United States Patent Application Publication US 2014/0004565 A1 - sequence listing, part 117

SEQ ID NO: 2931751 - RNA, 19 nt, Artificial Sequence
  Description of Artificial Sequence: Synthetic oligonucleotide
cuugucgauaccaguagau

SEQ ID NO: 2931752 - RNA, 19 nt, Artificial Sequence
  Description of Artificial Sequence: Synthetic oligonucleotide
agauaguguccugguaagu

SEQ ID NO: 2931753 - RNA, 19 nt, Artificial Sequence
  Description of Artificial Sequence: Synthetic oligonucleotide
uccuccauuuuggggcugc

SEQ ID NO: 2931754 - RNA, 19 nt, Artificial Sequence
  Description of Artificial Sequence: Synthetic oligonucleotide
uuggggcugcuucucucgu

SEQ ID NO: 2931755 - RNA, 19 nt, Artificial Sequence
  Description of Artificial Sequence: Synthetic oligonucleotide
aaguucgcacauauacaua

SEQ ID NO: 2931756 - RNA, 19 nt, Artificial Sequence
  Description of Artificial Sequence: Synthetic oligonucleotide
cacauauacauaacaugau

SEQ ID NO: 2931757 - RNA, 19 nt, Artificial Sequence
  Description of Artificial Sequence: Synthetic oligonucleotide
gcagagauucuucagcaua

SEQ ID NO: 2931758 - RNA, 19 nt, Artificial Sequence
  Description of Artificial Sequence: Synthetic oligonucleotide
gucggcaacuucaccuucc

SEQ ID NO: 2931759 - RNA, 19 nt, Artificial Sequence
  Description of Artificial Sequence: Synthetic oligonucleotide
ccgcucaaaagcgaguccg

SEQ ID NO: 2931760 - RNA, 19 nt, Artificial Sequence
  Description of Artificial Sequence: Synthetic oligonucleotide
gcaacuucaccuucccaca

SEQ ID NO: 2931761 - RNA, 19 nt, Artificial Sequence
  Description of Artificial Sequence: Synthetic oligonucleotide
guaugcaggcaguaauacu

SEQ ID NO: 2931762 - RNA, 19 nt, Artificial Sequence
  Description of Artificial Sequence: Synthetic oligonucleotide
cauuuuggggcugcuucuc

SEQ ID NO: 2931763 - RNA, 19 nt, Artificial Sequence
  Description of Artificial Sequence: Synthetic oligonucleotide
uuucuaaauuucgguucua

SEQ ID NO: 2931764 - RNA, 19 nt, Artificial Sequence
  Description of Artificial Sequence: Synthetic oligonucleotide
guucgcacauauacauaac

SEQ ID NO: 2931765 - RNA, 19 nt, Artificial Sequence
  Description of Artificial Sequence: Synthetic oligonucleotide
gaugccuggucccguaggu

SEQ ID NO: 2931766 - RNA, 19 nt, Artificial Sequence
  Description of Artificial Sequence: Synthetic oligonucleotide
gagauucuucagcauacuu

SEQ ID NO: 2931767 - RNA, 19 nt, Artificial Sequence
  Description of Artificial Sequence: Synthetic oligonucleotide
auggccccggcccucggug

SEQ ID NO: 2931768 - RNA, 19 nt, Artificial Sequence
  Description of Artificial Sequence: Synthetic oligonucleotide
ucucguccccagccgcuca

SEQ ID NO: 2931769 - RNA, 19 nt, Artificial Sequence
  Description of Artificial Sequence: Synthetic oligonucleotide
agcaguucauucacacaga

SEQ ID NO: 2931770 - RNA, 19 nt, Artificial Sequence
  Description of Artificial Sequence: Synthetic oligonucleotide
aucagcucgccaaguccgg

SEQ ID NO: 2931771 - RNA, 19 nt, Artificial Sequence
  Description of Artificial Sequence: Synthetic oligonucleotide
gcacgcauggccccggccc

SEQ ID NO: 2931772 - RNA, 19 nt, Artificial Sequence
  Description of Artificial Sequence: Synthetic oligonucleotide
auacuuguucccagcaguu

SEQ ID NO: 2931773 - RNA, 19 nt, Artificial Sequence
  Description of Artificial Sequence: Synthetic oligonucleotide
ccagccgcucaaaagcgag

SEQ ID NO: 2931774 - RNA, 19 nt, Artificial Sequence
  Description of Artificial Sequence: Synthetic oligonucleotide
caaguccggacgcccgccc

SEQ ID NO: 2931775 - RNA, 19 nt, Artificial Sequence
  Description of Artificial Sequence: Synthetic oligonucleotide
augccuggucccguagguc

SEQ ID NO: 2931776 - RNA, 19 nt, Artificial Sequence
  Description of Artificial Sequence: Synthetic oligonucleotide
uacuucuugucggcaacuu

SEQ ID NO: 2931777 - RNA, 19 nt, Artificial Sequence
  Description of Artificial Sequence: Synthetic oligonucleotide
ucgccaaguccggacgccc

SEQ ID NO: 2931778 - RNA, 19 nt, Artificial Sequence
  Description of Artificial Sequence: Synthetic oligonucleotide
ggcaguaauacuacucaaa

SEQ ID NO: 2931779 - RNA, 19 nt, Artificial Sequence
  Description of Artificial Sequence: Synthetic oligonucleotide
agagaugccuggucccgua

SEQ ID NO: 2931780 - RNA, 19 nt, Artificial Sequence
  Description of Artificial Sequence: Synthetic oligonucleotide
cagcucgccaaguccggac

SEQ ID NO: 2931781 - RNA, 19 nt, Artificial Sequence
  Description of Artificial Sequence: Synthetic oligonucleotide
aucauguaccagacuucug

SEQ ID NO: 2931782 - RNA, 19 nt, Artificial Sequence
  Description of Artificial Sequence: Synthetic oligonucleotide
gcaggcaguaauacuacuc

SEQ ID NO: 2931783 - RNA, 19 nt, Artificial Sequence
  Description of Artificial Sequence: Synthetic oligonucleotide
ucagcucgccaaguccgga

SEQ ID NO: 2931784 - RNA, 19 nt, Artificial Sequence
  Description of Artificial Sequence: Synthetic oligonucleotide
ggugucccgggccacgcgc

SEQ ID NO: 2931785 - RNA, 19 nt, Artificial Sequence
  Description of Artificial Sequence: Synthetic oligonucleotide
aguccggacgcccgccccu

SEQ ID NO: 2931786 - RNA, 19 nt, Artificial Sequence
  Description of Artificial Sequence: Synthetic oligonucleotide
cucgccaaguccggacgcc

SEQ ID NO: 2931787 - RNA, 19 nt, Artificial Sequence
  Description of Artificial Sequence: Synthetic oligonucleotide
cuaagucuccuugucgaua

SEQ ID NO: 2931788 - RNA, 19 nt, Artificial Sequence
  Description of Artificial Sequence: Synthetic oligonucleotide
caccuucccacaucaugga

SEQ ID NO: 2931789 - RNA, 19 nt, Artificial Sequence
  Description of Artificial Sequence: Synthetic oligonucleotide
gaguccgcaucagcucgcc

SEQ ID NO: 2931790 - RNA, 19 nt, Artificial Sequence
  Description of Artificial Sequence: Synthetic oligonucleotide
caguucauucacacagaua

SEQ ID NO: 2931791 - RNA, 19 nt, Artificial Sequence
  Description of Artificial Sequence: Synthetic oligonucleotide
ggacgcccgccccucacgg

SEQ ID NO: 2931792 - RNA, 19 nt, Artificial Sequence
  Description of Artificial Sequence: Synthetic oligonucleotide
ccccagccgcucaaaagcg

SEQ ID NO: 2931793 - RNA, 19 nt, Artificial Sequence
  Description of Artificial Sequence: Synthetic oligonucleotide
cucaaaagcgaguccgcau

SEQ ID NO: 2931794 - RNA, 19 nt, Artificial Sequence
  Description of Artificial Sequence: Synthetic oligonucleotide
aguguccugguaaguacuu

SEQ ID NO: 2931795 - RNA, 19 nt, Artificial Sequence
  Description of Artificial Sequence: Synthetic oligonucleotide
guauaaguucgcacauaua

SEQ ID NO: 2931796 - RNA, 19 nt, Artificial Sequence
  Description of Artificial Sequence: Synthetic oligonucleotide
uggggcugcuucucucguc

SEQ ID NO: 2931797 - RNA, 19 nt, Artificial Sequence
  Description of Artificial Sequence: Synthetic oligonucleotide
ggcugcuucucucgucccc

SEQ ID NO: 2931798 - RNA, 19 nt, Artificial Sequence
  Description of Artificial Sequence: Synthetic oligonucleotide
ccugguaaguacuucuugu

SEQ ID NO: 2931799 - RNA, 19 nt, Artificial Sequence
  Description of Artificial Sequence: Synthetic oligonucleotide
ucggugucccgggccacgc

SEQ ID NO: 2931800 - RNA, 19 nt, Artificial Sequence
  Description of Artificial Sequence: Synthetic oligonucleotide
guagguccugguaguaaaa

SEQ ID NO: 2931801 - RNA, 19 nt, Artificial Sequence
  Description of Artificial Sequence: Synthetic oligonucleotide
ugucccgggccacgcgcgu

SEQ ID NO: 2931802 - RNA, 19 nt, Artificial Sequence
  Description of Artificial Sequence: Synthetic oligonucleotide
cacagauaguguccuggua

SEQ ID NO: 2931803 - RNA, 19 nt, Artificial Sequence
  Description of Artificial Sequence: Synthetic oligonucleotide
cucacggcgcacgcauggc

SEQ ID NO: 2931804 - RNA, 19 nt, Artificial Sequence
  Description of Artificial Sequence: Synthetic oligonucleotide
guccugguaguaaaauccu

SEQ ID NO: 2931805 - RNA, 19 nt, Artificial Sequence
  Description of Artificial Sequence: Synthetic oligonucleotide
aguccgcaucagcucgcca

SEQ ID NO: 2931806 - RNA, 19 nt, Artificial Sequence
  Description of Artificial Sequence: Synthetic oligonucleotide
gacuucugcagagauucuu

SEQ ID NO: 2931807 - RNA, 19 nt, Artificial Sequence
  Description of Artificial Sequence: Synthetic oligonucleotide
guguccugguaaguacuuc

SEQ ID NO: 2931808 - RNA, 19 nt, Artificial Sequence
  Description of Artificial Sequence: Synthetic oligonucleotide
gugucccgggccacgcgcg

SEQ ID NO: 2931809 - RNA, 19 nt, Artificial Sequence
  Description of Artificial Sequence: Synthetic oligonucleotide
gccgcucaaaagcgagucc

SEQ ID NO: 2931810 - RNA, 19 nt, Artificial Sequence
  Description of Artificial Sequence: Synthetic oligonucleotide
gacgcccgccccucacggc

SEQ ID NO: 2931811 - RNA, 19 nt, Artificial Sequence
  Description of Artificial Sequence: Synthetic oligonucleotide
guucauucacacagauagu

SEQ ID NO: 2931812 - RNA, 19 nt, Artificial Sequence
  Description of Artificial Sequence: Synthetic oligonucleotide
gcucgccaaguccggacgc

SEQ ID NO: 2931813 - RNA, 19 nt, Artificial Sequence
  Description of Artificial Sequence: Synthetic oligonucleotide
cuggucccguagguccugg

SEQ ID NO: 2931814 - RNA, 19 nt, Artificial Sequence
  Description of Artificial Sequence: Synthetic oligonucleotide
gcucaaaagcgaguccgca

SEQ ID NO: 2931815 - RNA, 19 nt, Artificial Sequence
  Description of Artificial Sequence: Synthetic oligonucleotide
agacuucugcagagauucu

SEQ ID NO: 2931816 - RNA, 19 nt, Artificial Sequence
  Description of Artificial Sequence: Synthetic oligonucleotide
gcaguucauucacacagau

SEQ ID NO: 2931817 - RNA, 19 nt, Artificial Sequence
  Description of Artificial Sequence: Synthetic oligonucleotide
uggucccguagguccuggu

SEQ ID NO: 2931818 - RNA, 19 nt, Artificial Sequence
  Description of Artificial Sequence: Synthetic oligonucleotide
gccaaguccggacgcccgc

SEQ ID NO: 2931819 - RNA, 19 nt, Artificial Sequence
  Description of Artificial Sequence: Synthetic oligonucleotide
ccuugucgauaccaguaga

SEQ ID NO: 2931820 - RNA, 19 nt, Artificial Sequence
  Description of Artificial Sequence: Synthetic oligonucleotide
cgcucaaaagcgaguccgc

SEQ ID NO: 2931821 - RNA, 19 nt, Artificial Sequence
  Description of Artificial Sequence: Synthetic oligonucleotide
guacuucuugucggcaacu

SEQ ID NO: 2931822 - RNA, 19 nt, Artificial Sequence
  Description of Artificial Sequence: Synthetic oligonucleotide
uggccccggcccucggugu

SEQ ID NO: 2931823 - RNA, 19 nt, Artificial Sequence
  Description of Artificial Sequence: Synthetic oligonucleotide
uccggacgcccgccccuca

SEQ ID NO: 2931824 - RNA, 19 nt, Artificial Sequence
  Description of Artificial Sequence: Synthetic oligonucleotide
cccacaucauggaaguaua

SEQ ID NO: 2931825 - RNA, 19 nt, Artificial Sequence
  Description of Artificial Sequence: Synthetic oligonucleotide
uucccacaucauggaagua

SEQ ID NO: 2931826 - RNA, 19 nt, Artificial Sequence
  Description of Artificial Sequence: Synthetic oligonucleotide
gcugcuucucucgucccca

SEQ ID NO: 2931827 - RNA, 19 nt, Artificial Sequence
  Description of Artificial Sequence: Synthetic oligonucleotide
cucucguccccagccgcuc

SEQ ID NO: 2931828 - RNA, 19 nt, Artificial Sequence
  Description of Artificial Sequence: Synthetic oligonucleotide
cguagguccugguaguaaa

SEQ ID NO: 2931829 - RNA, 19 nt, Artificial Sequence
  Description of Artificial Sequence: Synthetic oligonucleotide
gggccacgcgcgucggcgg

SEQ ID NO: 2931830 - RNA, 19 nt, Artificial Sequence
  Description of Artificial Sequence: Synthetic oligonucleotide
ggucccguagguccuggua

SEQ ID NO: 2931831 - RNA, 19 nt, Artificial Sequence
  Description of Artificial Sequence: Synthetic oligonucleotide
auccuccauuuuggggcug

SEQ ID NO: 2931832 - RNA, 19 nt, Artificial Sequence
  Description of Artificial Sequence: Synthetic oligonucleotide
acgcauggccccggcccuc

SEQ ID NO: 2931833 - RNA, 19 nt, Artificial Sequence
  Description of Artificial Sequence: Synthetic oligonucleotide
caacuucaccuucccacau

SEQ ID NO: 2931834 - RNA, 19 nt, Artificial Sequence
  Description of Artificial Sequence: Synthetic oligonucleotide
gggcugcuucucucguccc

SEQ ID NO: 2931835 - RNA, 19 nt, Artificial Sequence
  Description of Artificial Sequence: Synthetic oligonucleotide
ccacaucauggaaguauaa

SEQ ID NO: 2931836 - RNA, 19 nt, Artificial Sequence
  Description of Artificial Sequence: Synthetic oligonucleotide
ucguccccagccgcucaaa

SEQ ID NO: 2931837 - RNA, 19 nt, Artificial Sequence
  Description of Artificial Sequence: Synthetic oligonucleotide
cgcaucagcucgccaaguc

SEQ ID NO: 2931838 - RNA, 19 nt, Artificial Sequence
  Description of Artificial Sequence: Synthetic oligonucleotide
ccaaguccggacgcccgcc

SEQ ID NO: 2931839 - RNA, 19 nt, Artificial Sequence
  Description of Artificial Sequence: Synthetic oligonucleotide
cgccaaguccggacgcccg

SEQ ID NO: 2931840 - RNA, 19 nt, Artificial Sequence
  Description of Artificial Sequence: Synthetic oligonucleotide
gcccucggugucccgggcc

SEQ ID NO: 2931841 - RNA, 19 nt, Artificial Sequence
  Description of Artificial Sequence: Synthetic oligonucleotide
ccauuuuggggcugcuucu

SEQ ID NO: 2931842 - RNA, 19 nt, Artificial Sequence
  Description of Artificial Sequence: Synthetic oligonucleotide
cgaguccgcaucagcucgc

SEQ ID NO: 2931843 - RNA, 19 nt, Artificial Sequence
  Description of Artificial Sequence: Synthetic oligonucleotide
guccugguaaguacuucuu

SEQ ID NO: 2931844 - RNA, 19 nt, Artificial Sequence
  Description of Artificial Sequence: Synthetic oligonucleotide
cagccgcucaaaagcgagu

SEQ ID NO: 2931845 - RNA, 19 nt, Artificial Sequence
  Description of Artificial Sequence: Synthetic oligonucleotide
cucguccccagccgcucaa

SEQ ID NO: 2931846 - RNA, 19 nt, Artificial Sequence
  Description of Artificial Sequence: Synthetic oligonucleotide
ggcgcacgcauggccccgg

SEQ ID NO: 2931847 - RNA, 19 nt, Artificial Sequence
  Description of Artificial Sequence: Synthetic oligonucleotide
cuucaccuucccacaucau

SEQ ID NO: 2931848 - RNA, 19 nt, Artificial Sequence
  Description of Artificial Sequence: Synthetic oligonucleotide
cacgcauggccccggcccu

SEQ ID NO: 2931849 - RNA, 19 nt, Artificial Sequence
  Description of Artificial Sequence: Synthetic oligonucleotide
cccagccgcucaaaagcga

SEQ ID NO: 2931850 - RNA, 19 nt, Artificial Sequence
  Description of Artificial Sequence: Synthetic oligonucleotide
cgauaccaguagauaagua

SEQ ID NO: 2931851 - RNA, 19 nt, Artificial Sequence
  Description of Artificial Sequence: Synthetic oligonucleotide
cgggccacgcgcgucggcg

SEQ ID NO: 2931852 - RNA, 19 nt, Artificial Sequence
  Description of Artificial Sequence: Synthetic oligonucleotide
ggcccucggugucccgggc

SEQ ID NO: 2931853 - RNA, 19 nt, Artificial Sequence
  Description of Artificial Sequence: Synthetic oligonucleotide
gcauggccccggcccucgg

SEQ ID NO: 2931854 - RNA, 19 nt, Artificial Sequence
  Description of Artificial Sequence: Synthetic oligonucleotide
guccggacgcccgccccuc

SEQ ID NO: 2931855 - RNA, 19 nt, Artificial Sequence
  Description of Artificial Sequence: Synthetic oligonucleotide
cccucggugucccgggcca

SEQ ID NO: 2931856 - RNA, 19 nt, Artificial Sequence
  Description of Artificial Sequence: Synthetic oligonucleotide
cggacgcccgccccucacg

SEQ ID NO: 2931857 - RNA, 19 nt, Artificial Sequence
  Description of Artificial Sequence: Synthetic oligonucleotide
cccucacggcgcacgcaug

SEQ ID NO: 2931858 - RNA, 19 nt, Artificial Sequence
  Description of Artificial Sequence: Synthetic oligonucleotide
ccgccccucacggcgcacg

SEQ ID NO: 2931859 - RNA, 19 nt, Artificial Sequence
  Description of Artificial Sequence: Synthetic oligonucleotide
gucccgggccacgcgcguc

SEQ ID NO: 2931860 - RNA, 19 nt, Artificial Sequence
  Description of Artificial Sequence: Synthetic oligonucleotide
cauggccccggcccucggu

SEQ ID NO: 2931861 - RNA, 19 nt, Artificial Sequence
  Description of Artificial Sequence: Synthetic oligonucleotide
ccuggucccguagguccug

SEQ ID NO: 2931862 - RNA, 19 nt, Artificial Sequence
  Description of Artificial Sequence: Synthetic oligonucleotide
cggcccucggugucccggg

SEQ ID NO: 2931863 - RNA, 19 nt, Artificial Sequence
  Description of Artificial Sequence: Synthetic oligonucleotide
ccagacuucugcagagauu

SEQ ID NO: 2931864 - RNA, 19 nt, Artificial Sequence
  Description of Artificial Sequence: Synthetic oligonucleotide
ggccccggcccucgguguc

SEQ ID NO: 2931865 - RNA, 19 nt, Artificial Sequence
  Description of Artificial Sequence: Synthetic oligonucleotide
cgcacgcauggccccggcc

SEQ ID NO: 2931866 - RNA, 19 nt, Artificial Sequence
  Description of Artificial Sequence: Synthetic oligonucleotide
cuccauuuuggggcugcuu

SEQ ID NO: 2931867 - RNA, 19 nt, Artificial Sequence
  Description of Artificial Sequence: Synthetic oligonucleotide
ccguagguccugguaguaa

SEQ ID NO: 2931868 - RNA, 19 nt, Artificial Sequence
  Description of Artificial Sequence: Synthetic oligonucleotide
cgguucuaagucuccuugu

SEQ ID NO: 2931869 - RNA, 19 nt, Artificial Sequence
  Description of Artificial Sequence: Synthetic oligonucleotide
gcgcacgcauggccccggc

SEQ ID NO: 2931870 - RNA, 19 nt, Artificial Sequence
  Description of Artificial Sequence: Synthetic oligonucleotide
ccggacgcccgccccucac

SEQ ID NO: 2931871 - RNA, 19 nt, Artificial Sequence
  Description of Artificial Sequence: Synthetic oligonucleotide
cgcauggccccggcccucg

SEQ ID NO: 2931872 - RNA, 19 nt, Artificial Sequence
  Description of Artificial Sequence: Synthetic oligonucleotide
cggugucccgggccacgcg

SEQ ID NO: 2931873 - RNA, 19 nt, Artificial Sequence
  Description of Artificial Sequence: Synthetic oligonucleotide
gccccggcccucggugucc

SEQ ID NO: 2931874 - RNA, 19 nt, Artificial Sequence
  Description of Artificial Sequence: Synthetic oligonucleotide
cgccccucacggcgcacgc

SEQ ID NO: 2931875 - RNA, 19 nt, Artificial Sequence
  Description of Artificial Sequence: Synthetic oligonucleotide
cggcaacuucaccuuccca

SEQ ID NO: 2931876 - RNA, 19 nt, Artificial Sequence
  Description of Artificial Sequence: Synthetic oligonucleotide
ccucggugucccgggccac

SEQ ID NO: 2931877 - RNA, 19 nt, Artificial Sequence
  Description of Artificial Sequence: Synthetic oligonucleotide
cgcccgccccucacggcgc

SEQ ID NO: 2931878 - RNA, 19 nt, Artificial Sequence
  Description of Artificial Sequence: Synthetic oligonucleotide
ccccucacggcgcacgcau

SEQ ID NO: 2931879 - RNA, 19 nt, Artificial Sequence
  Description of Artificial Sequence: Synthetic oligonucleotide
gccuggucccguagguccu

SEQ ID NO: 2931880 - RNA, 19 nt, Artificial Sequence
  Description of Artificial Sequence: Synthetic oligonucleotide
cguccccagccgcucaaaa

SEQ ID NO: 2931881 - RNA, 19 nt, Artificial Sequence
  Description of Artificial Sequence: Synthetic oligonucleotide
ccgggccacgcgcgucggc

SEQ ID NO: 2931882 - RNA, 19 nt, Artificial Sequence
  Description of Artificial Sequence: Synthetic oligonucleotide
cccggcccucggugucccg

SEQ ID NO: 2931883 - RNA, 19 nt, Artificial Sequence
  Description of Artificial Sequence: Synthetic oligonucleotide
ccccggcccucgguguccc

SEQ ID NO: 2931884 - RNA, 19 nt, Artificial Sequence
  Description of Artificial Sequence: Synthetic oligonucleotide
cccgggccacgcgcgucgg

SEQ ID NO: 2931885 - RNA, 19 nt, Artificial Sequence
  Description of Artificial Sequence: Synthetic oligonucleotide
cggcgcacgcauggccccg

SEQ ID NO: 2931886 - RNA, 19 nt, Artificial Sequence
  Description of Artificial Sequence: Synthetic oligonucleotide
gccccucacggcgcacgca

SEQ ID NO: 2931887 - RNA, 19 nt, Artificial Sequence
  Description of Artificial Sequence: Synthetic oligonucleotide
cccguagguccugguagua

SEQ ID NO: 2931888 - RNA, 19 nt, Artificial Sequence
  Description of Artificial Sequence: Synthetic oligonucleotide
gcccgccccucacggcgca

SEQ ID NO: 2931889 - RNA, 19 nt, Artificial Sequence
  Description of Artificial Sequence: Synthetic oligonucleotide
ccuccauuuuggggcugcu

SEQ ID NO: 2931890 - RNA, 19 nt, Artificial Sequence
  Description of Artificial Sequence: Synthetic oligonucleotide
ccgcaucagcucgccaagu

SEQ ID NO: 2931891 - RNA, 19 nt, Artificial Sequence
  Description of Artificial Sequence: Synthetic oligonucleotide
cccgccccucacggcgcac

SEQ ID NO: 2931892 - RNA, 19 nt, Artificial Sequence
  Description of Artificial Sequence: Synthetic oligonucleotide
ugaugaaccaguuacagac

SEQ ID NO: 2931893 - RNA, 19 nt, Artificial Sequence
  Description of Artificial Sequence: Synthetic oligonucleotide
acugguuuggaucuuugcc

SEQ ID NO: 2931894 - RNA, 19 nt, Artificial Sequence
  Description of Artificial Sequence: Synthetic oligonucleotide
aaauccuuggccccacggc

SEQ ID NO: 2931895 - RNA, 19 nt, Artificial Sequence
  Description of Artificial Sequence: Synthetic oligonucleotide
uugcuuuucauucuggaac

SEQ ID NO: 2931896 - RNA, 19 nt, Artificial Sequence
  Description of Artificial Sequence: Synthetic oligonucleotide
aauccuuggccccacggcg

SEQ ID NO: 2931897 - RNA, 19 nt, Artificial Sequence
  Description of Artificial Sequence: Synthetic oligonucleotide
uggaacuccagucccagcg

SEQ ID NO: 2931898 - RNA, 19 nt, Artificial Sequence
  Description of Artificial Sequence: Synthetic oligonucleotide
agaccugcaguguagauag

SEQ ID NO: 2931899 - RNA, 19 nt, Artificial Sequence
  Description of Artificial Sequence: Synthetic oligonucleotide
ugcugaagaggaaaggucc

SEQ ID NO: 2931900 - RNA, 19 nt, Artificial Sequence
  Description of Artificial Sequence: Synthetic oligonucleotide
gaagaaucuggacagacuc

SEQ ID NO: 2931901 - RNA, 19 nt, Artificial Sequence
  Description of Artificial Sequence: Synthetic oligonucleotide
aacugguuuggaucuuugc

SEQ ID NO: 2931902 - RNA, 19 nt, Artificial Sequence
  Description of Artificial Sequence: Synthetic oligonucleotide
gaagcugggguuucuaggg

SEQ ID NO: 2931903 - RNA, 19 nt, Artificial Sequence
  Description of Artificial Sequence: Synthetic oligonucleotide
gaagaggaaagguccaggg

SEQ ID NO: 2931904 - RNA, 19 nt, Artificial Sequence
  Description of Artificial Sequence: Synthetic oligonucleotide
aagaggaaagguccagggg

SEQ ID NO: 2931905 - RNA, 19 nt, Artificial Sequence
  Description of Artificial Sequence: Synthetic oligonucleotide
agauaggugugucugcugg

SEQ ID NO: 2931906 - RNA, 19 nt, Artificial Sequence
  Description of Artificial Sequence: Synthetic oligonucleotide
caugcugucuucauccucg

SEQ ID NO: 2931907 - RNA, 19 nt, Artificial Sequence
  Description of Artificial Sequence: Synthetic oligonucleotide
uuuucauucuggaacucca

SEQ ID NO: 2931908 - RNA, 19 nt, Artificial Sequence
  Description of Artificial Sequence: Synthetic oligonucleotide
aaucuggacagacuccuug

SEQ ID NO: 2931909 - RNA, 19 nt, Artificial Sequence
  Description of Artificial Sequence: Synthetic oligonucleotide
uuucucagcauggucaggg

SEQ ID NO: 2931910 - RNA, 19 nt, Artificial Sequence
  Description of Artificial Sequence: Synthetic oligonucleotide
agaggaaagguccagggga

SEQ ID NO: 2931911 - RNA, 19 nt, Artificial Sequence
  Description of Artificial Sequence: Synthetic oligonucleotide
aucuuugccauccuuucuc

SEQ ID NO: 2931912 - RNA, 19 nt, Artificial Sequence
  Description of Artificial Sequence: Synthetic oligonucleotide
ugcucguacagccaguccc

SEQ ID NO: 2931913 - RNA, 19 nt, Artificial Sequence
  Description of Artificial Sequence: Synthetic oligonucleotide
ugaagcugggguuucuagg

SEQ ID NO: 2931914 - RNA, 19 nt, Artificial Sequence
  Description of Artificial Sequence: Synthetic oligonucleotide
uguaucugugcucguacag

SEQ ID NO: 2931915 - RNA, 19 nt, Artificial Sequence
  Description of Artificial Sequence: Synthetic oligonucleotide
agcauggucagggaggagc

SEQ ID NO: 2931916 - RNA, 19 nt, Artificial Sequence
  Description of Artificial Sequence: Synthetic oligonucleotide
gagaucgugaacugguuug

SEQ ID NO: 2931917 - RNA, 19 nt, Artificial Sequence
  Description of Artificial Sequence: Synthetic oligonucleotide
uaggggugagcgaugaucc

SEQ ID NO: 2931918 - RNA, 19 nt, Artificial Sequence
  Description of Artificial Sequence: Synthetic oligonucleotide
cuucggaaauccuuggccc

SEQ ID NO: 2931919 - RNA, 19 nt, Artificial Sequence
  Description of Artificial Sequence: Synthetic oligonucleotide
ucccgaagaaucuggacag

SEQ ID NO: 2931920 - RNA, 19 nt, Artificial Sequence
  Description of Artificial Sequence: Synthetic oligonucleotide
uaucugugcucguacagcc

SEQ ID NO: 2931921 - RNA, 19 nt, Artificial Sequence
  Description of Artificial Sequence: Synthetic oligonucleotide
ucugugcucguacagccag

SEQ ID NO: 2931922 - RNA, 19 nt, Artificial Sequence
  Description of Artificial Sequence: Synthetic oligonucleotide
ucuagggaccggcaguccg

SEQ ID NO: 2931923 - RNA, 19 nt, Artificial Sequence
  Description of Artificial Sequence: Synthetic oligonucleotide
ucagggaggagccugcggc

SEQ ID NO: 2931924 - RNA, 19 nt, Artificial Sequence
  Description of Artificial Sequence: Synthetic oligonucleotide
uuugccauccuuucucagc

SEQ ID NO: 2931925 - RNA, 19 nt, Artificial Sequence
  Description of Artificial Sequence: Synthetic oligonucleotide
cuagcuucggaaauccuug

SEQ ID NO: 2931926 - RNA, 19 nt, Artificial Sequence
  Description of Artificial Sequence: Synthetic oligonucleotide
uuuugcuuuucauucugga

SEQ ID NO: 2931927 - RNA, 19 nt, Artificial Sequence
  Description of Artificial Sequence: Synthetic oligonucleotide
auacgcguuguaucugugc

SEQ ID NO: 2931928 - RNA, 19 nt, Artificial Sequence
  Description of Artificial Sequence: Synthetic oligonucleotide
uccgucucuugccagaggc

SEQ ID NO: 2931929 - RNA, 19 nt, Artificial Sequence
  Description of Artificial Sequence: Synthetic oligonucleotide
uggacagacuccuugggca

SEQ ID NO: 2931930 - RNA, 19 nt, Artificial Sequence
  Description of Artificial Sequence: Synthetic oligonucleotide
ugcuuuucauucuggaacu

SEQ ID NO: 2931931 - RNA, 19 nt, Artificial Sequence
  Description of Artificial Sequence: Synthetic oligonucleotide
ucuggacagacuccuuggg

SEQ ID NO: 2931932 - RNA, 19 nt, Artificial Sequence
  Description of Artificial Sequence: Synthetic oligonucleotide
uuucauucuggaacuccag

SEQ ID NO: 2931933 - RNA, 19 nt, Artificial Sequence
  Description of Artificial Sequence: Synthetic oligonucleotide
uccaggggaacauccaugc

SEQ ID NO: 2931934 - RNA, 19 nt, Artificial Sequence
  Description of Artificial Sequence: Synthetic oligonucleotide
ucauucuggaacuccaguc

SEQ ID NO: 2931935 - RNA, 19 nt, Artificial Sequence
  Description of Artificial Sequence: Synthetic oligonucleotide
ugaagaggaaagguccagg

SEQ ID NO: 2931936 - RNA, 19 nt, Artificial Sequence
  Description of Artificial Sequence: Synthetic oligonucleotide
uuacagaccugcaguguag

SEQ ID NO: 2931937 - RNA, 19 nt, Artificial Sequence
  Description of Artificial Sequence: Synthetic oligonucleotide
uguagauaggugugucugc

SEQ ID NO: 2931938 - RNA, 19 nt, Artificial Sequence
  Description of Artificial Sequence: Synthetic oligonucleotide
uuuucuugcucugagggau

SEQ ID NO: 2931939 - RNA, 19 nt, Artificial Sequence
  Description of Artificial Sequence: Synthetic oligonucleotide
uacgcguuguaucugugcu

SEQ ID NO: 2931940 - RNA, 19 nt, Artificial Sequence
  Description of Artificial Sequence: Synthetic oligonucleotide
cuugcucugagggauacgc

SEQ ID NO: 2931941 - RNA, 19 nt, Artificial Sequence
  Description of Artificial Sequence: Synthetic oligonucleotide
accaguuacagaccugcag

SEQ ID NO: 2931942 - RNA, 19 nt, Artificial Sequence
  Description of Artificial Sequence: Synthetic oligonucleotide
acuccuugggcagauugcc

SEQ ID NO: 2931943 - RNA, 19 nt, Artificial Sequence
  Description of Artificial Sequence: Synthetic oligonucleotide
ucucagcauggucagggag

SEQ ID NO: 2931944 - RNA, 19 nt, Artificial Sequence
  Description of Artificial Sequence: Synthetic oligonucleotide
gauaggugugucugcuggg

SEQ ID NO: 2931945 - RNA, 19 nt, Artificial Sequence
  Description of Artificial Sequence: Synthetic oligonucleotide
uucauucuggaacuccagu

SEQ ID NO: 2931946 - RNA, 19 nt, Artificial Sequence
  Description of Artificial Sequence: Synthetic oligonucleotide
agcuucggaaauccuuggc

SEQ ID NO: 2931947 - RNA, 19 nt, Artificial Sequence
  Description of Artificial Sequence: Synthetic oligonucleotide
guuuggaucuuugccaucc

SEQ ID NO: 2931948 - RNA, 19 nt, Artificial Sequence
  Description of Artificial Sequence: Synthetic oligonucleotide
agggauacgcguuguaucu

SEQ ID NO: 2931949 - RNA, 19 nt, Artificial Sequence
  Description of Artificial Sequence: Synthetic oligonucleotide
cuuuucauucuggaacucc

SEQ ID NO: 2931950 - RNA, 19 nt, Artificial Sequence
  Description of Artificial Sequence: Synthetic oligonucleotide
uccagucccagcgagaggu

SEQ ID NO: 2931951 - RNA, 19 nt, Artificial Sequence
  Description of Artificial Sequence: Synthetic oligonucleotide
agcugggguuucuagggac

SEQ ID NO: 2931952 - RNA, 19 nt, Artificial Sequence
  Description of Artificial Sequence: Synthetic oligonucleotide
agucccgaagaaucuggac

SEQ ID NO: 2931953 - RNA, 19 nt, Artificial Sequence
  Description of Artificial Sequence: Synthetic oligonucleotide
caggggaacauccaugcug

SEQ ID NO: 2931954 - RNA, 19 nt, Artificial Sequence
  Description of Artificial Sequence: Synthetic oligonucleotide
uucggaaauccuuggcccc

SEQ ID NO: 2931955 - RNA, 19 nt, Artificial Sequence
  Description of Artificial Sequence: Synthetic oligonucleotide
agacuccuugggcagauug

SEQ ID NO: 2931956 - RNA, 19 nt, Artificial Sequence
  Description of Artificial Sequence: Synthetic oligonucleotide
agaaucuggacagacuccu

SEQ ID NO: 2931957 - RNA, 19 nt, Artificial Sequence
  Description of Artificial Sequence: Synthetic oligonucleotide
aguguagauaggugugucu

SEQ ID NO: 2931958 - RNA, 19 nt, Artificial Sequence
  Description of Artificial Sequence: Synthetic oligonucleotide
cugguuuggaucuuugcca

SEQ ID NO: 2931959 - RNA, 19 nt, Artificial Sequence
  Description of Artificial Sequence: Synthetic oligonucleotide
acugccagacgccgcaagg

SEQ ID NO: 2931960 - RNA, 19 nt, Artificial Sequence
  Description of Artificial Sequence: Synthetic oligonucleotide
auugccucuccuccgucuc

SEQ ID NO: 2931961 - RNA, 19 nt, Artificial Sequence
  Description of Artificial Sequence: Synthetic oligonucleotide
uggaucuuugccauccuuu

SEQ ID NO: 2931962 - RNA, 19 nt, Artificial Sequence
  Description of Artificial Sequence: Synthetic oligonucleotide
gucccgaagaaucuggaca

SEQ ID NO: 2931963 - RNA, 19 nt, Artificial Sequence
  Description of Artificial Sequence: Synthetic oligonucleotide
auccuuucucagcaugguc

SEQ ID NO: 2931964 - RNA, 19 nt, Artificial Sequence
  Description of Artificial Sequence: Synthetic oligonucleotide
gagggauacgcguuguauc

SEQ ID NO: 2931965 - RNA, 19 nt, Artificial Sequence
  Description of Artificial Sequence: Synthetic oligonucleotide
ucuuugccauccuuucuca

SEQ ID NO: 2931966 - RNA, 19 nt, Artificial Sequence
  Description of Artificial Sequence: Synthetic oligonucleotide
guguagauaggugugucug

SEQ ID NO: 2931967 - RNA, 19 nt, Artificial Sequence
  Description of Artificial Sequence: Synthetic oligonucleotide
aaagguccaggggaacauc

SEQ ID NO: 2931968 - RNA, 19 nt, Artificial Sequence
  Description of Artificial Sequence: Synthetic oligonucleotide
cagcgagaggugaagcugg

SEQ ID NO: 2931969 - RNA, 19 nt, Artificial Sequence
  Description of Artificial Sequence: Synthetic oligonucleotide
uagcuucggaaauccuugg

SEQ ID NO: 2931970 - RNA, 19 nt, Artificial Sequence
  Description of Artificial Sequence: Synthetic oligonucleotide
agaucgugaacugguuugg

SEQ ID NO: 2931971 - RNA, 19 nt, Artificial Sequence
  Description of Artificial Sequence: Synthetic oligonucleotide
gaugaaccaguuacagacc

SEQ ID NO: 2931972 - RNA, 19 nt, Artificial Sequence
  Description of Artificial Sequence: Synthetic oligonucleotide
gaacuccagucccagcgag

SEQ ID NO: 2931973 - RNA, 19 nt, Artificial Sequence
  Description of Artificial Sequence: Synthetic oligonucleotide
uuguaucugugcucguaca

SEQ ID NO: 2931974 - RNA, 19 nt, Artificial Sequence
  Description of Artificial Sequence: Synthetic oligonucleotide
cugcugaagaggaaagguc

SEQ ID NO: 2931975 - RNA, 19 nt, Artificial Sequence
  Description of Artificial Sequence: Synthetic oligonucleotide
ucuggaacuccagucccag

SEQ ID NO: 2931976 - RNA, 19 nt, Artificial Sequence
  Description of Artificial Sequence: Synthetic oligonucleotide
ugguuuggaucuuugccau

SEQ ID NO: 2931977 - RNA, 19 nt, Artificial Sequence
  Description of Artificial Sequence: Synthetic oligonucleotide
caguuacagaccugcagug

SEQ ID NO: 2931978 - RNA, 19 nt, Artificial Sequence
  Description of Artificial Sequence: Synthetic oligonucleotide
ucuccuccgucucuugcca

SEQ ID NO: 2931979 - RNA, 19 nt, Artificial Sequence
  Description of Artificial Sequence: Synthetic oligonucleotide
guaucugugcucguacagc

SEQ ID NO: 2931980 - RNA, 19 nt, Artificial Sequence
  Description of Artificial Sequence: Synthetic oligonucleotide
gugaagcugggguuucuag

SEQ ID NO: 2931981 - RNA, 19 nt, Artificial Sequence
  Description of Artificial Sequence: Synthetic oligonucleotide
ggcagauugccucuccucc

SEQ ID NO: 2931982 - RNA, 19 nt, Artificial Sequence
  Description of Artificial Sequence: Synthetic oligonucleotide
acuccagucccagcgagag

SEQ ID NO: 2931983 - RNA, 19 nt, Artificial Sequence
  Description of Artificial Sequence: Synthetic oligonucleotide
acggcggagaucgugaacu

SEQ ID NO: 2931984 - RNA, 19 nt, Artificial Sequence
  Description of Artificial Sequence: Synthetic oligonucleotide
uucuggaacuccaguccca

SEQ ID NO: 2931985 - RNA, 19 nt, Artificial Sequence
  Description of Artificial Sequence: Synthetic oligonucleotide
ucagcauggucagggagga

SEQ ID NO: 2931986 - RNA, 19 nt, Artificial Sequence
  Description of Artificial Sequence: Synthetic oligonucleotide
aacauccaugcugucuuca

SEQ ID NO: 2931987 - RNA, 19 nt, Artificial Sequence
  Description of Artificial Sequence: Synthetic oligonucleotide
uagauaggugugucugcug

SEQ ID NO: 2931988 - RNA, 19 nt, Artificial Sequence
  Description of Artificial Sequence: Synthetic oligonucleotide
gagcuagcuucggaaaucc

SEQ ID NO: 2931989 - RNA, 19 nt, Artificial Sequence
  Description of Artificial Sequence: Synthetic oligonucleotide
uuuggaucuuugccauccu

SEQ ID NO: 2931990 - RNA, 19 nt, Artificial Sequence
  Description of Artificial Sequence: Synthetic oligonucleotide
aagcugggguuucuaggga

SEQ ID NO: 2931991 - RNA, 19 nt, Artificial Sequence
  Description of Artificial Sequence: Synthetic oligonucleotide
ugagggauacgcguuguau

SEQ ID NO: 2931992 - RNA, 19 nt, Artificial Sequence
  Description of Artificial Sequence: Synthetic oligonucleotide
uuucuagggaccggcaguc

SEQ ID NO: 2931993 - RNA, 19 nt, Artificial Sequence
  Description of Artificial Sequence: Synthetic oligonucleotide
guuacagaccugcagugua

SEQ ID NO: 2931994 - RNA, 19 nt, Artificial Sequence
  Description of Artificial Sequence: Synthetic oligonucleotide
aucgugaacugguuuggau

SEQ ID NO: 2931995 - RNA, 19 nt, Artificial Sequence
  Description of Artificial Sequence: Synthetic oligonucleotide
acgcguuguaucugugcuc

SEQ ID NO: 2931996 - RNA, 19 nt, Artificial Sequence
  Description of Artificial Sequence: Synthetic oligonucleotide
gguuucuagggaccggcag

SEQ ID NO: 2931997 - RNA, 19 nt, Artificial Sequence
  Description of Artificial Sequence: Synthetic oligonucleotide
guaggggugagcgaugauc

SEQ ID NO: 2931998 - RNA, 19 nt, Artificial Sequence
  Description of Artificial Sequence: Synthetic oligonucleotide
gggaccggcaguccgagag

SEQ ID NO: 2931999 - RNA, 19 nt, Artificial Sequence
  Description of Artificial Sequence: Synthetic oligonucleotide
aggggaacauccaugcugu

SEQ ID NO: 2932000 - RNA, 19 nt, Artificial Sequence
  Description of Artificial Sequence: Synthetic oligonucleotide
uaggugugucugcugggac

SEQ ID NO: 2932001 - RNA, 19 nt, Artificial Sequence
  Description of Artificial Sequence: Synthetic oligonucleotide
ccagacgccgcaaggaugc

SEQ ID NO: 2932002 - RNA, 19 nt, Artificial Sequence
  Description of Artificial Sequence: Synthetic oligonucleotide
ugucacugccagacgccgc

SEQ ID NO: 2932003 - RNA, 19 nt, Artificial Sequence
  Description of Artificial Sequence: Synthetic oligonucleotide
ccauccuuucucagcaugg

SEQ ID NO: 2932004 - RNA, 19 nt, Artificial Sequence
  Description of Artificial Sequence: Synthetic oligonucleotide
uugggcagauugccucucc

SEQ ID NO: 2932005 - RNA, 19 nt, Artificial Sequence
  Description of Artificial Sequence: Synthetic oligonucleotide
aguuacagaccugcagugu

SEQ ID NO: 2932006 - RNA, 19 nt, Artificial Sequence
  Description of Artificial Sequence: Synthetic oligonucleotide
agauugccucuccuccguc

SEQ ID NO: 2932007 - RNA, 19 nt, Artificial Sequence
  Description of Artificial Sequence: Synthetic oligonucleotide
ggccccacggcggagaucg

SEQ ID NO: 2932008 - RNA, 19 nt, Artificial Sequence
  Description of Artificial Sequence: Synthetic oligonucleotide
uggucagggaggagccugc

SEQ ID NO: 2932009 - RNA, 19 nt, Artificial Sequence
  Description of Artificial Sequence: Synthetic oligonucleotide
gcagauugccucuccuccg

SEQ ID NO: 2932010 - RNA, 19 nt, Artificial Sequence
  Description of Artificial Sequence: Synthetic oligonucleotide
uuggaucuuugccauccuu

SEQ ID NO: 2932011 - RNA, 19 nt, Artificial Sequence
  Description of Artificial Sequence: Synthetic oligonucleotide
uacagaccugcaguguaga

SEQ ID NO: 2932012 - RNA, 19 nt, Artificial Sequence
  Description of Artificial Sequence: Synthetic oligonucleotide
gucugcugggacagcagcg

SEQ ID NO: 2932013 - RNA, 19 nt, Artificial Sequence
  Description of Artificial Sequence: Synthetic oligonucleotide
auaggugugucugcuggga

SEQ ID NO: 2932014 - RNA, 19 nt, Artificial Sequence
  Description of Artificial Sequence: Synthetic oligonucleotide
ugggcagauugccucuccu

SEQ ID NO: 2932015 - RNA, 19 nt, Artificial Sequence
  Description of Artificial Sequence: Synthetic oligonucleotide
ggaucuuugccauccuuuc

SEQ ID NO: 2932016 - RNA, 19 nt, Artificial Sequence
  Description of Artificial Sequence: Synthetic oligonucleotide
gaacugguuuggaucuuug

SEQ ID NO: 2932017 - RNA, 19 nt, Artificial Sequence
  Description of Artificial Sequence: Synthetic oligonucleotide
cagggaggagccugcggcg

SEQ ID NO: 2932018 - RNA, 19 nt, Artificial Sequence
  Description of Artificial Sequence: Synthetic oligonucleotide
gugucacugccagacgccg

SEQ ID NO: 2932019 - RNA, 19 nt, Artificial Sequence
  Description of Artificial Sequence: Synthetic oligonucleotide
cugggguuucuagggaccg

SEQ ID NO: 2932020 - RNA, 19 nt, Artificial Sequence
  Description of Artificial Sequence: Synthetic oligonucleotide
aggaaagguccaggggaac

SEQ ID NO: 2932021 - RNA, 19 nt, Artificial Sequence
  Description of Artificial Sequence: Synthetic oligonucleotide
uccaugcugucuucauccu

SEQ ID NO: 2932022 - RNA, 19 nt, Artificial Sequence
  Description of Artificial Sequence: Synthetic oligonucleotide
uuucuugcucugagggaua

SEQ ID NO: 2932023 - RNA, 19 nt, Artificial Sequence
  Description of Artificial Sequence: Synthetic oligonucleotide
uugccagaggcugcugaag

SEQ ID NO: 2932024 - RNA, 19 nt, Artificial Sequence
  Description of Artificial Sequence: Synthetic oligonucleotide
ugugcucguacagccaguc

SEQ ID NO: 2932025 - RNA, 19 nt, Artificial Sequence
  Description of Artificial Sequence: Synthetic oligonucleotide
gauacgcguuguaucugug

SEQ ID NO: 2932026 - RNA, 19 nt, Artificial Sequence
  Description of Artificial Sequence: Synthetic oligonucleotide
ugccagacgccgcaaggau

SEQ ID NO: 2932027 - RNA, 19 nt, Artificial Sequence
  Description of Artificial Sequence: Synthetic oligonucleotide
ucggaaauccuuggcccca

SEQ ID NO: 2932028 - RNA, 19 nt, Artificial Sequence
  Description of Artificial Sequence: Synthetic oligonucleotide
cagaggcugcugaagagga

SEQ ID NO: 2932029 - RNA, 19 nt, Artificial Sequence
  Description of Artificial Sequence: Synthetic oligonucleotide
ggacagacuccuugggcag

SEQ ID NO: 2932030 - RNA, 19 nt, Artificial Sequence
  Description of Artificial Sequence: Synthetic oligonucleotide
gucagggaggagccugcgg

SEQ ID NO: 2932031 - RNA, 19 nt, Artificial Sequence
  Description of Artificial Sequence: Synthetic oligonucleotide
uccuccgucucuugccaga

SEQ ID NO: 2932032 - RNA, 19 nt, Artificial Sequence
  Description of Artificial Sequence: Synthetic oligonucleotide
ggugugucugcugggacag

SEQ ID NO: 2932033 - RNA, 19 nt, Artificial Sequence
  Description of Artificial Sequence: Synthetic oligonucleotide
aguccgagaggcgggguag

SEQ ID NO: 2932034 - RNA, 19 nt, Artificial Sequence
  Description of Artificial Sequence: Synthetic oligonucleotide
ccagucccgaagaaucugg

SEQ ID NO: 2932035 - RNA, 19 nt, Artificial Sequence
  Description of Artificial Sequence: Synthetic oligonucleotide
guuucuagggaccggcagu

SEQ ID NO: 2932036 - RNA, 19 nt, Artificial Sequence
  Description of Artificial Sequence: Synthetic oligonucleotide
uacagccagucccgaagaa

SEQ ID NO: 2932037 - RNA, 19 nt, Artificial Sequence
  Description of Artificial Sequence: Synthetic oligonucleotide
gucacugccagacgccgca

SEQ ID NO: 2932038 - RNA, 19 nt, Artificial Sequence
  Description of Artificial Sequence: Synthetic oligonucleotide
ugaacugguuuggaucuuu

SEQ ID NO: 2932039 - RNA, 19 nt, Artificial Sequence
  Description of Artificial Sequence: Synthetic oligonucleotide
gaccggcaguccgagaggc

SEQ ID NO: 2932040 - RNA, 19 nt, Artificial Sequence
  Description of Artificial Sequence: Synthetic oligonucleotide
ccuuucucagcauggucag

SEQ ID NO: 2932041 - RNA, 19 nt, Artificial Sequence
  Description of Artificial Sequence: Synthetic oligonucleotide
gaacauccaugcugucuuc

SEQ ID NO: 2932042 - RNA, 19 nt, Artificial Sequence
  Description of Artificial Sequence: Synthetic oligonucleotide
ugggguuucuagggaccgg

SEQ ID NO: 2932043 - RNA, 19 nt, Artificial Sequence
  Description of Artificial Sequence: Synthetic oligonucleotide
ugucuucauccucgguguc

SEQ ID NO: 2932044 - RNA, 19 nt, Artificial Sequence
  Description of Artificial Sequence: Synthetic oligonucleotide
uccgagaggcgggguaggg

SEQ ID NO: 2932045 - RNA, 19 nt, Artificial Sequence
  Description of Artificial Sequence: Synthetic oligonucleotide
ggcgggguaggggugagcg

SEQ ID NO: 2932046 - RNA, 19 nt, Artificial Sequence
  Description of Artificial Sequence: Synthetic oligonucleotide
cuuucucagcauggucagg

SEQ ID NO: 2932047 - RNA, 19 nt, Artificial Sequence
  Description of Artificial Sequence: Synthetic oligonucleotide
gaggaaagguccaggggaa

SEQ ID NO: 2932048 - RNA, 19 nt, Artificial Sequence
  Description of Artificial Sequence: Synthetic oligonucleotide
auccuuggccccacggcgg

SEQ ID NO: 2932049 - RNA, 19 nt, Artificial Sequence
  Description of Artificial Sequence: Synthetic oligonucleotide
guccaggggaacauccaug

SEQ ID NO: 2932050 - RNA, 19 nt, Artificial Sequence
  Description of Artificial Sequence: Synthetic oligonucleotide
cugucuucauccucggugu

SEQ ID NO: 2932051 - RNA, 19 nt, Artificial Sequence
  Description of Artificial Sequence: Synthetic oligonucleotide
uccuuggccccacggcgga

SEQ ID NO: 2932052 - RNA, 19 nt, Artificial Sequence
  Description of Artificial Sequence: Synthetic oligonucleotide
acagaccugcaguguagau

SEQ ID NO: 2932053 - RNA, 19 nt, Artificial Sequence
  Description of Artificial Sequence: Synthetic oligonucleotide
cuggaacuccagucccagc

SEQ ID NO: 2932054 - RNA, 19 nt, Artificial Sequence
  Description of Artificial Sequence: Synthetic oligonucleotide
caguguagauagguguguc

SEQ ID NO: 2932055 - RNA, 19 nt, Artificial Sequence
  Description of Artificial Sequence: Synthetic oligonucleotide
ugcugucuucauccucggu

SEQ ID NO: 2932056 - RNA, 19 nt, Artificial Sequence
  Description of Artificial Sequence: Synthetic oligonucleotide
agggaggagccugcggcgg

SEQ ID NO: 2932057 - RNA, 19 nt, Artificial Sequence
  Description of Artificial Sequence: Synthetic oligonucleotide
ucccagcgagaggugaagc

SEQ ID NO: 2932058 - RNA, 19 nt, Artificial Sequence
  Description of Artificial Sequence: Synthetic oligonucleotide
uagggaccggcaguccgag

SEQ ID NO: 2932059 - RNA, 19 nt, Artificial Sequence
  Description of Artificial Sequence: Synthetic oligonucleotide
guagauaggugugucugcu

SEQ ID NO: 2932060 - RNA, 19 nt, Artificial Sequence
  Description of Artificial Sequence: Synthetic oligonucleotide
gauugccucuccuccgucu

SEQ ID NO: 2932061 - RNA, 19 nt, Artificial Sequence
  Description of Artificial Sequence: Synthetic oligonucleotide
aacuccagucccagcgaga

SEQ ID NO: 2932062 - RNA, 19 nt, Artificial Sequence
  Description of Artificial Sequence: Synthetic oligonucleotide
gccauccuuucucagcaug

SEQ ID NO: 2932063 - RNA, 19 nt, Artificial Sequence
  Description of Artificial Sequence: Synthetic oligonucleotide
uugccucuccuccgucucu

SEQ ID NO: 2932064 - RNA, 19 nt, Artificial Sequence
  Description of Artificial Sequence: Synthetic oligonucleotide
gaucgugaacugguuugga

SEQ ID NO: 2932065 - RNA, 19 nt, Artificial Sequence
  Description of Artificial Sequence: Synthetic oligonucleotide
ggcugcugaagaggaaagg

SEQ ID NO: 2932066 - RNA, 19 nt, Artificial Sequence
  Description of Artificial Sequence: Synthetic oligonucleotide
gcucguacagccagucccg

SEQ ID NO: 2932067 - RNA, 19 nt, Artificial Sequence
  Description of Artificial Sequence: Synthetic oligonucleotide
ggaacauccaugcugucuu

SEQ ID NO: 2932068 - RNA, 19 nt, Artificial Sequence
  Description of Artificial Sequence: Synthetic oligonucleotide
uucuagggaccggcagucc

SEQ ID NO: 2932069 - RNA, 19 nt, Artificial Sequence
  Description of Artificial Sequence: Synthetic oligonucleotide
cuagggaccggcaguccga

SEQ ID NO: 2932070 - RNA, 19 nt, Artificial Sequence
  Description of Artificial Sequence: Synthetic oligonucleotide
gggugagcgaugauccucc

SEQ ID NO: 2932071 - RNA, 19 nt, Artificial Sequence
  Description of Artificial Sequence: Synthetic oligonucleotide
cuugccagaggcugcugaa

SEQ ID NO: 2932072 - RNA, 19 nt, Artificial Sequence
  Description of Artificial Sequence: Synthetic oligonucleotide
gucucuugccagaggcugc

SEQ ID NO: 2932073 - RNA, 19 nt, Artificial Sequence
  Description of Artificial Sequence: Synthetic oligonucleotide
cgcguuguaucugugcucg

SEQ ID NO: 2932074 - RNA, 19 nt, Artificial Sequence
  Description of Artificial Sequence: Synthetic oligonucleotide
ggaaauccuuggccccacg

SEQ ID NO: 2932075 - RNA, 19 nt, Artificial Sequence
  Description of Artificial Sequence: Synthetic oligonucleotide
agcgagaggugaagcuggg

SEQ ID NO: 2932076 - RNA, 19 nt, Artificial Sequence
  Description of Artificial Sequence: Synthetic oligonucleotide
ucguacagccagucccgaa

SEQ ID NO: 2932077 - RNA, 19 nt, Artificial Sequence
  Description of Artificial Sequence: Synthetic oligonucleotide
gugcucguacagccagucc

SEQ ID NO: 2932078 - RNA, 19 nt, Artificial Sequence
  Description of Artificial Sequence: Synthetic oligonucleotide
ggugucacugccagacgcc

SEQ ID NO: 2932079 - RNA, 19 nt, Artificial Sequence
  Description of Artificial Sequence: Synthetic oligonucleotide
gggguuucuagggaccggc

SEQ ID NO: 2932080 - RNA, 19 nt, Artificial Sequence
  Description of Artificial Sequence: Synthetic oligonucleotide
aggggugagcgaugauccu

SEQ ID NO: 2932081 - RNA, 19 nt, Artificial Sequence
  Description of Artificial Sequence: Synthetic oligonucleotide
ggcggagaucgugaacugg

SEQ ID NO: 2932082 - RNA, 19 nt, Artificial Sequence
  Description of Artificial Sequence: Synthetic oligonucleotide
cacugccagacgccgcaag

SEQ ID NO: 2932083 - RNA, 19 nt, Artificial Sequence
  Description of Artificial Sequence: Synthetic oligonucleotide
cuccagucccagcgagagg

SEQ ID NO: 2932084 - RNA, 19 nt, Artificial Sequence
  Description of Artificial Sequence: Synthetic oligonucleotide
ggaaagguccaggggaaca

SEQ ID NO: 2932085 - RNA, 19 nt, Artificial Sequence
  Description of Artificial Sequence: Synthetic oligonucleotide
ggaccggcaguccgagagg

SEQ ID NO: 2932086 - RNA, 19 nt, Artificial Sequence
  Description of Artificial Sequence: Synthetic oligonucleotide
cuccgucucuugccagagg

SEQ ID NO: 2932087 - RNA, 19 nt, Artificial Sequence
  Description of Artificial Sequence: Synthetic oligonucleotide
gaaagguccaggggaacau

SEQ ID NO: 2932088 - RNA, 19 nt, Artificial Sequence
  Description of Artificial Sequence: Synthetic oligonucleotide
gcauggucagggaggagcc

SEQ ID NO: 2932089 - RNA, 19 nt, Artificial Sequence
  Description of Artificial Sequence: Synthetic oligonucleotide
cuccuccgucucuugccag

SEQ ID NO: 2932090 - RNA, 19 nt, Artificial Sequence
  Description of Artificial Sequence: Synthetic oligonucleotide
gugagcgaugauccuccuc

SEQ ID NO: 2932091 - RNA, 19 nt, Artificial Sequence
  Description of Artificial Sequence: Synthetic oligonucleotide
ccgaagaaucuggacagac

SEQ ID NO: 2932092 - RNA, 19 nt, Artificial Sequence
  Description of Artificial Sequence: Synthetic oligonucleotide
ggaacuccagucccagcga

SEQ ID NO: 2932093 - RNA, 19 nt, Artificial Sequence
  Description of Artificial Sequence: Synthetic oligonucleotide
gaggagccugcggcgggcg

SEQ ID NO: 2932094 - RNA, 19 nt, Artificial Sequence
  Description of Artificial Sequence: Synthetic oligonucleotide
cagucccgaagaaucugga

SEQ ID NO: 2932095 - RNA, 19 nt, Artificial Sequence
  Description of Artificial Sequence: Synthetic oligonucleotide
ccaguuacagaccugcagu

SEQ ID NO: 2932096 - RNA, 19 nt, Artificial Sequence
  Description of Artificial Sequence: Synthetic oligonucleotide
gacagacuccuugggcaga

SEQ ID NO: 2932097 - RNA, 19 nt, Artificial Sequence
  Description of Artificial Sequence: Synthetic oligonucleotide
acagacuccuugggcagau

SEQ ID NO: 2932098 - RNA, 19 nt, Artificial Sequence
  Description of Artificial Sequence: Synthetic oligonucleotide
cacggcggagaucgugaac

SEQ ID NO: 2932099 - RNA, 19 nt, Artificial Sequence
  Description of Artificial Sequence: Synthetic oligonucleotide
cagaccugcaguguagaua

SEQ ID NO: 2932100 - RNA, 19 nt, Artificial Sequence
  Description of Artificial Sequence: Synthetic oligonucleotide
gagaggcgggguaggggug

SEQ ID NO: 2932101 - RNA, 19 nt, Artificial Sequence
  Description of Artificial Sequence: Synthetic oligonucleotide
ccagcgagaggugaagcug

SEQ ID NO: 2932102 - RNA, 19 nt, Artificial Sequence
  Description of Artificial Sequence: Synthetic oligonucleotide
gcugaagaggaaaggucca

SEQ ID NO: 2932103 - RNA, 19 nt, Artificial Sequence
  Description of Artificial Sequence: Synthetic oligonucleotide
cugcggcgggcguugauga

SEQ ID NO: 2932104 - RNA, 19 nt, Artificial Sequence
  Description of Artificial Sequence: Synthetic oligonucleotide
ggauacgcguuguaucugu

SEQ ID NO: 2932105 - RNA, 19 nt, Artificial Sequence
  Description of Artificial Sequence: Synthetic oligonucleotide
aucugugcucguacagcca

SEQ ID NO: 2932106 - RNA, 19 nt, Artificial Sequence
  Description of Artificial Sequence: Synthetic oligonucleotide
gcugggguuucuagggacc

SEQ ID NO: 2932107 - RNA, 19 nt, Artificial Sequence
  Description of Artificial Sequence: Synthetic oligonucleotide
cuugggcagauugccucuc

SEQ ID NO: 2932108 - RNA, 19 nt, Artificial Sequence
  Description of Artificial Sequence: Synthetic oligonucleotide
ccggcaguccgagaggcgg

SEQ ID NO: 2932109 - RNA, 19 nt, Artificial Sequence
  Description of Artificial Sequence: Synthetic oligonucleotide
ugccauccuuucucagcau

SEQ ID NO: 2932110 - RNA, 19 nt, Artificial Sequence
  Description of Artificial Sequence: Synthetic oligonucleotide
gcugcugaagaggaaaggu

SEQ ID NO: 2932111 - RNA, 19 nt, Artificial Sequence
  Description of Artificial Sequence: Synthetic oligonucleotide
cggugucacugccagacgc

SEQ ID NO: 2932112 - RNA, 19 nt, Artificial Sequence
  Description of Artificial Sequence: Synthetic oligonucleotide
guccgagaggcgggguagg

SEQ ID NO: 2932113 - RNA, 19 nt, Artificial Sequence
  Description of Artificial Sequence: Synthetic oligonucleotide
agacgccgcaaggaugccu

SEQ ID NO: 2932114 - RNA, 19 nt, Artificial Sequence
  Description of Artificial Sequence: Synthetic oligonucleotide
uuggccccacggcggagau

SEQ ID NO: 2932115 - RNA, 19 nt, Artificial Sequence
  Description of Artificial Sequence: Synthetic oligonucleotide
gggcagauugccucuccuc

SEQ ID NO: 2932116 - RNA, 19 nt, Artificial Sequence
  Description of Artificial Sequence: Synthetic oligonucleotide
gguuuggaucuuugccauc

SEQ ID NO: 2932117 - RNA, 19 nt, Artificial Sequence
  Description of Artificial Sequence: Synthetic oligonucleotide
cugccagacgccgcaagga

SEQ ID NO: 2932118 - RNA, 19 nt, Artificial Sequence
  Description of Artificial Sequence: Synthetic oligonucleotide
gggauacgcguuguaucug

SEQ ID NO: 2932119 - RNA, 19 nt, Artificial Sequence
  Description of Artificial Sequence: Synthetic oligonucleotide
ggggugagcgaugauccuc

SEQ ID NO: 2932120 - RNA, 19 nt, Artificial Sequence
  Description of Artificial Sequence: Synthetic oligonucleotide
gagccugcggcgggcguug

SEQ ID NO: 2932121 - RNA, 19 nt, Artificial Sequence
  Description of Artificial Sequence: Synthetic oligonucleotide
ggcaguccgagaggcgggg

SEQ ID NO: 2932122 - RNA, 19 nt, Artificial Sequence
  Description of Artificial Sequence: Synthetic oligonucleotide
agucccagcgagaggugaa

SEQ ID NO: 2932123 - RNA, 19 nt, Artificial Sequence
  Description of Artificial Sequence: Synthetic oligonucleotide
agcuagcuucggaaauccu

SEQ ID NO: 2932124 - RNA, 19 nt, Artificial Sequence
  Description of Artificial Sequence: Synthetic oligonucleotide
gcgggcguugaugaaccag

SEQ ID NO: 2932125 - RNA, 19 nt, Artificial Sequence
  Description of Artificial Sequence: Synthetic oligonucleotide
ccucuccuccgucucuugc

SEQ ID NO: 2932126 - RNA, 19 nt, Artificial Sequence
  Description of Artificial Sequence: Synthetic oligonucleotide
accggcaguccgagaggcg

SEQ ID NO: 2932127 - RNA, 19 nt, Artificial Sequence
  Description of Artificial Sequence: Synthetic oligonucleotide
gccagucccgaagaaucug

SEQ ID NO: 2932128 - RNA, 19 nt, Artificial Sequence
  Description of Artificial Sequence: Synthetic oligonucleotide
ggucagggaggagccugcg

SEQ ID NO: 2932129 - RNA, 19 nt, Artificial Sequence
  Description of Artificial Sequence: Synthetic oligonucleotide
cgugaacugguuuggaucu

SEQ ID NO: 2932130 - RNA, 19 nt, Artificial Sequence
  Description of Artificial Sequence: Synthetic oligonucleotide
cgucucuugccagaggcug

SEQ ID NO: 2932131 - RNA, 19 nt, Artificial Sequence
  Description of Artificial Sequence: Synthetic oligonucleotide
ugcggcgggcguugaugaa

SEQ ID NO: 2932132 - RNA, 19 nt, Artificial Sequence
  Description of Artificial Sequence: Synthetic oligonucleotide
cagauugccucuccuccgu

SEQ ID NO: 2932133 - RNA, 19 nt, Artificial Sequence
  Description of Artificial Sequence: Synthetic oligonucleotide
aggcgggguaggggugagc

SEQ ID NO: 2932134 - RNA, 19 nt, Artificial Sequence
  Description of Artificial Sequence: Synthetic oligonucleotide
ccaugcugucuucauccuc

SEQ ID NO: 2932135 - RNA, 19 nt, Artificial Sequence
  Description of Artificial Sequence: Synthetic oligonucleotide
gaggcgggguaggggugag

SEQ ID NO: 2932136 - RNA, 19 nt, Artificial Sequence
  Description of Artificial Sequence: Synthetic oligonucleotide
gccagacgccgcaaggaug

SEQ ID NO: 2932137 - RNA, 19 nt, Artificial Sequence
  Description of Artificial Sequence: Synthetic oligonucleotide
gggaacauccaugcugucu

SEQ ID NO: 2932138 - RNA, 19 nt, Artificial Sequence
  Description of Artificial Sequence: Synthetic oligonucleotide
ggagaucgugaacugguuu

SEQ ID NO: 2932139 - RNA, 19 nt, Artificial Sequence
  Description of Artificial Sequence: Synthetic oligonucleotide
gcgagaggugaagcugggg

SEQ ID NO: 2932140 - RNA, 19 nt, Artificial Sequence
  Description of Artificial Sequence: Synthetic oligonucleotide
gacgccgcaaggaugccuu

SEQ ID NO: 2932141 - RNA, 19 nt, Artificial Sequence
  Description of Artificial Sequence: Synthetic oligonucleotide
cagucccagcgagagguga

SEQ ID NO: 2932142 - RNA, 19 nt, Artificial Sequence
  Description of Artificial Sequence: Synthetic oligonucleotide
cuuggccccacggcggaga

SEQ ID NO: 2932143 - RNA, 19 nt, Artificial Sequence
  Description of Artificial Sequence: Synthetic oligonucleotide
cauccuuucucagcauggu

SEQ ID NO: 2932144 - RNA, 19 nt, Artificial Sequence
  Description of Artificial Sequence: Synthetic oligonucleotide
aggagccugcggcgggcgu

SEQ ID NO: 2932145 - RNA, 19 nt, Artificial Sequence
  Description of Artificial Sequence: Synthetic oligonucleotide
ucacugccagacgccgcaa

SEQ ID NO: 2932146 - RNA, 19 nt, Artificial Sequence
  Description of Artificial Sequence: Synthetic oligonucleotide
gcuuuucauucuggaacuc

SEQ ID NO: 2932147 - RNA, 19 nt, Artificial Sequence
  Description of Artificial Sequence: Synthetic oligonucleotide
auccucggugucacugcca

SEQ ID NO: 2932148 - RNA, 19 nt, Artificial Sequence
  Description of Artificial Sequence: Synthetic oligonucleotide
gcuagcuucggaaauccuu

SEQ ID NO: 2932149 - RNA, 19 nt, Artificial Sequence
  Description of Artificial Sequence: Synthetic oligonucleotide
cuccuugggcagauugccu

SEQ ID NO: 2932150 - RNA, 19 nt, Artificial Sequence
  Description of Artificial Sequence: Synthetic oligonucleotide
cggcgggcguugaugaacc

SEQ ID NO: 2932151 - RNA, 19 nt, Artificial Sequence
  Description of Artificial Sequence: Synthetic oligonucleotide
cugagggauacgcguugua

SEQ ID NO: 2932152 - RNA, 19 nt, Artificial Sequence
  Description of Artificial Sequence: Synthetic oligonucleotide
agggaccggcaguccgaga

SEQ ID NO: 2932153 - RNA, 19 nt, Artificial Sequence
  Description of Artificial Sequence: Synthetic oligonucleotide
cccacggcggagaucguga

SEQ ID NO: 2932154 - RNA, 19 nt, Artificial Sequence
  Description of Artificial Sequence: Synthetic oligonucleotide
gcggagaucgugaacuggu

SEQ ID NO: 2932155 - RNA, 19 nt, Artificial Sequence
  Description of Artificial Sequence: Synthetic oligonucleotide
caguccgagaggcggggua

SEQ ID NO: 2932156 - RNA, 19 nt, Artificial Sequence
  Description of Artificial Sequence: Synthetic oligonucleotide
gguccaggggaacauccau

SEQ ID NO: 2932157 - RNA, 19 nt, Artificial Sequence
  Description of Artificial Sequence: Synthetic oligonucleotide
ccugcggcgggcguugaug

SEQ ID NO: 2932158 - RNA, 19 nt, Artificial Sequence
  Description of Artificial Sequence: Synthetic oligonucleotide
cucguacagccagucccga

SEQ ID NO: 2932159 - RNA, 19 nt, Artificial Sequence
  Description of Artificial Sequence: Synthetic oligonucleotide
cagacgccgcaaggaugcc

SEQ ID NO: 2932160 - RNA, 19 nt, Artificial Sequence
  Description of Artificial Sequence: Synthetic oligonucleotide
ccuccgucucuugccagag

SEQ ID NO: 2932161 - RNA, 19 nt, Artificial Sequence
  Description of Artificial Sequence: Synthetic oligonucleotide
gcggcgggcguugaugaac

SEQ ID NO: 2932162 - RNA, 19 nt, Artificial Sequence
  Description of Artificial Sequence: Synthetic oligonucleotide
gcaguguagauaggugugu

SEQ ID NO: 2932163 - RNA, 19 nt, Artificial Sequence
  Description of Artificial Sequence: Synthetic oligonucleotide
ggaggagccugcggcgggc

SEQ ID NO: 2932164 - RNA, 19 nt, Artificial Sequence
  Description of Artificial Sequence: Synthetic oligonucleotide
cagcauggucagggaggag

SEQ ID NO: 2932165 - RNA, 19 nt, Artificial Sequence
  Description of Artificial Sequence: Synthetic oligonucleotide
gaaucuggacagacuccuu

SEQ ID NO: 2932166 - RNA, 19 nt, Artificial Sequence
  Description of Artificial Sequence: Synthetic oligonucleotide
ggugaagcugggguuucua

SEQ ID NO: 2932167 - RNA, 19 nt, Artificial Sequence
  Description of Artificial Sequence: Synthetic oligonucleotide
ggguuucuagggaccggca

SEQ ID NO: 2932168 - RNA, 19 nt, Artificial Sequence
  Description of Artificial Sequence: Synthetic oligonucleotide
cgaagaaucuggacagacu

SEQ ID NO: 2932169 - RNA, 19 nt, Artificial Sequence
  Description of Artificial Sequence: Synthetic oligonucleotide
gggguaggggugagcgaug

SEQ ID NO: 2932170 - RNA, 19 nt, Artificial Sequence
  Description of Artificial Sequence: Synthetic oligonucleotide
ggggaacauccaugcuguc

SEQ ID NO: 2932171 - RNA, 19 nt, Artificial Sequence
  Description of Artificial Sequence: Synthetic oligonucleotide
ccagucccagcgagaggug

SEQ ID NO: 2932172 - RNA, 19 nt, Artificial Sequence
  Description of Artificial Sequence: Synthetic oligonucleotide
cugugcucguacagccagu

SEQ ID NO: 2932173 - RNA, 19 nt, Artificial Sequence
  Description of Artificial Sequence: Synthetic oligonucleotide
cggcaguccgagaggcggg

SEQ ID NO: 2932174 - RNA, 19 nt, Artificial Sequence
  Description of Artificial Sequence: Synthetic oligonucleotide
acgccgcaaggaugccuuu

SEQ ID NO: 2932175 - RNA, 19 nt, Artificial Sequence
  Description of Artificial Sequence: Synthetic oligonucleotide
cccagcgagaggugaagcu

SEQ ID NO: 2932176 - RNA, 19 nt, Artificial Sequence
  Description of Artificial Sequence: Synthetic oligonucleotide
cgagaggcgggguaggggu

SEQ ID NO: 2932177 - RNA, 19 nt, Artificial Sequence
  Description of Artificial Sequence: Synthetic oligonucleotide
cuucauccucggugucacu

SEQ ID NO: 2932178 - RNA, 19 nt, Artificial Sequence
  Description of Artificial Sequence: Synthetic oligonucleotide
cgggcguugaugaaccagu

SEQ ID NO: 2932179 - RNA, 19 nt, Artificial Sequence
  Description of Artificial Sequence: Synthetic oligonucleotide
gcgggguaggggugagcga

SEQ ID NO: 2932180 - RNA, 19 nt, Artificial Sequence
  Description of Artificial Sequence: Synthetic oligonucleotide
ggugagcgaugauccuccu

SEQ ID NO: 2932181 - RNA, 19 nt, Artificial Sequence
  Description of Artificial Sequence: Synthetic oligonucleotide
uggccccacggcggagauc

SEQ ID NO: 2932182 - RNA, 19 nt, Artificial Sequence
  Description of Artificial Sequence: Synthetic oligonucleotide
ggcgggcguugaugaacca

SEQ ID NO: 2932183 - RNA, 19 nt, Artificial Sequence
  Description of Artificial Sequence: Synthetic oligonucleotide
cggcggagaucgugaacug

SEQ ID NO: 2932184 - RNA, 19 nt, Artificial Sequence
  Description of Artificial Sequence: Synthetic oligonucleotide
ccccacggcggagaucgug

SEQ ID NO: 2932185 - RNA, 19 nt, Artificial Sequence
  Description of Artificial Sequence: Synthetic oligonucleotide
gugaacugguuuggaucuu

SEQ ID NO: 2932186 - RNA, 19 nt, Artificial Sequence
  Description of Artificial Sequence: Synthetic oligonucleotide
cggaaauccuuggccccac

SEQ ID NO: 2932187 - RNA, 19 nt, Artificial Sequence
  Description of Artificial Sequence: Synthetic oligonucleotide
cccgaagaaucuggacaga

SEQ ID NO: 2932188 - RNA, 19 nt, Artificial Sequence
  Description of Artificial Sequence: Synthetic oligonucleotide
gguaggggugagcgaugau

SEQ ID NO: 2932189 - RNA, 19 nt, Artificial Sequence
  Description of Artificial Sequence: Synthetic oligonucleotide
ccacggcggagaucgugaa

SEQ ID NO: 2932190 - RNA, 19 nt, Artificial Sequence
  Description of Artificial Sequence: Synthetic oligonucleotide
ccgucucuugccagaggcu

SEQ ID NO: 2932191 - RNA, 19 nt, Artificial Sequence
  Description of Artificial Sequence: Synthetic oligonucleotide
agccugcggcgggcguuga

SEQ ID NO: 2932192 - RNA, 19 nt, Artificial Sequence
  Description of Artificial Sequence: Synthetic oligonucleotide
ccucggugucacugccaga

SEQ ID NO: 2932193 - RNA, 19 nt, Artificial Sequence
  Description of Artificial Sequence: Synthetic oligonucleotide
ccuuggccccacggcggag

SEQ ID NO: 2932194 - RNA, 19 nt, Artificial Sequence
  Description of Artificial Sequence: Synthetic oligonucleotide
ccaggggaacauccaugcu

SEQ ID NO: 2932195 - RNA, 19 nt, Artificial Sequence
  Description of Artificial Sequence: Synthetic oligonucleotide
gcguuguaucugugcucgu

SEQ ID NO: 2932196 - RNA, 19 nt, Artificial Sequence
  Description of Artificial Sequence: Synthetic oligonucleotide
cgggguaggggugagcgau

SEQ ID NO: 2932197 - RNA, 19 nt, Artificial Sequence
  Description of Artificial Sequence: Synthetic oligonucleotide
ggagccugcggcgggcguu

SEQ ID NO: 2932198 - RNA, 19 nt, Artificial Sequence
  Description of Artificial Sequence: Synthetic oligonucleotide
gcaguccgagaggcggggu

SEQ ID NO: 2932199 - RNA, 19 nt, Artificial Sequence
  Description of Artificial Sequence: Synthetic oligonucleotide
cugggacagcagcgcuuuu

SEQ ID NO: 2932200 - RNA, 19 nt, Artificial Sequence
  Description of Artificial Sequence: Synthetic oligonucleotide
cggagaucgugaacugguu

SEQ ID NO: 2932201 - RNA, 19 nt, Artificial Sequence
  Description of Artificial Sequence: Synthetic oligonucleotide
gccugcggcgggcguugau

SEQ ID NO: 2932202 - RNA, 19 nt, Artificial Sequence
  Description of Artificial Sequence: Synthetic oligonucleotide
cgccgcaaggaugccuuuu

SEQ ID NO: 2932203 - RNA, 19 nt, Artificial Sequence
  Description of Artificial Sequence: Synthetic oligonucleotide
gccccacggcggagaucgu

SEQ ID NO: 2932204 - RNA, 19 nt, Artificial Sequence
  Description of Artificial Sequence: Synthetic oligonucleotide
aaaacuuguugucuugucc

SEQ ID NO: 2932205 - RNA, 19 nt, Artificial Sequence
  Description of Artificial Sequence: Synthetic oligonucleotide
aacaucagaacccauuuuc

SEQ ID NO: 2932206 - RNA, 19 nt, Artificial Sequence
  Description of Artificial Sequence: Synthetic oligonucleotide
aacaguucaacaucagaac

SEQ ID NO: 2932207 - RNA, 19 nt, Artificial Sequence
  Description of Artificial Sequence: Synthetic oligonucleotide
aagcuauacagagaaaccc

SEQ ID NO: 2932208 - RNA, 19 nt, Artificial Sequence
  Description of Artificial Sequence: Synthetic oligonucleotide
aaccuuggcaggcugaccc

SEQ ID NO: 2932209 - RNA, 19 nt, Artificial Sequence
  Description of Artificial Sequence: Synthetic oligonucleotide
aauaccuugaauaacacau

SEQ ID NO: 2932210 - RNA, 19 nt, Artificial Sequence
  Description of Artificial Sequence: Synthetic oligonucleotide
aaagcuauacagagaaacc

SEQ ID NO: 2932211 - RNA, 19 nt, Artificial Sequence
  Description of Artificial Sequence: Synthetic oligonucleotide
agcuguaaaaccuuggcag

SEQ ID NO: 2932212 - RNA, 19 nt, Artificial Sequence
  Description of Artificial Sequence: Synthetic oligonucleotide
aaucccaguacuugggacg

SEQ ID NO: 2932213 - RNA, 19 nt, Artificial Sequence
  Description of Artificial Sequence: Synthetic oligonucleotide
accaguuucaauguguugc

SEQ ID NO: 2932214 - RNA, 19 nt, Artificial Sequence
  Description of Artificial Sequence: Synthetic oligonucleotide
ucuguuagaagaucguucc

SEQ ID NO: 2932215 - RNA, 19 nt, Artificial Sequence
  Description of Artificial Sequence: Synthetic oligonucleotide
uuuaucuuuacucuggcuu

SEQ ID NO: 2932216 - RNA, 19 nt, Artificial Sequence
  Description of Artificial Sequence: Synthetic oligonucleotide
uaacaguucaacaucagaa

SEQ ID NO: 2932217 - RNA, 19 nt, Artificial Sequence
  Description of Artificial Sequence: Synthetic oligonucleotide
agagcuguaaaaccuuggc

SEQ ID NO: 2932218 - RNA, 19 nt, Artificial Sequence
  Description of Artificial Sequence: Synthetic oligonucleotide
uagaagaucguuccugggg

SEQ ID NO: 2932219 - RNA, 19 nt, Artificial Sequence
  Description of Artificial Sequence: Synthetic oligonucleotide
aucucuucuauuuucuccg

SEQ ID NO: 2932220 - RNA, 19 nt, Artificial Sequence
  Description of Artificial Sequence: Synthetic oligonucleotide
aaacuuguugucuuguccu

SEQ ID NO: 2932221 - RNA, 19 nt, Artificial Sequence
  Description of Artificial Sequence: Synthetic oligonucleotide
ucuucguuuaucuuuacuc

SEQ ID NO: 2932222 - RNA, 19 nt, Artificial Sequence
  Description of Artificial Sequence: Synthetic oligonucleotide
uugaauaacacauguucug

SEQ ID NO: 2932223 - RNA, 19 nt, Artificial Sequence
  Description of Artificial Sequence: Synthetic oligonucleotide
ucuucuauuuucuccgggg

SEQ ID NO: 2932224 - RNA, 19 nt, Artificial Sequence
  Description of Artificial Sequence: Synthetic oligonucleotide
agugugaauaccuugaaua

SEQ ID NO: 2932225 - RNA, 19 nt, Artificial Sequence
  Description of Artificial Sequence: Synthetic oligonucleotide
ucagaacccauuuucaaca

SEQ ID NO: 2932226 - RNA, 19 nt, Artificial Sequence
  Description of Artificial Sequence: Synthetic oligonucleotide
uguucugaguaacaguuca

SEQ ID NO: 2932227 - RNA, 19 nt, Artificial Sequence
  Description of Artificial Sequence: Synthetic oligonucleotide
ucugaagagcuguaaaacc

SEQ ID NO: 2932228 - RNA, 19 nt, Artificial Sequence
  Description of Artificial Sequence: Synthetic oligonucleotide
ucguuuaucuuuacucugg

SEQ ID NO: 2932229 - RNA, 19 nt, Artificial Sequence
  Description of Artificial Sequence: Synthetic oligonucleotide
aacacauguucugaguaac

SEQ ID NO: 2932230 - RNA, 19 nt, Artificial Sequence
  Description of Artificial Sequence: Synthetic oligonucleotide
guuagaagaucguuccugg

SEQ ID NO: 2932231 - RNA, 19 nt, Artificial Sequence
  Description of Artificial Sequence: Synthetic oligonucleotide
ugaguaacaguucaacauc

SEQ ID NO: 2932232 - RNA, 19 nt, Artificial Sequence
  Description of Artificial Sequence: Synthetic oligonucleotide
ucuauuuucuccggggagg

SEQ ID NO: 2932233 - RNA, 19 nt, Artificial Sequence
  Description of Artificial Sequence: Synthetic oligonucleotide
caaagcuauacagagaaac

SEQ ID NO: 2932234 - RNA, 19 nt, Artificial Sequence
  Description of Artificial Sequence: Synthetic oligonucleotide
uuuucaacaucucuucuau

SEQ ID NO: 2932235 - RNA, 19 nt, Artificial Sequence
  Description of Artificial Sequence: Synthetic oligonucleotide
aaaauuggcgcaucacagu

SEQ ID NO: 2932236 - RNA, 19 nt, Artificial Sequence
  Description of Artificial Sequence: Synthetic oligonucleotide
guacuugggacgcagaggc

SEQ ID NO: 2932237 - RNA, 19 nt, Artificial Sequence
  Description of Artificial Sequence: Synthetic oligonucleotide
auuggcgcaucacaguacg

SEQ ID NO: 2932238 - RNA, 19 nt, Artificial Sequence
  Description of Artificial Sequence: Synthetic oligonucleotide
ugugcaguguucugaagag

SEQ ID NO: 2932239 - RNA, 19 nt, Artificial Sequence
  Description of Artificial Sequence: Synthetic oligonucleotide
uucaacaucucuucuauuu

SEQ ID NO: 2932240 - RNA, 19 nt, Artificial Sequence
  Description of Artificial Sequence: Synthetic oligonucleotide
ucugaguaacaguucaaca

SEQ ID NO: 2932241 - RNA, 19 nt, Artificial Sequence
  Description of Artificial Sequence: Synthetic oligonucleotide
uuguagcgcucucuuaucg

SEQ ID NO: 2932242 - RNA, 19 nt, Artificial Sequence
  Description of Artificial Sequence: Synthetic oligonucleotide
cacguuuucuguuagaaga

SEQ ID NO: 2932243 - RNA, 19 nt, Artificial Sequence
  Description of Artificial Sequence: Synthetic oligonucleotide
uaccuugaauaacacaugu

SEQ ID NO: 2932244 - RNA, 19 nt, Artificial Sequence
  Description of Artificial Sequence: Synthetic oligonucleotide
uucuauuuucuccggggag

SEQ ID NO: 2932245 - RNA, 19 nt, Artificial Sequence
  Description of Artificial Sequence: Synthetic oligonucleotide
uucuguuagaagaucguuc

SEQ ID NO: 2932246 - RNA, 19 nt, Artificial Sequence
  Description of Artificial Sequence: Synthetic oligonucleotide
aaauuggcgcaucacagua

SEQ ID NO: 2932247 - RNA, 19 nt, Artificial Sequence
  Description of Artificial Sequence: Synthetic oligonucleotide
uguuagaagaucguuccug

SEQ ID NO: 2932248 - RNA, 19 nt, Artificial Sequence
  Description of Artificial Sequence: Synthetic oligonucleotide
aaaaccuuggcaggcugac

SEQ ID NO: 2932249 - RNA, 19 nt, Artificial Sequence
  Description of Artificial Sequence: Synthetic oligonucleotide
caucucuucuauuuucucc

SEQ ID NO: 2932250 - RNA, 19 nt, Artificial Sequence
  Description of Artificial Sequence: Synthetic oligonucleotide
uucguuuaucuuuacucug

SEQ ID NO: 2932251 - RNA, 19 nt, Artificial Sequence
  Description of Artificial Sequence: Synthetic oligonucleotide
ucuuguagcgcucucuuau

SEQ ID NO: 2932252 - RNA, 19 nt, Artificial Sequence
  Description of Artificial Sequence: Synthetic oligonucleotide
cuggggaccaguuucaaug

SEQ ID NO: 2932253 - RNA, 19 nt, Artificial Sequence
  Description of Artificial Sequence: Synthetic oligonucleotide
ugaauaacacauguucuga

SEQ ID NO: 2932254 - RNA, 19 nt, Artificial Sequence
  Description of Artificial Sequence: Synthetic oligonucleotide
uuuucuguuagaagaucgu

SEQ ID NO: 2932255 - RNA, 19 nt, Artificial Sequence
  Description of Artificial Sequence: Synthetic oligonucleotide
uuaucuuuacucuggcuuc

SEQ ID NO: 2932256 - RNA, 19 nt, Artificial Sequence
  Description of Artificial Sequence: Synthetic oligonucleotide
ucaacaucagaacccauuu

SEQ ID NO: 2932257 - RNA, 19 nt, Artificial Sequence
  Description of Artificial Sequence: Synthetic oligonucleotide
uuacucuggcuucuuguag

SEQ ID NO: 2932258 - RNA, 19 nt, Artificial Sequence
  Description of Artificial Sequence: Synthetic oligonucleotide
agaagaucguuccugggga

SEQ ID NO: 2932259 - RNA, 19 nt, Artificial Sequence
  Description of Artificial Sequence: Synthetic oligonucleotide
uguugucuuguccugugca

SEQ ID NO: 2932260 - RNA, 19 nt, Artificial Sequence
  Description of Artificial Sequence: Synthetic oligonucleotide
aagaucguuccuggggacc

SEQ ID NO: 2932261 - RNA, 19 nt, Artificial Sequence
  Description of Artificial Sequence: Synthetic oligonucleotide
ugaauaccuugaauaacac

SEQ ID NO: 2932262 - RNA, 19 nt, Artificial Sequence
  Description of Artificial Sequence: Synthetic oligonucleotide
aguuucaauguguugcggu

SEQ ID NO: 2932263 - RNA, 19 nt, Artificial Sequence
  Description of Artificial Sequence: Synthetic oligonucleotide
auaacacauguucugagua

SEQ ID NO: 2932264 - RNA, 19 nt, Artificial Sequence
  Description of Artificial Sequence: Synthetic oligonucleotide
uucaauguguugcggucag

SEQ ID NO: 2932265 - RNA, 19 nt, Artificial Sequence
  Description of Artificial Sequence: Synthetic oligonucleotide
uucugaagagcuguaaaac

SEQ ID NO: 2932266 - RNA, 19 nt, Artificial Sequence
  Description of Artificial Sequence: Synthetic oligonucleotide
aauguguugcggucagugu

SEQ ID NO: 2932267 - RNA, 19 nt, Artificial Sequence
  Description of Artificial Sequence: Synthetic oligonucleotide
auguguugcggucagugug

SEQ ID NO: 2932268 - RNA, 19 nt, Artificial Sequence
  Description of Artificial Sequence: Synthetic oligonucleotide
uacucuggcuucuuguagc

SEQ ID NO: 2932269 - RNA, 19 nt, Artificial Sequence
  Description of Artificial Sequence: Synthetic oligonucleotide
uucaacaucagaacccauu

SEQ ID NO: 2932270 - RNA, 19 nt, Artificial Sequence
  Description of Artificial Sequence: Synthetic oligonucleotide
aacuuguugucuuguccug

SEQ ID NO: 2932271 - RNA, 19 nt, Artificial Sequence
  Description of Artificial Sequence: Synthetic oligonucleotide
uguguugcggucaguguga

SEQ ID NO: 2932272 - RNA, 19 nt, Artificial Sequence
  Description of Artificial Sequence: Synthetic oligonucleotide
ccuugaauaacacauguuc

SEQ ID NO: 2932273 - RNA, 19 nt, Artificial Sequence
  Description of Artificial Sequence: Synthetic oligonucleotide
ugugaauaccuugaauaac

SEQ ID NO: 2932274 - RNA, 19 nt, Artificial Sequence
  Description of Artificial Sequence: Synthetic oligonucleotide
gugaauaccuugaauaaca

SEQ ID NO: 2932275 - RNA, 19 nt, Artificial Sequence
  Description of Artificial Sequence: Synthetic oligonucleotide
auuuucaacaucucuucua

SEQ ID NO: 2932276 - RNA, 19 nt, Artificial Sequence
  Description of Artificial Sequence: Synthetic oligonucleotide
aagagcuguaaaaccuugg

SEQ ID NO: 2932277 - RNA, 19 nt, Artificial Sequence
  Description of Artificial Sequence: Synthetic oligonucleotide
uuuugaauucuucguuuau

SEQ ID NO: 2932278 - RNA, 19 nt, Artificial Sequence
  Description of Artificial Sequence: Synthetic oligonucleotide
aauuggcgcaucacaguac

SEQ ID NO: 2932279 - RNA, 19 nt, Artificial Sequence
  Description of Artificial Sequence: Synthetic oligonucleotide
agcgaguaccaggauaggc

SEQ ID NO: 2932280 - RNA, 19 nt, Artificial Sequence
  Description of Artificial Sequence: Synthetic oligonucleotide
aauucuucguuuaucuuua

SEQ ID NO: 2932281 - RNA, 19 nt, Artificial Sequence
  Description of Artificial Sequence: Synthetic oligonucleotide
acaucucuucuauuuucuc

SEQ ID NO: 2932282 - RNA, 19 nt, Artificial Sequence
  Description of Artificial Sequence: Synthetic oligonucleotide
uaaaaccuuggcaggcuga

SEQ ID NO: 2932283 - RNA, 19 nt, Artificial Sequence
  Description of Artificial Sequence: Synthetic oligonucleotide
ucucuucuauuuucuccgg

SEQ ID NO: 2932284 - RNA, 19 nt, Artificial Sequence
  Description of Artificial Sequence: Synthetic oligonucleotide
aacaucucuucuauuuucu

SEQ ID NO: 2932285 - RNA, 19 nt, Artificial Sequence
  Description of Artificial Sequence: Synthetic oligonucleotide
ucaacaucucuucuauuuu

SEQ ID NO: 2932286 - RNA, 19 nt, Artificial Sequence
  Description of Artificial Sequence: Synthetic oligonucleotide
acauguucugaguaacagu

SEQ ID NO: 2932287 - RNA, 19 nt, Artificial Sequence
  Description of Artificial Sequence: Synthetic oligonucleotide
uucugaguaacaguucaac

SEQ ID NO: 2932288 - RNA, 19 nt, Artificial Sequence
  Description of Artificial Sequence: Synthetic oligonucleotide
uuuacucuggcuucuugua

SEQ ID NO: 2932289 - RNA, 19 nt, Artificial Sequence
  Description of Artificial Sequence: Synthetic oligonucleotide
agaacccauuuucaacauc

SEQ ID NO: 2932290 - RNA, 19 nt, Artificial Sequence
  Description of Artificial Sequence: Synthetic oligonucleotide
aguacuugggacgcagagg

SEQ ID NO: 2932291 - RNA, 19 nt, Artificial Sequence
  Description of Artificial Sequence: Synthetic oligonucleotide
uucuucguuuaucuuuacu

SEQ ID NO: 2932292 - RNA, 19 nt, Artificial Sequence
  Description of Artificial Sequence: Synthetic oligonucleotide
aguacggcacguuuucugu

SEQ ID NO: 2932293 - RNA, 19 nt, Artificial Sequence
  Description of Artificial Sequence: Synthetic oligonucleotide
ucuuuacucuggcuucuug

SEQ ID NO: 2932294 - RNA, 19 nt, Artificial Sequence
  Description of Artificial Sequence: Synthetic oligonucleotide
guugucuuguccugugcag

SEQ ID NO: 2932295 - RNA, 19 nt, Artificial Sequence
  Description of Artificial Sequence: Synthetic oligonucleotide
ugucuuguccugugcagug

SEQ ID NO: 2932296 - RNA, 19 nt, Artificial Sequence
  Description of Artificial Sequence: Synthetic oligonucleotide
gaauucuucguuuaucuuu

SEQ ID NO: 2932297 - RNA, 19 nt, Artificial Sequence
  Description of Artificial Sequence: Synthetic oligonucleotide
guaacaguucaacaucaga

SEQ ID NO: 2932298 - RNA, 19 nt, Artificial Sequence
  Description of Artificial Sequence: Synthetic oligonucleotide
caacaucucuucuauuuuc

SEQ ID NO: 2932299 - RNA, 19 nt, Artificial Sequence
  Description of Artificial Sequence: Synthetic oligonucleotide
gcuguaaaaccuuggcagg

SEQ ID NO: 2932300 - RNA, 19 nt, Artificial Sequence
  Description of Artificial Sequence: Synthetic oligonucleotide
uuucaauguguugcgguca

SEQ ID NO: 2932301 - RNA, 19 nt, Artificial Sequence
  Description of Artificial Sequence: Synthetic oligonucleotide
aaaccuuggcaggcugacc

SEQ ID NO: 2932302 - RNA, 19 nt, Artificial Sequence
  Description of Artificial Sequence: Synthetic oligonucleotide
cacauguucugaguaacag

SEQ ID NO: 2932303 - RNA, 19 nt, Artificial Sequence
  Description of Artificial Sequence: Synthetic oligonucleotide
guuucaauguguugcgguc

SEQ ID NO: 2932304 - RNA, 19 nt, Artificial Sequence
  Description of Artificial Sequence: Synthetic oligonucleotide
aguucaacaucagaaccca

SEQ ID NO: 2932305 - RNA, 19 nt, Artificial Sequence
  Description of Artificial Sequence: Synthetic oligonucleotide
gagcuguaaaaccuuggca

SEQ ID NO: 2932306 - RNA, 19 nt, Artificial Sequence
  Description of Artificial Sequence: Synthetic oligonucleotide
cuugaauaacacauguucu

SEQ ID NO: 2932307 - RNA, 19 nt, Artificial Sequence
  Description of Artificial Sequence: Synthetic oligonucleotide
acuugggacgcagaggcag

SEQ ID NO: 2932308 - RNA, 19 nt, Artificial Sequence
  Description of Artificial Sequence: Synthetic oligonucleotide
gaagagcuguaaaaccuug

SEQ ID NO: 2932309 - RNA, 19 nt, Artificial Sequence
  Description of Artificial Sequence: Synthetic oligonucleotide
ucagugugaauaccuugaa

SEQ ID NO: 2932310 - RNA, 19 nt, Artificial Sequence
  Description of Artificial Sequence: Synthetic oligonucleotide
cucuucuauuuucuccggg

SEQ ID NO: 2932311 - RNA, 19 nt, Artificial Sequence
  Description of Artificial Sequence: Synthetic oligonucleotide
gaguaacaguucaacauca

SEQ ID NO: 2932312 - RNA, 19 nt, Artificial Sequence
  Description of Artificial Sequence: Synthetic oligonucleotide
gaacccauuuucaacaucu

SEQ ID NO: 2932313 - RNA, 19 nt, Artificial Sequence
  Description of Artificial Sequence: Synthetic oligonucleotide
uguaaaaccuuggcaggcu

SEQ ID NO: 2932314 - RNA, 19 nt, Artificial Sequence
  Description of Artificial Sequence: Synthetic oligonucleotide
guaaaaccuuggcaggcug

SEQ ID NO: 2932315 - RNA, 19 nt, Artificial Sequence
  Description of Artificial Sequence: Synthetic oligonucleotide
gugugaauaccuugaauaa

SEQ ID NO: 2932316 - RNA, 19 nt, Artificial Sequence
  Description of Artificial Sequence: Synthetic oligonucleotide
cuuguugucuuguccugug

SEQ ID NO: 2932317 - RNA, 19 nt, Artificial Sequence
  Description of Artificial Sequence: Synthetic oligonucleotide
caauguguugcggucagug

SEQ ID NO: 2932318 - RNA, 19 nt, Artificial Sequence
  Description of Artificial Sequence: Synthetic oligonucleotide
cuguaaaaccuuggcaggc

SEQ ID NO: 2932319 - RNA, 19 nt, Artificial Sequence
  Description of Artificial Sequence: Synthetic oligonucleotide
auucuucguuuaucuuuac

SEQ ID NO: 2932320 - RNA, 19 nt, Artificial Sequence
  Description of Artificial Sequence: Synthetic oligonucleotide
guugcggucagugugaaua

SEQ ID NO: 2932321 - RNA, 19 nt, Artificial Sequence
  Description of Artificial Sequence: Synthetic oligonucleotide
uguagcgcucucuuaucgu

SEQ ID NO: 2932322 - RNA, 19 nt, Artificial Sequence
  Description of Artificial Sequence: Synthetic oligonucleotide
auuuucuccggggaggccu

SEQ ID NO: 2932323 - RNA, 19 nt, Artificial Sequence
  Description of Artificial Sequence: Synthetic oligonucleotide
caguacuugggacgcagag

SEQ ID NO: 2932324 - RNA, 19 nt, Artificial Sequence
  Description of Artificial Sequence: Synthetic oligonucleotide
cuauuuucuccggggaggc

SEQ ID NO: 2932325 - RNA, 19 nt, Artificial Sequence
  Description of Artificial Sequence: Synthetic oligonucleotide
uggcgcaucacaguacggc

SEQ ID NO: 2932326 - RNA, 19 nt, Artificial Sequence
  Description of Artificial Sequence: Synthetic oligonucleotide
aacccauuuucaacaucuc

SEQ ID NO: 2932327 - RNA, 19 nt, Artificial Sequence
  Description of Artificial Sequence: Synthetic oligonucleotide
cugaagagcuguaaaaccu

SEQ ID NO: 2932328 - RNA, 19 nt, Artificial Sequence
  Description of Artificial Sequence: Synthetic oligonucleotide
cauguucugaguaacaguu

SEQ ID NO: 2932329 - RNA, 19 nt, Artificial Sequence
  Description of Artificial Sequence: Synthetic oligonucleotide
uuucuguuagaagaucguu

SEQ ID NO: 2932330 - RNA, 19 nt, Artificial Sequence
  Description of Artificial Sequence: Synthetic oligonucleotide
cugaguaacaguucaacau

SEQ ID NO: 2932331 - RNA, 19 nt, Artificial Sequence
  Description of Artificial Sequence: Synthetic oligonucleotide
cuugggacgcagaggcagg

SEQ ID NO: 2932332 - RNA, 19 nt, Artificial Sequence
  Description of Artificial Sequence: Synthetic oligonucleotide
cugugcaguguucugaaga

SEQ ID NO: 2932333 - RNA, 19 nt, Artificial Sequence
  Description of Artificial Sequence: Synthetic oligonucleotide
aucacaguacggcacguuu

SEQ ID NO: 2932334 - RNA, 19 nt, Artificial Sequence
  Description of Artificial Sequence: Synthetic oligonucleotide
aguaacaguucaacaucag

SEQ ID NO: 2932335 - RNA, 19 nt, Artificial Sequence
  Description of Artificial Sequence: Synthetic oligonucleotide
cuucguuuaucuuuacucu

SEQ ID NO: 2932336 - RNA, 19 nt, Artificial Sequence
  Description of Artificial Sequence: Synthetic oligonucleotide
gaagaucguuccuggggac

SEQ ID NO: 2932337 - RNA, 19 nt, Artificial Sequence
  Description of Artificial Sequence: Synthetic oligonucleotide
gaccaguuucaauguguug

SEQ ID NO: 2932338 - RNA, 19 nt, Artificial Sequence
  Description of Artificial Sequence: Synthetic oligonucleotide
auaccuugaauaacacaug

SEQ ID NO: 2932339 - RNA, 19 nt, Artificial Sequence
  Description of Artificial Sequence: Synthetic oligonucleotide
uggggaccaguuucaaugu

SEQ ID NO: 2932340 - RNA, 19 nt, Artificial Sequence
  Description of Artificial Sequence: Synthetic oligonucleotide
uaucuuuacucuggcuucu

SEQ ID NO: 2932341 - RNA, 19 nt, Artificial Sequence
  Description of Artificial Sequence: Synthetic oligonucleotide
acaucagaacccauuuuca

SEQ ID NO: 2932342 - RNA, 19 nt, Artificial Sequence
  Description of Artificial Sequence: Synthetic oligonucleotide
ucacaguacggcacguuuu

SEQ ID NO: 2932343 - RNA, 19 nt, Artificial Sequence
  Description of Artificial Sequence: Synthetic oligonucleotide
caguacggcacguuuucug

SEQ ID NO: 2932344 - RNA, 19 nt, Artificial Sequence
  Description of Artificial Sequence: Synthetic oligonucleotide
ccaguuucaauguguugcg

SEQ ID NO: 2932345 - RNA, 19 nt, Artificial Sequence
  Description of Artificial Sequence: Synthetic oligonucleotide
uuggcgcaucacaguacgg

SEQ ID NO: 2932346 - RNA, 19 nt, Artificial Sequence
  Description of Artificial Sequence: Synthetic oligonucleotide
gaaacccuguuuacgaaaa

SEQ ID NO: 2932347 - RNA, 19 nt, Artificial Sequence
  Description of Artificial Sequence: Synthetic oligonucleotide
cuucuauuuucuccgggga

SEQ ID NO: 2932348 - RNA, 19 nt, Artificial Sequence
  Description of Artificial Sequence: Synthetic oligonucleotide
uuccuggggaccaguuuca

SEQ ID NO: 2932349 - RNA, 19 nt, Artificial Sequence
  Description of Artificial Sequence: Synthetic oligonucleotide
cacaguacggcacguuuuc

SEQ ID NO: 2932350 - RNA, 19 nt, Artificial Sequence
  Description of Artificial Sequence: Synthetic oligonucleotide
uuguccugugcaguguucu

SEQ ID NO: 2932351 - RNA, 19 nt, Artificial Sequence
  Description of Artificial Sequence: Synthetic oligonucleotide
cuuguagcgcucucuuauc

SEQ ID NO: 2932352 - RNA, 19 nt, Artificial Sequence
  Description of Artificial Sequence: Synthetic oligonucleotide
uugucuuguccugugcagu

SEQ ID NO: 2932353 - RNA, 19 nt, Artificial Sequence
  Description of Artificial Sequence: Synthetic oligonucleotide
ucuuguccugugcaguguu

SEQ ID NO: 2932354 - RNA, 19 nt, Artificial Sequence
  Description of Artificial Sequence: Synthetic oligonucleotide
uccugugcaguguucugaa

SEQ ID NO: 2932355 - RNA, 19 nt, Artificial Sequence
  Description of Artificial Sequence: Synthetic oligonucleotide
uugcggucagugugaauac

SEQ ID NO: 2932356 - RNA, 19 nt, Artificial Sequence
  Description of Artificial Sequence: Synthetic oligonucleotide
aguaccaggauaggcucca

SEQ ID NO: 2932357 - RNA, 19 nt, Artificial Sequence
  Description of Artificial Sequence: Synthetic oligonucleotide
acggcacguuuucuguuag

SEQ ID NO: 2932358 - RNA, 19 nt, Artificial Sequence
  Description of Artificial Sequence: Synthetic oligonucleotide
uacggcacguuuucuguua

SEQ ID NO: 2932359 - RNA, 19 nt, Artificial Sequence
  Description of Artificial Sequence: Synthetic oligonucleotide
caucagaacccauuuucaa

SEQ ID NO: 2932360 - RNA, 19 nt, Artificial Sequence
  Description of Artificial Sequence: Synthetic oligonucleotide
cuuuacucuggcuucuugu

SEQ ID NO: 2932361 - RNA, 19 nt, Artificial Sequence
  Description of Artificial Sequence: Synthetic oligonucleotide
caguuucaauguguugcgg

SEQ ID NO: 2932362 - RNA, 19 nt, Artificial Sequence
  Description of Artificial Sequence: Synthetic oligonucleotide
uuucaacaucucuucuauu

SEQ ID NO: 2932363 - RNA, 19 nt, Artificial Sequence
  Description of Artificial Sequence: Synthetic oligonucleotide
uaccaggauaggcuccaaa

SEQ ID NO: 2932364 - RNA, 19 nt, Artificial Sequence
  Description of Artificial Sequence: Synthetic oligonucleotide
gaguaccaggauaggcucc

SEQ ID NO: 2932365 - RNA, 19 nt, Artificial Sequence
  Description of Artificial Sequence: Synthetic oligonucleotide
uuuucuccggggaggccuc

SEQ ID NO: 2932366 - RNA, 19 nt, Artificial Sequence
  Description of Artificial Sequence: Synthetic oligonucleotide
acuuguugucuuguccugu

SEQ ID NO: 2932367 - RNA, 19 nt, Artificial Sequence
  Description of Artificial Sequence: Synthetic oligonucleotide
gcacguuuucuguuagaag

SEQ ID NO: 2932368 - RNA, 19 nt, Artificial Sequence
  Description of Artificial Sequence: Synthetic oligonucleotide
agaucguuccuggggacca

SEQ ID NO: 2932369 - RNA, 19 nt, Artificial Sequence
  Description of Artificial Sequence: Synthetic oligonucleotide
uucuuguagcgcucucuua

SEQ ID NO: 2932370 - RNA, 19 nt, Artificial Sequence
  Description of Artificial Sequence: Synthetic oligonucleotide
ugcggucagugugaauacc

SEQ ID NO: 2932371 - RNA, 19 nt, Artificial Sequence
  Description of Artificial Sequence: Synthetic oligonucleotide
cuuguccugugcaguguuc

SEQ ID NO: 2932372 - RNA, 19 nt, Artificial Sequence
  Description of Artificial Sequence: Synthetic oligonucleotide
gggacgcagaggcaggcag

SEQ ID NO: 2932373 - RNA, 19 nt, Artificial Sequence
  Description of Artificial Sequence: Synthetic oligonucleotide
guuuaucuuuacucuggcu

SEQ ID NO: 2932374 - RNA, 19 nt, Artificial Sequence
  Description of Artificial Sequence: Synthetic oligonucleotide
uagcgcucucuuaucguuu

SEQ ID NO: 2932375 - RNA, 19 nt, Artificial Sequence
  Description of Artificial Sequence: Synthetic oligonucleotide
acacauguucugaguaaca

SEQ ID NO: 2932376 - RNA, 19 nt, Artificial Sequence
  Description of Artificial Sequence: Synthetic oligonucleotide
agcgcucucuuaucguuuu

SEQ ID NO: 2932377 - RNA, 19 nt, Artificial Sequence
  Description of Artificial Sequence: Synthetic oligonucleotide
uugggacgcagaggcaggc

SEQ ID NO: 2932378 - RNA, 19 nt, Artificial Sequence
  Description of Artificial Sequence: Synthetic oligonucleotide
cuuggcaggcugacccaug

SEQ ID NO: 2932379 - RNA, 19 nt, Artificial Sequence
  Description of Artificial Sequence: Synthetic oligonucleotide
gagcgaguaccaggauagg

SEQ ID NO: 2932380 - RNA, 19 nt, Artificial Sequence
  Description of Artificial Sequence: Synthetic oligonucleotide
cguuuaucuuuacucuggc

SEQ ID NO: 2932381 - RNA, 19 nt, Artificial Sequence
  Description of Artificial Sequence: Synthetic oligonucleotide
ggcgcaucacaguacggca

SEQ ID NO: 2932382 - RNA, 19 nt, Artificial Sequence
  Description of Artificial Sequence: Synthetic oligonucleotide
acaguacggcacguuuucu

SEQ ID NO: 2932383 - RNA, 19 nt, Artificial Sequence
  Description of Artificial Sequence: Synthetic oligonucleotide
ucaauguguugcggucagu

SEQ ID NO: 2932384 - RNA, 19 nt, Artificial Sequence
  Description of Artificial Sequence: Synthetic oligonucleotide
ggcacguuuucuguuagaa

SEQ ID NO: 2932385 - RNA, 19 nt, Artificial Sequence
  Description of Artificial Sequence: Synthetic oligonucleotide
gaucguuccuggggaccag

SEQ ID NO: 2932386 - RNA, 19 nt, Artificial Sequence
  Description of Artificial Sequence: Synthetic oligonucleotide
guccugugcaguguucuga

SEQ ID NO: 2932387 - RNA, 19 nt, Artificial Sequence
  Description of Artificial Sequence: Synthetic oligonucleotide
uccggggaggccucauuuu

SEQ ID NO: 2932388 - RNA, 19 nt, Artificial Sequence
  Description of Artificial Sequence: Synthetic oligonucleotide
uggcuucuuguagcgcucu

SEQ ID NO: 2932389 - RNA, 19 nt, Artificial Sequence
  Description of Artificial Sequence: Synthetic oligonucleotide
cgcaucacaguacggcacg

SEQ ID NO: 2932390 - RNA, 19 nt, Artificial Sequence
  Description of Artificial Sequence: Synthetic oligonucleotide
guucugaguaacaguucaa

SEQ ID NO: 2932391 - RNA, 19 nt, Artificial Sequence
  Description of Artificial Sequence: Synthetic oligonucleotide
cucuggcuucuuguagcgc

SEQ ID NO: 2932392 - RNA, 19 nt, Artificial Sequence
  Description of Artificial Sequence: Synthetic oligonucleotide
ggggaccaguuucaaugug

SEQ ID NO: 2932393 - RNA, 19 nt, Artificial Sequence
  Description of Artificial Sequence: Synthetic oligonucleotide
cgaguaccaggauaggcuc

SEQ ID NO: 2932394 - RNA, 19 nt, Artificial Sequence
  Description of Artificial Sequence: Synthetic oligonucleotide
aguguucugaagagcugua

SEQ ID NO: 2932395 - RNA, 19 nt, Artificial Sequence
  Description of Artificial Sequence: Synthetic oligonucleotide
ugggacgcagaggcaggca

SEQ ID NO: 2932396 - RNA, 19 nt, Artificial Sequence
  Description of Artificial Sequence: Synthetic oligonucleotide
guagcgcucucuuaucguu

SEQ ID NO: 2932397 - RNA, 19 nt, Artificial Sequence
  Description of Artificial Sequence: Synthetic oligonucleotide
uguugcggucagugugaau

SEQ ID NO: 2932398 - RNA, 19 nt, Artificial Sequence
  Description of Artificial Sequence: Synthetic oligonucleotide
ucuccggggaggccucauu

SEQ ID NO: 2932399 - RNA, 19 nt, Artificial Sequence
  Description of Artificial Sequence: Synthetic oligonucleotide
aucguuccuggggaccagu

SEQ ID NO: 2932400 - RNA, 19 nt, Artificial Sequence
  Description of Artificial Sequence: Synthetic oligonucleotide
cuucuuguagcgcucucuu

SEQ ID NO: 2932401 - RNA, 19 nt, Artificial Sequence
  Description of Artificial Sequence: Synthetic oligonucleotide
gcgaguaccaggauaggcu

SEQ ID NO: 2932402 - RNA, 19 nt, Artificial Sequence
  Description of Artificial Sequence: Synthetic oligonucleotide
cuguuagaagaucguuccu

SEQ ID NO: 2932403 - RNA, 19 nt, Artificial Sequence
  Description of Artificial Sequence: Synthetic oligonucleotide
cccaguacuugggacgcag

SEQ ID NO: 2932404 - RNA, 19 nt, Artificial Sequence
  Description of Artificial Sequence: Synthetic oligonucleotide
ccugugcaguguucugaag

SEQ ID NO: 2932405 - RNA, 19 nt, Artificial Sequence
  Description of Artificial Sequence: Synthetic oligonucleotide
uuucuccggggaggccuca

SEQ ID NO: 2932406 - RNA, 19 nt, Artificial Sequence
  Description of Artificial Sequence: Synthetic oligonucleotide
aucuuuacucuggcuucuu

SEQ ID NO: 2932407 - RNA, 19 nt, Artificial Sequence
  Description of Artificial Sequence: Synthetic oligonucleotide
gggaccaguuucaaugugu

SEQ ID NO: 2932408 - RNA, 19 nt, Artificial Sequence
  Description of Artificial Sequence: Synthetic oligonucleotide
acgcagaggcaggcagauc

SEQ ID NO: 2932409 - RNA, 19 nt, Artificial Sequence
  Description of Artificial Sequence: Synthetic oligonucleotide
gacgcagaggcaggcagau

SEQ ID NO: 2932410 - RNA, 19 nt, Artificial Sequence
  Description of Artificial Sequence: Synthetic oligonucleotide
cagaacccauuuucaacau

SEQ ID NO: 2932411 - RNA, 19 nt, Artificial Sequence
  Description of Artificial Sequence: Synthetic oligonucleotide
caacaucagaacccauuuu

SEQ ID NO: 2932412 - RNA, 19 nt, Artificial Sequence
  Description of Artificial Sequence: Synthetic oligonucleotide
gcgcaucacaguacggcac

SEQ ID NO: 2932413 - RNA, 19 nt, Artificial Sequence
  Description of Artificial Sequence: Synthetic oligonucleotide
guacggcacguuuucuguu

SEQ ID NO: 2932414 - RNA, 19 nt, Artificial Sequence
  Description of Artificial Sequence: Synthetic oligonucleotide
gcggucagugugaauaccu

SEQ ID NO: 2932415 - RNA, 19 nt, Artificial Sequence
  Description of Artificial Sequence: Synthetic oligonucleotide
ggcuucuuguagcgcucuc

SEQ ID NO: 2932416 - RNA, 19 nt, Artificial Sequence
  Description of Artificial Sequence: Synthetic oligonucleotide
uucuccggggaggccucau

SEQ ID NO: 2932417 - RNA, 19 nt, Artificial Sequence
  Description of Artificial Sequence: Synthetic oligonucleotide
gcuucuuguagcgcucucu

SEQ ID NO: 2932418 - RNA, 19 nt, Artificial Sequence
  Description of Artificial Sequence: Synthetic oligonucleotide
ggacgcagaggcaggcaga

SEQ ID NO: 2932419 - RNA, 19 nt, Artificial Sequence
  Description of Artificial Sequence: Synthetic oligonucleotide
guguugcggucagugugaa

SEQ ID NO: 2932420 - RNA, 19 nt, Artificial Sequence
  Description of Artificial Sequence: Synthetic oligonucleotide
ggaccaguuucaauguguu

SEQ ID NO: 2932421 - RNA, 19 nt, Artificial Sequence
  Description of Artificial Sequence: Synthetic oligonucleotide
ccaguacuugggacgcaga

SEQ ID NO: 2932422 - RNA, 19 nt, Artificial Sequence
  Description of Artificial Sequence: Synthetic oligonucleotide
cuccggggaggccucauuu

SEQ ID NO: 2932423 - RNA, 19 nt, Artificial Sequence
  Description of Artificial Sequence: Synthetic oligonucleotide
guaccaggauaggcuccaa

SEQ ID NO: 2932424 - RNA, 19 nt, Artificial Sequence
  Description of Artificial Sequence: Synthetic oligonucleotide
caucacaguacggcacguu

SEQ ID NO: 2932425 - RNA, 19 nt, Artificial Sequence
  Description of Artificial Sequence: Synthetic oligonucleotide
gcaucacaguacggcacgu

SEQ ID NO: 2932426 - RNA, 19 nt, Artificial Sequence
  Description of Artificial Sequence: Synthetic oligonucleotide
cggcacguuuucuguuaga

SEQ ID NO: 2932427 - RNA, 19 nt, Artificial Sequence
  Description of Artificial Sequence: Synthetic oligonucleotide
cggucagugugaauaccuu

SEQ ID NO: 2932428 - RNA, 19 nt, Artificial Sequence
  Description of Artificial Sequence: Synthetic oligonucleotide
cguuccuggggaccaguuu

SEQ ID NO: 2932429 - RNA, 19 nt, Artificial Sequence
  Description of Artificial Sequence: Synthetic oligonucleotide
uguggaggcaggaagagcg

SEQ ID NO: 2932430 - RNA, 19 nt, Artificial Sequence
  Description of Artificial Sequence: Synthetic oligonucleotide
ugcacggagaugcccagcg

SEQ ID NO: 2932431 - RNA, 19 nt, Artificial Sequence
  Description of Artificial Sequence: Synthetic oligonucleotide
cuucuguggaggcaggaag

SEQ ID NO: 2932432 - RNA, 19 nt, Artificial Sequence
  Description of Artificial Sequence: Synthetic oligonucleotide
agcggcucgucccaacagc

SEQ ID NO: 2932433 - RNA, 19 nt, Artificial Sequence
  Description of Artificial Sequence: Synthetic oligonucleotide
caggacgccaccuucugug

SEQ ID NO: 2932434 - RNA, 19 nt, Artificial Sequence
  Description of Artificial Sequence: Synthetic oligonucleotide
ucuguggaggcaggaagag

SEQ ID NO: 2932435 - RNA, 19 nt, Artificial Sequence
  Description of Artificial Sequence: Synthetic oligonucleotide
cacggagaugcccagcggc

SEQ ID NO: 2932436 - RNA, 19 nt, Artificial Sequence
  Description of Artificial Sequence: Synthetic oligonucleotide
gacgccaccuucuguggag

SEQ ID NO: 2932437 - RNA, 19 nt, Artificial Sequence
  Description of Artificial Sequence: Synthetic oligonucleotide
ugacaggacgccaccuucu

SEQ ID NO: 2932438 - RNA, 19 nt, Artificial Sequence
  Description of Artificial Sequence: Synthetic oligonucleotide
ucugacaggacgccaccuu

SEQ ID NO: 2932439 - RNA, 19 nt, Artificial Sequence
  Description of Artificial Sequence: Synthetic oligonucleotide
gacaggacgccaccuucug

SEQ ID NO: 2932440 - RNA, 19 nt, Artificial Sequence
  Description of Artificial Sequence: Synthetic oligonucleotide
ucgcgcacggcacgcgccg

SEQ ID NO: 2932441 - RNA, 19 nt, Artificial Sequence
  Description of Artificial Sequence: Synthetic oligonucleotide
cugacaggacgccaccuuc

SEQ ID NO: 2932442 - RNA, 19 nt, Artificial Sequence
  Description of Artificial Sequence: Synthetic oligonucleotide
ggagaugcccagcggcucg

SEQ ID NO: 2932443 - RNA, 19 nt, Artificial Sequence
  Description of Artificial Sequence: Synthetic oligonucleotide
ggcucgucccaacagcugc

SEQ ID NO: 2932444 - RNA, 19 nt, Artificial Sequence
  Description of Artificial Sequence: Synthetic oligonucleotide
gucccaacagcugcggccc

SEQ ID NO: 2932445 - RNA, 19 nt, Artificial Sequence
  Description of Artificial Sequence: Synthetic oligonucleotide
ucgucccaacagcugcggc

SEQ ID NO: 2932446 - RNA, 19 nt, Artificial Sequence
  Description of Artificial Sequence: Synthetic oligonucleotide
acaggacgccaccuucugu

SEQ ID NO: 2932447 - RNA, 19 nt, Artificial Sequence
  Description of Artificial Sequence: Synthetic oligonucleotide
cacggcacgcgccgcaccc

SEQ ID NO: 2932448 - RNA, 19 nt, Artificial Sequence
  Description of Artificial Sequence: Synthetic oligonucleotide
ucccaacagcugcggcccg

SEQ ID NO: 2932449 - RNA, 19 nt, Artificial Sequence
  Description of Artificial Sequence: Synthetic oligonucleotide
ugcccagcggcucguccca

SEQ ID NO: 2932450 - RNA, 19 nt, Artificial Sequence
  Description of Artificial Sequence: Synthetic oligonucleotide
cucgcgcacggcacgcgcc

SEQ ID NO: 2932451 - RNA, 19 nt, Artificial Sequence
  Description of Artificial Sequence: Synthetic oligonucleotide
cucgucccaacagcugcgg

SEQ ID NO: 2932452 - RNA, 19 nt, Artificial Sequence
  Description of Artificial Sequence: Synthetic oligonucleotide
caccuucuguggaggcagg

SEQ ID NO: 2932453 - RNA, 19 nt, Artificial Sequence
  Description of Artificial Sequence: Synthetic oligonucleotide
acgccaccuucuguggagg

SEQ ID NO: 2932454 - RNA, 19 nt, Artificial Sequence
  Description of Artificial Sequence: Synthetic oligonucleotide
cagcggcucgucccaacag

SEQ ID NO: 2932455 - RNA, 19 nt, Artificial Sequence
  Description of Artificial Sequence: Synthetic oligonucleotide
acggagaugcccagcggcu

SEQ ID NO: 2932456 - RNA, 19 nt, Artificial Sequence
  Description of Artificial Sequence: Synthetic oligonucleotide
cgucccaacagcugcggcc

SEQ ID NO: 2932457 - RNA, 19 nt, Artificial Sequence
  Description of Artificial Sequence: Synthetic oligonucleotide
agcugcggcccgcgggcuc

SEQ ID NO: 2932458 - RNA, 19 nt, Artificial Sequence
  Description of Artificial Sequence: Synthetic oligonucleotide
caacagcugcggcccgcgg

SEQ ID NO: 2932459 - RNA, 19 nt, Artificial Sequence
  Description of Artificial Sequence: Synthetic oligonucleotide
gcacggagaugcccagcgg

SEQ ID NO: 2932460 - RNA, 19 nt, Artificial Sequence
  Description of Artificial Sequence: Synthetic oligonucleotide
accuucuguggaggcagga

SEQ ID NO: 2932461 - RNA, 19 nt, Artificial Sequence
  Description of Artificial Sequence: Synthetic oligonucleotide
gcucgucccaacagcugcg

SEQ ID NO: 2932462 - RNA, 19 nt, Artificial Sequence
  Description of Artificial Sequence: Synthetic oligonucleotide
gcagccgcccgccucgggc

SEQ ID NO: 2932463 - RNA, 19 nt, Artificial Sequence
  Description of Artificial Sequence: Synthetic oligonucleotide
agaugcccagcggcucguc

SEQ ID NO: 2932464 - RNA, 19 nt, Artificial Sequence
  Description of Artificial Sequence: Synthetic oligonucleotide
agcagccgcccgccucggg

SEQ ID NO: 2932465 - RNA, 19 nt, Artificial Sequence
  Description of Artificial Sequence: Synthetic oligonucleotide
cccgccucgggcucguggc

SEQ ID NO: 2932466 - RNA, 19 nt, Artificial Sequence
  Description of Artificial Sequence: Synthetic oligonucleotide
agccgcccgccucgggcuc

SEQ ID NO: 2932467 - RNA, 19 nt, Artificial Sequence
  Description of Artificial Sequence: Synthetic oligonucleotide
ggcccucgcgcacggcacg

SEQ ID NO: 2932468 - RNA, 19 nt, Artificial Sequence
  Description of Artificial Sequence: Synthetic oligonucleotide
ggacgccaccuucugugga

SEQ ID NO: 2932469 - RNA, 19 nt, Artificial Sequence
  Description of Artificial Sequence: Synthetic oligonucleotide
ccaacagcugcggcccgcg

SEQ ID NO: 2932470 - RNA, 19 nt, Artificial Sequence
  Description of Artificial Sequence: Synthetic oligonucleotide
ccgugcacggagaugccca

SEQ ID NO: 2932471 - RNA, 19 nt, Artificial Sequence
  Description of Artificial Sequence: Synthetic oligonucleotide
gcccgccucgggcucgugg

SEQ ID NO: 2932472 - RNA, 19 nt, Artificial Sequence
  Description of Artificial Sequence: Synthetic oligonucleotide
gccgugcacggagaugccc

SEQ ID NO: 2932473 - RNA, 19 nt, Artificial Sequence
  Description of Artificial Sequence: Synthetic oligonucleotide
cgugcacggagaugcccag

SEQ ID NO: 2932474 - RNA, 19 nt, Artificial Sequence
  Description of Artificial Sequence: Synthetic oligonucleotide
ccucgcgcacggcacgcgc

SEQ ID NO: 2932475 - RNA, 19 nt, Artificial Sequence
  Description of Artificial Sequence: Synthetic oligonucleotide
gccaccuucuguggaggca

SEQ ID NO: 2932476 - RNA, 19 nt, Artificial Sequence
  Description of Artificial Sequence: Synthetic oligonucleotide
gagaugcccagcggcucgu

SEQ ID NO: 2932477 - RNA, 19 nt, Artificial Sequence
  Description of Artificial Sequence: Synthetic oligonucleotide
cucugacaggacgccaccu

SEQ ID NO: 2932478 - RNA, 19 nt, Artificial Sequence
  Description of Artificial Sequence: Synthetic oligonucleotide
ccagcggcucgucccaaca

SEQ ID NO: 2932479 - RNA, 19 nt, Artificial Sequence
  Description of Artificial Sequence: Synthetic oligonucleotide
gcacggcacgcgccgcacc

SEQ ID NO: 2932480 - RNA, 19 nt, Artificial Sequence
  Description of Artificial Sequence: Synthetic oligonucleotide
cccaacagcugcggcccgc

SEQ ID NO: 2932481 - RNA, 19 nt, Artificial Sequence
  Description of Artificial Sequence: Synthetic oligonucleotide
cagcagccgcccgccucgg

SEQ ID NO: 2932482 - RNA, 19 nt, Artificial Sequence
  Description of Artificial Sequence: Synthetic oligonucleotide
ccuucuguggaggcaggaa

SEQ ID NO: 2932483 - RNA, 19 nt, Artificial Sequence
  Description of Artificial Sequence: Synthetic oligonucleotide
cgccaccuucuguggaggc

SEQ ID NO: 2932484 - RNA, 19 nt, Artificial Sequence
  Description of Artificial Sequence: Synthetic oligonucleotide
cccagcggcucgucccaac

SEQ ID NO: 2932485 - RNA, 19 nt, Artificial Sequence
  Description of Artificial Sequence: Synthetic oligonucleotide
cagccgcccgccucgggcu

SEQ ID NO: 2932486 - RNA, 19 nt, Artificial Sequence
  Description of Artificial Sequence: Synthetic oligonucleotide
cggcucgucccaacagcug

SEQ ID NO: 2932487 - RNA, 19 nt, Artificial Sequence
  Description of Artificial Sequence: Synthetic oligonucleotide
gcggcucgucccaacagcu

SEQ ID NO: 2932488 - RNA, 19 nt, Artificial Sequence
  Description of Artificial Sequence: Synthetic oligonucleotide
ccgccucgggcucguggcc

SEQ ID NO: 2932489 - RNA, 19 nt, Artificial Sequence
  Description of Artificial Sequence: Synthetic oligonucleotide
cgccucgggcucguggccg

SEQ ID NO: 2932490 - RNA, 19 nt, Artificial Sequence
  Description of Artificial Sequence: Synthetic oligonucleotide
gcccucgcgcacggcacgc

SEQ ID NO: 2932491 - RNA, 19 nt, Artificial Sequence
  Description of Artificial Sequence: Synthetic oligonucleotide
cggagaugcccagcggcuc

SEQ ID NO: 2932492 - RNA, 19 nt, Artificial Sequence
  Description of Artificial Sequence: Synthetic oligonucleotide
gcgcacggcacgcgccgca

SEQ ID NO: 2932493 - RNA, 19 nt, Artificial Sequence
  Description of Artificial Sequence: Synthetic oligonucleotide
gccgcccgccucgggcucg

SEQ ID NO: 2932494 - RNA, 19 nt, Artificial Sequence
  Description of Artificial Sequence: Synthetic oligonucleotide
cccucgcgcacggcacgcg

SEQ ID NO: 2932495 - RNA, 19 nt, Artificial Sequence
  Description of Artificial Sequence: Synthetic oligonucleotide
cggcccucgcgcacggcac

SEQ ID NO: 2932496 - RNA, 19 nt, Artificial Sequence
  Description of Artificial Sequence: Synthetic oligonucleotide
gccucgggcucguggccgu

SEQ ID NO: 2932497 - RNA, 19 nt, Artificial Sequence
  Description of Artificial Sequence: Synthetic oligonucleotide
cgcacggcacgcgccgcac

SEQ ID NO: 2932498 - RNA, 19 nt, Artificial Sequence
  Description of Artificial Sequence: Synthetic oligonucleotide
cgcgcacggcacgcgccgc

SEQ ID NO: 2932499 - RNA, 19 nt, Artificial Sequence
  Description of Artificial Sequence: Synthetic oligonucleotide
ccucgggcucguggccguc

SEQ ID NO: 2932500 - RNA, 19 nt, Artificial Sequence
  Description of Artificial Sequence: Synthetic oligonucleotide
gcccagcggcucgucccaa

SEQ ID NO: 2932501 - RNA, 19 nt, Artificial Sequence
  Description of Artificial Sequence: Synthetic oligonucleotide
cgcccgccucgggcucgug

SEQ ID NO: 2932502 - RNA, 19 nt, Artificial Sequence
  Description of Artificial Sequence: Synthetic oligonucleotide
ccgcccgccucgggcucgu

SEQ ID NO: 2932503 - RNA, 19 nt, Artificial Sequence
  Description of Artificial Sequence: Synthetic oligonucleotide
aauuauuaccgauugagcc

SEQ ID NO: 2932504 - RNA, 19 nt, Artificial Sequence
  Description of Artificial Sequence: Synthetic oligonucleotide
ucuucuuaaaccuagaacc

SEQ ID NO: 2932505 - RNA, 19 nt, Artificial Sequence
  Description of Artificial Sequence: Synthetic oligonucleotide
aauggcuugauaaauuugc

SEQ ID NO: 2932506 - RNA, 19 nt, Artificial Sequence
  Description of Artificial Sequence: Synthetic oligonucleotide
uaagcaaucuucuuaaacc

SEQ ID NO: 2932507 - RNA, 19 nt, Artificial Sequence
  Description of Artificial Sequence: Synthetic oligonucleotide
ucagguauaaacugugucg

SEQ ID NO: 2932508 - RNA, 19 nt, Artificial Sequence
  Description of Artificial Sequence: Synthetic oligonucleotide
uccacaaugacuuaauggc

SEQ ID NO: 2932509 - RNA, 19 nt, Artificial Sequence
  Description of Artificial Sequence: Synthetic oligonucleotide
auuauuaccgauugagccg

SEQ ID NO: 2932510 - RNA, 19 nt, Artificial Sequence
  Description of Artificial Sequence: Synthetic oligonucleotide
ucaucuuuguugcagaggc

SEQ ID NO: 2932511 - RNA, 19 nt, Artificial Sequence
  Description of Artificial Sequence: Synthetic oligonucleotide
auaagcaaucuucuuaaac

SEQ ID NO: 2932512 - RNA, 19 nt, Artificial Sequence
  Description of Artificial Sequence: Synthetic oligonucleotide
uaucuuugcaauuauuacc

SEQ ID NO: 2932513 - RNA, 19 nt, Artificial Sequence
  Description of Artificial Sequence: Synthetic oligonucleotide
uuuaucuucuggaugagac

SEQ ID NO: 2932514 - RNA, 19 nt, Artificial Sequence
  Description of Artificial Sequence: Synthetic oligonucleotide
uccgauuucaucuuuguug

SEQ ID NO: 2932515 - RNA, 19 nt, Artificial Sequence
  Description of Artificial Sequence: Synthetic oligonucleotide
ucuacuucagcuucuagug

SEQ ID NO: 2932516 - RNA, 19 nt, Artificial Sequence
  Description of Artificial Sequence: Synthetic oligonucleotide
aucuucuuaaaccuagaac

SEQ ID NO: 2932517 - RNA, 19 nt, Artificial Sequence
  Description of Artificial Sequence: Synthetic oligonucleotide
ucuagugcuguacauaucu

SEQ ID NO: 2932518 - RNA, 19 nt, Artificial Sequence
  Description of Artificial Sequence: Synthetic oligonucleotide
uguuuuggcauauauuuca

SEQ ID NO: 2932519 - RNA, 19 nt, Artificial Sequence
  Description of Artificial Sequence: Synthetic oligonucleotide
uaaauuugcuggcuugugg

SEQ ID NO: 2932520 - RNA, 19 nt, Artificial Sequence
  Description of Artificial Sequence: Synthetic oligonucleotide
cuggaaaagacacugagug

SEQ ID NO: 2932521 - RNA, 19 nt, Artificial Sequence
  Description of Artificial Sequence: Synthetic oligonucleotide
uaaaccuagaaccuuuucu

SEQ ID NO: 2932522 - RNA, 19 nt, Artificial Sequence
  Description of Artificial Sequence: Synthetic oligonucleotide
aaugaggcuaauccuagug

SEQ ID NO: 2932523 - RNA, 19 nt, Artificial Sequence
  Description of Artificial Sequence: Synthetic oligonucleotide
uggcauauauuucaucagg

SEQ ID NO: 2932524 - RNA, 19 nt, Artificial Sequence
  Description of Artificial Sequence: Synthetic oligonucleotide
ugacuuaauggcuugauaa

SEQ ID NO: 2932525 - RNA, 19 nt, Artificial Sequence
  Description of Artificial Sequence: Synthetic oligonucleotide
aaacaguugcuccuaauga

SEQ ID NO: 2932526 - RNA, 19 nt, Artificial Sequence
  Description of Artificial Sequence: Synthetic oligonucleotide
aaauuugcuggcuuguggu

SEQ ID NO: 2932527 - RNA, 19 nt, Artificial Sequence
  Description of Artificial Sequence: Synthetic oligonucleotide
aucuuugcaauuauuaccg

SEQ ID NO: 2932528 - RNA, 19 nt, Artificial Sequence
  Description of Artificial Sequence: Synthetic oligonucleotide
aagcaaucuucuuaaaccu

SEQ ID NO: 2932529 - RNA, 19 nt, Artificial Sequence
  Description of Artificial Sequence: Synthetic oligonucleotide
uucuggaaaagacacugag

SEQ ID NO: 2932530 - RNA, 19 nt, Artificial Sequence
  Description of Artificial Sequence: Synthetic oligonucleotide
uuaucuuugcaauuauuac

SEQ ID NO: 2932531 - RNA, 19 nt, Artificial Sequence
  Description of Artificial Sequence: Synthetic oligonucleotide
cuguccaugauccaggagc

SEQ ID NO: 2932532 - RNA, 19 nt, Artificial Sequence
  Description of Artificial Sequence: Synthetic oligonucleotide
accuagaaccuuuucuugc

SEQ ID NO: 2932533 - RNA, 19 nt, Artificial Sequence
  Description of Artificial Sequence: Synthetic oligonucleotide
cuccuaaugaggcuaaucc

SEQ ID NO: 2932534 - RNA, 19 nt, Artificial Sequence
  Description of Artificial Sequence: Synthetic oligonucleotide
uuauuaccgauugagccgg

SEQ ID NO: 2932535 - RNA, 19 nt, Artificial Sequence
  Description of Artificial Sequence: Synthetic oligonucleotide
guccacaaugacuuaaugg

SEQ ID NO: 2932536 - RNA, 19 nt, Artificial Sequence
  Description of Artificial Sequence: Synthetic oligonucleotide
aaguucuucuggaaaagac

SEQ ID NO: 2932537 - RNA, 19 nt, Artificial Sequence
  Description of Artificial Sequence: Synthetic oligonucleotide
uucuggaugagacugucca

SEQ ID NO: 2932538 - RNA, 19 nt, Artificial Sequence
  Description of Artificial Sequence: Synthetic oligonucleotide
aaaccuagaaccuuuucuu

SEQ ID NO: 2932539 - RNA, 19 nt, Artificial Sequence
  Description of Artificial Sequence: Synthetic oligonucleotide
uaucuuuaucuucuggaug

SEQ ID NO: 2932540 - RNA, 19 nt, Artificial Sequence
  Description of Artificial Sequence: Synthetic oligonucleotide
uugcaauuauuaccgauug

SEQ ID NO: 2932541 - RNA, 19 nt, Artificial Sequence
  Description of Artificial Sequence: Synthetic oligonucleotide
uguugcagaggcaaguucu

SEQ ID NO: 2932542 - RNA, 19 nt, Artificial Sequence
  Description of Artificial Sequence: Synthetic oligonucleotide
augagacuguccaugaucc

SEQ ID NO: 2932543 - RNA, 19 nt, Artificial Sequence
  Description of Artificial Sequence: Synthetic oligonucleotide
cuuccuuugguucugggag

SEQ ID NO: 2932544 - RNA, 19 nt, Artificial Sequence
  Description of Artificial Sequence: Synthetic oligonucleotide
cuuggggucagguauaaac

SEQ ID NO: 2932545 - RNA, 19 nt, Artificial Sequence
  Description of Artificial Sequence: Synthetic oligonucleotide
uaguggauaagcaaucuuc

SEQ ID NO: 2932546 - RNA, 19 nt, Artificial Sequence
  Description of Artificial Sequence: Synthetic oligonucleotide
aauccuaguggauaagcaa

SEQ ID NO: 2932547 - RNA, 19 nt, Artificial Sequence
  Description of Artificial Sequence: Synthetic oligonucleotide
uguacauaucuuuaucuuc

SEQ ID NO: 2932548 - RNA, 19 nt, Artificial Sequence
  Description of Artificial Sequence: Synthetic oligonucleotide
ugauaaauuugcuggcuug

SEQ ID NO: 2932549 - RNA, 19 nt, Artificial Sequence
  Description of Artificial Sequence: Synthetic oligonucleotide
ugauccaggagcuuggggu

SEQ ID NO: 2932550 - RNA, 19 nt, Artificial Sequence
  Description of Artificial Sequence: Synthetic oligonucleotide
uuugcaauuauuaccgauu

SEQ ID NO: 2932551 - RNA, 19 nt, Artificial Sequence
  Description of Artificial Sequence: Synthetic oligonucleotide
uuuucuugcugaaagcaaa

SEQ ID NO: 2932552 - RNA, 19 nt, Artificial Sequence
  Description of Artificial Sequence: Synthetic oligonucleotide
caauuauuaccgauugagc

SEQ ID NO: 2932553 - RNA, 19 nt, Artificial Sequence
  Description of Artificial Sequence: Synthetic oligonucleotide
augaggcuaauccuagugg

SEQ ID NO: 2932554 - RNA, 19 nt, Artificial Sequence
  Description of Artificial Sequence: Synthetic oligonucleotide
uggauaagcaaucuucuua

SEQ ID NO: 2932555 - RNA, 19 nt, Artificial Sequence
  Description of Artificial Sequence: Synthetic oligonucleotide
uauguaggcucccacugcc

SEQ ID NO: 2932556 - RNA, 19 nt, Artificial Sequence
  Description of Artificial Sequence: Synthetic oligonucleotide
acauaucuuuaucuucugg

SEQ ID NO: 2932557 - RNA, 19 nt, Artificial Sequence
  Description of Artificial Sequence: Synthetic oligonucleotide
aguggauuccgauuucauc

SEQ ID NO: 2932558 - RNA, 19 nt, Artificial Sequence
  Description of Artificial Sequence: Synthetic oligonucleotide
uaauccuaguggauaagca

SEQ ID NO: 2932559 - RNA, 19 nt, Artificial Sequence
  Description of Artificial Sequence: Synthetic oligonucleotide
uucaagucagguguuuugg

SEQ ID NO: 2932560 - RNA, 19 nt, Artificial Sequence
  Description of Artificial Sequence: Synthetic oligonucleotide
aaucuucuuaaaccuagaa

SEQ ID NO: 2932561 - RNA, 19 nt, Artificial Sequence
  Description of Artificial Sequence: Synthetic oligonucleotide
aaccuagaaccuuuucuug

SEQ ID NO: 2932562 - RNA, 19 nt, Artificial Sequence
  Description of Artificial Sequence: Synthetic oligonucleotide
ugagccggguaacaaacag

SEQ ID NO: 2932563 - RNA, 19 nt, Artificial Sequence
  Description of Artificial Sequence: Synthetic oligonucleotide
aucuacuucagcuucuagu

SEQ ID NO: 2932564 - RNA, 19 nt, Artificial Sequence
  Description of Artificial Sequence: Synthetic oligonucleotide
gaugagacuguccaugauc

SEQ ID NO: 2932565 - RNA, 19 nt, Artificial Sequence
  Description of Artificial Sequence: Synthetic oligonucleotide
accuuuucuugcugaaagc

SEQ ID NO: 2932566 - RNA, 19 nt, Artificial Sequence
  Description of Artificial Sequence: Synthetic oligonucleotide
ugaggcuaauccuagugga

SEQ ID NO: 2932567 - RNA, 19 nt, Artificial Sequence
  Description of Artificial Sequence: Synthetic oligonucleotide
uauuucaucaggccuuccu

SEQ ID NO: 2932568 - RNA, 19 nt, Artificial Sequence
  Description of Artificial Sequence: Synthetic oligonucleotide
uaauggcuugauaaauuug

SEQ ID NO: 2932569 - RNA, 19 nt, Artificial Sequence
  Description of Artificial Sequence: Synthetic oligonucleotide
cuaaugaggcuaauccuag

SEQ ID NO: 2932570 - RNA, 19 nt, Artificial Sequence
  Description of Artificial Sequence: Synthetic oligonucleotide
uuaauggcuugauaaauuu

SEQ ID NO: 2932571 - RNA, 19 nt, Artificial Sequence
  Description of Artificial Sequence: Synthetic oligonucleotide
uuggcauauauuucaucag

SEQ ID NO: 2932572 - RNA, 19 nt, Artificial Sequence
  Description of Artificial Sequence: Synthetic oligonucleotide
cauaucuuuaucuucugga

SEQ ID NO: 2932573 - RNA, 19 nt, Artificial Sequence
  Description of Artificial Sequence: Synthetic oligonucleotide
gcaauuauuaccgauugag

SEQ ID NO: 2932574 - RNA, 19 nt, Artificial Sequence
  Description of Artificial Sequence: Synthetic oligonucleotide
ugaguguucaagucaggug

SEQ ID NO: 2932575 - RNA, 19 nt, Artificial Sequence
  Description of Artificial Sequence: Synthetic oligonucleotide
caaacaguugcuccuaaug

SEQ ID NO: 2932576 - RNA, 19 nt, Artificial Sequence
  Description of Artificial Sequence: Synthetic oligonucleotide
cuuauguaggcucccacug

SEQ ID NO: 2932577 - RNA, 19 nt, Artificial Sequence
  Description of Artificial Sequence: Synthetic oligonucleotide
uacuucagcuucuagugcu

SEQ ID NO: 2932578 - RNA, 19 nt, Artificial Sequence
  Description of Artificial Sequence: Synthetic oligonucleotide
gguaacaaacaguugcucc

SEQ ID NO: 2932579 - RNA, 19 nt, Artificial Sequence
  Description of Artificial Sequence: Synthetic oligonucleotide
uuggggucagguauaaacu

SEQ ID NO: 2932580 - RNA, 19 nt, Artificial Sequence
  Description of Artificial Sequence: Synthetic oligonucleotide
guauaaacugugucgugcc

SEQ ID NO: 2932581 - RNA, 19 nt, Artificial Sequence
  Description of Artificial Sequence: Synthetic oligonucleotide
aagacacugaguguucaag

SEQ ID NO: 2932582 - RNA, 19 nt, Artificial Sequence
  Description of Artificial Sequence: Synthetic oligonucleotide
ucuuaaaccuagaaccuuu

SEQ ID NO: 2932583 - RNA, 19 nt, Artificial Sequence
  Description of Artificial Sequence: Synthetic oligonucleotide
auaucuuuaucuucuggau

SEQ ID NO: 2932584 - RNA, 19 nt, Artificial Sequence
  Description of Artificial Sequence: Synthetic oligonucleotide
auugagccggguaacaaac

SEQ ID NO: 2932585 - RNA, 19 nt, Artificial Sequence
  Description of Artificial Sequence: Synthetic oligonucleotide
uuauguaggcucccacugc

SEQ ID NO: 2932586 - RNA, 19 nt, Artificial Sequence
  Description of Artificial Sequence: Synthetic oligonucleotide
ucuuauguaggcucccacu

SEQ ID NO: 2932587 - RNA, 19 nt, Artificial Sequence
  Description of Artificial Sequence: Synthetic oligonucleotide
uaaacugugucgugccugc

SEQ ID NO: 2932588 - RNA, 19 nt, Artificial Sequence
  Description of Artificial Sequence: Synthetic oligonucleotide
uggcuugauaaauuugcug

SEQ ID NO: 2932589 - RNA, 19 nt, Artificial Sequence
  Description of Artificial Sequence: Synthetic oligonucleotide
uuucuugcugaaagcaaac

SEQ ID NO: 2932590 - RNA, 19 nt, Artificial Sequence
  Description of Artificial Sequence: Synthetic oligonucleotide
uccuaccuuaguuucuucc

SEQ ID NO: 2932591 - RNA, 19 nt, Artificial Sequence
  Description of Artificial Sequence: Synthetic oligonucleotide
gaguguucaagucaggugu

SEQ ID NO: 2932592 - RNA, 19 nt, Artificial Sequence
  Description of Artificial Sequence: Synthetic oligonucleotide
aacugugucgugccugcag

SEQ ID NO: 2932593 - RNA, 19 nt, Artificial Sequence
  Description of Artificial Sequence: Synthetic oligonucleotide
cacugaguguucaagucag

SEQ ID NO: 2932594 - RNA, 19 nt, Artificial Sequence
  Description of Artificial Sequence: Synthetic oligonucleotide
uucaucuuuguugcagagg

SEQ ID NO: 2932595 - RNA, 19 nt, Artificial Sequence
  Description of Artificial Sequence: Synthetic oligonucleotide
uccuaaugaggcuaauccu

SEQ ID NO: 2932596 - RNA, 19 nt, Artificial Sequence
  Description of Artificial Sequence: Synthetic oligonucleotide
auuucaucuuuguugcaga

SEQ ID NO: 2932597 - RNA, 19 nt, Artificial Sequence
  Description of Artificial Sequence: Synthetic oligonucleotide
uuucaucaggccuuccuac

SEQ ID NO: 2932598 - RNA, 19 nt, Artificial Sequence
  Description of Artificial Sequence: Synthetic oligonucleotide
acaaugacuuaauggcuug

SEQ ID NO: 2932599 - RNA, 19 nt, Artificial Sequence
  Description of Artificial Sequence: Synthetic oligonucleotide
uuaguuucuuccuuugguu

SEQ ID NO: 2932600 - RNA, 19 nt, Artificial Sequence
  Description of Artificial Sequence: Synthetic oligonucleotide
cuaauccuaguggauaagc

SEQ ID NO: 2932601 - RNA, 19 nt, Artificial Sequence
  Description of Artificial Sequence: Synthetic oligonucleotide
uguccaugauccaggagcu

SEQ ID NO: 2932602 - RNA, 19 nt, Artificial Sequence
  Description of Artificial Sequence: Synthetic oligonucleotide
uuaucuucuggaugagacu

SEQ ID NO: 2932603 - RNA, 19 nt, Artificial Sequence
  Description of Artificial Sequence: Synthetic oligonucleotide
gagacuguccaugauccag

SEQ ID NO: 2932604 - RNA, 19 nt, Artificial Sequence
  Description of Artificial Sequence: Synthetic oligonucleotide
ucaagucagguguuuuggc

SEQ ID NO: 2932605 - RNA, 19 nt, Artificial Sequence
  Description of Artificial Sequence: Synthetic oligonucleotide
uucccaguuaucuuugcaa

SEQ ID NO: 2932606 - RNA, 19 nt, Artificial Sequence
  Description of Artificial Sequence: Synthetic oligonucleotide
guuaucuuugcaauuauua

SEQ ID NO: 2932607 - RNA, 19 nt, Artificial Sequence
  Description of Artificial Sequence: Synthetic oligonucleotide
uuucccaguuaucuuugca

SEQ ID NO: 2932608 - RNA, 19 nt, Artificial Sequence
  Description of Artificial Sequence: Synthetic oligonucleotide
uguccacaaugacuuaaug

SEQ ID NO: 2932609 - RNA, 19 nt, Artificial Sequence
  Description of Artificial Sequence: Synthetic oligonucleotide
uccaugauccaggagcuug

SEQ ID NO: 2932610 - RNA, 19 nt, Artificial Sequence
  Description of Artificial Sequence: Synthetic oligonucleotide
gacacugaguguucaaguc

SEQ ID NO: 2932611 - RNA, 19 nt, Artificial Sequence
  Description of Artificial Sequence: Synthetic oligonucleotide
uagaaccuuuucuugcuga

SEQ ID NO: 2932612 - RNA, 19 nt, Artificial Sequence
  Description of Artificial Sequence: Synthetic oligonucleotide
aaaagacacugaguguuca

SEQ ID NO: 2932613 - RNA, 19 nt, Artificial Sequence
  Description of Artificial Sequence: Synthetic oligonucleotide
ugcuguacauaucuuuauc

SEQ ID NO: 2932614 - RNA, 19 nt, Artificial Sequence
  Description of Artificial Sequence: Synthetic oligonucleotide
ugcagaggcaaguucuucu

SEQ ID NO: 2932615 - RNA, 19 nt, Artificial Sequence
  Description of Artificial Sequence: Synthetic oligonucleotide
uuaaaccuagaaccuuuuc

SEQ ID NO: 2932616 - RNA, 19 nt, Artificial Sequence
  Description of Artificial Sequence: Synthetic oligonucleotide
acacugaguguucaaguca

SEQ ID NO: 2932617 - RNA, 19 nt, Artificial Sequence
  Description of Artificial Sequence: Synthetic oligonucleotide
uauaaacugugucgugccu

SEQ ID NO: 2932618 - RNA, 19 nt, Artificial Sequence
  Description of Artificial Sequence: Synthetic oligonucleotide
ugcaauuauuaccgauuga

SEQ ID NO: 2932619 - RNA, 19 nt, Artificial Sequence
  Description of Artificial Sequence: Synthetic oligonucleotide
guggauuccgauuucaucu

SEQ ID NO: 2932620 - RNA, 19 nt, Artificial Sequence
  Description of Artificial Sequence: Synthetic oligonucleotide
caguugcuccuaaugaggc

SEQ ID NO: 2932621 - RNA, 19 nt, Artificial Sequence
  Description of Artificial Sequence: Synthetic oligonucleotide
uucaucaggccuuccuacc

SEQ ID NO: 2932622 - RNA, 19 nt, Artificial Sequence
  Description of Artificial Sequence: Synthetic oligonucleotide
uggaaaagacacugagugu

SEQ ID NO: 2932623 - RNA, 19 nt, Artificial Sequence
  Description of Artificial Sequence: Synthetic oligonucleotide
agacacugaguguucaagu

SEQ ID NO: 2932624 - RNA, 19 nt, Artificial Sequence
  Description of Artificial Sequence: Synthetic oligonucleotide
uacauaucuuuaucuucug

SEQ ID NO: 2932625 - RNA, 19 nt, Artificial Sequence
  Description of Artificial Sequence: Synthetic oligonucleotide
cauauauuucaucaggccu

SEQ ID NO: 2932626 - RNA, 19 nt, Artificial Sequence
  Description of Artificial Sequence: Synthetic oligonucleotide
cuggcuugugguauaugcc

SEQ ID NO: 2932627 - RNA, 19 nt, Artificial Sequence
  Description of Artificial Sequence: Synthetic oligonucleotide
gguauaaacugugucgugc

SEQ ID NO: 2932628 - RNA, 19 nt, Artificial Sequence
  Description of Artificial Sequence: Synthetic oligonucleotide
guucaagucagguguuuug

SEQ ID NO: 2932629 - RNA, 19 nt, Artificial Sequence
  Description of Artificial Sequence: Synthetic oligonucleotide
ccggguaacaaacaguugc

SEQ ID NO: 2932630 - RNA, 19 nt, Artificial Sequence
  Description of Artificial Sequence: Synthetic oligonucleotide
aaugacuuaauggcuugau

SEQ ID NO: 2932631 - RNA, 19 nt, Artificial Sequence
  Description of Artificial Sequence: Synthetic oligonucleotide
gcauauauuucaucaggcc

SEQ ID NO: 2932632 - RNA, 19 nt, Artificial Sequence
  Description of Artificial Sequence: Synthetic oligonucleotide
ucaucaggccuuccuaccu

SEQ ID NO: 2932633 - RNA, 19 nt, Artificial Sequence
  Description of Artificial Sequence: Synthetic oligonucleotide
uuuguccacaaugacuuaa

SEQ ID NO: 2932634 - RNA, 19 nt, Artificial Sequence
  Description of Artificial Sequence: Synthetic oligonucleotide
uccuaguggauaagcaauc

SEQ ID NO: 2932635 - RNA, 19 nt, Artificial Sequence
  Description of Artificial Sequence: Synthetic oligonucleotide
uaccgauugagccggguaa

SEQ ID NO: 2932636 - RNA, 19 nt, Artificial Sequence
  Description of Artificial Sequence: Synthetic oligonucleotide
aaagacacugaguguucaa

SEQ ID NO: 2932637 - RNA, 19 nt, Artificial Sequence
  Description of Artificial Sequence: Synthetic oligonucleotide
gucagguauaaacuguguc

SEQ ID NO: 2932638 - RNA, 19 nt, Artificial Sequence
  Description of Artificial Sequence: Synthetic oligonucleotide
ccgauuucaucuuuguugc

SEQ ID NO: 2932639 - RNA, 19 nt, Artificial Sequence
  Description of Artificial Sequence: Synthetic oligonucleotide
auauauuucaucaggccuu

SEQ ID NO: 2932640 - RNA, 19 nt, Artificial Sequence
  Description of Artificial Sequence: Synthetic oligonucleotide
uugguucugggagugauuc

SEQ ID NO: 2932641 - RNA, 19 nt, Artificial Sequence
  Description of Artificial Sequence: Synthetic oligonucleotide
aguggauaagcaaucuucu

SEQ ID NO: 2932642 - RNA, 19 nt, Artificial Sequence
  Description of Artificial Sequence: Synthetic oligonucleotide
acuuaauggcuugauaaau

SEQ ID NO: 2932643 - RNA, 19 nt, Artificial Sequence
  Description of Artificial Sequence: Synthetic oligonucleotide
uggaugagacuguccauga

SEQ ID NO: 2932644 - RNA, 19 nt, Artificial Sequence
  Description of Artificial Sequence: Synthetic oligonucleotide
ugugucgugccugcagugg

SEQ ID NO: 2932645 - RNA, 19 nt, Artificial Sequence
  Description of Artificial Sequence: Synthetic oligonucleotide
auuccgauuucaucuuugu

SEQ ID NO: 2932646 - RNA, 19 nt, Artificial Sequence
  Description of Artificial Sequence: Synthetic oligonucleotide
ucagcuucuagugcuguac

SEQ ID NO: 2932647 - RNA, 19 nt, Artificial Sequence
  Description of Artificial Sequence: Synthetic oligonucleotide
guaacaaacaguugcuccu

SEQ ID NO: 2932648 - RNA, 19 nt, Artificial Sequence
  Description of Artificial Sequence: Synthetic oligonucleotide
ugccaucuacuucagcuuc

SEQ ID NO: 2932649 - RNA, 19 nt, Artificial Sequence
  Description of Artificial Sequence: Synthetic oligonucleotide
auuucaucaggccuuccua

SEQ ID NO: 2932650 - RNA, 19 nt, Artificial Sequence
  Description of Artificial Sequence: Synthetic oligonucleotide
gguguuuuggcauauauuu

SEQ ID NO: 2932651 - RNA, 19 nt, Artificial Sequence
  Description of Artificial Sequence: Synthetic oligonucleotide
augauccaggagcuugggg

SEQ ID NO: 2932652 - RNA, 19 nt, Artificial Sequence
  Description of Artificial Sequence: Synthetic oligonucleotide
gauuccgauuucaucuuug

SEQ ID NO: 2932653 - RNA, 19 nt, Artificial Sequence
  Description of Artificial Sequence: Synthetic oligonucleotide
ucccaguuaucuuugcaau

SEQ ID NO: 2932654 - RNA, 19 nt, Artificial Sequence
  Description of Artificial Sequence: Synthetic oligonucleotide
cuacuucagcuucuagugc

SEQ ID NO: 2932655 - RNA, 19 nt, Artificial Sequence
  Description of Artificial Sequence: Synthetic oligonucleotide
gcuggcuugugguauaugc

SEQ ID NO: 2932656 - RNA, 19 nt, Artificial Sequence
  Description of Artificial Sequence: Synthetic oligonucleotide
uagugcuguacauaucuuu

SEQ ID NO: 2932657 - RNA, 19 nt, Artificial Sequence
  Description of Artificial Sequence: Synthetic oligonucleotide
auaaauuugcuggcuugug

SEQ ID NO: 2932658 - RNA, 19 nt, Artificial Sequence
  Description of Artificial Sequence: Synthetic oligonucleotide
gcaaucuucuuaaaccuag

SEQ ID NO: 2932659 - RNA, 19 nt, Artificial Sequence
  Description of Artificial Sequence: Synthetic oligonucleotide
uuuucccaguuaucuuugc

SEQ ID NO: 2932660 - RNA, 19 nt, Artificial Sequence
  Description of Artificial Sequence: Synthetic oligonucleotide
ucuuugcaauuauuaccga

SEQ ID NO: 2932661 - RNA, 19 nt, Artificial Sequence
  Description of Artificial Sequence: Synthetic oligonucleotide
uauauuucaucaggccuuc

SEQ ID NO: 2932662 - RNA, 19 nt, Artificial Sequence
  Description of Artificial Sequence: Synthetic oligonucleotide
accuuaguuucuuccuuug

SEQ ID NO: 2932663 - RNA, 19 nt, Artificial Sequence
  Description of Artificial Sequence: Synthetic oligonucleotide
gauugagccggguaacaaa

SEQ ID NO: 2932664 - RNA, 19 nt, Artificial Sequence
  Description of Artificial Sequence: Synthetic oligonucleotide
cuggaugagacuguccaug

SEQ ID NO: 2932665 - RNA, 19 nt, Artificial Sequence
  Description of Artificial Sequence: Synthetic oligonucleotide
acugugucgugccugcagu

SEQ ID NO: 2932666 - RNA, 19 nt, Artificial Sequence
  Description of Artificial Sequence: Synthetic oligonucleotide
ggcauauauuucaucaggc

SEQ ID NO: 2932667 - RNA, 19 nt, Artificial Sequence
  Description of Artificial Sequence: Synthetic oligonucleotide
uuguugcagaggcaaguuc

SEQ ID NO: 2932668 - RNA, 19 nt, Artificial Sequence
  Description of Artificial Sequence: Synthetic oligonucleotide
agacuguccaugauccagg

SEQ ID NO: 2932669 - RNA, 19 nt, Artificial Sequence
  Description of Artificial Sequence: Synthetic oligonucleotide
uuguccacaaugacuuaau

SEQ ID NO: 2932670 - RNA, 19 nt, Artificial Sequence
  Description of Artificial Sequence: Synthetic oligonucleotide
gauccaggagcuugggguc

SEQ ID NO: 2932671 - RNA, 19 nt, Artificial Sequence
  Description of Artificial Sequence: Synthetic oligonucleotide
ucuuuaucuucuggaugag

SEQ ID NO: 2932672 - RNA, 19 nt, Artificial Sequence
  Description of Artificial Sequence: Synthetic oligonucleotide
agguauaaacugugucgug

SEQ ID NO: 2932673 - RNA, 19 nt, Artificial Sequence
  Description of Artificial Sequence: Synthetic oligonucleotide
uuaccgauugagccgggua

SEQ ID NO: 2932674 - RNA, 19 nt, Artificial Sequence
  Description of Artificial Sequence: Synthetic oligonucleotide
cagaggcaaguucuucugg

SEQ ID NO: 2932675 - RNA, 19 nt, Artificial Sequence
  Description of Artificial Sequence: Synthetic oligonucleotide
uguaggcucccacugccau

SEQ ID NO: 2932676 - RNA, 19 nt, Artificial Sequence
  Description of Artificial Sequence: Synthetic oligonucleotide
guacauaucuuuaucuucu

SEQ ID NO: 2932677 - RNA, 19 nt, Artificial Sequence
  Description of Artificial Sequence: Synthetic oligonucleotide
agaaccuuuucuugcugaa

SEQ ID NO: 2932678 - RNA, 19 nt, Artificial Sequence
  Description of Artificial Sequence: Synthetic oligonucleotide
uaaugaggcuaauccuagu

SEQ ID NO: 2932679 - RNA, 19 nt, Artificial Sequence
  Description of Artificial Sequence: Synthetic oligonucleotide
gaaaagacacugaguguuc

SEQ ID NO: 2932680 - RNA, 19 nt, Artificial Sequence
  Description of Artificial Sequence: Synthetic oligonucleotide
cuucuggaugagacugucc

SEQ ID NO: 2932681 - RNA, 19 nt, Artificial Sequence
  Description of Artificial Sequence: Synthetic oligonucleotide
cuuaguuucuuccuuuggu

SEQ ID NO: 2932682 - RNA, 19 nt, Artificial Sequence
  Description of Artificial Sequence: Synthetic oligonucleotide
uugagccggguaacaaaca

SEQ ID NO: 2932683 - RNA, 19 nt, Artificial Sequence
  Description of Artificial Sequence: Synthetic oligonucleotide
cuagaaccuuuucuugcug

SEQ ID NO: 2932684 - RNA, 19 nt, Artificial Sequence
  Description of Artificial Sequence: Synthetic oligonucleotide
uaggcucccacugccaucu

SEQ ID NO: 2932685 - RNA, 19 nt, Artificial Sequence
  Description of Artificial Sequence: Synthetic oligonucleotide
augacuuaauggcuugaua

SEQ ID NO: 2932686 - RNA, 19 nt, Artificial Sequence
  Description of Artificial Sequence: Synthetic oligonucleotide
accgauugagccggguaac

SEQ ID NO: 2932687 - RNA, 19 nt, Artificial Sequence
  Description of Artificial Sequence: Synthetic oligonucleotide
gauaaauuugcuggcuugu

SEQ ID NO: 2932688 - RNA, 19 nt, Artificial Sequence
  Description of Artificial Sequence: Synthetic oligonucleotide
aguugcuccuaaugaggcu

SEQ ID NO: 2932689 - RNA, 19 nt, Artificial Sequence
  Description of Artificial Sequence: Synthetic oligonucleotide
uauuaccgauugagccggg

SEQ ID NO: 2932690 - RNA, 19 nt, Artificial Sequence
  Description of Artificial Sequence: Synthetic oligonucleotide
uucuuaaaccuagaaccuu

SEQ ID NO: 2932691 - RNA, 19 nt, Artificial Sequence
  Description of Artificial Sequence: Synthetic oligonucleotide
ucaggccuuccuaccuuag

SEQ ID NO: 2932692 - RNA, 19 nt, Artificial Sequence
  Description of Artificial Sequence: Synthetic oligonucleotide
cuucuuaaaccuagaaccu

SEQ ID NO: 2932693 - RNA, 19 nt, Artificial Sequence
  Description of Artificial Sequence: Synthetic oligonucleotide
auccuaguggauaagcaau

SEQ ID NO: 2932694 - RNA, 19 nt, Artificial Sequence
  Description of Artificial Sequence: Synthetic oligonucleotide
uaccuuaguuucuuccuuu

SEQ ID NO: 2932695 - RNA, 19 nt, Artificial Sequence
  Description of Artificial Sequence: Synthetic oligonucleotide
cucuuauguaggcucccac

SEQ ID NO: 2932696 - RNA, 19 nt, Artificial Sequence
  Description of Artificial Sequence: Synthetic oligonucleotide
aggcaaguucuucuggaaa

SEQ ID NO: 2932697 - RNA, 19 nt, Artificial Sequence
  Description of Artificial Sequence: Synthetic oligonucleotide
auauuucaucaggccuucc

SEQ ID NO: 2932698 - RNA, 19 nt, Artificial Sequence
  Description of Artificial Sequence: Synthetic oligonucleotide
uuuguugcagaggcaaguu

SEQ ID NO: 2932699 - RNA, 19 nt, Artificial Sequence
  Description of Artificial Sequence: Synthetic oligonucleotide
uccuuugguucugggagug

SEQ ID NO: 2932700 - RNA, 19 nt, Artificial Sequence
  Description of Artificial Sequence: Synthetic oligonucleotide
acuguccaugauccaggag

SEQ ID NO: 2932701 - RNA, 19 nt, Artificial Sequence
  Description of Artificial Sequence: Synthetic oligonucleotide
agugcuguacauaucuuua

SEQ ID NO: 2932702 - RNA, 19 nt, Artificial Sequence
  Description of Artificial Sequence: Synthetic oligonucleotide
uucucuuauguaggcuccc

SEQ ID NO: 2932703 - RNA, 19 nt, Artificial Sequence
  Description of Artificial Sequence: Synthetic oligonucleotide
acaaacaguugcuccuaau

SEQ ID NO: 2932704 - RNA, 19 nt, Artificial Sequence
  Description of Artificial Sequence: Synthetic oligonucleotide
ucuggaugagacuguccau

SEQ ID NO: 2932705 - RNA, 19 nt, Artificial Sequence
  Description of Artificial Sequence: Synthetic oligonucleotide
ucuucuggaugagacuguc

SEQ ID NO: 2932706 - RNA, 19 nt, Artificial Sequence
  Description of Artificial Sequence: Synthetic oligonucleotide
aggccuuccuaccuuaguu

SEQ ID NO: 2932707 - RNA, 19 nt, Artificial Sequence
  Description of Artificial Sequence: Synthetic oligonucleotide
ucucuuauguaggcuccca

SEQ ID NO: 2932708 - RNA, 19 nt, Artificial Sequence
  Description of Artificial Sequence: Synthetic oligonucleotide
uucuagugcuguacauauc

SEQ ID NO: 2932709 - RNA, 19 nt, Artificial Sequence
  Description of Artificial Sequence: Synthetic oligonucleotide
auuugcuggcuugugguau

SEQ ID NO: 2932710 - RNA, 19 nt, Artificial Sequence
  Description of Artificial Sequence: Synthetic oligonucleotide
uuugguucugggagugauu

SEQ ID NO: 2932711 - RNA, 19 nt, Artificial Sequence
  Description of Artificial Sequence: Synthetic oligonucleotide
uggauuccgauuucaucuu

SEQ ID NO: 2932712 - RNA, 19 nt, Artificial Sequence
  Description of Artificial Sequence: Synthetic oligonucleotide
uuugcuggcuugugguaua

SEQ ID NO: 2932713 - RNA, 19 nt, Artificial Sequence
  Description of Artificial Sequence: Synthetic oligonucleotide
cuucuagugcuguacauau

SEQ ID NO: 2932714 - RNA, 19 nt, Artificial Sequence
  Description of Artificial Sequence: Synthetic oligonucleotide
uguucaagucagguguuuu

SEQ ID NO: 2932715 - RNA, 19 nt, Artificial Sequence
  Description of Artificial Sequence: Synthetic oligonucleotide
cuuaauggcuugauaaauu

SEQ ID NO: 2932716 - RNA, 19 nt, Artificial Sequence
  Description of Artificial Sequence: Synthetic oligonucleotide
gcuguacauaucuuuaucu

SEQ ID NO: 2932717 - RNA, 19 nt, Artificial Sequence
  Description of Artificial Sequence: Synthetic oligonucleotide
auggcuugauaaauuugcu

SEQ ID NO: 2932718 - RNA, 19 nt, Artificial Sequence
  Description of Artificial Sequence: Synthetic oligonucleotide
caucuacuucagcuucuag

SEQ ID NO: 2932719 - RNA, 19 nt, Artificial Sequence
  Description of Artificial Sequence: Synthetic oligonucleotide
agcuucuagugcuguacau

SEQ ID NO: 2932720 - RNA, 19 nt, Artificial Sequence
  Description of Artificial Sequence: Synthetic oligonucleotide
guguuuuggcauauauuuc

SEQ ID NO: 2932721 - RNA, 19 nt, Artificial Sequence
  Description of Artificial Sequence: Synthetic oligonucleotide
cccacugccaucuacuuca

SEQ ID NO: 2932722 - RNA, 19 nt, Artificial Sequence
  Description of Artificial Sequence: Synthetic oligonucleotide
gaggcaaguucuucuggaa

SEQ ID NO: 2932723 - RNA, 19 nt, Artificial Sequence
  Description of Artificial Sequence: Synthetic oligonucleotide
ugcaguggauuccgauuuc

SEQ ID NO: 2932724 - RNA, 19 nt, Artificial Sequence
  Description of Artificial Sequence: Synthetic oligonucleotide
caaucuucuuaaaccuaga

SEQ ID NO: 2932725 - RNA, 19 nt, Artificial Sequence
  Description of Artificial Sequence: Synthetic oligonucleotide
agccggguaacaaacaguu

SEQ ID NO: 2932726 - RNA, 19 nt, Artificial Sequence
  Description of Artificial Sequence: Synthetic oligonucleotide
ucccacugccaucuacuuc

SEQ ID NO: 2932727 - RNA, 19 nt, Artificial Sequence
  Description of Artificial Sequence: Synthetic oligonucleotide
caugauccaggagcuuggg

SEQ ID NO: 2932728 - RNA, 19 nt, Artificial Sequence
  Description of Artificial Sequence: Synthetic oligonucleotide
gacuguccaugauccagga

SEQ ID NO: 2932729 - RNA, 19 nt, Artificial Sequence
  Description of Artificial Sequence: Synthetic oligonucleotide
ccuuaguuucuuccuuugg

SEQ ID NO: 2932730 - RNA, 19 nt, Artificial Sequence
  Description of Artificial Sequence: Synthetic oligonucleotide
uuuuguccacaaugacuua

SEQ ID NO: 2932731 - RNA, 19 nt, Artificial Sequence
  Description of Artificial Sequence: Synthetic oligonucleotide
uugcuccuaaugaggcuaa

SEQ ID NO: 2932732 - RNA, 19 nt, Artificial Sequence
  Description of Artificial Sequence: Synthetic oligonucleotide
uucugggagugauucuuuu

SEQ ID NO: 2932733 - RNA, 19 nt, Artificial Sequence
  Description of Artificial Sequence: Synthetic oligonucleotide
agucagguguuuuggcaua

SEQ ID NO: 2932734 - RNA, 19 nt, Artificial Sequence
  Description of Artificial Sequence: Synthetic oligonucleotide
cuuugcaauuauuaccgau

SEQ ID NO: 2932735 - RNA, 19 nt, Artificial Sequence
  Description of Artificial Sequence: Synthetic oligonucleotide
gugccugcaguggauuccg

SEQ ID NO: 2932736 - RNA, 19 nt, Artificial Sequence
  Description of Artificial Sequence: Synthetic oligonucleotide
gcagaggcaaguucuucug

SEQ ID NO: 2932737 - RNA, 19 nt, Artificial Sequence
  Description of Artificial Sequence: Synthetic oligonucleotide
gcaaguucuucuggaaaag

SEQ ID NO: 2932738 - RNA, 19 nt, Artificial Sequence
  Description of Artificial Sequence: Synthetic oligonucleotide
ccaugauccaggagcuugg

SEQ ID NO: 2932739 - RNA, 19 nt, Artificial Sequence
  Description of Artificial Sequence: Synthetic oligonucleotide
acugaguguucaagucagg

SEQ ID NO: 2932740 - RNA, 19 nt, Artificial Sequence
  Description of Artificial Sequence: Synthetic oligonucleotide
uucagcuucuagugcugua

SEQ ID NO: 2932741 - RNA, 19 nt, Artificial Sequence
  Description of Artificial Sequence: Synthetic oligonucleotide
ccuaaugaggcuaauccua

SEQ ID NO: 2932742 - RNA, 19 nt, Artificial Sequence
  Description of Artificial Sequence: Synthetic oligonucleotide
aguuaucuuugcaauuauu

SEQ ID NO: 2932743 - RNA, 19 nt, Artificial Sequence
  Description of Artificial Sequence: Synthetic oligonucleotide
ggaaaagacacugaguguu

SEQ ID NO: 2932744 - RNA, 19 nt, Artificial Sequence
  Description of Artificial Sequence: Synthetic oligonucleotide
ugguucugggagugauucu

SEQ ID NO: 2932745 - RNA, 19 nt, Artificial Sequence
  Description of Artificial Sequence: Synthetic oligonucleotide
aggcuaauccuaguggaua

SEQ ID NO: 2932746 - RNA, 19 nt, Artificial Sequence
  Description of Artificial Sequence: Synthetic oligonucleotide
cuugauaaauuugcuggcu

SEQ ID NO: 2932747 - RNA, 19 nt, Artificial Sequence
  Description of Artificial Sequence: Synthetic oligonucleotide
ugucgugccugcaguggau

SEQ ID NO: 2932748 - RNA, 19 nt, Artificial Sequence
  Description of Artificial Sequence: Synthetic oligonucleotide
cacaaugacuuaauggcuu

SEQ ID NO: 2932749 - RNA, 19 nt, Artificial Sequence
  Description of Artificial Sequence: Synthetic oligonucleotide
cugugucgugccugcagug

SEQ ID NO: 2932750 - RNA, 19 nt, Artificial Sequence
  Description of Artificial Sequence: Synthetic oligonucleotide
cagguauaaacugugucgu

SEQ ID NO: 2932751 - RNA, 19 nt, Artificial Sequence
  Description of Artificial Sequence: Synthetic oligonucleotide
gggucagguauaaacugug

SEQ ID NO: 2932752 - RNA, 19 nt, Artificial Sequence
  Description of Artificial Sequence: Synthetic oligonucleotide
ggcuaauccuaguggauaa

SEQ ID NO: 2932753 - RNA, 19 nt, Artificial Sequence
  Description of Artificial Sequence: Synthetic oligonucleotide
ggagcuuggggucagguau

SEQ ID NO: 2932754 - RNA, 19 nt, Artificial Sequence
  Description of Artificial Sequence: Synthetic oligonucleotide
cuguacauaucuuuaucuu

SEQ ID NO: 2932755 - RNA, 19 nt, Artificial Sequence
  Description of Artificial Sequence: Synthetic oligonucleotide
gaaccuuuucuugcugaaa

SEQ ID NO: 2932756 - RNA, 19 nt, Artificial Sequence
  Description of Artificial Sequence: Synthetic oligonucleotide
aucaggccuuccuaccuua

SEQ ID NO: 2932757 - RNA, 19 nt, Artificial Sequence
  Description of Artificial Sequence: Synthetic oligonucleotide
auuaccgauugagccgggu

SEQ ID NO: 2932758 - RNA, 19 nt, Artificial Sequence
  Description of Artificial Sequence: Synthetic oligonucleotide
agcaaucuucuuaaaccua

SEQ ID NO: 2932759 - RNA, 19 nt, Artificial Sequence
  Description of Artificial Sequence: Synthetic oligonucleotide
agguguuuuggcauauauu

SEQ ID NO: 2932760 - RNA, 19 nt, Artificial Sequence
  Description of Artificial Sequence: Synthetic oligonucleotide
ucgugccugcaguggauuc

SEQ ID NO: 2932761 - RNA, 19 nt, Artificial Sequence
  Description of Artificial Sequence: Synthetic oligonucleotide
uuccuaccuuaguuucuuc

SEQ ID NO: 2932762 - RNA, 19 nt, Artificial Sequence
  Description of Artificial Sequence: Synthetic oligonucleotide
caucuuuguugcagaggca

SEQ ID NO: 2932763 - RNA, 19 nt, Artificial Sequence
  Description of Artificial Sequence: Synthetic oligonucleotide
ccuuuucuugcugaaagca

SEQ ID NO: 2932764 - RNA, 19 nt, Artificial Sequence
  Description of Artificial Sequence: Synthetic oligonucleotide
aggagcuuggggucaggua

SEQ ID NO: 2932765 - RNA, 19 nt, Artificial Sequence
  Description of Artificial Sequence: Synthetic oligonucleotide
gugucgugccugcagugga

SEQ ID NO: 2932766 - RNA, 19 nt, Artificial Sequence
  Description of Artificial Sequence: Synthetic oligonucleotide
aaacugugucgugccugca

SEQ ID NO: 2932767 - RNA, 19 nt, Artificial Sequence
  Description of Artificial Sequence: Synthetic oligonucleotide
cuuuguugcagaggcaagu

SEQ ID NO: 2932768 - RNA, 19 nt, Artificial Sequence
  Description of Artificial Sequence: Synthetic oligonucleotide
gcuaauccuaguggauaag

SEQ ID NO: 2932769 - RNA, 19 nt, Artificial Sequence
  Description of Artificial Sequence: Synthetic oligonucleotide
aucuucuggaugagacugu

SEQ ID NO: 2932770 - RNA, 19 nt, Artificial Sequence
  Description of Artificial Sequence: Synthetic oligonucleotide
cagcuucuagugcuguaca

SEQ ID NO: 2932771 - RNA, 19 nt, Artificial Sequence
  Description of Artificial Sequence: Synthetic oligonucleotide
guaggcucccacugccauc

SEQ ID NO: 2932772 - RNA, 19 nt, Artificial Sequence
  Description of Artificial Sequence: Synthetic oligonucleotide
caaugacuuaauggcuuga

SEQ ID NO: 2932773 - RNA, 19 nt, Artificial Sequence
  Description of Artificial Sequence: Synthetic oligonucleotide
aguguucaagucagguguu

SEQ ID NO: 2932774 - RNA, 19 nt, Artificial Sequence
  Description of Artificial Sequence: Synthetic oligonucleotide
cugaguguucaagucaggu

SEQ ID NO: 2932775 - RNA, 19 nt, Artificial Sequence
  Description of Artificial Sequence: Synthetic oligonucleotide
cacugccaucuacuucagc

SEQ ID NO: 2932776 - RNA, 19 nt, Artificial Sequence
  Description of Artificial Sequence: Synthetic oligonucleotide
cuuaaaccuagaaccuuuu

SEQ ID NO: 2932777 - RNA, 19 nt, Artificial Sequence
  Description of Artificial Sequence: Synthetic oligonucleotide
ggguaacaaacaguugcuc

SEQ ID NO: 2932778 - RNA, 19 nt, Artificial Sequence
  Description of Artificial Sequence: Synthetic oligonucleotide
ugcuggcuugugguauaug

SEQ ID NO: 2932779 - RNA, 19 nt, Artificial Sequence
  Description of Artificial Sequence: Synthetic oligonucleotide
cagguguuuuggcauauau

SEQ ID NO: 2932780 - RNA, 19 nt, Artificial Sequence
  Description of Artificial Sequence: Synthetic oligonucleotide
gugcuguacauaucuuuau

SEQ ID NO: 2932781 - RNA, 19 nt, Artificial Sequence
  Description of Artificial Sequence: Synthetic oligonucleotide
ucagguguuuuggcauaua

SEQ ID NO: 2932782 - RNA, 19 nt, Artificial Sequence
  Description of Artificial Sequence: Synthetic oligonucleotide
cuaguggauaagcaaucuu

SEQ ID NO: 2932783 - RNA, 19 nt, Artificial Sequence
  Description of Artificial Sequence: Synthetic oligonucleotide
cugcaguggauuccgauuu

SEQ ID NO: 2932784 - RNA, 19 nt, Artificial Sequence
  Description of Artificial Sequence: Synthetic oligonucleotide
ccaguuaucuuugcaauua

SEQ ID NO: 2932785 - RNA, 19 nt, Artificial Sequence
  Description of Artificial Sequence: Synthetic oligonucleotide
guggauaagcaaucuucuu

SEQ ID NO: 2932786 - RNA, 19 nt, Artificial Sequence
  Description of Artificial Sequence: Synthetic oligonucleotide
ugccugcaguggauuccga

SEQ ID NO: 2932787 - RNA, 19 nt, Artificial Sequence
  Description of Artificial Sequence: Synthetic oligonucleotide
gcuccuaaugaggcuaauc

SEQ ID NO: 2932788 - RNA, 19 nt, Artificial Sequence
  Description of Artificial Sequence: Synthetic oligonucleotide
auguaggcucccacugcca

SEQ ID NO: 2932789 - RNA, 19 nt, Artificial Sequence
  Description of Artificial Sequence: Synthetic oligonucleotide
cuaccuuaguuucuuccuu

SEQ ID NO: 2932790 - RNA, 19 nt, Artificial Sequence
  Description of Artificial Sequence: Synthetic oligonucleotide
uugcuggcuugugguauau

SEQ ID NO: 2932791 - RNA, 19 nt, Artificial Sequence
  Description of Artificial Sequence: Synthetic oligonucleotide
gaggcuaauccuaguggau

SEQ ID NO: 2932792 - RNA, 19 nt, Artificial Sequence
  Description of Artificial Sequence: Synthetic oligonucleotide
gagccggguaacaaacagu

SEQ ID NO: 2932793 - RNA, 19 nt, Artificial Sequence
  Description of Artificial Sequence: Synthetic oligonucleotide
ccuaccuuaguuucuuccu

SEQ ID NO: 2932794 - RNA, 19 nt, Artificial Sequence
  Description of Artificial Sequence: Synthetic oligonucleotide
agcuuggggucagguauaa

SEQ ID NO: 2932795 - RNA, 19 nt, Artificial Sequence
  Description of Artificial Sequence: Synthetic oligonucleotide
gcuucuagugcuguacaua

SEQ ID NO: 2932796 - RNA, 19 nt, Artificial Sequence
  Description of Artificial Sequence: Synthetic oligonucleotide
gcaguggauuccgauuuca

SEQ ID NO: 2932797 - RNA, 19 nt, Artificial Sequence
  Description of Artificial Sequence: Synthetic oligonucleotide
cuuugguucugggagugau

SEQ ID NO: 2932798 - RNA, 19 nt, Artificial Sequence
  Description of Artificial Sequence: Synthetic oligonucleotide
ggcucccacugccaucuac

SEQ ID NO: 2932799 - RNA, 19 nt, Artificial Sequence
  Description of Artificial Sequence: Synthetic oligonucleotide
caguuaucuuugcaauuau

SEQ ID NO: 2932800 - RNA, 19 nt, Artificial Sequence
  Description of Artificial Sequence: Synthetic oligonucleotide
ccacaaugacuuaauggcu

SEQ ID NO: 2932801 - RNA, 19 nt, Artificial Sequence
  Description of Artificial Sequence: Synthetic oligonucleotide
ugcuccuaaugaggcuaau

SEQ ID NO: 2932802 - RNA, 19 nt, Artificial Sequence
  Description of Artificial Sequence: Synthetic oligonucleotide
gagcuuggggucagguaua

SEQ ID NO: 2932803 - RNA, 19 nt, Artificial Sequence
  Description of Artificial Sequence: Synthetic oligonucleotide
cuagugcuguacauaucuu

SEQ ID NO: 2932804 - RNA, 19 nt, Artificial Sequence
  Description of Artificial Sequence: Synthetic oligonucleotide
cugccaucuacuucagcuu

SEQ ID NO: 2932805 - RNA, 19 nt, Artificial Sequence
  Description of Artificial Sequence: Synthetic oligonucleotide
gguucugggagugauucuu

SEQ ID NO: 2932806 - RNA, 19 nt, Artificial Sequence
  Description of Artificial Sequence: Synthetic oligonucleotide
cuuccuaccuuaguuucuu

SEQ ID NO: 2932807 - RNA, 19 nt, Artificial Sequence
  Description of Artificial Sequence: Synthetic oligonucleotide
ggggucagguauaaacugu

SEQ ID NO: 2932808 - RNA, 19 nt, Artificial Sequence
  Description of Artificial Sequence: Synthetic oligonucleotide
caguggauuccgauuucau

SEQ ID NO: 2932809 - RNA, 19 nt, Artificial Sequence
  Description of Artificial Sequence: Synthetic oligonucleotide
gccggguaacaaacaguug

SEQ ID NO: 2932810 - RNA, 19 nt, Artificial Sequence
  Description of Artificial Sequence: Synthetic oligonucleotide
cgugccugcaguggauucc

SEQ ID NO: 2932811 - RNA, 19 nt, Artificial Sequence
  Description of Artificial Sequence: Synthetic oligonucleotide
guugcagaggcaaguucuu

SEQ ID NO: 2932812 - RNA, 19 nt, Artificial Sequence
  Description of Artificial Sequence: Synthetic oligonucleotide
ggucagguauaaacugugu

SEQ ID NO: 2932813 - RNA, 19 nt, Artificial Sequence
  Description of Artificial Sequence: Synthetic oligonucleotide
ccacugccaucuacuucag

SEQ ID NO: 2932814 - RNA, 19 nt, Artificial Sequence
  Description of Artificial Sequence: Synthetic oligonucleotide
gcucccacugccaucuacu

SEQ ID NO: 2932815 - RNA, 19 nt, Artificial Sequence
  Description of Artificial Sequence: Synthetic oligonucleotide
caucaggccuuccuaccuu

SEQ ID NO: 2932816 - RNA, 19 nt, Artificial Sequence
  Description of Artificial Sequence: Synthetic oligonucleotide
ggaugagacuguccaugau

SEQ ID NO: 2932817 - RNA, 19 nt, Artificial Sequence
  Description of Artificial Sequence: Synthetic oligonucleotide
guucugggagugauucuuu

SEQ ID NO: 2932818 - RNA, 19 nt, Artificial Sequence
  Description of Artificial Sequence: Synthetic oligonucleotide
ggauuccgauuucaucuuu

SEQ ID NO: 2932819 - RNA, 19 nt, Artificial Sequence
  Description of Artificial Sequence: Synthetic oligonucleotide
ccuaguggauaagcaaucu

SEQ ID NO: 2932820 - RNA, 19 nt, Artificial Sequence
  Description of Artificial Sequence: Synthetic oligonucleotide
guguucaagucagguguuu

SEQ ID NO: 2932821 - RNA, 19 nt, Artificial Sequence
  Description of Artificial Sequence: Synthetic oligonucleotide
cucccacugccaucuacuu

SEQ ID NO: 2932822 - RNA, 19 nt, Artificial Sequence
  Description of Artificial Sequence: Synthetic oligonucleotide
cggguaacaaacaguugcu

SEQ ID NO: 2932823 - RNA, 19 nt, Artificial Sequence
  Description of Artificial Sequence: Synthetic oligonucleotide
caggagcuuggggucaggu

SEQ ID NO: 2932824 - RNA, 19 nt, Artificial Sequence
  Description of Artificial Sequence: Synthetic oligonucleotide
cgauuucaucuuuguugca

SEQ ID NO: 2932825 - RNA, 19 nt, Artificial Sequence
  Description of Artificial Sequence: Synthetic oligonucleotide
gccaucuacuucagcuucu

SEQ ID NO: 2932826 - RNA, 19 nt, Artificial Sequence
  Description of Artificial Sequence: Synthetic oligonucleotide
ccgauugagccggguaaca

SEQ ID NO: 2932827 - RNA, 19 nt, Artificial Sequence
  Description of Artificial Sequence: Synthetic oligonucleotide
cccaguuaucuuugcaauu

SEQ ID NO: 2932828 - RNA, 19 nt, Artificial Sequence
  Description of Artificial Sequence: Synthetic oligonucleotide
gccugcaguggauuccgau

SEQ ID NO: 2932829 - RNA, 19 nt, Artificial Sequence
  Description of Artificial Sequence: Synthetic oligonucleotide
ggcuugugguauaugccuu

SEQ ID NO: 2932830 - RNA, 19 nt, Artificial Sequence
  Description of Artificial Sequence: Synthetic oligonucleotide
gucgugccugcaguggauu

SEQ ID NO: 2932831 - RNA, 19 nt, Artificial Sequence
  Description of Artificial Sequence: Synthetic oligonucleotide
ccaucuacuucagcuucua

SEQ ID NO: 2932832 - RNA, 19 nt, Artificial Sequence
  Description of Artificial Sequence: Synthetic oligonucleotide
cgauugagccggguaacaa

SEQ ID NO: 2932833 - RNA, 19 nt, Artificial Sequence
  Description of Artificial Sequence: Synthetic oligonucleotide
aggcucccacugccaucua

SEQ ID NO: 2932834 - RNA, 19 nt, Artificial Sequence
  Description of Artificial Sequence: Synthetic oligonucleotide
ccuuugguucugggaguga

SEQ ID NO: 2932835 - RNA, 19 nt, Artificial Sequence
  Description of Artificial Sequence: Synthetic oligonucleotide
gcuuggggucagguauaaa

SEQ ID NO: 2932836 - RNA, 19 nt, Artificial Sequence
  Description of Artificial Sequence: Synthetic oligonucleotide
guccaugauccaggagcuu

SEQ ID NO: 2932837 - RNA, 19 nt, Artificial Sequence
  Description of Artificial Sequence: Synthetic oligonucleotide
aaaaggauaggguauacgc

SEQ ID NO: 2932838 - RNA, 19 nt, Artificial Sequence
  Description of Artificial Sequence: Synthetic oligonucleotide
aaaucaaugaauuucuaag

SEQ ID NO: 2932839 - RNA, 19 nt, Artificial Sequence
  Description of Artificial Sequence: Synthetic oligonucleotide
aaucaaugaauuucuaagc

SEQ ID NO: 2932840 - RNA, 19 nt, Artificial Sequence
  Description of Artificial Sequence: Synthetic oligonucleotide
auuuacauaagucaggguc

SEQ ID NO: 2932841 - RNA, 19 nt, Artificial Sequence
  Description of Artificial Sequence: Synthetic oligonucleotide
aguaauuuaagauguuucc

SEQ ID NO: 2932842 - RNA, 19 nt, Artificial Sequence
  Description of Artificial Sequence: Synthetic oligonucleotide
accaaaaccaacuagugcg

SEQ ID NO: 2932843 - RNA, 19 nt, Artificial Sequence
  Description of Artificial Sequence: Synthetic oligonucleotide
agaaaauuuacauaaguca

SEQ ID NO: 2932844 - RNA, 19 nt, Artificial Sequence
  Description of Artificial Sequence: Synthetic oligonucleotide
aucaaugaauuucuaagcc

SEQ ID NO: 2932845 - RNA, 19 nt, Artificial Sequence
  Description of Artificial Sequence: Synthetic oligonucleotide
uuuacauaagucagggucg

SEQ ID NO: 2932846 - RNA, 19 nt, Artificial Sequence
  Description of Artificial Sequence: Synthetic oligonucleotide
gucuauauugucuagaccc

SEQ ID NO: 2932847 - RNA, 19 nt, Artificial Sequence
  Description of Artificial Sequence: Synthetic oligonucleotide
aaauuuacauaagucaggg

SEQ ID NO: 2932848 - RNA, 19 nt, Artificial Sequence
  Description of Artificial Sequence: Synthetic oligonucleotide
acuuagaaaauuuacauaa

SEQ ID NO: 2932849 - RNA, 19 nt, Artificial Sequence
  Description of Artificial Sequence: Synthetic oligonucleotide
gaaaauuuacauaagucag

SEQ ID NO: 2932850 - RNA, 19 nt, Artificial Sequence
  Description of Artificial Sequence: Synthetic oligonucleotide
auaccuggcagcuaggccc

SEQ ID NO: 2932851 - RNA, 19 nt, Artificial Sequence
  Description of Artificial Sequence: Synthetic oligonucleotide
uuuuguuguacauauuugc

SEQ ID NO: 2932852 - RNA, 19 nt, Artificial Sequence
  Description of Artificial Sequence: Synthetic oligonucleotide
acauauuugcuucaaauca

SEQ ID NO: 2932853 - RNA, 19 nt, Artificial Sequence
  Description of Artificial Sequence: Synthetic oligonucleotide
aucaccuguacucaaaggg

SEQ ID NO: 2932854 - RNA, 19 nt, Artificial Sequence
  Description of Artificial Sequence: Synthetic oligonucleotide
uuaugaggagucuauauug

SEQ ID NO: 2932855 - RNA, 19 nt, Artificial Sequence
  Description of Artificial Sequence: Synthetic oligonucleotide
cauagguauagccaaaagg

SEQ ID NO: 2932856 - RNA, 19 nt, Artificial Sequence
  Description of Artificial Sequence: Synthetic oligonucleotide
aaaaccaacuagugcgccc

SEQ ID NO: 2932857 - RNA, 19 nt, Artificial Sequence
  Description of Artificial Sequence: Synthetic oligonucleotide
aauuuaagauguuuccucu

SEQ ID NO: 2932858 - RNA, 19 nt, Artificial Sequence
  Description of Artificial Sequence: Synthetic oligonucleotide
aaaauuuacauaagucagg

SEQ ID NO: 2932859 - RNA, 19 nt, Artificial Sequence
  Description of Artificial Sequence: Synthetic oligonucleotide
aauaccaucuuucuacaga

SEQ ID NO: 2932860 - RNA, 19 nt, Artificial Sequence
  Description of Artificial Sequence: Synthetic oligonucleotide
uugucuagacccaagguag

SEQ ID NO: 2932861 - RNA, 19 nt, Artificial Sequence
  Description of Artificial Sequence: Synthetic oligonucleotide
uuugcuucaaaucaaugaa

SEQ ID NO: 2932862 - RNA, 19 nt, Artificial Sequence
  Description of Artificial Sequence: Synthetic oligonucleotide
uucaaaucaaugaauuucu

SEQ ID NO: 2932863 - RNA, 19 nt, Artificial Sequence
  Description of Artificial Sequence: Synthetic oligonucleotide
uagaaaauuuacauaaguc

SEQ ID NO: 2932864 - RNA, 19 nt, Artificial Sequence
  Description of Artificial Sequence: Synthetic oligonucleotide
uuuaagauguuuccucucc

SEQ ID NO: 2932865 - RNA, 19 nt, Artificial Sequence
  Description of Artificial Sequence: Synthetic oligonucleotide
uacucaaaggguaacuuag

SEQ ID NO: 2932866 - RNA, 19 nt, Artificial Sequence
  Description of Artificial Sequence: Synthetic oligonucleotide
aaaggauaggguauacgcc

SEQ ID NO: 2932867 - RNA, 19 nt, Artificial Sequence
  Description of Artificial Sequence: Synthetic oligonucleotide
auaccaucuuucuacagac

SEQ ID NO: 2932868 - RNA, 19 nt, Artificial Sequence
  Description of Artificial Sequence: Synthetic oligonucleotide
uaacuuagaaaauuuacau

SEQ ID NO: 2932869 - RNA, 19 nt, Artificial Sequence
  Description of Artificial Sequence: Synthetic oligonucleotide
aaggauaggguauacgcca

SEQ ID NO: 2932870 - RNA, 19 nt, Artificial Sequence
  Description of Artificial Sequence: Synthetic oligonucleotide
ugucaagaaaggcaucacg

SEQ ID NO: 2932871 - RNA, 19 nt, Artificial Sequence
  Description of Artificial Sequence: Synthetic oligonucleotide
caaugaauuucuaagccag

SEQ ID NO: 2932872 - RNA, 19 nt, Artificial Sequence
  Description of Artificial Sequence: Synthetic oligonucleotide
gaauuucuaagccagguuc

SEQ ID NO: 2932873 - RNA, 19 nt, Artificial Sequence
  Description of Artificial Sequence: Synthetic oligonucleotide
cuuagaaacuguaauccag

SEQ ID NO: 2932874 - RNA, 19 nt, Artificial Sequence
  Description of Artificial Sequence: Synthetic oligonucleotide
uaauccaguaauuuaagau

SEQ ID NO: 2932875 - RNA, 19 nt, Artificial Sequence
  Description of Artificial Sequence: Synthetic oligonucleotide
auagguauagccaaaagga

SEQ ID NO: 2932876 - RNA, 19 nt, Artificial Sequence
  Description of Artificial Sequence: Synthetic oligonucleotide
uaagcuggaagcuagucga

SEQ ID NO: 2932877 - RNA, 19 nt, Artificial Sequence
  Description of Artificial Sequence: Synthetic oligonucleotide
ugcaaacacagucugaagu

SEQ ID NO: 2932878 - RNA, 19 nt, Artificial Sequence
  Description of Artificial Sequence: Synthetic oligonucleotide
uuuguuguacauauuugcu

SEQ ID NO: 2932879 - RNA, 19 nt, Artificial Sequence
  Description of Artificial Sequence: Synthetic oligonucleotide
uaauuuaagauguuuccuc

SEQ ID NO: 2932880 - RNA, 19 nt, Artificial Sequence
  Description of Artificial Sequence: Synthetic oligonucleotide
uguaauccaguaauuuaag

SEQ ID NO: 2932881 - RNA, 19 nt, Artificial Sequence
  Description of Artificial Sequence: Synthetic oligonucleotide
aaaccaacuagugcgcccc

SEQ ID NO: 2932882 - RNA, 19 nt, Artificial Sequence
  Description of Artificial Sequence: Synthetic oligonucleotide
uuaagauguuuccucuccg

SEQ ID NO: 2932883 - RNA, 19 nt, Artificial Sequence
  Description of Artificial Sequence: Synthetic oligonucleotide
ucuacagacaggcuuagaa

SEQ ID NO: 2932884 - RNA, 19 nt, Artificial Sequence
  Description of Artificial Sequence: Synthetic oligonucleotide
ucaaugaauuucuaagcca

SEQ ID NO: 2932885 - RNA, 19 nt, Artificial Sequence
  Description of Artificial Sequence: Synthetic oligonucleotide
ggaaauaccaucuuucuac

SEQ ID NO: 2932886 - RNA, 19 nt, Artificial Sequence
  Description of Artificial Sequence: Synthetic oligonucleotide
uguuguacauauuugcuuc

SEQ ID NO: 2932887 - RNA, 19 nt, Artificial Sequence
  Description of Artificial Sequence: Synthetic oligonucleotide
auauugucuagacccaagg

SEQ ID NO: 2932888 - RNA, 19 nt, Artificial Sequence
  Description of Artificial Sequence: Synthetic oligonucleotide
ugaagggccuuuaugagga

SEQ ID NO: 2932889 - RNA, 19 nt, Artificial Sequence
  Description of Artificial Sequence: Synthetic oligonucleotide
accaucuuucuacagacag

SEQ ID NO: 2932890 - RNA, 19 nt, Artificial Sequence
  Description of Artificial Sequence: Synthetic oligonucleotide
uacagacaggcuuagaaac

SEQ ID NO: 2932891 - RNA, 19 nt, Artificial Sequence
  Description of Artificial Sequence: Synthetic oligonucleotide
uauagccaaaaggauaggg

SEQ ID NO: 2932892 - RNA, 19 nt, Artificial Sequence
  Description of Artificial Sequence: Synthetic oligonucleotide
agucuauauugucuagacc

SEQ ID NO: 2932893 - RNA, 19 nt, Artificial Sequence
  Description of Artificial Sequence: Synthetic oligonucleotide
uuagaaacuguaauccagu

SEQ ID NO: 2932894 - RNA, 19 nt, Artificial Sequence
  Description of Artificial Sequence: Synthetic oligonucleotide
auucauaccuggcagcuag

SEQ ID NO: 2932895 - RNA, 19 nt, Artificial Sequence
  Description of Artificial Sequence: Synthetic oligonucleotide
cacagucugaaguagaaug

SEQ ID NO: 2932896 - RNA, 19 nt, Artificial Sequence
  Description of Artificial Sequence: Synthetic oligonucleotide
cuugauucauaccuggcag

SEQ ID NO: 2932897 - RNA, 19 nt, Artificial Sequence
  Description of Artificial Sequence: Synthetic oligonucleotide
gucaagaaaggcaucacgg

SEQ ID NO: 2932898 - RNA, 19 nt, Artificial Sequence
  Description of Artificial Sequence: Synthetic oligonucleotide
aacuuagaaaauuuacaua

SEQ ID NO: 2932899 - RNA, 19 nt, Artificial Sequence
  Description of Artificial Sequence: Synthetic oligonucleotide
agcuagucgagcuuguguc

SEQ ID NO: 2932900 - RNA, 19 nt, Artificial Sequence
  Description of Artificial Sequence: Synthetic oligonucleotide
guaagcuggaagcuagucg

SEQ ID NO: 2932901 - RNA, 19 nt, Artificial Sequence
  Description of Artificial Sequence: Synthetic oligonucleotide
uauauugucuagacccaag

SEQ ID NO: 2932902 - RNA, 19 nt, Artificial Sequence
  Description of Artificial Sequence: Synthetic oligonucleotide
uuuaugaggagucuauauu

SEQ ID NO: 2932903 - RNA, 19 nt, Artificial Sequence
  Description of Artificial Sequence: Synthetic oligonucleotide
cuuagaaaauuuacauaag

SEQ ID NO: 2932904 - RNA, 19 nt, Artificial Sequence
  Description of Artificial Sequence: Synthetic oligonucleotide
ugaggagucuauauugucu

SEQ ID NO: 2932905 - RNA, 19 nt, Artificial Sequence
  Description of Artificial Sequence: Synthetic oligonucleotide
gaaacuguaauccaguaau

SEQ ID NO: 2932906 - RNA, 19 nt, Artificial Sequence
  Description of Artificial Sequence: Synthetic oligonucleotide
ucuuucuacagacaggcuu

SEQ ID NO: 2932907 - RNA, 19 nt, Artificial Sequence
  Description of Artificial Sequence: Synthetic oligonucleotide
caucuuucuacagacaggc

SEQ ID NO: 2932908 - RNA, 19 nt, Artificial Sequence
  Description of Artificial Sequence: Synthetic oligonucleotide
uucuaagccagguucaggu

SEQ ID NO: 2932909 - RNA, 19 nt, Artificial Sequence
  Description of Artificial Sequence: Synthetic oligonucleotide
ucaagaaaggcaucacggc

SEQ ID NO: 2932910 - RNA, 19 nt, Artificial Sequence
  Description of Artificial Sequence: Synthetic oligonucleotide
aggcuuagaaacuguaauc

SEQ ID NO: 2932911 - RNA, 19 nt, Artificial Sequence
  Description of Artificial Sequence: Synthetic oligonucleotide
uaccaaaaccaacuagugc

SEQ ID NO: 2932912 - RNA, 19 nt, Artificial Sequence
  Description of Artificial Sequence: Synthetic oligonucleotide
aaauaccaucuuucuacag

SEQ ID NO: 2932913 - RNA, 19 nt, Artificial Sequence
  Description of Artificial Sequence: Synthetic oligonucleotide
uagaaugggaaauaccauc

SEQ ID NO: 2932914 - RNA, 19 nt, Artificial Sequence
  Description of Artificial Sequence: Synthetic oligonucleotide
guauacgccacccauacca

SEQ ID NO: 2932915 - RNA, 19 nt, Artificial Sequence
  Description of Artificial Sequence: Synthetic oligonucleotide
ucuauauugucuagaccca

SEQ ID NO: 2932916 - RNA, 19 nt, Artificial Sequence
  Description of Artificial Sequence: Synthetic oligonucleotide
auuuaagauguuuccucuc

SEQ ID NO: 2932917 - RNA, 19 nt, Artificial Sequence
  Description of Artificial Sequence: Synthetic oligonucleotide
aagauguuuccucuccgug

SEQ ID NO: 2932918 - RNA, 19 nt, Artificial Sequence
  Description of Artificial Sequence: Synthetic oligonucleotide
aaugggaaauaccaucuuu

SEQ ID NO: 2932919 - RNA, 19 nt, Artificial Sequence
  Description of Artificial Sequence: Synthetic oligonucleotide
uauuugcuucaaaucaaug

SEQ ID NO: 2932920 - RNA, 19 nt, Artificial Sequence
  Description of Artificial Sequence: Synthetic oligonucleotide
agcugaagggccuuuauga

SEQ ID NO: 2932921 - RNA, 19 nt, Artificial Sequence
  Description of Artificial Sequence: Synthetic oligonucleotide
aacuagugcgccccggguc

SEQ ID NO: 2932922 - RNA, 19 nt, Artificial Sequence
  Description of Artificial Sequence: Synthetic oligonucleotide
uaugaggagucuauauugu

SEQ ID NO: 2932923 - RNA, 19 nt, Artificial Sequence
  Description of Artificial Sequence: Synthetic oligonucleotide
uucagguagcugaagggcc

SEQ ID NO: 2932924 - RNA, 19 nt, Artificial Sequence
  Description of Artificial Sequence: Synthetic oligonucleotide
ucauagguauagccaaaag

SEQ ID NO: 2932925 - RNA, 19 nt, Artificial Sequence
  Description of Artificial Sequence: Synthetic oligonucleotide
gagucuauauugucuagac

SEQ ID NO: 2932926 - RNA, 19 nt, Artificial Sequence
  Description of Artificial Sequence: Synthetic oligonucleotide
ugcuucaaaucaaugaauu

SEQ ID NO: 2932927 - RNA, 19 nt, Artificial Sequence
  Description of Artificial Sequence: Synthetic oligonucleotide
ucaaaggguaacuuagaaa

SEQ ID NO: 2932928 - RNA, 19 nt, Artificial Sequence
  Description of Artificial Sequence: Synthetic oligonucleotide
guucagaucaccuguacuc

SEQ ID NO: 2932929 - RNA, 19 nt, Artificial Sequence
  Description of Artificial Sequence: Synthetic oligonucleotide
auugucuagacccaaggua

SEQ ID NO: 2932930 - RNA, 19 nt, Artificial Sequence
  Description of Artificial Sequence: Synthetic oligonucleotide
agguucagguagcugaagg

SEQ ID NO: 2932931 - RNA, 19 nt, Artificial Sequence
  Description of Artificial Sequence: Synthetic oligonucleotide
ucgagcuugugucacgugc

SEQ ID NO: 2932932 - RNA, 19 nt, Artificial Sequence
  Description of Artificial Sequence: Synthetic oligonucleotide
aaugaauuucuaagccagg

SEQ ID NO: 2932933 - RNA, 19 nt, Artificial Sequence
  Description of Artificial Sequence: Synthetic oligonucleotide
gguauagccaaaaggauag

SEQ ID NO: 2932934 - RNA, 19 nt, Artificial Sequence
  Description of Artificial Sequence: Synthetic oligonucleotide
guaacuuagaaaauuuaca

SEQ ID NO: 2932935 - RNA, 19 nt, Artificial Sequence
  Description of Artificial Sequence: Synthetic oligonucleotide
aauuuacauaagucagggu

SEQ ID NO: 2932936 - RNA, 19 nt, Artificial Sequence
  Description of Artificial Sequence: Synthetic oligonucleotide
ucugaaguagaaugggaaa

SEQ ID NO: 2932937 - RNA, 19 nt, Artificial Sequence
  Description of Artificial Sequence: Synthetic oligonucleotide
ucaccuguacucaaagggu

SEQ ID NO: 2932938 - RNA, 19 nt, Artificial Sequence
  Description of Artificial Sequence: Synthetic oligonucleotide
uccucuccgugguagaggg

SEQ ID NO: 2932939 - RNA, 19 nt, Artificial Sequence
  Description of Artificial Sequence: Synthetic oligonucleotide
gaucaccuguacucaaagg

SEQ ID NO: 2932940 - RNA, 19 nt, Artificial Sequence
  Description of Artificial Sequence: Synthetic oligonucleotide
aauuucuaagccagguuca

SEQ ID NO: 2932941 - RNA, 19 nt, Artificial Sequence
  Description of Artificial Sequence: Synthetic oligonucleotide
augggaaauaccaucuuuc

SEQ ID NO: 2932942 - RNA, 19 nt, Artificial Sequence
  Description of Artificial Sequence: Synthetic oligonucleotide
cugaagggccuuuaugagg

SEQ ID NO: 2932943 - RNA, 19 nt, Artificial Sequence
  Description of Artificial Sequence: Synthetic oligonucleotide
aucacggccauugguaagc

SEQ ID NO: 2932944 - RNA, 19 nt, Artificial Sequence
  Description of Artificial Sequence: Synthetic oligonucleotide
uaggcugcaaacacagucu

SEQ ID NO: 2932945 - RNA, 19 nt, Artificial Sequence
  Description of Artificial Sequence: Synthetic oligonucleotide
guaggcugcaaacacaguc

SEQ ID NO: 2932946 - RNA, 19 nt, Artificial Sequence
  Description of Artificial Sequence: Synthetic oligonucleotide
augaggagucuauauuguc

SEQ ID NO: 2932947 - RNA, 19 nt, Artificial Sequence
  Description of Artificial Sequence: Synthetic oligonucleotide
ugucuagacccaagguagg

SEQ ID NO: 2932948 - RNA, 19 nt, Artificial Sequence
  Description of Artificial Sequence: Synthetic oligonucleotide
uugauucauaccuggcagc

SEQ ID NO: 2932949 - RNA, 19 nt, Artificial Sequence
  Description of Artificial Sequence: Synthetic oligonucleotide
agaucaccuguacucaaag

SEQ ID NO: 2932950 - RNA, 19 nt, Artificial Sequence
  Description of Artificial Sequence: Synthetic oligonucleotide
acuguaauccaguaauuua

SEQ ID NO: 2932951 - RNA, 19 nt, Artificial Sequence
  Description of Artificial Sequence: Synthetic oligonucleotide
acagucugaaguagaaugg

SEQ ID NO: 2932952 - RNA, 19 nt, Artificial Sequence
  Description of Artificial Sequence: Synthetic oligonucleotide
gugguagagggcuugauuc

SEQ ID NO: 2932953 - RNA, 19 nt, Artificial Sequence
  Description of Artificial Sequence: Synthetic oligonucleotide
aagcuagucgagcuugugu

SEQ ID NO: 2932954 - RNA, 19 nt, Artificial Sequence
  Description of Artificial Sequence: Synthetic oligonucleotide
ggucucacaguucagauca

SEQ ID NO: 2932955 - RNA, 19 nt, Artificial Sequence
  Description of Artificial Sequence: Synthetic oligonucleotide
uagccaaaaggauagggua

SEQ ID NO: 2932956 - RNA, 19 nt, Artificial Sequence
  Description of Artificial Sequence: Synthetic oligonucleotide
ugggaaauaccaucuuucu

SEQ ID NO: 2932957 - RNA, 19 nt, Artificial Sequence
  Description of Artificial Sequence: Synthetic oligonucleotide
aaggguaacuuagaaaauu

SEQ ID NO: 2932958 - RNA, 19 nt, Artificial Sequence
  Description of Artificial Sequence: Synthetic oligonucleotide
gaaauaccaucuuucuaca

SEQ ID NO: 2932959 - RNA, 19 nt, Artificial Sequence
  Description of Artificial Sequence: Synthetic oligonucleotide
acggccauugguaagcugg

SEQ ID NO: 2932960 - RNA, 19 nt, Artificial Sequence
  Description of Artificial Sequence: Synthetic oligonucleotide
uagguauagccaaaaggau

SEQ ID NO: 2932961 - RNA, 19 nt, Artificial Sequence
  Description of Artificial Sequence: Synthetic oligonucleotide
gagggcuugauucauaccu

SEQ ID NO: 2932962 - RNA, 19 nt, Artificial Sequence
  Description of Artificial Sequence: Synthetic oligonucleotide
gguaacuuagaaaauuuac

SEQ ID NO: 2932963 - RNA, 19 nt, Artificial Sequence
  Description of Artificial Sequence: Synthetic oligonucleotide
uuguuguacauauuugcuu

SEQ ID NO: 2932964 - RNA, 19 nt, Artificial Sequence
  Description of Artificial Sequence: Synthetic oligonucleotide
caagguaggcugcaaacac

SEQ ID NO: 2932965 - RNA, 19 nt, Artificial Sequence
  Description of Artificial Sequence: Synthetic oligonucleotide
cuguaauccaguaauuuaa

SEQ ID NO: 2932966 - RNA, 19 nt, Artificial Sequence
  Description of Artificial Sequence: Synthetic oligonucleotide
cauucauagguauagccaa

SEQ ID NO: 2932967 - RNA, 19 nt, Artificial Sequence
  Description of Artificial Sequence: Synthetic oligonucleotide
cuagacccaagguaggcug

SEQ ID NO: 2932968 - RNA, 19 nt, Artificial Sequence
  Description of Artificial Sequence: Synthetic oligonucleotide
auccaguaauuuaagaugu

SEQ ID NO: 2932969 - RNA, 19 nt, Artificial Sequence
  Description of Artificial Sequence: Synthetic oligonucleotide
agaaugggaaauaccaucu

SEQ ID NO: 2932970 - RNA, 19 nt, Artificial Sequence
  Description of Artificial Sequence: Synthetic oligonucleotide
uguacauauuugcuucaaa

SEQ ID NO: 2932971 - RNA, 19 nt, Artificial Sequence
  Description of Artificial Sequence: Synthetic oligonucleotide
uaagauguuuccucuccgu

SEQ ID NO: 2932972 - RNA, 19 nt, Artificial Sequence
  Description of Artificial Sequence: Synthetic oligonucleotide
aacuguaauccaguaauuu

SEQ ID NO: 2932973 - RNA, 19 nt, Artificial Sequence
  Description of Artificial Sequence: Synthetic oligonucleotide
ugaauuucuaagccagguu

SEQ ID NO: 2932974 - RNA, 19 nt, Artificial Sequence
  Description of Artificial Sequence: Synthetic oligonucleotide
ggcuuagaaacuguaaucc

SEQ ID NO: 2932975 - RNA, 19 nt, Artificial Sequence
  Description of Artificial Sequence: Synthetic oligonucleotide
uugcuucaaaucaaugaau

SEQ ID NO: 2932976 - RNA, 19 nt, Artificial Sequence
  Description of Artificial Sequence: Synthetic oligonucleotide
uguuuccucuccgugguag

SEQ ID NO: 2932977 - RNA, 19 nt, Artificial Sequence
  Description of Artificial Sequence: Synthetic oligonucleotide
aguucagaucaccuguacu

SEQ ID NO: 2932978 - RNA, 19 nt, Artificial Sequence
  Description of Artificial Sequence: Synthetic oligonucleotide
agagggcuugauucauacc

SEQ ID NO: 2932979 - RNA, 19 nt, Artificial Sequence
  Description of Artificial Sequence: Synthetic oligonucleotide
gauaggguauacgccaccc

SEQ ID NO: 2932980 - RNA, 19 nt, Artificial Sequence
  Description of Artificial Sequence: Synthetic oligonucleotide
caaaucaaugaauuucuaa

SEQ ID NO: 2932981 - RNA, 19 nt, Artificial Sequence
  Description of Artificial Sequence: Synthetic oligonucleotide
uagagggcuugauucauac

SEQ ID NO: 2932982 - RNA, 19 nt, Artificial Sequence
  Description of Artificial Sequence: Synthetic oligonucleotide
caaaaggauaggguauacg

SEQ ID NO: 2932983 - RNA, 19 nt, Artificial Sequence
  Description of Artificial Sequence: Synthetic oligonucleotide
gguucagguagcugaaggg

SEQ ID NO: 2932984 - RNA, 19 nt, Artificial Sequence
  Description of Artificial Sequence: Synthetic oligonucleotide
uuucuaagccagguucagg

SEQ ID NO: 2932985 - RNA, 19 nt, Artificial Sequence
  Description of Artificial Sequence: Synthetic oligonucleotide
ucgcugucaagaaaggcau

SEQ ID NO: 2932986 - RNA, 19 nt, Artificial Sequence
  Description of Artificial Sequence: Synthetic oligonucleotide
ugauucauaccuggcagcu

SEQ ID NO: 2932987 - RNA, 19 nt, Artificial Sequence
  Description of Artificial Sequence: Synthetic oligonucleotide
uaggguauacgccacccau

SEQ ID NO: 2932988 - RNA, 19 nt, Artificial Sequence
  Description of Artificial Sequence: Synthetic oligonucleotide
uuacauaagucagggucgc

SEQ ID NO: 2932989 - RNA, 19 nt, Artificial Sequence
  Description of Artificial Sequence: Synthetic oligonucleotide
augaauuucuaagccaggu

SEQ ID NO: 2932990 - RNA, 19 nt, Artificial Sequence
  Description of Artificial Sequence: Synthetic oligonucleotide
guaauccaguaauuuaaga

SEQ ID NO: 2932991 - RNA, 19 nt, Artificial Sequence
  Description of Artificial Sequence: Synthetic oligonucleotide
cauauuugcuucaaaucaa

SEQ ID NO: 2932992 - RNA, 19 nt, Artificial Sequence
  Description of Artificial Sequence: Synthetic oligonucleotide
aggucucacaguucagauc

SEQ ID NO: 2932993 - RNA, 19 nt, Artificial Sequence
  Description of Artificial Sequence: Synthetic oligonucleotide
uagcugaagggccuuuaug

SEQ ID NO: 2932994 - RNA, 19 nt, Artificial Sequence
  Description of Artificial Sequence: Synthetic oligonucleotide
uucagaucaccuguacuca

SEQ ID NO: 2932995 - RNA, 19 nt, Artificial Sequence
  Description of Artificial Sequence: Synthetic oligonucleotide
ucaaaucaaugaauuucua

SEQ ID NO: 2932996 - RNA, 19 nt, Artificial Sequence
  Description of Artificial Sequence: Synthetic oligonucleotide
auagccaaaaggauagggu

SEQ ID NO: 2932997 - RNA, 19 nt, Artificial Sequence
  Description of Artificial Sequence: Synthetic oligonucleotide
guucagguagcugaagggc

SEQ ID NO: 2932998 - RNA, 19 nt, Artificial Sequence
  Description of Artificial Sequence: Synthetic oligonucleotide
acauaagucagggucgcug

SEQ ID NO: 2932999 - RNA, 19 nt, Artificial Sequence
  Description of Artificial Sequence: Synthetic oligonucleotide
ccauugguaagcuggaagc

SEQ ID NO: 2933000 - RNA, 19 nt, Artificial Sequence
  Description of Artificial Sequence: Synthetic oligonucleotide
uggaagcuagucgagcuug

SEQ ID NO: 2933001 - RNA, 19 nt, Artificial Sequence
  Description of Artificial Sequence: Synthetic oligonucleotide
auaccaaaaccaacuagug

SEQ ID NO: 2933002 - RNA, 19 nt, Artificial Sequence
  Description of Artificial Sequence: Synthetic oligonucleotide
agggucgcugucaagaaag

SEQ ID NO: 2933003 - RNA, 19 nt, Artificial Sequence
  Description of Artificial Sequence: Synthetic oligonucleotide
auaagucagggucgcuguc

SEQ ID NO: 2933004 - RNA, 19 nt, Artificial Sequence
  Description of Artificial Sequence: Synthetic oligonucleotide
cagucugaaguagaauggg

SEQ ID NO: 2933005 - RNA, 19 nt, Artificial Sequence
  Description of Artificial Sequence: Synthetic oligonucleotide
uacgccacccauaccaaaa

SEQ ID NO: 2933006 - RNA, 19 nt, Artificial Sequence
  Description of Artificial Sequence: Synthetic oligonucleotide
uucauaccuggcagcuagg

SEQ ID NO: 2933007 - RNA, 19 nt, Artificial Sequence
  Description of Artificial Sequence: Synthetic oligonucleotide
ugguagagggcuugauuca

SEQ ID NO: 2933008 - RNA, 19 nt, Artificial Sequence
  Description of Artificial Sequence: Synthetic oligonucleotide
aaacacagucugaaguaga

SEQ ID NO: 2933009 - RNA, 19 nt, Artificial Sequence
  Description of Artificial Sequence: Synthetic oligonucleotide
guacauauuugcuucaaau

SEQ ID NO: 2933010 - RNA, 19 nt, Artificial Sequence
  Description of Artificial Sequence: Synthetic oligonucleotide
gaggagucuauauugucua

SEQ ID NO: 2933011 - RNA, 19 nt, Artificial Sequence
  Description of Artificial Sequence: Synthetic oligonucleotide
acccauaccaaaaccaacu

SEQ ID NO: 2933012 - RNA, 19 nt, Artificial Sequence
  Description of Artificial Sequence: Synthetic oligonucleotide
cauaccuggcagcuaggcc

SEQ ID NO: 2933013 - RNA, 19 nt, Artificial Sequence
  Description of Artificial Sequence: Synthetic oligonucleotide
acuagugcgccccggguca

SEQ ID NO: 2933014 - RNA, 19 nt, Artificial Sequence
  Description of Artificial Sequence: Synthetic oligonucleotide
uguacucaaaggguaacuu

SEQ ID NO: 2933015 - RNA, 19 nt, Artificial Sequence
  Description of Artificial Sequence: Synthetic oligonucleotide
agguaggcugcaaacacag

SEQ ID NO: 2933016 - RNA, 19 nt, Artificial Sequence
  Description of Artificial Sequence: Synthetic oligonucleotide
aacacagucugaaguagaa

SEQ ID NO: 2933017 - RNA, 19 nt, Artificial Sequence
  Description of Artificial Sequence: Synthetic oligonucleotide
uucauagguauagccaaaa

SEQ ID NO: 2933018 - RNA, 19 nt, Artificial Sequence
  Description of Artificial Sequence: Synthetic oligonucleotide
auuucuaagccagguucag

SEQ ID NO: 2933019 - RNA, 19 nt, Artificial Sequence
  Description of Artificial Sequence: Synthetic oligonucleotide
agcuggaagcuagucgagc

SEQ ID NO: 2933020 - RNA, 19 nt, Artificial Sequence
  Description of Artificial Sequence: Synthetic oligonucleotide
aggagucuauauugucuag

SEQ ID NO: 2933021 - RNA, 19 nt, Artificial Sequence
  Description of Artificial Sequence: Synthetic oligonucleotide
acgccacccauaccaaaac

SEQ ID NO: 2933022 - RNA, 19 nt, Artificial Sequence
  Description of Artificial Sequence: Synthetic oligonucleotide
cuuucuacagacaggcuua

SEQ ID NO: 2933023 - RNA, 19 nt, Artificial Sequence
  Description of Artificial Sequence: Synthetic oligonucleotide
gucgcugucaagaaaggca

SEQ ID NO: 2933024 - RNA, 19 nt, Artificial Sequence
  Description of Artificial Sequence: Synthetic oligonucleotide
ucucacaguucagaucacc

SEQ ID NO: 2933025 - RNA, 19 nt, Artificial Sequence
  Description of Artificial Sequence: Synthetic oligonucleotide
cccauucauagguauagcc

SEQ ID NO: 2933026 - RNA, 19 nt, Artificial Sequence
  Description of Artificial Sequence: Synthetic oligonucleotide
uaagucagggucgcuguca

SEQ ID NO: 2933027 - RNA, 19 nt, Artificial Sequence
  Description of Artificial Sequence: Synthetic oligonucleotide
agggccuuuaugaggaguc

SEQ ID NO: 2933028 - RNA, 19 nt, Artificial Sequence
  Description of Artificial Sequence: Synthetic oligonucleotide
uagacccaagguaggcugc

SEQ ID NO: 2933029 - RNA, 19 nt, Artificial Sequence
  Description of Artificial Sequence: Synthetic oligonucleotide
aaccaacuagugcgccccg

SEQ ID NO: 2933030 - RNA, 19 nt, Artificial Sequence
  Description of Artificial Sequence: Synthetic oligonucleotide
ucauaccuggcagcuaggc

SEQ ID NO: 2933031 - RNA, 19 nt, Artificial Sequence
  Description of Artificial Sequence: Synthetic oligonucleotide
aaaggguaacuuagaaaau

SEQ ID NO: 2933032 - RNA, 19 nt, Artificial Sequence
  Description of Artificial Sequence: Synthetic oligonucleotide
uauacgccacccauaccaa

SEQ ID NO: 2933033 - RNA, 19 nt, Artificial Sequence
  Description of Artificial Sequence: Synthetic oligonucleotide
ucuagacccaagguaggcu

SEQ ID NO: 2933034 - RNA, 19 nt, Artificial Sequence
  Description of Artificial Sequence: Synthetic oligonucleotide
uuucuacagacaggcuuag

SEQ ID NO: 2933035 - RNA, 19 nt, Artificial Sequence
  Description of Artificial Sequence: Synthetic oligonucleotide
aggcugcaaacacagucug

SEQ ID NO: 2933036 - RNA, 19 nt, Artificial Sequence
  Description of Artificial Sequence: Synthetic oligonucleotide
guuguacauauuugcuuca

SEQ ID NO: 2933037 - RNA, 19 nt, Artificial Sequence
  Description of Artificial Sequence: Synthetic oligonucleotide
gauguuuccucuccguggu

SEQ ID NO: 2933038 - RNA, 19 nt, Artificial Sequence
  Description of Artificial Sequence: Synthetic oligonucleotide
uagucgagcuugugucacg

SEQ ID NO: 2933039 - RNA, 19 nt, Artificial Sequence
  Description of Artificial Sequence: Synthetic oligonucleotide
guaauuuaagauguuuccu

SEQ ID NO: 2933040 - RNA, 19 nt, Artificial Sequence
  Description of Artificial Sequence: Synthetic oligonucleotide
ucagaucaccuguacucaa

SEQ ID NO: 2933041 - RNA, 19 nt, Artificial Sequence
  Description of Artificial Sequence: Synthetic oligonucleotide
aagucagggucgcugucaa

SEQ ID NO: 2933042 - RNA, 19 nt, Artificial Sequence
  Description of Artificial Sequence: Synthetic oligonucleotide
cuacagacaggcuuagaaa

SEQ ID NO: 2933043 - RNA, 19 nt, Artificial Sequence
  Description of Artificial Sequence: Synthetic oligonucleotide
gccauugguaagcuggaag

SEQ ID NO: 2933044 - RNA, 19 nt, Artificial Sequence
  Description of Artificial Sequence: Synthetic oligonucleotide
caaaaccaacuagugcgcc

SEQ ID NO: 2933045 - RNA, 19 nt, Artificial Sequence
  Description of Artificial Sequence: Synthetic oligonucleotide
cacccauaccaaaaccaac

SEQ ID NO: 2933046 - RNA, 19 nt, Artificial Sequence
  Description of Artificial Sequence: Synthetic oligonucleotide
aagguaggcugcaaacaca

SEQ ID NO: 2933047 - RNA, 19 nt, Artificial Sequence
  Description of Artificial Sequence: Synthetic oligonucleotide
cagacaggcuuagaaacug

SEQ ID NO: 2933048 - RNA, 19 nt, Artificial Sequence
  Description of Artificial Sequence: Synthetic oligonucleotide
uuuccucuccgugguagag

SEQ ID NO: 2933049 - RNA, 19 nt, Artificial Sequence
  Description of Artificial Sequence: Synthetic oligonucleotide
uaccaucuuucuacagaca

SEQ ID NO: 2933050 - RNA, 19 nt, Artificial Sequence
  Description of Artificial Sequence: Synthetic oligonucleotide
uuccucuccgugguagagg

SEQ ID NO: 2933051 - RNA, 19 nt, Artificial Sequence
  Description of Artificial Sequence: Synthetic oligonucleotide
gggcuugauucauaccugg

SEQ ID NO: 2933052 - RNA, 19 nt, Artificial Sequence
  Description of Artificial Sequence: Synthetic oligonucleotide
auauuugcuucaaaucaau

SEQ ID NO: 2933053 - RNA, 19 nt, Artificial Sequence
  Description of Artificial Sequence: Synthetic oligonucleotide
auaggguauacgccaccca

SEQ ID NO: 2933054 - RNA, 19 nt, Artificial Sequence
  Description of Artificial Sequence: Synthetic oligonucleotide
cucaaaggguaacuuagaa

SEQ ID NO: 2933055 - RNA, 19 nt, Artificial Sequence
  Description of Artificial Sequence: Synthetic oligonucleotide
cugcaaacacagucugaag

SEQ ID NO: 2933056 - RNA, 19 nt, Artificial Sequence
  Description of Artificial Sequence: Synthetic oligonucleotide
gcugaagggccuuuaugag

SEQ ID NO: 2933057 - RNA, 19 nt, Artificial Sequence
  Description of Artificial Sequence: Synthetic oligonucleotide
agguauagccaaaaggaua

SEQ ID NO: 2933058 - RNA, 19 nt, Artificial Sequence
  Description of Artificial Sequence: Synthetic oligonucleotide
aggauaggguauacgccac

SEQ ID NO: 2933059 - RNA, 19 nt, Artificial Sequence
  Description of Artificial Sequence: Synthetic oligonucleotide
acaggucucacaguucaga

SEQ ID NO: 2933060 - RNA, 19 nt, Artificial Sequence
  Description of Artificial Sequence: Synthetic oligonucleotide
aaacuguaauccaguaauu

SEQ ID NO: 2933061 - RNA, 19 nt, Artificial Sequence
  Description of Artificial Sequence: Synthetic oligonucleotide
gucugaaguagaaugggaa

SEQ ID NO: 2933062 - RNA, 19 nt, Artificial Sequence
  Description of Artificial Sequence: Synthetic oligonucleotide
ggguauacgccacccauac

SEQ ID NO: 2933063 - RNA, 19 nt, Artificial Sequence
  Description of Artificial Sequence: Synthetic oligonucleotide
ucuaagccagguucaggua

SEQ ID NO: 2933064 - RNA, 19 nt, Artificial Sequence
  Description of Artificial Sequence: Synthetic oligonucleotide
guacucaaaggguaacuua

SEQ ID NO: 2933065 - RNA, 19 nt, Artificial Sequence
  Description of Artificial Sequence: Synthetic oligonucleotide
gccagguucagguagcuga

SEQ ID NO: 2933066 - RNA, 19 nt, Artificial Sequence
  Description of Artificial Sequence: Synthetic oligonucleotide
uccaguaauuuaagauguu

SEQ ID NO: 2933067 - RNA, 19 nt, Artificial Sequence
  Description of Artificial Sequence: Synthetic oligonucleotide
gcuugauucauaccuggca

SEQ ID NO: 2933068 - RNA, 19 nt, Artificial Sequence
  Description of Artificial Sequence: Synthetic oligonucleotide
aagggccuuuaugaggagu

SEQ ID NO: 2933069 - RNA, 19 nt, Artificial Sequence
  Description of Artificial Sequence: Synthetic oligonucleotide
ccauaccaaaaccaacuag

SEQ ID NO: 2933070 - RNA, 19 nt, Artificial Sequence
  Description of Artificial Sequence: Synthetic oligonucleotide
cuuuaugaggagucuauau

SEQ ID NO: 2933071 - RNA, 19 nt, Artificial Sequence
  Description of Artificial Sequence: Synthetic oligonucleotide
ccaaaaccaacuagugcgc

SEQ ID NO: 2933072 - RNA, 19 nt, Artificial Sequence
  Description of Artificial Sequence: Synthetic oligonucleotide
gcuugugucacgugcaaga

SEQ ID NO: 2933073 - RNA, 19 nt, Artificial Sequence
  Description of Artificial Sequence: Synthetic oligonucleotide
ccaucuuucuacagacagg

SEQ ID NO: 2933074 - RNA, 19 nt, Artificial Sequence
  Description of Artificial Sequence: Synthetic oligonucleotide
uuguacauauuugcuucaa

SEQ ID NO: 2933075 - RNA, 19 nt, Artificial Sequence
  Description of Artificial Sequence: Synthetic oligonucleotide
cuagucgagcuugugucac

SEQ ID NO: 2933076 - RNA, 19 nt, Artificial Sequence
  Description of Artificial Sequence: Synthetic oligonucleotide
agucugaaguagaauggga

SEQ ID NO: 2933077 - RNA, 19 nt, Artificial Sequence
  Description of Artificial Sequence: Synthetic oligonucleotide
caucacggccauugguaag

SEQ ID NO: 2933078 - RNA, 19 nt, Artificial Sequence
  Description of Artificial Sequence: Synthetic oligonucleotide
guauagccaaaaggauagg

SEQ ID NO: 2933079 - RNA, 19 nt, Artificial Sequence
  Description of Artificial Sequence: Synthetic oligonucleotide
agaaaggcaucacggccau

SEQ ID NO: 2933080 - RNA, 19 nt, Artificial Sequence
  Description of Artificial Sequence: Synthetic oligonucleotide
ucagggucgcugucaagaa

SEQ ID NO: 2933081 - RNA, 19 nt, Artificial Sequence
  Description of Artificial Sequence: Synthetic oligonucleotide
auugguaagcuggaagcua

SEQ ID NO: 2933082 - RNA, 19 nt, Artificial Sequence
  Description of Artificial Sequence: Synthetic oligonucleotide
aggguaacuuagaaaauuu

SEQ ID NO: 2933083 - RNA, 19 nt, Artificial Sequence
  Description of Artificial Sequence: Synthetic oligonucleotide
ccauucauagguauagcca

SEQ ID NO: 2933084 - RNA, 19 nt, Artificial Sequence
  Description of Artificial Sequence: Synthetic oligonucleotide
gcuuagaaacuguaaucca

SEQ ID NO: 2933085 - RNA, 19 nt, Artificial Sequence
  Description of Artificial Sequence: Synthetic oligonucleotide
caguucagaucaccuguac

SEQ ID NO: 2933086 - RNA, 19 nt, Artificial Sequence
  Description of Artificial Sequence: Synthetic oligonucleotide
gaagcuagucgagcuugug

SEQ ID NO: 2933087 - RNA, 19 nt, Artificial Sequence
  Description of Artificial Sequence: Synthetic oligonucleotide
aagcuggaagcuagucgag

SEQ ID NO: 2933088 - RNA, 19 nt, Artificial Sequence
  Description of Artificial Sequence: Synthetic oligonucleotide
gucuagacccaagguaggc

SEQ ID NO: 2933089 - RNA, 19 nt, Artificial Sequence
  Description of Artificial Sequence: Synthetic oligonucleotide
ugguaagcuggaagcuagu

SEQ ID NO: 2933090 - RNA, 19 nt, Artificial Sequence
  Description of Artificial Sequence: Synthetic oligonucleotide
ucauggcacaggucucaca

SEQ ID NO: 2933091 - RNA, 19 nt, Artificial Sequence
  Description of Artificial Sequence: Synthetic oligonucleotide
gcaaacacagucugaagua

SEQ ID NO: 2933092 - RNA, 19 nt, Artificial Sequence
  Description of Artificial Sequence: Synthetic oligonucleotide
aggcaucacggccauuggu

SEQ ID NO: 2933093 - RNA, 19 nt, Artificial Sequence
  Description of Artificial Sequence: Synthetic oligonucleotide
agccaaaaggauaggguau

SEQ ID NO: 2933094 - RNA, 19 nt, Artificial Sequence
  Description of Artificial Sequence: Synthetic oligonucleotide
gaagggccuuuaugaggag

SEQ ID NO: 2933095 - RNA, 19 nt, Artificial Sequence
  Description of Artificial Sequence: Synthetic oligonucleotide
acucaaaggguaacuuaga

SEQ ID NO: 2933096 - RNA, 19 nt, Artificial Sequence
  Description of Artificial Sequence: Synthetic oligonucleotide
cucacaguucagaucaccu

SEQ ID NO: 2933097 - RNA, 19 nt, Artificial Sequence
  Description of Artificial Sequence: Synthetic oligonucleotide
gcacaggucucacaguuca

SEQ ID NO: 2933098 - RNA, 19 nt, Artificial Sequence
  Description of Artificial Sequence: Synthetic oligonucleotide
gcugucaagaaaggcauca

SEQ ID NO: 2933099 - RNA, 19 nt, Artificial Sequence
  Description of Artificial Sequence: Synthetic oligonucleotide
acaggcuuagaaacuguaa

SEQ ID NO: 2933100 - RNA, 19 nt, Artificial Sequence
  Description of Artificial Sequence: Synthetic oligonucleotide
agugcgccccgggucaugg

SEQ ID NO: 2933101 - RNA, 19 nt, Artificial Sequence
  Description of Artificial Sequence: Synthetic oligonucleotide
agggcuugauucauaccug

SEQ ID NO: 2933102 - RNA, 19 nt, Artificial Sequence
  Description of Artificial Sequence: Synthetic oligonucleotide
cauaagucagggucgcugu

SEQ ID NO: 2933103 - RNA, 19 nt, Artificial Sequence
  Description of Artificial Sequence: Synthetic oligonucleotide
agucgagcuugugucacgu

SEQ ID NO: 2933104 - RNA, 19 nt, Artificial Sequence
  Description of Artificial Sequence: Synthetic oligonucleotide
cugucaagaaaggcaucac

SEQ ID NO: 2933105 - RNA, 19 nt, Artificial Sequence
  Description of Artificial Sequence: Synthetic oligonucleotide
agcuugugucacgugcaag

SEQ ID NO: 2933106 - RNA, 19 nt, Artificial Sequence
  Description of Artificial Sequence: Synthetic oligonucleotide
caggcuuagaaacuguaau

SEQ ID NO: 2933107 - RNA, 19 nt, Artificial Sequence
  Description of Artificial Sequence: Synthetic oligonucleotide
cacaggucucacaguucag

SEQ ID NO: 2933108 - RNA, 19 nt, Artificial Sequence
  Description of Artificial Sequence: Synthetic oligonucleotide
accaacuagugcgccccgg

SEQ ID NO: 2933109 - RNA, 19 nt, Artificial Sequence
  Description of Artificial Sequence: Synthetic oligonucleotide
acccaagguaggcugcaaa

SEQ ID NO: 2933110 - RNA, 19 nt, Artificial Sequence
  Description of Artificial Sequence: Synthetic oligonucleotide
cccaagguaggcugcaaac

SEQ ID NO: 2933111 - RNA, 19 nt, Artificial Sequence
  Description of Artificial Sequence: Synthetic oligonucleotide
caccuguacucaaagggua

SEQ ID NO: 2933112 - RNA, 19 nt, Artificial Sequence
  Description of Artificial Sequence: Synthetic oligonucleotide
ggagucuauauugucuaga

SEQ ID NO: 2933113 - RNA, 19 nt, Artificial Sequence
  Description of Artificial Sequence: Synthetic oligonucleotide
gcugcaaacacagucugaa

SEQ ID NO: 2933114 - RNA, 19 nt, Artificial Sequence
  Description of Artificial Sequence: Synthetic oligonucleotide
ggauaggguauacgccacc

SEQ ID NO: 2933115 - RNA, 19 nt, Artificial Sequence
  Description of Artificial Sequence: Synthetic oligonucleotide
auacgccacccauaccaaa

SEQ ID NO: 2933116 - RNA, 19 nt, Artificial Sequence
  Description of Artificial Sequence: Synthetic oligonucleotide
gacaggcuuagaaacugua

SEQ ID NO: 2933117 - RNA, 19 nt, Artificial Sequence
  Description of Artificial Sequence: Synthetic oligonucleotide
cuauauugucuagacccaa

SEQ ID NO: 2933118 - RNA, 19 nt, Artificial Sequence
  Description of Artificial Sequence: Synthetic oligonucleotide
agucagggucgcugucaag

SEQ ID NO: 2933119 - RNA, 19 nt, Artificial Sequence
  Description of Artificial Sequence: Synthetic oligonucleotide
cugaaguagaaugggaaau

SEQ ID NO: 2933120 - RNA, 19 nt, Artificial Sequence
  Description of Artificial Sequence: Synthetic oligonucleotide
uucuacagacaggcuuaga

SEQ ID NO: 2933121 - RNA, 19 nt, Artificial Sequence
  Description of Artificial Sequence: Synthetic oligonucleotide
acacagucugaaguagaau

SEQ ID NO: 2933122 - RNA, 19 nt, Artificial Sequence
  Description of Artificial Sequence: Synthetic oligonucleotide
ccaacuagugcgccccggg

SEQ ID NO: 2933123 - RNA, 19 nt, Artificial Sequence
  Description of Artificial Sequence: Synthetic oligonucleotide
uacauaagucagggucgcu

SEQ ID NO: 2933124 - RNA, 19 nt, Artificial Sequence
  Description of Artificial Sequence: Synthetic oligonucleotide
cagaucaccuguacucaaa

SEQ ID NO: 2933125 - RNA, 19 nt, Artificial Sequence
  Description of Artificial Sequence: Synthetic oligonucleotide
gguauacgccacccauacc

SEQ ID NO: 2933126 - RNA, 19 nt, Artificial Sequence
  Description of Artificial Sequence: Synthetic oligonucleotide
agacaggcuuagaaacugu

SEQ ID NO: 2933127 - RNA, 19 nt, Artificial Sequence
  Description of Artificial Sequence: Synthetic oligonucleotide
guagaaugggaaauaccau

SEQ ID NO: 2933128 - RNA, 19 nt, Artificial Sequence
  Description of Artificial Sequence: Synthetic oligonucleotide
gaaugggaaauaccaucuu

SEQ ID NO: 2933129 - RNA, 19 nt, Artificial Sequence
  Description of Artificial Sequence: Synthetic oligonucleotide
gagcuugugucacgugcaa

SEQ ID NO: 2933130 - RNA, 19 nt, Artificial Sequence
  Description of Artificial Sequence: Synthetic oligonucleotide
gccacccauaccaaaacca

SEQ ID NO: 2933131 - RNA, 19 nt, Artificial Sequence
  Description of Artificial Sequence: Synthetic oligonucleotide
ggucgcugucaagaaaggc

SEQ ID NO: 2933132 - RNA, 19 nt, Artificial Sequence
  Description of Artificial Sequence: Synthetic oligonucleotide
gguaagcuggaagcuaguc

SEQ ID NO: 2933133 - RNA, 19 nt, Artificial Sequence
  Description of Artificial Sequence: Synthetic oligonucleotide
accuguacucaaaggguaa

SEQ ID NO: 2933134 - RNA, 19 nt, Artificial Sequence
  Description of Artificial Sequence: Synthetic oligonucleotide
gcuagucgagcuuguguca

SEQ ID NO: 2933135 - RNA, 19 nt, Artificial Sequence
  Description of Artificial Sequence: Synthetic oligonucleotide
ggcuugauucauaccuggc

SEQ ID NO: 2933136 - RNA, 19 nt, Artificial Sequence
  Description of Artificial Sequence: Synthetic oligonucleotide
agacccaagguaggcugca

SEQ ID NO: 2933137 - RNA, 19 nt, Artificial Sequence
  Description of Artificial Sequence: Synthetic oligonucleotide
acaguucagaucaccugua

SEQ ID NO: 2933138 - RNA, 19 nt, Artificial Sequence
  Description of Artificial Sequence: Synthetic oligonucleotide
gucgagcuugugucacgug

SEQ ID NO: 2933139 - RNA, 19 nt, Artificial Sequence
  Description of Artificial Sequence: Synthetic oligonucleotide
cagguucagguagcugaag

SEQ ID NO: 2933140 - RNA, 19 nt, Artificial Sequence
  Description of Artificial Sequence: Synthetic oligonucleotide
ucacggccauugguaagcu

SEQ ID NO: 2933141 - RNA, 19 nt, Artificial Sequence
  Description of Artificial Sequence: Synthetic oligonucleotide
aucuuucuacagacaggcu

SEQ ID NO: 2933142 - RNA, 19 nt, Artificial Sequence
  Description of Artificial Sequence: Synthetic oligonucleotide
uccgugguagagggcuuga

SEQ ID NO: 2933143 - RNA, 19 nt, Artificial Sequence
  Description of Artificial Sequence: Synthetic oligonucleotide
gauucauaccuggcagcua

SEQ ID NO: 2933144 - RNA, 19 nt, Artificial Sequence
  Description of Artificial Sequence: Synthetic oligonucleotide
gcuggaagcuagucgagcu

SEQ ID NO: 2933145 - RNA, 19 nt, Artificial Sequence
  Description of Artificial Sequence: Synthetic oligonucleotide
cauugguaagcuggaagcu

SEQ ID NO: 2933146 - RNA, 19 nt, Artificial Sequence
  Description of Artificial Sequence: Synthetic oligonucleotide
cucuccgugguagagggcu

SEQ ID NO: 2933147 - RNA, 19 nt, Artificial Sequence
  Description of Artificial Sequence: Synthetic oligonucleotide
cacggccauugguaagcug

SEQ ID NO: 2933148 - RNA, 19 nt, Artificial Sequence
  Description of Artificial Sequence: Synthetic oligonucleotide
ggcaucacggccauuggua

SEQ ID NO: 2933149 - RNA, 19 nt, Artificial Sequence
  Description of Artificial Sequence: Synthetic oligonucleotide
ggguaacuuagaaaauuua

SEQ ID NO: 2933150 - RNA, 19 nt, Artificial Sequence
  Description of Artificial Sequence: Synthetic oligonucleotide
gggucgcugucaagaaagg

SEQ ID NO: 2933151 - RNA, 19 nt, Artificial Sequence
  Description of Artificial Sequence: Synthetic oligonucleotide
gcaucacggccauugguaa

SEQ ID NO: 2933152 - RNA, 19 nt, Artificial Sequence
  Description of Artificial Sequence: Synthetic oligonucleotide
ccaaaaggauaggguauac

SEQ ID NO: 2933153 - RNA, 19 nt, Artificial Sequence
  Description of Artificial Sequence: Synthetic oligonucleotide
gucauggcacaggucucac

SEQ ID NO: 2933154 - RNA, 19 nt, Artificial Sequence
  Description of Artificial Sequence: Synthetic oligonucleotide
gcuucaaaucaaugaauuu

SEQ ID NO: 2933155 - RNA, 19 nt, Artificial Sequence
  Description of Artificial Sequence: Synthetic oligonucleotide
ccuguacucaaaggguaac

SEQ ID NO: 2933156 - RNA, 19 nt, Artificial Sequence
  Description of Artificial Sequence: Synthetic oligonucleotide
cuccgugguagagggcuug

SEQ ID NO: 2933157 - RNA, 19 nt, Artificial Sequence
  Description of Artificial Sequence: Synthetic oligonucleotide
aggguauacgccacccaua

SEQ ID NO: 2933158 - RNA, 19 nt, Artificial Sequence
  Description of Artificial Sequence: Synthetic oligonucleotide
guagcugaagggccuuuau

SEQ ID NO: 2933159 - RNA, 19 nt, Artificial Sequence
  Description of Artificial Sequence: Synthetic oligonucleotide
caggucucacaguucagau

SEQ ID NO: 2933160 - RNA, 19 nt, Artificial Sequence
  Description of Artificial Sequence: Synthetic oligonucleotide
ggucauggcacaggucuca

SEQ ID NO: 2933161 - RNA, 19 nt, Artificial Sequence
  Description of Artificial Sequence: Synthetic oligonucleotide
agccagguucagguagcug

SEQ ID NO: 2933162 - RNA, 19 nt, Artificial Sequence
  Description of Artificial Sequence: Synthetic oligonucleotide
ccacccauaccaaaaccaa

SEQ ID NO: 2933163 - RNA, 19 nt, Artificial Sequence
  Description of Artificial Sequence: Synthetic oligonucleotide
cuguacucaaaggguaacu

SEQ ID NO: 2933164 - RNA, 19 nt, Artificial Sequence
  Description of Artificial Sequence: Synthetic oligonucleotide
auguuuccucuccguggua

SEQ ID NO: 2933165 - RNA, 19 nt, Artificial Sequence
  Description of Artificial Sequence: Synthetic oligonucleotide
gccaaaaggauaggguaua

SEQ ID NO: 2933166 - RNA, 19 nt, Artificial Sequence
  Description of Artificial Sequence: Synthetic oligonucleotide
guagagggcuugauucaua

SEQ ID NO: 2933167 - RNA, 19 nt, Artificial Sequence
  Description of Artificial Sequence: Synthetic oligonucleotide
cagggucgcugucaagaaa

SEQ ID NO: 2933168 - RNA, 19 nt, Artificial Sequence
  Description of Artificial Sequence: Synthetic oligonucleotide
gucucacaguucagaucac

SEQ ID NO: 2933169 - RNA, 19 nt, Artificial Sequence
  Description of Artificial Sequence: Synthetic oligonucleotide
cuugugucacgugcaagau

SEQ ID NO: 2933170 - RNA, 19 nt, Artificial Sequence
  Description of Artificial Sequence: Synthetic oligonucleotide
cgccacccauaccaaaacc

SEQ ID NO: 2933171 - RNA, 19 nt, Artificial Sequence
  Description of Artificial Sequence: Synthetic oligonucleotide
ccccauucauagguauagc

SEQ ID NO: 2933172 - RNA, 19 nt, Artificial Sequence
  Description of Artificial Sequence: Synthetic oligonucleotide
cgagcuugugucacgugca

SEQ ID NO: 2933173 - RNA, 19 nt, Artificial Sequence
  Description of Artificial Sequence: Synthetic oligonucleotide
caacuagugcgccccgggu

SEQ ID NO: 2933174 - RNA, 19 nt, Artificial Sequence
  Description of Artificial Sequence: Synthetic oligonucleotide
uagugcgccccgggucaug

SEQ ID NO: 2933175 - RNA, 19 nt, Artificial Sequence
  Description of Artificial Sequence: Synthetic oligonucleotide
ggcacaggucucacaguuc

SEQ ID NO: 2933176 - RNA, 19 nt, Artificial Sequence
  Description of Artificial Sequence: Synthetic oligonucleotide
cccauaccaaaaccaacua

SEQ ID NO: 2933177 - RNA, 19 nt, Artificial Sequence
  Description of Artificial Sequence: Synthetic oligonucleotide
gacccaagguaggcugcaa

SEQ ID NO: 2933178 - RNA, 19 nt, Artificial Sequence
  Description of Artificial Sequence: Synthetic oligonucleotide
ccagguucagguagcugaa

SEQ ID NO: 2933179 - RNA, 19 nt, Artificial Sequence
  Description of Artificial Sequence: Synthetic oligonucleotide
ggcugcaaacacagucuga

SEQ ID NO: 2933180 - RNA, 19 nt, Artificial Sequence
  Description of Artificial Sequence: Synthetic oligonucleotide
ggccuuuaugaggagucua

SEQ ID NO: 2933181 - RNA, 19 nt, Artificial Sequence
  Description of Artificial Sequence: Synthetic oligonucleotide
cuggaagcuagucgagcuu

SEQ ID NO: 2933182 - RNA, 19 nt, Artificial Sequence
  Description of Artificial Sequence: Synthetic oligonucleotide
gguagagggcuugauucau

SEQ ID NO: 2933183 - RNA, 19 nt, Artificial Sequence
  Description of Artificial Sequence: Synthetic oligonucleotide
agguagcugaagggccuuu

SEQ ID NO: 2933184 - RNA, 19 nt, Artificial Sequence
  Description of Artificial Sequence: Synthetic oligonucleotide
gccuuuaugaggagucuau

SEQ ID NO: 2933185 - RNA, 19 nt, Artificial Sequence
  Description of Artificial Sequence: Synthetic oligonucleotide
gugcgccccgggucauggc

SEQ ID NO: 2933186 - RNA, 19 nt, Artificial Sequence
  Description of Artificial Sequence: Synthetic oligonucleotide
ccuuuaugaggagucuaua

SEQ ID NO: 2933187 - RNA, 19 nt, Artificial Sequence
  Description of Artificial Sequence: Synthetic oligonucleotide
ccucuccgugguagagggc

SEQ ID NO: 2933188 - RNA, 19 nt, Artificial Sequence
  Description of Artificial Sequence: Synthetic oligonucleotide
cgcugucaagaaaggcauc

SEQ ID NO: 2933189 - RNA, 19 nt, Artificial Sequence
  Description of Artificial Sequence: Synthetic oligonucleotide
ggaagcuagucgagcuugu

SEQ ID NO: 2933190 - RNA, 19 nt, Artificial Sequence
  Description of Artificial Sequence: Synthetic oligonucleotide
ccccgggucauggcacagg

SEQ ID NO: 2933191 - RNA, 19 nt, Artificial Sequence
  Description of Artificial Sequence: Synthetic oligonucleotide
ggccauugguaagcuggaa

SEQ ID NO: 2933192 - RNA, 19 nt, Artificial Sequence
  Description of Artificial Sequence: Synthetic oligonucleotide
gggccuuuaugaggagucu

SEQ ID NO: 2933193 - RNA, 19 nt, Artificial Sequence
  Description of Artificial Sequence: Synthetic oligonucleotide
gguaggcugcaaacacagu

SEQ ID NO: 2933194 - RNA, 19 nt, Artificial Sequence
  Description of Artificial Sequence: Synthetic oligonucleotide
cggccauugguaagcugga

SEQ ID NO: 2933195 - RNA, 19 nt, Artificial Sequence
  Description of Artificial Sequence: Synthetic oligonucleotide
gcgccccgggucauggcac

SEQ ID NO: 2933196 - RNA, 19 nt, Artificial Sequence
  Description of Artificial Sequence: Synthetic oligonucleotide
cccgggucauggcacaggu

SEQ ID NO: 2933197 - RNA, 19 nt, Artificial Sequence
  Description of Artificial Sequence: Synthetic oligonucleotide
gccccgggucauggcacag

SEQ ID NO: 2933198 - RNA, 19 nt, Artificial Sequence
  Description of Artificial Sequence: Synthetic oligonucleotide
gaaaggcaucacggccauu

SEQ ID NO: 2933199 - RNA, 19 nt, Artificial Sequence
  Description of Artificial Sequence: Synthetic oligonucleotide
cgugguagagggcuugauu

SEQ ID NO: 2933200 - RNA, 19 nt, Artificial Sequence
  Description of Artificial Sequence: Synthetic oligonucleotide
cagguagcugaagggccuu

SEQ ID NO: 2933201 - RNA, 19 nt, Artificial Sequence
  Description of Artificial Sequence: Synthetic oligonucleotide
cuagugcgccccgggucau

SEQ ID NO: 2933202 - RNA, 19 nt, Artificial Sequence
  Description of Artificial Sequence: Synthetic oligonucleotide
cgccccgggucauggcaca

SEQ ID NO: 2933203 - RNA, 19 nt, Artificial Sequence
  Description of Artificial Sequence: Synthetic oligonucleotide
ccgugguagagggcuugau

SEQ ID NO: 2933204 - RNA, 19 nt, Artificial Sequence
  Description of Artificial Sequence: Synthetic oligonucleotide
guuaauguuacccaccagg

SEQ ID NO: 2933205 - RNA, 19 nt, Artificial Sequence
  Description of Artificial Sequence: Synthetic oligonucleotide
aauguuacccaccaggaca

SEQ ID NO: 2933206 - RNA, 19 nt, Artificial Sequence
  Description of Artificial Sequence: Synthetic oligonucleotide
uucaguugcaagcacacgg

SEQ ID NO: 2933207 - RNA, 19 nt, Artificial Sequence
  Description of Artificial Sequence: Synthetic oligonucleotide
uuuuccaaaauguucauga

SEQ ID NO: 2933208 - RNA, 19 nt, Artificial Sequence
  Description of Artificial Sequence: Synthetic oligonucleotide
augauguucaguugcaagc

SEQ ID NO: 2933209 - RNA, 19 nt, Artificial Sequence
  Description of Artificial Sequence: Synthetic oligonucleotide
aacgugaggcccuugaagg

SEQ ID NO: 2933210 - RNA, 19 nt, Artificial Sequence
  Description of Artificial Sequence: Synthetic oligonucleotide
guaguuauggucuccaucc

SEQ ID NO: 2933211 - RNA, 19 nt, Artificial Sequence
  Description of Artificial Sequence: Synthetic oligonucleotide
ucuucaaggacuuucagua

SEQ ID NO: 2933212 - RNA, 19 nt, Artificial Sequence
  Description of Artificial Sequence: Synthetic oligonucleotide
ugucagacaagaucagucg

SEQ ID NO: 2933213 - RNA, 19 nt, Artificial Sequence
  Description of Artificial Sequence: Synthetic oligonucleotide
agaaguucccugaugagcc

SEQ ID NO: 2933214 - RNA, 19 nt, Artificial Sequence
  Description of Artificial Sequence: Synthetic oligonucleotide
uuaauguuacccaccagga

SEQ ID NO: 2933215 - RNA, 19 nt, Artificial Sequence
  Description of Artificial Sequence: Synthetic oligonucleotide
ucaguaaccacuuuuccaa

SEQ ID NO: 2933216 - RNA, 19 nt, Artificial Sequence
  Description of Artificial Sequence: Synthetic oligonucleotide
cacaaggauguguagaggg

SEQ ID NO: 2933217 - RNA, 19 nt, Artificial Sequence
  Description of Artificial Sequence: Synthetic oligonucleotide
aaggacuuucaguaaccac

SEQ ID NO: 2933218 - RNA, 19 nt, Artificial Sequence
  Description of Artificial Sequence: Synthetic oligonucleotide
gagccuuauguuuugcugg

SEQ ID NO: 2933219 - RNA, 19 nt, Artificial Sequence
  Description of Artificial Sequence: Synthetic oligonucleotide
guuuugcuggucuucaagg

SEQ ID NO: 2933220 - RNA, 19 nt, Artificial Sequence
  Description of Artificial Sequence: Synthetic oligonucleotide
ucaguugcaagcacacggg

SEQ ID NO: 2933221 - RNA, 19 nt, Artificial Sequence
  Description of Artificial Sequence: Synthetic oligonucleotide
guucaugaaguucuucugg

SEQ ID NO: 2933222 - RNA, 19 nt, Artificial Sequence
  Description of Artificial Sequence: Synthetic oligonucleotide
aagugguacuggcaaaguc

SEQ ID NO: 2933223 - RNA, 19 nt, Artificial Sequence
  Description of Artificial Sequence: Synthetic oligonucleotide
aggucggugaacgugaggc

SEQ ID NO: 2933224 - RNA, 19 nt, Artificial Sequence
  Description of Artificial Sequence: Synthetic oligonucleotide
ucccugaugagccuuaugu

SEQ ID NO: 2933225 - RNA, 19 nt, Artificial Sequence
  Description of Artificial Sequence: Synthetic oligonucleotide
aacucucuggaccagcaug

SEQ ID NO: 2933226 - RNA, 19 nt, Artificial Sequence
  Description of Artificial Sequence: Synthetic oligonucleotide
gacaagaucagucgcuugc

SEQ ID NO: 2933227 - RNA, 19 nt, Artificial Sequence
  Description of Artificial Sequence: Synthetic oligonucleotide
ugcacaaggauguguagag

SEQ ID NO: 2933228 - RNA, 19 nt, Artificial Sequence
  Description of Artificial Sequence: Synthetic oligonucleotide
cuugccaacucucuggacc

SEQ ID NO: 2933229 - RNA, 19 nt, Artificial Sequence
  Description of Artificial Sequence: Synthetic oligonucleotide
ugagaagugguacuggcaa

SEQ ID NO: 2933230 - RNA, 19 nt, Artificial Sequence
  Description of Artificial Sequence: Synthetic oligonucleotide
uucaguaaccacuuuucca

SEQ ID NO: 2933231 - RNA, 19 nt, Artificial Sequence
  Description of Artificial Sequence: Synthetic oligonucleotide
uguuuugcuggucuucaag

SEQ ID NO: 2933232 - RNA, 19 nt, Artificial Sequence
  Description of Artificial Sequence: Synthetic oligonucleotide
agugguacuggcaaagucg

SEQ ID NO: 2933233 - RNA, 19 nt, Artificial Sequence
  Description of Artificial Sequence: Synthetic oligonucleotide
uuucaguaaccacuuuucc

SEQ ID NO: 2933234 - RNA, 19 nt, Artificial Sequence
  Description of Artificial Sequence: Synthetic oligonucleotide
uucaugaaguucuucuggc

SEQ ID NO: 2933235 - RNA, 19 nt, Artificial Sequence
  Description of Artificial Sequence: Synthetic oligonucleotide
uucaaggacuuucaguaac

SEQ ID NO: 2933236 - RNA, 19 nt, Artificial Sequence
  Description of Artificial Sequence: Synthetic oligonucleotide
ucaugaaguucuucuggcg

SEQ ID NO: 2933237 - RNA, 19 nt, Artificial Sequence
  Description of Artificial Sequence: Synthetic oligonucleotide
uugucagacaagaucaguc

SEQ ID NO: 2933238 - RNA, 19 nt, Artificial Sequence
  Description of Artificial Sequence: Synthetic oligonucleotide
agacuugccaacucucugg

SEQ ID NO: 2933239 - RNA, 19 nt, Artificial Sequence
  Description of Artificial Sequence: Synthetic oligonucleotide
agucgcuuccacaacagcc

SEQ ID NO: 2933240 - RNA, 19 nt, Artificial Sequence
  Description of Artificial Sequence: Synthetic oligonucleotide
ucaaggacuuucaguaacc

SEQ ID NO: 2933241 - RNA, 19 nt, Artificial Sequence
  Description of Artificial Sequence: Synthetic oligonucleotide
uugaaggcaggccugguga

SEQ ID NO: 2933242 - RNA, 19 nt, Artificial Sequence
  Description of Artificial Sequence: Synthetic oligonucleotide
cuuucaguaaccacuuuuc

SEQ ID NO: 2933243 - RNA, 19 nt, Artificial Sequence
  Description of Artificial Sequence: Synthetic oligonucleotide
cucacugagcacaugcagg

SEQ ID NO: 2933244 - RNA, 19 nt, Artificial Sequence
  Description of Artificial Sequence: Synthetic oligonucleotide
ugagccuuauguuuugcug

SEQ ID NO: 2933245 - RNA, 19 nt, Artificial Sequence
  Description of Artificial Sequence: Synthetic oligonucleotide
acguguuaauguuacccac

SEQ ID NO: 2933246 - RNA, 19 nt, Artificial Sequence
  Description of Artificial Sequence: Synthetic oligonucleotide
uaaccacuuuuccaaaaug

SEQ ID NO: 2933247 - RNA, 19 nt, Artificial Sequence
  Description of Artificial Sequence: Synthetic oligonucleotide
guugcaagcacacgggcag

SEQ ID NO: 2933248 - RNA, 19 nt, Artificial Sequence
  Description of Artificial Sequence: Synthetic oligonucleotide
aagucgcuuccacaacagc

SEQ ID NO: 2933249 - RNA, 19 nt, Artificial Sequence
  Description of Artificial Sequence: Synthetic oligonucleotide
aguuauggucuccauccgg

SEQ ID NO: 2933250 - RNA, 19 nt, Artificial Sequence
  Description of Artificial Sequence: Synthetic oligonucleotide
aauguucaugaaguucuuc

SEQ ID NO: 2933251 - RNA, 19 nt, Artificial Sequence
  Description of Artificial Sequence: Synthetic oligonucleotide
cuggaugccgcucagcugc

SEQ ID NO: 2933252 - RNA, 19 nt, Artificial Sequence
  Description of Artificial Sequence: Synthetic oligonucleotide
caugauguucaguugcaag

SEQ ID NO: 2933253 - RNA, 19 nt, Artificial Sequence
  Description of Artificial Sequence: Synthetic oligonucleotide
cacuuuuccaaaauguuca

SEQ ID NO: 2933254 - RNA, 19 nt, Artificial Sequence
  Description of Artificial Sequence: Synthetic oligonucleotide
ucugagaagugguacuggc

SEQ ID NO: 2933255 - RNA, 19 nt, Artificial Sequence
  Description of Artificial Sequence: Synthetic oligonucleotide
uguaguuauggucuccauc

SEQ ID NO: 2933256 - RNA, 19 nt, Artificial Sequence
  Description of Artificial Sequence: Synthetic oligonucleotide
uguucaguugcaagcacac

SEQ ID NO: 2933257 - RNA, 19 nt, Artificial Sequence
  Description of Artificial Sequence: Synthetic oligonucleotide
aagaucagucgcuugcgga

SEQ ID NO: 2933258 - RNA, 19 nt, Artificial Sequence
  Description of Artificial Sequence: Synthetic oligonucleotide
ucagacaagaucagucgcu

SEQ ID NO: 2933259 - RNA, 19 nt, Artificial Sequence
  Description of Artificial Sequence: Synthetic oligonucleotide
uuugcuggucuucaaggac

SEQ ID NO: 2933260 - RNA, 19 nt, Artificial Sequence
  Description of Artificial Sequence: Synthetic oligonucleotide
aaccacuuuuccaaaaugu

SEQ ID NO: 2933261 - RNA, 19 nt, Artificial Sequence
  Description of Artificial Sequence: Synthetic oligonucleotide
gaacgugaggcccuugaag

SEQ ID NO: 2933262 - RNA, 19 nt, Artificial Sequence
  Description of Artificial Sequence: Synthetic oligonucleotide
aaucucugcaugauguuca

SEQ ID NO: 2933263 - RNA, 19 nt, Artificial Sequence
  Description of Artificial Sequence: Synthetic oligonucleotide
cugcaugauguucaguugc

SEQ ID NO: 2933264 - RNA, 19 nt, Artificial Sequence
  Description of Artificial Sequence: Synthetic oligonucleotide
uuuugcuggucuucaagga

SEQ ID NO: 2933265 - RNA, 19 nt, Artificial Sequence
  Description of Artificial Sequence: Synthetic oligonucleotide
aggacuuucaguaaccacu

SEQ ID NO: 2933266 - RNA, 19 nt, Artificial Sequence
  Description of Artificial Sequence: Synthetic oligonucleotide
gagaaguucccugaugagc

SEQ ID NO: 2933267 - RNA, 19 nt, Artificial Sequence
  Description of Artificial Sequence: Synthetic oligonucleotide
gucuccauccgguacaccc

SEQ ID NO: 2933268 - RNA, 19 nt, Artificial Sequence
  Description of Artificial Sequence: Synthetic oligonucleotide
acugagcacaugcaggucu

SEQ ID NO: 2933269 - RNA, 19 nt, Artificial Sequence
  Description of Artificial Sequence: Synthetic oligonucleotide
ugauguucaguugcaagca

SEQ ID NO: 2933270 - RNA, 19 nt, Artificial Sequence
  Description of Artificial Sequence: Synthetic oligonucleotide
uugcuggucuucaaggacu

SEQ ID NO: 2933271 - RNA, 19 nt, Artificial Sequence
  Description of Artificial Sequence: Synthetic oligonucleotide
acucucuggaccagcaugc

SEQ ID NO: 2933272 - RNA, 19 nt, Artificial Sequence
  Description of Artificial Sequence: Synthetic oligonucleotide
uaauguuacccaccaggac

SEQ ID NO: 2933273 - RNA, 19 nt, Artificial Sequence
  Description of Artificial Sequence: Synthetic oligonucleotide
acuuucaguaaccacuuuu

SEQ ID NO: 2933274 - RNA, 19 nt, Artificial Sequence
  Description of Artificial Sequence: Synthetic oligonucleotide
ucugcaugauguucaguug

SEQ ID NO: 2933275 - RNA, 19 nt, Artificial Sequence
  Description of Artificial Sequence: Synthetic oligonucleotide
agcacaugcaggucugcgg

SEQ ID NO: 2933276 - RNA, 19 nt, Artificial Sequence
  Description of Artificial Sequence: Synthetic oligonucleotide
uguuaauguuacccaccag

SEQ ID NO: 2933277 - RNA, 19 nt, Artificial Sequence
  Description of Artificial Sequence: Synthetic oligonucleotide
uauguuuugcuggucuuca

SEQ ID NO: 2933278 - RNA, 19 nt, Artificial Sequence
  Description of Artificial Sequence: Synthetic oligonucleotide
caagcacacgggcaggucg

SEQ ID NO: 2933279 - RNA, 19 nt, Artificial Sequence
  Description of Artificial Sequence: Synthetic oligonucleotide
uauggucuccauccgguac

SEQ ID NO: 2933280 - RNA, 19 nt, Artificial Sequence
  Description of Artificial Sequence: Synthetic oligonucleotide
ugcaugauguucaguugca

SEQ ID NO: 2933281 - RNA, 19 nt, Artificial Sequence
  Description of Artificial Sequence: Synthetic oligonucleotide
agaagugguacuggcaaag

SEQ ID NO: 2933282 - RNA, 19 nt, Artificial Sequence
  Description of Artificial Sequence: Synthetic oligonucleotide
gucagacaagaucagucgc

SEQ ID NO: 2933283 - RNA, 19 nt, Artificial Sequence
  Description of Artificial Sequence: Synthetic oligonucleotide
uggucuucaaggacuuuca

SEQ ID NO: 2933284 - RNA, 19 nt, Artificial Sequence
  Description of Artificial Sequence: Synthetic oligonucleotide
aaagucgcuuccacaacag

SEQ ID NO: 2933285 - RNA, 19 nt, Artificial Sequence
  Description of Artificial Sequence: Synthetic oligonucleotide
uacacccacguguuaaugu

SEQ ID NO: 2933286 - RNA, 19 nt, Artificial Sequence
  Description of Artificial Sequence: Synthetic oligonucleotide
acgugaggcccuugaaggc

SEQ ID NO: 2933287 - RNA, 19 nt, Artificial Sequence
  Description of Artificial Sequence: Synthetic oligonucleotide
auccgguacacccacgugu

SEQ ID NO: 2933288 - RNA, 19 nt, Artificial Sequence
  Description of Artificial Sequence: Synthetic oligonucleotide
aucuggaugccgcucagcu

SEQ ID NO: 2933289 - RNA, 19 nt, Artificial Sequence
  Description of Artificial Sequence: Synthetic oligonucleotide
gucgcuuccacaacagccg

SEQ ID NO: 2933290 - RNA, 19 nt, Artificial Sequence
  Description of Artificial Sequence: Synthetic oligonucleotide
uuacccaccaggacagacu

SEQ ID NO: 2933291 - RNA, 19 nt, Artificial Sequence
  Description of Artificial Sequence: Synthetic oligonucleotide
uuccacaacagccgguccu

SEQ ID NO: 2933292 - RNA, 19 nt, Artificial Sequence
  Description of Artificial Sequence: Synthetic oligonucleotide
ucgcuugcggaucugccgc

SEQ ID NO: 2933293 - RNA, 19 nt, Artificial Sequence
  Description of Artificial Sequence: Synthetic oligonucleotide
cuggugaucuggaugccgc

SEQ ID NO: 2933294 - RNA, 19 nt, Artificial Sequence
  Description of Artificial Sequence: Synthetic oligonucleotide
guccucacugagcacaugc

SEQ ID NO: 2933295 - RNA, 19 nt, Artificial Sequence
  Description of Artificial Sequence: Synthetic oligonucleotide
accagcaugcacaaggaug

SEQ ID NO: 2933296 - RNA, 19 nt, Artificial Sequence
  Description of Artificial Sequence: Synthetic oligonucleotide
cuuugucagacaagaucag

SEQ ID NO: 2933297 - RNA, 19 nt, Artificial Sequence
  Description of Artificial Sequence: Synthetic oligonucleotide
acaagaucagucgcuugcg

SEQ ID NO: 2933298 - RNA, 19 nt, Artificial Sequence
  Description of Artificial Sequence: Synthetic oligonucleotide
gauguucaguugcaagcac

SEQ ID NO: 2933299 - RNA, 19 nt, Artificial Sequence
  Description of Artificial Sequence: Synthetic oligonucleotide
uuugucagacaagaucagu

SEQ ID NO: 2933300 - RNA, 19 nt, Artificial Sequence
  Description of Artificial Sequence: Synthetic oligonucleotide
aggacagacuugccaacuc

SEQ ID NO: 2933301 - RNA, 19 nt, Artificial Sequence
  Description of Artificial Sequence: Synthetic oligonucleotide
accaggacagacuugccaa

SEQ ID NO: 2933302 - RNA, 19 nt, Artificial Sequence
  Description of Artificial Sequence: Synthetic oligonucleotide
ucgcuuccacaacagccgg

SEQ ID NO: 2933303 - RNA, 19 nt, Artificial Sequence
  Description of Artificial Sequence: Synthetic oligonucleotide
caugaaguucuucuggcga

SEQ ID NO: 2933304 - RNA, 19 nt, Artificial Sequence
  Description of Artificial Sequence: Synthetic oligonucleotide
guguuaauguuacccacca

SEQ ID NO: 2933305 - RNA, 19 nt, Artificial Sequence
  Description of Artificial Sequence: Synthetic oligonucleotide
ugccaguguaguuaugguc

SEQ ID NO: 2933306 - RNA, 19 nt, Artificial Sequence
  Description of Artificial Sequence: Synthetic oligonucleotide
ugaugagccuuauguuuug

SEQ ID NO: 2933307 - RNA, 19 nt, Artificial Sequence
  Description of Artificial Sequence: Synthetic oligonucleotide
aggcugaccaggucccgcc

SEQ ID NO: 2933308 - RNA, 19 nt, Artificial Sequence
  Description of Artificial Sequence: Synthetic oligonucleotide
agaucagucgcuugcggau

SEQ ID NO: 2933309 - RNA, 19 nt, Artificial Sequence
  Description of Artificial Sequence: Synthetic oligonucleotide
aucgcucaaucucugcaug

SEQ ID NO: 2933310 - RNA, 19 nt, Artificial Sequence
  Description of Artificial Sequence: Synthetic oligonucleotide
gucgcuugcggaucugccg

SEQ ID NO: 2933311 - RNA, 19 nt, Artificial Sequence
  Description of Artificial Sequence: Synthetic oligonucleotide
aguaaccacuuuuccaaaa

SEQ ID NO: 2933312 - RNA, 19 nt, Artificial Sequence
  Description of Artificial Sequence: Synthetic oligonucleotide
aguucuucuggcgaugcca

SEQ ID NO: 2933313 - RNA, 19 nt, Artificial Sequence
  Description of Artificial Sequence: Synthetic oligonucleotide
caagaucagucgcuugcgg

SEQ ID NO: 2933314 - RNA, 19 nt, Artificial Sequence
  Description of Artificial Sequence: Synthetic oligonucleotide
ucuccauccgguacaccca

SEQ ID NO: 2933315 - RNA, 19 nt, Artificial Sequence
  Description of Artificial Sequence: Synthetic oligonucleotide
agagggucuggagaaguuc

SEQ ID NO: 2933316 - RNA, 19 nt, Artificial Sequence
  Description of Artificial Sequence: Synthetic oligonucleotide
gaugccgcucagcugcugc

SEQ ID NO: 2933317 - RNA, 19 nt, Artificial Sequence
  Description of Artificial Sequence: Synthetic oligonucleotide
cucaaucucugcaugaugu

SEQ ID NO: 2933318 - RNA, 19 nt, Artificial Sequence
  Description of Artificial Sequence: Synthetic oligonucleotide
ggaucugccgcucugagaa

SEQ ID NO: 2933319 - RNA, 19 nt, Artificial Sequence
  Description of Artificial Sequence: Synthetic oligonucleotide
aaggauguguagagggucu

SEQ ID NO: 2933320 - RNA, 19 nt, Artificial Sequence
  Description of Artificial Sequence: Synthetic oligonucleotide
augaaguucuucuggcgau

SEQ ID NO: 2933321 - RNA, 19 nt, Artificial Sequence
  Description of Artificial Sequence: Synthetic oligonucleotide
uuauguuuugcuggucuuc

SEQ ID NO: 2933322 - RNA, 19 nt, Artificial Sequence
  Description of Artificial Sequence: Synthetic oligonucleotide
gaaguucuucuggcgaugc

SEQ ID NO: 2933323 - RNA, 19 nt, Artificial Sequence
  Description of Artificial Sequence: Synthetic oligonucleotide
auguuacccaccaggacag

SEQ ID NO: 2933324 - RNA, 19 nt, Artificial Sequence
  Description of Artificial Sequence: Synthetic oligonucleotide
auggucuccauccgguaca

SEQ ID NO: 2933325 - RNA, 19 nt, Artificial Sequence
  Description of Artificial Sequence: Synthetic oligonucleotide
aguguaguuauggucucca

SEQ ID NO: 2933326 - RNA, 19 nt, Artificial Sequence
  Description of Artificial Sequence: Synthetic oligonucleotide
uccucacugagcacaugca

SEQ ID NO: 2933327 - RNA, 19 nt, Artificial Sequence
  Description of Artificial Sequence: Synthetic oligonucleotide
caugcacaaggauguguag

SEQ ID NO: 2933328 - RNA, 19 nt, Artificial Sequence
  Description of Artificial Sequence: Synthetic oligonucleotide
aagcacacgggcaggucgg

SEQ ID NO: 2933329 - RNA, 19 nt, Artificial Sequence
  Description of Artificial Sequence: Synthetic oligonucleotide
ugaucuggaugccgcucag

SEQ ID NO: 2933330 - RNA, 19 nt, Artificial Sequence
  Description of Artificial Sequence: Synthetic oligonucleotide
acccacguguuaauguuac

SEQ ID NO: 2933331 - RNA, 19 nt, Artificial Sequence
  Description of Artificial Sequence: Synthetic oligonucleotide
augagccuuauguuuugcu

SEQ ID NO: 2933332 - RNA, 19 nt, Artificial Sequence
  Description of Artificial Sequence: Synthetic oligonucleotide
cacguguuaauguuaccca

SEQ ID NO: 2933333 - RNA, 19 nt, Artificial Sequence
  Description of Artificial Sequence: Synthetic oligonucleotide
caaagucgcuuccacaaca

SEQ ID NO: 2933334 - RNA, 19 nt, Artificial Sequence
  Description of Artificial Sequence: Synthetic oligonucleotide
gcugccaguguaguuaugg

SEQ ID NO: 2933335 - RNA, 19 nt, Artificial Sequence
  Description of Artificial Sequence: Synthetic oligonucleotide
cuugaaggcaggccuggug

SEQ ID NO: 2933336 - RNA, 19 nt, Artificial Sequence
  Description of Artificial Sequence: Synthetic oligonucleotide
agccgguccucacugagca

SEQ ID NO: 2933337 - RNA, 19 nt, Artificial Sequence
  Description of Artificial Sequence: Synthetic oligonucleotide
acuugccaacucucuggac

SEQ ID NO: 2933338 - RNA, 19 nt, Artificial Sequence
  Description of Artificial Sequence: Synthetic oligonucleotide
ugaaguucuucuggcgaug

SEQ ID NO: 2933339 - RNA, 19 nt, Artificial Sequence
  Description of Artificial Sequence: Synthetic oligonucleotide
ugaacgugaggcccuugaa

SEQ ID NO: 2933340 - RNA, 19 nt, Artificial Sequence
  Description of Artificial Sequence: Synthetic oligonucleotide
ucucuggaccagcaugcac

SEQ ID NO: 2933341 - RNA, 19 nt, Artificial Sequence
  Description of Artificial Sequence: Synthetic oligonucleotide
agccuuauguuuugcuggu

SEQ ID NO: 2933342 - RNA, 19 nt, Artificial Sequence
  Description of Artificial Sequence: Synthetic oligonucleotide
acagccgguccucacugag

SEQ ID NO: 2933343 - RNA, 19 nt, Artificial Sequence
  Description of Artificial Sequence: Synthetic oligonucleotide
aggccuggugaucuggaug

SEQ ID NO: 2933344 - RNA, 19 nt, Artificial Sequence
  Description of Artificial Sequence: Synthetic oligonucleotide
uacccaccaggacagacuu

SEQ ID NO: 2933345 - RNA, 19 nt, Artificial Sequence
  Description of Artificial Sequence: Synthetic oligonucleotide
agacaagaucagucgcuug

SEQ ID NO: 2933346 - RNA, 19 nt, Artificial Sequence
  Description of Artificial Sequence: Synthetic oligonucleotide
caaggauguguagaggguc

SEQ ID NO: 2933347 - RNA, 19 nt, Artificial Sequence
  Description of Artificial Sequence: Synthetic oligonucleotide
uacuggcaaagucgcuucc

SEQ ID NO: 2933348 - RNA, 19 nt, Artificial Sequence
  Description of Artificial Sequence: Synthetic oligonucleotide
ucgcucaaucucugcauga

SEQ ID NO: 2933349 - RNA, 19 nt, Artificial Sequence
  Description of Artificial Sequence: Synthetic oligonucleotide
cuggucuucaaggacuuuc

SEQ ID NO: 2933350 - RNA, 19 nt, Artificial Sequence
  Description of Artificial Sequence: Synthetic oligonucleotide
ucuucuggcgaugccacuc

SEQ ID NO: 2933351 - RNA, 19 nt, Artificial Sequence
  Description of Artificial Sequence: Synthetic oligonucleotide
gagcacaugcaggucugcg

SEQ ID NO: 2933352 - RNA, 19 nt, Artificial Sequence
  Description of Artificial Sequence: Synthetic oligonucleotide
gauguguagagggucugga

SEQ ID NO: 2933353 - RNA, 19 nt, Artificial Sequence
  Description of Artificial Sequence: Synthetic oligonucleotide
caaucucugcaugauguuc

SEQ ID NO: 2933354 - RNA, 19 nt, Artificial Sequence
  Description of Artificial Sequence: Synthetic oligonucleotide
acgggcaggucggugaacg

SEQ ID NO: 2933355 - RNA, 19 nt, Artificial Sequence
  Description of Artificial Sequence: Synthetic oligonucleotide
gacuugccaacucucugga

SEQ ID NO: 2933356 - RNA, 19 nt, Artificial Sequence
  Description of Artificial Sequence: Synthetic oligonucleotide
ucuggaccagcaugcacaa

SEQ ID NO: 2933357 - RNA, 19 nt, Artificial Sequence
  Description of Artificial Sequence: Synthetic oligonucleotide
augcacaaggauguguaga

SEQ ID NO: 2933358 - RNA, 19 nt, Artificial Sequence
  Description of Artificial Sequence: Synthetic oligonucleotide
cagacuugccaacucucug

SEQ ID NO: 2933359 - RNA, 19 nt, Artificial Sequence
  Description of Artificial Sequence: Synthetic oligonucleotide
ccacuuuuccaaaauguuc

SEQ ID NO: 2933360 - RNA, 19 nt, Artificial Sequence
  Description of Artificial Sequence: Synthetic oligonucleotide
ucugccgcucugagaagug

SEQ ID NO: 2933361 - RNA, 19 nt, Artificial Sequence
  Description of Artificial Sequence: Synthetic oligonucleotide
caguugcaagcacacgggc

SEQ ID NO: 2933362 - RNA, 19 nt, Artificial Sequence
  Description of Artificial Sequence: Synthetic oligonucleotide
agucgcuugcggaucugcc

SEQ ID NO: 2933363 - RNA, 19 nt, Artificial Sequence
  Description of Artificial Sequence: Synthetic oligonucleotide
cucugagaagugguacugg

SEQ ID NO: 2933364 - RNA, 19 nt, Artificial Sequence
  Description of Artificial Sequence: Synthetic oligonucleotide
accaggucccgcccaucgc

SEQ ID NO: 2933365 - RNA, 19 nt, Artificial Sequence
  Description of Artificial Sequence: Synthetic oligonucleotide
gaugagccuuauguuuugc

SEQ ID NO: 2933366 - RNA, 19 nt, Artificial Sequence
  Description of Artificial Sequence: Synthetic oligonucleotide
ucaaucucugcaugauguu

SEQ ID NO: 2933367 - RNA, 19 nt, Artificial Sequence
  Description of Artificial Sequence: Synthetic oligonucleotide
gucggugaacgugaggccc

SEQ ID NO: 2933368 - RNA, 19 nt, Artificial Sequence
  Description of Artificial Sequence: Synthetic oligonucleotide
ccacguguuaauguuaccc

SEQ ID NO: 2933369 - RNA, 19 nt, Artificial Sequence
  Description of Artificial Sequence: Synthetic oligonucleotide
ggcaaagucgcuuccacaa

SEQ ID NO: 2933370 - RNA, 19 nt, Artificial Sequence
  Description of Artificial Sequence: Synthetic oligonucleotide
ucugcggcugccuggccca

SEQ ID NO: 2933371 - RNA, 19 nt, Artificial Sequence
  Description of Artificial Sequence: Synthetic oligonucleotide
cuggcaaagucgcuuccac

SEQ ID NO: 2933372 - RNA, 19 nt, Artificial Sequence
  Description of Artificial Sequence: Synthetic oligonucleotide
ucggugaacgugaggcccu

SEQ ID NO: 2933373 - RNA, 19 nt, Artificial Sequence
  Description of Artificial Sequence: Synthetic oligonucleotide
acacccacguguuaauguu

SEQ ID NO: 2933374 - RNA, 19 nt, Artificial Sequence
  Description of Artificial Sequence: Synthetic oligonucleotide
guacuggcaaagucgcuuc

SEQ ID NO: 2933375 - RNA, 19 nt, Artificial Sequence
  Description of Artificial Sequence: Synthetic oligonucleotide
cugagcacaugcaggucug

SEQ ID NO: 2933376 - RNA, 19 nt, Artificial Sequence
  Description of Artificial Sequence: Synthetic oligonucleotide
ugccgcucugagaaguggu

SEQ ID NO: 2933377 - RNA, 19 nt, Artificial Sequence
  Description of Artificial Sequence: Synthetic oligonucleotide
gacagacuugccaacucuc

SEQ ID NO: 2933378 - RNA, 19 nt, Artificial Sequence
  Description of Artificial Sequence: Synthetic oligonucleotide
uccgguacacccacguguu

SEQ ID NO: 2933379 - RNA, 19 nt, Artificial Sequence
  Description of Artificial Sequence: Synthetic oligonucleotide
aggucugcggcugccuggc

SEQ ID NO: 2933380 - RNA, 19 nt, Artificial Sequence
  Description of Artificial Sequence: Synthetic oligonucleotide
guucaguugcaagcacacg

SEQ ID NO: 2933381 - RNA, 19 nt, Artificial Sequence
  Description of Artificial Sequence: Synthetic oligonucleotide
aggcccuugaaggcaggcc

SEQ ID NO: 2933382 - RNA, 19 nt, Artificial Sequence
  Description of Artificial Sequence: Synthetic oligonucleotide
gucuggagaaguucccuga

SEQ ID NO: 2933383 - RNA, 19 nt, Artificial Sequence
  Description of Artificial Sequence: Synthetic oligonucleotide
gcacaugcaggucugcggc

SEQ ID NO: 2933384 - RNA, 19 nt, Artificial Sequence
  Description of Artificial Sequence: Synthetic oligonucleotide
agggucuggagaaguuccc

SEQ ID NO: 2933385 - RNA, 19 nt, Artificial Sequence
  Description of Artificial Sequence: Synthetic oligonucleotide
ggagaaguucccugaugag

SEQ ID NO: 2933386 - RNA, 19 nt, Artificial Sequence
  Description of Artificial Sequence: Synthetic oligonucleotide
aguugcaagcacacgggca

SEQ ID NO: 2933387 - RNA, 19 nt, Artificial Sequence
  Description of Artificial Sequence: Synthetic oligonucleotide
uccauccgguacacccacg

SEQ ID NO: 2933388 - RNA, 19 nt, Artificial Sequence
  Description of Artificial Sequence: Synthetic oligonucleotide
caacagccgguccucacug

SEQ ID NO: 2933389 - RNA, 19 nt, Artificial Sequence
  Description of Artificial Sequence: Synthetic oligonucleotide
auguucaguugcaagcaca

SEQ ID NO: 2933390 - RNA, 19 nt, Artificial Sequence
  Description of Artificial Sequence: Synthetic oligonucleotide
gugaucuggaugccgcuca

SEQ ID NO: 2933391 - RNA, 19 nt, Artificial Sequence
  Description of Artificial Sequence: Synthetic oligonucleotide
uucccugaugagccuuaug

SEQ ID NO: 2933392 - RNA, 19 nt, Artificial Sequence
  Description of Artificial Sequence: Synthetic oligonucleotide
gucuucaaggacuuucagu

SEQ ID NO: 2933393 - RNA, 19 nt, Artificial Sequence
  Description of Artificial Sequence: Synthetic oligonucleotide
acaaggauguguagagggu

SEQ ID NO: 2933394 - RNA, 19 nt, Artificial Sequence
  Description of Artificial Sequence: Synthetic oligonucleotide
agcaugcacaaggaugugu

SEQ ID NO: 2933395 - RNA, 19 nt, Artificial Sequence
  Description of Artificial Sequence: Synthetic oligonucleotide
uuauggucuccauccggua

SEQ ID NO: 2933396 - RNA, 19 nt, Artificial Sequence
  Description of Artificial Sequence: Synthetic oligonucleotide
ugaggcccuugaaggcagg

SEQ ID NO: 2933397 - RNA, 19 nt, Artificial Sequence
  Description of Artificial Sequence: Synthetic oligonucleotide
aacagccgguccucacuga

SEQ ID NO: 2933398 - RNA, 19 nt, Artificial Sequence
  Description of Artificial Sequence: Synthetic oligonucleotide
cucugcaugauguucaguu

SEQ ID NO: 2933399 - RNA, 19 nt, Artificial Sequence
  Description of Artificial Sequence: Synthetic oligonucleotide
guucuucuggcgaugccac

SEQ ID NO: 2933400 - RNA, 19 nt, Artificial Sequence
  Description of Artificial Sequence: Synthetic oligonucleotide
guuacccaccaggacagac

SEQ ID NO: 2933401 - RNA, 19 nt, Artificial Sequence
  Description of Artificial Sequence: Synthetic oligonucleotide
cguguuaauguuacccacc

SEQ ID NO: 2933402 - RNA, 19 nt, Artificial Sequence
  Description of Artificial Sequence: Synthetic oligonucleotide
cuuccacaacagccggucc

SEQ ID NO: 2933403 - RNA, 19 nt, Artificial Sequence
  Description of Artificial Sequence: Synthetic oligonucleotide
gagaagugguacuggcaaa

SEQ ID NO: 2933404 - RNA, 19 nt, Artificial Sequence
  Description of Artificial Sequence: Synthetic oligonucleotide
gugaacgugaggcccuuga

SEQ ID NO: 2933405 - RNA, 19 nt, Artificial Sequence
  Description of Artificial Sequence: Synthetic oligonucleotide
ggucuggagaaguucccug

SEQ ID NO: 2933406 - RNA, 19 nt, Artificial Sequence
  Description of Artificial Sequence: Synthetic oligonucleotide
aaauguucaugaaguucuu

SEQ ID NO: 2933407 - RNA, 19 nt, Artificial Sequence
  Description of Artificial Sequence: Synthetic oligonucleotide
guaaccacuuuuccaaaau

SEQ ID NO: 2933408 - RNA, 19 nt, Artificial Sequence
  Description of Artificial Sequence: Synthetic oligonucleotide
acagacuugccaacucucu

SEQ ID NO: 2933409 - RNA, 19 nt, Artificial Sequence
  Description of Artificial Sequence: Synthetic oligonucleotide
ugcuggucuucaaggacuu

SEQ ID NO: 2933410 - RNA, 19 nt, Artificial Sequence
  Description of Artificial Sequence: Synthetic oligonucleotide
ggucuucaaggacuuucag

SEQ ID NO: 2933411 - RNA, 19 nt, Artificial Sequence
  Description of Artificial Sequence: Synthetic oligonucleotide
uugcggaucugccgcucug

SEQ ID NO: 2933412 - RNA, 19 nt, Artificial Sequence
  Description of Artificial Sequence: Synthetic oligonucleotide
gaucugccgcucugagaag

SEQ ID NO: 2933413 - RNA, 19 nt, Artificial Sequence
  Description of Artificial Sequence: Synthetic oligonucleotide
uagagggucuggagaaguu

SEQ ID NO: 2933414 - RNA, 19 nt, Artificial Sequence
  Description of Artificial Sequence: Synthetic oligonucleotide
gucugcggcugccuggccc

SEQ ID NO: 2933415 - RNA, 19 nt, Artificial Sequence
  Description of Artificial Sequence: Synthetic oligonucleotide
acaugcaggucugcggcug

SEQ ID NO: 2933416 - RNA, 19 nt, Artificial Sequence
  Description of Artificial Sequence: Synthetic oligonucleotide
uggugaucuggaugccgcu

SEQ ID NO: 2933417 - RNA, 19 nt, Artificial Sequence
  Description of Artificial Sequence: Synthetic oligonucleotide
aucugccgcucugagaagu

SEQ ID NO: 2933418 - RNA, 19 nt, Artificial Sequence
  Description of Artificial Sequence: Synthetic oligonucleotide
uccacaacagccgguccuc

SEQ ID NO: 2933419 - RNA, 19 nt, Artificial Sequence
  Description of Artificial Sequence: Synthetic oligonucleotide
cuccauccgguacacccac

SEQ ID NO: 2933420 - RNA, 19 nt, Artificial Sequence
  Description of Artificial Sequence: Synthetic oligonucleotide
acuggcaaagucgcuucca

SEQ ID NO: 2933421 - RNA, 19 nt, Artificial Sequence
  Description of Artificial Sequence: Synthetic oligonucleotide
cuucaaggacuuucaguaa

SEQ ID NO: 2933422 - RNA, 19 nt, Artificial Sequence
  Description of Artificial Sequence: Synthetic oligonucleotide
ugguacuggcaaagucgcu

SEQ ID NO: 2933423 - RNA, 19 nt, Artificial Sequence
  Description of Artificial Sequence: Synthetic oligonucleotide
guuauggucuccauccggu

SEQ ID NO: 2933424 - RNA, 19 nt, Artificial Sequence
  Description of Artificial Sequence: Synthetic oligonucleotide
cccaccaggacagacuugc

SEQ ID NO: 2933425 - RNA, 19 nt, Artificial Sequence
  Description of Artificial Sequence: Synthetic oligonucleotide
ccucacugagcacaugcag

SEQ ID NO: 2933426 - RNA, 19 nt, Artificial Sequence
  Description of Artificial Sequence: Synthetic oligonucleotide
caugcaggucugcggcugc

SEQ ID NO: 2933427 - RNA, 19 nt, Artificial Sequence
  Description of Artificial Sequence: Synthetic oligonucleotide
cacacgggcaggucgguga

SEQ ID NO: 2933428 - RNA, 19 nt, Artificial Sequence
  Description of Artificial Sequence: Synthetic oligonucleotide
gcucaaucucugcaugaug

SEQ ID NO: 2933429 - RNA, 19 nt, Artificial Sequence
  Description of Artificial Sequence: Synthetic oligonucleotide
ggauguguagagggucugg

SEQ ID NO: 2933430 - RNA, 19 nt, Artificial Sequence
  Description of Artificial Sequence: Synthetic oligonucleotide
guacacccacguguuaaug

SEQ ID NO: 2933431 - RNA, 19 nt, Artificial Sequence
  Description of Artificial Sequence: Synthetic oligonucleotide
uucuucuggcgaugccacu

SEQ ID NO: 2933432 - RNA, 19 nt, Artificial Sequence
  Description of Artificial Sequence: Synthetic oligonucleotide
aaguucccugaugagccuu

SEQ ID NO: 2933433 - RNA, 19 nt, Artificial Sequence
  Description of Artificial Sequence: Synthetic oligonucleotide
caguguaguuauggucucc

SEQ ID NO: 2933434 - RNA, 19 nt, Artificial Sequence
  Description of Artificial Sequence: Synthetic oligonucleotide
aggauguguagagggucug

SEQ ID NO: 2933435 - RNA, 19 nt, Artificial Sequence
  Description of Artificial Sequence: Synthetic oligonucleotide
caaggacuuucaguaacca

SEQ ID NO: 2933436 - RNA, 19 nt, Artificial Sequence
  Description of Artificial Sequence: Synthetic oligonucleotide
ugagcacaugcaggucugc

SEQ ID NO: 2933437 - RNA, 19 nt, Artificial Sequence
  Description of Artificial Sequence: Synthetic oligonucleotide
auguuuugcuggucuucaa

SEQ ID NO: 2933438 - RNA, 19 nt, Artificial Sequence
  Description of Artificial Sequence: Synthetic oligonucleotide
gugaggcccuugaaggcag

SEQ ID NO: 2933439 - RNA, 19 nt, Artificial Sequence
  Description of Artificial Sequence: Synthetic oligonucleotide
augcaggucugcggcugcc

SEQ ID NO: 2933440 - RNA, 19 nt, Artificial Sequence
  Description of Artificial Sequence: Synthetic oligonucleotide
cauccgguacacccacgug

SEQ ID NO: 2933441 - RNA, 19 nt, Artificial Sequence
  Description of Artificial Sequence: Synthetic oligonucleotide
cugaugagccuuauguuuu

SEQ ID NO: 2933442 - RNA, 19 nt, Artificial Sequence
  Description of Artificial Sequence: Synthetic oligonucleotide
caggucggugaacgugagg

SEQ ID NO: 2933443 - RNA, 19 nt, Artificial Sequence
  Description of Artificial Sequence: Synthetic oligonucleotide
ugcggaucugccgcucuga

SEQ ID NO: 2933444 - RNA, 19 nt, Artificial Sequence
  Description of Artificial Sequence: Synthetic oligonucleotide
gccaguguaguuauggucu

SEQ ID NO: 2933445 - RNA, 19 nt, Artificial Sequence
  Description of Artificial Sequence: Synthetic oligonucleotide
ggucggugaacgugaggcc

SEQ ID NO: 2933446 - RNA, 19 nt, Artificial Sequence
  Description of Artificial Sequence: Synthetic oligonucleotide
cugccgcucugagaagugg

SEQ ID NO: 2933447 - RNA, 19 nt, Artificial Sequence
  Description of Artificial Sequence: Synthetic oligonucleotide
gcacaaggauguguagagg

SEQ ID NO: 2933448 - RNA, 19 nt, Artificial Sequence
  Description of Artificial Sequence: Synthetic oligonucleotide
ucucugcaugauguucagu

SEQ ID NO: 2933449 - RNA, 19 nt, Artificial Sequence
  Description of Artificial Sequence: Synthetic oligonucleotide
cuucuggcgaugccacuca

SEQ ID NO: 2933450 - RNA, 19 nt, Artificial Sequence
  Description of Artificial Sequence: Synthetic oligonucleotide
gcaaagucgcuuccacaac

SEQ ID NO: 2933451 - RNA, 19 nt, Artificial Sequence
  Description of Artificial Sequence: Synthetic oligonucleotide
gaggcccuugaaggcaggc

SEQ ID NO: 2933452 - RNA, 19 nt, Artificial Sequence
  Description of Artificial Sequence: Synthetic oligonucleotide
augccgcucagcugcugcu

SEQ ID NO: 2933453 - RNA, 19 nt, Artificial Sequence
  Description of Artificial Sequence: Synthetic oligonucleotide
ccagcaugcacaaggaugu

SEQ ID NO: 2933454 - RNA, 19 nt, Artificial Sequence
  Description of Artificial Sequence: Synthetic oligonucleotide
gaaguucccugaugagccu

SEQ ID NO: 2933455 - RNA, 19 nt, Artificial Sequence
  Description of Artificial Sequence: Synthetic oligonucleotide
ugcugccaguguaguuaug

SEQ ID NO: 2933456 - RNA, 19 nt, Artificial Sequence
  Description of Artificial Sequence: Synthetic oligonucleotide
cagucgcuugcggaucugc

SEQ ID NO: 2933457 - RNA, 19 nt, Artificial Sequence
  Description of Artificial Sequence: Synthetic oligonucleotide
uggucuccauccgguacac

SEQ ID NO: 2933458 - RNA, 19 nt, Artificial Sequence
  Description of Artificial Sequence: Synthetic oligonucleotide
caguaaccacuuuuccaaa

SEQ ID NO: 2933459 - RNA, 19 nt, Artificial Sequence
  Description of Artificial Sequence: Synthetic oligonucleotide
cuuauguuuugcuggucuu

SEQ ID NO: 2933460 - RNA, 19 nt, Artificial Sequence
  Description of Artificial Sequence: Synthetic oligonucleotide
uggaugccgcucagcugcu

SEQ ID NO: 2933461 - RNA, 19 nt, Artificial Sequence
  Description of Artificial Sequence: Synthetic oligonucleotide
ugccaacucucuggaccag

SEQ ID NO: 2933462 - RNA, 19 nt, Artificial Sequence
  Description of Artificial Sequence: Synthetic oligonucleotide
guagagggucuggagaagu

SEQ ID NO: 2933463 - RNA, 19 nt, Artificial Sequence
  Description of Artificial Sequence: Synthetic oligonucleotide
ugccgcucagcugcugcug

SEQ ID NO: 2933464 - RNA, 19 nt, Artificial Sequence
  Description of Artificial Sequence: Synthetic oligonucleotide
caggcugaccaggucccgc

SEQ ID NO: 2933465 - RNA, 19 nt, Artificial Sequence
  Description of Artificial Sequence: Synthetic oligonucleotide
gcuuccacaacagccgguc

SEQ ID NO: 2933466 - RNA, 19 nt, Artificial Sequence
  Description of Artificial Sequence: Synthetic oligonucleotide
ugcugcugccaguguaguu

SEQ ID NO: 2933467 - RNA, 19 nt, Artificial Sequence
  Description of Artificial Sequence: Synthetic oligonucleotide
gcugcugccaguguaguua

SEQ ID NO: 2933468 - RNA, 19 nt, Artificial Sequence
  Description of Artificial Sequence: Synthetic oligonucleotide
acacgggcaggucggugaa

SEQ ID NO: 2933469 - RNA, 19 nt, Artificial Sequence
  Description of Artificial Sequence: Synthetic oligonucleotide
ucccgcccaucgcucaauc

SEQ ID NO: 2933470 - RNA, 19 nt, Artificial Sequence
  Description of Artificial Sequence: Synthetic oligonucleotide
ccuggugaucuggaugccg

SEQ ID NO: 2933471 - RNA, 19 nt, Artificial Sequence
  Description of Artificial Sequence: Synthetic oligonucleotide
uguuacccaccaggacaga

SEQ ID NO: 2933472 - RNA, 19 nt, Artificial Sequence
  Description of Artificial Sequence: Synthetic oligonucleotide
ucagucgcuugcggaucug

SEQ ID NO: 2933473 - RNA, 19 nt, Artificial Sequence
  Description of Artificial Sequence: Synthetic oligonucleotide
ggcaggucggugaacguga

SEQ ID NO: 2933474 - RNA, 19 nt, Artificial Sequence
  Description of Artificial Sequence: Synthetic oligonucleotide
ugcaggucugcggcugccu

SEQ ID NO: 2933475 - RNA, 19 nt, Artificial Sequence
  Description of Artificial Sequence: Synthetic oligonucleotide
ccgcccaucgcucaaucuc

SEQ ID NO: 2933476 - RNA, 19 nt, Artificial Sequence
  Description of Artificial Sequence: Synthetic oligonucleotide
ggacagacuugccaacucu

SEQ ID NO: 2933477 - RNA, 19 nt, Artificial Sequence
  Description of Artificial Sequence: Synthetic oligonucleotide
caucgcucaaucucugcau

SEQ ID NO: 2933478 - RNA, 19 nt, Artificial Sequence
  Description of Artificial Sequence: Synthetic oligonucleotide
gcaugcacaaggaugugua

SEQ ID NO: 2933479 - RNA, 19 nt, Artificial Sequence
  Description of Artificial Sequence: Synthetic oligonucleotide
ccaguguaguuauggucuc

SEQ ID NO: 2933480 - RNA, 19 nt, Artificial Sequence
  Description of Artificial Sequence: Synthetic oligonucleotide
ccaucgcucaaucucugca

SEQ ID NO: 2933481 - RNA, 19 nt, Artificial Sequence
  Description of Artificial Sequence: Synthetic oligonucleotide
ccaggacagacuugccaac

SEQ ID NO: 2933482 - RNA, 19 nt, Artificial Sequence
  Description of Artificial Sequence: Synthetic oligonucleotide
caggucccgcccaucgcuc

SEQ ID NO: 2933483 - RNA, 19 nt, Artificial Sequence
  Description of Artificial Sequence: Synthetic oligonucleotide
ccuuauguuuugcuggucu

SEQ ID NO: 2933484 - RNA, 19 nt, Artificial Sequence
  Description of Artificial Sequence: Synthetic oligonucleotide
ggcccuugaaggcaggccu

SEQ ID NO: 2933485 - RNA, 19 nt, Artificial Sequence
  Description of Artificial Sequence: Synthetic oligonucleotide
ggugaucuggaugccgcuc

SEQ ID NO: 2933486 - RNA, 19 nt, Artificial Sequence
  Description of Artificial Sequence: Synthetic oligonucleotide
gggcaggucggugaacgug

SEQ ID NO: 2933487 - RNA, 19 nt, Artificial Sequence
  Description of Artificial Sequence: Synthetic oligonucleotide
gcggaucugccgcucugag

SEQ ID NO: 2933488 - RNA, 19 nt, Artificial Sequence
  Description of Artificial Sequence: Synthetic oligonucleotide
cacccacguguuaauguua

SEQ ID NO: 2933489 - RNA, 19 nt, Artificial Sequence
  Description of Artificial Sequence: Synthetic oligonucleotide
cacugagcacaugcagguc

SEQ ID NO: 2933490 - RNA, 19 nt, Artificial Sequence
  Description of Artificial Sequence: Synthetic oligonucleotide
ccugaugagccuuauguuu

SEQ ID NO: 2933491 - RNA, 19 nt, Artificial Sequence
  Description of Artificial Sequence: Synthetic oligonucleotide
cccaucgcucaaucucugc

SEQ ID NO: 2933492 - RNA, 19 nt, Artificial Sequence
  Description of Artificial Sequence: Synthetic oligonucleotide
ccaacucucuggaccagca

SEQ ID NO: 2933493 - RNA, 19 nt, Artificial Sequence
  Description of Artificial Sequence: Synthetic oligonucleotide
ggaccagcaugcacaagga

SEQ ID NO: 2933494 - RNA, 19 nt, Artificial Sequence
  Description of Artificial Sequence: Synthetic oligonucleotide
gguacuggcaaagucgcuu

SEQ ID NO: 2933495 - RNA, 19 nt, Artificial Sequence
  Description of Artificial Sequence: Synthetic oligonucleotide
cccacguguuaauguuacc

SEQ ID NO: 2933496 - RNA, 19 nt, Artificial Sequence
  Description of Artificial Sequence: Synthetic oligonucleotide
aguucccugaugagccuua

SEQ ID NO: 2933497 - RNA, 19 nt, Artificial Sequence
  Description of Artificial Sequence: Synthetic oligonucleotide
cugccaguguaguuauggu

SEQ ID NO: 2933498 - RNA, 19 nt, Artificial Sequence
  Description of Artificial Sequence: Synthetic oligonucleotide
cagcaugcacaaggaugug

SEQ ID NO: 2933499 - RNA, 19 nt, Artificial Sequence
  Description of Artificial Sequence: Synthetic oligonucleotide
gccaacucucuggaccagc

SEQ ID NO: 2933500 - RNA, 19 nt, Artificial Sequence
  Description of Artificial Sequence: Synthetic oligonucleotide
ggcugaccaggucccgccc

SEQ ID NO: 2933501 - RNA, 19 nt, Artificial Sequence
  Description of Artificial Sequence: Synthetic oligonucleotide
cuggaccagcaugcacaag

SEQ ID NO: 2933502 - RNA, 19 nt, Artificial Sequence
  Description of Artificial Sequence: Synthetic oligonucleotide
gacuuucaguaaccacuuu

SEQ ID NO: 2933503 - RNA, 19 nt, Artificial Sequence
  Description of Artificial Sequence: Synthetic oligonucleotide
guguaguuauggucuccau

SEQ ID NO: 2933504 - RNA, 19 nt, Artificial Sequence
  Description of Artificial Sequence: Synthetic oligonucleotide
gcugaccaggucccgccca

SEQ ID NO: 2933505 - RNA, 19 nt, Artificial Sequence
  Description of Artificial Sequence: Synthetic oligonucleotide
ccgcucugagaagugguac

SEQ ID NO: 2933506 - RNA, 19 nt, Artificial Sequence
  Description of Artificial Sequence: Synthetic oligonucleotide
caggacagacuugccaacu

SEQ ID NO: 2933507 - RNA, 19 nt, Artificial Sequence
  Description of Artificial Sequence: Synthetic oligonucleotide
ugaccaggucccgcccauc

SEQ ID NO: 2933508 - RNA, 19 nt, Artificial Sequence
  Description of Artificial Sequence: Synthetic oligonucleotide
gguacacccacguguuaau

SEQ ID NO: 2933509 - RNA, 19 nt, Artificial Sequence
  Description of Artificial Sequence: Synthetic oligonucleotide
ccaccaggacagacuugcc

SEQ ID NO: 2933510 - RNA, 19 nt, Artificial Sequence
  Description of Artificial Sequence: Synthetic oligonucleotide
ggacuuucaguaaccacuu

SEQ ID NO: 2933511 - RNA, 19 nt, Artificial Sequence
  Description of Artificial Sequence: Synthetic oligonucleotide
cuugcggaucugccgcucu

SEQ ID NO: 2933512 - RNA, 19 nt, Artificial Sequence
  Description of Artificial Sequence: Synthetic oligonucleotide
cagacaagaucagucgcuu

SEQ ID NO: 2933513 - RNA, 19 nt, Artificial Sequence
  Description of Artificial Sequence: Synthetic oligonucleotide
cacaugcaggucugcggcu

SEQ ID NO: 2933514 - RNA, 19 nt, Artificial Sequence
  Description of Artificial Sequence: Synthetic oligonucleotide
ccgguccucacugagcaca

SEQ ID NO: 2933515 - RNA, 19 nt, Artificial Sequence
  Description of Artificial Sequence: Synthetic oligonucleotide
gcaggucggugaacgugag

SEQ ID NO: 2933516 - RNA, 19 nt, Artificial Sequence
  Description of Artificial Sequence: Synthetic oligonucleotide
gcaugauguucaguugcaa

SEQ ID NO: 2933517 - RNA, 19 nt, Artificial Sequence
  Description of Artificial Sequence: Synthetic oligonucleotide
cugcugccaguguaguuau

SEQ ID NO: 2933518 - RNA, 19 nt, Artificial Sequence
  Description of Artificial Sequence: Synthetic oligonucleotide
gcccuugaaggcaggccug

SEQ ID NO: 2933519 - RNA, 19 nt, Artificial Sequence
  Description of Artificial Sequence: Synthetic oligonucleotide
cugccuggcccaggcugac

SEQ ID NO: 2933520 - RNA, 19 nt, Artificial Sequence
  Description of Artificial Sequence: Synthetic oligonucleotide
cacgggcaggucggugaac

SEQ ID NO: 2933521 - RNA, 19 nt, Artificial Sequence
  Description of Artificial Sequence: Synthetic oligonucleotide
gguccucacugagcacaug

SEQ ID NO: 2933522 - RNA, 19 nt, Artificial Sequence
  Description of Artificial Sequence: Synthetic oligonucleotide
gcccaucgcucaaucucug

SEQ ID NO: 2933523 - RNA, 19 nt, Artificial Sequence
  Description of Artificial Sequence: Synthetic oligonucleotide
caacucucuggaccagcau

SEQ ID NO: 2933524 - RNA, 19 nt, Artificial Sequence
  Description of Artificial Sequence: Synthetic oligonucleotide
gccuuauguuuugcugguc

SEQ ID NO: 2933525 - RNA, 19 nt, Artificial Sequence
  Description of Artificial Sequence: Synthetic oligonucleotide
gcaagcacacgggcagguc

SEQ ID NO: 2933526 - RNA, 19 nt, Artificial Sequence
  Description of Artificial Sequence: Synthetic oligonucleotide
ggucuccauccgguacacc

SEQ ID NO: 2933527 - RNA, 19 nt, Artificial Sequence
  Description of Artificial Sequence: Synthetic oligonucleotide
cgugaggcccuugaaggca

SEQ ID NO: 2933528 - RNA, 19 nt, Artificial Sequence
  Description of Artificial Sequence: Synthetic oligonucleotide
gcaggccuggugaucugga

SEQ ID NO: 2933529 - RNA, 19 nt, Artificial Sequence
  Description of Artificial Sequence: Synthetic oligonucleotide
gggucuggagaaguucccu

SEQ ID NO: 2933530 - RNA, 19 nt, Artificial Sequence
  Description of Artificial Sequence: Synthetic oligonucleotide
ccaggcugaccaggucccg

SEQ ID NO: 2933531 - RNA, 19 nt, Artificial Sequence
  Description of Artificial Sequence: Synthetic oligonucleotide
ccauccgguacacccacgu

SEQ ID NO: 2933532 - RNA, 19 nt, Artificial Sequence
  Description of Artificial Sequence: Synthetic oligonucleotide
gccuggugaucuggaugcc

SEQ ID NO: 2933533 - RNA, 19 nt, Artificial Sequence
  Description of Artificial Sequence: Synthetic oligonucleotide
ggucugcggcugccuggcc

SEQ ID NO: 2933534 - RNA, 19 nt, Artificial Sequence
  Description of Artificial Sequence: Synthetic oligonucleotide
gcacacgggcaggucggug

SEQ ID NO: 2933535 - RNA, 19 nt, Artificial Sequence
  Description of Artificial Sequence: Synthetic oligonucleotide
cugaccaggucccgcccau

SEQ ID NO: 2933536 - RNA, 19 nt, Artificial Sequence
  Description of Artificial Sequence: Synthetic oligonucleotide
caggccuggugaucuggau

SEQ ID NO: 2933537 - RNA, 19 nt, Artificial Sequence
  Description of Artificial Sequence: Synthetic oligonucleotide
gccgguccucacugagcac

SEQ ID NO: 2933538 - RNA, 19 nt, Artificial Sequence
  Description of Artificial Sequence: Synthetic oligonucleotide
ccaggucccgcccaucgcu

SEQ ID NO: 2933539 - RNA, 19 nt, Artificial Sequence
  Description of Artificial Sequence: Synthetic oligonucleotide
ggucccgcccaucgcucaa

SEQ ID NO: 2933540 - RNA, 19 nt, Artificial Sequence
  Description of Artificial Sequence: Synthetic oligonucleotide
cugcggcugccuggcccag

SEQ ID NO: 2933541 - RNA, 19 nt, Artificial Sequence
  Description of Artificial Sequence: Synthetic oligonucleotide
gccgcucugagaaguggua

SEQ ID NO: 2933542 - RNA, 19 nt, Artificial Sequence
  Description of Artificial Sequence: Synthetic oligonucleotide
cgguacacccacguguuaa

SEQ ID NO: 2933543 - RNA, 19 nt, Artificial Sequence
  Description of Artificial Sequence: Synthetic oligonucleotide
cccugaugagccuuauguu

SEQ ID NO: 2933544 - RNA, 19 nt, Artificial Sequence
  Description of Artificial Sequence: Synthetic oligonucleotide
guucccugaugagccuuau

SEQ ID NO: 2933545 - RNA, 19 nt, Artificial Sequence
  Description of Artificial Sequence: Synthetic oligonucleotide
cggaucugccgcucugaga

SEQ ID NO: 2933546 - RNA, 19 nt, Artificial Sequence
  Description of Artificial Sequence: Synthetic oligonucleotide
cgcccaucgcucaaucucu

SEQ ID NO: 2933547 - RNA, 19 nt, Artificial Sequence
  Description of Artificial Sequence: Synthetic oligonucleotide
ccacaacagccgguccuca

SEQ ID NO: 2933548 - RNA, 19 nt, Artificial Sequence
  Description of Artificial Sequence: Synthetic oligonucleotide
gucccgcccaucgcucaau

SEQ ID NO: 2933549 - RNA, 19 nt, Artificial Sequence
  Description of Artificial Sequence: Synthetic oligonucleotide
cccgcccaucgcucaaucu

SEQ ID NO: 2933550 - RNA, 19 nt, Artificial Sequence
  Description of Artificial Sequence: Synthetic oligonucleotide
ccgguacacccacguguua

SEQ ID NO: 2933551 - RNA, 19 nt, Artificial Sequence
  Description of Artificial Sequence: Synthetic oligonucleotide
cgcucaaucucugcaugau

SEQ ID NO: 2933552 - RNA, 19 nt, Artificial Sequence
  Description of Artificial Sequence: Synthetic oligonucleotide
ccuugaaggcaggccuggu

SEQ ID NO: 2933553 - RNA, 19 nt, Artificial Sequence
  Description of Artificial Sequence: Synthetic oligonucleotide
cgcuuccacaacagccggu

SEQ ID NO: 2933554 - RNA, 19 nt, Artificial Sequence
  Description of Artificial Sequence: Synthetic oligonucleotide
gcuggucuucaaggacuuu

SEQ ID NO: 2933555 - RNA, 19 nt, Artificial Sequence
  Description of Artificial Sequence: Synthetic oligonucleotide
cgguccucacugagcacau

SEQ ID NO: 2933556 - RNA, 19 nt, Artificial Sequence
  Description of Artificial Sequence: Synthetic oligonucleotide
cggugaacgugaggcccuu

SEQ ID NO: 2933557 - RNA, 19 nt, Artificial Sequence
  Description of Artificial Sequence: Synthetic oligonucleotide
aacagugguuuucagaggc

SEQ ID NO: 2933558 - RNA, 19 nt, Artificial Sequence
  Description of Artificial Sequence: Synthetic oligonucleotide
ugaacagugguuuucagag

SEQ ID NO: 2933559 - RNA, 19 nt, Artificial Sequence
  Description of Artificial Sequence: Synthetic oligonucleotide
aaagaaugcuuccugaaga

SEQ ID NO: 2933560 - RNA, 19 nt, Artificial Sequence
  Description of Artificial Sequence: Synthetic oligonucleotide
aauauucugaaguaggguu

SEQ ID NO: 2933561 - RNA, 19 nt, Artificial Sequence
  Description of Artificial Sequence: Synthetic oligonucleotide
cuucuuacagaucucaucc

SEQ ID NO: 2933562 - RNA, 19 nt, Artificial Sequence
  Description of Artificial Sequence: Synthetic oligonucleotide
aaaauauucugaaguaggg

SEQ ID NO: 2933563 - RNA, 19 nt, Artificial Sequence
  Description of Artificial Sequence: Synthetic oligonucleotide
uguagaauuguuuugcuuc

SEQ ID NO: 2933564 - RNA, 19 nt, Artificial Sequence
  Description of Artificial Sequence: Synthetic oligonucleotide
ucugaaguaggguugaaca

SEQ ID NO: 2933565 - RNA, 19 nt, Artificial Sequence
  Description of Artificial Sequence: Synthetic oligonucleotide
uuccugaagauuuccaugg

SEQ ID NO: 2933566 - RNA, 19 nt, Artificial Sequence
  Description of Artificial Sequence: Synthetic oligonucleotide
gaaugguugguccucaucc

SEQ ID NO: 2933567 - RNA, 19 nt, Artificial Sequence
  Description of Artificial Sequence: Synthetic oligonucleotide
auuguuuugcuucaguugu

SEQ ID NO: 2933568 - RNA, 19 nt, Artificial Sequence
  Description of Artificial Sequence: Synthetic oligonucleotide
uguucuuuggccuucaaua

SEQ ID NO: 2933569 - RNA, 19 nt, Artificial Sequence
  Description of Artificial Sequence: Synthetic oligonucleotide
cauggcuucacucucacag

SEQ ID NO: 2933570 - RNA, 19 nt, Artificial Sequence
  Description of Artificial Sequence: Synthetic oligonucleotide
cuucugaagaaagagauug

SEQ ID NO: 2933571 - RNA, 19 nt, Artificial Sequence
  Description of Artificial Sequence: Synthetic oligonucleotide
aagaaagagauuguggccu

SEQ ID NO: 2933572 - RNA, 19 nt, Artificial Sequence
  Description of Artificial Sequence: Synthetic oligonucleotide
gaaagaaugcuuccugaag

SEQ ID NO: 2933573 - RNA, 19 nt, Artificial Sequence
  Description of Artificial Sequence: Synthetic oligonucleotide
gaagaaagagauuguggcc

SEQ ID NO: 2933574 - RNA, 19 nt, Artificial Sequence
  Description of Artificial Sequence: Synthetic oligonucleotide
uuggccuucaauauuucug

SEQ ID NO: 2933575 - RNA, 19 nt, Artificial Sequence
  Description of Artificial Sequence: Synthetic oligonucleotide
ucaauauuucugcagcacu

SEQ ID NO: 2933576 - RNA, 19 nt, Artificial Sequence
  Description of Artificial Sequence: Synthetic oligonucleotide
uucuccuuggcugugagag

SEQ ID NO: 2933577 - RNA, 19 nt, Artificial Sequence
  Description of Artificial Sequence: Synthetic oligonucleotide
uuuccucucauucuccuug

SEQ ID NO: 2933578 - RNA, 19 nt, Artificial Sequence
  Description of Artificial Sequence: Synthetic oligonucleotide
ugguccucauccuugaaag

SEQ ID NO: 2933579 - RNA, 19 nt, Artificial Sequence
  Description of Artificial Sequence: Synthetic oligonucleotide
ucuuacagaucucauccca

SEQ ID NO: 2933580 - RNA, 19 nt, Artificial Sequence
  Description of Artificial Sequence: Synthetic oligonucleotide
uguuuguagaauuguuuug

SEQ ID NO: 2933581 - RNA, 19 nt, Artificial Sequence
  Description of Artificial Sequence: Synthetic oligonucleotide
aaauauucugaaguagggu

SEQ ID NO: 2933582 - RNA, 19 nt, Artificial Sequence
  Description of Artificial Sequence: Synthetic oligonucleotide
guuuguagaauuguuuugc

SEQ ID NO: 2933583 - RNA, 19 nt, Artificial Sequence
  Description of Artificial Sequence: Synthetic oligonucleotide
aucucaucccacuuugcac

SEQ ID NO: 2933584 - RNA, 19 nt, Artificial Sequence
  Description of Artificial Sequence: Synthetic oligonucleotide
agagauuguggccuccugg

SEQ ID NO: 2933585 - RNA, 19 nt, Artificial Sequence
  Description of Artificial Sequence: Synthetic oligonucleotide
uuuuccaucuucugaagaa

SEQ ID NO: 2933586 - RNA, 19 nt, Artificial Sequence
  Description of Artificial Sequence: Synthetic oligonucleotide
ucuagcuuuuccaucuucu

SEQ ID NO: 2933587 - RNA, 19 nt, Artificial Sequence
  Description of Artificial Sequence: Synthetic oligonucleotide
ucugaagaaagagauugug

SEQ ID NO: 2933588 - RNA, 19 nt, Artificial Sequence
  Description of Artificial Sequence: Synthetic oligonucleotide
ccugguguagcauagaccc

SEQ ID NO: 2933589 - RNA, 19 nt, Artificial Sequence
  Description of Artificial Sequence: Synthetic oligonucleotide
aagauuuccauggcuucac

SEQ ID NO: 2933590 - RNA, 19 nt, Artificial Sequence
  Description of Artificial Sequence: Synthetic oligonucleotide
uuugcacuuaguagggucu

SEQ ID NO: 2933591 - RNA, 19 nt, Artificial Sequence
  Description of Artificial Sequence: Synthetic oligonucleotide
uggccuucaauauuucugc

SEQ ID NO: 2933592 - RNA, 19 nt, Artificial Sequence
  Description of Artificial Sequence: Synthetic oligonucleotide
uucaguuguucuuuggccu

SEQ ID NO: 2933593 - RNA, 19 nt, Artificial Sequence
  Description of Artificial Sequence: Synthetic oligonucleotide
acucucacagguccugugc

SEQ ID NO: 2933594 - RNA, 19 nt, Artificial Sequence
  Description of Artificial Sequence: Synthetic oligonucleotide
ucucaucccacuuugcacu

SEQ ID NO: 2933595 - RNA, 19 nt, Artificial Sequence
  Description of Artificial Sequence: Synthetic oligonucleotide
cuuccuuggcugcugaugg

SEQ ID NO: 2933596 - RNA, 19 nt, Artificial Sequence
  Description of Artificial Sequence: Synthetic oligonucleotide
ucuguuuguagaauuguuu

SEQ ID NO: 2933597 - RNA, 19 nt, Artificial Sequence
  Description of Artificial Sequence: Synthetic oligonucleotide
cuugaaagaaugcuuccug

SEQ ID NO: 2933598 - RNA, 19 nt, Artificial Sequence
  Description of Artificial Sequence: Synthetic oligonucleotide
uugaaagaaugcuuccuga

SEQ ID NO: 2933599 - RNA, 19 nt, Artificial Sequence
  Description of Artificial Sequence: Synthetic oligonucleotide
uucagaggcuuccacauuc

SEQ ID NO: 2933600 - RNA, 19 nt, Artificial Sequence
  Description of Artificial Sequence: Synthetic oligonucleotide
uccacauucuucuuacaga

SEQ ID NO: 2933601 - RNA, 19 nt, Artificial Sequence
  Description of Artificial Sequence: Synthetic oligonucleotide
acagguccugugcaguucc

SEQ ID NO: 2933602 - RNA, 19 nt, Artificial Sequence
  Description of Artificial Sequence: Synthetic oligonucleotide
aguaggguugaacaguggu

SEQ ID NO: 2933603 - RNA, 19 nt, Artificial Sequence
  Description of Artificial Sequence: Synthetic oligonucleotide
uugucuguuuguagaauug

SEQ ID NO: 2933604 - RNA, 19 nt, Artificial Sequence
  Description of Artificial Sequence: Synthetic oligonucleotide
ucuuuggccuucaauauuu

SEQ ID NO: 2933605 - RNA, 19 nt, Artificial Sequence
  Description of Artificial Sequence: Synthetic oligonucleotide
aagaaugcuuccugaagau

SEQ ID NO: 2933606 - RNA, 19 nt, Artificial Sequence
  Description of Artificial Sequence: Synthetic oligonucleotide
uugaacagugguuuucaga

SEQ ID NO: 2933607 - RNA, 19 nt, Artificial Sequence
  Description of Artificial Sequence: Synthetic oligonucleotide
uuuguagaauuguuuugcu

SEQ ID NO: 2933608 - RNA, 19 nt, Artificial Sequence
  Description of Artificial Sequence: Synthetic oligonucleotide
ucuucuuacagaucucauc

SEQ ID NO: 2933609 - RNA, 19 nt, Artificial Sequence
  Description of Artificial Sequence: Synthetic oligonucleotide
ccacuuugcacuuaguagg

SEQ ID NO: 2933610 - RNA, 19 nt, Artificial Sequence
  Description of Artificial Sequence: Synthetic oligonucleotide
uuaguagggucuucaauuc

SEQ ID NO: 2933611 - RNA, 19 nt, Artificial Sequence
  Description of Artificial Sequence: Synthetic oligonucleotide
ugaaguaggguugaacagu

SEQ ID NO: 2933612 - RNA, 19 nt, Artificial Sequence
  Description of Artificial Sequence: Synthetic oligonucleotide
aaugguugguccucauccu

SEQ ID NO: 2933613 - RNA, 19 nt, Artificial Sequence
  Description of Artificial Sequence: Synthetic oligonucleotide
uagcuuuuccaucuucuga

SEQ ID NO: 2933614 - RNA, 19 nt, Artificial Sequence
  Description of Artificial Sequence: Synthetic oligonucleotide
ugaaagaaugcuuccugaa

SEQ ID NO: 2933615 - RNA, 19 nt, Artificial Sequence
  Description of Artificial Sequence: Synthetic oligonucleotide
cugaaguaggguugaacag

SEQ ID NO: 2933616 - RNA, 19 nt, Artificial Sequence
  Description of Artificial Sequence: Synthetic oligonucleotide
uucugcagcacuuccucag

SEQ ID NO: 2933617 - RNA, 19 nt, Artificial Sequence
  Description of Artificial Sequence: Synthetic oligonucleotide
aaugcuuccugaagauuuc

SEQ ID NO: 2933618 - RNA, 19 nt, Artificial Sequence
  Description of Artificial Sequence: Synthetic oligonucleotide
cuuccugaagauuuccaug

SEQ ID NO: 2933619 - RNA, 19 nt, Artificial Sequence
  Description of Artificial Sequence: Synthetic oligonucleotide
agaaagagauuguggccuc

SEQ ID NO: 2933620 - RNA, 19 nt, Artificial Sequence
  Description of Artificial Sequence: Synthetic oligonucleotide
cacuuugcacuuaguaggg

SEQ ID NO: 2933621 - RNA, 19 nt, Artificial Sequence
  Description of Artificial Sequence: Synthetic oligonucleotide
uuccuucuggaaugguugg

SEQ ID NO: 2933622 - RNA, 19 nt, Artificial Sequence
  Description of Artificial Sequence: Synthetic oligonucleotide
gaaguaggguugaacagug

SEQ ID NO: 2933623 - RNA, 19 nt, Artificial Sequence
  Description of Artificial Sequence: Synthetic oligonucleotide
cuuugcacuuaguaggguc

SEQ ID NO: 2933624 - RNA, 19 nt, Artificial Sequence
  Description of Artificial Sequence: Synthetic oligonucleotide
ugaagauuuccauggcuuc

SEQ ID NO: 2933625 - RNA, 19 nt, Artificial Sequence
  Description of Artificial Sequence: Synthetic oligonucleotide
uucaauauuucugcagcac

SEQ ID NO: 2933626 - RNA, 19 nt, Artificial Sequence
  Description of Artificial Sequence: Synthetic oligonucleotide
cuucuggaaugguuggucc

SEQ ID NO: 2933627 - RNA, 19 nt, Artificial Sequence
  Description of Artificial Sequence: Synthetic oligonucleotide
uccuugaaagaaugcuucc

SEQ ID NO: 2933628 - RNA, 19 nt, Artificial Sequence
  Description of Artificial Sequence: Synthetic oligonucleotide
uccugguguagcauagacc

SEQ ID NO: 2933629 - RNA, 19 nt, Artificial Sequence
  Description of Artificial Sequence: Synthetic oligonucleotide
cuuacagaucucaucccac

SEQ ID NO: 2933630 - RNA, 19 nt, Artificial Sequence
  Description of Artificial Sequence: Synthetic oligonucleotide
uuacagaucucaucccacu

SEQ ID NO: 2933631 - RNA, 19 nt, Artificial Sequence
  Description of Artificial Sequence: Synthetic oligonucleotide
agaauuguuuugcuucagu

SEQ ID NO: 2933632 - RNA, 19 nt, Artificial Sequence
  Description of Artificial Sequence: Synthetic oligonucleotide
gaucucaucccacuuugca

SEQ ID NO: 2933633 - RNA, 19 nt, Artificial Sequence
  Description of Artificial Sequence: Synthetic oligonucleotide
uucugaagaaagagauugu

SEQ ID NO: 2933634 - RNA, 19 nt, Artificial Sequence
  Description of Artificial Sequence: Synthetic oligonucleotide
uucuuacagaucucauccc

SEQ ID NO: 2933635 - RNA, 19 nt, Artificial Sequence
  Description of Artificial Sequence: Synthetic oligonucleotide
ccuucaauauuucugcagc

SEQ ID NO: 2933636 - RNA, 19 nt, Artificial Sequence
  Description of Artificial Sequence: Synthetic oligonucleotide
auauucugaaguaggguug

SEQ ID NO: 2933637 - RNA, 19 nt, Artificial Sequence
  Description of Artificial Sequence: Synthetic oligonucleotide
gauuuccauggcuucacuc

SEQ ID NO: 2933638 - RNA, 19 nt, Artificial Sequence
  Description of Artificial Sequence: Synthetic oligonucleotide
uauucugaaguaggguuga

SEQ ID NO: 2933639 - RNA, 19 nt, Artificial Sequence
  Description of Artificial Sequence: Synthetic oligonucleotide
uuuggccuucaauauuucu

SEQ ID NO: 2933640 - RNA, 19 nt, Artificial Sequence
  Description of Artificial Sequence: Synthetic oligonucleotide
guagaauuguuuugcuuca

SEQ ID NO: 2933641 - RNA, 19 nt, Artificial Sequence
  Description of Artificial Sequence: Synthetic oligonucleotide
cucauccuugaaagaaugc

SEQ ID NO: 2933642 - RNA, 19 nt, Artificial Sequence
  Description of Artificial Sequence: Synthetic oligonucleotide
uguguucccuuccuuggcu

SEQ ID NO: 2933643 - RNA, 19 nt, Artificial Sequence
  Description of Artificial Sequence: Synthetic oligonucleotide
ugguacugggccuucuagc

SEQ ID NO: 2933644 - RNA, 19 nt, Artificial Sequence
  Description of Artificial Sequence: Synthetic oligonucleotide
ugguugguccucauccuug

SEQ ID NO: 2933645 - RNA, 19 nt, Artificial Sequence
  Description of Artificial Sequence: Synthetic oligonucleotide
guuuucagaggcuuccaca

SEQ ID NO: 2933646 - RNA, 19 nt, Artificial Sequence
  Description of Artificial Sequence: Synthetic oligonucleotide
uuccgcuuuccucucauuc

SEQ ID NO: 2933647 - RNA, 19 nt, Artificial Sequence
  Description of Artificial Sequence: Synthetic oligonucleotide
cuagcuuuuccaucuucug

SEQ ID NO: 2933648 - RNA, 19 nt, Artificial Sequence
  Description of Artificial Sequence: Synthetic oligonucleotide
ugggccuucuagcuuuucc

SEQ ID NO: 2933649 - RNA, 19 nt, Artificial Sequence
  Description of Artificial Sequence: Synthetic oligonucleotide
auucuucuuacagaucuca

SEQ ID NO: 2933650 - RNA, 19 nt, Artificial Sequence
  Description of Artificial Sequence: Synthetic oligonucleotide
aagagauuguggccuccug

SEQ ID NO: 2933651 - RNA, 19 nt, Artificial Sequence
  Description of Artificial Sequence: Synthetic oligonucleotide
ucccacuuugcacuuagua

SEQ ID NO: 2933652 - RNA, 19 nt, Artificial Sequence
  Description of Artificial Sequence: Synthetic oligonucleotide
uuccucucauucuccuugg

SEQ ID NO: 2933653 - RNA, 19 nt, Artificial Sequence
  Description of Artificial Sequence: Synthetic oligonucleotide
acuuaguagggucuucaau

SEQ ID NO: 2933654 - RNA, 19 nt, Artificial Sequence
  Description of Artificial Sequence: Synthetic oligonucleotide
cagaucucaucccacuuug

SEQ ID NO: 2933655 - RNA, 19 nt, Artificial Sequence
  Description of Artificial Sequence: Synthetic oligonucleotide
ugucuguuuguagaauugu

SEQ ID NO: 2933656 - RNA, 19 nt, Artificial Sequence
  Description of Artificial Sequence: Synthetic oligonucleotide
uccgcuuuccucucauucu

SEQ ID NO: 2933657 - RNA, 19 nt, Artificial Sequence
  Description of Artificial Sequence: Synthetic oligonucleotide
agaggcuuccacauucuuc

SEQ ID NO: 2933658 - RNA, 19 nt, Artificial Sequence
  Description of Artificial Sequence: Synthetic oligonucleotide
ucagccuguguucccuucc

SEQ ID NO: 2933659 - RNA, 19 nt, Artificial Sequence
  Description of Artificial Sequence: Synthetic oligonucleotide
uuguuccagaggcuuaaaa

SEQ ID NO: 2933660 - RNA, 19 nt, Artificial Sequence
  Description of Artificial Sequence: Synthetic oligonucleotide
uccugaagauuuccauggc

SEQ ID NO: 2933661 - RNA, 19 nt, Artificial Sequence
  Description of Artificial Sequence: Synthetic oligonucleotide
aguuccagcagcugcugga

SEQ ID NO: 2933662 - RNA, 19 nt, Artificial Sequence
  Description of Artificial Sequence: Synthetic oligonucleotide
ugcuuccugaagauuucca

SEQ ID NO: 2933663 - RNA, 19 nt, Artificial Sequence
  Description of Artificial Sequence: Synthetic oligonucleotide
ucucacagguccugugcag

SEQ ID NO: 2933664 - RNA, 19 nt, Artificial Sequence
  Description of Artificial Sequence: Synthetic oligonucleotide
aauuccuucuggaaugguu

SEQ ID NO: 2933665 - RNA, 19 nt, Artificial Sequence
  Description of Artificial Sequence: Synthetic oligonucleotide
uuguucuuuggccuucaau

SEQ ID NO: 2933666 - RNA, 19 nt, Artificial Sequence
  Description of Artificial Sequence: Synthetic oligonucleotide
uuguagaauuguuuugcuu

SEQ ID NO: 2933667 - RNA, 19 nt, Artificial Sequence
  Description of Artificial Sequence: Synthetic oligonucleotide
cuuaguagggucuucaauu

SEQ ID NO: 2933668 - RNA, 19 nt, Artificial Sequence
  Description of Artificial Sequence: Synthetic oligonucleotide
uaggguugaacagugguuu

SEQ ID NO: 2933669 - RNA, 19 nt, Artificial Sequence
  Description of Artificial Sequence: Synthetic oligonucleotide
aaagagauuguggccuccu

SEQ ID NO: 2933670 - RNA, 19 nt, Artificial Sequence
  Description of Artificial Sequence: Synthetic oligonucleotide
ugugccacuucuuguucca

SEQ ID NO: 2933671 - RNA, 19 nt, Artificial Sequence
  Description of Artificial Sequence: Synthetic oligonucleotide
uccucauccuugaaagaau

SEQ ID NO: 2933672 - RNA, 19 nt, Artificial Sequence
  Description of Artificial Sequence: Synthetic oligonucleotide
uuuccaucuucugaagaaa

SEQ ID NO: 2933673 - RNA, 19 nt, Artificial Sequence
  Description of Artificial Sequence: Synthetic oligonucleotide
uucuggaaugguugguccu

SEQ ID NO: 2933674 - RNA, 19 nt, Artificial Sequence
  Description of Artificial Sequence: Synthetic oligonucleotide
gagccuugucuguuuguag

SEQ ID NO: 2933675 - RNA, 19 nt, Artificial Sequence
  Description of Artificial Sequence: Synthetic oligonucleotide
uucuuuggccuucaauauu

SEQ ID NO: 2933676 - RNA, 19 nt, Artificial Sequence
  Description of Artificial Sequence: Synthetic oligonucleotide
cccacuuugcacuuaguag

SEQ ID NO: 2933677 - RNA, 19 nt, Artificial Sequence
  Description of Artificial Sequence: Synthetic oligonucleotide
augcuuccugaagauuucc

SEQ ID NO: 2933678 - RNA, 19 nt, Artificial Sequence
  Description of Artificial Sequence: Synthetic oligonucleotide
guugaacagugguuuucag

SEQ ID NO: 2933679 - RNA, 19 nt, Artificial Sequence
  Description of Artificial Sequence: Synthetic oligonucleotide
gcugugagagccuugucug

SEQ ID NO: 2933680 - RNA, 19 nt, Artificial Sequence
  Description of Artificial Sequence: Synthetic oligonucleotide
cuucaauauuucugcagca

SEQ ID NO: 2933681 - RNA, 19 nt, Artificial Sequence
  Description of Artificial Sequence: Synthetic oligonucleotide
gaagauuuccauggcuuca

SEQ ID NO: 2933682 - RNA, 19 nt, Artificial Sequence
  Description of Artificial Sequence: Synthetic oligonucleotide
uucuucuuacagaucucau

SEQ ID NO: 2933683 - RNA, 19 nt, Artificial Sequence
  Description of Artificial Sequence: Synthetic oligonucleotide
uucuagcuuuuccaucuuc

SEQ ID NO: 2933684 - RNA, 19 nt, Artificial Sequence
  Description of Artificial Sequence: Synthetic oligonucleotide
gaauuguuuugcuucaguu

SEQ ID NO: 2933685 - RNA, 19 nt, Artificial Sequence
  Description of Artificial Sequence: Synthetic oligonucleotide
uggagggucucugugggca

SEQ ID NO: 2933686 - RNA, 19 nt, Artificial Sequence
  Description of Artificial Sequence: Synthetic oligonucleotide
uagaauuguuuugcuucag

SEQ ID NO: 2933687 - RNA, 19 nt, Artificial Sequence
  Description of Artificial Sequence: Synthetic oligonucleotide
uguucccuuccuuggcugc

SEQ ID NO: 2933688 - RNA, 19 nt, Artificial Sequence
  Description of Artificial Sequence: Synthetic oligonucleotide
cugugccacuucuuguucc

SEQ ID NO: 2933689 - RNA, 19 nt, Artificial Sequence
  Description of Artificial Sequence: Synthetic oligonucleotide
caucccacuuugcacuuag

SEQ ID NO: 2933690 - RNA, 19 nt, Artificial Sequence
  Description of Artificial Sequence: Synthetic oligonucleotide
ucagaggcuuccacauucu

SEQ ID NO: 2933691 - RNA, 19 nt, Artificial Sequence
  Description of Artificial Sequence: Synthetic oligonucleotide
gauuguggccuccuggugu

SEQ ID NO: 2933692 - RNA, 19 nt, Artificial Sequence
  Description of Artificial Sequence: Synthetic oligonucleotide
uacagaucucaucccacuu

SEQ ID NO: 2933693 - RNA, 19 nt, Artificial Sequence
  Description of Artificial Sequence: Synthetic oligonucleotide
acagaucucaucccacuuu

SEQ ID NO: 2933694 - RNA, 19 nt, Artificial Sequence
  Description of Artificial Sequence: Synthetic oligonucleotide
uuccauggcuucacucuca

SEQ ID NO: 2933695 - RNA, 19 nt, Artificial Sequence
  Description of Artificial Sequence: Synthetic oligonucleotide
cuuuuccaucuucugaaga

SEQ ID NO: 2933696 - RNA, 19 nt, Artificial Sequence
  Description of Artificial Sequence: Synthetic oligonucleotide
cuccugguguagcauagac

SEQ ID NO: 2933697 - RNA, 19 nt, Artificial Sequence
  Description of Artificial Sequence: Synthetic oligonucleotide
uucacucucacagguccug

SEQ ID NO: 2933698 - RNA, 19 nt, Artificial Sequence
  Description of Artificial Sequence: Synthetic oligonucleotide
uacugggccuucuagcuuu

SEQ ID NO: 2933699 - RNA, 19 nt, Artificial Sequence
  Description of Artificial Sequence: Synthetic oligonucleotide
aaguaggguugaacagugg

SEQ ID NO: 2933700 - RNA, 19 nt, Artificial Sequence
  Description of Artificial Sequence: Synthetic oligonucleotide
gccuucaauauuucugcag

SEQ ID NO: 2933701 - RNA, 19 nt, Artificial Sequence
  Description of Artificial Sequence: Synthetic oligonucleotide
agaucucaucccacuuugc

SEQ ID NO: 2933702 - RNA, 19 nt, Artificial Sequence
  Description of Artificial Sequence: Synthetic oligonucleotide
uccauggcuucacucucac

SEQ ID NO: 2933703 - RNA, 19 nt, Artificial Sequence
  Description of Artificial Sequence: Synthetic oligonucleotide
agauuguggccuccuggug

SEQ ID NO: 2933704 - RNA, 19 nt, Artificial Sequence
  Description of Artificial Sequence: Synthetic oligonucleotide
ucaguuguucuuuggccuu

SEQ ID NO: 2933705 - RNA, 19 nt, Artificial Sequence
  Description of Artificial Sequence: Synthetic oligonucleotide
gcuuccacauucuucuuac

SEQ ID NO: 2933706 - RNA, 19 nt, Artificial Sequence
  Description of Artificial Sequence: Synthetic oligonucleotide
cauucuucuuacagaucuc

SEQ ID NO: 2933707 - RNA, 19 nt, Artificial Sequence
  Description of Artificial Sequence: Synthetic oligonucleotide
gaaugcuuccugaagauuu

SEQ ID NO: 2933708 - RNA, 19 nt, Artificial Sequence
  Description of Artificial Sequence: Synthetic oligonucleotide
gaaagagauuguggccucc

SEQ ID NO: 2933709 - RNA, 19 nt, Artificial Sequence
  Description of Artificial Sequence: Synthetic oligonucleotide
ucuggaaugguugguccuc

SEQ ID NO: 2933710 - RNA, 19 nt, Artificial Sequence
  Description of Artificial Sequence: Synthetic oligonucleotide
gagauuguggccuccuggu

SEQ ID NO: 2933711 - RNA, 19 nt, Artificial Sequence
  Description of Artificial Sequence: Synthetic oligonucleotide
ugcugaugguacugggccu

SEQ ID NO: 2933712 - RNA, 19 nt, Artificial Sequence
  Description of Artificial Sequence: Synthetic oligonucleotide
guccugugcaguuccagca

SEQ ID NO: 2933713 - RNA, 19 nt, Artificial Sequence
  Description of Artificial Sequence: Synthetic oligonucleotide
ucuuccgcuuuccucucau

SEQ ID NO: 2933714 - RNA, 19 nt, Artificial Sequence
  Description of Artificial Sequence: Synthetic oligonucleotide
cauucuccuuggcugugag

SEQ ID NO: 2933715 - RNA, 19 nt, Artificial Sequence
  Description of Artificial Sequence: Synthetic oligonucleotide
cuguguucccuuccuuggc

SEQ ID NO: 2933716 - RNA, 19 nt, Artificial Sequence
  Description of Artificial Sequence: Synthetic oligonucleotide
ucuccuuggcugugagagc

SEQ ID NO: 2933717 - RNA, 19 nt, Artificial Sequence
  Description of Artificial Sequence: Synthetic oligonucleotide
ccuguguucccuuccuugg

SEQ ID NO: 2933718 - RNA, 19 nt, Artificial Sequence
  Description of Artificial Sequence: Synthetic oligonucleotide
ugugcaguuccagcagcug

SEQ ID NO: 2933719 - RNA, 19 nt, Artificial Sequence
  Description of Artificial Sequence: Synthetic oligonucleotide
agauuuccauggcuucacu

SEQ ID NO: 2933720 - RNA, 19 nt, Artificial Sequence
  Description of Artificial Sequence: Synthetic oligonucleotide
cuguuuguagaauuguuuu

SEQ ID NO: 2933721 - RNA, 19 nt, Artificial Sequence
  Description of Artificial Sequence: Synthetic oligonucleotide
cugguguagcauagacccc

SEQ ID NO: 2933722 - RNA, 19 nt, Artificial Sequence
  Description of Artificial Sequence: Synthetic oligonucleotide
uccucucauucuccuuggc

SEQ ID NO: 2933723 - RNA, 19 nt, Artificial Sequence
  Description of Artificial Sequence: Synthetic oligonucleotide
uuucagaggcuuccacauu

SEQ ID NO: 2933724 - RNA, 19 nt, Artificial Sequence
  Description of Artificial Sequence: Synthetic oligonucleotide
cuuuggccuucaauauuuc

SEQ ID NO: 2933725 - RNA, 19 nt, Artificial Sequence
  Description of Artificial Sequence: Synthetic oligonucleotide
auuguggccuccuggugua

SEQ ID NO: 2933726 - RNA, 19 nt, Artificial Sequence
  Description of Artificial Sequence: Synthetic oligonucleotide
ccucauccuugaaagaaug

SEQ ID NO: 2933727 - RNA, 19 nt, Artificial Sequence
  Description of Artificial Sequence: Synthetic oligonucleotide
guguucccuuccuuggcug

SEQ ID NO: 2933728 - RNA, 19 nt, Artificial Sequence
  Description of Artificial Sequence: Synthetic oligonucleotide
ugugagagccuugucuguu

SEQ ID NO: 2933729 - RNA, 19 nt, Artificial Sequence
  Description of Artificial Sequence: Synthetic oligonucleotide
gcuuuuccaucuucugaag

SEQ ID NO: 2933730 - RNA, 19 nt, Artificial Sequence
  Description of Artificial Sequence: Synthetic oligonucleotide
cugaagauuuccauggcuu

SEQ ID NO: 2933731 - RNA, 19 nt, Artificial Sequence
  Description of Artificial Sequence: Synthetic oligonucleotide
gguccugugcaguuccagc

SEQ ID NO: 2933732 - RNA, 19 nt, Artificial Sequence
  Description of Artificial Sequence: Synthetic oligonucleotide
gguuuucagaggcuuccac

SEQ ID NO: 2933733 - RNA, 19 nt, Artificial Sequence
  Description of Artificial Sequence: Synthetic oligonucleotide
ucauucuccuuggcuguga

SEQ ID NO: 2933734 - RNA, 19 nt, Artificial Sequence
  Description of Artificial Sequence: Synthetic oligonucleotide
augguugguccucauccuu

SEQ ID NO: 2933735 - RNA, 19 nt, Artificial Sequence
  Description of Artificial Sequence: Synthetic oligonucleotide
uucuuccgcuuuccucuca

SEQ ID NO: 2933736 - RNA, 19 nt, Artificial Sequence
  Description of Artificial Sequence: Synthetic oligonucleotide
agcacuuccucagccugug

SEQ ID NO: 2933737 - RNA, 19 nt, Artificial Sequence
  Description of Artificial Sequence: Synthetic oligonucleotide
cacucucacagguccugug

SEQ ID NO: 2933738 - RNA, 19 nt, Artificial Sequence
  Description of Artificial Sequence: Synthetic oligonucleotide
cucucacagguccugugca

SEQ ID NO: 2933739 - RNA, 19 nt, Artificial Sequence
  Description of Artificial Sequence: Synthetic oligonucleotide
agagccuugucuguuugua

SEQ ID NO: 2933740 - RNA, 19 nt, Artificial Sequence
  Description of Artificial Sequence: Synthetic oligonucleotide
ucacagguccugugcaguu

SEQ ID NO: 2933741 - RNA, 19 nt, Artificial Sequence
  Description of Artificial Sequence: Synthetic oligonucleotide
uuccucagccuguguuccc

SEQ ID NO: 2933742 - RNA, 19 nt, Artificial Sequence
  Description of Artificial Sequence: Synthetic oligonucleotide
gguugaacagugguuuuca

SEQ ID NO: 2933743 - RNA, 19 nt, Artificial Sequence
  Description of Artificial Sequence: Synthetic oligonucleotide
gaugguacugggccuucua

SEQ ID NO: 2933744 - RNA, 19 nt, Artificial Sequence
  Description of Artificial Sequence: Synthetic oligonucleotide
uccuucuggaaugguuggu

SEQ ID NO: 2933745 - RNA, 19 nt, Artificial Sequence
  Description of Artificial Sequence: Synthetic oligonucleotide
ggcugcugaugguacuggg

SEQ ID NO: 2933746 - RNA, 19 nt, Artificial Sequence
  Description of Artificial Sequence: Synthetic oligonucleotide
gccuguguucccuuccuug

SEQ ID NO: 2933747 - RNA, 19 nt, Artificial Sequence
  Description of Artificial Sequence: Synthetic oligonucleotide
uccucagccuguguucccu

SEQ ID NO: 2933748 - RNA, 19 nt, Artificial Sequence
  Description of Artificial Sequence: Synthetic oligonucleotide
guuuugcuucaguuguucu

SEQ ID NO: 2933749 - RNA, 19 nt, Artificial Sequence
  Description of Artificial Sequence: Synthetic oligonucleotide
gguacugggccuucuagcu

SEQ ID NO: 2933750 - RNA, 19 nt, Artificial Sequence
  Description of Artificial Sequence: Synthetic oligonucleotide
ucccuuccuuggcugcuga

SEQ ID NO: 2933751 - RNA, 19 nt, Artificial Sequence
  Description of Artificial Sequence: Synthetic oligonucleotide
aggguugaacagugguuuu

SEQ ID NO: 2933752 - RNA, 19 nt, Artificial Sequence
  Description of Artificial Sequence: Synthetic oligonucleotide
acuuugcacuuaguagggu

SEQ ID NO: 2933753 - RNA, 19 nt, Artificial Sequence
  Description of Artificial Sequence: Synthetic oligonucleotide
ucacucucacagguccugu

SEQ ID NO: 2933754 - RNA, 19 nt, Artificial Sequence
  Description of Artificial Sequence: Synthetic oligonucleotide
cuucuuccgcuuuccucuc

SEQ ID NO: 2933755 - RNA, 19 nt, Artificial Sequence
  Description of Artificial Sequence: Synthetic oligonucleotide
aguuguucuuuggccuuca

SEQ ID NO: 2933756 - RNA, 19 nt, Artificial Sequence
  Description of Artificial Sequence: Synthetic oligonucleotide
ggaaugguugguccucauc

SEQ ID NO: 2933757 - RNA, 19 nt, Artificial Sequence
  Description of Artificial Sequence: Synthetic oligonucleotide
ugcacuuaguagggucuuc

SEQ ID NO: 2933758 - RNA, 19 nt, Artificial Sequence
  Description of Artificial Sequence: Synthetic oligonucleotide
cucagccuguguucccuuc

SEQ ID NO: 2933759 - RNA, 19 nt, Artificial Sequence
  Description of Artificial Sequence: Synthetic oligonucleotide
uggaaugguugguccucau

SEQ ID NO: 2933760 - RNA, 19 nt, Artificial Sequence
  Description of Artificial Sequence: Synthetic oligonucleotide
uucccuuccuuggcugcug

SEQ ID NO: 2933761 - RNA, 19 nt, Artificial Sequence
  Description of Artificial Sequence: Synthetic oligonucleotide
ugaugguacugggccuucu

SEQ ID NO: 2933762 - RNA, 19 nt, Artificial Sequence
  Description of Artificial Sequence: Synthetic oligonucleotide
gguugguccucauccuuga

SEQ ID NO: 2933763 - RNA, 19 nt, Artificial Sequence
  Description of Artificial Sequence: Synthetic oligonucleotide
ccuucuagcuuuuccaucu

SEQ ID NO: 2933764 - RNA, 19 nt, Artificial Sequence
  Description of Artificial Sequence: Synthetic oligonucleotide
gcugcugaugguacugggc

SEQ ID NO: 2933765 - RNA, 19 nt, Artificial Sequence
  Description of Artificial Sequence: Synthetic oligonucleotide
cuuccacauucuucuuaca

SEQ ID NO: 2933766 - RNA, 19 nt, Artificial Sequence
  Description of Artificial Sequence: Synthetic oligonucleotide
uugcacuuaguagggucuu

SEQ ID NO: 2933767 - RNA, 19 nt, Artificial Sequence
  Description of Artificial Sequence: Synthetic oligonucleotide
cacuuaguagggucuucaa

SEQ ID NO: 2933768 - RNA, 19 nt, Artificial Sequence
  Description of Artificial Sequence: Synthetic oligonucleotide
gagggucucugugggcagc

SEQ ID NO: 2933769 - RNA, 19 nt, Artificial Sequence
  Description of Artificial Sequence: Synthetic oligonucleotide
ccacuucuuguuccagagg

SEQ ID NO: 2933770 - RNA, 19 nt, Artificial Sequence
  Description of Artificial Sequence: Synthetic oligonucleotide
agcugcuggagggucucug

SEQ ID NO: 2933771 - RNA, 19 nt, Artificial Sequence
  Description of Artificial Sequence: Synthetic oligonucleotide
gucucugugggcagcugca

SEQ ID NO: 2933772 - RNA, 19 nt, Artificial Sequence
  Description of Artificial Sequence: Synthetic oligonucleotide
ggagggucucugugggcag

SEQ ID NO: 2933773 - RNA, 19 nt, Artificial Sequence
  Description of Artificial Sequence: Synthetic oligonucleotide
gccuucuagcuuuuccauc

SEQ ID NO: 2933774 - RNA, 19 nt, Artificial Sequence
  Description of Artificial Sequence: Synthetic oligonucleotide
cacagguccugugcaguuc

SEQ ID NO: 2933775 - RNA, 19 nt, Artificial Sequence
  Description of Artificial Sequence: Synthetic oligonucleotide
ccuucuggaaugguugguc

SEQ ID NO: 2933776 - RNA, 19 nt, Artificial Sequence
  Description of Artificial Sequence: Synthetic oligonucleotide
gguccucauccuugaaaga

SEQ ID NO: 2933777 - RNA, 19 nt, Artificial Sequence
  Description of Artificial Sequence: Synthetic oligonucleotide
ccacauucuucuuacagau

SEQ ID NO: 2933778 - RNA, 19 nt, Artificial Sequence
  Description of Artificial Sequence: Synthetic oligonucleotide
ggccuucaauauuucugca

SEQ ID NO: 2933779 - RNA, 19 nt, Artificial Sequence
  Description of Artificial Sequence: Synthetic oligonucleotide
gcacuuaguagggucuuca

SEQ ID NO: 2933780 - RNA, 19 nt, Artificial Sequence
  Description of Artificial Sequence: Synthetic oligonucleotide
gagagccuugucuguuugu

SEQ ID NO: 2933781 - RNA, 19 nt, Artificial Sequence
  Description of Artificial Sequence: Synthetic oligonucleotide
ggguugaacagugguuuuc

SEQ ID NO: 2933782 - RNA, 19 nt, Artificial Sequence
  Description of Artificial Sequence: Synthetic oligonucleotide
cuggaaugguugguccuca

SEQ ID NO: 2933783 - RNA, 19 nt, Artificial Sequence
  Description of Artificial Sequence: Synthetic oligonucleotide
gugccacuucuuguuccag

SEQ ID NO: 2933784 - RNA, 19 nt, Artificial Sequence
  Description of Artificial Sequence: Synthetic oligonucleotide
gccuugucuguuuguagaa

SEQ ID NO: 2933785 - RNA, 19 nt, Artificial Sequence
  Description of Artificial Sequence: Synthetic oligonucleotide
guaggguugaacagugguu

SEQ ID NO: 2933786 - RNA, 19 nt, Artificial Sequence
  Description of Artificial Sequence: Synthetic oligonucleotide
ggcuuccacauucuucuua

SEQ ID NO: 2933787 - RNA, 19 nt, Artificial Sequence
  Description of Artificial Sequence: Synthetic oligonucleotide
guuguucuuuggccuucaa

SEQ ID NO: 2933788 - RNA, 19 nt, Artificial Sequence
  Description of Artificial Sequence: Synthetic oligonucleotide
ccgcuuuccucucauucuc

SEQ ID NO: 2933789 - RNA, 19 nt, Artificial Sequence
  Description of Artificial Sequence: Synthetic oligonucleotide
cuuggcugcugaugguacu

SEQ ID NO: 2933790 - RNA, 19 nt, Artificial Sequence
  Description of Artificial Sequence: Synthetic oligonucleotide
ucaucccacuuugcacuua

SEQ ID NO: 2933791 - RNA, 19 nt, Artificial Sequence
  Description of Artificial Sequence: Synthetic oligonucleotide
gucuguuuguagaauuguu

SEQ ID NO: 2933792 - RNA, 19 nt, Artificial Sequence
  Description of Artificial Sequence: Synthetic oligonucleotide
cuucacucucacagguccu

SEQ ID NO: 2933793 - RNA, 19 nt, Artificial Sequence
  Description of Artificial Sequence: Synthetic oligonucleotide
agccuguguucccuuccuu

SEQ ID NO: 2933794 - RNA, 19 nt, Artificial Sequence
  Description of Artificial Sequence: Synthetic oligonucleotide
gccuccugguguagcauag

SEQ ID NO: 2933795 - RNA, 19 nt, Artificial Sequence
  Description of Artificial Sequence: Synthetic oligonucleotide
cugaugguacugggccuuc

SEQ ID NO: 2933796 - RNA, 19 nt, Artificial Sequence
  Description of Artificial Sequence: Synthetic oligonucleotide
ccugugccacuucuuguuc

SEQ ID NO: 2933797 - RNA, 19 nt, Artificial Sequence
  Description of Artificial Sequence: Synthetic oligonucleotide
ccugaagauuuccauggcu

SEQ ID NO: 2933798 - RNA, 19 nt, Artificial Sequence
  Description of Artificial Sequence: Synthetic oligonucleotide
cugugagagccuugucugu

SEQ ID NO: 2933799 - RNA, 19 nt, Artificial Sequence
  Description of Artificial Sequence: Synthetic oligonucleotide
uggccuccugguguagcau

SEQ ID NO: 2933800 - RNA, 19 nt, Artificial Sequence
  Description of Artificial Sequence: Synthetic oligonucleotide
cucacagguccugugcagu

SEQ ID NO: 2933801 - RNA, 19 nt, Artificial Sequence
  Description of Artificial Sequence: Synthetic oligonucleotide
gugagagccuugucuguuu

SEQ ID NO: 2933802 - RNA, 19 nt, Artificial Sequence
  Description of Artificial Sequence: Synthetic oligonucleotide
ggcuucacucucacagguc

SEQ ID NO: 2933803 - RNA, 19 nt, Artificial Sequence
  Description of Artificial Sequence: Synthetic oligonucleotide
guacugggccuucuagcuu

SEQ ID NO: 2933804 - RNA, 19 nt, Artificial Sequence
  Description of Artificial Sequence: Synthetic oligonucleotide
ggccuucuagcuuuuccau

SEQ ID NO: 2933805 - RNA, 19 nt, Artificial Sequence
  Description of Artificial Sequence: Synthetic oligonucleotide
aucccacuuugcacuuagu

SEQ ID NO: 2933806 - RNA, 19 nt, Artificial Sequence
  Description of Artificial Sequence: Synthetic oligonucleotide
cagguccugugcaguucca

SEQ ID NO: 2933807 - RNA, 19 nt, Artificial Sequence
  Description of Artificial Sequence: Synthetic oligonucleotide
ccuugaaagaaugcuuccu

SEQ ID NO: 2933808 - RNA, 19 nt, Artificial Sequence
  Description of Artificial Sequence: Synthetic oligonucleotide
cagcacuuccucagccugu

SEQ ID NO: 2933809 - RNA, 19 nt, Artificial Sequence
  Description of Artificial Sequence: Synthetic oligonucleotide
guucccuuccuuggcugcu

SEQ ID NO: 2933810 - RNA, 19 nt, Artificial Sequence
  Description of Artificial Sequence: Synthetic oligonucleotide
ccucucauucuccuuggcu

SEQ ID NO: 2933811 - RNA, 19 nt, Artificial Sequence
  Description of Artificial Sequence: Synthetic oligonucleotide
cucaucccacuuugcacuu

SEQ ID NO: 2933812 - RNA, 19 nt, Artificial Sequence
  Description of Artificial Sequence: Synthetic oligonucleotide
cagccuguguucccuuccu

SEQ ID NO: 2933813 - RNA, 19 nt, Artificial Sequence
  Description of Artificial Sequence: Synthetic oligonucleotide
gcugcuggagggucucugu

SEQ ID NO: 2933814 - RNA, 19 nt, Artificial Sequence
  Description of Artificial Sequence: Synthetic oligonucleotide
caauuccuucuggaauggu

SEQ ID NO: 2933815 - RNA, 19 nt, Artificial Sequence
  Description of Artificial Sequence: Synthetic oligonucleotide
cuucuagcuuuuccaucuu

SEQ ID NO: 2933816 - RNA, 19 nt, Artificial Sequence
  Description of Artificial Sequence: Synthetic oligonucleotide
cugggccuucuagcuuuuc

SEQ ID NO: 2933817 - RNA, 19 nt, Artificial Sequence
  Description of Artificial Sequence: Synthetic oligonucleotide
acugggccuucuagcuuuu

SEQ ID NO: 2933818 - RNA, 19 nt, Artificial Sequence
  Description of Artificial Sequence: Synthetic oligonucleotide
cagaggcuuccacauucuu

SEQ ID NO: 2933819 - RNA, 19 nt, Artificial Sequence
  Description of Artificial Sequence: Synthetic oligonucleotide
gcugaugguacugggccuu

SEQ ID NO: 2933820 - RNA, 19 nt, Artificial Sequence
  Description of Artificial Sequence: Synthetic oligonucleotide
gggucucugugggcagcug

SEQ ID NO: 2933821 - RNA, 19 nt, Artificial Sequence
  Description of Artificial Sequence: Synthetic oligonucleotide
cuuccgcuuuccucucauu

SEQ ID NO: 2933822 - RNA, 19 nt, Artificial Sequence
  Description of Artificial Sequence: Synthetic oligonucleotide
cccugugccacuucuuguu

SEQ ID NO: 2933823 - RNA, 19 nt, Artificial Sequence
  Description of Artificial Sequence: Synthetic oligonucleotide
ccuugucuguuuguagaau

SEQ ID NO: 2933824 - RNA, 19 nt, Artificial Sequence
  Description of Artificial Sequence: Synthetic oligonucleotide
ccccugugccacuucuugu

SEQ ID NO: 2933825 - RNA, 19 nt, Artificial Sequence
  Description of Artificial Sequence: Synthetic oligonucleotide
ccuccugguguagcauaga

SEQ ID NO: 2933826 - RNA, 19 nt, Artificial Sequence
  Description of Artificial Sequence: Synthetic oligonucleotide
gcacuuccucagccugugu

SEQ ID NO: 2933827 - RNA, 19 nt, Artificial Sequence
  Description of Artificial Sequence: Synthetic oligonucleotide
ccuuggcugugagagccuu

SEQ ID NO: 2933828 - RNA, 19 nt, Artificial Sequence
  Description of Artificial Sequence: Synthetic oligonucleotide
ccucagccuguguucccuu

SEQ ID NO: 2933829 - RNA, 19 nt, Artificial Sequence
  Description of Artificial Sequence: Synthetic oligonucleotide
cccuuccuuggcugcugau

SEQ ID NO: 2933830 - RNA, 19 nt, Artificial Sequence
  Description of Artificial Sequence: Synthetic oligonucleotide
auugaugacauucauaugg

SEQ ID NO: 2933831 - RNA, 19 nt, Artificial Sequence
  Description of Artificial Sequence: Synthetic oligonucleotide
auugguuacauucauaugg

SEQ ID NO: 2933832 - RNA, 19 nt, Artificial Sequence
  Description of Artificial Sequence: Synthetic oligonucleotide
aagacuaacugugauaugc

SEQ ID NO: 2933833 - RNA, 19 nt, Artificial Sequence
  Description of Artificial Sequence: Synthetic oligonucleotide
cuugauuauauucauaggg

SEQ ID NO: 2933834 - RNA, 19 nt, Artificial Sequence
  Description of Artificial Sequence: Synthetic oligonucleotide
auucauaugguuucuuucc

SEQ ID NO: 2933835 - RNA, 19 nt, Artificial Sequence
  Description of Artificial Sequence: Synthetic oligonucleotide
aacugugacaugcaaaauc

SEQ ID NO: 2933836 - RNA, 19 nt, Artificial Sequence
  Description of Artificial Sequence: Synthetic oligonucleotide
ugcaaaaucuuuaacaccu

SEQ ID NO: 2933837 - RNA, 19 nt, Artificial Sequence
  Description of Artificial Sequence: Synthetic oligonucleotide
uccaguaugaauuuugggc

SEQ ID NO: 2933838 - RNA, 19 nt, Artificial Sequence
  Description of Artificial Sequence: Synthetic oligonucleotide
agugugucuucuuuuaugc

SEQ ID NO: 2933839 - RNA, 19 nt, Artificial Sequence
  Description of Artificial Sequence: Synthetic oligonucleotide
ucuuugaagacuaacugug

SEQ ID NO: 2933840 - RNA, 19 nt, Artificial Sequence
  Description of Artificial Sequence: Synthetic oligonucleotide
aucuuuaacaccuugauua

SEQ ID NO: 2933841 - RNA, 19 nt, Artificial Sequence
  Description of Artificial Sequence: Synthetic oligonucleotide
accuugauuauauucauag

SEQ ID NO: 2933842 - RNA, 19 nt, Artificial Sequence
  Description of Artificial Sequence: Synthetic oligonucleotide
uguauuuuacguucacugg

SEQ ID NO: 2933843 - RNA, 19 nt, Artificial Sequence
  Description of Artificial Sequence: Synthetic oligonucleotide
gaagauaacugugacaugc

SEQ ID NO: 2933844 - RNA, 19 nt, Artificial Sequence
  Description of Artificial Sequence: Synthetic oligonucleotide
acauugaugacauucauau

SEQ ID NO: 2933845 - RNA, 19 nt, Artificial Sequence
  Description of Artificial Sequence: Synthetic oligonucleotide
cuaacugugauaugcaaag

SEQ ID NO: 2933846 - RNA, 19 nt, Artificial Sequence
  Description of Artificial Sequence: Synthetic oligonucleotide
auaacugugaugugcaaag

SEQ ID NO: 2933847 - RNA, 19 nt, Artificial Sequence
  Description of Artificial Sequence: Synthetic oligonucleotide
auguauuuuacguucacug

SEQ ID NO: 2933848 - RNA, 19 nt, Artificial Sequence
  Description of Artificial Sequence: Synthetic oligonucleotide
augacauucauaugguuuc

SEQ ID NO: 2933849 - RNA, 19 nt, Artificial Sequence
  Description of Artificial Sequence: Synthetic oligonucleotide
guauuuuacguucacuggg

SEQ ID NO: 2933850 - RNA, 19 nt, Artificial Sequence
  Description of Artificial Sequence: Synthetic oligonucleotide
ucuuucauguauuuuacgu

SEQ ID NO: 2933851 - RNA, 19 nt, Artificial Sequence
  Description of Artificial Sequence: Synthetic oligonucleotide
uuuucuuucauguauuuua

SEQ ID NO: 2933852 - RNA, 19 nt, Artificial Sequence
  Description of Artificial Sequence: Synthetic oligonucleotide
aguauguuuucuuucaugu

SEQ ID NO: 2933853 - RNA, 19 nt, Artificial Sequence
  Description of Artificial Sequence: Synthetic oligonucleotide
uugaagauaacugugacau

SEQ ID NO: 2933854 - RNA, 19 nt, Artificial Sequence
  Description of Artificial Sequence: Synthetic oligonucleotide
uauguuuucuuucauguau

SEQ ID NO: 2933855 - RNA, 19 nt, Artificial Sequence
  Description of Artificial Sequence: Synthetic oligonucleotide
ugucuuugaagacuaacug

SEQ ID NO: 2933856 - RNA, 19 nt, Artificial Sequence
  Description of Artificial Sequence: Synthetic oligonucleotide
uuuaacaccuugauuauau

SEQ ID NO: 2933857 - RNA, 19 nt, Artificial Sequence
  Description of Artificial Sequence: Synthetic oligonucleotide
uuuccaguaugaauuuugg

SEQ ID NO: 2933858 - RNA, 19 nt, Artificial Sequence
  Description of Artificial Sequence: Synthetic oligonucleotide
augcaaaaucuuuaacacc

SEQ ID NO: 2933859 - RNA, 19 nt, Artificial Sequence
  Description of Artificial Sequence: Synthetic oligonucleotide
aaaucuuuaacaccuugau

SEQ ID NO: 2933860 - RNA, 19 nt, Artificial Sequence
  Description of Artificial Sequence: Synthetic oligonucleotide
auuacuuucauaggguuuc

SEQ ID NO: 2933861 - RNA, 19 nt, Artificial Sequence
  Description of Artificial Sequence: Synthetic oligonucleotide
auuauauucauagggcuuc

SEQ ID NO: 2933862 - RNA, 19 nt, Artificial Sequence
  Description of Artificial Sequence: Synthetic oligonucleotide
ugauuauauucauagggcu

SEQ ID NO: 2933863 - RNA, 19 nt, Artificial Sequence
  Description of Artificial Sequence: Synthetic oligonucleotide
uuucauguauuuuacguuc

SEQ ID NO: 2933864 - RNA, 19 nt, Artificial Sequence
  Description of Artificial Sequence: Synthetic oligonucleotide
auaacugugacaugcaaaa

SEQ ID NO: 2933865 - RNA, 19 nt, Artificial Sequence
  Description of Artificial Sequence: Synthetic oligonucleotide
uuuacguucacugggacgu

SEQ ID NO: 2933866 - RNA, 19 nt, Artificial Sequence
  Description of Artificial Sequence: Synthetic oligonucleotide
auuacuguugugugcaaag

SEQ ID NO: 2933867 - RNA, 19 nt, Artificial Sequence
  Description of Artificial Sequence: Synthetic oligonucleotide
uauguuuucuuugaugucu

SEQ ID NO: 2933868 - RNA, 19 nt, Artificial Sequence
  Description of Artificial Sequence: Synthetic oligonucleotide
ugaagauuacuguugugug

SEQ ID NO: 2933869 - RNA, 19 nt, Artificial Sequence
  Description of Artificial Sequence: Synthetic oligonucleotide
aacaccuugauuauauuca

SEQ ID NO: 2933870 - RNA, 19 nt, Artificial Sequence
  Description of Artificial Sequence: Synthetic oligonucleotide
uuuuacguucacugggacg

SEQ ID NO: 2933871 - RNA, 19 nt, Artificial Sequence
  Description of Artificial Sequence: Synthetic oligonucleotide
uugaagauuacuguugugu

SEQ ID NO: 2933872 - RNA, 19 nt, Artificial Sequence
  Description of Artificial Sequence: Synthetic oligonucleotide
acauugguuacauucauau

SEQ ID NO: 2933873 - RNA, 19 nt, Artificial Sequence
  Description of Artificial Sequence: Synthetic oligonucleotide
ugugucuucuuuuaugccu

SEQ ID NO: 2933874 - RNA, 19 nt, Artificial Sequence
  Description of Artificial Sequence: Synthetic oligonucleotide
ugaagacuaacugugauau

SEQ ID NO: 2933875 - RNA, 19 nt, Artificial Sequence
  Description of Artificial Sequence: Synthetic oligonucleotide
aagauuacuguugugugca

SEQ ID NO: 2933876 - RNA, 19 nt, Artificial Sequence
  Description of Artificial Sequence: Synthetic oligonucleotide
uauuuuacguucacuggga

SEQ ID NO: 2933877 - RNA, 19 nt, Artificial Sequence
  Description of Artificial Sequence: Synthetic oligonucleotide
gaagauuacuguugugugc

SEQ ID NO: 2933878 - RNA, 19 nt, Artificial Sequence
  Description of Artificial Sequence: Synthetic oligonucleotide
uuucuuucauguauuuuac

SEQ ID NO: 2933879 - RNA, 19 nt, Artificial Sequence
  Description of Artificial Sequence: Synthetic oligonucleotide
uuugaugucuuugaagacu

SEQ ID NO: 2933880 - RNA, 19 nt, Artificial Sequence
  Description of Artificial Sequence: Synthetic oligonucleotide
aaaaucuuuaacaccuuga

SEQ ID NO: 2933881 - RNA, 19 nt, Artificial Sequence
  Description of Artificial Sequence: Synthetic oligonucleotide
uuugaagacuaacugugau

SEQ ID NO: 2933882 - RNA, 19 nt, Artificial Sequence
  Description of Artificial Sequence: Synthetic oligonucleotide
uucacugggacgugcaaag

SEQ ID NO: 2933883 - RNA, 19 nt, Artificial Sequence
  Description of Artificial Sequence: Synthetic oligonucleotide
uucuuucauguauuuuacg

SEQ ID NO: 2933884 - RNA, 19 nt, Artificial Sequence
  Description of Artificial Sequence: Synthetic oligonucleotide
ggcuuuuccacauugauga

SEQ ID NO: 2933885 - RNA, 19 nt, Artificial Sequence
  Description of Artificial Sequence: Synthetic oligonucleotide
ugaauuuugggcacuugaa

SEQ ID NO: 2933886 - RNA, 19 nt, Artificial Sequence
  Description of Artificial Sequence: Synthetic oligonucleotide
uaacaccuugauuauauuc

SEQ ID NO: 2933887 - RNA, 19 nt, Artificial Sequence
  Description of Artificial Sequence: Synthetic oligonucleotide
ugugacaugcaaaaucuuu

SEQ ID NO: 2933888 - RNA, 19 nt, Artificial Sequence
  Description of Artificial Sequence: Synthetic oligonucleotide
auuuuacguucacugggac

SEQ ID NO: 2933889 - RNA, 19 nt, Artificial Sequence
  Description of Artificial Sequence: Synthetic oligonucleotide
acuuucauaggguuucucu

SEQ ID NO: 2933890 - RNA, 19 nt, Artificial Sequence
  Description of Artificial Sequence: Synthetic oligonucleotide
uuccaguaugaauuuuggg

SEQ ID NO: 2933891 - RNA, 19 nt, Artificial Sequence
  Description of Artificial Sequence: Synthetic oligonucleotide
augaauuuugggcacuuga

SEQ ID NO: 2933892 - RNA, 19 nt, Artificial Sequence
  Description of Artificial Sequence: Synthetic oligonucleotide
aaucuuuaacaccuugauu

SEQ ID NO: 2933893 - RNA, 19 nt, Artificial Sequence
  Description of Artificial Sequence: Synthetic oligonucleotide
ugugauaugcaaagguuuu

SEQ ID NO: 2933894 - RNA, 19 nt, Artificial Sequence
  Description of Artificial Sequence: Synthetic oligonucleotide
uacuguugugugcaaagac

SEQ ID NO: 2933895 - RNA, 19 nt, Artificial Sequence
  Description of Artificial Sequence: Synthetic oligonucleotide
ugugugcaaagacuuuacc

SEQ ID NO: 2933896 - RNA, 19 nt, Artificial Sequence
  Description of Artificial Sequence: Synthetic oligonucleotide
cauucauaugguuucuuuc

SEQ ID NO: 2933897 - RNA, 19 nt, Artificial Sequence
  Description of Artificial Sequence: Synthetic oligonucleotide
cuuucauaggguuucucuc

SEQ ID NO: 2933898 - RNA, 19 nt, Artificial Sequence
  Description of Artificial Sequence: Synthetic oligonucleotide
uuugggcacuugaagauaa

SEQ ID NO: 2933899 - RNA, 19 nt, Artificial Sequence
  Description of Artificial Sequence: Synthetic oligonucleotide
uugaugucuuugaagacua

SEQ ID NO: 2933900 - RNA, 19 nt, Artificial Sequence
  Description of Artificial Sequence: Synthetic oligonucleotide
auuuugggcacuugaagau

SEQ ID NO: 2933901 - RNA, 19 nt, Artificial Sequence
  Description of Artificial Sequence: Synthetic oligonucleotide
caaaaucuuuaacaccuug

SEQ ID NO: 2933902 - RNA, 19 nt, Artificial Sequence
  Description of Artificial Sequence: Synthetic oligonucleotide
cuguauguuuucuuugaug

SEQ ID NO: 2933903 - RNA, 19 nt, Artificial Sequence
  Description of Artificial Sequence: Synthetic oligonucleotide
ugacaugcaaaaucuuuaa

SEQ ID NO: 2933904 - RNA, 19 nt, Artificial Sequence
  Description of Artificial Sequence: Synthetic oligonucleotide
uuugaagauuacuguugug

SEQ ID NO: 2933905 - RNA, 19 nt, Artificial Sequence
  Description of Artificial Sequence: Synthetic oligonucleotide
uuucuuugaugucuuugaa

SEQ ID NO: 2933906 - RNA, 19 nt, Artificial Sequence
  Description of Artificial Sequence: Synthetic oligonucleotide
gacaugcaaaaucuuuaac

SEQ ID NO: 2933907 - RNA, 19 nt, Artificial Sequence
  Description of Artificial Sequence: Synthetic oligonucleotide
ugcaaagacuuuaccacau

SEQ ID NO: 2933908 - RNA, 19 nt, Artificial Sequence
  Description of Artificial Sequence: Synthetic oligonucleotide
ucuuuaacaccuugauuau

SEQ ID NO: 2933909 - RNA, 19 nt, Artificial Sequence
  Description of Artificial Sequence: Synthetic oligonucleotide
gaugucuuugaagacuaac

SEQ ID NO: 2933910 - RNA, 19 nt, Artificial Sequence
  Description of Artificial Sequence: Synthetic oligonucleotide
ugauuacuuucauaggguu

SEQ ID NO: 2933911 - RNA, 19 nt, Artificial Sequence
  Description of Artificial Sequence: Synthetic oligonucleotide
ucauguauuuuacguucac

SEQ ID NO: 2933912 - RNA, 19 nt, Artificial Sequence
  Description of Artificial Sequence: Synthetic oligonucleotide
uagguuuucucuccuguau

SEQ ID NO: 2933913 - RNA, 19 nt, Artificial Sequence
  Description of Artificial Sequence: Synthetic oligonucleotide
uugaagacuaacugugaua

SEQ ID NO: 2933914 - RNA, 19 nt, Artificial Sequence
  Description of Artificial Sequence: Synthetic oligonucleotide
uaacugugauaugcaaagg

SEQ ID NO: 2933915 - RNA, 19 nt, Artificial Sequence
  Description of Artificial Sequence: Synthetic oligonucleotide
cuuugaugucuuugaagac

SEQ ID NO: 2933916 - RNA, 19 nt, Artificial Sequence
  Description of Artificial Sequence: Synthetic oligonucleotide
uucauagguuuucucuccu

SEQ ID NO: 2933917 - RNA, 19 nt, Artificial Sequence
  Description of Artificial Sequence: Synthetic oligonucleotide
uugugugcaaagacuuuac

SEQ ID NO: 2933918 - RNA, 19 nt, Artificial Sequence
  Description of Artificial Sequence: Synthetic oligonucleotide
augucuuugaagacuaacu

SEQ ID NO: 2933919 - RNA, 19 nt, Artificial Sequence
  Description of Artificial Sequence: Synthetic oligonucleotide
gauaacugugacaugcaaa

SEQ ID NO: 2933920 - RNA, 19 nt, Artificial Sequence
  Description of Artificial Sequence: Synthetic oligonucleotide
acuguugugugcaaagacu

SEQ ID NO: 2933921 - RNA, 19 nt, Artificial Sequence
  Description of Artificial Sequence: Synthetic oligonucleotide
uaacugugaugugcaaagg

SEQ ID NO: 2933922 - RNA, 19 nt, Artificial Sequence
  Description of Artificial Sequence: Synthetic oligonucleotide
ucuccuguauguuuucuuu

SEQ ID NO: 2933923 - RNA, 19 nt, Artificial Sequence
  Description of Artificial Sequence: Synthetic oligonucleotide
cagugugucuucuuuuaug

SEQ ID NO: 2933924 - RNA, 19 nt, Artificial Sequence
  Description of Artificial Sequence: Synthetic oligonucleotide
cauugguuacauucauaug

SEQ ID NO: 2933925 - RNA, 19 nt, Artificial Sequence
  Description of Artificial Sequence: Synthetic oligonucleotide
caguaugaauuuugggcac

SEQ ID NO: 2933926 - RNA, 19 nt, Artificial Sequence
  Description of Artificial Sequence: Synthetic oligonucleotide
ucauagguuuucucuccug

SEQ ID NO: 2933927 - RNA, 19 nt, Artificial Sequence
  Description of Artificial Sequence: Synthetic oligonucleotide
cacugggacgugcaaaggc

SEQ ID NO: 2933928 - RNA, 19 nt, Artificial Sequence
  Description of Artificial Sequence: Synthetic oligonucleotide
agauaacugugacaugcaa

SEQ ID NO: 2933929 - RNA, 19 nt, Artificial Sequence
  Description of Artificial Sequence: Synthetic oligonucleotide
aagauaacugugacaugca

SEQ ID NO: 2933930 - RNA, 19 nt, Artificial Sequence
  Description of Artificial Sequence: Synthetic oligonucleotide
ccuuugaagauuacuguug

SEQ ID NO: 2933931 - RNA, 19 nt, Artificial Sequence
  Description of Artificial Sequence: Synthetic oligonucleotide
gaagacuaacugugauaug

SEQ ID NO: 2933932 - RNA, 19 nt, Artificial Sequence
  Description of Artificial Sequence: Synthetic oligonucleotide
cacuugaagauaacuguga

SEQ ID NO: 2933933 - RNA, 19 nt, Artificial Sequence
  Description of Artificial Sequence: Synthetic oligonucleotide
uuacuguugugugcaaaga

SEQ ID NO: 2933934 - RNA, 19 nt, Artificial Sequence
  Description of Artificial Sequence: Synthetic oligonucleotide
uaugaauuuugggcacuug

SEQ ID NO: 2933935 - RNA, 19 nt, Artificial Sequence
  Description of Artificial Sequence: Synthetic oligonucleotide
cuuugaagacuaacuguga

SEQ ID NO: 2933936 - RNA, 19 nt, Artificial Sequence
  Description of Artificial Sequence: Synthetic oligonucleotide
gucuuugaagacuaacugu

SEQ ID NO: 2933937 - RNA, 19 nt, Artificial Sequence
  Description of Artificial Sequence: Synthetic oligonucleotide
acuaacugugauaugcaaa

SEQ ID NO: 2933938 - RNA, 19 nt, Artificial Sequence
  Description of Artificial Sequence: Synthetic oligonucleotide
ccuugauuauauucauagg

SEQ ID NO: 2933939 - RNA, 19 nt, Artificial Sequence
  Description of Artificial Sequence: Synthetic oligonucleotide
gaugacauucauaugguuu

SEQ ID NO: 2933940 - RNA, 19 nt, Artificial Sequence
  Description of Artificial Sequence: Synthetic oligonucleotide
gacuaacugugauaugcaa

SEQ ID NO: 2933941 - RNA, 19 nt, Artificial Sequence
  Description of Artificial Sequence: Synthetic oligonucleotide
ugggcacuugaagauaacu

SEQ ID NO: 2933942 - RNA, 19 nt, Artificial Sequence
  Description of Artificial Sequence: Synthetic oligonucleotide
gugcaaagacuuuaccaca

SEQ ID NO: 2933943 - RNA, 19 nt, Artificial Sequence
  Description of Artificial Sequence: Synthetic oligonucleotide
guauguuuucuuugauguc

SEQ ID NO: 2933944 - RNA, 19 nt, Artificial Sequence
  Description of Artificial Sequence: Synthetic oligonucleotide
gugugucuucuuuuaugcc

SEQ ID NO: 2933945 - RNA, 19 nt, Artificial Sequence
  Description of Artificial Sequence: Synthetic oligonucleotide
acugugauaugcaaagguu

SEQ ID NO: 2933946 - RNA, 19 nt, Artificial Sequence
  Description of Artificial Sequence: Synthetic oligonucleotide
uguugugugcaaagacuuu

SEQ ID NO: 2933947 - RNA, 19 nt, Artificial Sequence
  Description of Artificial Sequence: Synthetic oligonucleotide
aguaugaauuuugggcacu

SEQ ID NO: 2933948 - RNA, 19 nt, Artificial Sequence
  Description of Artificial Sequence: Synthetic oligonucleotide
ugaugacauucauaugguu

SEQ ID NO: 2933949 - RNA, 19 nt, Artificial Sequence
  Description of Artificial Sequence: Synthetic oligonucleotide
uuaacaccuugauuauauu

SEQ ID NO: 2933950 - RNA, 19 nt, Artificial Sequence
  Description of Artificial Sequence: Synthetic oligonucleotide
auagguuuucucuccugua

SEQ ID NO: 2933951 - RNA, 19 nt, Artificial Sequence
  Description of Artificial Sequence: Synthetic oligonucleotide
cuuugaagauuacuguugu

SEQ ID NO: 2933952 - RNA, 19 nt, Artificial Sequence
  Description of Artificial Sequence: Synthetic oligonucleotide
ugacauucauaugguuucu

SEQ ID NO: 2933953 - RNA, 19 nt, Artificial Sequence
  Description of Artificial Sequence: Synthetic oligonucleotide
cugauuacuuucauagggu

SEQ ID NO: 2933954 - RNA, 19 nt, Artificial Sequence
  Description of Artificial Sequence: Synthetic oligonucleotide
acugggacgugcaaaggcu

SEQ ID NO: 2933955 - RNA, 19 nt, Artificial Sequence
  Description of Artificial Sequence: Synthetic oligonucleotide
uuuugggcacuugaagaua

SEQ ID NO: 2933956 - RNA, 19 nt, Artificial Sequence
  Description of Artificial Sequence: Synthetic oligonucleotide
ucacugggacgugcaaagg

SEQ ID NO: 2933957 - RNA, 19 nt, Artificial Sequence
  Description of Artificial Sequence: Synthetic oligonucleotide
agacuaacugugauaugca

SEQ ID NO: 2933958 - RNA, 19 nt, Artificial Sequence
  Description of Artificial Sequence: Synthetic oligonucleotide
gugacaugcaaaaucuuua

SEQ ID NO: 2933959 - RNA, 19 nt, Artificial Sequence
  Description of Artificial Sequence: Synthetic oligonucleotide
gggcacuugaagauaacug

SEQ ID NO: 2933960 - RNA, 19 nt, Artificial Sequence
  Description of Artificial Sequence: Synthetic oligonucleotide
guugugugcaaagacuuua

SEQ ID NO: 2933961 - RNA, 19 nt, Artificial Sequence
  Description of Artificial Sequence: Synthetic oligonucleotide
uacguucacugggacgugc

SEQ ID NO: 2933962 - RNA, 19 nt, Artificial Sequence
  Description of Artificial Sequence: Synthetic oligonucleotide
guauguuuucuuucaugua

SEQ ID NO: 2933963 - RNA, 19 nt, Artificial Sequence
  Description of Artificial Sequence: Synthetic oligonucleotide
ugguuacauucauaugguu

SEQ ID NO: 2933964 - RNA, 19 nt, Artificial Sequence
  Description of Artificial Sequence: Synthetic oligonucleotide
cuuucauguauuuuacguu

SEQ ID NO: 2933965 - RNA, 19 nt, Artificial Sequence
  Description of Artificial Sequence: Synthetic oligonucleotide
gauuacuguugugugcaaa

SEQ ID NO: 2933966 - RNA, 19 nt, Artificial Sequence
  Description of Artificial Sequence: Synthetic oligonucleotide
ugaugucuuugaagacuaa

SEQ ID NO: 2933967 - RNA, 19 nt, Artificial Sequence
  Description of Artificial Sequence: Synthetic oligonucleotide
uuacuuucauaggguuucu

SEQ ID NO: 2933968 - RNA, 19 nt, Artificial Sequence
  Description of Artificial Sequence: Synthetic oligonucleotide
uugggcacuugaagauaac

SEQ ID NO: 2933969 - RNA, 19 nt, Artificial Sequence
  Description of Artificial Sequence: Synthetic oligonucleotide
uguuuucuuugaugucuuu

SEQ ID NO: 2933970 - RNA, 19 nt, Artificial Sequence
  Description of Artificial Sequence: Synthetic oligonucleotide
cauagguuuucucuccugu

SEQ ID NO: 2933971 - RNA, 19 nt, Artificial Sequence
  Description of Artificial Sequence: Synthetic oligonucleotide
cugugauaugcaaagguuu

SEQ ID NO: 2933972 - RNA, 19 nt, Artificial Sequence
  Description of Artificial Sequence: Synthetic oligonucleotide
uaacugugacaugcaaaau

SEQ ID NO: 2933973 - RNA, 19 nt, Artificial Sequence
  Description of Artificial Sequence: Synthetic oligonucleotide
ugggacgugcaaaggcuuu

SEQ ID NO: 2933974 - RNA, 19 nt, Artificial Sequence
  Description of Artificial Sequence: Synthetic oligonucleotide
agauuacuguugugugcaa

SEQ ID NO: 2933975 - RNA, 19 nt, Artificial Sequence
  Description of Artificial Sequence: Synthetic oligonucleotide
uacuuucauaggguuucuc

SEQ ID NO: 2933976 - RNA, 19 nt, Artificial Sequence
  Description of Artificial Sequence: Synthetic oligonucleotide
cuguugugugcaaagacuu

SEQ ID NO: 2933977 - RNA, 19 nt, Artificial Sequence
  Description of Artificial Sequence: Synthetic oligonucleotide
gauuacuuucauaggguuu

SEQ ID NO: 2933978 - RNA, 19 nt, Artificial Sequence
  Description of Artificial Sequence: Synthetic oligonucleotide
ugucuucuuuuaugccuuu

SEQ ID NO: 2933979 - RNA, 19 nt, Artificial Sequence
  Description of Artificial Sequence: Synthetic oligonucleotide
cacauugguuacauucaua

SEQ ID NO: 2933980 - RNA, 19 nt, Artificial Sequence
  Description of Artificial Sequence: Synthetic oligonucleotide
uuacguucacugggacgug

SEQ ID NO: 2933981 - RNA, 19 nt, Artificial Sequence
  Description of Artificial Sequence: Synthetic oligonucleotide
auguuuucuuugaugucuu

SEQ ID NO: 2933982 - RNA, 19 nt, Artificial Sequence
  Description of Artificial Sequence: Synthetic oligonucleotide
guucacugggacgugcaaa

SEQ ID NO: 2933983 - RNA, 19 nt, Artificial Sequence
  Description of Artificial Sequence: Synthetic oligonucleotide
cauguauuuuacguucacu

SEQ ID NO: 2933984 - RNA, 19 nt, Artificial Sequence
  Description of Artificial Sequence: Synthetic oligonucleotide
cuuuaacaccuugauuaua

SEQ ID NO: 2933985 - RNA, 19 nt, Artificial Sequence
  Description of Artificial Sequence: Synthetic oligonucleotide
caccuugauuauauucaua

SEQ ID NO: 2933986 - RNA, 19 nt, Artificial Sequence
  Description of Artificial Sequence: Synthetic oligonucleotide
acguucacugggacgugca

SEQ ID NO: 2933987 - RNA, 19 nt, Artificial Sequence
  Description of Artificial Sequence: Synthetic oligonucleotide
gugucuucuuuuaugccuu

SEQ ID NO: 2933988 - RNA, 19 nt, Artificial Sequence
  Description of Artificial Sequence: Synthetic oligonucleotide
guaugaauuuugggcacuu

SEQ ID NO: 2933989 - RNA, 19 nt, Artificial Sequence
  Description of Artificial Sequence: Synthetic oligonucleotide
guuuucucuccuguauguu

SEQ ID NO: 2933990 - RNA, 19 nt, Artificial Sequence
  Description of Artificial Sequence: Synthetic oligonucleotide
cugggacgugcaaaggcuu

SEQ ID NO: 2933991 - RNA, 19 nt, Artificial Sequence
  Description of Artificial Sequence: Synthetic oligonucleotide
gcaaagacuuuaccacauu

SEQ ID NO: 2933992 - RNA, 19 nt, Artificial Sequence
  Description of Artificial Sequence: Synthetic oligonucleotide
ccacauugguuacauucau

SEQ ID NO: 2933993 - RNA, 19 nt, Artificial Sequence
  Description of Artificial Sequence: Synthetic oligonucleotide
gcaaaaucuuuaacaccuu

SEQ ID NO: 2933994 - RNA, 19 nt, Artificial Sequence
  Description of Artificial Sequence: Synthetic oligonucleotide
ccagugugucuucuuuuau

SEQ ID NO: 2933995 - RNA, 19 nt, Artificial Sequence
  Description of Artificial Sequence: Synthetic oligonucleotide
gggacgugcaaaggcuuuu

SEQ ID NO: 2933996 - RNA, 19 nt, Artificial Sequence
  Description of Artificial Sequence: Synthetic oligonucleotide
cguucacugggacgugcaa

SEQ ID NO: 2933997 - RNA, 19 nt, Artificial Sequence
  Description of Artificial Sequence: Synthetic oligonucleotide
uucaccgccaaguagaugg

SEQ ID NO: 2933998 - RNA, 19 nt, Artificial Sequence
  Description of Artificial Sequence: Synthetic oligonucleotide
uguguagccaacaaugggg

SEQ ID NO: 2933999 - RNA, 19 nt, Artificial Sequence
  Description of Artificial Sequence: Synthetic oligonucleotide
uccuuuaugucaaaguggg

SEQ ID NO: 2934000 - RNA, 19 nt, Artificial Sequence
  Description of Artificial Sequence: Synthetic oligonucleotide
aagaccacucccuucaccg

SEQ ID NO: 2934001 - RNA, 19 nt, Artificial Sequence
  Description of Artificial Sequence: Synthetic oligonucleotide
gaagacgucauccagggcc

SEQ ID NO: 2934002 - RNA, 19 nt, Artificial Sequence
  Description of Artificial Sequence: Synthetic oligonucleotide
agaggugacaucaaagacc

SEQ ID NO: 2934003 - RNA, 19 nt, Artificial Sequence
  Description of Artificial Sequence: Synthetic oligonucleotide
uagacgucagaacucaucc

SEQ ID NO: 2934004 - RNA, 19 nt, Artificial Sequence
  Description of Artificial Sequence: Synthetic oligonucleotide
uuagcugugagacccguag

SEQ ID NO: 2934005 - RNA, 19 nt, Artificial Sequence
  Description of Artificial Sequence: Synthetic oligonucleotide
ucaaagaccacucccuuca

SEQ ID NO: 2934006 - RNA, 19 nt, Artificial Sequence
  Description of Artificial Sequence: Synthetic oligonucleotide
uccucgaccauaaaacucc

SEQ ID NO: 2934007 - RNA, 19 nt, Artificial Sequence
  Description of Artificial Sequence: Synthetic oligonucleotide
aaagaccacucccuucacc

SEQ ID NO: 2934008 - RNA, 19 nt, Artificial Sequence
  Description of Artificial Sequence: Synthetic oligonucleotide
uaaaacuccuuuccagagg

SEQ ID NO: 2934009 - RNA, 19 nt, Artificial Sequence
  Description of Artificial Sequence: Synthetic oligonucleotide
uuggccacaccucuggugg

SEQ ID NO: 2934010 - RNA, 19 nt, Artificial Sequence
  Description of Artificial Sequence: Synthetic oligonucleotide
auaaaacuccuuuccagag

SEQ ID NO: 2934011 - RNA, 19 nt, Artificial Sequence
  Description of Artificial Sequence: Synthetic oligonucleotide
agugucaugagugaggucu

SEQ ID NO: 2934012 - RNA, 19 nt, Artificial Sequence
  Description of Artificial Sequence: Synthetic oligonucleotide
gacaucaaagaccacuccc

SEQ ID NO: 2934013 - RNA, 19 nt, Artificial Sequence
  Description of Artificial Sequence: Synthetic oligonucleotide
gaccauaaaacuccuuucc

SEQ ID NO: 2934014 - RNA, 19 nt, Artificial Sequence
  Description of Artificial Sequence: Synthetic oligonucleotide
uacaccuugcugaagacgu

SEQ ID NO: 2934015 - RNA, 19 nt, Artificial Sequence
  Description of Artificial Sequence: Synthetic oligonucleotide
ucagaacucauccuuuaug

SEQ ID NO: 2934016 - RNA, 19 nt, Artificial Sequence
  Description of Artificial Sequence: Synthetic oligonucleotide
uggucuucaggcuugaagu

SEQ ID NO: 2934017 - RNA, 19 nt, Artificial Sequence
  Description of Artificial Sequence: Synthetic oligonucleotide
gaacucauccuuuauguca

SEQ ID NO: 2934018 - RNA, 19 nt, Artificial Sequence
  Description of Artificial Sequence: Synthetic oligonucleotide
cauccuuuaugucaaagug

SEQ ID NO: 2934019 - RNA, 19 nt, Artificial Sequence
  Description of Artificial Sequence: Synthetic oligonucleotide
uccuccuccgugaagagcc

SEQ ID NO: 2934020 - RNA, 19 nt, Artificial Sequence
  Description of Artificial Sequence: Synthetic oligonucleotide
agcuccuuagcugugagac

SEQ ID NO: 2934021 - RNA, 19 nt, Artificial Sequence
  Description of Artificial Sequence: Synthetic oligonucleotide
uuguacaccuugcugaaga

SEQ ID NO: 2934022 - RNA, 19 nt, Artificial Sequence
  Description of Artificial Sequence: Synthetic oligonucleotide
uccgugaagagccgcaccg

SEQ ID NO: 2934023 - RNA, 19 nt, Artificial Sequence
  Description of Artificial Sequence: Synthetic oligonucleotide
uuggucuucaggcuugaag

SEQ ID NO: 2934024 - RNA, 19 nt, Artificial Sequence
  Description of Artificial Sequence: Synthetic oligonucleotide
cuugcugaagacgucaucc

SEQ ID NO: 2934025 - RNA, 19 nt, Artificial Sequence
  Description of Artificial Sequence: Synthetic oligonucleotide
ucguggaggauccugcggg

SEQ ID NO: 2934026 - RNA, 19 nt, Artificial Sequence
  Description of Artificial Sequence: Synthetic oligonucleotide
cugaagacgucauccaggg

SEQ ID NO: 2934027 - RNA, 19 nt, Artificial Sequence
  Description of Artificial Sequence: Synthetic oligonucleotide
agugaggucugcaggaucc

SEQ ID NO: 2934028 - RNA, 19 nt, Artificial Sequence
  Description of Artificial Sequence: Synthetic oligonucleotide
gauccagugacaucuuggc

SEQ ID NO: 2934029 - RNA, 19 nt, Artificial Sequence
  Description of Artificial Sequence: Synthetic oligonucleotide
aaguagaugggcugguccu

SEQ ID NO: 2934030 - RNA, 19 nt, Artificial Sequence
  Description of Artificial Sequence: Synthetic oligonucleotide
ucauccuuuaugucaaagu

SEQ ID NO: 2934031 - RNA, 19 nt, Artificial Sequence
  Description of Artificial Sequence: Synthetic oligonucleotide
ucgaccauaaaacuccuuu

SEQ ID NO: 2934032 - RNA, 19 nt, Artificial Sequence
  Description of Artificial Sequence: Synthetic oligonucleotide
caugagugaggucugcagg

SEQ ID NO: 2934033 - RNA, 19 nt, Artificial Sequence
  Description of Artificial Sequence: Synthetic oligonucleotide
ugacaucuuggccacaccu

SEQ ID NO: 2934034 - RNA, 19 nt, Artificial Sequence
  Description of Artificial Sequence: Synthetic oligonucleotide
ccaacaaugggguacuugg

SEQ ID NO: 2934035 - RNA, 19 nt, Artificial Sequence
  Description of Artificial Sequence: Synthetic oligonucleotide
ucaggcuugaaguccaggu

SEQ ID NO: 2934036 - RNA, 19 nt, Artificial Sequence
  Description of Artificial Sequence: Synthetic oligonucleotide
uaugucaaagugggguugg

SEQ ID NO: 2934037 - RNA, 19 nt, Artificial Sequence
  Description of Artificial Sequence: Synthetic oligonucleotide
aggcuugaaguccagguug

SEQ ID NO: 2934038 - RNA, 19 nt, Artificial Sequence
  Description of Artificial Sequence: Synthetic oligonucleotide
auccagugacaucuuggcc

SEQ ID NO: 2934039 - RNA, 19 nt, Artificial Sequence
  Description of Artificial Sequence: Synthetic oligonucleotide
uuggcuuuguacaccuugc

SEQ ID NO: 2934040 - RNA, 19 nt, Artificial Sequence
  Description of Artificial Sequence: Synthetic oligonucleotide
auccuuuaugucaaagugg

SEQ ID NO: 2934041 - RNA, 19 nt, Artificial Sequence
  Description of Artificial Sequence: Synthetic oligonucleotide
ucuucaggcuugaagucca

SEQ ID NO: 2934042 - RNA, 19 nt, Artificial Sequence
  Description of Artificial Sequence: Synthetic oligonucleotide
aucaaagaccacucccuuc

SEQ ID NO: 2934043 - RNA, 19 nt, Artificial Sequence
  Description of Artificial Sequence: Synthetic oligonucleotide
uuuaugucaaagugggguu

SEQ ID NO: 2934044 - RNA, 19 nt, Artificial Sequence
  Description of Artificial Sequence: Synthetic oligonucleotide
cauaaaacuccuuuccaga

SEQ ID NO: 2934045 - RNA, 19 nt, Artificial Sequence
  Description of Artificial Sequence: Synthetic oligonucleotide
ugcugaagacgucauccag

SEQ ID NO: 2934046 - RNA, 19 nt, Artificial Sequence
  Description of Artificial Sequence: Synthetic oligonucleotide
caaguagaugggcuggucc

SEQ ID NO: 2934047 - RNA, 19 nt, Artificial Sequence
  Description of Artificial Sequence: Synthetic oligonucleotide
gugggguuggucuucaggc

SEQ ID NO: 2934048 - RNA, 19 nt, Artificial Sequence
  Description of Artificial Sequence: Synthetic oligonucleotide
aacuccuuuccagagguga

SEQ ID NO: 2934049 - RNA, 19 nt, Artificial Sequence
  Description of Artificial Sequence: Synthetic oligonucleotide
accauaaaacuccuuucca

SEQ ID NO: 2934050 - RNA, 19 nt, Artificial Sequence
  Description of Artificial Sequence: Synthetic oligonucleotide
cuccuuagcugugagaccc

SEQ ID NO: 2934051 - RNA, 19 nt, Artificial Sequence
  Description of Artificial Sequence: Synthetic oligonucleotide
cuuggcuuuguacaccuug

SEQ ID NO: 2934052 - RNA, 19 nt, Artificial Sequence
  Description of Artificial Sequence: Synthetic oligonucleotide
cuguguagccaacaauggg

SEQ ID NO: 2934053 - RNA, 19 nt, Artificial Sequence
  Description of Artificial Sequence: Synthetic oligonucleotide
aucuuggccacaccucugg

SEQ ID NO: 2934054 - RNA, 19 nt, Artificial Sequence
  Description of Artificial Sequence: Synthetic oligonucleotide
ugacaucaaagaccacucc

SEQ ID NO: 2934055 - RNA, 19 nt, Artificial Sequence
  Description of Artificial Sequence: Synthetic oligonucleotide
agugacaucuuggccacac

SEQ ID NO: 2934056 - RNA, 19 nt, Artificial Sequence
  Description of Artificial Sequence: Synthetic oligonucleotide
agcugugagacccguagug

SEQ ID NO: 2934057 - RNA, 19 nt, Artificial Sequence
  Description of Artificial Sequence: Synthetic oligonucleotide
gucugcaggauccagugac

SEQ ID NO: 2934058 - RNA, 19 nt, Artificial Sequence
  Description of Artificial Sequence: Synthetic oligonucleotide
acaucuuggccacaccucu

SEQ ID NO: 2934059 - RNA, 19 nt, Artificial Sequence
  Description of Artificial Sequence: Synthetic oligonucleotide
augagugaggucugcagga

SEQ ID NO: 2934060 - RNA, 19 nt, Artificial Sequence
  Description of Artificial Sequence: Synthetic oligonucleotide
uuaugucaaagugggguug

SEQ ID NO: 2934061 - RNA, 19 nt, Artificial Sequence
  Description of Artificial Sequence: Synthetic oligonucleotide
cuuuccagaggugacauca

SEQ ID NO: 2934062 - RNA, 19 nt, Artificial Sequence
  Description of Artificial Sequence: Synthetic oligonucleotide
cagaggugacaucaaagac

SEQ ID NO: 2934063 - RNA, 19 nt, Artificial Sequence
  Description of Artificial Sequence: Synthetic oligonucleotide
gcuuuguacaccuugcuga

SEQ ID NO: 2934064 - RNA, 19 nt, Artificial Sequence
  Description of Artificial Sequence: Synthetic oligonucleotide
uacuuggcuuuguacaccu

SEQ ID NO: 2934065 - RNA, 19 nt, Artificial Sequence
  Description of Artificial Sequence: Synthetic oligonucleotide
cuagacgucagaacucauc

SEQ ID NO: 2934066 - RNA, 19 nt, Artificial Sequence
  Description of Artificial Sequence: Synthetic oligonucleotide
gaugggcugguccuccucc

SEQ ID NO: 2934067 - RNA, 19 nt, Artificial Sequence
  Description of Artificial Sequence: Synthetic oligonucleotide
ggucaaggcauuauagggg

SEQ ID NO: 2934068 - RNA, 19 nt, Artificial Sequence
  Description of Artificial Sequence: Synthetic oligonucleotide
guagccaacaaugggguac

SEQ ID NO: 2934069 - RNA, 19 nt, Artificial Sequence
  Description of Artificial Sequence: Synthetic oligonucleotide
aacucauccuuuaugucaa

SEQ ID NO: 2934070 - RNA, 19 nt, Artificial Sequence
  Description of Artificial Sequence: Synthetic oligonucleotide
uccucguggaggauccugc

SEQ ID NO: 2934071 - RNA, 19 nt, Artificial Sequence
  Description of Artificial Sequence: Synthetic oligonucleotide
ccauaaaacuccuuuccag

SEQ ID NO: 2934072 - RNA, 19 nt, Artificial Sequence
  Description of Artificial Sequence: Synthetic oligonucleotide
cuuuaugucaaaguggggu

SEQ ID NO: 2934073 - RNA, 19 nt, Artificial Sequence
  Description of Artificial Sequence: Synthetic oligonucleotide
agaccacucccuucaccgc

SEQ ID NO: 2934074 - RNA, 19 nt, Artificial Sequence
  Description of Artificial Sequence: Synthetic oligonucleotide
ggggcugccauccucgugg

SEQ ID NO: 2934075 - RNA, 19 nt, Artificial Sequence
  Description of Artificial Sequence: Synthetic oligonucleotide
acaucaaagaccacucccu

SEQ ID NO: 2934076 - RNA, 19 nt, Artificial Sequence
  Description of Artificial Sequence: Synthetic oligonucleotide
caacaaugggguacuuggc

SEQ ID NO: 2934077 - RNA, 19 nt, Artificial Sequence
  Description of Artificial Sequence: Synthetic oligonucleotide
aaguccagguuggggcugc

SEQ ID NO: 2934078 - RNA, 19 nt, Artificial Sequence
  Description of Artificial Sequence: Synthetic oligonucleotide
ucccuucaccgccaaguag

SEQ ID NO: 2934079 - RNA, 19 nt, Artificial Sequence
  Description of Artificial Sequence: Synthetic oligonucleotide
ggcuguguagccaacaaug

SEQ ID NO: 2934080 - RNA, 19 nt, Artificial Sequence
  Description of Artificial Sequence: Synthetic oligonucleotide
ucugcaggauccagugaca

SEQ ID NO: 2934081 - RNA, 19 nt, Artificial Sequence
  Description of Artificial Sequence: Synthetic oligonucleotide
gucaaagugggguuggucu

SEQ ID NO: 2934082 - RNA, 19 nt, Artificial Sequence
  Description of Artificial Sequence: Synthetic oligonucleotide
uguacaccuugcugaagac

SEQ ID NO: 2934083 - RNA, 19 nt, Artificial Sequence
  Description of Artificial Sequence: Synthetic oligonucleotide
uugcugaagacgucaucca

SEQ ID NO: 2934084 - RNA, 19 nt, Artificial Sequence
  Description of Artificial Sequence: Synthetic oligonucleotide
guacaccuugcugaagacg

SEQ ID NO: 2934085 - RNA, 19 nt, Artificial Sequence
  Description of Artificial Sequence: Synthetic oligonucleotide
cuccucgaccauaaaacuc

SEQ ID NO: 2934086 - RNA, 19 nt, Artificial Sequence
  Description of Artificial Sequence: Synthetic oligonucleotide
guuggggcugccauccucg

SEQ ID NO: 2934087 - RNA, 19 nt, Artificial Sequence
  Description of Artificial Sequence: Synthetic oligonucleotide
gguacuuggcuuuguacac

SEQ ID NO: 2934088 - RNA, 19 nt, Artificial Sequence
  Description of Artificial Sequence: Synthetic oligonucleotide
ucaccgccaaguagauggg

SEQ ID NO: 2934089 - RNA, 19 nt, Artificial Sequence
  Description of Artificial Sequence: Synthetic oligonucleotide
acccguagugucaugagug

SEQ ID NO: 2934090 - RNA, 19 nt, Artificial Sequence
  Description of Artificial Sequence: Synthetic oligonucleotide
gcuguagcgggccagcucc

SEQ ID NO: 2934091 - RNA, 19 nt, Artificial Sequence
  Description of Artificial Sequence: Synthetic oligonucleotide
uccuuagcugugagacccg

SEQ ID NO: 2934092 - RNA, 19 nt, Artificial Sequence
  Description of Artificial Sequence: Synthetic oligonucleotide
uggaggauccugcgggcug

SEQ ID NO: 2934093 - RNA, 19 nt, Artificial Sequence
  Description of Artificial Sequence: Synthetic oligonucleotide
ggguacuuggcuuuguaca

SEQ ID NO: 2934094 - RNA, 19 nt, Artificial Sequence
  Description of Artificial Sequence: Synthetic oligonucleotide
ggauccagugacaucuugg

SEQ ID NO: 2934095 - RNA, 19 nt, Artificial Sequence
  Description of Artificial Sequence: Synthetic oligonucleotide
uuuguacaccuugcugaag

SEQ ID NO: 2934096 - RNA, 19 nt, Artificial Sequence
  Description of Artificial Sequence: Synthetic oligonucleotide
cucauccuuuaugucaaag

SEQ ID NO: 2934097 - RNA, 19 nt, Artificial Sequence
  Description of Artificial Sequence: Synthetic oligonucleotide
uggcuuuguacaccuugcu

SEQ ID NO: 2934098 - RNA, 19 nt, Artificial Sequence
  Description of Artificial Sequence: Synthetic oligonucleotide
acucccuucaccgccaagu

SEQ ID NO: 2934099 - RNA, 19 nt, Artificial Sequence
  Description of Artificial Sequence: Synthetic oligonucleotide
gugacaucaaagaccacuc

SEQ ID NO: 2934100 - RNA, 19 nt, Artificial Sequence
  Description of Artificial Sequence: Synthetic oligonucleotide
cggucaaggcauuauaggg

SEQ ID NO: 2934101 - RNA, 19 nt, Artificial Sequence
  Description of Artificial Sequence: Synthetic oligonucleotide
gcugaagacgucauccagg

SEQ ID NO: 2934102 - RNA, 19 nt, Artificial Sequence
  Description of Artificial Sequence: Synthetic oligonucleotide
aagacgucauccagggccu

SEQ ID NO: 2934103 - RNA, 19 nt, Artificial Sequence
  Description of Artificial Sequence: Synthetic oligonucleotide
uccagguuggggcugccau

SEQ ID NO: 2934104 - RNA, 19 nt, Artificial Sequence
  Description of Artificial Sequence: Synthetic oligonucleotide
cugugagacccguaguguc

SEQ ID NO: 2934105 - RNA, 19 nt, Artificial Sequence
  Description of Artificial Sequence: Synthetic oligonucleotide
aguagaugggcugguccuc

SEQ ID NO: 2934106 - RNA, 19 nt, Artificial Sequence
  Description of Artificial Sequence: Synthetic oligonucleotide
gcugccauccucguggagg

SEQ ID NO: 2934107 - RNA, 19 nt, Artificial Sequence
  Description of Artificial Sequence: Synthetic oligonucleotide
agacccguagugucaugag

SEQ ID NO: 2934108 - RNA, 19 nt, Artificial Sequence
  Description of Artificial Sequence: Synthetic oligonucleotide
acuccuuuccagaggugac

SEQ ID NO: 2934109 - RNA, 19 nt, Artificial Sequence
  Description of Artificial Sequence: Synthetic oligonucleotide
ugaagacgucauccagggc

SEQ ID NO: 2934110 - RNA, 19 nt, Artificial Sequence
  Description of Artificial Sequence: Synthetic oligonucleotide
uccuucccggucaaggcau

SEQ ID NO: 2934111 - RNA, 19 nt, Artificial Sequence
  Description of Artificial Sequence: Synthetic oligonucleotide
agcuagacgucagaacuca

SEQ ID NO: 2934112 - RNA, 19 nt, Artificial Sequence
  Description of Artificial Sequence: Synthetic oligonucleotide
cucguggaggauccugcgg

SEQ ID NO: 2934113 - RNA, 19 nt, Artificial Sequence
  Description of Artificial Sequence: Synthetic oligonucleotide
agcuccuccuccgugaaga

SEQ ID NO: 2934114 - RNA, 19 nt, Artificial Sequence
  Description of Artificial Sequence: Synthetic oligonucleotide
uccucgccgcuguagcggg

SEQ ID NO: 2934115 - RNA, 19 nt, Artificial Sequence
  Description of Artificial Sequence: Synthetic oligonucleotide
aggauccagugacaucuug

SEQ ID NO: 2934116 - RNA, 19 nt, Artificial Sequence
  Description of Artificial Sequence: Synthetic oligonucleotide
ugguccuccuccucgccgc

SEQ ID NO: 2934117 - RNA, 19 nt, Artificial Sequence
  Description of Artificial Sequence: Synthetic oligonucleotide
agacgucagaacucauccu

SEQ ID NO: 2934118 - RNA, 19 nt, Artificial Sequence
  Description of Artificial Sequence: Synthetic oligonucleotide
uccuccgugaagagccgca

SEQ ID NO: 2934119 - RNA, 19 nt, Artificial Sequence
  Description of Artificial Sequence: Synthetic oligonucleotide
gcuguguagccaacaaugg

SEQ ID NO: 2934120 - RNA, 19 nt, Artificial Sequence
  Description of Artificial Sequence: Synthetic oligonucleotide
cagguuggggcugccaucc

SEQ ID NO: 2934121 - RNA, 19 nt, Artificial Sequence
  Description of Artificial Sequence: Synthetic oligonucleotide
ggcuuuguacaccuugcug

SEQ ID NO: 2934122 - RNA, 19 nt, Artificial Sequence
  Description of Artificial Sequence: Synthetic oligonucleotide
ggcuccucgaccauaaaac

SEQ ID NO: 2934123 - RNA, 19 nt, Artificial Sequence
  Description of Artificial Sequence: Synthetic oligonucleotide
aaagugggguuggucuuca

SEQ ID NO: 2934124 - RNA, 19 nt, Artificial Sequence
  Description of Artificial Sequence: Synthetic oligonucleotide
ugggguuggucuucaggcu

SEQ ID NO: 2934125 - RNA, 19 nt, Artificial Sequence
  Description of Artificial Sequence: Synthetic oligonucleotide
cguagugucaugagugagg

SEQ ID NO: 2934126 - RNA, 19 nt, Artificial Sequence
  Description of Artificial Sequence: Synthetic oligonucleotide
ccggucaaggcauuauagg

SEQ ID NO: 2934127 - RNA, 19 nt, Artificial Sequence
  Description of Artificial Sequence: Synthetic oligonucleotide
agaugggcugguccuccuc

SEQ ID NO: 2934128 - RNA, 19 nt, Artificial Sequence
  Description of Artificial Sequence: Synthetic oligonucleotide
gacgucagaacucauccuu

SEQ ID NO: 2934129 - RNA, 19 nt, Artificial Sequence
  Description of Artificial Sequence: Synthetic oligonucleotide
guacuuggcuuuguacacc

SEQ ID NO: 2934130 - RNA, 19 nt, Artificial Sequence
  Description of Artificial Sequence: Synthetic oligonucleotide
uagcugugagacccguagu

SEQ ID NO: 2934131 - RNA, 19 nt, Artificial Sequence
  Description of Artificial Sequence: Synthetic oligonucleotide
ugucaaagugggguugguc

SEQ ID NO: 2934132 - RNA, 19 nt, Artificial Sequence
  Description of Artificial Sequence: Synthetic oligonucleotide
gagacccguagugucauga

SEQ ID NO: 2934133 - RNA, 19 nt, Artificial Sequence
  Description of Artificial Sequence: Synthetic oligonucleotide
cugguccuccuccucgccg

SEQ ID NO: 2934134 - RNA, 19 nt, Artificial Sequence
  Description of Artificial Sequence: Synthetic oligonucleotide
cagcuagacgucagaacuc

SEQ ID NO: 2934135 - RNA, 19 nt, Artificial Sequence
  Description of Artificial Sequence: Synthetic oligonucleotide
uagccaacaaugggguacu

SEQ ID NO: 2934136 - RNA, 19 nt, Artificial Sequence
  Description of Artificial Sequence: Synthetic oligonucleotide
uccuuuccagaggugacau

SEQ ID NO: 2934137 - RNA, 19 nt, Artificial Sequence
  Description of Artificial Sequence: Synthetic oligonucleotide
ucuuggccacaccucuggu

SEQ ID NO: 2934138 - RNA, 19 nt, Artificial Sequence
  Description of Artificial Sequence: Synthetic oligonucleotide
ugucaugagugaggucugc

SEQ ID NO: 2934139 - RNA, 19 nt, Artificial Sequence
  Description of Artificial Sequence: Synthetic oligonucleotide
gagugaggucugcaggauc

SEQ ID NO: 2934140 - RNA, 19 nt, Artificial Sequence
  Description of Artificial Sequence: Synthetic oligonucleotide
ggugacaucaaagaccacu

SEQ ID NO: 2934141 - RNA, 19 nt, Artificial Sequence
  Description of Artificial Sequence: Synthetic oligonucleotide
guagaugggcugguccucc

SEQ ID NO: 2934142 - RNA, 19 nt, Artificial Sequence
  Description of Artificial Sequence: Synthetic oligonucleotide
ccagaggugacaucaaaga

SEQ ID NO: 2934143 - RNA, 19 nt, Artificial Sequence
  Description of Artificial Sequence: Synthetic oligonucleotide
uguagccaacaauggggua

SEQ ID NO: 2934144 - RNA, 19 nt, Artificial Sequence
  Description of Artificial Sequence: Synthetic oligonucleotide
ugcaggauccagugacauc

SEQ ID NO: 2934145 - RNA, 19 nt, Artificial Sequence
  Description of Artificial Sequence: Synthetic oligonucleotide
ucccggucaaggcauuaua

SEQ ID NO: 2934146 - RNA, 19 nt, Artificial Sequence
  Description of Artificial Sequence: Synthetic oligonucleotide
caucuuggccacaccucug

SEQ ID NO: 2934147 - RNA, 19 nt, Artificial Sequence
  Description of Artificial Sequence: Synthetic oligonucleotide
guagcgggccagcuccucc

SEQ ID NO: 2934148 - RNA, 19 nt, Artificial Sequence
  Description of Artificial Sequence: Synthetic oligonucleotide
guagugucaugagugaggu

SEQ ID NO: 2934149 - RNA, 19 nt, Artificial Sequence
  Description of Artificial Sequence: Synthetic oligonucleotide
cuccgugaagagccgcacc

SEQ ID NO: 2934150 - RNA, 19 nt, Artificial Sequence
  Description of Artificial Sequence: Synthetic oligonucleotide
cccggucaaggcauuauag

SEQ ID NO: 2934151 - RNA, 19 nt, Artificial Sequence
  Description of Artificial Sequence: Synthetic oligonucleotide
accucugguggcguccuuc

SEQ ID NO: 2934152 - RNA, 19 nt, Artificial Sequence
  Description of Artificial Sequence: Synthetic oligonucleotide
cuccucgccgcuguagcgg

SEQ ID NO: 2934153 - RNA, 19 nt, Artificial Sequence
  Description of Artificial Sequence: Synthetic oligonucleotide
gaaguccagguuggggcug

SEQ ID NO: 2934154 - RNA, 19 nt, Artificial Sequence
  Description of Artificial Sequence: Synthetic oligonucleotide
accgccaaguagaugggcu

SEQ ID NO: 2934155 - RNA, 19 nt, Artificial Sequence
  Description of Artificial Sequence: Synthetic oligonucleotide
gugacaucuuggccacacc

SEQ ID NO: 2934156 - RNA, 19 nt, Artificial Sequence
  Description of Artificial Sequence: Synthetic oligonucleotide
uccagcuccuuagcuguga

SEQ ID NO: 2934157 - RNA, 19 nt, Artificial Sequence
  Description of Artificial Sequence: Synthetic oligonucleotide
ccuuuaugucaaagugggg

SEQ ID NO: 2934158 - RNA, 19 nt, Artificial Sequence
  Description of Artificial Sequence: Synthetic oligonucleotide
ccauccucguggaggaucc

SEQ ID NO: 2934159 - RNA, 19 nt, Artificial Sequence
  Description of Artificial Sequence: Synthetic oligonucleotide
ugagugaggucugcaggau

SEQ ID NO: 2934160 - RNA, 19 nt, Artificial Sequence
  Description of Artificial Sequence: Synthetic oligonucleotide
gggguacuuggcuuuguac

SEQ ID NO: 2934161 - RNA, 19 nt, Artificial Sequence
  Description of Artificial Sequence: Synthetic oligonucleotide
gacgucauccagggccucc

SEQ ID NO: 2934162 - RNA, 19 nt, Artificial Sequence
  Description of Artificial Sequence: Synthetic oligonucleotide
cuucaggcuugaaguccag

SEQ ID NO: 2934163 - RNA, 19 nt, Artificial Sequence
  Description of Artificial Sequence: Synthetic oligonucleotide
guccuucccggucaaggca

SEQ ID NO: 2934164 - RNA, 19 nt, Artificial Sequence
  Description of Artificial Sequence: Synthetic oligonucleotide
uccugcgggcuguguagcc

SEQ ID NO: 2934165 - RNA, 19 nt, Artificial Sequence
  Description of Artificial Sequence: Synthetic oligonucleotide
gcggcgugugcccagcgcg

SEQ ID NO: 2934166 - RNA, 19 nt, Artificial Sequence
  Description of Artificial Sequence: Synthetic oligonucleotide
caaagugggguuggucuuc

SEQ ID NO: 2934167 - RNA, 19 nt, Artificial Sequence
  Description of Artificial Sequence: Synthetic oligonucleotide
ggucuucaggcuugaaguc

SEQ ID NO: 2934168 - RNA, 19 nt, Artificial Sequence
  Description of Artificial Sequence: Synthetic oligonucleotide
caaagaccacucccuucac

SEQ ID NO: 2934169 - RNA, 19 nt, Artificial Sequence
  Description of Artificial Sequence: Synthetic oligonucleotide
cacaccucugguggcgucc

SEQ ID NO: 2934170 - RNA, 19 nt, Artificial Sequence
  Description of Artificial Sequence: Synthetic oligonucleotide
gggcugguccuccuccucg

SEQ ID NO: 2934171 - RNA, 19 nt, Artificial Sequence
  Description of Artificial Sequence: Synthetic oligonucleotide
uggggcugccauccucgug

SEQ ID NO: 2934172 - RNA, 19 nt, Artificial Sequence
  Description of Artificial Sequence: Synthetic oligonucleotide
guggcguccuucccgguca

SEQ ID NO: 2934173 - RNA, 19 nt, Artificial Sequence
  Description of Artificial Sequence: Synthetic oligonucleotide
gccuccagcuccuuagcug

SEQ ID NO: 2934174 - RNA, 19 nt, Artificial Sequence
  Description of Artificial Sequence: Synthetic oligonucleotide
cugccauccucguggagga

SEQ ID NO: 2934175 - RNA, 19 nt, Artificial Sequence
  Description of Artificial Sequence: Synthetic oligonucleotide
cccuucaccgccaaguaga

SEQ ID NO: 2934176 - RNA, 19 nt, Artificial Sequence
  Description of Artificial Sequence: Synthetic oligonucleotide
ccagugacaucuuggccac

SEQ ID NO: 2934177 - RNA, 19 nt, Artificial Sequence
  Description of Artificial Sequence: Synthetic oligonucleotide
auccucguggaggauccug

SEQ ID NO: 2934178 - RNA, 19 nt, Artificial Sequence
  Description of Artificial Sequence: Synthetic oligonucleotide
ugagacccguagugucaug

SEQ ID NO: 2934179 - RNA, 19 nt, Artificial Sequence
  Description of Artificial Sequence: Synthetic oligonucleotide
gacccguagugucaugagu

SEQ ID NO: 2934180 - RNA, 19 nt, Artificial Sequence
  Description of Artificial Sequence: Synthetic oligonucleotide
uagaugggcugguccuccu

SEQ ID NO: 2934181 - RNA, 19 nt, Artificial Sequence
  Description of Artificial Sequence: Synthetic oligonucleotide
gugucaugagugaggucug

SEQ ID NO: 2934182 - RNA, 19 nt, Artificial Sequence
  Description of Artificial Sequence: Synthetic oligonucleotide
acaccuugcugaagacguc

SEQ ID NO: 2934183 - RNA, 19 nt, Artificial Sequence
  Description of Artificial Sequence: Synthetic oligonucleotide
augggcugguccuccuccu

SEQ ID NO: 2934184 - RNA, 19 nt, Artificial Sequence
  Description of Artificial Sequence: Synthetic oligonucleotide
uggccacaccucugguggc

SEQ ID NO: 2934185 - RNA, 19 nt, Artificial Sequence
  Description of Artificial Sequence: Synthetic oligonucleotide
gcguccuucccggucaagg

SEQ ID NO: 2934186 - RNA, 19 nt, Artificial Sequence
  Description of Artificial Sequence: Synthetic oligonucleotide
gucaugagugaggucugca

SEQ ID NO: 2934187 - RNA, 19 nt, Artificial Sequence
  Description of Artificial Sequence: Synthetic oligonucleotide
caccuugcugaagacguca

SEQ ID NO: 2934188 - RNA, 19 nt, Artificial Sequence
  Description of Artificial Sequence: Synthetic oligonucleotide
uagugucaugagugagguc

SEQ ID NO: 2934189 - RNA, 19 nt, Artificial Sequence
  Description of Artificial Sequence: Synthetic oligonucleotide
cuccuccuccgugaagagc

SEQ ID NO: 2934190 - RNA, 19 nt, Artificial Sequence
  Description of Artificial Sequence: Synthetic oligonucleotide
guguagccaacaauggggu

SEQ ID NO: 2934191 - RNA, 19 nt, Artificial Sequence
  Description of Artificial Sequence: Synthetic oligonucleotide
acggggcgcggcgugugcc

SEQ ID NO: 2934192 - RNA, 19 nt, Artificial Sequence
  Description of Artificial Sequence: Synthetic oligonucleotide
cucgccgcuguagcgggcc

SEQ ID NO: 2934193 - RNA, 19 nt, Artificial Sequence
  Description of Artificial Sequence: Synthetic oligonucleotide
cgugaagagccgcaccggg

SEQ ID NO: 2934194 - RNA, 19 nt, Artificial Sequence
  Description of Artificial Sequence: Synthetic oligonucleotide
uucccggucaaggcauuau

SEQ ID NO: 2934195 - RNA, 19 nt, Artificial Sequence
  Description of Artificial Sequence: Synthetic oligonucleotide
acucauccuuuaugucaaa

SEQ ID NO: 2934196 - RNA, 19 nt, Artificial Sequence
  Description of Artificial Sequence: Synthetic oligonucleotide
gugugcccagcgcgggccg

SEQ ID NO: 2934197 - RNA, 19 nt, Artificial Sequence
  Description of Artificial Sequence: Synthetic oligonucleotide
gccaacaaugggguacuug

SEQ ID NO: 2934198 - RNA, 19 nt, Artificial Sequence
  Description of Artificial Sequence: Synthetic oligonucleotide
uuggggcugccauccucgu

SEQ ID NO: 2934199 - RNA, 19 nt, Artificial Sequence
  Description of Artificial Sequence: Synthetic oligonucleotide
ccucguggaggauccugcg

SEQ ID NO: 2934200 - RNA, 19 nt, Artificial Sequence
  Description of Artificial Sequence: Synthetic oligonucleotide
cuccuuuccagaggugaca

SEQ ID NO: 2934201 - RNA, 19 nt, Artificial Sequence
  Description of Artificial Sequence: Synthetic oligonucleotide
caccgccaaguagaugggc

SEQ ID NO: 2934202 - RNA, 19 nt, Artificial Sequence
  Description of Artificial Sequence: Synthetic oligonucleotide
gucagaacucauccuuuau

SEQ ID NO: 2934203 - RNA, 19 nt, Artificial Sequence
  Description of Artificial Sequence: Synthetic oligonucleotide
aguccagguuggggcugcc

SEQ ID NO: 2934204 - RNA, 19 nt, Artificial Sequence
  Description of Artificial Sequence: Synthetic oligonucleotide
ccucugguggcguccuucc

SEQ ID NO: 2934205 - RNA, 19 nt, Artificial Sequence
  Description of Artificial Sequence: Synthetic oligonucleotide
augucaaagugggguuggu

SEQ ID NO: 2934206 - RNA, 19 nt, Artificial Sequence
  Description of Artificial Sequence: Synthetic oligonucleotide
acgucagaacucauccuuu

SEQ ID NO: 2934207 - RNA, 19 nt, Artificial Sequence
  Description of Artificial Sequence: Synthetic oligonucleotide
cuucaccgccaaguagaug

SEQ ID NO: 2934208 - RNA, 19 nt, Artificial Sequence
  Description of Artificial Sequence: Synthetic oligonucleotide
gcuugaaguccagguuggg

SEQ ID NO: 2934209 - RNA, 19 nt, Artificial Sequence
  Description of Artificial Sequence: Synthetic oligonucleotide
ugcgggcuguguagccaac

SEQ ID NO: 2934210 - RNA, 19 nt, Artificial Sequence
  Description of Artificial Sequence: Synthetic oligonucleotide
gggcuccucgaccauaaaa

SEQ ID NO: 2934211 - RNA, 19 nt, Artificial Sequence
  Description of Artificial Sequence: Synthetic oligonucleotide
gggcccgcgcuccacgggg

SEQ ID NO: 2934212 - RNA, 19 nt, Artificial Sequence
  Description of Artificial Sequence: Synthetic oligonucleotide
cuuagcugugagacccgua

SEQ ID NO: 2934213 - RNA, 19 nt, Artificial Sequence
  Description of Artificial Sequence: Synthetic oligonucleotide
cuccuccucgccgcuguag

SEQ ID NO: 2934214 - RNA, 19 nt, Artificial Sequence
  Description of Artificial Sequence: Synthetic oligonucleotide
ggguuggucuucaggcuug

SEQ ID NO: 2934215 - RNA, 19 nt, Artificial Sequence
  Description of Artificial Sequence: Synthetic oligonucleotide
gguuggggcugccauccuc

SEQ ID NO: 2934216 - RNA, 19 nt, Artificial Sequence
  Description of Artificial Sequence: Synthetic oligonucleotide
ccgccaaguagaugggcug

SEQ ID NO: 2934217 - RNA, 19 nt, Artificial Sequence
  Description of Artificial Sequence: Synthetic oligonucleotide
ggccacaccucugguggcg

SEQ ID NO: 2934218 - RNA, 19 nt, Artificial Sequence
  Description of Artificial Sequence: Synthetic oligonucleotide
uguagcgggccagcuccuc

SEQ ID NO: 2934219 - RNA, 19 nt, Artificial Sequence
  Description of Artificial Sequence: Synthetic oligonucleotide
gcuccucgaccauaaaacu

SEQ ID NO: 2934220 - RNA, 19 nt, Artificial Sequence
  Description of Artificial Sequence: Synthetic oligonucleotide
agacgucauccagggccuc

SEQ ID NO: 2934221 - RNA, 19 nt, Artificial Sequence
  Description of Artificial Sequence: Synthetic oligonucleotide
gguggcguccuucccgguc

SEQ ID NO: 2934222 - RNA, 19 nt, Artificial Sequence
  Description of Artificial Sequence: Synthetic oligonucleotide
acaccucugguggcguccu

SEQ ID NO: 2934223 - RNA, 19 nt, Artificial Sequence
  Description of Artificial Sequence: Synthetic oligonucleotide
ccuccucgccgcuguagcg

SEQ ID NO: 2934224 - RNA, 19 nt, Artificial Sequence
  Description of Artificial Sequence: Synthetic oligonucleotide
accacucccuucaccgcca

SEQ ID NO: 2934225 - RNA, 19 nt, Artificial Sequence
  Description of Artificial Sequence: Synthetic oligonucleotide
aggugacaucaaagaccac

SEQ ID NO: 2934226 - RNA, 19 nt, Artificial Sequence
  Description of Artificial Sequence: Synthetic oligonucleotide
caucaaagaccacucccuu

SEQ ID NO: 2934227 - RNA, 19 nt, Artificial Sequence
  Description of Artificial Sequence: Synthetic oligonucleotide
ccguagugucaugagugag

SEQ ID NO: 2934228 - RNA, 19 nt, Artificial Sequence
  Description of Artificial Sequence: Synthetic oligonucleotide
accuugcugaagacgucau

SEQ ID NO: 2934229 - RNA, 19 nt, Artificial Sequence
  Description of Artificial Sequence: Synthetic oligonucleotide
ucgccgcuguagcgggcca

SEQ ID NO: 2934230 - RNA, 19 nt, Artificial Sequence
  Description of Artificial Sequence: Synthetic oligonucleotide
gcuccuccuccgugaagag

SEQ ID NO: 2934231 - RNA, 19 nt, Artificial Sequence
  Description of Artificial Sequence: Synthetic oligonucleotide
cagcuccuuagcugugaga

SEQ ID NO: 2934232 - RNA, 19 nt, Artificial Sequence
  Description of Artificial Sequence: Synthetic oligonucleotide
cugcgggcuguguagccaa

SEQ ID NO: 2934233 - RNA, 19 nt, Artificial Sequence
  Description of Artificial Sequence: Synthetic oligonucleotide
cacucccuucaccgccaag

SEQ ID NO: 2934234 - RNA, 19 nt, Artificial Sequence
  Description of Artificial Sequence: Synthetic oligonucleotide
ugcccagcgcgggccgagg

SEQ ID NO: 2934235 - RNA, 19 nt, Artificial Sequence
  Description of Artificial Sequence: Synthetic oligonucleotide
cucccuucaccgccaagua

SEQ ID NO: 2934236 - RNA, 19 nt, Artificial Sequence
  Description of Artificial Sequence: Synthetic oligonucleotide
ggucugcaggauccaguga

SEQ ID NO: 2934237 - RNA, 19 nt, Artificial Sequence
  Description of Artificial Sequence: Synthetic oligonucleotide
gaggauccugcgggcugug

SEQ ID NO: 2934238 - RNA, 19 nt, Artificial Sequence
  Description of Artificial Sequence: Synthetic oligonucleotide
uggcguccuucccggucaa

SEQ ID NO: 2934239 - RNA, 19 nt, Artificial Sequence
  Description of Artificial Sequence: Synthetic oligonucleotide
ccuugcugaagacgucauc

SEQ ID NO: 2934240 - RNA, 19 nt, Artificial Sequence
  Description of Artificial Sequence: Synthetic oligonucleotide
ugugcccagcgcgggccga

SEQ ID NO: 2934241 - RNA, 19 nt, Artificial Sequence
  Description of Artificial Sequence: Synthetic oligonucleotide
cuccacggggcgcggcgug

SEQ ID NO: 2934242 - RNA, 19 nt, Artificial Sequence
  Description of Artificial Sequence: Synthetic oligonucleotide
gccauccucguggaggauc

SEQ ID NO: 2934243 - RNA, 19 nt, Artificial Sequence
  Description of Artificial Sequence: Synthetic oligonucleotide
caggcuugaaguccagguu

SEQ ID NO: 2934244 - RNA, 19 nt, Artificial Sequence
  Description of Artificial Sequence: Synthetic oligonucleotide
cccguagugucaugaguga

SEQ ID NO: 2934245 - RNA, 19 nt, Artificial Sequence
  Description of Artificial Sequence: Synthetic oligonucleotide
ccuccuccgugaagagccg

SEQ ID NO: 2934246 - RNA, 19 nt, Artificial Sequence
  Description of Artificial Sequence: Synthetic oligonucleotide
ccagguuggggcugccauc

SEQ ID NO: 2934247 - RNA, 19 nt, Artificial Sequence
  Description of Artificial Sequence: Synthetic oligonucleotide
cguggaggauccugcgggc

SEQ ID NO: 2934248 - RNA, 19 nt, Artificial Sequence
  Description of Artificial Sequence: Synthetic oligonucleotide
cgccaaguagaugggcugg

SEQ ID NO: 2934249 - RNA, 19 nt, Artificial Sequence
  Description of Artificial Sequence: Synthetic oligonucleotide
ggcgugugcccagcgcggg

SEQ ID NO: 2934250 - RNA, 19 nt, Artificial Sequence
  Description of Artificial Sequence: Synthetic oligonucleotide
gggccuccagcuccuuagc

SEQ ID NO: 2934251 - RNA, 19 nt, Artificial Sequence
  Description of Artificial Sequence: Synthetic oligonucleotide
uccacggggcgcggcgugu

SEQ ID NO: 2934252 - RNA, 19 nt, Artificial Sequence
  Description of Artificial Sequence: Synthetic oligonucleotide
cacggggcgcggcgugugc

SEQ ID NO: 2934253 - RNA, 19 nt, Artificial Sequence
  Description of Artificial Sequence: Synthetic oligonucleotide
ugguggcguccuucccggu

SEQ ID NO: 2934254 - RNA, 19 nt, Artificial Sequence
  Description of Artificial Sequence: Synthetic oligonucleotide
ccgugaagagccgcaccgg

SEQ ID NO: 2934255 - RNA, 19 nt, Artificial Sequence
  Description of Artificial Sequence: Synthetic oligonucleotide
gcugugagacccguagugu

SEQ ID NO: 2934256 - RNA, 19 nt, Artificial Sequence
  Description of Artificial Sequence: Synthetic oligonucleotide
ccaaguagaugggcugguc

SEQ ID NO: 2934257 - RNA, 19 nt, Artificial Sequence
  Description of Artificial Sequence: Synthetic oligonucleotide
ccuuuccagaggugacauc

SEQ ID NO: 2934258 - RNA, 19 nt, Artificial Sequence
  Description of Artificial Sequence: Synthetic oligonucleotide
ggggcccgcgcuccacggg

SEQ ID NO: 2934259 - RNA, 19 nt, Artificial Sequence
  Description of Artificial Sequence: Synthetic oligonucleotide
gugagacccguagugucau

SEQ ID NO: 2934260 - RNA, 19 nt, Artificial Sequence
  Description of Artificial Sequence: Synthetic oligonucleotide
gcccagcgcgggccgaggg

SEQ ID NO: 2934261 - RNA, 19 nt, Artificial Sequence
  Description of Artificial Sequence: Synthetic oligonucleotide
gggguuggucuucaggcuu

SEQ ID NO: 2934262 - RNA, 19 nt, Artificial Sequence
  Description of Artificial Sequence: Synthetic oligonucleotide
ggcugccauccucguggag

SEQ ID NO: 2934263 - RNA, 19 nt, Artificial Sequence
  Description of Artificial Sequence: Synthetic oligonucleotide
gugcccagcgcgggccgag

SEQ ID NO: 2934264 - RNA, 19 nt, Artificial Sequence
  Description of Artificial Sequence: Synthetic oligonucleotide
cugcaggauccagugacau

SEQ ID NO: 2934265 - RNA, 19 nt, Artificial Sequence
  Description of Artificial Sequence: Synthetic oligonucleotide
gguuggucuucaggcuuga

SEQ ID NO: 2934266 - RNA, 19 nt, Artificial Sequence
  Description of Artificial Sequence: Synthetic oligonucleotide
guggaggauccugcgggcu

SEQ ID NO: 2934267 - RNA, 19 nt, Artificial Sequence
  Description of Artificial Sequence: Synthetic oligonucleotide
acuuggcuuuguacaccuu

SEQ ID NO: 2934268 - RNA, 19 nt, Artificial Sequence
  Description of Artificial Sequence: Synthetic oligonucleotide
gcccgcgcuccacggggcg

SEQ ID NO: 2934269 - RNA, 19 nt, Artificial Sequence
  Description of Artificial Sequence: Synthetic oligonucleotide
cccagcgcgggccgagggc

SEQ ID NO: 2934270 - RNA, 19 nt, Artificial Sequence
  Description of Artificial Sequence: Synthetic oligonucleotide
gccgcuguagcgggccagc

SEQ ID NO: 2934271 - RNA, 19 nt, Artificial Sequence
  Description of Artificial Sequence: Synthetic oligonucleotide
gggcuguguagccaacaau

SEQ ID NO: 2934272 - RNA, 19 nt, Artificial Sequence
  Description of Artificial Sequence: Synthetic oligonucleotide
cgugugcccagcgcgggcc

SEQ ID NO: 2934273 - RNA, 19 nt, Artificial Sequence
  Description of Artificial Sequence: Synthetic oligonucleotide
cucgaccauaaaacuccuu

SEQ ID NO: 2934274 - RNA, 19 nt, Artificial Sequence
  Description of Artificial Sequence: Synthetic oligonucleotide
ugccauccucguggaggau

SEQ ID NO: 2934275 - RNA, 19 nt, Artificial Sequence
  Description of Artificial Sequence: Synthetic oligonucleotide
gcgugugcccagcgcgggc

SEQ ID NO: 2934276 - RNA, 19 nt, Artificial Sequence
  Description of Artificial Sequence: Synthetic oligonucleotide
cuucccggucaaggcauua

SEQ ID NO: 2934277 - RNA, 19 nt, Artificial Sequence
  Description of Artificial Sequence: Synthetic oligonucleotide
cggcgugugcccagcgcgg

SEQ ID NO: 2934278 - RNA, 19 nt, Artificial Sequence
  Description of Artificial Sequence: Synthetic oligonucleotide
cgucagaacucauccuuua

SEQ ID NO: 2934279 - RNA, 19 nt, Artificial Sequence
  Description of Artificial Sequence: Synthetic oligonucleotide
cgcuccacggggcgcggcg

SEQ ID NO: 2934280 - RNA, 19 nt, Artificial Sequence
  Description of Artificial Sequence: Synthetic oligonucleotide
agccaacaaugggguacuu

SEQ ID NO: 2934281 - RNA, 19 nt, Artificial Sequence
  Description of Artificial Sequence: Synthetic oligonucleotide
gggcugccauccucgugga

SEQ ID NO: 2934282 - RNA, 19 nt, Artificial Sequence
  Description of Artificial Sequence: Synthetic oligonucleotide
ggaggauccugcgggcugu

SEQ ID NO: 2934283 - RNA, 19 nt, Artificial Sequence
  Description of Artificial Sequence: Synthetic oligonucleotide
cagggccuccagcuccuua

SEQ ID NO: 2934284 - RNA, 19 nt, Artificial Sequence
  Description of Artificial Sequence: Synthetic oligonucleotide
gcgggcuguguagccaaca

SEQ ID NO: 2934285 - RNA, 19 nt, Artificial Sequence
  Description of Artificial Sequence: Synthetic oligonucleotide
cuguagcgggccagcuccu

SEQ ID NO: 2934286 - RNA, 19 nt, Artificial Sequence
  Description of Artificial Sequence: Synthetic oligonucleotide
ccacaccucugguggcguc

SEQ ID NO: 2934287 - RNA, 19 nt, Artificial Sequence
  Description of Artificial Sequence: Synthetic oligonucleotide
ccgcgcuccacggggcgcg

SEQ ID NO: 2934288 - RNA, 19 nt, Artificial Sequence
  Description of Artificial Sequence: Synthetic oligonucleotide
ccagcgcgggccgagggca

SEQ ID NO: 2934289 - RNA, 19 nt, Artificial Sequence
  Description of Artificial Sequence: Synthetic oligonucleotide
gcgcggcgugugcccagcg

SEQ ID NO: 2934290 - RNA, 19 nt, Artificial Sequence
  Description of Artificial Sequence: Synthetic oligonucleotide
ccugcgggcuguguagcca

SEQ ID NO: 2934291 - RNA, 19 nt, Artificial Sequence
  Description of Artificial Sequence: Synthetic oligonucleotide
gggcgcggcgugugcccag

SEQ ID NO: 2934292 - RNA, 19 nt, Artificial Sequence
  Description of Artificial Sequence: Synthetic oligonucleotide
ccucgaccauaaaacuccu

SEQ ID NO: 2934293 - RNA, 19 nt, Artificial Sequence
  Description of Artificial Sequence: Synthetic oligonucleotide
ggcguccuucccggucaag

SEQ ID NO: 2934294 - RNA, 19 nt, Artificial Sequence
  Description of Artificial Sequence: Synthetic oligonucleotide
cgcuguagcgggccagcuc

SEQ ID NO: 2934295 - RNA, 19 nt, Artificial Sequence
  Description of Artificial Sequence: Synthetic oligonucleotide
gccaaguagaugggcuggu

SEQ ID NO: 2934296 - RNA, 19 nt, Artificial Sequence
  Description of Artificial Sequence: Synthetic oligonucleotide
ggcgcggcgugugcccagc

SEQ ID NO: 2934297 - RNA, 19 nt, Artificial Sequence
  Description of Artificial Sequence: Synthetic oligonucleotide
ccucgccgcuguagcgggc

SEQ ID NO: 2934298 - RNA, 19 nt, Artificial Sequence
  Description of Artificial Sequence: Synthetic oligonucleotide
cgcggcgugugcccagcgc

SEQ ID NO: 2934299 - RNA, 19 nt, Artificial Sequence
  Description of Artificial Sequence: Synthetic oligonucleotide
ccuucaccgccaaguagau

SEQ ID NO: 2934300 - RNA, 19 nt, Artificial Sequence
  Description of Artificial Sequence: Synthetic oligonucleotide
cgggcuguguagccaacaa

SEQ ID NO: 2934301 - RNA, 19 nt, Artificial Sequence
  Description of Artificial Sequence: Synthetic oligonucleotide
ggcccgcgcuccacggggc

SEQ ID NO: 2934302 - RNA, 19 nt, Artificial Sequence
  Description of Artificial Sequence: Synthetic oligonucleotide
cggggcgcggcgugugccc

SEQ ID NO: 2934303 - RNA, 19 nt, Artificial Sequence
  Description of Artificial Sequence: Synthetic oligonucleotide
ggggcuccucgaccauaaa

SEQ ID NO: 2934304 - RNA, 19 nt, Artificial Sequence
  Description of Artificial Sequence: Synthetic oligonucleotide
gcuagacgucagaacucau

SEQ ID NO: 2934305 - RNA, 19 nt, Artificial Sequence
  Description of Artificial Sequence: Synthetic oligonucleotide
cccgcgcuccacggggcgc

SEQ ID NO: 2934306 - RNA, 19 nt, Artificial Sequence
  Description of Artificial Sequence: Synthetic oligonucleotide
ccuuagcugugagacccgu

SEQ ID NO: 2934307 - RNA, 19 nt, Artificial Sequence
  Description of Artificial Sequence: Synthetic oligonucleotide
ggggcgcggcgugugccca

SEQ ID NO: 2934308 - RNA, 19 nt, Artificial Sequence
  Description of Artificial Sequence: Synthetic oligonucleotide
ccacggggcgcggcgugug

SEQ ID NO: 2934309 - RNA, 19 nt, Artificial Sequence
  Description of Artificial Sequence: Synthetic oligonucleotide
cauccucguggaggauccu

SEQ ID NO: 2934310 - RNA, 19 nt, Artificial Sequence
  Description of Artificial Sequence: Synthetic oligonucleotide
gccacaccucugguggcgu

SEQ ID NO: 2934311 - RNA, 19 nt, Artificial Sequence
  Description of Artificial Sequence: Synthetic oligonucleotide
cgccgcuguagcgggccag

SEQ ID NO: 2934312 - RNA, 19 nt, Artificial Sequence
  Description of Artificial Sequence: Synthetic oligonucleotide
gcgcuccacggggcgcggc

SEQ ID NO: 2934313 - RNA, 19 nt, Artificial Sequence
  Description of Artificial Sequence: Synthetic oligonucleotide
ccacucccuucaccgccaa

SEQ ID NO: 2934314 - RNA, 19 nt, Artificial Sequence
  Description of Artificial Sequence: Synthetic oligonucleotide
gcuccacggggcgcggcgu

SEQ ID NO: 2934315 - RNA, 19 nt, Artificial Sequence
  Description of Artificial Sequence: Synthetic oligonucleotide
ccuucccggucaaggcauu

SEQ ID NO: 2934316 - RNA, 19 nt, Artificial Sequence
  Description of Artificial Sequence: Synthetic oligonucleotide
cgcgcuccacggggcgcgg

SEQ ID NO: 2934317 - RNA, 19 nt, Artificial Sequence
  Description of Artificial Sequence: Synthetic oligonucleotide
caccucugguggcguccuu

SEQ ID NO: 2934318 - RNA, 19 nt, Artificial Sequence
  Description of Artificial Sequence: Synthetic oligonucleotide
ccgcuguagcgggccagcu

SEQ ID NO: 2934319 - RNA, 19 nt, Artificial Sequence
  Description of Artificial Sequence: Synthetic oligonucleotide
agauuauuggguucggugc

SEQ ID NO: 2934320 - RNA, 19 nt, Artificial Sequence
  Description of Artificial Sequence: Synthetic oligonucleotide
uuucucuucaccaccacgg

SEQ ID NO: 2934321 - RNA, 19 nt, Artificial Sequence
  Description of Artificial Sequence: Synthetic oligonucleotide
uucaugaccaccacgaccc

SEQ ID NO: 2934322 - RNA, 19 nt, Artificial Sequence
  Description of Artificial Sequence: Synthetic oligonucleotide
cucuugaugaggaagcugg

SEQ ID NO: 2934323 - RNA, 19 nt, Artificial Sequence
  Description of Artificial Sequence: Synthetic oligonucleotide
ucuuuauugcuucuggggu

SEQ ID NO: 2934324 - RNA, 19 nt, Artificial Sequence
  Description of Artificial Sequence: Synthetic oligonucleotide
uuacguacgacguggcugg

SEQ ID NO: 2934325 - RNA, 19 nt, Artificial Sequence
  Description of Artificial Sequence: Synthetic oligonucleotide
uuucaugaccaccacgacc

SEQ ID NO: 2934326 - RNA, 19 nt, Artificial Sequence
  Description of Artificial Sequence: Synthetic oligonucleotide
cucuuuauugcuucugggg

SEQ ID NO: 2934327 - RNA, 19 nt, Artificial Sequence
  Description of Artificial Sequence: Synthetic oligonucleotide
ugcagaugcgcagacaugg

SEQ ID NO: 2934328 - RNA, 19 nt, Artificial Sequence
  Description of Artificial Sequence: Synthetic oligonucleotide
gacucuuuauugcuucugg

SEQ ID NO: 2934329 - RNA, 19 nt, Artificial Sequence
  Description of Artificial Sequence: Synthetic oligonucleotide
accaccacgaccccuuugc

SEQ ID NO: 2934330 - RNA, 19 nt, Artificial Sequence
  Description of Artificial Sequence: Synthetic oligonucleotide
uugauggugguccuuacgu

SEQ ID NO: 2934331 - RNA, 19 nt, Artificial Sequence
  Description of Artificial Sequence: Synthetic oligonucleotide
uuuauugcuucuggggugg

SEQ ID NO: 2934332 - RNA, 19 nt, Artificial Sequence
  Description of Artificial Sequence: Synthetic oligonucleotide
ugaugaggaagcuggagca

SEQ ID NO: 2934333 - RNA, 19 nt, Artificial Sequence
  Description of Artificial Sequence: Synthetic oligonucleotide
uuggguucggugcuguagg

SEQ ID NO: 2934334 - RNA, 19 nt, Artificial Sequence
  Description of Artificial Sequence: Synthetic oligonucleotide
uucuuguugaugguggucc

SEQ ID NO: 2934335 - RNA, 19 nt, Artificial Sequence
  Description of Artificial Sequence: Synthetic oligonucleotide
uacuuguucuuccggauca

SEQ ID NO: 2934336 - RNA, 19 nt, Artificial Sequence
  Description of Artificial Sequence: Synthetic oligonucleotide
uuccucuugaugaggaagc

SEQ ID NO: 2934337 - RNA, 19 nt, Artificial Sequence
  Description of Artificial Sequence: Synthetic oligonucleotide
cuucagauuauuggguucg

SEQ ID NO: 2934338 - RNA, 19 nt, Artificial Sequence
  Description of Artificial Sequence: Synthetic oligonucleotide
ugccggaugcugcugaggg

SEQ ID NO: 2934339 - RNA, 19 nt, Artificial Sequence
  Description of Artificial Sequence: Synthetic oligonucleotide
agcggaaggaguugcgggc

SEQ ID NO: 2934340 - RNA, 19 nt, Artificial Sequence
  Description of Artificial Sequence: Synthetic oligonucleotide
uuccgaaccaccauccacu

SEQ ID NO: 2934341 - RNA, 19 nt, Artificial Sequence
  Description of Artificial Sequence: Synthetic oligonucleotide
uggaucagcccauuguagc

SEQ ID NO: 2934342 - RNA, 19 nt, Artificial Sequence
  Description of Artificial Sequence: Synthetic oligonucleotide
cagauuauuggguucggug

SEQ ID NO: 2934343 - RNA, 19 nt, Artificial Sequence
  Description of Artificial Sequence: Synthetic oligonucleotide
gauggugguccuuacguac

SEQ ID NO: 2934344 - RNA, 19 nt, Artificial Sequence
  Description of Artificial Sequence: Synthetic oligonucleotide
cuguaggucugcuuguucc

SEQ ID NO: 2934345 - RNA, 19 nt, Artificial Sequence
  Description of Artificial Sequence: Synthetic oligonucleotide
uuguucuuccggaucaugu

SEQ ID NO: 2934346 - RNA, 19 nt, Artificial Sequence
  Description of Artificial Sequence: Synthetic oligonucleotide
ucagcggacucuuuauugc

SEQ ID NO: 2934347 - RNA, 19 nt, Artificial Sequence
  Description of Artificial Sequence: Synthetic oligonucleotide
uguucuuccggaucaugug

SEQ ID NO: 2934348 - RNA, 19 nt, Artificial Sequence
  Description of Artificial Sequence: Synthetic oligonucleotide
uucuuccggaucaugugcc

SEQ ID NO: 2934349 - RNA, 19 nt, Artificial Sequence
  Description of Artificial Sequence: Synthetic oligonucleotide
uucucuucaccaccacggg

SEQ ID NO: 2934350 - RNA, 19 nt, Artificial Sequence
  Description of Artificial Sequence: Synthetic oligonucleotide
uguagcggaaggaguugcg

SEQ ID NO: 2934351 - RNA, 19 nt, Artificial Sequence
  Description of Artificial Sequence: Synthetic oligonucleotide
agcuggagcaguuccgaac

SEQ ID NO: 2934352 - RNA, 19 nt, Artificial Sequence
  Description of Artificial Sequence: Synthetic oligonucleotide
cuuucucuucaccaccacg

SEQ ID NO: 2934353 - RNA, 19 nt, Artificial Sequence
  Description of Artificial Sequence: Synthetic oligonucleotide
acugcagaugcgcagacau

SEQ ID NO: 2934354 - RNA, 19 nt, Artificial Sequence
  Description of Artificial Sequence: Synthetic oligonucleotide
uagcggaaggaguugcggg

SEQ ID NO: 2934355 - RNA, 19 nt, Artificial Sequence
  Description of Artificial Sequence: Synthetic oligonucleotide
uucgcugaccggaucugcg

SEQ ID NO: 2934356 - RNA, 19 nt, Artificial Sequence
  Description of Artificial Sequence: Synthetic oligonucleotide
cuuacguacgacguggcug

SEQ ID NO: 2934357 - RNA, 19 nt, Artificial Sequence
  Description of Artificial Sequence: Synthetic oligonucleotide
guucuuccggaucaugugc

SEQ ID NO: 2934358 - RNA, 19 nt, Artificial Sequence
  Description of Artificial Sequence: Synthetic oligonucleotide
ggugcuguaggucugcuug

SEQ ID NO: 2934359 - RNA, 19 nt, Artificial Sequence
  Description of Artificial Sequence: Synthetic oligonucleotide
cgugcauucuuguugaugg

SEQ ID NO: 2934360 - RNA, 19 nt, Artificial Sequence
  Description of Artificial Sequence: Synthetic oligonucleotide
gauggcacuggcccugcgg

SEQ ID NO: 2934361 - RNA, 19 nt, Artificial Sequence
  Description of Artificial Sequence: Synthetic oligonucleotide
gugguccuuacguacgacg

SEQ ID NO: 2934362 - RNA, 19 nt, Artificial Sequence
  Description of Artificial Sequence: Synthetic oligonucleotide
ugguccuuacguacgacgu

SEQ ID NO: 2934363 - RNA, 19 nt, Artificial Sequence
  Description of Artificial Sequence: Synthetic oligonucleotide
guugauggugguccuuacg

SEQ ID NO: 2934364 - RNA, 19 nt, Artificial Sequence
  Description of Artificial Sequence: Synthetic oligonucleotide
acugucuugcgguggauca

SEQ ID NO: 2934365 - RNA, 19 nt, Artificial Sequence
  Description of Artificial Sequence: Synthetic oligonucleotide
ucucuucaccaccacgggc

SEQ ID NO: 2934366 - RNA, 19 nt, Artificial Sequence
  Description of Artificial Sequence: Synthetic oligonucleotide
uucuggcuucgcaggaugg

SEQ ID NO: 2934367 - RNA, 19 nt, Artificial Sequence
  Description of Artificial Sequence: Synthetic oligonucleotide
ugcauucuuguugauggug

SEQ ID NO: 2934368 - RNA, 19 nt, Artificial Sequence
  Description of Artificial Sequence: Synthetic oligonucleotide
gucagcggacucuuuauug

SEQ ID NO: 2934369 - RNA, 19 nt, Artificial Sequence
  Description of Artificial Sequence: Synthetic oligonucleotide
gaucagcccauuguagcgg

SEQ ID NO: 2934370 - RNA, 19 nt, Artificial Sequence
  Description of Artificial Sequence: Synthetic oligonucleotide
agcccauuguagcggaagg

SEQ ID NO: 2934371 - RNA, 19 nt, Artificial Sequence
  Description of Artificial Sequence: Synthetic oligonucleotide
guccuuacguacgacgugg

SEQ ID NO: 2934372 - RNA, 19 nt, Artificial Sequence
  Description of Artificial Sequence: Synthetic oligonucleotide
ucuuccggaucaugugccg

SEQ ID NO: 2934373 - RNA, 19 nt, Artificial Sequence
  Description of Artificial Sequence: Synthetic oligonucleotide
accacgaccccuuugccgu

SEQ ID NO: 2934374 - RNA, 19 nt, Artificial Sequence
  Description of Artificial Sequence: Synthetic oligonucleotide
ucugcguuucaugaccacc

SEQ ID NO: 2934375 - RNA, 19 nt, Artificial Sequence
  Description of Artificial Sequence: Synthetic oligonucleotide
ggaucagcccauuguagcg

SEQ ID NO: 2934376 - RNA, 19 nt, Artificial Sequence
  Description of Artificial Sequence: Synthetic oligonucleotide
aucggggcgguacuuguuc

SEQ ID NO: 2934377 - RNA, 19 nt, Artificial Sequence
  Description of Artificial Sequence: Synthetic oligonucleotide
gggccuucagauuauuggg

SEQ ID NO: 2934378 - RNA, 19 nt, Artificial Sequence
  Description of Artificial Sequence: Synthetic oligonucleotide
aucaugugccggaugcugc

SEQ ID NO: 2934379 - RNA, 19 nt, Artificial Sequence
  Description of Artificial Sequence: Synthetic oligonucleotide
cagaugcgcagacauggcg

SEQ ID NO: 2934380 - RNA, 19 nt, Artificial Sequence
  Description of Artificial Sequence: Synthetic oligonucleotide
guuccucuugaugaggaag

SEQ ID NO: 2934381 - RNA, 19 nt, Artificial Sequence
  Description of Artificial Sequence: Synthetic oligonucleotide
uuugccgucggccgcgggc

SEQ ID NO: 2934382 - RNA, 19 nt, Artificial Sequence
  Description of Artificial Sequence: Synthetic oligonucleotide
ggaucugcguuucaugacc

SEQ ID NO: 2934383 - RNA, 19 nt, Artificial Sequence
  Description of Artificial Sequence: Synthetic oligonucleotide
cuugcgguggaucagccca

SEQ ID NO: 2934384 - RNA, 19 nt, Artificial Sequence
  Description of Artificial Sequence: Synthetic oligonucleotide
caguuccgaaccaccaucc

SEQ ID NO: 2934385 - RNA, 19 nt, Artificial Sequence
  Description of Artificial Sequence: Synthetic oligonucleotide
ugcgcuuucucuucaccac

SEQ ID NO: 2934386 - RNA, 19 nt, Artificial Sequence
  Description of Artificial Sequence: Synthetic oligonucleotide
auuggguucggugcuguag

SEQ ID NO: 2934387 - RNA, 19 nt, Artificial Sequence
  Description of Artificial Sequence: Synthetic oligonucleotide
caccauccacugcagaugc

SEQ ID NO: 2934388 - RNA, 19 nt, Artificial Sequence
  Description of Artificial Sequence: Synthetic oligonucleotide
auucuuguugauggugguc

SEQ ID NO: 2934389 - RNA, 19 nt, Artificial Sequence
  Description of Artificial Sequence: Synthetic oligonucleotide
cuugaugaggaagcuggag

SEQ ID NO: 2934390 - RNA, 19 nt, Artificial Sequence
  Description of Artificial Sequence: Synthetic oligonucleotide
cuuguuccucuugaugagg

SEQ ID NO: 2934391 - RNA, 19 nt, Artificial Sequence
  Description of Artificial Sequence: Synthetic oligonucleotide
accaccauccacugcagau

SEQ ID NO: 2934392 - RNA, 19 nt, Artificial Sequence
  Description of Artificial Sequence: Synthetic oligonucleotide
uucagauuauuggguucgg

SEQ ID NO: 2934393 - RNA, 19 nt, Artificial Sequence
  Description of Artificial Sequence: Synthetic oligonucleotide
gauuauuggguucggugcu

SEQ ID NO: 2934394 - RNA, 19 nt, Artificial Sequence
  Description of Artificial Sequence: Synthetic oligonucleotide
accccuuugccgucggccg

SEQ ID NO: 2934395 - RNA, 19 nt, Artificial Sequence
  Description of Artificial Sequence: Synthetic oligonucleotide
ggcugguuuucgcugaccg

SEQ ID NO: 2934396 - RNA, 19 nt, Artificial Sequence
  Description of Artificial Sequence: Synthetic oligonucleotide
gaugaggaagcuggagcag

SEQ ID NO: 2934397 - RNA, 19 nt, Artificial Sequence
  Description of Artificial Sequence: Synthetic oligonucleotide
gcauucuuguugauggugg

SEQ ID NO: 2934398 - RNA, 19 nt, Artificial Sequence
  Description of Artificial Sequence: Synthetic oligonucleotide
guuccgaaccaccauccac

SEQ ID NO: 2934399 - RNA, 19 nt, Artificial Sequence
  Description of Artificial Sequence: Synthetic oligonucleotide
guugcgggccuucagauua

SEQ ID NO: 2934400 - RNA, 19 nt, Artificial Sequence
  Description of Artificial Sequence: Synthetic oligonucleotide
uucgcaggauggcacuggc

SEQ ID NO: 2934401 - RNA, 19 nt, Artificial Sequence
  Description of Artificial Sequence: Synthetic oligonucleotide
guagcggaaggaguugcgg

SEQ ID NO: 2934402 - RNA, 19 nt, Artificial Sequence
  Description of Artificial Sequence: Synthetic oligonucleotide
uuguagcggaaggaguugc

SEQ ID NO: 2934403 - RNA, 19 nt, Artificial Sequence
  Description of Artificial Sequence: Synthetic oligonucleotide
gcuggagcaguuccgaacc

SEQ ID NO: 2934404 - RNA, 19 nt, Artificial Sequence
  Description of Artificial Sequence: Synthetic oligonucleotide
ugucuugcgguggaucagc

SEQ ID NO: 2934405 - RNA, 19 nt, Artificial Sequence
  Description of Artificial Sequence: Synthetic oligonucleotide
ucuuggugggacgggugcg

SEQ ID NO: 2934406 - RNA, 19 nt, Artificial Sequence
  Description of Artificial Sequence: Synthetic oligonucleotide
aucugcguuucaugaccac

SEQ ID NO: 2934407 - RNA, 19 nt, Artificial Sequence
  Description of Artificial Sequence: Synthetic oligonucleotide
auccacugcagaugcgcag

SEQ ID NO: 2934408 - RNA, 19 nt, Artificial Sequence
  Description of Artificial Sequence: Synthetic oligonucleotide
uauugcuucuggggugggg

SEQ ID NO: 2934409 - RNA, 19 nt, Artificial Sequence
  Description of Artificial Sequence: Synthetic oligonucleotide
ucaugugccggaugcugcu

SEQ ID NO: 2934410 - RNA, 19 nt, Artificial Sequence
  Description of Artificial Sequence: Synthetic oligonucleotide
uuccggaucaugugccgga

SEQ ID NO: 2934411 - RNA, 19 nt, Artificial Sequence
  Description of Artificial Sequence: Synthetic oligonucleotide
cugcguuucaugaccacca

SEQ ID NO: 2934412 - RNA, 19 nt, Artificial Sequence
  Description of Artificial Sequence: Synthetic oligonucleotide
uccacgcccacugucuugc

SEQ ID NO: 2934413 - RNA, 19 nt, Artificial Sequence
  Description of Artificial Sequence: Synthetic oligonucleotide
uccgaaccaccauccacug

SEQ ID NO: 2934414 - RNA, 19 nt, Artificial Sequence
  Description of Artificial Sequence: Synthetic oligonucleotide
cugcuuguuccucuugaug

SEQ ID NO: 2934415 - RNA, 19 nt, Artificial Sequence
  Description of Artificial Sequence: Synthetic oligonucleotide
uccuuacguacgacguggc

SEQ ID NO: 2934416 - RNA, 19 nt, Artificial Sequence
  Description of Artificial Sequence: Synthetic oligonucleotide
auggugguccuuacguacg

SEQ ID NO: 2934417 - RNA, 19 nt, Artificial Sequence
  Description of Artificial Sequence: Synthetic oligonucleotide
uccacugcagaugcgcaga

SEQ ID NO: 2934418 - RNA, 19 nt, Artificial Sequence
  Description of Artificial Sequence: Synthetic oligonucleotide
accacgggcuucuggcuuc

SEQ ID NO: 2934419 - RNA, 19 nt, Artificial Sequence
  Description of Artificial Sequence: Synthetic oligonucleotide
accggaucugcguuucaug

SEQ ID NO: 2934420 - RNA, 19 nt, Artificial Sequence
  Description of Artificial Sequence: Synthetic oligonucleotide
ucuugcgguggaucagccc

SEQ ID NO: 2934421 - RNA, 19 nt, Artificial Sequence
  Description of Artificial Sequence: Synthetic oligonucleotide
aggagcucuuggugggacg

SEQ ID NO: 2934422 - RNA, 19 nt, Artificial Sequence
  Description of Artificial Sequence: Synthetic oligonucleotide
guacuuguucuuccggauc

SEQ ID NO: 2934423 - RNA, 19 nt, Artificial Sequence
  Description of Artificial Sequence: Synthetic oligonucleotide
acgggugcgcuuucucuuc

SEQ ID NO: 2934424 - RNA, 19 nt, Artificial Sequence
  Description of Artificial Sequence: Synthetic oligonucleotide
ucagauuauuggguucggu

SEQ ID NO: 2934425 - RNA, 19 nt, Artificial Sequence
  Description of Artificial Sequence: Synthetic oligonucleotide
uguugauggugguccuuac

SEQ ID NO: 2934426 - RNA, 19 nt, Artificial Sequence
  Description of Artificial Sequence: Synthetic oligonucleotide
ugcguuucaugaccaccac

SEQ ID NO: 2934427 - RNA, 19 nt, Artificial Sequence
  Description of Artificial Sequence: Synthetic oligonucleotide
ugauggugguccuuacgua

SEQ ID NO: 2934428 - RNA, 19 nt, Artificial Sequence
  Description of Artificial Sequence: Synthetic oligonucleotide
uggugguccuuacguacga

SEQ ID NO: 2934429 - RNA, 19 nt, Artificial Sequence
  Description of Artificial Sequence: Synthetic oligonucleotide
uuuucgcugaccggaucug

SEQ ID NO: 2934430 - RNA, 19 nt, Artificial Sequence
  Description of Artificial Sequence: Synthetic oligonucleotide
uggcuucgcaggauggcac

SEQ ID NO: 2934431 - RNA, 19 nt, Artificial Sequence
  Description of Artificial Sequence: Synthetic oligonucleotide
auuauuggguucggugcug

SEQ ID NO: 2934432 - RNA, 19 nt, Artificial Sequence
  Description of Artificial Sequence: Synthetic oligonucleotide
ucuggcuucgcaggauggc

SEQ ID NO: 2934433 - RNA, 19 nt, Artificial Sequence
  Description of Artificial Sequence: Synthetic oligonucleotide
guggaucagcccauuguag

SEQ ID NO: 2934434 - RNA, 19 nt, Artificial Sequence
  Description of Artificial Sequence: Synthetic oligonucleotide
acgcccacugucuugcggu

SEQ ID NO: 2934435 - RNA, 19 nt, Artificial Sequence
  Description of Artificial Sequence: Synthetic oligonucleotide
aaccaccauccacugcaga

SEQ ID NO: 2934436 - RNA, 19 nt, Artificial Sequence
  Description of Artificial Sequence: Synthetic oligonucleotide
ugcugcugaggguggcccg

SEQ ID NO: 2934437 - RNA, 19 nt, Artificial Sequence
  Description of Artificial Sequence: Synthetic oligonucleotide
ugaggaagcuggagcaguu

SEQ ID NO: 2934438 - RNA, 19 nt, Artificial Sequence
  Description of Artificial Sequence: Synthetic oligonucleotide
aucagcccauuguagcgga

SEQ ID NO: 2934439 - RNA, 19 nt, Artificial Sequence
  Description of Artificial Sequence: Synthetic oligonucleotide
acguggcugguuuucgcug

SEQ ID NO: 2934440 - RNA, 19 nt, Artificial Sequence
  Description of Artificial Sequence: Synthetic oligonucleotide
uuguugauggugguccuua

SEQ ID NO: 2934441 - RNA, 19 nt, Artificial Sequence
  Description of Artificial Sequence: Synthetic oligonucleotide
ugugccggaugcugcugag

SEQ ID NO: 2934442 - RNA, 19 nt, Artificial Sequence
  Description of Artificial Sequence: Synthetic oligonucleotide
uuucgcugaccggaucugc

SEQ ID NO: 2934443 - RNA, 19 nt, Artificial Sequence
  Description of Artificial Sequence: Synthetic oligonucleotide
ugcggauggccgccaugcg

SEQ ID NO: 2934444 - RNA, 19 nt, Artificial Sequence
  Description of Artificial Sequence: Synthetic oligonucleotide
agaucggggcgguacuugu

SEQ ID NO: 2934445 - RNA, 19 nt, Artificial Sequence
  Description of Artificial Sequence: Synthetic oligonucleotide
uuauuggguucggugcugu

SEQ ID NO: 2934446 - RNA, 19 nt, Artificial Sequence
  Description of Artificial Sequence: Synthetic oligonucleotide
gaccccuuugccgucggcc

SEQ ID NO: 2934447 - RNA, 19 nt, Artificial Sequence
  Description of Artificial Sequence: Synthetic oligonucleotide
cuuccggaucaugugccgg

SEQ ID NO: 2934448 - RNA, 19 nt, Artificial Sequence
  Description of Artificial Sequence: Synthetic oligonucleotide
uguuccucuugaugaggaa

SEQ ID NO: 2934449 - RNA, 19 nt, Artificial Sequence
  Description of Artificial Sequence: Synthetic oligonucleotide
gcuuguuccucuugaugag

SEQ ID NO: 2934450 - RNA, 19 nt, Artificial Sequence
  Description of Artificial Sequence: Synthetic oligonucleotide
guuuucgcugaccggaucu

SEQ ID NO: 2934451 - RNA, 19 nt, Artificial Sequence
  Description of Artificial Sequence: Synthetic oligonucleotide
cugcggauggccgccaugc

SEQ ID NO: 2934452 - RNA, 19 nt, Artificial Sequence
  Description of Artificial Sequence: Synthetic oligonucleotide
ucggccgcgggcuccacgc

SEQ ID NO: 2934453 - RNA, 19 nt, Artificial Sequence
  Description of Artificial Sequence: Synthetic oligonucleotide
aguuccgaaccaccaucca

SEQ ID NO: 2934454 - RNA, 19 nt, Artificial Sequence
  Description of Artificial Sequence: Synthetic oligonucleotide
agcaguuccgaaccaccau

SEQ ID NO: 2934455 - RNA, 19 nt, Artificial Sequence
  Description of Artificial Sequence: Synthetic oligonucleotide
cgggccuucagauuauugg

SEQ ID NO: 2934456 - RNA, 19 nt, Artificial Sequence
  Description of Artificial Sequence: Synthetic oligonucleotide
acuggcccugcggauggcc

SEQ ID NO: 2934457 - RNA, 19 nt, Artificial Sequence
  Description of Artificial Sequence: Synthetic oligonucleotide
cuucgcaggauggcacugg

SEQ ID NO: 2934458 - RNA, 19 nt, Artificial Sequence
  Description of Artificial Sequence: Synthetic oligonucleotide
ucgcaggauggcacuggcc

SEQ ID NO: 2934459 - RNA, 19 nt, Artificial Sequence
  Description of Artificial Sequence: Synthetic oligonucleotide
gaucugcguuucaugacca

SEQ ID NO: 2934460 - RNA, 19 nt, Artificial Sequence
  Description of Artificial Sequence: Synthetic oligonucleotide
cuggcccugcggauggccg

SEQ ID NO: 2934461 - RNA, 19 nt, Artificial Sequence
  Description of Artificial Sequence: Synthetic oligonucleotide
uuauugcuucugggguggg

SEQ ID NO: 2934462 - RNA, 19 nt, Artificial Sequence
  Description of Artificial Sequence: Synthetic oligonucleotide
ucaugaccaccacgacccc

SEQ ID NO: 2934463 - RNA, 19 nt, Artificial Sequence
  Description of Artificial Sequence: Synthetic oligonucleotide
caugcgcagaucggggcgg

SEQ ID NO: 2934464 - RNA, 19 nt, Artificial Sequence
  Description of Artificial Sequence: Synthetic oligonucleotide
cguuucaugaccaccacga

SEQ ID NO: 2934465 - RNA, 19 nt, Artificial Sequence
  Description of Artificial Sequence: Synthetic oligonucleotide
uccucuugaugaggaagcu

SEQ ID NO: 2934466 - RNA, 19 nt, Artificial Sequence
  Description of Artificial Sequence: Synthetic oligonucleotide
uggagcaguuccgaaccac

SEQ ID NO: 2934467 - RNA, 19 nt, Artificial Sequence
  Description of Artificial Sequence: Synthetic oligonucleotide
ggagcucuuggugggacgg

SEQ ID NO: 2934468 - RNA, 19 nt, Artificial Sequence
  Description of Artificial Sequence: Synthetic oligonucleotide
ggcccgugcauucuuguug

SEQ ID NO: 2934469 - RNA, 19 nt, Artificial Sequence
  Description of Artificial Sequence: Synthetic oligonucleotide
cuuguucuuccggaucaug

SEQ ID NO: 2934470 - RNA, 19 nt, Artificial Sequence
  Description of Artificial Sequence: Synthetic oligonucleotide
gcguuucaugaccaccacg

SEQ ID NO: 2934471 - RNA, 19 nt, Artificial Sequence
  Description of Artificial Sequence: Synthetic oligonucleotide
augugccggaugcugcuga

SEQ ID NO: 2934472 - RNA, 19 nt, Artificial Sequence
  Description of Artificial Sequence: Synthetic oligonucleotide
ucgcugaccggaucugcgu

SEQ ID NO: 2934473 - RNA, 19 nt, Artificial Sequence
  Description of Artificial Sequence: Synthetic oligonucleotide
ugguuuucgcugaccggau

SEQ ID NO: 2934474 - RNA, 19 nt, Artificial Sequence
  Description of Artificial Sequence: Synthetic oligonucleotide
acgacguggcugguuuucg

SEQ ID NO: 2934475 - RNA, 19 nt, Artificial Sequence
  Description of Artificial Sequence: Synthetic oligonucleotide
cgcaggauggcacuggccc

SEQ ID NO: 2934476 - RNA, 19 nt, Artificial Sequence
  Description of Artificial Sequence: Synthetic oligonucleotide
agucagcggacucuuuauu

SEQ ID NO: 2934477 - RNA, 19 nt, Artificial Sequence
  Description of Artificial Sequence: Synthetic oligonucleotide
cuuggugggacgggugcgc

SEQ ID NO: 2934478 - RNA, 19 nt, Artificial Sequence
  Description of Artificial Sequence: Synthetic oligonucleotide
gggcuucuggcuucgcagg

SEQ ID NO: 2934479 - RNA, 19 nt, Artificial Sequence
  Description of Artificial Sequence: Synthetic oligonucleotide
cauuguagcggaaggaguu

SEQ ID NO: 2934480 - RNA, 19 nt, Artificial Sequence
  Description of Artificial Sequence: Synthetic oligonucleotide
gaaccaccauccacugcag

SEQ ID NO: 2934481 - RNA, 19 nt, Artificial Sequence
  Description of Artificial Sequence: Synthetic oligonucleotide
ggccgccaugcgcagaucg

SEQ ID NO: 2934482 - RNA, 19 nt, Artificial Sequence
  Description of Artificial Sequence: Synthetic oligonucleotide
cacgcccacugucuugcgg

SEQ ID NO: 2934483 - RNA, 19 nt, Artificial Sequence
  Description of Artificial Sequence: Synthetic oligonucleotide
gaggguggcccgugcauuc

SEQ ID NO: 2934484 - RNA, 19 nt, Artificial Sequence
  Description of Artificial Sequence: Synthetic oligonucleotide
gguggaucagcccauugua

SEQ ID NO: 2934485 - RNA, 19 nt, Artificial Sequence
  Description of Artificial Sequence: Synthetic oligonucleotide
uucggugcuguaggucugc

SEQ ID NO: 2934486 - RNA, 19 nt, Artificial Sequence
  Description of Artificial Sequence: Synthetic oligonucleotide
auggccgccaugcgcagau

SEQ ID NO: 2934487 - RNA, 19 nt, Artificial Sequence
  Description of Artificial Sequence: Synthetic oligonucleotide
uacgacguggcugguuuuc

SEQ ID NO: 2934488 - RNA, 19 nt, Artificial Sequence
  Description of Artificial Sequence: Synthetic oligonucleotide
gcaguuccgaaccaccauc

SEQ ID NO: 2934489 - RNA, 19 nt, Artificial Sequence
  Description of Artificial Sequence: Synthetic oligonucleotide
cugcagaugcgcagacaug

SEQ ID NO: 2934490 - RNA, 19 nt, Artificial Sequence
  Description of Artificial Sequence: Synthetic oligonucleotide
aaggaguugcgggccuuca

SEQ ID NO: 2934491 - RNA, 19 nt, Artificial Sequence
  Description of Artificial Sequence: Synthetic oligonucleotide
cccauuguagcggaaggag

SEQ ID NO: 2934492 - RNA, 19 nt, Artificial Sequence
  Description of Artificial Sequence: Synthetic oligonucleotide
ucggggcgguacuuguucu

SEQ ID NO: 2934493 - RNA, 19 nt, Artificial Sequence
  Description of Artificial Sequence: Synthetic oligonucleotide
uggguucggugcuguaggu

SEQ ID NO: 2934494 - RNA, 19 nt, Artificial Sequence
  Description of Artificial Sequence: Synthetic oligonucleotide
gagcaguuccgaaccacca

SEQ ID NO: 2934495 - RNA, 19 nt, Artificial Sequence
  Description of Artificial Sequence: Synthetic oligonucleotide
cagcccauuguagcggaag

SEQ ID NO: 2934496 - RNA, 19 nt, Artificial Sequence
  Description of Artificial Sequence: Synthetic oligonucleotide
cggaucaugugccggaugc

SEQ ID NO: 2934497 - RNA, 19 nt, Artificial Sequence
  Description of Artificial Sequence: Synthetic oligonucleotide
ggaguugcgggccuucaga

SEQ ID NO: 2934498 - RNA, 19 nt, Artificial Sequence
  Description of Artificial Sequence: Synthetic oligonucleotide
ggagcaguuccgaaccacc

SEQ ID NO: 2934499 - RNA, 19 nt, Artificial Sequence
  Description of Artificial Sequence: Synthetic oligonucleotide
gguucggugcuguaggucu

SEQ ID NO: 2934500 - RNA, 19 nt, Artificial Sequence
  Description of Artificial Sequence: Synthetic oligonucleotide
gguccuuacguacgacgug

SEQ ID NO: 2934501 - RNA, 19 nt, Artificial Sequence
  Description of Artificial Sequence: Synthetic oligonucleotide
ggugcgcuuucucuucacc

SEQ ID NO: 2934502 - RNA, 19 nt, Artificial Sequence
  Description of Artificial Sequence: Synthetic oligonucleotide
gcgguacuuguucuuccgg

SEQ ID NO: 2934503 - RNA, 19 nt, Artificial Sequence
  Description of Artificial Sequence: Synthetic oligonucleotide
aggauggcacuggcccugc

SEQ ID NO: 2934504 - RNA, 19 nt, Artificial Sequence
  Description of Artificial Sequence: Synthetic oligonucleotide
cgaaccaccauccacugca

SEQ ID NO: 2934505 - RNA, 19 nt, Artificial Sequence
  Description of Artificial Sequence: Synthetic oligonucleotide
ccuucagauuauuggguuc

SEQ ID NO: 2934506 - RNA, 19 nt, Artificial Sequence
  Description of Artificial Sequence: Synthetic oligonucleotide
cauccacugcagaugcgca

SEQ ID NO: 2934507 - RNA, 19 nt, Artificial Sequence
  Description of Artificial Sequence: Synthetic oligonucleotide
ccauccacugcagaugcgc

SEQ ID NO: 2934508 - RNA, 19 nt, Artificial Sequence
  Description of Artificial Sequence: Synthetic oligonucleotide
acgggcuucuggcuucgca

SEQ ID NO: 2934509 - RNA, 19 nt, Artificial Sequence
  Description of Artificial Sequence: Synthetic oligonucleotide
gacguggcugguuuucgcu

SEQ ID NO: 2934510 - RNA, 19 nt, Artificial Sequence
  Description of Artificial Sequence: Synthetic oligonucleotide
gaccaccacgaccccuuug

SEQ ID NO: 2934511 - RNA, 19 nt, Artificial Sequence
  Description of Artificial Sequence: Synthetic oligonucleotide
ggggcucaggagcucuugg

SEQ ID NO: 2934512 - RNA, 19 nt, Artificial Sequence
  Description of Artificial Sequence: Synthetic oligonucleotide
gagcucuuggugggacggg

SEQ ID NO: 2934513 - RNA, 19 nt, Artificial Sequence
  Description of Artificial Sequence: Synthetic oligonucleotide
cugucuugcgguggaucag

SEQ ID NO: 2934514 - RNA, 19 nt, Artificial Sequence
  Description of Artificial Sequence: Synthetic oligonucleotide
uggcccugcggauggccgc

SEQ ID NO: 2934515 - RNA, 19 nt, Artificial Sequence
  Description of Artificial Sequence: Synthetic oligonucleotide
caccaccacgggcuucugg

SEQ ID NO: 2934516 - RNA, 19 nt, Artificial Sequence
  Description of Artificial Sequence: Synthetic oligonucleotide
ccaugcgcagaucggggcg

SEQ ID NO: 2934517 - RNA, 19 nt, Artificial Sequence
  Description of Artificial Sequence: Synthetic oligonucleotide
aguugcgggccuucagauu

SEQ ID NO: 2934518 - RNA, 19 nt, Artificial Sequence
  Description of Artificial Sequence: Synthetic oligonucleotide
ugaccggaucugcguuuca

SEQ ID NO: 2934519 - RNA, 19 nt, Artificial Sequence
  Description of Artificial Sequence: Synthetic oligonucleotide
ggacucuuuauugcuucug

SEQ ID NO: 2934520 - RNA, 19 nt, Artificial Sequence
  Description of Artificial Sequence: Synthetic oligonucleotide
uugcgguggaucagcccau

SEQ ID NO: 2934521 - RNA, 19 nt, Artificial Sequence
  Description of Artificial Sequence: Synthetic oligonucleotide
gcgcuuucucuucaccacc

SEQ ID NO: 2934522 - RNA, 19 nt, Artificial Sequence
  Description of Artificial Sequence: Synthetic oligonucleotide
caggauggcacuggcccug

SEQ ID NO: 2934523 - RNA, 19 nt, Artificial Sequence
  Description of Artificial Sequence: Synthetic oligonucleotide
gcacuggcccugcggaugg

SEQ ID NO: 2934524 - RNA, 19 nt, Artificial Sequence
  Description of Artificial Sequence: Synthetic oligonucleotide
agcucuuggugggacgggu

SEQ ID NO: 2934525 - RNA, 19 nt, Artificial Sequence
  Description of Artificial Sequence: Synthetic oligonucleotide
gaaggaguugcgggccuuc

SEQ ID NO: 2934526 - RNA, 19 nt, Artificial Sequence
  Description of Artificial Sequence: Synthetic oligonucleotide
gcggacucuuuauugcuuc

SEQ ID NO: 2934527 - RNA, 19 nt, Artificial Sequence
  Description of Artificial Sequence: Synthetic oligonucleotide
guaggucugcuuguuccuc

SEQ ID NO: 2934528 - RNA, 19 nt, Artificial Sequence
  Description of Artificial Sequence: Synthetic oligonucleotide
uauuggguucggugcugua

SEQ ID NO: 2934529 - RNA, 19 nt, Artificial Sequence
  Description of Artificial Sequence: Synthetic oligonucleotide
gaguugcgggccuucagau

SEQ ID NO: 2934530 - RNA, 19 nt, Artificial Sequence
  Description of Artificial Sequence: Synthetic oligonucleotide
ucagcccauuguagcggaa

SEQ ID NO: 2934531 - RNA, 19 nt, Artificial Sequence
  Description of Artificial Sequence: Synthetic oligonucleotide
uugccgucggccgcgggcu

SEQ ID NO: 2934532 - RNA, 19 nt, Artificial Sequence
  Description of Artificial Sequence: Synthetic oligonucleotide
cacugucuugcgguggauc

SEQ ID NO: 2934533 - RNA, 19 nt, Artificial Sequence
  Description of Artificial Sequence: Synthetic oligonucleotide
acgaccccuuugccgucgg

SEQ ID NO: 2934534 - RNA, 19 nt, Artificial Sequence
  Description of Artificial Sequence: Synthetic oligonucleotide
cuccacgcccacugucuug

SEQ ID NO: 2934535 - RNA, 19 nt, Artificial Sequence
  Description of Artificial Sequence: Synthetic oligonucleotide
cagaucggggcgguacuug

SEQ ID NO: 2934536 - RNA, 19 nt, Artificial Sequence
  Description of Artificial Sequence: Synthetic oligonucleotide
ugaggguggcccgugcauu

SEQ ID NO: 2934537 - RNA, 19 nt, Artificial Sequence
  Description of Artificial Sequence: Synthetic oligonucleotide
gcggauggccgccaugcgc

SEQ ID NO: 2934538 - RNA, 19 nt, Artificial Sequence
  Description of Artificial Sequence: Synthetic oligonucleotide
augaccaccacgaccccuu

SEQ ID NO: 2934539 - RNA, 19 nt, Artificial Sequence
  Description of Artificial Sequence: Synthetic oligonucleotide
gccaugcgcagaucggggc

SEQ ID NO: 2934540 - RNA, 19 nt, Artificial Sequence
  Description of Artificial Sequence: Synthetic oligonucleotide
cugaccggaucugcguuuc

SEQ ID NO: 2934541 - RNA, 19 nt, Artificial Sequence
  Description of Artificial Sequence: Synthetic oligonucleotide
uggcugguuuucgcugacc

SEQ ID NO: 2934542 - RNA, 19 nt, Artificial Sequence
  Description of Artificial Sequence: Synthetic oligonucleotide
cuggcuucgcaggauggca

SEQ ID NO: 2934543 - RNA, 19 nt, Artificial Sequence
  Description of Artificial Sequence: Synthetic oligonucleotide
ccggaugcugcugagggug

SEQ ID NO: 2934544 - RNA, 19 nt, Artificial Sequence
  Description of Artificial Sequence: Synthetic oligonucleotide
gggcgguacuuguucuucc

SEQ ID NO: 2934545 - RNA, 19 nt, Artificial Sequence
  Description of Artificial Sequence: Synthetic oligonucleotide
ccggaucugcguuucauga

SEQ ID NO: 2934546 - RNA, 19 nt, Artificial Sequence
  Description of Artificial Sequence: Synthetic oligonucleotide
ugcuguaggucugcuuguu

SEQ ID NO: 2934547 - RNA, 19 nt, Artificial Sequence
  Description of Artificial Sequence: Synthetic oligonucleotide
guucggugcuguaggucug

SEQ ID NO: 2934548 - RNA, 19 nt, Artificial Sequence
  Description of Artificial Sequence: Synthetic oligonucleotide
cacgaccccuuugccgucg

SEQ ID NO: 2934549 - RNA, 19 nt, Artificial Sequence
  Description of Artificial Sequence: Synthetic oligonucleotide
caggagcucuuggugggac

SEQ ID NO: 2934550 - RNA, 19 nt, Artificial Sequence
  Description of Artificial Sequence: Synthetic oligonucleotide
uuggugggacgggugcgcu

SEQ ID NO: 2934551 - RNA, 19 nt, Artificial Sequence
  Description of Artificial Sequence: Synthetic oligonucleotide
gugccggaugcugcugagg

SEQ ID NO: 2934552 - RNA, 19 nt, Artificial Sequence
  Description of Artificial Sequence: Synthetic oligonucleotide
uugcgggccuucagauuau

SEQ ID NO: 2934553 - RNA, 19 nt, Artificial Sequence
  Description of Artificial Sequence: Synthetic oligonucleotide
gcccgugcauucuuguuga

SEQ ID NO: 2934554 - RNA, 19 nt, Artificial Sequence
  Description of Artificial Sequence: Synthetic oligonucleotide
guggcugguuuucgcugac

SEQ ID NO: 2934555 - RNA, 19 nt, Artificial Sequence
  Description of Artificial Sequence: Synthetic oligonucleotide
caugugccggaugcugcug

SEQ ID NO: 2934556 - RNA, 19 nt, Artificial Sequence
  Description of Artificial Sequence: Synthetic oligonucleotide
gacgggugcgcuuucucuu

SEQ ID NO: 2934557 - RNA, 19 nt, Artificial Sequence
  Description of Artificial Sequence: Synthetic oligonucleotide
gguacuuguucuuccggau

SEQ ID NO: 2934558 - RNA, 19 nt, Artificial Sequence
  Description of Artificial Sequence: Synthetic oligonucleotide
uccggaucaugugccggau

SEQ ID NO: 2934559 - RNA, 19 nt, Artificial Sequence
  Description of Artificial Sequence: Synthetic oligonucleotide
gguuuucgcugaccggauc

SEQ ID NO: 2934560 - RNA, 19 nt, Artificial Sequence
  Description of Artificial Sequence: Synthetic oligonucleotide
gcuguaggucugcuuguuc

SEQ ID NO: 2934561 - RNA, 19 nt, Artificial Sequence
  Description of Artificial Sequence: Synthetic oligonucleotide
uggcccgugcauucuuguu

SEQ ID NO: 2934562 - RNA, 19 nt, Artificial Sequence
  Description of Artificial Sequence: Synthetic oligonucleotide
gcgggcuccacgcccacug

SEQ ID NO: 2934563 - RNA, 19 nt, Artificial Sequence
  Description of Artificial Sequence: Synthetic oligonucleotide
ccaccauccacugcagaug

SEQ ID NO: 2934564 - RNA, 19 nt, Artificial Sequence
  Description of Artificial Sequence: Synthetic oligonucleotide
cuuugccgucggccgcggg

SEQ ID NO: 2934565 - RNA, 19 nt, Artificial Sequence
  Description of Artificial Sequence: Synthetic oligonucleotide
ggcacuggcccugcggaug

SEQ ID NO: 2934566 - RNA, 19 nt, Artificial Sequence
  Description of Artificial Sequence: Synthetic oligonucleotide
agcggacucuuuauugcuu

SEQ ID NO: 2934567 - RNA, 19 nt, Artificial Sequence
  Description of Artificial Sequence: Synthetic oligonucleotide
uggcacuggcccugcggau

SEQ ID NO: 2934568 - RNA, 19 nt, Artificial Sequence
  Description of Artificial Sequence: Synthetic oligonucleotide
cagcggacucuuuauugcu

SEQ ID NO: 2934569 - RNA, 19 nt, Artificial Sequence
  Description of Artificial Sequence: Synthetic oligonucleotide
cuggagcaguuccgaacca

SEQ ID NO: 2934570 - RNA, 19 nt, Artificial Sequence
  Description of Artificial Sequence: Synthetic oligonucleotide
ccucuugaugaggaagcug

SEQ ID NO: 2934571 - RNA, 19 nt, Artificial Sequence
  Description of Artificial Sequence: Synthetic oligonucleotide
ugaccaccacgaccccuuu

SEQ ID NO: 2934572 - RNA, 19 nt, Artificial Sequence
  Description of Artificial Sequence: Synthetic oligonucleotide
gcggaaggaguugcgggcc

SEQ ID NO: 2934573 - RNA, 19 nt, Artificial Sequence
  Description of Artificial Sequence: Synthetic oligonucleotide
ucggugcuguaggucugcu

SEQ ID NO: 2934574 - RNA, 19 nt, Artificial Sequence
  Description of Artificial Sequence: Synthetic oligonucleotide
ugggacgggugcgcuuucu

SEQ ID NO: 2934575 - RNA, 19 nt, Artificial Sequence
  Description of Artificial Sequence: Synthetic oligonucleotide
gcagaugcgcagacauggc

SEQ ID NO: 2934576 - RNA, 19 nt, Artificial Sequence
  Description of Artificial Sequence: Synthetic oligonucleotide
gugcauucuuguugauggu

SEQ ID NO: 2934577 - RNA, 19 nt, Artificial Sequence
  Description of Artificial Sequence: Synthetic oligonucleotide
gugcuguaggucugcuugu

SEQ ID NO: 2934578 - RNA, 19 nt, Artificial Sequence
  Description of Artificial Sequence: Synthetic oligonucleotide
gccgccaugcgcagaucgg

SEQ ID NO: 2934579 - RNA, 19 nt, Artificial Sequence
  Description of Artificial Sequence: Synthetic oligonucleotide
ccgccaugcgcagaucggg

SEQ ID NO: 2934580 - RNA, 19 nt, Artificial Sequence
  Description of Artificial Sequence: Synthetic oligonucleotide
ccgugcauucuuguugaug

SEQ ID NO: 2934581 - RNA, 19 nt, Artificial Sequence
  Description of Artificial Sequence: Synthetic oligonucleotide
cggaucugcguuucaugac

SEQ ID NO: 2934582 - RNA, 19 nt, Artificial Sequence
  Description of Artificial Sequence: Synthetic oligonucleotide
ggauggccgccaugcgcag

SEQ ID NO: 2934583 - RNA, 19 nt, Artificial Sequence
  Description of Artificial Sequence: Synthetic oligonucleotide
gguggcccgugcauucuug

SEQ ID NO: 2934584 - RNA, 19 nt, Artificial Sequence
  Description of Artificial Sequence: Synthetic oligonucleotide
ggauggcacuggcccugcg

SEQ ID NO: 2934585 - RNA, 19 nt, Artificial Sequence
  Description of Artificial Sequence: Synthetic oligonucleotide
gauggccgccaugcgcaga

SEQ ID NO: 2934586 - RNA, 19 nt, Artificial Sequence
  Description of Artificial Sequence: Synthetic oligonucleotide
aggguggcccgugcauucu

SEQ ID NO: 2934587 - RNA, 19 nt, Artificial Sequence
  Description of Artificial Sequence: Synthetic oligonucleotide
uggugggacgggugcgcuu

SEQ ID NO: 2934588 - RNA, 19 nt, Artificial Sequence
  Description of Artificial Sequence: Synthetic oligonucleotide
cgccaugcgcagaucgggg

SEQ ID NO: 2934589 - RNA, 19 nt, Artificial Sequence
  Description of Artificial Sequence: Synthetic oligonucleotide
gcugaggguggcccgugca

SEQ ID NO: 2934590 - RNA, 19 nt, Artificial Sequence
  Description of Artificial Sequence: Synthetic oligonucleotide
gcgguggaucagcccauug

SEQ ID NO: 2934591 - RNA, 19 nt, Artificial Sequence
  Description of Artificial Sequence: Synthetic oligonucleotide
ggugguccuuacguacgac

SEQ ID NO: 2934592 - RNA, 19 nt, Artificial Sequence
  Description of Artificial Sequence: Synthetic oligonucleotide
gcuucgcaggauggcacug

SEQ ID NO: 2934593 - RNA, 19 nt, Artificial Sequence
  Description of Artificial Sequence: Synthetic oligonucleotide
gccuucagauuauuggguu

SEQ ID NO: 2934594 - RNA, 19 nt, Artificial Sequence
  Description of Artificial Sequence: Synthetic oligonucleotide
ggggcgguacuuguucuuc

SEQ ID NO: 2934595 - RNA, 19 nt, Artificial Sequence
  Description of Artificial Sequence: Synthetic oligonucleotide
ccauuguagcggaaggagu

SEQ ID NO: 2934596 - RNA, 19 nt, Artificial Sequence
  Description of Artificial Sequence: Synthetic oligonucleotide
ggacgggugcgcuuucucu

SEQ ID NO: 2934597 - RNA, 19 nt, Artificial Sequence
  Description of Artificial Sequence: Synthetic oligonucleotide
ccaccacgaccccuuugcc

SEQ ID NO: 2934598 - RNA, 19 nt, Artificial Sequence
  Description of Artificial Sequence: Synthetic oligonucleotide
uacguacgacguggcuggu

SEQ ID NO: 2934599 - RNA, 19 nt, Artificial Sequence
  Description of Artificial Sequence: Synthetic oligonucleotide
gcucuuggugggacgggug

SEQ ID NO: 2934600 - RNA, 19 nt, Artificial Sequence
  Description of Artificial Sequence: Synthetic oligonucleotide
cggauggccgccaugcgca

SEQ ID NO: 2934601 - RNA, 19 nt, Artificial Sequence
  Description of Artificial Sequence: Synthetic oligonucleotide
gaccggaucugcguuucau

SEQ ID NO: 2934602 - RNA, 19 nt, Artificial Sequence
  Description of Artificial Sequence: Synthetic oligonucleotide
ccgaaccaccauccacugc

SEQ ID NO: 2934603 - RNA, 19 nt, Artificial Sequence
  Description of Artificial Sequence: Synthetic oligonucleotide
gggacgggugcgcuuucuc

SEQ ID NO: 2934604 - RNA, 19 nt, Artificial Sequence
  Description of Artificial Sequence: Synthetic oligonucleotide
gcccauuguagcggaagga

SEQ ID NO: 2934605 - RNA, 19 nt, Artificial Sequence
  Description of Artificial Sequence: Synthetic oligonucleotide
cgguacuuguucuuccgga

SEQ ID NO: 2934606 - RNA, 19 nt, Artificial Sequence
  Description of Artificial Sequence: Synthetic oligonucleotide
guggcccgugcauucuugu

SEQ ID NO: 2934607 - RNA, 19 nt, Artificial Sequence
  Description of Artificial Sequence: Synthetic oligonucleotide
cacugcagaugcgcagaca

SEQ ID NO: 2934608 - RNA, 19 nt, Artificial Sequence
  Description of Artificial Sequence: Synthetic oligonucleotide
ggccgcgggcuccacgccc

SEQ ID NO: 2934609 - RNA, 19 nt, Artificial Sequence
  Description of Artificial Sequence: Synthetic oligonucleotide
ccacugcagaugcgcagac

SEQ ID NO: 2934610 - RNA, 19 nt, Artificial Sequence
  Description of Artificial Sequence: Synthetic oligonucleotide
ugcgguggaucagcccauu

SEQ ID NO: 2934611 - RNA, 19 nt, Artificial Sequence
  Description of Artificial Sequence: Synthetic oligonucleotide
gcgggccuucagauuauug

SEQ ID NO: 2934612 - RNA, 19 nt, Artificial Sequence
  Description of Artificial Sequence: Synthetic oligonucleotide
ggguucggugcuguagguc

SEQ ID NO: 2934613 - RNA, 19 nt, Artificial Sequence
  Description of Artificial Sequence: Synthetic oligonucleotide
gggugcgcuuucucuucac

SEQ ID NO: 2934614 - RNA, 19 nt, Artificial Sequence
  Description of Artificial Sequence: Synthetic oligonucleotide
cggaugcugcugagggugg

SEQ ID NO: 2934615 - RNA, 19 nt, Artificial Sequence
  Description of Artificial Sequence: Synthetic oligonucleotide
cgacguggcugguuuucgc

SEQ ID NO: 2934616 - RNA, 19 nt, Artificial Sequence
  Description of Artificial Sequence: Synthetic oligonucleotide
cccuuugccgucggccgcg

SEQ ID NO: 2934617 - RNA, 19 nt, Artificial Sequence
  Description of Artificial Sequence: Synthetic oligonucleotide
gcgcagaucggggcgguac

SEQ ID NO: 2934618 - RNA, 19 nt, Artificial Sequence
  Description of Artificial Sequence: Synthetic oligonucleotide
gggcuccacgcccacuguc

SEQ ID NO: 2934619 - RNA, 19 nt, Artificial Sequence
  Description of Artificial Sequence: Synthetic oligonucleotide
cugcugaggguggcccgug

SEQ ID NO: 2934620 - RNA, 19 nt, Artificial Sequence
  Description of Artificial Sequence: Synthetic oligonucleotide
ugcgggccuucagauuauu

SEQ ID NO: 2934621 - RNA, 19 nt, Artificial Sequence
  Description of Artificial Sequence: Synthetic oligonucleotide
acguacgacguggcugguu

SEQ ID NO: 2934622 - RNA, 19 nt, Artificial Sequence
  Description of Artificial Sequence: Synthetic oligonucleotide
caugaccaccacgaccccu

SEQ ID NO: 2934623 - RNA, 19 nt, Artificial Sequence
  Description of Artificial Sequence: Synthetic oligonucleotide
augcgcagaucggggcggu

SEQ ID NO: 2934624 - RNA, 19 nt, Artificial Sequence
  Description of Artificial Sequence: Synthetic oligonucleotide
ggcuucgcaggauggcacu

SEQ ID NO: 2934625 - RNA, 19 nt, Artificial Sequence
  Description of Artificial Sequence: Synthetic oligonucleotide
cugaggguggcccgugcau

SEQ ID NO: 2934626 - RNA, 19 nt, Artificial Sequence
  Description of Artificial Sequence: Synthetic oligonucleotide
ccggaucaugugccggaug

SEQ ID NO: 2934627 - RNA, 19 nt, Artificial Sequence
  Description of Artificial Sequence: Synthetic oligonucleotide
cccacugucuugcggugga

SEQ ID NO: 2934628 - RNA, 19 nt, Artificial Sequence
  Description of Artificial Sequence: Synthetic oligonucleotide
ccccuuugccgucggccgc

SEQ ID NO: 2934629 - RNA, 19 nt, Artificial Sequence
  Description of Artificial Sequence: Synthetic oligonucleotide
cguggcugguuuucgcuga

SEQ ID NO: 2934630 - RNA, 19 nt, Artificial Sequence
  Description of Artificial Sequence: Synthetic oligonucleotide
gugggacgggugcgcuuuc

SEQ ID NO: 2934631 - RNA, 19 nt, Artificial Sequence
  Description of Artificial Sequence: Synthetic oligonucleotide
ggcccugcggauggccgcc

SEQ ID NO: 2934632 - RNA, 19 nt, Artificial Sequence
  Description of Artificial Sequence: Synthetic oligonucleotide
ugcgcagaucggggcggua

SEQ ID NO: 2934633 - RNA, 19 nt, Artificial Sequence
  Description of Artificial Sequence: Synthetic oligonucleotide
ggcuccacgcccacugucu

SEQ ID NO: 2934634 - RNA, 19 nt, Artificial Sequence
  Description of Artificial Sequence: Synthetic oligonucleotide
ggaucaugugccggaugcu

SEQ ID NO: 2934635 - RNA, 19 nt, Artificial Sequence
  Description of Artificial Sequence: Synthetic oligonucleotide
gaucggggcgguacuuguu

SEQ ID NO: 2934636 - RNA, 19 nt, Artificial Sequence
  Description of Artificial Sequence: Synthetic oligonucleotide
ccacgcccacugucuugcg

SEQ ID NO: 2934637 - RNA, 19 nt, Artificial Sequence
  Description of Artificial Sequence: Synthetic oligonucleotide
guacgacguggcugguuuu

SEQ ID NO: 2934638 - RNA, 19 nt, Artificial Sequence
  Description of Artificial Sequence: Synthetic oligonucleotide
cacgggcuucuggcuucgc

SEQ ID NO: 2934639 - RNA, 19 nt, Artificial Sequence
  Description of Artificial Sequence: Synthetic oligonucleotide
caccacgggcuucuggcuu

SEQ ID NO: 2934640 - RNA, 19 nt, Artificial Sequence
  Description of Artificial Sequence: Synthetic oligonucleotide
ccacgggcuucuggcuucg

SEQ ID NO: 2934641 - RNA, 19 nt, Artificial Sequence
  Description of Artificial Sequence: Synthetic oligonucleotide
ggugggacgggugcgcuuu

SEQ ID NO: 2934642 - RNA, 19 nt, Artificial Sequence
  Description of Artificial Sequence: Synthetic oligonucleotide
gcugaccggaucugcguuu

SEQ ID NO: 2934643 - RNA, 19 nt, Artificial Sequence
  Description of Artificial Sequence: Synthetic oligonucleotide
ccuuacguacgacguggcu

SEQ ID NO: 2934644 - RNA, 19 nt, Artificial Sequence
  Description of Artificial Sequence: Synthetic oligonucleotide
uggccgccaugcgcagauc

SEQ ID NO: 2934645 - RNA, 19 nt, Artificial Sequence
  Description of Artificial Sequence: Synthetic oligonucleotide
cguacgacguggcugguuu

SEQ ID NO: 2934646 - RNA, 19 nt, Artificial Sequence
  Description of Artificial Sequence: Synthetic oligonucleotide
ccuuugccgucggccgcgg

SEQ ID NO: 2934647 - RNA, 19 nt, Artificial Sequence
  Description of Artificial Sequence: Synthetic oligonucleotide
cgguggaucagcccauugu

SEQ ID NO: 2934648 - RNA, 19 nt, Artificial Sequence
  Description of Artificial Sequence: Synthetic oligonucleotide
ccacgaccccuuugccguc

SEQ ID NO: 2934649 - RNA, 19 nt, Artificial Sequence
  Description of Artificial Sequence: Synthetic oligonucleotide
cgcccacugucuugcggug

SEQ ID NO: 2934650 - RNA, 19 nt, Artificial Sequence
  Description of Artificial Sequence: Synthetic oligonucleotide
gccggaugcugcugagggu

SEQ ID NO: 2934651 - RNA, 19 nt, Artificial Sequence
  Description of Artificial Sequence: Synthetic oligonucleotide
gcugcugaggguggcccgu

SEQ ID NO: 2934652 - RNA, 19 nt, Artificial Sequence
  Description of Artificial Sequence: Synthetic oligonucleotide
gccgcgggcuccacgccca

SEQ ID NO: 2934653 - RNA, 19 nt, Artificial Sequence
  Description of Artificial Sequence: Synthetic oligonucleotide
gcuccacgcccacugucuu

SEQ ID NO: 2934654 - RNA, 19 nt, Artificial Sequence
  Description of Artificial Sequence: Synthetic oligonucleotide
cggacucuuuauugcuucu

SEQ ID NO: 2934655 - RNA, 19 nt, Artificial Sequence
  Description of Artificial Sequence: Synthetic oligonucleotide
ggaaggaguugcgggccuu

SEQ ID NO: 2934656 - RNA, 19 nt, Artificial Sequence
  Description of Artificial Sequence: Synthetic oligonucleotide
cgaccccuuugccgucggc

SEQ ID NO: 2934657 - RNA, 19 nt, Artificial Sequence
  Description of Artificial Sequence: Synthetic oligonucleotide
cgggugcgcuuucucuuca

SEQ ID NO: 2934658 - RNA, 19 nt, Artificial Sequence
  Description of Artificial Sequence: Synthetic oligonucleotide
gcagaucggggcgguacuu

SEQ ID NO: 2934659 - RNA, 19 nt, Artificial Sequence
  Description of Artificial Sequence: Synthetic oligonucleotide
ggguggcccgugcauucuu

SEQ ID NO: 2934660 - RNA, 19 nt, Artificial Sequence
  Description of Artificial Sequence: Synthetic oligonucleotide
cgcagaucggggcgguacu

SEQ ID NO: 2934661 - RNA, 19 nt, Artificial Sequence
  Description of Artificial Sequence: Synthetic oligonucleotide
cggccgcgggcuccacgcc

SEQ ID NO: 2934662 - RNA, 19 nt, Artificial Sequence
  Description of Artificial Sequence: Synthetic oligonucleotide
cggaaggaguugcgggccu

SEQ ID NO: 2934663 - RNA, 19 nt, Artificial Sequence
  Description of Artificial Sequence: Synthetic oligonucleotide
ccgcgggcuccacgcccac

SEQ ID NO: 2934664 - RNA, 19 nt, Artificial Sequence
  Description of Artificial Sequence: Synthetic oligonucleotide
gcccugcggauggccgcca

SEQ ID NO: 2934665 - RNA, 19 nt, Artificial Sequence
  Description of Artificial Sequence: Synthetic oligonucleotide
cgcugaccggaucugcguu

SEQ ID NO: 2934666 - RNA, 19 nt, Artificial Sequence
  Description of Artificial Sequence: Synthetic oligonucleotide
cccgugcauucuuguugau

SEQ ID NO: 2934667 - RNA, 19 nt, Artificial Sequence
  Description of Artificial Sequence: Synthetic oligonucleotide
ccgucggccgcgggcucca

SEQ ID NO: 2934668 - RNA, 19 nt, Artificial Sequence
  Description of Artificial Sequence: Synthetic oligonucleotide
cggugcuguaggucugcuu

SEQ ID NO: 2934669 - RNA, 19 nt, Artificial Sequence
  Description of Artificial Sequence: Synthetic oligonucleotide
cggggcgguacuuguucuu

SEQ ID NO: 2934670 - RNA, 19 nt, Artificial Sequence
  Description of Artificial Sequence: Synthetic oligonucleotide
ccacugucuugcgguggau

SEQ ID NO: 2934671 - RNA, 19 nt, Artificial Sequence
  Description of Artificial Sequence: Synthetic oligonucleotide
cgucggccgcgggcuccac

SEQ ID NO: 2934672 - RNA, 19 nt, Artificial Sequence
  Description of Artificial Sequence: Synthetic oligonucleotide
cgcgggcuccacgcccacu

SEQ ID NO: 2934673 - RNA, 19 nt, Artificial Sequence
  Description of Artificial Sequence: Synthetic oligonucleotide
aaauuuaagccuuugcugc

SEQ ID NO: 2934674 - RNA, 19 nt, Artificial Sequence
  Description of Artificial Sequence: Synthetic oligonucleotide
auuuaguaaaauuuaagcc

SEQ ID NO: 2934675 - RNA, 19 nt, Artificial Sequence
  Description of Artificial Sequence: Synthetic oligonucleotide
aauucuuuagccuucaaag

SEQ ID NO: 2934676 - RNA, 19 nt, Artificial Sequence
  Description of Artificial Sequence: Synthetic oligonucleotide
aaaaguuacagccagacca

SEQ ID NO: 2934677 - RNA, 19 nt, Artificial Sequence
  Description of Artificial Sequence: Synthetic oligonucleotide
agaaauacuaacuugaacu

SEQ ID NO: 2934678 - RNA, 19 nt, Artificial Sequence
  Description of Artificial Sequence: Synthetic oligonucleotide
uuuaguaaaauuuaagccu

SEQ ID NO: 2934679 - RNA, 19 nt, Artificial Sequence
  Description of Artificial Sequence: Synthetic oligonucleotide
aaaauuuaagccuuugcug

SEQ ID NO: 2934680 - RNA, 19 nt, Artificial Sequence
  Description of Artificial Sequence: Synthetic oligonucleotide
acuaacuugaacugaaagc

SEQ ID NO: 2934681 - RNA, 19 nt, Artificial Sequence
  Description of Artificial Sequence: Synthetic oligonucleotide
uauacaaaauauuaguagc

SEQ ID NO: 2934682 - RNA, 19 nt, Artificial Sequence
  Description of Artificial Sequence: Synthetic oligonucleotide
aaauuuucaauguauacaa

SEQ ID NO: 2934683 - RNA, 19 nt, Artificial Sequence
  Description of Artificial Sequence: Synthetic oligonucleotide
agcauuuuaaauucugacc

SEQ ID NO: 2934684 - RNA, 19 nt, Artificial Sequence
  Description of Artificial Sequence: Synthetic oligonucleotide
auuaguagcacuauguagc

SEQ ID NO: 2934685 - RNA, 19 nt, Artificial Sequence
  Description of Artificial Sequence: Synthetic oligonucleotide
uaaaauuuaagccuuugcu

SEQ ID NO: 2934686 - RNA, 19 nt, Artificial Sequence
  Description of Artificial Sequence: Synthetic oligonucleotide
aaauucugaccuuaguagg

SEQ ID NO: 2934687 - RNA, 19 nt, Artificial Sequence
  Description of Artificial Sequence: Synthetic oligonucleotide
uaaauucugaccuuaguag

SEQ ID NO: 2934688 - RNA, 19 nt, Artificial Sequence
  Description of Artificial Sequence: Synthetic oligonucleotide
ugaauacuaggauuaaugg

SEQ ID NO: 2934689 - RNA, 19 nt, Artificial Sequence
  Description of Artificial Sequence: Synthetic oligonucleotide
aaagaagcaaaauaaaaua

SEQ ID NO: 2934690 - RNA, 19 nt, Artificial Sequence
  Description of Artificial Sequence: Synthetic oligonucleotide
aauacuaggauuaauggca

SEQ ID NO: 2934691 - RNA, 19 nt, Artificial Sequence
  Description of Artificial Sequence: Synthetic oligonucleotide
uuuaauuuaguaaaauuua

SEQ ID NO: 2934692 - RNA, 19 nt, Artificial Sequence
  Description of Artificial Sequence: Synthetic oligonucleotide
uaauuuaguaaaauuuaag

SEQ ID NO: 2934693 - RNA, 19 nt, Artificial Sequence
  Description of Artificial Sequence: Synthetic oligonucleotide
aaaauuuucaauguauaca

SEQ ID NO: 2934694 - RNA, 19 nt, Artificial Sequence
  Description of Artificial Sequence: Synthetic oligonucleotide
uuuaguagcauuuuaaauu

SEQ ID NO: 2934695 - RNA, 19 nt, Artificial Sequence
  Description of Artificial Sequence: Synthetic oligonucleotide
guauacaaaauauuaguag

SEQ ID NO: 2934696 - RNA, 19 nt, Artificial Sequence
  Description of Artificial Sequence: Synthetic oligonucleotide
caugcuuuuacuuuaguag

SEQ ID NO: 2934697 - RNA, 19 nt, Artificial Sequence
  Description of Artificial Sequence: Synthetic oligonucleotide
aauguauacaaaauauuag

SEQ ID NO: 2934698 - RNA, 19 nt, Artificial Sequence
  Description of Artificial Sequence: Synthetic oligonucleotide
uuaguaggcauucaaaagu

SEQ ID NO: 2934699 - RNA, 19 nt, Artificial Sequence
  Description of Artificial Sequence: Synthetic oligonucleotide
auuaauggcauguaccauc

SEQ ID NO: 2934700 - RNA, 19 nt, Artificial Sequence
  Description of Artificial Sequence: Synthetic oligonucleotide
cuuucaucaaguauucugg

SEQ ID NO: 2934701 - RNA, 19 nt, Artificial Sequence
  Description of Artificial Sequence: Synthetic oligonucleotide
aaucagaaauacuaacuug

SEQ ID NO: 2934702 - RNA, 19 nt, Artificial Sequence
  Description of Artificial Sequence: Synthetic oligonucleotide
augcuuuuacuuuaguagc

SEQ ID NO: 2934703 - RNA, 19 nt, Artificial Sequence
  Description of Artificial Sequence: Synthetic oligonucleotide
aucaggauuaaauuuucac

SEQ ID NO: 2934704 - RNA, 19 nt, Artificial Sequence
  Description of Artificial Sequence: Synthetic oligonucleotide
uucacuuuuaauuuaguaa

SEQ ID NO: 2934705 - RNA, 19 nt, Artificial Sequence
  Description of Artificial Sequence: Synthetic oligonucleotide
aauauuaguagcacuaugu

SEQ ID NO: 2934706 - RNA, 19 nt, Artificial Sequence
  Description of Artificial Sequence: Synthetic oligonucleotide
uauuaguagcacuauguag

SEQ ID NO: 2934707 - RNA, 19 nt, Artificial Sequence
  Description of Artificial Sequence: Synthetic oligonucleotide
ucaaagaagcaaaauaaaa

SEQ ID NO: 2934708 - RNA, 19 nt, Artificial Sequence
  Description of Artificial Sequence: Synthetic oligonucleotide
uuaauuuaguaaaauuuaa

SEQ ID NO: 2934709 - RNA, 19 nt, Artificial Sequence
  Description of Artificial Sequence: Synthetic oligonucleotide
uuaaauucugaccuuagua

SEQ ID NO: 2934710 - RNA, 19 nt, Artificial Sequence
  Description of Artificial Sequence: Synthetic oligonucleotide
gaaauacuaacuugaacug

SEQ ID NO: 2934711 - RNA, 19 nt, Artificial Sequence
  Description of Artificial Sequence: Synthetic oligonucleotide
gaauacuaggauuaauggc

SEQ ID NO: 2934712 - RNA, 19 nt, Artificial Sequence
  Description of Artificial Sequence: Synthetic oligonucleotide
aaauauuaguagcacuaug

SEQ ID NO: 2934713 - RNA, 19 nt, Artificial Sequence
  Description of Artificial Sequence: Synthetic oligonucleotide
gaacugaaagcacacuucg

SEQ ID NO: 2934714 - RNA, 19 nt, Artificial Sequence
  Description of Artificial Sequence: Synthetic oligonucleotide
auguauacaaaauauuagu

SEQ ID NO: 2934715 - RNA, 19 nt, Artificial Sequence
  Description of Artificial Sequence: Synthetic oligonucleotide
aaaaucagaaauacuaacu

SEQ ID NO: 2934716 - RNA, 19 nt, Artificial Sequence
  Description of Artificial Sequence: Synthetic oligonucleotide
uaccaaaggagguaggagg

SEQ ID NO: 2934717 - RNA, 19 nt, Artificial Sequence
  Description of Artificial Sequence: Synthetic oligonucleotide
uuaguagcauuuuaaauuc

SEQ ID NO: 2934718 - RNA, 19 nt, Artificial Sequence
  Description of Artificial Sequence: Synthetic oligonucleotide
aauucugaccuuaguaggc

SEQ ID NO: 2934719 - RNA, 19 nt, Artificial Sequence
  Description of Artificial Sequence: Synthetic oligonucleotide
acugaaagcacacuucguc

SEQ ID NO: 2934720 - RNA, 19 nt, Artificial Sequence
  Description of Artificial Sequence: Synthetic oligonucleotide
ugaacuuacaauccccacc

SEQ ID NO: 2934721 - RNA, 19 nt, Artificial Sequence
  Description of Artificial Sequence: Synthetic oligonucleotide
uguauacaaaauauuagua

SEQ ID NO: 2934722 - RNA, 19 nt, Artificial Sequence
  Description of Artificial Sequence: Synthetic oligonucleotide
ucaggauuaaauuuucacu

SEQ ID NO: 2934723 - RNA, 19 nt, Artificial Sequence
  Description of Artificial Sequence: Synthetic oligonucleotide
uuuacucucaguuucaauu

SEQ ID NO: 2934724 - RNA, 19 nt, Artificial Sequence
  Description of Artificial Sequence: Synthetic oligonucleotide
uacuaacuugaacugaaag

SEQ ID NO: 2934725 - RNA, 19 nt, Artificial Sequence
  Description of Artificial Sequence: Synthetic oligonucleotide
ucuuuggucccucuaaacc

SEQ ID NO: 2934726 - RNA, 19 nt, Artificial Sequence
  Description of Artificial Sequence: Synthetic oligonucleotide
cugaauacuaggauuaaug

SEQ ID NO: 2934727 - RNA, 19 nt, Artificial Sequence
  Description of Artificial Sequence: Synthetic oligonucleotide
aaguauucugggucugacc

SEQ ID NO: 2934728 - RNA, 19 nt, Artificial Sequence
  Description of Artificial Sequence: Synthetic oligonucleotide
aaagcacacuucgucaugc

SEQ ID NO: 2934729 - RNA, 19 nt, Artificial Sequence
  Description of Artificial Sequence: Synthetic oligonucleotide
ucuuuagccuucaaagaag

SEQ ID NO: 2934730 - RNA, 19 nt, Artificial Sequence
  Description of Artificial Sequence: Synthetic oligonucleotide
auuuucaauguauacaaaa

SEQ ID NO: 2934731 - RNA, 19 nt, Artificial Sequence
  Description of Artificial Sequence: Synthetic oligonucleotide
agcacuauguagcccaagc

SEQ ID NO: 2934732 - RNA, 19 nt, Artificial Sequence
  Description of Artificial Sequence: Synthetic oligonucleotide
ucaucaaguauucuggguc

SEQ ID NO: 2934733 - RNA, 19 nt, Artificial Sequence
  Description of Artificial Sequence: Synthetic oligonucleotide
aguauucugggucugaccu

SEQ ID NO: 2934734 - RNA, 19 nt, Artificial Sequence
  Description of Artificial Sequence: Synthetic oligonucleotide
cucaguuucaauucuuuag

SEQ ID NO: 2934735 - RNA, 19 nt, Artificial Sequence
  Description of Artificial Sequence: Synthetic oligonucleotide
gcauucaaaaguuacagcc

SEQ ID NO: 2934736 - RNA, 19 nt, Artificial Sequence
  Description of Artificial Sequence: Synthetic oligonucleotide
uuaguaaaauuuaagccuu

SEQ ID NO: 2934737 - RNA, 19 nt, Artificial Sequence
  Description of Artificial Sequence: Synthetic oligonucleotide
cuuaguaggcauucaaaag

SEQ ID NO: 2934738 - RNA, 19 nt, Artificial Sequence
  Description of Artificial Sequence: Synthetic oligonucleotide
uuuuaaauucugaccuuag

SEQ ID NO: 2934739 - RNA, 19 nt, Artificial Sequence
  Description of Artificial Sequence: Synthetic oligonucleotide
uucuuuagccuucaaagaa

SEQ ID NO: 2934740 - RNA, 19 nt, Artificial Sequence
  Description of Artificial Sequence: Synthetic oligonucleotide
uuugcugcugugcaggcag

SEQ ID NO: 2934741 - RNA, 19 nt, Artificial Sequence
  Description of Artificial Sequence: Synthetic oligonucleotide
aggauuaauggcauguacc

SEQ ID NO: 2934742 - RNA, 19 nt, Artificial Sequence
  Description of Artificial Sequence: Synthetic oligonucleotide
uagcuuugaacuuacaauc

SEQ ID NO: 2934743 - RNA, 19 nt, Artificial Sequence
  Description of Artificial Sequence: Synthetic oligonucleotide
uuaaauuuucacuuuuaau

SEQ ID NO: 2934744 - RNA, 19 nt, Artificial Sequence
  Description of Artificial Sequence: Synthetic oligonucleotide
uuugaacuuacaaucccca

SEQ ID NO: 2934745 - RNA, 19 nt, Artificial Sequence
  Description of Artificial Sequence: Synthetic oligonucleotide
uuucaucaaguauucuggg

SEQ ID NO: 2934746 - RNA, 19 nt, Artificial Sequence
  Description of Artificial Sequence: Synthetic oligonucleotide
cuucaaagaagcaaaauaa

SEQ ID NO: 2934747 - RNA, 19 nt, Artificial Sequence
  Description of Artificial Sequence: Synthetic oligonucleotide
aguagcacuauguagccca

SEQ ID NO: 2934748 - RNA, 19 nt, Artificial Sequence
  Description of Artificial Sequence: Synthetic oligonucleotide
aaaguuacagccagaccac

SEQ ID NO: 2934749 - RNA, 19 nt, Artificial Sequence
  Description of Artificial Sequence: Synthetic oligonucleotide
uucaaagaagcaaaauaaa

SEQ ID NO: 2934750 - RNA, 19 nt, Artificial Sequence
  Description of Artificial Sequence: Synthetic oligonucleotide
uguaccaucauaucaggau

SEQ ID NO: 2934751 - RNA, 19 nt, Artificial Sequence
  Description of Artificial Sequence: Synthetic oligonucleotide
uuaauggcauguaccauca

SEQ ID NO: 2934752 - RNA, 19 nt, Artificial Sequence
  Description of Artificial Sequence: Synthetic oligonucleotide
cucgggaucucuuuggucc

SEQ ID NO: 2934753 - RNA, 19 nt, Artificial Sequence
  Description of Artificial Sequence: Synthetic oligonucleotide
cuuugaacuuacaaucccc

SEQ ID NO: 2934754 - RNA, 19 nt, Artificial Sequence
  Description of Artificial Sequence: Synthetic oligonucleotide
guaaaauuuaagccuuugc

SEQ ID NO: 2934755 - RNA, 19 nt, Artificial Sequence
  Description of Artificial Sequence: Synthetic oligonucleotide
ucagcuuccugaauacuag

SEQ ID NO: 2934756 - RNA, 19 nt, Artificial Sequence
  Description of Artificial Sequence: Synthetic oligonucleotide
cuaacuugaacugaaagca

SEQ ID NO: 2934757 - RNA, 19 nt, Artificial Sequence
  Description of Artificial Sequence: Synthetic oligonucleotide
acaaaauauuaguagcacu

SEQ ID NO: 2934758 - RNA, 19 nt, Artificial Sequence
  Description of Artificial Sequence: Synthetic oligonucleotide
ucauaucaggauuaaauuu

SEQ ID NO: 2934759 - RNA, 19 nt, Artificial Sequence
  Description of Artificial Sequence: Synthetic oligonucleotide
uuuaaauucugaccuuagu

SEQ ID NO: 2934760 - RNA, 19 nt, Artificial Sequence
  Description of Artificial Sequence: Synthetic oligonucleotide
uacuuuaguagcauuuuaa

SEQ ID NO: 2934761 - RNA, 19 nt, Artificial Sequence
  Description of Artificial Sequence: Synthetic oligonucleotide
cuuuagccuucaaagaagc

SEQ ID NO: 2934762 - RNA, 19 nt, Artificial Sequence
  Description of Artificial Sequence: Synthetic oligonucleotide
ucaauguauacaaaauauu

SEQ ID NO: 2934763 - RNA, 19 nt, Artificial Sequence
  Description of Artificial Sequence: Synthetic oligonucleotide
aauuuucacuuuuaauuua

SEQ ID NO: 2934764 - RNA, 19 nt, Artificial Sequence
  Description of Artificial Sequence: Synthetic oligonucleotide
aauuuaagccuuugcugcu

SEQ ID NO: 2934765 - RNA, 19 nt, Artificial Sequence
  Description of Artificial Sequence: Synthetic oligonucleotide
ucaaaaguuacagccagac

SEQ ID NO: 2934766 - RNA, 19 nt, Artificial Sequence
  Description of Artificial Sequence: Synthetic oligonucleotide
cuuacaauccccaccucag

SEQ ID NO: 2934767 - RNA, 19 nt, Artificial Sequence
  Description of Artificial Sequence: Synthetic oligonucleotide
uauucugggucugaccucg

SEQ ID NO: 2934768 - RNA, 19 nt, Artificial Sequence
  Description of Artificial Sequence: Synthetic oligonucleotide
aauacuaacuugaacugaa

SEQ ID NO: 2934769 - RNA, 19 nt, Artificial Sequence
  Description of Artificial Sequence: Synthetic oligonucleotide
uuaguagcacuauguagcc

SEQ ID NO: 2934770 - RNA, 19 nt, Artificial Sequence
  Description of Artificial Sequence: Synthetic oligonucleotide
ucagcaacgcugcaaguug

SEQ ID NO: 2934771 - RNA, 19 nt, Artificial Sequence
  Description of Artificial Sequence: Synthetic oligonucleotide
caauguauacaaaauauua

SEQ ID NO: 2934772 - RNA, 19 nt, Artificial Sequence
  Description of Artificial Sequence: Synthetic oligonucleotide
ugaacugaaagcacacuuc

SEQ ID NO: 2934773 - RNA, 19 nt, Artificial Sequence
  Description of Artificial Sequence: Synthetic oligonucleotide
aauggcauguaccaucaua

SEQ ID NO: 2934774 - RNA, 19 nt, Artificial Sequence
  Description of Artificial Sequence: Synthetic oligonucleotide
aaauacuaacuugaacuga

SEQ ID NO: 2934775 - RNA, 19 nt, Artificial Sequence
  Description of Artificial Sequence: Synthetic oligonucleotide
uuuggucccucuaaaccag

SEQ ID NO: 2934776 - RNA, 19 nt, Artificial Sequence
  Description of Artificial Sequence: Synthetic oligonucleotide
aucagaaauacuaacuuga

SEQ ID NO: 2934777 - RNA, 19 nt, Artificial Sequence
  Description of Artificial Sequence: Synthetic oligonucleotide
uugaacugaaagcacacuu

SEQ ID NO: 2934778 - RNA, 19 nt, Artificial Sequence
  Description of Artificial Sequence: Synthetic oligonucleotide
uacaaaauauuaguagcac

SEQ ID NO: 2934779 - RNA, 19 nt, Artificial Sequence
  Description of Artificial Sequence: Synthetic oligonucleotide
caaaauauuaguagcacua

SEQ ID NO: 2934780 - RNA, 19 nt, Artificial Sequence
  Description of Artificial Sequence: Synthetic oligonucleotide
acagccagaccacagaccu

SEQ ID NO: 2934781 - RNA, 19 nt, Artificial Sequence
  Description of Artificial Sequence: Synthetic oligonucleotide
ugcuuuuacuuuaguagca

SEQ ID NO: 2934782 - RNA, 19 nt, Artificial Sequence
  Description of Artificial Sequence: Synthetic oligonucleotide
aucauaucaggauuaaauu

SEQ ID NO: 2934783 - RNA, 19 nt, Artificial Sequence
  Description of Artificial Sequence: Synthetic oligonucleotide
uuucacuuuuaauuuagua

SEQ ID NO: 2934784 - RNA, 19 nt, Artificial Sequence
  Description of Artificial Sequence: Synthetic oligonucleotide
gucccucuaaaccagacug

SEQ ID NO: 2934785 - RNA, 19 nt, Artificial Sequence
  Description of Artificial Sequence: Synthetic oligonucleotide
acuggaguaccaaaggagg

SEQ ID NO: 2934786 - RNA, 19 nt, Artificial Sequence
  Description of Artificial Sequence: Synthetic oligonucleotide
ugugcaggcaggcagguuc

SEQ ID NO: 2934787 - RNA, 19 nt, Artificial Sequence
  Description of Artificial Sequence: Synthetic oligonucleotide
auucuuuagccuucaaaga

SEQ ID NO: 2934788 - RNA, 19 nt, Artificial Sequence
  Description of Artificial Sequence: Synthetic oligonucleotide
uuagccuucaaagaagcaa

SEQ ID NO: 2934789 - RNA, 19 nt, Artificial Sequence
  Description of Artificial Sequence: Synthetic oligonucleotide
auuuucacuuuuaauuuag

SEQ ID NO: 2934790 - RNA, 19 nt, Artificial Sequence
  Description of Artificial Sequence: Synthetic oligonucleotide
agcuuugaacuuacaaucc

SEQ ID NO: 2934791 - RNA, 19 nt, Artificial Sequence
  Description of Artificial Sequence: Synthetic oligonucleotide
uaggauuaauggcauguac

SEQ ID NO: 2934792 - RNA, 19 nt, Artificial Sequence
  Description of Artificial Sequence: Synthetic oligonucleotide
uuccugaauacuaggauua

SEQ ID NO: 2934793 - RNA, 19 nt, Artificial Sequence
  Description of Artificial Sequence: Synthetic oligonucleotide
aaaauauuaguagcacuau

SEQ ID NO: 2934794 - RNA, 19 nt, Artificial Sequence
  Description of Artificial Sequence: Synthetic oligonucleotide
uaggcauucaaaaguuaca

SEQ ID NO: 2934795 - RNA, 19 nt, Artificial Sequence
  Description of Artificial Sequence: Synthetic oligonucleotide
acuuuaguagcauuuuaaa

SEQ ID NO: 2934796 - RNA, 19 nt, Artificial Sequence
  Description of Artificial Sequence: Synthetic oligonucleotide
ucagaaauacuaacuugaa

SEQ ID NO: 2934797 - RNA, 19 nt, Artificial Sequence
  Description of Artificial Sequence: Synthetic oligonucleotide
uuacucucaguuucaauuc

SEQ ID NO: 2934798 - RNA, 19 nt, Artificial Sequence
  Description of Artificial Sequence: Synthetic oligonucleotide
uagccuucaaagaagcaaa

SEQ ID NO: 2934799 - RNA, 19 nt, Artificial Sequence
  Description of Artificial Sequence: Synthetic oligonucleotide
auacaaaauauuaguagca

SEQ ID NO: 2934800 - RNA, 19 nt, Artificial Sequence
  Description of Artificial Sequence: Synthetic oligonucleotide
cauguaccaucauaucagg

SEQ ID NO: 2934801 - RNA, 19 nt, Artificial Sequence
  Description of Artificial Sequence: Synthetic oligonucleotide
caguuucaauucuuuagcc

SEQ ID NO: 2934802 - RNA, 19 nt, Artificial Sequence
  Description of Artificial Sequence: Synthetic oligonucleotide
uacaauccccaccucagcu

SEQ ID NO: 2934803 - RNA, 19 nt, Artificial Sequence
  Description of Artificial Sequence: Synthetic oligonucleotide
acuuacaauccccaccuca

SEQ ID NO: 2934804 - RNA, 19 nt, Artificial Sequence
  Description of Artificial Sequence: Synthetic oligonucleotide
gacuggaguaccaaaggag

SEQ ID NO: 2934805 - RNA, 19 nt, Artificial Sequence
  Description of Artificial Sequence: Synthetic oligonucleotide
aggcauucaaaaguuacag

SEQ ID NO: 2934806 - RNA, 19 nt, Artificial Sequence
  Description of Artificial Sequence: Synthetic oligonucleotide
aacuugaacugaaagcaca

SEQ ID NO: 2934807 - RNA, 19 nt, Artificial Sequence
  Description of Artificial Sequence: Synthetic oligonucleotide
uuacagccagaccacagac

SEQ ID NO: 2934808 - RNA, 19 nt, Artificial Sequence
  Description of Artificial Sequence: Synthetic oligonucleotide
acuaggauuaauggcaugu

SEQ ID NO: 2934809 - RNA, 19 nt, Artificial Sequence
  Description of Artificial Sequence: Synthetic oligonucleotide
ucaugcuuuuacuuuagua

SEQ ID NO: 2934810 - RNA, 19 nt, Artificial Sequence
  Description of Artificial Sequence: Synthetic oligonucleotide
uaaaccagacuggaguacc

SEQ ID NO: 2934811 - RNA, 19 nt, Artificial Sequence
  Description of Artificial Sequence: Synthetic oligonucleotide
uaacuugaacugaaagcac

SEQ ID NO: 2934812 - RNA, 19 nt, Artificial Sequence
  Description of Artificial Sequence: Synthetic oligonucleotide
ucccucuaaaccagacugg

SEQ ID NO: 2934813 - RNA, 19 nt, Artificial Sequence
  Description of Artificial Sequence: Synthetic oligonucleotide
uaucaggauuaaauuuuca

SEQ ID NO: 2934814 - RNA, 19 nt, Artificial Sequence
  Description of Artificial Sequence: Synthetic oligonucleotide
ucuaaaccagacuggagua

SEQ ID NO: 2934815 - RNA, 19 nt, Artificial Sequence
  Description of Artificial Sequence: Synthetic oligonucleotide
uucaucaaguauucugggu

SEQ ID NO: 2934816 - RNA, 19 nt, Artificial Sequence
  Description of Artificial Sequence: Synthetic oligonucleotide
uuucaauucuuuagccuuc

SEQ ID NO: 2934817 - RNA, 19 nt, Artificial Sequence
  Description of Artificial Sequence: Synthetic oligonucleotide
auauuaguagcacuaugua

SEQ ID NO: 2934818 - RNA, 19 nt, Artificial Sequence
  Description of Artificial Sequence: Synthetic oligonucleotide
auaucaggauuaaauuuuc

SEQ ID NO: 2934819 - RNA, 19 nt, Artificial Sequence
  Description of Artificial Sequence: Synthetic oligonucleotide
acuugaacugaaagcacac

SEQ ID NO: 2934820 - RNA, 19 nt, Artificial Sequence
  Description of Artificial Sequence: Synthetic oligonucleotide
uuuucacuuuuaauuuagu

SEQ ID NO: 2934821 - RNA, 19 nt, Artificial Sequence
  Description of Artificial Sequence: Synthetic oligonucleotide
cagaaauacuaacuugaac

SEQ ID NO: 2934822 - RNA, 19 nt, Artificial Sequence
  Description of Artificial Sequence: Synthetic oligonucleotide
gaacuuacaauccccaccu

SEQ ID NO: 2934823 - RNA, 19 nt, Artificial Sequence
  Description of Artificial Sequence: Synthetic oligonucleotide
accucagcaacgcugcaag

SEQ ID NO: 2934824 - RNA, 19 nt, Artificial Sequence
  Description of Artificial Sequence: Synthetic oligonucleotide
caaagaagcaaaauaaaau

SEQ ID NO: 2934825 - RNA, 19 nt, Artificial Sequence
  Description of Artificial Sequence: Synthetic oligonucleotide
aguaaaauuuaagccuuug

SEQ ID NO: 2934826 - RNA, 19 nt, Artificial Sequence
  Description of Artificial Sequence: Synthetic oligonucleotide
uuacuuuaguagcauuuua

SEQ ID NO: 2934827 - RNA, 19 nt, Artificial Sequence
  Description of Artificial Sequence: Synthetic oligonucleotide
cagacuggaguaccaaagg

SEQ ID NO: 2934828 - RNA, 19 nt, Artificial Sequence
  Description of Artificial Sequence: Synthetic oligonucleotide
aguagcauuuuaaauucug

SEQ ID NO: 2934829 - RNA, 19 nt, Artificial Sequence
  Description of Artificial Sequence: Synthetic oligonucleotide
cuuuggucccucuaaacca

SEQ ID NO: 2934830 - RNA, 19 nt, Artificial Sequence
  Description of Artificial Sequence: Synthetic oligonucleotide
uguagcccaagcuagcuuu

SEQ ID NO: 2934831 - RNA, 19 nt, Artificial Sequence
  Description of Artificial Sequence: Synthetic oligonucleotide
uaguaggcauucaaaaguu

SEQ ID NO: 2934832 - RNA, 19 nt, Artificial Sequence
  Description of Artificial Sequence: Synthetic oligonucleotide
gcauuuuaaauucugaccu

SEQ ID NO: 2934833 - RNA, 19 nt, Artificial Sequence
  Description of Artificial Sequence: Synthetic oligonucleotide
cauucaaaaguuacagcca

SEQ ID NO: 2934834 - RNA, 19 nt, Artificial Sequence
  Description of Artificial Sequence: Synthetic oligonucleotide
uuuagccuucaaagaagca

SEQ ID NO: 2934835 - RNA, 19 nt, Artificial Sequence
  Description of Artificial Sequence: Synthetic oligonucleotide
ugaaagcacacuucgucau

SEQ ID NO: 2934836 - RNA, 19 nt, Artificial Sequence
  Description of Artificial Sequence: Synthetic oligonucleotide
guaggcauucaaaaguuac

SEQ ID NO: 2934837 - RNA, 19 nt, Artificial Sequence
  Description of Artificial Sequence: Synthetic oligonucleotide
ggauuaauggcauguacca

SEQ ID NO: 2934838 - RNA, 19 nt, Artificial Sequence
  Description of Artificial Sequence: Synthetic oligonucleotide
uacucucaguuucaauucu

SEQ ID NO: 2934839 - RNA, 19 nt, Artificial Sequence
  Description of Artificial Sequence: Synthetic oligonucleotide
caaaaguuacagccagacc

SEQ ID NO: 2934840 - RNA, 19 nt, Artificial Sequence
  Description of Artificial Sequence: Synthetic oligonucleotide
agacuggaguaccaaagga

SEQ ID NO: 2934841 - RNA, 19 nt, Artificial Sequence
  Description of Artificial Sequence: Synthetic oligonucleotide
aacgcugcaaguugcuaau

SEQ ID NO: 2934842 - RNA, 19 nt, Artificial Sequence
  Description of Artificial Sequence: Synthetic oligonucleotide
uuuacuuuaguagcauuuu

SEQ ID NO: 2934843 - RNA, 19 nt, Artificial Sequence
  Description of Artificial Sequence: Synthetic oligonucleotide
caucauaucaggauuaaau

SEQ ID NO: 2934844 - RNA, 19 nt, Artificial Sequence
  Description of Artificial Sequence: Synthetic oligonucleotide
ugcugugcaggcaggcagg

SEQ ID NO: 2934845 - RNA, 19 nt, Artificial Sequence
  Description of Artificial Sequence: Synthetic oligonucleotide
uucgucaugcuuuuacuuu

SEQ ID NO: 2934846 - RNA, 19 nt, Artificial Sequence
  Description of Artificial Sequence: Synthetic oligonucleotide
ucugggucugaccucggga

SEQ ID NO: 2934847 - RNA, 19 nt, Artificial Sequence
  Description of Artificial Sequence: Synthetic oligonucleotide
uuuaagccuuugcugcugu

SEQ ID NO: 2934848 - RNA, 19 nt, Artificial Sequence
  Description of Artificial Sequence: Synthetic oligonucleotide
aacuuacaauccccaccuc

SEQ ID NO: 2934849 - RNA, 19 nt, Artificial Sequence
  Description of Artificial Sequence: Synthetic oligonucleotide
gaaagcacacuucgucaug

SEQ ID NO: 2934850 - RNA, 19 nt, Artificial Sequence
  Description of Artificial Sequence: Synthetic oligonucleotide
cagaccucagcaacgcugc

SEQ ID NO: 2934851 - RNA, 19 nt, Artificial Sequence
  Description of Artificial Sequence: Synthetic oligonucleotide
uugaacuuacaauccccac

SEQ ID NO: 2934852 - RNA, 19 nt, Artificial Sequence
  Description of Artificial Sequence: Synthetic oligonucleotide
uacagccagaccacagacc

SEQ ID NO: 2934853 - RNA, 19 nt, Artificial Sequence
  Description of Artificial Sequence: Synthetic oligonucleotide
uaccaucauaucaggauua

SEQ ID NO: 2934854 - RNA, 19 nt, Artificial Sequence
  Description of Artificial Sequence: Synthetic oligonucleotide
acuucgucaugcuuuuacu

SEQ ID NO: 2934855 - RNA, 19 nt, Artificial Sequence
  Description of Artificial Sequence: Synthetic oligonucleotide
gaccucgggaucucuuugg

SEQ ID NO: 2934856 - RNA, 19 nt, Artificial Sequence
  Description of Artificial Sequence: Synthetic oligonucleotide
gaccacagaccucagcaac

SEQ ID NO: 2934857 - RNA, 19 nt, Artificial Sequence
  Description of Artificial Sequence: Synthetic oligonucleotide
auuuuaaauucugaccuua

SEQ ID NO: 2934858 - RNA, 19 nt, Artificial Sequence
  Description of Artificial Sequence: Synthetic oligonucleotide
aagcuagcuuugaacuuac

SEQ ID NO: 2934859 - RNA, 19 nt, Artificial Sequence
  Description of Artificial Sequence: Synthetic oligonucleotide
aggauuaaauuuucacuuu

SEQ ID NO: 2934860 - RNA, 19 nt, Artificial Sequence
  Description of Artificial Sequence: Synthetic oligonucleotide
gcauguaccaucauaucag

SEQ ID NO: 2934861 - RNA, 19 nt, Artificial Sequence
  Description of Artificial Sequence: Synthetic oligonucleotide
cagaccacagaccucagca

SEQ ID NO: 2934862 - RNA, 19 nt, Artificial Sequence
  Description of Artificial Sequence: Synthetic oligonucleotide
cacuucgucaugcuuuuac

SEQ ID NO: 2934863 - RNA, 19 nt, Artificial Sequence
  Description of Artificial Sequence: Synthetic oligonucleotide
uaguagcauuuuaaauucu

SEQ ID NO: 2934864 - RNA, 19 nt, Artificial Sequence
  Description of Artificial Sequence: Synthetic oligonucleotide
cugaaagcacacuucguca

SEQ ID NO: 2934865 - RNA, 19 nt, Artificial Sequence
  Description of Artificial Sequence: Synthetic oligonucleotide
ucucuuuggucccucuaaa

SEQ ID NO: 2934866 - RNA, 19 nt, Artificial Sequence
  Description of Artificial Sequence: Synthetic oligonucleotide
ggcauguaccaucauauca

SEQ ID NO: 2934867 - RNA, 19 nt, Artificial Sequence
  Description of Artificial Sequence: Synthetic oligonucleotide
cuuuuaauuuaguaaaauu

SEQ ID NO: 2934868 - RNA, 19 nt, Artificial Sequence
  Description of Artificial Sequence: Synthetic oligonucleotide
aguaccaaaggagguagga

SEQ ID NO: 2934869 - RNA, 19 nt, Artificial Sequence
  Description of Artificial Sequence: Synthetic oligonucleotide
cauaucaggauuaaauuuu

SEQ ID NO: 2934870 - RNA, 19 nt, Artificial Sequence
  Description of Artificial Sequence: Synthetic oligonucleotide
cuagcuuugaacuuacaau

SEQ ID NO: 2934871 - RNA, 19 nt, Artificial Sequence
  Description of Artificial Sequence: Synthetic oligonucleotide
auggcauguaccaucauau

SEQ ID NO: 2934872 - RNA, 19 nt, Artificial Sequence
  Description of Artificial Sequence: Synthetic oligonucleotide
uuuuacucucaguuucaau

SEQ ID NO: 2934873 - RNA, 19 nt, Artificial Sequence
  Description of Artificial Sequence: Synthetic oligonucleotide
gcuuugaacuuacaauccc

SEQ ID NO: 2934874 - RNA, 19 nt, Artificial Sequence
  Description of Artificial Sequence: Synthetic oligonucleotide
ucucaguuucaauucuuua

SEQ ID NO: 2934875 - RNA, 19 nt, Artificial Sequence
  Description of Artificial Sequence: Synthetic oligonucleotide
ugaccucgggaucucuuug

SEQ ID NO: 2934876 - RNA, 19 nt, Artificial Sequence
  Description of Artificial Sequence: Synthetic oligonucleotide
ucgucaugcuuuuacuuua

SEQ ID NO: 2934877 - RNA, 19 nt, Artificial Sequence
  Description of Artificial Sequence: Synthetic oligonucleotide
uucugggucugaccucggg

SEQ ID NO: 2934878 - RNA, 19 nt, Artificial Sequence
  Description of Artificial Sequence: Synthetic oligonucleotide
aucucuuuggucccucuaa

SEQ ID NO: 2934879 - RNA, 19 nt, Artificial Sequence
  Description of Artificial Sequence: Synthetic oligonucleotide
gauuaaauuuucacuuuua

SEQ ID NO: 2934880 - RNA, 19 nt, Artificial Sequence
  Description of Artificial Sequence: Synthetic oligonucleotide
cucuaaaccagacuggagu

SEQ ID NO: 2934881 - RNA, 19 nt, Artificial Sequence
  Description of Artificial Sequence: Synthetic oligonucleotide
guuacagccagaccacaga

SEQ ID NO: 2934882 - RNA, 19 nt, Artificial Sequence
  Description of Artificial Sequence: Synthetic oligonucleotide
guaccaaaggagguaggag

SEQ ID NO: 2934883 - RNA, 19 nt, Artificial Sequence
  Description of Artificial Sequence: Synthetic oligonucleotide
uucaauucuuuagccuuca

SEQ ID NO: 2934884 - RNA, 19 nt, Artificial Sequence
  Description of Artificial Sequence: Synthetic oligonucleotide
aaaggagguaggaggaaaa

SEQ ID NO: 2934885 - RNA, 19 nt, Artificial Sequence
  Description of Artificial Sequence: Synthetic oligonucleotide
acagaccucagcaacgcug

SEQ ID NO: 2934886 - RNA, 19 nt, Artificial Sequence
  Description of Artificial Sequence: Synthetic oligonucleotide
guagcauuuuaaauucuga

SEQ ID NO: 2934887 - RNA, 19 nt, Artificial Sequence
  Description of Artificial Sequence: Synthetic oligonucleotide
cucuuuggucccucuaaac

SEQ ID NO: 2934888 - RNA, 19 nt, Artificial Sequence
  Description of Artificial Sequence: Synthetic oligonucleotide
cuuuaguagcauuuuaaau

SEQ ID NO: 2934889 - RNA, 19 nt, Artificial Sequence
  Description of Artificial Sequence: Synthetic oligonucleotide
ggcauucaaaaguuacagc

SEQ ID NO: 2934890 - RNA, 19 nt, Artificial Sequence
  Description of Artificial Sequence: Synthetic oligonucleotide
uacuaggauuaauggcaug

SEQ ID NO: 2934891 - RNA, 19 nt, Artificial Sequence
  Description of Artificial Sequence: Synthetic oligonucleotide
cagcuuccugaauacuagg

SEQ ID NO: 2934892 - RNA, 19 nt, Artificial Sequence
  Description of Artificial Sequence: Synthetic oligonucleotide
caauucuuuagccuucaaa

SEQ ID NO: 2934893 - RNA, 19 nt, Artificial Sequence
  Description of Artificial Sequence: Synthetic oligonucleotide
cugcugugcaggcaggcag

SEQ ID NO: 2934894 - RNA, 19 nt, Artificial Sequence
  Description of Artificial Sequence: Synthetic oligonucleotide
auuuaagccuuugcugcug

SEQ ID NO: 2934895 - RNA, 19 nt, Artificial Sequence
  Description of Artificial Sequence: Synthetic oligonucleotide
agccagaccacagaccuca

SEQ ID NO: 2934896 - RNA, 19 nt, Artificial Sequence
  Description of Artificial Sequence: Synthetic oligonucleotide
aguuacagccagaccacag

SEQ ID NO: 2934897 - RNA, 19 nt, Artificial Sequence
  Description of Artificial Sequence: Synthetic oligonucleotide
ggaguaccaaaggagguag

SEQ ID NO: 2934898 - RNA, 19 nt, Artificial Sequence
  Description of Artificial Sequence: Synthetic oligonucleotide
uaguaaaauuuaagccuuu

SEQ ID NO: 2934899 - RNA, 19 nt, Artificial Sequence
  Description of Artificial Sequence: Synthetic oligonucleotide
ucaaguauucugggucuga

SEQ ID NO: 2934900 - RNA, 19 nt, Artificial Sequence
  Description of Artificial Sequence: Synthetic oligonucleotide
cuaaaccagacuggaguac

SEQ ID NO: 2934901 - RNA, 19 nt, Artificial Sequence
  Description of Artificial Sequence: Synthetic oligonucleotide
auucugaccuuaguaggca

SEQ ID NO: 2934902 - RNA, 19 nt, Artificial Sequence
  Description of Artificial Sequence: Synthetic oligonucleotide
gaccuuaguaggcauucaa

SEQ ID NO: 2934903 - RNA, 19 nt, Artificial Sequence
  Description of Artificial Sequence: Synthetic oligonucleotide
ccagacuggaguaccaaag

SEQ ID NO: 2934904 - RNA, 19 nt, Artificial Sequence
  Description of Artificial Sequence: Synthetic oligonucleotide
ucugaccuuaguaggcauu

SEQ ID NO: 2934905 - RNA, 19 nt, Artificial Sequence
  Description of Artificial Sequence: Synthetic oligonucleotide
ucgggaucucuuugguccc

SEQ ID NO: 2934906 - RNA, 19 nt, Artificial Sequence
  Description of Artificial Sequence: Synthetic oligonucleotide
accaaaggagguaggagga

SEQ ID NO: 2934907 - RNA, 19 nt, Artificial Sequence
  Description of Artificial Sequence: Synthetic oligonucleotide
cagcaacgcugcaaguugc

SEQ ID NO: 2934908 - RNA, 19 nt, Artificial Sequence
  Description of Artificial Sequence: Synthetic oligonucleotide
cugaccuuaguaggcauuc

SEQ ID NO: 2934909 - RNA, 19 nt, Artificial Sequence
  Description of Artificial Sequence: Synthetic oligonucleotide
uggaguaccaaaggaggua

SEQ ID NO: 2934910 - RNA, 19 nt, Artificial Sequence
  Description of Artificial Sequence: Synthetic oligonucleotide
uuaagccuuugcugcugug

SEQ ID NO: 2934911 - RNA, 19 nt, Artificial Sequence
  Description of Artificial Sequence: Synthetic oligonucleotide
caaguauucugggucugac

SEQ ID NO: 2934912 - RNA, 19 nt, Artificial Sequence
  Description of Artificial Sequence: Synthetic oligonucleotide
cucagcuuccugaauacua

SEQ ID NO: 2934913 - RNA, 19 nt, Artificial Sequence
  Description of Artificial Sequence: Synthetic oligonucleotide
gaguaccaaaggagguagg

SEQ ID NO: 2934914 - RNA, 19 nt, Artificial Sequence
  Description of Artificial Sequence: Synthetic oligonucleotide
ucaauucuuuagccuucaa

SEQ ID NO: 2934915 - RNA, 19 nt, Artificial Sequence
  Description of Artificial Sequence: Synthetic oligonucleotide
aaguuacagccagaccaca

SEQ ID NO: 2934916 - RNA, 19 nt, Artificial Sequence
  Description of Artificial Sequence: Synthetic oligonucleotide
uggucccucuaaaccagac

SEQ ID NO: 2934917 - RNA, 19 nt, Artificial Sequence
  Description of Artificial Sequence: Synthetic oligonucleotide
aaaccagacuggaguacca

SEQ ID NO: 2934918 - RNA, 19 nt, Artificial Sequence
  Description of Artificial Sequence: Synthetic oligonucleotide
uaguagcacuauguagccc

SEQ ID NO: 2934919 - RNA, 19 nt, Artificial Sequence
  Description of Artificial Sequence: Synthetic oligonucleotide
acaauccccaccucagcuu

SEQ ID NO: 2934920 - RNA, 19 nt, Artificial Sequence
  Description of Artificial Sequence: Synthetic oligonucleotide
agcuuccugaauacuagga

SEQ ID NO: 2934921 - RNA, 19 nt, Artificial Sequence
  Description of Artificial Sequence: Synthetic oligonucleotide
uggcauguaccaucauauc

SEQ ID NO: 2934922 - RNA, 19 nt, Artificial Sequence
  Description of Artificial Sequence: Synthetic oligonucleotide
uucugaccuuaguaggcau

SEQ ID NO: 2934923 - RNA, 19 nt, Artificial Sequence
  Description of Artificial Sequence: Synthetic oligonucleotide
accagacuggaguaccaaa

SEQ ID NO: 2934924 - RNA, 19 nt, Artificial Sequence
  Description of Artificial Sequence: Synthetic oligonucleotide
aucaaguauucugggucug

SEQ ID NO: 2934925 - RNA, 19 nt, Artificial Sequence
  Description of Artificial Sequence: Synthetic oligonucleotide
uuggucccucuaaaccaga

SEQ ID NO: 2934926 - RNA, 19 nt, Artificial Sequence
  Description of Artificial Sequence: Synthetic oligonucleotide
agccuuugcugcugugcag

SEQ ID NO: 2934927 - RNA, 19 nt, Artificial Sequence
  Description of Artificial Sequence: Synthetic oligonucleotide
caacgcugcaaguugcuaa

SEQ ID NO: 2934928 - RNA, 19 nt, Artificial Sequence
  Description of Artificial Sequence: Synthetic oligonucleotide
auacuaggauuaauggcau

SEQ ID NO: 2934929 - RNA, 19 nt, Artificial Sequence
  Description of Artificial Sequence: Synthetic oligonucleotide
ccuuaguaggcauucaaaa

SEQ ID NO: 2934930 - RNA, 19 nt, Artificial Sequence
  Description of Artificial Sequence: Synthetic oligonucleotide
caucaaguauucugggucu

SEQ ID NO: 2934931 - RNA, 19 nt, Artificial Sequence
  Description of Artificial Sequence: Synthetic oligonucleotide
ucugaccucgggaucucuu

SEQ ID NO: 2934932 - RNA, 19 nt, Artificial Sequence
  Description of Artificial Sequence: Synthetic oligonucleotide
cuuccugaauacuaggauu

SEQ ID NO: 2934933 - RNA, 19 nt, Artificial Sequence
  Description of Artificial Sequence: Synthetic oligonucleotide
guauucugggucugaccuc

SEQ ID NO: 2934934 - RNA, 19 nt, Artificial Sequence
  Description of Artificial Sequence: Synthetic oligonucleotide
aaccagacuggaguaccaa

SEQ ID NO: 2934935 - RNA, 19 nt, Artificial Sequence
  Description of Artificial Sequence: Synthetic oligonucleotide
guaccaucauaucaggauu

SEQ ID NO: 2934936 - RNA, 19 nt, Artificial Sequence
  Description of Artificial Sequence: Synthetic oligonucleotide
agcacacuucgucaugcuu

SEQ ID NO: 2934937 - RNA, 19 nt, Artificial Sequence
  Description of Artificial Sequence: Synthetic oligonucleotide
ugaccuuaguaggcauuca

SEQ ID NO: 2934938 - RNA, 19 nt, Artificial Sequence
  Description of Artificial Sequence: Synthetic oligonucleotide
uccugaauacuaggauuaa

SEQ ID NO: 2934939 - RNA, 19 nt, Artificial Sequence
  Description of Artificial Sequence: Synthetic oligonucleotide
accuuaguaggcauucaaa

SEQ ID NO: 2934940 - RNA, 19 nt, Artificial Sequence
  Description of Artificial Sequence: Synthetic oligonucleotide
caagcuagcuuugaacuua

SEQ ID NO: 2934941 - RNA, 19 nt, Artificial Sequence
  Description of Artificial Sequence: Synthetic oligonucleotide
accucgggaucucuuuggu

SEQ ID NO: 2934942 - RNA, 19 nt, Artificial Sequence
  Description of Artificial Sequence: Synthetic oligonucleotide
gccuuugcugcugugcagg

SEQ ID NO: 2934943 - RNA, 19 nt, Artificial Sequence
  Description of Artificial Sequence: Synthetic oligonucleotide
auguaccaucauaucagga

SEQ ID NO: 2934944 - RNA, 19 nt, Artificial Sequence
  Description of Artificial Sequence: Synthetic oligonucleotide
uagcacuauguagcccaag

SEQ ID NO: 2934945 - RNA, 19 nt, Artificial Sequence
  Description of Artificial Sequence: Synthetic oligonucleotide
gaucucuuuggucccucua

SEQ ID NO: 2934946 - RNA, 19 nt, Artificial Sequence
  Description of Artificial Sequence: Synthetic oligonucleotide
auguagcccaagcuagcuu

SEQ ID NO: 2934947 - RNA, 19 nt, Artificial Sequence
  Description of Artificial Sequence: Synthetic oligonucleotide
accaucauaucaggauuaa

SEQ ID NO: 2934948 - RNA, 19 nt, Artificial Sequence
  Description of Artificial Sequence: Synthetic oligonucleotide
gcccaagcuagcuuugaac

SEQ ID NO: 2934949 - RNA, 19 nt, Artificial Sequence
  Description of Artificial Sequence: Synthetic oligonucleotide
caaaggagguaggaggaaa

SEQ ID NO: 2934950 - RNA, 19 nt, Artificial Sequence
  Description of Artificial Sequence: Synthetic oligonucleotide
ggauuaaauuuucacuuuu

SEQ ID NO: 2934951 - RNA, 19 nt, Artificial Sequence
  Description of Artificial Sequence: Synthetic oligonucleotide
gauuaauggcauguaccau

SEQ ID NO: 2934952 - RNA, 19 nt, Artificial Sequence
  Description of Artificial Sequence: Synthetic oligonucleotide
auacuaacuugaacugaaa

SEQ ID NO: 2934953 - RNA, 19 nt, Artificial Sequence
  Description of Artificial Sequence: Synthetic oligonucleotide
agcccaagcuagcuuugaa

SEQ ID NO: 2934954 - RNA, 19 nt, Artificial Sequence
  Description of Artificial Sequence: Synthetic oligonucleotide
aguaggcauucaaaaguua

SEQ ID NO: 2934955 - RNA, 19 nt, Artificial Sequence
  Description of Artificial Sequence: Synthetic oligonucleotide
ccucuaaaccagacuggag

SEQ ID NO: 2934956 - RNA, 19 nt, Artificial Sequence
  Description of Artificial Sequence: Synthetic oligonucleotide
guagcccaagcuagcuuug

SEQ ID NO: 2934957 - RNA, 19 nt, Artificial Sequence
  Description of Artificial Sequence: Synthetic oligonucleotide
cuggaguaccaaaggaggu

SEQ ID NO: 2934958 - RNA, 19 nt, Artificial Sequence
  Description of Artificial Sequence: Synthetic oligonucleotide
cauuuuaaauucugaccuu

SEQ ID NO: 2934959 - RNA, 19 nt, Artificial Sequence
  Description of Artificial Sequence: Synthetic oligonucleotide
uagcccaagcuagcuuuga

SEQ ID NO: 2934960 - RNA, 19 nt, Artificial Sequence
  Description of Artificial Sequence: Synthetic oligonucleotide
cuaggauuaauggcaugua

SEQ ID NO: 2934961 - RNA, 19 nt, Artificial Sequence
  Description of Artificial Sequence: Synthetic oligonucleotide
cuucgucaugcuuuuacuu

SEQ ID NO: 2934962 - RNA, 19 nt, Artificial Sequence
  Description of Artificial Sequence: Synthetic oligonucleotide
cccaagcuagcuuugaacu

SEQ ID NO: 2934963 - RNA, 19 nt, Artificial Sequence
  Description of Artificial Sequence: Synthetic oligonucleotide
acucucaguuucaauucuu

SEQ ID NO: 2934964 - RNA, 19 nt, Artificial Sequence
  Description of Artificial Sequence: Synthetic oligonucleotide
agcaacgcugcaaguugcu

SEQ ID NO: 2934965 - RNA, 19 nt, Artificial Sequence
  Description of Artificial Sequence: Synthetic oligonucleotide
gaccucagcaacgcugcaa

SEQ ID NO: 2934966 - RNA, 19 nt, Artificial Sequence
  Description of Artificial Sequence: Synthetic oligonucleotide
agccuucaaagaagcaaaa

SEQ ID NO: 2934967 - RNA, 19 nt, Artificial Sequence
  Description of Artificial Sequence: Synthetic oligonucleotide
agaccucagcaacgcugca

SEQ ID NO: 2934968 - RNA, 19 nt, Artificial Sequence
  Description of Artificial Sequence: Synthetic oligonucleotide
cucucaguuucaauucuuu

SEQ ID NO: 2934969 - RNA, 19 nt, Artificial Sequence
  Description of Artificial Sequence: Synthetic oligonucleotide
cuugaacugaaagcacacu

SEQ ID NO: 2934970 - RNA, 19 nt, Artificial Sequence
  Description of Artificial Sequence: Synthetic oligonucleotide
gcuuccugaauacuaggau

SEQ ID NO: 2934971 - RNA, 19 nt, Artificial Sequence
  Description of Artificial Sequence: Synthetic oligonucleotide
cgucaugcuuuuacuuuag

SEQ ID NO: 2934972 - RNA, 19 nt, Artificial Sequence
  Description of Artificial Sequence: Synthetic oligonucleotide
ccacagaccucagcaacgc

SEQ ID NO: 2934973 - RNA, 19 nt, Artificial Sequence
  Description of Artificial Sequence: Synthetic oligonucleotide
ccuuugcugcugugcaggc

SEQ ID NO: 2934974 - RNA, 19 nt, Artificial Sequence
  Description of Artificial Sequence: Synthetic oligonucleotide
auucugggucugaccucgg

SEQ ID NO: 2934975 - RNA, 19 nt, Artificial Sequence
  Description of Artificial Sequence: Synthetic oligonucleotide
gucaugcuuuuacuuuagu

SEQ ID NO: 2934976 - RNA, 19 nt, Artificial Sequence
  Description of Artificial Sequence: Synthetic oligonucleotide
ccagaccacagaccucagc

SEQ ID NO: 2934977 - RNA, 19 nt, Artificial Sequence
  Description of Artificial Sequence: Synthetic oligonucleotide
gcugcaaguugcuaauuuu

SEQ ID NO: 2934978 - RNA, 19 nt, Artificial Sequence
  Description of Artificial Sequence: Synthetic oligonucleotide
cagccagaccacagaccuc

SEQ ID NO: 2934979 - RNA, 19 nt, Artificial Sequence
  Description of Artificial Sequence: Synthetic oligonucleotide
cucagcaacgcugcaaguu

SEQ ID NO: 2934980 - RNA, 19 nt, Artificial Sequence
  Description of Artificial Sequence: Synthetic oligonucleotide
cacacuucgucaugcuuuu

SEQ ID NO: 2934981 - RNA, 19 nt, Artificial Sequence
  Description of Artificial Sequence: Synthetic oligonucleotide
ggucccucuaaaccagacu

SEQ ID NO: 2934982 - RNA, 19 nt, Artificial Sequence
  Description of Artificial Sequence: Synthetic oligonucleotide
guagcacuauguagcccaa

SEQ ID NO: 2934983 - RNA, 19 nt, Artificial Sequence
  Description of Artificial Sequence: Synthetic oligonucleotide
agcuagcuuugaacuuaca

SEQ ID NO: 2934984 - RNA, 19 nt, Artificial Sequence
  Description of Artificial Sequence: Synthetic oligonucleotide
cccucuaaaccagacugga

SEQ ID NO: 2934985 - RNA, 19 nt, Artificial Sequence
  Description of Artificial Sequence: Synthetic oligonucleotide
ccucgggaucucuuugguc

SEQ ID NO: 2934986 - RNA, 19 nt, Artificial Sequence
  Description of Artificial Sequence: Synthetic oligonucleotide
gcacacuucgucaugcuuu

SEQ ID NO: 2934987 - RNA, 19 nt, Artificial Sequence
  Description of Artificial Sequence: Synthetic oligonucleotide
cugaccucgggaucucuuu

SEQ ID NO: 2934988 - RNA, 19 nt, Artificial Sequence
  Description of Artificial Sequence: Synthetic oligonucleotide
ccccaccucagcuuccuga

SEQ ID NO: 2934989 - RNA, 19 nt, Artificial Sequence
  Description of Artificial Sequence: Synthetic oligonucleotide
gggucugaccucgggaucu

SEQ ID NO: 2934990 - RNA, 19 nt, Artificial Sequence
  Description of Artificial Sequence: Synthetic oligonucleotide
acgcugcaaguugcuaauu

SEQ ID NO: 2934991 - RNA, 19 nt, Artificial Sequence
  Description of Artificial Sequence: Synthetic oligonucleotide
gcugcugugcaggcaggca

SEQ ID NO: 2934992 - RNA, 19 nt, Artificial Sequence
  Description of Artificial Sequence: Synthetic oligonucleotide
ggaucucuuuggucccucu

SEQ ID NO: 2934993 - RNA, 19 nt, Artificial Sequence
  Description of Artificial Sequence: Synthetic oligonucleotide
cacagaccucagcaacgcu

SEQ ID NO: 2934994 - RNA, 19 nt, Artificial Sequence
  Description of Artificial Sequence: Synthetic oligonucleotide
gccuucaaagaagcaaaau

SEQ ID NO: 2934995 - RNA, 19 nt, Artificial Sequence
  Description of Artificial Sequence: Synthetic oligonucleotide
gggaucucuuuggucccuc

SEQ ID NO: 2934996 - RNA, 19 nt, Artificial Sequence
  Description of Artificial Sequence: Synthetic oligonucleotide
acacuucgucaugcuuuua

SEQ ID NO: 2934997 - RNA, 19 nt, Artificial Sequence
  Description of Artificial Sequence: Synthetic oligonucleotide
ccaucauaucaggauuaaa

SEQ ID NO: 2934998 - RNA, 19 nt, Artificial Sequence
  Description of Artificial Sequence: Synthetic oligonucleotide
ccaagcuagcuuugaacuu

SEQ ID NO: 2934999 - RNA, 19 nt, Artificial Sequence
  Description of Artificial Sequence: Synthetic oligonucleotide
gcaacgcugcaaguugcua

SEQ ID NO: 2935000 - RNA, 19 nt, Artificial Sequence
  Description of Artificial Sequence: Synthetic oligonucleotide
ggucugaccucgggaucuc

SEQ ID NO: 2935001 - RNA, 19 nt, Artificial Sequence
  Description of Artificial Sequence: Synthetic oligonucleotide
ccaaaggagguaggaggaa

SEQ ID NO: 2935002 - RNA, 19 nt, Artificial Sequence
  Description of Artificial Sequence: Synthetic oligonucleotide
ccugaauacuaggauuaau

SEQ ID NO: 2935003 - RNA, 19 nt, Artificial Sequence
  Description of Artificial Sequence: Synthetic oligonucleotide
gccagaccacagaccucag

SEQ ID NO: 2935004 - RNA, 19 nt, Artificial Sequence
  Description of Artificial Sequence: Synthetic oligonucleotide
gucugaccucgggaucucu

SEQ ID NO: 2935005 - RNA, 19 nt, Artificial Sequence
  Description of Artificial Sequence: Synthetic oligonucleotide
gcugugcaggcaggcaggu

SEQ ID NO: 2935006 - RNA, 19 nt, Artificial Sequence
  Description of Artificial Sequence: Synthetic oligonucleotide
cgcugcaaguugcuaauuu

SEQ ID NO: 2935007 - RNA, 19 nt, Artificial Sequence
  Description of Artificial Sequence: Synthetic oligonucleotide
ccucagcaacgcugcaagu

SEQ ID NO: 2935008 - RNA, 19 nt, Artificial Sequence
  Description of Artificial Sequence: Synthetic oligonucleotide
cugugcaggcaggcagguu

SEQ ID NO: 2935009 - RNA, 19 nt, Artificial Sequence
  Description of Artificial Sequence: Synthetic oligonucleotide
cgggaucucuuuggucccu

SEQ ID NO: 2935010 - RNA, 19 nt, Artificial Sequence
  Description of Artificial Sequence: Synthetic oligonucleotide
aauagcacaacauaaaggu

SEQ ID NO: 2935011 - RNA, 19 nt, Artificial Sequence
  Description of Artificial Sequence: Synthetic oligonucleotide
aagagugucauucauguuc

SEQ ID NO: 2935012 - RNA, 19 nt, Artificial Sequence
  Description of Artificial Sequence: Synthetic oligonucleotide
uuacacuuccuuaagaugg

SEQ ID NO: 2935013 - RNA, 19 nt, Artificial Sequence
  Description of Artificial Sequence: Synthetic oligonucleotide
aaggauaggauauuguagg

SEQ ID NO: 2935014 - RNA, 19 nt, Artificial Sequence
  Description of Artificial Sequence: Synthetic oligonucleotide
gaaaugaagaaucucagag

SEQ ID NO: 2935015 - RNA, 19 nt, Artificial Sequence
  Description of Artificial Sequence: Synthetic oligonucleotide
aaacaagaaucucucaggc

SEQ ID NO: 2935016 - RNA, 19 nt, Artificial Sequence
  Description of Artificial Sequence: Synthetic oligonucleotide
aaaacuaaaucccaaacaa

SEQ ID NO: 2935017 - RNA, 19 nt, Artificial Sequence
  Description of Artificial Sequence: Synthetic oligonucleotide
uuuacuguaaacacggccc

SEQ ID NO: 2935018 - RNA, 19 nt, Artificial Sequence
  Description of Artificial Sequence: Synthetic oligonucleotide
gaaaauaaaugucagucgc

SEQ ID NO: 2935019 - RNA, 19 nt, Artificial Sequence
  Description of Artificial Sequence: Synthetic oligonucleotide
uagcacaacauaaaggugg

SEQ ID NO: 2935020 - RNA, 19 nt, Artificial Sequence
  Description of Artificial Sequence: Synthetic oligonucleotide
auugcuuccgguuuuaagg

SEQ ID NO: 2935021 - RNA, 19 nt, Artificial Sequence
  Description of Artificial Sequence: Synthetic oligonucleotide
aaugaagaaucucagagau

SEQ ID NO: 2935022 - RNA, 19 nt, Artificial Sequence
  Description of Artificial Sequence: Synthetic oligonucleotide
ugaaaauaaaugucagucg

SEQ ID NO: 2935023 - RNA, 19 nt, Artificial Sequence
  Description of Artificial Sequence: Synthetic oligonucleotide
cuagcuagaacauucaaag

SEQ ID NO: 2935024 - RNA, 19 nt, Artificial Sequence
  Description of Artificial Sequence: Synthetic oligonucleotide
uauacuuacguacaugaug

SEQ ID NO: 2935025 - RNA, 19 nt, Artificial Sequence
  Description of Artificial Sequence: Synthetic oligonucleotide
acaggaaguucauuuaucc

SEQ ID NO: 2935026 - RNA, 19 nt, Artificial Sequence
  Description of Artificial Sequence: Synthetic oligonucleotide
aucucagagauuuaaagag

SEQ ID NO: 2935027 - RNA, 19 nt, Artificial Sequence
  Description of Artificial Sequence: Synthetic oligonucleotide
aaucucagagauuuaaaga

SEQ ID NO: 2935028 - RNA, 19 nt, Artificial Sequence
  Description of Artificial Sequence: Synthetic oligonucleotide
uaaggauaggauauuguag

SEQ ID NO: 2935029 - RNA, 19 nt, Artificial Sequence
  Description of Artificial Sequence: Synthetic oligonucleotide
uuugaaaacccugaaauga

SEQ ID NO: 2935030 - RNA, 19 nt, Artificial Sequence
  Description of Artificial Sequence: Synthetic oligonucleotide
agcuagaacauucaaagug

SEQ ID NO: 2935031 - RNA, 19 nt, Artificial Sequence
  Description of Artificial Sequence: Synthetic oligonucleotide
agaacauucaaagugcaac

SEQ ID NO: 2935032 - RNA, 19 nt, Artificial Sequence
  Description of Artificial Sequence: Synthetic oligonucleotide
uuuuacuguaaacacggcc

SEQ ID NO: 2935033 - RNA, 19 nt, Artificial Sequence
  Description of Artificial Sequence: Synthetic oligonucleotide
uaaaucccaaacaagaauc

SEQ ID NO: 2935034 - RNA, 19 nt, Artificial Sequence
  Description of Artificial Sequence: Synthetic oligonucleotide
gaaucucagagauuuaaag

SEQ ID NO: 2935035 - RNA, 19 nt, Artificial Sequence
  Description of Artificial Sequence: Synthetic oligonucleotide
aacaacccuagcuagaaca

SEQ ID NO: 2935036 - RNA, 19 nt, Artificial Sequence
  Description of Artificial Sequence: Synthetic oligonucleotide
ucaaagugcaacuagcaga

SEQ ID NO: 2935037 - RNA, 19 nt, Artificial Sequence
  Description of Artificial Sequence: Synthetic oligonucleotide
aaguucauuuauccauucc

SEQ ID NO: 2935038 - RNA, 19 nt, Artificial Sequence
  Description of Artificial Sequence: Synthetic oligonucleotide
aggagcuauacuuacguac

SEQ ID NO: 2935039 - RNA, 19 nt, Artificial Sequence
  Description of Artificial Sequence: Synthetic oligonucleotide
uuuauccauuccaagagug

SEQ ID NO: 2935040 - RNA, 19 nt, Artificial Sequence
  Description of Artificial Sequence: Synthetic oligonucleotide
aaugucagucgcuuugagg

SEQ ID NO: 2935041 - RNA, 19 nt, Artificial Sequence
  Description of Artificial Sequence: Synthetic oligonucleotide
cuuacguacaugauguuag

SEQ ID NO: 2935042 - RNA, 19 nt, Artificial Sequence
  Description of Artificial Sequence: Synthetic oligonucleotide
acugcuuacguuugaaaac

SEQ ID NO: 2935043 - RNA, 19 nt, Artificial Sequence
  Description of Artificial Sequence: Synthetic oligonucleotide
aaaugaagaaucucagaga

SEQ ID NO: 2935044 - RNA, 19 nt, Artificial Sequence
  Description of Artificial Sequence: Synthetic oligonucleotide
uguuagagaaucuggcagg

SEQ ID NO: 2935045 - RNA, 19 nt, Artificial Sequence
  Description of Artificial Sequence: Synthetic oligonucleotide
aacccugaaaugaagaauc

SEQ ID NO: 2935046 - RNA, 19 nt, Artificial Sequence
  Description of Artificial Sequence: Synthetic oligonucleotide
ucauuuauccauuccaaga

SEQ ID NO: 2935047 - RNA, 19 nt, Artificial Sequence
  Description of Artificial Sequence: Synthetic oligonucleotide
uuaaagaggaggaacuaga

SEQ ID NO: 2935048 - RNA, 19 nt, Artificial Sequence
  Description of Artificial Sequence: Synthetic oligonucleotide
aacuaaaucccaaacaaga

SEQ ID NO: 2935049 - RNA, 19 nt, Artificial Sequence
  Description of Artificial Sequence: Synthetic oligonucleotide
aaagaggaggaacuagaag

SEQ ID NO: 2935050 - RNA, 19 nt, Artificial Sequence
  Description of Artificial Sequence: Synthetic oligonucleotide
ucucagagauuuaaagagg

SEQ ID NO: 2935051 - RNA, 19 nt, Artificial Sequence
  Description of Artificial Sequence: Synthetic oligonucleotide
ucucucaggcaucagagag

SEQ ID NO: 2935052 - RNA, 19 nt, Artificial Sequence
  Description of Artificial Sequence: Synthetic oligonucleotide
aaaugaaaauaaaugucag

SEQ ID NO: 2935053 - RNA, 19 nt, Artificial Sequence
  Description of Artificial Sequence: Synthetic oligonucleotide
agauuuaaagaggaggaac

SEQ ID NO: 2935054 - RNA, 19 nt, Artificial Sequence
  Description of Artificial Sequence: Synthetic oligonucleotide
ugauguuagagaaucuggc

SEQ ID NO: 2935055 - RNA, 19 nt, Artificial Sequence
  Description of Artificial Sequence: Synthetic oligonucleotide
gaauagcacaacauaaagg

SEQ ID NO: 2935056 - RNA, 19 nt, Artificial Sequence
  Description of Artificial Sequence: Synthetic oligonucleotide
aaacaaaguaaaaugaaaa

SEQ ID NO: 2935057 - RNA, 19 nt, Artificial Sequence
  Description of Artificial Sequence: Synthetic oligonucleotide
caaacaagaaucucucagg

SEQ ID NO: 2935058 - RNA, 19 nt, Artificial Sequence
  Description of Artificial Sequence: Synthetic oligonucleotide
aacuagcagacuuguggcc

SEQ ID NO: 2935059 - RNA, 19 nt, Artificial Sequence
  Description of Artificial Sequence: Synthetic oligonucleotide
uagagaaucuggcagggcc

SEQ ID NO: 2935060 - RNA, 19 nt, Artificial Sequence
  Description of Artificial Sequence: Synthetic oligonucleotide
auaaaugucagucgcuuug

SEQ ID NO: 2935061 - RNA, 19 nt, Artificial Sequence
  Description of Artificial Sequence: Synthetic oligonucleotide
auguuagagaaucuggcag

SEQ ID NO: 2935062 - RNA, 19 nt, Artificial Sequence
  Description of Artificial Sequence: Synthetic oligonucleotide
cauuuauccauuccaagag

SEQ ID NO: 2935063 - RNA, 19 nt, Artificial Sequence
  Description of Artificial Sequence: Synthetic oligonucleotide
augucagucgcuuugagga

SEQ ID NO: 2935064 - RNA, 19 nt, Artificial Sequence
  Description of Artificial Sequence: Synthetic oligonucleotide
aguucauuuauccauucca

SEQ ID NO: 2935065 - RNA, 19 nt, Artificial Sequence
  Description of Artificial Sequence: Synthetic oligonucleotide
ugaagaaucucagagauuu

SEQ ID NO: 2935066 - RNA, 19 nt, Artificial Sequence
  Description of Artificial Sequence: Synthetic oligonucleotide
acuuccuuaagauggacug

SEQ ID NO: 2935067 - RNA, 19 nt, Artificial Sequence
  Description of Artificial Sequence: Synthetic oligonucleotide
uucaaagugcaacuagcag

SEQ ID NO: 2935068 - RNA, 19 nt, Artificial Sequence
  Description of Artificial Sequence: Synthetic oligonucleotide
acaagaaucucucaggcau

SEQ ID NO: 2935069 - RNA, 19 nt, Artificial Sequence
  Description of Artificial Sequence: Synthetic oligonucleotide
uuuaaggauaggauauugu

SEQ ID NO: 2935070 - RNA, 19 nt, Artificial Sequence
  Description of Artificial Sequence: Synthetic oligonucleotide
uuuaaagaggaggaacuag

SEQ ID NO: 2935071 - RNA, 19 nt, Artificial Sequence
  Description of Artificial Sequence: Synthetic oligonucleotide
auucauguucauugcuucc

SEQ ID NO: 2935072 - RNA, 19 nt, Artificial Sequence
  Description of Artificial Sequence: Synthetic oligonucleotide
aaaacaaaguaaaaugaaa

SEQ ID NO: 2935073 - RNA, 19 nt, Artificial Sequence
  Description of Artificial Sequence: Synthetic oligonucleotide
uuaaggauaggauauugua

SEQ ID NO: 2935074 - RNA, 19 nt, Artificial Sequence
  Description of Artificial Sequence: Synthetic oligonucleotide
cagagauuuaaagaggagg

SEQ ID NO: 2935075 - RNA, 19 nt, Artificial Sequence
  Description of Artificial Sequence: Synthetic oligonucleotide
aaguaaaaugaaaauaaau

SEQ ID NO: 2935076 - RNA, 19 nt, Artificial Sequence
  Description of Artificial Sequence: Synthetic oligonucleotide
cauucaaagugcaacuagc

SEQ ID NO: 2935077 - RNA, 19 nt, Artificial Sequence
  Description of Artificial Sequence: Synthetic oligonucleotide
aucagagagugucaagugg

SEQ ID NO: 2935078 - RNA, 19 nt, Artificial Sequence
  Description of Artificial Sequence: Synthetic oligonucleotide
uucauuuauccauuccaag

SEQ ID NO: 2935079 - RNA, 19 nt, Artificial Sequence
  Description of Artificial Sequence: Synthetic oligonucleotide
aaguggaucaggaauagca

SEQ ID NO: 2935080 - RNA, 19 nt, Artificial Sequence
  Description of Artificial Sequence: Synthetic oligonucleotide
ucagagagugucaagugga

SEQ ID NO: 2935081 - RNA, 19 nt, Artificial Sequence
  Description of Artificial Sequence: Synthetic oligonucleotide
ugaaaacccugaaaugaag

SEQ ID NO: 2935082 - RNA, 19 nt, Artificial Sequence
  Description of Artificial Sequence: Synthetic oligonucleotide
caaagugcaacuagcagac

SEQ ID NO: 2935083 - RNA, 19 nt, Artificial Sequence
  Description of Artificial Sequence: Synthetic oligonucleotide
aaaacccugaaaugaagaa

SEQ ID NO: 2935084 - RNA, 19 nt, Artificial Sequence
  Description of Artificial Sequence: Synthetic oligonucleotide
gauaggauauuguagggaa

SEQ ID NO: 2935085 - RNA, 19 nt, Artificial Sequence
  Description of Artificial Sequence: Synthetic oligonucleotide
uuaagauggacugcuuacg

SEQ ID NO: 2935086 - RNA, 19 nt, Artificial Sequence
  Description of Artificial Sequence: Synthetic oligonucleotide
gagagugucaaguggauca

SEQ ID NO: 2935087 - RNA, 19 nt, Artificial Sequence
  Description of Artificial Sequence: Synthetic oligonucleotide
ugaggagcuauacuuacgu

SEQ ID NO: 2935088 - RNA, 19 nt, Artificial Sequence
  Description of Artificial Sequence: Synthetic oligonucleotide
uuacguuugaaaacccuga

SEQ ID NO: 2935089 - RNA, 19 nt, Artificial Sequence
  Description of Artificial Sequence: Synthetic oligonucleotide
acauucaaagugcaacuag

SEQ ID NO: 2935090 - RNA, 19 nt, Artificial Sequence
  Description of Artificial Sequence: Synthetic oligonucleotide
cuuaagauggacugcuuac

SEQ ID NO: 2935091 - RNA, 19 nt, Artificial Sequence
  Description of Artificial Sequence: Synthetic oligonucleotide
gcaacuagcagacuugugg

SEQ ID NO: 2935092 - RNA, 19 nt, Artificial Sequence
  Description of Artificial Sequence: Synthetic oligonucleotide
guaaacacggcccugaaaa

SEQ ID NO: 2935093 - RNA, 19 nt, Artificial Sequence
  Description of Artificial Sequence: Synthetic oligonucleotide
aaucucucaggcaucagag

SEQ ID NO: 2935094 - RNA, 19 nt, Artificial Sequence
  Description of Artificial Sequence: Synthetic oligonucleotide
uacaugauguuagagaauc

SEQ ID NO: 2935095 - RNA, 19 nt, Artificial Sequence
  Description of Artificial Sequence: Synthetic oligonucleotide
cugaaaugaagaaucucag

SEQ ID NO: 2935096 - RNA, 19 nt, Artificial Sequence
  Description of Artificial Sequence: Synthetic oligonucleotide
cuuacguuugaaaacccug

SEQ ID NO: 2935097 - RNA, 19 nt, Artificial Sequence
  Description of Artificial Sequence: Synthetic oligonucleotide
aaacuaaaucccaaacaag

SEQ ID NO: 2935098 - RNA, 19 nt, Artificial Sequence
  Description of Artificial Sequence: Synthetic oligonucleotide
aggaaguucauuuauccau

SEQ ID NO: 2935099 - RNA, 19 nt, Artificial Sequence
  Description of Artificial Sequence: Synthetic oligonucleotide
uuuuaaggauaggauauug

SEQ ID NO: 2935100 - RNA, 19 nt, Artificial Sequence
  Description of Artificial Sequence: Synthetic oligonucleotide
aacccuagcuagaacauuc

SEQ ID NO: 2935101 - RNA, 19 nt, Artificial Sequence
  Description of Artificial Sequence: Synthetic oligonucleotide
uucauguucauugcuuccg

SEQ ID NO: 2935102 - RNA, 19 nt, Artificial Sequence
  Description of Artificial Sequence: Synthetic oligonucleotide
ucaggaauagcacaacaua

SEQ ID NO: 2935103 - RNA, 19 nt, Artificial Sequence
  Description of Artificial Sequence: Synthetic oligonucleotide
ugaaaugaagaaucucaga

SEQ ID NO: 2935104 - RNA, 19 nt, Artificial Sequence
  Description of Artificial Sequence: Synthetic oligonucleotide
auacuuacguacaugaugu

SEQ ID NO: 2935105 - RNA, 19 nt, Artificial Sequence
  Description of Artificial Sequence: Synthetic oligonucleotide
ucauguucauugcuuccgg

SEQ ID NO: 2935106 - RNA, 19 nt, Artificial Sequence
  Description of Artificial Sequence: Synthetic oligonucleotide
aguuacacuuccuuaagau

SEQ ID NO: 2935107 - RNA, 19 nt, Artificial Sequence
  Description of Artificial Sequence: Synthetic oligonucleotide
acaaaguaaaaugaaaaua

SEQ ID NO: 2935108 - RNA, 19 nt, Artificial Sequence
  Description of Artificial Sequence: Synthetic oligonucleotide
uaaagguggggaaaguaaa

SEQ ID NO: 2935109 - RNA, 19 nt, Artificial Sequence
  Description of Artificial Sequence: Synthetic oligonucleotide
ucagagauuuaaagaggag

SEQ ID NO: 2935110 - RNA, 19 nt, Artificial Sequence
  Description of Artificial Sequence: Synthetic oligonucleotide
guuugaaaacccugaaaug

SEQ ID NO: 2935111 - RNA, 19 nt, Artificial Sequence
  Description of Artificial Sequence: Synthetic oligonucleotide
aacaagaaucucucaggca

SEQ ID NO: 2935112 - RNA, 19 nt, Artificial Sequence
  Description of Artificial Sequence: Synthetic oligonucleotide
uuugaggagcuauacuuac

SEQ ID NO: 2935113 - RNA, 19 nt, Artificial Sequence
  Description of Artificial Sequence: Synthetic oligonucleotide
ggaauagcacaacauaaag

SEQ ID NO: 2935114 - RNA, 19 nt, Artificial Sequence
  Description of Artificial Sequence: Synthetic oligonucleotide
gauguuagagaaucuggca

SEQ ID NO: 2935115 - RNA, 19 nt, Artificial Sequence
  Description of Artificial Sequence: Synthetic oligonucleotide
aaucccaaacaagaaucuc

SEQ ID NO: 2935116 - RNA, 19 nt, Artificial Sequence
  Description of Artificial Sequence: Synthetic oligonucleotide
agagauuuaaagaggagga

SEQ ID NO: 2935117 - RNA, 19 nt, Artificial Sequence
  Description of Artificial Sequence: Synthetic oligonucleotide
gauauuguagggaacuuga

SEQ ID NO: 2935118 - RNA, 19 nt, Artificial Sequence
  Description of Artificial Sequence: Synthetic oligonucleotide
cauuccaagagugucauuc

SEQ ID NO: 2935119 - RNA, 19 nt, Artificial Sequence
  Description of Artificial Sequence: Synthetic oligonucleotide
aggauaggauauuguaggg

SEQ ID NO: 2935120 - RNA, 19 nt, Artificial Sequence
  Description of Artificial Sequence: Synthetic oligonucleotide
guuacacuuccuuaagaug

SEQ ID NO: 2935121 - RNA, 19 nt, Artificial Sequence
  Description of Artificial Sequence: Synthetic oligonucleotide
ggaacuagaagacugccug

SEQ ID NO: 2935122 - RNA, 19 nt, Artificial Sequence
  Description of Artificial Sequence: Synthetic oligonucleotide
caacuagcagacuuguggc

SEQ ID NO: 2935123 - RNA, 19 nt, Artificial Sequence
  Description of Artificial Sequence: Synthetic oligonucleotide
aaauaaaugucagucgcuu

SEQ ID NO: 2935124 - RNA, 19 nt, Artificial Sequence
  Description of Artificial Sequence: Synthetic oligonucleotide
aaaauaaaugucagucgcu

SEQ ID NO: 2935125 - RNA, 19 nt, Artificial Sequence
  Description of Artificial Sequence: Synthetic oligonucleotide
augauguuagagaaucugg

SEQ ID NO: 2935126 - RNA, 19 nt, Artificial Sequence
  Description of Artificial Sequence: Synthetic oligonucleotide
uugaggagcuauacuuacg

SEQ ID NO: 2935127 - RNA, 19 nt, Artificial Sequence
  Description of Artificial Sequence: Synthetic oligonucleotide
aagugcaacuagcagacuu

SEQ ID NO: 2935128 - RNA, 19 nt, Artificial Sequence
  Description of Artificial Sequence: Synthetic oligonucleotide
acguacaugauguuagaga

SEQ ID NO: 2935129 - RNA, 19 nt, Artificial Sequence
  Description of Artificial Sequence: Synthetic oligonucleotide
aagaaucucagagauuuaa

SEQ ID NO: 2935130 - RNA, 19 nt, Artificial Sequence
  Description of Artificial Sequence: Synthetic oligonucleotide
uccaagagugucauucaug

SEQ ID NO: 2935131 - RNA, 19 nt, Artificial Sequence
  Description of Artificial Sequence: Synthetic oligonucleotide
uccgguuuuaaggauagga

SEQ ID NO: 2935132 - RNA, 19 nt, Artificial Sequence
  Description of Artificial Sequence: Synthetic oligonucleotide
aaaugucagucgcuuugag

SEQ ID NO: 2935133 - RNA, 19 nt, Artificial Sequence
  Description of Artificial Sequence: Synthetic oligonucleotide
uggaucaggaauagcacaa

SEQ ID NO: 2935134 - RNA, 19 nt, Artificial Sequence
  Description of Artificial Sequence: Synthetic oligonucleotide
uaggauauuguagggaacu

SEQ ID NO: 2935135 - RNA, 19 nt, Artificial Sequence
  Description of Artificial Sequence: Synthetic oligonucleotide
ugucauucauguucauugc

SEQ ID NO: 2935136 - RNA, 19 nt, Artificial Sequence
  Description of Artificial Sequence: Synthetic oligonucleotide
uuauccauuccaagagugu

SEQ ID NO: 2935137 - RNA, 19 nt, Artificial Sequence
  Description of Artificial Sequence: Synthetic oligonucleotide
auuuauccauuccaagagu

SEQ ID NO: 2935138 - RNA, 19 nt, Artificial Sequence
  Description of Artificial Sequence: Synthetic oligonucleotide
caugauguuagagaaucug

SEQ ID NO: 2935139 - RNA, 19 nt, Artificial Sequence
  Description of Artificial Sequence: Synthetic oligonucleotide
uuacuguaaacacggcccu

SEQ ID NO: 2935140 - RNA, 19 nt, Artificial Sequence
  Description of Artificial Sequence: Synthetic oligonucleotide
cugcuuacguuugaaaacc

SEQ ID NO: 2935141 - RNA, 19 nt, Artificial Sequence
  Description of Artificial Sequence: Synthetic oligonucleotide
gacugcuuacguuugaaaa

SEQ ID NO: 2935142 - RNA, 19 nt, Artificial Sequence
  Description of Artificial Sequence: Synthetic oligonucleotide
aguggaucaggaauagcac

SEQ ID NO: 2935143 - RNA, 19 nt, Artificial Sequence
  Description of Artificial Sequence: Synthetic oligonucleotide
cucagagauuuaaagagga

SEQ ID NO: 2935144 - RNA, 19 nt, Artificial Sequence
  Description of Artificial Sequence: Synthetic oligonucleotide
ucccaaacaagaaucucuc

SEQ ID NO: 2935145 - RNA, 19 nt, Artificial Sequence
  Description of Artificial Sequence: Synthetic oligonucleotide
ucucaggcaucagagagug

SEQ ID NO: 2935146 - RNA, 19 nt, Artificial Sequence
  Description of Artificial Sequence: Synthetic oligonucleotide
acaacauaaagguggggaa

SEQ ID NO: 2935147 - RNA, 19 nt, Artificial Sequence
  Description of Artificial Sequence: Synthetic oligonucleotide
uguucauugcuuccgguuu

SEQ ID NO: 2935148 - RNA, 19 nt, Artificial Sequence
  Description of Artificial Sequence: Synthetic oligonucleotide
aacuagaagacugccugcu

SEQ ID NO: 2935149 - RNA, 19 nt, Artificial Sequence
  Description of Artificial Sequence: Synthetic oligonucleotide
agauggacugcuuacguuu

SEQ ID NO: 2935150 - RNA, 19 nt, Artificial Sequence
  Description of Artificial Sequence: Synthetic oligonucleotide
guuagagaaucuggcaggg

SEQ ID NO: 2935151 - RNA, 19 nt, Artificial Sequence
  Description of Artificial Sequence: Synthetic oligonucleotide
gaaaacccugaaaugaaga

SEQ ID NO: 2935152 - RNA, 19 nt, Artificial Sequence
  Description of Artificial Sequence: Synthetic oligonucleotide
aaacccugaaaugaagaau

SEQ ID NO: 2935153 - RNA, 19 nt, Artificial Sequence
  Description of Artificial Sequence: Synthetic oligonucleotide
cuuccgguuuuaaggauag

SEQ ID NO: 2935154 - RNA, 19 nt, Artificial Sequence
  Description of Artificial Sequence: Synthetic oligonucleotide
gauuuaaagaggaggaacu

SEQ ID NO: 2935155 - RNA, 19 nt, Artificial Sequence
  Description of Artificial Sequence: Synthetic oligonucleotide
uugcuuccgguuuuaagga

SEQ ID NO: 2935156 - RNA, 19 nt, Artificial Sequence
  Description of Artificial Sequence: Synthetic oligonucleotide
gaaucucucaggcaucaga

SEQ ID NO: 2935157 - RNA, 19 nt, Artificial Sequence
  Description of Artificial Sequence: Synthetic oligonucleotide
gcuauacuuacguacauga

SEQ ID NO: 2935158 - RNA, 19 nt, Artificial Sequence
  Description of Artificial Sequence: Synthetic oligonucleotide
gaacuagaagacugccugc

SEQ ID NO: 2935159 - RNA, 19 nt, Artificial Sequence
  Description of Artificial Sequence: Synthetic oligonucleotide
ucaaguggaucaggaauag

SEQ ID NO: 2935160 - RNA, 19 nt, Artificial Sequence
  Description of Artificial Sequence: Synthetic oligonucleotide
gaucaggaauagcacaaca

SEQ ID NO: 2935161 - RNA, 19 nt, Artificial Sequence
  Description of Artificial Sequence: Synthetic oligonucleotide
ccaaacaagaaucucucag

SEQ ID NO: 2935162 - RNA, 19 nt, Artificial Sequence
  Description of Artificial Sequence: Synthetic oligonucleotide
uuccuuaagauggacugcu

SEQ ID NO: 2935163 - RNA, 19 nt, Artificial Sequence
  Description of Artificial Sequence: Synthetic oligonucleotide
cagaagcaggccaaacagg

SEQ ID NO: 2935164 - RNA, 19 nt, Artificial Sequence
  Description of Artificial Sequence: Synthetic oligonucleotide
uacguacaugauguuagag

SEQ ID NO: 2935165 - RNA, 19 nt, Artificial Sequence
  Description of Artificial Sequence: Synthetic oligonucleotide
uauccauuccaagaguguc

SEQ ID NO: 2935166 - RNA, 19 nt, Artificial Sequence
  Description of Artificial Sequence: Synthetic oligonucleotide
aagaaucucucaggcauca

SEQ ID NO: 2935167 - RNA, 19 nt, Artificial Sequence
  Description of Artificial Sequence: Synthetic oligonucleotide
uacacuuccuuaagaugga

SEQ ID NO: 2935168 - RNA, 19 nt, Artificial Sequence
  Description of Artificial Sequence: Synthetic oligonucleotide
aggaggaacuagaagacug

SEQ ID NO: 2935169 - RNA, 19 nt, Artificial Sequence
  Description of Artificial Sequence: Synthetic oligonucleotide
gcuagaacauucaaagugc

SEQ ID NO: 2935170 - RNA, 19 nt, Artificial Sequence
  Description of Artificial Sequence: Synthetic oligonucleotide
uacguuugaaaacccugaa

SEQ ID NO: 2935171 - RNA, 19 nt, Artificial Sequence
  Description of Artificial Sequence: Synthetic oligonucleotide
gaaguucauuuauccauuc

SEQ ID NO: 2935172 - RNA, 19 nt, Artificial Sequence
  Description of Artificial Sequence: Synthetic oligonucleotide
gaacauucaaagugcaacu

SEQ ID NO: 2935173 - RNA, 19 nt, Artificial Sequence
  Description of Artificial Sequence: Synthetic oligonucleotide
agaagcaggccaaacagga

SEQ ID NO: 2935174 - RNA, 19 nt, Artificial Sequence
  Description of Artificial Sequence: Synthetic oligonucleotide
cauugcuuccgguuuuaag

SEQ ID NO: 2935175 - RNA, 19 nt, Artificial Sequence
  Description of Artificial Sequence: Synthetic oligonucleotide
ccugaaaugaagaaucuca

SEQ ID NO: 2935176 - RNA, 19 nt, Artificial Sequence
  Description of Artificial Sequence: Synthetic oligonucleotide
ugcuuacguuugaaaaccc

SEQ ID NO: 2935177 - RNA, 19 nt, Artificial Sequence
  Description of Artificial Sequence: Synthetic oligonucleotide
auaggauauuguagggaac

SEQ ID NO: 2935178 - RNA, 19 nt, Artificial Sequence
  Description of Artificial Sequence: Synthetic oligonucleotide
caggaauagcacaacauaa

SEQ ID NO: 2935179 - RNA, 19 nt, Artificial Sequence
  Description of Artificial Sequence: Synthetic oligonucleotide
uaaaugucagucgcuuuga

SEQ ID NO: 2935180 - RNA, 19 nt, Artificial Sequence
  Description of Artificial Sequence: Synthetic oligonucleotide
uagaacauucaaagugcaa

SEQ ID NO: 2935181 - RNA, 19 nt, Artificial Sequence
  Description of Artificial Sequence: Synthetic oligonucleotide
cacaacauaaaggugggga

SEQ ID NO: 2935182 - RNA, 19 nt, Artificial Sequence
  Description of Artificial Sequence: Synthetic oligonucleotide
agcacaacauaaagguggg

SEQ ID NO: 2935183 - RNA, 19 nt, Artificial Sequence
  Description of Artificial Sequence: Synthetic oligonucleotide
auuccaagagugucauuca

SEQ ID NO: 2935184 - RNA, 19 nt, Artificial Sequence
  Description of Artificial Sequence: Synthetic oligonucleotide
auucaaagugcaacuagca

SEQ ID NO: 2935185 - RNA, 19 nt, Artificial Sequence
  Description of Artificial Sequence: Synthetic oligonucleotide
uuacguacaugauguuaga

SEQ ID NO: 2935186 - RNA, 19 nt, Artificial Sequence
  Description of Artificial Sequence: Synthetic oligonucleotide
aagauggacugcuuacguu

SEQ ID NO: 2935187 - RNA, 19 nt, Artificial Sequence
  Description of Artificial Sequence: Synthetic oligonucleotide
aucccaaacaagaaucucu

SEQ ID NO: 2935188 - RNA, 19 nt, Artificial Sequence
  Description of Artificial Sequence: Synthetic oligonucleotide
auaaagguggggaaaguaa

SEQ ID NO: 2935189 - RNA, 19 nt, Artificial Sequence
  Description of Artificial Sequence: Synthetic oligonucleotide
uguaaacacggcccugaaa

SEQ ID NO: 2935190 - RNA, 19 nt, Artificial Sequence
  Description of Artificial Sequence: Synthetic oligonucleotide
aacauucaaagugcaacua

SEQ ID NO: 2935191 - RNA, 19 nt, Artificial Sequence
  Description of Artificial Sequence: Synthetic oligonucleotide
ugucagucgcuuugaggag

SEQ ID NO: 2935192 - RNA, 19 nt, Artificial Sequence
  Description of Artificial Sequence: Synthetic oligonucleotide
uagcuagaacauucaaagu

SEQ ID NO: 2935193 - RNA, 19 nt, Artificial Sequence
  Description of Artificial Sequence: Synthetic oligonucleotide
cuagaacauucaaagugca

SEQ ID NO: 2935194 - RNA, 19 nt, Artificial Sequence
  Description of Artificial Sequence: Synthetic oligonucleotide
gaggaacuagaagacugcc

SEQ ID NO: 2935195 - RNA, 19 nt, Artificial Sequence
  Description of Artificial Sequence: Synthetic oligonucleotide
aggccaaacaggaaguuca

SEQ ID NO: 2935196 - RNA, 19 nt, Artificial Sequence
  Description of Artificial Sequence: Synthetic oligonucleotide
agagugucauucauguuca

SEQ ID NO: 2935197 - RNA, 19 nt, Artificial Sequence
  Description of Artificial Sequence: Synthetic oligonucleotide
guggaucaggaauagcaca

SEQ ID NO: 2935198 - RNA, 19 nt, Artificial Sequence
  Description of Artificial Sequence: Synthetic oligonucleotide
agagagugucaaguggauc

SEQ ID NO: 2935199 - RNA, 19 nt, Artificial Sequence
  Description of Artificial Sequence: Synthetic oligonucleotide
acuaaaucccaaacaagaa

SEQ ID NO: 2935200 - RNA, 19 nt, Artificial Sequence
  Description of Artificial Sequence: Synthetic oligonucleotide
acuagcagacuuguggcca

SEQ ID NO: 2935201 - RNA, 19 nt, Artificial Sequence
  Description of Artificial Sequence: Synthetic oligonucleotide
ccagaagcaggccaaacag

SEQ ID NO: 2935202 - RNA, 19 nt, Artificial Sequence
  Description of Artificial Sequence: Synthetic oligonucleotide
agugcaacuagcagacuug

SEQ ID NO: 2935203 - RNA, 19 nt, Artificial Sequence
  Description of Artificial Sequence: Synthetic oligonucleotide
aaagguggggaaaguaaaa

SEQ ID NO: 2935204 - RNA, 19 nt, Artificial Sequence
  Description of Artificial Sequence: Synthetic oligonucleotide
ucagucgcuuugaggagcu

SEQ ID NO: 2935205 - RNA, 19 nt, Artificial Sequence
  Description of Artificial Sequence: Synthetic oligonucleotide
auagcacaacauaaaggug

SEQ ID NO: 2935206 - RNA, 19 nt, Artificial Sequence
  Description of Artificial Sequence: Synthetic oligonucleotide
uuccaagagugucauucau

SEQ ID NO: 2935207 - RNA, 19 nt, Artificial Sequence
  Description of Artificial Sequence: Synthetic oligonucleotide
agugucaaguggaucagga

SEQ ID NO: 2935208 - RNA, 19 nt, Artificial Sequence
  Description of Artificial Sequence: Synthetic oligonucleotide
guggccauggcaguuacac

SEQ ID NO: 2935209 - RNA, 19 nt, Artificial Sequence
  Description of Artificial Sequence: Synthetic oligonucleotide
acguuugaaaacccugaaa

SEQ ID NO: 2935210 - RNA, 19 nt, Artificial Sequence
  Description of Artificial Sequence: Synthetic oligonucleotide
aaucuggcagggcccagaa

SEQ ID NO: 2935211 - RNA, 19 nt, Artificial Sequence
  Description of Artificial Sequence: Synthetic oligonucleotide
auggcaguuacacuuccuu

SEQ ID NO: 2935212 - RNA, 19 nt, Artificial Sequence
  Description of Artificial Sequence: Synthetic oligonucleotide
ugcaacuagcagacuugug

SEQ ID NO: 2935213 - RNA, 19 nt, Artificial Sequence
  Description of Artificial Sequence: Synthetic oligonucleotide
acuguaaacacggcccuga

SEQ ID NO: 2935214 - RNA, 19 nt, Artificial Sequence
  Description of Artificial Sequence: Synthetic oligonucleotide
gauggacugcuuacguuug

SEQ ID NO: 2935215 - RNA, 19 nt, Artificial Sequence
  Description of Artificial Sequence: Synthetic oligonucleotide
cuuccuuaagauggacugc

SEQ ID NO: 2935216 - RNA, 19 nt, Artificial Sequence
  Description of Artificial Sequence: Synthetic oligonucleotide
auguucauugcuuccgguu

SEQ ID NO: 2935217 - RNA, 19 nt, Artificial Sequence
  Description of Artificial Sequence: Synthetic oligonucleotide
agcuauacuuacguacaug

SEQ ID NO: 2935218 - RNA, 19 nt, Artificial Sequence
  Description of Artificial Sequence: Synthetic oligonucleotide
aggaauagcacaacauaaa

SEQ ID NO: 2935219 - RNA, 19 nt, Artificial Sequence
  Description of Artificial Sequence: Synthetic oligonucleotide
auuuaaagaggaggaacua

SEQ ID NO: 2935220 - RNA, 19 nt, Artificial Sequence
  Description of Artificial Sequence: Synthetic oligonucleotide
caagaaucucucaggcauc

SEQ ID NO: 2935221 - RNA, 19 nt, Artificial Sequence
  Description of Artificial Sequence: Synthetic oligonucleotide
aucaggaauagcacaacau

SEQ ID NO: 2935222 - RNA, 19 nt, Artificial Sequence
  Description of Artificial Sequence: Synthetic oligonucleotide
acuuacguacaugauguua

SEQ ID NO: 2935223 - RNA, 19 nt, Artificial Sequence
  Description of Artificial Sequence: Synthetic oligonucleotide
cuaaaucccaaacaagaau

SEQ ID NO: 2935224 - RNA, 19 nt, Artificial Sequence
  Description of Artificial Sequence: Synthetic oligonucleotide
guucauuuauccauuccaa

SEQ ID NO: 2935225 - RNA, 19 nt, Artificial Sequence
  Description of Artificial Sequence: Synthetic oligonucleotide
uuagagaaucuggcagggc

SEQ ID NO: 2935226 - RNA, 19 nt, Artificial Sequence
  Description of Artificial Sequence: Synthetic oligonucleotide
agagugucaaguggaucag

SEQ ID NO: 2935227 - RNA, 19 nt, Artificial Sequence
  Description of Artificial Sequence: Synthetic oligonucleotide
gagugucaaguggaucagg

SEQ ID NO: 2935228 - RNA, 19 nt, Artificial Sequence
  Description of Artificial Sequence: Synthetic oligonucleotide
caaacaggaaguucauuua

SEQ ID NO: 2935229 - RNA, 19 nt, Artificial Sequence
  Description of Artificial Sequence: Synthetic oligonucleotide
ggauauuguagggaacuug

SEQ ID NO: 2935230 - RNA, 19 nt, Artificial Sequence
  Description of Artificial Sequence: Synthetic oligonucleotide
cuuugaggagcuauacuua

SEQ ID NO: 2935231 - RNA, 19 nt, Artificial Sequence
  Description of Artificial Sequence: Synthetic oligonucleotide
gagauuuaaagaggaggaa

SEQ ID NO: 2935232 - RNA, 19 nt, Artificial Sequence
  Description of Artificial Sequence: Synthetic oligonucleotide
acacuuccuuaagauggac

SEQ ID NO: 2935233 - RNA, 19 nt, Artificial Sequence
  Description of Artificial Sequence: Synthetic oligonucleotide
cagacuuguggccauggca

SEQ ID NO: 2935234 - RNA, 19 nt, Artificial Sequence
  Description of Artificial Sequence: Synthetic oligonucleotide
caggaaguucauuuaucca

SEQ ID NO: 2935235 - RNA, 19 nt, Artificial Sequence
  Description of Artificial Sequence: Synthetic oligonucleotide
gcaguuacacuuccuuaag

SEQ ID NO: 2935236 - RNA, 19 nt, Artificial Sequence
  Description of Artificial Sequence: Synthetic oligonucleotide
uggcaguuacacuuccuua

SEQ ID NO: 2935237 - RNA, 19 nt, Artificial Sequence
  Description of Artificial Sequence: Synthetic oligonucleotide
aucucucaggcaucagaga

SEQ ID NO: 2935238 - RNA, 19 nt, Artificial Sequence
  Description of Artificial Sequence: Synthetic oligonucleotide
ggcaguuacacuuccuuaa

SEQ ID NO: 2935239 - RNA, 19 nt, Artificial Sequence
  Description of Artificial Sequence: Synthetic oligonucleotide
agaaucucagagauuuaaa

SEQ ID NO: 2935240 - RNA, 19 nt, Artificial Sequence
  Description of Artificial Sequence: Synthetic oligonucleotide
agcagacuuguggccaugg

SEQ ID NO: 2935241 - RNA, 19 nt, Artificial Sequence
  Description of Artificial Sequence: Synthetic oligonucleotide
gucagucgcuuugaggagc

SEQ ID NO: 2935242 - RNA, 19 nt, Artificial Sequence
  Description of Artificial Sequence: Synthetic oligonucleotide
ggagcuauacuuacguaca

SEQ ID NO: 2935243 - RNA, 19 nt, Artificial Sequence
  Description of Artificial Sequence: Synthetic oligonucleotide
gguuuuaaggauaggauau

SEQ ID NO: 2935244 - RNA, 19 nt, Artificial Sequence
  Description of Artificial Sequence: Synthetic oligonucleotide
ucgcuuugaggagcuauac

SEQ ID NO: 2935245 - RNA, 19 nt, Artificial Sequence
  Description of Artificial Sequence: Synthetic oligonucleotide
auccauuccaagaguguca

SEQ ID NO: 2935246 - RNA, 19 nt, Artificial Sequence
  Description of Artificial Sequence: Synthetic oligonucleotide
cguacaugauguuagagaa

SEQ ID NO: 2935247 - RNA, 19 nt, Artificial Sequence
  Description of Artificial Sequence: Synthetic oligonucleotide
aggaacuagaagacugccu

SEQ ID NO: 2935248 - RNA, 19 nt, Artificial Sequence
  Description of Artificial Sequence: Synthetic oligonucleotide
uacuguaaacacggcccug

SEQ ID NO: 2935249 - RNA, 19 nt, Artificial Sequence
  Description of Artificial Sequence: Synthetic oligonucleotide
ggaggaacuagaagacugc

SEQ ID NO: 2935250 - RNA, 19 nt, Artificial Sequence
  Description of Artificial Sequence: Synthetic oligonucleotide
acauaaagguggggaaagu

SEQ ID NO: 2935251 - RNA, 19 nt, Artificial Sequence
  Description of Artificial Sequence: Synthetic oligonucleotide
caguuacacuuccuuaaga

SEQ ID NO: 2935252 - RNA, 19 nt, Artificial Sequence
  Description of Artificial Sequence: Synthetic oligonucleotide
gcuuugaggagcuauacuu

SEQ ID NO: 2935253 - RNA, 19 nt, Artificial Sequence
  Description of Artificial Sequence: Synthetic oligonucleotide
gucauucauguucauugcu

SEQ ID NO: 2935254 - RNA, 19 nt, Artificial Sequence
  Description of Artificial Sequence: Synthetic oligonucleotide
caaguggaucaggaauagc

SEQ ID NO: 2935255 - RNA, 19 nt, Artificial Sequence
  Description of Artificial Sequence: Synthetic oligonucleotide
acuagaagacugccugcuu

SEQ ID NO: 2935256 - RNA, 19 nt, Artificial Sequence
  Description of Artificial Sequence: Synthetic oligonucleotide
ugcuuccgguuuuaaggau

SEQ ID NO: 2935257 - RNA, 19 nt, Artificial Sequence
  Description of Artificial Sequence: Synthetic oligonucleotide
aaagugcaacuagcagacu

SEQ ID NO: 2935258 - RNA, 19 nt, Artificial Sequence
  Description of Artificial Sequence: Synthetic oligonucleotide
uggacugcuuacguuugaa

SEQ ID NO: 2935259 - RNA, 19 nt, Artificial Sequence
  Description of Artificial Sequence: Synthetic oligonucleotide
cauaaagguggggaaagua

SEQ ID NO: 2935260 - RNA, 19 nt, Artificial Sequence
  Description of Artificial Sequence: Synthetic oligonucleotide
agucgcuuugaggagcuau

SEQ ID NO: 2935261 - RNA, 19 nt, Artificial Sequence
  Description of Artificial Sequence: Synthetic oligonucleotide
ggauaggauauuguaggga

SEQ ID NO: 2935262 - RNA, 19 nt, Artificial Sequence
  Description of Artificial Sequence: Synthetic oligonucleotide
agcaggccaaacaggaagu

SEQ ID NO: 2935263 - RNA, 19 nt, Artificial Sequence
  Description of Artificial Sequence: Synthetic oligonucleotide
acaacccuagcuagaacau

SEQ ID NO: 2935264 - RNA, 19 nt, Artificial Sequence
  Description of Artificial Sequence: Synthetic oligonucleotide
auggacugcuuacguuuga

SEQ ID NO: 2935265 - RNA, 19 nt, Artificial Sequence
  Description of Artificial Sequence: Synthetic oligonucleotide
uccuuaagauggacugcuu

SEQ ID NO: 2935266 - RNA, 19 nt, Artificial Sequence
  Description of Artificial Sequence: Synthetic oligonucleotide
acaugauguuagagaaucu

SEQ ID NO: 2935267 - RNA, 19 nt, Artificial Sequence
  Description of Artificial Sequence: Synthetic oligonucleotide
caacauaaagguggggaaa

SEQ ID NO: 2935268 - RNA, 19 nt, Artificial Sequence
  Description of Artificial Sequence: Synthetic oligonucleotide
uuccgguuuuaaggauagg

SEQ ID NO: 2935269 - RNA, 19 nt, Artificial Sequence
  Description of Artificial Sequence: Synthetic oligonucleotide
auauuguagggaacuugau

SEQ ID NO: 2935270 - RNA, 19 nt, Artificial Sequence
  Description of Artificial Sequence: Synthetic oligonucleotide
uguggccauggcaguuaca

SEQ ID NO: 2935271 - RNA, 19 nt, Artificial Sequence
  Description of Artificial Sequence: Synthetic oligonucleotide
uggccauggcaguuacacu

SEQ ID NO: 2935272 - RNA, 19 nt, Artificial Sequence
  Description of Artificial Sequence: Synthetic oligonucleotide
ccuagcuagaacauucaaa

SEQ ID NO: 2935273 - RNA, 19 nt, Artificial Sequence
  Description of Artificial Sequence: Synthetic oligonucleotide
caggccaaacaggaaguuc

SEQ ID NO: 2935274 - RNA, 19 nt, Artificial Sequence
  Description of Artificial Sequence: Synthetic oligonucleotide
ccaagagugucauucaugu

SEQ ID NO: 2935275 - RNA, 19 nt, Artificial Sequence
  Description of Artificial Sequence: Synthetic oligonucleotide
gaggagcuauacuuacgua

SEQ ID NO: 2935276 - RNA, 19 nt, Artificial Sequence
  Description of Artificial Sequence: Synthetic oligonucleotide
agaaucucucaggcaucag

SEQ ID NO: 2935277 - RNA, 19 nt, Artificial Sequence
  Description of Artificial Sequence: Synthetic oligonucleotide
gugucaaguggaucaggaa

SEQ ID NO: 2935278 - RNA, 19 nt, Artificial Sequence
  Description of Artificial Sequence: Synthetic oligonucleotide
acccugaaaugaagaaucu

SEQ ID NO: 2935279 - RNA, 19 nt, Artificial Sequence
  Description of Artificial Sequence: Synthetic oligonucleotide
aucuggcagggcccagaag

SEQ ID NO: 2935280 - RNA, 19 nt, Artificial Sequence
  Description of Artificial Sequence: Synthetic oligonucleotide
uggcagggcccagaagcag

SEQ ID NO: 2935281 - RNA, 19 nt, Artificial Sequence
  Description of Artificial Sequence: Synthetic oligonucleotide
uacuuacguacaugauguu

SEQ ID NO: 2935282 - RNA, 19 nt, Artificial Sequence
  Description of Artificial Sequence: Synthetic oligonucleotide
uucauugcuuccgguuuua

SEQ ID NO: 2935283 - RNA, 19 nt, Artificial Sequence
  Description of Artificial Sequence: Synthetic oligonucleotide
gaaucuggcagggcccaga

SEQ ID NO: 2935284 - RNA, 19 nt, Artificial Sequence
  Description of Artificial Sequence: Synthetic oligonucleotide
caggcaucagagaguguca

SEQ ID NO: 2935285 - RNA, 19 nt, Artificial Sequence
  Description of Artificial Sequence: Synthetic oligonucleotide
cguuugaaaacccugaaau

SEQ ID NO: 2935286 - RNA, 19 nt, Artificial Sequence
  Description of Artificial Sequence: Synthetic oligonucleotide
aggauauuguagggaacuu

SEQ ID NO: 2935287 - RNA, 19 nt, Artificial Sequence
  Description of Artificial Sequence: Synthetic oligonucleotide
cuagaagacugccugcuuu

SEQ ID NO: 2935288 - RNA, 19 nt, Artificial Sequence
  Description of Artificial Sequence: Synthetic oligonucleotide
cacuuccuuaagauggacu

SEQ ID NO: 2935289 - RNA, 19 nt, Artificial Sequence
  Description of Artificial Sequence: Synthetic oligonucleotide
gaagcaggccaaacaggaa

SEQ ID NO: 2935290 - RNA, 19 nt, Artificial Sequence
  Description of Artificial Sequence: Synthetic oligonucleotide
cuauacuuacguacaugau

SEQ ID NO: 2935291 - RNA, 19 nt, Artificial Sequence
  Description of Artificial Sequence: Synthetic oligonucleotide
ucauugcuuccgguuuuaa

SEQ ID NO: 2935292 - RNA, 19 nt, Artificial Sequence
  Description of Artificial Sequence: Synthetic oligonucleotide
aggcaucagagagugucaa

SEQ ID NO: 2935293 - RNA, 19 nt, Artificial Sequence
  Description of Artificial Sequence: Synthetic oligonucleotide
ggccauggcaguuacacuu

SEQ ID NO: 2935294 - RNA, 19 nt, Artificial Sequence
  Description of Artificial Sequence: Synthetic oligonucleotide
gagcuauacuuacguacau

SEQ ID NO: 2935295 - RNA, 19 nt, Artificial Sequence
  Description of Artificial Sequence: Synthetic oligonucleotide
acccuagcuagaacauuca

SEQ ID NO: 2935296 - RNA, 19 nt, Artificial Sequence
  Description of Artificial Sequence: Synthetic oligonucleotide
augaagaaucucagagauu

SEQ ID NO: 2935297 - RNA, 19 nt, Artificial Sequence
  Description of Artificial Sequence: Synthetic oligonucleotide
ggaucaggaauagcacaac

SEQ ID NO: 2935298 - RNA, 19 nt, Artificial Sequence
  Description of Artificial Sequence: Synthetic oligonucleotide
agaaucuggcagggcccag

SEQ ID NO: 2935299 - RNA, 19 nt, Artificial Sequence
  Description of Artificial Sequence: Synthetic oligonucleotide
acuuguggccauggcaguu

SEQ ID NO: 2935300 - RNA, 19 nt, Artificial Sequence
  Description of Artificial Sequence: Synthetic oligonucleotide
gcagacuuguggccauggc

SEQ ID NO: 2935301 - RNA, 19 nt, Artificial Sequence
  Description of Artificial Sequence: Synthetic oligonucleotide
cauguucauugcuuccggu

SEQ ID NO: 2935302 - RNA, 19 nt, Artificial Sequence
  Description of Artificial Sequence: Synthetic oligonucleotide
uagcagacuuguggccaug

SEQ ID NO: 2935303 - RNA, 19 nt, Artificial Sequence
  Description of Artificial Sequence: Synthetic oligonucleotide
gacuuguggccauggcagu

SEQ ID NO: 2935304 - RNA, 19 nt, Artificial Sequence
  Description of Artificial Sequence: Synthetic oligonucleotide
ggacugcuuacguuugaaa

SEQ ID NO: 2935305 - RNA, 19 nt, Artificial Sequence
  Description of Artificial Sequence: Synthetic oligonucleotide
gcacaacauaaaggugggg

SEQ ID NO: 2935306 - RNA, 19 nt, Artificial Sequence
  Description of Artificial Sequence: Synthetic oligonucleotide
guuuuaaggauaggauauu

SEQ ID NO: 2935307 - RNA, 19 nt, Artificial Sequence
  Description of Artificial Sequence: Synthetic oligonucleotide
guucauugcuuccgguuuu

SEQ ID NO: 2935308 - RNA, 19 nt, Artificial Sequence
  Description of Artificial Sequence: Synthetic oligonucleotide
ccuuaagauggacugcuua

SEQ ID NO: 2935309 - RNA, 19 nt, Artificial Sequence
  Description of Artificial Sequence: Synthetic oligonucleotide
gucgcuuugaggagcuaua

SEQ ID NO: 2935310 - RNA, 19 nt, Artificial Sequence
  Description of Artificial Sequence: Synthetic oligonucleotide
cuguaaacacggcccugaa

SEQ ID NO: 2935311 - RNA, 19 nt, Artificial Sequence
  Description of Artificial Sequence: Synthetic oligonucleotide
cccugaaaugaagaaucuc

SEQ ID NO: 2935312 - RNA, 19 nt, Artificial Sequence
  Description of Artificial Sequence: Synthetic oligonucleotide
cuuguggccauggcaguua

SEQ ID NO: 2935313 - RNA, 19 nt, Artificial Sequence
  Description of Artificial Sequence: Synthetic oligonucleotide
gugcaacuagcagacuugu

SEQ ID NO: 2935314 - RNA, 19 nt, Artificial Sequence
  Description of Artificial Sequence: Synthetic oligonucleotide
guacaugauguuagagaau

SEQ ID NO: 2935315 - RNA, 19 nt, Artificial Sequence
  Description of Artificial Sequence: Synthetic oligonucleotide
cccaaacaagaaucucuca

SEQ ID NO: 2935316 - RNA, 19 nt, Artificial Sequence
  Description of Artificial Sequence: Synthetic oligonucleotide
cagagagugucaaguggau

SEQ ID NO: 2935317 - RNA, 19 nt, Artificial Sequence
  Description of Artificial Sequence: Synthetic oligonucleotide
cuagcagacuuguggccau

SEQ ID NO: 2935318 - RNA, 19 nt, Artificial Sequence
  Description of Artificial Sequence: Synthetic oligonucleotide
gcuuccgguuuuaaggaua

SEQ ID NO: 2935319 - RNA, 19 nt, Artificial Sequence
  Description of Artificial Sequence: Synthetic oligonucleotide
ccgguuuuaaggauaggau

SEQ ID NO: 2935320 - RNA, 19 nt, Artificial Sequence
  Description of Artificial Sequence: Synthetic oligonucleotide
gcuuacguuugaaaacccu

SEQ ID NO: 2935321 - RNA, 19 nt, Artificial Sequence
  Description of Artificial Sequence: Synthetic oligonucleotide
gccauggcaguuacacuuc

SEQ ID NO: 2935322 - RNA, 19 nt, Artificial Sequence
  Description of Artificial Sequence: Synthetic oligonucleotide
caagagugucauucauguu

SEQ ID NO: 2935323 - RNA, 19 nt, Artificial Sequence
  Description of Artificial Sequence: Synthetic oligonucleotide
cccuagcuagaacauucaa

SEQ ID NO: 2935324 - RNA, 19 nt, Artificial Sequence
  Description of Artificial Sequence: Synthetic oligonucleotide
gcccagaagcaggccaaac

SEQ ID NO: 2935325 - RNA, 19 nt, Artificial Sequence
  Description of Artificial Sequence: Synthetic oligonucleotide
caacccuagcuagaacauu

SEQ ID NO: 2935326 - RNA, 19 nt, Artificial Sequence
  Description of Artificial Sequence: Synthetic oligonucleotide
cucaggcaucagagagugu

SEQ ID NO: 2935327 - RNA, 19 nt, Artificial Sequence
  Description of Artificial Sequence: Synthetic oligonucleotide
ggccaaacaggaaguucau

SEQ ID NO: 2935328 - RNA, 19 nt, Artificial Sequence
  Description of Artificial Sequence: Synthetic oligonucleotide
cgcuuugaggagcuauacu

SEQ ID NO: 2935329 - RNA, 19 nt, Artificial Sequence
  Description of Artificial Sequence: Synthetic oligonucleotide
ggcccagaagcaggccaaa

SEQ ID NO: 2935330 - RNA, 19 nt, Artificial Sequence
  Description of Artificial Sequence: Synthetic oligonucleotide
cagucgcuuugaggagcua

SEQ ID NO: 2935331 - RNA, 19 nt, Artificial Sequence
  Description of Artificial Sequence: Synthetic oligonucleotide
uucuugcccacgaagaugg

SEQ ID NO: 2935332 - RNA, 19 nt, Artificial Sequence
  Description of Artificial Sequence: Synthetic oligonucleotide
acagccaccacguugacag

SEQ ID NO: 2935333 - RNA, 19 nt, Artificial Sequence
  Description of Artificial Sequence: Synthetic oligonucleotide
aagagcgccauguuggcgg

SEQ ID NO: 2935334 - RNA, 19 nt, Artificial Sequence
  Description of Artificial Sequence: Synthetic oligonucleotide
acgaagauggccgagacuc

SEQ ID NO: 2935335 - RNA, 19 nt, Artificial Sequence
  Description of Artificial Sequence: Synthetic oligonucleotide
ugggaagucgcgaaccugg

SEQ ID NO: 2935336 - RNA, 19 nt, Artificial Sequence
  Description of Artificial Sequence: Synthetic oligonucleotide
uugcccacgaagauggccg

SEQ ID NO: 2935337 - RNA, 19 nt, Artificial Sequence
  Description of Artificial Sequence: Synthetic oligonucleotide
aacaucaucuucugcggug

SEQ ID NO: 2935338 - RNA, 19 nt, Artificial Sequence
  Description of Artificial Sequence: Synthetic oligonucleotide
acaacaucaucuucugcgg

SEQ ID NO: 2935339 - RNA, 19 nt, Artificial Sequence
  Description of Artificial Sequence: Synthetic oligonucleotide
caugcaguggugcaggcgg

SEQ ID NO: 2935340 - RNA, 19 nt, Artificial Sequence
  Description of Artificial Sequence: Synthetic oligonucleotide
agcauguagcaauagaaaa

SEQ ID NO: 2935341 - RNA, 19 nt, Artificial Sequence
  Description of Artificial Sequence: Synthetic oligonucleotide
uacucgaggaacgugcagg

SEQ ID NO: 2935342 - RNA, 19 nt, Artificial Sequence
  Description of Artificial Sequence: Synthetic oligonucleotide
augcugaccucgcugagcg

SEQ ID NO: 2935343 - RNA, 19 nt, Artificial Sequence
  Description of Artificial Sequence: Synthetic oligonucleotide
aauugcgcugggaaggagg

SEQ ID NO: 2935344 - RNA, 19 nt, Artificial Sequence
  Description of Artificial Sequence: Synthetic oligonucleotide
augugcuccccuugcaugc

SEQ ID NO: 2935345 - RNA, 19 nt, Artificial Sequence
  Description of Artificial Sequence: Synthetic oligonucleotide
acucgaggaacgugcaggc

SEQ ID NO: 2935346 - RNA, 19 nt, Artificial Sequence
  Description of Artificial Sequence: Synthetic oligonucleotide
uugacaguggccaggcuga

SEQ ID NO: 2935347 - RNA, 19 nt, Artificial Sequence
  Description of Artificial Sequence: Synthetic oligonucleotide
uccccuugcaugcugaccu

SEQ ID NO: 2935348 - RNA, 19 nt, Artificial Sequence
  Description of Artificial Sequence: Synthetic oligonucleotide
guugacaguggccaggcug

SEQ ID NO: 2935349 - RNA, 19 nt, Artificial Sequence
  Description of Artificial Sequence: Synthetic oligonucleotide
ugcgcugggaaggaggugg

SEQ ID NO: 2935350 - RNA, 19 nt, Artificial Sequence
  Description of Artificial Sequence: Synthetic oligonucleotide
ucgaggaacgugcaggccu

SEQ ID NO: 2935351 - RNA, 19 nt, Artificial Sequence
  Description of Artificial Sequence: Synthetic oligonucleotide
ugcagcucaagcgcaagcg

SEQ ID NO: 2935352 - RNA, 19 nt, Artificial Sequence
  Description of Artificial Sequence: Synthetic oligonucleotide
acaucaucuucugcggugc

SEQ ID NO: 2935353 - RNA, 19 nt, Artificial Sequence
  Description of Artificial Sequence: Synthetic oligonucleotide
aagucgcgaaccuggcgac

SEQ ID NO: 2935354 - RNA, 19 nt, Artificial Sequence
  Description of Artificial Sequence: Synthetic oligonucleotide
uguccaacgcgucacgagu

SEQ ID NO: 2935355 - RNA, 19 nt, Artificial Sequence
  Description of Artificial Sequence: Synthetic oligonucleotide
ugucacguguccaacgcgu

SEQ ID NO: 2935356 - RNA, 19 nt, Artificial Sequence
  Description of Artificial Sequence: Synthetic oligonucleotide
gaugugcuccccuugcaug

SEQ ID NO: 2935357 - RNA, 19 nt, Artificial Sequence
  Description of Artificial Sequence: Synthetic oligonucleotide
gacucggcuaucucggaag

SEQ ID NO: 2935358 - RNA, 19 nt, Artificial Sequence
  Description of Artificial Sequence: Synthetic oligonucleotide
ucggaagagcgccauguug

SEQ ID NO: 2935359 - RNA, 19 nt, Artificial Sequence
  Description of Artificial Sequence: Synthetic oligonucleotide
ucacgagugggugagggcc

SEQ ID NO: 2935360 - RNA, 19 nt, Artificial Sequence
  Description of Artificial Sequence: Synthetic oligonucleotide
cauguuggcggcacgggcc

SEQ ID NO: 2935361 - RNA, 19 nt, Artificial Sequence
  Description of Artificial Sequence: Synthetic oligonucleotide
agcagcagcauguagcaau

SEQ ID NO: 2935362 - RNA, 19 nt, Artificial Sequence
  Description of Artificial Sequence: Synthetic oligonucleotide
ugcaugcugaccucgcuga

SEQ ID NO: 2935363 - RNA, 19 nt, Artificial Sequence
  Description of Artificial Sequence: Synthetic oligonucleotide
gaagauggccgagacucgg

SEQ ID NO: 2935364 - RNA, 19 nt, Artificial Sequence
  Description of Artificial Sequence: Synthetic oligonucleotide
uaguccagcgucugugcgg

SEQ ID NO: 2935365 - RNA, 19 nt, Artificial Sequence
  Description of Artificial Sequence: Synthetic oligonucleotide
gguggcugcagcucaagcg

SEQ ID NO: 2935366 - RNA, 19 nt, Artificial Sequence
  Description of Artificial Sequence: Synthetic oligonucleotide
uccaacgcgucacgagugg

SEQ ID NO: 2935367 - RNA, 19 nt, Artificial Sequence
  Description of Artificial Sequence: Synthetic oligonucleotide
gaacgugcaggccuuggug

SEQ ID NO: 2935368 - RNA, 19 nt, Artificial Sequence
  Description of Artificial Sequence: Synthetic oligonucleotide
caagcgcaagcgcaggugg

SEQ ID NO: 2935369 - RNA, 19 nt, Artificial Sequence
  Description of Artificial Sequence: Synthetic oligonucleotide
guggcugcagcucaagcgc

SEQ ID NO: 2935370 - RNA, 19 nt, Artificial Sequence
  Description of Artificial Sequence: Synthetic oligonucleotide
accgaauugcgcugggaag

SEQ ID NO: 2935371 - RNA, 19 nt, Artificial Sequence
  Description of Artificial Sequence: Synthetic oligonucleotide
aguggccaggcugagcacc

SEQ ID NO: 2935372 - RNA, 19 nt, Artificial Sequence
  Description of Artificial Sequence: Synthetic oligonucleotide
uugcaugcugaccucgcug

SEQ ID NO: 2935373 - RNA, 19 nt, Artificial Sequence
  Description of Artificial Sequence: Synthetic oligonucleotide
ucggcuaucucggaagagc

SEQ ID NO: 2935374 - RNA, 19 nt, Artificial Sequence
  Description of Artificial Sequence: Synthetic oligonucleotide
aguccagcgucugugcggc

SEQ ID NO: 2935375 - RNA, 19 nt, Artificial Sequence
  Description of Artificial Sequence: Synthetic oligonucleotide
accacguugacaguggcca

SEQ ID NO: 2935376 - RNA, 19 nt, Artificial Sequence
  Description of Artificial Sequence: Synthetic oligonucleotide
aaccuggcgacgguacucg

SEQ ID NO: 2935377 - RNA, 19 nt, Artificial Sequence
  Description of Artificial Sequence: Synthetic oligonucleotide
cuggcgacgguacucgagg

SEQ ID NO: 2935378 - RNA, 19 nt, Artificial Sequence
  Description of Artificial Sequence: Synthetic oligonucleotide
aagauggccgagacucggc

SEQ ID NO: 2935379 - RNA, 19 nt, Artificial Sequence
  Description of Artificial Sequence: Synthetic oligonucleotide
ugcgaugugcuccccuugc

SEQ ID NO: 2935380 - RNA, 19 nt, Artificial Sequence
  Description of Artificial Sequence: Synthetic oligonucleotide
cugagcaccggguacaaca

SEQ ID NO: 2935381 - RNA, 19 nt, Artificial Sequence
  Description of Artificial Sequence: Synthetic oligonucleotide
agcagcauguagcaauaga

SEQ ID NO: 2935382 - RNA, 19 nt, Artificial Sequence
  Description of Artificial Sequence: Synthetic oligonucleotide
aaggagguggcugcagcuc

SEQ ID NO: 2935383 - RNA, 19 nt, Artificial Sequence
  Description of Artificial Sequence: Synthetic oligonucleotide
accggguacaacaucaucu

SEQ ID NO: 2935384 - RNA, 19 nt, Artificial Sequence
  Description of Artificial Sequence: Synthetic oligonucleotide
uggcggaccaugcaguggu

SEQ ID NO: 2935385 - RNA, 19 nt, Artificial Sequence
  Description of Artificial Sequence: Synthetic oligonucleotide
gguacaacaucaucuucug

SEQ ID NO: 2935386 - RNA, 19 nt, Artificial Sequence
  Description of Artificial Sequence: Synthetic oligonucleotide
ugggugagggcccgugggg

SEQ ID NO: 2935387 - RNA, 19 nt, Artificial Sequence
  Description of Artificial Sequence: Synthetic oligonucleotide
cacguucuugcccacgaag

SEQ ID NO: 2935388 - RNA, 19 nt, Artificial Sequence
  Description of Artificial Sequence: Synthetic oligonucleotide
cuaguccagcgucugugcg

SEQ ID NO: 2935389 - RNA, 19 nt, Artificial Sequence
  Description of Artificial Sequence: Synthetic oligonucleotide
ucucggaagagcgccaugu

SEQ ID NO: 2935390 - RNA, 19 nt, Artificial Sequence
  Description of Artificial Sequence: Synthetic oligonucleotide
acguugacaguggccaggc

SEQ ID NO: 2935391 - RNA, 19 nt, Artificial Sequence
  Description of Artificial Sequence: Synthetic oligonucleotide
ucuucugcggugcgaugug

SEQ ID NO: 2935392 - RNA, 19 nt, Artificial Sequence
  Description of Artificial Sequence: Synthetic oligonucleotide
aacgcgucacgagugggug

SEQ ID NO: 2935393 - RNA, 19 nt, Artificial Sequence
  Description of Artificial Sequence: Synthetic oligonucleotide
agagcgccauguuggcggc

SEQ ID NO: 2935394 - RNA, 19 nt, Artificial Sequence
  Description of Artificial Sequence: Synthetic oligonucleotide
ucacguguccaacgcguca

SEQ ID NO: 2935395 - RNA, 19 nt, Artificial Sequence
  Description of Artificial Sequence: Synthetic oligonucleotide
gaagagcgccauguuggcg

SEQ ID NO: 2935396 - RNA, 19 nt, Artificial Sequence
  Description of Artificial Sequence: Synthetic oligonucleotide
agcacagccaccacguuga

SEQ ID NO: 2935397 - RNA, 19 nt, Artificial Sequence
  Description of Artificial Sequence: Synthetic oligonucleotide
ugagcaccggguacaacau

SEQ ID NO: 2935398 - RNA, 19 nt, Artificial Sequence
  Description of Artificial Sequence: Synthetic oligonucleotide
agugggugagggcccgugg

SEQ ID NO: 2935399 - RNA, 19 nt, Artificial Sequence
  Description of Artificial Sequence: Synthetic oligonucleotide
guacaacaucaucuucugc

SEQ ID NO: 2935400 - RNA, 19 nt, Artificial Sequence
  Description of Artificial Sequence: Synthetic oligonucleotide
ugccaccacguucuugccc

SEQ ID NO: 2935401 - RNA, 19 nt, Artificial Sequence
  Description of Artificial Sequence: Synthetic oligonucleotide
uggugggaagucgcgaacc

SEQ ID NO: 2935402 - RNA, 19 nt, Artificial Sequence
  Description of Artificial Sequence: Synthetic oligonucleotide
cuugcccacgaagauggcc

SEQ ID NO: 2935403 - RNA, 19 nt, Artificial Sequence
  Description of Artificial Sequence: Synthetic oligonucleotide
agcaccggguacaacauca

SEQ ID NO: 2935404 - RNA, 19 nt, Artificial Sequence
  Description of Artificial Sequence: Synthetic oligonucleotide
uugguggccagugccacca

SEQ ID NO: 2935405 - RNA, 19 nt, Artificial Sequence
  Description of Artificial Sequence: Synthetic oligonucleotide
uucugcggugcgaugugcu

SEQ ID NO: 2935406 - RNA, 19 nt, Artificial Sequence
  Description of Artificial Sequence: Synthetic oligonucleotide
gugggugagggcccguggg

SEQ ID NO: 2935407 - RNA, 19 nt, Artificial Sequence
  Description of Artificial Sequence: Synthetic oligonucleotide
gcuaucucggaagagcgcc

SEQ ID NO: 2935408 - RNA, 19 nt, Artificial Sequence
  Description of Artificial Sequence: Synthetic oligonucleotide
aagcgcagguggugggaag

SEQ ID NO: 2935409 - RNA, 19 nt, Artificial Sequence
  Description of Artificial Sequence: Synthetic oligonucleotide
ucaucuucugcggugcgau

SEQ ID NO: 2935410 - RNA, 19 nt, Artificial Sequence
  Description of Artificial Sequence: Synthetic oligonucleotide
cggaagagcgccauguugg

SEQ ID NO: 2935411 - RNA, 19 nt, Artificial Sequence
  Description of Artificial Sequence: Synthetic oligonucleotide
agauggccgagacucggcu

SEQ ID NO: 2935412 - RNA, 19 nt, Artificial Sequence
  Description of Artificial Sequence: Synthetic oligonucleotide
guguccaacgcgucacgag

SEQ ID NO: 2935413 - RNA, 19 nt, Artificial Sequence
  Description of Artificial Sequence: Synthetic oligonucleotide
cugucacguguccaacgcg

SEQ ID NO: 2935414 - RNA, 19 nt, Artificial Sequence
  Description of Artificial Sequence: Synthetic oligonucleotide
cugagcgccacgcagggca

SEQ ID NO: 2935415 - RNA, 19 nt, Artificial Sequence
  Description of Artificial Sequence: Synthetic oligonucleotide
aucuucugcggugcgaugu

SEQ ID NO: 2935416 - RNA, 19 nt, Artificial Sequence
  Description of Artificial Sequence: Synthetic oligonucleotide
accacguucuugcccacga

SEQ ID NO: 2935417 - RNA, 19 nt, Artificial Sequence
  Description of Artificial Sequence: Synthetic oligonucleotide
ugcggugcgaugugcuccc

SEQ ID NO: 2935418 - RNA, 19 nt, Artificial Sequence
  Description of Artificial Sequence: Synthetic oligonucleotide
acuggcggaccaugcagug

SEQ ID NO: 2935419 - RNA, 19 nt, Artificial Sequence
  Description of Artificial Sequence: Synthetic oligonucleotide
cagcauguagcaauagaaa

SEQ ID NO: 2935420 - RNA, 19 nt, Artificial Sequence
  Description of Artificial Sequence: Synthetic oligonucleotide
cagcacagccaccacguug

SEQ ID NO: 2935421 - RNA, 19 nt, Artificial Sequence
  Description of Artificial Sequence: Synthetic oligonucleotide
auggccgagacucggcuau

SEQ ID NO: 2935422 - RNA, 19 nt, Artificial Sequence
  Description of Artificial Sequence: Synthetic oligonucleotide
cagguggugggaagucgcg

SEQ ID NO: 2935423 - RNA, 19 nt, Artificial Sequence
  Description of Artificial Sequence: Synthetic oligonucleotide
aggccuugguggccagugc

SEQ ID NO: 2935424 - RNA, 19 nt, Artificial Sequence
  Description of Artificial Sequence: Synthetic oligonucleotide
cacguugacaguggccagg

SEQ ID NO: 2935425 - RNA, 19 nt, Artificial Sequence
  Description of Artificial Sequence: Synthetic oligonucleotide
gucugugcggcccgcgggg

SEQ ID NO: 2935426 - RNA, 19 nt, Artificial Sequence
  Description of Artificial Sequence: Synthetic oligonucleotide
ccgagacucggcuaucucg

SEQ ID NO: 2935427 - RNA, 19 nt, Artificial Sequence
  Description of Artificial Sequence: Synthetic oligonucleotide
gucgcgaaccuggcgacgg

SEQ ID NO: 2935428 - RNA, 19 nt, Artificial Sequence
  Description of Artificial Sequence: Synthetic oligonucleotide
ugcaguggugcaggcggcg

SEQ ID NO: 2935429 - RNA, 19 nt, Artificial Sequence
  Description of Artificial Sequence: Synthetic oligonucleotide
caccacguugacaguggcc

SEQ ID NO: 2935430 - RNA, 19 nt, Artificial Sequence
  Description of Artificial Sequence: Synthetic oligonucleotide
guacucgaggaacgugcag

SEQ ID NO: 2935431 - RNA, 19 nt, Artificial Sequence
  Description of Artificial Sequence: Synthetic oligonucleotide
cagggcagcaccagcagca

SEQ ID NO: 2935432 - RNA, 19 nt, Artificial Sequence
  Description of Artificial Sequence: Synthetic oligonucleotide
acucggcuaucucggaaga

SEQ ID NO: 2935433 - RNA, 19 nt, Artificial Sequence
  Description of Artificial Sequence: Synthetic oligonucleotide
caugcugaccucgcugagc

SEQ ID NO: 2935434 - RNA, 19 nt, Artificial Sequence
  Description of Artificial Sequence: Synthetic oligonucleotide
agcgccauguuggcggcac

SEQ ID NO: 2935435 - RNA, 19 nt, Artificial Sequence
  Description of Artificial Sequence: Synthetic oligonucleotide
ggaagucgcgaaccuggcg

SEQ ID NO: 2935436 - RNA, 19 nt, Artificial Sequence
  Description of Artificial Sequence: Synthetic oligonucleotide
caucaucuucugcggugcg

SEQ ID NO: 2935437 - RNA, 19 nt, Artificial Sequence
  Description of Artificial Sequence: Synthetic oligonucleotide
ugagcgccacgcagggcag

SEQ ID NO: 2935438 - RNA, 19 nt, Artificial Sequence
  Description of Artificial Sequence: Synthetic oligonucleotide
cacgagugggugagggccc

SEQ ID NO: 2935439 - RNA, 19 nt, Artificial Sequence
  Description of Artificial Sequence: Synthetic oligonucleotide
ugcuccccuugcaugcuga

SEQ ID NO: 2935440 - RNA, 19 nt, Artificial Sequence
  Description of Artificial Sequence: Synthetic oligonucleotide
acguguccaacgcgucacg

SEQ ID NO: 2935441 - RNA, 19 nt, Artificial Sequence
  Description of Artificial Sequence: Synthetic oligonucleotide
uggcugcagcucaagcgca

SEQ ID NO: 2935442 - RNA, 19 nt, Artificial Sequence
  Description of Artificial Sequence: Synthetic oligonucleotide
ccgaauugcgcugggaagg

SEQ ID NO: 2935443 - RNA, 19 nt, Artificial Sequence
  Description of Artificial Sequence: Synthetic oligonucleotide
uccagcgucugugcggccc

SEQ ID NO: 2935444 - RNA, 19 nt, Artificial Sequence
  Description of Artificial Sequence: Synthetic oligonucleotide
auguuggcggcacgggcca

SEQ ID NO: 2935445 - RNA, 19 nt, Artificial Sequence
  Description of Artificial Sequence: Synthetic oligonucleotide
cuugguggccagugccacc

SEQ ID NO: 2935446 - RNA, 19 nt, Artificial Sequence
  Description of Artificial Sequence: Synthetic oligonucleotide
auugcgcugggaaggaggu

SEQ ID NO: 2935447 - RNA, 19 nt, Artificial Sequence
  Description of Artificial Sequence: Synthetic oligonucleotide
cagcucaagcgcaagcgca

SEQ ID NO: 2935448 - RNA, 19 nt, Artificial Sequence
  Description of Artificial Sequence: Synthetic oligonucleotide
agcucaagcgcaagcgcag

SEQ ID NO: 2935449 - RNA, 19 nt, Artificial Sequence
  Description of Artificial Sequence: Synthetic oligonucleotide
cgagacucggcuaucucgg

SEQ ID NO: 2935450 - RNA, 19 nt, Artificial Sequence
  Description of Artificial Sequence: Synthetic oligonucleotide
ucugcggugcgaugugcuc

SEQ ID NO: 2935451 - RNA, 19 nt, Artificial Sequence
  Description of Artificial Sequence: Synthetic oligonucleotide
gucacgagugggugagggc

SEQ ID NO: 2935452 - RNA, 19 nt, Artificial Sequence
  Description of Artificial Sequence: Synthetic oligonucleotide
caggcugagcaccggguac

SEQ ID NO: 2935453 - RNA, 19 nt, Artificial Sequence
  Description of Artificial Sequence: Synthetic oligonucleotide
gaauugcgcugggaaggag

SEQ ID NO: 2935454 - RNA, 19 nt, Artificial Sequence
  Description of Artificial Sequence: Synthetic oligonucleotide
agacucggcuaucucggaa

SEQ ID NO: 2935455 - RNA, 19 nt, Artificial Sequence
  Description of Artificial Sequence: Synthetic oligonucleotide
ccugucacguguccaacgc

SEQ ID NO: 2935456 - RNA, 19 nt, Artificial Sequence
  Description of Artificial Sequence: Synthetic oligonucleotide
cugcggugcgaugugcucc

SEQ ID NO: 2935457 - RNA, 19 nt, Artificial Sequence
  Description of Artificial Sequence: Synthetic oligonucleotide
cacguguccaacgcgucac

SEQ ID NO: 2935458 - RNA, 19 nt, Artificial Sequence
  Description of Artificial Sequence: Synthetic oligonucleotide
cagcagcuaguccagcguc

SEQ ID NO: 2935459 - RNA, 19 nt, Artificial Sequence
  Description of Artificial Sequence: Synthetic oligonucleotide
ggaagagcgccauguuggc

SEQ ID NO: 2935460 - RNA, 19 nt, Artificial Sequence
  Description of Artificial Sequence: Synthetic oligonucleotide
aggaacgugcaggccuugg

SEQ ID NO: 2935461 - RNA, 19 nt, Artificial Sequence
  Description of Artificial Sequence: Synthetic oligonucleotide
gaaccuggcgacgguacuc

SEQ ID NO: 2935462 - RNA, 19 nt, Artificial Sequence
  Description of Artificial Sequence: Synthetic oligonucleotide
gcacuggcggaccaugcag

SEQ ID NO: 2935463 - RNA, 19 nt, Artificial Sequence
  Description of Artificial Sequence: Synthetic oligonucleotide
ggccagcacagccaccacg

SEQ ID NO: 2935464 - RNA, 19 nt, Artificial Sequence
  Description of Artificial Sequence: Synthetic oligonucleotide
gacgcacuggcggaccaug

SEQ ID NO: 2935465 - RNA, 19 nt, Artificial Sequence
  Description of Artificial Sequence: Synthetic oligonucleotide
ucuugcccacgaagauggc

SEQ ID NO: 2935466 - RNA, 19 nt, Artificial Sequence
  Description of Artificial Sequence: Synthetic oligonucleotide
gcagcucaagcgcaagcgc

SEQ ID NO: 2935467 - RNA, 19 nt, Artificial Sequence
  Description of Artificial Sequence: Synthetic oligonucleotide
ggcacgggccagcacagcc

SEQ ID NO: 2935468 - RNA, 19 nt, Artificial Sequence
  Description of Artificial Sequence: Synthetic oligonucleotide
gcuaguccagcgucugugc

SEQ ID NO: 2935469 - RNA, 19 nt, Artificial Sequence
  Description of Artificial Sequence: Synthetic oligonucleotide
uggcgacgguacucgagga

SEQ ID NO: 2935470 - RNA, 19 nt, Artificial Sequence
  Description of Artificial Sequence: Synthetic oligonucleotide
caccgaauugcgcugggaa

SEQ ID NO: 2935471 - RNA, 19 nt, Artificial Sequence
  Description of Artificial Sequence: Synthetic oligonucleotide
gccaccacguucuugccca

SEQ ID NO: 2935472 - RNA, 19 nt, Artificial Sequence
  Description of Artificial Sequence: Synthetic oligonucleotide
cacgcagggcagcaccagc

SEQ ID NO: 2935473 - RNA, 19 nt, Artificial Sequence
  Description of Artificial Sequence: Synthetic oligonucleotide
cgguacucgaggaacgugc

SEQ ID NO: 2935474 - RNA, 19 nt, Artificial Sequence
  Description of Artificial Sequence: Synthetic oligonucleotide
aucaucuucugcggugcga

SEQ ID NO: 2935475 - RNA, 19 nt, Artificial Sequence
  Description of Artificial Sequence: Synthetic oligonucleotide
uaucucggaagagcgccau

SEQ ID NO: 2935476 - RNA, 19 nt, Artificial Sequence
  Description of Artificial Sequence: Synthetic oligonucleotide
gccugucacguguccaacg

SEQ ID NO: 2935477 - RNA, 19 nt, Artificial Sequence
  Description of Artificial Sequence: Synthetic oligonucleotide
guccaacgcgucacgagug

SEQ ID NO: 2935478 - RNA, 19 nt, Artificial Sequence
  Description of Artificial Sequence: Synthetic oligonucleotide
cacgggccagcacagccac

SEQ ID NO: 2935479 - RNA, 19 nt, Artificial Sequence
  Description of Artificial Sequence: Synthetic oligonucleotide
aucucggaagagcgccaug

SEQ ID NO: 2935480 - RNA, 19 nt, Artificial Sequence
  Description of Artificial Sequence: Synthetic oligonucleotide
guggugggaagucgcgaac

SEQ ID NO: 2935481 - RNA, 19 nt, Artificial Sequence
  Description of Artificial Sequence: Synthetic oligonucleotide
ugcccacgaagauggccga

SEQ ID NO: 2935482 - RNA, 19 nt, Artificial Sequence
  Description of Artificial Sequence: Synthetic oligonucleotide
cuaucucggaagagcgcca

SEQ ID NO: 2935483 - RNA, 19 nt, Artificial Sequence
  Description of Artificial Sequence: Synthetic oligonucleotide
acgcacuggcggaccaugc

SEQ ID NO: 2935484 - RNA, 19 nt, Artificial Sequence
  Description of Artificial Sequence: Synthetic oligonucleotide
agcgcaagcgcagguggug

SEQ ID NO: 2935485 - RNA, 19 nt, Artificial Sequence
  Description of Artificial Sequence: Synthetic oligonucleotide
ggguacaacaucaucuucu

SEQ ID NO: 2935486 - RNA, 19 nt, Artificial Sequence
  Description of Artificial Sequence: Synthetic oligonucleotide
cuggcggaccaugcagugg

SEQ ID NO: 2935487 - RNA, 19 nt, Artificial Sequence
  Description of Artificial Sequence: Synthetic oligonucleotide
cuucugcggugcgaugugc

SEQ ID NO: 2935488 - RNA, 19 nt, Artificial Sequence
  Description of Artificial Sequence: Synthetic oligonucleotide
cggcuaucucggaagagcg

SEQ ID NO: 2935489 - RNA, 19 nt, Artificial Sequence
  Description of Artificial Sequence: Synthetic oligonucleotide
agucgcgaaccuggcgacg

SEQ ID NO: 2935490 - RNA, 19 nt, Artificial Sequence
  Description of Artificial Sequence: Synthetic oligonucleotide
caccggguacaacaucauc

SEQ ID NO: 2935491 - RNA, 19 nt, Artificial Sequence
  Description of Artificial Sequence: Synthetic oligonucleotide
acgguacucgaggaacgug

SEQ ID NO: 2935492 - RNA, 19 nt, Artificial Sequence
  Description of Artificial Sequence: Synthetic oligonucleotide
uggugcaggcggcggcacc

SEQ ID NO: 2935493 - RNA, 19 nt, Artificial Sequence
  Description of Artificial Sequence: Synthetic oligonucleotide
caguggugcaggcggcggc

SEQ ID NO: 2935494 - RNA, 19 nt, Artificial Sequence
  Description of Artificial Sequence: Synthetic oligonucleotide
ggugcaggcggcggcaccg

SEQ ID NO: 2935495 - RNA, 19 nt, Artificial Sequence
  Description of Artificial Sequence: Synthetic oligonucleotide
gaccucgcugagcgccacg

SEQ ID NO: 2935496 - RNA, 19 nt, Artificial Sequence
  Description of Artificial Sequence: Synthetic oligonucleotide
gagacucggcuaucucgga

SEQ ID NO: 2935497 - RNA, 19 nt, Artificial Sequence
  Description of Artificial Sequence: Synthetic oligonucleotide
cguggggacgcacuggcgg

SEQ ID NO: 2935498 - RNA, 19 nt, Artificial Sequence
  Description of Artificial Sequence: Synthetic oligonucleotide
gacaguggccaggcugagc

SEQ ID NO: 2935499 - RNA, 19 nt, Artificial Sequence
  Description of Artificial Sequence: Synthetic oligonucleotide
caucuucugcggugcgaug

SEQ ID NO: 2935500 - RNA, 19 nt, Artificial Sequence
  Description of Artificial Sequence: Synthetic oligonucleotide
cucgaggaacgugcaggcc

SEQ ID NO: 2935501 - RNA, 19 nt, Artificial Sequence
  Description of Artificial Sequence: Synthetic oligonucleotide
gugcgaugugcuccccuug

SEQ ID NO: 2935502 - RNA, 19 nt, Artificial Sequence
  Description of Artificial Sequence: Synthetic oligonucleotide
aagcgcaagcgcagguggu

SEQ ID NO: 2935503 - RNA, 19 nt, Artificial Sequence
  Description of Artificial Sequence: Synthetic oligonucleotide
ggcggcacgggccagcaca

SEQ ID NO: 2935504 - RNA, 19 nt, Artificial Sequence
  Description of Artificial Sequence: Synthetic oligonucleotide
gugggaagucgcgaaccug

SEQ ID NO: 2935505 - RNA, 19 nt, Artificial Sequence
  Description of Artificial Sequence: Synthetic oligonucleotide
gugagggcccguggggacg

SEQ ID NO: 2935506 - RNA, 19 nt, Artificial Sequence
  Description of Artificial Sequence: Synthetic oligonucleotide
cuccccuugcaugcugacc

SEQ ID NO: 2935507 - RNA, 19 nt, Artificial Sequence
  Description of Artificial Sequence: Synthetic oligonucleotide
aguggugcaggcggcggca

SEQ ID NO: 2935508 - RNA, 19 nt, Artificial Sequence
  Description of Artificial Sequence: Synthetic oligonucleotide
acgagugggugagggcccg

SEQ ID NO: 2935509 - RNA, 19 nt, Artificial Sequence
  Description of Artificial Sequence: Synthetic oligonucleotide
gagguggcugcagcucaag

SEQ ID NO: 2935510 - RNA, 19 nt, Artificial Sequence
  Description of Artificial Sequence: Synthetic oligonucleotide
gauggccgagacucggcua

SEQ ID NO: 2935511 - RNA, 19 nt, Artificial Sequence
  Description of Artificial Sequence: Synthetic oligonucleotide
ugacaguggccaggcugag

SEQ ID NO: 2935512 - RNA, 19 nt, Artificial Sequence
  Description of Artificial Sequence: Synthetic oligonucleotide
agcagcuaguccagcgucu

SEQ ID NO: 2935513 - RNA, 19 nt, Artificial Sequence
  Description of Artificial Sequence: Synthetic oligonucleotide
agcgcagguggugggaagu

SEQ ID NO: 2935514 - RNA, 19 nt, Artificial Sequence
  Description of Artificial Sequence: Synthetic oligonucleotide
ugagggcccguggggacgc

SEQ ID NO: 2935515 - RNA, 19 nt, Artificial Sequence
  Description of Artificial Sequence: Synthetic oligonucleotide
gagcaccggguacaacauc

SEQ ID NO: 2935516 - RNA, 19 nt, Artificial Sequence
  Description of Artificial Sequence: Synthetic oligonucleotide
gguggugggaagucgcgaa

SEQ ID NO: 2935517 - RNA, 19 nt, Artificial Sequence
  Description of Artificial Sequence: Synthetic oligonucleotide
ggaccaugcaguggugcag

SEQ ID NO: 2935518 - RNA, 19 nt, Artificial Sequence
  Description of Artificial Sequence: Synthetic oligonucleotide
ccauguuggcggcacgggc

SEQ ID NO: 2935519 - RNA, 19 nt, Artificial Sequence
  Description of Artificial Sequence: Synthetic oligonucleotide
ggcggcggcaccgaauugc

SEQ ID NO: 2935520 - RNA, 19 nt, Artificial Sequence
  Description of Artificial Sequence: Synthetic oligonucleotide
gagugggugagggcccgug

SEQ ID NO: 2935521 - RNA, 19 nt, Artificial Sequence
  Description of Artificial Sequence: Synthetic oligonucleotide
gccaccacguugacagugg

SEQ ID NO: 2935522 - RNA, 19 nt, Artificial Sequence
  Description of Artificial Sequence: Synthetic oligonucleotide
ccuugcaugcugaccucgc

SEQ ID NO: 2935523 - RNA, 19 nt, Artificial Sequence
  Description of Artificial Sequence: Synthetic oligonucleotide
guggggacgcacuggcgga

SEQ ID NO: 2935524 - RNA, 19 nt, Artificial Sequence
  Description of Artificial Sequence: Synthetic oligonucleotide
gcgacgguacucgaggaac

SEQ ID NO: 2935525 - RNA, 19 nt, Artificial Sequence
  Description of Artificial Sequence: Synthetic oligonucleotide
gcagguggugggaagucgc

SEQ ID NO: 2935526 - RNA, 19 nt, Artificial Sequence
  Description of Artificial Sequence: Synthetic oligonucleotide
acgcagggcagcaccagca

SEQ ID NO: 2935527 - RNA, 19 nt, Artificial Sequence
  Description of Artificial Sequence: Synthetic oligonucleotide
acgcgucacgaguggguga

SEQ ID NO: 2935528 - RNA, 19 nt, Artificial Sequence
  Description of Artificial Sequence: Synthetic oligonucleotide
agguggugggaagucgcga

SEQ ID NO: 2935529 - RNA, 19 nt, Artificial Sequence
  Description of Artificial Sequence: Synthetic oligonucleotide
cagcagcauguagcaauag

SEQ ID NO: 2935530 - RNA, 19 nt, Artificial Sequence
  Description of Artificial Sequence: Synthetic oligonucleotide
ggcggcaccgaauugcgcu

SEQ ID NO: 2935531 - RNA, 19 nt, Artificial Sequence
  Description of Artificial Sequence: Synthetic oligonucleotide
cgacgguacucgaggaacg

SEQ ID NO: 2935532 - RNA, 19 nt, Artificial Sequence
  Description of Artificial Sequence: Synthetic oligonucleotide
caccacguucuugcccacg

SEQ ID NO: 2935533 - RNA, 19 nt, Artificial Sequence
  Description of Artificial Sequence: Synthetic oligonucleotide
ucgcgaaccuggcgacggu

SEQ ID NO: 2935534 - RNA, 19 nt, Artificial Sequence
  Description of Artificial Sequence: Synthetic oligonucleotide
gugccaccacguucuugcc

SEQ ID NO: 2935535 - RNA, 19 nt, Artificial Sequence
  Description of Artificial Sequence: Synthetic oligonucleotide
uggccagugccaccacguu

SEQ ID NO: 2935536 - RNA, 19 nt, Artificial Sequence
  Description of Artificial Sequence: Synthetic oligonucleotide
ggcaccgaauugcgcuggg

SEQ ID NO: 2935537 - RNA, 19 nt, Artificial Sequence
  Description of Artificial Sequence: Synthetic oligonucleotide
ccacgaagauggccgagac

SEQ ID NO: 2935538 - RNA, 19 nt, Artificial Sequence
  Description of Artificial Sequence: Synthetic oligonucleotide
ccuggcgacgguacucgag

SEQ ID NO: 2935539 - RNA, 19 nt, Artificial Sequence
  Description of Artificial Sequence: Synthetic oligonucleotide
gguacucgaggaacgugca

SEQ ID NO: 2935540 - RNA, 19 nt, Artificial Sequence
  Description of Artificial Sequence: Synthetic oligonucleotide
gcucaagcgcaagcgcagg

SEQ ID NO: 2935541 - RNA, 19 nt, Artificial Sequence
  Description of Artificial Sequence: Synthetic oligonucleotide
uugcgcugggaaggaggug

SEQ ID NO: 2935542 - RNA, 19 nt, Artificial Sequence
  Description of Artificial Sequence: Synthetic oligonucleotide
cgaagauggccgagacucg

SEQ ID NO: 2935543 - RNA, 19 nt, Artificial Sequence
  Description of Artificial Sequence: Synthetic oligonucleotide
ggcuaucucggaagagcgc

SEQ ID NO: 2935544 - RNA, 19 nt, Artificial Sequence
  Description of Artificial Sequence: Synthetic oligonucleotide
gugcuccccuugcaugcug

SEQ ID NO: 2935545 - RNA, 19 nt, Artificial Sequence
  Description of Artificial Sequence: Synthetic oligonucleotide
caacaucaucuucugcggu

SEQ ID NO: 2935546 - RNA, 19 nt, Artificial Sequence
  Description of Artificial Sequence: Synthetic oligonucleotide
guuggcggcacgggccagc

SEQ ID NO: 2935547 - RNA, 19 nt, Artificial Sequence
  Description of Artificial Sequence: Synthetic oligonucleotide
gucacguguccaacgcguc

SEQ ID NO: 2935548 - RNA, 19 nt, Artificial Sequence
  Description of Artificial Sequence: Synthetic oligonucleotide
ggugagggcccguggggac

SEQ ID NO: 2935549 - RNA, 19 nt, Artificial Sequence
  Description of Artificial Sequence: Synthetic oligonucleotide
gccauguuggcggcacggg

SEQ ID NO: 2935550 - RNA, 19 nt, Artificial Sequence
  Description of Artificial Sequence: Synthetic oligonucleotide
uggccaggcugagcaccgg

SEQ ID NO: 2935551 - RNA, 19 nt, Artificial Sequence
  Description of Artificial Sequence: Synthetic oligonucleotide
gcaugcugaccucgcugag

SEQ ID NO: 2935552 - RNA, 19 nt, Artificial Sequence
  Description of Artificial Sequence: Synthetic oligonucleotide
uguuggcggcacgggccag

SEQ ID NO: 2935553 - RNA, 19 nt, Artificial Sequence
  Description of Artificial Sequence: Synthetic oligonucleotide
uggggacgcacuggcggac

SEQ ID NO: 2935554 - RNA, 19 nt, Artificial Sequence
  Description of Artificial Sequence: Synthetic oligonucleotide
gaggaacgugcaggccuug

SEQ ID NO: 2935555 - RNA, 19 nt, Artificial Sequence
  Description of Artificial Sequence: Synthetic oligonucleotide
cccguggggacgcacuggc

SEQ ID NO: 2935556 - RNA, 19 nt, Artificial Sequence
  Description of Artificial Sequence: Synthetic oligonucleotide
gcagcuaguccagcgucug

SEQ ID NO: 2935557 - RNA, 19 nt, Artificial Sequence
  Description of Artificial Sequence: Synthetic oligonucleotide
gcgcaagcgcagguggugg

SEQ ID NO: 2935558 - RNA, 19 nt, Artificial Sequence
  Description of Artificial Sequence: Synthetic oligonucleotide
agcgccacgcagggcagca

SEQ ID NO: 2935559 - RNA, 19 nt, Artificial Sequence
  Description of Artificial Sequence: Synthetic oligonucleotide
cugaccucgcugagcgcca

SEQ ID NO: 2935560 - RNA, 19 nt, Artificial Sequence
  Description of Artificial Sequence: Synthetic oligonucleotide
gacgguacucgaggaacgu

SEQ ID NO: 2935561 - RNA, 19 nt, Artificial Sequence
  Description of Artificial Sequence: Synthetic oligonucleotide
caguggccaggcugagcac

SEQ ID NO: 2935562 - RNA, 19 nt, Artificial Sequence
  Description of Artificial Sequence: Synthetic oligonucleotide
ugcaggcggcggcaccgaa

SEQ ID NO: 2935563 - RNA, 19 nt, Artificial Sequence
  Description of Artificial Sequence: Synthetic oligonucleotide
gcaguggugcaggcggcgg

SEQ ID NO: 2935564 - RNA, 19 nt, Artificial Sequence
  Description of Artificial Sequence: Synthetic oligonucleotide
cuugcaugcugaccucgcu

SEQ ID NO: 2935565 - RNA, 19 nt, Artificial Sequence
  Description of Artificial Sequence: Synthetic oligonucleotide
gcggcaccgaauugcgcug

SEQ ID NO: 2935566 - RNA, 19 nt, Artificial Sequence
  Description of Artificial Sequence: Synthetic oligonucleotide
cgucacgagugggugaggg

SEQ ID NO: 2935567 - RNA, 19 nt, Artificial Sequence
  Description of Artificial Sequence: Synthetic oligonucleotide
caacgcgucacgagugggu

SEQ ID NO: 2935568 - RNA, 19 nt, Artificial Sequence
  Description of Artificial Sequence: Synthetic oligonucleotide
cacuggcggaccaugcagu

SEQ ID NO: 2935569 - RNA, 19 nt, Artificial Sequence
  Description of Artificial Sequence: Synthetic oligonucleotide
gcugcagcucaagcgcaag

SEQ ID NO: 2935570 - RNA, 19 nt, Artificial Sequence
  Description of Artificial Sequence: Synthetic oligonucleotide
gcggcggcaccgaauugcg

SEQ ID NO: 2935571 - RNA, 19 nt, Artificial Sequence
  Description of Artificial Sequence: Synthetic oligonucleotide
gggaagucgcgaaccuggc

SEQ ID NO: 2935572 - RNA, 19 nt, Artificial Sequence
  Description of Artificial Sequence: Synthetic oligonucleotide
ccaacgcgucacgaguggg

SEQ ID NO: 2935573 - RNA, 19 nt, Artificial Sequence
  Description of Artificial Sequence: Synthetic oligonucleotide
accuggcgacgguacucga

SEQ ID NO: 2935574 - RNA, 19 nt, Artificial Sequence
  Description of Artificial Sequence: Synthetic oligonucleotide
ugguggccagugccaccac

SEQ ID NO: 2935575 - RNA, 19 nt, Artificial Sequence
  Description of Artificial Sequence: Synthetic oligonucleotide
cccuugcaugcugaccucg

SEQ ID NO: 2935576 - RNA, 19 nt, Artificial Sequence
  Description of Artificial Sequence: Synthetic oligonucleotide
ccagcgucugugcggcccg

SEQ ID NO: 2935577 - RNA, 19 nt, Artificial Sequence
  Description of Artificial Sequence: Synthetic oligonucleotide
ugaccucgcugagcgccac

SEQ ID NO: 2935578 - RNA, 19 nt, Artificial Sequence
  Description of Artificial Sequence: Synthetic oligonucleotide
cagugccaccacguucuug

SEQ ID NO: 2935579 - RNA, 19 nt, Artificial Sequence
  Description of Artificial Sequence: Synthetic oligonucleotide
gcggaccaugcaguggugc

SEQ ID NO: 2935580 - RNA, 19 nt, Artificial Sequence
  Description of Artificial Sequence: Synthetic oligonucleotide
ggugggaagucgcgaaccu

SEQ ID NO: 2935581 - RNA, 19 nt, Artificial Sequence
  Description of Artificial Sequence: Synthetic oligonucleotide
aggcggcggcaccgaauug

SEQ ID NO: 2935582 - RNA, 19 nt, Artificial Sequence
  Description of Artificial Sequence: Synthetic oligonucleotide
ccacguugacaguggccag

SEQ ID NO: 2935583 - RNA, 19 nt, Artificial Sequence
  Description of Artificial Sequence: Synthetic oligonucleotide
guggccagugccaccacgu

SEQ ID NO: 2935584 - RNA, 19 nt, Artificial Sequence
  Description of Artificial Sequence: Synthetic oligonucleotide
ggaacgugcaggccuuggu

SEQ ID NO: 2935585 - RNA, 19 nt, Artificial Sequence
  Description of Artificial Sequence: Synthetic oligonucleotide
cucaagcgcaagcgcaggu

SEQ ID NO: 2935586 - RNA, 19 nt, Artificial Sequence
  Description of Artificial Sequence: Synthetic oligonucleotide
cacagccaccacguugaca

SEQ ID NO: 2935587 - RNA, 19 nt, Artificial Sequence
  Description of Artificial Sequence: Synthetic oligonucleotide
caagcgcagguggugggaa

SEQ ID NO: 2935588 - RNA, 19 nt, Artificial Sequence
  Description of Artificial Sequence: Synthetic oligonucleotide
gcgaaccuggcgacgguac

SEQ ID NO: 2935589 - RNA, 19 nt, Artificial Sequence
  Description of Artificial Sequence: Synthetic oligonucleotide
gggccugucacguguccaa

SEQ ID NO: 2935590 - RNA, 19 nt, Artificial Sequence
  Description of Artificial Sequence: Synthetic oligonucleotide
gcagcagcuaguccagcgu

SEQ ID NO: 2935591 - RNA, 19 nt, Artificial Sequence
  Description of Artificial Sequence: Synthetic oligonucleotide
cacgaagauggccgagacu

SEQ ID NO: 2935592 - RNA, 19 nt, Artificial Sequence
  Description of Artificial Sequence: Synthetic oligonucleotide
ggcgacgguacucgaggaa

SEQ ID NO: 2935593 - RNA, 19 nt, Artificial Sequence
  Description of Artificial Sequence: Synthetic oligonucleotide
ggcccguggggacgcacug

SEQ ID NO: 2935594 - RNA, 19 nt, Artificial Sequence
  Description of Artificial Sequence: Synthetic oligonucleotide
ccuugguggccagugccac

SEQ ID NO: 2935595 - RNA, 19 nt, Artificial Sequence
  Description of Artificial Sequence: Synthetic oligonucleotide
gagcgccacgcagggcagc

SEQ ID NO: 2935596 - RNA, 19 nt, Artificial Sequence
  Description of Artificial Sequence: Synthetic oligonucleotide
gcgaugugcuccccuugca

SEQ ID NO: 2935597 - RNA, 19 nt, Artificial Sequence
  Description of Artificial Sequence: Synthetic oligonucleotide
cgucugugcggcccgcggg

SEQ ID NO: 2935598 - RNA, 19 nt, Artificial Sequence
  Description of Artificial Sequence: Synthetic oligonucleotide
cgcaagcgcaggugguggg

SEQ ID NO: 2935599 - RNA, 19 nt, Artificial Sequence
  Description of Artificial Sequence: Synthetic oligonucleotide
cgcugagcgccacgcaggg

SEQ ID NO: 2935600 - RNA, 19 nt, Artificial Sequence
  Description of Artificial Sequence: Synthetic oligonucleotide
cgcgucacgagugggugag

SEQ ID NO: 2935601 - RNA, 19 nt, Artificial Sequence
  Description of Artificial Sequence: Synthetic oligonucleotide
gccagcacagccaccacgu

SEQ ID NO: 2935602 - RNA, 19 nt, Artificial Sequence
  Description of Artificial Sequence: Synthetic oligonucleotide
gccgagacucggcuaucuc

SEQ ID NO: 2935603 - RNA, 19 nt, Artificial Sequence
  Description of Artificial Sequence: Synthetic oligonucleotide
gcagcagcauguagcaaua

SEQ ID NO: 2935604 - RNA, 19 nt, Artificial Sequence
  Description of Artificial Sequence: Synthetic oligonucleotide
uggcggcacgggccagcac

SEQ ID NO: 2935605 - RNA, 19 nt, Artificial Sequence
  Description of Artificial Sequence: Synthetic oligonucleotide
cgcagguggugggaagucg

SEQ ID NO: 2935606 - RNA, 19 nt, Artificial Sequence
  Description of Artificial Sequence: Synthetic oligonucleotide
gcuccccuugcaugcugac

SEQ ID NO: 2935607 - RNA, 19 nt, Artificial Sequence
  Description of Artificial Sequence: Synthetic oligonucleotide
cggguacaacaucaucuuc

SEQ ID NO: 2935608 - RNA, 19 nt, Artificial Sequence
  Description of Artificial Sequence: Synthetic oligonucleotide
cgccacgcagggcagcacc

SEQ ID NO: 2935609 - RNA, 19 nt, Artificial Sequence
  Description of Artificial Sequence: Synthetic oligonucleotide
ccguggggacgcacuggcg

SEQ ID NO: 2935610 - RNA, 19 nt, Artificial Sequence
  Description of Artificial Sequence: Synthetic oligonucleotide
gggugagggcccgugggga

SEQ ID NO: 2935611 - RNA, 19 nt, Artificial Sequence
  Description of Artificial Sequence: Synthetic oligonucleotide
uggccgagacucggcuauc

SEQ ID NO: 2935612 - RNA, 19 nt, Artificial Sequence
  Description of Artificial Sequence: Synthetic oligonucleotide
ggugcgaugugcuccccuu

SEQ ID NO: 2935613 - RNA, 19 nt, Artificial Sequence
  Description of Artificial Sequence: Synthetic oligonucleotide
gggacgcacuggcggacca

SEQ ID NO: 2935614 - RNA, 19 nt, Artificial Sequence
  Description of Artificial Sequence: Synthetic oligonucleotide
gcgccauguuggcggcacg

SEQ ID NO: 2935615 - RNA, 19 nt, Artificial Sequence
  Description of Artificial Sequence: Synthetic oligonucleotide
cgccauguuggcggcacgg

SEQ ID NO: 2935616 - RNA, 19 nt, Artificial Sequence
  Description of Artificial Sequence: Synthetic oligonucleotide
guggugcaggcggcggcac

SEQ ID NO: 2935617 - RNA, 19 nt, Artificial Sequence
  Description of Artificial Sequence: Synthetic oligonucleotide
caggcggcggcaccgaauu

SEQ ID NO: 2935618 - RNA, 19 nt, Artificial Sequence
  Description of Artificial Sequence: Synthetic oligonucleotide
gccuugguggccagugcca

SEQ ID NO: 2935619 - RNA, 19 nt, Artificial Sequence
  Description of Artificial Sequence: Synthetic oligonucleotide
ggggacgcacuggcggacc

SEQ ID NO: 2935620 - RNA, 19 nt, Artificial Sequence
  Description of Artificial Sequence: Synthetic oligonucleotide
guccagcgucugugcggcc

SEQ ID NO: 2935621 - RNA, 19 nt, Artificial Sequence
  Description of Artificial Sequence: Synthetic oligonucleotide
ggccugucacguguccaac

SEQ ID NO: 2935622 - RNA, 19 nt, Artificial Sequence
  Description of Artificial Sequence: Synthetic oligonucleotide
gcggcacgggccagcacag

SEQ ID NO: 2935623 - RNA, 19 nt, Artificial Sequence
  Description of Artificial Sequence: Synthetic oligonucleotide
cgcagggcagcaccagcag

SEQ ID NO: 2935624 - RNA, 19 nt, Artificial Sequence
  Description of Artificial Sequence: Synthetic oligonucleotide
gcaagcgcaggugguggga

SEQ ID NO: 2935625 - RNA, 19 nt, Artificial Sequence
  Description of Artificial Sequence: Synthetic oligonucleotide
gcccguggggacgcacugg

SEQ ID NO: 2935626 - RNA, 19 nt, Artificial Sequence
  Description of Artificial Sequence: Synthetic oligonucleotide
gcacgggccagcacagcca

SEQ ID NO: 2935627 - RNA, 19 nt, Artificial Sequence
  Description of Artificial Sequence: Synthetic oligonucleotide
ggggccugucacgugucca

SEQ ID NO: 2935628 - RNA, 19 nt, Artificial Sequence
  Description of Artificial Sequence: Synthetic oligonucleotide
cggaccaugcaguggugca

SEQ ID NO: 2935629 - RNA, 19 nt, Artificial Sequence
  Description of Artificial Sequence: Synthetic oligonucleotide
cccacgaagauggccgaga

SEQ ID NO: 2935630 - RNA, 19 nt, Artificial Sequence
  Description of Artificial Sequence: Synthetic oligonucleotide
gcccacgaagauggccgag

SEQ ID NO: 2935631 - RNA, 19 nt, Artificial Sequence
  Description of Artificial Sequence: Synthetic oligonucleotide
cagcgucugugcggcccgc

SEQ ID NO: 2935632 - RNA, 19 nt, Artificial Sequence
  Description of Artificial Sequence: Synthetic oligonucleotide
cucggaagagcgccauguu

SEQ ID NO: 2935633 - RNA, 19 nt, Artificial Sequence
  Description of Artificial Sequence: Synthetic oligonucleotide
ccggguacaacaucaucuu

SEQ ID NO: 2935634 - RNA, 19 nt, Artificial Sequence
  Description of Artificial Sequence: Synthetic oligonucleotide
gagcgccauguuggcggca

SEQ ID NO: 2935635 - RNA, 19 nt, Artificial Sequence
  Description of Artificial Sequence: Synthetic oligonucleotide
ccccuugcaugcugaccuc

SEQ ID NO: 2935636 - RNA, 19 nt, Artificial Sequence
  Description of Artificial Sequence: Synthetic oligonucleotide
gcugagcaccggguacaac

SEQ ID NO: 2935637 - RNA, 19 nt, Artificial Sequence
  Description of Artificial Sequence: Synthetic oligonucleotide
gccacgcagggcagcacca

SEQ ID NO: 2935638 - RNA, 19 nt, Artificial Sequence
  Description of Artificial Sequence: Synthetic oligonucleotide
ggcggaccaugcaguggug

SEQ ID NO: 2935639 - RNA, 19 nt, Artificial Sequence
  Description of Artificial Sequence: Synthetic oligonucleotide
ccaggcugagcaccgggua

SEQ ID NO: 2935640 - RNA, 19 nt, Artificial Sequence
  Description of Artificial Sequence: Synthetic oligonucleotide
gcaccgaauugcgcuggga

SEQ ID NO: 2935641 - RNA, 19 nt, Artificial Sequence
  Description of Artificial Sequence: Synthetic oligonucleotide
gcacagccaccacguugac

SEQ ID NO: 2935642 - RNA, 19 nt, Artificial Sequence
  Description of Artificial Sequence: Synthetic oligonucleotide
cagcuaguccagcgucugu

SEQ ID NO: 2935643 - RNA, 19 nt, Artificial Sequence
  Description of Artificial Sequence: Synthetic oligonucleotide
gcugagcgccacgcagggc

SEQ ID NO: 2935644 - RNA, 19 nt, Artificial Sequence
  Description of Artificial Sequence: Synthetic oligonucleotide
cagcagcagcauguagcaa

SEQ ID NO: 2935645 - RNA, 19 nt, Artificial Sequence
  Description of Artificial Sequence: Synthetic oligonucleotide
gcgucacgagugggugagg

SEQ ID NO: 2935646 - RNA, 19 nt, Artificial Sequence
  Description of Artificial Sequence: Synthetic oligonucleotide
ggagguggcugcagcucaa

SEQ ID NO: 2935647 - RNA, 19 nt, Artificial Sequence
  Description of Artificial Sequence: Synthetic oligonucleotide
cgaauugcgcugggaagga

SEQ ID NO: 2935648 - RNA, 19 nt, Artificial Sequence
  Description of Artificial Sequence: Synthetic oligonucleotide
ggcugcagcucaagcgcaa

SEQ ID NO: 2935649 - RNA, 19 nt, Artificial Sequence
  Description of Artificial Sequence: Synthetic oligonucleotide
ccaccacguucuugcccac

SEQ ID NO: 2935650 - RNA, 19 nt, Artificial Sequence
  Description of Artificial Sequence: Synthetic oligonucleotide
cggcaccgaauugcgcugg

SEQ ID NO: 2935651 - RNA, 19 nt, Artificial Sequence
  Description of Artificial Sequence: Synthetic oligonucleotide
gcgcagguggugggaaguc

SEQ ID NO: 2935652 - RNA, 19 nt, Artificial Sequence
  Description of Artificial Sequence: Synthetic oligonucleotide
ggcugagcaccggguacaa

SEQ ID NO: 2935653 - RNA, 19 nt, Artificial Sequence
  Description of Artificial Sequence: Synthetic oligonucleotide
cgcacuggcggaccaugca

SEQ ID NO: 2935654 - RNA, 19 nt, Artificial Sequence
  Description of Artificial Sequence: Synthetic oligonucleotide
cguucuugcccacgaagau

SEQ ID NO: 2935655 - RNA, 19 nt, Artificial Sequence
  Description of Artificial Sequence: Synthetic oligonucleotide
cguguccaacgcgucacga

SEQ ID NO: 2935656 - RNA, 19 nt, Artificial Sequence
  Description of Artificial Sequence: Synthetic oligonucleotide
ggccgagacucggcuaucu

SEQ ID NO: 2935657 - RNA, 19 nt, Artificial Sequence
  Description of Artificial Sequence: Synthetic oligonucleotide
ccacguucuugcccacgaa

SEQ ID NO: 2935658 - RNA, 19 nt, Artificial Sequence
  Description of Artificial Sequence: Synthetic oligonucleotide
cggcggcaccgaauugcgc

SEQ ID NO: 2935659 - RNA, 19 nt, Artificial Sequence
  Description of Artificial Sequence: Synthetic oligonucleotide
cagccaccacguugacagu

SEQ ID NO: 2935660 - RNA, 19 nt, Artificial Sequence
  Description of Artificial Sequence: Synthetic oligonucleotide
ccucgcugagcgccacgca

SEQ ID NO: 2935661 - RNA, 19 nt, Artificial Sequence
  Description of Artificial Sequence: Synthetic oligonucleotide
cgaugugcuccccuugcau

SEQ ID NO: 2935662 - RNA, 19 nt, Artificial Sequence
  Description of Artificial Sequence: Synthetic oligonucleotide
gcggugcgaugugcucccc

SEQ ID NO: 2935663 - RNA, 19 nt, Artificial Sequence
  Description of Artificial Sequence: Synthetic oligonucleotide
gcaccggguacaacaucau

SEQ ID NO: 2935664 - RNA, 19 nt, Artificial Sequence
  Description of Artificial Sequence: Synthetic oligonucleotide
cgaaccuggcgacgguacu

SEQ ID NO: 2935665 - RNA, 19 nt, Artificial Sequence
  Description of Artificial Sequence: Synthetic oligonucleotide
cgaggaacgugcaggccuu

SEQ ID NO: 2935666 - RNA, 19 nt, Artificial Sequence
  Description of Artificial Sequence: Synthetic oligonucleotide
gggcccguggggacgcacu

SEQ ID NO: 2935667 - RNA, 19 nt, Artificial Sequence
  Description of Artificial Sequence: Synthetic oligonucleotide
gcgccacgcagggcagcac

SEQ ID NO: 2935668 - RNA, 19 nt, Artificial Sequence
  Description of Artificial Sequence: Synthetic oligonucleotide
gcaggcggcggcaccgaau

SEQ ID NO: 2935669 - RNA, 19 nt, Artificial Sequence
  Description of Artificial Sequence: Synthetic oligonucleotide
ggacgcacuggcggaccau

SEQ ID NO: 2935670 - RNA, 19 nt, Artificial Sequence
  Description of Artificial Sequence: Synthetic oligonucleotide
cgcgaaccuggcgacggua

SEQ ID NO: 2935671 - RNA, 19 nt, Artificial Sequence
  Description of Artificial Sequence: Synthetic oligonucleotide
gcaggccuugguggccagu

SEQ ID NO: 2935672 - RNA, 19 nt, Artificial Sequence
  Description of Artificial Sequence: Synthetic oligonucleotide
cggcacgggccagcacagc

SEQ ID NO: 2935673 - RNA, 19 nt, Artificial Sequence
  Description of Artificial Sequence: Synthetic oligonucleotide
cguugacaguggccaggcu

SEQ ID NO: 2935674 - RNA, 19 nt, Artificial Sequence
  Description of Artificial Sequence: Synthetic oligonucleotide
ccagcacagccaccacguu

SEQ ID NO: 2935675 - RNA, 19 nt, Artificial Sequence
  Description of Artificial Sequence: Synthetic oligonucleotide
cggugcgaugugcuccccu

SEQ ID NO: 2935676 - RNA, 19 nt, Artificial Sequence
  Description of Artificial Sequence: Synthetic oligonucleotide
cgcugggaaggagguggcu

SEQ ID NO: 2935677 - RNA, 19 nt, Artificial Sequence
  Description of Artificial Sequence: Synthetic oligonucleotide
aaagaugaaggucaaaagc

SEQ ID NO: 2935678 - RNA, 19 nt, Artificial Sequence
  Description of Artificial Sequence: Synthetic oligonucleotide
aauaguaugaggacgaggc

SEQ ID NO: 2935679 - RNA, 19 nt, Artificial Sequence
  Description of Artificial Sequence: Synthetic oligonucleotide
aagacuuuauuguuggcac

SEQ ID NO: 2935680 - RNA, 19 nt, Artificial Sequence
  Description of Artificial Sequence: Synthetic oligonucleotide
agauauuaaugagagaugc

SEQ ID NO: 2935681 - RNA, 19 nt, Artificial Sequence
  Description of Artificial Sequence: Synthetic oligonucleotide
aaggucaaaagcaugaaac

SEQ ID NO: 2935682 - RNA, 19 nt, Artificial Sequence
  Description of Artificial Sequence: Synthetic oligonucleotide
uaaugagagaugcucaugg

SEQ ID NO: 2935683 - RNA, 19 nt, Artificial Sequence
  Description of Artificial Sequence: Synthetic oligonucleotide
aauuuauccaggucgaugu

SEQ ID NO: 2935684 - RNA, 19 nt, Artificial Sequence
  Description of Artificial Sequence: Synthetic oligonucleotide
aaaagcaugaaacucaguu

SEQ ID NO: 2935685 - RNA, 19 nt, Artificial Sequence
  Description of Artificial Sequence: Synthetic oligonucleotide
aaaagaugaaggucaaaag

SEQ ID NO: 2935686 - RNA, 19 nt, Artificial Sequence
  Description of Artificial Sequence: Synthetic oligonucleotide
ugaacggagacuauuauga

SEQ ID NO: 2935687 - RNA, 19 nt, Artificial Sequence
  Description of Artificial Sequence: Synthetic oligonucleotide
uucuccgucauacaguugg

SEQ ID NO: 2935688 - RNA, 19 nt, Artificial Sequence
  Description of Artificial Sequence: Synthetic oligonucleotide
uagauaaucaugaggagca

SEQ ID NO: 2935689 - RNA, 19 nt, Artificial Sequence
  Description of Artificial Sequence: Synthetic oligonucleotide
uauuaugaauaguaugagg

SEQ ID NO: 2935690 - RNA, 19 nt, Artificial Sequence
  Description of Artificial Sequence: Synthetic oligonucleotide
auagauaaucaugaggagc

SEQ ID NO: 2935691 - RNA, 19 nt, Artificial Sequence
  Description of Artificial Sequence: Synthetic oligonucleotide
ugaaaccugaguuauuccg

SEQ ID NO: 2935692 - RNA, 19 nt, Artificial Sequence
  Description of Artificial Sequence: Synthetic oligonucleotide
uaugaauaguaugaggacg

SEQ ID NO: 2935693 - RNA, 19 nt, Artificial Sequence
  Description of Artificial Sequence: Synthetic oligonucleotide
caugaaacucaguugaacg

SEQ ID NO: 2935694 - RNA, 19 nt, Artificial Sequence
  Description of Artificial Sequence: Synthetic oligonucleotide
ugguagaugagcaagggca

SEQ ID NO: 2935695 - RNA, 19 nt, Artificial Sequence
  Description of Artificial Sequence: Synthetic oligonucleotide
uuuauuguuggcacuaaca

SEQ ID NO: 2935696 - RNA, 19 nt, Artificial Sequence
  Description of Artificial Sequence: Synthetic oligonucleotide
aaagcaugaaacucaguug

SEQ ID NO: 2935697 - RNA, 19 nt, Artificial Sequence
  Description of Artificial Sequence: Synthetic oligonucleotide
aacucaguugaacggagac

SEQ ID NO: 2935698 - RNA, 19 nt, Artificial Sequence
  Description of Artificial Sequence: Synthetic oligonucleotide
auauuaaugagagaugcuc

SEQ ID NO: 2935699 - RNA, 19 nt, Artificial Sequence
  Description of Artificial Sequence: Synthetic oligonucleotide
aaugagagaugcucauggc

SEQ ID NO: 2935700 - RNA, 19 nt, Artificial Sequence
  Description of Artificial Sequence: Synthetic oligonucleotide
uuauuguuggcacuaacac

SEQ ID NO: 2935701 - RNA, 19 nt, Artificial Sequence
  Description of Artificial Sequence: Synthetic oligonucleotide
gcugaauuuauccaggucg

SEQ ID NO: 2935702 - RNA, 19 nt, Artificial Sequence
  Description of Artificial Sequence: Synthetic oligonucleotide
acagauauuaaugagagau

SEQ ID NO: 2935703 - RNA, 19 nt, Artificial Sequence
  Description of Artificial Sequence: Synthetic oligonucleotide
auuaugaauaguaugagga

SEQ ID NO: 2935704 - RNA, 19 nt, Artificial Sequence
  Description of Artificial Sequence: Synthetic oligonucleotide
ugagcaagggcacagauau

SEQ ID NO: 2935705 - RNA, 19 nt, Artificial Sequence
  Description of Artificial Sequence: Synthetic oligonucleotide
gagaacgugucgcagaagg

SEQ ID NO: 2935706 - RNA, 19 nt, Artificial Sequence
  Description of Artificial Sequence: Synthetic oligonucleotide
aaggaucugagcugggugg

SEQ ID NO: 2935707 - RNA, 19 nt, Artificial Sequence
  Description of Artificial Sequence: Synthetic oligonucleotide
augagagaugcucauggcc

SEQ ID NO: 2935708 - RNA, 19 nt, Artificial Sequence
  Description of Artificial Sequence: Synthetic oligonucleotide
gacuauuaugaauaguaug

SEQ ID NO: 2935709 - RNA, 19 nt, Artificial Sequence
  Description of Artificial Sequence: Synthetic oligonucleotide
uauuaaugagagaugcuca

SEQ ID NO: 2935710 - RNA, 19 nt, Artificial Sequence
  Description of Artificial Sequence: Synthetic oligonucleotide
acuauuaugaauaguauga

SEQ ID NO: 2935711 - RNA, 19 nt, Artificial Sequence
  Description of Artificial Sequence: Synthetic oligonucleotide
uuccguguugaaaagauga

SEQ ID NO: 2935712 - RNA, 19 nt, Artificial Sequence
  Description of Artificial Sequence: Synthetic oligonucleotide
auaaucaugaggagcacgc

SEQ ID NO: 2935713 - RNA, 19 nt, Artificial Sequence
  Description of Artificial Sequence: Synthetic oligonucleotide
augaggagcacgcugcugc

SEQ ID NO: 2935714 - RNA, 19 nt, Artificial Sequence
  Description of Artificial Sequence: Synthetic oligonucleotide
aagaugaaggucaaaagca

SEQ ID NO: 2935715 - RNA, 19 nt, Artificial Sequence
  Description of Artificial Sequence: Synthetic oligonucleotide
agcauuggaauucccaacg

SEQ ID NO: 2935716 - RNA, 19 nt, Artificial Sequence
  Description of Artificial Sequence: Synthetic oligonucleotide
augaaacucaguugaacgg

SEQ ID NO: 2935717 - RNA, 19 nt, Artificial Sequence
  Description of Artificial Sequence: Synthetic oligonucleotide
cuaacacauucccagaagg

SEQ ID NO: 2935718 - RNA, 19 nt, Artificial Sequence
  Description of Artificial Sequence: Synthetic oligonucleotide
aguuauuccguguugaaaa

SEQ ID NO: 2935719 - RNA, 19 nt, Artificial Sequence
  Description of Artificial Sequence: Synthetic oligonucleotide
auacaguuggccuugucag

SEQ ID NO: 2935720 - RNA, 19 nt, Artificial Sequence
  Description of Artificial Sequence: Synthetic oligonucleotide
guugaaaagaugaagguca

SEQ ID NO: 2935721 - RNA, 19 nt, Artificial Sequence
  Description of Artificial Sequence: Synthetic oligonucleotide
ugagagaugcucauggccu

SEQ ID NO: 2935722 - RNA, 19 nt, Artificial Sequence
  Description of Artificial Sequence: Synthetic oligonucleotide
uguacauauguacaccgcu

SEQ ID NO: 2935723 - RNA, 19 nt, Artificial Sequence
  Description of Artificial Sequence: Synthetic oligonucleotide
aacacuaucuucagcauug

SEQ ID NO: 2935724 - RNA, 19 nt, Artificial Sequence
  Description of Artificial Sequence: Synthetic oligonucleotide
aaucaugaggagcacgcug

SEQ ID NO: 2935725 - RNA, 19 nt, Artificial Sequence
  Description of Artificial Sequence: Synthetic oligonucleotide
aacgugagggacuugugug

SEQ ID NO: 2935726 - RNA, 19 nt, Artificial Sequence
  Description of Artificial Sequence: Synthetic oligonucleotide
uguguggagcagaagauga

SEQ ID NO: 2935727 - RNA, 19 nt, Artificial Sequence
  Description of Artificial Sequence: Synthetic oligonucleotide
uauagauaaucaugaggag

SEQ ID NO: 2935728 - RNA, 19 nt, Artificial Sequence
  Description of Artificial Sequence: Synthetic oligonucleotide
uguacaccgcuucaggaag

SEQ ID NO: 2935729 - RNA, 19 nt, Artificial Sequence
  Description of Artificial Sequence: Synthetic oligonucleotide
uuaugaauaguaugaggac

SEQ ID NO: 2935730 - RNA, 19 nt, Artificial Sequence
  Description of Artificial Sequence: Synthetic oligonucleotide
gaugauagccacugugucc

SEQ ID NO: 2935731 - RNA, 19 nt, Artificial Sequence
  Description of Artificial Sequence: Synthetic oligonucleotide
augauagccacuguguccg

SEQ ID NO: 2935732 - RNA, 19 nt, Artificial Sequence
  Description of Artificial Sequence: Synthetic oligonucleotide
gacgaggcugaauuuaucc

SEQ ID NO: 2935733 - RNA, 19 nt, Artificial Sequence
  Description of Artificial Sequence: Synthetic oligonucleotide
ucccagaaggaucugagcu

SEQ ID NO: 2935734 - RNA, 19 nt, Artificial Sequence
  Description of Artificial Sequence: Synthetic oligonucleotide
auauguacaccgcuucagg

SEQ ID NO: 2935735 - RNA, 19 nt, Artificial Sequence
  Description of Artificial Sequence: Synthetic oligonucleotide
uuggcacuaacacauuccc

SEQ ID NO: 2935736 - RNA, 19 nt, Artificial Sequence
  Description of Artificial Sequence: Synthetic oligonucleotide
gaaaagaugaaggucaaaa

SEQ ID NO: 2935737 - RNA, 19 nt, Artificial Sequence
  Description of Artificial Sequence: Synthetic oligonucleotide
ugagcugggugguagauga

SEQ ID NO: 2935738 - RNA, 19 nt, Artificial Sequence
  Description of Artificial Sequence: Synthetic oligonucleotide
gauaaucaugaggagcacg

SEQ ID NO: 2935739 - RNA, 19 nt, Artificial Sequence
  Description of Artificial Sequence: Synthetic oligonucleotide
uuggaauucccaacgugag

SEQ ID NO: 2935740 - RNA, 19 nt, Artificial Sequence
  Description of Artificial Sequence: Synthetic oligonucleotide
agaugauagccacuguguc

SEQ ID NO: 2935741 - RNA, 19 nt, Artificial Sequence
  Description of Artificial Sequence: Synthetic oligonucleotide
aaaccugaguuauuccgug

SEQ ID NO: 2935742 - RNA, 19 nt, Artificial Sequence
  Description of Artificial Sequence: Synthetic oligonucleotide
uauuguuggcacuaacaca

SEQ ID NO: 2935743 - RNA, 19 nt, Artificial Sequence
  Description of Artificial Sequence: Synthetic oligonucleotide
aagggcacagauauuaaug

SEQ ID NO: 2935744 - RNA, 19 nt, Artificial Sequence
  Description of Artificial Sequence: Synthetic oligonucleotide
augcucauggccugcaaac

SEQ ID NO: 2935745 - RNA, 19 nt, Artificial Sequence
  Description of Artificial Sequence: Synthetic oligonucleotide
uauuccguguugaaaagau

SEQ ID NO: 2935746 - RNA, 19 nt, Artificial Sequence
  Description of Artificial Sequence: Synthetic oligonucleotide
aauucccaacgugagggac

SEQ ID NO: 2935747 - RNA, 19 nt, Artificial Sequence
  Description of Artificial Sequence: Synthetic oligonucleotide
ugccuugacaccauccaag

SEQ ID NO: 2935748 - RNA, 19 nt, Artificial Sequence
  Description of Artificial Sequence: Synthetic oligonucleotide
uucagcauuggaauuccca

SEQ ID NO: 2935749 - RNA, 19 nt, Artificial Sequence
  Description of Artificial Sequence: Synthetic oligonucleotide
agcuucacucccuucugcc

SEQ ID NO: 2935750 - RNA, 19 nt, Artificial Sequence
  Description of Artificial Sequence: Synthetic oligonucleotide
uuauccaggucgaugugug

SEQ ID NO: 2935751 - RNA, 19 nt, Artificial Sequence
  Description of Artificial Sequence: Synthetic oligonucleotide
auuguuggcacuaacacau

SEQ ID NO: 2935752 - RNA, 19 nt, Artificial Sequence
  Description of Artificial Sequence: Synthetic oligonucleotide
ggcacuaacacauucccag

SEQ ID NO: 2935753 - RNA, 19 nt, Artificial Sequence
  Description of Artificial Sequence: Synthetic oligonucleotide
uugaacggagacuauuaug

SEQ ID NO: 2935754 - RNA, 19 nt, Artificial Sequence
  Description of Artificial Sequence: Synthetic oligonucleotide
aucaugaggagcacgcugc

SEQ ID NO: 2935755 - RNA, 19 nt, Artificial Sequence
  Description of Artificial Sequence: Synthetic oligonucleotide
uguggguuggagaacgugu

SEQ ID NO: 2935756 - RNA, 19 nt, Artificial Sequence
  Description of Artificial Sequence: Synthetic oligonucleotide
acuaacacauucccagaag

SEQ ID NO: 2935757 - RNA, 19 nt, Artificial Sequence
  Description of Artificial Sequence: Synthetic oligonucleotide
uguugaaaagaugaagguc

SEQ ID NO: 2935758 - RNA, 19 nt, Artificial Sequence
  Description of Artificial Sequence: Synthetic oligonucleotide
ggaauucccaacgugaggg

SEQ ID NO: 2935759 - RNA, 19 nt, Artificial Sequence
  Description of Artificial Sequence: Synthetic oligonucleotide
ugugaaaccugaguuauuc

SEQ ID NO: 2935760 - RNA, 19 nt, Artificial Sequence
  Description of Artificial Sequence: Synthetic oligonucleotide
aacggagacuauuaugaau

SEQ ID NO: 2935761 - RNA, 19 nt, Artificial Sequence
  Description of Artificial Sequence: Synthetic oligonucleotide
cagaaggugguauagauaa

SEQ ID NO: 2935762 - RNA, 19 nt, Artificial Sequence
  Description of Artificial Sequence: Synthetic oligonucleotide
uggaauucccaacgugagg

SEQ ID NO: 2935763 - RNA, 19 nt, Artificial Sequence
  Description of Artificial Sequence: Synthetic oligonucleotide
uaacacauucccagaagga

SEQ ID NO: 2935764 - RNA, 19 nt, Artificial Sequence
  Description of Artificial Sequence: Synthetic oligonucleotide
gaauaguaugaggacgagg

SEQ ID NO: 2935765 - RNA, 19 nt, Artificial Sequence
  Description of Artificial Sequence: Synthetic oligonucleotide
aacgugucgcagaaggugg

SEQ ID NO: 2935766 - RNA, 19 nt, Artificial Sequence
  Description of Artificial Sequence: Synthetic oligonucleotide
uauguacaccgcuucagga

SEQ ID NO: 2935767 - RNA, 19 nt, Artificial Sequence
  Description of Artificial Sequence: Synthetic oligonucleotide
aagaugauagccacugugu

SEQ ID NO: 2935768 - RNA, 19 nt, Artificial Sequence
  Description of Artificial Sequence: Synthetic oligonucleotide
ucugccuugacaccaucca

SEQ ID NO: 2935769 - RNA, 19 nt, Artificial Sequence
  Description of Artificial Sequence: Synthetic oligonucleotide
uacauauguacaccgcuuc

SEQ ID NO: 2935770 - RNA, 19 nt, Artificial Sequence
  Description of Artificial Sequence: Synthetic oligonucleotide
ugaaacucaguugaacgga

SEQ ID NO: 2935771 - RNA, 19 nt, Artificial Sequence
  Description of Artificial Sequence: Synthetic oligonucleotide
auggccugcaaacacuauc

SEQ ID NO: 2935772 - RNA, 19 nt, Artificial Sequence
  Description of Artificial Sequence: Synthetic oligonucleotide
ucagcauuggaauucccaa

SEQ ID NO: 2935773 - RNA, 19 nt, Artificial Sequence
  Description of Artificial Sequence: Synthetic oligonucleotide
gaauuuauccaggucgaug

SEQ ID NO: 2935774 - RNA, 19 nt, Artificial Sequence
  Description of Artificial Sequence: Synthetic oligonucleotide
uaguaugaggacgaggcug

SEQ ID NO: 2935775 - RNA, 19 nt, Artificial Sequence
  Description of Artificial Sequence: Synthetic oligonucleotide
cuauuaugaauaguaugag

SEQ ID NO: 2935776 - RNA, 19 nt, Artificial Sequence
  Description of Artificial Sequence: Synthetic oligonucleotide
auuaaugagagaugcucau

SEQ ID NO: 2935777 - RNA, 19 nt, Artificial Sequence
  Description of Artificial Sequence: Synthetic oligonucleotide
cguguugaaaagaugaagg

SEQ ID NO: 2935778 - RNA, 19 nt, Artificial Sequence
  Description of Artificial Sequence: Synthetic oligonucleotide
accauccaagacuuuauug

SEQ ID NO: 2935779 - RNA, 19 nt, Artificial Sequence
  Description of Artificial Sequence: Synthetic oligonucleotide
gaaggaucugagcugggug

SEQ ID NO: 2935780 - RNA, 19 nt, Artificial Sequence
  Description of Artificial Sequence: Synthetic oligonucleotide
cucccuucugccuugacac

SEQ ID NO: 2935781 - RNA, 19 nt, Artificial Sequence
  Description of Artificial Sequence: Synthetic oligonucleotide
aggucaaaagcaugaaacu

SEQ ID NO: 2935782 - RNA, 19 nt, Artificial Sequence
  Description of Artificial Sequence: Synthetic oligonucleotide
agggcacagauauuaauga

SEQ ID NO: 2935783 - RNA, 19 nt, Artificial Sequence
  Description of Artificial Sequence: Synthetic oligonucleotide
ugguauagauaaucaugag

SEQ ID NO: 2935784 - RNA, 19 nt, Artificial Sequence
  Description of Artificial Sequence: Synthetic oligonucleotide
uggccugcaaacacuaucu

SEQ ID NO: 2935785 - RNA, 19 nt, Artificial Sequence
  Description of Artificial Sequence: Synthetic oligonucleotide
aucuucagcauuggaauuc

SEQ ID NO: 2935786 - RNA, 19 nt, Artificial Sequence
  Description of Artificial Sequence: Synthetic oligonucleotide
gaaggugguauagauaauc

SEQ ID NO: 2935787 - RNA, 19 nt, Artificial Sequence
  Description of Artificial Sequence: Synthetic oligonucleotide
aacacauucccagaaggau

SEQ ID NO: 2935788 - RNA, 19 nt, Artificial Sequence
  Description of Artificial Sequence: Synthetic oligonucleotide
auuggaauucccaacguga

SEQ ID NO: 2935789 - RNA, 19 nt, Artificial Sequence
  Description of Artificial Sequence: Synthetic oligonucleotide
guuauuccguguugaaaag

SEQ ID NO: 2935790 - RNA, 19 nt, Artificial Sequence
  Description of Artificial Sequence: Synthetic oligonucleotide
aaacacuaucuucagcauu

SEQ ID NO: 2935791 - RNA, 19 nt, Artificial Sequence
  Description of Artificial Sequence: Synthetic oligonucleotide
uugacaccauccaagacuu

SEQ ID NO: 2935792 - RNA, 19 nt, Artificial Sequence
  Description of Artificial Sequence: Synthetic oligonucleotide
gugguauagauaaucauga

SEQ ID NO: 2935793 - RNA, 19 nt, Artificial Sequence
  Description of Artificial Sequence: Synthetic oligonucleotide
cagauauuaaugagagaug

SEQ ID NO: 2935794 - RNA, 19 nt, Artificial Sequence
  Description of Artificial Sequence: Synthetic oligonucleotide
agggacuuguguguggagc

SEQ ID NO: 2935795 - RNA, 19 nt, Artificial Sequence
  Description of Artificial Sequence: Synthetic oligonucleotide
ggugguauagauaaucaug

SEQ ID NO: 2935796 - RNA, 19 nt, Artificial Sequence
  Description of Artificial Sequence: Synthetic oligonucleotide
uggguuggagaacgugucg

SEQ ID NO: 2935797 - RNA, 19 nt, Artificial Sequence
  Description of Artificial Sequence: Synthetic oligonucleotide
ugcaaacacuaucuucagc

SEQ ID NO: 2935798 - RNA, 19 nt, Artificial Sequence
  Description of Artificial Sequence: Synthetic oligonucleotide
gucaaaagcaugaaacuca

SEQ ID NO: 2935799 - RNA, 19 nt, Artificial Sequence
  Description of Artificial Sequence: Synthetic oligonucleotide
uccgucauacaguuggccu

SEQ ID NO: 2935800 - RNA, 19 nt, Artificial Sequence
  Description of Artificial Sequence: Synthetic oligonucleotide
acuaucuucagcauuggaa

SEQ ID NO: 2935801 - RNA, 19 nt, Artificial Sequence
  Description of Artificial Sequence: Synthetic oligonucleotide
uacagcccuguacauaugu

SEQ ID NO: 2935802 - RNA, 19 nt, Artificial Sequence
  Description of Artificial Sequence: Synthetic oligonucleotide
gaaacucaguugaacggag

SEQ ID NO: 2935803 - RNA, 19 nt, Artificial Sequence
  Description of Artificial Sequence: Synthetic oligonucleotide
uguuggcacuaacacauuc

SEQ ID NO: 2935804 - RNA, 19 nt, Artificial Sequence
  Description of Artificial Sequence: Synthetic oligonucleotide
cagaagaugauagccacug

SEQ ID NO: 2935805 - RNA, 19 nt, Artificial Sequence
  Description of Artificial Sequence: Synthetic oligonucleotide
gaggcugaauuuauccagg

SEQ ID NO: 2935806 - RNA, 19 nt, Artificial Sequence
  Description of Artificial Sequence: Synthetic oligonucleotide
ugggugguagaugagcaag

SEQ ID NO: 2935807 - RNA, 19 nt, Artificial Sequence
  Description of Artificial Sequence: Synthetic oligonucleotide
uuaaugagagaugcucaug

SEQ ID NO: 2935808 - RNA, 19 nt, Artificial Sequence
  Description of Artificial Sequence: Synthetic oligonucleotide
gaacgugucgcagaaggug

SEQ ID NO: 2935809 - RNA, 19 nt, Artificial Sequence
  Description of Artificial Sequence: Synthetic oligonucleotide
augaauaguaugaggacga

SEQ ID NO: 2935810 - RNA, 19 nt, Artificial Sequence
  Description of Artificial Sequence: Synthetic oligonucleotide
uuuauccaggucgaugugu

SEQ ID NO: 2935811 - RNA, 19 nt, Artificial Sequence
  Description of Artificial Sequence: Synthetic oligonucleotide
cauacaguuggccuuguca

SEQ ID NO: 2935812 - RNA, 19 nt, Artificial Sequence
  Description of Artificial Sequence: Synthetic oligonucleotide
auguguggguuggagaacg

SEQ ID NO: 2935813 - RNA, 19 nt, Artificial Sequence
  Description of Artificial Sequence: Synthetic oligonucleotide
augaaggucaaaagcauga

SEQ ID NO: 2935814 - RNA, 19 nt, Artificial Sequence
  Description of Artificial Sequence: Synthetic oligonucleotide
gcacagauauuaaugagag

SEQ ID NO: 2935815 - RNA, 19 nt, Artificial Sequence
  Description of Artificial Sequence: Synthetic oligonucleotide
acacauucccagaaggauc

SEQ ID NO: 2935816 - RNA, 19 nt, Artificial Sequence
  Description of Artificial Sequence: Synthetic oligonucleotide
uucugccuugacaccaucc

SEQ ID NO: 2935817 - RNA, 19 nt, Artificial Sequence
  Description of Artificial Sequence: Synthetic oligonucleotide
cauuggaauucccaacgug

SEQ ID NO: 2935818 - RNA, 19 nt, Artificial Sequence
  Description of Artificial Sequence: Synthetic oligonucleotide
ggagcagaagaugauagcc

SEQ ID NO: 2935819 - RNA, 19 nt, Artificial Sequence
  Description of Artificial Sequence: Synthetic oligonucleotide
cuguacauauguacaccgc

SEQ ID NO: 2935820 - RNA, 19 nt, Artificial Sequence
  Description of Artificial Sequence: Synthetic oligonucleotide
ccuguacauauguacaccg

SEQ ID NO: 2935821 - RNA, 19 nt, Artificial Sequence
  Description of Artificial Sequence: Synthetic oligonucleotide
ucuucagcauuggaauucc

SEQ ID NO: 2935822 - RNA, 19 nt, Artificial Sequence
  Description of Artificial Sequence: Synthetic oligonucleotide
cauauguacaccgcuucag

SEQ ID NO: 2935823 - RNA, 19 nt, Artificial Sequence
  Description of Artificial Sequence: Synthetic oligonucleotide
uggagcagaagaugauagc

SEQ ID NO: 2935824 - RNA, 19 nt, Artificial Sequence
  Description of Artificial Sequence: Synthetic oligonucleotide
guggagcagaagaugauag

SEQ ID NO: 2935825 - RNA, 19 nt, Artificial Sequence
  Description of Artificial Sequence: Synthetic oligonucleotide
cuugacaccauccaagacu

SEQ ID NO: 2935826 - RNA, 19 nt, Artificial Sequence
  Description of Artificial Sequence: Synthetic oligonucleotide
uuggagaacgugucgcaga

SEQ ID NO: 2935827 - RNA, 19 nt, Artificial Sequence
  Description of Artificial Sequence: Synthetic oligonucleotide
cuuuauuguuggcacuaac

SEQ ID NO: 2935828 - RNA, 19 nt, Artificial Sequence
  Description of Artificial Sequence: Synthetic oligonucleotide
acauauguacaccgcuuca

SEQ ID NO: 2935829 - RNA, 19 nt, Artificial Sequence
  Description of Artificial Sequence: Synthetic oligonucleotide
guuggcacuaacacauucc

SEQ ID NO: 2935830 - RNA, 19 nt, Artificial Sequence
  Description of Artificial Sequence: Synthetic oligonucleotide
uccuucuccgucauacagu

SEQ ID NO: 2935831 - RNA, 19 nt, Artificial Sequence
  Description of Artificial Sequence: Synthetic oligonucleotide
uuauuccguguugaaaaga

SEQ ID NO: 2935832 - RNA, 19 nt, Artificial Sequence
  Description of Artificial Sequence: Synthetic oligonucleotide
aguuggccuugucagcuuc

SEQ ID NO: 2935833 - RNA, 19 nt, Artificial Sequence
  Description of Artificial Sequence: Synthetic oligonucleotide
gaaggucaaaagcaugaaa

SEQ ID NO: 2935834 - RNA, 19 nt, Artificial Sequence
  Description of Artificial Sequence: Synthetic oligonucleotide
caggaaggcuccuucuccg

SEQ ID NO: 2935835 - RNA, 19 nt, Artificial Sequence
  Description of Artificial Sequence: Synthetic oligonucleotide
auccaggucgauguguggg

SEQ ID NO: 2935836 - RNA, 19 nt, Artificial Sequence
  Description of Artificial Sequence: Synthetic oligonucleotide
ugaauaguaugaggacgag

SEQ ID NO: 2935837 - RNA, 19 nt, Artificial Sequence
  Description of Artificial Sequence: Synthetic oligonucleotide
uggagaacgugucgcagaa

SEQ ID NO: 2935838 - RNA, 19 nt, Artificial Sequence
  Description of Artificial Sequence: Synthetic oligonucleotide
uucaggaaggcuccuucuc

SEQ ID NO: 2935839 - RNA, 19 nt, Artificial Sequence
  Description of Artificial Sequence: Synthetic oligonucleotide
cugaauuuauccaggucga

SEQ ID NO: 2935840 - RNA, 19 nt, Artificial Sequence
  Description of Artificial Sequence: Synthetic oligonucleotide
acggagacuauuaugaaua

SEQ ID NO: 2935841 - RNA, 19 nt, Artificial Sequence
  Description of Artificial Sequence: Synthetic oligonucleotide
aaccugaguuauuccgugu

SEQ ID NO: 2935842 - RNA, 19 nt, Artificial Sequence
  Description of Artificial Sequence: Synthetic oligonucleotide
caagacuuuauuguuggca

SEQ ID NO: 2935843 - RNA, 19 nt, Artificial Sequence
  Description of Artificial Sequence: Synthetic oligonucleotide
ucgauguguggguuggaga

SEQ ID NO: 2935844 - RNA, 19 nt, Artificial Sequence
  Description of Artificial Sequence: Synthetic oligonucleotide
acgaggcugaauuuaucca

SEQ ID NO: 2935845 - RNA, 19 nt, Artificial Sequence
  Description of Artificial Sequence: Synthetic oligonucleotide
uacaguuggccuugucagc

SEQ ID NO: 2935846 - RNA, 19 nt, Artificial Sequence
  Description of Artificial Sequence: Synthetic oligonucleotide
uauccaggucgaugugugg

SEQ ID NO: 2935847 - RNA, 19 nt, Artificial Sequence
  Description of Artificial Sequence: Synthetic oligonucleotide
auaguaugaggacgaggcu

SEQ ID NO: 2935848 - RNA, 19 nt, Artificial Sequence
  Description of Artificial Sequence: Synthetic oligonucleotide
uccguguugaaaagaugaa

SEQ ID NO: 2935849 - RNA, 19 nt, Artificial Sequence
  Description of Artificial Sequence: Synthetic oligonucleotide
ugaguuauuccguguugaa

SEQ ID NO: 2935850 - RNA, 19 nt, Artificial Sequence
  Description of Artificial Sequence: Synthetic oligonucleotide
accgcuucaggaaggcucc

SEQ ID NO: 2935851 - RNA, 19 nt, Artificial Sequence
  Description of Artificial Sequence: Synthetic oligonucleotide
auuuauccaggucgaugug

SEQ ID NO: 2935852 - RNA, 19 nt, Artificial Sequence
  Description of Artificial Sequence: Synthetic oligonucleotide
auguacaccgcuucaggaa

SEQ ID NO: 2935853 - RNA, 19 nt, Artificial Sequence
  Description of Artificial Sequence: Synthetic oligonucleotide
ccugcaaacacuaucuuca

SEQ ID NO: 2935854 - RNA, 19 nt, Artificial Sequence
  Description of Artificial Sequence: Synthetic oligonucleotide
agcaagggcacagauauua

SEQ ID NO: 2935855 - RNA, 19 nt, Artificial Sequence
  Description of Artificial Sequence: Synthetic oligonucleotide
gaucugagcugggugguag

SEQ ID NO: 2935856 - RNA, 19 nt, Artificial Sequence
  Description of Artificial Sequence: Synthetic oligonucleotide
gugaaaccugaguuauucc

SEQ ID NO: 2935857 - RNA, 19 nt, Artificial Sequence
  Description of Artificial Sequence: Synthetic oligonucleotide
agauaaucaugaggagcac

SEQ ID NO: 2935858 - RNA, 19 nt, Artificial Sequence
  Description of Artificial Sequence: Synthetic oligonucleotide
gagagaugcucauggccug

SEQ ID NO: 2935859 - RNA, 19 nt, Artificial Sequence
  Description of Artificial Sequence: Synthetic oligonucleotide
uggugugaaaccugaguua

SEQ ID NO: 2935860 - RNA, 19 nt, Artificial Sequence
  Description of Artificial Sequence: Synthetic oligonucleotide
cuaucuucagcauuggaau

SEQ ID NO: 2935861 - RNA, 19 nt, Artificial Sequence
  Description of Artificial Sequence: Synthetic oligonucleotide
agacuuuauuguuggcacu

SEQ ID NO: 2935862 - RNA, 19 nt, Artificial Sequence
  Description of Artificial Sequence: Synthetic oligonucleotide
auagccacuguguccgcug

SEQ ID NO: 2935863 - RNA, 19 nt, Artificial Sequence
  Description of Artificial Sequence: Synthetic oligonucleotide
gugguagaugagcaagggc

SEQ ID NO: 2935864 - RNA, 19 nt, Artificial Sequence
  Description of Artificial Sequence: Synthetic oligonucleotide
uucccagaaggaucugagc

SEQ ID NO: 2935865 - RNA, 19 nt, Artificial Sequence
  Description of Artificial Sequence: Synthetic oligonucleotide
auucccagaaggaucugag

SEQ ID NO: 2935866 - RNA, 19 nt, Artificial Sequence
  Description of Artificial Sequence: Synthetic oligonucleotide
aggugguauagauaaucau

SEQ ID NO: 2935867 - RNA, 19 nt, Artificial Sequence
  Description of Artificial Sequence: Synthetic oligonucleotide
acucccuucugccuugaca

SEQ ID NO: 2935868 - RNA, 19 nt, Artificial Sequence
  Description of Artificial Sequence: Synthetic oligonucleotide
agagaugcucauggccugc

SEQ ID NO: 2935869 - RNA, 19 nt, Artificial Sequence
  Description of Artificial Sequence: Synthetic oligonucleotide
aguaugaggacgaggcuga

SEQ ID NO: 2935870 - RNA, 19 nt, Artificial Sequence
  Description of Artificial Sequence: Synthetic oligonucleotide
caccgcuucaggaaggcuc

SEQ ID NO: 2935871 - RNA, 19 nt, Artificial Sequence
  Description of Artificial Sequence: Synthetic oligonucleotide
ggccuugucagcuucacuc

SEQ ID NO: 2935872 - RNA, 19 nt, Artificial Sequence
  Description of Artificial Sequence: Synthetic oligonucleotide
uccgcuggugugaaaccug

SEQ ID NO: 2935873 - RNA, 19 nt, Artificial Sequence
  Description of Artificial Sequence: Synthetic oligonucleotide
uggcacuaacacauuccca

SEQ ID NO: 2935874 - RNA, 19 nt, Artificial Sequence
  Description of Artificial Sequence: Synthetic oligonucleotide
cagcauuggaauucccaac

SEQ ID NO: 2935875 - RNA, 19 nt, Artificial Sequence
  Description of Artificial Sequence: Synthetic oligonucleotide
acaguuggccuugucagcu

SEQ ID NO: 2935876 - RNA, 19 nt, Artificial Sequence
  Description of Artificial Sequence: Synthetic oligonucleotide
uaucuucagcauuggaauu

SEQ ID NO: 2935877 - RNA, 19 nt, Artificial Sequence
  Description of Artificial Sequence: Synthetic oligonucleotide
gaaggcuccuucuccguca

SEQ ID NO: 2935878 - RNA, 19 nt, Artificial Sequence
  Description of Artificial Sequence: Synthetic oligonucleotide
cugcaaacacuaucuucag

SEQ ID NO: 2935879 - RNA, 19 nt, Artificial Sequence
  Description of Artificial Sequence: Synthetic oligonucleotide
ugagggacuugugugugga

SEQ ID NO: 2935880 - RNA, 19 nt, Artificial Sequence
  Description of Artificial Sequence: Synthetic oligonucleotide
uguggagcagaagaugaua

SEQ ID NO: 2935881 - RNA, 19 nt, Artificial Sequence
  Description of Artificial Sequence: Synthetic oligonucleotide
ugaaggucaaaagcaugaa

SEQ ID NO: 2935882 - RNA, 19 nt, Artificial Sequence
  Description of Artificial Sequence: Synthetic oligonucleotide
ucuccgucauacaguuggc

SEQ ID NO: 2935883 - RNA, 19 nt, Artificial Sequence
  Description of Artificial Sequence: Synthetic oligonucleotide
cucaguugaacggagacua

SEQ ID NO: 2935884 - RNA, 19 nt, Artificial Sequence
  Description of Artificial Sequence: Synthetic oligonucleotide
ggucaaaagcaugaaacuc

SEQ ID NO: 2935885 - RNA, 19 nt, Artificial Sequence
  Description of Artificial Sequence: Synthetic oligonucleotide
agaugaaggucaaaagcau

SEQ ID NO: 2935886 - RNA, 19 nt, Artificial Sequence
  Description of Artificial Sequence: Synthetic oligonucleotide
guguugaaaagaugaaggu

SEQ ID NO: 2935887 - RNA, 19 nt, Artificial Sequence
  Description of Artificial Sequence: Synthetic oligonucleotide
agacuauuaugaauaguau

SEQ ID NO: 2935888 - RNA, 19 nt, Artificial Sequence
  Description of Artificial Sequence: Synthetic oligonucleotide
acgugagggacuugugugu

SEQ ID NO: 2935889 - RNA, 19 nt, Artificial Sequence
  Description of Artificial Sequence: Synthetic oligonucleotide
agaagaugauagccacugu

SEQ ID NO: 2935890 - RNA, 19 nt, Artificial Sequence
  Description of Artificial Sequence: Synthetic oligonucleotide
uucacucccuucugccuug

SEQ ID NO: 2935891 - RNA, 19 nt, Artificial Sequence
  Description of Artificial Sequence: Synthetic oligonucleotide
gaugcucauggccugcaaa

SEQ ID NO: 2935892 - RNA, 19 nt, Artificial Sequence
  Description of Artificial Sequence: Synthetic oligonucleotide
uguccgcuggugugaaacc

SEQ ID NO: 2935893 - RNA, 19 nt, Artificial Sequence
  Description of Artificial Sequence: Synthetic oligonucleotide
aggucgauguguggguugg

SEQ ID NO: 2935894 - RNA, 19 nt, Artificial Sequence
  Description of Artificial Sequence: Synthetic oligonucleotide
guuggagaacgugucgcag

SEQ ID NO: 2935895 - RNA, 19 nt, Artificial Sequence
  Description of Artificial Sequence: Synthetic oligonucleotide
uccaggucgaugugugggu

SEQ ID NO: 2935896 - RNA, 19 nt, Artificial Sequence
  Description of Artificial Sequence: Synthetic oligonucleotide
aaacucaguugaacggaga

SEQ ID NO: 2935897 - RNA, 19 nt, Artificial Sequence
  Description of Artificial Sequence: Synthetic oligonucleotide
gucgcagaaggugguauag

SEQ ID NO: 2935898 - RNA, 19 nt, Artificial Sequence
  Description of Artificial Sequence: Synthetic oligonucleotide
gggcacagauauuaaugag

SEQ ID NO: 2935899 - RNA, 19 nt, Artificial Sequence
  Description of Artificial Sequence: Synthetic oligonucleotide
gacuuuauuguuggcacua

SEQ ID NO: 2935900 - RNA, 19 nt, Artificial Sequence
  Description of Artificial Sequence: Synthetic oligonucleotide
aggcugaauuuauccaggu

SEQ ID NO: 2935901 - RNA, 19 nt, Artificial Sequence
  Description of Artificial Sequence: Synthetic oligonucleotide
gauauuaaugagagaugcu

SEQ ID NO: 2935902 - RNA, 19 nt, Artificial Sequence
  Description of Artificial Sequence: Synthetic oligonucleotide
ggcacagauauuaaugaga

SEQ ID NO: 2935903 - RNA, 19 nt, Artificial Sequence
  Description of Artificial Sequence: Synthetic oligonucleotide
gacaccauccaagacuuua

SEQ ID NO: 2935904 - RNA, 19 nt, Artificial Sequence
  Description of Artificial Sequence: Synthetic oligonucleotide
gugagggacuugugugugg

SEQ ID NO: 2935905 - RNA, 19 nt, Artificial Sequence
  Description of Artificial Sequence: Synthetic oligonucleotide
uaaucaugaggagcacgcu

SEQ ID NO: 2935906 - RNA, 19 nt, Artificial Sequence
  Description of Artificial Sequence: Synthetic oligonucleotide
accugaguuauuccguguu

SEQ ID NO: 2935907 - RNA, 19 nt, Artificial Sequence
  Description of Artificial Sequence: Synthetic oligonucleotide
aguugaacggagacuauua

SEQ ID NO: 2935908 - RNA, 19 nt, Artificial Sequence
  Description of Artificial Sequence: Synthetic oligonucleotide
gaacggagacuauuaugaa

SEQ ID NO: 2935909 - RNA, 19 nt, Artificial Sequence
  Description of Artificial Sequence: Synthetic oligonucleotide
ugaaaagaugaaggucaaa

SEQ ID NO: 2935910 - RNA, 19 nt, Artificial Sequence
  Description of Artificial Sequence: Synthetic oligonucleotide
gaauucccaacgugaggga

SEQ ID NO: 2935911 - RNA, 19 nt, Artificial Sequence
  Description of Artificial Sequence: Synthetic oligonucleotide
acucaguugaacggagacu

SEQ ID NO: 2935912 - RNA, 19 nt, Artificial Sequence
  Description of Artificial Sequence: Synthetic oligonucleotide
gaaaccugaguuauuccgu

SEQ ID NO: 2935913 - RNA, 19 nt, Artificial Sequence
  Description of Artificial Sequence: Synthetic oligonucleotide
ugcucauggccugcaaaca

SEQ ID NO: 2935914 - RNA, 19 nt, Artificial Sequence
  Description of Artificial Sequence: Synthetic oligonucleotide
cuucagcauuggaauuccc

SEQ ID NO: 2935915 - RNA, 19 nt, Artificial Sequence
  Description of Artificial Sequence: Synthetic oligonucleotide
acacuaucuucagcauugg

SEQ ID NO: 2935916 - RNA, 19 nt, Artificial Sequence
  Description of Artificial Sequence: Synthetic oligonucleotide
agaaggaucugagcugggu

SEQ ID NO: 2935917 - RNA, 19 nt, Artificial Sequence
  Description of Artificial Sequence: Synthetic oligonucleotide
cacauucccagaaggaucu

SEQ ID NO: 2935918 - RNA, 19 nt, Artificial Sequence
  Description of Artificial Sequence: Synthetic oligonucleotide
guguguggagcagaagaug

SEQ ID NO: 2935919 - RNA, 19 nt, Artificial Sequence
  Description of Artificial Sequence: Synthetic oligonucleotide
gucgauguguggguuggag

SEQ ID NO: 2935920 - RNA, 19 nt, Artificial Sequence
  Description of Artificial Sequence: Synthetic oligonucleotide
cacuguguccgcuggugug

SEQ ID NO: 2935921 - RNA, 19 nt, Artificial Sequence
  Description of Artificial Sequence: Synthetic oligonucleotide
ccagaaggaucugagcugg

SEQ ID NO: 2935922 - RNA, 19 nt, Artificial Sequence
  Description of Artificial Sequence: Synthetic oligonucleotide
agcccuguacauauguaca

SEQ ID NO: 2935923 - RNA, 19 nt, Artificial Sequence
  Description of Artificial Sequence: Synthetic oligonucleotide
ucaguugaacggagacuau

SEQ ID NO: 2935924 - RNA, 19 nt, Artificial Sequence
  Description of Artificial Sequence: Synthetic oligonucleotide
cugaguuauuccguguuga

SEQ ID NO: 2935925 - RNA, 19 nt, Artificial Sequence
  Description of Artificial Sequence: Synthetic oligonucleotide
uacaccgcuucaggaaggc

SEQ ID NO: 2935926 - RNA, 19 nt, Artificial Sequence
  Description of Artificial Sequence: Synthetic oligonucleotide
ugucgcagaaggugguaua

SEQ ID NO: 2935927 - RNA, 19 nt, Artificial Sequence
  Description of Artificial Sequence: Synthetic oligonucleotide
gauguguggguuggagaac

SEQ ID NO: 2935928 - RNA, 19 nt, Artificial Sequence
  Description of Artificial Sequence: Synthetic oligonucleotide
auuccguguugaaaagaug

SEQ ID NO: 2935929 - RNA, 19 nt, Artificial Sequence
  Description of Artificial Sequence: Synthetic oligonucleotide
ugaauuuauccaggucgau

SEQ ID NO: 2935930 - RNA, 19 nt, Artificial Sequence
  Description of Artificial Sequence: Synthetic oligonucleotide
uguguggguuggagaacgu

SEQ ID NO: 2935931 - RNA, 19 nt, Artificial Sequence
  Description of Artificial Sequence: Synthetic oligonucleotide
cgaggcugaauuuauccag

SEQ ID NO: 2935932 - RNA, 19 nt, Artificial Sequence
  Description of Artificial Sequence: Synthetic oligonucleotide
guacaccgcuucaggaagg

SEQ ID NO: 2935933 - RNA, 19 nt, Artificial Sequence
  Description of Artificial Sequence: Synthetic oligonucleotide
ugaggagcacgcugcugcu

SEQ ID NO: 2935934 - RNA, 19 nt, Artificial Sequence
  Description of Artificial Sequence: Synthetic oligonucleotide
ucauacaguuggccuuguc

SEQ ID NO: 2935935 - RNA, 19 nt, Artificial Sequence
  Description of Artificial Sequence: Synthetic oligonucleotide
aaggcuccuucuccgucau

SEQ ID NO: 2935936 - RNA, 19 nt, Artificial Sequence
  Description of Artificial Sequence: Synthetic oligonucleotide
cacuaacacauucccagaa

SEQ ID NO: 2935937 - RNA, 19 nt, Artificial Sequence
  Description of Artificial Sequence: Synthetic oligonucleotide
uugucagcuucacucccuu

SEQ ID NO: 2935938 - RNA, 19 nt, Artificial Sequence
  Description of Artificial Sequence: Synthetic oligonucleotide
cagcuucacucccuucugc

SEQ ID NO: 2935939 - RNA, 19 nt, Artificial Sequence
  Description of Artificial Sequence: Synthetic oligonucleotide
ugaggacgaggcugaauuu

SEQ ID NO: 2935940 - RNA, 19 nt, Artificial Sequence
  Description of Artificial Sequence: Synthetic oligonucleotide
auucccaacgugagggacu

SEQ ID NO: 2935941 - RNA, 19 nt, Artificial Sequence
  Description of Artificial Sequence: Synthetic oligonucleotide
cuccgucauacaguuggcc

SEQ ID NO: 2935942 - RNA, 19 nt, Artificial Sequence
  Description of Artificial Sequence: Synthetic oligonucleotide
gguagaugagcaagggcac

SEQ ID NO: 2935943 - RNA, 19 nt, Artificial Sequence
  Description of Artificial Sequence: Synthetic oligonucleotide
ucccuucugccuugacacc

SEQ ID NO: 2935944 - RNA, 19 nt, Artificial Sequence
  Description of Artificial Sequence: Synthetic oligonucleotide
acuguguccgcugguguga

SEQ ID NO: 2935945 - RNA, 19 nt, Artificial Sequence
  Description of Artificial Sequence: Synthetic oligonucleotide
cagaaggaucugagcuggg

SEQ ID NO: 2935946 - RNA, 19 nt, Artificial Sequence
  Description of Artificial Sequence: Synthetic oligonucleotide
cacagauauuaaugagaga

SEQ ID NO: 2935947 - RNA, 19 nt, Artificial Sequence
  Description of Artificial Sequence: Synthetic oligonucleotide
caggucgauguguggguug

SEQ ID NO: 2935948 - RNA, 19 nt, Artificial Sequence
  Description of Artificial Sequence: Synthetic oligonucleotide
ggcuccuucuccgucauac

SEQ ID NO: 2935949 - RNA, 19 nt, Artificial Sequence
  Description of Artificial Sequence: Synthetic oligonucleotide
cuuguguguggagcagaag

SEQ ID NO: 2935950 - RNA, 19 nt, Artificial Sequence
  Description of Artificial Sequence: Synthetic oligonucleotide
gggacuuguguguggagca

SEQ ID NO: 2935951 - RNA, 19 nt, Artificial Sequence
  Description of Artificial Sequence: Synthetic oligonucleotide
ucgcagaaggugguauaga

SEQ ID NO: 2935952 - RNA, 19 nt, Artificial Sequence
  Description of Artificial Sequence: Synthetic oligonucleotide
aggaaggcuccuucuccgu

SEQ ID NO: 2935953 - RNA, 19 nt, Artificial Sequence
  Description of Artificial Sequence: Synthetic oligonucleotide
gcaugaaacucaguugaac

SEQ ID NO: 2935954 - RNA, 19 nt, Artificial Sequence
  Description of Artificial Sequence: Synthetic oligonucleotide
cuggugugaaaccugaguu

SEQ ID NO: 2935955 - RNA, 19 nt, Artificial Sequence
  Description of Artificial Sequence: Synthetic oligonucleotide
gccuugucagcuucacucc

SEQ ID NO: 2935956 - RNA, 19 nt, Artificial Sequence
  Description of Artificial Sequence: Synthetic oligonucleotide
gaggacgaggcugaauuua

SEQ ID NO: 2935957 - RNA, 19 nt, Artificial Sequence
  Description of Artificial Sequence: Synthetic oligonucleotide
aucugagcugggugguaga

SEQ ID NO: 2935958 - RNA, 19 nt, Artificial Sequence
  Description of Artificial Sequence: Synthetic oligonucleotide
ggguuggagaacgugucgc

SEQ ID NO: 2935959 - RNA, 19 nt, Artificial Sequence
  Description of Artificial Sequence: Synthetic oligonucleotide
uaugaggacgaggcugaau

SEQ ID NO: 2935960 - RNA, 19 nt, Artificial Sequence
  Description of Artificial Sequence: Synthetic oligonucleotide
acuuuauuguuggcacuaa

SEQ ID NO: 2935961 - RNA, 19 nt, Artificial Sequence
  Description of Artificial Sequence: Synthetic oligonucleotide
uggccuugucagcuucacu

SEQ ID NO: 2935962 - RNA, 19 nt, Artificial Sequence
  Description of Artificial Sequence: Synthetic oligonucleotide
ccauccaagacuuuauugu

SEQ ID NO: 2935963 - RNA, 19 nt, Artificial Sequence
  Description of Artificial Sequence: Synthetic oligonucleotide
cccagaaggaucugagcug

SEQ ID NO: 2935964 - RNA, 19 nt, Artificial Sequence
  Description of Artificial Sequence: Synthetic oligonucleotide
guugaacggagacuauuau

SEQ ID NO: 2935965 - RNA, 19 nt, Artificial Sequence
  Description of Artificial Sequence: Synthetic oligonucleotide
guggguuggagaacguguc

SEQ ID NO: 2935966 - RNA, 19 nt, Artificial Sequence
  Description of Artificial Sequence: Synthetic oligonucleotide
ugauagccacuguguccgc

SEQ ID NO: 2935967 - RNA, 19 nt, Artificial Sequence
  Description of Artificial Sequence: Synthetic oligonucleotide
gcccuguacauauguacac

SEQ ID NO: 2935968 - RNA, 19 nt, Artificial Sequence
  Description of Artificial Sequence: Synthetic oligonucleotide
guagaugagcaagggcaca

SEQ ID NO: 2935969 - RNA, 19 nt, Artificial Sequence
  Description of Artificial Sequence: Synthetic oligonucleotide
uuggccuugucagcuucac

SEQ ID NO: 2935970 - RNA, 19 nt, Artificial Sequence
  Description of Artificial Sequence: Synthetic oligonucleotide
guguggguuggagaacgug

SEQ ID NO: 2935971 - RNA, 19 nt, Artificial Sequence
  Description of Artificial Sequence: Synthetic oligonucleotide
gguuggagaacgugucgca

SEQ ID NO: 2935972 - RNA, 19 nt, Artificial Sequence
  Description of Artificial Sequence: Synthetic oligonucleotide
ugucagcuucacucccuuc

SEQ ID NO: 2935973 - RNA, 19 nt, Artificial Sequence
  Description of Artificial Sequence: Synthetic oligonucleotide
aggaucugagcuggguggu

SEQ ID NO: 2935974 - RNA, 19 nt, Artificial Sequence
  Description of Artificial Sequence: Synthetic oligonucleotide
ggcugaauuuauccagguc

SEQ ID NO: 2935975 - RNA, 19 nt, Artificial Sequence
  Description of Artificial Sequence: Synthetic oligonucleotide
acaccauccaagacuuuau

SEQ ID NO: 2935976 - RNA, 19 nt, Artificial Sequence
  Description of Artificial Sequence: Synthetic oligonucleotide
agaugagcaagggcacaga

SEQ ID NO: 2935977 - RNA, 19 nt, Artificial Sequence
  Description of Artificial Sequence: Synthetic oligonucleotide
uucccaacgugagggacuu

SEQ ID NO: 2935978 - RNA, 19 nt, Artificial Sequence
  Description of Artificial Sequence: Synthetic oligonucleotide
uuguuggcacuaacacauu

SEQ ID NO: 2935979 - RNA, 19 nt, Artificial Sequence
  Description of Artificial Sequence: Synthetic oligonucleotide
ccugaguuauuccguguug

SEQ ID NO: 2935980 - RNA, 19 nt, Artificial Sequence
  Description of Artificial Sequence: Synthetic oligonucleotide
acuuguguguggagcagaa

SEQ ID NO: 2935981 - RNA, 19 nt, Artificial Sequence
  Description of Artificial Sequence: Synthetic oligonucleotide
cauucccagaaggaucuga

SEQ ID NO: 2935982 - RNA, 19 nt, Artificial Sequence
  Description of Artificial Sequence: Synthetic oligonucleotide
ccuugucagcuucacuccc

SEQ ID NO: 2935983 - RNA, 19 nt, Artificial Sequence
  Description of Artificial Sequence: Synthetic oligonucleotide
cugagcugggugguagaug

SEQ ID NO: 2935984 - RNA, 19 nt, Artificial Sequence
  Description of Artificial Sequence: Synthetic oligonucleotide
aggacgaggcugaauuuau

SEQ ID NO: 2935985 - RNA, 19 nt, Artificial Sequence
  Description of Artificial Sequence: Synthetic oligonucleotide
cuucuccgucauacaguug

SEQ ID NO: 2935986 - RNA, 19 nt, Artificial Sequence
  Description of Artificial Sequence: Synthetic oligonucleotide
cacuaucuucagcauugga

SEQ ID NO: 2935987 - RNA, 19 nt, Artificial Sequence
  Description of Artificial Sequence: Synthetic oligonucleotide
caugaggagcacgcugcug

SEQ ID NO: 2935988 - RNA, 19 nt, Artificial Sequence
  Description of Artificial Sequence: Synthetic oligonucleotide
gccuugacaccauccaaga

SEQ ID NO: 2935989 - RNA, 19 nt, Artificial Sequence
  Description of Artificial Sequence: Synthetic oligonucleotide
cccuguacauauguacacc

SEQ ID NO: 2935990 - RNA, 19 nt, Artificial Sequence
  Description of Artificial Sequence: Synthetic oligonucleotide
agaugcucauggccugcaa

SEQ ID NO: 2935991 - RNA, 19 nt, Artificial Sequence
  Description of Artificial Sequence: Synthetic oligonucleotide
agcaugaaacucaguugaa

SEQ ID NO: 2935992 - RNA, 19 nt, Artificial Sequence
  Description of Artificial Sequence: Synthetic oligonucleotide
caacgugagggacuugugu

SEQ ID NO: 2935993 - RNA, 19 nt, Artificial Sequence
  Description of Artificial Sequence: Synthetic oligonucleotide
augagcaagggcacagaua

SEQ ID NO: 2935994 - RNA, 19 nt, Artificial Sequence
  Description of Artificial Sequence: Synthetic oligonucleotide
ggugugaaaccugaguuau

SEQ ID NO: 2935995 - RNA, 19 nt, Artificial Sequence
  Description of Artificial Sequence: Synthetic oligonucleotide
cuugucagcuucacucccu

SEQ ID NO: 2935996 - RNA, 19 nt, Artificial Sequence
  Description of Artificial Sequence: Synthetic oligonucleotide
gcacuaacacauucccaga

SEQ ID NO: 2935997 - RNA, 19 nt, Artificial Sequence
  Description of Artificial Sequence: Synthetic oligonucleotide
cuucugccuugacaccauc

SEQ ID NO: 2935998 - RNA, 19 nt, Artificial Sequence
  Description of Artificial Sequence: Synthetic oligonucleotide
caagggcacagauauuaau

SEQ ID NO: 2935999 - RNA, 19 nt, Artificial Sequence
  Description of Artificial Sequence: Synthetic oligonucleotide
gcuggugugaaaccugagu

SEQ ID NO: 2936000 - RNA, 19 nt, Artificial Sequence
  Description of Artificial Sequence: Synthetic oligonucleotide
ggaaggcuccuucuccguc

SEQ ID NO: 2936001 - RNA, 19 nt, Artificial Sequence
  Description of Artificial Sequence: Synthetic oligonucleotide
gcugggugguagaugagca

SEQ ID NO: 2936002 - RNA, 19 nt, Artificial Sequence
  Description of Artificial Sequence: Synthetic oligonucleotide
agaaggugguauagauaau

SEQ ID NO: 2936003 - RNA, 19 nt, Artificial Sequence
  Description of Artificial Sequence: Synthetic oligonucleotide
cggagacuauuaugaauag

SEQ ID NO: 2936004 - RNA, 19 nt, Artificial Sequence
  Description of Artificial Sequence: Synthetic oligonucleotide
cugccuugacaccauccaa

SEQ ID NO: 2936005 - RNA, 19 nt, Artificial Sequence
  Description of Artificial Sequence: Synthetic oligonucleotide
ggacuuguguguggagcag

SEQ ID NO: 2936006 - RNA, 19 nt, Artificial Sequence
  Description of Artificial Sequence: Synthetic oligonucleotide
cugggugguagaugagcaa

SEQ ID NO: 2936007 - RNA, 19 nt, Artificial Sequence
  Description of Artificial Sequence: Synthetic oligonucleotide
ccuugacaccauccaagac

SEQ ID NO: 2936008 - RNA, 19 nt, Artificial Sequence
  Description of Artificial Sequence: Synthetic oligonucleotide
cgauguguggguuggagaa

SEQ ID NO: 2936009 - RNA, 19 nt, Artificial Sequence
  Description of Artificial Sequence: Synthetic oligonucleotide
gagcugggugguagaugag

SEQ ID NO: 2936010 - RNA, 19 nt, Artificial Sequence
  Description of Artificial Sequence: Synthetic oligonucleotide
agccacuguguccgcuggu

SEQ ID NO: 2936011 - RNA, 19 nt, Artificial Sequence
  Description of Artificial Sequence: Synthetic oligonucleotide
acauucccagaaggaucug

SEQ ID NO: 2936012 - RNA, 19 nt, Artificial Sequence
  Description of Artificial Sequence: Synthetic oligonucleotide
caaaagcaugaaacucagu

SEQ ID NO: 2936013 - RNA, 19 nt, Artificial Sequence
  Description of Artificial Sequence: Synthetic oligonucleotide
gauagccacuguguccgcu

SEQ ID NO: 2936014 - RNA, 19 nt, Artificial Sequence
  Description of Artificial Sequence: Synthetic oligonucleotide
ugacaccauccaagacuuu

SEQ ID NO: 2936015 - RNA, 19 nt, Artificial Sequence
  Description of Artificial Sequence: Synthetic oligonucleotide
ccaacgugagggacuugug

SEQ ID NO: 2936016 - RNA, 19 nt, Artificial Sequence
  Description of Artificial Sequence: Synthetic oligonucleotide
gccacuguguccgcuggug

SEQ ID NO: 2936017 - RNA, 19 nt, Artificial Sequence
  Description of Artificial Sequence: Synthetic oligonucleotide
cuucacucccuucugccuu

SEQ ID NO: 2936018 - RNA, 19 nt, Artificial Sequence
  Description of Artificial Sequence: Synthetic oligonucleotide
ggagacuauuaugaauagu

SEQ ID NO: 2936019 - RNA, 19 nt, Artificial Sequence
  Description of Artificial Sequence: Synthetic oligonucleotide
acgugucgcagaagguggu

SEQ ID NO: 2936020 - RNA, 19 nt, Artificial Sequence
  Description of Artificial Sequence: Synthetic oligonucleotide
ggagaacgugucgcagaag

SEQ ID NO: 2936021 - RNA, 19 nt, Artificial Sequence
  Description of Artificial Sequence: Synthetic oligonucleotide
ucacucccuucugccuuga

SEQ ID NO: 2936022 - RNA, 19 nt, Artificial Sequence
  Description of Artificial Sequence: Synthetic oligonucleotide
acaccgcuucaggaaggcu

SEQ ID NO: 2936023 - RNA, 19 nt, Artificial Sequence
  Description of Artificial Sequence: Synthetic oligonucleotide
gcauuggaauucccaacgu

SEQ ID NO: 2936024 - RNA, 19 nt, Artificial Sequence
  Description of Artificial Sequence: Synthetic oligonucleotide
gcagaaggugguauagaua

SEQ ID NO: 2936025 - RNA, 19 nt, Artificial Sequence
  Description of Artificial Sequence: Synthetic oligonucleotide
cgucauacaguuggccuug

SEQ ID NO: 2936026 - RNA, 19 nt, Artificial Sequence
  Description of Artificial Sequence: Synthetic oligonucleotide
gcuccuucuccgucauaca

SEQ ID NO: 2936027 - RNA, 19 nt, Artificial Sequence
  Description of Artificial Sequence: Synthetic oligonucleotide
ggacgaggcugaauuuauc

SEQ ID NO: 2936028 - RNA, 19 nt, Artificial Sequence
  Description of Artificial Sequence: Synthetic oligonucleotide
guccgcuggugugaaaccu

SEQ ID NO: 2936029 - RNA, 19 nt, Artificial Sequence
  Description of Artificial Sequence: Synthetic oligonucleotide
cacucccuucugccuugac

SEQ ID NO: 2936030 - RNA, 19 nt, Artificial Sequence
  Description of Artificial Sequence: Synthetic oligonucleotide
caguugaacggagacuauu

SEQ ID NO: 2936031 - RNA, 19 nt, Artificial Sequence
  Description of Artificial Sequence: Synthetic oligonucleotide
gcaagggcacagauauuaa

SEQ ID NO: 2936032 - RNA, 19 nt, Artificial Sequence
  Description of Artificial Sequence: Synthetic oligonucleotide
cgugagggacuugugugug

SEQ ID NO: 2936033 - RNA, 19 nt, Artificial Sequence
  Description of Artificial Sequence: Synthetic oligonucleotide
gugucgcagaaggugguau

SEQ ID NO: 2936034 - RNA, 19 nt, Artificial Sequence
  Description of Artificial Sequence: Synthetic oligonucleotide
cccuucugccuugacacca

SEQ ID NO: 2936035 - RNA, 19 nt, Artificial Sequence
  Description of Artificial Sequence: Synthetic oligonucleotide
caccauccaagacuuuauu

SEQ ID NO: 2936036 - RNA, 19 nt, Artificial Sequence
  Description of Artificial Sequence: Synthetic oligonucleotide
ucccaacgugagggacuug

SEQ ID NO: 2936037 - RNA, 19 nt, Artificial Sequence
  Description of Artificial Sequence: Synthetic oligonucleotide
guguggagcagaagaugau

SEQ ID NO: 2936038 - RNA, 19 nt, Artificial Sequence
  Description of Artificial Sequence: Synthetic oligonucleotide
guaugaggacgaggcugaa

SEQ ID NO: 2936039 - RNA, 19 nt, Artificial Sequence
  Description of Artificial Sequence: Synthetic oligonucleotide
ccgcuggugugaaaccuga

SEQ ID NO: 2936040 - RNA, 19 nt, Artificial Sequence
  Description of Artificial Sequence: Synthetic oligonucleotide
cauggccugcaaacacuau

SEQ ID NO: 2936041 - RNA, 19 nt, Artificial Sequence
  Description of Artificial Sequence: Synthetic oligonucleotide
gcagaagaugauagccacu

SEQ ID NO: 2936042 - RNA, 19 nt, Artificial Sequence
  Description of Artificial Sequence: Synthetic oligonucleotide
cgcagaaggugguauagau

SEQ ID NO: 2936043 - RNA, 19 nt, Artificial Sequence
  Description of Artificial Sequence: Synthetic oligonucleotide
cccaacgugagggacuugu

SEQ ID NO: 2936044 - RNA, 19 nt, Artificial Sequence
  Description of Artificial Sequence: Synthetic oligonucleotide
gucauacaguuggccuugu

SEQ ID NO: 2936045 - RNA, 19 nt, Artificial Sequence
  Description of Artificial Sequence: Synthetic oligonucleotide
aggcuccuucuccgucaua

SEQ ID NO: 2936046 - RNA, 19 nt, Artificial Sequence
  Description of Artificial Sequence: Synthetic oligonucleotide
ccgucauacaguuggccuu

SEQ ID NO: 2936047 - RNA, 19 nt, Artificial Sequence
  Description of Artificial Sequence: Synthetic oligonucleotide
gugugaaaccugaguuauu

SEQ ID NO: 2936048 - RNA, 19 nt, Artificial Sequence
  Description of Artificial Sequence: Synthetic oligonucleotide
ggaucugagcuggguggua

SEQ ID NO: 2936049 - RNA, 19 nt, Artificial Sequence
  Description of Artificial Sequence: Synthetic oligonucleotide
ggucgauguguggguugga

SEQ ID NO: 2936050 - RNA, 19 nt, Artificial Sequence
  Description of Artificial Sequence: Synthetic oligonucleotide
ggccugcaaacacuaucuu

SEQ ID NO: 2936051 - RNA, 19 nt, Artificial Sequence
  Description of Artificial Sequence: Synthetic oligonucleotide
caguuggccuugucagcuu

SEQ ID NO: 2936052 - RNA, 19 nt, Artificial Sequence
  Description of Artificial Sequence: Synthetic oligonucleotide
gagcaagggcacagauauu

SEQ ID NO: 2936053 - RNA, 19 nt, Artificial Sequence
  Description of Artificial Sequence: Synthetic oligonucleotide
ccacuguguccgcuggugu

SEQ ID NO: 2936054 - RNA, 19 nt, Artificial Sequence
  Description of Artificial Sequence: Synthetic oligonucleotide
ccuucugccuugacaccau

SEQ ID NO: 2936055 - RNA, 19 nt, Artificial Sequence
  Description of Artificial Sequence: Synthetic oligonucleotide
cgugucgcagaagguggua

SEQ ID NO: 2936056 - RNA, 19 nt, Artificial Sequence
  Description of Artificial Sequence: Synthetic oligonucleotide
ccaggucgauguguggguu

SEQ ID NO: 2936057 - RNA, 19 nt, Artificial Sequence
  Description of Artificial Sequence: Synthetic oligonucleotide
aacuucaucacaguuaucc

SEQ ID NO: 2936058 - RNA, 19 nt, Artificial Sequence
  Description of Artificial Sequence: Synthetic oligonucleotide
uaagacauaagccacacag

SEQ ID NO: 2936059 - RNA, 19 nt, Artificial Sequence
  Description of Artificial Sequence: Synthetic oligonucleotide
ugauguuuaagacauaagc

SEQ ID NO: 2936060 - RNA, 19 nt, Artificial Sequence
  Description of Artificial Sequence: Synthetic oligonucleotide
aauucuuuugagcuuugcc

SEQ ID NO: 2936061 - RNA, 19 nt, Artificial Sequence
  Description of Artificial Sequence: Synthetic oligonucleotide
aaaauugucgucaagaacu

SEQ ID NO: 2936062 - RNA, 19 nt, Artificial Sequence
  Description of Artificial Sequence: Synthetic oligonucleotide
cauuuuaucagacagugag

SEQ ID NO: 2936063 - RNA, 19 nt, Artificial Sequence
  Description of Artificial Sequence: Synthetic oligonucleotide
aagacuacuuguccuauac

SEQ ID NO: 2936064 - RNA, 19 nt, Artificial Sequence
  Description of Artificial Sequence: Synthetic oligonucleotide
acugauaccugucugguac

SEQ ID NO: 2936065 - RNA, 19 nt, Artificial Sequence
  Description of Artificial Sequence: Synthetic oligonucleotide
aucagaauaucccuuauag

SEQ ID NO: 2936066 - RNA, 19 nt, Artificial Sequence
  Description of Artificial Sequence: Synthetic oligonucleotide
uuagauacaggaauaguga

SEQ ID NO: 2936067 - RNA, 19 nt, Artificial Sequence
  Description of Artificial Sequence: Synthetic oligonucleotide
uuugccaccauuuuaucag

SEQ ID NO: 2936068 - RNA, 19 nt, Artificial Sequence
  Description of Artificial Sequence: Synthetic oligonucleotide
cauguuuguaaaauugucg

SEQ ID NO: 2936069 - RNA, 19 nt, Artificial Sequence
  Description of Artificial Sequence: Synthetic oligonucleotide
uaauuacugaccaucagga

SEQ ID NO: 2936070 - RNA, 19 nt, Artificial Sequence
  Description of Artificial Sequence: Synthetic oligonucleotide
gauguuuaagacauaagcc

SEQ ID NO: 2936071 - RNA, 19 nt, Artificial Sequence
  Description of Artificial Sequence: Synthetic oligonucleotide
ugaaguguaauuacugacc

SEQ ID NO: 2936072 - RNA, 19 nt, Artificial Sequence
  Description of Artificial Sequence: Synthetic oligonucleotide
guaauuacugaccaucagg

SEQ ID NO: 2936073 - RNA, 19 nt, Artificial Sequence
  Description of Artificial Sequence: Synthetic oligonucleotide
acaugggucgaacugauac

SEQ ID NO: 2936074 - RNA, 19 nt, Artificial Sequence
  Description of Artificial Sequence: Synthetic oligonucleotide
ugucauguuuguaaaauug

SEQ ID NO: 2936075 - RNA, 19 nt, Artificial Sequence
  Description of Artificial Sequence: Synthetic oligonucleotide
uguguuguaggccaagugc

SEQ ID NO: 2936076 - RNA, 19 nt, Artificial Sequence
  Description of Artificial Sequence: Synthetic oligonucleotide
aauuggcuuacaugggucg

SEQ ID NO: 2936077 - RNA, 19 nt, Artificial Sequence
  Description of Artificial Sequence: Synthetic oligonucleotide
auguuuaagacauaagcca

SEQ ID NO: 2936078 - RNA, 19 nt, Artificial Sequence
  Description of Artificial Sequence: Synthetic oligonucleotide
uguaaaauugucgucaaga

SEQ ID NO: 2936079 - RNA, 19 nt, Artificial Sequence
  Description of Artificial Sequence: Synthetic oligonucleotide
uuauagggugcauugauug

SEQ ID NO: 2936080 - RNA, 19 nt, Artificial Sequence
  Description of Artificial Sequence: Synthetic oligonucleotide
uguuacaucucucugaauu

SEQ ID NO: 2936081 - RNA, 19 nt, Artificial Sequence
  Description of Artificial Sequence: Synthetic oligonucleotide
aauagugagcauguuuugg

SEQ ID NO: 2936082 - RNA, 19 nt, Artificial Sequence
  Description of Artificial Sequence: Synthetic oligonucleotide
uaaggagucaucugcagcc

SEQ ID NO: 2936083 - RNA, 19 nt, Artificial Sequence
  Description of Artificial Sequence: Synthetic oligonucleotide
uguccuauaccacagucug

SEQ ID NO: 2936084 - RNA, 19 nt, Artificial Sequence
  Description of Artificial Sequence: Synthetic oligonucleotide
aguguaauuacugaccauc

SEQ ID NO: 2936085 - RNA, 19 nt, Artificial Sequence
  Description of Artificial Sequence: Synthetic oligonucleotide
uguuuaagacauaagccac

SEQ ID NO: 2936086 - RNA, 19 nt, Artificial Sequence
  Description of Artificial Sequence: Synthetic oligonucleotide
auucuuuugagcuuugcca

SEQ ID NO: 2936087 - RNA, 19 nt, Artificial Sequence
  Description of Artificial Sequence: Synthetic oligonucleotide
ucagaauaucccuuauagg

SEQ ID NO: 2936088 - RNA, 19 nt, Artificial Sequence
  Description of Artificial Sequence: Synthetic oligonucleotide
uaagcaagacuacuugucc

SEQ ID NO: 2936089 - RNA, 19 nt, Artificial Sequence
  Description of Artificial Sequence: Synthetic oligonucleotide
agacauaagccacacagug

SEQ ID NO: 2936090 - RNA, 19 nt, Artificial Sequence
  Description of Artificial Sequence: Synthetic oligonucleotide
auguuuguaaaauugucgu

SEQ ID NO: 2936091 - RNA, 19 nt, Artificial Sequence
  Description of Artificial Sequence: Synthetic oligonucleotide
acagaguugauguuuaaga

SEQ ID NO: 2936092 - RNA, 19 nt, Artificial Sequence
  Description of Artificial Sequence: Synthetic oligonucleotide
ugcagcaaagaucagaaua

SEQ ID NO: 2936093 - RNA, 19 nt, Artificial Sequence
  Description of Artificial Sequence: Synthetic oligonucleotide
uaaaauugucgucaagaac

SEQ ID NO: 2936094 - RNA, 19 nt, Artificial Sequence
  Description of Artificial Sequence: Synthetic oligonucleotide
uuggacuuucuuuaccugg

SEQ ID NO: 2936095 - RNA, 19 nt, Artificial Sequence
  Description of Artificial Sequence: Synthetic oligonucleotide
agugccugggcuuaauugg

SEQ ID NO: 2936096 - RNA, 19 nt, Artificial Sequence
  Description of Artificial Sequence: Synthetic oligonucleotide
caggauauuagauacagga

SEQ ID NO: 2936097 - RNA, 19 nt, Artificial Sequence
  Description of Artificial Sequence: Synthetic oligonucleotide
acauaagccacacagugga

SEQ ID NO: 2936098 - RNA, 19 nt, Artificial Sequence
  Description of Artificial Sequence: Synthetic oligonucleotide
gauacaggaauagugagca

SEQ ID NO: 2936099 - RNA, 19 nt, Artificial Sequence
  Description of Artificial Sequence: Synthetic oligonucleotide
uuaauuggcuuacaugggu

SEQ ID NO: 2936100 - RNA, 19 nt, Artificial Sequence
  Description of Artificial Sequence: Synthetic oligonucleotide
ucagacagugaguuaacag

SEQ ID NO: 2936101 - RNA, 19 nt, Artificial Sequence
  Description of Artificial Sequence: Synthetic oligonucleotide
ugaguuaacagaguugaug

SEQ ID NO: 2936102 - RNA, 19 nt, Artificial Sequence
  Description of Artificial Sequence: Synthetic oligonucleotide
gaauaucccuuauagggug

SEQ ID NO: 2936103 - RNA, 19 nt, Artificial Sequence
  Description of Artificial Sequence: Synthetic oligonucleotide
uuacugaccaucaggauau

SEQ ID NO: 2936104 - RNA, 19 nt, Artificial Sequence
  Description of Artificial Sequence: Synthetic oligonucleotide
accacagucuguuacaucu

SEQ ID NO: 2936105 - RNA, 19 nt, Artificial Sequence
  Description of Artificial Sequence: Synthetic oligonucleotide
uucaucacaguuauccaca

SEQ ID NO: 2936106 - RNA, 19 nt, Artificial Sequence
  Description of Artificial Sequence: Synthetic oligonucleotide
aguuauccacauuaguaag

SEQ ID NO: 2936107 - RNA, 19 nt, Artificial Sequence
  Description of Artificial Sequence: Synthetic oligonucleotide
uuuuggacuuucuuuaccu

SEQ ID NO: 2936108 - RNA, 19 nt, Artificial Sequence
  Description of Artificial Sequence: Synthetic oligonucleotide
uagauacaggaauagugag

SEQ ID NO: 2936109 - RNA, 19 nt, Artificial Sequence
  Description of Artificial Sequence: Synthetic oligonucleotide
ugagaagucguacuuucug

SEQ ID NO: 2936110 - RNA, 19 nt, Artificial Sequence
  Description of Artificial Sequence: Synthetic oligonucleotide
uguaauuacugaccaucag

SEQ ID NO: 2936111 - RNA, 19 nt, Artificial Sequence
  Description of Artificial Sequence: Synthetic oligonucleotide
agcaaagaucagaauaucc

SEQ ID NO: 2936112 - RNA, 19 nt, Artificial Sequence
  Description of Artificial Sequence: Synthetic oligonucleotide
gacuacuuguccuauacca

SEQ ID NO: 2936113 - RNA, 19 nt, Artificial Sequence
  Description of Artificial Sequence: Synthetic oligonucleotide
agugaguuaacagaguuga

SEQ ID NO: 2936114 - RNA, 19 nt, Artificial Sequence
  Description of Artificial Sequence: Synthetic oligonucleotide
uaguaagcaagacuacuug

SEQ ID NO: 2936115 - RNA, 19 nt, Artificial Sequence
  Description of Artificial Sequence: Synthetic oligonucleotide
agaacuucaucacaguuau

SEQ ID NO: 2936116 - RNA, 19 nt, Artificial Sequence
  Description of Artificial Sequence: Synthetic oligonucleotide
gucgucaagaacuucauca

SEQ ID NO: 2936117 - RNA, 19 nt, Artificial Sequence
  Description of Artificial Sequence: Synthetic oligonucleotide
agaguugauguuuaagaca

SEQ ID NO: 2936118 - RNA, 19 nt, Artificial Sequence
  Description of Artificial Sequence: Synthetic oligonucleotide
cugaccaucaggauauuag

SEQ ID NO: 2936119 - RNA, 19 nt, Artificial Sequence
  Description of Artificial Sequence: Synthetic oligonucleotide
gaaguguaauuacugacca

SEQ ID NO: 2936120 - RNA, 19 nt, Artificial Sequence
  Description of Artificial Sequence: Synthetic oligonucleotide
uuaucagacagugaguuaa

SEQ ID NO: 2936121 - RNA, 19 nt, Artificial Sequence
  Description of Artificial Sequence: Synthetic oligonucleotide
uucuuuugagcuuugccac

SEQ ID NO: 2936122 - RNA, 19 nt, Artificial Sequence
  Description of Artificial Sequence: Synthetic oligonucleotide
cuuaauuggcuuacauggg

SEQ ID NO: 2936123 - RNA, 19 nt, Artificial Sequence
  Description of Artificial Sequence: Synthetic oligonucleotide
cugagugcagcaaagauca

SEQ ID NO: 2936124 - RNA, 19 nt, Artificial Sequence
  Description of Artificial Sequence: Synthetic oligonucleotide
ucauguuuguaaaauuguc

SEQ ID NO: 2936125 - RNA, 19 nt, Artificial Sequence
  Description of Artificial Sequence: Synthetic oligonucleotide
uccacauuaguaagcaaga

SEQ ID NO: 2936126 - RNA, 19 nt, Artificial Sequence
  Description of Artificial Sequence: Synthetic oligonucleotide
uaagccacacaguggaucc

SEQ ID NO: 2936127 - RNA, 19 nt, Artificial Sequence
  Description of Artificial Sequence: Synthetic oligonucleotide
ucuguuacaucucucugaa

SEQ ID NO: 2936128 - RNA, 19 nt, Artificial Sequence
  Description of Artificial Sequence: Synthetic oligonucleotide
agaagucguacuuucuguc

SEQ ID NO: 2936129 - RNA, 19 nt, Artificial Sequence
  Description of Artificial Sequence: Synthetic oligonucleotide
aucaggauauuagauacag

SEQ ID NO: 2936130 - RNA, 19 nt, Artificial Sequence
  Description of Artificial Sequence: Synthetic oligonucleotide
aagugccugggcuuaauug

SEQ ID NO: 2936131 - RNA, 19 nt, Artificial Sequence
  Description of Artificial Sequence: Synthetic oligonucleotide
uuugagaagucguacuuuc

SEQ ID NO: 2936132 - RNA, 19 nt, Artificial Sequence
  Description of Artificial Sequence: Synthetic oligonucleotide
uugauguuuaagacauaag

SEQ ID NO: 2936133 - RNA, 19 nt, Artificial Sequence
  Description of Artificial Sequence: Synthetic oligonucleotide
ucucucugaauucuuuuga

SEQ ID NO: 2936134 - RNA, 19 nt, Artificial Sequence
  Description of Artificial Sequence: Synthetic oligonucleotide
agauacaggaauagugagc

SEQ ID NO: 2936135 - RNA, 19 nt, Artificial Sequence
  Description of Artificial Sequence: Synthetic oligonucleotide
accauuuuaucagacagug

SEQ ID NO: 2936136 - RNA, 19 nt, Artificial Sequence
  Description of Artificial Sequence: Synthetic oligonucleotide
uuaguaagcaagacuacuu

SEQ ID NO: 2936137 - RNA, 19 nt, Artificial Sequence
  Description of Artificial Sequence: Synthetic oligonucleotide
aauaucccuuauagggugc

SEQ ID NO: 2936138 - RNA, 19 nt, Artificial Sequence
  Description of Artificial Sequence: Synthetic oligonucleotide
uuuuaucagacagugaguu

SEQ ID NO: 2936139 - RNA, 19 nt, Artificial Sequence
  Description of Artificial Sequence: Synthetic oligonucleotide
guuuguaaaauugucguca

SEQ ID NO: 2936140 - RNA, 19 nt, Artificial Sequence
  Description of Artificial Sequence: Synthetic oligonucleotide
cugaaguguaauuacugac

SEQ ID NO: 2936141 - RNA, 19 nt, Artificial Sequence
  Description of Artificial Sequence: Synthetic oligonucleotide
uacaggaauagugagcaug

SEQ ID NO: 2936142 - RNA, 19 nt, Artificial Sequence
  Description of Artificial Sequence: Synthetic oligonucleotide
ucaggauauuagauacagg

SEQ ID NO: 2936143 - RNA, 19 nt, Artificial Sequence
  Description of Artificial Sequence: Synthetic oligonucleotide
ucucugaauucuuuugagc

SEQ ID NO: 2936144 - RNA, 19 nt, Artificial Sequence
  Description of Artificial Sequence: Synthetic oligonucleotide
acauuaguaagcaagacua

SEQ ID NO: 2936145 - RNA, 19 nt, Artificial Sequence
  Description of Artificial Sequence: Synthetic oligonucleotide
uauaccacagucuguuaca

SEQ ID NO: 2936146 - RNA, 19 nt, Artificial Sequence
  Description of Artificial Sequence: Synthetic oligonucleotide
aacagaguugauguuuaag

SEQ ID NO: 2936147 - RNA, 19 nt, Artificial Sequence
  Description of Artificial Sequence: Synthetic oligonucleotide
uucuuuaccuggcuuugag

SEQ ID NO: 2936148 - RNA, 19 nt, Artificial Sequence
  Description of Artificial Sequence: Synthetic oligonucleotide
auauuagauacaggaauag

SEQ ID NO: 2936149 - RNA, 19 nt, Artificial Sequence
  Description of Artificial Sequence: Synthetic oligonucleotide
aagcaagacuacuuguccu

SEQ ID NO: 2936150 - RNA, 19 nt, Artificial Sequence
  Description of Artificial Sequence: Synthetic oligonucleotide
gucaagaacuucaucacag

SEQ ID NO: 2936151 - RNA, 19 nt, Artificial Sequence
  Description of Artificial Sequence: Synthetic oligonucleotide
auagugagcauguuuugga

SEQ ID NO: 2936152 - RNA, 19 nt, Artificial Sequence
  Description of Artificial Sequence: Synthetic oligonucleotide
gaguuaacagaguugaugu

SEQ ID NO: 2936153 - RNA, 19 nt, Artificial Sequence
  Description of Artificial Sequence: Synthetic oligonucleotide
uuaacagaguugauguuua

SEQ ID NO: 2936154 - RNA, 19 nt, Artificial Sequence
  Description of Artificial Sequence: Synthetic oligonucleotide
agacuacuuguccuauacc

SEQ ID NO: 2936155 - RNA, 19 nt, Artificial Sequence
  Description of Artificial Sequence: Synthetic oligonucleotide
auccacauuaguaagcaag

SEQ ID NO: 2936156 - RNA, 19 nt, Artificial Sequence
  Description of Artificial Sequence: Synthetic oligonucleotide
uacuuguccuauaccacag

SEQ ID NO: 2936157 - RNA, 19 nt, Artificial Sequence
  Description of Artificial Sequence: Synthetic oligonucleotide
aguaagcaagacuacuugu

SEQ ID NO: 2936158 - RNA, 19 nt, Artificial Sequence
  Description of Artificial Sequence: Synthetic oligonucleotide
cagaguugauguuuaagac

SEQ ID NO: 2936159 - RNA, 19 nt, Artificial Sequence
  Description of Artificial Sequence: Synthetic oligonucleotide
uggacuuucuuuaccuggc

SEQ ID NO: 2936160 - RNA, 19 nt, Artificial Sequence
  Description of Artificial Sequence: Synthetic oligonucleotide
ucuaaggagucaucugcag

SEQ ID NO: 2936161 - RNA, 19 nt, Artificial Sequence
  Description of Artificial Sequence: Synthetic oligonucleotide
uuuaagacauaagccacac

SEQ ID NO: 2936162 - RNA, 19 nt, Artificial Sequence
  Description of Artificial Sequence: Synthetic oligonucleotide
aagaucagaauaucccuua

SEQ ID NO: 2936163 - RNA, 19 nt, Artificial Sequence
  Description of Artificial Sequence: Synthetic oligonucleotide
ucaucugcagcccgcaaca

SEQ ID NO: 2936164 - RNA, 19 nt, Artificial Sequence
  Description of Artificial Sequence: Synthetic oligonucleotide
ucuucuaaggagucaucug

SEQ ID NO: 2936165 - RNA, 19 nt, Artificial Sequence
  Description of Artificial Sequence: Synthetic oligonucleotide
uucuaaggagucaucugca

SEQ ID NO: 2936166 - RNA, 19 nt, Artificial Sequence
  Description of Artificial Sequence: Synthetic oligonucleotide
ucacaguuauccacauuag

SEQ ID NO: 2936167 - RNA, 19 nt, Artificial Sequence
  Description of Artificial Sequence: Synthetic oligonucleotide
cuuucugucauguuuguaa

SEQ ID NO: 2936168 - RNA, 19 nt, Artificial Sequence
  Description of Artificial Sequence: Synthetic oligonucleotide
cuauaccacagucuguuac

SEQ ID NO: 2936169 - RNA, 19 nt, Artificial Sequence
  Description of Artificial Sequence: Synthetic oligonucleotide
gacauaagccacacagugg

SEQ ID NO: 2936170 - RNA, 19 nt, Artificial Sequence
  Description of Artificial Sequence: Synthetic oligonucleotide
uuuguaaaauugucgucaa

SEQ ID NO: 2936171 - RNA, 19 nt, Artificial Sequence
  Description of Artificial Sequence: Synthetic oligonucleotide
uuuaccuggcuuugagaag

SEQ ID NO: 2936172 - RNA, 19 nt, Artificial Sequence
  Description of Artificial Sequence: Synthetic oligonucleotide
auuaguaagcaagacuacu

SEQ ID NO: 2936173 - RNA, 19 nt, Artificial Sequence
  Description of Artificial Sequence: Synthetic oligonucleotide
uauagggugcauugauugc

SEQ ID NO: 2936174 - RNA, 19 nt, Artificial Sequence
  Description of Artificial Sequence: Synthetic oligonucleotide
cauugauugcucugaagug

SEQ ID NO: 2936175 - RNA, 19 nt, Artificial Sequence
  Description of Artificial Sequence: Synthetic oligonucleotide
auugauugcucugaagugu

SEQ ID NO: 2936176 - RNA, 19 nt, Artificial Sequence
  Description of Artificial Sequence: Synthetic oligonucleotide
ucugucauguuuguaaaau

SEQ ID NO: 2936177 - RNA, 19 nt, Artificial Sequence
  Description of Artificial Sequence: Synthetic oligonucleotide
ucccuuauagggugcauug

SEQ ID NO: 2936178 - RNA, 19 nt, Artificial Sequence
  Description of Artificial Sequence: Synthetic oligonucleotide
uguuuguaaaauugucguc

SEQ ID NO: 2936179 - RNA, 19 nt, Artificial Sequence
  Description of Artificial Sequence: Synthetic oligonucleotide
auguuuuggacuuucuuua

SEQ ID NO: 2936180 - RNA, 19 nt, Artificial Sequence
  Description of Artificial Sequence: Synthetic oligonucleotide
gaauagugagcauguuuug

SEQ ID NO: 2936181 - RNA, 19 nt, Artificial Sequence
  Description of Artificial Sequence: Synthetic oligonucleotide
cuaaggagucaucugcagc

SEQ ID NO: 2936182 - RNA, 19 nt, Artificial Sequence
  Description of Artificial Sequence: Synthetic oligonucleotide
uuaccuggcuuugagaagu

SEQ ID NO: 2936183 - RNA, 19 nt, Artificial Sequence
  Description of Artificial Sequence: Synthetic oligonucleotide
agacagugaguuaacagag

SEQ ID NO: 2936184 - RNA, 19 nt, Artificial Sequence
  Description of Artificial Sequence: Synthetic oligonucleotide
ucgaacugauaccugucug

SEQ ID NO: 2936185 - RNA, 19 nt, Artificial Sequence
  Description of Artificial Sequence: Synthetic oligonucleotide
uuguccuauaccacagucu

SEQ ID NO: 2936186 - RNA, 19 nt, Artificial Sequence
  Description of Artificial Sequence: Synthetic oligonucleotide
ugcucugaaguguaauuac

SEQ ID NO: 2936187 - RNA, 19 nt, Artificial Sequence
  Description of Artificial Sequence: Synthetic oligonucleotide
uaauuggcuuacauggguc

SEQ ID NO: 2936188 - RNA, 19 nt, Artificial Sequence
  Description of Artificial Sequence: Synthetic oligonucleotide
aaggagucaucugcagccc

SEQ ID NO: 2936189 - RNA, 19 nt, Artificial Sequence
  Description of Artificial Sequence: Synthetic oligonucleotide
aauuacugaccaucaggau

SEQ ID NO: 2936190 - RNA, 19 nt, Artificial Sequence
  Description of Artificial Sequence: Synthetic oligonucleotide
aucucucugaauucuuuug

SEQ ID NO: 2936191 - RNA, 19 nt, Artificial Sequence
  Description of Artificial Sequence: Synthetic oligonucleotide
uuguaaaauugucgucaag

SEQ ID NO: 2936192 - RNA, 19 nt, Artificial Sequence
  Description of Artificial Sequence: Synthetic oligonucleotide
cuuuaccuggcuuugagaa

SEQ ID NO: 2936193 - RNA, 19 nt, Artificial Sequence
  Description of Artificial Sequence: Synthetic oligonucleotide
uauuagauacaggaauagu

SEQ ID NO: 2936194 - RNA, 19 nt, Artificial Sequence
  Description of Artificial Sequence: Synthetic oligonucleotide
guaaaauugucgucaagaa

SEQ ID NO: 2936195 - RNA, 19 nt, Artificial Sequence
  Description of Artificial Sequence: Synthetic oligonucleotide
uuuggacuuucuuuaccug

SEQ ID NO: 2936196 - RNA, 19 nt, Artificial Sequence
  Description of Artificial Sequence: Synthetic oligonucleotide
cagacagugaguuaacaga

SEQ ID NO: 2936197 - RNA, 19 nt, Artificial Sequence
  Description of Artificial Sequence: Synthetic oligonucleotide
gauauuagauacaggaaua

SEQ ID NO: 2936198 - RNA, 19 nt, Artificial Sequence
  Description of Artificial Sequence: Synthetic oligonucleotide
auugucgucaagaacuuca

SEQ ID NO: 2936199 - RNA, 19 nt, Artificial Sequence
  Description of Artificial Sequence: Synthetic oligonucleotide
acuacuuguccuauaccac

SEQ ID NO: 2936200 - RNA, 19 nt, Artificial Sequence
  Description of Artificial Sequence: Synthetic oligonucleotide
aagucguacuuucugucau

SEQ ID NO: 2936201 - RNA, 19 nt, Artificial Sequence
  Description of Artificial Sequence: Synthetic oligonucleotide
uuucugucauguuuguaaa

SEQ ID NO: 2936202 - RNA, 19 nt, Artificial Sequence
  Description of Artificial Sequence: Synthetic oligonucleotide
ucgucaagaacuucaucac

SEQ ID NO: 2936203 - RNA, 19 nt, Artificial Sequence
  Description of Artificial Sequence: Synthetic oligonucleotide
acaucugccugagugcagc

SEQ ID NO: 2936204 - RNA, 19 nt, Artificial Sequence
  Description of Artificial Sequence: Synthetic oligonucleotide
gcaaagaucagaauauccc

SEQ ID NO: 2936205 - RNA, 19 nt, Artificial Sequence
  Description of Artificial Sequence: Synthetic oligonucleotide
guuuuggacuuucuuuacc

SEQ ID NO: 2936206 - RNA, 19 nt, Artificial Sequence
  Description of Artificial Sequence: Synthetic oligonucleotide
cacacaguggauccugucc

SEQ ID NO: 2936207 - RNA, 19 nt, Artificial Sequence
  Description of Artificial Sequence: Synthetic oligonucleotide
guuacaucucucugaauuc

SEQ ID NO: 2936208 - RNA, 19 nt, Artificial Sequence
  Description of Artificial Sequence: Synthetic oligonucleotide
acagugaguuaacagaguu

SEQ ID NO: 2936209 - RNA, 19 nt, Artificial Sequence
  Description of Artificial Sequence: Synthetic oligonucleotide
aagaacuucaucacaguua

SEQ ID NO: 2936210 - RNA, 19 nt, Artificial Sequence
  Description of Artificial Sequence: Synthetic oligonucleotide
ucuuuugagcuuugccacc

SEQ ID NO: 2936211 - RNA, 19 nt, Artificial Sequence
  Description of Artificial Sequence: Synthetic oligonucleotide
agugagcauguuuuggacu

SEQ ID NO: 2936212 - RNA, 19 nt, Artificial Sequence
  Description of Artificial Sequence: Synthetic oligonucleotide
guggagauguguuguaggc

SEQ ID NO: 2936213 - RNA, 19 nt, Artificial Sequence
  Description of Artificial Sequence: Synthetic oligonucleotide
guuauccacauuaguaagc

SEQ ID NO: 2936214 - RNA, 19 nt, Artificial Sequence
  Description of Artificial Sequence: Synthetic oligonucleotide
ccaucaggauauuagauac

SEQ ID NO: 2936215 - RNA, 19 nt, Artificial Sequence
  Description of Artificial Sequence: Synthetic oligonucleotide
cauuaguaagcaagacuac

SEQ ID NO: 2936216 - RNA, 19 nt, Artificial Sequence
  Description of Artificial Sequence: Synthetic oligonucleotide
acaguuauccacauuagua

SEQ ID NO: 2936217 - RNA, 19 nt, Artificial Sequence
  Description of Artificial Sequence: Synthetic oligonucleotide
ugcauugauugcucugaag

SEQ ID NO: 2936218 - RNA, 19 nt, Artificial Sequence
  Description of Artificial Sequence: Synthetic oligonucleotide
uaggccaagugccugggcu

SEQ ID NO: 2936219 - RNA, 19 nt, Artificial Sequence
  Description of Artificial Sequence: Synthetic oligonucleotide
ucaagaacuucaucacagu

SEQ ID NO: 2936220 - RNA, 19 nt, Artificial Sequence
  Description of Artificial Sequence: Synthetic oligonucleotide
uguuuuggacuuucuuuac

SEQ ID NO: 2936221 - RNA, 19 nt, Artificial Sequence
  Description of Artificial Sequence: Synthetic oligonucleotide
acuuucuuuaccuggcuuu

SEQ ID NO: 2936222 - RNA, 19 nt, Artificial Sequence
  Description of Artificial Sequence: Synthetic oligonucleotide
aauugucgucaagaacuuc

SEQ ID NO: 2936223 - RNA, 19 nt, Artificial Sequence
  Description of Artificial Sequence: Synthetic oligonucleotide
caugggucgaacugauacc

SEQ ID NO: 2936224 - RNA, 19 nt, Artificial Sequence
  Description of Artificial Sequence: Synthetic oligonucleotide
uugagcuuugccaccauuu

SEQ ID NO: 2936225 - RNA, 19 nt, Artificial Sequence
  Description of Artificial Sequence: Synthetic oligonucleotide
acacaguggauccuguccu

SEQ ID NO: 2936226 - RNA, 19 nt, Artificial Sequence
  Description of Artificial Sequence: Synthetic oligonucleotide
accaucaggauauuagaua

SEQ ID NO: 2936227 - RNA, 19 nt, Artificial Sequence
  Description of Artificial Sequence: Synthetic oligonucleotide
gaagucguacuuucuguca

SEQ ID NO: 2936228 - RNA, 19 nt, Artificial Sequence
  Description of Artificial Sequence: Synthetic oligonucleotide
cuuguccuauaccacaguc

SEQ ID NO: 2936229 - RNA, 19 nt, Artificial Sequence
  Description of Artificial Sequence: Synthetic oligonucleotide
guugauguuuaagacauaa

SEQ ID NO: 2936230 - RNA, 19 nt, Artificial Sequence
  Description of Artificial Sequence: Synthetic oligonucleotide
ucuuuaccuggcuuugaga

SEQ ID NO: 2936231 - RNA, 19 nt, Artificial Sequence
  Description of Artificial Sequence: Synthetic oligonucleotide
aaagaucagaauaucccuu

SEQ ID NO: 2936232 - RNA, 19 nt, Artificial Sequence
  Description of Artificial Sequence: Synthetic oligonucleotide
agucuguuacaucucucug

SEQ ID NO: 2936233 - RNA, 19 nt, Artificial Sequence
  Description of Artificial Sequence: Synthetic oligonucleotide
agaauaucccuuauagggu

SEQ ID NO: 2936234 - RNA, 19 nt, Artificial Sequence
  Description of Artificial Sequence: Synthetic oligonucleotide
uuacaucucucugaauucu

SEQ ID NO: 2936235 - RNA, 19 nt, Artificial Sequence
  Description of Artificial Sequence: Synthetic oligonucleotide
caguuauccacauuaguaa

SEQ ID NO: 2936236 - RNA, 19 nt, Artificial Sequence
  Description of Artificial Sequence: Synthetic oligonucleotide
aggaauagugagcauguuu

SEQ ID NO: 2936237 - RNA, 19 nt, Artificial Sequence
  Description of Artificial Sequence: Synthetic oligonucleotide
guguuguaggccaagugcc

SEQ ID NO: 2936238 - RNA, 19 nt, Artificial Sequence
  Description of Artificial Sequence: Synthetic oligonucleotide
uuaagacauaagccacaca

SEQ ID NO: 2936239 - RNA, 19 nt, Artificial Sequence
  Description of Artificial Sequence: Synthetic oligonucleotide
uugauugcucugaagugua

SEQ ID NO: 2936240 - RNA, 19 nt, Artificial Sequence
  Description of Artificial Sequence: Synthetic oligonucleotide
ucugccugagugcagcaaa

SEQ ID NO: 2936241 - RNA, 19 nt, Artificial Sequence
  Description of Artificial Sequence: Synthetic oligonucleotide
uguuguaggccaagugccu

SEQ ID NO: 2936242 - RNA, 19 nt, Artificial Sequence
  Description of Artificial Sequence: Synthetic oligonucleotide
ucugaauucuuuugagcuu

SEQ ID NO: 2936243 - RNA, 19 nt, Artificial Sequence
  Description of Artificial Sequence: Synthetic oligonucleotide
uagugagcauguuuuggac

SEQ ID NO: 2936244 - RNA, 19 nt, Artificial Sequence
  Description of Artificial Sequence: Synthetic oligonucleotide
gguggagauguguuguagg

SEQ ID NO: 2936245 - RNA, 19 nt, Artificial Sequence
  Description of Artificial Sequence: Synthetic oligonucleotide
aagacauaagccacacagu

SEQ ID NO: 2936246 - RNA, 19 nt, Artificial Sequence
  Description of Artificial Sequence: Synthetic oligonucleotide
uugagaagucguacuuucu

SEQ ID NO: 2936247 - RNA, 19 nt, Artificial Sequence
  Description of Artificial Sequence: Synthetic oligonucleotide
auugcucugaaguguaauu

SEQ ID NO: 2936248 - RNA, 19 nt, Artificial Sequence
  Description of Artificial Sequence: Synthetic oligonucleotide
auagggugcauugauugcu

SEQ ID NO: 2936249 - RNA, 19 nt, Artificial Sequence
  Description of Artificial Sequence: Synthetic oligonucleotide
ccaccauuuuaucagacag

SEQ ID NO: 2936250 - RNA, 19 nt, Artificial Sequence
  Description of Artificial Sequence: Synthetic oligonucleotide
ugaauucuuuugagcuuug

SEQ ID NO: 2936251 - RNA, 19 nt, Artificial Sequence
  Description of Artificial Sequence: Synthetic oligonucleotide
aaguguaauuacugaccau

SEQ ID NO: 2936252 - RNA, 19 nt, Artificial Sequence
  Description of Artificial Sequence: Synthetic oligonucleotide
agugcagcaaagaucagaa

SEQ ID NO: 2936253 - RNA, 19 nt, Artificial Sequence
  Description of Artificial Sequence: Synthetic oligonucleotide
gaguugauguuuaagacau

SEQ ID NO: 2936254 - RNA, 19 nt, Artificial Sequence
  Description of Artificial Sequence: Synthetic oligonucleotide
ucagugguggagauguguu

SEQ ID NO: 2936255 - RNA, 19 nt, Artificial Sequence
  Description of Artificial Sequence: Synthetic oligonucleotide
cuacuuguccuauaccaca

SEQ ID NO: 2936256 - RNA, 19 nt, Artificial Sequence
  Description of Artificial Sequence: Synthetic oligonucleotide
uccuauaccacagucuguu

SEQ ID NO: 2936257 - RNA, 19 nt, Artificial Sequence
  Description of Artificial Sequence: Synthetic oligonucleotide
gucuguuacaucucucuga

SEQ ID NO: 2936258 - RNA, 19 nt, Artificial Sequence
  Description of Artificial Sequence: Synthetic oligonucleotide
cagugaguuaacagaguug

SEQ ID NO: 2936259 - RNA, 19 nt, Artificial Sequence
  Description of Artificial Sequence: Synthetic oligonucleotide
ggagauguguuguaggcca

SEQ ID NO: 2936260 - RNA, 19 nt, Artificial Sequence
  Description of Artificial Sequence: Synthetic oligonucleotide
uguccuucagugguggaga

SEQ ID NO: 2936261 - RNA, 19 nt, Artificial Sequence
  Description of Artificial Sequence: Synthetic oligonucleotide
ggcuuaauuggcuuacaug

SEQ ID NO: 2936262 - RNA, 19 nt, Artificial Sequence
  Description of Artificial Sequence: Synthetic oligonucleotide
uaucagacagugaguuaac

SEQ ID NO: 2936263 - RNA, 19 nt, Artificial Sequence
  Description of Artificial Sequence: Synthetic oligonucleotide
uuuaucagacagugaguua

SEQ ID NO: 2936264 - RNA, 19 nt, Artificial Sequence
  Description of Artificial Sequence: Synthetic oligonucleotide
gauccuguccuucaguggu

SEQ ID NO: 2936265 - RNA, 19 nt, Artificial Sequence
  Description of Artificial Sequence: Synthetic oligonucleotide
ggauauuagauacaggaau

SEQ ID NO: 2936266 - RNA, 19 nt, Artificial Sequence
  Description of Artificial Sequence: Synthetic oligonucleotide
uuacaugggucgaacugau

SEQ ID NO: 2936267 - RNA, 19 nt, Artificial Sequence
  Description of Artificial Sequence: Synthetic oligonucleotide
uggagauguguuguaggcc

SEQ ID NO: 2936268 - RNA, 19 nt, Artificial Sequence
  Description of Artificial Sequence: Synthetic oligonucleotide
cuuugccaccauuuuauca

SEQ ID NO: 2936269 - RNA, 19 nt, Artificial Sequence
  Description of Artificial Sequence: Synthetic oligonucleotide
aguggauccuguccuucag

SEQ ID NO: 2936270 - RNA, 19 nt, Artificial Sequence
  Description of Artificial Sequence: Synthetic oligonucleotide
agugguggagauguguugu

SEQ ID NO: 2936271 - RNA, 19 nt, Artificial Sequence
  Description of Artificial Sequence: Synthetic oligonucleotide
ugagcuuugccaccauuuu

SEQ ID NO: 2936272 - RNA, 19 nt, Artificial Sequence
  Description of Artificial Sequence: Synthetic oligonucleotide
aucugcagcccgcaacauc

SEQ ID NO: 2936273 - RNA, 19 nt, Artificial Sequence
  Description of Artificial Sequence: Synthetic oligonucleotide
caaagaucagaauaucccu

SEQ ID NO: 2936274 - RNA, 19 nt, Artificial Sequence
  Description of Artificial Sequence: Synthetic oligonucleotide
aggagucaucugcagcccg

SEQ ID NO: 2936275 - RNA, 19 nt, Artificial Sequence
  Description of Artificial Sequence: Synthetic oligonucleotide
gcuuacaugggucgaacug

SEQ ID NO: 2936276 - RNA, 19 nt, Artificial Sequence
  Description of Artificial Sequence: Synthetic oligonucleotide
uucagugguggagaugugu

SEQ ID NO: 2936277 - RNA, 19 nt, Artificial Sequence
  Description of Artificial Sequence: Synthetic oligonucleotide
augggucgaacugauaccu

SEQ ID NO: 2936278 - RNA, 19 nt, Artificial Sequence
  Description of Artificial Sequence: Synthetic oligonucleotide
auuuuaucagacagugagu

SEQ ID NO: 2936279 - RNA, 19 nt, Artificial Sequence
  Description of Artificial Sequence: Synthetic oligonucleotide
cuuacaugggucgaacuga

SEQ ID NO: 2936280 - RNA, 19 nt, Artificial Sequence
  Description of Artificial Sequence: Synthetic oligonucleotide
cuuucuuuaccuggcuuug

SEQ ID NO: 2936281 - RNA, 19 nt, Artificial Sequence
  Description of Artificial Sequence: Synthetic oligonucleotide
gaauucuuuugagcuuugc

SEQ ID NO: 2936282 - RNA, 19 nt, Artificial Sequence
  Description of Artificial Sequence: Synthetic oligonucleotide
uugcucugaaguguaauua

SEQ ID NO: 2936283 - RNA, 19 nt, Artificial Sequence
  Description of Artificial Sequence: Synthetic oligonucleotide
uguaggccaagugccuggg

SEQ ID NO: 2936284 - RNA, 19 nt, Artificial Sequence
  Description of Artificial Sequence: Synthetic oligonucleotide
agcaagacuacuuguccua

SEQ ID NO: 2936285 - RNA, 19 nt, Artificial Sequence
  Description of Artificial Sequence: Synthetic oligonucleotide
uugucgucaagaacuucau

SEQ ID NO: 2936286 - RNA, 19 nt, Artificial Sequence
  Description of Artificial Sequence: Synthetic oligonucleotide
ugguggagauguguuguag

SEQ ID NO: 2936287 - RNA, 19 nt, Artificial Sequence
  Description of Artificial Sequence: Synthetic oligonucleotide
agucguacuuucugucaug

SEQ ID NO: 2936288 - RNA, 19 nt, Artificial Sequence
  Description of Artificial Sequence: Synthetic oligonucleotide
uucugucauguuuguaaaa

SEQ ID NO: 2936289 - RNA, 19 nt, Artificial Sequence
  Description of Artificial Sequence: Synthetic oligonucleotide
gcauugauugcucugaagu

SEQ ID NO: 2936290 - RNA, 19 nt, Artificial Sequence
  Description of Artificial Sequence: Synthetic oligonucleotide
agcuuugccaccauuuuau

SEQ ID NO: 2936291 - RNA, 19 nt, Artificial Sequence
  Description of Artificial Sequence: Synthetic oligonucleotide
gaucagaauaucccuuaua

SEQ ID NO: 2936292 - RNA, 19 nt, Artificial Sequence
  Description of Artificial Sequence: Synthetic oligonucleotide
aaauugucgucaagaacuu

SEQ ID NO: 2936293 - RNA, 19 nt, Artificial Sequence
  Description of Artificial Sequence: Synthetic oligonucleotide
ugucgucaagaacuucauc

SEQ ID NO: 2936294 - RNA, 19 nt, Artificial Sequence
  Description of Artificial Sequence: Synthetic oligonucleotide
agaucagaauaucccuuau

SEQ ID NO: 2936295 - RNA, 19 nt, Artificial Sequence
  Description of Artificial Sequence: Synthetic oligonucleotide
gucaucugcagcccgcaac

SEQ ID NO: 2936296 - RNA, 19 nt, Artificial Sequence
  Description of Artificial Sequence: Synthetic oligonucleotide
gagaagucguacuuucugu

SEQ ID NO: 2936297 - RNA, 19 nt, Artificial Sequence
  Description of Artificial Sequence: Synthetic oligonucleotide
gcaacaucugccugagugc

SEQ ID NO: 2936298 - RNA, 19 nt, Artificial Sequence
  Description of Artificial Sequence: Synthetic oligonucleotide
ucaucacaguuauccacau

SEQ ID NO: 2936299 - RNA, 19 nt, Artificial Sequence
  Description of Artificial Sequence: Synthetic oligonucleotide
ugccaccauuuuaucagac

SEQ ID NO: 2936300 - RNA, 19 nt, Artificial Sequence
  Description of Artificial Sequence: Synthetic oligonucleotide
cacauuaguaagcaagacu

SEQ ID NO: 2936301 - RNA, 19 nt, Artificial Sequence
  Description of Artificial Sequence: Synthetic oligonucleotide
ugcagcccgcaacaucugc

SEQ ID NO: 2936302 - RNA, 19 nt, Artificial Sequence
  Description of Artificial Sequence: Synthetic oligonucleotide
uugccaccauuuuaucaga

SEQ ID NO: 2936303 - RNA, 19 nt, Artificial Sequence
  Description of Artificial Sequence: Synthetic oligonucleotide
uagggugcauugauugcuc

SEQ ID NO: 2936304 - RNA, 19 nt, Artificial Sequence
  Description of Artificial Sequence: Synthetic oligonucleotide
aguuaacagaguugauguu

SEQ ID NO: 2936305 - RNA, 19 nt, Artificial Sequence
  Description of Artificial Sequence: Synthetic oligonucleotide
uuugagcuuugccaccauu

SEQ ID NO: 2936306 - RNA, 19 nt, Artificial Sequence
  Description of Artificial Sequence: Synthetic oligonucleotide
aacugauaccugucuggua

SEQ ID NO: 2936307 - RNA, 19 nt, Artificial Sequence
  Description of Artificial Sequence: Synthetic oligonucleotide
uacaucucucugaauucuu

SEQ ID NO: 2936308 - RNA, 19 nt, Artificial Sequence
  Description of Artificial Sequence: Synthetic oligonucleotide
cgaacugauaccugucugg

SEQ ID NO: 2936309 - RNA, 19 nt, Artificial Sequence
  Description of Artificial Sequence: Synthetic oligonucleotide
uauccacauuaguaagcaa

SEQ ID NO: 2936310 - RNA, 19 nt, Artificial Sequence
  Description of Artificial Sequence: Synthetic oligonucleotide
guguaauuacugaccauca

SEQ ID NO: 2936311 - RNA, 19 nt, Artificial Sequence
  Description of Artificial Sequence: Synthetic oligonucleotide
ccugagugcagcaaagauc

SEQ ID NO: 2936312 - RNA, 19 nt, Artificial Sequence
  Description of Artificial Sequence: Synthetic oligonucleotide
uggcuuugagaagucguac

SEQ ID NO: 2936313 - RNA, 19 nt, Artificial Sequence
  Description of Artificial Sequence: Synthetic oligonucleotide
ggauccuguccuucagugg

SEQ ID NO: 2936314 - RNA, 19 nt, Artificial Sequence
  Description of Artificial Sequence: Synthetic oligonucleotide
acaguggauccuguccuuc

SEQ ID NO: 2936315 - RNA, 19 nt, Artificial Sequence
  Description of Artificial Sequence: Synthetic oligonucleotide
ugggucgaacugauaccug

SEQ ID NO: 2936316 - RNA, 19 nt, Artificial Sequence
  Description of Artificial Sequence: Synthetic oligonucleotide
uuucuuuaccuggcuuuga

SEQ ID NO: 2936317 - RNA, 19 nt, Artificial Sequence
  Description of Artificial Sequence: Synthetic oligonucleotide
guuguaggccaagugccug

SEQ ID NO: 2936318 - RNA, 19 nt, Artificial Sequence
  Description of Artificial Sequence: Synthetic oligonucleotide
cuguccuucagugguggag

SEQ ID NO: 2936319 - RNA, 19 nt, Artificial Sequence
  Description of Artificial Sequence: Synthetic oligonucleotide
cugccugagugcagcaaag

SEQ ID NO: 2936320 - RNA, 19 nt, Artificial Sequence
  Description of Artificial Sequence: Synthetic oligonucleotide
acagucuguuacaucucuc

SEQ ID NO: 2936321 - RNA, 19 nt, Artificial Sequence
  Description of Artificial Sequence: Synthetic oligonucleotide
ugauugcucugaaguguaa

SEQ ID NO: 2936322 - RNA, 19 nt, Artificial Sequence
  Description of Artificial Sequence: Synthetic oligonucleotide
acuuguccuauaccacagu

SEQ ID NO: 2936323 - RNA, 19 nt, Artificial Sequence
  Description of Artificial Sequence: Synthetic oligonucleotide
uaacagaguugauguuuaa

SEQ ID NO: 2936324 - RNA, 19 nt, Artificial Sequence
  Description of Artificial Sequence: Synthetic oligonucleotide
guuaacagaguugauguuu

SEQ ID NO: 2936325 - RNA, 19 nt, Artificial Sequence
  Description of Artificial Sequence: Synthetic oligonucleotide
ugagugcagcaaagaucag

SEQ ID NO: 2936326 - RNA, 19 nt, Artificial Sequence
  Description of Artificial Sequence: Synthetic oligonucleotide
cagugguggagauguguug

SEQ ID NO: 2936327 - RNA, 19 nt, Artificial Sequence
  Description of Artificial Sequence: Synthetic oligonucleotide
agauguguuguaggccaag

SEQ ID NO: 2936328 - RNA, 19 nt, Artificial Sequence
  Description of Artificial Sequence: Synthetic oligonucleotide
aacaucugccugagugcag

SEQ ID NO: 2936329 - RNA, 19 nt, Artificial Sequence
  Description of Artificial Sequence: Synthetic oligonucleotide
aucagacagugaguuaaca

SEQ ID NO: 2936330 - RNA, 19 nt, Artificial Sequence
  Description of Artificial Sequence: Synthetic oligonucleotide
gucauguuuguaaaauugu

SEQ ID NO: 2936331 - RNA, 19 nt, Artificial Sequence
  Description of Artificial Sequence: Synthetic oligonucleotide
ugccugggcuuaauuggcu

SEQ ID NO: 2936332 - RNA, 19 nt, Artificial Sequence
  Description of Artificial Sequence: Synthetic oligonucleotide
caucaggauauuagauaca

SEQ ID NO: 2936333 - RNA, 19 nt, Artificial Sequence
  Description of Artificial Sequence: Synthetic oligonucleotide
auuggcuuacaugggucga

SEQ ID NO: 2936334 - RNA, 19 nt, Artificial Sequence
  Description of Artificial Sequence: Synthetic oligonucleotide
cugggcuuaauuggcuuac

SEQ ID NO: 2936335 - RNA, 19 nt, Artificial Sequence
  Description of Artificial Sequence: Synthetic oligonucleotide
ggugcauugauugcucuga

SEQ ID NO: 2936336 - RNA, 19 nt, Artificial Sequence
  Description of Artificial Sequence: Synthetic oligonucleotide
auaucccuuauagggugca

SEQ ID NO: 2936337 - RNA, 19 nt, Artificial Sequence
  Description of Artificial Sequence: Synthetic oligonucleotide
agggugcauugauugcucu

SEQ ID NO: 2936338 - RNA, 19 nt, Artificial Sequence
  Description of Artificial Sequence: Synthetic oligonucleotide
ugauaccugucugguacaa

SEQ ID NO: 2936339 - RNA, 19 nt, Artificial Sequence
  Description of Artificial Sequence: Synthetic oligonucleotide
ggaauagugagcauguuuu

SEQ ID NO: 2936340 - RNA, 19 nt, Artificial Sequence
  Description of Artificial Sequence: Synthetic oligonucleotide
accuggcuuugagaagucg

SEQ ID NO: 2936341 - RNA, 19 nt, Artificial Sequence
  Description of Artificial Sequence: Synthetic oligonucleotide
uuggcuuacaugggucgaa

SEQ ID NO: 2936342 - RNA, 19 nt, Artificial Sequence
  Description of Artificial Sequence: Synthetic oligonucleotide
cagcaaagaucagaauauc

SEQ ID NO: 2936343 - RNA, 19 nt, Artificial Sequence
  Description of Artificial Sequence: Synthetic oligonucleotide
caacaucugccugagugca

SEQ ID NO: 2936344 - RNA, 19 nt, Artificial Sequence
  Description of Artificial Sequence: Synthetic oligonucleotide
auaccacagucuguuacau

SEQ ID NO: 2936345 - RNA, 19 nt, Artificial Sequence
  Description of Artificial Sequence: Synthetic oligonucleotide
gagcauguuuuggacuuuc

SEQ ID NO: 2936346 - RNA, 19 nt, Artificial Sequence
  Description of Artificial Sequence: Synthetic oligonucleotide
gugagcauguuuuggacuu

SEQ ID NO: 2936347 - RNA, 19 nt, Artificial Sequence
  Description of Artificial Sequence: Synthetic oligonucleotide
uaccacagucuguuacauc

SEQ ID NO: 2936348 - RNA, 19 nt, Artificial Sequence
  Description of Artificial Sequence: Synthetic oligonucleotide
gaacugauaccugucuggu

SEQ ID NO: 2936349 - RNA, 19 nt, Artificial Sequence
  Description of Artificial Sequence: Synthetic oligonucleotide
cagucuguuacaucucucu

SEQ ID NO: 2936350 - RNA, 19 nt, Artificial Sequence
  Description of Artificial Sequence: Synthetic oligonucleotide
uggcuuacaugggucgaac

SEQ ID NO: 2936351 - RNA, 19 nt, Artificial Sequence
  Description of Artificial Sequence: Synthetic oligonucleotide
ugccugagugcagcaaaga

SEQ ID NO: 2936352 - RNA, 19 nt, Artificial Sequence
  Description of Artificial Sequence: Synthetic oligonucleotide
gucuucuaaggagucaucu

SEQ ID NO: 2936353 - RNA, 19 nt, Artificial Sequence
  Description of Artificial Sequence: Synthetic oligonucleotide
cuggcuuugagaagucgua

SEQ ID NO: 2936354 - RNA, 19 nt, Artificial Sequence
  Description of Artificial Sequence: Synthetic oligonucleotide
agccacacaguggauccug

SEQ ID NO: 2936355 - RNA, 19 nt, Artificial Sequence
  Description of Artificial Sequence: Synthetic oligonucleotide
gugccugggcuuaauuggc

SEQ ID NO: 2936356 - RNA, 19 nt, Artificial Sequence
  Description of Artificial Sequence: Synthetic oligonucleotide
gucgaacugauaccugucu

SEQ ID NO: 2936357 - RNA, 19 nt, Artificial Sequence
  Description of Artificial Sequence: Synthetic oligonucleotide
auacaggaauagugagcau

SEQ ID NO: 2936358 - RNA, 19 nt, Artificial Sequence
  Description of Artificial Sequence: Synthetic oligonucleotide
uccuucagugguggagaug

SEQ ID NO: 2936359 - RNA, 19 nt, Artificial Sequence
  Description of Artificial Sequence: Synthetic oligonucleotide
cugauaccugucugguaca

SEQ ID NO: 2936360 - RNA, 19 nt, Artificial Sequence
  Description of Artificial Sequence: Synthetic oligonucleotide
uacaugggucgaacugaua

SEQ ID NO: 2936361 - RNA, 19 nt, Artificial Sequence
  Description of Artificial Sequence: Synthetic oligonucleotide
gggugcauugauugcucug

SEQ ID NO: 2936362 - RNA, 19 nt, Artificial Sequence
  Description of Artificial Sequence: Synthetic oligonucleotide
gauguguuguaggccaagu

SEQ ID NO: 2936363 - RNA, 19 nt, Artificial Sequence
  Description of Artificial Sequence: Synthetic oligonucleotide
ugggcuuaauuggcuuaca

SEQ ID NO: 2936364 - RNA, 19 nt, Artificial Sequence
  Description of Artificial Sequence: Synthetic oligonucleotide
cacaguuauccacauuagu

SEQ ID NO: 2936365 - RNA, 19 nt, Artificial Sequence
  Description of Artificial Sequence: Synthetic oligonucleotide
cuuauagggugcauugauu

SEQ ID NO: 2936366 - RNA, 19 nt, Artificial Sequence
  Description of Artificial Sequence: Synthetic oligonucleotide
gaccaucaggauauuagau

SEQ ID NO: 2936367 - RNA, 19 nt, Artificial Sequence
  Description of Artificial Sequence: Synthetic oligonucleotide
gauugcucugaaguguaau

SEQ ID NO: 2936368 - RNA, 19 nt, Artificial Sequence
  Description of Artificial Sequence: Synthetic oligonucleotide
caagaacuucaucacaguu

SEQ ID NO: 2936369 - RNA, 19 nt, Artificial Sequence
  Description of Artificial Sequence: Synthetic oligonucleotide
aucccuuauagggugcauu

SEQ ID NO: 2936370 - RNA, 19 nt, Artificial Sequence
  Description of Artificial Sequence: Synthetic oligonucleotide
uaccuggcuuugagaaguc

SEQ ID NO: 2936371 - RNA, 19 nt, Artificial Sequence
  Description of Artificial Sequence: Synthetic oligonucleotide
agcccgcaacaucugccug

SEQ ID NO: 2936372 - RNA, 19 nt, Artificial Sequence
  Description of Artificial Sequence: Synthetic oligonucleotide
aagccacacaguggauccu

SEQ ID NO: 2936373 - RNA, 19 nt, Artificial Sequence
  Description of Artificial Sequence: Synthetic oligonucleotide
gacuuucuuuaccuggcuu

SEQ ID NO: 2936374 - RNA, 19 nt, Artificial Sequence
  Description of Artificial Sequence: Synthetic oligonucleotide
cuucagugguggagaugug

SEQ ID NO: 2936375 - RNA, 19 nt, Artificial Sequence
  Description of Artificial Sequence: Synthetic oligonucleotide
caccauuuuaucagacagu

SEQ ID NO: 2936376 - RNA, 19 nt, Artificial Sequence
  Description of Artificial Sequence: Synthetic oligonucleotide
caguggauccuguccuuca

SEQ ID NO: 2936377 - RNA, 19 nt, Artificial Sequence
  Description of Artificial Sequence: Synthetic oligonucleotide
aggccaagugccugggcuu

SEQ ID NO: 2936378 - RNA, 19 nt, Artificial Sequence
  Description of Artificial Sequence: Synthetic oligonucleotide
guaggccaagugccugggc

SEQ ID NO: 2936379 - RNA, 19 nt, Artificial Sequence
  Description of Artificial Sequence: Synthetic oligonucleotide
ucguacuuucugucauguu

SEQ ID NO: 2936380 - RNA, 19 nt, Artificial Sequence
  Description of Artificial Sequence: Synthetic oligonucleotide
acugaccaucaggauauua

SEQ ID NO: 2936381 - RNA, 19 nt, Artificial Sequence
  Description of Artificial Sequence: Synthetic oligonucleotide
gcagcaaagaucagaauau

SEQ ID NO: 2936382 - RNA, 19 nt, Artificial Sequence
  Description of Artificial Sequence: Synthetic oligonucleotide
cacagucuguuacaucucu

SEQ ID NO: 2936383 - RNA, 19 nt, Artificial Sequence
  Description of Artificial Sequence: Synthetic oligonucleotide
cugaauucuuuugagcuuu

SEQ ID NO: 2936384 - RNA, 19 nt, Artificial Sequence
  Description of Artificial Sequence: Synthetic oligonucleotide
ggagucaucugcagcccgc

SEQ ID NO: 2936385 - RNA, 19 nt, Artificial Sequence
  Description of Artificial Sequence: Synthetic oligonucleotide
gacagugaguuaacagagu

SEQ ID NO: 2936386 - RNA, 19 nt, Artificial Sequence
  Description of Artificial Sequence: Synthetic oligonucleotide
gagucaucugcagcccgca

SEQ ID NO: 2936387 - RNA, 19 nt, Artificial Sequence
  Description of Artificial Sequence: Synthetic oligonucleotide
acuuucugucauguuugua

SEQ ID NO: 2936388 - RNA, 19 nt, Artificial Sequence
  Description of Artificial Sequence: Synthetic oligonucleotide
agucaucugcagcccgcaa

SEQ ID NO: 2936389 - RNA, 19 nt, Artificial Sequence
  Description of Artificial Sequence: Synthetic oligonucleotide
uaucccuuauagggugcau

SEQ ID NO: 2936390 - RNA, 19 nt, Artificial Sequence
  Description of Artificial Sequence: Synthetic oligonucleotide
ggcuuugagaagucguacu

SEQ ID NO: 2936391 - RNA, 19 nt, Artificial Sequence
  Description of Artificial Sequence: Synthetic oligonucleotide
ccacauuaguaagcaagac

SEQ ID NO: 2936392 - RNA, 19 nt, Artificial Sequence
  Description of Artificial Sequence: Synthetic oligonucleotide
gucguacuuucugucaugu

SEQ ID NO: 2936393 - RNA, 19 nt, Artificial Sequence
  Description of Artificial Sequence: Synthetic oligonucleotide
gugcauugauugcucugaa

SEQ ID NO: 2936394 - RNA, 19 nt, Artificial Sequence
  Description of Artificial Sequence: Synthetic oligonucleotide
cugucauguuuguaaaauu

SEQ ID NO: 2936395 - RNA, 19 nt, Artificial Sequence
  Description of Artificial Sequence: Synthetic oligonucleotide
caagacuacuuguccuaua

SEQ ID NO: 2936396 - RNA, 19 nt, Artificial Sequence
  Description of Artificial Sequence: Synthetic oligonucleotide
gggucgaacugauaccugu

SEQ ID NO: 2936397 - RNA, 19 nt, Artificial Sequence
  Description of Artificial Sequence: Synthetic oligonucleotide
gaacuucaucacaguuauc

SEQ ID NO: 2936398 - RNA, 19 nt, Artificial Sequence
  Description of Artificial Sequence: Synthetic oligonucleotide
auccuguccuucaguggug

SEQ ID NO: 2936399 - RNA, 19 nt, Artificial Sequence
  Description of Artificial Sequence: Synthetic oligonucleotide
gagauguguuguaggccaa

SEQ ID NO: 2936400 - RNA, 19 nt, Artificial Sequence
  Description of Artificial Sequence: Synthetic oligonucleotide
caucucucugaauucuuuu

SEQ ID NO: 2936401 - RNA, 19 nt, Artificial Sequence
  Description of Artificial Sequence: Synthetic oligonucleotide
ccuucagugguggagaugu

SEQ ID NO: 2936402 - RNA, 19 nt, Artificial Sequence
  Description of Artificial Sequence: Synthetic oligonucleotide
gcagcccgcaacaucugcc

SEQ ID NO: 2936403 - RNA, 19 nt, Artificial Sequence
  Description of Artificial Sequence: Synthetic oligonucleotide
cugcagcccgcaacaucug

SEQ ID NO: 2936404 - RNA, 19 nt, Artificial Sequence
  Description of Artificial Sequence: Synthetic oligonucleotide
ggucgaacugauaccuguc

SEQ ID NO: 2936405 - RNA, 19 nt, Artificial Sequence
  Description of Artificial Sequence: Synthetic oligonucleotide
ccauuuuaucagacaguga

SEQ ID NO: 2936406 - RNA, 19 nt, Artificial Sequence
  Description of Artificial Sequence: Synthetic oligonucleotide
caucugccugagugcagca

SEQ ID NO: 2936407 - RNA, 19 nt, Artificial Sequence
  Description of Artificial Sequence: Synthetic oligonucleotide
cuuugagaagucguacuuu

SEQ ID NO: 2936408 - RNA, 19 nt, Artificial Sequence
  Description of Artificial Sequence: Synthetic oligonucleotide
guggauccuguccuucagu

SEQ ID NO: 2936409 - RNA, 19 nt, Artificial Sequence
  Description of Artificial Sequence: Synthetic oligonucleotide
aucugccugagugcagcaa

SEQ ID NO: 2936410 - RNA, 19 nt, Artificial Sequence
  Description of Artificial Sequence: Synthetic oligonucleotide
aguugauguuuaagacaua

SEQ ID NO: 2936411 - RNA, 19 nt, Artificial Sequence
  Description of Artificial Sequence: Synthetic oligonucleotide
ccacagucuguuacaucuc

SEQ ID NO: 2936412 - RNA, 19 nt, Artificial Sequence
  Description of Artificial Sequence: Synthetic oligonucleotide
cguacuuucugucauguuu

SEQ ID NO: 2936413 - RNA, 19 nt, Artificial Sequence
  Description of Artificial Sequence: Synthetic oligonucleotide
gcucugaaguguaauuacu

SEQ ID NO: 2936414 - RNA, 19 nt, Artificial Sequence
  Description of Artificial Sequence: Synthetic oligonucleotide
cgucaagaacuucaucaca

SEQ ID NO: 2936415 - RNA, 19 nt, Artificial Sequence
  Description of Artificial Sequence: Synthetic oligonucleotide
gcauguuuuggacuuucuu

SEQ ID NO: 2936416 - RNA, 19 nt, Artificial Sequence
  Description of Artificial Sequence: Synthetic oligonucleotide
ccuggcuuugagaagucgu

SEQ ID NO: 2936417 - RNA, 19 nt, Artificial Sequence
  Description of Artificial Sequence: Synthetic oligonucleotide
ccuuauagggugcauugau

SEQ ID NO: 2936418 - RNA, 19 nt, Artificial Sequence
  Description of Artificial Sequence: Synthetic oligonucleotide
ggacuuucuuuaccuggcu

SEQ ID NO: 2936419 - RNA, 19 nt, Artificial Sequence
  Description of Artificial Sequence: Synthetic oligonucleotide
cagcccgcaacaucugccu

SEQ ID NO: 2936420 - RNA, 19 nt, Artificial Sequence
  Description of Artificial Sequence: Synthetic oligonucleotide
ccacacaguggauccuguc

SEQ ID NO: 2936421 - RNA, 19 nt, Artificial Sequence
  Description of Artificial Sequence: Synthetic oligonucleotide
gggcuuaauuggcuuacau

SEQ ID NO: 2936422 - RNA, 19 nt, Artificial Sequence
  Description of Artificial Sequence: Synthetic oligonucleotide
ccugucugguacaaagccu

SEQ ID NO: 2936423 - RNA, 19 nt, Artificial Sequence
  Description of Artificial Sequence: Synthetic oligonucleotide
cauaagccacacaguggau

SEQ ID NO: 2936424 - RNA, 19 nt, Artificial Sequence
  Description of Artificial Sequence: Synthetic oligonucleotide
ggcuuacaugggucgaacu

SEQ ID NO: 2936425 - RNA, 19 nt, Artificial Sequence
  Description of Artificial Sequence: Synthetic oligonucleotide
gccugagugcagcaaagau

SEQ ID NO: 2936426 - RNA, 19 nt, Artificial Sequence
  Description of Artificial Sequence: Synthetic oligonucleotide
cccgcaacaucugccugag

SEQ ID NO: 2936427 - RNA, 19 nt, Artificial Sequence
  Description of Artificial Sequence: Synthetic oligonucleotide
guccuauaccacagucugu

SEQ ID NO: 2936428 - RNA, 19 nt, Artificial Sequence
  Description of Artificial Sequence: Synthetic oligonucleotide
ccugggcuuaauuggcuua

SEQ ID NO: 2936429 - RNA, 19 nt, Artificial Sequence
  Description of Artificial Sequence: Synthetic oligonucleotide
gugaguuaacagaguugau

SEQ ID NO: 2936430 - RNA, 19 nt, Artificial Sequence
  Description of Artificial Sequence: Synthetic oligonucleotide
caagugccugggcuuaauu

SEQ ID NO: 2936431 - RNA, 19 nt, Artificial Sequence
  Description of Artificial Sequence: Synthetic oligonucleotide
cuguuacaucucucugaau

SEQ ID NO: 2936432 - RNA, 19 nt, Artificial Sequence
  Description of Artificial Sequence: Synthetic oligonucleotide
cacaguggauccuguccuu

SEQ ID NO: 2936433 - RNA, 19 nt, Artificial Sequence
  Description of Artificial Sequence: Synthetic oligonucleotide
cccuuauagggugcauuga

SEQ ID NO: 2936434 - RNA, 19 nt, Artificial Sequence
  Description of Artificial Sequence: Synthetic oligonucleotide
ccuauaccacagucuguua

SEQ ID NO: 2936435 - RNA, 19 nt, Artificial Sequence
  Description of Artificial Sequence: Synthetic oligonucleotide
gcaagacuacuuguccuau

SEQ ID NO: 2936436 - RNA, 19 nt, Artificial Sequence
  Description of Artificial Sequence: Synthetic oligonucleotide
ggccaagugccugggcuua

SEQ ID NO: 2936437 - RNA, 19 nt, Artificial Sequence
  Description of Artificial Sequence: Synthetic oligonucleotide
ccuguccuucaguggugga

SEQ ID NO: 2936438 - RNA, 19 nt, Artificial Sequence
  Description of Artificial Sequence: Synthetic oligonucleotide
gccugggcuuaauuggcuu

SEQ ID NO: 2936439 - RNA, 19 nt, Artificial Sequence
  Description of Artificial Sequence: Synthetic oligonucleotide
caggaauagugagcauguu

SEQ ID NO: 2936440 - RNA, 19 nt, Artificial Sequence
  Description of Artificial Sequence: Synthetic oligonucleotide
caucugcagcccgcaacau

SEQ ID NO: 2936441 - RNA, 19 nt, Artificial Sequence
  Description of Artificial Sequence: Synthetic oligonucleotide
gccacacaguggauccugu

SEQ ID NO: 2936442 - RNA, 19 nt, Artificial Sequence
  Description of Artificial Sequence: Synthetic oligonucleotide
gccaagugccugggcuuaa

SEQ ID NO: 2936443 - RNA, 19 nt, Artificial Sequence
  Description of Artificial Sequence: Synthetic oligonucleotide
ccaagugccugggcuuaau

SEQ ID NO: 2936444 - RNA, 19 nt, Artificial Sequence
  Description of Artificial Sequence: Synthetic oligonucleotide
ccgcaacaucugccugagu

SEQ ID NO: 2936445 - RNA, 19 nt, Artificial Sequence
  Description of Artificial Sequence: Synthetic oligonucleotide
ugaagauagaaccuuaggg

SEQ ID NO: 2936446 - RNA, 19 nt, Artificial Sequence
  Description of Artificial Sequence: Synthetic oligonucleotide
aggacaugaagauagaacc

SEQ ID NO: 2936447 - RNA, 19 nt, Artificial Sequence
  Description of Artificial Sequence: Synthetic oligonucleotide
acugguguuaaucuggacc

SEQ ID NO: 2936448 - RNA, 19 nt, Artificial Sequence
  Description of Artificial Sequence: Synthetic oligonucleotide
uugucugccaacuucaugg

SEQ ID NO: 2936449 - RNA, 19 nt, Artificial Sequence
  Description of Artificial Sequence: Synthetic oligonucleotide
aaugaagugccauuugauc

SEQ ID NO: 2936450 - RNA, 19 nt, Artificial Sequence
  Description of Artificial Sequence: Synthetic oligonucleotide
ucucaggacaugaagauag

SEQ ID NO: 2936451 - RNA, 19 nt, Artificial Sequence
  Description of Artificial Sequence: Synthetic oligonucleotide
gaaccuuaggguuugaugc

SEQ ID NO: 2936452 - RNA, 19 nt, Artificial Sequence
  Description of Artificial Sequence: Synthetic oligonucleotide
aguagaaccuuucuucugc

SEQ ID NO: 2936453 - RNA, 19 nt, Artificial Sequence
  Description of Artificial Sequence: Synthetic oligonucleotide
uuaaucuggaccauaaccu

SEQ ID NO: 2936454 - RNA, 19 nt, Artificial Sequence
  Description of Artificial Sequence: Synthetic oligonucleotide
aguucuugaacauaguucu

SEQ ID NO: 2936455 - RNA, 19 nt, Artificial Sequence
  Description of Artificial Sequence: Synthetic oligonucleotide
aacuucauggagucuaccg

SEQ ID NO: 2936456 - RNA, 19 nt, Artificial Sequence
  Description of Artificial Sequence: Synthetic oligonucleotide
uuuguugacauucuguuuc

SEQ ID NO: 2936457 - RNA, 19 nt, Artificial Sequence
  Description of Artificial Sequence: Synthetic oligonucleotide
aaacccgagucccagcucc

SEQ ID NO: 2936458 - RNA, 19 nt, Artificial Sequence
  Description of Artificial Sequence: Synthetic oligonucleotide
uguaaauggccaaugaagu

SEQ ID NO: 2936459 - RNA, 19 nt, Artificial Sequence
  Description of Artificial Sequence: Synthetic oligonucleotide
guuaaucuggaccauaacc

SEQ ID NO: 2936460 - RNA, 19 nt, Artificial Sequence
  Description of Artificial Sequence: Synthetic oligonucleotide
aaagagguuggggacagcc

SEQ ID NO: 2936461 - RNA, 19 nt, Artificial Sequence
  Description of Artificial Sequence: Synthetic oligonucleotide
acagccaucaauuuguuga

SEQ ID NO: 2936462 - RNA, 19 nt, Artificial Sequence
  Description of Artificial Sequence: Synthetic oligonucleotide
ucuguuucuguaaauggcc

SEQ ID NO: 2936463 - RNA, 19 nt, Artificial Sequence
  Description of Artificial Sequence: Synthetic oligonucleotide
uaguaguucuugaacauag

SEQ ID NO: 2936464 - RNA, 19 nt, Artificial Sequence
  Description of Artificial Sequence: Synthetic oligonucleotide
cuguaaauggccaaugaag

SEQ ID NO: 2936465 - RNA, 19 nt, Artificial Sequence
  Description of Artificial Sequence: Synthetic oligonucleotide
aauuuguugacauucuguu

SEQ ID NO: 2936466 - RNA, 19 nt, Artificial Sequence
  Description of Artificial Sequence: Synthetic oligonucleotide
uccaaaagugcguuggccg

SEQ ID NO: 2936467 - RNA, 19 nt, Artificial Sequence
  Description of Artificial Sequence: Synthetic oligonucleotide
gaacuguucaccuugucug

SEQ ID NO: 2936468 - RNA, 19 nt, Artificial Sequence
  Description of Artificial Sequence: Synthetic oligonucleotide
aaccuuaggguuugaugcc

SEQ ID NO: 2936469 - RNA, 19 nt, Artificial Sequence
  Description of Artificial Sequence: Synthetic oligonucleotide
uugaacauaguucucucca

SEQ ID NO: 2936470 - RNA, 19 nt, Artificial Sequence
  Description of Artificial Sequence: Synthetic oligonucleotide
aacuguucaccuugucugc

SEQ ID NO: 2936471 - RNA, 19 nt, Artificial Sequence
  Description of Artificial Sequence: Synthetic oligonucleotide
uccagcauaaagagguugg

SEQ ID NO: 2936472 - RNA, 19 nt, Artificial Sequence
  Description of Artificial Sequence: Synthetic oligonucleotide
uaaauggccaaugaagugc

SEQ ID NO: 2936473 - RNA, 19 nt, Artificial Sequence
  Description of Artificial Sequence: Synthetic oligonucleotide
uucuaguaguucuugaaca

SEQ ID NO: 2936474 - RNA, 19 nt, Artificial Sequence
  Description of Artificial Sequence: Synthetic oligonucleotide
uucaguagaaccuuucuuc

SEQ ID NO: 2936475 - RNA, 19 nt, Artificial Sequence
  Description of Artificial Sequence: Synthetic oligonucleotide
uccacugguguuaaucugg

SEQ ID NO: 2936476 - RNA, 19 nt, Artificial Sequence
  Description of Artificial Sequence: Synthetic oligonucleotide
ugaucucaggacaugaaga

SEQ ID NO: 2936477 - RNA, 19 nt, Artificial Sequence
  Description of Artificial Sequence: Synthetic oligonucleotide
uucuguuucuguaaauggc

SEQ ID NO: 2936478 - RNA, 19 nt, Artificial Sequence
  Description of Artificial Sequence: Synthetic oligonucleotide
aaauggccaaugaagugcc

SEQ ID NO: 2936479 - RNA, 19 nt, Artificial Sequence
  Description of Artificial Sequence: Synthetic oligonucleotide
aagauagaaccuuaggguu

SEQ ID NO: 2936480 - RNA, 19 nt, Artificial Sequence
  Description of Artificial Sequence: Synthetic oligonucleotide
ucagucguucaguagaacc

SEQ ID NO: 2936481 - RNA, 19 nt, Artificial Sequence
  Description of Artificial Sequence: Synthetic oligonucleotide
uugaucucaggacaugaag

SEQ ID NO: 2936482 - RNA, 19 nt, Artificial Sequence
  Description of Artificial Sequence: Synthetic oligonucleotide
augaagugccauuugaucu

SEQ ID NO: 2936483 - RNA, 19 nt, Artificial Sequence
  Description of Artificial Sequence: Synthetic oligonucleotide
agcauaaagagguugggga

SEQ ID NO: 2936484 - RNA, 19 nt, Artificial Sequence
  Description of Artificial Sequence: Synthetic oligonucleotide
uuucuaguaguucuugaac

SEQ ID NO: 2936485 - RNA, 19 nt, Artificial Sequence
  Description of Artificial Sequence: Synthetic oligonucleotide
uggaccauaaccuuucagu

SEQ ID NO: 2936486 - RNA, 19 nt, Artificial Sequence
  Description of Artificial Sequence: Synthetic oligonucleotide
uaguucuugaacauaguuc

SEQ ID NO: 2936487 - RNA, 19 nt, Artificial Sequence
  Description of Artificial Sequence: Synthetic oligonucleotide
augaagauagaaccuuagg

SEQ ID NO: 2936488 - RNA, 19 nt, Artificial Sequence
  Description of Artificial Sequence: Synthetic oligonucleotide
gaccauaaccuuucagucg

SEQ ID NO: 2936489 - RNA, 19 nt, Artificial Sequence
  Description of Artificial Sequence: Synthetic oligonucleotide
uuuaguuuugcugaccgcu

SEQ ID NO: 2936490 - RNA, 19 nt, Artificial Sequence
  Description of Artificial Sequence: Synthetic oligonucleotide
gaagauagaaccuuagggu

SEQ ID NO: 2936491 - RNA, 19 nt, Artificial Sequence
  Description of Artificial Sequence: Synthetic oligonucleotide
uaaccuuucagucguucag

SEQ ID NO: 2936492 - RNA, 19 nt, Artificial Sequence
  Description of Artificial Sequence: Synthetic oligonucleotide
acauaguucucuccaaaag

SEQ ID NO: 2936493 - RNA, 19 nt, Artificial Sequence
  Description of Artificial Sequence: Synthetic oligonucleotide
uuggccgugaccauaggcc

SEQ ID NO: 2936494 - RNA, 19 nt, Artificial Sequence
  Description of Artificial Sequence: Synthetic oligonucleotide
uaccguuuccagcauaaag

SEQ ID NO: 2936495 - RNA, 19 nt, Artificial Sequence
  Description of Artificial Sequence: Synthetic oligonucleotide
uuugcugaccgcuacuagc

SEQ ID NO: 2936496 - RNA, 19 nt, Artificial Sequence
  Description of Artificial Sequence: Synthetic oligonucleotide
ucugccaacuucauggagu

SEQ ID NO: 2936497 - RNA, 19 nt, Artificial Sequence
  Description of Artificial Sequence: Synthetic oligonucleotide
ugcagguuuaguuuugcug

SEQ ID NO: 2936498 - RNA, 19 nt, Artificial Sequence
  Description of Artificial Sequence: Synthetic oligonucleotide
ucaauuuguugacauucug

SEQ ID NO: 2936499 - RNA, 19 nt, Artificial Sequence
  Description of Artificial Sequence: Synthetic oligonucleotide
ucuguaaauggccaaugaa

SEQ ID NO: 2936500 - RNA, 19 nt, Artificial Sequence
  Description of Artificial Sequence: Synthetic oligonucleotide
agaaccuuucuucugccag

SEQ ID NO: 2936501 - RNA, 19 nt, Artificial Sequence
  Description of Artificial Sequence: Synthetic oligonucleotide
uuuucuaguaguucuugaa

SEQ ID NO: 2936502 - RNA, 19 nt, Artificial Sequence
  Description of Artificial Sequence: Synthetic oligonucleotide
agaaccuuaggguuugaug

SEQ ID NO: 2936503 - RNA, 19 nt, Artificial Sequence
  Description of Artificial Sequence: Synthetic oligonucleotide
ugaccauaggccucaauca

SEQ ID NO: 2936504 - RNA, 19 nt, Artificial Sequence
  Description of Artificial Sequence: Synthetic oligonucleotide
accauaaccuuucagucgu

SEQ ID NO: 2936505 - RNA, 19 nt, Artificial Sequence
  Description of Artificial Sequence: Synthetic oligonucleotide
aacauaguucucuccaaaa

SEQ ID NO: 2936506 - RNA, 19 nt, Artificial Sequence
  Description of Artificial Sequence: Synthetic oligonucleotide
ugacacacucugcuggacg

SEQ ID NO: 2936507 - RNA, 19 nt, Artificial Sequence
  Description of Artificial Sequence: Synthetic oligonucleotide
gguuuaguuuugcugaccg

SEQ ID NO: 2936508 - RNA, 19 nt, Artificial Sequence
  Description of Artificial Sequence: Synthetic oligonucleotide
uccguagacaugcugccag

SEQ ID NO: 2936509 - RNA, 19 nt, Artificial Sequence
  Description of Artificial Sequence: Synthetic oligonucleotide
uagacaugcugccagcucu

SEQ ID NO: 2936510 - RNA, 19 nt, Artificial Sequence
  Description of Artificial Sequence: Synthetic oligonucleotide
ucaguagaaccuuucuucu

SEQ ID NO: 2936511 - RNA, 19 nt, Artificial Sequence
  Description of Artificial Sequence: Synthetic oligonucleotide
gagucuaccguuuccagca

SEQ ID NO: 2936512 - RNA, 19 nt, Artificial Sequence
  Description of Artificial Sequence: Synthetic oligonucleotide
uugcugaccgcuacuagcc

SEQ ID NO: 2936513 - RNA, 19 nt, Artificial Sequence
  Description of Artificial Sequence: Synthetic oligonucleotide
uuugaugccuuuucuagua

SEQ ID NO: 2936514 - RNA, 19 nt, Artificial Sequence
  Description of Artificial Sequence: Synthetic oligonucleotide
caucaauuuguugacauuc

SEQ ID NO: 2936515 - RNA, 19 nt, Artificial Sequence
  Description of Artificial Sequence: Synthetic oligonucleotide
ucguucacggcccgcagcg

SEQ ID NO: 2936516 - RNA, 19 nt, Artificial Sequence
  Description of Artificial Sequence: Synthetic oligonucleotide
uaggccucaaucaccaugu

SEQ ID NO: 2936517 - RNA, 19 nt, Artificial Sequence
  Description of Artificial Sequence: Synthetic oligonucleotide
gaaccuuucuucugccagg

SEQ ID NO: 2936518 - RNA, 19 nt, Artificial Sequence
  Description of Artificial Sequence: Synthetic oligonucleotide
caugaagauagaaccuuag

SEQ ID NO: 2936519 - RNA, 19 nt, Artificial Sequence
  Description of Artificial Sequence: Synthetic oligonucleotide
ugccuuuucuaguaguucu

SEQ ID NO: 2936520 - RNA, 19 nt, Artificial Sequence
  Description of Artificial Sequence: Synthetic oligonucleotide
gguuugaugccuuuucuag

SEQ ID NO: 2936521 - RNA, 19 nt, Artificial Sequence
  Description of Artificial Sequence: Synthetic oligonucleotide
uucuguaaauggccaauga

SEQ ID NO: 2936522 - RNA, 19 nt, Artificial Sequence
  Description of Artificial Sequence: Synthetic oligonucleotide
auaguucucuccaaaagug

SEQ ID NO: 2936523 - RNA, 19 nt, Artificial Sequence
  Description of Artificial Sequence: Synthetic oligonucleotide
aagugcguuggccgugacc

SEQ ID NO: 2936524 - RNA, 19 nt, Artificial Sequence
  Description of Artificial Sequence: Synthetic oligonucleotide
guaaauggccaaugaagug

SEQ ID NO: 2936525 - RNA, 19 nt, Artificial Sequence
  Description of Artificial Sequence: Synthetic oligonucleotide
cuugaacauaguucucucc

SEQ ID NO: 2936526 - RNA, 19 nt, Artificial Sequence
  Description of Artificial Sequence: Synthetic oligonucleotide
ucuaguaguucuugaacau

SEQ ID NO: 2936527 - RNA, 19 nt, Artificial Sequence
  Description of Artificial Sequence: Synthetic oligonucleotide
ugccauuugaucucaggac

SEQ ID NO: 2936528 - RNA, 19 nt, Artificial Sequence
  Description of Artificial Sequence: Synthetic oligonucleotide
agcuccguagacaugcugc

SEQ ID NO: 2936529 - RNA, 19 nt, Artificial Sequence
  Description of Artificial Sequence: Synthetic oligonucleotide
auaggccucaaucaccaug

SEQ ID NO: 2936530 - RNA, 19 nt, Artificial Sequence
  Description of Artificial Sequence: Synthetic oligonucleotide
agugccauuugaucucagg

SEQ ID NO: 2936531 - RNA, 19 nt, Artificial Sequence
  Description of Artificial Sequence: Synthetic oligonucleotide
auggcugggagaucccgcc

SEQ ID NO: 2936532 - RNA, 19 nt, Artificial Sequence
  Description of Artificial Sequence: Synthetic oligonucleotide
gugaccauaggccucaauc

SEQ ID NO: 2936533 - RNA, 19 nt, Artificial Sequence
  Description of Artificial Sequence: Synthetic oligonucleotide
uuuugcugaccgcuacuag

SEQ ID NO: 2936534 - RNA, 19 nt, Artificial Sequence
  Description of Artificial Sequence: Synthetic oligonucleotide
acuucauggagucuaccgu

SEQ ID NO: 2936535 - RNA, 19 nt, Artificial Sequence
  Description of Artificial Sequence: Synthetic oligonucleotide
cauucuguuucuguaaaug

SEQ ID NO: 2936536 - RNA, 19 nt, Artificial Sequence
  Description of Artificial Sequence: Synthetic oligonucleotide
uuggauggcugggagaucc

SEQ ID NO: 2936537 - RNA, 19 nt, Artificial Sequence
  Description of Artificial Sequence: Synthetic oligonucleotide
ucuaccguuuccagcauaa

SEQ ID NO: 2936538 - RNA, 19 nt, Artificial Sequence
  Description of Artificial Sequence: Synthetic oligonucleotide
acuagccgggguuggaugg

SEQ ID NO: 2936539 - RNA, 19 nt, Artificial Sequence
  Description of Artificial Sequence: Synthetic oligonucleotide
ucuccacugguguuaaucu

SEQ ID NO: 2936540 - RNA, 19 nt, Artificial Sequence
  Description of Artificial Sequence: Synthetic oligonucleotide
guuuccagcauaaagaggu

SEQ ID NO: 2936541 - RNA, 19 nt, Artificial Sequence
  Description of Artificial Sequence: Synthetic oligonucleotide
ugaagugccauuugaucuc

SEQ ID NO: 2936542 - RNA, 19 nt, Artificial Sequence
  Description of Artificial Sequence: Synthetic oligonucleotide
agugcguuggccgugacca

SEQ ID NO: 2936543 - RNA, 19 nt, Artificial Sequence
  Description of Artificial Sequence: Synthetic oligonucleotide
uugacauucuguuucugua

SEQ ID NO: 2936544 - RNA, 19 nt, Artificial Sequence
  Description of Artificial Sequence: Synthetic oligonucleotide
gauagaaccuuaggguuug

SEQ ID NO: 2936545 - RNA, 19 nt, Artificial Sequence
  Description of Artificial Sequence: Synthetic oligonucleotide
gacacacucugcuggacgc

SEQ ID NO: 2936546 - RNA, 19 nt, Artificial Sequence
  Description of Artificial Sequence: Synthetic oligonucleotide
auaaccuuucagucguuca

SEQ ID NO: 2936547 - RNA, 19 nt, Artificial Sequence
  Description of Artificial Sequence: Synthetic oligonucleotide
cugguguuaaucuggacca

SEQ ID NO: 2936548 - RNA, 19 nt, Artificial Sequence
  Description of Artificial Sequence: Synthetic oligonucleotide
uuggggacagccaucaauu

SEQ ID NO: 2936549 - RNA, 19 nt, Artificial Sequence
  Description of Artificial Sequence: Synthetic oligonucleotide
uguuaaucuggaccauaac

SEQ ID NO: 2936550 - RNA, 19 nt, Artificial Sequence
  Description of Artificial Sequence: Synthetic oligonucleotide
uuugaucucaggacaugaa

SEQ ID NO: 2936551 - RNA, 19 nt, Artificial Sequence
  Description of Artificial Sequence: Synthetic oligonucleotide
cucuccaaaagugcguugg

SEQ ID NO: 2936552 - RNA, 19 nt, Artificial Sequence
  Description of Artificial Sequence: Synthetic oligonucleotide
uugaugccuuuucuaguag

SEQ ID NO: 2936553 - RNA, 19 nt, Artificial Sequence
  Description of Artificial Sequence: Synthetic oligonucleotide
ugacauucuguuucuguaa

SEQ ID NO: 2936554 - RNA, 19 nt, Artificial Sequence
  Description of Artificial Sequence: Synthetic oligonucleotide
accguuuccagcauaaaga

SEQ ID NO: 2936555 - RNA, 19 nt, Artificial Sequence
  Description of Artificial Sequence: Synthetic oligonucleotide
ucuugaacauaguucucuc

SEQ ID NO: 2936556 - RNA, 19 nt, Artificial Sequence
  Description of Artificial Sequence: Synthetic oligonucleotide
uuucuguaaauggccaaug

SEQ ID NO: 2936557 - RNA, 19 nt, Artificial Sequence
  Description of Artificial Sequence: Synthetic oligonucleotide
accauaggccucaaucacc

SEQ ID NO: 2936558 - RNA, 19 nt, Artificial Sequence
  Description of Artificial Sequence: Synthetic oligonucleotide
gaccauaggccucaaucac

SEQ ID NO: 2936559 - RNA, 19 nt, Artificial Sequence
  Description of Artificial Sequence: Synthetic oligonucleotide
auaaagagguuggggacag

SEQ ID NO: 2936560 - RNA, 19 nt, Artificial Sequence
  Description of Artificial Sequence: Synthetic oligonucleotide
aaucaccaugucugcaggu

SEQ ID NO: 2936561 - RNA, 19 nt, Artificial Sequence
  Description of Artificial Sequence: Synthetic oligonucleotide
ucugccaggaacuguucac

SEQ ID NO: 2936562 - RNA, 19 nt, Artificial Sequence
  Description of Artificial Sequence: Synthetic oligonucleotide
uuucagucguucaguagaa

SEQ ID NO: 2936563 - RNA, 19 nt, Artificial Sequence
  Description of Artificial Sequence: Synthetic oligonucleotide
ugaacauaguucucuccaa

SEQ ID NO: 2936564 - RNA, 19 nt, Artificial Sequence
  Description of Artificial Sequence: Synthetic oligonucleotide
uaggguuugaugccuuuuc

SEQ ID NO: 2936565 - RNA, 19 nt, Artificial Sequence
  Description of Artificial Sequence: Synthetic oligonucleotide
uguuucuguaaauggccaa

SEQ ID NO: 2936566 - RNA, 19 nt, Artificial Sequence
  Description of Artificial Sequence: Synthetic oligonucleotide
ucuccaaaagugcguuggc

SEQ ID NO: 2936567 - RNA, 19 nt, Artificial Sequence
  Description of Artificial Sequence: Synthetic oligonucleotide
acuguucaccuugucugcc

SEQ ID NO: 2936568 - RNA, 19 nt, Artificial Sequence
  Description of Artificial Sequence: Synthetic oligonucleotide
auuugaucucaggacauga

SEQ ID NO: 2936569 - RNA, 19 nt, Artificial Sequence
  Description of Artificial Sequence: Synthetic oligonucleotide
ugaugccuuuucuaguagu

SEQ ID NO: 2936570 - RNA, 19 nt, Artificial Sequence
  Description of Artificial Sequence: Synthetic oligonucleotide
uaaucuggaccauaaccuu

SEQ ID NO: 2936571 - RNA, 19 nt, Artificial Sequence
  Description of Artificial Sequence: Synthetic oligonucleotide
uucugccaggaacuguuca

SEQ ID NO: 2936572 - RNA, 19 nt, Artificial Sequence
  Description of Artificial Sequence: Synthetic oligonucleotide
agguuuaguuuugcugacc

SEQ ID NO: 2936573 - RNA, 19 nt, Artificial Sequence
  Description of Artificial Sequence: Synthetic oligonucleotide
uaguuuugcugaccgcuac

SEQ ID NO: 2936574 - RNA, 19 nt, Artificial Sequence
  Description of Artificial Sequence: Synthetic oligonucleotide
uuaguuuugcugaccgcua

SEQ ID NO: 2936575 - RNA, 19 nt, Artificial Sequence
  Description of Artificial Sequence: Synthetic oligonucleotide
uucaccuugucugccaacu

SEQ ID NO: 2936576 - RNA, 19 nt, Artificial Sequence
  Description of Artificial Sequence: Synthetic oligonucleotide
augucugcagguuuaguuu

SEQ ID NO: 2936577 - RNA, 19 nt, Artificial Sequence
  Description of Artificial Sequence: Synthetic oligonucleotide
gacgcgcucguucacggcc

SEQ ID NO: 2936578 - RNA, 19 nt, Artificial Sequence
  Description of Artificial Sequence: Synthetic oligonucleotide
uuguugacauucuguuucu

SEQ ID NO: 2936579 - RNA, 19 nt, Artificial Sequence
  Description of Artificial Sequence: Synthetic oligonucleotide
cauggagucuaccguuucc

SEQ ID NO: 2936580 - RNA, 19 nt, Artificial Sequence
  Description of Artificial Sequence: Synthetic oligonucleotide
gugccauuugaucucagga

SEQ ID NO: 2936581 - RNA, 19 nt, Artificial Sequence
  Description of Artificial Sequence: Synthetic oligonucleotide
auuuguugacauucuguuu

SEQ ID NO: 2936582 - RNA, 19 nt, Artificial Sequence
  Description of Artificial Sequence: Synthetic oligonucleotide
guagaaccuuucuucugcc

SEQ ID NO: 2936583 - RNA, 19 nt, Artificial Sequence
  Description of Artificial Sequence: Synthetic oligonucleotide
aaccuuucagucguucagu

SEQ ID NO: 2936584 - RNA, 19 nt, Artificial Sequence
  Description of Artificial Sequence: Synthetic oligonucleotide
cagcauaaagagguugggg

SEQ ID NO: 2936585 - RNA, 19 nt, Artificial Sequence
  Description of Artificial Sequence: Synthetic oligonucleotide
aucuggaccauaaccuuuc

SEQ ID NO: 2936586 - RNA, 19 nt, Artificial Sequence
  Description of Artificial Sequence: Synthetic oligonucleotide
guuuaguuuugcugaccgc

SEQ ID NO: 2936587 - RNA, 19 nt, Artificial Sequence
  Description of Artificial Sequence: Synthetic oligonucleotide
uggagucuaccguuuccag

SEQ ID NO: 2936588 - RNA, 19 nt, Artificial Sequence
  Description of Artificial Sequence: Synthetic oligonucleotide
gaacauaguucucuccaaa

SEQ ID NO: 2936589 - RNA, 19 nt, Artificial Sequence
  Description of Artificial Sequence: Synthetic oligonucleotide
cugaccgcuacuagccggg

SEQ ID NO: 2936590 - RNA, 19 nt, Artificial Sequence
  Description of Artificial Sequence: Synthetic oligonucleotide
ugcugaccgcuacuagccg

SEQ ID NO: 2936591 - RNA, 19 nt, Artificial Sequence
  Description of Artificial Sequence: Synthetic oligonucleotide
uggacgcgcucguucacgg

SEQ ID NO: 2936592 - RNA, 19 nt, Artificial Sequence
  Description of Artificial Sequence: Synthetic oligonucleotide
guuggccgugaccauaggc

SEQ ID NO: 2936593 - RNA, 19 nt, Artificial Sequence
  Description of Artificial Sequence: Synthetic oligonucleotide
aggguuugaugccuuuucu

SEQ ID NO: 2936594 - RNA, 19 nt, Artificial Sequence
  Description of Artificial Sequence: Synthetic oligonucleotide
cauaguucucuccaaaagu

SEQ ID NO: 2936595 - RNA, 19 nt, Artificial Sequence
  Description of Artificial Sequence: Synthetic oligonucleotide
cuuuucuaguaguucuuga

SEQ ID NO: 2936596 - RNA, 19 nt, Artificial Sequence
  Description of Artificial Sequence: Synthetic oligonucleotide
ggaccauaaccuuucaguc

SEQ ID NO: 2936597 - RNA, 19 nt, Artificial Sequence
  Description of Artificial Sequence: Synthetic oligonucleotide
gacagccaucaauuuguug

SEQ ID NO: 2936598 - RNA, 19 nt, Artificial Sequence
  Description of Artificial Sequence: Synthetic oligonucleotide
aaagugcguuggccgugac

SEQ ID NO: 2936599 - RNA, 19 nt, Artificial Sequence
  Description of Artificial Sequence: Synthetic oligonucleotide
aaaagugcguuggccguga

SEQ ID NO: 2936600 - RNA, 19 nt, Artificial Sequence
  Description of Artificial Sequence: Synthetic oligonucleotide
ucaggacaugaagauagaa

SEQ ID NO: 2936601 - RNA, 19 nt, Artificial Sequence
  Description of Artificial Sequence: Synthetic oligonucleotide
ucugcagguuuaguuuugc

SEQ ID NO: 2936602 - RNA, 19 nt, Artificial Sequence
  Description of Artificial Sequence: Synthetic oligonucleotide
ucguucaguagaaccuuuc

SEQ ID NO: 2936603 - RNA, 19 nt, Artificial Sequence
  Description of Artificial Sequence: Synthetic oligonucleotide
aguuuugcugaccgcuacu

SEQ ID NO: 2936604 - RNA, 19 nt, Artificial Sequence
  Description of Artificial Sequence: Synthetic oligonucleotide
cuugucugccaacuucaug

SEQ ID NO: 2936605 - RNA, 19 nt, Artificial Sequence
  Description of Artificial Sequence: Synthetic oligonucleotide
uacuagccgggguuggaug

SEQ ID NO: 2936606 - RNA, 19 nt, Artificial Sequence
  Description of Artificial Sequence: Synthetic oligonucleotide
caauuuguugacauucugu

SEQ ID NO: 2936607 - RNA, 19 nt, Artificial Sequence
  Description of Artificial Sequence: Synthetic oligonucleotide
gaucucaggacaugaagau

SEQ ID NO: 2936608 - RNA, 19 nt, Artificial Sequence
  Description of Artificial Sequence: Synthetic oligonucleotide
ugggagaucccgccgccgc

SEQ ID NO: 2936609 - RNA, 19 nt, Artificial Sequence
  Description of Artificial Sequence: Synthetic oligonucleotide
uguucaccuugucugccaa

SEQ ID NO: 2936610 - RNA, 19 nt, Artificial Sequence
  Description of Artificial Sequence: Synthetic oligonucleotide
cuccaaaagugcguuggcc

SEQ ID NO: 2936611 - RNA, 19 nt, Artificial Sequence
  Description of Artificial Sequence: Synthetic oligonucleotide
cugccaacuucauggaguc

SEQ ID NO: 2936612 - RNA, 19 nt, Artificial Sequence
  Description of Artificial Sequence: Synthetic oligonucleotide
gcauaaagagguuggggac

SEQ ID NO: 2936613 - RNA, 19 nt, Artificial Sequence
  Description of Artificial Sequence: Synthetic oligonucleotide
aucaauuuguugacauucu

SEQ ID NO: 2936614 - RNA, 19 nt, Artificial Sequence
  Description of Artificial Sequence: Synthetic oligonucleotide
cagccaucaauuuguugac

SEQ ID NO: 2936615 - RNA, 19 nt, Artificial Sequence
  Description of Artificial Sequence: Synthetic oligonucleotide
cuguuucuguaaauggcca

SEQ ID NO: 2936616 - RNA, 19 nt, Artificial Sequence
  Description of Artificial Sequence: Synthetic oligonucleotide
uucauggagucuaccguuu

SEQ ID NO: 2936617 - RNA, 19 nt, Artificial Sequence
  Description of Artificial Sequence: Synthetic oligonucleotide
caguagaaccuuucuucug

SEQ ID NO: 2936618 - RNA, 19 nt, Artificial Sequence
  Description of Artificial Sequence: Synthetic oligonucleotide
aaucuggaccauaaccuuu

SEQ ID NO: 2936619 - RNA, 19 nt, Artificial Sequence
  Description of Artificial Sequence: Synthetic oligonucleotide
ucauggagucuaccguuuc

SEQ ID NO: 2936620 - RNA, 19 nt, Artificial Sequence
  Description of Artificial Sequence: Synthetic oligonucleotide
gccauuugaucucaggaca

SEQ ID NO: 2936621 - RNA, 19 nt, Artificial Sequence
  Description of Artificial Sequence: Synthetic oligonucleotide
aggaacuguucaccuuguc

SEQ ID NO: 2936622 - RNA, 19 nt, Artificial Sequence
  Description of Artificial Sequence: Synthetic oligonucleotide
ugcuggacgcgcucguuca

SEQ ID NO: 2936623 - RNA, 19 nt, Artificial Sequence
  Description of Artificial Sequence: Synthetic oligonucleotide
uggccgugaccauaggccu

SEQ ID NO: 2936624 - RNA, 19 nt, Artificial Sequence
  Description of Artificial Sequence: Synthetic oligonucleotide
ugccaggaacuguucaccu

SEQ ID NO: 2936625 - RNA, 19 nt, Artificial Sequence
  Description of Artificial Sequence: Synthetic oligonucleotide
ucaccaugucugcagguuu

SEQ ID NO: 2936626 - RNA, 19 nt, Artificial Sequence
  Description of Artificial Sequence: Synthetic oligonucleotide
ucucuccaaaagugcguug

SEQ ID NO: 2936627 - RNA, 19 nt, Artificial Sequence
  Description of Artificial Sequence: Synthetic oligonucleotide
ccuuucuucugccaggaac

SEQ ID NO: 2936628 - RNA, 19 nt, Artificial Sequence
  Description of Artificial Sequence: Synthetic oligonucleotide
cagguuuaguuuugcugac

SEQ ID NO: 2936629 - RNA, 19 nt, Artificial Sequence
  Description of Artificial Sequence: Synthetic oligonucleotide
cuggaccauaaccuuucag

SEQ ID NO: 2936630 - RNA, 19 nt, Artificial Sequence
  Description of Artificial Sequence: Synthetic oligonucleotide
cauaaagagguuggggaca

SEQ ID NO: 2936631 - RNA, 19 nt, Artificial Sequence
  Description of Artificial Sequence: Synthetic oligonucleotide
cucuccacugguguuaauc

SEQ ID NO: 2936632 - RNA, 19 nt, Artificial Sequence
  Description of Artificial Sequence: Synthetic oligonucleotide
ccguuuccagcauaaagag

SEQ ID NO: 2936633 - RNA, 19 nt, Artificial Sequence
  Description of Artificial Sequence: Synthetic oligonucleotide
ggagucuaccguuuccagc

SEQ ID NO: 2936634 - RNA, 19 nt, Artificial Sequence
  Description of Artificial Sequence: Synthetic oligonucleotide
guugacauucuguuucugu

SEQ ID NO: 2936635 - RNA, 19 nt, Artificial Sequence
  Description of Artificial Sequence: Synthetic oligonucleotide
caccuugucugccaacuuc

SEQ ID NO: 2936636 - RNA, 19 nt, Artificial Sequence
  Description of Artificial Sequence: Synthetic oligonucleotide
uacucuccucuccacuggu

SEQ ID NO: 2936637 - RNA, 19 nt, Artificial Sequence
  Description of Artificial Sequence: Synthetic oligonucleotide
cuccacugguguuaaucug

SEQ ID NO: 2936638 - RNA, 19 nt, Artificial Sequence
  Description of Artificial Sequence: Synthetic oligonucleotide
auggagucuaccguuucca

SEQ ID NO: 2936639 - RNA, 19 nt, Artificial Sequence
  Description of Artificial Sequence: Synthetic oligonucleotide
uggcugggagaucccgccg

SEQ ID NO: 2936640 - RNA, 19 nt, Artificial Sequence
  Description of Artificial Sequence: Synthetic oligonucleotide
gauggcugggagaucccgc

SEQ ID NO: 2936641 - RNA, 19 nt, Artificial Sequence
  Description of Artificial Sequence: Synthetic oligonucleotide
cugccaggaacuguucacc

SEQ ID NO: 2936642 - RNA, 19 nt, Artificial Sequence
  Description of Artificial Sequence: Synthetic oligonucleotide
guaguucuugaacauaguu

SEQ ID NO: 2936643 - RNA, 19 nt, Artificial Sequence
  Description of Artificial Sequence: Synthetic oligonucleotide
uguugacauucuguuucug

SEQ ID NO: 2936644 - RNA, 19 nt, Artificial Sequence
  Description of Artificial Sequence: Synthetic oligonucleotide
cauuugaucucaggacaug

SEQ ID NO: 2936645 - RNA, 19 nt, Artificial Sequence
  Description of Artificial Sequence: Synthetic oligonucleotide
aagagguuggggacagcca

SEQ ID NO: 2936646 - RNA, 19 nt, Artificial Sequence
  Description of Artificial Sequence: Synthetic oligonucleotide
uucucuccaaaagugcguu

SEQ ID NO: 2936647 - RNA, 19 nt, Artificial Sequence
  Description of Artificial Sequence: Synthetic oligonucleotide
cauaaccuuucagucguuc

SEQ ID NO: 2936648 - RNA, 19 nt, Artificial Sequence
  Description of Artificial Sequence: Synthetic oligonucleotide
accgcuacuagccgggguu

SEQ ID NO: 2936649 - RNA, 19 nt, Artificial Sequence
  Description of Artificial Sequence: Synthetic oligonucleotide
ccaggaacuguucaccuug

SEQ ID NO: 2936650 - RNA, 19 nt, Artificial Sequence
  Description of Artificial Sequence: Synthetic oligonucleotide
uuuccagcauaaagagguu

SEQ ID NO: 2936651 - RNA, 19 nt, Artificial Sequence
  Description of Artificial Sequence: Synthetic oligonucleotide
ggggacagccaucaauuug

SEQ ID NO: 2936652 - RNA, 19 nt, Artificial Sequence
  Description of Artificial Sequence: Synthetic oligonucleotide
guagacaugcugccagcuc

SEQ ID NO: 2936653 - RNA, 19 nt, Artificial Sequence
  Description of Artificial Sequence: Synthetic oligonucleotide
gcugaccgcuacuagccgg

SEQ ID NO: 2936654 - RNA, 19 nt, Artificial Sequence
  Description of Artificial Sequence: Synthetic oligonucleotide
agauagaaccuuaggguuu

SEQ ID NO: 2936655 - RNA, 19 nt, Artificial Sequence
  Description of Artificial Sequence: Synthetic oligonucleotide
guuugaugccuuuucuagu

SEQ ID NO: 2936656 - RNA, 19 nt, Artificial Sequence
  Description of Artificial Sequence: Synthetic oligonucleotide
gaagugccauuugaucuca

SEQ ID NO: 2936657 - RNA, 19 nt, Artificial Sequence
  Description of Artificial Sequence: Synthetic oligonucleotide
accuuucagucguucagua

SEQ ID NO: 2936658 - RNA, 19 nt, Artificial Sequence
  Description of Artificial Sequence: Synthetic oligonucleotide
cagcgcaaacccgaguccc

SEQ ID NO: 2936659 - RNA, 19 nt, Artificial Sequence
  Description of Artificial Sequence: Synthetic oligonucleotide
ccgugacacacucugcugg

SEQ ID NO: 2936660 - RNA, 19 nt, Artificial Sequence
  Description of Artificial Sequence: Synthetic oligonucleotide
aguaguucuugaacauagu

SEQ ID NO: 2936661 - RNA, 19 nt, Artificial Sequence
  Description of Artificial Sequence: Synthetic oligonucleotide
guguuaaucuggaccauaa

SEQ ID NO: 2936662 - RNA, 19 nt, Artificial Sequence
  Description of Artificial Sequence: Synthetic oligonucleotide
uggccaaugaagugccauu

SEQ ID NO: 2936663 - RNA, 19 nt, Artificial Sequence
  Description of Artificial Sequence: Synthetic oligonucleotide
cucguucacggcccgcagc

SEQ ID NO: 2936664 - RNA, 19 nt, Artificial Sequence
  Description of Artificial Sequence: Synthetic oligonucleotide
ggaacuguucaccuugucu

SEQ ID NO: 2936665 - RNA, 19 nt, Artificial Sequence
  Description of Artificial Sequence: Synthetic oligonucleotide
acucugcuggacgcgcucg

SEQ ID NO: 2936666 - RNA, 19 nt, Artificial Sequence
  Description of Artificial Sequence: Synthetic oligonucleotide
cagucguucaguagaaccu

SEQ ID NO: 2936667 - RNA, 19 nt, Artificial Sequence
  Description of Artificial Sequence: Synthetic oligonucleotide
uggauggcugggagauccc

SEQ ID NO: 2936668 - RNA, 19 nt, Artificial Sequence
  Description of Artificial Sequence: Synthetic oligonucleotide
caaaagugcguuggccgug

SEQ ID NO: 2936669 - RNA, 19 nt, Artificial Sequence
  Description of Artificial Sequence: Synthetic oligonucleotide
agacaugcugccagcucuc

SEQ ID NO: 2936670 - RNA, 19 nt, Artificial Sequence
  Description of Artificial Sequence: Synthetic oligonucleotide
accuuaggguuugaugccu

SEQ ID NO: 2936671 - RNA, 19 nt, Artificial Sequence
  Description of Artificial Sequence: Synthetic oligonucleotide
caugucugcagguuuaguu

SEQ ID NO: 2936672 - RNA, 19 nt, Artificial Sequence
  Description of Artificial Sequence: Synthetic oligonucleotide
acacacucugcuggacgcg

SEQ ID NO: 2936673 - RNA, 19 nt, Artificial Sequence
  Description of Artificial Sequence: Synthetic oligonucleotide
acaugaagauagaaccuua

SEQ ID NO: 2936674 - RNA, 19 nt, Artificial Sequence
  Description of Artificial Sequence: Synthetic oligonucleotide
acggcccgcagcgcaaacc

SEQ ID NO: 2936675 - RNA, 19 nt, Artificial Sequence
  Description of Artificial Sequence: Synthetic oligonucleotide
auggccaaugaagugccau

SEQ ID NO: 2936676 - RNA, 19 nt, Artificial Sequence
  Description of Artificial Sequence: Synthetic oligonucleotide
gccgccgugacacacucug

SEQ ID NO: 2936677 - RNA, 19 nt, Artificial Sequence
  Description of Artificial Sequence: Synthetic oligonucleotide
cccagcuccguagacaugc

SEQ ID NO: 2936678 - RNA, 19 nt, Artificial Sequence
  Description of Artificial Sequence: Synthetic oligonucleotide
caacuucauggagucuacc

SEQ ID NO: 2936679 - RNA, 19 nt, Artificial Sequence
  Description of Artificial Sequence: Synthetic oligonucleotide
agucguucaguagaaccuu

SEQ ID NO: 2936680 - RNA, 19 nt, Artificial Sequence
  Description of Artificial Sequence: Synthetic oligonucleotide
cacacucugcuggacgcgc

SEQ ID NO: 2936681 - RNA, 19 nt, Artificial Sequence
  Description of Artificial Sequence: Synthetic oligonucleotide
uucagucguucaguagaac

SEQ ID NO: 2936682 - RNA, 19 nt, Artificial Sequence
  Description of Artificial Sequence: Synthetic oligonucleotide
accaugucugcagguuuag

SEQ ID NO: 2936683 - RNA, 19 nt, Artificial Sequence
  Description of Artificial Sequence: Synthetic oligonucleotide
guuggggacagccaucaau

SEQ ID NO: 2936684 - RNA, 19 nt, Artificial Sequence
  Description of Artificial Sequence: Synthetic oligonucleotide
aacccgagucccagcuccg

SEQ ID NO: 2936685 - RNA, 19 nt, Artificial Sequence
  Description of Artificial Sequence: Synthetic oligonucleotide
uagaaccuuaggguuugau

SEQ ID NO: 2936686 - RNA, 19 nt, Artificial Sequence
  Description of Artificial Sequence: Synthetic oligonucleotide
ccaaugaagugccauuuga

SEQ ID NO: 2936687 - RNA, 19 nt, Artificial Sequence
  Description of Artificial Sequence: Synthetic oligonucleotide
cuggacgcgcucguucacg

SEQ ID NO: 2936688 - RNA, 19 nt, Artificial Sequence
  Description of Artificial Sequence: Synthetic oligonucleotide
caaugaagugccauuugau

SEQ ID NO: 2936689 - RNA, 19 nt, Artificial Sequence
  Description of Artificial Sequence: Synthetic oligonucleotide
gcuccguagacaugcugcc

SEQ ID NO: 2936690 - RNA, 19 nt, Artificial Sequence
  Description of Artificial Sequence: Synthetic oligonucleotide
guucaguagaaccuuucuu

SEQ ID NO: 2936691 - RNA, 19 nt, Artificial Sequence
  Description of Artificial Sequence: Synthetic oligonucleotide
ucaccuugucugccaacuu

SEQ ID NO: 2936692 - RNA, 19 nt, Artificial Sequence
  Description of Artificial Sequence: Synthetic oligonucleotide
aucaccaugucugcagguu

SEQ ID NO: 2936693 - RNA, 19 nt, Artificial Sequence
  Description of Artificial Sequence: Synthetic oligonucleotide
guucacggcccgcagcgca

SEQ ID NO: 2936694 - RNA, 19 nt, Artificial Sequence
  Description of Artificial Sequence: Synthetic oligonucleotide
ccuuucagucguucaguag

SEQ ID NO: 2936695 - RNA, 19 nt, Artificial Sequence
  Description of Artificial Sequence: Synthetic oligonucleotide
gccaaugaagugccauuug

SEQ ID NO: 2936696 - RNA, 19 nt, Artificial Sequence
  Description of Artificial Sequence: Synthetic oligonucleotide
uucacggcccgcagcgcaa

SEQ ID NO: 2936697 - RNA, 19 nt, Artificial Sequence
  Description of Artificial Sequence: Synthetic oligonucleotide
gggguuggauggcugggag

SEQ ID NO: 2936698 - RNA, 19 nt, Artificial Sequence
  Description of Artificial Sequence: Synthetic oligonucleotide
ucuccucuccacugguguu

SEQ ID NO: 2936699 - RNA, 19 nt, Artificial Sequence
  Description of Artificial Sequence: Synthetic oligonucleotide
cuucugccaggaacuguuc

SEQ ID NO: 2936700 - RNA, 19 nt, Artificial Sequence
  Description of Artificial Sequence: Synthetic oligonucleotide
cguuuccagcauaaagagg

SEQ ID NO: 2936701 - RNA, 19 nt, Artificial Sequence
  Description of Artificial Sequence: Synthetic oligonucleotide
cacugguguuaaucuggac

SEQ ID NO: 2936702 - RNA, 19 nt, Artificial Sequence
  Description of Artificial Sequence: Synthetic oligonucleotide
guuuugcugaccgcuacua

SEQ ID NO: 2936703 - RNA, 19 nt, Artificial Sequence
  Description of Artificial Sequence: Synthetic oligonucleotide
acgcgcucguucacggccc

SEQ ID NO: 2936704 - RNA, 19 nt, Artificial Sequence
  Description of Artificial Sequence: Synthetic oligonucleotide
aauggccaaugaagugcca

SEQ ID NO: 2936705 - RNA, 19 nt, Artificial Sequence
  Description of Artificial Sequence: Synthetic oligonucleotide
ccauaggccucaaucacca

SEQ ID NO: 2936706 - RNA, 19 nt, Artificial Sequence
  Description of Artificial Sequence: Synthetic oligonucleotide
uggggacagccaucaauuu

SEQ ID NO: 2936707 - RNA, 19 nt, Artificial Sequence
  Description of Artificial Sequence: Synthetic oligonucleotide
cucaggacaugaagauaga

SEQ ID NO: 2936708 - RNA, 19 nt, Artificial Sequence
  Description of Artificial Sequence: Synthetic oligonucleotide
cuaguaguucuugaacaua

SEQ ID NO: 2936709 - RNA, 19 nt, Artificial Sequence
  Description of Artificial Sequence: Synthetic oligonucleotide
aucucaggacaugaagaua

SEQ ID NO: 2936710 - RNA, 19 nt, Artificial Sequence
  Description of Artificial Sequence: Synthetic oligonucleotide
aagugccauuugaucucag

SEQ ID NO: 2936711 - RNA, 19 nt, Artificial Sequence
  Description of Artificial Sequence: Synthetic oligonucleotide
guucaccuugucugccaac

SEQ ID NO: 2936712 - RNA, 19 nt, Artificial Sequence
  Description of Artificial Sequence: Synthetic oligonucleotide
gagucccagcuccguagac

SEQ ID NO: 2936713 - RNA, 19 nt, Artificial Sequence
  Description of Artificial Sequence: Synthetic oligonucleotide
ccagcauaaagagguuggg

SEQ ID NO: 2936714 - RNA, 19 nt, Artificial Sequence
  Description of Artificial Sequence: Synthetic oligonucleotide
ugaccgcuacuagccgggg

SEQ ID NO: 2936715 - RNA, 19 nt, Artificial Sequence
  Description of Artificial Sequence: Synthetic oligonucleotide
cuucauggagucuaccguu

SEQ ID NO: 2936716 - RNA, 19 nt, Artificial Sequence
  Description of Artificial Sequence: Synthetic oligonucleotide
gaugccuuuucuaguaguu

SEQ ID NO: 2936717 - RNA, 19 nt, Artificial Sequence
  Description of Artificial Sequence: Synthetic oligonucleotide
ggauggcugggagaucccg

SEQ ID NO: 2936718 - RNA, 19 nt, Artificial Sequence
  Description of Artificial Sequence: Synthetic oligonucleotide
agccaucaauuuguugaca

SEQ ID NO: 2936719 - RNA, 19 nt, Artificial Sequence
  Description of Artificial Sequence: Synthetic oligonucleotide
uaaagagguuggggacagc

SEQ ID NO: 2936720 - RNA, 19 nt, Artificial Sequence
  Description of Artificial Sequence: Synthetic oligonucleotide
cugcuggacgcgcucguuc

SEQ ID NO: 2936721 - RNA, 19 nt, Artificial Sequence
  Description of Artificial Sequence: Synthetic oligonucleotide
gucugcagguuuaguuuug

SEQ ID NO: 2936722 - RNA, 19 nt, Artificial Sequence
  Description of Artificial Sequence: Synthetic oligonucleotide
gggacagccaucaauuugu

SEQ ID NO: 2936723 - RNA, 19 nt, Artificial Sequence
  Description of Artificial Sequence: Synthetic oligonucleotide
guuucuguaaauggccaau

SEQ ID NO: 2936724 - RNA, 19 nt, Artificial Sequence
  Description of Artificial Sequence: Synthetic oligonucleotide
caaacccgagucccagcuc

SEQ ID NO: 2936725 - RNA, 19 nt, Artificial Sequence
  Description of Artificial Sequence: Synthetic oligonucleotide
gcagcgcaaacccgagucc

SEQ ID NO: 2936726 - RNA, 19 nt, Artificial Sequence
  Description of Artificial Sequence: Synthetic oligonucleotide
ggcugggagaucccgccgc

SEQ ID NO: 2936727 - RNA, 19 nt, Artificial Sequence
  Description of Artificial Sequence: Synthetic oligonucleotide
ccaacuucauggagucuac

SEQ ID NO: 2936728 - RNA, 19 nt, Artificial Sequence
  Description of Artificial Sequence: Synthetic oligonucleotide
cuagccgggguuggauggc

SEQ ID NO: 2936729 - RNA, 19 nt, Artificial Sequence
  Description of Artificial Sequence: Synthetic oligonucleotide
cagcuccguagacaugcug

SEQ ID NO: 2936730 - RNA, 19 nt, Artificial Sequence
  Description of Artificial Sequence: Synthetic oligonucleotide
agucuaccguuuccagcau

SEQ ID NO: 2936731 - RNA, 19 nt, Artificial Sequence
  Description of Artificial Sequence: Synthetic oligonucleotide
ugcguuggccgugaccaua

SEQ ID NO: 2936732 - RNA, 19 nt, Artificial Sequence
  Description of Artificial Sequence: Synthetic oligonucleotide
uccucuccacugguguuaa

SEQ ID NO: 2936733 - RNA, 19 nt, Artificial Sequence
  Description of Artificial Sequence: Synthetic oligonucleotide
gccgggguuggauggcugg

SEQ ID NO: 2936734 - RNA, 19 nt, Artificial Sequence
  Description of Artificial Sequence: Synthetic oligonucleotide
ucccagcuccguagacaug

SEQ ID NO: 2936735 - RNA, 19 nt, Artificial Sequence
  Description of Artificial Sequence: Synthetic oligonucleotide
ugguguuaaucuggaccau

SEQ ID NO: 2936736 - RNA, 19 nt, Artificial Sequence
  Description of Artificial Sequence: Synthetic oligonucleotide
gccaucaauuuguugacau

SEQ ID NO: 2936737 - RNA, 19 nt, Artificial Sequence
  Description of Artificial Sequence: Synthetic oligonucleotide
ggguuugaugccuuuucua

SEQ ID NO: 2936738 - RNA, 19 nt, Artificial Sequence
  Description of Artificial Sequence: Synthetic oligonucleotide
ccgagucccagcuccguag

SEQ ID NO: 2936739 - RNA, 19 nt, Artificial Sequence
  Description of Artificial Sequence: Synthetic oligonucleotide
ggagaucccgccgccgccg

SEQ ID NO: 2936740 - RNA, 19 nt, Artificial Sequence
  Description of Artificial Sequence: Synthetic oligonucleotide
gccaacuucauggagucua

SEQ ID NO: 2936741 - RNA, 19 nt, Artificial Sequence
  Description of Artificial Sequence: Synthetic oligonucleotide
gagguuggggacagccauc

SEQ ID NO: 2936742 - RNA, 19 nt, Artificial Sequence
  Description of Artificial Sequence: Synthetic oligonucleotide
caccaugucugcagguuua

SEQ ID NO: 2936743 - RNA, 19 nt, Artificial Sequence
  Description of Artificial Sequence: Synthetic oligonucleotide
gucccagcuccguagacau

SEQ ID NO: 2936744 - RNA, 19 nt, Artificial Sequence
  Description of Artificial Sequence: Synthetic oligonucleotide
gccgugacacacucugcug

SEQ ID NO: 2936745 - RNA, 19 nt, Artificial Sequence
  Description of Artificial Sequence: Synthetic oligonucleotide
cugggagaucccgccgccg

SEQ ID NO: 2936746 - RNA, 19 nt, Artificial Sequence
  Description of Artificial Sequence: Synthetic oligonucleotide
gaucccgccgccgccguga

SEQ ID NO: 2936747 - RNA, 19 nt, Artificial Sequence
  Description of Artificial Sequence: Synthetic oligonucleotide
cacucugcuggacgcgcuc

SEQ ID NO: 2936748 - RNA, 19 nt, Artificial Sequence
  Description of Artificial Sequence: Synthetic oligonucleotide
guucucuccaaaagugcgu

SEQ ID NO: 2936749 - RNA, 19 nt, Artificial Sequence
  Description of Artificial Sequence: Synthetic oligonucleotide
ggacaugaagauagaaccu

SEQ ID NO: 2936750 - RNA, 19 nt, Artificial Sequence
  Description of Artificial Sequence: Synthetic oligonucleotide
acucuccucuccacuggug

SEQ ID NO: 2936751 - RNA, 19 nt, Artificial Sequence
  Description of Artificial Sequence: Synthetic oligonucleotide
gugacacacucugcuggac

SEQ ID NO: 2936752 - RNA, 19 nt, Artificial Sequence
  Description of Artificial Sequence: Synthetic oligonucleotide
gguuggauggcugggagau

SEQ ID NO: 2936753 - RNA, 19 nt, Artificial Sequence
  Description of Artificial Sequence: Synthetic oligonucleotide
ugccaacuucauggagucu

SEQ ID NO: 2936754 - RNA, 19 nt, Artificial Sequence
  Description of Artificial Sequence: Synthetic oligonucleotide
aucccgccgccgccgugac

SEQ ID NO: 2936755 - RNA, 19 nt, Artificial Sequence
  Description of Artificial Sequence: Synthetic oligonucleotide
cgcagcgcaaacccgaguc

SEQ ID NO: 2936756 - RNA, 19 nt, Artificial Sequence
  Description of Artificial Sequence: Synthetic oligonucleotide
accuuucuucugccaggaa

SEQ ID NO: 2936757 - RNA, 19 nt, Artificial Sequence
  Description of Artificial Sequence: Synthetic oligonucleotide
gcaaacccgagucccagcu

SEQ ID NO: 2936758 - RNA, 19 nt, Artificial Sequence
  Description of Artificial Sequence: Synthetic oligonucleotide
agcgcaaacccgaguccca

SEQ ID NO: 2936759 - RNA, 19 nt, Artificial Sequence
  Description of Artificial Sequence: Synthetic oligonucleotide
uagccgggguuggauggcu

SEQ ID NO: 2936760 - RNA, 19 nt, Artificial Sequence
  Description of Artificial Sequence: Synthetic oligonucleotide
gguguuaaucuggaccaua

SEQ ID NO: 2936761 - RNA, 19 nt, Artificial Sequence
  Description of Artificial Sequence: Synthetic oligonucleotide
auagaaccuuaggguuuga

SEQ ID NO: 2936762 - RNA, 19 nt, Artificial Sequence
  Description of Artificial Sequence: Synthetic oligonucleotide
ccguagacaugcugccagc

SEQ ID NO: 2936763 - RNA, 19 nt, Artificial Sequence
  Description of Artificial Sequence: Synthetic oligonucleotide
gcguuggccgugaccauag

SEQ ID NO: 2936764 - RNA, 19 nt, Artificial Sequence
  Description of Artificial Sequence: Synthetic oligonucleotide
gcugggagaucccgccgcc

SEQ ID NO: 2936765 - RNA, 19 nt, Artificial Sequence
  Description of Artificial Sequence: Synthetic oligonucleotide
gucuaccguuuccagcaua

SEQ ID NO: 2936766 - RNA, 19 nt, Artificial Sequence
  Description of Artificial Sequence: Synthetic oligonucleotide
ggccucaaucaccaugucu

SEQ ID NO: 2936767 - RNA, 19 nt, Artificial Sequence
  Description of Artificial Sequence: Synthetic oligonucleotide
gggagaucccgccgccgcc

SEQ ID NO: 2936768 - RNA, 19 nt, Artificial Sequence
  Description of Artificial Sequence: Synthetic oligonucleotide
ucugcuggacgcgcucguu

SEQ ID NO: 2936769 - RNA, 19 nt, Artificial Sequence
  Description of Artificial Sequence: Synthetic oligonucleotide
ggguuggauggcugggaga

SEQ ID NO: 2936770 - RNA, 19 nt, Artificial Sequence
  Description of Artificial Sequence: Synthetic oligonucleotide
agaucccgccgccgccgug

SEQ ID NO: 2936771 - RNA, 19 nt, Artificial Sequence
  Description of Artificial Sequence: Synthetic oligonucleotide
cugcagguuuaguuuugcu

SEQ ID NO: 2936772 - RNA, 19 nt, Artificial Sequence
  Description of Artificial Sequence: Synthetic oligonucleotide
cuccguagacaugcugcca

SEQ ID NO: 2936773 - RNA, 19 nt, Artificial Sequence
  Description of Artificial Sequence: Synthetic oligonucleotide
guuggauggcugggagauc

SEQ ID NO: 2936774 - RNA, 19 nt, Artificial Sequence
  Description of Artificial Sequence: Synthetic oligonucleotide
ccacugguguuaaucugga

SEQ ID NO: 2936775 - RNA, 19 nt, Artificial Sequence
  Description of Artificial Sequence: Synthetic oligonucleotide
acacucugcuggacgcgcu

SEQ ID NO: 2936776 - RNA, 19 nt, Artificial Sequence
  Description of Artificial Sequence: Synthetic oligonucleotide
gcgcaaacccgagucccag

SEQ ID NO: 2936777 - RNA, 19 nt, Artificial Sequence
  Description of Artificial Sequence: Synthetic oligonucleotide
cuuaggguuugaugccuuu

SEQ ID NO: 2936778 - RNA, 19 nt, Artificial Sequence
  Description of Artificial Sequence: Synthetic oligonucleotide
caggaacuguucaccuugu

SEQ ID NO: 2936779 - RNA, 19 nt, Artificial Sequence
  Description of Artificial Sequence: Synthetic oligonucleotide
gaccgcuacuagccggggu

SEQ ID NO: 2936780 - RNA, 19 nt, Artificial Sequence
  Description of Artificial Sequence: Synthetic oligonucleotide
cuccucuccacugguguua

SEQ ID NO: 2936781 - RNA, 19 nt, Artificial Sequence
  Description of Artificial Sequence: Synthetic oligonucleotide
ccaaaagugcguuggccgu

SEQ ID NO: 2936782 - RNA, 19 nt, Artificial Sequence
  Description of Artificial Sequence: Synthetic oligonucleotide
ggacgcgcucguucacggc

SEQ ID NO: 2936783 - RNA, 19 nt, Artificial Sequence
  Description of Artificial Sequence: Synthetic oligonucleotide
ucacggcccgcagcgcaaa

SEQ ID NO: 2936784 - RNA, 19 nt, Artificial Sequence
  Description of Artificial Sequence: Synthetic oligonucleotide
cggcccgcagcgcaaaccc

SEQ ID NO: 2936785 - RNA, 19 nt, Artificial Sequence
  Description of Artificial Sequence: Synthetic oligonucleotide
gccgugaccauaggccuca

SEQ ID NO: 2936786 - RNA, 19 nt, Artificial Sequence
  Description of Artificial Sequence: Synthetic oligonucleotide
cuaccguuuccagcauaaa

SEQ ID NO: 2936787 - RNA, 19 nt, Artificial Sequence
  Description of Artificial Sequence: Synthetic oligonucleotide
ccauuugaucucaggacau

SEQ ID NO: 2936788 - RNA, 19 nt, Artificial Sequence
  Description of Artificial Sequence: Synthetic oligonucleotide
cccgcagcgcaaacccgag

SEQ ID NO: 2936789 - RNA, 19 nt, Artificial Sequence
  Description of Artificial Sequence: Synthetic oligonucleotide
acccgagucccagcuccgu

SEQ ID NO: 2936790 - RNA, 19 nt, Artificial Sequence
  Description of Artificial Sequence: Synthetic oligonucleotide
agccgggguuggauggcug

SEQ ID NO: 2936791 - RNA, 19 nt, Artificial Sequence
  Description of Artificial Sequence: Synthetic oligonucleotide
cacggcccgcagcgcaaac

SEQ ID NO: 2936792 - RNA, 19 nt, Artificial Sequence
  Description of Artificial Sequence: Synthetic oligonucleotide
gcuggacgcgcucguucac

SEQ ID NO: 2936793 - RNA, 19 nt, Artificial Sequence
  Description of Artificial Sequence: Synthetic oligonucleotide
ggcccgcagcgcaaacccg

SEQ ID NO: 2936794 - RNA, 19 nt, Artificial Sequence
  Description of Artificial Sequence: Synthetic oligonucleotide
cgugacacacucugcugga

SEQ ID NO: 2936795 - RNA, 19 nt, Artificial Sequence
  Description of Artificial Sequence: Synthetic oligonucleotide
cgcaaacccgagucccagc

SEQ ID NO: 2936796 - RNA, 19 nt, Artificial Sequence
  Description of Artificial Sequence: Synthetic oligonucleotide
gcuacuagccgggguugga

SEQ ID NO: 2936797 - RNA, 19 nt, Artificial Sequence
  Description of Artificial Sequence: Synthetic oligonucleotide
ccgggguuggauggcuggg

SEQ ID NO: 2936798 - RNA, 19 nt, Artificial Sequence
  Description of Artificial Sequence: Synthetic oligonucleotide
cuacuagccgggguuggau

SEQ ID NO: 2936799 - RNA, 19 nt, Artificial Sequence
  Description of Artificial Sequence: Synthetic oligonucleotide
ccgccgugacacacucugc

SEQ ID NO: 2936800 - RNA, 19 nt, Artificial Sequence
  Description of Artificial Sequence: Synthetic oligonucleotide
ggccaaugaagugccauuu

SEQ ID NO: 2936801 - RNA, 19 nt, Artificial Sequence
  Description of Artificial Sequence: Synthetic oligonucleotide
ucccgccgccgccgugaca

SEQ ID NO: 2936802 - RNA, 19 nt, Artificial Sequence
  Description of Artificial Sequence: Synthetic oligonucleotide
gucguucaguagaaccuuu

SEQ ID NO: 2936803 - RNA, 19 nt, Artificial Sequence
  Description of Artificial Sequence: Synthetic oligonucleotide
gagaucccgccgccgccgu

SEQ ID NO: 2936804 - RNA, 19 nt, Artificial Sequence
  Description of Artificial Sequence: Synthetic oligonucleotide
cguucaguagaaccuuucu

SEQ ID NO: 2936805 - RNA, 19 nt, Artificial Sequence
  Description of Artificial Sequence: Synthetic oligonucleotide
gcccgcagcgcaaacccga

SEQ ID NO: 2936806 - RNA, 19 nt, Artificial Sequence
  Description of Artificial Sequence: Synthetic oligonucleotide
cucugcuggacgcgcucgu

SEQ ID NO: 2936807 - RNA, 19 nt, Artificial Sequence
  Description of Artificial Sequence: Synthetic oligonucleotide
ggccgugaccauaggccuc

SEQ ID NO: 2936808 - RNA, 19 nt, Artificial Sequence
  Description of Artificial Sequence: Synthetic oligonucleotide
cauaggccucaaucaccau

SEQ ID NO: 2936809 - RNA, 19 nt, Artificial Sequence
  Description of Artificial Sequence: Synthetic oligonucleotide
ccaucaauuuguugacauu

SEQ ID NO: 2936810 - RNA, 19 nt, Artificial Sequence
  Description of Artificial Sequence: Synthetic oligonucleotide
cgcuacuagccgggguugg

SEQ ID NO: 2936811 - RNA, 19 nt, Artificial Sequence
  Description of Artificial Sequence: Synthetic oligonucleotide
ccgcuacuagccgggguug

SEQ ID NO: 2936812 - RNA, 19 nt, Artificial Sequence
  Description of Artificial Sequence: Synthetic oligonucleotide
gguuggggacagccaucaa

SEQ ID NO: 2936813 - RNA, 19 nt, Artificial Sequence
  Description of Artificial Sequence: Synthetic oligonucleotide
cguuggccgugaccauagg

SEQ ID NO: 2936814 - RNA, 19 nt, Artificial Sequence
  Description of Artificial Sequence: Synthetic oligonucleotide
gccaggaacuguucaccuu

SEQ ID NO: 2936815 - RNA, 19 nt, Artificial Sequence
  Description of Artificial Sequence: Synthetic oligonucleotide
ccgccgccgugacacacuc

SEQ ID NO: 2936816 - RNA, 19 nt, Artificial Sequence
  Description of Artificial Sequence: Synthetic oligonucleotide
cgagucccagcuccguaga

SEQ ID NO: 2936817 - RNA, 19 nt, Artificial Sequence
  Description of Artificial Sequence: Synthetic oligonucleotide
cgcgcucguucacggcccg

SEQ ID NO: 2936818 - RNA, 19 nt, Artificial Sequence
  Description of Artificial Sequence: Synthetic oligonucleotide
gugcguuggccgugaccau

SEQ ID NO: 2936819 - RNA, 19 nt, Artificial Sequence
  Description of Artificial Sequence: Synthetic oligonucleotide
cgccgugacacacucugcu

SEQ ID NO: 2936820 - RNA, 19 nt, Artificial Sequence
  Description of Artificial Sequence: Synthetic oligonucleotide
ccuuaggguuugaugccuu

SEQ ID NO: 2936821 - RNA, 19 nt, Artificial Sequence
  Description of Artificial Sequence: Synthetic oligonucleotide
ccuugucugccaacuucau

SEQ ID NO: 2936822 - RNA, 19 nt, Artificial Sequence
  Description of Artificial Sequence: Synthetic oligonucleotide
cguucacggcccgcagcgc

SEQ ID NO: 2936823 - RNA, 19 nt, Artificial Sequence
  Description of Artificial Sequence: Synthetic oligonucleotide
ggacagccaucaauuuguu

SEQ ID NO: 2936824 - RNA, 19 nt, Artificial Sequence
  Description of Artificial Sequence: Synthetic oligonucleotide
cguagacaugcugccagcu

SEQ ID NO: 2936825 - RNA, 19 nt, Artificial Sequence
  Description of Artificial Sequence: Synthetic oligonucleotide
cccgagucccagcuccgua

SEQ ID NO: 2936826 - RNA, 19 nt, Artificial Sequence
  Description of Artificial Sequence: Synthetic oligonucleotide
cgcucguucacggcccgca

SEQ ID NO: 2936827 - RNA, 19 nt, Artificial Sequence
  Description of Artificial Sequence: Synthetic oligonucleotide
gcgcucguucacggcccgc

SEQ ID NO: 2936828 - RNA, 19 nt, Artificial Sequence
  Description of Artificial Sequence: Synthetic oligonucleotide
ccagcuccguagacaugcu

SEQ ID NO: 2936829 - RNA, 19 nt, Artificial Sequence
  Description of Artificial Sequence: Synthetic oligonucleotide
cgggguuggauggcuggga

SEQ ID NO: 2936830 - RNA, 19 nt, Artificial Sequence
  Description of Artificial Sequence: Synthetic oligonucleotide
ccaugucugcagguuuagu

SEQ ID NO: 2936831 - RNA, 19 nt, Artificial Sequence
  Description of Artificial Sequence: Synthetic oligonucleotide
ccauaaccuuucagucguu

SEQ ID NO: 2936832 - RNA, 19 nt, Artificial Sequence
  Description of Artificial Sequence: Synthetic oligonucleotide
cgccgccgccgugacacac

SEQ ID NO: 2936833 - RNA, 19 nt, Artificial Sequence
  Description of Artificial Sequence: Synthetic oligonucleotide
gccgccgccgugacacacu

SEQ ID NO: 2936834 - RNA, 19 nt, Artificial Sequence
  Description of Artificial Sequence: Synthetic oligonucleotide
ccgcagcgcaaacccgagu

SEQ ID NO: 2936835 - RNA, 19 nt, Artificial Sequence
  Description of Artificial Sequence: Synthetic oligonucleotide
cgugaccauaggccucaau

SEQ ID NO: 2936836 - RNA, 19 nt, Artificial Sequence
  Description of Artificial Sequence: Synthetic oligonucleotide
ccucuccacugguguuaau

SEQ ID NO: 2936837 - RNA, 19 nt, Artificial Sequence
  Description of Artificial Sequence: Synthetic oligonucleotide
ccgccgccgccgugacaca

SEQ ID NO: 2936838 - RNA, 19 nt, Artificial Sequence
  Description of Artificial Sequence: Synthetic oligonucleotide
ccgugaccauaggccucaa

SEQ ID NO: 2936839 - RNA, 19 nt, Artificial Sequence
  Description of Artificial Sequence: Synthetic oligonucleotide
cgccgccgugacacacucu

SEQ ID NO: 2936840 - RNA, 19 nt, Artificial Sequence
  Description of Artificial Sequence: Synthetic oligonucleotide
aagaaagacaaccagcagc

SEQ ID NO: 2936841 - RNA, 19 nt, Artificial Sequence
  Description of Artificial Sequence: Synthetic oligonucleotide
uuuacuacuguccccauug

SEQ ID NO: 2936842 - RNA, 19 nt, Artificial Sequence
  Description of Artificial Sequence: Synthetic oligonucleotide
aauucuuucccugccaucg

SEQ ID NO: 2936843 - RNA, 19 nt, Artificial Sequence
  Description of Artificial Sequence: Synthetic oligonucleotide
ucuuaaugcauacuaggcc

SEQ ID NO: 2936844 - RNA, 19 nt, Artificial Sequence
  Description of Artificial Sequence: Synthetic oligonucleotide
auuuccgucacuucguccg

SEQ ID NO: 2936845 - RNA, 19 nt, Artificial Sequence
  Description of Artificial Sequence: Synthetic oligonucleotide
uaugguuuacuacuguccc

SEQ ID NO: 2936846 - RNA, 19 nt, Artificial Sequence
  Description of Artificial Sequence: Synthetic oligonucleotide
caugauuuccgucacuucg

SEQ ID NO: 2936847 - RNA, 19 nt, Artificial Sequence
  Description of Artificial Sequence: Synthetic oligonucleotide
aaagacaaccagcagcaca

SEQ ID NO: 2936848 - RNA, 19 nt, Artificial Sequence
  Description of Artificial Sequence: Synthetic oligonucleotide
uggaagaaagacaaccagc

SEQ ID NO: 2936849 - RNA, 19 nt, Artificial Sequence
  Description of Artificial Sequence: Synthetic oligonucleotide
aaauuggugagcaugauuu

SEQ ID NO: 2936850 - RNA, 19 nt, Artificial Sequence
  Description of Artificial Sequence: Synthetic oligonucleotide
aucguuccaauucuuuccc

SEQ ID NO: 2936851 - RNA, 19 nt, Artificial Sequence
  Description of Artificial Sequence: Synthetic oligonucleotide
uuggugagcaugauuuccg

SEQ ID NO: 2936852 - RNA, 19 nt, Artificial Sequence
  Description of Artificial Sequence: Synthetic oligonucleotide
agcacaaucaggaugauga

SEQ ID NO: 2936853 - RNA, 19 nt, Artificial Sequence
  Description of Artificial Sequence: Synthetic oligonucleotide
cuaugguuuacuacugucc

SEQ ID NO: 2936854 - RNA, 19 nt, Artificial Sequence
  Description of Artificial Sequence: Synthetic oligonucleotide
ugggcuagagucuugguug

SEQ ID NO: 2936855 - RNA, 19 nt, Artificial Sequence
  Description of Artificial Sequence: Synthetic oligonucleotide
aaucaggaugaugagcagg

SEQ ID NO: 2936856 - RNA, 19 nt, Artificial Sequence
  Description of Artificial Sequence: Synthetic oligonucleotide
cucuuaaugcauacuaggc

SEQ ID NO: 2936857 - RNA, 19 nt, Artificial Sequence
  Description of Artificial Sequence: Synthetic oligonucleotide
auuggugagcaugauuucc

SEQ ID NO: 2936858 - RNA, 19 nt, Artificial Sequence
  Description of Artificial Sequence: Synthetic oligonucleotide
augcauacuaggccuaugg

SEQ ID NO: 2936859 - RNA, 19 nt, Artificial Sequence
  Description of Artificial Sequence: Synthetic oligonucleotide
agagucuugguugucuugc

SEQ ID NO: 2936860 - RNA, 19 nt, Artificial Sequence
  Description of Artificial Sequence: Synthetic oligonucleotide
ugcucuuaaugcauacuag

SEQ ID NO: 2936861 - RNA, 19 nt, Artificial Sequence
  Description of Artificial Sequence: Synthetic oligonucleotide
ucgaaauuggugagcauga

SEQ ID NO: 2936862 - RNA, 19 nt, Artificial Sequence
  Description of Artificial Sequence: Synthetic oligonucleotide
aauauucucccagcgcuuc

SEQ ID NO: 2936863 - RNA, 19 nt, Artificial Sequence
  Description of Artificial Sequence: Synthetic oligonucleotide
cuucuucugggcuagaguc

SEQ ID NO: 2936864 - RNA, 19 nt, Artificial Sequence
  Description of Artificial Sequence: Synthetic oligonucleotide
aucaggaugaugagcaggc

SEQ ID NO: 2936865 - RNA, 19 nt, Artificial Sequence
  Description of Artificial Sequence: Synthetic oligonucleotide
gucaccaugugguugcugg

SEQ ID NO: 2936866 - RNA, 19 nt, Artificial Sequence
  Description of Artificial Sequence: Synthetic oligonucleotide
caucguuccaauucuuucc

SEQ ID NO: 2936867 - RNA, 19 nt, Artificial Sequence
  Description of Artificial Sequence: Synthetic oligonucleotide
ugggagagcagcuagugcu

SEQ ID NO: 2936868 - RNA, 19 nt, Artificial Sequence
  Description of Artificial Sequence: Synthetic oligonucleotide
acaaucaggaugaugagca

SEQ ID NO: 2936869 - RNA, 19 nt, Artificial Sequence
  Description of Artificial Sequence: Synthetic oligonucleotide
accuugucgaaauugguga

SEQ ID NO: 2936870 - RNA, 19 nt, Artificial Sequence
  Description of Artificial Sequence: Synthetic oligonucleotide
augguuuacuacugucccc

SEQ ID NO: 2936871 - RNA, 19 nt, Artificial Sequence
  Description of Artificial Sequence: Synthetic oligonucleotide
aaguauauccggcaccgaa

SEQ ID NO: 2936872 - RNA, 19 nt, Artificial Sequence
  Description of Artificial Sequence: Synthetic oligonucleotide
cuacuguccccauugcucg

SEQ ID NO: 2936873 - RNA, 19 nt, Artificial Sequence
  Description of Artificial Sequence: Synthetic oligonucleotide
gaaggccgaacucaugucc

SEQ ID NO: 2936874 - RNA, 19 nt, Artificial Sequence
  Description of Artificial Sequence: Synthetic oligonucleotide
ugugugugugugaaggugu

SEQ ID NO: 2936875 - RNA, 19 nt, Artificial Sequence
  Description of Artificial Sequence: Synthetic oligonucleotide
gaagaaagacaaccagcag

SEQ ID NO: 2936876 - RNA, 19 nt, Artificial Sequence
  Description of Artificial Sequence: Synthetic oligonucleotide
accgaauauucucccagcg

SEQ ID NO: 2936877 - RNA, 19 nt, Artificial Sequence
  Description of Artificial Sequence: Synthetic oligonucleotide
guugucuugcugaaggccg

SEQ ID NO: 2936878 - RNA, 19 nt, Artificial Sequence
  Description of Artificial Sequence: Synthetic oligonucleotide
agaaagacaaccagcagca

SEQ ID NO: 2936879 - RNA, 19 nt, Artificial Sequence
  Description of Artificial Sequence: Synthetic oligonucleotide
aggccuaugguuuacuacu

SEQ ID NO: 2936880 - RNA, 19 nt, Artificial Sequence
  Description of Artificial Sequence: Synthetic oligonucleotide
ugaugagcaggccaccagc

SEQ ID NO: 2936881 - RNA, 19 nt, Artificial Sequence
  Description of Artificial Sequence: Synthetic oligonucleotide
cagcuagugcucuuaaugc

SEQ ID NO: 2936882 - RNA, 19 nt, Artificial Sequence
  Description of Artificial Sequence: Synthetic oligonucleotide
acuacuguccccauugcuc

SEQ ID NO: 2936883 - RNA, 19 nt, Artificial Sequence
  Description of Artificial Sequence: Synthetic oligonucleotide
gcucuuaaugcauacuagg

SEQ ID NO: 2936884 - RNA, 19 nt, Artificial Sequence
  Description of Artificial Sequence: Synthetic oligonucleotide
cuugccgucacgcuccagg

SEQ ID NO: 2936885 - RNA, 19 nt, Artificial Sequence
  Description of Artificial Sequence: Synthetic oligonucleotide
auguccaggagcugguccg

SEQ ID NO: 2936886 - RNA, 19 nt, Artificial Sequence
  Description of Artificial Sequence: Synthetic oligonucleotide
ugccagcccaaguauaucc

SEQ ID NO: 2936887 - RNA, 19 nt, Artificial Sequence
  Description of Artificial Sequence: Synthetic oligonucleotide
aagacaaccagcagcacaa

SEQ ID NO: 2936888 - RNA, 19 nt, Artificial Sequence
  Description of Artificial Sequence: Synthetic oligonucleotide
cuuaaugcauacuaggccu

SEQ ID NO: 2936889 - RNA, 19 nt, Artificial Sequence
  Description of Artificial Sequence: Synthetic oligonucleotide
cucguuggaagaaagacaa

SEQ ID NO: 2936890 - RNA, 19 nt, Artificial Sequence
  Description of Artificial Sequence: Synthetic oligonucleotide
gugagcaugauuuccguca

SEQ ID NO: 2936891 - RNA, 19 nt, Artificial Sequence
  Description of Artificial Sequence: Synthetic oligonucleotide
gucgaaauuggugagcaug

SEQ ID NO: 2936892 - RNA, 19 nt, Artificial Sequence
  Description of Artificial Sequence: Synthetic oligonucleotide
ugguuuacuacugucccca

SEQ ID NO: 2936893 - RNA, 19 nt, Artificial Sequence
  Description of Artificial Sequence: Synthetic oligonucleotide
aggaugaugagcaggccac

SEQ ID NO: 2936894 - RNA, 19 nt, Artificial Sequence
  Description of Artificial Sequence: Synthetic oligonucleotide
uuccaauucuuucccugcc

SEQ ID NO: 2936895 - RNA, 19 nt, Artificial Sequence
  Description of Artificial Sequence: Synthetic oligonucleotide
agcucugccagcuugccgu

SEQ ID NO: 2936896 - RNA, 19 nt, Artificial Sequence
  Description of Artificial Sequence: Synthetic oligonucleotide
ugcucguuggaagaaagac

SEQ ID NO: 2936897 - RNA, 19 nt, Artificial Sequence
  Description of Artificial Sequence: Synthetic oligonucleotide
acucauguccaggagcugg

SEQ ID NO: 2936898 - RNA, 19 nt, Artificial Sequence
  Description of Artificial Sequence: Synthetic oligonucleotide
auucuuucccugccaucgc

SEQ ID NO: 2936899 - RNA, 19 nt, Artificial Sequence
  Description of Artificial Sequence: Synthetic oligonucleotide
uugucgaaauuggugagca

SEQ ID NO: 2936900 - RNA, 19 nt, Artificial Sequence
  Description of Artificial Sequence: Synthetic oligonucleotide
acaaccagcagcacaauca

SEQ ID NO: 2936901 - RNA, 19 nt, Artificial Sequence
  Description of Artificial Sequence: Synthetic oligonucleotide
uauccggcaccgaauauuc

SEQ ID NO: 2936902 - RNA, 19 nt, Artificial Sequence
  Description of Artificial Sequence: Synthetic oligonucleotide
guuccaauucuuucccugc

SEQ ID NO: 2936903 - RNA, 19 nt, Artificial Sequence
  Description of Artificial Sequence: Synthetic oligonucleotide
agcagcacaaucaggauga

SEQ ID NO: 2936904 - RNA, 19 nt, Artificial Sequence
  Description of Artificial Sequence: Synthetic oligonucleotide
ugagcaggccaccagccac

SEQ ID NO: 2936905 - RNA, 19 nt, Artificial Sequence
  Description of Artificial Sequence: Synthetic oligonucleotide
uccaauucuuucccugcca

SEQ ID NO: 2936906 - RNA, 19 nt, Artificial Sequence
  Description of Artificial Sequence: Synthetic oligonucleotide
uucuuucccugccaucgcc

SEQ ID NO: 2936907 - RNA, 19 nt, Artificial Sequence
  Description of Artificial Sequence: Synthetic oligonucleotide
gcagcuagugcucuuaaug

SEQ ID NO: 2936908 - RNA, 19 nt, Artificial Sequence
  Description of Artificial Sequence: Synthetic oligonucleotide
ugagcaugauuuccgucac

SEQ ID NO: 2936909 - RNA, 19 nt, Artificial Sequence
  Description of Artificial Sequence: Synthetic oligonucleotide
ugcauacuaggccuauggu

SEQ ID NO: 2936910 - RNA, 19 nt, Artificial Sequence
  Description of Artificial Sequence: Synthetic oligonucleotide
ugugaaggugucagauccc

SEQ ID NO: 2936911 - RNA, 19 nt, Artificial Sequence
  Description of Artificial Sequence: Synthetic oligonucleotide
gaccuugucgaaauuggug

SEQ ID NO: 2936912 - RNA, 19 nt, Artificial Sequence
  Description of Artificial Sequence: Synthetic oligonucleotide
agcuagugcucuuaaugca

SEQ ID NO: 2936913 - RNA, 19 nt, Artificial Sequence
  Description of Artificial Sequence: Synthetic oligonucleotide
gauuuccgucacuucgucc

SEQ ID NO: 2936914 - RNA, 19 nt, Artificial Sequence
  Description of Artificial Sequence: Synthetic oligonucleotide
uaggccuaugguuuacuac

SEQ ID NO: 2936915 - RNA, 19 nt, Artificial Sequence
  Description of Artificial Sequence: Synthetic oligonucleotide
aggaccuugucgaaauugg

SEQ ID NO: 2936916 - RNA, 19 nt, Artificial Sequence
  Description of Artificial Sequence: Synthetic oligonucleotide
ugcgucuucugggagagca

SEQ ID NO: 2936917 - RNA, 19 nt, Artificial Sequence
  Description of Artificial Sequence: Synthetic oligonucleotide
caaccagcagcacaaucag

SEQ ID NO: 2936918 - RNA, 19 nt, Artificial Sequence
  Description of Artificial Sequence: Synthetic oligonucleotide
ggaagaaagacaaccagca

SEQ ID NO: 2936919 - RNA, 19 nt, Artificial Sequence
  Description of Artificial Sequence: Synthetic oligonucleotide
uuaaugcauacuaggccua

SEQ ID NO: 2936920 - RNA, 19 nt, Artificial Sequence
  Description of Artificial Sequence: Synthetic oligonucleotide
uucugggcuagagucuugg

SEQ ID NO: 2936921 - RNA, 19 nt, Artificial Sequence
  Description of Artificial Sequence: Synthetic oligonucleotide
uuacuacuguccccauugc

SEQ ID NO: 2936922 - RNA, 19 nt, Artificial Sequence
  Description of Artificial Sequence: Synthetic oligonucleotide
uacuacuguccccauugcu

SEQ ID NO: 2936923 - RNA, 19 nt, Artificial Sequence
  Description of Artificial Sequence: Synthetic oligonucleotide
cuucugggagagcagcuag

SEQ ID NO: 2936924 - RNA, 19 nt, Artificial Sequence
  Description of Artificial Sequence: Synthetic oligonucleotide
augaugagcaggccaccag

SEQ ID NO: 2936925 - RNA, 19 nt, Artificial Sequence
  Description of Artificial Sequence: Synthetic oligonucleotide
uccggcaccgaauauucuc

SEQ ID NO: 2936926 - RNA, 19 nt, Artificial Sequence
  Description of Artificial Sequence: Synthetic oligonucleotide
ucugggagagcagcuagug

SEQ ID NO: 2936927 - RNA, 19 nt, Artificial Sequence
  Description of Artificial Sequence: Synthetic oligonucleotide
auugcucguuggaagaaag

SEQ ID NO: 2936928 - RNA, 19 nt, Artificial Sequence
  Description of Artificial Sequence: Synthetic oligonucleotide
cuugcugaaggccgaacuc

SEQ ID NO: 2936929 - RNA, 19 nt, Artificial Sequence
  Description of Artificial Sequence: Synthetic oligonucleotide
gugugugugaaggugucag

SEQ ID NO: 2936930 - RNA, 19 nt, Artificial Sequence
  Description of Artificial Sequence: Synthetic oligonucleotide
uugcugaaggccgaacuca

SEQ ID NO: 2936931 - RNA, 19 nt, Artificial Sequence
  Description of Artificial Sequence: Synthetic oligonucleotide
cuugucgaaauuggugagc

SEQ ID NO: 2936932 - RNA, 19 nt, Artificial Sequence
  Description of Artificial Sequence: Synthetic oligonucleotide
ucucccagcgcuucuucug

SEQ ID NO: 2936933 - RNA, 19 nt, Artificial Sequence
  Description of Artificial Sequence: Synthetic oligonucleotide
ucuuucccugccaucgccu

SEQ ID NO: 2936934 - RNA, 19 nt, Artificial Sequence
  Description of Artificial Sequence: Synthetic oligonucleotide
aaugcauacuaggccuaug

SEQ ID NO: 2936935 - RNA, 19 nt, Artificial Sequence
  Description of Artificial Sequence: Synthetic oligonucleotide
uccaggaccuugucgaaau

SEQ ID NO: 2936936 - RNA, 19 nt, Artificial Sequence
  Description of Artificial Sequence: Synthetic oligonucleotide
ugugugugugugugaaggu

SEQ ID NO: 2936937 - RNA, 19 nt, Artificial Sequence
  Description of Artificial Sequence: Synthetic oligonucleotide
uagagucuugguugucuug

SEQ ID NO: 2936938 - RNA, 19 nt, Artificial Sequence
  Description of Artificial Sequence: Synthetic oligonucleotide
agucuugguugucuugcug

SEQ ID NO: 2936939 - RNA, 19 nt, Artificial Sequence
  Description of Artificial Sequence: Synthetic oligonucleotide
ugauuuccgucacuucguc

SEQ ID NO: 2936940 - RNA, 19 nt, Artificial Sequence
  Description of Artificial Sequence: Synthetic oligonucleotide
ugugugugaaggugucaga

SEQ ID NO: 2936941 - RNA, 19 nt, Artificial Sequence
  Description of Artificial Sequence: Synthetic oligonucleotide
ugguugucuugcugaaggc

SEQ ID NO: 2936942 - RNA, 19 nt, Artificial Sequence
  Description of Artificial Sequence: Synthetic oligonucleotide
cagcagcacaaucaggaug

SEQ ID NO: 2936943 - RNA, 19 nt, Artificial Sequence
  Description of Artificial Sequence: Synthetic oligonucleotide
uugcucguuggaagaaaga

SEQ ID NO: 2936944 - RNA, 19 nt, Artificial Sequence
  Description of Artificial Sequence: Synthetic oligonucleotide
uagugcucuuaaugcauac

SEQ ID NO: 2936945 - RNA, 19 nt, Artificial Sequence
  Description of Artificial Sequence: Synthetic oligonucleotide
cauacuaggccuaugguuu

SEQ ID NO: 2936946 - RNA, 19 nt, Artificial Sequence
  Description of Artificial Sequence: Synthetic oligonucleotide
uugucuugcugaaggccga

SEQ ID NO: 2936947 - RNA, 19 nt, Artificial Sequence
  Description of Artificial Sequence: Synthetic oligonucleotide
caccgaauauucucccagc

SEQ ID NO: 2936948 - RNA, 19 nt, Artificial Sequence
  Description of Artificial Sequence: Synthetic oligonucleotide
ucuugguugucuugcugaa

SEQ ID NO: 2936949 - RNA, 19 nt, Artificial Sequence
  Description of Artificial Sequence: Synthetic oligonucleotide
aaccugcgucuucugggag

SEQ ID NO: 2936950 - RNA, 19 nt, Artificial Sequence
  Description of Artificial Sequence: Synthetic oligonucleotide
cagcuugccgucacgcucc

SEQ ID NO: 2936951 - RNA, 19 nt, Artificial Sequence
  Description of Artificial Sequence: Synthetic oligonucleotide
cagcccaaguauauccggc

SEQ ID NO: 2936952 - RNA, 19 nt, Artificial Sequence
  Description of Artificial Sequence: Synthetic oligonucleotide
gacaaccagcagcacaauc

SEQ ID NO: 2936953 - RNA, 19 nt, Artificial Sequence
  Description of Artificial Sequence: Synthetic oligonucleotide
agcccaaguauauccggca

SEQ ID NO: 2936954 - RNA, 19 nt, Artificial Sequence
  Description of Artificial Sequence: Synthetic oligonucleotide
uucccugccaucgccuccg

SEQ ID NO: 2936955 - RNA, 19 nt, Artificial Sequence
  Description of Artificial Sequence: Synthetic oligonucleotide
guugcugggaacugaaccu

SEQ ID NO: 2936956 - RNA, 19 nt, Artificial Sequence
  Description of Artificial Sequence: Synthetic oligonucleotide
cguuggaagaaagacaacc

SEQ ID NO: 2936957 - RNA, 19 nt, Artificial Sequence
  Description of Artificial Sequence: Synthetic oligonucleotide
ccaaguauauccggcaccg

SEQ ID NO: 2936958 - RNA, 19 nt, Artificial Sequence
  Description of Artificial Sequence: Synthetic oligonucleotide
uauauccggcaccgaauau

SEQ ID NO: 2936959 - RNA, 19 nt, Artificial Sequence
  Description of Artificial Sequence: Synthetic oligonucleotide
uuuccgucacuucguccgc

SEQ ID NO: 2936960 - RNA, 19 nt, Artificial Sequence
  Description of Artificial Sequence: Synthetic oligonucleotide
gugcucuuaaugcauacua

SEQ ID NO: 2936961 - RNA, 19 nt, Artificial Sequence
  Description of Artificial Sequence: Synthetic oligonucleotide
gugaaggugucagaucccc

SEQ ID NO: 2936962 - RNA, 19 nt, Artificial Sequence
  Description of Artificial Sequence: Synthetic oligonucleotide
caaucaggaugaugagcag

SEQ ID NO: 2936963 - RNA, 19 nt, Artificial Sequence
  Description of Artificial Sequence: Synthetic oligonucleotide
aaggccgaacucaugucca

SEQ ID NO: 2936964 - RNA, 19 nt, Artificial Sequence
  Description of Artificial Sequence: Synthetic oligonucleotide
gaaccugcgucuucuggga

SEQ ID NO: 2936965 - RNA, 19 nt, Artificial Sequence
  Description of Artificial Sequence: Synthetic oligonucleotide
uguccccauugcucguugg

SEQ ID NO: 2936966 - RNA, 19 nt, Artificial Sequence
  Description of Artificial Sequence: Synthetic oligonucleotide
cucccagcgcuucuucugg

SEQ ID NO: 2936967 - RNA, 19 nt, Artificial Sequence
  Description of Artificial Sequence: Synthetic oligonucleotide
cacuucguccgccugccgc

SEQ ID NO: 2936968 - RNA, 19 nt, Artificial Sequence
  Description of Artificial Sequence: Synthetic oligonucleotide
gcuggcaucguuccaauuc

SEQ ID NO: 2936969 - RNA, 19 nt, Artificial Sequence
  Description of Artificial Sequence: Synthetic oligonucleotide
ucugccagcuugccgucac

SEQ ID NO: 2936970 - RNA, 19 nt, Artificial Sequence
  Description of Artificial Sequence: Synthetic oligonucleotide
ugaaggccgaacucauguc

SEQ ID NO: 2936971 - RNA, 19 nt, Artificial Sequence
  Description of Artificial Sequence: Synthetic oligonucleotide
gcaccgaauauucucccag

SEQ ID NO: 2936972 - RNA, 19 nt, Artificial Sequence
  Description of Artificial Sequence: Synthetic oligonucleotide
agcaugauuuccgucacuu

SEQ ID NO: 2936973 - RNA, 19 nt, Artificial Sequence
  Description of Artificial Sequence: Synthetic oligonucleotide
uucugggagagcagcuagu

SEQ ID NO: 2936974 - RNA, 19 nt, Artificial Sequence
  Description of Artificial Sequence: Synthetic oligonucleotide
acgcuccaggaccuugucg

SEQ ID NO: 2936975 - RNA, 19 nt, Artificial Sequence
  Description of Artificial Sequence: Synthetic oligonucleotide
gaacucauguccaggagcu

SEQ ID NO: 2936976 - RNA, 19 nt, Artificial Sequence
  Description of Artificial Sequence: Synthetic oligonucleotide
gugugugugugugaaggug

SEQ ID NO: 2936977 - RNA, 19 nt, Artificial Sequence
  Description of Artificial Sequence: Synthetic oligonucleotide
ugcugaaggccgaacucau

SEQ ID NO: 2936978 - RNA, 19 nt, Artificial Sequence
  Description of Artificial Sequence: Synthetic oligonucleotide
uggugagcaugauuuccgu

SEQ ID NO: 2936979 - RNA, 19 nt, Artificial Sequence
  Description of Artificial Sequence: Synthetic oligonucleotide
guauauccggcaccgaaua

SEQ ID NO: 2936980 - RNA, 19 nt, Artificial Sequence
  Description of Artificial Sequence: Synthetic oligonucleotide
acuucguccgccugccgcu

SEQ ID NO: 2936981 - RNA, 19 nt, Artificial Sequence
  Description of Artificial Sequence: Synthetic oligonucleotide
caggaccuugucgaaauug

SEQ ID NO: 2936982 - RNA, 19 nt, Artificial Sequence
  Description of Artificial Sequence: Synthetic oligonucleotide
ucacgcuccaggaccuugu

SEQ ID NO: 2936983 - RNA, 19 nt, Artificial Sequence
  Description of Artificial Sequence: Synthetic oligonucleotide
aguauauccggcaccgaau

SEQ ID NO: 2936984 - RNA, 19 nt, Artificial Sequence
  Description of Artificial Sequence: Synthetic oligonucleotide
augauuuccgucacuucgu

SEQ ID NO: 2936985 - RNA, 19 nt, Artificial Sequence
  Description of Artificial Sequence: Synthetic oligonucleotide
cugggagagcagcuagugc

SEQ ID NO: 2936986 - RNA, 19 nt, Artificial Sequence
  Description of Artificial Sequence: Synthetic oligonucleotide
gaugaugagcaggccacca

SEQ ID NO: 2936987 - RNA, 19 nt, Artificial Sequence
  Description of Artificial Sequence: Synthetic oligonucleotide
ucguuggaagaaagacaac

SEQ ID NO: 2936988 - RNA, 19 nt, Artificial Sequence
  Description of Artificial Sequence: Synthetic oligonucleotide
caauucuuucccugccauc

SEQ ID NO: 2936989 - RNA, 19 nt, Artificial Sequence
  Description of Artificial Sequence: Synthetic oligonucleotide
agugcucuuaaugcauacu

SEQ ID NO: 2936990 - RNA, 19 nt, Artificial Sequence
  Description of Artificial Sequence: Synthetic oligonucleotide
gaaauuggugagcaugauu

SEQ ID NO: 2936991 - RNA, 19 nt, Artificial Sequence
  Description of Artificial Sequence: Synthetic oligonucleotide
gguugucuugcugaaggcc

SEQ ID NO: 2936992 - RNA, 19 nt, Artificial Sequence
  Description of Artificial Sequence: Synthetic oligonucleotide
uugccgucacgcuccagga

SEQ ID NO: 2936993 - RNA, 19 nt, Artificial Sequence
  Description of Artificial Sequence: Synthetic oligonucleotide
auauccggcaccgaauauu

SEQ ID NO: 2936994 - RNA, 19 nt, Artificial Sequence
  Description of Artificial Sequence: Synthetic oligonucleotide
auauucucccagcgcuucu

SEQ ID NO: 2936995 - RNA, 19 nt, Artificial Sequence
  Description of Artificial Sequence: Synthetic oligonucleotide
ucaggaugaugagcaggcc

SEQ ID NO: 2936996 - RNA, 19 nt, Artificial Sequence
  Description of Artificial Sequence: Synthetic oligonucleotide
ccuaugguuuacuacuguc

SEQ ID NO: 2936997 - RNA, 19 nt, Artificial Sequence
  Description of Artificial Sequence: Synthetic oligonucleotide
ugugugugugaagguguca

SEQ ID NO: 2936998 - RNA, 19 nt, Artificial Sequence
  Description of Artificial Sequence: Synthetic oligonucleotide
uccaggagcugguccgagc

SEQ ID NO: 2936999 - RNA, 19 nt, Artificial Sequence
  Description of Artificial Sequence: Synthetic oligonucleotide
cugaaggccgaacucaugu

SEQ ID NO: 2937000 - RNA, 19 nt, Artificial Sequence
  Description of Artificial Sequence: Synthetic oligonucleotide
ucccagcgcuucuucuggg

SEQ ID NO: 2937001 - RNA, 19 nt, Artificial Sequence
  Description of Artificial Sequence: Synthetic oligonucleotide
gccgucacgcuccaggacc

SEQ ID NO: 2937002 - RNA, 19 nt, Artificial Sequence
  Description of Artificial Sequence: Synthetic oligonucleotide
ucguuccaauucuuucccu

SEQ ID NO: 2937003 - RNA, 19 nt, Artificial Sequence
  Description of Artificial Sequence: Synthetic oligonucleotide
uaaugcauacuaggccuau

SEQ ID NO: 2937004 - RNA, 19 nt, Artificial Sequence
  Description of Artificial Sequence: Synthetic oligonucleotide
ccugccaucgccuccgcag

SEQ ID NO: 2937005 - RNA, 19 nt, Artificial Sequence
  Description of Artificial Sequence: Synthetic oligonucleotide
cuugguugucuugcugaag

SEQ ID NO: 2937006 - RNA, 19 nt, Artificial Sequence
  Description of Artificial Sequence: Synthetic oligonucleotide
gcaucguuccaauucuuuc

SEQ ID NO: 2937007 - RNA, 19 nt, Artificial Sequence
  Description of Artificial Sequence: Synthetic oligonucleotide
augagcaggccaccagcca

SEQ ID NO: 2937008 - RNA, 19 nt, Artificial Sequence
  Description of Artificial Sequence: Synthetic oligonucleotide
ccaggagcugguccgagcg

SEQ ID NO: 2937009 - RNA, 19 nt, Artificial Sequence
  Description of Artificial Sequence: Synthetic oligonucleotide
accugcgucuucugggaga

SEQ ID NO: 2937010 - RNA, 19 nt, Artificial Sequence
  Description of Artificial Sequence: Synthetic oligonucleotide
cugccgcuggcaucguucc

SEQ ID NO: 2937011 - RNA, 19 nt, Artificial Sequence
  Description of Artificial Sequence: Synthetic oligonucleotide
cgaacucauguccaggagc

SEQ ID NO: 2937012 - RNA, 19 nt, Artificial Sequence
  Description of Artificial Sequence: Synthetic oligonucleotide
aggccgaacucauguccag

SEQ ID NO: 2937013 - RNA, 19 nt, Artificial Sequence
  Description of Artificial Sequence: Synthetic oligonucleotide
ugccagcuugccgucacgc

SEQ ID NO: 2937014 - RNA, 19 nt, Artificial Sequence
  Description of Artificial Sequence: Synthetic oligonucleotide
cuuucccugccaucgccuc

SEQ ID NO: 2937015 - RNA, 19 nt, Artificial Sequence
  Description of Artificial Sequence: Synthetic oligonucleotide
agcgcuucuucugggcuag

SEQ ID NO: 2937016 - RNA, 19 nt, Artificial Sequence
  Description of Artificial Sequence: Synthetic oligonucleotide
aacucauguccaggagcug

SEQ ID NO: 2937017 - RNA, 19 nt, Artificial Sequence
  Description of Artificial Sequence: Synthetic oligonucleotide
ucacuucguccgccugccg

SEQ ID NO: 2937018 - RNA, 19 nt, Artificial Sequence
  Description of Artificial Sequence: Synthetic oligonucleotide
auacuaggccuaugguuua

SEQ ID NO: 2937019 - RNA, 19 nt, Artificial Sequence
  Description of Artificial Sequence: Synthetic oligonucleotide
ccgaauauucucccagcgc

SEQ ID NO: 2937020 - RNA, 19 nt, Artificial Sequence
  Description of Artificial Sequence: Synthetic oligonucleotide
ucugggcuagagucuuggu

SEQ ID NO: 2937021 - RNA, 19 nt, Artificial Sequence
  Description of Artificial Sequence: Synthetic oligonucleotide
ccuugucgaaauuggugag

SEQ ID NO: 2937022 - RNA, 19 nt, Artificial Sequence
  Description of Artificial Sequence: Synthetic oligonucleotide
gucacuucguccgccugcc

SEQ ID NO: 2937023 - RNA, 19 nt, Artificial Sequence
  Description of Artificial Sequence: Synthetic oligonucleotide
gaaagacaaccagcagcac

SEQ ID NO: 2937024 - RNA, 19 nt, Artificial Sequence
  Description of Artificial Sequence: Synthetic oligonucleotide
ccagcccaaguauauccgg

SEQ ID NO: 2937025 - RNA, 19 nt, Artificial Sequence
  Description of Artificial Sequence: Synthetic oligonucleotide
uccgucacuucguccgccu

SEQ ID NO: 2937026 - RNA, 19 nt, Artificial Sequence
  Description of Artificial Sequence: Synthetic oligonucleotide
cugguccgagcgcugcucc

SEQ ID NO: 2937027 - RNA, 19 nt, Artificial Sequence
  Description of Artificial Sequence: Synthetic oligonucleotide
ugucgaaauuggugagcau

SEQ ID NO: 2937028 - RNA, 19 nt, Artificial Sequence
  Description of Artificial Sequence: Synthetic oligonucleotide
uccccauugcucguuggaa

SEQ ID NO: 2937029 - RNA, 19 nt, Artificial Sequence
  Description of Artificial Sequence: Synthetic oligonucleotide
acugccagcccaaguauau

SEQ ID NO: 2937030 - RNA, 19 nt, Artificial Sequence
  Description of Artificial Sequence: Synthetic oligonucleotide
cuagugcucuuaaugcaua

SEQ ID NO: 2937031 - RNA, 19 nt, Artificial Sequence
  Description of Artificial Sequence: Synthetic oligonucleotide
ccggcaccgaauauucucc

SEQ ID NO: 2937032 - RNA, 19 nt, Artificial Sequence
  Description of Artificial Sequence: Synthetic oligonucleotide
agcagcuagugcucuuaau

SEQ ID NO: 2937033 - RNA, 19 nt, Artificial Sequence
  Description of Artificial Sequence: Synthetic oligonucleotide
cagcucugccagcuugccg

SEQ ID NO: 2937034 - RNA, 19 nt, Artificial Sequence
  Description of Artificial Sequence: Synthetic oligonucleotide
ugccgucacgcuccaggac

SEQ ID NO: 2937035 - RNA, 19 nt, Artificial Sequence
  Description of Artificial Sequence: Synthetic oligonucleotide
uacuaggccuaugguuuac

SEQ ID NO: 2937036 - RNA, 19 nt, Artificial Sequence
  Description of Artificial Sequence: Synthetic oligonucleotide
uauucucccagcgcuucuu

SEQ ID NO: 2937037 - RNA, 19 nt, Artificial Sequence
  Description of Artificial Sequence: Synthetic oligonucleotide
acuaggccuaugguuuacu

SEQ ID NO: 2937038 - RNA, 19 nt, Artificial Sequence
  Description of Artificial Sequence: Synthetic oligonucleotide
ggugagcaugauuuccguc

SEQ ID NO: 2937039 - RNA, 19 nt, Artificial Sequence
  Description of Artificial Sequence: Synthetic oligonucleotide
uccgagcgcugcuccagcu

SEQ ID NO: 2937040 - RNA, 19 nt, Artificial Sequence
  Description of Artificial Sequence: Synthetic oligonucleotide
uacuguccccauugcucgu

SEQ ID NO: 2937041 - RNA, 19 nt, Artificial Sequence
  Description of Artificial Sequence: Synthetic oligonucleotide
uuccgucacuucguccgcc

SEQ ID NO: 2937042 - RNA, 19 nt, Artificial Sequence
  Description of Artificial Sequence: Synthetic oligonucleotide
cguuccaauucuuucccug

SEQ ID NO: 2937043 - RNA, 19 nt, Artificial Sequence
  Description of Artificial Sequence: Synthetic oligonucleotide
cuggcaucguuccaauucu

SEQ ID NO: 2937044 - RNA, 19 nt, Artificial Sequence
  Description of Artificial Sequence: Synthetic oligonucleotide
gccagcccaaguauauccg

SEQ ID NO: 2937045 - RNA, 19 nt, Artificial Sequence
  Description of Artificial Sequence: Synthetic oligonucleotide
gcucguuggaagaaagaca

SEQ ID NO: 2937046 - RNA, 19 nt, Artificial Sequence
  Description of Artificial Sequence: Synthetic oligonucleotide
cuaggccuaugguuuacua

SEQ ID NO: 2937047 - RNA, 19 nt, Artificial Sequence
  Description of Artificial Sequence: Synthetic oligonucleotide
agagcagcuagugcucuua

SEQ ID NO: 2937048 - RNA, 19 nt, Artificial Sequence
  Description of Artificial Sequence: Synthetic oligonucleotide
uguccaggagcugguccga

SEQ ID NO: 2937049 - RNA, 19 nt, Artificial Sequence
  Description of Artificial Sequence: Synthetic oligonucleotide
cuucugggcuagagucuug

SEQ ID NO: 2937050 - RNA, 19 nt, Artificial Sequence
  Description of Artificial Sequence: Synthetic oligonucleotide
guccccauugcucguugga

SEQ ID NO: 2937051 - RNA, 19 nt, Artificial Sequence
  Description of Artificial Sequence: Synthetic oligonucleotide
uggcaucguuccaauucuu

SEQ ID NO: 2937052 - RNA, 19 nt, Artificial Sequence
  Description of Artificial Sequence: Synthetic oligonucleotide
caggagcugguccgagcgc

SEQ ID NO: 2937053 - RNA, 19 nt, Artificial Sequence
  Description of Artificial Sequence: Synthetic oligonucleotide
gccgaacucauguccagga

SEQ ID NO: 2937054 - RNA, 19 nt, Artificial Sequence
  Description of Artificial Sequence: Synthetic oligonucleotide
ucguccgccugccgcuggc

SEQ ID NO: 2937055 - RNA, 19 nt, Artificial Sequence
  Description of Artificial Sequence: Synthetic oligonucleotide
agccacugccagcccaagu

SEQ ID NO: 2937056 - RNA, 19 nt, Artificial Sequence
  Description of Artificial Sequence: Synthetic oligonucleotide
ugguccgagcgcugcucca

SEQ ID NO: 2937057 - RNA, 19 nt, Artificial Sequence
  Description of Artificial Sequence: Synthetic oligonucleotide
gagcagcuagugcucuuaa

SEQ ID NO: 2937058 - RNA, 19 nt, Artificial Sequence
  Description of Artificial Sequence: Synthetic oligonucleotide
gcauacuaggccuaugguu

SEQ ID NO: 2937059 - RNA, 19 nt, Artificial Sequence
  Description of Artificial Sequence: Synthetic oligonucleotide
cuguccccauugcucguug

SEQ ID NO: 2937060 - RNA, 19 nt, Artificial Sequence
  Description of Artificial Sequence: Synthetic oligonucleotide
gucacgcuccaggaccuug

SEQ ID NO: 2937061 - RNA, 19 nt, Artificial Sequence
  Description of Artificial Sequence: Synthetic oligonucleotide
gugugugugugaagguguc

SEQ ID NO: 2937062 - RNA, 19 nt, Artificial Sequence
  Description of Artificial Sequence: Synthetic oligonucleotide
gcccaaguauauccggcac

SEQ ID NO: 2937063 - RNA, 19 nt, Artificial Sequence
  Description of Artificial Sequence: Synthetic oligonucleotide
ccagcuugccgucacgcuc

SEQ ID NO: 2937064 - RNA, 19 nt, Artificial Sequence
  Description of Artificial Sequence: Synthetic oligonucleotide
gagucuugguugucuugcu

SEQ ID NO: 2937065 - RNA, 19 nt, Artificial Sequence
  Description of Artificial Sequence: Synthetic oligonucleotide
gccacugccagcccaagua

SEQ ID NO: 2937066 - RNA, 19 nt, Artificial Sequence
  Description of Artificial Sequence: Synthetic oligonucleotide
gugugugaaggugucagau

SEQ ID NO: 2937067 - RNA, 19 nt, Artificial Sequence
  Description of Artificial Sequence: Synthetic oligonucleotide
cugccagcuugccgucacg

SEQ ID NO: 2937068 - RNA, 19 nt, Artificial Sequence
  Description of Artificial Sequence: Synthetic oligonucleotide
cgaauauucucccagcgcu

SEQ ID NO: 2937069 - RNA, 19 nt, Artificial Sequence
  Description of Artificial Sequence: Synthetic oligonucleotide
ggccgaacucauguccagg

SEQ ID NO: 2937070 - RNA, 19 nt, Artificial Sequence
  Description of Artificial Sequence: Synthetic oligonucleotide
ggccuaugguuuacuacug

SEQ ID NO: 2937071 - RNA, 19 nt, Artificial Sequence
  Description of Artificial Sequence: Synthetic oligonucleotide
uccgccugccgcuggcauc

SEQ ID NO: 2937072 - RNA, 19 nt, Artificial Sequence
  Description of Artificial Sequence: Synthetic oligonucleotide
agcugguccgagcgcugcu

SEQ ID NO: 2937073 - RNA, 19 nt, Artificial Sequence
  Description of Artificial Sequence: Synthetic oligonucleotide
guccgagcgcugcuccagc

SEQ ID NO: 2937074 - RNA, 19 nt, Artificial Sequence
  Description of Artificial Sequence: Synthetic oligonucleotide
ccugccgcuggcaucguuc

SEQ ID NO: 2937075 - RNA, 19 nt, Artificial Sequence
  Description of Artificial Sequence: Synthetic oligonucleotide
cauugcucguuggaagaaa

SEQ ID NO: 2937076 - RNA, 19 nt, Artificial Sequence
  Description of Artificial Sequence: Synthetic oligonucleotide
ggcaccgaauauucuccca

SEQ ID NO: 2937077 - RNA, 19 nt, Artificial Sequence
  Description of Artificial Sequence: Synthetic oligonucleotide
ugccgcuggcaucguucca

SEQ ID NO: 2937078 - RNA, 19 nt, Artificial Sequence
  Description of Artificial Sequence: Synthetic oligonucleotide
ggaugaugagcaggccacc

SEQ ID NO: 2937079 - RNA, 19 nt, Artificial Sequence
  Description of Artificial Sequence: Synthetic oligonucleotide
ccgaacucauguccaggag

SEQ ID NO: 2937080 - RNA, 19 nt, Artificial Sequence
  Description of Artificial Sequence: Synthetic oligonucleotide
cccauugcucguuggaaga

SEQ ID NO: 2937081 - RNA, 19 nt, Artificial Sequence
  Description of Artificial Sequence: Synthetic oligonucleotide
ccugcgucuucugggagag

SEQ ID NO: 2937082 - RNA, 19 nt, Artificial Sequence
  Description of Artificial Sequence: Synthetic oligonucleotide
gaauauucucccagcgcuu

SEQ ID NO: 2937083 - RNA, 19 nt, Artificial Sequence
  Description of Artificial Sequence: Synthetic oligonucleotide
cucauguccaggagcuggu

SEQ ID NO: 2937084 - RNA, 19 nt, Artificial Sequence
  Description of Artificial Sequence: Synthetic oligonucleotide
cgcuccaggaccuugucga

SEQ ID NO: 2937085 - RNA, 19 nt, Artificial Sequence
  Description of Artificial Sequence: Synthetic oligonucleotide
cuagagucuugguugucuu

SEQ ID NO: 2937086 - RNA, 19 nt, Artificial Sequence
  Description of Artificial Sequence: Synthetic oligonucleotide
gucuugcugaaggccgaac

SEQ ID NO: 2937087 - RNA, 19 nt, Artificial Sequence
  Description of Artificial Sequence: Synthetic oligonucleotide
guuuacuacuguccccauu

SEQ ID NO: 2937088 - RNA, 19 nt, Artificial Sequence
  Description of Artificial Sequence: Synthetic oligonucleotide
cugccagcccaaguauauc

SEQ ID NO: 2937089 - RNA, 19 nt, Artificial Sequence
  Description of Artificial Sequence: Synthetic oligonucleotide
cugggcuagagucuugguu

SEQ ID NO: 2937090 - RNA, 19 nt, Artificial Sequence
  Description of Artificial Sequence: Synthetic oligonucleotide
gguccgagcgcugcuccag

SEQ ID NO: 2937091 - RNA, 19 nt, Artificial Sequence
  Description of Artificial Sequence: Synthetic oligonucleotide
agcaggccaccagccacug

SEQ ID NO: 2937092 - RNA, 19 nt, Artificial Sequence
  Description of Artificial Sequence: Synthetic oligonucleotide
cacugccagcccaaguaua

SEQ ID NO: 2937093 - RNA, 19 nt, Artificial Sequence
  Description of Artificial Sequence: Synthetic oligonucleotide
gagcaugauuuccgucacu

SEQ ID NO: 2937094 - RNA, 19 nt, Artificial Sequence
  Description of Artificial Sequence: Synthetic oligonucleotide
cccagcgcuucuucugggc

SEQ ID NO: 2937095 - RNA, 19 nt, Artificial Sequence
  Description of Artificial Sequence: Synthetic oligonucleotide
acuguccccauugcucguu

SEQ ID NO: 2937096 - RNA, 19 nt, Artificial Sequence
  Description of Artificial Sequence: Synthetic oligonucleotide
guccaggagcugguccgag

SEQ ID NO: 2937097 - RNA, 19 nt, Artificial Sequence
  Description of Artificial Sequence: Synthetic oligonucleotide
cugcuccagcucugccagc

SEQ ID NO: 2937098 - RNA, 19 nt, Artificial Sequence
  Description of Artificial Sequence: Synthetic oligonucleotide
gcuagagucuugguugucu

SEQ ID NO: 2937099 - RNA, 19 nt, Artificial Sequence
  Description of Artificial Sequence: Synthetic oligonucleotide
caaguauauccggcaccga

SEQ ID NO: 2937100 - RNA, 19 nt, Artificial Sequence
  Description of Artificial Sequence: Synthetic oligonucleotide
gggagagcagcuagugcuc

SEQ ID NO: 2937101 - RNA, 19 nt, Artificial Sequence
  Description of Artificial Sequence: Synthetic oligonucleotide
ccgccugccgcuggcaucg

SEQ ID NO: 2937102 - RNA, 19 nt, Artificial Sequence
  Description of Artificial Sequence: Synthetic oligonucleotide
gcugaaggccgaacucaug

SEQ ID NO: 2937103 - RNA, 19 nt, Artificial Sequence
  Description of Artificial Sequence: Synthetic oligonucleotide
gagcgcugcuccagcucug

SEQ ID NO: 2937104 - RNA, 19 nt, Artificial Sequence
  Description of Artificial Sequence: Synthetic oligonucleotide
ucccugccaucgccuccgc

SEQ ID NO: 2937105 - RNA, 19 nt, Artificial Sequence
  Description of Artificial Sequence: Synthetic oligonucleotide
gcuagugcucuuaaugcau

SEQ ID NO: 2937106 - RNA, 19 nt, Artificial Sequence
  Description of Artificial Sequence: Synthetic oligonucleotide
cuucguccgccugccgcug

SEQ ID NO: 2937107 - RNA, 19 nt, Artificial Sequence
  Description of Artificial Sequence: Synthetic oligonucleotide
cagcgcuucuucugggcua

SEQ ID NO: 2937108 - RNA, 19 nt, Artificial Sequence
  Description of Artificial Sequence: Synthetic oligonucleotide
auccggcaccgaauauucu

SEQ ID NO: 2937109 - RNA, 19 nt, Artificial Sequence
  Description of Artificial Sequence: Synthetic oligonucleotide
gagcaggccaccagccacu

SEQ ID NO: 2937110 - RNA, 19 nt, Artificial Sequence
  Description of Artificial Sequence: Synthetic oligonucleotide
cuccaggaccuugucgaaa

SEQ ID NO: 2937111 - RNA, 19 nt, Artificial Sequence
  Description of Artificial Sequence: Synthetic oligonucleotide
caccagccacugccagccc

SEQ ID NO: 2937112 - RNA, 19 nt, Artificial Sequence
  Description of Artificial Sequence: Synthetic oligonucleotide
cggcaccgaauauucuccc

SEQ ID NO: 2937113 - RNA, 19 nt, Artificial Sequence
  Description of Artificial Sequence: Synthetic oligonucleotide
gcgucuucugggagagcag

SEQ ID NO: 2937114 - RNA, 19 nt, Artificial Sequence
  Description of Artificial Sequence: Synthetic oligonucleotide
gccuaugguuuacuacugu

SEQ ID NO: 2937115 - RNA, 19 nt, Artificial Sequence
  Description of Artificial Sequence: Synthetic oligonucleotide
gggcuagagucuugguugu

SEQ ID NO: 2937116 - RNA, 19 nt, Artificial Sequence
  Description of Artificial Sequence: Synthetic oligonucleotide
ccagcucugccagcuugcc

SEQ ID NO: 2937117 - RNA, 19 nt, Artificial Sequence
  Description of Artificial Sequence: Synthetic oligonucleotide
ggaccuugucgaaauuggu

SEQ ID NO: 2937118 - RNA, 19 nt, Artificial Sequence
  Description of Artificial Sequence: Synthetic oligonucleotide
cagccacugccagcccaag

SEQ ID NO: 2937119 - RNA, 19 nt, Artificial Sequence
  Description of Artificial Sequence: Synthetic oligonucleotide
gccgcuggcaucguuccaa

SEQ ID NO: 2937120 - RNA, 19 nt, Artificial Sequence
  Description of Artificial Sequence: Synthetic oligonucleotide
ccaauucuuucccugccau

SEQ ID NO: 2937121 - RNA, 19 nt, Artificial Sequence
  Description of Artificial Sequence: Synthetic oligonucleotide
cugcgucuucugggagagc

SEQ ID NO: 2937122 - RNA, 19 nt, Artificial Sequence
  Description of Artificial Sequence: Synthetic oligonucleotide
ggagagcagcuagugcucu

SEQ ID NO: 2937123 - RNA, 19 nt, Artificial Sequence
  Description of Artificial Sequence: Synthetic oligonucleotide
gcugguccgagcgcugcuc

SEQ ID NO: 2937124 - RNA, 19 nt, Artificial Sequence
  Description of Artificial Sequence: Synthetic oligonucleotide
gcucugccagcuugccguc

SEQ ID NO: 2937125 - RNA, 19 nt, Artificial Sequence
  Description of Artificial Sequence: Synthetic oligonucleotide
gcaggccaccagccacugc

SEQ ID NO: 2937126 - RNA, 19 nt, Artificial Sequence
  Description of Artificial Sequence: Synthetic oligonucleotide
ggcaucguuccaauucuuu

SEQ ID NO: 2937127 - RNA, 19 nt, Artificial Sequence
  Description of Artificial Sequence: Synthetic oligonucleotide
ggcuagagucuugguuguc

SEQ ID NO: 2937128 - RNA, 19 nt, Artificial Sequence
  Description of Artificial Sequence: Synthetic oligonucleotide
gcgcugcuccagcucugcc

SEQ ID NO: 2937129 - RNA, 19 nt, Artificial Sequence
  Description of Artificial Sequence: Synthetic oligonucleotide
gguuuacuacuguccccau

SEQ ID NO: 2937130 - RNA, 19 nt, Artificial Sequence
  Description of Artificial Sequence: Synthetic oligonucleotide
ccgagcgcugcuccagcuc

SEQ ID NO: 2937131 - RNA, 19 nt, Artificial Sequence
  Description of Artificial Sequence: Synthetic oligonucleotide
ccagccacugccagcccaa

SEQ ID NO: 2937132 - RNA, 19 nt, Artificial Sequence
  Description of Artificial Sequence: Synthetic oligonucleotide
ccgucacuucguccgccug

SEQ ID NO: 2937133 - RNA, 19 nt, Artificial Sequence
  Description of Artificial Sequence: Synthetic oligonucleotide
ccauugcucguuggaagaa

SEQ ID NO: 2937134 - RNA, 19 nt, Artificial Sequence
  Description of Artificial Sequence: Synthetic oligonucleotide
gccagcuugccgucacgcu

SEQ ID NO: 2937135 - RNA, 19 nt, Artificial Sequence
  Description of Artificial Sequence: Synthetic oligonucleotide
ccagcgcuucuucugggcu

SEQ ID NO: 2937136 - RNA, 19 nt, Artificial Sequence
  Description of Artificial Sequence: Synthetic oligonucleotide
ccagcagcacaaucaggau

SEQ ID NO: 2937137 - RNA, 19 nt, Artificial Sequence
  Description of Artificial Sequence: Synthetic oligonucleotide
guccgccugccgcuggcau

SEQ ID NO: 2937138 - RNA, 19 nt, Artificial Sequence
  Description of Artificial Sequence: Synthetic oligonucleotide
cgagcgcugcuccagcucu

SEQ ID NO: 2937139 - RNA, 19 nt, Artificial Sequence
  Description of Artificial Sequence: Synthetic oligonucleotide
ccacugccagcccaaguau

SEQ ID NO: 2937140 - RNA, 19 nt, Artificial Sequence
  Description of Artificial Sequence: Synthetic oligonucleotide
gcuugccgucacgcuccag

SEQ ID NO: 2937141 - RNA, 19 nt, Artificial Sequence
  Description of Artificial Sequence: Synthetic oligonucleotide
ccgucacgcuccaggaccu

SEQ ID NO: 2937142 - RNA, 19 nt, Artificial Sequence
  Description of Artificial Sequence: Synthetic oligonucleotide
cccugccaucgccuccgca

SEQ ID NO: 2937143 - RNA, 19 nt, Artificial Sequence
  Description of Artificial Sequence: Synthetic oligonucleotide
cgaaauuggugagcaugau

SEQ ID NO: 2937144 - RNA, 19 nt, Artificial Sequence
  Description of Artificial Sequence: Synthetic oligonucleotide
ccgcuggcaucguuccaau

SEQ ID NO: 2937145 - RNA, 19 nt, Artificial Sequence
  Description of Artificial Sequence: Synthetic oligonucleotide
gcgcuucuucugggcuaga

SEQ ID NO: 2937146 - RNA, 19 nt, Artificial Sequence
  Description of Artificial Sequence: Synthetic oligonucleotide
gccugccgcuggcaucguu

SEQ ID NO: 2937147 - RNA, 19 nt, Artificial Sequence
  Description of Artificial Sequence: Synthetic oligonucleotide
cguccgccugccgcuggca

SEQ ID NO: 2937148 - RNA, 19 nt, Artificial Sequence
  Description of Artificial Sequence: Synthetic oligonucleotide
cgcuggcaucguuccaauu

SEQ ID NO: 2937149 - RNA, 19 nt, Artificial Sequence
  Description of Artificial Sequence: Synthetic oligonucleotide
cgucacgcuccaggaccuu

SEQ ID NO: 2937150 - RNA, 19 nt, Artificial Sequence
  Description of Artificial Sequence: Synthetic oligonucleotide
cgccugccgcuggcaucgu

SEQ ID NO: 2937151 - RNA, 19 nt, Artificial Sequence
  Description of Artificial Sequence: Synthetic oligonucleotide
gauccuaugugcuugagcc

SEQ ID NO: 2937152 - RNA, 19 nt, Artificial Sequence
  Description of Artificial Sequence: Synthetic oligonucleotide
ucuuguagaccucugaacc

SEQ ID NO: 2937153 - RNA, 19 nt, Artificial Sequence
  Description of Artificial Sequence: Synthetic oligonucleotide
ucuguugucauccagccca

SEQ ID NO: 2937154 - RNA, 19 nt, Artificial Sequence
  Description of Artificial Sequence: Synthetic oligonucleotide
agggugauaucauugcugc

SEQ ID NO: 2937155 - RNA, 19 nt, Artificial Sequence
  Description of Artificial Sequence: Synthetic oligonucleotide
ucaucaagggcacuggucc

SEQ ID NO: 2937156 - RNA, 19 nt, Artificial Sequence
  Description of Artificial Sequence: Synthetic oligonucleotide
auugugagggacuggaagg

SEQ ID NO: 2937157 - RNA, 19 nt, Artificial Sequence
  Description of Artificial Sequence: Synthetic oligonucleotide
agcggaaggauccagacug

SEQ ID NO: 2937158 - RNA, 19 nt, Artificial Sequence
  Description of Artificial Sequence: Synthetic oligonucleotide
gaaggauccagacugcuug

SEQ ID NO: 2937159 - RNA, 19 nt, Artificial Sequence
  Description of Artificial Sequence: Synthetic oligonucleotide
ucccuuaacaucuuguaga

SEQ ID NO: 2937160 - RNA, 19 nt, Artificial Sequence
  Description of Artificial Sequence: Synthetic oligonucleotide
ugagccuugucaucaaggg

SEQ ID NO: 2937161 - RNA, 19 nt, Artificial Sequence
  Description of Artificial Sequence: Synthetic oligonucleotide
ucaauguggauccuaugug

SEQ ID NO: 2937162 - RNA, 19 nt, Artificial Sequence
  Description of Artificial Sequence: Synthetic oligonucleotide
uggagacacaugcagagug

SEQ ID NO: 2937163 - RNA, 19 nt, Artificial Sequence
  Description of Artificial Sequence: Synthetic oligonucleotide
ugaucuguugucauccagc

SEQ ID NO: 2937164 - RNA, 19 nt, Artificial Sequence
  Description of Artificial Sequence: Synthetic oligonucleotide
uugagccuugucaucaagg

SEQ ID NO: 2937165 - RNA, 19 nt, Artificial Sequence
  Description of Artificial Sequence: Synthetic oligonucleotide
aucuuguagaccucugaac

SEQ ID NO: 2937166 - RNA, 19 nt, Artificial Sequence
  Description of Artificial Sequence: Synthetic oligonucleotide
uggacugccauccugggac

SEQ ID NO: 2937167 - RNA, 19 nt, Artificial Sequence
  Description of Artificial Sequence: Synthetic oligonucleotide
ucagggucaauguggaucc

SEQ ID NO: 2937168 - RNA, 19 nt, Artificial Sequence
  Description of Artificial Sequence: Synthetic oligonucleotide
uucccuuaacaucuuguag

SEQ ID NO: 2937169 - RNA, 19 nt, Artificial Sequence
  Description of Artificial Sequence: Synthetic oligonucleotide
uucgcuagccucuagcaug

SEQ ID NO: 2937170 - RNA, 19 nt, Artificial Sequence
  Description of Artificial Sequence: Synthetic oligonucleotide
caauguggauccuaugugc

SEQ ID NO: 2937171 - RNA, 19 nt, Artificial Sequence
  Description of Artificial Sequence: Synthetic oligonucleotide
cuuaacaucuuguagaccu

SEQ ID NO: 2937172 - RNA, 19 nt, Artificial Sequence
  Description of Artificial Sequence: Synthetic oligonucleotide
agcacugggagguggagac

SEQ ID NO: 2937173 - RNA, 19 nt, Artificial Sequence
  Description of Artificial Sequence: Synthetic oligonucleotide
ugcagagugcucaucuggg

SEQ ID NO: 2937174 - RNA, 19 nt, Artificial Sequence
  Description of Artificial Sequence: Synthetic oligonucleotide
gaucuguugucauccagcc

SEQ ID NO: 2937175 - RNA, 19 nt, Artificial Sequence
  Description of Artificial Sequence: Synthetic oligonucleotide
ucuagcaugccuugcaagu

SEQ ID NO: 2937176 - RNA, 19 nt, Artificial Sequence
  Description of Artificial Sequence: Synthetic oligonucleotide
ucugcugguucccuuaaca

SEQ ID NO: 2937177 - RNA, 19 nt, Artificial Sequence
  Description of Artificial Sequence: Synthetic oligonucleotide
gagguggagacacaugcag

SEQ ID NO: 2937178 - RNA, 19 nt, Artificial Sequence
  Description of Artificial Sequence: Synthetic oligonucleotide
auauggagaucccaggccu

SEQ ID NO: 2937179 - RNA, 19 nt, Artificial Sequence
  Description of Artificial Sequence: Synthetic oligonucleotide
aaggauccagacugcuugg

SEQ ID NO: 2937180 - RNA, 19 nt, Artificial Sequence
  Description of Artificial Sequence: Synthetic oligonucleotide
cauugugagggacuggaag

SEQ ID NO: 2937181 - RNA, 19 nt, Artificial Sequence
  Description of Artificial Sequence: Synthetic oligonucleotide
ugugcuugagccuugucau

SEQ ID NO: 2937182 - RNA, 19 nt, Artificial Sequence
  Description of Artificial Sequence: Synthetic oligonucleotide
cuuguagaccucugaaccc

SEQ ID NO: 2937183 - RNA, 19 nt, Artificial Sequence
  Description of Artificial Sequence: Synthetic oligonucleotide
augcagagugcucaucugg

SEQ ID NO: 2937184 - RNA, 19 nt, Artificial Sequence
  Description of Artificial Sequence: Synthetic oligonucleotide
cauauggagaucccaggcc

SEQ ID NO: 2937185 - RNA, 19 nt, Artificial Sequence
  Description of Artificial Sequence: Synthetic oligonucleotide
acugaggaccgccugcugg

SEQ ID NO: 2937186 - RNA, 19 nt, Artificial Sequence
  Description of Artificial Sequence: Synthetic oligonucleotide
accauauggagaucccagg

SEQ ID NO: 2937187 - RNA, 19 nt, Artificial Sequence
  Description of Artificial Sequence: Synthetic oligonucleotide
ugucauccagcccaauccc

SEQ ID NO: 2937188 - RNA, 19 nt, Artificial Sequence
  Description of Artificial Sequence: Synthetic oligonucleotide
gacugcuuggguucugagg

SEQ ID NO: 2937189 - RNA, 19 nt, Artificial Sequence
  Description of Artificial Sequence: Synthetic oligonucleotide
ucauccagcccaaucccag

SEQ ID NO: 2937190 - RNA, 19 nt, Artificial Sequence
  Description of Artificial Sequence: Synthetic oligonucleotide
aagggcacugguccaguuc

SEQ ID NO: 2937191 - RNA, 19 nt, Artificial Sequence
  Description of Artificial Sequence: Synthetic oligonucleotide
ugugucagcacugggaggu

SEQ ID NO: 2937192 - RNA, 19 nt, Artificial Sequence
  Description of Artificial Sequence: Synthetic oligonucleotide
accuucgcuagccucuagc

SEQ ID NO: 2937193 - RNA, 19 nt, Artificial Sequence
  Description of Artificial Sequence: Synthetic oligonucleotide
auccagacugcuuggguuc

SEQ ID NO: 2937194 - RNA, 19 nt, Artificial Sequence
  Description of Artificial Sequence: Synthetic oligonucleotide
cauccugggacucaggguc

SEQ ID NO: 2937195 - RNA, 19 nt, Artificial Sequence
  Description of Artificial Sequence: Synthetic oligonucleotide
aaggcgagguggcugacca

SEQ ID NO: 2937196 - RNA, 19 nt, Artificial Sequence
  Description of Artificial Sequence: Synthetic oligonucleotide
uguggauccuaugugcuug

SEQ ID NO: 2937197 - RNA, 19 nt, Artificial Sequence
  Description of Artificial Sequence: Synthetic oligonucleotide
gugauaucauugcugcugc

SEQ ID NO: 2937198 - RNA, 19 nt, Artificial Sequence
  Description of Artificial Sequence: Synthetic oligonucleotide
aauguggauccuaugugcu

SEQ ID NO: 2937199 - RNA, 19 nt, Artificial Sequence
  Description of Artificial Sequence: Synthetic oligonucleotide
ugcucaucugggcuggcag

SEQ ID NO: 2937200 - RNA, 19 nt, Artificial Sequence
  Description of Artificial Sequence: Synthetic oligonucleotide
acugguccaguucuugcuc

SEQ ID NO: 2937201 - RNA, 19 nt, Artificial Sequence
  Description of Artificial Sequence: Synthetic oligonucleotide
augccuugcaaguagcgga

SEQ ID NO: 2937202 - RNA, 19 nt, Artificial Sequence
  Description of Artificial Sequence: Synthetic oligonucleotide
aucuguugucauccagccc

SEQ ID NO: 2937203 - RNA, 19 nt, Artificial Sequence
  Description of Artificial Sequence: Synthetic oligonucleotide
gaccauauggagaucccag

SEQ ID NO: 2937204 - RNA, 19 nt, Artificial Sequence
  Description of Artificial Sequence: Synthetic oligonucleotide
agccuugucaucaagggca

SEQ ID NO: 2937205 - RNA, 19 nt, Artificial Sequence
  Description of Artificial Sequence: Synthetic oligonucleotide
gguggagacacaugcagag

SEQ ID NO: 2937206 - RNA, 19 nt, Artificial Sequence
  Description of Artificial Sequence: Synthetic oligonucleotide
agcccaaucccagagacug

SEQ ID NO: 2937207 - RNA, 19 nt, Artificial Sequence
  Description of Artificial Sequence: Synthetic oligonucleotide
cacuggacugccauccugg

SEQ ID NO: 2937208 - RNA, 19 nt, Artificial Sequence
  Description of Artificial Sequence: Synthetic oligonucleotide
uggcagggugauaucauug

SEQ ID NO: 2937209 - RNA, 19 nt, Artificial Sequence
  Description of Artificial Sequence: Synthetic oligonucleotide
ugcaaguagcggaaggauc

SEQ ID NO: 2937210 - RNA, 19 nt, Artificial Sequence
  Description of Artificial Sequence: Synthetic oligonucleotide
uuccgaggaagaacccugg

SEQ ID NO: 2937211 - RNA, 19 nt, Artificial Sequence
  Description of Artificial Sequence: Synthetic oligonucleotide
ugaacccagguccacccug

SEQ ID NO: 2937212 - RNA, 19 nt, Artificial Sequence
  Description of Artificial Sequence: Synthetic oligonucleotide
gacacaugcagagugcuca

SEQ ID NO: 2937213 - RNA, 19 nt, Artificial Sequence
  Description of Artificial Sequence: Synthetic oligonucleotide
agaccucugaacccagguc

SEQ ID NO: 2937214 - RNA, 19 nt, Artificial Sequence
  Description of Artificial Sequence: Synthetic oligonucleotide
ucccagagacugaggaccg

SEQ ID NO: 2937215 - RNA, 19 nt, Artificial Sequence
  Description of Artificial Sequence: Synthetic oligonucleotide
ggugauaucauugcugcug

SEQ ID NO: 2937216 - RNA, 19 nt, Artificial Sequence
  Description of Artificial Sequence: Synthetic oligonucleotide
cagggugauaucauugcug

SEQ ID NO: 2937217 - RNA, 19 nt, Artificial Sequence
  Description of Artificial Sequence: Synthetic oligonucleotide
auaucauugcugcugccau

SEQ ID NO: 2937218 - RNA, 19 nt, Artificial Sequence
  Description of Artificial Sequence: Synthetic oligonucleotide
agagugcucaucugggcug

SEQ ID NO: 2937219 - RNA, 19 nt, Artificial Sequence
  Description of Artificial Sequence: Synthetic oligonucleotide
cuugucaucaagggcacug

SEQ ID NO: 2937220 - RNA, 19 nt, Artificial Sequence
  Description of Artificial Sequence: Synthetic oligonucleotide
uagaccucugaacccaggu

SEQ ID NO: 2937221 - RNA, 19 nt, Artificial Sequence
  Description of Artificial Sequence: Synthetic oligonucleotide
gggagguggagacacaugc

SEQ ID NO: 2937222 - RNA, 19 nt, Artificial Sequence
  Description of Artificial Sequence: Synthetic oligonucleotide
ugcuugagccuugucauca

SEQ ID NO: 2937223 - RNA, 19 nt, Artificial Sequence
  Description of Artificial Sequence: Synthetic oligonucleotide
uggguucugaggccacugg

SEQ ID NO: 2937224 - RNA, 19 nt, Artificial Sequence
  Description of Artificial Sequence: Synthetic oligonucleotide
uuguagaccucugaaccca

SEQ ID NO: 2937225 - RNA, 19 nt, Artificial Sequence
  Description of Artificial Sequence: Synthetic oligonucleotide
uguagaccucugaacccag

SEQ ID NO: 2937226 - RNA, 19 nt, Artificial Sequence
  Description of Artificial Sequence: Synthetic oligonucleotide
uuaacaucuuguagaccuc

SEQ ID NO: 2937227 - RNA, 19 nt, Artificial Sequence
  Description of Artificial Sequence: Synthetic oligonucleotide
aucauugcugcugccauug

SEQ ID NO: 2937228 - RNA, 19 nt, Artificial Sequence
  Description of Artificial Sequence: Synthetic oligonucleotide
uugucaucaagggcacugg

SEQ ID NO: 2937229 - RNA, 19 nt, Artificial Sequence
  Description of Artificial Sequence: Synthetic oligonucleotide
accagacccaggccgcucc

SEQ ID NO: 2937230 - RNA, 19 nt, Artificial Sequence
  Description of Artificial Sequence: Synthetic oligonucleotide
cucagggucaauguggauc

SEQ ID NO: 2937231 - RNA, 19 nt, Artificial Sequence
  Description of Artificial Sequence: Synthetic oligonucleotide
uauggagaucccaggccug

SEQ ID NO: 2937232 - RNA, 19 nt, Artificial Sequence
  Description of Artificial Sequence: Synthetic oligonucleotide
acaucuuguagaccucuga

SEQ ID NO: 2937233 - RNA, 19 nt, Artificial Sequence
  Description of Artificial Sequence: Synthetic oligonucleotide
ugcugguucccuuaacauc

SEQ ID NO: 2937234 - RNA, 19 nt, Artificial Sequence
  Description of Artificial Sequence: Synthetic oligonucleotide
gucaauguggauccuaugu

SEQ ID NO: 2937235 - RNA, 19 nt, Artificial Sequence
  Description of Artificial Sequence: Synthetic oligonucleotide
agggcacugguccaguucu

SEQ ID NO: 2937236 - RNA, 19 nt, Artificial Sequence
  Description of Artificial Sequence: Synthetic oligonucleotide
gagacugaggaccgccugc

SEQ ID NO: 2937237 - RNA, 19 nt, Artificial Sequence
  Description of Artificial Sequence: Synthetic oligonucleotide
gagccuugucaucaagggc

SEQ ID NO: 2937238 - RNA, 19 nt, Artificial Sequence
  Description of Artificial Sequence: Synthetic oligonucleotide
ucgcuagccucuagcaugc

SEQ ID NO: 2937239 - RNA, 19 nt, Artificial Sequence
  Description of Artificial Sequence: Synthetic oligonucleotide
caugccuugcaaguagcgg

SEQ ID NO: 2937240 - RNA, 19 nt, Artificial Sequence
  Description of Artificial Sequence: Synthetic oligonucleotide
ugcagucccgguuccgagg

SEQ ID NO: 2937241 - RNA, 19 nt, Artificial Sequence
  Description of Artificial Sequence: Synthetic oligonucleotide
uaacaucuuguagaccucu

SEQ ID NO: 2937242 - RNA, 19 nt, Artificial Sequence
  Description of Artificial Sequence: Synthetic oligonucleotide
gcaaguagcggaaggaucc

SEQ ID NO: 2937243 - RNA, 19 nt, Artificial Sequence
  Description of Artificial Sequence: Synthetic oligonucleotide
ucacuggacugccauccug

SEQ ID NO: 2937244 - RNA, 19 nt, Artificial Sequence
  Description of Artificial Sequence: Synthetic oligonucleotide
guagcggaaggauccagac

SEQ ID NO: 2937245 - RNA, 19 nt, Artificial Sequence
  Description of Artificial Sequence: Synthetic oligonucleotide
caaucccagagacugagga

SEQ ID NO: 2937246 - RNA, 19 nt, Artificial Sequence
  Description of Artificial Sequence: Synthetic oligonucleotide
cucuagcaugccuugcaag

SEQ ID NO: 2937247 - RNA, 19 nt, Artificial Sequence
  Description of Artificial Sequence: Synthetic oligonucleotide
ggacucagggucaaugugg

SEQ ID NO: 2937248 - RNA, 19 nt, Artificial Sequence
  Description of Artificial Sequence: Synthetic oligonucleotide
guugucauccagcccaauc

SEQ ID NO: 2937249 - RNA, 19 nt, Artificial Sequence
  Description of Artificial Sequence: Synthetic oligonucleotide
ugucaucaagggcacuggu

SEQ ID NO: 2937250 - RNA, 19 nt, Artificial Sequence
  Description of Artificial Sequence: Synthetic oligonucleotide
caguucuugcucucaggcc

SEQ ID NO: 2937251 - RNA, 19 nt, Artificial Sequence
  Description of Artificial Sequence: Synthetic oligonucleotide
aagaacccuggcuguguca

SEQ ID NO: 2937252 - RNA, 19 nt, Artificial Sequence
  Description of Artificial Sequence: Synthetic oligonucleotide
uggaaggcgagguggcuga

SEQ ID NO: 2937253 - RNA, 19 nt, Artificial Sequence
  Description of Artificial Sequence: Synthetic oligonucleotide
acuggacugccauccuggg

SEQ ID NO: 2937254 - RNA, 19 nt, Artificial Sequence
  Description of Artificial Sequence: Synthetic oligonucleotide
cugaucuguugucauccag

SEQ ID NO: 2937255 - RNA, 19 nt, Artificial Sequence
  Description of Artificial Sequence: Synthetic oligonucleotide
agagacugaggaccgccug

SEQ ID NO: 2937256 - RNA, 19 nt, Artificial Sequence
  Description of Artificial Sequence: Synthetic oligonucleotide
gguggcugaccauauggag

SEQ ID NO: 2937257 - RNA, 19 nt, Artificial Sequence
  Description of Artificial Sequence: Synthetic oligonucleotide
cugaccauauggagauccc

SEQ ID NO: 2937258 - RNA, 19 nt, Artificial Sequence
  Description of Artificial Sequence: Synthetic oligonucleotide
ugucagcacugggaggugg

SEQ ID NO: 2937259 - RNA, 19 nt, Artificial Sequence
  Description of Artificial Sequence: Synthetic oligonucleotide
ugaccauauggagauccca

SEQ ID NO: 2937260 - RNA, 19 nt, Artificial Sequence
  Description of Artificial Sequence: Synthetic oligonucleotide
gggaccaccagacccaggc

SEQ ID NO: 2937261 - RNA, 19 nt, Artificial Sequence
  Description of Artificial Sequence: Synthetic oligonucleotide
cucaucugggcuggcaggg

SEQ ID NO: 2937262 - RNA, 19 nt, Artificial Sequence
  Description of Artificial Sequence: Synthetic oligonucleotide
aacaucuuguagaccucug

SEQ ID NO: 2937263 - RNA, 19 nt, Artificial Sequence
  Description of Artificial Sequence: Synthetic oligonucleotide
cauugcugcugccauugug

SEQ ID NO: 2937264 - RNA, 19 nt, Artificial Sequence
  Description of Artificial Sequence: Synthetic oligonucleotide
aaguagcggaaggauccag

SEQ ID NO: 2937265 - RNA, 19 nt, Artificial Sequence
  Description of Artificial Sequence: Synthetic oligonucleotide
aggaccgccugcuggucac

SEQ ID NO: 2937266 - RNA, 19 nt, Artificial Sequence
  Description of Artificial Sequence: Synthetic oligonucleotide
uccgaggaagaacccuggc

SEQ ID NO: 2937267 - RNA, 19 nt, Artificial Sequence
  Description of Artificial Sequence: Synthetic oligonucleotide
guuccgaggaagaacccug

SEQ ID NO: 2937268 - RNA, 19 nt, Artificial Sequence
  Description of Artificial Sequence: Synthetic oligonucleotide
cuugagccuugucaucaag

SEQ ID NO: 2937269 - RNA, 19 nt, Artificial Sequence
  Description of Artificial Sequence: Synthetic oligonucleotide
uagcggaaggauccagacu

SEQ ID NO: 2937270 - RNA, 19 nt, Artificial Sequence
  Description of Artificial Sequence: Synthetic oligonucleotide
ugccuugcaaguagcggaa

SEQ ID NO: 2937271 - RNA, 19 nt, Artificial Sequence
  Description of Artificial Sequence: Synthetic oligonucleotide
ggcagggugauaucauugc

SEQ ID NO: 2937272 - RNA, 19 nt, Artificial Sequence
  Description of Artificial Sequence: Synthetic oligonucleotide
uccuaugugcuugagccuu

SEQ ID NO: 2937273 - RNA, 19 nt, Artificial Sequence
  Description of Artificial Sequence: Synthetic oligonucleotide
caugcagagugcucaucug

SEQ ID NO: 2937274 - RNA, 19 nt, Artificial Sequence
  Description of Artificial Sequence: Synthetic oligonucleotide
gcugaccauauggagaucc

SEQ ID NO: 2937275 - RNA, 19 nt, Artificial Sequence
  Description of Artificial Sequence: Synthetic oligonucleotide
ccgguuccgaggaagaacc

SEQ ID NO: 2937276 - RNA, 19 nt, Artificial Sequence
  Description of Artificial Sequence: Synthetic oligonucleotide
ugguucccuuaacaucuug

SEQ ID NO: 2937277 - RNA, 19 nt, Artificial Sequence
  Description of Artificial Sequence: Synthetic oligonucleotide
gaagaacccuggcuguguc

SEQ ID NO: 2937278 - RNA, 19 nt, Artificial Sequence
  Description of Artificial Sequence: Synthetic oligonucleotide
ccauauggagaucccaggc

SEQ ID NO: 2937279 - RNA, 19 nt, Artificial Sequence
  Description of Artificial Sequence: Synthetic oligonucleotide
caucuuguagaccucugaa

SEQ ID NO: 2937280 - RNA, 19 nt, Artificial Sequence
  Description of Artificial Sequence: Synthetic oligonucleotide
acuggcucugcugguuccc

SEQ ID NO: 2937281 - RNA, 19 nt, Artificial Sequence
  Description of Artificial Sequence: Synthetic oligonucleotide
acccaggccgcuccccacc

SEQ ID NO: 2937282 - RNA, 19 nt, Artificial Sequence
  Description of Artificial Sequence: Synthetic oligonucleotide
uucugaggccacuggcucu

SEQ ID NO: 2937283 - RNA, 19 nt, Artificial Sequence
  Description of Artificial Sequence: Synthetic oligonucleotide
gagugcucaucugggcugg

SEQ ID NO: 2937284 - RNA, 19 nt, Artificial Sequence
  Description of Artificial Sequence: Synthetic oligonucleotide
uccagcccaaucccagaga

SEQ ID NO: 2937285 - RNA, 19 nt, Artificial Sequence
  Description of Artificial Sequence: Synthetic oligonucleotide
cugugucagcacugggagg

SEQ ID NO: 2937286 - RNA, 19 nt, Artificial Sequence
  Description of Artificial Sequence: Synthetic oligonucleotide
uggcugugucagcacuggg

SEQ ID NO: 2937287 - RNA, 19 nt, Artificial Sequence
  Description of Artificial Sequence: Synthetic oligonucleotide
guucccuuaacaucuugua

SEQ ID NO: 2937288 - RNA, 19 nt, Artificial Sequence
  Description of Artificial Sequence: Synthetic oligonucleotide
cuugcaaguagcggaagga

SEQ ID NO: 2937289 - RNA, 19 nt, Artificial Sequence
  Description of Artificial Sequence: Synthetic oligonucleotide
uugcaaguagcggaaggau

SEQ ID NO: 2937290 - RNA, 19 nt, Artificial Sequence
  Description of Artificial Sequence: Synthetic oligonucleotide
accaccagacccaggccgc

SEQ ID NO: 2937291 - RNA, 19 nt, Artificial Sequence
  Description of Artificial Sequence: Synthetic oligonucleotide
guccaguucuugcucucag

SEQ ID NO: 2937292 - RNA, 19 nt, Artificial Sequence
  Description of Artificial Sequence: Synthetic oligonucleotide
ggucacuggacugccaucc

SEQ ID NO: 2937293 - RNA, 19 nt, Artificial Sequence
  Description of Artificial Sequence: Synthetic oligonucleotide
ugcuuggguucugaggcca

SEQ ID NO: 2937294 - RNA, 19 nt, Artificial Sequence
  Description of Artificial Sequence: Synthetic oligonucleotide
ggauccuaugugcuugagc

SEQ ID NO: 2937295 - RNA, 19 nt, Artificial Sequence
  Description of Artificial Sequence: Synthetic oligonucleotide
agacugcuuggguucugag

SEQ ID NO: 2937296 - RNA, 19 nt, Artificial Sequence
  Description of Artificial Sequence: Synthetic oligonucleotide
auccuaugugcuugagccu

SEQ ID NO: 2937297 - RNA, 19 nt, Artificial Sequence
  Description of Artificial Sequence: Synthetic oligonucleotide
uuggguucugaggccacug

SEQ ID NO: 2937298 - RNA, 19 nt, Artificial Sequence
  Description of Artificial Sequence: Synthetic oligonucleotide
aggauccagacugcuuggg

SEQ ID NO: 2937299 - RNA, 19 nt, Artificial Sequence
  Description of Artificial Sequence: Synthetic oligonucleotide
gacucagggucaaugugga

SEQ ID NO: 2937300 - RNA, 19 nt, Artificial Sequence
  Description of Artificial Sequence: Synthetic oligonucleotide
cccuuaacaucuuguagac

SEQ ID NO: 2937301 - RNA, 19 nt, Artificial Sequence
  Description of Artificial Sequence: Synthetic oligonucleotide
cuggcugugucagcacugg

SEQ ID NO: 2937302 - RNA, 19 nt, Artificial Sequence
  Description of Artificial Sequence: Synthetic oligonucleotide
agucccgguuccgaggaag

SEQ ID NO: 2937303 - RNA, 19 nt, Artificial Sequence
  Description of Artificial Sequence: Synthetic oligonucleotide
gaacccagguccacccugc

SEQ ID NO: 2937304 - RNA, 19 nt, Artificial Sequence
  Description of Artificial Sequence: Synthetic oligonucleotide
ccuugcaaguagcggaagg

SEQ ID NO: 2937305 - RNA, 19 nt, Artificial Sequence
  Description of Artificial Sequence: Synthetic oligonucleotide
cugggacucagggucaaug

SEQ ID NO: 2937306 - RNA, 19 nt, Artificial Sequence
  Description of Artificial Sequence: Synthetic oligonucleotide
aguagcggaaggauccaga

SEQ ID NO: 2937307 - RNA, 19 nt, Artificial Sequence
  Description of Artificial Sequence: Synthetic oligonucleotide
agacacaugcagagugcuc

SEQ ID NO: 2937308 - RNA, 19 nt, Artificial Sequence
  Description of Artificial Sequence: Synthetic oligonucleotide
caucugggcuggcagggug

SEQ ID NO: 2937309 - RNA, 19 nt, Artificial Sequence
  Description of Artificial Sequence: Synthetic oligonucleotide
gauccagacugcuuggguu

SEQ ID NO: 2937310 - RNA, 19 nt, Artificial Sequence
  Description of Artificial Sequence: Synthetic oligonucleotide
gccugaucuguugucaucc

SEQ ID NO: 2937311 - RNA, 19 nt, Artificial Sequence
  Description of Artificial Sequence: Synthetic oligonucleotide
cucugaacccagguccacc

SEQ ID NO: 2937312 - RNA, 19 nt, Artificial Sequence
  Description of Artificial Sequence: Synthetic oligonucleotide
acccugcagucccgguucc

SEQ ID NO: 2937313 - RNA, 19 nt, Artificial Sequence
  Description of Artificial Sequence: Synthetic oligonucleotide
gggacucagggucaaugug

SEQ ID NO: 2937314 - RNA, 19 nt, Artificial Sequence
  Description of Artificial Sequence: Synthetic oligonucleotide
agaucccaggccugaucug

SEQ ID NO: 2937315 - RNA, 19 nt, Artificial Sequence
  Description of Artificial Sequence: Synthetic oligonucleotide
uaugugcuugagccuuguc

SEQ ID NO: 2937316 - RNA, 19 nt, Artificial Sequence
  Description of Artificial Sequence: Synthetic oligonucleotide
cugcuuggguucugaggcc

SEQ ID NO: 2937317 - RNA, 19 nt, Artificial Sequence
  Description of Artificial Sequence: Synthetic oligonucleotide
agggacuggaaggcgaggu

SEQ ID NO: 2937318 - RNA, 19 nt, Artificial Sequence
  Description of Artificial Sequence: Synthetic oligonucleotide
gucaucaagggcacugguc

SEQ ID NO: 2937319 - RNA, 19 nt, Artificial Sequence
  Description of Artificial Sequence: Synthetic oligonucleotide
agccucuagcaugccuugc

SEQ ID NO: 2937320 - RNA, 19 nt, Artificial Sequence
  Description of Artificial Sequence: Synthetic oligonucleotide
ucccaggccugaucuguug

SEQ ID NO: 2937321 - RNA, 19 nt, Artificial Sequence
  Description of Artificial Sequence: Synthetic oligonucleotide
guagaccucugaacccagg

SEQ ID NO: 2937322 - RNA, 19 nt, Artificial Sequence
  Description of Artificial Sequence: Synthetic oligonucleotide
auguggauccuaugugcuu

SEQ ID NO: 2937323 - RNA, 19 nt, Artificial Sequence
  Description of Artificial Sequence: Synthetic oligonucleotide
cacuggcucugcugguucc

SEQ ID NO: 2937324 - RNA, 19 nt, Artificial Sequence
  Description of Artificial Sequence: Synthetic oligonucleotide
ugccauccugggacucagg

SEQ ID NO: 2937325 - RNA, 19 nt, Artificial Sequence
  Description of Artificial Sequence: Synthetic oligonucleotide
gaggaagaacccuggcugu

SEQ ID NO: 2937326 - RNA, 19 nt, Artificial Sequence
  Description of Artificial Sequence: Synthetic oligonucleotide
cuccccaccuucgcuagcc

SEQ ID NO: 2937327 - RNA, 19 nt, Artificial Sequence
  Description of Artificial Sequence: Synthetic oligonucleotide
cugcuggucacuggacugc

SEQ ID NO: 2937328 - RNA, 19 nt, Artificial Sequence
  Description of Artificial Sequence: Synthetic oligonucleotide
cacccugcagucccgguuc

SEQ ID NO: 2937329 - RNA, 19 nt, Artificial Sequence
  Description of Artificial Sequence: Synthetic oligonucleotide
aggaagaacccuggcugug

SEQ ID NO: 2937330 - RNA, 19 nt, Artificial Sequence
  Description of Artificial Sequence: Synthetic oligonucleotide
ugcuggucacuggacugcc

SEQ ID NO: 2937331 - RNA, 19 nt, Artificial Sequence
  Description of Artificial Sequence: Synthetic oligonucleotide
acccagguccacccugcag

SEQ ID NO: 2937332 - RNA, 19 nt, Artificial Sequence
  Description of Artificial Sequence: Synthetic oligonucleotide
ugccauugugagggacugg

SEQ ID NO: 2937333 - RNA, 19 nt, Artificial Sequence
  Description of Artificial Sequence: Synthetic oligonucleotide
ggguucugaggccacuggc

SEQ ID NO: 2937334 - RNA, 19 nt, Artificial Sequence
  Description of Artificial Sequence: Synthetic oligonucleotide
cugccauugugagggacug

SEQ ID NO: 2937335 - RNA, 19 nt, Artificial Sequence
  Description of Artificial Sequence: Synthetic oligonucleotide
gaaggcgagguggcugacc

SEQ ID NO: 2937336 - RNA, 19 nt, Artificial Sequence
  Description of Artificial Sequence: Synthetic oligonucleotide
aacccagguccacccugca

SEQ ID NO: 2937337 - RNA, 19 nt, Artificial Sequence
  Description of Artificial Sequence: Synthetic oligonucleotide
ggagacacaugcagagugc

SEQ ID NO: 2937338 - RNA, 19 nt, Artificial Sequence
  Description of Artificial Sequence: Synthetic oligonucleotide
acccuggcugugucagcac

SEQ ID NO: 2937339 - RNA, 19 nt, Artificial Sequence
  Description of Artificial Sequence: Synthetic oligonucleotide
ccagcccaaucccagagac

SEQ ID NO: 2937340 - RNA, 19 nt, Artificial Sequence
  Description of Artificial Sequence: Synthetic oligonucleotide
gagggacuggaaggcgagg

SEQ ID NO: 2937341 - RNA, 19 nt, Artificial Sequence
  Description of Artificial Sequence: Synthetic oligonucleotide
cugcagucccgguuccgag

SEQ ID NO: 2937342 - RNA, 19 nt, Artificial Sequence
  Description of Artificial Sequence: Synthetic oligonucleotide
uggauccuaugugcuugag

SEQ ID NO: 2937343 - RNA, 19 nt, Artificial Sequence
  Description of Artificial Sequence: Synthetic oligonucleotide
acacaugcagagugcucau

SEQ ID NO: 2937344 - RNA, 19 nt, Artificial Sequence
  Description of Artificial Sequence: Synthetic oligonucleotide
gcugguucccuuaacaucu

SEQ ID NO: 2937345 - RNA, 19 nt, Artificial Sequence
  Description of Artificial Sequence: Synthetic oligonucleotide
ggucaauguggauccuaug

SEQ ID NO: 2937346 - RNA, 19 nt, Artificial Sequence
  Description of Artificial Sequence: Synthetic oligonucleotide
agguggagacacaugcaga

SEQ ID NO: 2937347 - RNA, 19 nt, Artificial Sequence
  Description of Artificial Sequence: Synthetic oligonucleotide
uccagacugcuuggguucu

SEQ ID NO: 2937348 - RNA, 19 nt, Artificial Sequence
  Description of Artificial Sequence: Synthetic oligonucleotide
agacccaggccgcucccca

SEQ ID NO: 2937349 - RNA, 19 nt, Artificial Sequence
  Description of Artificial Sequence: Synthetic oligonucleotide
ucaagggcacugguccagu

SEQ ID NO: 2937350 - RNA, 19 nt, Artificial Sequence
  Description of Artificial Sequence: Synthetic oligonucleotide
auggagaucccaggccuga

SEQ ID NO: 2937351 - RNA, 19 nt, Artificial Sequence
  Description of Artificial Sequence: Synthetic oligonucleotide
uggucacuggacugccauc

SEQ ID NO: 2937352 - RNA, 19 nt, Artificial Sequence
  Description of Artificial Sequence: Synthetic oligonucleotide
agguggcugaccauaugga

SEQ ID NO: 2937353 - RNA, 19 nt, Artificial Sequence
  Description of Artificial Sequence: Synthetic oligonucleotide
aggccugaucuguugucau

SEQ ID NO: 2937354 - RNA, 19 nt, Artificial Sequence
  Description of Artificial Sequence: Synthetic oligonucleotide
gacugaggaccgccugcug

SEQ ID NO: 2937355 - RNA, 19 nt, Artificial Sequence
  Description of Artificial Sequence: Synthetic oligonucleotide
gagacacaugcagagugcu

SEQ ID NO: 2937356 - RNA, 19 nt, Artificial Sequence
  Description of Artificial Sequence: Synthetic oligonucleotide
caucaagggcacuggucca

SEQ ID NO: 2937357 - RNA, 19 nt, Artificial Sequence
  Description of Artificial Sequence: Synthetic oligonucleotide
ugguccaguucuugcucuc

SEQ ID NO: 2937358 - RNA, 19 nt, Artificial Sequence
  Description of Artificial Sequence: Synthetic oligonucleotide
cuagccucuagcaugccuu

SEQ ID NO: 2937359 - RNA, 19 nt, Artificial Sequence
  Description of Artificial Sequence: Synthetic oligonucleotide
gcacugguccaguucuugc

SEQ ID NO: 2937360 - RNA, 19 nt, Artificial Sequence
  Description of Artificial Sequence: Synthetic oligonucleotide
ccugcuggucacuggacug

SEQ ID NO: 2937361 - RNA, 19 nt, Artificial Sequence
  Description of Artificial Sequence: Synthetic oligonucleotide
gaucccaggccugaucugu

SEQ ID NO: 2937362 - RNA, 19 nt, Artificial Sequence
  Description of Artificial Sequence: Synthetic oligonucleotide
gaggaccgccugcugguca

SEQ ID NO: 2937363 - RNA, 19 nt, Artificial Sequence
  Description of Artificial Sequence: Synthetic oligonucleotide
ugcugccauugugagggac

SEQ ID NO: 2937364 - RNA, 19 nt, Artificial Sequence
  Description of Artificial Sequence: Synthetic oligonucleotide
gcaugccuugcaaguagcg

SEQ ID NO: 2937365 - RNA, 19 nt, Artificial Sequence
  Description of Artificial Sequence: Synthetic oligonucleotide
agugcucaucugggcuggc

SEQ ID NO: 2937366 - RNA, 19 nt, Artificial Sequence
  Description of Artificial Sequence: Synthetic oligonucleotide
guggauccuaugugcuuga

SEQ ID NO: 2937367 - RNA, 19 nt, Artificial Sequence
  Description of Artificial Sequence: Synthetic oligonucleotide
cagagugcucaucugggcu

SEQ ID NO: 2937368 - RNA, 19 nt, Artificial Sequence
  Description of Artificial Sequence: Synthetic oligonucleotide
gccauugugagggacugga

SEQ ID NO: 2937369 - RNA, 19 nt, Artificial Sequence
  Description of Artificial Sequence: Synthetic oligonucleotide
cccaaucccagagacugag

SEQ ID NO: 2937370 - RNA, 19 nt, Artificial Sequence
  Description of Artificial Sequence: Synthetic oligonucleotide
gggacuggaaggcgaggug

SEQ ID NO: 2937371 - RNA, 19 nt, Artificial Sequence
  Description of Artificial Sequence: Synthetic oligonucleotide
cucugcugguucccuuaac

SEQ ID NO: 2937372 - RNA, 19 nt, Artificial Sequence
  Description of Artificial Sequence: Synthetic oligonucleotide
ccaaucccagagacugagg

SEQ ID NO: 2937373 - RNA, 19 nt, Artificial Sequence
  Description of Artificial Sequence: Synthetic oligonucleotide
gugcuugagccuugucauc

SEQ ID NO: 2937374 - RNA, 19 nt, Artificial Sequence
  Description of Artificial Sequence: Synthetic oligonucleotide
caggccgcuccccaccuuc

SEQ ID NO: 2937375 - RNA, 19 nt, Artificial Sequence
  Description of Artificial Sequence: Synthetic oligonucleotide
acuggaaggcgagguggcu

SEQ ID NO: 2937376 - RNA, 19 nt, Artificial Sequence
  Description of Artificial Sequence: Synthetic oligonucleotide
gucauccagcccaauccca

SEQ ID NO: 2937377 - RNA, 19 nt, Artificial Sequence
  Description of Artificial Sequence: Synthetic oligonucleotide
ucaucugggcuggcagggu

SEQ ID NO: 2937378 - RNA, 19 nt, Artificial Sequence
  Description of Artificial Sequence: Synthetic oligonucleotide
cugccauccugggacucag

SEQ ID NO: 2937379 - RNA, 19 nt, Artificial Sequence
  Description of Artificial Sequence: Synthetic oligonucleotide
ccuuaacaucuuguagacc

SEQ ID NO: 2937380 - RNA, 19 nt, Artificial Sequence
  Description of Artificial Sequence: Synthetic oligonucleotide
uccccaccuucgcuagccu

SEQ ID NO: 2937381 - RNA, 19 nt, Artificial Sequence
  Description of Artificial Sequence: Synthetic oligonucleotide
cuagcaugccuugcaagua

SEQ ID NO: 2937382 - RNA, 19 nt, Artificial Sequence
  Description of Artificial Sequence: Synthetic oligonucleotide
acucagggucaauguggau

SEQ ID NO: 2937383 - RNA, 19 nt, Artificial Sequence
  Description of Artificial Sequence: Synthetic oligonucleotide
caggccugaucuguuguca

SEQ ID NO: 2937384 - RNA, 19 nt, Artificial Sequence
  Description of Artificial Sequence: Synthetic oligonucleotide
ggagaucccaggccugauc

SEQ ID NO: 2937385 - RNA, 19 nt, Artificial Sequence
  Description of Artificial Sequence: Synthetic oligonucleotide
cacugguccaguucuugcu

SEQ ID NO: 2937386 - RNA, 19 nt, Artificial Sequence
  Description of Artificial Sequence: Synthetic oligonucleotide
gccucuagcaugccuugca

SEQ ID NO: 2937387 - RNA, 19 nt, Artificial Sequence
  Description of Artificial Sequence: Synthetic oligonucleotide
uccacccugcagucccggu

SEQ ID NO: 2937388 - RNA, 19 nt, Artificial Sequence
  Description of Artificial Sequence: Synthetic oligonucleotide
ccuucgcuagccucuagca

SEQ ID NO: 2937389 - RNA, 19 nt, Artificial Sequence
  Description of Artificial Sequence: Synthetic oligonucleotide
agggucaauguggauccua

SEQ ID NO: 2937390 - RNA, 19 nt, Artificial Sequence
  Description of Artificial Sequence: Synthetic oligonucleotide
ggcacugguccaguucuug

SEQ ID NO: 2937391 - RNA, 19 nt, Artificial Sequence
  Description of Artificial Sequence: Synthetic oligonucleotide
ccuggcugugucagcacug

SEQ ID NO: 2937392 - RNA, 19 nt, Artificial Sequence
  Description of Artificial Sequence: Synthetic oligonucleotide
caaguagcggaaggaucca

SEQ ID NO: 2937393 - RNA, 19 nt, Artificial Sequence
  Description of Artificial Sequence: Synthetic oligonucleotide
gacccaggccgcuccccac

SEQ ID NO: 2937394 - RNA, 19 nt, Artificial Sequence
  Description of Artificial Sequence: Synthetic oligonucleotide
cuggacugccauccuggga

SEQ ID NO: 2937395 - RNA, 19 nt, Artificial Sequence
  Description of Artificial Sequence: Synthetic oligonucleotide
gcagucccgguuccgagga

SEQ ID NO: 2937396 - RNA, 19 nt, Artificial Sequence
  Description of Artificial Sequence: Synthetic oligonucleotide
cugcugguucccuuaacau

SEQ ID NO: 2937397 - RNA, 19 nt, Artificial Sequence
  Description of Artificial Sequence: Synthetic oligonucleotide
cugguccaguucuugcucu

SEQ ID NO: 2937398 - RNA, 19 nt, Artificial Sequence
  Description of Artificial Sequence: Synthetic oligonucleotide
gaccgccugcuggucacug

SEQ ID NO: 2937399 - RNA, 19 nt, Artificial Sequence
  Description of Artificial Sequence: Synthetic oligonucleotide
ucccgguuccgaggaagaa

SEQ ID NO: 2937400 - RNA, 19 nt, Artificial Sequence
  Description of Artificial Sequence: Synthetic oligonucleotide
cugaggaccgccugcuggu

SEQ ID NO: 2937401 - RNA, 19 nt, Artificial Sequence
  Description of Artificial Sequence: Synthetic oligonucleotide
ccuaugugcuugagccuug

SEQ ID NO: 2937402 - RNA, 19 nt, Artificial Sequence
  Description of Artificial Sequence: Synthetic oligonucleotide
gguucccuuaacaucuugu

SEQ ID NO: 2937403 - RNA, 19 nt, Artificial Sequence
  Description of Artificial Sequence: Synthetic oligonucleotide
cagguccacccugcagucc

SEQ ID NO: 2937404 - RNA, 19 nt, Artificial Sequence
  Description of Artificial Sequence: Synthetic oligonucleotide
guccacccugcagucccgg

SEQ ID NO: 2937405 - RNA, 19 nt, Artificial Sequence
  Description of Artificial Sequence: Synthetic oligonucleotide
ggcuggcagggugauauca

SEQ ID NO: 2937406 - RNA, 19 nt, Artificial Sequence
  Description of Artificial Sequence: Synthetic oligonucleotide
ugaggaccgccugcugguc

SEQ ID NO: 2937407 - RNA, 19 nt, Artificial Sequence
  Description of Artificial Sequence: Synthetic oligonucleotide
ggccugaucuguugucauc

SEQ ID NO: 2937408 - RNA, 19 nt, Artificial Sequence
  Description of Artificial Sequence: Synthetic oligonucleotide
cuguugucauccagcccaa

SEQ ID NO: 2937409 - RNA, 19 nt, Artificial Sequence
  Description of Artificial Sequence: Synthetic oligonucleotide
uguugucauccagcccaau

SEQ ID NO: 2937410 - RNA, 19 nt, Artificial Sequence
  Description of Artificial Sequence: Synthetic oligonucleotide
uggagaucccaggccugau

SEQ ID NO: 2937411 - RNA, 19 nt, Artificial Sequence
  Description of Artificial Sequence: Synthetic oligonucleotide
cuggucacuggacugccau

SEQ ID NO: 2937412 - RNA, 19 nt, Artificial Sequence
  Description of Artificial Sequence: Synthetic oligonucleotide
cagacugcuuggguucuga

SEQ ID NO: 2937413 - RNA, 19 nt, Artificial Sequence
  Description of Artificial Sequence: Synthetic oligonucleotide
uccugggacucagggucaa

SEQ ID NO: 2937414 - RNA, 19 nt, Artificial Sequence
  Description of Artificial Sequence: Synthetic oligonucleotide
gguucugaggccacuggcu

SEQ ID NO: 2937415 - RNA, 19 nt, Artificial Sequence
  Description of Artificial Sequence: Synthetic oligonucleotide
cagacccaggccgcucccc

SEQ ID NO: 2937416 - RNA, 19 nt, Artificial Sequence
  Description of Artificial Sequence: Synthetic oligonucleotide
cuucgcuagccucuagcau

SEQ ID NO: 2937417 - RNA, 19 nt, Artificial Sequence
  Description of Artificial Sequence: Synthetic oligonucleotide
gcagggugauaucauugcu

SEQ ID NO: 2937418 - RNA, 19 nt, Artificial Sequence
  Description of Artificial Sequence: Synthetic oligonucleotide
aggccgcuccccaccuucg

SEQ ID NO: 2937419 - RNA, 19 nt, Artificial Sequence
  Description of Artificial Sequence: Synthetic oligonucleotide
ggauccagacugcuugggu

SEQ ID NO: 2937420 - RNA, 19 nt, Artificial Sequence
  Description of Artificial Sequence: Synthetic oligonucleotide
caccuucgcuagccucuag

SEQ ID NO: 2937421 - RNA, 19 nt, Artificial Sequence
  Description of Artificial Sequence: Synthetic oligonucleotide
cagagacugaggaccgccu

SEQ ID NO: 2937422 - RNA, 19 nt, Artificial Sequence
  Description of Artificial Sequence: Synthetic oligonucleotide
cccgguuccgaggaagaac

SEQ ID NO: 2937423 - RNA, 19 nt, Artificial Sequence
  Description of Artificial Sequence: Synthetic oligonucleotide
ccaggccugaucuguuguc

SEQ ID NO: 2937424 - RNA, 19 nt, Artificial Sequence
  Description of Artificial Sequence: Synthetic oligonucleotide
gucccgguuccgaggaaga

SEQ ID NO: 2937425 - RNA, 19 nt, Artificial Sequence
  Description of Artificial Sequence: Synthetic oligonucleotide
ccagguccacccugcaguc

SEQ ID NO: 2937426 - RNA, 19 nt, Artificial Sequence
  Description of Artificial Sequence: Synthetic oligonucleotide
gguuccgaggaagaacccu

SEQ ID NO: 2937427 - RNA, 19 nt, Artificial Sequence
  Description of Artificial Sequence: Synthetic oligonucleotide
gccuugucaucaagggcac

SEQ ID NO: 2937428 - RNA, 19 nt, Artificial Sequence
  Description of Artificial Sequence: Synthetic oligonucleotide
guggagacacaugcagagu

SEQ ID NO: 2937429 - RNA, 19 nt, Artificial Sequence
  Description of Artificial Sequence: Synthetic oligonucleotide
gguccaguucuugcucuca

SEQ ID NO: 2937430 - RNA, 19 nt, Artificial Sequence
  Description of Artificial Sequence: Synthetic oligonucleotide
gucacuggacugccauccu

SEQ ID NO: 2937431 - RNA, 19 nt, Artificial Sequence
  Description of Artificial Sequence: Synthetic oligonucleotide
gugcucaucugggcuggca

SEQ ID NO: 2937432 - RNA, 19 nt, Artificial Sequence
  Description of Artificial Sequence: Synthetic oligonucleotide
ggcgagguggcugaccaua

SEQ ID NO: 2937433 - RNA, 19 nt, Artificial Sequence
  Description of Artificial Sequence: Synthetic oligonucleotide
gcuagccucuagcaugccu

SEQ ID NO: 2937434 - RNA, 19 nt, Artificial Sequence
  Description of Artificial Sequence: Synthetic oligonucleotide
gcggaaggauccagacugc

SEQ ID NO: 2937435 - RNA, 19 nt, Artificial Sequence
  Description of Artificial Sequence: Synthetic oligonucleotide
cuggcagggugauaucauu

SEQ ID NO: 2937436 - RNA, 19 nt, Artificial Sequence
  Description of Artificial Sequence: Synthetic oligonucleotide
gccuugcaaguagcggaag

SEQ ID NO: 2937437 - RNA, 19 nt, Artificial Sequence
  Description of Artificial Sequence: Synthetic oligonucleotide
aggcgagguggcugaccau

SEQ ID NO: 2937438 - RNA, 19 nt, Artificial Sequence
  Description of Artificial Sequence: Synthetic oligonucleotide
ccugaucuguugucaucca

SEQ ID NO: 2937439 - RNA, 19 nt, Artificial Sequence
  Description of Artificial Sequence: Synthetic oligonucleotide
gguccacccugcagucccg

SEQ ID NO: 2937440 - RNA, 19 nt, Artificial Sequence
  Description of Artificial Sequence: Synthetic oligonucleotide
ccacuggcucugcugguuc

SEQ ID NO: 2937441 - RNA, 19 nt, Artificial Sequence
  Description of Artificial Sequence: Synthetic oligonucleotide
ggaagaacccuggcugugu

SEQ ID NO: 2937442 - RNA, 19 nt, Artificial Sequence
  Description of Artificial Sequence: Synthetic oligonucleotide
gcugccauugugagggacu

SEQ ID NO: 2937443 - RNA, 19 nt, Artificial Sequence
  Description of Artificial Sequence: Synthetic oligonucleotide
cugggagguggagacacau

SEQ ID NO: 2937444 - RNA, 19 nt, Artificial Sequence
  Description of Artificial Sequence: Synthetic oligonucleotide
gggucaauguggauccuau

SEQ ID NO: 2937445 - RNA, 19 nt, Artificial Sequence
  Description of Artificial Sequence: Synthetic oligonucleotide
ccucuagcaugccuugcaa

SEQ ID NO: 2937446 - RNA, 19 nt, Artificial Sequence
  Description of Artificial Sequence: Synthetic oligonucleotide
caccagacccaggccgcuc

SEQ ID NO: 2937447 - RNA, 19 nt, Artificial Sequence
  Description of Artificial Sequence: Synthetic oligonucleotide
gccugcuggucacuggacu

SEQ ID NO: 2937448 - RNA, 19 nt, Artificial Sequence
  Description of Artificial Sequence: Synthetic oligonucleotide
gggugauaucauugcugcu

SEQ ID NO: 2937449 - RNA, 19 nt, Artificial Sequence
  Description of Artificial Sequence: Synthetic oligonucleotide
cuaugugcuugagccuugu

SEQ ID NO: 2937450 - RNA, 19 nt, Artificial Sequence
  Description of Artificial Sequence: Synthetic oligonucleotide
aucccaggccugaucuguu

SEQ ID NO: 2937451 - RNA, 19 nt, Artificial Sequence
  Description of Artificial Sequence: Synthetic oligonucleotide
ccgaggaagaacccuggcu

SEQ ID NO: 2937452 - RNA, 19 nt, Artificial Sequence
  Description of Artificial Sequence: Synthetic oligonucleotide
cagcccaaucccagagacu

SEQ ID NO: 2937453 - RNA, 19 nt, Artificial Sequence
  Description of Artificial Sequence: Synthetic oligonucleotide
ggccgcuccccaccuucgc

SEQ ID NO: 2937454 - RNA, 19 nt, Artificial Sequence
  Description of Artificial Sequence: Synthetic oligonucleotide
ccccaccuucgcuagccuc

SEQ ID NO: 2937455 - RNA, 19 nt, Artificial Sequence
  Description of Artificial Sequence: Synthetic oligonucleotide
gcucugcugguucccuuaa

SEQ ID NO: 2937456 - RNA, 19 nt, Artificial Sequence
  Description of Artificial Sequence: Synthetic oligonucleotide
ccagacccaggccgcuccc

SEQ ID NO: 2937457 - RNA, 19 nt, Artificial Sequence
  Description of Artificial Sequence: Synthetic oligonucleotide
cccaccuucgcuagccucu

SEQ ID NO: 2937458 - RNA, 19 nt, Artificial Sequence
  Description of Artificial Sequence: Synthetic oligonucleotide
cuuggguucugaggccacu

SEQ ID NO: 2937459 - RNA, 19 nt, Artificial Sequence
  Description of Artificial Sequence: Synthetic oligonucleotide
cgguuccgaggaagaaccc

SEQ ID NO: 2937460 - RNA, 19 nt, Artificial Sequence
  Description of Artificial Sequence: Synthetic oligonucleotide
gcuuggguucugaggccac

SEQ ID NO: 2937461 - RNA, 19 nt, Artificial Sequence
  Description of Artificial Sequence: Synthetic oligonucleotide
ccauugugagggacuggaa

SEQ ID NO: 2937462 - RNA, 19 nt, Artificial Sequence
  Description of Artificial Sequence: Synthetic oligonucleotide
cgcuccccaccuucgcuag

SEQ ID NO: 2937463 - RNA, 19 nt, Artificial Sequence
  Description of Artificial Sequence: Synthetic oligonucleotide
ccucugaacccagguccac

SEQ ID NO: 2937464 - RNA, 19 nt, Artificial Sequence
  Description of Artificial Sequence: Synthetic oligonucleotide
ccgccugcuggucacugga

SEQ ID NO: 2937465 - RNA, 19 nt, Artificial Sequence
  Description of Artificial Sequence: Synthetic oligonucleotide
ggaaggauccagacugcuu

SEQ ID NO: 2937466 - RNA, 19 nt, Artificial Sequence
  Description of Artificial Sequence: Synthetic oligonucleotide
cgagguggcugaccauaug

SEQ ID NO: 2937467 - RNA, 19 nt, Artificial Sequence
  Description of Artificial Sequence: Synthetic oligonucleotide
ccugcagucccgguuccga

SEQ ID NO: 2937468 - RNA, 19 nt, Artificial Sequence
  Description of Artificial Sequence: Synthetic oligonucleotide
cugcugccauugugaggga

SEQ ID NO: 2937469 - RNA, 19 nt, Artificial Sequence
  Description of Artificial Sequence: Synthetic oligonucleotide
ggacugccauccugggacu

SEQ ID NO: 2937470 - RNA, 19 nt, Artificial Sequence
  Description of Artificial Sequence: Synthetic oligonucleotide
cccagagacugaggaccgc

SEQ ID NO: 2937471 - RNA, 19 nt, Artificial Sequence
  Description of Artificial Sequence: Synthetic oligonucleotide
ggaaggcgagguggcugac

SEQ ID NO: 2937472 - RNA, 19 nt, Artificial Sequence
  Description of Artificial Sequence: Synthetic oligonucleotide
gggcuggcagggugauauc

SEQ ID NO: 2937473 - RNA, 19 nt, Artificial Sequence
  Description of Artificial Sequence: Synthetic oligonucleotide
caagggcacugguccaguu

SEQ ID NO: 2937474 - RNA, 19 nt, Artificial Sequence
  Description of Artificial Sequence: Synthetic oligonucleotide
gcuggcagggugauaucau

SEQ ID NO: 2937475 - RNA, 19 nt, Artificial Sequence
  Description of Artificial Sequence: Synthetic oligonucleotide
gcuggucacuggacugcca

SEQ ID NO: 2937476 - RNA, 19 nt, Artificial Sequence
  Description of Artificial Sequence: Synthetic oligonucleotide
cccugcagucccgguuccg

SEQ ID NO: 2937477 - RNA, 19 nt, Artificial Sequence
  Description of Artificial Sequence: Synthetic oligonucleotide
ggcugaccauauggagauc

SEQ ID NO: 2937478 - RNA, 19 nt, Artificial Sequence
  Description of Artificial Sequence: Synthetic oligonucleotide
ccagacugcuuggguucug

SEQ ID NO: 2937479 - RNA, 19 nt, Artificial Sequence
  Description of Artificial Sequence: Synthetic oligonucleotide
gcccaaucccagagacuga

SEQ ID NO: 2937480 - RNA, 19 nt, Artificial Sequence
  Description of Artificial Sequence: Synthetic oligonucleotide
cagucccgguuccgaggaa

SEQ ID NO: 2937481 - RNA, 19 nt, Artificial Sequence
  Description of Artificial Sequence: Synthetic oligonucleotide
gccgcuccccaccuucgcu

SEQ ID NO: 2937482 - RNA, 19 nt, Artificial Sequence
  Description of Artificial Sequence: Synthetic oligonucleotide
cccaggccugaucuguugu

SEQ ID NO: 2937483 - RNA, 19 nt, Artificial Sequence
  Description of Artificial Sequence: Synthetic oligonucleotide
ccgcuccccaccuucgcua

SEQ ID NO: 2937484 - RNA, 19 nt, Artificial Sequence
  Description of Artificial Sequence: Synthetic oligonucleotide
cccuggcugugucagcacu

SEQ ID NO: 2937485 - RNA, 19 nt, Artificial Sequence
  Description of Artificial Sequence: Synthetic oligonucleotide
ggccacuggcucugcuggu

SEQ ID NO: 2937486 - RNA, 19 nt, Artificial Sequence
  Description of Artificial Sequence: Synthetic oligonucleotide
cagggucaauguggauccu

SEQ ID NO: 2937487 - RNA, 19 nt, Artificial Sequence
  Description of Artificial Sequence: Synthetic oligonucleotide
gcgagguggcugaccauau

SEQ ID NO: 2937488 - RNA, 19 nt, Artificial Sequence
  Description of Artificial Sequence: Synthetic oligonucleotide
gccacuggcucugcugguu

SEQ ID NO: 2937489 - RNA, 19 nt, Artificial Sequence
  Description of Artificial Sequence: Synthetic oligonucleotide
ccacccugcagucccgguu

SEQ ID NO: 2937490 - RNA, 19 nt, Artificial Sequence
  Description of Artificial Sequence: Synthetic oligonucleotide
cggaaggauccagacugcu

SEQ ID NO: 2937491 - RNA, 19 nt, Artificial Sequence
  Description of Artificial Sequence: Synthetic oligonucleotide
cgcuagccucuagcaugcc

SEQ ID NO: 2937492 - RNA, 19 nt, Artificial Sequence
  Description of Artificial Sequence: Synthetic oligonucleotide
ccaccuucgcuagccucua

SEQ ID NO: 2937493 - RNA, 19 nt, Artificial Sequence
  Description of Artificial Sequence: Synthetic oligonucleotide
ccuugucaucaagggcacu

SEQ ID NO: 2937494 - RNA, 19 nt, Artificial Sequence
  Description of Artificial Sequence: Synthetic oligonucleotide
cccaggccgcuccccaccu

SEQ ID NO: 2937495 - RNA, 19 nt, Artificial Sequence
  Description of Artificial Sequence: Synthetic oligonucleotide
ggaccgccugcuggucacu

SEQ ID NO: 2937496 - RNA, 19 nt, Artificial Sequence
  Description of Artificial Sequence: Synthetic oligonucleotide
gggcacugguccaguucuu

SEQ ID NO: 2937497 - RNA, 19 nt, Artificial Sequence
  Description of Artificial Sequence: Synthetic oligonucleotide
ccaccagacccaggccgcu

SEQ ID NO: 2937498 - RNA, 19 nt, Artificial Sequence
  Description of Artificial Sequence: Synthetic oligonucleotide
ccugggacucagggucaau

SEQ ID NO: 2937499 - RNA, 19 nt, Artificial Sequence
  Description of Artificial Sequence: Synthetic oligonucleotide
ccaggccgcuccccaccuu

SEQ ID NO: 2937500 - RNA, 19 nt, Artificial Sequence
  Description of Artificial Sequence: Synthetic oligonucleotide
aaaccaauagcucaugagg

SEQ ID NO: 2937501 - RNA, 19 nt, Artificial Sequence
  Description of Artificial Sequence: Synthetic oligonucleotide
cauaagagcacccagagag

SEQ ID NO: 2937502 - RNA, 19 nt, Artificial Sequence
  Description of Artificial Sequence: Synthetic oligonucleotide
ucuaacagcaaacacagcu

SEQ ID NO: 2937503 - RNA, 19 nt, Artificial Sequence
  Description of Artificial Sequence: Synthetic oligonucleotide
aauaucagcauggugagag

SEQ ID NO: 2937504 - RNA, 19 nt, Artificial Sequence
  Description of Artificial Sequence: Synthetic oligonucleotide
cuaacaaauaucagcaugg

SEQ ID NO: 2937505 - RNA, 19 nt, Artificial Sequence
  Description of Artificial Sequence: Synthetic oligonucleotide
agugauacgaagcccaagc

SEQ ID NO: 2937506 - RNA, 19 nt, Artificial Sequence
  Description of Artificial Sequence: Synthetic oligonucleotide
caugcuaacaaauaucagc

SEQ ID NO: 2937507 - RNA, 19 nt, Artificial Sequence
  Description of Artificial Sequence: Synthetic oligonucleotide
ucuggaaggagucuaacag

SEQ ID NO: 2937508 - RNA, 19 nt, Artificial Sequence
  Description of Artificial Sequence: Synthetic oligonucleotide
aaggaaaccaccuuugagu

SEQ ID NO: 2937509 - RNA, 19 nt, Artificial Sequence
  Description of Artificial Sequence: Synthetic oligonucleotide
uuugaguuacucuggaagg

SEQ ID NO: 2937510 - RNA, 19 nt, Artificial Sequence
  Description of Artificial Sequence: Synthetic oligonucleotide
aaaaccaauagcucaugag

SEQ ID NO: 2937511 - RNA, 19 nt, Artificial Sequence
  Description of Artificial Sequence: Synthetic oligonucleotide
ugggagaaaaccaauagcu

SEQ ID NO: 2937512 - RNA, 19 nt, Artificial Sequence
  Description of Artificial Sequence: Synthetic oligonucleotide
acaaauaucagcaugguga

SEQ ID NO: 2937513 - RNA, 19 nt, Artificial Sequence
  Description of Artificial Sequence: Synthetic oligonucleotide
aaccaauagcucaugaggc

SEQ ID NO: 2937514 - RNA, 19 nt, Artificial Sequence
  Description of Artificial Sequence: Synthetic oligonucleotide
aguccuuccagcaauaugg

SEQ ID NO: 2937515 - RNA, 19 nt, Artificial Sequence
  Description of Artificial Sequence: Synthetic oligonucleotide
cuuugaguuacucuggaag

SEQ ID NO: 2937516 - RNA, 19 nt, Artificial Sequence
  Description of Artificial Sequence: Synthetic oligonucleotide
ucaagugauacgaagccca

SEQ ID NO: 2937517 - RNA, 19 nt, Artificial Sequence
  Description of Artificial Sequence: Synthetic oligonucleotide
auuuugcugugucaggggc

SEQ ID NO: 2937518 - RNA, 19 nt, Artificial Sequence
  Description of Artificial Sequence: Synthetic oligonucleotide
aacauggucaagugauacg

SEQ ID NO: 2937519 - RNA, 19 nt, Artificial Sequence
  Description of Artificial Sequence: Synthetic oligonucleotide
ugagaggccgcacacagag

SEQ ID NO: 2937520 - RNA, 19 nt, Artificial Sequence
  Description of Artificial Sequence: Synthetic oligonucleotide
caggaagaagccaacaggg

SEQ ID NO: 2937521 - RNA, 19 nt, Artificial Sequence
  Description of Artificial Sequence: Synthetic oligonucleotide
uggcuauuccugaacaugg

SEQ ID NO: 2937522 - RNA, 19 nt, Artificial Sequence
  Description of Artificial Sequence: Synthetic oligonucleotide
aguguuggcauuuugcugu

SEQ ID NO: 2937523 - RNA, 19 nt, Artificial Sequence
  Description of Artificial Sequence: Synthetic oligonucleotide
aacaaauaucagcauggug

SEQ ID NO: 2937524 - RNA, 19 nt, Artificial Sequence
  Description of Artificial Sequence: Synthetic oligonucleotide
ucucuggagacacuugggg

SEQ ID NO: 2937525 - RNA, 19 nt, Artificial Sequence
  Description of Artificial Sequence: Synthetic oligonucleotide
uggaaggagucuaacagca

SEQ ID NO: 2937526 - RNA, 19 nt, Artificial Sequence
  Description of Artificial Sequence: Synthetic oligonucleotide
ugugucaggggccugggag

SEQ ID NO: 2937527 - RNA, 19 nt, Artificial Sequence
  Description of Artificial Sequence: Synthetic oligonucleotide
agucuaacagcaaacacag

SEQ ID NO: 2937528 - RNA, 19 nt, Artificial Sequence
  Description of Artificial Sequence: Synthetic oligonucleotide
uucaugaaggaaaccaccu

SEQ ID NO: 2937529 - RNA, 19 nt, Artificial Sequence
  Description of Artificial Sequence: Synthetic oligonucleotide
gaaggaaaccaccuuugag

SEQ ID NO: 2937530 - RNA, 19 nt, Artificial Sequence
  Description of Artificial Sequence: Synthetic oligonucleotide
ugauacgaagcccaagcca

SEQ ID NO: 2937531 - RNA, 19 nt, Artificial Sequence
  Description of Artificial Sequence: Synthetic oligonucleotide
accacauaggacaucaugg

SEQ ID NO: 2937532 - RNA, 19 nt, Artificial Sequence
  Description of Artificial Sequence: Synthetic oligonucleotide
uggucaagugauacgaagc

SEQ ID NO: 2937533 - RNA, 19 nt, Artificial Sequence
  Description of Artificial Sequence: Synthetic oligonucleotide
aggaaaggaugccuguccc

SEQ ID NO: 2937534 - RNA, 19 nt, Artificial Sequence
  Description of Artificial Sequence: Synthetic oligonucleotide
cuucaugaaggaaaccacc

SEQ ID NO: 2937535 - RNA, 19 nt, Artificial Sequence
  Description of Artificial Sequence: Synthetic oligonucleotide
caaauaucagcauggugag

SEQ ID NO: 2937536 - RNA, 19 nt, Artificial Sequence
  Description of Artificial Sequence: Synthetic oligonucleotide
agucucuggagacacuugg

SEQ ID NO: 2937537 - RNA, 19 nt, Artificial Sequence
  Description of Artificial Sequence: Synthetic oligonucleotide
gacaugcuaacaaauauca

SEQ ID NO: 2937538 - RNA, 19 nt, Artificial Sequence
  Description of Artificial Sequence: Synthetic oligonucleotide
cuucauagccagcugacag

SEQ ID NO: 2937539 - RNA, 19 nt, Artificial Sequence
  Description of Artificial Sequence: Synthetic oligonucleotide
gaaaccaccuuugaguuac

SEQ ID NO: 2937540 - RNA, 19 nt, Artificial Sequence
  Description of Artificial Sequence: Synthetic oligonucleotide
aaggagucuaacagcaaac

SEQ ID NO: 2937541 - RNA, 19 nt, Artificial Sequence
  Description of Artificial Sequence: Synthetic oligonucleotide
ugacaugcuaacaaauauc

SEQ ID NO: 2937542 - RNA, 19 nt, Artificial Sequence
  Description of Artificial Sequence: Synthetic oligonucleotide
uuugcuagcuccugcaagu

SEQ ID NO: 2937543 - RNA, 19 nt, Artificial Sequence
  Description of Artificial Sequence: Synthetic oligonucleotide
ucaguguuggcauuuugcu

SEQ ID NO: 2937544 - RNA, 19 nt, Artificial Sequence
  Description of Artificial Sequence: Synthetic oligonucleotide
gauacgaagcccaagccac

SEQ ID NO: 2937545 - RNA, 19 nt, Artificial Sequence
  Description of Artificial Sequence: Synthetic oligonucleotide
gaggaugcagagcagugag

SEQ ID NO: 2937546 - RNA, 19 nt, Artificial Sequence
  Description of Artificial Sequence: Synthetic oligonucleotide
agugagaggccgcacacag

SEQ ID NO: 2937547 - RNA, 19 nt, Artificial Sequence
  Description of Artificial Sequence: Synthetic oligonucleotide
auagccagcugacagucag

SEQ ID NO: 2937548 - RNA, 19 nt, Artificial Sequence
  Description of Artificial Sequence: Synthetic oligonucleotide
ucauggcuauuccugaaca

SEQ ID NO: 2937549 - RNA, 19 nt, Artificial Sequence
  Description of Artificial Sequence: Synthetic oligonucleotide
uagcucaugaggcaugaca

SEQ ID NO: 2937550 - RNA, 19 nt, Artificial Sequence
  Description of Artificial Sequence: Synthetic oligonucleotide
aaacacagcuuccuuugcu

SEQ ID NO: 2937551 - RNA, 19 nt, Artificial Sequence
  Description of Artificial Sequence: Synthetic oligonucleotide
gacaucauggcuauuccug

SEQ ID NO: 2937552 - RNA, 19 nt, Artificial Sequence
  Description of Artificial Sequence: Synthetic oligonucleotide
aucauggcuauuccugaac

SEQ ID NO: 2937553 - RNA, 19 nt, Artificial Sequence
  Description of Artificial Sequence: Synthetic oligonucleotide
auggucaagugauacgaag

SEQ ID NO: 2937554 - RNA, 19 nt, Artificial Sequence
  Description of Artificial Sequence: Synthetic oligonucleotide
uaacagcaaacacagcuuc

SEQ ID NO: 2937555 - RNA, 19 nt, Artificial Sequence
  Description of Artificial Sequence: Synthetic oligonucleotide
gacuucaugaaggaaacca

SEQ ID NO: 2937556 - RNA, 19 nt, Artificial Sequence
  Description of Artificial Sequence: Synthetic oligonucleotide
augcuaacaaauaucagca

SEQ ID NO: 2937557 - RNA, 19 nt, Artificial Sequence
  Description of Artificial Sequence: Synthetic oligonucleotide
agcucaugaggcaugacac

SEQ ID NO: 2937558 - RNA, 19 nt, Artificial Sequence
  Description of Artificial Sequence: Synthetic oligonucleotide
ugagagccaggaaaggaug

SEQ ID NO: 2937559 - RNA, 19 nt, Artificial Sequence
  Description of Artificial Sequence: Synthetic oligonucleotide
gagucuaacagcaaacaca

SEQ ID NO: 2937560 - RNA, 19 nt, Artificial Sequence
  Description of Artificial Sequence: Synthetic oligonucleotide
agcaggaagaagccaacag

SEQ ID NO: 2937561 - RNA, 19 nt, Artificial Sequence
  Description of Artificial Sequence: Synthetic oligonucleotide
gcuaacaaauaucagcaug

SEQ ID NO: 2937562 - RNA, 19 nt, Artificial Sequence
  Description of Artificial Sequence: Synthetic oligonucleotide
aaaggaugccugucccagg

SEQ ID NO: 2937563 - RNA, 19 nt, Artificial Sequence
  Description of Artificial Sequence: Synthetic oligonucleotide
ggagaaaaccaauagcuca

SEQ ID NO: 2937564 - RNA, 19 nt, Artificial Sequence
  Description of Artificial Sequence: Synthetic oligonucleotide
auaucagcauggugagagc

SEQ ID NO: 2937565 - RNA, 19 nt, Artificial Sequence
  Description of Artificial Sequence: Synthetic oligonucleotide
gaaaggaugccugucccag

SEQ ID NO: 2937566 - RNA, 19 nt, Artificial Sequence
  Description of Artificial Sequence: Synthetic oligonucleotide
uccugcaagucucuggaga

SEQ ID NO: 2937567 - RNA, 19 nt, Artificial Sequence
  Description of Artificial Sequence: Synthetic oligonucleotide
caggggauggcugacaugc

SEQ ID NO: 2937568 - RNA, 19 nt, Artificial Sequence
  Description of Artificial Sequence: Synthetic oligonucleotide
acacagagaugaccagucc

SEQ ID NO: 2937569 - RNA, 19 nt, Artificial Sequence
  Description of Artificial Sequence: Synthetic oligonucleotide
aaggaugccugucccaggu

SEQ ID NO: 2937570 - RNA, 19 nt, Artificial Sequence
  Description of Artificial Sequence: Synthetic oligonucleotide
ugaaggaaaccaccuuuga

SEQ ID NO: 2937571 - RNA, 19 nt, Artificial Sequence
  Description of Artificial Sequence: Synthetic oligonucleotide
cuggaaggagucuaacagc

SEQ ID NO: 2937572 - RNA, 19 nt, Artificial Sequence
  Description of Artificial Sequence: Synthetic oligonucleotide
cuuccagcaauauggcccc

SEQ ID NO: 2937573 - RNA, 19 nt, Artificial Sequence
  Description of Artificial Sequence: Synthetic oligonucleotide
ugaguuacucuggaaggag

SEQ ID NO: 2937574 - RNA, 19 nt, Artificial Sequence
  Description of Artificial Sequence: Synthetic oligonucleotide
ccuuccagcaauauggccc

SEQ ID NO: 2937575 - RNA, 19 nt, Artificial Sequence
  Description of Artificial Sequence: Synthetic oligonucleotide
uaucagcauggugagagcc

SEQ ID NO: 2937576 - RNA, 19 nt, Artificial Sequence
  Description of Artificial Sequence: Synthetic oligonucleotide
acauggucaagugauacga

SEQ ID NO: 2937577 - RNA, 19 nt, Artificial Sequence
  Description of Artificial Sequence: Synthetic oligonucleotide
uggcauuuugcugugucag

SEQ ID NO: 2937578 - RNA, 19 nt, Artificial Sequence
  Description of Artificial Sequence: Synthetic oligonucleotide
gcaggaagaagccaacagg

SEQ ID NO: 2937579 - RNA, 19 nt, Artificial Sequence
  Description of Artificial Sequence: Synthetic oligonucleotide
cauuuugcugugucagggg

SEQ ID NO: 2937580 - RNA, 19 nt, Artificial Sequence
  Description of Artificial Sequence: Synthetic oligonucleotide
gaaggagucuaacagcaaa

SEQ ID NO: 2937581 - RNA, 19 nt, Artificial Sequence
  Description of Artificial Sequence: Synthetic oligonucleotide
auggcugacaugcuaacaa

SEQ ID NO: 2937582 - RNA, 19 nt, Artificial Sequence
  Description of Artificial Sequence: Synthetic oligonucleotide
aacacagcuuccuuugcua

SEQ ID NO: 2937583 - RNA, 19 nt, Artificial Sequence
  Description of Artificial Sequence: Synthetic oligonucleotide
gaugcagagcagugagagg

SEQ ID NO: 2937584 - RNA, 19 nt, Artificial Sequence
  Description of Artificial Sequence: Synthetic oligonucleotide
gaggugagcaccacgauga

SEQ ID NO: 2937585 - RNA, 19 nt, Artificial Sequence
  Description of Artificial Sequence: Synthetic oligonucleotide
gugagcaccacgaugagca

SEQ ID NO: 2937586 - RNA, 19 nt, Artificial Sequence
  Description of Artificial Sequence: Synthetic oligonucleotide
cuuugcuagcuccugcaag

SEQ ID NO: 2937587 - RNA, 19 nt, Artificial Sequence
  Description of Artificial Sequence: Synthetic oligonucleotide
gaacauggucaagugauac

SEQ ID NO: 2937588 - RNA, 19 nt, Artificial Sequence
  Description of Artificial Sequence: Synthetic oligonucleotide
aguuacucuggaaggaguc

SEQ ID NO: 2937589 - RNA, 19 nt, Artificial Sequence
  Description of Artificial Sequence: Synthetic oligonucleotide
aauagcucaugaggcauga

SEQ ID NO: 2937590 - RNA, 19 nt, Artificial Sequence
  Description of Artificial Sequence: Synthetic oligonucleotide
uucauagccagcugacagu

SEQ ID NO: 2937591 - RNA, 19 nt, Artificial Sequence
  Description of Artificial Sequence: Synthetic oligonucleotide
ggucaagugauacgaagcc

SEQ ID NO: 2937592 - RNA, 19 nt, Artificial Sequence
  Description of Artificial Sequence: Synthetic oligonucleotide
augacaccaccacauagga

SEQ ID NO: 2937593 - RNA, 19 nt, Artificial Sequence
  Description of Artificial Sequence: Synthetic oligonucleotide
uaggacaucauggcuauuc

SEQ ID NO: 2937594 - RNA, 19 nt, Artificial Sequence
  Description of Artificial Sequence: Synthetic oligonucleotide
acccagagaggugagcacc

SEQ ID NO: 2937595 - RNA, 19 nt, Artificial Sequence
  Description of Artificial Sequence: Synthetic oligonucleotide
agagccaggaaaggaugcc

SEQ ID NO: 2937596 - RNA, 19 nt, Artificial Sequence
  Description of Artificial Sequence: Synthetic oligonucleotide
gaugaccaguccuuccagc

SEQ ID NO: 2937597 - RNA, 19 nt, Artificial Sequence
  Description of Artificial Sequence: Synthetic oligonucleotide
agaggccgcacacagagau

SEQ ID NO: 2937598 - RNA, 19 nt, Artificial Sequence
  Description of Artificial Sequence: Synthetic oligonucleotide
uaagagcacccagagaggu

SEQ ID NO: 2937599 - RNA, 19 nt, Artificial Sequence
  Description of Artificial Sequence: Synthetic oligonucleotide
accacgaugagcaggaaga

SEQ ID NO: 2937600 - RNA, 19 nt, Artificial Sequence
  Description of Artificial Sequence: Synthetic oligonucleotide
uuccugaacauggucaagu

SEQ ID NO: 2937601 - RNA, 19 nt, Artificial Sequence
  Description of Artificial Sequence: Synthetic oligonucleotide
caggaaaggaugccugucc

SEQ ID NO: 2937602 - RNA, 19 nt, Artificial Sequence
  Description of Artificial Sequence: Synthetic oligonucleotide
cauggugagagccaggaaa

SEQ ID NO: 2937603 - RNA, 19 nt, Artificial Sequence
  Description of Artificial Sequence: Synthetic oligonucleotide
ucagcauggugagagccag

SEQ ID NO: 2937604 - RNA, 19 nt, Artificial Sequence
  Description of Artificial Sequence: Synthetic oligonucleotide
aggaaaccaccuuugaguu

SEQ ID NO: 2937605 - RNA, 19 nt, Artificial Sequence
  Description of Artificial Sequence: Synthetic oligonucleotide
uccugaacauggucaagug

SEQ ID NO: 2937606 - RNA, 19 nt, Artificial Sequence
  Description of Artificial Sequence: Synthetic oligonucleotide
acaucauggcuauuccuga

SEQ ID NO: 2937607 - RNA, 19 nt, Artificial Sequence
  Description of Artificial Sequence: Synthetic oligonucleotide
cacacagagaugaccaguc

SEQ ID NO: 2937608 - RNA, 19 nt, Artificial Sequence
  Description of Artificial Sequence: Synthetic oligonucleotide
aacaggggauggcugacau

SEQ ID NO: 2937609 - RNA, 19 nt, Artificial Sequence
  Description of Artificial Sequence: Synthetic oligonucleotide
gagaugaccaguccuucca

SEQ ID NO: 2937610 - RNA, 19 nt, Artificial Sequence
  Description of Artificial Sequence: Synthetic oligonucleotide
uugaguuacucuggaagga

SEQ ID NO: 2937611 - RNA, 19 nt, Artificial Sequence
  Description of Artificial Sequence: Synthetic oligonucleotide
caugaggcaugacaccacc

SEQ ID NO: 2937612 - RNA, 19 nt, Artificial Sequence
  Description of Artificial Sequence: Synthetic oligonucleotide
augaccaguccuuccagca

SEQ ID NO: 2937613 - RNA, 19 nt, Artificial Sequence
  Description of Artificial Sequence: Synthetic oligonucleotide
uuggcauuuugcuguguca

SEQ ID NO: 2937614 - RNA, 19 nt, Artificial Sequence
  Description of Artificial Sequence: Synthetic oligonucleotide
gucaguguuggcauuuugc

SEQ ID NO: 2937615 - RNA, 19 nt, Artificial Sequence
  Description of Artificial Sequence: Synthetic oligonucleotide
agcuccugcaagucucugg

SEQ ID NO: 2937616 - RNA, 19 nt, Artificial Sequence
  Description of Artificial Sequence: Synthetic oligonucleotide
auggcuauuccugaacaug

SEQ ID NO: 2937617 - RNA, 19 nt, Artificial Sequence
  Description of Artificial Sequence: Synthetic oligonucleotide
gugauacgaagcccaagcc

SEQ ID NO: 2937618 - RNA, 19 nt, Artificial Sequence
  Description of Artificial Sequence: Synthetic oligonucleotide
ugacagucaguguuggcau

SEQ ID NO: 2937619 - RNA, 19 nt, Artificial Sequence
  Description of Artificial Sequence: Synthetic oligonucleotide
caccacauaggacaucaug

SEQ ID NO: 2937620 - RNA, 19 nt, Artificial Sequence
  Description of Artificial Sequence: Synthetic oligonucleotide
uccuuugcuagcuccugca

SEQ ID NO: 2937621 - RNA, 19 nt, Artificial Sequence
  Description of Artificial Sequence: Synthetic oligonucleotide
ggaugcagagcagugagag

SEQ ID NO: 2937622 - RNA, 19 nt, Artificial Sequence
  Description of Artificial Sequence: Synthetic oligonucleotide
uaacaaauaucagcauggu

SEQ ID NO: 2937623 - RNA, 19 nt, Artificial Sequence
  Description of Artificial Sequence: Synthetic oligonucleotide
agaugaccaguccuuccag

SEQ ID NO: 2937624 - RNA, 19 nt, Artificial Sequence
  Description of Artificial Sequence: Synthetic oligonucleotide
ugcaagucucuggagacac

SEQ ID NO: 2937625 - RNA, 19 nt, Artificial Sequence
  Description of Artificial Sequence: Synthetic oligonucleotide
gcaaacacagcuuccuuug

SEQ ID NO: 2937626 - RNA, 19 nt, Artificial Sequence
  Description of Artificial Sequence: Synthetic oligonucleotide
ucaugaaggaaaccaccuu

SEQ ID NO: 2937627 - RNA, 19 nt, Artificial Sequence
  Description of Artificial Sequence: Synthetic oligonucleotide
auggugagagccaggaaag

SEQ ID NO: 2937628 - RNA, 19 nt, Artificial Sequence
  Description of Artificial Sequence: Synthetic oligonucleotide
uccguggacuucauagcca

SEQ ID NO: 2937629 - RNA, 19 nt, Artificial Sequence
  Description of Artificial Sequence: Synthetic oligonucleotide
ugagcaggaagaagccaac

SEQ ID NO: 2937630 - RNA, 19 nt, Artificial Sequence
  Description of Artificial Sequence: Synthetic oligonucleotide
cagguaccgacccaccggg

SEQ ID NO: 2937631 - RNA, 19 nt, Artificial Sequence
  Description of Artificial Sequence: Synthetic oligonucleotide
aagugauacgaagcccaag

SEQ ID NO: 2937632 - RNA, 19 nt, Artificial Sequence
  Description of Artificial Sequence: Synthetic oligonucleotide
agcaaacacagcuuccuuu

SEQ ID NO: 2937633 - RNA, 19 nt, Artificial Sequence
  Description of Artificial Sequence: Synthetic oligonucleotide
aggggccugggagaaaacc

SEQ ID NO: 2937634 - RNA, 19 nt, Artificial Sequence
  Description of Artificial Sequence: Synthetic oligonucleotide
ucauagccagcugacaguc

SEQ ID NO: 2937635 - RNA, 19 nt, Artificial Sequence
  Description of Artificial Sequence: Synthetic oligonucleotide
accggggacuucaugaagg

SEQ ID NO: 2937636 - RNA, 19 nt, Artificial Sequence
  Description of Artificial Sequence: Synthetic oligonucleotide
agccacagaggaugcagag

SEQ ID NO: 2937637 - RNA, 19 nt, Artificial Sequence
  Description of Artificial Sequence: Synthetic oligonucleotide
uggacuucauagccagcug

SEQ ID NO: 2937638 - RNA, 19 nt, Artificial Sequence
  Description of Artificial Sequence: Synthetic oligonucleotide
auaagagcacccagagagg

SEQ ID NO: 2937639 - RNA, 19 nt, Artificial Sequence
  Description of Artificial Sequence: Synthetic oligonucleotide
agagcacccagagagguga

SEQ ID NO: 2937640 - RNA, 19 nt, Artificial Sequence
  Description of Artificial Sequence: Synthetic oligonucleotide
accaccacauaggacauca

SEQ ID NO: 2937641 - RNA, 19 nt, Artificial Sequence
  Description of Artificial Sequence: Synthetic oligonucleotide
agagaggugagcaccacga

SEQ ID NO: 2937642 - RNA, 19 nt, Artificial Sequence
  Description of Artificial Sequence: Synthetic oligonucleotide
caagccacagaggaugcag

SEQ ID NO: 2937643 - RNA, 19 nt, Artificial Sequence
  Description of Artificial Sequence: Synthetic oligonucleotide
aagccaacaggggauggcu

SEQ ID NO: 2937644 - RNA, 19 nt, Artificial Sequence
  Description of Artificial Sequence: Synthetic oligonucleotide
caguguuggcauuuugcug

SEQ ID NO: 2937645 - RNA, 19 nt, Artificial Sequence
  Description of Artificial Sequence: Synthetic oligonucleotide
ucaugaggcaugacaccac

SEQ ID NO: 2937646 - RNA, 19 nt, Artificial Sequence
  Description of Artificial Sequence: Synthetic oligonucleotide
guuggcauuuugcuguguc

SEQ ID NO: 2937647 - RNA, 19 nt, Artificial Sequence
  Description of Artificial Sequence: Synthetic oligonucleotide
aaccaccuuugaguuacuc

SEQ ID NO: 2937648 - RNA, 19 nt, Artificial Sequence
  Description of Artificial Sequence: Synthetic oligonucleotide
gcauuuugcugugucaggg

SEQ ID NO: 2937649 - RNA, 19 nt, Artificial Sequence
  Description of Artificial Sequence: Synthetic oligonucleotide
aggaagaagccaacagggg

SEQ ID NO: 2937650 - RNA, 19 nt, Artificial Sequence
  Description of Artificial Sequence: Synthetic oligonucleotide
acauaggacaucauggcua

SEQ ID NO: 2937651 - RNA, 19 nt, Artificial Sequence
  Description of Artificial Sequence: Synthetic oligonucleotide
caauagcucaugaggcaug

SEQ ID NO: 2937652 - RNA, 19 nt, Artificial Sequence
  Description of Artificial Sequence: Synthetic oligonucleotide
gucaagugauacgaagccc

SEQ ID NO: 2937653 - RNA, 19 nt, Artificial Sequence
  Description of Artificial Sequence: Synthetic oligonucleotide
cacagcuuccuuugcuagc

SEQ ID NO: 2937654 - RNA, 19 nt, Artificial Sequence
  Description of Artificial Sequence: Synthetic oligonucleotide
caaacacagcuuccuuugc

SEQ ID NO: 2937655 - RNA, 19 nt, Artificial Sequence
  Description of Artificial Sequence: Synthetic oligonucleotide
uacgaagcccaagccacag

SEQ ID NO: 2937656 - RNA, 19 nt, Artificial Sequence
  Description of Artificial Sequence: Synthetic oligonucleotide
ugcuaacaaauaucagcau

SEQ ID NO: 2937657 - RNA, 19 nt, Artificial Sequence
  Description of Artificial Sequence: Synthetic oligonucleotide
accuuugaguuacucugga

SEQ ID NO: 2937658 - RNA, 19 nt, Artificial Sequence
  Description of Artificial Sequence: Synthetic oligonucleotide
acagcuuccuuugcuagcu

SEQ ID NO: 2937659 - RNA, 19 nt, Artificial Sequence
  Description of Artificial Sequence: Synthetic oligonucleotide
agcagugagaggccgcaca

SEQ ID NO: 2937660 - RNA, 19 nt, Artificial Sequence
  Description of Artificial Sequence: Synthetic oligonucleotide
gaagcccaagccacagagg

SEQ ID NO: 2937661 - RNA, 19 nt, Artificial Sequence
  Description of Artificial Sequence: Synthetic oligonucleotide
gacuucauagccagcugac

SEQ ID NO: 2937662 - RNA, 19 nt, Artificial Sequence
  Description of Artificial Sequence: Synthetic oligonucleotide
gagagccaggaaaggaugc

SEQ ID NO: 2937663 - RNA, 19 nt, Artificial Sequence
  Description of Artificial Sequence: Synthetic oligonucleotide
ugcuagcuccugcaagucu

SEQ ID NO: 2937664 - RNA, 19 nt, Artificial Sequence
  Description of Artificial Sequence: Synthetic oligonucleotide
ccugggagaaaaccaauag

SEQ ID NO: 2937665 - RNA, 19 nt, Artificial Sequence
  Description of Artificial Sequence: Synthetic oligonucleotide
agaaaaccaauagcucaug

SEQ ID NO: 2937666 - RNA, 19 nt, Artificial Sequence
  Description of Artificial Sequence: Synthetic oligonucleotide
cagaggaugcagagcagug

SEQ ID NO: 2937667 - RNA, 19 nt, Artificial Sequence
  Description of Artificial Sequence: Synthetic oligonucleotide
gagcaccacgaugagcagg

SEQ ID NO: 2937668 - RNA, 19 nt, Artificial Sequence
  Description of Artificial Sequence: Synthetic oligonucleotide
aaauaucagcauggugaga

SEQ ID NO: 2937669 - RNA, 19 nt, Artificial Sequence
  Description of Artificial Sequence: Synthetic oligonucleotide
acaugcuaacaaauaucag

SEQ ID NO: 2937670 - RNA, 19 nt, Artificial Sequence
  Description of Artificial Sequence: Synthetic oligonucleotide
agucaguguuggcauuuug

SEQ ID NO: 2937671 - RNA, 19 nt, Artificial Sequence
  Description of Artificial Sequence: Synthetic oligonucleotide
gaagccaacaggggauggc

SEQ ID NO: 2937672 - RNA, 19 nt, Artificial Sequence
  Description of Artificial Sequence: Synthetic oligonucleotide
ccacauaggacaucauggc

SEQ ID NO: 2937673 - RNA, 19 nt, Artificial Sequence
  Description of Artificial Sequence: Synthetic oligonucleotide
gaggcaugacaccaccaca

SEQ ID NO: 2937674 - RNA, 19 nt, Artificial Sequence
  Description of Artificial Sequence: Synthetic oligonucleotide
ugcugugucaggggccugg

SEQ ID NO: 2937675 - RNA, 19 nt, Artificial Sequence
  Description of Artificial Sequence: Synthetic oligonucleotide
acagaggaugcagagcagu

SEQ ID NO: 2937676 - RNA, 19 nt, Artificial Sequence
  Description of Artificial Sequence: Synthetic oligonucleotide
agcauggugagagccagga

SEQ ID NO: 2937677 - RNA, 19 nt, Artificial Sequence
  Description of Artificial Sequence: Synthetic oligonucleotide
uuacucuggaaggagucua

SEQ ID NO: 2937678 - RNA, 19 nt, Artificial Sequence
  Description of Artificial Sequence: Synthetic oligonucleotide
uggcugacaugcuaacaaa

SEQ ID NO: 2937679 - RNA, 19 nt, Artificial Sequence
  Description of Artificial Sequence: Synthetic oligonucleotide
uggugagagccaggaaagg

SEQ ID NO: 2937680 - RNA, 19 nt, Artificial Sequence
  Description of Artificial Sequence: Synthetic oligonucleotide
cucaugaggcaugacacca

SEQ ID NO: 2937681 - RNA, 19 nt, Artificial Sequence
  Description of Artificial Sequence: Synthetic oligonucleotide
caccacgaugagcaggaag

SEQ ID NO: 2937682 - RNA, 19 nt, Artificial Sequence
  Description of Artificial Sequence: Synthetic oligonucleotide
ggcauuuugcugugucagg

SEQ ID NO: 2937683 - RNA, 19 nt, Artificial Sequence
  Description of Artificial Sequence: Synthetic oligonucleotide
cucuggaaggagucuaaca

SEQ ID NO: 2937684 - RNA, 19 nt, Artificial Sequence
  Description of Artificial Sequence: Synthetic oligonucleotide
augccugucccagguaccg

SEQ ID NO: 2937685 - RNA, 19 nt, Artificial Sequence
  Description of Artificial Sequence: Synthetic oligonucleotide
agcugacagucaguguugg

SEQ ID NO: 2937686 - RNA, 19 nt, Artificial Sequence
  Description of Artificial Sequence: Synthetic oligonucleotide
agaagccaacaggggaugg

SEQ ID NO: 2937687 - RNA, 19 nt, Artificial Sequence
  Description of Artificial Sequence: Synthetic oligonucleotide
gucucuggagacacuuggg

SEQ ID NO: 2937688 - RNA, 19 nt, Artificial Sequence
  Description of Artificial Sequence: Synthetic oligonucleotide
aggccgcacacagagauga

SEQ ID NO: 2937689 - RNA, 19 nt, Artificial Sequence
  Description of Artificial Sequence: Synthetic oligonucleotide
caguccuuccagcaauaug

SEQ ID NO: 2937690 - RNA, 19 nt, Artificial Sequence
  Description of Artificial Sequence: Synthetic oligonucleotide
agccagcugacagucagug

SEQ ID NO: 2937691 - RNA, 19 nt, Artificial Sequence
  Description of Artificial Sequence: Synthetic oligonucleotide
agcaccacgaugagcagga

SEQ ID NO: 2937692 - RNA, 19 nt, Artificial Sequence
  Description of Artificial Sequence: Synthetic oligonucleotide
ucaggggccugggagaaaa

SEQ ID NO: 2937693 - RNA, 19 nt, Artificial Sequence
  Description of Artificial Sequence: Synthetic oligonucleotide
cccauaagagcacccagag

SEQ ID NO: 2937694 - RNA, 19 nt, Artificial Sequence
  Description of Artificial Sequence: Synthetic oligonucleotide
agaggaugcagagcaguga

SEQ ID NO: 2937695 - RNA, 19 nt, Artificial Sequence
  Description of Artificial Sequence: Synthetic oligonucleotide
gaugccugucccagguacc

SEQ ID NO: 2937696 - RNA, 19 nt, Artificial Sequence
  Description of Artificial Sequence: Synthetic oligonucleotide
cacgaugagcaggaagaag

SEQ ID NO: 2937697 - RNA, 19 nt, Artificial Sequence
  Description of Artificial Sequence: Synthetic oligonucleotide
cagcugacagucaguguug

SEQ ID NO: 2937698 - RNA, 19 nt, Artificial Sequence
  Description of Artificial Sequence: Synthetic oligonucleotide
cugacaugcuaacaaauau

SEQ ID NO: 2937699 - RNA, 19 nt, Artificial Sequence
  Description of Artificial Sequence: Synthetic oligonucleotide
gauggcugacaugcuaaca

SEQ ID NO: 2937700 - RNA, 19 nt, Artificial Sequence
  Description of Artificial Sequence: Synthetic oligonucleotide
gagaaaaccaauagcucau

SEQ ID NO: 2937701 - RNA, 19 nt, Artificial Sequence
  Description of Artificial Sequence: Synthetic oligonucleotide
ggaugccugucccagguac

SEQ ID NO: 2937702 - RNA, 19 nt, Artificial Sequence
  Description of Artificial Sequence: Synthetic oligonucleotide
aagagcacccagagaggug

SEQ ID NO: 2937703 - RNA, 19 nt, Artificial Sequence
  Description of Artificial Sequence: Synthetic oligonucleotide
agcacccagagaggugagc

SEQ ID NO: 2937704 - RNA, 19 nt, Artificial Sequence
  Description of Artificial Sequence: Synthetic oligonucleotide
aagccacagaggaugcaga

SEQ ID NO: 2937705 - RNA, 19 nt, Artificial Sequence
  Description of Artificial Sequence: Synthetic oligonucleotide
acagagaugaccaguccuu

SEQ ID NO: 2937706 - RNA, 19 nt, Artificial Sequence
  Description of Artificial Sequence: Synthetic oligonucleotide
ccacagaggaugcagagca

SEQ ID NO: 2937707 - RNA, 19 nt, Artificial Sequence
  Description of Artificial Sequence: Synthetic oligonucleotide
ccugcaagucucuggagac

SEQ ID NO: 2937708 - RNA, 19 nt, Artificial Sequence
  Description of Artificial Sequence: Synthetic oligonucleotide
gcuauuccugaacaugguc

SEQ ID NO: 2937709 - RNA, 19 nt, Artificial Sequence
  Description of Artificial Sequence: Synthetic oligonucleotide
acuucauagccagcugaca

SEQ ID NO: 2937710 - RNA, 19 nt, Artificial Sequence
  Description of Artificial Sequence: Synthetic oligonucleotide
auuccugaacauggucaag

SEQ ID NO: 2937711 - RNA, 19 nt, Artificial Sequence
  Description of Artificial Sequence: Synthetic oligonucleotide
cacagaggaugcagagcag

SEQ ID NO: 2937712 - RNA, 19 nt, Artificial Sequence
  Description of Artificial Sequence: Synthetic oligonucleotide
cagagcagugagaggccgc

SEQ ID NO: 2937713 - RNA, 19 nt, Artificial Sequence
  Description of Artificial Sequence: Synthetic oligonucleotide
aggcaugacaccaccacau

SEQ ID NO: 2937714 - RNA, 19 nt, Artificial Sequence
  Description of Artificial Sequence: Synthetic oligonucleotide
agagcagugagaggccgca

SEQ ID NO: 2937715 - RNA, 19 nt, Artificial Sequence
  Description of Artificial Sequence: Synthetic oligonucleotide
auagcucaugaggcaugac

SEQ ID NO: 2937716 - RNA, 19 nt, Artificial Sequence
  Description of Artificial Sequence: Synthetic oligonucleotide
caugaaggaaaccaccuuu

SEQ ID NO: 2937717 - RNA, 19 nt, Artificial Sequence
  Description of Artificial Sequence: Synthetic oligonucleotide
guaccgacccaccggggac

SEQ ID NO: 2937718 - RNA, 19 nt, Artificial Sequence
  Description of Artificial Sequence: Synthetic oligonucleotide
gggacuucaugaaggaaac

SEQ ID NO: 2937719 - RNA, 19 nt, Artificial Sequence
  Description of Artificial Sequence: Synthetic oligonucleotide
cuaacagcaaacacagcuu

SEQ ID NO: 2937720 - RNA, 19 nt, Artificial Sequence
  Description of Artificial Sequence: Synthetic oligonucleotide
aggugagcaccacgaugag

SEQ ID NO: 2937721 - RNA, 19 nt, Artificial Sequence
  Description of Artificial Sequence: Synthetic oligonucleotide
acaggggauggcugacaug

SEQ ID NO: 2937722 - RNA, 19 nt, Artificial Sequence
  Description of Artificial Sequence: Synthetic oligonucleotide
aucagcauggugagagcca

SEQ ID NO: 2937723 - RNA, 19 nt, Artificial Sequence
  Description of Artificial Sequence: Synthetic oligonucleotide
gcucaugaggcaugacacc

SEQ ID NO: 2937724 - RNA, 19 nt, Artificial Sequence
  Description of Artificial Sequence: Synthetic oligonucleotide
cgaagcccaagccacagag

SEQ ID NO: 2937725 - RNA, 19 nt, Artificial Sequence
  Description of Artificial Sequence: Synthetic oligonucleotide
cuuccuuugcuagcuccug

SEQ ID NO: 2937726 - RNA, 19 nt, Artificial Sequence
  Description of Artificial Sequence: Synthetic oligonucleotide
ucccagguaccgacccacc

SEQ ID NO: 2937727 - RNA, 19 nt, Artificial Sequence
  Description of Artificial Sequence: Synthetic oligonucleotide
guguuggcauuuugcugug

SEQ ID NO: 2937728 - RNA, 19 nt, Artificial Sequence
  Description of Artificial Sequence: Synthetic oligonucleotide
cacagagaugaccaguccu

SEQ ID NO: 2937729 - RNA, 19 nt, Artificial Sequence
  Description of Artificial Sequence: Synthetic oligonucleotide
ccagguaccgacccaccgg

SEQ ID NO: 2937730 - RNA, 19 nt, Artificial Sequence
  Description of Artificial Sequence: Synthetic oligonucleotide
gggagaaaaccaauagcuc

SEQ ID NO: 2937731 - RNA, 19 nt, Artificial Sequence
  Description of Artificial Sequence: Synthetic oligonucleotide
guccuuccagcaauauggc

SEQ ID NO: 2937732 - RNA, 19 nt, Artificial Sequence
  Description of Artificial Sequence: Synthetic oligonucleotide
uagccagcugacagucagu

SEQ ID NO: 2937733 - RNA, 19 nt, Artificial Sequence
  Description of Artificial Sequence: Synthetic oligonucleotide
caccggggacuucaugaag

SEQ ID NO: 2937734 - RNA, 19 nt, Artificial Sequence
  Description of Artificial Sequence: Synthetic oligonucleotide
gugucaggggccugggaga

SEQ ID NO: 2937735 - RNA, 19 nt, Artificial Sequence
  Description of Artificial Sequence: Synthetic oligonucleotide
gcuccugcaagucucugga

SEQ ID NO: 2937736 - RNA, 19 nt, Artificial Sequence
  Description of Artificial Sequence: Synthetic oligonucleotide
guggacuucauagccagcu

SEQ ID NO: 2937737 - RNA, 19 nt, Artificial Sequence
  Description of Artificial Sequence: Synthetic oligonucleotide
ccguggacuucauagccag

SEQ ID NO: 2937738 - RNA, 19 nt, Artificial Sequence
  Description of Artificial Sequence: Synthetic oligonucleotide
acagucaguguuggcauuu

SEQ ID NO: 2937739 - RNA, 19 nt, Artificial Sequence
  Description of Artificial Sequence: Synthetic oligonucleotide
ggugagagccaggaaagga

SEQ ID NO: 2937740 - RNA, 19 nt, Artificial Sequence
  Description of Artificial Sequence: Synthetic oligonucleotide
cacauaggacaucauggcu

SEQ ID NO: 2937741 - RNA, 19 nt, Artificial Sequence
  Description of Artificial Sequence: Synthetic oligonucleotide
cuccugcaagucucuggag

SEQ ID NO: 2937742 - RNA, 19 nt, Artificial Sequence
  Description of Artificial Sequence: Synthetic oligonucleotide
cacccagagaggugagcac

SEQ ID NO: 2937743 - RNA, 19 nt, Artificial Sequence
  Description of Artificial Sequence: Synthetic oligonucleotide
cauaggacaucauggcuau

SEQ ID NO: 2937744 - RNA, 19 nt, Artificial Sequence
  Description of Artificial Sequence: Synthetic oligonucleotide
cagagaugaccaguccuuc

SEQ ID NO: 2937745 - RNA, 19 nt, Artificial Sequence
  Description of Artificial Sequence: Synthetic oligonucleotide
ugucaggggccugggagaa

SEQ ID NO: 2937746 - RNA, 19 nt, Artificial Sequence
  Description of Artificial Sequence: Synthetic oligonucleotide
cauggucaagugauacgaa

SEQ ID NO: 2937747 - RNA, 19 nt, Artificial Sequence
  Description of Artificial Sequence: Synthetic oligonucleotide
caagugauacgaagcccaa

SEQ ID NO: 2937748 - RNA, 19 nt, Artificial Sequence
  Description of Artificial Sequence: Synthetic oligonucleotide
ggaaaggaugccuguccca

SEQ ID NO: 2937749 - RNA, 19 nt, Artificial Sequence
  Description of Artificial Sequence: Synthetic oligonucleotide
cagcauggugagagccagg

SEQ ID NO: 2937750 - RNA, 19 nt, Artificial Sequence
  Description of Artificial Sequence: Synthetic oligonucleotide
caucauggcuauuccugaa

SEQ ID NO: 2937751 - RNA, 19 nt, Artificial Sequence
  Description of Artificial Sequence: Synthetic oligonucleotide
gaccaguccuuccagcaau

SEQ ID NO: 2937752 - RNA, 19 nt, Artificial Sequence
  Description of Artificial Sequence: Synthetic oligonucleotide
gcuagcuccugcaagucuc

SEQ ID NO: 2937753 - RNA, 19 nt, Artificial Sequence
  Description of Artificial Sequence: Synthetic oligonucleotide
gcagagcagugagaggccg

SEQ ID NO: 2937754 - RNA, 19 nt, Artificial Sequence
  Description of Artificial Sequence: Synthetic oligonucleotide
uugcuagcuccugcaaguc

SEQ ID NO: 2937755 - RNA, 19 nt, Artificial Sequence
  Description of Artificial Sequence: Synthetic oligonucleotide
acgaagcccaagccacaga

SEQ ID NO: 2937756 - RNA, 19 nt, Artificial Sequence
  Description of Artificial Sequence: Synthetic oligonucleotide
ggauggcugacaugcuaac

SEQ ID NO: 2937757 - RNA, 19 nt, Artificial Sequence
  Description of Artificial Sequence: Synthetic oligonucleotide
gaguuacucuggaaggagu

SEQ ID NO: 2937758 - RNA, 19 nt, Artificial Sequence
  Description of Artificial Sequence: Synthetic oligonucleotide
gguaccgacccaccgggga

SEQ ID NO: 2937759 - RNA, 19 nt, Artificial Sequence
  Description of Artificial Sequence: Synthetic oligonucleotide
ggugagcaccacgaugagc

SEQ ID NO: 2937760 - RNA, 19 nt, Artificial Sequence
  Description of Artificial Sequence: Synthetic oligonucleotide
auacgaagcccaagccaca

SEQ ID NO: 2937761 - RNA, 19 nt, Artificial Sequence
  Description of Artificial Sequence: Synthetic oligonucleotide
guuacucuggaaggagucu

SEQ ID NO: 2937762 - RNA, 19 nt, Artificial Sequence
  Description of Artificial Sequence: Synthetic oligonucleotide
uguuggcauuuugcugugu

SEQ ID NO: 2937763 - RNA, 19 nt, Artificial Sequence
  Description of Artificial Sequence: Synthetic oligonucleotide
gucuaacagcaaacacagc

SEQ ID NO: 2937764 - RNA, 19 nt, Artificial Sequence
  Description of Artificial Sequence: Synthetic oligonucleotide
ccgcacacagagaugacca

SEQ ID NO: 2937765 - RNA, 19 nt, Artificial Sequence
  Description of Artificial Sequence: Synthetic oligonucleotide
gccaacaggggauggcuga

SEQ ID NO: 2937766 - RNA, 19 nt, Artificial Sequence
  Description of Artificial Sequence: Synthetic oligonucleotide
uaccgacccaccggggacu

SEQ ID NO: 2937767 - RNA, 19 nt, Artificial Sequence
  Description of Artificial Sequence: Synthetic oligonucleotide
gaggccgcacacagagaug

SEQ ID NO: 2937768 - RNA, 19 nt, Artificial Sequence
  Description of Artificial Sequence: Synthetic oligonucleotide
gugagagccaggaaaggau

SEQ ID NO: 2937769 - RNA, 19 nt, Artificial Sequence
  Description of Artificial Sequence: Synthetic oligonucleotide
agccaacaggggauggcug

SEQ ID NO: 2937770 - RNA, 19 nt, Artificial Sequence
  Description of Artificial Sequence: Synthetic oligonucleotide
cccaccggggacuucauga

SEQ ID NO: 2937771 - RNA, 19 nt, Artificial Sequence
  Description of Artificial Sequence: Synthetic oligonucleotide
cauagccagcugacaguca

SEQ ID NO: 2937772 - RNA, 19 nt, Artificial Sequence
  Description of Artificial Sequence: Synthetic oligonucleotide
ccugaacauggucaaguga

SEQ ID NO: 2937773 - RNA, 19 nt, Artificial Sequence
  Description of Artificial Sequence: Synthetic oligonucleotide
gccgcacacagagaugacc

SEQ ID NO: 2937774 - RNA, 19 nt, Artificial Sequence
  Description of Artificial Sequence: Synthetic oligonucleotide
gcugacaugcuaacaaaua

SEQ ID NO: 2937775 - RNA, 19 nt, Artificial Sequence
  Description of Artificial Sequence: Synthetic oligonucleotide
aggaugcagagcagugaga

SEQ ID NO: 2937776 - RNA, 19 nt, Artificial Sequence
  Description of Artificial Sequence: Synthetic oligonucleotide
ggacuucaugaaggaaacc

SEQ ID NO: 2937777 - RNA, 19 nt, Artificial Sequence
  Description of Artificial Sequence: Synthetic oligonucleotide
gcacccagagaggugagca

SEQ ID NO: 2937778 - RNA, 19 nt, Artificial Sequence
  Description of Artificial Sequence: Synthetic oligonucleotide
uagcuccugcaagucucug

SEQ ID NO: 2937779 - RNA, 19 nt, Artificial Sequence
  Description of Artificial Sequence: Synthetic oligonucleotide
gcugacagucaguguuggc

SEQ ID NO: 2937780 - RNA, 19 nt, Artificial Sequence
  Description of Artificial Sequence: Synthetic oligonucleotide
cauggcuauuccugaacau

SEQ ID NO: 2937781 - RNA, 19 nt, Artificial Sequence
  Description of Artificial Sequence: Synthetic oligonucleotide
gccugucccagguaccgac

SEQ ID NO: 2937782 - RNA, 19 nt, Artificial Sequence
  Description of Artificial Sequence: Synthetic oligonucleotide
acccaccggggacuucaug

SEQ ID NO: 2937783 - RNA, 19 nt, Artificial Sequence
  Description of Artificial Sequence: Synthetic oligonucleotide
gccacagaggaugcagagc

SEQ ID NO: 2937784 - RNA, 19 nt, Artificial Sequence
  Description of Artificial Sequence: Synthetic oligonucleotide
ggggccugggagaaaacca

SEQ ID NO: 2937785 - RNA, 19 nt, Artificial Sequence
  Description of Artificial Sequence: Synthetic oligonucleotide
acaccaccacauaggacau

SEQ ID NO: 2937786 - RNA, 19 nt, Artificial Sequence
  Description of Artificial Sequence: Synthetic oligonucleotide
aaaccaccuuugaguuacu

SEQ ID NO: 2937787 - RNA, 19 nt, Artificial Sequence
  Description of Artificial Sequence: Synthetic oligonucleotide
gagcacccagagaggugag

SEQ ID NO: 2937788 - RNA, 19 nt, Artificial Sequence
  Description of Artificial Sequence: Synthetic oligonucleotide
gggauggcugacaugcuaa

SEQ ID NO: 2937789 - RNA, 19 nt, Artificial Sequence
  Description of Artificial Sequence: Synthetic oligonucleotide
ccugucccagguaccgacc

SEQ ID NO: 2937790 - RNA, 19 nt, Artificial Sequence
  Description of Artificial Sequence: Synthetic oligonucleotide
ugccugucccagguaccga

SEQ ID NO: 2937791 - RNA, 19 nt, Artificial Sequence
  Description of Artificial Sequence: Synthetic oligonucleotide
ccccauaagagcacccaga

SEQ ID NO: 2937792 - RNA, 19 nt, Artificial Sequence
  Description of Artificial Sequence: Synthetic oligonucleotide
agguaccgacccaccgggg

SEQ ID NO: 2937793 - RNA, 19 nt, Artificial Sequence
  Description of Artificial Sequence: Synthetic oligonucleotide
gagaggugagcaccacgau

SEQ ID NO: 2937794 - RNA, 19 nt, Artificial Sequence
  Description of Artificial Sequence: Synthetic oligonucleotide
ggaaaccaccuuugaguua

SEQ ID NO: 2937795 - RNA, 19 nt, Artificial Sequence
  Description of Artificial Sequence: Synthetic oligonucleotide
caagucucuggagacacuu

SEQ ID NO: 2937796 - RNA, 19 nt, Artificial Sequence
  Description of Artificial Sequence: Synthetic oligonucleotide
cugcaagucucuggagaca

SEQ ID NO: 2937797 - RNA, 19 nt, Artificial Sequence
  Description of Artificial Sequence: Synthetic oligonucleotide
cuagcuccugcaagucucu

SEQ ID NO: 2937798 - RNA, 19 nt, Artificial Sequence
  Description of Artificial Sequence: Synthetic oligonucleotide
aggaugccugucccaggua

SEQ ID NO: 2937799 - RNA, 19 nt, Artificial Sequence
  Description of Artificial Sequence: Synthetic oligonucleotide
ccagcugacagucaguguu

SEQ ID NO: 2937800 - RNA, 19 nt, Artificial Sequence
  Description of Artificial Sequence: Synthetic oligonucleotide
ggggauggcugacaugcua

SEQ ID NO: 2937801 - RNA, 19 nt, Artificial Sequence
  Description of Artificial Sequence: Synthetic oligonucleotide
gacagucaguguuggcauu

SEQ ID NO: 2937802 - RNA, 19 nt, Artificial Sequence
  Description of Artificial Sequence: Synthetic oligonucleotide
caggggccugggagaaaac

SEQ ID NO: 2937803 - RNA, 19 nt, Artificial Sequence
  Description of Artificial Sequence: Synthetic oligonucleotide
cagcuuccuuugcuagcuc

SEQ ID NO: 2937804 - RNA, 19 nt, Artificial Sequence
  Description of Artificial Sequence: Synthetic oligonucleotide
caacaggggauggcugaca

SEQ ID NO: 2937805 - RNA, 19 nt, Artificial Sequence
  Description of Artificial Sequence: Synthetic oligonucleotide
ccauaagagcacccagaga

SEQ ID NO: 2937806 - RNA, 19 nt, Artificial Sequence
  Description of Artificial Sequence: Synthetic oligonucleotide
gagaggccgcacacagaga

SEQ ID NO: 2937807 - RNA, 19 nt, Artificial Sequence
  Description of Artificial Sequence: Synthetic oligonucleotide
ggcaugacaccaccacaua

SEQ ID NO: 2937808 - RNA, 19 nt, Artificial Sequence
  Description of Artificial Sequence: Synthetic oligonucleotide
gugagaggccgcacacaga

SEQ ID NO: 2937809 - RNA, 19 nt, Artificial Sequence
  Description of Artificial Sequence: Synthetic oligonucleotide
cagugagaggccgcacaca

SEQ ID NO: 2937810 - RNA, 19 nt, Artificial Sequence
  Description of Artificial Sequence: Synthetic oligonucleotide
agcccaagccacagaggau

SEQ ID NO: 2937811 - RNA, 19 nt, Artificial Sequence
  Description of Artificial Sequence: Synthetic oligonucleotide
cgcacacagagaugaccag

SEQ ID NO: 2937812 - RNA, 19 nt, Artificial Sequence
  Description of Artificial Sequence: Synthetic oligonucleotide
ccuuugaguuacucuggaa

SEQ ID NO: 2937813 - RNA, 19 nt, Artificial Sequence
  Description of Artificial Sequence: Synthetic oligonucleotide
uugcugugucaggggccug

SEQ ID NO: 2937814 - RNA, 19 nt, Artificial Sequence
  Description of Artificial Sequence: Synthetic oligonucleotide
gggccugggagaaaaccaa

SEQ ID NO: 2937815 - RNA, 19 nt, Artificial Sequence
  Description of Artificial Sequence: Synthetic oligonucleotide
ggaaggagucuaacagcaa

SEQ ID NO: 2937816 - RNA, 19 nt, Artificial Sequence
  Description of Artificial Sequence: Synthetic oligonucleotide
ccaacaggggauggcugac

SEQ ID NO: 2937817 - RNA, 19 nt, Artificial Sequence
  Description of Artificial Sequence: Synthetic oligonucleotide
ggcugacaugcuaacaaau

SEQ ID NO: 2937818 - RNA, 19 nt, Artificial Sequence
  Description of Artificial Sequence: Synthetic oligonucleotide
cugugucaggggccuggga

SEQ ID NO: 2937819 - RNA, 19 nt, Artificial Sequence
  Description of Artificial Sequence: Synthetic oligonucleotide
gcacacagagaugaccagu

SEQ ID NO: 2937820 - RNA, 19 nt, Artificial Sequence
  Description of Artificial Sequence: Synthetic oligonucleotide
gccaggaaaggaugccugu

SEQ ID NO: 2937821 - RNA, 19 nt, Artificial Sequence
  Description of Artificial Sequence: Synthetic oligonucleotide
caccaccacauaggacauc

SEQ ID NO: 2937822 - RNA, 19 nt, Artificial Sequence
  Description of Artificial Sequence: Synthetic oligonucleotide
gccugggagaaaaccaaua

SEQ ID NO: 2937823 - RNA, 19 nt, Artificial Sequence
  Description of Artificial Sequence: Synthetic oligonucleotide
auaggacaucauggcuauu

SEQ ID NO: 2937824 - RNA, 19 nt, Artificial Sequence
  Description of Artificial Sequence: Synthetic oligonucleotide
ccggggacuucaugaagga

SEQ ID NO: 2937825 - RNA, 19 nt, Artificial Sequence
  Description of Artificial Sequence: Synthetic oligonucleotide
gcauggugagagccaggaa

SEQ ID NO: 2937826 - RNA, 19 nt, Artificial Sequence
  Description of Artificial Sequence: Synthetic oligonucleotide
gcuuccuuugcuagcuccu

SEQ ID NO: 2937827 - RNA, 19 nt, Artificial Sequence
  Description of Artificial Sequence: Synthetic oligonucleotide
ggcuauuccugaacauggu

SEQ ID NO: 2937828 - RNA, 19 nt, Artificial Sequence
  Description of Artificial Sequence: Synthetic oligonucleotide
ccuuugcuagcuccugcaa

SEQ ID NO: 2937829 - RNA, 19 nt, Artificial Sequence
  Description of Artificial Sequence: Synthetic oligonucleotide
ccaauagcucaugaggcau

SEQ ID NO: 2937830 - RNA, 19 nt, Artificial Sequence
  Description of Artificial Sequence: Synthetic oligonucleotide
cagcaaacacagcuuccuu

SEQ ID NO: 2937831 - RNA, 19 nt, Artificial Sequence
  Description of Artificial Sequence: Synthetic oligonucleotide
ccagagaggugagcaccac

SEQ ID NO: 2937832 - RNA, 19 nt, Artificial Sequence
  Description of Artificial Sequence: Synthetic oligonucleotide
ccaccggggacuucaugaa

SEQ ID NO: 2937833 - RNA, 19 nt, Artificial Sequence
  Description of Artificial Sequence: Synthetic oligonucleotide
accgacccaccggggacuu

SEQ ID NO: 2937834 - RNA, 19 nt, Artificial Sequence
  Description of Artificial Sequence: Synthetic oligonucleotide
gccagcugacagucagugu

SEQ ID NO: 2937835 - RNA, 19 nt, Artificial Sequence
  Description of Artificial Sequence: Synthetic oligonucleotide
ccacgaugagcaggaagaa

SEQ ID NO: 2937836 - RNA, 19 nt, Artificial Sequence
  Description of Artificial Sequence: Synthetic oligonucleotide
ggccgcacacagagaugac

SEQ ID NO: 2937837 - RNA, 19 nt, Artificial Sequence
  Description of Artificial Sequence: Synthetic oligonucleotide
ccaagccacagaggaugca

SEQ ID NO: 2937838 - RNA, 19 nt, Artificial Sequence
  Description of Artificial Sequence: Synthetic oligonucleotide
gucaggggccugggagaaa

SEQ ID NO: 2937839 - RNA, 19 nt, Artificial Sequence
  Description of Artificial Sequence: Synthetic oligonucleotide
ggccugggagaaaaccaau

SEQ ID NO: 2937840 - RNA, 19 nt, Artificial Sequence
  Description of Artificial Sequence: Synthetic oligonucleotide
gcaagucucuggagacacu

SEQ ID NO: 2937841 - RNA, 19 nt, Artificial Sequence
  Description of Artificial Sequence: Synthetic oligonucleotide
cagucaguguuggcauuuu

SEQ ID NO: 2937842 - RNA, 19 nt, Artificial Sequence
  Description of Artificial Sequence: Synthetic oligonucleotide
gacccaccggggacuucau

SEQ ID NO: 2937843 - RNA, 19 nt, Artificial Sequence
  Description of Artificial Sequence: Synthetic oligonucleotide
gcaccacgaugagcaggaa

SEQ ID NO: 2937844 - RNA, 19 nt, Artificial Sequence
  Description of Artificial Sequence: Synthetic oligonucleotide
cggggacuucaugaaggaa

SEQ ID NO: 2937845 - RNA, 19 nt, Artificial Sequence
  Description of Artificial Sequence: Synthetic oligonucleotide
ccaguccuuccagcaauau

SEQ ID NO: 2937846 - RNA, 19 nt, Artificial Sequence
  Description of Artificial Sequence: Synthetic oligonucleotide
ccaccacauaggacaucau

SEQ ID NO: 2937847 - RNA, 19 nt, Artificial Sequence
  Description of Artificial Sequence: Synthetic oligonucleotide
ccgacccaccggggacuuc

SEQ ID NO: 2937848 - RNA, 19 nt, Artificial Sequence
  Description of Artificial Sequence: Synthetic oligonucleotide
aaagaugcgcgccagagcg

SEQ ID NO: 2937849 - RNA, 19 nt, Artificial Sequence
  Description of Artificial Sequence: Synthetic oligonucleotide
agaacgaucauaugugugc

SEQ ID NO: 2937850 - RNA, 19 nt, Artificial Sequence
  Description of Artificial Sequence: Synthetic oligonucleotide
ugauagaacgaucauaugu

SEQ ID NO: 2937851 - RNA, 19 nt, Artificial Sequence
  Description of Artificial Sequence: Synthetic oligonucleotide
uucagggucaucuuguugg

SEQ ID NO: 2937852 - RNA, 19 nt, Artificial Sequence
  Description of Artificial Sequence: Synthetic oligonucleotide
ucuauaccaccaaagaugc

SEQ ID NO: 2937853 - RNA, 19 nt, Artificial Sequence
  Description of Artificial Sequence: Synthetic oligonucleotide
cucuauaccaccaaagaug

SEQ ID NO: 2937854 - RNA, 19 nt, Artificial Sequence
  Description of Artificial Sequence: Synthetic oligonucleotide
ucuccauccacagugauag

SEQ ID NO: 2937855 - RNA, 19 nt, Artificial Sequence
  Description of Artificial Sequence: Synthetic oligonucleotide
uauaccaccaaagaugcgc

SEQ ID NO: 2937856 - RNA, 19 nt, Artificial Sequence
  Description of Artificial Sequence: Synthetic oligonucleotide
agcagcaccuuguaaacgc

SEQ ID NO: 2937857 - RNA, 19 nt, Artificial Sequence
  Description of Artificial Sequence: Synthetic oligonucleotide
gauagaacgaucauaugug

SEQ ID NO: 2937858 - RNA, 19 nt, Artificial Sequence
  Description of Artificial Sequence: Synthetic oligonucleotide
ugagugaugccucuucucc

SEQ ID NO: 2937859 - RNA, 19 nt, Artificial Sequence
  Description of Artificial Sequence: Synthetic oligonucleotide
uuggaagccgucuagagaa

SEQ ID NO: 2937860 - RNA, 19 nt, Artificial Sequence
  Description of Artificial Sequence: Synthetic oligonucleotide
ucauccacgggcaugcucc

SEQ ID NO: 2937861 - RNA, 19 nt, Artificial Sequence
  Description of Artificial Sequence: Synthetic oligonucleotide
aacgaucauaugugugccc

SEQ ID NO: 2937862 - RNA, 19 nt, Artificial Sequence
  Description of Artificial Sequence: Synthetic oligonucleotide
ucauaugugugcccugcgg

SEQ ID NO: 2937863 - RNA, 19 nt, Artificial Sequence
  Description of Artificial Sequence: Synthetic oligonucleotide
cauccacagugauagaacg

SEQ ID NO: 2937864 - RNA, 19 nt, Artificial Sequence
  Description of Artificial Sequence: Synthetic oligonucleotide
aacugagcgagucggagga

SEQ ID NO: 2937865 - RNA, 19 nt, Artificial Sequence
  Description of Artificial Sequence: Synthetic oligonucleotide
uguagucgcugcuagggag

SEQ ID NO: 2937866 - RNA, 19 nt, Artificial Sequence
  Description of Artificial Sequence: Synthetic oligonucleotide
uccucuauaccaccaaaga

SEQ ID NO: 2937867 - RNA, 19 nt, Artificial Sequence
  Description of Artificial Sequence: Synthetic oligonucleotide
uccguugccgccauucagg

SEQ ID NO: 2937868 - RNA, 19 nt, Artificial Sequence
  Description of Artificial Sequence: Synthetic oligonucleotide
uagaccaugagugaugccu

SEQ ID NO: 2937869 - RNA, 19 nt, Artificial Sequence
  Description of Artificial Sequence: Synthetic oligonucleotide
agugauagaacgaucauau

SEQ ID NO: 2937870 - RNA, 19 nt, Artificial Sequence
  Description of Artificial Sequence: Synthetic oligonucleotide
ucauagaccaugagugaug

SEQ ID NO: 2937871 - RNA, 19 nt, Artificial Sequence
  Description of Artificial Sequence: Synthetic oligonucleotide
aaaugucauagaccaugag

SEQ ID NO: 2937872 - RNA, 19 nt, Artificial Sequence
  Description of Artificial Sequence: Synthetic oligonucleotide
uagaacgaucauaugugug

SEQ ID NO: 2937873 - RNA, 19 nt, Artificial Sequence
  Description of Artificial Sequence: Synthetic oligonucleotide
agggucaucuuguuggaag

SEQ ID NO: 2937874 - RNA, 19 nt, Artificial Sequence
  Description of Artificial Sequence: Synthetic oligonucleotide
cugaaggucucgcucaucc

SEQ ID NO: 2937875 - RNA, 19 nt, Artificial Sequence
  Description of Artificial Sequence: Synthetic oligonucleotide
uguuggaagccgucuagag

SEQ ID NO: 2937876 - RNA, 19 nt, Artificial Sequence
  Description of Artificial Sequence: Synthetic oligonucleotide
gaacugagcgagucggagg

SEQ ID NO: 2937877 - RNA, 19 nt, Artificial Sequence
  Description of Artificial Sequence: Synthetic oligonucleotide
cauaugugugcccugcggc

SEQ ID NO: 2937878 - RNA, 19 nt, Artificial Sequence
  Description of Artificial Sequence: Synthetic oligonucleotide
guugccgccauucaggguc

SEQ ID NO: 2937879 - RNA, 19 nt, Artificial Sequence
  Description of Artificial Sequence: Synthetic oligonucleotide
auagaacgaucauaugugu

SEQ ID NO: 2937880 - RNA, 19 nt, Artificial Sequence
  Description of Artificial Sequence: Synthetic oligonucleotide
agcagcagcaccuuguaaa

SEQ ID NO: 2937881 - RNA, 19 nt, Artificial Sequence
  Description of Artificial Sequence: Synthetic oligonucleotide
agucggaggagccuucggg

SEQ ID NO: 2937882 - RNA, 19 nt, Artificial Sequence
  Description of Artificial Sequence: Synthetic oligonucleotide
gaaggucucgcucauccac

SEQ ID NO: 2937883 - RNA, 19 nt, Artificial Sequence
  Description of Artificial Sequence: Synthetic oligonucleotide
cacagugauagaacgauca

SEQ ID NO: 2937884 - RNA, 19 nt, Artificial Sequence
  Description of Artificial Sequence: Synthetic oligonucleotide
accaccaaagaugcgcgcc

SEQ ID NO: 2937885 - RNA, 19 nt, Artificial Sequence
  Description of Artificial Sequence: Synthetic oligonucleotide
ugucauagaccaugaguga

SEQ ID NO: 2937886 - RNA, 19 nt, Artificial Sequence
  Description of Artificial Sequence: Synthetic oligonucleotide
cauagaccaugagugaugc

SEQ ID NO: 2937887 - RNA, 19 nt, Artificial Sequence
  Description of Artificial Sequence: Synthetic oligonucleotide
ucaucuuguuggaagccgu

SEQ ID NO: 2937888 - RNA, 19 nt, Artificial Sequence
  Description of Artificial Sequence: Synthetic oligonucleotide
uccugaacugagcgagucg

SEQ ID NO: 2937889 - RNA, 19 nt, Artificial Sequence
  Description of Artificial Sequence: Synthetic oligonucleotide
augagugaugccucuucuc

SEQ ID NO: 2937890 - RNA, 19 nt, Artificial Sequence
  Description of Artificial Sequence: Synthetic oligonucleotide
ugaacugagcgagucggag

SEQ ID NO: 2937891 - RNA, 19 nt, Artificial Sequence
  Description of Artificial Sequence: Synthetic oligonucleotide
guaaacgcccuccucugag

SEQ ID NO: 2937892 - RNA, 19 nt, Artificial Sequence
  Description of Artificial Sequence: Synthetic oligonucleotide
aaacgcccuccucugagcu

SEQ ID NO: 2937893 - RNA, 19 nt, Artificial Sequence
  Description of Artificial Sequence: Synthetic oligonucleotide
gaucauaugugugcccugc

SEQ ID NO: 2937894 - RNA, 19 nt, Artificial Sequence
  Description of Artificial Sequence: Synthetic oligonucleotide
cuuguuggaagccgucuag

SEQ ID NO: 2937895 - RNA, 19 nt, Artificial Sequence
  Description of Artificial Sequence: Synthetic oligonucleotide
uuguaaacgcccuccucug

SEQ ID NO: 2937896 - RNA, 19 nt, Artificial Sequence
  Description of Artificial Sequence: Synthetic oligonucleotide
gaacgaucauaugugugcc

SEQ ID NO: 2937897 - RNA, 19 nt, Artificial Sequence
  Description of Artificial Sequence: Synthetic oligonucleotide
aaggucucgcucauccacg

SEQ ID NO: 2937898 - RNA, 19 nt, Artificial Sequence
  Description of Artificial Sequence: Synthetic oligonucleotide
uccacagugauagaacgau

SEQ ID NO: 2937899 - RNA, 19 nt, Artificial Sequence
  Description of Artificial Sequence: Synthetic oligonucleotide
aucauaugugugcccugcg

SEQ ID NO: 2937900 - RNA, 19 nt, Artificial Sequence
  Description of Artificial Sequence: Synthetic oligonucleotide
ugcgccacggcucccuccg

SEQ ID NO: 2937901 - RNA, 19 nt, Artificial Sequence
  Description of Artificial Sequence: Synthetic oligonucleotide
gucaucuuguuggaagccg

SEQ ID NO: 2937902 - RNA, 19 nt, Artificial Sequence
  Description of Artificial Sequence: Synthetic oligonucleotide
uccacgggcaugcuccugc

SEQ ID NO: 2937903 - RNA, 19 nt, Artificial Sequence
  Description of Artificial Sequence: Synthetic oligonucleotide
auagaccaugagugaugcc

SEQ ID NO: 2937904 - RNA, 19 nt, Artificial Sequence
  Description of Artificial Sequence: Synthetic oligonucleotide
uucugcgucaggcccgucc

SEQ ID NO: 2937905 - RNA, 19 nt, Artificial Sequence
  Description of Artificial Sequence: Synthetic oligonucleotide
cugccuccugaacugagcg

SEQ ID NO: 2937906 - RNA, 19 nt, Artificial Sequence
  Description of Artificial Sequence: Synthetic oligonucleotide
ugagcgagucggaggagcc

SEQ ID NO: 2937907 - RNA, 19 nt, Artificial Sequence
  Description of Artificial Sequence: Synthetic oligonucleotide
ucuucuccauccacaguga

SEQ ID NO: 2937908 - RNA, 19 nt, Artificial Sequence
  Description of Artificial Sequence: Synthetic oligonucleotide
auaugugugcccugcggcu

SEQ ID NO: 2937909 - RNA, 19 nt, Artificial Sequence
  Description of Artificial Sequence: Synthetic oligonucleotide
auaccaccaaagaugcgcg

SEQ ID NO: 2937910 - RNA, 19 nt, Artificial Sequence
  Description of Artificial Sequence: Synthetic oligonucleotide
uccauccacagugauagaa

SEQ ID NO: 2937911 - RNA, 19 nt, Artificial Sequence
  Description of Artificial Sequence: Synthetic oligonucleotide
ucuuguuggaagccgucua

SEQ ID NO: 2937912 - RNA, 19 nt, Artificial Sequence
  Description of Artificial Sequence: Synthetic oligonucleotide
gucucgcucauccacgggc

SEQ ID NO: 2937913 - RNA, 19 nt, Artificial Sequence
  Description of Artificial Sequence: Synthetic oligonucleotide
auucagggucaucuuguug

SEQ ID NO: 2937914 - RNA, 19 nt, Artificial Sequence
  Description of Artificial Sequence: Synthetic oligonucleotide
uccgaguucccgcuguagu

SEQ ID NO: 2937915 - RNA, 19 nt, Artificial Sequence
  Description of Artificial Sequence: Synthetic oligonucleotide
cuugcccacaccaggcgcc

SEQ ID NO: 2937916 - RNA, 19 nt, Artificial Sequence
  Description of Artificial Sequence: Synthetic oligonucleotide
uguaaacgcccuccucuga

SEQ ID NO: 2937917 - RNA, 19 nt, Artificial Sequence
  Description of Artificial Sequence: Synthetic oligonucleotide
aggcccguccucuauacca

SEQ ID NO: 2937918 - RNA, 19 nt, Artificial Sequence
  Description of Artificial Sequence: Synthetic oligonucleotide
uaaacgcccuccucugagc

SEQ ID NO: 2937919 - RNA, 19 nt, Artificial Sequence
  Description of Artificial Sequence: Synthetic oligonucleotide
ucucgcucauccacgggca

SEQ ID NO: 2937920 - RNA, 19 nt, Artificial Sequence
  Description of Artificial Sequence: Synthetic oligonucleotide
caaaugucauagaccauga

SEQ ID NO: 2937921 - RNA, 19 nt, Artificial Sequence
  Description of Artificial Sequence: Synthetic oligonucleotide
ccaaaugucauagaccaug

SEQ ID NO: 2937922 - RNA, 19 nt, Artificial Sequence
  Description of Artificial Sequence: Synthetic oligonucleotide
agggugugcugccucgacg

SEQ ID NO: 2937923 - RNA, 19 nt, Artificial Sequence
  Description of Artificial Sequence: Synthetic oligonucleotide
guuggaagccgucuagaga

SEQ ID NO: 2937924 - RNA, 19 nt, Artificial Sequence
  Description of Artificial Sequence: Synthetic oligonucleotide
cuuguaaacgcccuccucu

SEQ ID NO: 2937925 - RNA, 19 nt, Artificial Sequence
  Description of Artificial Sequence: Synthetic oligonucleotide
gagccuucgggccagucca

SEQ ID NO: 2937926 - RNA, 19 nt, Artificial Sequence
  Description of Artificial Sequence: Synthetic oligonucleotide
acgaucauaugugugcccu

SEQ ID NO: 2937927 - RNA, 19 nt, Artificial Sequence
  Description of Artificial Sequence: Synthetic oligonucleotide
acgcccuccucugagcugc

SEQ ID NO: 2937928 - RNA, 19 nt, Artificial Sequence
  Description of Artificial Sequence: Synthetic oligonucleotide
ucggaggagccuucgggcc

SEQ ID NO: 2937929 - RNA, 19 nt, Artificial Sequence
  Description of Artificial Sequence: Synthetic oligonucleotide
gucgcugcuagggagcccg

SEQ ID NO: 2937930 - RNA, 19 nt, Artificial Sequence
  Description of Artificial Sequence: Synthetic oligonucleotide
gcuguagucgcugcuaggg

SEQ ID NO: 2937931 - RNA, 19 nt, Artificial Sequence
  Description of Artificial Sequence: Synthetic oligonucleotide
gggugugcugccucgacgg

SEQ ID NO: 2937932 - RNA, 19 nt, Artificial Sequence
  Description of Artificial Sequence: Synthetic oligonucleotide
agugaugccucuucuccau

SEQ ID NO: 2937933 - RNA, 19 nt, Artificial Sequence
  Description of Artificial Sequence: Synthetic oligonucleotide
aggucucgcucauccacgg

SEQ ID NO: 2937934 - RNA, 19 nt, Artificial Sequence
  Description of Artificial Sequence: Synthetic oligonucleotide
gucggaggagccuucgggc

SEQ ID NO: 2937935 - RNA, 19 nt, Artificial Sequence
  Description of Artificial Sequence: Synthetic oligonucleotide
agagcgcucuugcccacac

SEQ ID NO: 2937936 - RNA, 19 nt, Artificial Sequence
  Description of Artificial Sequence: Synthetic oligonucleotide
agccucugccccugugucc

SEQ ID NO: 2937937 - RNA, 19 nt, Artificial Sequence
  Description of Artificial Sequence: Synthetic oligonucleotide
ugcggcuucugcgucaggc

SEQ ID NO: 2937938 - RNA, 19 nt, Artificial Sequence
  Description of Artificial Sequence: Synthetic oligonucleotide
acagugauagaacgaucau

SEQ ID NO: 2937939 - RNA, 19 nt, Artificial Sequence
  Description of Artificial Sequence: Synthetic oligonucleotide
aagaugcgcgccagagcgc

SEQ ID NO: 2937940 - RNA, 19 nt, Artificial Sequence
  Description of Artificial Sequence: Synthetic oligonucleotide
cuauaccaccaaagaugcg

SEQ ID NO: 2937941 - RNA, 19 nt, Artificial Sequence
  Description of Artificial Sequence: Synthetic oligonucleotide
uucuccauccacagugaua

SEQ ID NO: 2937942 - RNA, 19 nt, Artificial Sequence
  Description of Artificial Sequence: Synthetic oligonucleotide
agaccaugagugaugccuc

SEQ ID NO: 2937943 - RNA, 19 nt, Artificial Sequence
  Description of Artificial Sequence: Synthetic oligonucleotide
ucagggucaucuuguugga

SEQ ID NO: 2937944 - RNA, 19 nt, Artificial Sequence
  Description of Artificial Sequence: Synthetic oligonucleotide
gugauagaacgaucauaug

SEQ ID NO: 2937945 - RNA, 19 nt, Artificial Sequence
  Description of Artificial Sequence: Synthetic oligonucleotide
ugagcugcugccuccugaa

SEQ ID NO: 2937946 - RNA, 19 nt, Artificial Sequence
  Description of Artificial Sequence: Synthetic oligonucleotide
ugaaggucucgcucaucca

SEQ ID NO: 2937947 - RNA, 19 nt, Artificial Sequence
  Description of Artificial Sequence: Synthetic oligonucleotide
acgggcaugcuccugcggu

SEQ ID NO: 2937948 - RNA, 19 nt, Artificial Sequence
  Description of Artificial Sequence: Synthetic oligonucleotide
gagugaugccucuucucca

SEQ ID NO: 2937949 - RNA, 19 nt, Artificial Sequence
  Description of Artificial Sequence: Synthetic oligonucleotide
caccuuguaaacgcccucc

SEQ ID NO: 2937950 - RNA, 19 nt, Artificial Sequence
  Description of Artificial Sequence: Synthetic oligonucleotide
acaccaggcgccccaagca

SEQ ID NO: 2937951 - RNA, 19 nt, Artificial Sequence
  Description of Artificial Sequence: Synthetic oligonucleotide
cagcaccuuguaaacgccc

SEQ ID NO: 2937952 - RNA, 19 nt, Artificial Sequence
  Description of Artificial Sequence: Synthetic oligonucleotide
uuguuggaagccgucuaga

SEQ ID NO: 2937953 - RNA, 19 nt, Artificial Sequence
  Description of Artificial Sequence: Synthetic oligonucleotide
cacaccaggcgccccaagc

SEQ ID NO: 2937954 - RNA, 19 nt, Artificial Sequence
  Description of Artificial Sequence: Synthetic oligonucleotide
ucaggcccguccucuauac

SEQ ID NO: 2937955 - RNA, 19 nt, Artificial Sequence
  Description of Artificial Sequence: Synthetic oligonucleotide
ugugcccugcggcuucugc

SEQ ID NO: 2937956 - RNA, 19 nt, Artificial Sequence
  Description of Artificial Sequence: Synthetic oligonucleotide
gugcccugcggcuucugcg

SEQ ID NO: 2937957 - RNA, 19 nt, Artificial Sequence
  Description of Artificial Sequence: Synthetic oligonucleotide
gaguucccgcuguagucgc

SEQ ID NO: 2937958 - RNA, 19 nt, Artificial Sequence
  Description of Artificial Sequence: Synthetic oligonucleotide
ccugaacugagcgagucgg

SEQ ID NO: 2937959 - RNA, 19 nt, Artificial Sequence
  Description of Artificial Sequence: Synthetic oligonucleotide
uccucugagcugcugccuc

SEQ ID NO: 2937960 - RNA, 19 nt, Artificial Sequence
  Description of Artificial Sequence: Synthetic oligonucleotide
aacgcccuccucugagcug

SEQ ID NO: 2937961 - RNA, 19 nt, Artificial Sequence
  Description of Artificial Sequence: Synthetic oligonucleotide
gggucaucuuguuggaagc

SEQ ID NO: 2937962 - RNA, 19 nt, Artificial Sequence
  Description of Artificial Sequence: Synthetic oligonucleotide
ugcuagggagcccggggcu

SEQ ID NO: 2937963 - RNA, 19 nt, Artificial Sequence
  Description of Artificial Sequence: Synthetic oligonucleotide
uguguccgaguucccgcug

SEQ ID NO: 2937964 - RNA, 19 nt, Artificial Sequence
  Description of Artificial Sequence: Synthetic oligonucleotide
augugugcccugcggcuuc

SEQ ID NO: 2937965 - RNA, 19 nt, Artificial Sequence
  Description of Artificial Sequence: Synthetic oligonucleotide
ugcuccugcggugcagugg

SEQ ID NO: 2937966 - RNA, 19 nt, Artificial Sequence
  Description of Artificial Sequence: Synthetic oligonucleotide
gaugccucuucuccaucca

SEQ ID NO: 2937967 - RNA, 19 nt, Artificial Sequence
  Description of Artificial Sequence: Synthetic oligonucleotide
gagucggaggagccuucgg

SEQ ID NO: 2937968 - RNA, 19 nt, Artificial Sequence
  Description of Artificial Sequence: Synthetic oligonucleotide
guagucgcugcuagggagc

SEQ ID NO: 2937969 - RNA, 19 nt, Artificial Sequence
  Description of Artificial Sequence: Synthetic oligonucleotide
accuuguaaacgcccuccu

SEQ ID NO: 2937970 - RNA, 19 nt, Artificial Sequence
  Description of Artificial Sequence: Synthetic oligonucleotide
cugcuagggagcccggggc

SEQ ID NO: 2937971 - RNA, 19 nt, Artificial Sequence
  Description of Artificial Sequence: Synthetic oligonucleotide
uucgggccaguccagccuc

SEQ ID NO: 2937972 - RNA, 19 nt, Artificial Sequence
  Description of Artificial Sequence: Synthetic oligonucleotide
aucuuguuggaagccgucu

SEQ ID NO: 2937973 - RNA, 19 nt, Artificial Sequence
  Description of Artificial Sequence: Synthetic oligonucleotide
uaccaccaaagaugcgcgc

SEQ ID NO: 2937974 - RNA, 19 nt, Artificial Sequence
  Description of Artificial Sequence: Synthetic oligonucleotide
caucuuguuggaagccguc

SEQ ID NO: 2937975 - RNA, 19 nt, Artificial Sequence
  Description of Artificial Sequence: Synthetic oligonucleotide
cuccguugccgccauucag

SEQ ID NO: 2937976 - RNA, 19 nt, Artificial Sequence
  Description of Artificial Sequence: Synthetic oligonucleotide
ugcccugcggcuucugcgu

SEQ ID NO: 2937977 - RNA, 19 nt, Artificial Sequence
  Description of Artificial Sequence: Synthetic oligonucleotide
ggugccggaccccagggug

SEQ ID NO: 2937978 - RNA, 19 nt, Artificial Sequence
  Description of Artificial Sequence: Synthetic oligonucleotide
gccauucagggucaucuug

SEQ ID NO: 2937979 - RNA, 19 nt, Artificial Sequence
  Description of Artificial Sequence: Synthetic oligonucleotide
gcugcuagggagcccgggg

SEQ ID NO: 2937980 - RNA, 19 nt, Artificial Sequence
  Description of Artificial Sequence: Synthetic oligonucleotide
gugugcugccucgacggcg

SEQ ID NO: 2937981 - RNA, 19 nt, Artificial Sequence
  Description of Artificial Sequence: Synthetic oligonucleotide
uggaagccgucuagagaac

SEQ ID NO: 2937982 - RNA, 19 nt, Artificial Sequence
  Description of Artificial Sequence: Synthetic oligonucleotide
gccuccugaacugagcgag

SEQ ID NO: 2937983 - RNA, 19 nt, Artificial Sequence
  Description of Artificial Sequence: Synthetic oligonucleotide
ugccuccugaacugagcga

SEQ ID NO: 2937984 - RNA, 19 nt, Artificial Sequence
  Description of Artificial Sequence: Synthetic oligonucleotide
ucgacggcggucgcgcucc

SEQ ID NO: 2937985 - RNA, 19 nt, Artificial Sequence
  Description of Artificial Sequence: Synthetic oligonucleotide
cagcagcaccuuguaaacg

SEQ ID NO: 2937986 - RNA, 19 nt, Artificial Sequence
  Description of Artificial Sequence: Synthetic oligonucleotide
ggcuagcgccgccugaagg

SEQ ID NO: 2937987 - RNA, 19 nt, Artificial Sequence
  Description of Artificial Sequence: Synthetic oligonucleotide
agaugcgcgccagagcgcu

SEQ ID NO: 2937988 - RNA, 19 nt, Artificial Sequence
  Description of Artificial Sequence: Synthetic oligonucleotide
uagucgcugcuagggagcc

SEQ ID NO: 2937989 - RNA, 19 nt, Artificial Sequence
  Description of Artificial Sequence: Synthetic oligonucleotide
caccaggcgccccaagcag

SEQ ID NO: 2937990 - RNA, 19 nt, Artificial Sequence
  Description of Artificial Sequence: Synthetic oligonucleotide
agcaccuuguaaacgcccu

SEQ ID NO: 2937991 - RNA, 19 nt, Artificial Sequence
  Description of Artificial Sequence: Synthetic oligonucleotide
ggagccuucgggccagucc

SEQ ID NO: 2937992 - RNA, 19 nt, Artificial Sequence
  Description of Artificial Sequence: Synthetic oligonucleotide
ggccaguccagccucugcc

SEQ ID NO: 2937993 - RNA, 19 nt, Artificial Sequence
  Description of Artificial Sequence: Synthetic oligonucleotide
gcugccucgacggcggucg

SEQ ID NO: 2937994 - RNA, 19 nt, Artificial Sequence
  Description of Artificial Sequence: Synthetic oligonucleotide
auccacagugauagaacga

SEQ ID NO: 2937995 - RNA, 19 nt, Artificial Sequence
  Description of Artificial Sequence: Synthetic oligonucleotide
cucauccacgggcaugcuc

SEQ ID NO: 2937996 - RNA, 19 nt, Artificial Sequence
  Description of Artificial Sequence: Synthetic oligonucleotide
acggcggucgcgcucccug

SEQ ID NO: 2937997 - RNA, 19 nt, Artificial Sequence
  Description of Artificial Sequence: Synthetic oligonucleotide
gaccccagggugugcugcc

SEQ ID NO: 2937998 - RNA, 19 nt, Artificial Sequence
  Description of Artificial Sequence: Synthetic oligonucleotide
uugccgccauucaggguca

SEQ ID NO: 2937999 - RNA, 19 nt, Artificial Sequence
  Description of Artificial Sequence: Synthetic oligonucleotide
ccuguguccgaguucccgc

SEQ ID NO: 2938000 - RNA, 19 nt, Artificial Sequence
  Description of Artificial Sequence: Synthetic oligonucleotide
cuccugaacugagcgaguc

SEQ ID NO: 2938001 - RNA, 19 nt, Artificial Sequence
  Description of Artificial Sequence: Synthetic oligonucleotide
acggcucccuccguugccg

SEQ ID NO: 2938002 - RNA, 19 nt, Artificial Sequence
  Description of Artificial Sequence: Synthetic oligonucleotide
uaugugugcccugcggcuu

SEQ ID NO: 2938003 - RNA, 19 nt, Artificial Sequence
  Description of Artificial Sequence: Synthetic oligonucleotide
ggagcccggggcuagcgcc

SEQ ID NO: 2938004 - RNA, 19 nt, Artificial Sequence
  Description of Artificial Sequence: Synthetic oligonucleotide
ggucaucuuguuggaagcc

SEQ ID NO: 2938005 - RNA, 19 nt, Artificial Sequence
  Description of Artificial Sequence: Synthetic oligonucleotide
uccagccucugccccugug

SEQ ID NO: 2938006 - RNA, 19 nt, Artificial Sequence
  Description of Artificial Sequence: Synthetic oligonucleotide
cugccugcgccacggcucc

SEQ ID NO: 2938007 - RNA, 19 nt, Artificial Sequence
  Description of Artificial Sequence: Synthetic oligonucleotide
uagcgccgccugaaggucu

SEQ ID NO: 2938008 - RNA, 19 nt, Artificial Sequence
  Description of Artificial Sequence: Synthetic oligonucleotide
ucgcucauccacgggcaug

SEQ ID NO: 2938009 - RNA, 19 nt, Artificial Sequence
  Description of Artificial Sequence: Synthetic oligonucleotide
cagugauagaacgaucaua

SEQ ID NO: 2938010 - RNA, 19 nt, Artificial Sequence
  Description of Artificial Sequence: Synthetic oligonucleotide
cucccugccugcgccacgg

SEQ ID NO: 2938011 - RNA, 19 nt, Artificial Sequence
  Description of Artificial Sequence: Synthetic oligonucleotide
gccucugccccuguguccg

SEQ ID NO: 2938012 - RNA, 19 nt, Artificial Sequence
  Description of Artificial Sequence: Synthetic oligonucleotide
caccaaagaugcgcgccag

SEQ ID NO: 2938013 - RNA, 19 nt, Artificial Sequence
  Description of Artificial Sequence: Synthetic oligonucleotide
gucauagaccaugagugau

SEQ ID NO: 2938014 - RNA, 19 nt, Artificial Sequence
  Description of Artificial Sequence: Synthetic oligonucleotide
caugagugaugccucuucu

SEQ ID NO: 2938015 - RNA, 19 nt, Artificial Sequence
  Description of Artificial Sequence: Synthetic oligonucleotide
gccccuguguccgaguucc

SEQ ID NO: 2938016 - RNA, 19 nt, Artificial Sequence
  Description of Artificial Sequence: Synthetic oligonucleotide
agucgcugcuagggagccc

SEQ ID NO: 2938017 - RNA, 19 nt, Artificial Sequence
  Description of Artificial Sequence: Synthetic oligonucleotide
cagccucugccccuguguc

SEQ ID NO: 2938018 - RNA, 19 nt, Artificial Sequence
  Description of Artificial Sequence: Synthetic oligonucleotide
ucugccccuguguccgagu

SEQ ID NO: 2938019 - RNA, 19 nt, Artificial Sequence
  Description of Artificial Sequence: Synthetic oligonucleotide
cuguagucgcugcuaggga

SEQ ID NO: 2938020 - RNA, 19 nt, Artificial Sequence
  Description of Artificial Sequence: Synthetic oligonucleotide
cugaacugagcgagucgga

SEQ ID NO: 2938021 - RNA, 19 nt, Artificial Sequence
  Description of Artificial Sequence: Synthetic oligonucleotide
uguccgaguucccgcugua

SEQ ID NO: 2938022 - RNA, 19 nt, Artificial Sequence
  Description of Artificial Sequence: Synthetic oligonucleotide
cugagcugcugccuccuga

SEQ ID NO: 2938023 - RNA, 19 nt, Artificial Sequence
  Description of Artificial Sequence: Synthetic oligonucleotide
cuagggagcccggggcuag

SEQ ID NO: 2938024 - RNA, 19 nt, Artificial Sequence
  Description of Artificial Sequence: Synthetic oligonucleotide
gagcccggggcuagcgccg

SEQ ID NO: 2938025 - RNA, 19 nt, Artificial Sequence
  Description of Artificial Sequence: Synthetic oligonucleotide
ucgcugcuagggagcccgg

SEQ ID NO: 2938026 - RNA, 19 nt, Artificial Sequence
  Description of Artificial Sequence: Synthetic oligonucleotide
gcucuugcccacaccaggc

SEQ ID NO: 2938027 - RNA, 19 nt, Artificial Sequence
  Description of Artificial Sequence: Synthetic oligonucleotide
ccguugccgccauucaggg

SEQ ID NO: 2938028 - RNA, 19 nt, Artificial Sequence
  Description of Artificial Sequence: Synthetic oligonucleotide
cacgggcaugcuccugcgg

SEQ ID NO: 2938029 - RNA, 19 nt, Artificial Sequence
  Description of Artificial Sequence: Synthetic oligonucleotide
uugcccacaccaggcgccc

SEQ ID NO: 2938030 - RNA, 19 nt, Artificial Sequence
  Description of Artificial Sequence: Synthetic oligonucleotide
ggcuucugcgucaggcccg

SEQ ID NO: 2938031 - RNA, 19 nt, Artificial Sequence
  Description of Artificial Sequence: Synthetic oligonucleotide
cuagcgccgccugaagguc

SEQ ID NO: 2938032 - RNA, 19 nt, Artificial Sequence
  Description of Artificial Sequence: Synthetic oligonucleotide
cacggcucccuccguugcc

SEQ ID NO: 2938033 - RNA, 19 nt, Artificial Sequence
  Description of Artificial Sequence: Synthetic oligonucleotide
ugccccuguguccgaguuc

SEQ ID NO: 2938034 - RNA, 19 nt, Artificial Sequence
  Description of Artificial Sequence: Synthetic oligonucleotide
ugccucgacggcggucgcg

SEQ ID NO: 2938035 - RNA, 19 nt, Artificial Sequence
  Description of Artificial Sequence: Synthetic oligonucleotide
gccagagcgcucuugccca

SEQ ID NO: 2938036 - RNA, 19 nt, Artificial Sequence
  Description of Artificial Sequence: Synthetic oligonucleotide
gagcgcucuugcccacacc

SEQ ID NO: 2938037 - RNA, 19 nt, Artificial Sequence
  Description of Artificial Sequence: Synthetic oligonucleotide
ccaugagugaugccucuuc

SEQ ID NO: 2938038 - RNA, 19 nt, Artificial Sequence
  Description of Artificial Sequence: Synthetic oligonucleotide
ggucucgcucauccacggg

SEQ ID NO: 2938039 - RNA, 19 nt, Artificial Sequence
  Description of Artificial Sequence: Synthetic oligonucleotide
gaccaugagugaugccucu

SEQ ID NO: 2938040 - RNA, 19 nt, Artificial Sequence
  Description of Artificial Sequence: Synthetic oligonucleotide
cgaguucccgcuguagucg

SEQ ID NO: 2938041 - RNA, 19 nt, Artificial Sequence
  Description of Artificial Sequence: Synthetic oligonucleotide
augcuccugcggugcagug

SEQ ID NO: 2938042 - RNA, 19 nt, Artificial Sequence
  Description of Artificial Sequence: Synthetic oligonucleotide
gccaguccagccucugccc

SEQ ID NO: 2938043 - RNA, 19 nt, Artificial Sequence
  Description of Artificial Sequence: Synthetic oligonucleotide
agcgagucggaggagccuu

SEQ ID NO: 2938044 - RNA, 19 nt, Artificial Sequence
  Description of Artificial Sequence: Synthetic oligonucleotide
guccgaguucccgcuguag

SEQ ID NO: 2938045 - RNA, 19 nt, Artificial Sequence
  Description of Artificial Sequence: Synthetic oligonucleotide
aguccagccucugccccug

SEQ ID NO: 2938046 - RNA, 19 nt, Artificial Sequence
  Description of Artificial Sequence: Synthetic oligonucleotide
caggcccguccucuauacc

SEQ ID NO: 2938047 - RNA, 19 nt, Artificial Sequence
  Description of Artificial Sequence: Synthetic oligonucleotide
ggggugccggaccccaggg

SEQ ID NO: 2938048 - RNA, 19 nt, Artificial Sequence
  Description of Artificial Sequence: Synthetic oligonucleotide
cagggugugcugccucgac

SEQ ID NO: 2938049 - RNA, 19 nt, Artificial Sequence
  Description of Artificial Sequence: Synthetic oligonucleotide
agggagcccggggcuagcg

SEQ ID NO: 2938050 - RNA, 19 nt, Artificial Sequence
  Description of Artificial Sequence: Synthetic oligonucleotide
gcggcuucugcgucaggcc

SEQ ID NO: 2938051 - RNA, 19 nt, Artificial Sequence
  Description of Artificial Sequence: Synthetic oligonucleotide
ccuucgggccaguccagcc

SEQ ID NO: 2938052 - RNA, 19 nt, Artificial Sequence
  Description of Artificial Sequence: Synthetic oligonucleotide
ccgaguucccgcuguaguc

SEQ ID NO: 2938053 - RNA, 19 nt, Artificial Sequence
  Description of Artificial Sequence: Synthetic oligonucleotide
ccaguccagccucugcccc

SEQ ID NO: 2938054 - RNA, 19 nt, Artificial Sequence
  Description of Artificial Sequence: Synthetic oligonucleotide
ccacagugauagaacgauc

SEQ ID NO: 2938055 - RNA, 19 nt, Artificial Sequence
  Description of Artificial Sequence: Synthetic oligonucleotide
augcgcgccagagcgcucu

SEQ ID NO: 2938056 - RNA, 19 nt, Artificial Sequence
  Description of Artificial Sequence: Synthetic oligonucleotide
ucgcgcucccugccugcgc

SEQ ID NO: 2938057 - RNA, 19 nt, Artificial Sequence
  Description of Artificial Sequence: Synthetic oligonucleotide
gcagcaccuuguaaacgcc

SEQ ID NO: 2938058 - RNA, 19 nt, Artificial Sequence
  Description of Artificial Sequence: Synthetic oligonucleotide
ccuuguaaacgcccuccuc

SEQ ID NO: 2938059 - RNA, 19 nt, Artificial Sequence
  Description of Artificial Sequence: Synthetic oligonucleotide
agcgccgccugaaggucuc

SEQ ID NO: 2938060 - RNA, 19 nt, Artificial Sequence
  Description of Artificial Sequence: Synthetic oligonucleotide
cugcgccacggcucccucc

SEQ ID NO: 2938061 - RNA, 19 nt, Artificial Sequence
  Description of Artificial Sequence: Synthetic oligonucleotide
ugccggaccccagggugug

SEQ ID NO: 2938062 - RNA, 19 nt, Artificial Sequence
  Description of Artificial Sequence: Synthetic oligonucleotide
cccagggugugcugccucg

SEQ ID NO: 2938063 - RNA, 19 nt, Artificial Sequence
  Description of Artificial Sequence: Synthetic oligonucleotide
ccugccugcgccacggcuc

SEQ ID NO: 2938064 - RNA, 19 nt, Artificial Sequence
  Description of Artificial Sequence: Synthetic oligonucleotide
ucgggccaguccagccucu

SEQ ID NO: 2938065 - RNA, 19 nt, Artificial Sequence
  Description of Artificial Sequence: Synthetic oligonucleotide
cucgacggcggucgcgcuc

SEQ ID NO: 2938066 - RNA, 19 nt, Artificial Sequence
  Description of Artificial Sequence: Synthetic oligonucleotide
ggugugcugccucgacggc

SEQ ID NO: 2938067 - RNA, 19 nt, Artificial Sequence
  Description of Artificial Sequence: Synthetic oligonucleotide
gcuagcgccgccugaaggu

SEQ ID NO: 2938068 - RNA, 19 nt, Artificial Sequence
  Description of Artificial Sequence: Synthetic oligonucleotide
aggagccuucgggccaguc

SEQ ID NO: 2938069 - RNA, 19 nt, Artificial Sequence
  Description of Artificial Sequence: Synthetic oligonucleotide
gcugccuccugaacugagc

SEQ ID NO: 2938070 - RNA, 19 nt, Artificial Sequence
  Description of Artificial Sequence: Synthetic oligonucleotide
cgccagagcgcucuugccc

SEQ ID NO: 2938071 - RNA, 19 nt, Artificial Sequence
  Description of Artificial Sequence: Synthetic oligonucleotide
ugugugcccugcggcuucu

SEQ ID NO: 2938072 - RNA, 19 nt, Artificial Sequence
  Description of Artificial Sequence: Synthetic oligonucleotide
accaugagugaugccucuu

SEQ ID NO: 2938073 - RNA, 19 nt, Artificial Sequence
  Description of Artificial Sequence: Synthetic oligonucleotide
cuccugcggugcagugggg

SEQ ID NO: 2938074 - RNA, 19 nt, Artificial Sequence
  Description of Artificial Sequence: Synthetic oligonucleotide
agcccggggcuagcgccgc

SEQ ID NO: 2938075 - RNA, 19 nt, Artificial Sequence
  Description of Artificial Sequence: Synthetic oligonucleotide
ggaggagccuucgggccag

SEQ ID NO: 2938076 - RNA, 19 nt, Artificial Sequence
  Description of Artificial Sequence: Synthetic oligonucleotide
cccuguguccgaguucccg

SEQ ID NO: 2938077 - RNA, 19 nt, Artificial Sequence
  Description of Artificial Sequence: Synthetic oligonucleotide
ggaccccagggugugcugc

SEQ ID NO: 2938078 - RNA, 19 nt, Artificial Sequence
  Description of Artificial Sequence: Synthetic oligonucleotide
ccauucagggucaucuugu

SEQ ID NO: 2938079 - RNA, 19 nt, Artificial Sequence
  Description of Artificial Sequence: Synthetic oligonucleotide
gccacggcucccuccguug

SEQ ID NO: 2938080 - RNA, 19 nt, Artificial Sequence
  Description of Artificial Sequence: Synthetic oligonucleotide
gucaggcccguccucuaua

SEQ ID NO: 2938081 - RNA, 19 nt, Artificial Sequence
  Description of Artificial Sequence: Synthetic oligonucleotide
gcaccuuguaaacgcccuc

SEQ ID NO: 2938082 - RNA, 19 nt, Artificial Sequence
  Description of Artificial Sequence: Synthetic oligonucleotide
cucugccccuguguccgag

SEQ ID NO: 2938083 - RNA, 19 nt, Artificial Sequence
  Description of Artificial Sequence: Synthetic oligonucleotide
ccucuauaccaccaaagau

SEQ ID NO: 2938084 - RNA, 19 nt, Artificial Sequence
  Description of Artificial Sequence: Synthetic oligonucleotide
ccgcuguagucgcugcuag

SEQ ID NO: 2938085 - RNA, 19 nt, Artificial Sequence
  Description of Artificial Sequence: Synthetic oligonucleotide
cuucgggccaguccagccu

SEQ ID NO: 2938086 - RNA, 19 nt, Artificial Sequence
  Description of Artificial Sequence: Synthetic oligonucleotide
cgcucauccacgggcaugc

SEQ ID NO: 2938087 - RNA, 19 nt, Artificial Sequence
  Description of Artificial Sequence: Synthetic oligonucleotide
gggcaugcuccugcggugc

SEQ ID NO: 2938088 - RNA, 19 nt, Artificial Sequence
  Description of Artificial Sequence: Synthetic oligonucleotide
guguccgaguucccgcugu

SEQ ID NO: 2938089 - RNA, 19 nt, Artificial Sequence
  Description of Artificial Sequence: Synthetic oligonucleotide
cuguguccgaguucccgcu

SEQ ID NO: 2938090 - RNA, 19 nt, Artificial Sequence
  Description of Artificial Sequence: Synthetic oligonucleotide
gcccguccucuauaccacc

SEQ ID NO: 2938091 - RNA, 19 nt, Artificial Sequence
  Description of Artificial Sequence: Synthetic oligonucleotide
uagggagcccggggcuagc

SEQ ID NO: 2938092 - RNA, 19 nt, Artificial Sequence
  Description of Artificial Sequence: Synthetic oligonucleotide
gggccaguccagccucugc

SEQ ID NO: 2938093 - RNA, 19 nt, Artificial Sequence
  Description of Artificial Sequence: Synthetic oligonucleotide
ccacgggcaugcuccugcg

SEQ ID NO: 2938094 - RNA, 19 nt, Artificial Sequence
  Description of Artificial Sequence: Synthetic oligonucleotide
cauucagggucaucuuguu

SEQ ID NO: 2938095 - RNA, 19 nt, Artificial Sequence
  Description of Artificial Sequence: Synthetic oligonucleotide
gccucgacggcggucgcgc

SEQ ID NO: 2938096 - RNA, 19 nt, Artificial Sequence
  Description of Artificial Sequence: Synthetic oligonucleotide
cgaucauaugugugcccug

SEQ ID NO: 2938097 - RNA, 19 nt, Artificial Sequence
  Description of Artificial Sequence: Synthetic oligonucleotide
ccgccugaaggucucgcuc

SEQ ID NO: 2938098 - RNA, 19 nt, Artificial Sequence
  Description of Artificial Sequence: Synthetic oligonucleotide
ggcccguccucuauaccac

SEQ ID NO: 2938099 - RNA, 19 nt, Artificial Sequence
  Description of Artificial Sequence: Synthetic oligonucleotide
cuucuccauccacagugau

SEQ ID NO: 2938100 - RNA, 19 nt, Artificial Sequence
  Description of Artificial Sequence: Synthetic oligonucleotide
auccacgggcaugcuccug

SEQ ID NO: 2938101 - RNA, 19 nt, Artificial Sequence
  Description of Artificial Sequence: Synthetic oligonucleotide
ggcggucgcgcucccugcc

SEQ ID NO: 2938102 - RNA, 19 nt, Artificial Sequence
  Description of Artificial Sequence: Synthetic oligonucleotide
cgccccaagcagcagcacc

SEQ ID NO: 2938103 - RNA, 19 nt, Artificial Sequence
  Description of Artificial Sequence: Synthetic oligonucleotide
agccuucgggccaguccag

SEQ ID NO: 2938104 - RNA, 19 nt, Artificial Sequence
  Description of Artificial Sequence: Synthetic oligonucleotide
aguucccgcuguagucgcu

SEQ ID NO: 2938105 - RNA, 19 nt, Artificial Sequence
  Description of Artificial Sequence: Synthetic oligonucleotide
gggagcccggggcuagcgc

SEQ ID NO: 2938106 - RNA, 19 nt, Artificial Sequence
  Description of Artificial Sequence: Synthetic oligonucleotide
cgcuguagucgcugcuagg

SEQ ID NO: 2938107 - RNA, 19 nt, Artificial Sequence
  Description of Artificial Sequence: Synthetic oligonucleotide
gggcuagcgccgccugaag

SEQ ID NO: 2938108 - RNA, 19 nt, Artificial Sequence
  Description of Artificial Sequence: Synthetic oligonucleotide
ggcucccuccguugccgcc

SEQ ID NO: 2938109 - RNA, 19 nt, Artificial Sequence
  Description of Artificial Sequence: Synthetic oligonucleotide
cuccauccacagugauaga

SEQ ID NO: 2938110 - RNA, 19 nt, Artificial Sequence
  Description of Artificial Sequence: Synthetic oligonucleotide
ccacggcucccuccguugc

SEQ ID NO: 2938111 - RNA, 19 nt, Artificial Sequence
  Description of Artificial Sequence: Synthetic oligonucleotide
gcaugcuccugcggugcag

SEQ ID NO: 2938112 - RNA, 19 nt, Artificial Sequence
  Description of Artificial Sequence: Synthetic oligonucleotide
gcucccugccugcgccacg

SEQ ID NO: 2938113 - RNA, 19 nt, Artificial Sequence
  Description of Artificial Sequence: Synthetic oligonucleotide
cugccucgacggcggucgc

SEQ ID NO: 2938114 - RNA, 19 nt, Artificial Sequence
  Description of Artificial Sequence: Synthetic oligonucleotide
caugcuccugcggugcagu

SEQ ID NO: 2938115 - RNA, 19 nt, Artificial Sequence
  Description of Artificial Sequence: Synthetic oligonucleotide
cccuccguugccgccauuc

SEQ ID NO: 2938116 - RNA, 19 nt, Artificial Sequence
  Description of Artificial Sequence: Synthetic oligonucleotide
cccguccucuauaccacca

SEQ ID NO: 2938117 - RNA, 19 nt, Artificial Sequence
  Description of Artificial Sequence: Synthetic oligonucleotide
ccugcggcuucugcgucag

SEQ ID NO: 2938118 - RNA, 19 nt, Artificial Sequence
  Description of Artificial Sequence: Synthetic oligonucleotide
gaugcgcgccagagcgcuc

SEQ ID NO: 2938119 - RNA, 19 nt, Artificial Sequence
  Description of Artificial Sequence: Synthetic oligonucleotide
accccagggugugcugccu

SEQ ID NO: 2938120 - RNA, 19 nt, Artificial Sequence
  Description of Artificial Sequence: Synthetic oligonucleotide
ccaggcgccccaagcagca

SEQ ID NO: 2938121 - RNA, 19 nt, Artificial Sequence
  Description of Artificial Sequence: Synthetic oligonucleotide
cugcggcuucugcgucagg

SEQ ID NO: 2938122 - RNA, 19 nt, Artificial Sequence
  Description of Artificial Sequence: Synthetic oligonucleotide
cagggucaucuuguuggaa

SEQ ID NO: 2938123 - RNA, 19 nt, Artificial Sequence
  Description of Artificial Sequence: Synthetic oligonucleotide
gagcgagucggaggagccu

SEQ ID NO: 2938124 - RNA, 19 nt, Artificial Sequence
  Description of Artificial Sequence: Synthetic oligonucleotide
ggcaugcuccugcggugca

SEQ ID NO: 2938125 - RNA, 19 nt, Artificial Sequence
  Description of Artificial Sequence: Synthetic oligonucleotide
cgccugaaggucucgcuca

SEQ ID NO: 2938126 - RNA, 19 nt, Artificial Sequence
  Description of Artificial Sequence: Synthetic oligonucleotide
cgcgcucccugccugcgcc

SEQ ID NO: 2938127 - RNA, 19 nt, Artificial Sequence
  Description of Artificial Sequence: Synthetic oligonucleotide
caggcgccccaagcagcag

SEQ ID NO: 2938128 - RNA, 19 nt, Artificial Sequence
  Description of Artificial Sequence: Synthetic oligonucleotide
ugcgcgccagagcgcucuu

SEQ ID NO: 2938129 - RNA, 19 nt, Artificial Sequence
  Description of Artificial Sequence: Synthetic oligonucleotide
cgagucggaggagccuucg

SEQ ID NO: 2938130 - RNA, 19 nt, Artificial Sequence
  Description of Artificial Sequence: Synthetic oligonucleotide
ccgccauucagggucaucu

SEQ ID NO: 2938131 - RNA, 19 nt, Artificial Sequence
  Description of Artificial Sequence: Synthetic oligonucleotide
cauccacgggcaugcuccu

SEQ ID NO: 2938132 - RNA, 19 nt, Artificial Sequence
  Description of Artificial Sequence: Synthetic oligonucleotide
ccagagcgcucuugcccac

SEQ ID NO: 2938133 - RNA, 19 nt, Artificial Sequence
  Description of Artificial Sequence: Synthetic oligonucleotide
gccuucgggccaguccagc

SEQ ID NO: 2938134 - RNA, 19 nt, Artificial Sequence
  Description of Artificial Sequence: Synthetic oligonucleotide
ggggcuagcgccgccugaa

SEQ ID NO: 2938135 - RNA, 19 nt, Artificial Sequence
  Description of Artificial Sequence: Synthetic oligonucleotide
gcccacaccaggcgcccca

SEQ ID NO: 2938136 - RNA, 19 nt, Artificial Sequence
  Description of Artificial Sequence: Synthetic oligonucleotide
gcucccuccguugccgcca

SEQ ID NO: 2938137 - RNA, 19 nt, Artificial Sequence
  Description of Artificial Sequence: Synthetic oligonucleotide
cagagcgcucuugcccaca

SEQ ID NO: 2938138 - RNA, 19 nt, Artificial Sequence
  Description of Artificial Sequence: Synthetic oligonucleotide
cgggcaugcuccugcggug

SEQ ID NO: 2938139 - RNA, 19 nt, Artificial Sequence
  Description of Artificial Sequence: Synthetic oligonucleotide
cguccucuauaccaccaaa

SEQ ID NO: 2938140 - RNA, 19 nt, Artificial Sequence
  Description of Artificial Sequence: Synthetic oligonucleotide
ccuccguugccgccauuca

SEQ ID NO: 2938141 - RNA, 19 nt, Artificial Sequence
  Description of Artificial Sequence: Synthetic oligonucleotide
gugccggaccccagggugu

SEQ ID NO: 2938142 - RNA, 19 nt, Artificial Sequence
  Description of Artificial Sequence: Synthetic oligonucleotide
cuccucugagcugcugccu

SEQ ID NO: 2938143 - RNA, 19 nt, Artificial Sequence
  Description of Artificial Sequence: Synthetic oligonucleotide
ccugaaggucucgcucauc

SEQ ID NO: 2938144 - RNA, 19 nt, Artificial Sequence
  Description of Artificial Sequence: Synthetic oligonucleotide
ccacaccaggcgccccaag

SEQ ID NO: 2938145 - RNA, 19 nt, Artificial Sequence
  Description of Artificial Sequence: Synthetic oligonucleotide
gugugcccugcggcuucug

SEQ ID NO: 2938146 - RNA, 19 nt, Artificial Sequence
  Description of Artificial Sequence: Synthetic oligonucleotide
gccgccugaaggucucgcu

SEQ ID NO: 2938147 - RNA, 19 nt, Artificial Sequence
  Description of Artificial Sequence: Synthetic oligonucleotide
ccguccucuauaccaccaa

SEQ ID NO: 2938148 - RNA, 19 nt, Artificial Sequence
  Description of Artificial Sequence: Synthetic oligonucleotide
cucgcucauccacgggcau

SEQ ID NO: 2938149 - RNA, 19 nt, Artificial Sequence
  Description of Artificial Sequence: Synthetic oligonucleotide
ccccagggugugcugccuc

SEQ ID NO: 2938150 - RNA, 19 nt, Artificial Sequence
  Description of Artificial Sequence: Synthetic oligonucleotide
cugccccuguguccgaguu

SEQ ID NO: 2938151 - RNA, 19 nt, Artificial Sequence
  Description of Artificial Sequence: Synthetic oligonucleotide
ccagccucugccccugugu

SEQ ID NO: 2938152 - RNA, 19 nt, Artificial Sequence
  Description of Artificial Sequence: Synthetic oligonucleotide
ugccgccauucagggucau

SEQ ID NO: 2938153 - RNA, 19 nt, Artificial Sequence
  Description of Artificial Sequence: Synthetic oligonucleotide
gcuagggagcccggggcua

SEQ ID NO: 2938154 - RNA, 19 nt, Artificial Sequence
  Description of Artificial Sequence: Synthetic oligonucleotide
gcccugcggcuucugcguc

SEQ ID NO: 2938155 - RNA, 19 nt, Artificial Sequence
  Description of Artificial Sequence: Synthetic oligonucleotide
ccccuguguccgaguuccc

SEQ ID NO: 2938156 - RNA, 19 nt, Artificial Sequence
  Description of Artificial Sequence: Synthetic oligonucleotide
cccugcggcuucugcguca

SEQ ID NO: 2938157 - RNA, 19 nt, Artificial Sequence
  Description of Artificial Sequence: Synthetic oligonucleotide
cggaggagccuucgggcca

SEQ ID NO: 2938158 - RNA, 19 nt, Artificial Sequence
  Description of Artificial Sequence: Synthetic oligonucleotide
ucccuccguugccgccauu

SEQ ID NO: 2938159 - RNA, 19 nt, Artificial Sequence
  Description of Artificial Sequence: Synthetic oligonucleotide
cgcugcuagggagcccggg

SEQ ID NO: 2938160 - RNA, 19 nt, Artificial Sequence
  Description of Artificial Sequence: Synthetic oligonucleotide
gcgagucggaggagccuuc

SEQ ID NO: 2938161 - RNA, 19 nt, Artificial Sequence
  Description of Artificial Sequence: Synthetic oligonucleotide
cuucugcgucaggcccguc

SEQ ID NO: 2938162 - RNA, 19 nt, Artificial Sequence
  Description of Artificial Sequence: Synthetic oligonucleotide
ccggggcuagcgccgccug

SEQ ID NO: 2938163 - RNA, 19 nt, Artificial Sequence
  Description of Artificial Sequence: Synthetic oligonucleotide
ccugcgccacggcucccuc

SEQ ID NO: 2938164 - RNA, 19 nt, Artificial Sequence
  Description of Artificial Sequence: Synthetic oligonucleotide
cccaaaugucauagaccau

SEQ ID NO: 2938165 - RNA, 19 nt, Artificial Sequence
  Description of Artificial Sequence: Synthetic oligonucleotide
gggugccggaccccagggu

SEQ ID NO: 2938166 - RNA, 19 nt, Artificial Sequence
  Description of Artificial Sequence: Synthetic oligonucleotide
gccgccauucagggucauc

SEQ ID NO: 2938167 - RNA, 19 nt, Artificial Sequence
  Description of Artificial Sequence: Synthetic oligonucleotide
cggucgcgcucccugccug

SEQ ID NO: 2938168 - RNA, 19 nt, Artificial Sequence
  Description of Artificial Sequence: Synthetic oligonucleotide
cggcggucgcgcucccugc

SEQ ID NO: 2938169 - RNA, 19 nt, Artificial Sequence
  Description of Artificial Sequence: Synthetic oligonucleotide
cccgcuguagucgcugcua

SEQ ID NO: 2938170 - RNA, 19 nt, Artificial Sequence
  Description of Artificial Sequence: Synthetic oligonucleotide
gcgccgccugaaggucucg

SEQ ID NO: 2938171 - RNA, 19 nt, Artificial Sequence
  Description of Artificial Sequence: Synthetic oligonucleotide
cggcucccuccguugccgc

SEQ ID NO: 2938172 - RNA, 19 nt, Artificial Sequence
  Description of Artificial Sequence: Synthetic oligonucleotide
ccuccugaacugagcgagu

SEQ ID NO: 2938173 - RNA, 19 nt, Artificial Sequence
  Description of Artificial Sequence: Synthetic oligonucleotide
gcgucaggcccguccucua

SEQ ID NO: 2938174 - RNA, 19 nt, Artificial Sequence
  Description of Artificial Sequence: Synthetic oligonucleotide
ccagggugugcugccucga

SEQ ID NO: 2938175 - RNA, 19 nt, Artificial Sequence
  Description of Artificial Sequence: Synthetic oligonucleotide
gcccuccucugagcugcug

SEQ ID NO: 2938176 - RNA, 19 nt, Artificial Sequence
  Description of Artificial Sequence: Synthetic oligonucleotide
gcgcucccugccugcgcca

SEQ ID NO: 2938177 - RNA, 19 nt, Artificial Sequence
  Description of Artificial Sequence: Synthetic oligonucleotide
cgccgccugaaggucucgc

SEQ ID NO: 2938178 - RNA, 19 nt, Artificial Sequence
  Description of Artificial Sequence: Synthetic oligonucleotide
gacggcggucgcgcucccu

SEQ ID NO: 2938179 - RNA, 19 nt, Artificial Sequence
  Description of Artificial Sequence: Synthetic oligonucleotide
gccggaccccagggugugc

SEQ ID NO: 2938180 - RNA, 19 nt, Artificial Sequence
  Description of Artificial Sequence: Synthetic oligonucleotide
cucccuccguugccgccau

SEQ ID NO: 2938181 - RNA, 19 nt, Artificial Sequence
  Description of Artificial Sequence: Synthetic oligonucleotide
gaggagccuucgggccagu

SEQ ID NO: 2938182 - RNA, 19 nt, Artificial Sequence
  Description of Artificial Sequence: Synthetic oligonucleotide
cgcucccugccugcgccac

SEQ ID NO: 2938183 - RNA, 19 nt, Artificial Sequence
  Description of Artificial Sequence: Synthetic oligonucleotide
ccucugccccuguguccga

SEQ ID NO: 2938184 - RNA, 19 nt, Artificial Sequence
  Description of Artificial Sequence: Synthetic oligonucleotide
gccugcgccacggcucccu

SEQ ID NO: 2938185 - RNA, 19 nt, Artificial Sequence
  Description of Artificial Sequence: Synthetic oligonucleotide
cgggccaguccagccucug

SEQ ID NO: 2938186 - RNA, 19 nt, Artificial Sequence
  Description of Artificial Sequence: Synthetic oligonucleotide
ccggaccccagggugugcu

SEQ ID NO: 2938187 - RNA, 19 nt, Artificial Sequence
  Description of Artificial Sequence: Synthetic oligonucleotide
gcucauccacgggcaugcu

SEQ ID NO: 2938188 - RNA, 19 nt, Artificial Sequence
  Description of Artificial Sequence: Synthetic oligonucleotide
cguugccgccauucagggu

SEQ ID NO: 2938189 - RNA, 19 nt, Artificial Sequence
  Description of Artificial Sequence: Synthetic oligonucleotide
cccacaccaggcgccccaa

SEQ ID NO: 2938190 - RNA, 19 nt, Artificial Sequence
  Description of Artificial Sequence: Synthetic oligonucleotide
cggggcuagcgccgccuga

SEQ ID NO: 2938191 - RNA, 19 nt, Artificial Sequence
  Description of Artificial Sequence: Synthetic oligonucleotide
cgacggcggucgcgcuccc

SEQ ID NO: 2938192 - RNA, 19 nt, Artificial Sequence
  Description of Artificial Sequence: Synthetic oligonucleotide
cgucaggcccguccucuau

SEQ ID NO: 2938193 - RNA, 19 nt, Artificial Sequence
  Description of Artificial Sequence: Synthetic oligonucleotide
ccucgacggcggucgcgcu

SEQ ID NO: 2938194 - RNA, 19 nt, Artificial Sequence
  Description of Artificial Sequence: Synthetic oligonucleotide
cccggggcuagcgccgccu

SEQ ID NO: 2938195 - RNA, 19 nt, Artificial Sequence
  Description of Artificial Sequence: Synthetic oligonucleotide
gcgccacggcucccuccgu

SEQ ID NO: 2938196 - RNA, 19 nt, Artificial Sequence
  Description of Artificial Sequence: Synthetic oligonucleotide
ccccaagcagcagcaccuu

SEQ ID NO: 2938197 - RNA, 19 nt, Artificial Sequence
  Description of Artificial Sequence: Synthetic oligonucleotide
cgccacggcucccuccguu

SEQ ID NO: 2938198 - RNA, 19 nt, Artificial Sequence
  Description of Artificial Sequence: Synthetic oligonucleotide
cgcccuccucugagcugcu

SEQ ID NO: 2938199 - RNA, 19 nt, Artificial Sequence
  Description of Artificial Sequence: Synthetic oligonucleotide
aaauuaaucauuucuuuac

SEQ ID NO: 2938200 - RNA, 19 nt, Artificial Sequence
  Description of Artificial Sequence: Synthetic oligonucleotide
aaaaggauguauaacaucc

SEQ ID NO: 2938201 - RNA, 19 nt, Artificial Sequence
  Description of Artificial Sequence: Synthetic oligonucleotide
aauaauuaguuucuaacag

SEQ ID NO: 2938202 - RNA, 19 nt, Artificial Sequence
  Description of Artificial Sequence: Synthetic oligonucleotide
uauauuuccauuuucaucu

SEQ ID NO: 2938203 - RNA, 19 nt, Artificial Sequence
  Description of Artificial Sequence: Synthetic oligonucleotide
aagaauaucauuaaaagga

SEQ ID NO: 2938204 - RNA, 19 nt, Artificial Sequence
  Description of Artificial Sequence: Synthetic oligonucleotide
uggaguauuaaccauacag

SEQ ID NO: 2938205 - RNA, 19 nt, Artificial Sequence
  Description of Artificial Sequence: Synthetic oligonucleotide
aaacauuggaguauuaacc

SEQ ID NO: 2938206 - RNA, 19 nt, Artificial Sequence
  Description of Artificial Sequence: Synthetic oligonucleotide
aauuguucccaccaaaguc

SEQ ID NO: 2938207 - RNA, 19 nt, Artificial Sequence
  Description of Artificial Sequence: Synthetic oligonucleotide
uccauuuucaucuucuucg

SEQ ID NO: 2938208 - RNA, 19 nt, Artificial Sequence
  Description of Artificial Sequence: Synthetic oligonucleotide
auuaaaaggauguauaaca

SEQ ID NO: 2938209 - RNA, 19 nt, Artificial Sequence
  Description of Artificial Sequence: Synthetic oligonucleotide
ucaagaauaucauuaaaag

SEQ ID NO: 2938210 - RNA, 19 nt, Artificial Sequence
  Description of Artificial Sequence: Synthetic oligonucleotide
uucaaaauuaaucauuucu

SEQ ID NO: 2938211 - RNA, 19 nt, Artificial Sequence
  Description of Artificial Sequence: Synthetic oligonucleotide
uuuaagaacaucuucuuug

SEQ ID NO: 2938212 - RNA, 19 nt, Artificial Sequence
  Description of Artificial Sequence: Synthetic oligonucleotide
auauuuucaaaauuaauca

SEQ ID NO: 2938213 - RNA, 19 nt, Artificial Sequence
  Description of Artificial Sequence: Synthetic oligonucleotide
auacacacaaaucaaaguc

SEQ ID NO: 2938214 - RNA, 19 nt, Artificial Sequence
  Description of Artificial Sequence: Synthetic oligonucleotide
uccauuuuaaucuuggggc

SEQ ID NO: 2938215 - RNA, 19 nt, Artificial Sequence
  Description of Artificial Sequence: Synthetic oligonucleotide
uggacauacacacaaauca

SEQ ID NO: 2938216 - RNA, 19 nt, Artificial Sequence
  Description of Artificial Sequence: Synthetic oligonucleotide
uuaaucauuucuuuacagg

SEQ ID NO: 2938217 - RNA, 19 nt, Artificial Sequence
  Description of Artificial Sequence: Synthetic oligonucleotide
guauuaaccauacagacac

SEQ ID NO: 2938218 - RNA, 19 nt, Artificial Sequence
  Description of Artificial Sequence: Synthetic oligonucleotide
uuuuauauuuccauuuuca

SEQ ID NO: 2938219 - RNA, 19 nt, Artificial Sequence
  Description of Artificial Sequence: Synthetic oligonucleotide
uguauaacauccauuacac

SEQ ID NO: 2938220 - RNA, 19 nt, Artificial Sequence
  Description of Artificial Sequence: Synthetic oligonucleotide
aauaucauuaaaaggaugu

SEQ ID NO: 2938221 - RNA, 19 nt, Artificial Sequence
  Description of Artificial Sequence: Synthetic oligonucleotide
uauaacauccauuacacau

SEQ ID NO: 2938222 - RNA, 19 nt, Artificial Sequence
  Description of Artificial Sequence: Synthetic oligonucleotide
acuguguggacauacacac

SEQ ID NO: 2938223 - RNA, 19 nt, Artificial Sequence
  Description of Artificial Sequence: Synthetic oligonucleotide
caagaauaucauuaaaagg

SEQ ID NO: 2938224 - RNA, 19 nt, Artificial Sequence
  Description of Artificial Sequence: Synthetic oligonucleotide
aucuucuuuguuuuaaugg

SEQ ID NO: 2938225 - RNA, 19 nt, Artificial Sequence
  Description of Artificial Sequence: Synthetic oligonucleotide
caggacaauaacuagagag

SEQ ID NO: 2938226 - RNA, 19 nt, Artificial Sequence
  Description of Artificial Sequence: Synthetic oligonucleotide
aacauuggaguauuaacca

SEQ ID NO: 2938227 - RNA, 19 nt, Artificial Sequence
  Description of Artificial Sequence: Synthetic oligonucleotide
uuacagguaaacauuggag

SEQ ID NO: 2938228 - RNA, 19 nt, Artificial Sequence
  Description of Artificial Sequence: Synthetic oligonucleotide
augacuucaaacuauggug

SEQ ID NO: 2938229 - RNA, 19 nt, Artificial Sequence
  Description of Artificial Sequence: Synthetic oligonucleotide
uaaucauuucuuuacaggu

SEQ ID NO: 2938230 - RNA, 19 nt, Artificial Sequence
  Description of Artificial Sequence: Synthetic oligonucleotide
uaggcauccauuuuaaucu

SEQ ID NO: 2938231 - RNA, 19 nt, Artificial Sequence
  Description of Artificial Sequence: Synthetic oligonucleotide
aaaauuaaucauuucuuua

SEQ ID NO: 2938232 - RNA, 19 nt, Artificial Sequence
  Description of Artificial Sequence: Synthetic oligonucleotide
aauuaaucauuucuuuaca

SEQ ID NO: 2938233 - RNA, 19 nt, Artificial Sequence
  Description of Artificial Sequence: Synthetic oligonucleotide
auccauuuuaaucuugggg

SEQ ID NO: 2938234 - RNA, 19 nt, Artificial Sequence
  Description of Artificial Sequence: Synthetic oligonucleotide
acaaaucaaagucagguca

SEQ ID NO: 2938235 - RNA, 19 nt, Artificial Sequence
  Description of Artificial Sequence: Synthetic oligonucleotide
uaauuaguuucuaacaguc

SEQ ID NO: 2938236 - RNA, 19 nt, Artificial Sequence
  Description of Artificial Sequence: Synthetic oligonucleotide
uuuaauggguuuuauauuu

SEQ ID NO: 2938237 - RNA, 19 nt, Artificial Sequence
  Description of Artificial Sequence: Synthetic oligonucleotide
auuaaucauuucuuuacag

SEQ ID NO: 2938238 - RNA, 19 nt, Artificial Sequence
  Description of Artificial Sequence: Synthetic oligonucleotide
ucuuuacagguaaacauug

SEQ ID NO: 2938239 - RNA, 19 nt, Artificial Sequence
  Description of Artificial Sequence: Synthetic oligonucleotide
uuuacagguaaacauugga

SEQ ID NO: 2938240 - RNA, 19 nt, Artificial Sequence
  Description of Artificial Sequence: Synthetic oligonucleotide
uuucuaacagucauuccag

SEQ ID NO: 2938241 - RNA, 19 nt, Artificial Sequence
  Description of Artificial Sequence: Synthetic oligonucleotide
aauaacuagagagcuguuc

SEQ ID NO: 2938242 - RNA, 19 nt, Artificial Sequence
  Description of Artificial Sequence: Synthetic oligonucleotide
auguauaacauccauuaca

SEQ ID NO: 2938243 - RNA, 19 nt, Artificial Sequence
  Description of Artificial Sequence: Synthetic oligonucleotide
uaaacauuggaguauuaac

SEQ ID NO: 2938244 - RNA, 19 nt, Artificial Sequence
  Description of Artificial Sequence: Synthetic oligonucleotide
uuucuuuacagguaaacau

SEQ ID NO: 2938245 - RNA, 19 nt, Artificial Sequence
  Description of Artificial Sequence: Synthetic oligonucleotide
ucaagaacagcauauuuuc

SEQ ID NO: 2938246 - RNA, 19 nt, Artificial Sequence
  Description of Artificial Sequence: Synthetic oligonucleotide
uuacacaucugucucaaga

SEQ ID NO: 2938247 - RNA, 19 nt, Artificial Sequence
  Description of Artificial Sequence: Synthetic oligonucleotide
uaaucuuggggcuuuaaga

SEQ ID NO: 2938248 - RNA, 19 nt, Artificial Sequence
  Description of Artificial Sequence: Synthetic oligonucleotide
uacacacaaaucaaaguca

SEQ ID NO: 2938249 - RNA, 19 nt, Artificial Sequence
  Description of Artificial Sequence: Synthetic oligonucleotide
aaucuuggggcuuuaagaa

SEQ ID NO: 2938250 - RNA, 19 nt, Artificial Sequence
  Description of Artificial Sequence: Synthetic oligonucleotide
ucaucuucuucguaauugg

SEQ ID NO: 2938251 - RNA, 19 nt, Artificial Sequence
  Description of Artificial Sequence: Synthetic oligonucleotide
uuaaucuuggggcuuuaag

SEQ ID NO: 2938252 - RNA, 19 nt, Artificial Sequence
  Description of Artificial Sequence: Synthetic oligonucleotide
uugaagacccucaagaaua

SEQ ID NO: 2938253 - RNA, 19 nt, Artificial Sequence
  Description of Artificial Sequence: Synthetic oligonucleotide
aagaacagcauauuuucaa

SEQ ID NO: 2938254 - RNA, 19 nt, Artificial Sequence
  Description of Artificial Sequence: Synthetic oligonucleotide
uuauauuuccauuuucauc

SEQ ID NO: 2938255 - RNA, 19 nt, Artificial Sequence
  Description of Artificial Sequence: Synthetic oligonucleotide
aagaacaucuucuuuguuu

SEQ ID NO: 2938256 - RNA, 19 nt, Artificial Sequence
  Description of Artificial Sequence: Synthetic oligonucleotide
uacagguaaacauuggagu

SEQ ID NO: 2938257 - RNA, 19 nt, Artificial Sequence
  Description of Artificial Sequence: Synthetic oligonucleotide
uuuccaauuguucccacca

SEQ ID NO: 2938258 - RNA, 19 nt, Artificial Sequence
  Description of Artificial Sequence: Synthetic oligonucleotide
aggacaauaacuagagagc

SEQ ID NO: 2938259 - RNA, 19 nt, Artificial Sequence
  Description of Artificial Sequence: Synthetic oligonucleotide
auaauuaguuucuaacagu

SEQ ID NO: 2938260 - RNA, 19 nt, Artificial Sequence
  Description of Artificial Sequence: Synthetic oligonucleotide
uucguaauuggcucggucc

SEQ ID NO: 2938261 - RNA, 19 nt, Artificial Sequence
  Description of Artificial Sequence: Synthetic oligonucleotide
uagagagcuguucauaugu

SEQ ID NO: 2938262 - RNA, 19 nt, Artificial Sequence
  Description of Artificial Sequence: Synthetic oligonucleotide
acauccauuacacaucugu

SEQ ID NO: 2938263 - RNA, 19 nt, Artificial Sequence
  Description of Artificial Sequence: Synthetic oligonucleotide
ugacuucaaacuauggugu

SEQ ID NO: 2938264 - RNA, 19 nt, Artificial Sequence
  Description of Artificial Sequence: Synthetic oligonucleotide
aacagcauauuuucaaaau

SEQ ID NO: 2938265 - RNA, 19 nt, Artificial Sequence
  Description of Artificial Sequence: Synthetic oligonucleotide
ucuuggggcuuuaagaaca

SEQ ID NO: 2938266 - RNA, 19 nt, Artificial Sequence
  Description of Artificial Sequence: Synthetic oligonucleotide
aacuauggugugcucacag

SEQ ID NO: 2938267 - RNA, 19 nt, Artificial Sequence
  Description of Artificial Sequence: Synthetic oligonucleotide
uaaccauacagacaccaca

SEQ ID NO: 2938268 - RNA, 19 nt, Artificial Sequence
  Description of Artificial Sequence: Synthetic oligonucleotide
uauuuucaaaauuaaucau

SEQ ID NO: 2938269 - RNA, 19 nt, Artificial Sequence
  Description of Artificial Sequence: Synthetic oligonucleotide
ucauuaaaaggauguauaa

SEQ ID NO: 2938270 - RNA, 19 nt, Artificial Sequence
  Description of Artificial Sequence: Synthetic oligonucleotide
uuaagaacaucuucuuugu

SEQ ID NO: 2938271 - RNA, 19 nt, Artificial Sequence
  Description of Artificial Sequence: Synthetic oligonucleotide
uuuauauuuccauuuucau

SEQ ID NO: 2938272 - RNA, 19 nt, Artificial Sequence
  Description of Artificial Sequence: Synthetic oligonucleotide
uaauggguuuuauauuucc

SEQ ID NO: 2938273 - RNA, 19 nt, Artificial Sequence
  Description of Artificial Sequence: Synthetic oligonucleotide
cuaggcauccauuuuaauc

SEQ ID NO: 2938274 - RNA, 19 nt, Artificial Sequence
  Description of Artificial Sequence: Synthetic oligonucleotide
uggggcuuuaagaacaucu

SEQ ID NO: 2938275 - RNA, 19 nt, Artificial Sequence
  Description of Artificial Sequence: Synthetic oligonucleotide
uaacagucauuccaggaca

SEQ ID NO: 2938276 - RNA, 19 nt, Artificial Sequence
  Description of Artificial Sequence: Synthetic oligonucleotide
acaauaacuagagagcugu

SEQ ID NO: 2938277 - RNA, 19 nt, Artificial Sequence
  Description of Artificial Sequence: Synthetic oligonucleotide
ugugcucacaggcagcugc

SEQ ID NO: 2938278 - RNA, 19 nt, Artificial Sequence
  Description of Artificial Sequence: Synthetic oligonucleotide
uuugaagacccucaagaau

SEQ ID NO: 2938279 - RNA, 19 nt, Artificial Sequence
  Description of Artificial Sequence: Synthetic oligonucleotide
uaacauccauuacacaucu

SEQ ID NO: 2938280 - RNA, 19 nt, Artificial Sequence
  Description of Artificial Sequence: Synthetic oligonucleotide
cauuugaagacccucaaga

SEQ ID NO: 2938281 - RNA, 19 nt, Artificial Sequence
  Description of Artificial Sequence: Synthetic oligonucleotide
uccauuacacaucugucuc

SEQ ID NO: 2938282 - RNA, 19 nt, Artificial Sequence
  Description of Artificial Sequence: Synthetic oligonucleotide
ucuaacagucauuccagga

SEQ ID NO: 2938283 - RNA, 19 nt, Artificial Sequence
  Description of Artificial Sequence: Synthetic oligonucleotide
guuuuaauggguuuuauau

SEQ ID NO: 2938284 - RNA, 19 nt, Artificial Sequence
  Description of Artificial Sequence: Synthetic oligonucleotide
ucauuccaggacaauaacu

SEQ ID NO: 2938285 - RNA, 19 nt, Artificial Sequence
  Description of Artificial Sequence: Synthetic oligonucleotide
aaaucuagggagcggcaug

SEQ ID NO: 2938286 - RNA, 19 nt, Artificial Sequence
  Description of Artificial Sequence: Synthetic oligonucleotide
acacaucugucucaagaac

SEQ ID NO: 2938287 - RNA, 19 nt, Artificial Sequence
  Description of Artificial Sequence: Synthetic oligonucleotide
aagacccucaagaauauca

SEQ ID NO: 2938288 - RNA, 19 nt, Artificial Sequence
  Description of Artificial Sequence: Synthetic oligonucleotide
ucuucuucguaauuggcuc

SEQ ID NO: 2938289 - RNA, 19 nt, Artificial Sequence
  Description of Artificial Sequence: Synthetic oligonucleotide
ugugcccacacauuugaag

SEQ ID NO: 2938290 - RNA, 19 nt, Artificial Sequence
  Description of Artificial Sequence: Synthetic oligonucleotide
auaacauccauuacacauc

SEQ ID NO: 2938291 - RNA, 19 nt, Artificial Sequence
  Description of Artificial Sequence: Synthetic oligonucleotide
uauguguccugacugugug

SEQ ID NO: 2938292 - RNA, 19 nt, Artificial Sequence
  Description of Artificial Sequence: Synthetic oligonucleotide
auuggaguauuaaccauac

SEQ ID NO: 2938293 - RNA, 19 nt, Artificial Sequence
  Description of Artificial Sequence: Synthetic oligonucleotide
aaggauguauaacauccau

SEQ ID NO: 2938294 - RNA, 19 nt, Artificial Sequence
  Description of Artificial Sequence: Synthetic oligonucleotide
ugucucaagaacagcauau

SEQ ID NO: 2938295 - RNA, 19 nt, Artificial Sequence
  Description of Artificial Sequence: Synthetic oligonucleotide
aucauuucuuuacagguaa

SEQ ID NO: 2938296 - RNA, 19 nt, Artificial Sequence
  Description of Artificial Sequence: Synthetic oligonucleotide
uucuuuacagguaaacauu

SEQ ID NO: 2938297 - RNA, 19 nt, Artificial Sequence
  Description of Artificial Sequence: Synthetic oligonucleotide
cuauggugugcucacaggc

SEQ ID NO: 2938298 - RNA, 19 nt, Artificial Sequence
  Description of Artificial Sequence: Synthetic oligonucleotide
gcaauaauuaguuucuaac

SEQ ID NO: 2938299 - RNA, 19 nt, Artificial Sequence
  Description of Artificial Sequence: Synthetic oligonucleotide
cauacagacaccacaagga

SEQ ID NO: 2938300 - RNA, 19 nt, Artificial Sequence
  Description of Artificial Sequence: Synthetic oligonucleotide
uguggacauacacacaaau

SEQ ID NO: 2938301 - RNA, 19 nt, Artificial Sequence
  Description of Artificial Sequence: Synthetic oligonucleotide
cuuuacagguaaacauugg

SEQ ID NO: 2938302 - RNA, 19 nt, Artificial Sequence
  Description of Artificial Sequence: Synthetic oligonucleotide
uuuuaauggguuuuauauu

SEQ ID NO: 2938303 - RNA, 19 nt, Artificial Sequence
  Description of Artificial Sequence: Synthetic oligonucleotide
uaucauuaaaaggauguau

SEQ ID NO: 2938304 - RNA, 19 nt, Artificial Sequence
  Description of Artificial Sequence: Synthetic oligonucleotide
acuucaaacuauggugugc

SEQ ID NO: 2938305 - RNA, 19 nt, Artificial Sequence
  Description of Artificial Sequence: Synthetic oligonucleotide
ucguaauuggcucgguccc

SEQ ID NO: 2938306 - RNA, 19 nt, Artificial Sequence
  Description of Artificial Sequence: Synthetic oligonucleotide
auccauuacacaucugucu

SEQ ID NO: 2938307 - RNA, 19 nt, Artificial Sequence
  Description of Artificial Sequence: Synthetic oligonucleotide
ucaaacuauggugugcuca

SEQ ID NO: 2938308 - RNA, 19 nt, Artificial Sequence
  Description of Artificial Sequence: Synthetic oligonucleotide
uacagacaccacaaggaug

SEQ ID NO: 2938309 - RNA, 19 nt, Artificial Sequence
  Description of Artificial Sequence: Synthetic oligonucleotide
auuccaggacaauaacuag

SEQ ID NO: 2938310 - RNA, 19 nt, Artificial Sequence
  Description of Artificial Sequence: Synthetic oligonucleotide
gaauaucauuaaaaggaug

SEQ ID NO: 2938311 - RNA, 19 nt, Artificial Sequence
  Description of Artificial Sequence: Synthetic oligonucleotide
aucuuggggcuuuaagaac

SEQ ID NO: 2938312 - RNA, 19 nt, Artificial Sequence
  Description of Artificial Sequence: Synthetic oligonucleotide
auuaaccauacagacacca

SEQ ID NO: 2938313 - RNA, 19 nt, Artificial Sequence
  Description of Artificial Sequence: Synthetic oligonucleotide
cauuaaaaggauguauaac

SEQ ID NO: 2938314 - RNA, 19 nt, Artificial Sequence
  Description of Artificial Sequence: Synthetic oligonucleotide
cuagggagcggcaugugcc

SEQ ID NO: 2938315 - RNA, 19 nt, Artificial Sequence
  Description of Artificial Sequence: Synthetic oligonucleotide
uucuaacagucauuccagg

SEQ ID NO: 2938316 - RNA, 19 nt, Artificial Sequence
  Description of Artificial Sequence: Synthetic oligonucleotide
auuucuuuacagguaaaca

SEQ ID NO: 2938317 - RNA, 19 nt, Artificial Sequence
  Description of Artificial Sequence: Synthetic oligonucleotide
acagacaccacaaggauga

SEQ ID NO: 2938318 - RNA, 19 nt, Artificial Sequence
  Description of Artificial Sequence: Synthetic oligonucleotide
uuuuccaauuguucccacc

SEQ ID NO: 2938319 - RNA, 19 nt, Artificial Sequence
  Description of Artificial Sequence: Synthetic oligonucleotide
uaguuucuaacagucauuc

SEQ ID NO: 2938320 - RNA, 19 nt, Artificial Sequence
  Description of Artificial Sequence: Synthetic oligonucleotide
gaugacuucaaacuauggu

SEQ ID NO: 2938321 - RNA, 19 nt, Artificial Sequence
  Description of Artificial Sequence: Synthetic oligonucleotide
gagcuguucauaugugucc

SEQ ID NO: 2938322 - RNA, 19 nt, Artificial Sequence
  Description of Artificial Sequence: Synthetic oligonucleotide
auuguucccaccaaagucu

SEQ ID NO: 2938323 - RNA, 19 nt, Artificial Sequence
  Description of Artificial Sequence: Synthetic oligonucleotide
uacacaucugucucaagaa

SEQ ID NO: 2938324 - RNA, 19 nt, Artificial Sequence
  Description of Artificial Sequence: Synthetic oligonucleotide
acuauggugugcucacagg

SEQ ID NO: 2938325 - RNA, 19 nt, Artificial Sequence
  Description of Artificial Sequence: Synthetic oligonucleotide
uuaauggguuuuauauuuc

SEQ ID NO: 2938326 - RNA, 19 nt, Artificial Sequence
  Description of Artificial Sequence: Synthetic oligonucleotide
uuaaccauacagacaccac

SEQ ID NO: 2938327 - RNA, 19 nt, Artificial Sequence
  Description of Artificial Sequence: Synthetic oligonucleotide
uauggugugcucacaggca

SEQ ID NO: 2938328 - RNA, 19 nt, Artificial Sequence
  Description of Artificial Sequence: Synthetic oligonucleotide
auuuucaaaauuaaucauu

SEQ ID NO: 2938329 - RNA, 19 nt, Artificial Sequence
  Description of Artificial Sequence: Synthetic oligonucleotide
auuugaagacccucaagaa

SEQ ID NO: 2938330 - RNA, 19 nt, Artificial Sequence
  Description of Artificial Sequence: Synthetic oligonucleotide
caaacuauggugugcucac

SEQ ID NO: 2938331 - RNA, 19 nt, Artificial Sequence
  Description of Artificial Sequence: Synthetic oligonucleotide
uguuuuaauggguuuuaua

SEQ ID NO: 2938332 - RNA, 19 nt, Artificial Sequence
  Description of Artificial Sequence: Synthetic oligonucleotide
uucuuuguuuuaauggguu

SEQ ID NO: 2938333 - RNA, 19 nt, Artificial Sequence
  Description of Artificial Sequence: Synthetic oligonucleotide
cuucuucguaauuggcucg

SEQ ID NO: 2938334 - RNA, 19 nt, Artificial Sequence
  Description of Artificial Sequence: Synthetic oligonucleotide
acagcauauuuucaaaauu

SEQ ID NO: 2938335 - RNA, 19 nt, Artificial Sequence
  Description of Artificial Sequence: Synthetic oligonucleotide
acuagagagcuguucauau

SEQ ID NO: 2938336 - RNA, 19 nt, Artificial Sequence
  Description of Artificial Sequence: Synthetic oligonucleotide
agagcuguucauauguguc

SEQ ID NO: 2938337 - RNA, 19 nt, Artificial Sequence
  Description of Artificial Sequence: Synthetic oligonucleotide
ugacuguguggacauacac

SEQ ID NO: 2938338 - RNA, 19 nt, Artificial Sequence
  Description of Artificial Sequence: Synthetic oligonucleotide
acauuugaagacccucaag

SEQ ID NO: 2938339 - RNA, 19 nt, Artificial Sequence
  Description of Artificial Sequence: Synthetic oligonucleotide
uuucaaaauuaaucauuuc

SEQ ID NO: 2938340 - RNA, 19 nt, Artificial Sequence
  Description of Artificial Sequence: Synthetic oligonucleotide
ucuagggagcggcaugugc

SEQ ID NO: 2938341 - RNA, 19 nt, Artificial Sequence
  Description of Artificial Sequence: Synthetic oligonucleotide
acagguaaacauuggagua

SEQ ID NO: 2938342 - RNA, 19 nt, Artificial Sequence
  Description of Artificial Sequence: Synthetic oligonucleotide
ggauguauaacauccauua

SEQ ID NO: 2938343 - RNA, 19 nt, Artificial Sequence
  Description of Artificial Sequence: Synthetic oligonucleotide
aauggguuuuauauuucca

SEQ ID NO: 2938344 - RNA, 19 nt, Artificial Sequence
  Description of Artificial Sequence: Synthetic oligonucleotide
auggugugcucacaggcag

SEQ ID NO: 2938345 - RNA, 19 nt, Artificial Sequence
  Description of Artificial Sequence: Synthetic oligonucleotide
agaacagcauauuuucaaa

SEQ ID NO: 2938346 - RNA, 19 nt, Artificial Sequence
  Description of Artificial Sequence: Synthetic oligonucleotide
uuuucaucuucuucguaau

SEQ ID NO: 2938347 - RNA, 19 nt, Artificial Sequence
  Description of Artificial Sequence: Synthetic oligonucleotide
acacacaaaucaaagucag

SEQ ID NO: 2938348 - RNA, 19 nt, Artificial Sequence
  Description of Artificial Sequence: Synthetic oligonucleotide
cauccauuuuaaucuuggg

SEQ ID NO: 2938349 - RNA, 19 nt, Artificial Sequence
  Description of Artificial Sequence: Synthetic oligonucleotide
aguauuaaccauacagaca

SEQ ID NO: 2938350 - RNA, 19 nt, Artificial Sequence
  Description of Artificial Sequence: Synthetic oligonucleotide
aacaucuucuuuguuuuaa

SEQ ID NO: 2938351 - RNA, 19 nt, Artificial Sequence
  Description of Artificial Sequence: Synthetic oligonucleotide
uuaguuucuaacagucauu

SEQ ID NO: 2938352 - RNA, 19 nt, Artificial Sequence
  Description of Artificial Sequence: Synthetic oligonucleotide
cauuccaggacaauaacua

SEQ ID NO: 2938353 - RNA, 19 nt, Artificial Sequence
  Description of Artificial Sequence: Synthetic oligonucleotide
uccaauuguucccaccaaa

SEQ ID NO: 2938354 - RNA, 19 nt, Artificial Sequence
  Description of Artificial Sequence: Synthetic oligonucleotide
cacaaaucaaagucagguc

SEQ ID NO: 2938355 - RNA, 19 nt, Artificial Sequence
  Description of Artificial Sequence: Synthetic oligonucleotide
cauuucuuuacagguaaac

SEQ ID NO: 2938356 - RNA, 19 nt, Artificial Sequence
  Description of Artificial Sequence: Synthetic oligonucleotide
gaacagcauauuuucaaaa

SEQ ID NO: 2938357 - RNA, 19 nt, Artificial Sequence
  Description of Artificial Sequence: Synthetic oligonucleotide
uguguccugacugugugga

SEQ ID NO: 2938358 - RNA, 19 nt, Artificial Sequence
  Description of Artificial Sequence: Synthetic oligonucleotide
ugcuguauccuaggcaucc

SEQ ID NO: 2938359 - RNA, 19 nt, Artificial Sequence
  Description of Artificial Sequence: Synthetic oligonucleotide
aucauuaaaaggauguaua

SEQ ID NO: 2938360 - RNA, 19 nt, Artificial Sequence
  Description of Artificial Sequence: Synthetic oligonucleotide
uauuaaccauacagacacc

SEQ ID NO: 2938361 - RNA, 19 nt, Artificial Sequence
  Description of Artificial Sequence: Synthetic oligonucleotide
uucuucguaauuggcucgg

SEQ ID NO: 2938362 - RNA, 19 nt, Artificial Sequence
  Description of Artificial Sequence: Synthetic oligonucleotide
auuggcucggucccucuuc

SEQ ID NO: 2938363 - RNA, 19 nt, Artificial Sequence
  Description of Artificial Sequence: Synthetic oligonucleotide
ucugucucaagaacagcau

SEQ ID NO: 2938364 - RNA, 19 nt, Artificial Sequence
  Description of Artificial Sequence: Synthetic oligonucleotide
auacagacaccacaaggau

SEQ ID NO: 2938365 - RNA, 19 nt, Artificial Sequence
  Description of Artificial Sequence: Synthetic oligonucleotide
aaucuagggagcggcaugu

SEQ ID NO: 2938366 - RNA, 19 nt, Artificial Sequence
  Description of Artificial Sequence: Synthetic oligonucleotide
agaauaucauuaaaaggau

SEQ ID NO: 2938367 - RNA, 19 nt, Artificial Sequence
  Description of Artificial Sequence: Synthetic oligonucleotide
cacaucugucucaagaaca

SEQ ID NO: 2938368 - RNA, 19 nt, Artificial Sequence
  Description of Artificial Sequence: Synthetic oligonucleotide
caucuucuucguaauuggc

SEQ ID NO: 2938369 - RNA, 19 nt, Artificial Sequence
  Description of Artificial Sequence: Synthetic oligonucleotide
aaggaugacuucaaacuau

SEQ ID NO: 2938370 - RNA, 19 nt, Artificial Sequence
  Description of Artificial Sequence: Synthetic oligonucleotide
aaccauacagacaccacaa

SEQ ID NO: 2938371 - RNA, 19 nt, Artificial Sequence
  Description of Artificial Sequence: Synthetic oligonucleotide
aaaaucuagggagcggcau

SEQ ID NO: 2938372 - RNA, 19 nt, Artificial Sequence
  Description of Artificial Sequence: Synthetic oligonucleotide
cauccauuacacaucuguc

SEQ ID NO: 2938373 - RNA, 19 nt, Artificial Sequence
  Description of Artificial Sequence: Synthetic oligonucleotide
aaaggauguauaacaucca

SEQ ID NO: 2938374 - RNA, 19 nt, Artificial Sequence
  Description of Artificial Sequence: Synthetic oligonucleotide
ccauacagacaccacaagg

SEQ ID NO: 2938375 - RNA, 19 nt, Artificial Sequence
  Description of Artificial Sequence: Synthetic oligonucleotide
aucugucucaagaacagca

SEQ ID NO: 2938376 - RNA, 19 nt, Artificial Sequence
  Description of Artificial Sequence: Synthetic oligonucleotide
aaucaaagucaggucaaaa

SEQ ID NO: 2938377 - RNA, 19 nt, Artificial Sequence
  Description of Artificial Sequence: Synthetic oligonucleotide
uggguuuuauauuuccauu

SEQ ID NO: 2938378 - RNA, 19 nt, Artificial Sequence
  Description of Artificial Sequence: Synthetic oligonucleotide
uuuguuuuaauggguuuua

SEQ ID NO: 2938379 - RNA, 19 nt, Artificial Sequence
  Description of Artificial Sequence: Synthetic oligonucleotide
acaucugucucaagaacag

SEQ ID NO: 2938380 - RNA, 19 nt, Artificial Sequence
  Description of Artificial Sequence: Synthetic oligonucleotide
aaucauuucuuuacaggua

SEQ ID NO: 2938381 - RNA, 19 nt, Artificial Sequence
  Description of Artificial Sequence: Synthetic oligonucleotide
gacaauaacuagagagcug

SEQ ID NO: 2938382 - RNA, 19 nt, Artificial Sequence
  Description of Artificial Sequence: Synthetic oligonucleotide
ucuuuguuuuaauggguuu

SEQ ID NO: 2938383 - RNA, 19 nt, Artificial Sequence
  Description of Artificial Sequence: Synthetic oligonucleotide
uguucauauguguccugac

SEQ ID NO: 2938384 - RNA, 19 nt, Artificial Sequence
  Description of Artificial Sequence: Synthetic oligonucleotide
acauuggaguauuaaccau

SEQ ID NO: 2938385 - RNA, 19 nt, Artificial Sequence
  Description of Artificial Sequence: Synthetic oligonucleotide
uguccugacuguguggaca

SEQ ID NO: 2938386 - RNA, 19 nt, Artificial Sequence
  Description of Artificial Sequence: Synthetic oligonucleotide
ugaagacccucaagaauau

SEQ ID NO: 2938387 - RNA, 19 nt, Artificial Sequence
  Description of Artificial Sequence: Synthetic oligonucleotide
cuagagagcuguucauaug

SEQ ID NO: 2938388 - RNA, 19 nt, Artificial Sequence
  Description of Artificial Sequence: Synthetic oligonucleotide
accauacagacaccacaag

SEQ ID NO: 2938389 - RNA, 19 nt, Artificial Sequence
  Description of Artificial Sequence: Synthetic oligonucleotide
ggaguauuaaccauacaga

SEQ ID NO: 2938390 - RNA, 19 nt, Artificial Sequence
  Description of Artificial Sequence: Synthetic oligonucleotide
uguauccuaggcauccauu

SEQ ID NO: 2938391 - RNA, 19 nt, Artificial Sequence
  Description of Artificial Sequence: Synthetic oligonucleotide
aucuucuucguaauuggcu

SEQ ID NO: 2938392 - RNA, 19 nt, Artificial Sequence
  Description of Artificial Sequence: Synthetic oligonucleotide
uccuaggcauccauuuuaa

SEQ ID NO: 2938393 - RNA, 19 nt, Artificial Sequence
  Description of Artificial Sequence: Synthetic oligonucleotide
agcauauuuucaaaauuaa

SEQ ID NO: 2938394 - RNA, 19 nt, Artificial Sequence
  Description of Artificial Sequence: Synthetic oligonucleotide
guaaacauuggaguauuaa

SEQ ID NO: 2938395 - RNA, 19 nt, Artificial Sequence
  Description of Artificial Sequence: Synthetic oligonucleotide
caaaucaaagucaggucaa

SEQ ID NO: 2938396 - RNA, 19 nt, Artificial Sequence
  Description of Artificial Sequence: Synthetic oligonucleotide
ucauuucuuuacagguaaa

SEQ ID NO: 2938397 - RNA, 19 nt, Artificial Sequence
  Description of Artificial Sequence: Synthetic oligonucleotide
uaacuagagagcuguucau

SEQ ID NO: 2938398 - RNA, 19 nt, Artificial Sequence
  Description of Artificial Sequence: Synthetic oligonucleotide
gucauuccaggacaauaac

SEQ ID NO: 2938399 - RNA, 19 nt, Artificial Sequence
  Description of Artificial Sequence: Synthetic oligonucleotide
agcugcuguauccuaggca

SEQ ID NO: 2938400 - RNA, 19 nt, Artificial Sequence
  Description of Artificial Sequence: Synthetic oligonucleotide
auguguccugacugugugg

SEQ ID NO: 2938401 - RNA, 19 nt, Artificial Sequence
  Description of Artificial Sequence: Synthetic oligonucleotide
gacuguguggacauacaca

SEQ ID NO: 2938402 - RNA, 19 nt, Artificial Sequence
  Description of Artificial Sequence: Synthetic oligonucleotide
cauuggaguauuaaccaua

SEQ ID NO: 2938403 - RNA, 19 nt, Artificial Sequence
  Description of Artificial Sequence: Synthetic oligonucleotide
aacuagagagcuguucaua

SEQ ID NO: 2938404 - RNA, 19 nt, Artificial Sequence
  Description of Artificial Sequence: Synthetic oligonucleotide
auccuaggcauccauuuua

SEQ ID NO: 2938405 - RNA, 19 nt, Artificial Sequence
  Description of Artificial Sequence: Synthetic oligonucleotide
agucauuccaggacaauaa

SEQ ID NO: 2938406 - RNA, 19 nt, Artificial Sequence
  Description of Artificial Sequence: Synthetic oligonucleotide
gcauccauuuuaaucuugg

SEQ ID NO: 2938407 - RNA, 19 nt, Artificial Sequence
  Description of Artificial Sequence: Synthetic oligonucleotide
auuacacaucugucucaag

SEQ ID NO: 2938408 - RNA, 19 nt, Artificial Sequence
  Description of Artificial Sequence: Synthetic oligonucleotide
uuggaguauuaaccauaca

SEQ ID NO: 2938409 - RNA, 19 nt, Artificial Sequence
  Description of Artificial Sequence: Synthetic oligonucleotide
acccucaagaauaucauua

SEQ ID NO: 2938410 - RNA, 19 nt, Artificial Sequence
  Description of Artificial Sequence: Synthetic oligonucleotide
uauccuaggcauccauuuu

SEQ ID NO: 2938411 - RNA, 19 nt, Artificial Sequence
  Description of Artificial Sequence: Synthetic oligonucleotide
acacauuugaagacccuca

SEQ ID NO: 2938412 - RNA, 19 nt, Artificial Sequence
  Description of Artificial Sequence: Synthetic oligonucleotide
caaaauuaaucauuucuuu

SEQ ID NO: 2938413 - RNA, 19 nt, Artificial Sequence
  Description of Artificial Sequence: Synthetic oligonucleotide
aggaugacuucaaacuaug

SEQ ID NO: 2938414 - RNA, 19 nt, Artificial Sequence
  Description of Artificial Sequence: Synthetic oligonucleotide
uuguucccaccaaagucuc

SEQ ID NO: 2938415 - RNA, 19 nt, Artificial Sequence
  Description of Artificial Sequence: Synthetic oligonucleotide
caagaacagcauauuuuca

SEQ ID NO: 2938416 - RNA, 19 nt, Artificial Sequence
  Description of Artificial Sequence: Synthetic oligonucleotide
uaagaacaucuucuuuguu

SEQ ID NO: 2938417 - RNA, 19 nt, Artificial Sequence
  Description of Artificial Sequence: Synthetic oligonucleotide
auaucauuaaaaggaugua

SEQ ID NO: 2938418 - RNA, 19 nt, Artificial Sequence
  Description of Artificial Sequence: Synthetic oligonucleotide
uagggagcggcaugugccc

SEQ ID NO: 2938419 - RNA, 19 nt, Artificial Sequence
  Description of Artificial Sequence: Synthetic oligonucleotide
cauauguguccugacugug

SEQ ID NO: 2938420 - RNA, 19 nt, Artificial Sequence
  Description of Artificial Sequence: Synthetic oligonucleotide
uuuccauuuucaucuucuu

SEQ ID NO: 2938421 - RNA, 19 nt, Artificial Sequence
  Description of Artificial Sequence: Synthetic oligonucleotide
caugugcccacacauuuga

SEQ ID NO: 2938422 - RNA, 19 nt, Artificial Sequence
  Description of Artificial Sequence: Synthetic oligonucleotide
uuccaauuguucccaccaa

SEQ ID NO: 2938423 - RNA, 19 nt, Artificial Sequence
  Description of Artificial Sequence: Synthetic oligonucleotide
guauaacauccauuacaca

SEQ ID NO: 2938424 - RNA, 19 nt, Artificial Sequence
  Description of Artificial Sequence: Synthetic oligonucleotide
gacaccacaaggaugacuu

SEQ ID NO: 2938425 - RNA, 19 nt, Artificial Sequence
  Description of Artificial Sequence: Synthetic oligonucleotide
caaggaugacuucaaacua

SEQ ID NO: 2938426 - RNA, 19 nt, Artificial Sequence
  Description of Artificial Sequence: Synthetic oligonucleotide
agcuguucauauguguccu

SEQ ID NO: 2938427 - RNA, 19 nt, Artificial Sequence
  Description of Artificial Sequence: Synthetic oligonucleotide
cucaagaacagcauauuuu

SEQ ID NO: 2938428 - RNA, 19 nt, Artificial Sequence
  Description of Artificial Sequence: Synthetic oligonucleotide
guggacauacacacaaauc

SEQ ID NO: 2938429 - RNA, 19 nt, Artificial Sequence
  Description of Artificial Sequence: Synthetic oligonucleotide
cuucguaauuggcucgguc

SEQ ID NO: 2938430 - RNA, 19 nt, Artificial Sequence
  Description of Artificial Sequence: Synthetic oligonucleotide
uuuaaucuuggggcuuuaa

SEQ ID NO: 2938431 - RNA, 19 nt, Artificial Sequence
  Description of Artificial Sequence: Synthetic oligonucleotide
uuggcucggucccucuucu

SEQ ID NO: 2938432 - RNA, 19 nt, Artificial Sequence
  Description of Artificial Sequence: Synthetic oligonucleotide
guucauauguguccugacu

SEQ ID NO: 2938433 - RNA, 19 nt, Artificial Sequence
  Description of Artificial Sequence: Synthetic oligonucleotide
gagagcuguucauaugugu

SEQ ID NO: 2938434 - RNA, 19 nt, Artificial Sequence
  Description of Artificial Sequence: Synthetic oligonucleotide
uggugugcucacaggcagc

SEQ ID NO: 2938435 - RNA, 19 nt, Artificial Sequence
  Description of Artificial Sequence: Synthetic oligonucleotide
aacagucauuccaggacaa

SEQ ID NO: 2938436 - RNA, 19 nt, Artificial Sequence
  Description of Artificial Sequence: Synthetic oligonucleotide
uuguuuuaauggguuuuau

SEQ ID NO: 2938437 - RNA, 19 nt, Artificial Sequence
  Description of Artificial Sequence: Synthetic oligonucleotide
aaacuauggugugcucaca

SEQ ID NO: 2938438 - RNA, 19 nt, Artificial Sequence
  Description of Artificial Sequence: Synthetic oligonucleotide
ggcaauaauuaguuucuaa

SEQ ID NO: 2938439 - RNA, 19 nt, Artificial Sequence
  Description of Artificial Sequence: Synthetic oligonucleotide
uguucccaccaaagucuca

SEQ ID NO: 2938440 - RNA, 19 nt, Artificial Sequence
  Description of Artificial Sequence: Synthetic oligonucleotide
aauuggcucggucccucuu

SEQ ID NO: 2938441 - RNA, 19 nt, Artificial Sequence
  Description of Artificial Sequence: Synthetic oligonucleotide
ggaugacuucaaacuaugg

SEQ ID NO: 2938442 - RNA, 19 nt, Artificial Sequence
  Description of Artificial Sequence: Synthetic oligonucleotide
cuucuuuguuuuaaugggu

SEQ ID NO: 2938443 - RNA, 19 nt, Artificial Sequence
  Description of Artificial Sequence: Synthetic oligonucleotide
uucaaacuauggugugcuc

SEQ ID NO: 2938444 - RNA, 19 nt, Artificial Sequence
  Description of Artificial Sequence: Synthetic oligonucleotide
auauguguccugacugugu

SEQ ID NO: 2938445 - RNA, 19 nt, Artificial Sequence
  Description of Artificial Sequence: Synthetic oligonucleotide
cccacacauuugaagaccc

SEQ ID NO: 2938446 - RNA, 19 nt, Artificial Sequence
  Description of Artificial Sequence: Synthetic oligonucleotide
gcagcugcuguauccuagg

SEQ ID NO: 2938447 - RNA, 19 nt, Artificial Sequence
  Description of Artificial Sequence: Synthetic oligonucleotide
agagagcuguucauaugug

SEQ ID NO: 2938448 - RNA, 19 nt, Artificial Sequence
  Description of Artificial Sequence: Synthetic oligonucleotide
agguaaacauuggaguauu

SEQ ID NO: 2938449 - RNA, 19 nt, Artificial Sequence
  Description of Artificial Sequence: Synthetic oligonucleotide
gcucggucccucuucuugg

SEQ ID NO: 2938450 - RNA, 19 nt, Artificial Sequence
  Description of Artificial Sequence: Synthetic oligonucleotide
aggauguauaacauccauu

SEQ ID NO: 2938451 - RNA, 19 nt, Artificial Sequence
  Description of Artificial Sequence: Synthetic oligonucleotide
uaauuggcucggucccucu

SEQ ID NO: 2938452 - RNA, 19 nt, Artificial Sequence
  Description of Artificial Sequence: Synthetic oligonucleotide
guauccuaggcauccauuu

SEQ ID NO: 2938453 - RNA, 19 nt, Artificial Sequence
  Description of Artificial Sequence: Synthetic oligonucleotide
agacaccacaaggaugacu

SEQ ID NO: 2938454 - RNA, 19 nt, Artificial Sequence
  Description of Artificial Sequence: Synthetic oligonucleotide
cucggucccucuucuuggc

SEQ ID NO: 2938455 - RNA, 19 nt, Artificial Sequence
  Description of Artificial Sequence: Synthetic oligonucleotide
cuucaaacuauggugugcu

SEQ ID NO: 2938456 - RNA, 19 nt, Artificial Sequence
  Description of Artificial Sequence: Synthetic oligonucleotide
cauuacacaucugucucaa

SEQ ID NO: 2938457 - RNA, 19 nt, Artificial Sequence
  Description of Artificial Sequence: Synthetic oligonucleotide
cuguucauauguguccuga

SEQ ID NO: 2938458 - RNA, 19 nt, Artificial Sequence
  Description of Artificial Sequence: Synthetic oligonucleotide
caccacaaggaugacuuca

SEQ ID NO: 2938459 - RNA, 19 nt, Artificial Sequence
  Description of Artificial Sequence: Synthetic oligonucleotide
cacauuugaagacccucaa

SEQ ID NO: 2938460 - RNA, 19 nt, Artificial Sequence
  Description of Artificial Sequence: Synthetic oligonucleotide
ucggucccucuucuuggca

SEQ ID NO: 2938461 - RNA, 19 nt, Artificial Sequence
  Description of Artificial Sequence: Synthetic oligonucleotide
ggacaauaacuagagagcu

SEQ ID NO: 2938462 - RNA, 19 nt, Artificial Sequence
  Description of Artificial Sequence: Synthetic oligonucleotide
aacauccauuacacaucug

SEQ ID NO: 2938463 - RNA, 19 nt, Artificial Sequence
  Description of Artificial Sequence: Synthetic oligonucleotide
agcggcaugugcccacaca

SEQ ID NO: 2938464 - RNA, 19 nt, Artificial Sequence
  Description of Artificial Sequence: Synthetic oligonucleotide
caauuguucccaccaaagu

SEQ ID NO: 2938465 - RNA, 19 nt, Artificial Sequence
  Description of Artificial Sequence: Synthetic oligonucleotide
gcugcuguauccuaggcau

SEQ ID NO: 2938466 - RNA, 19 nt, Artificial Sequence
  Description of Artificial Sequence: Synthetic oligonucleotide
cagcugcuguauccuaggc

SEQ ID NO: 2938467 - RNA, 19 nt, Artificial Sequence
  Description of Artificial Sequence: Synthetic oligonucleotide
cucuucuuggcaaacuuuu

SEQ ID NO: 2938468 - RNA, 19 nt, Artificial Sequence
  Description of Artificial Sequence: Synthetic oligonucleotide
ggcucggucccucuucuug

SEQ ID NO: 2938469 - RNA, 19 nt, Artificial Sequence
  Description of Artificial Sequence: Synthetic oligonucleotide
gaacaucuucuuuguuuua

SEQ ID NO: 2938470 - RNA, 19 nt, Artificial Sequence
  Description of Artificial Sequence: Synthetic oligonucleotide
cugacuguguggacauaca

SEQ ID NO: 2938471 - RNA, 19 nt, Artificial Sequence
  Description of Artificial Sequence: Synthetic oligonucleotide
cuuuaagaacaucuucuuu

SEQ ID NO: 2938472 - RNA, 19 nt, Artificial Sequence
  Description of Artificial Sequence: Synthetic oligonucleotide
ggacauacacacaaaucaa

SEQ ID NO: 2938473 - RNA, 19 nt, Artificial Sequence
  Description of Artificial Sequence: Synthetic oligonucleotide
guaauuggcucggucccuc

SEQ ID NO: 2938474 - RNA, 19 nt, Artificial Sequence
  Description of Artificial Sequence: Synthetic oligonucleotide
uuuuaaucuuggggcuuua

SEQ ID NO: 2938475 - RNA, 19 nt, Artificial Sequence
  Description of Artificial Sequence: Synthetic oligonucleotide
cugucucaagaacagcaua

SEQ ID NO: 2938476 - RNA, 19 nt, Artificial Sequence
  Description of Artificial Sequence: Synthetic oligonucleotide
ucuucguaauuggcucggu

SEQ ID NO: 2938477 - RNA, 19 nt, Artificial Sequence
  Description of Artificial Sequence: Synthetic oligonucleotide
gguuuuauauuuccauuuu

SEQ ID NO: 2938478 - RNA, 19 nt, Artificial Sequence
  Description of Artificial Sequence: Synthetic oligonucleotide
ccugacuguguggacauac

SEQ ID NO: 2938479 - RNA, 19 nt, Artificial Sequence
  Description of Artificial Sequence: Synthetic oligonucleotide
cagucauuccaggacaaua

SEQ ID NO: 2938480 - RNA, 19 nt, Artificial Sequence
  Description of Artificial Sequence: Synthetic oligonucleotide
ggcagcugcuguauccuag

SEQ ID NO: 2938481 - RNA, 19 nt, Artificial Sequence
  Description of Artificial Sequence: Synthetic oligonucleotide
cugcuguauccuaggcauc

SEQ ID NO: 2938482 - RNA, 19 nt, Artificial Sequence
  Description of Artificial Sequence: Synthetic oligonucleotide
gcccacacauuugaagacc

SEQ ID NO: 2938483 - RNA, 19 nt, Artificial Sequence
  Description of Artificial Sequence: Synthetic oligonucleotide
ugcucacaggcagcugcug

SEQ ID NO: 2938484 - RNA, 19 nt, Artificial Sequence
  Description of Artificial Sequence: Synthetic oligonucleotide
ggcauccauuuuaaucuug

SEQ ID NO: 2938485 - RNA, 19 nt, Artificial Sequence
  Description of Artificial Sequence: Synthetic oligonucleotide
cucacaggcagcugcugua

SEQ ID NO: 2938486 - RNA, 19 nt, Artificial Sequence
  Description of Artificial Sequence: Synthetic oligonucleotide
gcuguucauauguguccug

SEQ ID NO: 2938487 - RNA, 19 nt, Artificial Sequence
  Description of Artificial Sequence: Synthetic oligonucleotide
acagucauuccaggacaau

SEQ ID NO: 2938488 - RNA, 19 nt, Artificial Sequence
  Description of Artificial Sequence: Synthetic oligonucleotide
gcuuuaagaacaucuucuu

SEQ ID NO: 2938489 - RNA, 19 nt, Artificial Sequence
  Description of Artificial Sequence: Synthetic oligonucleotide
uuggggcuuuaagaacauc

SEQ ID NO: 2938490 - RNA, 19 nt, Artificial Sequence
  Description of Artificial Sequence: Synthetic oligonucleotide
guguccugacuguguggac

SEQ ID NO: 2938491 - RNA, 19 nt, Artificial Sequence
  Description of Artificial Sequence: Synthetic oligonucleotide
ccauuuuaaucuuggggcu

SEQ ID NO: 2938492 - RNA, 19 nt, Artificial Sequence
  Description of Artificial Sequence: Synthetic oligonucleotide
ccauuacacaucugucuca

SEQ ID NO: 2938493 - RNA, 19 nt, Artificial Sequence
  Description of Artificial Sequence: Synthetic oligonucleotide
gcauauuuucaaaauuaau

SEQ ID NO: 2938494 - RNA, 19 nt, Artificial Sequence
  Description of Artificial Sequence: Synthetic oligonucleotide
aucuagggagcggcaugug

SEQ ID NO: 2938495 - RNA, 19 nt, Artificial Sequence
  Description of Artificial Sequence: Synthetic oligonucleotide
cagguaaacauuggaguau

SEQ ID NO: 2938496 - RNA, 19 nt, Artificial Sequence
  Description of Artificial Sequence: Synthetic oligonucleotide
gcaugugcccacacauuug

SEQ ID NO: 2938497 - RNA, 19 nt, Artificial Sequence
  Description of Artificial Sequence: Synthetic oligonucleotide
ggcaugugcccacacauuu

SEQ ID NO: 2938498 - RNA, 19 nt, Artificial Sequence
  Description of Artificial Sequence: Synthetic oligonucleotide
guccugacuguguggacau

SEQ ID NO: 2938499 - RNA, 19 nt, Artificial Sequence
  Description of Artificial Sequence: Synthetic oligonucleotide
cauuuuaaucuuggggcuu

SEQ ID NO: 2938500 - RNA, 19 nt, Artificial Sequence
  Description of Artificial Sequence: Synthetic oligonucleotide
gagcggcaugugcccacac

SEQ ID NO: 2938501 - RNA, 19 nt, Artificial Sequence
  Description of Artificial Sequence: Synthetic oligonucleotide
aggcagcugcuguauccua

SEQ ID NO: 2938502 - RNA, 19 nt, Artificial Sequence
  Description of Artificial Sequence: Synthetic oligonucleotide
guguggacauacacacaaa

SEQ ID NO: 2938503 - RNA, 19 nt, Artificial Sequence
  Description of Artificial Sequence: Synthetic oligonucleotide
cuuggggcuuuaagaacau

SEQ ID NO: 2938504 - RNA, 19 nt, Artificial Sequence
  Description of Artificial Sequence: Synthetic oligonucleotide
agggagcggcaugugccca

SEQ ID NO: 2938505 - RNA, 19 nt, Artificial Sequence
  Description of Artificial Sequence: Synthetic oligonucleotide
ggucccucuucuuggcaaa

SEQ ID NO: 2938506 - RNA, 19 nt, Artificial Sequence
  Description of Artificial Sequence: Synthetic oligonucleotide
cagacaccacaaggaugac

SEQ ID NO: 2938507 - RNA, 19 nt, Artificial Sequence
  Description of Artificial Sequence: Synthetic oligonucleotide
cuguauccuaggcauccau

SEQ ID NO: 2938508 - RNA, 19 nt, Artificial Sequence
  Description of Artificial Sequence: Synthetic oligonucleotide
gguaaacauuggaguauua

SEQ ID NO: 2938509 - RNA, 19 nt, Artificial Sequence
  Description of Artificial Sequence: Synthetic oligonucleotide
gcggcaugugcccacacau

SEQ ID NO: 2938510 - RNA, 19 nt, Artificial Sequence
  Description of Artificial Sequence: Synthetic oligonucleotide
gggagcggcaugugcccac

SEQ ID NO: 2938511 - RNA, 19 nt, Artificial Sequence
  Description of Artificial Sequence: Synthetic oligonucleotide
gugugcucacaggcagcug

SEQ ID NO: 2938512 - RNA, 19 nt, Artificial Sequence
  Description of Artificial Sequence: Synthetic oligonucleotide
augugcccacacauuugaa

SEQ ID NO: 2938513 - RNA, 19 nt, Artificial Sequence
  Description of Artificial Sequence: Synthetic oligonucleotide
ggugugcucacaggcagcu

SEQ ID NO: 2938514 - RNA, 19 nt, Artificial Sequence
  Description of Artificial Sequence: Synthetic oligonucleotide
caauaacuagagagcuguu

SEQ ID NO: 2938515 - RNA, 19 nt, Artificial Sequence
  Description of Artificial Sequence: Synthetic oligonucleotide
ccaggacaauaacuagaga

SEQ ID NO: 2938516 - RNA, 19 nt, Artificial Sequence
  Description of Artificial Sequence: Synthetic oligonucleotide
gcucacaggcagcugcugu

SEQ ID NO: 2938517 - RNA, 19 nt, Artificial Sequence
  Description of Artificial Sequence: Synthetic oligonucleotide
uccugacuguguggacaua

SEQ ID NO: 2938518 - RNA, 19 nt, Artificial Sequence
  Description of Artificial Sequence: Synthetic oligonucleotide
gcuguauccuaggcaucca

SEQ ID NO: 2938519 - RNA, 19 nt, Artificial Sequence
  Description of Artificial Sequence: Synthetic oligonucleotide
ggggcuuuaagaacaucuu

SEQ ID NO: 2938520 - RNA, 19 nt, Artificial Sequence
  Description of Artificial Sequence: Synthetic oligonucleotide
gugcucacaggcagcugcu

SEQ ID NO: 2938521 - RNA, 19 nt, Artificial Sequence
  Description of Artificial Sequence: Synthetic oligonucleotide
ggagcggcaugugcccaca

SEQ ID NO: 2938522 - RNA, 19 nt, Artificial Sequence
  Description of Artificial Sequence: Synthetic oligonucleotide
ccuaggcauccauuuuaau

SEQ ID NO: 2938523 - RNA, 19 nt, Artificial Sequence
  Description of Artificial Sequence: Synthetic oligonucleotide
cguaauuggcucggucccu

SEQ ID NO: 2938524 - RNA, 19 nt, Artificial Sequence
  Description of Artificial Sequence: Synthetic oligonucleotide
cggcaugugcccacacauu

SEQ ID NO: 2938525 - RNA, 19 nt, Artificial Sequence
  Description of Artificial Sequence: Synthetic oligonucleotide
aaagguucaacauugacac

SEQ ID NO: 2938526 - RNA, 19 nt, Artificial Sequence
  Description of Artificial Sequence: Synthetic oligonucleotide
auguuaacaagaaagaggc

SEQ ID NO: 2938527 - RNA, 19 nt, Artificial Sequence
  Description of Artificial Sequence: Synthetic oligonucleotide
uuaaugagggcauugaucu

SEQ ID NO: 2938528 - RNA, 19 nt, Artificial Sequence
  Description of Artificial Sequence: Synthetic oligonucleotide
cauguuaacaagaaagagg

SEQ ID NO: 2938529 - RNA, 19 nt, Artificial Sequence
  Description of Artificial Sequence: Synthetic oligonucleotide
acaagaaagaggcuuaguc

SEQ ID NO: 2938530 - RNA, 19 nt, Artificial Sequence
  Description of Artificial Sequence: Synthetic oligonucleotide
aagaccaaagcccauguca

SEQ ID NO: 2938531 - RNA, 19 nt, Artificial Sequence
  Description of Artificial Sequence: Synthetic oligonucleotide
aaggccuuugcaaacaggc

SEQ ID NO: 2938532 - RNA, 19 nt, Artificial Sequence
  Description of Artificial Sequence: Synthetic oligonucleotide
aagaaagaggcuuagucaa

SEQ ID NO: 2938533 - RNA, 19 nt, Artificial Sequence
  Description of Artificial Sequence: Synthetic oligonucleotide
ugaagugagggccucaccc

SEQ ID NO: 2938534 - RNA, 19 nt, Artificial Sequence
  Description of Artificial Sequence: Synthetic oligonucleotide
uuuaaugagggcauugauc

SEQ ID NO: 2938535 - RNA, 19 nt, Artificial Sequence
  Description of Artificial Sequence: Synthetic oligonucleotide
uauuggacauguuaacaag

SEQ ID NO: 2938536 - RNA, 19 nt, Artificial Sequence
  Description of Artificial Sequence: Synthetic oligonucleotide
uucaacauugacaccagcu

SEQ ID NO: 2938537 - RNA, 19 nt, Artificial Sequence
  Description of Artificial Sequence: Synthetic oligonucleotide
agaaagguucaacauugac

SEQ ID NO: 2938538 - RNA, 19 nt, Artificial Sequence
  Description of Artificial Sequence: Synthetic oligonucleotide
aacaggccaggccagaaag

SEQ ID NO: 2938539 - RNA, 19 nt, Artificial Sequence
  Description of Artificial Sequence: Synthetic oligonucleotide
uuugcaaacaggccaggcc

SEQ ID NO: 2938540 - RNA, 19 nt, Artificial Sequence
  Description of Artificial Sequence: Synthetic oligonucleotide
ucgucguggaggaugaggg

SEQ ID NO: 2938541 - RNA, 19 nt, Artificial Sequence
  Description of Artificial Sequence: Synthetic oligonucleotide
uuauuggacauguuaacaa

SEQ ID NO: 2938542 - RNA, 19 nt, Artificial Sequence
  Description of Artificial Sequence: Synthetic oligonucleotide
guugacauuggccaaggcc

SEQ ID NO: 2938543 - RNA, 19 nt, Artificial Sequence
  Description of Artificial Sequence: Synthetic oligonucleotide
uuuauuggacauguuaaca

SEQ ID NO: 2938544 - RNA, 19 nt, Artificial Sequence
  Description of Artificial Sequence: Synthetic oligonucleotide
uccaccagccccuacauug

SEQ ID NO: 2938545 - RNA, 19 nt, Artificial Sequence
  Description of Artificial Sequence: Synthetic oligonucleotide
ggacauguuaacaagaaag

SEQ ID NO: 2938546 - RNA, 19 nt, Artificial Sequence
  Description of Artificial Sequence: Synthetic oligonucleotide
aaaagaccaaagcccaugu

SEQ ID NO: 2938547 - RNA, 19 nt, Artificial Sequence
  Description of Artificial Sequence: Synthetic oligonucleotide
uugcaaacaggccaggcca

SEQ ID NO: 2938548 - RNA, 19 nt, Artificial Sequence
  Description of Artificial Sequence: Synthetic oligonucleotide
gaaagguucaacauugaca

SEQ ID NO: 2938549 - RNA, 19 nt, Artificial Sequence
  Description of Artificial Sequence: Synthetic oligonucleotide
uuaacaagaaagaggcuua

SEQ ID NO: 2938550 - RNA, 19 nt, Artificial Sequence
  Description of Artificial Sequence: Synthetic oligonucleotide
gacaccagcugcuuuaaug

SEQ ID NO: 2938551 - RNA, 19 nt, Artificial Sequence
  Description of Artificial Sequence: Synthetic oligonucleotide
auugaucuuauccuccgug

SEQ ID NO: 2938552 - RNA, 19 nt, Artificial Sequence
  Description of Artificial Sequence: Synthetic oligonucleotide
aaagaccaaagcccauguc

SEQ ID NO: 2938553 - RNA, 19 nt, Artificial Sequence
  Description of Artificial Sequence: Synthetic oligonucleotide
gaugcaggcgagcucagag

SEQ ID NO: 2938554 - RNA, 19 nt, Artificial Sequence
  Description of Artificial Sequence: Synthetic oligonucleotide
aagguucaacauugacacc

SEQ ID NO: 2938555 - RNA, 19 nt, Artificial Sequence
  Description of Artificial Sequence: Synthetic oligonucleotide
acauguuaacaagaaagag

SEQ ID NO: 2938556 - RNA, 19 nt, Artificial Sequence
  Description of Artificial Sequence: Synthetic oligonucleotide
caucagacuccucagauuc

SEQ ID NO: 2938557 - RNA, 19 nt, Artificial Sequence
  Description of Artificial Sequence: Synthetic oligonucleotide
agggcauugaucuuauccu

SEQ ID NO: 2938558 - RNA, 19 nt, Artificial Sequence
  Description of Artificial Sequence: Synthetic oligonucleotide
caacauugacaccagcugc

SEQ ID NO: 2938559 - RNA, 19 nt, Artificial Sequence
  Description of Artificial Sequence: Synthetic oligonucleotide
agguucaacauugacacca

SEQ ID NO: 2938560 - RNA, 19 nt, Artificial Sequence
  Description of Artificial Sequence: Synthetic oligonucleotide
uuggacauguuaacaagaa

SEQ ID NO: 2938561 - RNA, 19 nt, Artificial Sequence
  Description of Artificial Sequence: Synthetic oligonucleotide
caagaaagaggcuuaguca

SEQ ID NO: 2938562 - RNA, 19 nt, Artificial Sequence
  Description of Artificial Sequence: Synthetic oligonucleotide
uugaucuuauccuccguga

SEQ ID NO: 2938563 - RNA, 19 nt, Artificial Sequence
  Description of Artificial Sequence: Synthetic oligonucleotide
agauucuucuuucuuugcu

SEQ ID NO: 2938564 - RNA, 19 nt, Artificial Sequence
  Description of Artificial Sequence: Synthetic oligonucleotide
gacauguuaacaagaaaga

SEQ ID NO: 2938565 - RNA, 19 nt, Artificial Sequence
  Description of Artificial Sequence: Synthetic oligonucleotide
uacauugcagaugaggcuc

SEQ ID NO: 2938566 - RNA, 19 nt, Artificial Sequence
  Description of Artificial Sequence: Synthetic oligonucleotide
cuuugcuucuacuuucuuc

SEQ ID NO: 2938567 - RNA, 19 nt, Artificial Sequence
  Description of Artificial Sequence: Synthetic oligonucleotide
ugaucuuauccuccgugac

SEQ ID NO: 2938568 - RNA, 19 nt, Artificial Sequence
  Description of Artificial Sequence: Synthetic oligonucleotide
aagcccaugucaucaucag

SEQ ID NO: 2938569 - RNA, 19 nt, Artificial Sequence
  Description of Artificial Sequence: Synthetic oligonucleotide
aaugagggcauugaucuua

SEQ ID NO: 2938570 - RNA, 19 nt, Artificial Sequence
  Description of Artificial Sequence: Synthetic oligonucleotide
agagacggaggccauguug

SEQ ID NO: 2938571 - RNA, 19 nt, Artificial Sequence
  Description of Artificial Sequence: Synthetic oligonucleotide
aucuuauccuccgugacug

SEQ ID NO: 2938572 - RNA, 19 nt, Artificial Sequence
  Description of Artificial Sequence: Synthetic oligonucleotide
ugcaggcgagcucagagac

SEQ ID NO: 2938573 - RNA, 19 nt, Artificial Sequence
  Description of Artificial Sequence: Synthetic oligonucleotide
aacauugacaccagcugcu

SEQ ID NO: 2938574 - RNA, 19 nt, Artificial Sequence
  Description of Artificial Sequence: Synthetic oligonucleotide
uuauccuccgugacuguca

SEQ ID NO: 2938575 - RNA, 19 nt, Artificial Sequence
  Description of Artificial Sequence: Synthetic oligonucleotide
aguagaugcaggcgagcuc

SEQ ID NO: 2938576 - RNA, 19 nt, Artificial Sequence
  Description of Artificial Sequence: Synthetic oligonucleotide
gaagugagggccucacccc

SEQ ID NO: 2938577 - RNA, 19 nt, Artificial Sequence
  Description of Artificial Sequence: Synthetic oligonucleotide
ccagaaagguucaacauug

SEQ ID NO: 2938578 - RNA, 19 nt, Artificial Sequence
  Description of Artificial Sequence: Synthetic oligonucleotide
aaagcccaugucaucauca

SEQ ID NO: 2938579 - RNA, 19 nt, Artificial Sequence
  Description of Artificial Sequence: Synthetic oligonucleotide
uggagcagguccaccagcc

SEQ ID NO: 2938580 - RNA, 19 nt, Artificial Sequence
  Description of Artificial Sequence: Synthetic oligonucleotide
gaugaggcucccaauguug

SEQ ID NO: 2938581 - RNA, 19 nt, Artificial Sequence
  Description of Artificial Sequence: Synthetic oligonucleotide
ucguggaggaugagggcgg

SEQ ID NO: 2938582 - RNA, 19 nt, Artificial Sequence
  Description of Artificial Sequence: Synthetic oligonucleotide
uccuccgugacugucaccu

SEQ ID NO: 2938583 - RNA, 19 nt, Artificial Sequence
  Description of Artificial Sequence: Synthetic oligonucleotide
augaagugagggccucacc

SEQ ID NO: 2938584 - RNA, 19 nt, Artificial Sequence
  Description of Artificial Sequence: Synthetic oligonucleotide
agcugcuuuaaugagggca

SEQ ID NO: 2938585 - RNA, 19 nt, Artificial Sequence
  Description of Artificial Sequence: Synthetic oligonucleotide
uguuaacaagaaagaggcu

SEQ ID NO: 2938586 - RNA, 19 nt, Artificial Sequence
  Description of Artificial Sequence: Synthetic oligonucleotide
auugacaccagcugcuuua

SEQ ID NO: 2938587 - RNA, 19 nt, Artificial Sequence
  Description of Artificial Sequence: Synthetic oligonucleotide
uggacauguuaacaagaaa

SEQ ID NO: 2938588 - RNA, 19 nt, Artificial Sequence
  Description of Artificial Sequence: Synthetic oligonucleotide
uaacaagaaagaggcuuag

SEQ ID NO: 2938589 - RNA, 19 nt, Artificial Sequence
  Description of Artificial Sequence: Synthetic oligonucleotide
ccagcugcuuuaaugaggg

SEQ ID NO: 2938590 - RNA, 19 nt, Artificial Sequence
  Description of Artificial Sequence: Synthetic oligonucleotide
gucguggaggaugagggcg

SEQ ID NO: 2938591 - RNA, 19 nt, Artificial Sequence
  Description of Artificial Sequence: Synthetic oligonucleotide
ugcaaacaggccaggccag

SEQ ID NO: 2938592 - RNA, 19 nt, Artificial Sequence
  Description of Artificial Sequence: Synthetic oligonucleotide
caggcgagcucagagacgg

SEQ ID NO: 2938593 - RNA, 19 nt, Artificial Sequence
  Description of Artificial Sequence: Synthetic oligonucleotide
agacuccucagauucuucu

SEQ ID NO: 2938594 - RNA, 19 nt, Artificial Sequence
  Description of Artificial Sequence: Synthetic oligonucleotide
ccaauguugacauuggcca

SEQ ID NO: 2938595 - RNA, 19 nt, Artificial Sequence
  Description of Artificial Sequence: Synthetic oligonucleotide
ugucaccucgucgucgugg

SEQ ID NO: 2938596 - RNA, 19 nt, Artificial Sequence
  Description of Artificial Sequence: Synthetic oligonucleotide
auuggacauguuaacaaga

SEQ ID NO: 2938597 - RNA, 19 nt, Artificial Sequence
  Description of Artificial Sequence: Synthetic oligonucleotide
agggccucaccccaacgcg

SEQ ID NO: 2938598 - RNA, 19 nt, Artificial Sequence
  Description of Artificial Sequence: Synthetic oligonucleotide
accaaagcccaugucauca

SEQ ID NO: 2938599 - RNA, 19 nt, Artificial Sequence
  Description of Artificial Sequence: Synthetic oligonucleotide
guagaugcaggcgagcuca

SEQ ID NO: 2938600 - RNA, 19 nt, Artificial Sequence
  Description of Artificial Sequence: Synthetic oligonucleotide
cucagcuggggcagcagcg

SEQ ID NO: 2938601 - RNA, 19 nt, Artificial Sequence
  Description of Artificial Sequence: Synthetic oligonucleotide
ugcuuuaaugagggcauug

SEQ ID NO: 2938602 - RNA, 19 nt, Artificial Sequence
  Description of Artificial Sequence: Synthetic oligonucleotide
gaggccauguugcggacug

SEQ ID NO: 2938603 - RNA, 19 nt, Artificial Sequence
  Description of Artificial Sequence: Synthetic oligonucleotide
cuagucgccggaugaagug

SEQ ID NO: 2938604 - RNA, 19 nt, Artificial Sequence
  Description of Artificial Sequence: Synthetic oligonucleotide
cccaauguugacauuggcc

SEQ ID NO: 2938605 - RNA, 19 nt, Artificial Sequence
  Description of Artificial Sequence: Synthetic oligonucleotide
ucgccggaugaagugaggg

SEQ ID NO: 2938606 - RNA, 19 nt, Artificial Sequence
  Description of Artificial Sequence: Synthetic oligonucleotide
cuccgugacugucaccucg

SEQ ID NO: 2938607 - RNA, 19 nt, Artificial Sequence
  Description of Artificial Sequence: Synthetic oligonucleotide
ucccaauguugacauuggc

SEQ ID NO: 2938608 - RNA, 19 nt, Artificial Sequence
  Description of Artificial Sequence: Synthetic oligonucleotide
uucuuucuuugcuucuacu

SEQ ID NO: 2938609 - RNA, 19 nt, Artificial Sequence
  Description of Artificial Sequence: Synthetic oligonucleotide
guuaacaagaaagaggcuu

SEQ ID NO: 2938610 - RNA, 19 nt, Artificial Sequence
  Description of Artificial Sequence: Synthetic oligonucleotide
aacaagaaagaggcuuagu

SEQ ID NO: 2938611 - RNA, 19 nt, Artificial Sequence
  Description of Artificial Sequence: Synthetic oligonucleotide
accagcugcuuuaaugagg

SEQ ID NO: 2938612 - RNA, 19 nt, Artificial Sequence
  Description of Artificial Sequence: Synthetic oligonucleotide
gcauugaucuuauccuccg

SEQ ID NO: 2938613 - RNA, 19 nt, Artificial Sequence
  Description of Artificial Sequence: Synthetic oligonucleotide
caaggccuuugcaaacagg

SEQ ID NO: 2938614 - RNA, 19 nt, Artificial Sequence
  Description of Artificial Sequence: Synthetic oligonucleotide
gagggccucaccccaacgc

SEQ ID NO: 2938615 - RNA, 19 nt, Artificial Sequence
  Description of Artificial Sequence: Synthetic oligonucleotide
ucagagacggaggccaugu

SEQ ID NO: 2938616 - RNA, 19 nt, Artificial Sequence
  Description of Artificial Sequence: Synthetic oligonucleotide
aaacaggccaggccagaaa

SEQ ID NO: 2938617 - RNA, 19 nt, Artificial Sequence
  Description of Artificial Sequence: Synthetic oligonucleotide
uauccuccgugacugucac

SEQ ID NO: 2938618 - RNA, 19 nt, Artificial Sequence
  Description of Artificial Sequence: Synthetic oligonucleotide
acggaggccauguugcgga

SEQ ID NO: 2938619 - RNA, 19 nt, Artificial Sequence
  Description of Artificial Sequence: Synthetic oligonucleotide
gaaagaggcuuagucaaaa

SEQ ID NO: 2938620 - RNA, 19 nt, Artificial Sequence
  Description of Artificial Sequence: Synthetic oligonucleotide
ugagggccucaccccaacg

SEQ ID NO: 2938621 - RNA, 19 nt, Artificial Sequence
  Description of Artificial Sequence: Synthetic oligonucleotide
gaugagggcggaguagaug

SEQ ID NO: 2938622 - RNA, 19 nt, Artificial Sequence
  Description of Artificial Sequence: Synthetic oligonucleotide
acugucaccucgucgucgu

SEQ ID NO: 2938623 - RNA, 19 nt, Artificial Sequence
  Description of Artificial Sequence: Synthetic oligonucleotide
uggccaaggccuuugcaaa

SEQ ID NO: 2938624 - RNA, 19 nt, Artificial Sequence
  Description of Artificial Sequence: Synthetic oligonucleotide
auguugacauuggccaagg

SEQ ID NO: 2938625 - RNA, 19 nt, Artificial Sequence
  Description of Artificial Sequence: Synthetic oligonucleotide
ucagcuggggcagcagcgg

SEQ ID NO: 2938626 - RNA, 19 nt, Artificial Sequence
  Description of Artificial Sequence: Synthetic oligonucleotide
gaugaagugagggccucac

SEQ ID NO: 2938627 - RNA, 19 nt, Artificial Sequence
  Description of Artificial Sequence: Synthetic oligonucleotide
uucuccucagcuggggcag

SEQ ID NO: 2938628 - RNA, 19 nt, Artificial Sequence
  Description of Artificial Sequence: Synthetic oligonucleotide
gugacugucaccucgucgu

SEQ ID NO: 2938629 - RNA, 19 nt, Artificial Sequence
  Description of Artificial Sequence: Synthetic oligonucleotide
uguugacauuggccaaggc

SEQ ID NO: 2938630 - RNA, 19 nt, Artificial Sequence
  Description of Artificial Sequence: Synthetic oligonucleotide
gacugucaccucgucgucg

SEQ ID NO: 2938631 - RNA, 19 nt, Artificial Sequence
  Description of Artificial Sequence: Synthetic oligonucleotide
acugccggcacggugcuag

SEQ ID NO: 2938632 - RNA, 19 nt, Artificial Sequence
  Description of Artificial Sequence: Synthetic oligonucleotide
aggccuuugcaaacaggcc

SEQ ID NO: 2938633 - RNA, 19 nt, Artificial Sequence
  Description of Artificial Sequence: Synthetic oligonucleotide
cuuugcaaacaggccaggc

SEQ ID NO: 2938634 - RNA, 19 nt, Artificial Sequence
  Description of Artificial Sequence: Synthetic oligonucleotide
ucgucgucguggaggauga

SEQ ID NO: 2938635 - RNA, 19 nt, Artificial Sequence
  Description of Artificial Sequence: Synthetic oligonucleotide
guugcggacugccggcacg

SEQ ID NO: 2938636 - RNA, 19 nt, Artificial Sequence
  Description of Artificial Sequence: Synthetic oligonucleotide
gucgucguggaggaugagg

SEQ ID NO: 2938637 - RNA, 19 nt, Artificial Sequence
  Description of Artificial Sequence: Synthetic oligonucleotide
agacggaggccauguugcg

SEQ ID NO: 2938638 - RNA, 19 nt, Artificial Sequence
  Description of Artificial Sequence: Synthetic oligonucleotide
ucaucagacuccucagauu

SEQ ID NO: 2938639 - RNA, 19 nt, Artificial Sequence
  Description of Artificial Sequence: Synthetic oligonucleotide
uggggcagcagcgguagag

SEQ ID NO: 2938640 - RNA, 19 nt, Artificial Sequence
  Description of Artificial Sequence: Synthetic oligonucleotide
gaucuuauccuccgugacu

SEQ ID NO: 2938641 - RNA, 19 nt, Artificial Sequence
  Description of Artificial Sequence: Synthetic oligonucleotide
uggaggaugagggcggagu

SEQ ID NO: 2938642 - RNA, 19 nt, Artificial Sequence
  Description of Artificial Sequence: Synthetic oligonucleotide
ugcuagucgccggaugaag

SEQ ID NO: 2938643 - RNA, 19 nt, Artificial Sequence
  Description of Artificial Sequence: Synthetic oligonucleotide
ggccuuugcaaacaggcca

SEQ ID NO: 2938644 - RNA, 19 nt, Artificial Sequence
  Description of Artificial Sequence: Synthetic oligonucleotide
gauucuucuuucuuugcuu

SEQ ID NO: 2938645 - RNA, 19 nt, Artificial Sequence
  Description of Artificial Sequence: Synthetic oligonucleotide
aggaccaccugcuggugca

SEQ ID NO: 2938646 - RNA, 19 nt, Artificial Sequence
  Description of Artificial Sequence: Synthetic oligonucleotide
caccucgucgucguggagg

SEQ ID NO: 2938647 - RNA, 19 nt, Artificial Sequence
  Description of Artificial Sequence: Synthetic oligonucleotide
gacggaggccauguugcgg

SEQ ID NO: 2938648 - RNA, 19 nt, Artificial Sequence
  Description of Artificial Sequence: Synthetic oligonucleotide
gaggaugagggcggaguag

SEQ ID NO: 2938649 - RNA, 19 nt, Artificial Sequence
  Description of Artificial Sequence: Synthetic oligonucleotide
gcucccaauguugacauug

SEQ ID NO: 2938650 - RNA, 19 nt, Artificial Sequence
  Description of Artificial Sequence: Synthetic oligonucleotide
agaugaggcucccaauguu

SEQ ID NO: 2938651 - RNA, 19 nt, Artificial Sequence
  Description of Artificial Sequence: Synthetic oligonucleotide
uccgugacugucaccucgu

SEQ ID NO: 2938652 - RNA, 19 nt, Artificial Sequence
  Description of Artificial Sequence: Synthetic oligonucleotide
aggaugagggcggaguaga

SEQ ID NO: 2938653 - RNA, 19 nt, Artificial Sequence
  Description of Artificial Sequence: Synthetic oligonucleotide
cucgucgucguggaggaug

SEQ ID NO: 2938654 - RNA, 19 nt, Artificial Sequence
  Description of Artificial Sequence: Synthetic oligonucleotide
cuggugcagcuccagcugc

SEQ ID NO: 2938655 - RNA, 19 nt, Artificial Sequence
  Description of Artificial Sequence: Synthetic oligonucleotide
agaccaaagcccaugucau

SEQ ID NO: 2938656 - RNA, 19 nt, Artificial Sequence
  Description of Artificial Sequence: Synthetic oligonucleotide
gaggcucccaauguugaca

SEQ ID NO: 2938657 - RNA, 19 nt, Artificial Sequence
  Description of Artificial Sequence: Synthetic oligonucleotide
uugcggacugccggcacgg

SEQ ID NO: 2938658 - RNA, 19 nt, Artificial Sequence
  Description of Artificial Sequence: Synthetic oligonucleotide
ccauguugcggacugccgg

SEQ ID NO: 2938659 - RNA, 19 nt, Artificial Sequence
  Description of Artificial Sequence: Synthetic oligonucleotide
ugaggcucccaauguugac

SEQ ID NO: 2938660 - RNA, 19 nt, Artificial Sequence
  Description of Artificial Sequence: Synthetic oligonucleotide
gagggcggaguagaugcag

SEQ ID NO: 2938661 - RNA, 19 nt, Artificial Sequence
  Description of Artificial Sequence: Synthetic oligonucleotide
ggcauugaucuuauccucc

SEQ ID NO: 2938662 - RNA, 19 nt, Artificial Sequence
  Description of Artificial Sequence: Synthetic oligonucleotide
augcaggcgagcucagaga

SEQ ID NO: 2938663 - RNA, 19 nt, Artificial Sequence
  Description of Artificial Sequence: Synthetic oligonucleotide
accucgucgucguggagga

SEQ ID NO: 2938664 - RNA, 19 nt, Artificial Sequence
  Description of Artificial Sequence: Synthetic oligonucleotide
cccuacauugcagaugagg

SEQ ID NO: 2938665 - RNA, 19 nt, Artificial Sequence
  Description of Artificial Sequence: Synthetic oligonucleotide
accccaacgcggccuuagc

SEQ ID NO: 2938666 - RNA, 19 nt, Artificial Sequence
  Description of Artificial Sequence: Synthetic oligonucleotide
ucagacuccucagauucuu

SEQ ID NO: 2938667 - RNA, 19 nt, Artificial Sequence
  Description of Artificial Sequence: Synthetic oligonucleotide
gccccuacauugcagauga

SEQ ID NO: 2938668 - RNA, 19 nt, Artificial Sequence
  Description of Artificial Sequence: Synthetic oligonucleotide
uagucgccggaugaaguga

SEQ ID NO: 2938669 - RNA, 19 nt, Artificial Sequence
  Description of Artificial Sequence: Synthetic oligonucleotide
cuuauccuccgugacuguc

SEQ ID NO: 2938670 - RNA, 19 nt, Artificial Sequence
  Description of Artificial Sequence: Synthetic oligonucleotide
caccugcuggugcagcucc

SEQ ID NO: 2938671 - RNA, 19 nt, Artificial Sequence
  Description of Artificial Sequence: Synthetic oligonucleotide
uagaugcaggcgagcucag

SEQ ID NO: 2938672 - RNA, 19 nt, Artificial Sequence
  Description of Artificial Sequence: Synthetic oligonucleotide
ugacauuggccaaggccuu

SEQ ID NO: 2938673 - RNA, 19 nt, Artificial Sequence
  Description of Artificial Sequence: Synthetic oligonucleotide
ggugcuagucgccggauga

SEQ ID NO: 2938674 - RNA, 19 nt, Artificial Sequence
  Description of Artificial Sequence: Synthetic oligonucleotide
ugagggcggaguagaugca

SEQ ID NO: 2938675 - RNA, 19 nt, Artificial Sequence
  Description of Artificial Sequence: Synthetic oligonucleotide
caaagcccaugucaucauc

SEQ ID NO: 2938676 - RNA, 19 nt, Artificial Sequence
  Description of Artificial Sequence: Synthetic oligonucleotide
agcccaugucaucaucaga

SEQ ID NO: 2938677 - RNA, 19 nt, Artificial Sequence
  Description of Artificial Sequence: Synthetic oligonucleotide
gccggaugaagugagggcc

SEQ ID NO: 2938678 - RNA, 19 nt, Artificial Sequence
  Description of Artificial Sequence: Synthetic oligonucleotide
ucuuauccuccgugacugu

SEQ ID NO: 2938679 - RNA, 19 nt, Artificial Sequence
  Description of Artificial Sequence: Synthetic oligonucleotide
acaggccaggccagaaagg

SEQ ID NO: 2938680 - RNA, 19 nt, Artificial Sequence
  Description of Artificial Sequence: Synthetic oligonucleotide
uguugcggacugccggcac

SEQ ID NO: 2938681 - RNA, 19 nt, Artificial Sequence
  Description of Artificial Sequence: Synthetic oligonucleotide
cuacauugcagaugaggcu

SEQ ID NO: 2938682 - RNA, 19 nt, Artificial Sequence
  Description of Artificial Sequence: Synthetic oligonucleotide
ccaacgcggccuuagcucc

SEQ ID NO: 2938683 - RNA, 19 nt, Artificial Sequence
  Description of Artificial Sequence: Synthetic oligonucleotide
auccuccgugacugucacc

SEQ ID NO: 2938684 - RNA, 19 nt, Artificial Sequence
  Description of Artificial Sequence: Synthetic oligonucleotide
caggaccaccugcuggugc

SEQ ID NO: 2938685 - RNA, 19 nt, Artificial Sequence
  Description of Artificial Sequence: Synthetic oligonucleotide
gccggcacggugcuagucg

SEQ ID NO: 2938686 - RNA, 19 nt, Artificial Sequence
  Description of Artificial Sequence: Synthetic oligonucleotide
agucgccggaugaagugag

SEQ ID NO: 2938687 - RNA, 19 nt, Artificial Sequence
  Description of Artificial Sequence: Synthetic oligonucleotide
caggccagaaagguucaac

SEQ ID NO: 2938688 - RNA, 19 nt, Artificial Sequence
  Description of Artificial Sequence: Synthetic oligonucleotide
uaaugagggcauugaucuu

SEQ ID NO: 2938689 - RNA, 19 nt, Artificial Sequence
  Description of Artificial Sequence: Synthetic oligonucleotide
agggcggaguagaugcagg

SEQ ID NO: 2938690 - RNA, 19 nt, Artificial Sequence
  Description of Artificial Sequence: Synthetic oligonucleotide
gggcauugaucuuauccuc

SEQ ID NO: 2938691 - RNA, 19 nt, Artificial Sequence
  Description of Artificial Sequence: Synthetic oligonucleotide
gcggaguagaugcaggcga

SEQ ID NO: 2938692 - RNA, 19 nt, Artificial Sequence
  Description of Artificial Sequence: Synthetic oligonucleotide
gguucaacauugacaccag

SEQ ID NO: 2938693 - RNA, 19 nt, Artificial Sequence
  Description of Artificial Sequence: Synthetic oligonucleotide
uugacaccagcugcuuuaa

SEQ ID NO: 2938694 - RNA, 19 nt, Artificial Sequence
  Description of Artificial Sequence: Synthetic oligonucleotide
agccccuacauugcagaug

SEQ ID NO: 2938695 - RNA, 19 nt, Artificial Sequence
  Description of Artificial Sequence: Synthetic oligonucleotide
gaguagaugcaggcgagcu

SEQ ID NO: 2938696 - RNA, 19 nt, Artificial Sequence
  Description of Artificial Sequence: Synthetic oligonucleotide
cuuuaaugagggcauugau

SEQ ID NO: 2938697 - RNA, 19 nt, Artificial Sequence
  Description of Artificial Sequence: Synthetic oligonucleotide
cagacuccucagauucuuc

SEQ ID NO: 2938698 - RNA, 19 nt, Artificial Sequence
  Description of Artificial Sequence: Synthetic oligonucleotide
gccuuugcaaacaggccag

SEQ ID NO: 2938699 - RNA, 19 nt, Artificial Sequence
  Description of Artificial Sequence: Synthetic oligonucleotide
gucaccucgucgucgugga

SEQ ID NO: 2938700 - RNA, 19 nt, Artificial Sequence
  Description of Artificial Sequence: Synthetic oligonucleotide
agaaagaggcuuagucaaa

SEQ ID NO: 2938701 - RNA, 19 nt, Artificial Sequence
  Description of Artificial Sequence: Synthetic oligonucleotide
ucaccucgucgucguggag

SEQ ID NO: 2938702 - RNA, 19 nt, Artificial Sequence
  Description of Artificial Sequence: Synthetic oligonucleotide
ggcggaguagaugcaggcg

SEQ ID NO: 2938703 - RNA, 19 nt, Artificial Sequence
  Description of Artificial Sequence: Synthetic oligonucleotide
gcuuuaaugagggcauuga

SEQ ID NO: 2938704 - RNA, 19 nt, Artificial Sequence
  Description of Artificial Sequence: Synthetic oligonucleotide
ggcacggugcuagucgccg

SEQ ID NO: 2938705 - RNA, 19 nt, Artificial Sequence
  Description of Artificial Sequence: Synthetic oligonucleotide
ggcgagcucagagacggag

SEQ ID NO: 2938706 - RNA, 19 nt, Artificial Sequence
  Description of Artificial Sequence: Synthetic oligonucleotide
ggccaggccagaaagguuc

SEQ ID NO: 2938707 - RNA, 19 nt, Artificial Sequence
  Description of Artificial Sequence: Synthetic oligonucleotide
cauugcagaugaggcuccc

SEQ ID NO: 2938708 - RNA, 19 nt, Artificial Sequence
  Description of Artificial Sequence: Synthetic oligonucleotide
gcggccuuagcucccucgg

SEQ ID NO: 2938709 - RNA, 19 nt, Artificial Sequence
  Description of Artificial Sequence: Synthetic oligonucleotide
gccuuagcucccucggaag

SEQ ID NO: 2938710 - RNA, 19 nt, Artificial Sequence
  Description of Artificial Sequence: Synthetic oligonucleotide
gggcggaguagaugcaggc

SEQ ID NO: 2938711 - RNA, 19 nt, Artificial Sequence
  Description of Artificial Sequence: Synthetic oligonucleotide
cgugacugucaccucgucg

SEQ ID NO: 2938712 - RNA, 19 nt, Artificial Sequence
  Description of Artificial Sequence: Synthetic oligonucleotide
caacgcggccuuagcuccc

SEQ ID NO: 2938713 - RNA, 19 nt, Artificial Sequence
  Description of Artificial Sequence: Synthetic oligonucleotide
aucagacuccucagauucu

SEQ ID NO: 2938714 - RNA, 19 nt, Artificial Sequence
  Description of Artificial Sequence: Synthetic oligonucleotide
cccaacgcggccuuagcuc

SEQ ID NO: 2938715 - RNA, 19 nt, Artificial Sequence
  Description of Artificial Sequence: Synthetic oligonucleotide
aacgcggccuuagcucccu

SEQ ID NO: 2938716 - RNA, 19 nt, Artificial Sequence
  Description of Artificial Sequence: Synthetic oligonucleotide
uccucagcuggggcagcag

SEQ ID NO: 2938717 - RNA, 19 nt, Artificial Sequence
  Description of Artificial Sequence: Synthetic oligonucleotide
cagaugaggcucccaaugu

SEQ ID NO: 2938718 - RNA, 19 nt, Artificial Sequence
  Description of Artificial Sequence: Synthetic oligonucleotide
aggccauguugcggacugc

SEQ ID NO: 2938719 - RNA, 19 nt, Artificial Sequence
  Description of Artificial Sequence: Synthetic oligonucleotide
ggccauguugcggacugcc

SEQ ID NO: 2938720 - RNA, 19 nt, Artificial Sequence
  Description of Artificial Sequence: Synthetic oligonucleotide
cggacugccggcacggugc

SEQ ID NO: 2938721 - RNA, 19 nt, Artificial Sequence
  Description of Artificial Sequence: Synthetic oligonucleotide
cagcugcuuuaaugagggc

SEQ ID NO: 2938722 - RNA, 19 nt, Artificial Sequence
  Description of Artificial Sequence: Synthetic oligonucleotide
acauugacaccagcugcuu

SEQ ID NO: 2938723 - RNA, 19 nt, Artificial Sequence
  Description of Artificial Sequence: Synthetic oligonucleotide
gcgagcucagagacggagg

SEQ ID NO: 2938724 - RNA, 19 nt, Artificial Sequence
  Description of Artificial Sequence: Synthetic oligonucleotide
cucagagacggaggccaug

SEQ ID NO: 2938725 - RNA, 19 nt, Artificial Sequence
  Description of Artificial Sequence: Synthetic oligonucleotide
ccaaggccuuugcaaacag

SEQ ID NO: 2938726 - RNA, 19 nt, Artificial Sequence
  Description of Artificial Sequence: Synthetic oligonucleotide
gucgccggaugaagugagg

SEQ ID NO: 2938727 - RNA, 19 nt, Artificial Sequence
  Description of Artificial Sequence: Synthetic oligonucleotide
ggaguagaugcaggcgagc

SEQ ID NO: 2938728 - RNA, 19 nt, Artificial Sequence
  Description of Artificial Sequence: Synthetic oligonucleotide
ggagcagguccaccagccc

SEQ ID NO: 2938729 - RNA, 19 nt, Artificial Sequence
  Description of Artificial Sequence: Synthetic oligonucleotide
augagggcauugaucuuau

SEQ ID NO: 2938730 - RNA, 19 nt, Artificial Sequence
  Description of Artificial Sequence: Synthetic oligonucleotide
ggccaaggccuuugcaaac

SEQ ID NO: 2938731 - RNA, 19 nt, Artificial Sequence
  Description of Artificial Sequence: Synthetic oligonucleotide
gugagggccucaccccaac

SEQ ID NO: 2938732 - RNA, 19 nt, Artificial Sequence
  Description of Artificial Sequence: Synthetic oligonucleotide
ccaccagccccuacauugc

SEQ ID NO: 2938733 - RNA, 19 nt, Artificial Sequence
  Description of Artificial Sequence: Synthetic oligonucleotide
gcuggggcagcagcgguag

SEQ ID NO: 2938734 - RNA, 19 nt, Artificial Sequence
  Description of Artificial Sequence: Synthetic oligonucleotide
auguugcggacugccggca

SEQ ID NO: 2938735 - RNA, 19 nt, Artificial Sequence
  Description of Artificial Sequence: Synthetic oligonucleotide
ggccuuagcucccucggaa

SEQ ID NO: 2938736 - RNA, 19 nt, Artificial Sequence
  Description of Artificial Sequence: Synthetic oligonucleotide
caccccaacgcggccuuag

SEQ ID NO: 2938737 - RNA, 19 nt, Artificial Sequence
  Description of Artificial Sequence: Synthetic oligonucleotide
gccauguugcggacugccg

SEQ ID NO: 2938738 - RNA, 19 nt, Artificial Sequence
  Description of Artificial Sequence: Synthetic oligonucleotide
agaugcaggcgagcucaga

SEQ ID NO: 2938739 - RNA, 19 nt, Artificial Sequence
  Description of Artificial Sequence: Synthetic oligonucleotide
cacggugcuagucgccgga

SEQ ID NO: 2938740 - RNA, 19 nt, Artificial Sequence
  Description of Artificial Sequence: Synthetic oligonucleotide
gccagaaagguucaacauu

SEQ ID NO: 2938741 - RNA, 19 nt, Artificial Sequence
  Description of Artificial Sequence: Synthetic oligonucleotide
gggccucaccccaacgcgg

SEQ ID NO: 2938742 - RNA, 19 nt, Artificial Sequence
  Description of Artificial Sequence: Synthetic oligonucleotide
cauugaucuuauccuccgu

SEQ ID NO: 2938743 - RNA, 19 nt, Artificial Sequence
  Description of Artificial Sequence: Synthetic oligonucleotide
ggaggaugagggcggagua

SEQ ID NO: 2938744 - RNA, 19 nt, Artificial Sequence
  Description of Artificial Sequence: Synthetic oligonucleotide
cggaguagaugcaggcgag

SEQ ID NO: 2938745 - RNA, 19 nt, Artificial Sequence
  Description of Artificial Sequence: Synthetic oligonucleotide
ggcaggaccaccugcuggu

SEQ ID NO: 2938746 - RNA, 19 nt, Artificial Sequence
  Description of Artificial Sequence: Synthetic oligonucleotide
gcacggugcuagucgccgg

SEQ ID NO: 2938747 - RNA, 19 nt, Artificial Sequence
  Description of Artificial Sequence: Synthetic oligonucleotide
ccagccccuacauugcaga

SEQ ID NO: 2938748 - RNA, 19 nt, Artificial Sequence
  Description of Artificial Sequence: Synthetic oligonucleotide
ggccagaaagguucaacau

SEQ ID NO: 2938749 - RNA, 19 nt, Artificial Sequence
  Description of Artificial Sequence: Synthetic oligonucleotide
gcaggcgagcucagagacg

SEQ ID NO: 2938750 - RNA, 19 nt, Artificial Sequence
  Description of Artificial Sequence: Synthetic oligonucleotide
gcugcuuuaaugagggcau

SEQ ID NO: 2938751 - RNA, 19 nt, Artificial Sequence
  Description of Artificial Sequence: Synthetic oligonucleotide
guggaggaugagggcggag

SEQ ID NO: 2938752 - RNA, 19 nt, Artificial Sequence
  Description of Artificial Sequence: Synthetic oligonucleotide
ccggcacggugcuagucgc

SEQ ID NO: 2938753 - RNA, 19 nt, Artificial Sequence
  Description of Artificial Sequence: Synthetic oligonucleotide
ccuuugcaaacaggccagg

SEQ ID NO: 2938754 - RNA, 19 nt, Artificial Sequence
  Description of Artificial Sequence: Synthetic oligonucleotide
gccaaggccuuugcaaaca

SEQ ID NO: 2938755 - RNA, 19 nt, Artificial Sequence
  Description of Artificial Sequence: Synthetic oligonucleotide
caccagccccuacauugca

SEQ ID NO: 2938756 - RNA, 19 nt, Artificial Sequence
  Description of Artificial Sequence: Synthetic oligonucleotide
cgccggaugaagugagggc

SEQ ID NO: 2938757 - RNA, 19 nt, Artificial Sequence
  Description of Artificial Sequence: Synthetic oligonucleotide
agugagggccucaccccaa

SEQ ID NO: 2938758 - RNA, 19 nt, Artificial Sequence
  Description of Artificial Sequence: Synthetic oligonucleotide
ggccucaccccaacgcggc

SEQ ID NO: 2938759 - RNA, 19 nt, Artificial Sequence
  Description of Artificial Sequence: Synthetic oligonucleotide
gcggacugccggcacggug

SEQ ID NO: 2938760 - RNA, 19 nt, Artificial Sequence
  Description of Artificial Sequence: Synthetic oligonucleotide
cugucaccucgucgucgug

SEQ ID NO: 2938761 - RNA, 19 nt, Artificial Sequence
  Description of Artificial Sequence: Synthetic oligonucleotide
acgcggccuuagcucccuc

SEQ ID NO: 2938762 - RNA, 19 nt, Artificial Sequence
  Description of Artificial Sequence: Synthetic oligonucleotide
ugccggcacggugcuaguc

SEQ ID NO: 2938763 - RNA, 19 nt, Artificial Sequence
  Description of Artificial Sequence: Synthetic oligonucleotide
gugcuagucgccggaugaa

SEQ ID NO: 2938764 - RNA, 19 nt, Artificial Sequence
  Description of Artificial Sequence: Synthetic oligonucleotide
ggaugaagugagggccuca

SEQ ID NO: 2938765 - RNA, 19 nt, Artificial Sequence
  Description of Artificial Sequence: Synthetic oligonucleotide
cagguccaccagccccuac

SEQ ID NO: 2938766 - RNA, 19 nt, Artificial Sequence
  Description of Artificial Sequence: Synthetic oligonucleotide
cgcggccuuagcucccucg

SEQ ID NO: 2938767 - RNA, 19 nt, Artificial Sequence
  Description of Artificial Sequence: Synthetic oligonucleotide
gcuagucgccggaugaagu

SEQ ID NO: 2938768 - RNA, 19 nt, Artificial Sequence
  Description of Artificial Sequence: Synthetic oligonucleotide
acggugcuagucgccggau

SEQ ID NO: 2938769 - RNA, 19 nt, Artificial Sequence
  Description of Artificial Sequence: Synthetic oligonucleotide
ggaccaccugcuggugcag

SEQ ID NO: 2938770 - RNA, 19 nt, Artificial Sequence
  Description of Artificial Sequence: Synthetic oligonucleotide
agcuggggcagcagcggua

SEQ ID NO: 2938771 - RNA, 19 nt, Artificial Sequence
  Description of Artificial Sequence: Synthetic oligonucleotide
ugcggacugccggcacggu

SEQ ID NO: 2938772 - RNA, 19 nt, Artificial Sequence
  Description of Artificial Sequence: Synthetic oligonucleotide
accugcuggugcagcucca

SEQ ID NO: 2938773 - RNA, 19 nt, Artificial Sequence
  Description of Artificial Sequence: Synthetic oligonucleotide
gacauuggccaaggccuuu

SEQ ID NO: 2938774 - RNA, 19 nt, Artificial Sequence
  Description of Artificial Sequence: Synthetic oligonucleotide
gccucaccccaacgcggcc

SEQ ID NO: 2938775 - RNA, 19 nt, Artificial Sequence
  Description of Artificial Sequence: Synthetic oligonucleotide
gccaggccagaaagguuca

SEQ ID NO: 2938776 - RNA, 19 nt, Artificial Sequence
  Description of Artificial Sequence: Synthetic oligonucleotide
cagccccuacauugcagau

SEQ ID NO: 2938777 - RNA, 19 nt, Artificial Sequence
  Description of Artificial Sequence: Synthetic oligonucleotide
ucaccccaacgcggccuua

SEQ ID NO: 2938778 - RNA, 19 nt, Artificial Sequence
  Description of Artificial Sequence: Synthetic oligonucleotide
ccggaugaagugagggccu

SEQ ID NO: 2938779 - RNA, 19 nt, Artificial Sequence
  Description of Artificial Sequence: Synthetic oligonucleotide
ccuccgugacugucaccuc

SEQ ID NO: 2938780 - RNA, 19 nt, Artificial Sequence
  Description of Artificial Sequence: Synthetic oligonucleotide
cagcuggggcagcagcggu

SEQ ID NO: 2938781 - RNA, 19 nt, Artificial Sequence
  Description of Artificial Sequence: Synthetic oligonucleotide
ccccuacauugcagaugag

SEQ ID NO: 2938782 - RNA, 19 nt, Artificial Sequence
  Description of Artificial Sequence: Synthetic oligonucleotide
cggugcuagucgccggaug

SEQ ID NO: 2938783 - RNA, 19 nt, Artificial Sequence
  Description of Artificial Sequence: Synthetic oligonucleotide
cuggggcagcagcgguaga

SEQ ID NO: 2938784 - RNA, 19 nt, Artificial Sequence
  Description of Artificial Sequence: Synthetic oligonucleotide
ccgugacugucaccucguc

SEQ ID NO: 2938785 - RNA, 19 nt, Artificial Sequence
  Description of Artificial Sequence: Synthetic oligonucleotide
aggcgagcucagagacgga

SEQ ID NO: 2938786 - RNA, 19 nt, Artificial Sequence
  Description of Artificial Sequence: Synthetic oligonucleotide
cggcacggugcuagucgcc

SEQ ID NO: 2938787 - RNA, 19 nt, Artificial Sequence
  Description of Artificial Sequence: Synthetic oligonucleotide
cucaccccaacgcggccuu

SEQ ID NO: 2938788 - RNA, 19 nt, Artificial Sequence
  Description of Artificial Sequence: Synthetic oligonucleotide
guccaccagccccuacauu

SEQ ID NO: 2938789 - RNA, 19 nt, Artificial Sequence
  Description of Artificial Sequence: Synthetic oligonucleotide
ccaaagcccaugucaucau

SEQ ID NO: 2938790 - RNA, 19 nt, Artificial Sequence
  Description of Artificial Sequence: Synthetic oligonucleotide
cggaugaagugagggccuc

SEQ ID NO: 2938791 - RNA, 19 nt, Artificial Sequence
  Description of Artificial Sequence: Synthetic oligonucleotide
ggacugccggcacggugcu

SEQ ID NO: 2938792 - RNA, 19 nt, Artificial Sequence
  Description of Artificial Sequence: Synthetic oligonucleotide
cugcuuuaaugagggcauu

SEQ ID NO: 2938793 - RNA, 19 nt, Artificial Sequence
  Description of Artificial Sequence: Synthetic oligonucleotide
ggaggccauguugcggacu

SEQ ID NO: 2938794 - RNA, 19 nt, Artificial Sequence
  Description of Artificial Sequence: Synthetic oligonucleotide
ggaugagggcggaguagau

SEQ ID NO: 2938795 - RNA, 19 nt, Artificial Sequence
  Description of Artificial Sequence: Synthetic oligonucleotide
cggaggccauguugcggac

SEQ ID NO: 2938796 - RNA, 19 nt, Artificial Sequence
  Description of Artificial Sequence: Synthetic oligonucleotide
ccccaacgcggccuuagcu

SEQ ID NO: 2938797 - RNA, 19 nt, Artificial Sequence
  Description of Artificial Sequence: Synthetic oligonucleotide
cagagacggaggccauguu

SEQ ID NO: 2938798 - RNA, 19 nt, Artificial Sequence
  Description of Artificial Sequence: Synthetic oligonucleotide
gacugccggcacggugcua

SEQ ID NO: 2938799 - RNA, 19 nt, Artificial Sequence
  Description of Artificial Sequence: Synthetic oligonucleotide
cugccggcacggugcuagu

SEQ ID NO: 2938800 - RNA, 19 nt, Artificial Sequence
  Description of Artificial Sequence: Synthetic oligonucleotide
cggccuuagcucccucgga

SEQ ID NO: 2938801 - RNA, 19 nt, Artificial Sequence
  Description of Artificial Sequence: Synthetic oligonucleotide
ccucaccccaacgcggccu

SEQ ID NO: 2938802 - RNA, 19 nt, Artificial Sequence
  Description of Artificial Sequence: Synthetic oligonucleotide
ccaggccagaaagguucaa

SEQ ID NO: 2938803 - RNA, 19 nt, Artificial Sequence
  Description of Artificial Sequence: Synthetic oligonucleotide
ggcucccaauguugacauu

SEQ ID NO: 2938804 - RNA, 19 nt, Artificial Sequence
  Description of Artificial Sequence: Synthetic oligonucleotide
cguggaggaugagggcgga

SEQ ID NO: 2938805 - RNA, 19 nt, Artificial Sequence
  Description of Artificial Sequence: Synthetic oligonucleotide
gcagguccaccagccccua

SEQ ID NO: 2938806 - RNA, 19 nt, Artificial Sequence
  Description of Artificial Sequence: Synthetic oligonucleotide
cgucgucguggaggaugag

SEQ ID NO: 2938807 - RNA, 19 nt, Artificial Sequence
  Description of Artificial Sequence: Synthetic oligonucleotide
ccucgucgucguggaggau

SEQ ID NO: 2938808 - RNA, 19 nt, Artificial Sequence
  Description of Artificial Sequence: Synthetic oligonucleotide
uaguauuuuauuaagauag

SEQ ID NO: 2938809 - RNA, 19 nt, Artificial Sequence
  Description of Artificial Sequence: Synthetic oligonucleotide
uaagauagcagucucauca

SEQ ID NO: 2938810 - RNA, 19 nt, Artificial Sequence
  Description of Artificial Sequence: Synthetic oligonucleotide
acuguaagcuguuugaagc

SEQ ID NO: 2938811 - RNA, 19 nt, Artificial Sequence
  Description of Artificial Sequence: Synthetic oligonucleotide
aaccauuuagcacagcuuc

SEQ ID NO: 2938812 - RNA, 19 nt, Artificial Sequence
  Description of Artificial Sequence: Synthetic oligonucleotide
uauaaaaccacauccacac

SEQ ID NO: 2938813 - RNA, 19 nt, Artificial Sequence
  Description of Artificial Sequence: Synthetic oligonucleotide
aaauguggccaaucgaggc

SEQ ID NO: 2938814 - RNA, 19 nt, Artificial Sequence
  Description of Artificial Sequence: Synthetic oligonucleotide
aucucuccgauauaaaacc

SEQ ID NO: 2938815 - RNA, 19 nt, Artificial Sequence
  Description of Artificial Sequence: Synthetic oligonucleotide
gaagcuaccaguuuuagca

SEQ ID NO: 2938816 - RNA, 19 nt, Artificial Sequence
  Description of Artificial Sequence: Synthetic oligonucleotide
aaaaucagauguuaaagau

SEQ ID NO: 2938817 - RNA, 19 nt, Artificial Sequence
  Description of Artificial Sequence: Synthetic oligonucleotide
aauaaaaucagauguuaaa

SEQ ID NO: 2938818 - RNA, 19 nt, Artificial Sequence
  Description of Artificial Sequence: Synthetic oligonucleotide
ucaaacaucauagccaacg

SEQ ID NO: 2938819 - RNA, 19 nt, Artificial Sequence
  Description of Artificial Sequence: Synthetic oligonucleotide
aguuuuagcacuuugaauu

SEQ ID NO: 2938820 - RNA, 19 nt, Artificial Sequence
  Description of Artificial Sequence: Synthetic oligonucleotide
aaccaguucaaccuuggcg

SEQ ID NO: 2938821 - RNA, 19 nt, Artificial Sequence
  Description of Artificial Sequence: Synthetic oligonucleotide
uuaaagaucagucuucaaa

SEQ ID NO: 2938822 - RNA, 19 nt, Artificial Sequence
  Description of Artificial Sequence: Synthetic oligonucleotide
aaucagauguuaaagauca

SEQ ID NO: 2938823 - RNA, 19 nt, Artificial Sequence
  Description of Artificial Sequence: Synthetic oligonucleotide
uaaagaucagucuucaaac

SEQ ID NO: 2938824 - RNA, 19 nt, Artificial Sequence
  Description of Artificial Sequence: Synthetic oligonucleotide
uaaaaucagauguuaaaga

SEQ ID NO: 2938825 - RNA, 19 nt, Artificial Sequence
  Description of Artificial Sequence: Synthetic oligonucleotide
caaaauguggccaaucgag

SEQ ID NO: 2938826 - RNA, 19 nt, Artificial Sequence
  Description of Artificial Sequence: Synthetic oligonucleotide
auaaaaucagauguuaaag

SEQ ID NO: 2938827 - RNA, 19 nt, Artificial Sequence
  Description of Artificial Sequence: Synthetic oligonucleotide
uaaaaccacauccacaccu

SEQ ID NO: 2938828 - RNA, 19 nt, Artificial Sequence
  Description of Artificial Sequence: Synthetic oligonucleotide
acauccacaccucaguggc

SEQ ID NO: 2938829 - RNA, 19 nt, Artificial Sequence
  Description of Artificial Sequence: Synthetic oligonucleotide
cagucuucaaacaucauag

SEQ ID NO: 2938830 - RNA, 19 nt, Artificial Sequence
  Description of Artificial Sequence: Synthetic oligonucleotide
uuuuauuaagauagcaguc

SEQ ID NO: 2938831 - RNA, 19 nt, Artificial Sequence
  Description of Artificial Sequence: Synthetic oligonucleotide
aaaucagauguuaaagauc

SEQ ID NO: 2938832 - RNA, 19 nt, Artificial Sequence
  Description of Artificial Sequence: Synthetic oligonucleotide
uuaacuguaagcuguuuga

SEQ ID NO: 2938833 - RNA, 19 nt, Artificial Sequence
  Description of Artificial Sequence: Synthetic oligonucleotide
aacaucauagccaacgaug

SEQ ID NO: 2938834 - RNA, 19 nt, Artificial Sequence
  Description of Artificial Sequence: Synthetic oligonucleotide
uuuauuaagauagcagucu

SEQ ID NO: 2938835 - RNA, 19 nt, Artificial Sequence
  Description of Artificial Sequence: Synthetic oligonucleotide
uuugccuaugaucucuccg

SEQ ID NO: 2938836 - RNA, 19 nt, Artificial Sequence
  Description of Artificial Sequence: Synthetic oligonucleotide
aagauagcagucucaucac

SEQ ID NO: 2938837 - RNA, 19 nt, Artificial Sequence
  Description of Artificial Sequence: Synthetic oligonucleotide
uuggccauggucuagggug

SEQ ID NO: 2938838 - RNA, 19 nt, Artificial Sequence
  Description of Artificial Sequence: Synthetic oligonucleotide
acucaaauaaaaucagaug

SEQ ID NO: 2938839 - RNA, 19 nt, Artificial Sequence
  Description of Artificial Sequence: Synthetic oligonucleotide
aacuguaagcuguuugaag

SEQ ID NO: 2938840 - RNA, 19 nt, Artificial Sequence
  Description of Artificial Sequence: Synthetic oligonucleotide
gaccaaaccauuuagcaca

SEQ ID NO: 2938841 - RNA, 19 nt, Artificial Sequence
  Description of Artificial Sequence: Synthetic oligonucleotide
accaaaauguggccaaucg

SEQ ID NO: 2938842 - RNA, 19 nt, Artificial Sequence
  Description of Artificial Sequence: Synthetic oligonucleotide
aacgaugccacguuugccu

SEQ ID NO: 2938843 - RNA, 19 nt, Artificial Sequence
  Description of Artificial Sequence: Synthetic oligonucleotide
uuacggacgaacuuggcca

SEQ ID NO: 2938844 - RNA, 19 nt, Artificial Sequence
  Description of Artificial Sequence: Synthetic oligonucleotide
aaagaucagucuucaaaca

SEQ ID NO: 2938845 - RNA, 19 nt, Artificial Sequence
  Description of Artificial Sequence: Synthetic oligonucleotide
uggcguaguaccaaaaugu

SEQ ID NO: 2938846 - RNA, 19 nt, Artificial Sequence
  Description of Artificial Sequence: Synthetic oligonucleotide
uuccuuaacuguaagcugu

SEQ ID NO: 2938847 - RNA, 19 nt, Artificial Sequence
  Description of Artificial Sequence: Synthetic oligonucleotide
aacucaaauaaaaucagau

SEQ ID NO: 2938848 - RNA, 19 nt, Artificial Sequence
  Description of Artificial Sequence: Synthetic oligonucleotide
accaguucaaccuuggcgu

SEQ ID NO: 2938849 - RNA, 19 nt, Artificial Sequence
  Description of Artificial Sequence: Synthetic oligonucleotide
agucucaucacaugugguc

SEQ ID NO: 2938850 - RNA, 19 nt, Artificial Sequence
  Description of Artificial Sequence: Synthetic oligonucleotide
acaucauagccaacgaugc

SEQ ID NO: 2938851 - RNA, 19 nt, Artificial Sequence
  Description of Artificial Sequence: Synthetic oligonucleotide
gucuucaaacaucauagcc

SEQ ID NO: 2938852 - RNA, 19 nt, Artificial Sequence
  Description of Artificial Sequence: Synthetic oligonucleotide
aagaucagucuucaaacau

SEQ ID NO: 2938853 - RNA, 19 nt, Artificial Sequence
  Description of Artificial Sequence: Synthetic oligonucleotide
aaaauguggccaaucgagg

SEQ ID NO: 2938854 - RNA, 19 nt, Artificial Sequence
  Description of Artificial Sequence: Synthetic oligonucleotide
ucacaugugguccaagaac

SEQ ID NO: 2938855 - RNA, 19 nt, Artificial Sequence
  Description of Artificial Sequence: Synthetic oligonucleotide
uuauuaagauagcagucuc

SEQ ID NO: 2938856 - RNA, 19 nt, Artificial Sequence
  Description of Artificial Sequence: Synthetic oligonucleotide
uauuaagauagcagucuca

SEQ ID NO: 2938857 - RNA, 19 nt, Artificial Sequence
  Description of Artificial Sequence: Synthetic oligonucleotide
aguauuuuauuaagauagc

SEQ ID NO: 2938858 - RNA, 19 nt, Artificial Sequence
  Description of Artificial Sequence: Synthetic oligonucleotide
gaaguuacggacgaacuug

SEQ ID NO: 2938859 - RNA, 19 nt, Artificial Sequence
  Description of Artificial Sequence: Synthetic oligonucleotide
ucacacucugaauagcugc

SEQ ID NO: 2938860 - RNA, 19 nt, Artificial Sequence
  Description of Artificial Sequence: Synthetic oligonucleotide
agucuucaaacaucauagc

SEQ ID NO: 2938861 - RNA, 19 nt, Artificial Sequence
  Description of Artificial Sequence: Synthetic oligonucleotide
cagauguuaaagaucaguc

SEQ ID NO: 2938862 - RNA, 19 nt, Artificial Sequence
  Description of Artificial Sequence: Synthetic oligonucleotide
agauguuaaagaucagucu

SEQ ID NO: 2938863 - RNA, 19 nt, Artificial Sequence
  Description of Artificial Sequence: Synthetic oligonucleotide
aagcuaccaguuuuagcac

SEQ ID NO: 2938864 - RNA, 19 nt, Artificial Sequence
  Description of Artificial Sequence: Synthetic oligonucleotide
ucagucuucaaacaucaua

SEQ ID NO: 2938865 - RNA, 19 nt, Artificial Sequence
  Description of Artificial Sequence: Synthetic oligonucleotide
uuggcguaguaccaaaaug

SEQ ID NO: 2938866 - RNA, 19 nt, Artificial Sequence
  Description of Artificial Sequence: Synthetic oligonucleotide
aagaacaccucaaauaaaa

SEQ ID NO: 2938867 - RNA, 19 nt, Artificial Sequence
  Description of Artificial Sequence: Synthetic oligonucleotide
uccaagaacaccucaaaua

SEQ ID NO: 2938868 - RNA, 19 nt, Artificial Sequence
  Description of Artificial Sequence: Synthetic oligonucleotide
cuuaacuguaagcuguuug

SEQ ID NO: 2938869 - RNA, 19 nt, Artificial Sequence
  Description of Artificial Sequence: Synthetic oligonucleotide
acagcuaguauuuuauuaa

SEQ ID NO: 2938870 - RNA, 19 nt, Artificial Sequence
  Description of Artificial Sequence: Synthetic oligonucleotide
ucuccgauauaaaaccaca

SEQ ID NO: 2938871 - RNA, 19 nt, Artificial Sequence
  Description of Artificial Sequence: Synthetic oligonucleotide
uggaagguccgucuccucg

SEQ ID NO: 2938872 - RNA, 19 nt, Artificial Sequence
  Description of Artificial Sequence: Synthetic oligonucleotide
auaaaaccacauccacacc

SEQ ID NO: 2938873 - RNA, 19 nt, Artificial Sequence
  Description of Artificial Sequence: Synthetic oligonucleotide
ccgauauaaaaccacaucc

SEQ ID NO: 2938874 - RNA, 19 nt, Artificial Sequence
  Description of Artificial Sequence: Synthetic oligonucleotide
aauguggccaaucgaggcu

SEQ ID NO: 2938875 - RNA, 19 nt, Artificial Sequence
  Description of Artificial Sequence: Synthetic oligonucleotide
agcuuccuuaacuguaagc

SEQ ID NO: 2938876 - RNA, 19 nt, Artificial Sequence
  Description of Artificial Sequence: Synthetic oligonucleotide
uucgaguaagucacggcag

SEQ ID NO: 2938877 - RNA, 19 nt, Artificial Sequence
  Description of Artificial Sequence: Synthetic oligonucleotide
uccgauauaaaaccacauc

SEQ ID NO: 2938878 - RNA, 19 nt, Artificial Sequence
  Description of Artificial Sequence: Synthetic oligonucleotide
uuuagcacagcuuccuuaa

SEQ ID NO: 2938879 - RNA, 19 nt, Artificial Sequence
  Description of Artificial Sequence: Synthetic oligonucleotide
ucagauguuaaagaucagu

SEQ ID NO: 2938880 - RNA, 19 nt, Artificial Sequence
  Description of Artificial Sequence: Synthetic oligonucleotide
ucugaauagcugcagggau

SEQ ID NO: 2938881 - RNA, 19 nt, Artificial Sequence
  Description of Artificial Sequence: Synthetic oligonucleotide
aaaaccacauccacaccuc

SEQ ID NO: 2938882 - RNA, 19 nt, Artificial Sequence
  Description of Artificial Sequence: Synthetic oligonucleotide
agcuguuugaagcuaccag

SEQ ID NO: 2938883 - RNA, 19 nt, Artificial Sequence
  Description of Artificial Sequence: Synthetic oligonucleotide
guuacggacgaacuuggcc

SEQ ID NO: 2938884 - RNA, 19 nt, Artificial Sequence
  Description of Artificial Sequence: Synthetic oligonucleotide
aaacaucauagccaacgau

SEQ ID NO: 2938885 - RNA, 19 nt, Artificial Sequence
  Description of Artificial Sequence: Synthetic oligonucleotide
gaggcuucgaguaagucac

SEQ ID NO: 2938886 - RNA, 19 nt, Artificial Sequence
  Description of Artificial Sequence: Synthetic oligonucleotide
gaucucuccgauauaaaac

SEQ ID NO: 2938887 - RNA, 19 nt, Artificial Sequence
  Description of Artificial Sequence: Synthetic oligonucleotide
uguuaaagaucagucuuca

SEQ ID NO: 2938888 - RNA, 19 nt, Artificial Sequence
  Description of Artificial Sequence: Synthetic oligonucleotide
uugccuaugaucucuccga

SEQ ID NO: 2938889 - RNA, 19 nt, Artificial Sequence
  Description of Artificial Sequence: Synthetic oligonucleotide
gauguuaaagaucagucuu

SEQ ID NO: 2938890 - RNA, 19 nt, Artificial Sequence
  Description of Artificial Sequence: Synthetic oligonucleotide
cguaguaccaaaauguggc

SEQ ID NO: 2938891 - RNA, 19 nt, Artificial Sequence
  Description of Artificial Sequence: Synthetic oligonucleotide
aaguuacggacgaacuugg

SEQ ID NO: 2938892 - RNA, 19 nt, Artificial Sequence
  Description of Artificial Sequence: Synthetic oligonucleotide
aaacucaaauaaaaucaga

SEQ ID NO: 2938893 - RNA, 19 nt, Artificial Sequence
  Description of Artificial Sequence: Synthetic oligonucleotide
uuugaagcuaccaguuuua

SEQ ID NO: 2938894 - RNA, 19 nt, Artificial Sequence
  Description of Artificial Sequence: Synthetic oligonucleotide
ugaagcuaccaguuuuagc

SEQ ID NO: 2938895 - RNA, 19 nt, Artificial Sequence
  Description of Artificial Sequence: Synthetic oligonucleotide
cauggucuaggguggaagg

SEQ ID NO: 2938896 - RNA, 19 nt, Artificial Sequence
  Description of Artificial Sequence: Synthetic oligonucleotide
uucacacucugaauagcug

SEQ ID NO: 2938897 - RNA, 19 nt, Artificial Sequence
  Description of Artificial Sequence: Synthetic oligonucleotide
agcugcagggauuucagca

SEQ ID NO: 2938898 - RNA, 19 nt, Artificial Sequence
  Description of Artificial Sequence: Synthetic oligonucleotide
agaucagucuucaaacauc

SEQ ID NO: 2938899 - RNA, 19 nt, Artificial Sequence
  Description of Artificial Sequence: Synthetic oligonucleotide
auuaagauagcagucucau

SEQ ID NO: 2938900 - RNA, 19 nt, Artificial Sequence
  Description of Artificial Sequence: Synthetic oligonucleotide
ucaguggcgaccaaaccau

SEQ ID NO: 2938901 - RNA, 19 nt, Artificial Sequence
  Description of Artificial Sequence: Synthetic oligonucleotide
aaucgaggcuucgaguaag

SEQ ID NO: 2938902 - RNA, 19 nt, Artificial Sequence
  Description of Artificial Sequence: Synthetic oligonucleotide
uagcagucucaucacaugu

SEQ ID NO: 2938903 - RNA, 19 nt, Artificial Sequence
  Description of Artificial Sequence: Synthetic oligonucleotide
aguaagucacggcagcgcu

SEQ ID NO: 2938904 - RNA, 19 nt, Artificial Sequence
  Description of Artificial Sequence: Synthetic oligonucleotide
ucgaguaagucacggcagc

SEQ ID NO: 2938905 - RNA, 19 nt, Artificial Sequence
  Description of Artificial Sequence: Synthetic oligonucleotide
aguaccaaaauguggccaa

SEQ ID NO: 2938906 - RNA, 19 nt, Artificial Sequence
  Description of Artificial Sequence: Synthetic oligonucleotide
auguuaaagaucagucuuc

SEQ ID NO: 2938907 - RNA, 19 nt, Artificial Sequence
  Description of Artificial Sequence: Synthetic oligonucleotide
cuuccuuaacuguaagcug

SEQ ID NO: 2938908 - RNA, 19 nt, Artificial Sequence
  Description of Artificial Sequence: Synthetic oligonucleotide
aucauagccaacgaugcca

SEQ ID NO: 2938909 - RNA, 19 nt, Artificial Sequence
  Description of Artificial Sequence: Synthetic oligonucleotide
uagcacagcuuccuuaacu

SEQ ID NO: 2938910 - RNA, 19 nt, Artificial Sequence
  Description of Artificial Sequence: Synthetic oligonucleotide
aacuuggccauggucuagg

SEQ ID NO: 2938911 - RNA, 19 nt, Artificial Sequence
  Description of Artificial Sequence: Synthetic oligonucleotide
agguccgucuccucgcacc

SEQ ID NO: 2938912 - RNA, 19 nt, Artificial Sequence
  Description of Artificial Sequence: Synthetic oligonucleotide
uuagcacuuugaauuauuu

SEQ ID NO: 2938913 - RNA, 19 nt, Artificial Sequence
  Description of Artificial Sequence: Synthetic oligonucleotide
cacaugugguccaagaaca

SEQ ID NO: 2938914 - RNA, 19 nt, Artificial Sequence
  Description of Artificial Sequence: Synthetic oligonucleotide
auauaaaaccacauccaca

SEQ ID NO: 2938915 - RNA, 19 nt, Artificial Sequence
  Description of Artificial Sequence: Synthetic oligonucleotide
ucauagccaacgaugccac

SEQ ID NO: 2938916 - RNA, 19 nt, Artificial Sequence
  Description of Artificial Sequence: Synthetic oligonucleotide
cagcuaguauuuuauuaag

SEQ ID NO: 2938917 - RNA, 19 nt, Artificial Sequence
  Description of Artificial Sequence: Synthetic oligonucleotide
uaagcuguuugaagcuacc

SEQ ID NO: 2938918 - RNA, 19 nt, Artificial Sequence
  Description of Artificial Sequence: Synthetic oligonucleotide
auagcagucucaucacaug

SEQ ID NO: 2938919 - RNA, 19 nt, Artificial Sequence
  Description of Artificial Sequence: Synthetic oligonucleotide
ucucuccgauauaaaacca

SEQ ID NO: 2938920 - RNA, 19 nt, Artificial Sequence
  Description of Artificial Sequence: Synthetic oligonucleotide
cacauccacaccucagugg

SEQ ID NO: 2938921 - RNA, 19 nt, Artificial Sequence
  Description of Artificial Sequence: Synthetic oligonucleotide
uuuagcacuuugaauuauu

SEQ ID NO: 2938922 - RNA, 19 nt, Artificial Sequence
  Description of Artificial Sequence: Synthetic oligonucleotide
ugcagggauuucagcaggg

SEQ ID NO: 2938923 - RNA, 19 nt, Artificial Sequence
  Description of Artificial Sequence: Synthetic oligonucleotide
cuucgaguaagucacggca

SEQ ID NO: 2938924 - RNA, 19 nt, Artificial Sequence
  Description of Artificial Sequence: Synthetic oligonucleotide
uggcgaccaaaccauuuag

SEQ ID NO: 2938925 - RNA, 19 nt, Artificial Sequence
  Description of Artificial Sequence: Synthetic oligonucleotide
acgaacuuggccauggucu

SEQ ID NO: 2938926 - RNA, 19 nt, Artificial Sequence
  Description of Artificial Sequence: Synthetic oligonucleotide
uuuucacacucugaauagc

SEQ ID NO: 2938927 - RNA, 19 nt, Artificial Sequence
  Description of Artificial Sequence: Synthetic oligonucleotide
cacggcagcgcuuacuagc

SEQ ID NO: 2938928 - RNA, 19 nt, Artificial Sequence
  Description of Artificial Sequence: Synthetic oligonucleotide
cucuccgauauaaaaccac

SEQ ID NO: 2938929 - RNA, 19 nt, Artificial Sequence
  Description of Artificial Sequence: Synthetic oligonucleotide
guaguaccaaaauguggcc

SEQ ID NO: 2938930 - RNA, 19 nt, Artificial Sequence
  Description of Artificial Sequence: Synthetic oligonucleotide
cuaguauuuuauuaagaua

SEQ ID NO: 2938931 - RNA, 19 nt, Artificial Sequence
  Description of Artificial Sequence: Synthetic oligonucleotide
aaaccacauccacaccuca

SEQ ID NO: 2938932 - RNA, 19 nt, Artificial Sequence
  Description of Artificial Sequence: Synthetic oligonucleotide
uaccaguuuuagcacuuug

SEQ ID NO: 2938933 - RNA, 19 nt, Artificial Sequence
  Description of Artificial Sequence: Synthetic oligonucleotide
auuucagcagggguugggg

SEQ ID NO: 2938934 - RNA, 19 nt, Artificial Sequence
  Description of Artificial Sequence: Synthetic oligonucleotide
uggccauggucuagggugg

SEQ ID NO: 2938935 - RNA, 19 nt, Artificial Sequence
  Description of Artificial Sequence: Synthetic oligonucleotide
accauuuagcacagcuucc

SEQ ID NO: 2938936 - RNA, 19 nt, Artificial Sequence
  Description of Artificial Sequence: Synthetic oligonucleotide
uccgcgaaguuacggacga

SEQ ID NO: 2938937 - RNA, 19 nt, Artificial Sequence
  Description of Artificial Sequence: Synthetic oligonucleotide
uaguaccaaaauguggcca

SEQ ID NO: 2938938 - RNA, 19 nt, Artificial Sequence
  Description of Artificial Sequence: Synthetic oligonucleotide
gcagucucaucacaugugg

SEQ ID NO: 2938939 - RNA, 19 nt, Artificial Sequence
  Description of Artificial Sequence: Synthetic oligonucleotide
auuuagcacagcuuccuua

SEQ ID NO: 2938940 - RNA, 19 nt, Artificial Sequence
  Description of Artificial Sequence: Synthetic oligonucleotide
gauuucagcagggguuggg

SEQ ID NO: 2938941 - RNA, 19 nt, Artificial Sequence
  Description of Artificial Sequence: Synthetic oligonucleotide
cucaguggcgaccaaacca

SEQ ID NO: 2938942 - RNA, 19 nt, Artificial Sequence
  Description of Artificial Sequence: Synthetic oligonucleotide
gucucaucacauguggucc

SEQ ID NO: 2938943 - RNA, 19 nt, Artificial Sequence
  Description of Artificial Sequence: Synthetic oligonucleotide
accacauccacaccucagu

SEQ ID NO: 2938944 - RNA, 19 nt, Artificial Sequence
  Description of Artificial Sequence: Synthetic oligonucleotide
ucucaucacauguggucca

SEQ ID NO: 2938945 - RNA, 19 nt, Artificial Sequence
  Description of Artificial Sequence: Synthetic oligonucleotide
uuaagauagcagucucauc

SEQ ID NO: 2938946 - RNA, 19 nt, Artificial Sequence
  Description of Artificial Sequence: Synthetic oligonucleotide
ugguccaagaacaccucaa

SEQ ID NO: 2938947 - RNA, 19 nt, Artificial Sequence
  Description of Artificial Sequence: Synthetic oligonucleotide
uugaagcuaccaguuuuag

SEQ ID NO: 2938948 - RNA, 19 nt, Artificial Sequence
  Description of Artificial Sequence: Synthetic oligonucleotide
auagccaacgaugccacgu

SEQ ID NO: 2938949 - RNA, 19 nt, Artificial Sequence
  Description of Artificial Sequence: Synthetic oligonucleotide
caaauaaaaucagauguua

SEQ ID NO: 2938950 - RNA, 19 nt, Artificial Sequence
  Description of Artificial Sequence: Synthetic oligonucleotide
uguuugaagcuaccaguuu

SEQ ID NO: 2938951 - RNA, 19 nt, Artificial Sequence
  Description of Artificial Sequence: Synthetic oligonucleotide
ugaauagcugcagggauuu

SEQ ID NO: 2938952 - RNA, 19 nt, Artificial Sequence
  Description of Artificial Sequence: Synthetic oligonucleotide
aucacaugugguccaagaa

SEQ ID NO: 2938953 - RNA, 19 nt, Artificial Sequence
  Description of Artificial Sequence: Synthetic oligonucleotide
ucuccgcgaaguuacggac

SEQ ID NO: 2938954 - RNA, 19 nt, Artificial Sequence
  Description of Artificial Sequence: Synthetic oligonucleotide
agauagcagucucaucaca

SEQ ID NO: 2938955 - RNA, 19 nt, Artificial Sequence
  Description of Artificial Sequence: Synthetic oligonucleotide
agcuaccaguuuuagcacu

SEQ ID NO: 2938956 - RNA, 19 nt, Artificial Sequence
  Description of Artificial Sequence: Synthetic oligonucleotide
aagguccgucuccucgcac

SEQ ID NO: 2938957 - RNA, 19 nt, Artificial Sequence
  Description of Artificial Sequence: Synthetic oligonucleotide
gaguaagucacggcagcgc

SEQ ID NO: 2938958 - RNA, 19 nt, Artificial Sequence
  Description of Artificial Sequence: Synthetic oligonucleotide
caucauagccaacgaugcc

SEQ ID NO: 2938959 - RNA, 19 nt, Artificial Sequence
  Description of Artificial Sequence: Synthetic oligonucleotide
gacgaacuuggccaugguc

SEQ ID NO: 2938960 - RNA, 19 nt, Artificial Sequence
  Description of Artificial Sequence: Synthetic oligonucleotide
aaaccauuuagcacagcuu

SEQ ID NO: 2938961 - RNA, 19 nt, Artificial Sequence
  Description of Artificial Sequence: Synthetic oligonucleotide
caaaccauuuagcacagcu

SEQ ID NO: 2938962 - RNA, 19 nt, Artificial Sequence
  Description of Artificial Sequence: Synthetic oligonucleotide
cuccgcgaaguuacggacg

SEQ ID NO: 2938963 - RNA, 19 nt, Artificial Sequence
  Description of Artificial Sequence: Synthetic oligonucleotide
aaccacauccacaccucag

SEQ ID NO: 2938964 - RNA, 19 nt, Artificial Sequence
  Description of Artificial Sequence: Synthetic oligonucleotide
uagcacuuugaauuauuuu

SEQ ID NO: 2938965 - RNA, 19 nt, Artificial Sequence
  Description of Artificial Sequence: Synthetic oligonucleotide
guuuuagcacuuugaauua

SEQ ID NO: 2938966 - RNA, 19 nt, Artificial Sequence
  Description of Artificial Sequence: Synthetic oligonucleotide
uccgucuccucgcaccgcc

SEQ ID NO: 2938967 - RNA, 19 nt, Artificial Sequence
  Description of Artificial Sequence: Synthetic oligonucleotide
accucaguggcgaccaaac

SEQ ID NO: 2938968 - RNA, 19 nt, Artificial Sequence
  Description of Artificial Sequence: Synthetic oligonucleotide
uaacuguaagcuguuugaa

SEQ ID NO: 2938969 - RNA, 19 nt, Artificial Sequence
  Description of Artificial Sequence: Synthetic oligonucleotide
agcgccggggccuucuccg

SEQ ID NO: 2938970 - RNA, 19 nt, Artificial Sequence
  Description of Artificial Sequence: Synthetic oligonucleotide
gaaccaguucaaccuuggc

SEQ ID NO: 2938971 - RNA, 19 nt, Artificial Sequence
  Description of Artificial Sequence: Synthetic oligonucleotide
aagcuguuugaagcuacca

SEQ ID NO: 2938972 - RNA, 19 nt, Artificial Sequence
  Description of Artificial Sequence: Synthetic oligonucleotide
uuuuagcacuuugaauuau

SEQ ID NO: 2938973 - RNA, 19 nt, Artificial Sequence
  Description of Artificial Sequence: Synthetic oligonucleotide
accaguuuuagcacuuuga

SEQ ID NO: 2938974 - RNA, 19 nt, Artificial Sequence
  Description of Artificial Sequence: Synthetic oligonucleotide
uaggguggaagguccgucu

SEQ ID NO: 2938975 - RNA, 19 nt, Artificial Sequence
  Description of Artificial Sequence: Synthetic oligonucleotide
aggguggaagguccgucuc

SEQ ID NO: 2938976 - RNA, 19 nt, Artificial Sequence
  Description of Artificial Sequence: Synthetic oligonucleotide
uguaagcuguuugaagcua

SEQ ID NO: 2938977 - RNA, 19 nt, Artificial Sequence
  Description of Artificial Sequence: Synthetic oligonucleotide
gcuaguauuuuauuaagau

SEQ ID NO: 2938978 - RNA, 19 nt, Artificial Sequence
  Description of Artificial Sequence: Synthetic oligonucleotide
guaagcuguuugaagcuac

SEQ ID NO: 2938979 - RNA, 19 nt, Artificial Sequence
  Description of Artificial Sequence: Synthetic oligonucleotide
caaacaucauagccaacga

SEQ ID NO: 2938980 - RNA, 19 nt, Artificial Sequence
  Description of Artificial Sequence: Synthetic oligonucleotide
uucaaccuuggcguaguac

SEQ ID NO: 2938981 - RNA, 19 nt, Artificial Sequence
  Description of Artificial Sequence: Synthetic oligonucleotide
ugugguccaagaacaccuc

SEQ ID NO: 2938982 - RNA, 19 nt, Artificial Sequence
  Description of Artificial Sequence: Synthetic oligonucleotide
uuagcacagcuuccuuaac

SEQ ID NO: 2938983 - RNA, 19 nt, Artificial Sequence
  Description of Artificial Sequence: Synthetic oligonucleotide
acaugugguccaagaacac

SEQ ID NO: 2938984 - RNA, 19 nt, Artificial Sequence
  Description of Artificial Sequence: Synthetic oligonucleotide
ccaagaacaccucaaauaa

SEQ ID NO: 2938985 - RNA, 19 nt, Artificial Sequence
  Description of Artificial Sequence: Synthetic oligonucleotide
gcgaccaaaccauuuagca

SEQ ID NO: 2938986 - RNA, 19 nt, Artificial Sequence
  Description of Artificial Sequence: Synthetic oligonucleotide
aguuacggacgaacuuggc

SEQ ID NO: 2938987 - RNA, 19 nt, Artificial Sequence
  Description of Artificial Sequence: Synthetic oligonucleotide
uaagucacggcagcgcuua

SEQ ID NO: 2938988 - RNA, 19 nt, Artificial Sequence
  Description of Artificial Sequence: Synthetic oligonucleotide
caucacaugugguccaaga

SEQ ID NO: 2938989 - RNA, 19 nt, Artificial Sequence
  Description of Artificial Sequence: Synthetic oligonucleotide
guuugccuaugaucucucc

SEQ ID NO: 2938990 - RNA, 19 nt, Artificial Sequence
  Description of Artificial Sequence: Synthetic oligonucleotide
guuugaagcuaccaguuuu

SEQ ID NO: 2938991 - RNA, 19 nt, Artificial Sequence
  Description of Artificial Sequence: Synthetic oligonucleotide
cuucuccgcgaaguuacgg

SEQ ID NO: 2938992 - RNA, 19 nt, Artificial Sequence
  Description of Artificial Sequence: Synthetic oligonucleotide
gaugccacguuugccuaug

SEQ ID NO: 2938993 - RNA, 19 nt, Artificial Sequence
  Description of Artificial Sequence: Synthetic oligonucleotide
acguuugccuaugaucucu

SEQ ID NO: 2938994 - RNA, 19 nt, Artificial Sequence
  Description of Artificial Sequence: Synthetic oligonucleotide
gcguaguaccaaaaugugg

SEQ ID NO: 2938995 - RNA, 19 nt, Artificial Sequence
  Description of Artificial Sequence: Synthetic oligonucleotide
uggucuaggguggaagguc

SEQ ID NO: 2938996 - RNA, 19 nt, Artificial Sequence
  Description of Artificial Sequence: Synthetic oligonucleotide
agcgcuuacuagcgccggg

SEQ ID NO: 2938997 - RNA, 19 nt, Artificial Sequence
  Description of Artificial Sequence: Synthetic oligonucleotide
aagucacggcagcgcuuac

SEQ ID NO: 2938998 - RNA, 19 nt, Artificial Sequence
  Description of Artificial Sequence: Synthetic oligonucleotide
acggcagcgcuuacuagcg

SEQ ID NO: 2938999 - RNA, 19 nt, Artificial Sequence
  Description of Artificial Sequence: Synthetic oligonucleotide
ugccuaugaucucuccgau

SEQ ID NO: 2939000 - RNA, 19 nt, Artificial Sequence
  Description of Artificial Sequence: Synthetic oligonucleotide
uccuuaacuguaagcuguu

SEQ ID NO: 2939001 - RNA, 19 nt, Artificial Sequence
  Description of Artificial Sequence: Synthetic oligonucleotide
cauagccaacgaugccacg

SEQ ID NO: 2939002 - RNA, 19 nt, Artificial Sequence
  Description of Artificial Sequence: Synthetic oligonucleotide
gccacguuugccuaugauc

SEQ ID NO: 2939003 - RNA, 19 nt, Artificial Sequence
  Description of Artificial Sequence: Synthetic oligonucleotide
agggauuucagcagggguu

SEQ ID NO: 2939004 - RNA, 19 nt, Artificial Sequence
  Description of Artificial Sequence: Synthetic oligonucleotide
agcagucucaucacaugug

SEQ ID NO: 2939005 - RNA, 19 nt, Artificial Sequence
  Description of Artificial Sequence: Synthetic oligonucleotide
cauccacaccucaguggcg

SEQ ID NO: 2939006 - RNA, 19 nt, Artificial Sequence
  Description of Artificial Sequence: Synthetic oligonucleotide
ucacggcagcgcuuacuag

SEQ ID NO: 2939007 - RNA, 19 nt, Artificial Sequence
  Description of Artificial Sequence: Synthetic oligonucleotide
ggcagcgcuuacuagcgcc

SEQ ID NO: 2939008 - RNA, 19 nt, Artificial Sequence
  Description of Artificial Sequence: Synthetic oligonucleotide
gauagcagucucaucacau

SEQ ID NO: 2939009 - RNA, 19 nt, Artificial Sequence
  Description of Artificial Sequence: Synthetic oligonucleotide
acacucugaauagcugcag

SEQ ID NO: 2939010 - RNA, 19 nt, Artificial Sequence
  Description of Artificial Sequence: Synthetic oligonucleotide
ucaucacaugugguccaag

SEQ ID NO: 2939011 - RNA, 19 nt, Artificial Sequence
  Description of Artificial Sequence: Synthetic oligonucleotide
uaccaaaauguggccaauc

SEQ ID NO: 2939012 - RNA, 19 nt, Artificial Sequence
  Description of Artificial Sequence: Synthetic oligonucleotide
accaaaccauuuagcacag

SEQ ID NO: 2939013 - RNA, 19 nt, Artificial Sequence
  Description of Artificial Sequence: Synthetic oligonucleotide
aguucaaccuuggcguagu

SEQ ID NO: 2939014 - RNA, 19 nt, Artificial Sequence
  Description of Artificial Sequence: Synthetic oligonucleotide
ggaaccaguucaaccuugg

SEQ ID NO: 2939015 - RNA, 19 nt, Artificial Sequence
  Description of Artificial Sequence: Synthetic oligonucleotide
auccacaccucaguggcga

SEQ ID NO: 2939016 - RNA, 19 nt, Artificial Sequence
  Description of Artificial Sequence: Synthetic oligonucleotide
caagaacaccucaaauaaa

SEQ ID NO: 2939017 - RNA, 19 nt, Artificial Sequence
  Description of Artificial Sequence: Synthetic oligonucleotide
gcuuccuuaacuguaagcu

SEQ ID NO: 2939018 - RNA, 19 nt, Artificial Sequence
  Description of Artificial Sequence: Synthetic oligonucleotide
ggaagguccgucuccucgc

SEQ ID NO: 2939019 - RNA, 19 nt, Artificial Sequence
  Description of Artificial Sequence: Synthetic oligonucleotide
guuaaagaucagucuucaa

SEQ ID NO: 2939020 - RNA, 19 nt, Artificial Sequence
  Description of Artificial Sequence: Synthetic oligonucleotide
gaacuuggccauggucuag

SEQ ID NO: 2939021 - RNA, 19 nt, Artificial Sequence
  Description of Artificial Sequence: Synthetic oligonucleotide
gcuguuugaagcuaccagu

SEQ ID NO: 2939022 - RNA, 19 nt, Artificial Sequence
  Description of Artificial Sequence: Synthetic oligonucleotide
uacggacgaacuuggccau

SEQ ID NO: 2939023 - RNA, 19 nt, Artificial Sequence
  Description of Artificial Sequence: Synthetic oligonucleotide
caacgaugccacguuugcc

SEQ ID NO: 2939024 - RNA, 19 nt, Artificial Sequence
  Description of Artificial Sequence: Synthetic oligonucleotide
ggccaaucgaggcuucgag

SEQ ID NO: 2939025 - RNA, 19 nt, Artificial Sequence
  Description of Artificial Sequence: Synthetic oligonucleotide
cgauauaaaaccacaucca

SEQ ID NO: 2939026 - RNA, 19 nt, Artificial Sequence
  Description of Artificial Sequence: Synthetic oligonucleotide
ggcguaguaccaaaaugug

SEQ ID NO: 2939027 - RNA, 19 nt, Artificial Sequence
  Description of Artificial Sequence: Synthetic oligonucleotide
uagccaacgaugccacguu

SEQ ID NO: 2939028 - RNA, 19 nt, Artificial Sequence
  Description of Artificial Sequence: Synthetic oligonucleotide
ggcuucgaguaagucacgg

SEQ ID NO: 2939029 - RNA, 19 nt, Artificial Sequence
  Description of Artificial Sequence: Synthetic oligonucleotide
aaccuuggcguaguaccaa

SEQ ID NO: 2939030 - RNA, 19 nt, Artificial Sequence
  Description of Artificial Sequence: Synthetic oligonucleotide
ucuaggguggaagguccgu

SEQ ID NO: 2939031 - RNA, 19 nt, Artificial Sequence
  Description of Artificial Sequence: Synthetic oligonucleotide
caaccuuggcguaguacca

SEQ ID NO: 2939032 - RNA, 19 nt, Artificial Sequence
  Description of Artificial Sequence: Synthetic oligonucleotide
gggauuucagcagggguug

SEQ ID NO: 2939033 - RNA, 19 nt, Artificial Sequence
  Description of Artificial Sequence: Synthetic oligonucleotide
acagcuuccuuaacuguaa

SEQ ID NO: 2939034 - RNA, 19 nt, Artificial Sequence
  Description of Artificial Sequence: Synthetic oligonucleotide
gcuucgaguaagucacggc

SEQ ID NO: 2939035 - RNA, 19 nt, Artificial Sequence
  Description of Artificial Sequence: Synthetic oligonucleotide
ccaacgaugccacguuugc

SEQ ID NO: 2939036 - RNA, 19 nt, Artificial Sequence
  Description of Artificial Sequence: Synthetic oligonucleotide
auggucuaggguggaaggu

SEQ ID NO: 2939037 - RNA, 19 nt, Artificial Sequence
  Description of Artificial Sequence: Synthetic oligonucleotide
cagcuuccuuaacuguaag

SEQ ID NO: 2939038 - RNA, 19 nt, Artificial Sequence
  Description of Artificial Sequence: Synthetic oligonucleotide
ugccacguuugccuaugau

SEQ ID NO: 2939039 - RNA, 19 nt, Artificial Sequence
  Description of Artificial Sequence: Synthetic oligonucleotide
ggucuaggguggaaggucc

SEQ ID NO: 2939040 - RNA, 19 nt, Artificial Sequence
  Description of Artificial Sequence: Synthetic oligonucleotide
gugguccaagaacaccuca

SEQ ID NO: 2939041 - RNA, 19 nt, Artificial Sequence
  Description of Artificial Sequence: Synthetic oligonucleotide
caguucaaccuuggcguag

SEQ ID NO: 2939042 - RNA, 19 nt, Artificial Sequence
  Description of Artificial Sequence: Synthetic oligonucleotide
gguccgucuccucgcaccg

SEQ ID NO: 2939043 - RNA, 19 nt, Artificial Sequence
  Description of Artificial Sequence: Synthetic oligonucleotide
gucacggcagcgcuuacua

SEQ ID NO: 2939044 - RNA, 19 nt, Artificial Sequence
  Description of Artificial Sequence: Synthetic oligonucleotide
aucagauguuaaagaucag

SEQ ID NO: 2939045 - RNA, 19 nt, Artificial Sequence
  Description of Artificial Sequence: Synthetic oligonucleotide
gaagguccgucuccucgca

SEQ ID NO: 2939046 - RNA, 19 nt, Artificial Sequence
  Description of Artificial Sequence: Synthetic oligonucleotide
cuguaagcuguuugaagcu

SEQ ID NO: 2939047 - RNA, 19 nt, Artificial Sequence
  Description of Artificial Sequence: Synthetic oligonucleotide
cacguuugccuaugaucuc

SEQ ID NO: 2939048 - RNA, 19 nt, Artificial Sequence
  Description of Artificial Sequence: Synthetic oligonucleotide
ccacguuugccuaugaucu

SEQ ID NO: 2939049 - RNA, 19 nt, Artificial Sequence
  Description of Artificial Sequence: Synthetic oligonucleotide
guggcgaccaaaccauuua

SEQ ID NO: 2939050 - RNA, 19 nt, Artificial Sequence
  Description of Artificial Sequence: Synthetic oligonucleotide
accuuggcguaguaccaaa

SEQ ID NO: 2939051 - RNA, 19 nt, Artificial Sequence
  Description of Artificial Sequence: Synthetic oligonucleotide
cgaccaaaccauuuagcac

SEQ ID NO: 2939052 - RNA, 19 nt, Artificial Sequence
  Description of Artificial Sequence: Synthetic oligonucleotide
gcuuacuagcgccggggcc

SEQ ID NO: 2939053 - RNA, 19 nt, Artificial Sequence
  Description of Artificial Sequence: Synthetic oligonucleotide
cuaggguggaagguccguc

SEQ ID NO: 2939054 - RNA, 19 nt, Artificial Sequence
  Description of Artificial Sequence: Synthetic oligonucleotide
ccaguuuuagcacuuugaa

SEQ ID NO: 2939055 - RNA, 19 nt, Artificial Sequence
  Description of Artificial Sequence: Synthetic oligonucleotide
cuuacuagcgccggggccu

SEQ ID NO: 2939056 - RNA, 19 nt, Artificial Sequence
  Description of Artificial Sequence: Synthetic oligonucleotide
uguggccaaucgaggcuuc

SEQ ID NO: 2939057 - RNA, 19 nt, Artificial Sequence
  Description of Artificial Sequence: Synthetic oligonucleotide
ggcgaccaaaccauuuagc

SEQ ID NO: 2939058 - RNA, 19 nt, Artificial Sequence
  Description of Artificial Sequence: Synthetic oligonucleotide
uggccaaucgaggcuucga

SEQ ID NO: 2939059 - RNA, 19 nt, Artificial Sequence
  Description of Artificial Sequence: Synthetic oligonucleotide
caguuuuagcacuuugaau

SEQ ID NO: 2939060 - RNA, 19 nt, Artificial Sequence
  Description of Artificial Sequence: Synthetic oligonucleotide
gguccaagaacaccucaaa

SEQ ID NO: 2939061 - RNA, 19 nt, Artificial Sequence
  Description of Artificial Sequence: Synthetic oligonucleotide
ccaaaauguggccaaucga

SEQ ID NO: 2939062 - RNA, 19 nt, Artificial Sequence
  Description of Artificial Sequence: Synthetic oligonucleotide
uagcgccggggccuucucc

SEQ ID NO: 2939063 - RNA, 19 nt, Artificial Sequence
  Description of Artificial Sequence: Synthetic oligonucleotide
ucuccucgcaccgccggcu

SEQ ID NO: 2939064 - RNA, 19 nt, Artificial Sequence
  Description of Artificial Sequence: Synthetic oligonucleotide
ccaaucgaggcuucgagua

SEQ ID NO: 2939065 - RNA, 19 nt, Artificial Sequence
  Description of Artificial Sequence: Synthetic oligonucleotide
guccaagaacaccucaaau

SEQ ID NO: 2939066 - RNA, 19 nt, Artificial Sequence
  Description of Artificial Sequence: Synthetic oligonucleotide
acgaugccacguuugccua

SEQ ID NO: 2939067 - RNA, 19 nt, Artificial Sequence
  Description of Artificial Sequence: Synthetic oligonucleotide
auguggccaaucgaggcuu

SEQ ID NO: 2939068 - RNA, 19 nt, Artificial Sequence
  Description of Artificial Sequence: Synthetic oligonucleotide
ucgaggcuucgaguaaguc

SEQ ID NO: 2939069 - RNA, 19 nt, Artificial Sequence
  Description of Artificial Sequence: Synthetic oligonucleotide
cacaccucaguggcgacca

SEQ ID NO: 2939070 - RNA, 19 nt, Artificial Sequence
  Description of Artificial Sequence: Synthetic oligonucleotide
cuuggcguaguaccaaaau

SEQ ID NO: 2939071 - RNA, 19 nt, Artificial Sequence
  Description of Artificial Sequence: Synthetic oligonucleotide
ggguggaagguccgucucc

SEQ ID NO: 2939072 - RNA, 19 nt, Artificial Sequence
  Description of Artificial Sequence: Synthetic oligonucleotide
guggccaaucgaggcuucg

SEQ ID NO: 2939073 - RNA, 19 nt, Artificial Sequence
  Description of Artificial Sequence: Synthetic oligonucleotide
gccuucuccgcgaaguuac

SEQ ID NO: 2939074 - RNA, 19 nt, Artificial Sequence
  Description of Artificial Sequence: Synthetic oligonucleotide
agucacggcagcgcuuacu

SEQ ID NO: 2939075 - RNA, 19 nt, Artificial Sequence
  Description of Artificial Sequence: Synthetic oligonucleotide
aguggcgaccaaaccauuu

SEQ ID NO: 2939076 - RNA, 19 nt, Artificial Sequence
  Description of Artificial Sequence: Synthetic oligonucleotide
caaucgaggcuucgaguaa

SEQ ID NO: 2939077 - RNA, 19 nt, Artificial Sequence
  Description of Artificial Sequence: Synthetic oligonucleotide
cuccgauauaaaaccacau

SEQ ID NO: 2939078 - RNA, 19 nt, Artificial Sequence
  Description of Artificial Sequence: Synthetic oligonucleotide
gcagcgcuuacuagcgccg

SEQ ID NO: 2939079 - RNA, 19 nt, Artificial Sequence
  Description of Artificial Sequence: Synthetic oligonucleotide
ccauggucuaggguggaag

SEQ ID NO: 2939080 - RNA, 19 nt, Artificial Sequence
  Description of Artificial Sequence: Synthetic oligonucleotide
gccaacgaugccacguuug

SEQ ID NO: 2939081 - RNA, 19 nt, Artificial Sequence
  Description of Artificial Sequence: Synthetic oligonucleotide
cgaggcuucgaguaaguca

SEQ ID NO: 2939082 - RNA, 19 nt, Artificial Sequence
  Description of Artificial Sequence: Synthetic oligonucleotide
uccucgcaccgccggcuga

SEQ ID NO: 2939083 - RNA, 19 nt, Artificial Sequence
  Description of Artificial Sequence: Synthetic oligonucleotide
cagcgcuuacuagcgccgg

SEQ ID NO: 2939084 - RNA, 19 nt, Artificial Sequence
  Description of Artificial Sequence: Synthetic oligonucleotide
gucuccucgcaccgccggc

SEQ ID NO: 2939085 - RNA, 19 nt, Artificial Sequence
  Description of Artificial Sequence: Synthetic oligonucleotide
cagggauuucagcaggggu

SEQ ID NO: 2939086 - RNA, 19 nt, Artificial Sequence
  Description of Artificial Sequence: Synthetic oligonucleotide
gcgcuuacuagcgccgggg

SEQ ID NO: 2939087 - RNA, 19 nt, Artificial Sequence
  Description of Artificial Sequence: Synthetic oligonucleotide
ggauuucagcagggguugg

SEQ ID NO: 2939088 - RNA, 19 nt, Artificial Sequence
  Description of Artificial Sequence: Synthetic oligonucleotide
aucgaggcuucgaguaagu

SEQ ID NO: 2939089 - RNA, 19 nt, Artificial Sequence
  Description of Artificial Sequence: Synthetic oligonucleotide
acuagcgccggggccuucu

SEQ ID NO: 2939090 - RNA, 19 nt, Artificial Sequence
  Description of Artificial Sequence: Synthetic oligonucleotide
ccucaguggcgaccaaacc

SEQ ID NO: 2939091 - RNA, 19 nt, Artificial Sequence
  Description of Artificial Sequence: Synthetic oligonucleotide
augccacguuugccuauga

SEQ ID NO: 2939092 - RNA, 19 nt, Artificial Sequence
  Description of Artificial Sequence: Synthetic oligonucleotide
aggcuucgaguaagucacg

SEQ ID NO: 2939093 - RNA, 19 nt, Artificial Sequence
  Description of Artificial Sequence: Synthetic oligonucleotide
gaauagcugcagggauuuc

SEQ ID NO: 2939094 - RNA, 19 nt, Artificial Sequence
  Description of Artificial Sequence: Synthetic oligonucleotide
ccuucuccgcgaaguuacg

SEQ ID NO: 2939095 - RNA, 19 nt, Artificial Sequence
  Description of Artificial Sequence: Synthetic oligonucleotide
cgaguaagucacggcagcg

SEQ ID NO: 2939096 - RNA, 19 nt, Artificial Sequence
  Description of Artificial Sequence: Synthetic oligonucleotide
cuaugaucucuccgauaua

SEQ ID NO: 2939097 - RNA, 19 nt, Artificial Sequence
  Description of Artificial Sequence: Synthetic oligonucleotide
cagucucaucacauguggu

SEQ ID NO: 2939098 - RNA, 19 nt, Artificial Sequence
  Description of Artificial Sequence: Synthetic oligonucleotide
aucagucuucaaacaucau

SEQ ID NO: 2939099 - RNA, 19 nt, Artificial Sequence
  Description of Artificial Sequence: Synthetic oligonucleotide
cgcgaaguuacggacgaac

SEQ ID NO: 2939100 - RNA, 19 nt, Artificial Sequence
  Description of Artificial Sequence: Synthetic oligonucleotide
cuccucgcaccgccggcug

SEQ ID NO: 2939101 - RNA, 19 nt, Artificial Sequence
  Description of Artificial Sequence: Synthetic oligonucleotide
guggaagguccgucuccuc

SEQ ID NO: 2939102 - RNA, 19 nt, Artificial Sequence
  Description of Artificial Sequence: Synthetic oligonucleotide
acggacgaacuuggccaug

SEQ ID NO: 2939103 - RNA, 19 nt, Artificial Sequence
  Description of Artificial Sequence: Synthetic oligonucleotide
cuuggccauggucuagggu

SEQ ID NO: 2939104 - RNA, 19 nt, Artificial Sequence
  Description of Artificial Sequence: Synthetic oligonucleotide
cggacgaacuuggccaugg

SEQ ID NO: 2939105 - RNA, 19 nt, Artificial Sequence
  Description of Artificial Sequence: Synthetic oligonucleotide
uuacuagcgccggggccuu

SEQ ID NO: 2939106 - RNA, 19 nt, Artificial Sequence
  Description of Artificial Sequence: Synthetic oligonucleotide
cucaucacaugugguccaa

SEQ ID NO: 2939107 - RNA, 19 nt, Artificial Sequence
  Description of Artificial Sequence: Synthetic oligonucleotide
cauuuagcacagcuuccuu

SEQ ID NO: 2939108 - RNA, 19 nt, Artificial Sequence
  Description of Artificial Sequence: Synthetic oligonucleotide
gccaaucgaggcuucgagu

SEQ ID NO: 2939109 - RNA, 19 nt, Artificial Sequence
  Description of Artificial Sequence: Synthetic oligonucleotide
guucaaccuuggcguagua

SEQ ID NO: 2939110 - RNA, 19 nt, Artificial Sequence
  Description of Artificial Sequence: Synthetic oligonucleotide
cuagcgccggggccuucuc

SEQ ID NO: 2939111 - RNA, 19 nt, Artificial Sequence
  Description of Artificial Sequence: Synthetic oligonucleotide
gcacagcuuccuuaacugu

SEQ ID NO: 2939112 - RNA, 19 nt, Artificial Sequence
  Description of Artificial Sequence: Synthetic oligonucleotide
gcgaaguuacggacgaacu

SEQ ID NO: 2939113 - RNA, 19 nt, Artificial Sequence
  Description of Artificial Sequence: Synthetic oligonucleotide
gguggaagguccgucuccu

SEQ ID NO: 2939114 - RNA, 19 nt, Artificial Sequence
  Description of Artificial Sequence: Synthetic oligonucleotide
cguuugccuaugaucucuc

SEQ ID NO: 2939115 - RNA, 19 nt, Artificial Sequence
  Description of Artificial Sequence: Synthetic oligonucleotide
ccacaccucaguggcgacc

SEQ ID NO: 2939116 - RNA, 19 nt, Artificial Sequence
  Description of Artificial Sequence: Synthetic oligonucleotide
caccucaguggcgaccaaa

SEQ ID NO: 2939117 - RNA, 19 nt, Artificial Sequence
  Description of Artificial Sequence: Synthetic oligonucleotide
cgcuuacuagcgccggggc

SEQ ID NO: 2939118 - RNA, 19 nt, Artificial Sequence
  Description of Artificial Sequence: Synthetic oligonucleotide
gccuaugaucucuccgaua

SEQ ID NO: 2939119 - RNA, 19 nt, Artificial Sequence
  Description of Artificial Sequence: Synthetic oligonucleotide
cgucuccucgcaccgccgg

SEQ ID NO: 2939120 - RNA, 19 nt, Artificial Sequence
  Description of Artificial Sequence: Synthetic oligonucleotide
acaccucaguggcgaccaa

SEQ ID NO: 2939121 - RNA, 19 nt, Artificial Sequence
  Description of Artificial Sequence: Synthetic oligonucleotide
guccgucuccucgcaccgc

SEQ ID NO: 2939122 - RNA, 19 nt, Artificial Sequence
  Description of Artificial Sequence: Synthetic oligonucleotide
ccauuuagcacagcuuccu

SEQ ID NO: 2939123 - RNA, 19 nt, Artificial Sequence
  Description of Artificial Sequence: Synthetic oligonucleotide
guaccaaaauguggccaau

SEQ ID NO: 2939124 - RNA, 19 nt, Artificial Sequence
  Description of Artificial Sequence: Synthetic oligonucleotide
ccaaaccauuuagcacagc

SEQ ID NO: 2939125 - RNA, 19 nt, Artificial Sequence
  Description of Artificial Sequence: Synthetic oligonucleotide
ccuuggcguaguaccaaaa

SEQ ID NO: 2939126 - RNA, 19 nt, Artificial Sequence
  Description of Artificial Sequence: Synthetic oligonucleotide
ccgucuccucgcaccgccg

SEQ ID NO: 2939127 - RNA, 19 nt, Artificial Sequence
  Description of Artificial Sequence: Synthetic oligonucleotide
guaagucacggcagcgcuu

SEQ ID NO: 2939128 - RNA, 19 nt, Artificial Sequence
  Description of Artificial Sequence: Synthetic oligonucleotide
ggggaaccaguucaaccuu

SEQ ID NO: 2939129 - RNA, 19 nt, Artificial Sequence
  Description of Artificial Sequence: Synthetic oligonucleotide
cgaacuuggccauggucua

SEQ ID NO: 2939130 - RNA, 19 nt, Artificial Sequence
  Description of Artificial Sequence: Synthetic oligonucleotide
gcuaccaguuuuagcacuu

SEQ ID NO: 2939131 - RNA, 19 nt, Artificial Sequence
  Description of Artificial Sequence: Synthetic oligonucleotide
ccaguucaaccuuggcgua

SEQ ID NO: 2939132 - RNA, 19 nt, Artificial Sequence
  Description of Artificial Sequence: Synthetic oligonucleotide
ggccuucuccgcgaaguua

SEQ ID NO: 2939133 - RNA, 19 nt, Artificial Sequence
  Description of Artificial Sequence: Synthetic oligonucleotide
gccggggccuucuccgcga

SEQ ID NO: 2939134 - RNA, 19 nt, Artificial Sequence
  Description of Artificial Sequence: Synthetic oligonucleotide
ggacgaacuuggccauggu

SEQ ID NO: 2939135 - RNA, 19 nt, Artificial Sequence
  Description of Artificial Sequence: Synthetic oligonucleotide
cuaccaguuuuagcacuuu

SEQ ID NO: 2939136 - RNA, 19 nt, Artificial Sequence
  Description of Artificial Sequence: Synthetic oligonucleotide
cgaaguuacggacgaacuu

SEQ ID NO: 2939137 - RNA, 19 nt, Artificial Sequence
  Description of Artificial Sequence: Synthetic oligonucleotide
uacuagcgccggggccuuc

SEQ ID NO: 2939138 - RNA, 19 nt, Artificial Sequence
  Description of Artificial Sequence: Synthetic oligonucleotide
gcgccggggccuucuccgc

SEQ ID NO: 2939139 - RNA, 19 nt, Artificial Sequence
  Description of Artificial Sequence: Synthetic oligonucleotide
cgccggggccuucuccgcg

SEQ ID NO: 2939140 - RNA, 19 nt, Artificial Sequence
  Description of Artificial Sequence: Synthetic oligonucleotide
ggccauggucuagggugga

SEQ ID NO: 2939141 - RNA, 19 nt, Artificial Sequence
  Description of Artificial Sequence: Synthetic oligonucleotide
caguggcgaccaaaccauu

SEQ ID NO: 2939142 - RNA, 19 nt, Artificial Sequence
  Description of Artificial Sequence: Synthetic oligonucleotide
gccauggucuaggguggaa

SEQ ID NO: 2939143 - RNA, 19 nt, Artificial Sequence
  Description of Artificial Sequence: Synthetic oligonucleotide
cggcagcgcuuacuagcgc

SEQ ID NO: 2939144 - RNA, 19 nt, Artificial Sequence
  Description of Artificial Sequence: Synthetic oligonucleotide
ccuuaacuguaagcuguuu

SEQ ID NO: 2939145 - RNA, 19 nt, Artificial Sequence
  Description of Artificial Sequence: Synthetic oligonucleotide
ccucgcaccgccggcugaa

SEQ ID NO: 2939146 - RNA, 19 nt, Artificial Sequence
  Description of Artificial Sequence: Synthetic oligonucleotide
cgaugccacguuugccuau

SEQ ID NO: 2939147 - RNA, 19 nt, Artificial Sequence
  Description of Artificial Sequence: Synthetic oligonucleotide
cucgcaccgccggcugaau

SEQ ID NO: 2939148 - RNA, 19 nt, Artificial Sequence
  Description of Artificial Sequence: Synthetic oligonucleotide
ccggggccuucuccgcgaa

SEQ ID NO: 2939149 - RNA, 19 nt, Artificial Sequence
  Description of Artificial Sequence: Synthetic oligonucleotide
ccgcgaaguuacggacgaa

SEQ ID NO: 2939150 - RNA, 19 nt, Artificial Sequence
  Description of Artificial Sequence: Synthetic oligonucleotide
acaucauccccauagaugg

SEQ ID NO: 2939151 - RNA, 19 nt, Artificial Sequence
  Description of Artificial Sequence: Synthetic oligonucleotide
gaugacaucauccccauag

SEQ ID NO: 2939152 - RNA, 19 nt, Artificial Sequence
  Description of Artificial Sequence: Synthetic oligonucleotide
uccauugugccccauaggg

SEQ ID NO: 2939153 - RNA, 19 nt, Artificial Sequence
  Description of Artificial Sequence: Synthetic oligonucleotide
aacagguggaaguaguccg

SEQ ID NO: 2939154 - RNA, 19 nt, Artificial Sequence
  Description of Artificial Sequence: Synthetic oligonucleotide
auucccaaagugcaggagc

SEQ ID NO: 2939155 - RNA, 19 nt, Artificial Sequence
  Description of Artificial Sequence: Synthetic oligonucleotide
aucugcggaaaccaaaggc

SEQ ID NO: 2939156 - RNA, 19 nt, Artificial Sequence
  Description of Artificial Sequence: Synthetic oligonucleotide
ucugcggaaaccaaaggcc

SEQ ID NO: 2939157 - RNA, 19 nt, Artificial Sequence
  Description of Artificial Sequence: Synthetic oligonucleotide
agggacaguucucugagcc

SEQ ID NO: 2939158 - RNA, 19 nt, Artificial Sequence
  Description of Artificial Sequence: Synthetic oligonucleotide
gaaguaguccgucugguag

SEQ ID NO: 2939159 - RNA, 19 nt, Artificial Sequence
  Description of Artificial Sequence: Synthetic oligonucleotide
aaaccaaaggccucccgag

SEQ ID NO: 2939160 - RNA, 19 nt, Artificial Sequence
  Description of Artificial Sequence: Synthetic oligonucleotide
cuuacacaggucauguagg

SEQ ID NO: 2939161 - RNA, 19 nt, Artificial Sequence
  Description of Artificial Sequence: Synthetic oligonucleotide
auggcaucuccauugugcc

SEQ ID NO: 2939162 - RNA, 19 nt, Artificial Sequence
  Description of Artificial Sequence: Synthetic oligonucleotide
gaaguuuucuaucugcgga

SEQ ID NO: 2939163 - RNA, 19 nt, Artificial Sequence
  Description of Artificial Sequence: Synthetic oligonucleotide
agaaguuuucuaucugcgg

SEQ ID NO: 2939164 - RNA, 19 nt, Artificial Sequence
  Description of Artificial Sequence: Synthetic oligonucleotide
aaagugcaggagcaucugg

SEQ ID NO: 2939165 - RNA, 19 nt, Artificial Sequence
  Description of Artificial Sequence: Synthetic oligonucleotide
uuuucuaucugcggaaacc

SEQ ID NO: 2939166 - RNA, 19 nt, Artificial Sequence
  Description of Artificial Sequence: Synthetic oligonucleotide
ugguagugggcccagcagg

SEQ ID NO: 2939167 - RNA, 19 nt, Artificial Sequence
  Description of Artificial Sequence: Synthetic oligonucleotide
acacaggucauguaggcug

SEQ ID NO: 2939168 - RNA, 19 nt, Artificial Sequence
  Description of Artificial Sequence: Synthetic oligonucleotide
gauggcaucuccauugugc

SEQ ID NO: 2939169 - RNA, 19 nt, Artificial Sequence
  Description of Artificial Sequence: Synthetic oligonucleotide
ucuccauugugccccauag

SEQ ID NO: 2939170 - RNA, 19 nt, Artificial Sequence
  Description of Artificial Sequence: Synthetic oligonucleotide
auagauggccacgauggcc

SEQ ID NO: 2939171 - RNA, 19 nt, Artificial Sequence
  Description of Artificial Sequence: Synthetic oligonucleotide
aagaggcggaacuggguac

SEQ ID NO: 2939172 - RNA, 19 nt, Artificial Sequence
  Description of Artificial Sequence: Synthetic oligonucleotide
caguucuccauucaugugc

SEQ ID NO: 2939173 - RNA, 19 nt, Artificial Sequence
  Description of Artificial Sequence: Synthetic oligonucleotide
cagaaguuuucuaucugcg

SEQ ID NO: 2939174 - RNA, 19 nt, Artificial Sequence
  Description of Artificial Sequence: Synthetic oligonucleotide
auagggacaguucucugag

SEQ ID NO: 2939175 - RNA, 19 nt, Artificial Sequence
  Description of Artificial Sequence: Synthetic oligonucleotide
uagauggccacgauggcca

SEQ ID NO: 2939176 - RNA, 19 nt, Artificial Sequence
  Description of Artificial Sequence: Synthetic oligonucleotide
ucuguggccagcuggcugg

SEQ ID NO: 2939177 - RNA, 19 nt, Artificial Sequence
  Description of Artificial Sequence: Synthetic oligonucleotide
aagggcagaaguuuucuau

SEQ ID NO: 2939178 - RNA, 19 nt, Artificial Sequence
  Description of Artificial Sequence: Synthetic oligonucleotide
cuaucugcggaaaccaaag

SEQ ID NO: 2939179 - RNA, 19 nt, Artificial Sequence
  Description of Artificial Sequence: Synthetic oligonucleotide
ccauagauggccacgaugg

SEQ ID NO: 2939180 - RNA, 19 nt, Artificial Sequence
  Description of Artificial Sequence: Synthetic oligonucleotide
cauugugccccauagggac

SEQ ID NO: 2939181 - RNA, 19 nt, Artificial Sequence
  Description of Artificial Sequence: Synthetic oligonucleotide
ucauguaggcugcagggga

SEQ ID NO: 2939182 - RNA, 19 nt, Artificial Sequence
  Description of Artificial Sequence: Synthetic oligonucleotide
aacuggguacaggagacuc

SEQ ID NO: 2939183 - RNA, 19 nt, Artificial Sequence
  Description of Artificial Sequence: Synthetic oligonucleotide
uaguccgucugguaguggg

SEQ ID NO: 2939184 - RNA, 19 nt, Artificial Sequence
  Description of Artificial Sequence: Synthetic oligonucleotide
aaccaaaggccucccgagg

SEQ ID NO: 2939185 - RNA, 19 nt, Artificial Sequence
  Description of Artificial Sequence: Synthetic oligonucleotide
uaucugcggaaaccaaagg

SEQ ID NO: 2939186 - RNA, 19 nt, Artificial Sequence
  Description of Artificial Sequence: Synthetic oligonucleotide
aucauccccauagauggcc

SEQ ID NO: 2939187 - RNA, 19 nt, Artificial Sequence
  Description of Artificial Sequence: Synthetic oligonucleotide
aaguuuucuaucugcggaa

SEQ ID NO: 2939188 - RNA, 19 nt, Artificial Sequence
  Description of Artificial Sequence: Synthetic oligonucleotide
accaguucuccauucaugu

SEQ ID NO: 2939189 - RNA, 19 nt, Artificial Sequence
  Description of Artificial Sequence: Synthetic oligonucleotide
ucuaucugcggaaaccaaa

SEQ ID NO: 2939190 - RNA, 19 nt, Artificial Sequence
  Description of Artificial Sequence: Synthetic oligonucleotide
gacaucauccccauagaug

SEQ ID NO: 2939191 - RNA, 19 nt, Artificial Sequence
  Description of Artificial Sequence: Synthetic oligonucleotide
uuacacaggucauguaggc

SEQ ID NO: 2939192 - RNA, 19 nt, Artificial Sequence
  Description of Artificial Sequence: Synthetic oligonucleotide
agggcagaaguuuucuauc

SEQ ID NO: 2939193 - RNA, 19 nt, Artificial Sequence
  Description of Artificial Sequence: Synthetic oligonucleotide
uacccacugucccacaugc

SEQ ID NO: 2939194 - RNA, 19 nt, Artificial Sequence
  Description of Artificial Sequence: Synthetic oligonucleotide
uuucuaucugcggaaacca

SEQ ID NO: 2939195 - RNA, 19 nt, Artificial Sequence
  Description of Artificial Sequence: Synthetic oligonucleotide
acacagcuuacacagguca

SEQ ID NO: 2939196 - RNA, 19 nt, Artificial Sequence
  Description of Artificial Sequence: Synthetic oligonucleotide
ugucccacaugccuguccc

SEQ ID NO: 2939197 - RNA, 19 nt, Artificial Sequence
  Description of Artificial Sequence: Synthetic oligonucleotide
gcuuacacaggucauguag

SEQ ID NO: 2939198 - RNA, 19 nt, Artificial Sequence
  Description of Artificial Sequence: Synthetic oligonucleotide
gaaaccaaaggccucccga

SEQ ID NO: 2939199 - RNA, 19 nt, Artificial Sequence
  Description of Artificial Sequence: Synthetic oligonucleotide
uggcucgaugacaucaucc

SEQ ID NO: 2939200 - RNA, 19 nt, Artificial Sequence
  Description of Artificial Sequence: Synthetic oligonucleotide
aaguaguccgucugguagu

SEQ ID NO: 2939201 - RNA, 19 nt, Artificial Sequence
  Description of Artificial Sequence: Synthetic oligonucleotide
aggucauguaggcugcagg

SEQ ID NO: 2939202 - RNA, 19 nt, Artificial Sequence
  Description of Artificial Sequence: Synthetic oligonucleotide
agugcaggagcaucugguc

SEQ ID NO: 2939203 - RNA, 19 nt, Artificial Sequence
  Description of Artificial Sequence: Synthetic oligonucleotide
uaagaggcggaacugggua

SEQ ID NO: 2939204 - RNA, 19 nt, Artificial Sequence
  Description of Artificial Sequence: Synthetic oligonucleotide
acaugccugucccacacag

SEQ ID NO: 2939205 - RNA, 19 nt, Artificial Sequence
  Description of Artificial Sequence: Synthetic oligonucleotide
uggccagauucccaaagug

SEQ ID NO: 2939206 - RNA, 19 nt, Artificial Sequence
  Description of Artificial Sequence: Synthetic oligonucleotide
ggucauguaggcugcaggg

SEQ ID NO: 2939207 - RNA, 19 nt, Artificial Sequence
  Description of Artificial Sequence: Synthetic oligonucleotide
gaacagguggaaguagucc

SEQ ID NO: 2939208 - RNA, 19 nt, Artificial Sequence
  Description of Artificial Sequence: Synthetic oligonucleotide
gaugaacagguggaaguag

SEQ ID NO: 2939209 - RNA, 19 nt, Artificial Sequence
  Description of Artificial Sequence: Synthetic oligonucleotide
aggagcaucuggucugugg

SEQ ID NO: 2939210 - RNA, 19 nt, Artificial Sequence
  Description of Artificial Sequence: Synthetic oligonucleotide
ugguaagaggcggaacugg

SEQ ID NO: 2939211 - RNA, 19 nt, Artificial Sequence
  Description of Artificial Sequence: Synthetic oligonucleotide
ucugguagugggcccagca

SEQ ID NO: 2939212 - RNA, 19 nt, Artificial Sequence
  Description of Artificial Sequence: Synthetic oligonucleotide
augugcauggccagauucc

SEQ ID NO: 2939213 - RNA, 19 nt, Artificial Sequence
  Description of Artificial Sequence: Synthetic oligonucleotide
uggcauguacccacugucc

SEQ ID NO: 2939214 - RNA, 19 nt, Artificial Sequence
  Description of Artificial Sequence: Synthetic oligonucleotide
gauccgugguaagaggcgg

SEQ ID NO: 2939215 - RNA, 19 nt, Artificial Sequence
  Description of Artificial Sequence: Synthetic oligonucleotide
uucuugccuucucuugggg

SEQ ID NO: 2939216 - RNA, 19 nt, Artificial Sequence
  Description of Artificial Sequence: Synthetic oligonucleotide
caugugcauggccagauuc

SEQ ID NO: 2939217 - RNA, 19 nt, Artificial Sequence
  Description of Artificial Sequence: Synthetic oligonucleotide
cuucuugccuucucuuggg

SEQ ID NO: 2939218 - RNA, 19 nt, Artificial Sequence
  Description of Artificial Sequence: Synthetic oligonucleotide
uucuccauucaugugcaug

SEQ ID NO: 2939219 - RNA, 19 nt, Artificial Sequence
  Description of Artificial Sequence: Synthetic oligonucleotide
cagauucccaaagugcagg

SEQ ID NO: 2939220 - RNA, 19 nt, Artificial Sequence
  Description of Artificial Sequence: Synthetic oligonucleotide
ugccuuugggcccuucuug

SEQ ID NO: 2939221 - RNA, 19 nt, Artificial Sequence
  Description of Artificial Sequence: Synthetic oligonucleotide
ugacaucauccccauagau

SEQ ID NO: 2939222 - RNA, 19 nt, Artificial Sequence
  Description of Artificial Sequence: Synthetic oligonucleotide
cauucaugugcauggccag

SEQ ID NO: 2939223 - RNA, 19 nt, Artificial Sequence
  Description of Artificial Sequence: Synthetic oligonucleotide
guggaaguaguccgucugg

SEQ ID NO: 2939224 - RNA, 19 nt, Artificial Sequence
  Description of Artificial Sequence: Synthetic oligonucleotide
guucucugagcccgggugg

SEQ ID NO: 2939225 - RNA, 19 nt, Artificial Sequence
  Description of Artificial Sequence: Synthetic oligonucleotide
gcagaaguuuucuaucugc

SEQ ID NO: 2939226 - RNA, 19 nt, Artificial Sequence
  Description of Artificial Sequence: Synthetic oligonucleotide
cucgaugacaucaucccca

SEQ ID NO: 2939227 - RNA, 19 nt, Artificial Sequence
  Description of Artificial Sequence: Synthetic oligonucleotide
guacaggagacuccuggcc

SEQ ID NO: 2939228 - RNA, 19 nt, Artificial Sequence
  Description of Artificial Sequence: Synthetic oligonucleotide
ugcauggccagauucccaa

SEQ ID NO: 2939229 - RNA, 19 nt, Artificial Sequence
  Description of Artificial Sequence: Synthetic oligonucleotide
cagcaggccucccagauac

SEQ ID NO: 2939230 - RNA, 19 nt, Artificial Sequence
  Description of Artificial Sequence: Synthetic oligonucleotide
ggguacaggagacuccugg

SEQ ID NO: 2939231 - RNA, 19 nt, Artificial Sequence
  Description of Artificial Sequence: Synthetic oligonucleotide
cauggccagauucccaaag

SEQ ID NO: 2939232 - RNA, 19 nt, Artificial Sequence
  Description of Artificial Sequence: Synthetic oligonucleotide
aagugcaggagcaucuggu

SEQ ID NO: 2939233 - RNA, 19 nt, Artificial Sequence
  Description of Artificial Sequence: Synthetic oligonucleotide
aggccucccagauacgcag

SEQ ID NO: 2939234 - RNA, 19 nt, Artificial Sequence
  Description of Artificial Sequence: Synthetic oligonucleotide
accaaaggccucccgaggu

SEQ ID NO: 2939235 - RNA, 19 nt, Artificial Sequence
  Description of Artificial Sequence: Synthetic oligonucleotide
ucaagggcagaaguuuucu

SEQ ID NO: 2939236 - RNA, 19 nt, Artificial Sequence
  Description of Artificial Sequence: Synthetic oligonucleotide
acuggguacaggagacucc

SEQ ID NO: 2939237 - RNA, 19 nt, Artificial Sequence
  Description of Artificial Sequence: Synthetic oligonucleotide
cauagggacaguucucuga

SEQ ID NO: 2939238 - RNA, 19 nt, Artificial Sequence
  Description of Artificial Sequence: Synthetic oligonucleotide
cuugggugauggcaucucc

SEQ ID NO: 2939239 - RNA, 19 nt, Artificial Sequence
  Description of Artificial Sequence: Synthetic oligonucleotide
cuggcauguacccacuguc

SEQ ID NO: 2939240 - RNA, 19 nt, Artificial Sequence
  Description of Artificial Sequence: Synthetic oligonucleotide
ggacaguucucugagcccg

SEQ ID NO: 2939241 - RNA, 19 nt, Artificial Sequence
  Description of Artificial Sequence: Synthetic oligonucleotide
uggccacacagaugaacag

SEQ ID NO: 2939242 - RNA, 19 nt, Artificial Sequence
  Description of Artificial Sequence: Synthetic oligonucleotide
guuuucuaucugcggaaac

SEQ ID NO: 2939243 - RNA, 19 nt, Artificial Sequence
  Description of Artificial Sequence: Synthetic oligonucleotide
ggcucgaugacaucauccc

SEQ ID NO: 2939244 - RNA, 19 nt, Artificial Sequence
  Description of Artificial Sequence: Synthetic oligonucleotide
aaaggccucccgaggugcc

SEQ ID NO: 2939245 - RNA, 19 nt, Artificial Sequence
  Description of Artificial Sequence: Synthetic oligonucleotide
agauucccaaagugcagga

SEQ ID NO: 2939246 - RNA, 19 nt, Artificial Sequence
  Description of Artificial Sequence: Synthetic oligonucleotide
cacaggucauguaggcugc

SEQ ID NO: 2939247 - RNA, 19 nt, Artificial Sequence
  Description of Artificial Sequence: Synthetic oligonucleotide
gauucccaaagugcaggag

SEQ ID NO: 2939248 - RNA, 19 nt, Artificial Sequence
  Description of Artificial Sequence: Synthetic oligonucleotide
gucauguaggcugcagggg

SEQ ID NO: 2939249 - RNA, 19 nt, Artificial Sequence
  Description of Artificial Sequence: Synthetic oligonucleotide
uucuaucugcggaaaccaa

SEQ ID NO: 2939250 - RNA, 19 nt, Artificial Sequence
  Description of Artificial Sequence: Synthetic oligonucleotide
acagcuuacacaggucaug

SEQ ID NO: 2939251 - RNA, 19 nt, Artificial Sequence
  Description of Artificial Sequence: Synthetic oligonucleotide
caccaguucuccauucaug

SEQ ID NO: 2939252 - RNA, 19 nt, Artificial Sequence
  Description of Artificial Sequence: Synthetic oligonucleotide
ugauggcaucuccauugug

SEQ ID NO: 2939253 - RNA, 19 nt, Artificial Sequence
  Description of Artificial Sequence: Synthetic oligonucleotide
auggccacacagaugaaca

SEQ ID NO: 2939254 - RNA, 19 nt, Artificial Sequence
  Description of Artificial Sequence: Synthetic oligonucleotide
cauagauggccacgauggc

SEQ ID NO: 2939255 - RNA, 19 nt, Artificial Sequence
  Description of Artificial Sequence: Synthetic oligonucleotide
auggccagauucccaaagu

SEQ ID NO: 2939256 - RNA, 19 nt, Artificial Sequence
  Description of Artificial Sequence: Synthetic oligonucleotide
gagcaucuggucuguggcc

SEQ ID NO: 2939257 - RNA, 19 nt, Artificial Sequence
  Description of Artificial Sequence: Synthetic oligonucleotide
gguggaaguaguccgucug

SEQ ID NO: 2939258 - RNA, 19 nt, Artificial Sequence
  Description of Artificial Sequence: Synthetic oligonucleotide
aggggauccgugguaagag

SEQ ID NO: 2939259 - RNA, 19 nt, Artificial Sequence
  Description of Artificial Sequence: Synthetic oligonucleotide
uggccagcuggcuggcucg

SEQ ID NO: 2939260 - RNA, 19 nt, Artificial Sequence
  Description of Artificial Sequence: Synthetic oligonucleotide
gguaagaggcggaacuggg

SEQ ID NO: 2939261 - RNA, 19 nt, Artificial Sequence
  Description of Artificial Sequence: Synthetic oligonucleotide
ggcaucuccauugugcccc

SEQ ID NO: 2939262 - RNA, 19 nt, Artificial Sequence
  Description of Artificial Sequence: Synthetic oligonucleotide
uuccugagcaccaguucuc

SEQ ID NO: 2939263 - RNA, 19 nt, Artificial Sequence
  Description of Artificial Sequence: Synthetic oligonucleotide
uguacccacugucccacau

SEQ ID NO: 2939264 - RNA, 19 nt, Artificial Sequence
  Description of Artificial Sequence: Synthetic oligonucleotide
uagugggcccagcaggccu

SEQ ID NO: 2939265 - RNA, 19 nt, Artificial Sequence
  Description of Artificial Sequence: Synthetic oligonucleotide
ggcauguacccacuguccc

SEQ ID NO: 2939266 - RNA, 19 nt, Artificial Sequence
  Description of Artificial Sequence: Synthetic oligonucleotide
gacuccuggccuuccugag

SEQ ID NO: 2939267 - RNA, 19 nt, Artificial Sequence
  Description of Artificial Sequence: Synthetic oligonucleotide
ugggugauggcaucuccau

SEQ ID NO: 2939268 - RNA, 19 nt, Artificial Sequence
  Description of Artificial Sequence: Synthetic oligonucleotide
gguacaggagacuccuggc

SEQ ID NO: 2939269 - RNA, 19 nt, Artificial Sequence
  Description of Artificial Sequence: Synthetic oligonucleotide
cauguacccacugucccac

SEQ ID NO: 2939270 - RNA, 19 nt, Artificial Sequence
  Description of Artificial Sequence: Synthetic oligonucleotide
augaacagguggaaguagu

SEQ ID NO: 2939271 - RNA, 19 nt, Artificial Sequence
  Description of Artificial Sequence: Synthetic oligonucleotide
ccuucuugccuucucuugg

SEQ ID NO: 2939272 - RNA, 19 nt, Artificial Sequence
  Description of Artificial Sequence: Synthetic oligonucleotide
ucccgaggugccuuugggc

SEQ ID NO: 2939273 - RNA, 19 nt, Artificial Sequence
  Description of Artificial Sequence: Synthetic oligonucleotide
cuccauugugccccauagg

SEQ ID NO: 2939274 - RNA, 19 nt, Artificial Sequence
  Description of Artificial Sequence: Synthetic oligonucleotide
uugugccccauagggacag

SEQ ID NO: 2939275 - RNA, 19 nt, Artificial Sequence
  Description of Artificial Sequence: Synthetic oligonucleotide
uucaugugcauggccagau

SEQ ID NO: 2939276 - RNA, 19 nt, Artificial Sequence
  Description of Artificial Sequence: Synthetic oligonucleotide
aguucuccauucaugugca

SEQ ID NO: 2939277 - RNA, 19 nt, Artificial Sequence
  Description of Artificial Sequence: Synthetic oligonucleotide
cugguagugggcccagcag

SEQ ID NO: 2939278 - RNA, 19 nt, Artificial Sequence
  Description of Artificial Sequence: Synthetic oligonucleotide
agcaccaguucuccauuca

SEQ ID NO: 2939279 - RNA, 19 nt, Artificial Sequence
  Description of Artificial Sequence: Synthetic oligonucleotide
uggaaguaguccgucuggu

SEQ ID NO: 2939280 - RNA, 19 nt, Artificial Sequence
  Description of Artificial Sequence: Synthetic oligonucleotide
cagaugaacagguggaagu

SEQ ID NO: 2939281 - RNA, 19 nt, Artificial Sequence
  Description of Artificial Sequence: Synthetic oligonucleotide
uacacaggucauguaggcu

SEQ ID NO: 2939282 - RNA, 19 nt, Artificial Sequence
  Description of Artificial Sequence: Synthetic oligonucleotide
ugagcaccaguucuccauu

SEQ ID NO: 2939283 - RNA, 19 nt, Artificial Sequence
  Description of Artificial Sequence: Synthetic oligonucleotide
ucgaugacaucauccccau

SEQ ID NO: 2939284 - RNA, 19 nt, Artificial Sequence
  Description of Artificial Sequence: Synthetic oligonucleotide
auccccauagauggccacg

SEQ ID NO: 2939285 - RNA, 19 nt, Artificial Sequence
  Description of Artificial Sequence: Synthetic oligonucleotide
uccugagcaccaguucucc

SEQ ID NO: 2939286 - RNA, 19 nt, Artificial Sequence
  Description of Artificial Sequence: Synthetic oligonucleotide
caaaggccucccgaggugc

SEQ ID NO: 2939287 - RNA, 19 nt, Artificial Sequence
  Description of Artificial Sequence: Synthetic oligonucleotide
agcaucuggucuguggcca

SEQ ID NO: 2939288 - RNA, 19 nt, Artificial Sequence
  Description of Artificial Sequence: Synthetic oligonucleotide
aguaguccgucugguagug

SEQ ID NO: 2939289 - RNA, 19 nt, Artificial Sequence
  Description of Artificial Sequence: Synthetic oligonucleotide
uggcaucuccauugugccc

SEQ ID NO: 2939290 - RNA, 19 nt, Artificial Sequence
  Description of Artificial Sequence: Synthetic oligonucleotide
agaugaacagguggaagua

SEQ ID NO: 2939291 - RNA, 19 nt, Artificial Sequence
  Description of Artificial Sequence: Synthetic oligonucleotide
cuccacagcuggcauguac

SEQ ID NO: 2939292 - RNA, 19 nt, Artificial Sequence
  Description of Artificial Sequence: Synthetic oligonucleotide
caucauccccauagauggc

SEQ ID NO: 2939293 - RNA, 19 nt, Artificial Sequence
  Description of Artificial Sequence: Synthetic oligonucleotide
ugccccauagggacaguuc

SEQ ID NO: 2939294 - RNA, 19 nt, Artificial Sequence
  Description of Artificial Sequence: Synthetic oligonucleotide
caugccugucccacacagc

SEQ ID NO: 2939295 - RNA, 19 nt, Artificial Sequence
  Description of Artificial Sequence: Synthetic oligonucleotide
acacuccacagcuggcaug

SEQ ID NO: 2939296 - RNA, 19 nt, Artificial Sequence
  Description of Artificial Sequence: Synthetic oligonucleotide
uggccggcacacuccacag

SEQ ID NO: 2939297 - RNA, 19 nt, Artificial Sequence
  Description of Artificial Sequence: Synthetic oligonucleotide
agauggccacgauggccac

SEQ ID NO: 2939298 - RNA, 19 nt, Artificial Sequence
  Description of Artificial Sequence: Synthetic oligonucleotide
uagggacaguucucugagc

SEQ ID NO: 2939299 - RNA, 19 nt, Artificial Sequence
  Description of Artificial Sequence: Synthetic oligonucleotide
ggaaaccaaaggccucccg

SEQ ID NO: 2939300 - RNA, 19 nt, Artificial Sequence
  Description of Artificial Sequence: Synthetic oligonucleotide
cucccgaggugccuuuggg

SEQ ID NO: 2939301 - RNA, 19 nt, Artificial Sequence
  Description of Artificial Sequence: Synthetic oligonucleotide
ggccacacagaugaacagg

SEQ ID NO: 2939302 - RNA, 19 nt, Artificial Sequence
  Description of Artificial Sequence: Synthetic oligonucleotide
aguuuucuaucugcggaaa

SEQ ID NO: 2939303 - RNA, 19 nt, Artificial Sequence
  Description of Artificial Sequence: Synthetic oligonucleotide
cacgauggccacacagaug

SEQ ID NO: 2939304 - RNA, 19 nt, Artificial Sequence
  Description of Artificial Sequence: Synthetic oligonucleotide
agguggaaguaguccgucu

SEQ ID NO: 2939305 - RNA, 19 nt, Artificial Sequence
  Description of Artificial Sequence: Synthetic oligonucleotide
ggcggaacuggguacagga

SEQ ID NO: 2939306 - RNA, 19 nt, Artificial Sequence
  Description of Artificial Sequence: Synthetic oligonucleotide
ugagcccgggugguggccg

SEQ ID NO: 2939307 - RNA, 19 nt, Artificial Sequence
  Description of Artificial Sequence: Synthetic oligonucleotide
agcuggcuggcucgaugac

SEQ ID NO: 2939308 - RNA, 19 nt, Artificial Sequence
  Description of Artificial Sequence: Synthetic oligonucleotide
uuugggcccuucuugccuu

SEQ ID NO: 2939309 - RNA, 19 nt, Artificial Sequence
  Description of Artificial Sequence: Synthetic oligonucleotide
ggaacuggguacaggagac

SEQ ID NO: 2939310 - RNA, 19 nt, Artificial Sequence
  Description of Artificial Sequence: Synthetic oligonucleotide
gugguaagaggcggaacug

SEQ ID NO: 2939311 - RNA, 19 nt, Artificial Sequence
  Description of Artificial Sequence: Synthetic oligonucleotide
gucuguggccagcuggcug

SEQ ID NO: 2939312 - RNA, 19 nt, Artificial Sequence
  Description of Artificial Sequence: Synthetic oligonucleotide
gacaguucucugagcccgg

SEQ ID NO: 2939313 - RNA, 19 nt, Artificial Sequence
  Description of Artificial Sequence: Synthetic oligonucleotide
cacacagcuuacacagguc

SEQ ID NO: 2939314 - RNA, 19 nt, Artificial Sequence
  Description of Artificial Sequence: Synthetic oligonucleotide
guacccacugucccacaug

SEQ ID NO: 2939315 - RNA, 19 nt, Artificial Sequence
  Description of Artificial Sequence: Synthetic oligonucleotide
cccgaggugccuuugggcc

SEQ ID NO: 2939316 - RNA, 19 nt, Artificial Sequence
  Description of Artificial Sequence: Synthetic oligonucleotide
ggccagauucccaaagugc

SEQ ID NO: 2939317 - RNA, 19 nt, Artificial Sequence
  Description of Artificial Sequence: Synthetic oligonucleotide
ccauucaugugcauggcca

SEQ ID NO: 2939318 - RNA, 19 nt, Artificial Sequence
  Description of Artificial Sequence: Synthetic oligonucleotide
uccgucugguagugggccc

SEQ ID NO: 2939319 - RNA, 19 nt, Artificial Sequence
  Description of Artificial Sequence: Synthetic oligonucleotide
ggccacgauggccacacag

SEQ ID NO: 2939320 - RNA, 19 nt, Artificial Sequence
  Description of Artificial Sequence: Synthetic oligonucleotide
ucugagcccgggugguggc

SEQ ID NO: 2939321 - RNA, 19 nt, Artificial Sequence
  Description of Artificial Sequence: Synthetic oligonucleotide
ggauccgugguaagaggcg

SEQ ID NO: 2939322 - RNA, 19 nt, Artificial Sequence
  Description of Artificial Sequence: Synthetic oligonucleotide
ugcaggggauccgugguaa

SEQ ID NO: 2939323 - RNA, 19 nt, Artificial Sequence
  Description of Artificial Sequence: Synthetic oligonucleotide
caaagugcaggagcaucug

SEQ ID NO: 2939324 - RNA, 19 nt, Artificial Sequence
  Description of Artificial Sequence: Synthetic oligonucleotide
ugguggccggcacacucca

SEQ ID NO: 2939325 - RNA, 19 nt, Artificial Sequence
  Description of Artificial Sequence: Synthetic oligonucleotide
cugucccacaugccugucc

SEQ ID NO: 2939326 - RNA, 19 nt, Artificial Sequence
  Description of Artificial Sequence: Synthetic oligonucleotide
ggggauccgugguaagagg

SEQ ID NO: 2939327 - RNA, 19 nt, Artificial Sequence
  Description of Artificial Sequence: Synthetic oligonucleotide
gggauccgugguaagaggc

SEQ ID NO: 2939328 - RNA, 19 nt, Artificial Sequence
  Description of Artificial Sequence: Synthetic oligonucleotide
gccagauucccaaagugca

SEQ ID NO: 2939329 - RNA, 19 nt, Artificial Sequence
  Description of Artificial Sequence: Synthetic oligonucleotide
gcucgaugacaucaucccc

SEQ ID NO: 2939330 - RNA, 19 nt, Artificial Sequence
  Description of Artificial Sequence: Synthetic oligonucleotide
gagcaccaguucuccauuc

SEQ ID NO: 2939331 - RNA, 19 nt, Artificial Sequence
  Description of Artificial Sequence: Synthetic oligonucleotide
agaggcggaacuggguaca

SEQ ID NO: 2939332 - RNA, 19 nt, Artificial Sequence
  Description of Artificial Sequence: Synthetic oligonucleotide
guccgucugguagugggcc

SEQ ID NO: 2939333 - RNA, 19 nt, Artificial Sequence
  Description of Artificial Sequence: Synthetic oligonucleotide
ccagauucccaaagugcag

SEQ ID NO: 2939334 - RNA, 19 nt, Artificial Sequence
  Description of Artificial Sequence: Synthetic oligonucleotide
uggguacaggagacuccug

SEQ ID NO: 2939335 - RNA, 19 nt, Artificial Sequence
  Description of Artificial Sequence: Synthetic oligonucleotide
guggccggcacacuccaca

SEQ ID NO: 2939336 - RNA, 19 nt, Artificial Sequence
  Description of Artificial Sequence: Synthetic oligonucleotide
uucucugagcccggguggu

SEQ ID NO: 2939337 - RNA, 19 nt, Artificial Sequence
  Description of Artificial Sequence: Synthetic oligonucleotide
ucaugugcauggccagauu

SEQ ID NO: 2939338 - RNA, 19 nt, Artificial Sequence
  Description of Artificial Sequence: Synthetic oligonucleotide
gggacaguucucugagccc

SEQ ID NO: 2939339 - RNA, 19 nt, Artificial Sequence
  Description of Artificial Sequence: Synthetic oligonucleotide
cuccauucaugugcauggc

SEQ ID NO: 2939340 - RNA, 19 nt, Artificial Sequence
  Description of Artificial Sequence: Synthetic oligonucleotide
gccuuugggcccuucuugc

SEQ ID NO: 2939341 - RNA, 19 nt, Artificial Sequence
  Description of Artificial Sequence: Synthetic oligonucleotide
gguagugggcccagcaggc

SEQ ID NO: 2939342 - RNA, 19 nt, Artificial Sequence
  Description of Artificial Sequence: Synthetic oligonucleotide
guaggcugcaggggauccg

SEQ ID NO: 2939343 - RNA, 19 nt, Artificial Sequence
  Description of Artificial Sequence: Synthetic oligonucleotide
acagguggaaguaguccgu

SEQ ID NO: 2939344 - RNA, 19 nt, Artificial Sequence
  Description of Artificial Sequence: Synthetic oligonucleotide
agcuggcauguacccacug

SEQ ID NO: 2939345 - RNA, 19 nt, Artificial Sequence
  Description of Artificial Sequence: Synthetic oligonucleotide
cccauagauggccacgaug

SEQ ID NO: 2939346 - RNA, 19 nt, Artificial Sequence
  Description of Artificial Sequence: Synthetic oligonucleotide
uccgugguaagaggcggaa

SEQ ID NO: 2939347 - RNA, 19 nt, Artificial Sequence
  Description of Artificial Sequence: Synthetic oligonucleotide
aucuccauugugccccaua

SEQ ID NO: 2939348 - RNA, 19 nt, Artificial Sequence
  Description of Artificial Sequence: Synthetic oligonucleotide
cagcuggcuggcucgauga

SEQ ID NO: 2939349 - RNA, 19 nt, Artificial Sequence
  Description of Artificial Sequence: Synthetic oligonucleotide
agugggcccagcaggccuc

SEQ ID NO: 2939350 - RNA, 19 nt, Artificial Sequence
  Description of Artificial Sequence: Synthetic oligonucleotide
caggucauguaggcugcag

SEQ ID NO: 2939351 - RNA, 19 nt, Artificial Sequence
  Description of Artificial Sequence: Synthetic oligonucleotide
cuggccuuccugagcacca

SEQ ID NO: 2939352 - RNA, 19 nt, Artificial Sequence
  Description of Artificial Sequence: Synthetic oligonucleotide
guaguccgucugguagugg

SEQ ID NO: 2939353 - RNA, 19 nt, Artificial Sequence
  Description of Artificial Sequence: Synthetic oligonucleotide
gaggcggaacuggguacag

SEQ ID NO: 2939354 - RNA, 19 nt, Artificial Sequence
  Description of Artificial Sequence: Synthetic oligonucleotide
acccacugucccacaugcc

SEQ ID NO: 2939355 - RNA, 19 nt, Artificial Sequence
  Description of Artificial Sequence: Synthetic oligonucleotide
cuggcucgaugacaucauc

SEQ ID NO: 2939356 - RNA, 19 nt, Artificial Sequence
  Description of Artificial Sequence: Synthetic oligonucleotide
auugugccccauagggaca

SEQ ID NO: 2939357 - RNA, 19 nt, Artificial Sequence
  Description of Artificial Sequence: Synthetic oligonucleotide
agcuuacacaggucaugua

SEQ ID NO: 2939358 - RNA, 19 nt, Artificial Sequence
  Description of Artificial Sequence: Synthetic oligonucleotide
ccacagcuggcauguaccc

SEQ ID NO: 2939359 - RNA, 19 nt, Artificial Sequence
  Description of Artificial Sequence: Synthetic oligonucleotide
aggcggaacuggguacagg

SEQ ID NO: 2939360 - RNA, 19 nt, Artificial Sequence
  Description of Artificial Sequence: Synthetic oligonucleotide
uggccuuccugagcaccag

SEQ ID NO: 2939361 - RNA, 19 nt, Artificial Sequence
  Description of Artificial Sequence: Synthetic oligonucleotide
gcauguacccacuguccca

SEQ ID NO: 2939362 - RNA, 19 nt, Artificial Sequence
  Description of Artificial Sequence: Synthetic oligonucleotide
aucuggucuguggccagcu

SEQ ID NO: 2939363 - RNA, 19 nt, Artificial Sequence
  Description of Artificial Sequence: Synthetic oligonucleotide
ccacugucccacaugccug

SEQ ID NO: 2939364 - RNA, 19 nt, Artificial Sequence
  Description of Artificial Sequence: Synthetic oligonucleotide
caucuggucuguggccagc

SEQ ID NO: 2939365 - RNA, 19 nt, Artificial Sequence
  Description of Artificial Sequence: Synthetic oligonucleotide
guagugggcccagcaggcc

SEQ ID NO: 2939366 - RNA, 19 nt, Artificial Sequence
  Description of Artificial Sequence: Synthetic oligonucleotide
aaggccucccgaggugccu

SEQ ID NO: 2939367 - RNA, 19 nt, Artificial Sequence
  Description of Artificial Sequence: Synthetic oligonucleotide
ggcuggcucgaugacauca

SEQ ID NO: 2939368 - RNA, 19 nt, Artificial Sequence
  Description of Artificial Sequence: Synthetic oligonucleotide
cagguggaaguaguccguc

SEQ ID NO: 2939369 - RNA, 19 nt, Artificial Sequence
  Description of Artificial Sequence: Synthetic oligonucleotide
cugagcaccaguucuccau

SEQ ID NO: 2939370 - RNA, 19 nt, Artificial Sequence
  Description of Artificial Sequence: Synthetic oligonucleotide
ccuuugggcccuucuugcc

SEQ ID NO: 2939371 - RNA, 19 nt, Artificial Sequence
  Description of Artificial Sequence: Synthetic oligonucleotide
ccaguucuccauucaugug

SEQ ID NO: 2939372 - RNA, 19 nt, Artificial Sequence
  Description of Artificial Sequence: Synthetic oligonucleotide
ucucugagcccggguggug

SEQ ID NO: 2939373 - RNA, 19 nt, Artificial Sequence
  Description of Artificial Sequence: Synthetic oligonucleotide
acugucccacaugccuguc

SEQ ID NO: 2939374 - RNA, 19 nt, Artificial Sequence
  Description of Artificial Sequence: Synthetic oligonucleotide
caagggcagaaguuuucua

SEQ ID NO: 2939375 - RNA, 19 nt, Artificial Sequence
  Description of Artificial Sequence: Synthetic oligonucleotide
cuuugggcccuucuugccu

SEQ ID NO: 2939376 - RNA, 19 nt, Artificial Sequence
  Description of Artificial Sequence: Synthetic oligonucleotide
cccuucuugccuucucuug

SEQ ID NO: 2939377 - RNA, 19 nt, Artificial Sequence
  Description of Artificial Sequence: Synthetic oligonucleotide
gcaggccucccagauacgc

SEQ ID NO: 2939378 - RNA, 19 nt, Artificial Sequence
  Description of Artificial Sequence: Synthetic oligonucleotide
cacagaugaacagguggaa

SEQ ID NO: 2939379 - RNA, 19 nt, Artificial Sequence
  Description of Artificial Sequence: Synthetic oligonucleotide
gagcccgggugguggccgg

SEQ ID NO: 2939380 - RNA, 19 nt, Artificial Sequence
  Description of Artificial Sequence: Synthetic oligonucleotide
caggccucccagauacgca

SEQ ID NO: 2939381 - RNA, 19 nt, Artificial Sequence
  Description of Artificial Sequence: Synthetic oligonucleotide
cggcacacuccacagcugg

SEQ ID NO: 2939382 - RNA, 19 nt, Artificial Sequence
  Description of Artificial Sequence: Synthetic oligonucleotide
ucccaaagugcaggagcau

SEQ ID NO: 2939383 - RNA, 19 nt, Artificial Sequence
  Description of Artificial Sequence: Synthetic oligonucleotide
gugauggcaucuccauugu

SEQ ID NO: 2939384 - RNA, 19 nt, Artificial Sequence
  Description of Artificial Sequence: Synthetic oligonucleotide
gccugucccacacagcuua

SEQ ID NO: 2939385 - RNA, 19 nt, Artificial Sequence
  Description of Artificial Sequence: Synthetic oligonucleotide
auguacccacugucccaca

SEQ ID NO: 2939386 - RNA, 19 nt, Artificial Sequence
  Description of Artificial Sequence: Synthetic oligonucleotide
gcaucuggucuguggccag

SEQ ID NO: 2939387 - RNA, 19 nt, Artificial Sequence
  Description of Artificial Sequence: Synthetic oligonucleotide
ggaaguaguccgucuggua

SEQ ID NO: 2939388 - RNA, 19 nt, Artificial Sequence
  Description of Artificial Sequence: Synthetic oligonucleotide
cuggguacaggagacuccu

SEQ ID NO: 2939389 - RNA, 19 nt, Artificial Sequence
  Description of Artificial Sequence: Synthetic oligonucleotide
guaagaggcggaacugggu

SEQ ID NO: 2939390 - RNA, 19 nt, Artificial Sequence
  Description of Artificial Sequence: Synthetic oligonucleotide
caggggauccgugguaaga

SEQ ID NO: 2939391 - RNA, 19 nt, Artificial Sequence
  Description of Artificial Sequence: Synthetic oligonucleotide
ccauagggacaguucucug

SEQ ID NO: 2939392 - RNA, 19 nt, Artificial Sequence
  Description of Artificial Sequence: Synthetic oligonucleotide
ccacacagaugaacaggug

SEQ ID NO: 2939393 - RNA, 19 nt, Artificial Sequence
  Description of Artificial Sequence: Synthetic oligonucleotide
ccauugugccccauaggga

SEQ ID NO: 2939394 - RNA, 19 nt, Artificial Sequence
  Description of Artificial Sequence: Synthetic oligonucleotide
cccacacagcuuacacagg

SEQ ID NO: 2939395 - RNA, 19 nt, Artificial Sequence
  Description of Artificial Sequence: Synthetic oligonucleotide
ccgaggugccuuugggccc

SEQ ID NO: 2939396 - RNA, 19 nt, Artificial Sequence
  Description of Artificial Sequence: Synthetic oligonucleotide
cagcuuacacaggucaugu

SEQ ID NO: 2939397 - RNA, 19 nt, Artificial Sequence
  Description of Artificial Sequence: Synthetic oligonucleotide
cccaaagugcaggagcauc

SEQ ID NO: 2939398 - RNA, 19 nt, Artificial Sequence
  Description of Artificial Sequence: Synthetic oligonucleotide
ccaaagugcaggagcaucu

SEQ ID NO: 2939399 - RNA, 19 nt, Artificial Sequence
  Description of Artificial Sequence: Synthetic oligonucleotide
ccaaaggccucccgaggug

SEQ ID NO: 2939400 - RNA, 19 nt, Artificial Sequence
  Description of Artificial Sequence: Synthetic oligonucleotide
gauggccacgauggccaca

SEQ ID NO: 2939401 - RNA, 19 nt, Artificial Sequence
  Description of Artificial Sequence: Synthetic oligonucleotide
auccgugguaagaggcgga

SEQ ID NO: 2939402 - RNA, 19 nt, Artificial Sequence
  Description of Artificial Sequence: Synthetic oligonucleotide
gccccauagggacaguucu

SEQ ID NO: 2939403 - RNA, 19 nt, Artificial Sequence
  Description of Artificial Sequence: Synthetic oligonucleotide
cacuccacagcuggcaugu

SEQ ID NO: 2939404 - RNA, 19 nt, Artificial Sequence
  Description of Artificial Sequence: Synthetic oligonucleotide
uugggcccuucuugccuuc

SEQ ID NO: 2939405 - RNA, 19 nt, Artificial Sequence
  Description of Artificial Sequence: Synthetic oligonucleotide
gccggcacacuccacagcu

SEQ ID NO: 2939406 - RNA, 19 nt, Artificial Sequence
  Description of Artificial Sequence: Synthetic oligonucleotide
uccuggccuuccugagcac

SEQ ID NO: 2939407 - RNA, 19 nt, Artificial Sequence
  Description of Artificial Sequence: Synthetic oligonucleotide
cauguaggcugcaggggau

SEQ ID NO: 2939408 - RNA, 19 nt, Artificial Sequence
  Description of Artificial Sequence: Synthetic oligonucleotide
gccacacagaugaacaggu

SEQ ID NO: 2939409 - RNA, 19 nt, Artificial Sequence
  Description of Artificial Sequence: Synthetic oligonucleotide
gccacgauggccacacaga

SEQ ID NO: 2939410 - RNA, 19 nt, Artificial Sequence
  Description of Artificial Sequence: Synthetic oligonucleotide
cacagcuggcauguaccca

SEQ ID NO: 2939411 - RNA, 19 nt, Artificial Sequence
  Description of Artificial Sequence: Synthetic oligonucleotide
acaggucauguaggcugca

SEQ ID NO: 2939412 - RNA, 19 nt, Artificial Sequence
  Description of Artificial Sequence: Synthetic oligonucleotide
gcaggggauccgugguaag

SEQ ID NO: 2939413 - RNA, 19 nt, Artificial Sequence
  Description of Artificial Sequence: Synthetic oligonucleotide
cacagcuuacacaggucau

SEQ ID NO: 2939414 - RNA, 19 nt, Artificial Sequence
  Description of Artificial Sequence: Synthetic oligonucleotide
gcggaacuggguacaggag

SEQ ID NO: 2939415 - RNA, 19 nt, Artificial Sequence
  Description of Artificial Sequence: Synthetic oligonucleotide
cggaacuggguacaggaga

SEQ ID NO: 2939416 - RNA, 19 nt, Artificial Sequence
  Description of Artificial Sequence: Synthetic oligonucleotide
ccuggccuuccugagcacc

SEQ ID NO: 2939417 - RNA, 19 nt, Artificial Sequence
  Description of Artificial Sequence: Synthetic oligonucleotide
agcaggccucccagauacg

SEQ ID NO: 2939418 - RNA, 19 nt, Artificial Sequence
  Description of Artificial Sequence: Synthetic oligonucleotide
gugcauggccagauuccca

SEQ ID NO: 2939419 - RNA, 19 nt, Artificial Sequence
  Description of Artificial Sequence: Synthetic oligonucleotide
gaacuggguacaggagacu

SEQ ID NO: 2939420 - RNA, 19 nt, Artificial Sequence
  Description of Artificial Sequence: Synthetic oligonucleotide
gcacacuccacagcuggca

SEQ ID NO: 2939421 - RNA, 19 nt, Artificial Sequence
  Description of Artificial Sequence: Synthetic oligonucleotide
cugagcccgggugguggcc

SEQ ID NO: 2939422 - RNA, 19 nt, Artificial Sequence
  Description of Artificial Sequence: Synthetic oligonucleotide
cacugucccacaugccugu

SEQ ID NO: 2939423 - RNA, 19 nt, Artificial Sequence
  Description of Artificial Sequence: Synthetic oligonucleotide
ccucccgaggugccuuugg

SEQ ID NO: 2939424 - RNA, 19 nt, Artificial Sequence
  Description of Artificial Sequence: Synthetic oligonucleotide
ccacacagcuuacacaggu

SEQ ID NO: 2939425 - RNA, 19 nt, Artificial Sequence
  Description of Artificial Sequence: Synthetic oligonucleotide
ccccauagggacaguucuc

SEQ ID NO: 2939426 - RNA, 19 nt, Artificial Sequence
  Description of Artificial Sequence: Synthetic oligonucleotide
ggccucccagauacgcagg

SEQ ID NO: 2939427 - RNA, 19 nt, Artificial Sequence
  Description of Artificial Sequence: Synthetic oligonucleotide
cacaugccugucccacaca

SEQ ID NO: 2939428 - RNA, 19 nt, Artificial Sequence
  Description of Artificial Sequence: Synthetic oligonucleotide
cgugguaagaggcggaacu

SEQ ID NO: 2939429 - RNA, 19 nt, Artificial Sequence
  Description of Artificial Sequence: Synthetic oligonucleotide
ugggcccuucuugccuucu

SEQ ID NO: 2939430 - RNA, 19 nt, Artificial Sequence
  Description of Artificial Sequence: Synthetic oligonucleotide
gcuggcauguacccacugu

SEQ ID NO: 2939431 - RNA, 19 nt, Artificial Sequence
  Description of Artificial Sequence: Synthetic oligonucleotide
ggcacacuccacagcuggc

SEQ ID NO: 2939432 - RNA, 19 nt, Artificial Sequence
  Description of Artificial Sequence: Synthetic oligonucleotide
agcccgggugguggccggc

SEQ ID NO: 2939433 - RNA, 19 nt, Artificial Sequence
  Description of Artificial Sequence: Synthetic oligonucleotide
cugucccacacagcuuaca

SEQ ID NO: 2939434 - RNA, 19 nt, Artificial Sequence
  Description of Artificial Sequence: Synthetic oligonucleotide
cccacugucccacaugccu

SEQ ID NO: 2939435 - RNA, 19 nt, Artificial Sequence
  Description of Artificial Sequence: Synthetic oligonucleotide
uguggccagcuggcuggcu

SEQ ID NO: 2939436 - RNA, 19 nt, Artificial Sequence
  Description of Artificial Sequence: Synthetic oligonucleotide
uggccacgauggccacaca

SEQ ID NO: 2939437 - RNA, 19 nt, Artificial Sequence
  Description of Artificial Sequence: Synthetic oligonucleotide
cuguggccagcuggcuggc

SEQ ID NO: 2939438 - RNA, 19 nt, Artificial Sequence
  Description of Artificial Sequence: Synthetic oligonucleotide
ggccggcacacuccacagc

SEQ ID NO: 2939439 - RNA, 19 nt, Artificial Sequence
  Description of Artificial Sequence: Synthetic oligonucleotide
gucugguagugggcccagc

SEQ ID NO: 2939440 - RNA, 19 nt, Artificial Sequence
  Description of Artificial Sequence: Synthetic oligonucleotide
gcugcaggggauccguggu

SEQ ID NO: 2939441 - RNA, 19 nt, Artificial Sequence
  Description of Artificial Sequence: Synthetic oligonucleotide
cacacuccacagcuggcau

SEQ ID NO: 2939442 - RNA, 19 nt, Artificial Sequence
  Description of Artificial Sequence: Synthetic oligonucleotide
ccugucccacacagcuuac

SEQ ID NO: 2939443 - RNA, 19 nt, Artificial Sequence
  Description of Artificial Sequence: Synthetic oligonucleotide
cugcaggggauccguggua

SEQ ID NO: 2939444 - RNA, 19 nt, Artificial Sequence
  Description of Artificial Sequence: Synthetic oligonucleotide
ggcccuucuugccuucucu

SEQ ID NO: 2939445 - RNA, 19 nt, Artificial Sequence
  Description of Artificial Sequence: Synthetic oligonucleotide
gggcuugggugauggcauc

SEQ ID NO: 2939446 - RNA, 19 nt, Artificial Sequence
  Description of Artificial Sequence: Synthetic oligonucleotide
gugccuuugggcccuucuu

SEQ ID NO: 2939447 - RNA, 19 nt, Artificial Sequence
  Description of Artificial Sequence: Synthetic oligonucleotide
caggagcaucuggucugug

SEQ ID NO: 2939448 - RNA, 19 nt, Artificial Sequence
  Description of Artificial Sequence: Synthetic oligonucleotide
gcaccaguucuccauucau

SEQ ID NO: 2939449 - RNA, 19 nt, Artificial Sequence
  Description of Artificial Sequence: Synthetic oligonucleotide
gugggcccagcaggccucc

SEQ ID NO: 2939450 - RNA, 19 nt, Artificial Sequence
  Description of Artificial Sequence: Synthetic oligonucleotide
aggcugcaggggauccgug

SEQ ID NO: 2939451 - RNA, 19 nt, Artificial Sequence
  Description of Artificial Sequence: Synthetic oligonucleotide
ccugagcaccaguucucca

SEQ ID NO: 2939452 - RNA, 19 nt, Artificial Sequence
  Description of Artificial Sequence: Synthetic oligonucleotide
gcaucuccauugugcccca

SEQ ID NO: 2939453 - RNA, 19 nt, Artificial Sequence
  Description of Artificial Sequence: Synthetic oligonucleotide
gcauggccagauucccaaa

SEQ ID NO: 2939454 - RNA, 19 nt, Artificial Sequence
  Description of Artificial Sequence: Synthetic oligonucleotide
cccauagggacaguucucu

SEQ ID NO: 2939455 - RNA, 19 nt, Artificial Sequence
  Description of Artificial Sequence: Synthetic oligonucleotide
ccggcacacuccacagcug

SEQ ID NO: 2939456 - RNA, 19 nt, Artificial Sequence
  Description of Artificial Sequence: Synthetic oligonucleotide
guucuccauucaugugcau

SEQ ID NO: 2939457 - RNA, 19 nt, Artificial Sequence
  Description of Artificial Sequence: Synthetic oligonucleotide
ggggcuugggugauggcau

SEQ ID NO: 2939458 - RNA, 19 nt, Artificial Sequence
  Description of Artificial Sequence: Synthetic oligonucleotide
aggccucccgaggugccuu

SEQ ID NO: 2939459 - RNA, 19 nt, Artificial Sequence
  Description of Artificial Sequence: Synthetic oligonucleotide
ccgugguaagaggcggaac

SEQ ID NO: 2939460 - RNA, 19 nt, Artificial Sequence
  Description of Artificial Sequence: Synthetic oligonucleotide
gggcccuucuugccuucuc

SEQ ID NO: 2939461 - RNA, 19 nt, Artificial Sequence
  Description of Artificial Sequence: Synthetic oligonucleotide
ccacgauggccacacagau

SEQ ID NO: 2939462 - RNA, 19 nt, Artificial Sequence
  Description of Artificial Sequence: Synthetic oligonucleotide
cccacaugccugucccaca

SEQ ID NO: 2939463 - RNA, 19 nt, Artificial Sequence
  Description of Artificial Sequence: Synthetic oligonucleotide
cagcuggcauguacccacu

SEQ ID NO: 2939464 - RNA, 19 nt, Artificial Sequence
  Description of Artificial Sequence: Synthetic oligonucleotide
gggugauggcaucuccauu

SEQ ID NO: 2939465 - RNA, 19 nt, Artificial Sequence
  Description of Artificial Sequence: Synthetic oligonucleotide
ggcuugggugauggcaucu

SEQ ID NO: 2939466 - RNA, 19 nt, Artificial Sequence
  Description of Artificial Sequence: Synthetic oligonucleotide
acuccacagcuggcaugua

SEQ ID NO: 2939467 - RNA, 19 nt, Artificial Sequence
  Description of Artificial Sequence: Synthetic oligonucleotide
cgggugguggccggcacac

SEQ ID NO: 2939468 - RNA, 19 nt, Artificial Sequence
  Description of Artificial Sequence: Synthetic oligonucleotide
gugccccauagggacaguu

SEQ ID NO: 2939469 - RNA, 19 nt, Artificial Sequence
  Description of Artificial Sequence: Synthetic oligonucleotide
ggccuuccugagcaccagu

SEQ ID NO: 2939470 - RNA, 19 nt, Artificial Sequence
  Description of Artificial Sequence: Synthetic oligonucleotide
gcuggcucgaugacaucau

SEQ ID NO: 2939471 - RNA, 19 nt, Artificial Sequence
  Description of Artificial Sequence: Synthetic oligonucleotide
gguggccggcacacuccac

SEQ ID NO: 2939472 - RNA, 19 nt, Artificial Sequence
  Description of Artificial Sequence: Synthetic oligonucleotide
ccgucugguagugggccca

SEQ ID NO: 2939473 - RNA, 19 nt, Artificial Sequence
  Description of Artificial Sequence: Synthetic oligonucleotide
gcaggagcaucuggucugu

SEQ ID NO: 2939474 - RNA, 19 nt, Artificial Sequence
  Description of Artificial Sequence: Synthetic oligonucleotide
gccuuccugagcaccaguu

SEQ ID NO: 2939475 - RNA, 19 nt, Artificial Sequence
  Description of Artificial Sequence: Synthetic oligonucleotide
ccagcaggccucccagaua

SEQ ID NO: 2939476 - RNA, 19 nt, Artificial Sequence
  Description of Artificial Sequence: Synthetic oligonucleotide
cccgggugguggccggcac

SEQ ID NO: 2939477 - RNA, 19 nt, Artificial Sequence
  Description of Artificial Sequence: Synthetic oligonucleotide
gccucccgaggugccuuug

SEQ ID NO: 2939478 - RNA, 19 nt, Artificial Sequence
  Description of Artificial Sequence: Synthetic oligonucleotide
ggucuguggccagcuggcu

SEQ ID NO: 2939479 - RNA, 19 nt, Artificial Sequence
  Description of Artificial Sequence: Synthetic oligonucleotide
ccgggugguggccggcaca

SEQ ID NO: 2939480 - RNA, 19 nt, Artificial Sequence
  Description of Artificial Sequence: Synthetic oligonucleotide
gcccgggugguggccggca

SEQ ID NO: 2939481 - RNA, 19 nt, Artificial Sequence
  Description of Artificial Sequence: Synthetic oligonucleotide
cgauggccacacagaugaa

SEQ ID NO: 2939482 - RNA, 19 nt, Artificial Sequence
  Description of Artificial Sequence: Synthetic oligonucleotide
caucuccauugugccccau

SEQ ID NO: 2939483 - RNA, 19 nt, Artificial Sequence
  Description of Artificial Sequence: Synthetic oligonucleotide
cgaugacaucauccccaua

SEQ ID NO: 2939484 - RNA, 19 nt, Artificial Sequence
  Description of Artificial Sequence: Synthetic oligonucleotide
cgaggugccuuugggcccu

SEQ ID NO: 2939485 - RNA, 19 nt, Artificial Sequence
  Description of Artificial Sequence: Synthetic oligonucleotide
ggccucccgaggugccuuu

SEQ ID NO: 2939486 - RNA, 19 nt, Artificial Sequence
  Description of Artificial Sequence: Synthetic oligonucleotide
gggugguggccggcacacu

SEQ ID NO: 2939487 - RNA, 19 nt, Artificial Sequence
  Description of Artificial Sequence: Synthetic oligonucleotide
gaggugccuuugggcccuu

SEQ ID NO: 2939488 - RNA, 19 nt, Artificial Sequence
  Description of Artificial Sequence: Synthetic oligonucleotide
gccagcuggcuggcucgau

SEQ ID NO: 2939489 - RNA, 19 nt, Artificial Sequence
  Description of Artificial Sequence: Synthetic oligonucleotide
gaucaucugguccuucugg

SEQ ID NO: 2939490 - RNA, 19 nt, Artificial Sequence
  Description of Artificial Sequence: Synthetic oligonucleotide
ugcagguugcggacgaugg

SEQ ID NO: 2939491 - RNA, 19 nt, Artificial Sequence
  Description of Artificial Sequence: Synthetic oligonucleotide
uagcaggucagccuggggc

SEQ ID NO: 2939492 - RNA, 19 nt, Artificial Sequence
  Description of Artificial Sequence: Synthetic oligonucleotide
gaggguggaaaucucccgg

SEQ ID NO: 2939493 - RNA, 19 nt, Artificial Sequence
  Description of Artificial Sequence: Synthetic oligonucleotide
cuucugguccacuugggcc

SEQ ID NO: 2939494 - RNA, 19 nt, Artificial Sequence
  Description of Artificial Sequence: Synthetic oligonucleotide
ugucccuggucacuggccg

SEQ ID NO: 2939495 - RNA, 19 nt, Artificial Sequence
  Description of Artificial Sequence: Synthetic oligonucleotide
caucugguccuucuggucc

SEQ ID NO: 2939496 - RNA, 19 nt, Artificial Sequence
  Description of Artificial Sequence: Synthetic oligonucleotide
aucucccgguccuuggugc

SEQ ID NO: 2939497 - RNA, 19 nt, Artificial Sequence
  Description of Artificial Sequence: Synthetic oligonucleotide
uggaggguggaaaucuccc

SEQ ID NO: 2939498 - RNA, 19 nt, Artificial Sequence
  Description of Artificial Sequence: Synthetic oligonucleotide
ugcacggccgccaggugcg

SEQ ID NO: 2939499 - RNA, 19 nt, Artificial Sequence
  Description of Artificial Sequence: Synthetic oligonucleotide
aaucucccgguccuuggug

SEQ ID NO: 2939500 - RNA, 19 nt, Artificial Sequence
  Description of Artificial Sequence: Synthetic oligonucleotide
aguagcugucccuggucac

SEQ ID NO: 2939501 - RNA, 19 nt, Artificial Sequence
  Description of Artificial Sequence: Synthetic oligonucleotide
guccacuugggccugcagg

SEQ ID NO: 2939502 - RNA, 19 nt, Artificial Sequence
  Description of Artificial Sequence: Synthetic oligonucleotide
ucagccuccuccagggcag

SEQ ID NO: 2939503 - RNA, 19 nt, Artificial Sequence
  Description of Artificial Sequence: Synthetic oligonucleotide
ucgccaucgagugaugucc

SEQ ID NO: 2939504 - RNA, 19 nt, Artificial Sequence
  Description of Artificial Sequence: Synthetic oligonucleotide
ggaucuggagagcaggcgg

SEQ ID NO: 2939505 - RNA, 19 nt, Artificial Sequence
  Description of Artificial Sequence: Synthetic oligonucleotide
ucgagugaugucccguagc

SEQ ID NO: 2939506 - RNA, 19 nt, Artificial Sequence
  Description of Artificial Sequence: Synthetic oligonucleotide
ggucucagagcucaggagc

SEQ ID NO: 2939507 - RNA, 19 nt, Artificial Sequence
  Description of Artificial Sequence: Synthetic oligonucleotide
guccuucugguccacuugg

SEQ ID NO: 2939508 - RNA, 19 nt, Artificial Sequence
  Description of Artificial Sequence: Synthetic oligonucleotide
aaaucucccgguccuuggu

SEQ ID NO: 2939509 - RNA, 19 nt, Artificial Sequence
  Description of Artificial Sequence: Synthetic oligonucleotide
uucuggaggguggaaaucu

SEQ ID NO: 2939510 - RNA, 19 nt, Artificial Sequence
  Description of Artificial Sequence: Synthetic oligonucleotide
gauggucucagagcucagg

SEQ ID NO: 2939511 - RNA, 19 nt, Artificial Sequence
  Description of Artificial Sequence: Synthetic oligonucleotide
auggucucagagcucagga

SEQ ID NO: 2939512 - RNA, 19 nt, Artificial Sequence
  Description of Artificial Sequence: Synthetic oligonucleotide
uggucucagagcucaggag

SEQ ID NO: 2939513 - RNA, 19 nt, Artificial Sequence
  Description of Artificial Sequence: Synthetic oligonucleotide
uccuccagagcgcugcgca

SEQ ID NO: 2939514 - RNA, 19 nt, Artificial Sequence
  Description of Artificial Sequence: Synthetic oligonucleotide
agcgcugcgcagcugcugg

SEQ ID NO: 2939515 - RNA, 19 nt, Artificial Sequence
  Description of Artificial Sequence: Synthetic oligonucleotide
gacccggcccaucaggaag

SEQ ID NO: 2939516 - RNA, 19 nt, Artificial Sequence
  Description of Artificial Sequence: Synthetic oligonucleotide
uccuucugguccacuuggg

SEQ ID NO: 2939517 - RNA, 19 nt, Artificial Sequence
  Description of Artificial Sequence: Synthetic oligonucleotide
cuggaggguggaaaucucc

SEQ ID NO: 2939518 - RNA, 19 nt, Artificial Sequence
  Description of Artificial Sequence: Synthetic oligonucleotide
uggaucaucugguccuucu

SEQ ID NO: 2939519 - RNA, 19 nt, Artificial Sequence
  Description of Artificial Sequence: Synthetic oligonucleotide
ugggccugcagguugcgga

SEQ ID NO: 2939520 - RNA, 19 nt, Artificial Sequence
  Description of Artificial Sequence: Synthetic oligonucleotide
uccagcuccgccacgcgac

SEQ ID NO: 2939521 - RNA, 19 nt, Artificial Sequence
  Description of Artificial Sequence: Synthetic oligonucleotide
caggagcugcuucuggagg

SEQ ID NO: 2939522 - RNA, 19 nt, Artificial Sequence
  Description of Artificial Sequence: Synthetic oligonucleotide
aucgagugaugucccguag

SEQ ID NO: 2939523 - RNA, 19 nt, Artificial Sequence
  Description of Artificial Sequence: Synthetic oligonucleotide
gguggaaaucucccggucc

SEQ ID NO: 2939524 - RNA, 19 nt, Artificial Sequence
  Description of Artificial Sequence: Synthetic oligonucleotide
agcaggucagccuggggcu

SEQ ID NO: 2939525 - RNA, 19 nt, Artificial Sequence
  Description of Artificial Sequence: Synthetic oligonucleotide
cacgcgacggugcacggcc

SEQ ID NO: 2939526 - RNA, 19 nt, Artificial Sequence
  Description of Artificial Sequence: Synthetic oligonucleotide
acgauggucucagagcuca

SEQ ID NO: 2939527 - RNA, 19 nt, Artificial Sequence
  Description of Artificial Sequence: Synthetic oligonucleotide
gaucuggagagcaggcggc

SEQ ID NO: 2939528 - RNA, 19 nt, Artificial Sequence
  Description of Artificial Sequence: Synthetic oligonucleotide
cugcuggaucaucuggucc

SEQ ID NO: 2939529 - RNA, 19 nt, Artificial Sequence
  Description of Artificial Sequence: Synthetic oligonucleotide
ucucccgguccuuggugcg

SEQ ID NO: 2939530 - RNA, 19 nt, Artificial Sequence
  Description of Artificial Sequence: Synthetic oligonucleotide
cagucgcucagccuccucc

SEQ ID NO: 2939531 - RNA, 19 nt, Artificial Sequence
  Description of Artificial Sequence: Synthetic oligonucleotide
cagagcgcugcgcagcugc

SEQ ID NO: 2939532 - RNA, 19 nt, Artificial Sequence
  Description of Artificial Sequence: Synthetic oligonucleotide
ggaggguggaaaucucccg

SEQ ID NO: 2939533 - RNA, 19 nt, Artificial Sequence
  Description of Artificial Sequence: Synthetic oligonucleotide
ucggccugcgcgcgcaccg

SEQ ID NO: 2939534 - RNA, 19 nt, Artificial Sequence
  Description of Artificial Sequence: Synthetic oligonucleotide
ucaucugguccuucugguc

SEQ ID NO: 2939535 - RNA, 19 nt, Artificial Sequence
  Description of Artificial Sequence: Synthetic oligonucleotide
uggacccggcccaucagga

SEQ ID NO: 2939536 - RNA, 19 nt, Artificial Sequence
  Description of Artificial Sequence: Synthetic oligonucleotide
ucuggaggguggaaaucuc

SEQ ID NO: 2939537 - RNA, 19 nt, Artificial Sequence
  Description of Artificial Sequence: Synthetic oligonucleotide
acuugggccugcagguugc

SEQ ID NO: 2939538 - RNA, 19 nt, Artificial Sequence
  Description of Artificial Sequence: Synthetic oligonucleotide
ugcgcguucgccucccgga

SEQ ID NO: 2939539 - RNA, 19 nt, Artificial Sequence
  Description of Artificial Sequence: Synthetic oligonucleotide
guggacccggcccaucagg

SEQ ID NO: 2939540 - RNA, 19 nt, Artificial Sequence
  Description of Artificial Sequence: Synthetic oligonucleotide
aggguggaaaucucccggu

SEQ ID NO: 2939541 - RNA, 19 nt, Artificial Sequence
  Description of Artificial Sequence: Synthetic oligonucleotide
caggaaguagcugucccug

SEQ ID NO: 2939542 - RNA, 19 nt, Artificial Sequence
  Description of Artificial Sequence: Synthetic oligonucleotide
uugcggacgauggucucag

SEQ ID NO: 2939543 - RNA, 19 nt, Artificial Sequence
  Description of Artificial Sequence: Synthetic oligonucleotide
ucuccagcuccgccacgcg

SEQ ID NO: 2939544 - RNA, 19 nt, Artificial Sequence
  Description of Artificial Sequence: Synthetic oligonucleotide
guugcccagggguggaccc

SEQ ID NO: 2939545 - RNA, 19 nt, Artificial Sequence
  Description of Artificial Sequence: Synthetic oligonucleotide
ucccguagcaggucagccu

SEQ ID NO: 2939546 - RNA, 19 nt, Artificial Sequence
  Description of Artificial Sequence: Synthetic oligonucleotide
cucagagcucaggagcugc

SEQ ID NO: 2939547 - RNA, 19 nt, Artificial Sequence
  Description of Artificial Sequence: Synthetic oligonucleotide
aaggggcccagucgcucag

SEQ ID NO: 2939548 - RNA, 19 nt, Artificial Sequence
  Description of Artificial Sequence: Synthetic oligonucleotide
caucaggaaguagcugucc

SEQ ID NO: 2939549 - RNA, 19 nt, Artificial Sequence
  Description of Artificial Sequence: Synthetic oligonucleotide
gagugaugucccguagcag

SEQ ID NO: 2939550 - RNA, 19 nt, Artificial Sequence
  Description of Artificial Sequence: Synthetic oligonucleotide
ucguggagggccaggcgcu

SEQ ID NO: 2939551 - RNA, 19 nt, Artificial Sequence
  Description of Artificial Sequence: Synthetic oligonucleotide
aggcgcucggccugcgcgc

SEQ ID NO: 2939552 - RNA, 19 nt, Artificial Sequence
  Description of Artificial Sequence: Synthetic oligonucleotide
caggcgcucggccugcgcg

SEQ ID NO: 2939553 - RNA, 19 nt, Artificial Sequence
  Description of Artificial Sequence: Synthetic oligonucleotide
cugcuggucguggagggcc

SEQ ID NO: 2939554 - RNA, 19 nt, Artificial Sequence
  Description of Artificial Sequence: Synthetic oligonucleotide
cacuugggccugcagguug

SEQ ID NO: 2939555 - RNA, 19 nt, Artificial Sequence
  Description of Artificial Sequence: Synthetic oligonucleotide
uccagagcgcugcgcagcu

SEQ ID NO: 2939556 - RNA, 19 nt, Artificial Sequence
  Description of Artificial Sequence: Synthetic oligonucleotide
ugcuucuggaggguggaaa

SEQ ID NO: 2939557 - RNA, 19 nt, Artificial Sequence
  Description of Artificial Sequence: Synthetic oligonucleotide
agucgcucagccuccucca

SEQ ID NO: 2939558 - RNA, 19 nt, Artificial Sequence
  Description of Artificial Sequence: Synthetic oligonucleotide
agggguggucgccaucgag

SEQ ID NO: 2939559 - RNA, 19 nt, Artificial Sequence
  Description of Artificial Sequence: Synthetic oligonucleotide
gcccagcuccuccagagcg

SEQ ID NO: 2939560 - RNA, 19 nt, Artificial Sequence
  Description of Artificial Sequence: Synthetic oligonucleotide
cugucccuggucacuggcc

SEQ ID NO: 2939561 - RNA, 19 nt, Artificial Sequence
  Description of Artificial Sequence: Synthetic oligonucleotide
uccuuggugcggcccagcu

SEQ ID NO: 2939562 - RNA, 19 nt, Artificial Sequence
  Description of Artificial Sequence: Synthetic oligonucleotide
guagcaggucagccugggg

SEQ ID NO: 2939563 - RNA, 19 nt, Artificial Sequence
  Description of Artificial Sequence: Synthetic oligonucleotide
aucuggagagcaggcggcg

SEQ ID NO: 2939564 - RNA, 19 nt, Artificial Sequence
  Description of Artificial Sequence: Synthetic oligonucleotide
gugcacggccgccaggugc

SEQ ID NO: 2939565 - RNA, 19 nt, Artificial Sequence
  Description of Artificial Sequence: Synthetic oligonucleotide
cuggucacuggccggcaag

SEQ ID NO: 2939566 - RNA, 19 nt, Artificial Sequence
  Description of Artificial Sequence: Synthetic oligonucleotide
cucaggagcugcuucugga

SEQ ID NO: 2939567 - RNA, 19 nt, Artificial Sequence
  Description of Artificial Sequence: Synthetic oligonucleotide
uguugcccagggguggacc

SEQ ID NO: 2939568 - RNA, 19 nt, Artificial Sequence
  Description of Artificial Sequence: Synthetic oligonucleotide
cagguugcggacgaugguc

SEQ ID NO: 2939569 - RNA, 19 nt, Artificial Sequence
  Description of Artificial Sequence: Synthetic oligonucleotide
ucccggaucuggagagcag

SEQ ID NO: 2939570 - RNA, 19 nt, Artificial Sequence
  Description of Artificial Sequence: Synthetic oligonucleotide
gcggacgauggucucagag

SEQ ID NO: 2939571 - RNA, 19 nt, Artificial Sequence
  Description of Artificial Sequence: Synthetic oligonucleotide
uccgccacgcgacggugca

SEQ ID NO: 2939572 - RNA, 19 nt, Artificial Sequence
  Description of Artificial Sequence: Synthetic oligonucleotide
agggcagccagcagggcag

SEQ ID NO: 2939573 - RNA, 19 nt, Artificial Sequence
  Description of Artificial Sequence: Synthetic oligonucleotide
ucuggagagcaggcggcgc

SEQ ID NO: 2939574 - RNA, 19 nt, Artificial Sequence
  Description of Artificial Sequence: Synthetic oligonucleotide
ugcgcucugccgccagcag

SEQ ID NO: 2939575 - RNA, 19 nt, Artificial Sequence
  Description of Artificial Sequence: Synthetic oligonucleotide
uagcugucccuggucacug

SEQ ID NO: 2939576 - RNA, 19 nt, Artificial Sequence
  Description of Artificial Sequence: Synthetic oligonucleotide
uggucguggagggccaggc

SEQ ID NO: 2939577 - RNA, 19 nt, Artificial Sequence
  Description of Artificial Sequence: Synthetic oligonucleotide
ggaucaucugguccuucug

SEQ ID NO: 2939578 - RNA, 19 nt, Artificial Sequence
  Description of Artificial Sequence: Synthetic oligonucleotide
ggacgauggucucagagcu

SEQ ID NO: 2939579 - RNA, 19 nt, Artificial Sequence
  Description of Artificial Sequence: Synthetic oligonucleotide
ucucagagcucaggagcug

SEQ ID NO: 2939580 - RNA, 19 nt, Artificial Sequence
  Description of Artificial Sequence: Synthetic oligonucleotide
ugucccguagcaggucagc

SEQ ID NO: 2939581 - RNA, 19 nt, Artificial Sequence
  Description of Artificial Sequence: Synthetic oligonucleotide
gagagcaggcggcgcagac

SEQ ID NO: 2939582 - RNA, 19 nt, Artificial Sequence
  Description of Artificial Sequence: Synthetic oligonucleotide
guggaaaucucccgguccu

SEQ ID NO: 2939583 - RNA, 19 nt, Artificial Sequence
  Description of Artificial Sequence: Synthetic oligonucleotide
gucgccaucgagugauguc

SEQ ID NO: 2939584 - RNA, 19 nt, Artificial Sequence
  Description of Artificial Sequence: Synthetic oligonucleotide
ugguccuucugguccacuu

SEQ ID NO: 2939585 - RNA, 19 nt, Artificial Sequence
  Description of Artificial Sequence: Synthetic oligonucleotide
ucgccucccggaucuggag

SEQ ID NO: 2939586 - RNA, 19 nt, Artificial Sequence
  Description of Artificial Sequence: Synthetic oligonucleotide
ggguggucgccaucgagug

SEQ ID NO: 2939587 - RNA, 19 nt, Artificial Sequence
  Description of Artificial Sequence: Synthetic oligonucleotide
cagcugcuggucguggagg

SEQ ID NO: 2939588 - RNA, 19 nt, Artificial Sequence
  Description of Artificial Sequence: Synthetic oligonucleotide
gguccuucugguccacuug

SEQ ID NO: 2939589 - RNA, 19 nt, Artificial Sequence
  Description of Artificial Sequence: Synthetic oligonucleotide
cagccgggucuccagcucc

SEQ ID NO: 2939590 - RNA, 19 nt, Artificial Sequence
  Description of Artificial Sequence: Synthetic oligonucleotide
cuccagagcgcugcgcagc

SEQ ID NO: 2939591 - RNA, 19 nt, Artificial Sequence
  Description of Artificial Sequence: Synthetic oligonucleotide
ggcccagucgcucagccuc

SEQ ID NO: 2939592 - RNA, 19 nt, Artificial Sequence
  Description of Artificial Sequence: Synthetic oligonucleotide
gucccuggucacuggccgg

SEQ ID NO: 2939593 - RNA, 19 nt, Artificial Sequence
  Description of Artificial Sequence: Synthetic oligonucleotide
gucuccagcuccgccacgc

SEQ ID NO: 2939594 - RNA, 19 nt, Artificial Sequence
  Description of Artificial Sequence: Synthetic oligonucleotide
ucccuggucacuggccggc

SEQ ID NO: 2939595 - RNA, 19 nt, Artificial Sequence
  Description of Artificial Sequence: Synthetic oligonucleotide
cuucuggaggguggaaauc

SEQ ID NO: 2939596 - RNA, 19 nt, Artificial Sequence
  Description of Artificial Sequence: Synthetic oligonucleotide
ggaaaucucccgguccuug

SEQ ID NO: 2939597 - RNA, 19 nt, Artificial Sequence
  Description of Artificial Sequence: Synthetic oligonucleotide
uugcccagggguggacccg

SEQ ID NO: 2939598 - RNA, 19 nt, Artificial Sequence
  Description of Artificial Sequence: Synthetic oligonucleotide
gcugcgcagcugcuggucg

SEQ ID NO: 2939599 - RNA, 19 nt, Artificial Sequence
  Description of Artificial Sequence: Synthetic oligonucleotide
agguugcggacgauggucu

SEQ ID NO: 2939600 - RNA, 19 nt, Artificial Sequence
  Description of Artificial Sequence: Synthetic oligonucleotide
ccuucugguccacuugggc

SEQ ID NO: 2939601 - RNA, 19 nt, Artificial Sequence
  Description of Artificial Sequence: Synthetic oligonucleotide
gagcaggcggcgcagacau

SEQ ID NO: 2939602 - RNA, 19 nt, Artificial Sequence
  Description of Artificial Sequence: Synthetic oligonucleotide
cacuggccggcaaggggcc

SEQ ID NO: 2939603 - RNA, 19 nt, Artificial Sequence
  Description of Artificial Sequence: Synthetic oligonucleotide
ggcugcagcugcuggauca

SEQ ID NO: 2939604 - RNA, 19 nt, Artificial Sequence
  Description of Artificial Sequence: Synthetic oligonucleotide
agcagggcagccaggggug

SEQ ID NO: 2939605 - RNA, 19 nt, Artificial Sequence
  Description of Artificial Sequence: Synthetic oligonucleotide
cggacgauggucucagagc

SEQ ID NO: 2939606 - RNA, 19 nt, Artificial Sequence
  Description of Artificial Sequence: Synthetic oligonucleotide
gcaccgugcgcucugccgc

SEQ ID NO: 2939607 - RNA, 19 nt, Artificial Sequence
  Description of Artificial Sequence: Synthetic oligonucleotide
gucccguagcaggucagcc

SEQ ID NO: 2939608 - RNA, 19 nt, Artificial Sequence
  Description of Artificial Sequence: Synthetic oligonucleotide
gccucccggaucuggagag

SEQ ID NO: 2939609 - RNA, 19 nt, Artificial Sequence
  Description of Artificial Sequence: Synthetic oligonucleotide
gugcgcguucgccucccgg

SEQ ID NO: 2939610 - RNA, 19 nt, Artificial Sequence
  Description of Artificial Sequence: Synthetic oligonucleotide
gucgcucagccuccuccag

SEQ ID NO: 2939611 - RNA, 19 nt, Artificial Sequence
  Description of Artificial Sequence: Synthetic oligonucleotide
ugcgcgcgcaccgugcgcu

SEQ ID NO: 2939612 - RNA, 19 nt, Artificial Sequence
  Description of Artificial Sequence: Synthetic oligonucleotide
cccguagcaggucagccug

SEQ ID NO: 2939613 - RNA, 19 nt, Artificial Sequence
  Description of Artificial Sequence: Synthetic oligonucleotide
gcagcugcuggucguggag

SEQ ID NO: 2939614 - RNA, 19 nt, Artificial Sequence
  Description of Artificial Sequence: Synthetic oligonucleotide
cugcagguugcggacgaug

SEQ ID NO: 2939615 - RNA, 19 nt, Artificial Sequence
  Description of Artificial Sequence: Synthetic oligonucleotide
ccagggguggucgccaucg

SEQ ID NO: 2939616 - RNA, 19 nt, Artificial Sequence
  Description of Artificial Sequence: Synthetic oligonucleotide
agagcaggcggcgcagaca

SEQ ID NO: 2939617 - RNA, 19 nt, Artificial Sequence
  Description of Artificial Sequence: Synthetic oligonucleotide
ggugcggcccagcuccucc

SEQ ID NO: 2939618 - RNA, 19 nt, Artificial Sequence
  Description of Artificial Sequence: Synthetic oligonucleotide
caucgagugaugucccgua

SEQ ID NO: 2939619 - RNA, 19 nt, Artificial Sequence
  Description of Artificial Sequence: Synthetic oligonucleotide
cuggagagcaggcggcgca

SEQ ID NO: 2939620 - RNA, 19 nt, Artificial Sequence
  Description of Artificial Sequence: Synthetic oligonucleotide
agcuccgccacgcgacggu

SEQ ID NO: 2939621 - RNA, 19 nt, Artificial Sequence
  Description of Artificial Sequence: Synthetic oligonucleotide
guugcggacgauggucuca

SEQ ID NO: 2939622 - RNA, 19 nt, Artificial Sequence
  Description of Artificial Sequence: Synthetic oligonucleotide
gccaucgagugaugucccg

SEQ ID NO: 2939623 - RNA, 19 nt, Artificial Sequence
  Description of Artificial Sequence: Synthetic oligonucleotide
aggugcgcguucgccuccc

SEQ ID NO: 2939624 - RNA, 19 nt, Artificial Sequence
  Description of Artificial Sequence: Synthetic oligonucleotide
cuccgccacgcgacggugc

SEQ ID NO: 2939625 - RNA, 19 nt, Artificial Sequence
  Description of Artificial Sequence: Synthetic oligonucleotide
gcugucccuggucacuggc

SEQ ID NO: 2939626 - RNA, 19 nt, Artificial Sequence
  Description of Artificial Sequence: Synthetic oligonucleotide
caccgugcgcucugccgcc

SEQ ID NO: 2939627 - RNA, 19 nt, Artificial Sequence
  Description of Artificial Sequence: Synthetic oligonucleotide
acuggccggcaaggggccc

SEQ ID NO: 2939628 - RNA, 19 nt, Artificial Sequence
  Description of Artificial Sequence: Synthetic oligonucleotide
caaggggcccagucgcuca

SEQ ID NO: 2939629 - RNA, 19 nt, Artificial Sequence
  Description of Artificial Sequence: Synthetic oligonucleotide
ccagggguggacccggccc

SEQ ID NO: 2939630 - RNA, 19 nt, Artificial Sequence
  Description of Artificial Sequence: Synthetic oligonucleotide
ccggcaaggggcccagucg

SEQ ID NO: 2939631 - RNA, 19 nt, Artificial Sequence
  Description of Artificial Sequence: Synthetic oligonucleotide
gacgauggucucagagcuc

SEQ ID NO: 2939632 - RNA, 19 nt, Artificial Sequence
  Description of Artificial Sequence: Synthetic oligonucleotide
ucccgguccuuggugcggc

SEQ ID NO: 2939633 - RNA, 19 nt, Artificial Sequence
  Description of Artificial Sequence: Synthetic oligonucleotide
acggugcacggccgccagg

SEQ ID NO: 2939634 - RNA, 19 nt, Artificial Sequence
  Description of Artificial Sequence: Synthetic oligonucleotide
uggucgccaucgagugaug

SEQ ID NO: 2939635 - RNA, 19 nt, Artificial Sequence
  Description of Artificial Sequence: Synthetic oligonucleotide
cagcagccgggucuccagc

SEQ ID NO: 2939636 - RNA, 19 nt, Artificial Sequence
  Description of Artificial Sequence: Synthetic oligonucleotide
cccggaucuggagagcagg

SEQ ID NO: 2939637 - RNA, 19 nt, Artificial Sequence
  Description of Artificial Sequence: Synthetic oligonucleotide
gucucagagcucaggagcu

SEQ ID NO: 2939638 - RNA, 19 nt, Artificial Sequence
  Description of Artificial Sequence: Synthetic oligonucleotide
acggccgccaggugcgcgu

SEQ ID NO: 2939639 - RNA, 19 nt, Artificial Sequence
  Description of Artificial Sequence: Synthetic oligonucleotide
ccggaucuggagagcaggc

SEQ ID NO: 2939640 - RNA, 19 nt, Artificial Sequence
  Description of Artificial Sequence: Synthetic oligonucleotide
cuugggccugcagguugcg

SEQ ID NO: 2939641 - RNA, 19 nt, Artificial Sequence
  Description of Artificial Sequence: Synthetic oligonucleotide
cuggucguggagggccagg

SEQ ID NO: 2939642 - RNA, 19 nt, Artificial Sequence
  Description of Artificial Sequence: Synthetic oligonucleotide
ggucacuggccggcaaggg

SEQ ID NO: 2939643 - RNA, 19 nt, Artificial Sequence
  Description of Artificial Sequence: Synthetic oligonucleotide
guggagggccaggcgcucg

SEQ ID NO: 2939644 - RNA, 19 nt, Artificial Sequence
  Description of Artificial Sequence: Synthetic oligonucleotide
augucccguagcaggucag

SEQ ID NO: 2939645 - RNA, 19 nt, Artificial Sequence
  Description of Artificial Sequence: Synthetic oligonucleotide
guggucgccaucgagugau

SEQ ID NO: 2939646 - RNA, 19 nt, Artificial Sequence
  Description of Artificial Sequence: Synthetic oligonucleotide
cagcagggcagccaggggu

SEQ ID NO: 2939647 - RNA, 19 nt, Artificial Sequence
  Description of Artificial Sequence: Synthetic oligonucleotide
gguggacccggcccaucag

SEQ ID NO: 2939648 - RNA, 19 nt, Artificial Sequence
  Description of Artificial Sequence: Synthetic oligonucleotide
cucccgguccuuggugcgg

SEQ ID NO: 2939649 - RNA, 19 nt, Artificial Sequence
  Description of Artificial Sequence: Synthetic oligonucleotide
aggggcccagucgcucagc

SEQ ID NO: 2939650 - RNA, 19 nt, Artificial Sequence
  Description of Artificial Sequence: Synthetic oligonucleotide
ggguggaaaucucccgguc

SEQ ID NO: 2939651 - RNA, 19 nt, Artificial Sequence
  Description of Artificial Sequence: Synthetic oligonucleotide
caggugcgcguucgccucc

SEQ ID NO: 2939652 - RNA, 19 nt, Artificial Sequence
  Description of Artificial Sequence: Synthetic oligonucleotide
ggaaguagcugucccuggu

SEQ ID NO: 2939653 - RNA, 19 nt, Artificial Sequence
  Description of Artificial Sequence: Synthetic oligonucleotide
cucccggaucuggagagca

SEQ ID NO: 2939654 - RNA, 19 nt, Artificial Sequence
  Description of Artificial Sequence: Synthetic oligonucleotide
uggaaaucucccgguccuu

SEQ ID NO: 2939655 - RNA, 19 nt, Artificial Sequence
  Description of Artificial Sequence: Synthetic oligonucleotide
cagggguggacccggccca

SEQ ID NO: 2939656 - RNA, 19 nt, Artificial Sequence
  Description of Artificial Sequence: Synthetic oligonucleotide
agccgggucuccagcuccg

SEQ ID NO: 2939657 - RNA, 19 nt, Artificial Sequence
  Description of Artificial Sequence: Synthetic oligonucleotide
ggggcccagucgcucagcc

SEQ ID NO: 2939658 - RNA, 19 nt, Artificial Sequence
  Description of Artificial Sequence: Synthetic oligonucleotide
uuggugcggcccagcuccu

SEQ ID NO: 2939659 - RNA, 19 nt, Artificial Sequence
  Description of Artificial Sequence: Synthetic oligonucleotide
acccggcccaucaggaagu

SEQ ID NO: 2939660 - RNA, 19 nt, Artificial Sequence
  Description of Artificial Sequence: Synthetic oligonucleotide
gugaugucccguagcaggu

SEQ ID NO: 2939661 - RNA, 19 nt, Artificial Sequence
  Description of Artificial Sequence: Synthetic oligonucleotide
cgagugaugucccguagca

SEQ ID NO: 2939662 - RNA, 19 nt, Artificial Sequence
  Description of Artificial Sequence: Synthetic oligonucleotide
ugguccacuugggccugca

SEQ ID NO: 2939663 - RNA, 19 nt, Artificial Sequence
  Description of Artificial Sequence: Synthetic oligonucleotide
cuccuccagagcgcugcgc

SEQ ID NO: 2939664 - RNA, 19 nt, Artificial Sequence
  Description of Artificial Sequence: Synthetic oligonucleotide
guagcugucccuggucacu

SEQ ID NO: 2939665 - RNA, 19 nt, Artificial Sequence
  Description of Artificial Sequence: Synthetic oligonucleotide
ugcggacgauggucucaga

SEQ ID NO: 2939666 - RNA, 19 nt, Artificial Sequence
  Description of Artificial Sequence: Synthetic oligonucleotide
cuggaucaucugguccuuc

SEQ ID NO: 2939667 - RNA, 19 nt, Artificial Sequence
  Description of Artificial Sequence: Synthetic oligonucleotide
cuccagcuccgccacgcga

SEQ ID NO: 2939668 - RNA, 19 nt, Artificial Sequence
  Description of Artificial Sequence: Synthetic oligonucleotide
gcgcucugccgccagcagc

SEQ ID NO: 2939669 - RNA, 19 nt, Artificial Sequence
  Description of Artificial Sequence: Synthetic oligonucleotide
gggccugcagguugcggac

SEQ ID NO: 2939670 - RNA, 19 nt, Artificial Sequence
  Description of Artificial Sequence: Synthetic oligonucleotide
cagcuccgccacgcgacgg

SEQ ID NO: 2939671 - RNA, 19 nt, Artificial Sequence
  Description of Artificial Sequence: Synthetic oligonucleotide
cggcaaggggcccagucgc

SEQ ID NO: 2939672 - RNA, 19 nt, Artificial Sequence
  Description of Artificial Sequence: Synthetic oligonucleotide
gcuccuccagagcgcugcg

SEQ ID NO: 2939673 - RNA, 19 nt, Artificial Sequence
  Description of Artificial Sequence: Synthetic oligonucleotide
gcuucuggaggguggaaau

SEQ ID NO: 2939674 - RNA, 19 nt, Artificial Sequence
  Description of Artificial Sequence: Synthetic oligonucleotide
gguugcggacgauggucuc

SEQ ID NO: 2939675 - RNA, 19 nt, Artificial Sequence
  Description of Artificial Sequence: Synthetic oligonucleotide
cgcaccgugcgcucugccg

SEQ ID NO: 2939676 - RNA, 19 nt, Artificial Sequence
  Description of Artificial Sequence: Synthetic oligonucleotide
ccaggugcgcguucgccuc

SEQ ID NO: 2939677 - RNA, 19 nt, Artificial Sequence
  Description of Artificial Sequence: Synthetic oligonucleotide
ggguggacccggcccauca

SEQ ID NO: 2939678 - RNA, 19 nt, Artificial Sequence
  Description of Artificial Sequence: Synthetic oligonucleotide
gggcagccagggguggucg

SEQ ID NO: 2939679 - RNA, 19 nt, Artificial Sequence
  Description of Artificial Sequence: Synthetic oligonucleotide
ccugcgcgcgcaccgugcg

SEQ ID NO: 2939680 - RNA, 19 nt, Artificial Sequence
  Description of Artificial Sequence: Synthetic oligonucleotide
uggccggcaaggggcccag

SEQ ID NO: 2939681 - RNA, 19 nt, Artificial Sequence
  Description of Artificial Sequence: Synthetic oligonucleotide
ccguagcaggucagccugg

SEQ ID NO: 2939682 - RNA, 19 nt, Artificial Sequence
  Description of Artificial Sequence: Synthetic oligonucleotide
cugcgcgcgcaccgugcgc

SEQ ID NO: 2939683 - RNA, 19 nt, Artificial Sequence
  Description of Artificial Sequence: Synthetic oligonucleotide
gguggucgccaucgaguga

SEQ ID NO: 2939684 - RNA, 19 nt, Artificial Sequence
  Description of Artificial Sequence: Synthetic oligonucleotide
gugcgcucugccgccagca

SEQ ID NO: 2939685 - RNA, 19 nt, Artificial Sequence
  Description of Artificial Sequence: Synthetic oligonucleotide
ggccugcagguugcggacg

SEQ ID NO: 2939686 - RNA, 19 nt, Artificial Sequence
  Description of Artificial Sequence: Synthetic oligonucleotide
ccagcuccgccacgcgacg

SEQ ID NO: 2939687 - RNA, 19 nt, Artificial Sequence
  Description of Artificial Sequence: Synthetic oligonucleotide
cggaucuggagagcaggcg

SEQ ID NO: 2939688 - RNA, 19 nt, Artificial Sequence
  Description of Artificial Sequence: Synthetic oligonucleotide
cacggccgccaggugcgcg

SEQ ID NO: 2939689 - RNA, 19 nt, Artificial Sequence
  Description of Artificial Sequence: Synthetic oligonucleotide
cucggccugcgcgcgcacc

SEQ ID NO: 2939690 - RNA, 19 nt, Artificial Sequence
  Description of Artificial Sequence: Synthetic oligonucleotide
gccggcaaggggcccaguc

SEQ ID NO: 2939691 - RNA, 19 nt, Artificial Sequence
  Description of Artificial Sequence: Synthetic oligonucleotide
cuguugcccagggguggac

SEQ ID NO: 2939692 - RNA, 19 nt, Artificial Sequence
  Description of Artificial Sequence: Synthetic oligonucleotide
acgcgacggugcacggccg

SEQ ID NO: 2939693 - RNA, 19 nt, Artificial Sequence
  Description of Artificial Sequence: Synthetic oligonucleotide
agccagggguggucgccau

SEQ ID NO: 2939694 - RNA, 19 nt, Artificial Sequence
  Description of Artificial Sequence: Synthetic oligonucleotide
cgccaucgagugauguccc

SEQ ID NO: 2939695 - RNA, 19 nt, Artificial Sequence
  Description of Artificial Sequence: Synthetic oligonucleotide
agagcgcugcgcagcugcu

SEQ ID NO: 2939696 - RNA, 19 nt, Artificial Sequence
  Description of Artificial Sequence: Synthetic oligonucleotide
ggcagccagggguggucgc

SEQ ID NO: 2939697 - RNA, 19 nt, Artificial Sequence
  Description of Artificial Sequence: Synthetic oligonucleotide
gccacgcgacggugcacgg

SEQ ID NO: 2939698 - RNA, 19 nt, Artificial Sequence
  Description of Artificial Sequence: Synthetic oligonucleotide
gccugcagguugcggacga

SEQ ID NO: 2939699 - RNA, 19 nt, Artificial Sequence
  Description of Artificial Sequence: Synthetic oligonucleotide
gguccuuggugcggcccag

SEQ ID NO: 2939700 - RNA, 19 nt, Artificial Sequence
  Description of Artificial Sequence: Synthetic oligonucleotide
gggguggucgccaucgagu

SEQ ID NO: 2939701 - RNA, 19 nt, Artificial Sequence
  Description of Artificial Sequence: Synthetic oligonucleotide
gccgccagcagccgggucu

SEQ ID NO: 2939702 - RNA, 19 nt, Artificial Sequence
  Description of Artificial Sequence: Synthetic oligonucleotide
ggugcacggccgccaggug

SEQ ID NO: 2939703 - RNA, 19 nt, Artificial Sequence
  Description of Artificial Sequence: Synthetic oligonucleotide
ggugcgcguucgccucccg

SEQ ID NO: 2939704 - RNA, 19 nt, Artificial Sequence
  Description of Artificial Sequence: Synthetic oligonucleotide
gcagggcagccaggggugg

SEQ ID NO: 2939705 - RNA, 19 nt, Artificial Sequence
  Description of Artificial Sequence: Synthetic oligonucleotide
gcguucgccucccggaucu

SEQ ID NO: 2939706 - RNA, 19 nt, Artificial Sequence
  Description of Artificial Sequence: Synthetic oligonucleotide
ugccgccagcagccggguc

SEQ ID NO: 2939707 - RNA, 19 nt, Artificial Sequence
  Description of Artificial Sequence: Synthetic oligonucleotide
ggcgcucggccugcgcgcg

SEQ ID NO: 2939708 - RNA, 19 nt, Artificial Sequence
  Description of Artificial Sequence: Synthetic oligonucleotide
cgccacgcgacggugcacg

SEQ ID NO: 2939709 - RNA, 19 nt, Artificial Sequence
  Description of Artificial Sequence: Synthetic oligonucleotide
gcaaggggcccagucgcuc

SEQ ID NO: 2939710 - RNA, 19 nt, Artificial Sequence
  Description of Artificial Sequence: Synthetic oligonucleotide
ccgggucuccagcuccgcc

SEQ ID NO: 2939711 - RNA, 19 nt, Artificial Sequence
  Description of Artificial Sequence: Synthetic oligonucleotide
gccaggugcgcguucgccu

SEQ ID NO: 2939712 - RNA, 19 nt, Artificial Sequence
  Description of Artificial Sequence: Synthetic oligonucleotide
cuggccggcaaggggccca

SEQ ID NO: 2939713 - RNA, 19 nt, Artificial Sequence
  Description of Artificial Sequence: Synthetic oligonucleotide
cagccagggguggucgcca

SEQ ID NO: 2939714 - RNA, 19 nt, Artificial Sequence
  Description of Artificial Sequence: Synthetic oligonucleotide
ggacccggcccaucaggaa

SEQ ID NO: 2939715 - RNA, 19 nt, Artificial Sequence
  Description of Artificial Sequence: Synthetic oligonucleotide
uggugcggcccagcuccuc

SEQ ID NO: 2939716 - RNA, 19 nt, Artificial Sequence
  Description of Artificial Sequence: Synthetic oligonucleotide
cccagggguggacccggcc

SEQ ID NO: 2939717 - RNA, 19 nt, Artificial Sequence
  Description of Artificial Sequence: Synthetic oligonucleotide
gcgcagcugcuggucgugg

SEQ ID NO: 2939718 - RNA, 19 nt, Artificial Sequence
  Description of Artificial Sequence: Synthetic oligonucleotide
gcuguugcccaggggugga

SEQ ID NO: 2939719 - RNA, 19 nt, Artificial Sequence
  Description of Artificial Sequence: Synthetic oligonucleotide
gcagguugcggacgauggu

SEQ ID NO: 2939720 - RNA, 19 nt, Artificial Sequence
  Description of Artificial Sequence: Synthetic oligonucleotide
ggccugcgcgcgcaccgug

SEQ ID NO: 2939721 - RNA, 19 nt, Artificial Sequence
  Description of Artificial Sequence: Synthetic oligonucleotide
cugcgcagcugcuggucgu

SEQ ID NO: 2939722 - RNA, 19 nt, Artificial Sequence
  Description of Artificial Sequence: Synthetic oligonucleotide
accgugcgcucugccgcca

SEQ ID NO: 2939723 - RNA, 19 nt, Artificial Sequence
  Description of Artificial Sequence: Synthetic oligonucleotide
gcuggucguggagggccag

SEQ ID NO: 2939724 - RNA, 19 nt, Artificial Sequence
  Description of Artificial Sequence: Synthetic oligonucleotide
cagggguggucgccaucga

SEQ ID NO: 2939725 - RNA, 19 nt, Artificial Sequence
  Description of Artificial Sequence: Synthetic oligonucleotide
gcccagucgcucagccucc

SEQ ID NO: 2939726 - RNA, 19 nt, Artificial Sequence
  Description of Artificial Sequence: Synthetic oligonucleotide
gggcugcagcugcuggauc

SEQ ID NO: 2939727 - RNA, 19 nt, Artificial Sequence
  Description of Artificial Sequence: Synthetic oligonucleotide
gcgacggugcacggccgcc

SEQ ID NO: 2939728 - RNA, 19 nt, Artificial Sequence
  Description of Artificial Sequence: Synthetic oligonucleotide
gcuccgccacgcgacggug

SEQ ID NO: 2939729 - RNA, 19 nt, Artificial Sequence
  Description of Artificial Sequence: Synthetic oligonucleotide
agggguggacccggcccau

SEQ ID NO: 2939730 - RNA, 19 nt, Artificial Sequence
  Description of Artificial Sequence: Synthetic oligonucleotide
agcaggcggcgcagacaug

SEQ ID NO: 2939731 - RNA, 19 nt, Artificial Sequence
  Description of Artificial Sequence: Synthetic oligonucleotide
ggagagcaggcggcgcaga

SEQ ID NO: 2939732 - RNA, 19 nt, Artificial Sequence
  Description of Artificial Sequence: Synthetic oligonucleotide
ggucgccaucgagugaugu

SEQ ID NO: 2939733 - RNA, 19 nt, Artificial Sequence
  Description of Artificial Sequence: Synthetic oligonucleotide
ccucccggaucuggagagc

SEQ ID NO: 2939734 - RNA, 19 nt, Artificial Sequence
  Description of Artificial Sequence: Synthetic oligonucleotide
ccgguccuuggugcggccc

SEQ ID NO: 2939735 - RNA, 19 nt, Artificial Sequence
  Description of Artificial Sequence: Synthetic oligonucleotide
ggagcugcuucuggagggu

SEQ ID NO: 2939736 - RNA, 19 nt, Artificial Sequence
  Description of Artificial Sequence: Synthetic oligonucleotide
gccugcgcgcgcaccgugc

SEQ ID NO: 2939737 - RNA, 19 nt, Artificial Sequence
  Description of Artificial Sequence: Synthetic oligonucleotide
ccacgcgacggugcacggc

SEQ ID NO: 2939738 - RNA, 19 nt, Artificial Sequence
  Description of Artificial Sequence: Synthetic oligonucleotide
gcgcgcaccgugcgcucug

SEQ ID NO: 2939739 - RNA, 19 nt, Artificial Sequence
  Description of Artificial Sequence: Synthetic oligonucleotide
gcgcaccgugcgcucugcc

SEQ ID NO: 2939740 - RNA, 19 nt, Artificial Sequence
  Description of Artificial Sequence: Synthetic oligonucleotide
cugcuucuggaggguggaa

SEQ ID NO: 2939741 - RNA, 19 nt, Artificial Sequence
  Description of Artificial Sequence: Synthetic oligonucleotide
ccaggcgcucggccugcgc

SEQ ID NO: 2939742 - RNA, 19 nt, Artificial Sequence
  Description of Artificial Sequence: Synthetic oligonucleotide
cgcgacggugcacggccgc

SEQ ID NO: 2939743 - RNA, 19 nt, Artificial Sequence
  Description of Artificial Sequence: Synthetic oligonucleotide
gccagggguggucgccauc

SEQ ID NO: 2939744 - RNA, 19 nt, Artificial Sequence
  Description of Artificial Sequence: Synthetic oligonucleotide
gggcagccagcagggcagc

SEQ ID NO: 2939745 - RNA, 19 nt, Artificial Sequence
  Description of Artificial Sequence: Synthetic oligonucleotide
cgugcgcucugccgccagc

SEQ ID NO: 2939746 - RNA, 19 nt, Artificial Sequence
  Description of Artificial Sequence: Synthetic oligonucleotide
cccgguccuuggugcggcc

SEQ ID NO: 2939747 - RNA, 19 nt, Artificial Sequence
  Description of Artificial Sequence: Synthetic oligonucleotide
ccaucgagugaugucccgu

SEQ ID NO: 2939748 - RNA, 19 nt, Artificial Sequence
  Description of Artificial Sequence: Synthetic oligonucleotide
ccagucgcucagccuccuc

SEQ ID NO: 2939749 - RNA, 19 nt, Artificial Sequence
  Description of Artificial Sequence: Synthetic oligonucleotide
cgccaggugcgcguucgcc

SEQ ID NO: 2939750 - RNA, 19 nt, Artificial Sequence
  Description of Artificial Sequence: Synthetic oligonucleotide
ggccaggcgcucggccugc

SEQ ID NO: 2939751 - RNA, 19 nt, Artificial Sequence
  Description of Artificial Sequence: Synthetic oligonucleotide
ggggcugcagcugcuggau

SEQ ID NO: 2939752 - RNA, 19 nt, Artificial Sequence
  Description of Artificial Sequence: Synthetic oligonucleotide
ccgugcgcucugccgccag

SEQ ID NO: 2939753 - RNA, 19 nt, Artificial Sequence
  Description of Artificial Sequence: Synthetic oligonucleotide
gccgggucuccagcuccgc

SEQ ID NO: 2939754 - RNA, 19 nt, Artificial Sequence
  Description of Artificial Sequence: Synthetic oligonucleotide
ccuggucacuggccggcaa

SEQ ID NO: 2939755 - RNA, 19 nt, Artificial Sequence
  Description of Artificial Sequence: Synthetic oligonucleotide
ccgccaggugcgcguucgc

SEQ ID NO: 2939756 - RNA, 19 nt, Artificial Sequence
  Description of Artificial Sequence: Synthetic oligonucleotide
cgcguucgccucccggauc

SEQ ID NO: 2939757 - RNA, 19 nt, Artificial Sequence
  Description of Artificial Sequence: Synthetic oligonucleotide
cgccucccggaucuggaga

SEQ ID NO: 2939758 - RNA, 19 nt, Artificial Sequence
  Description of Artificial Sequence: Synthetic oligonucleotide
ggcaaggggcccagucgcu

SEQ ID NO: 2939759 - RNA, 19 nt, Artificial Sequence
  Description of Artificial Sequence: Synthetic oligonucleotide
gccaggcgcucggccugcg

SEQ ID NO: 2939760 - RNA, 19 nt, Artificial Sequence
  Description of Artificial Sequence: Synthetic oligonucleotide
cugguccuucugguccacu

SEQ ID NO: 2939761 - RNA, 19 nt, Artificial Sequence
  Description of Artificial Sequence: Synthetic oligonucleotide
ccagcuccuccagagcgcu

SEQ ID NO: 2939762 - RNA, 19 nt, Artificial Sequence
  Description of Artificial Sequence: Synthetic oligonucleotide
ccgccagcagccgggucuc

SEQ ID NO: 2939763 - RNA, 19 nt, Artificial Sequence
  Description of Artificial Sequence: Synthetic oligonucleotide
gcucggccugcgcgcgcac

SEQ ID NO: 2939764 - RNA, 19 nt, Artificial Sequence
  Description of Artificial Sequence: Synthetic oligonucleotide
gcgcucggccugcgcgcgc

SEQ ID NO: 2939765 - RNA, 19 nt, Artificial Sequence
  Description of Artificial Sequence: Synthetic oligonucleotide
gggguggacccggcccauc

SEQ ID NO: 2939766 - RNA, 19 nt, Artificial Sequence
  Description of Artificial Sequence: Synthetic oligonucleotide
gcgcguucgccucccggau

SEQ ID NO: 2939767 - RNA, 19 nt, Artificial Sequence
  Description of Artificial Sequence: Synthetic oligonucleotide
gcgcgcgcaccgugcgcuc

SEQ ID NO: 2939768 - RNA, 19 nt, Artificial Sequence
  Description of Artificial Sequence: Synthetic oligonucleotide
cguggagggccaggcgcuc

SEQ ID NO: 2939769 - RNA, 19 nt, Artificial Sequence
  Description of Artificial Sequence: Synthetic oligonucleotide
cgcgcaccgugcgcucugc

SEQ ID NO: 2939770 - RNA, 19 nt, Artificial Sequence
  Description of Artificial Sequence: Synthetic oligonucleotide
gcgcugcgcagcugcuggu

SEQ ID NO: 2939771 - RNA, 19 nt, Artificial Sequence
  Description of Artificial Sequence: Synthetic oligonucleotide
cugccgccagcagccgggu

SEQ ID NO: 2939772 - RNA, 19 nt, Artificial Sequence
  Description of Artificial Sequence: Synthetic oligonucleotide
cccuggucacuggccggca

SEQ ID NO: 2939773 - RNA, 19 nt, Artificial Sequence
  Description of Artificial Sequence: Synthetic oligonucleotide
ccgccacgcgacggugcac

SEQ ID NO: 2939774 - RNA, 19 nt, Artificial Sequence
  Description of Artificial Sequence: Synthetic oligonucleotide
cggugcacggccgccaggu

SEQ ID NO: 2939775 - RNA, 19 nt, Artificial Sequence
  Description of Artificial Sequence: Synthetic oligonucleotide
cguucgccucccggaucug

SEQ ID NO: 2939776 - RNA, 19 nt, Artificial Sequence
  Description of Artificial Sequence: Synthetic oligonucleotide
cgcucggccugcgcgcgca

SEQ ID NO: 2939777 - RNA, 19 nt, Artificial Sequence
  Description of Artificial Sequence: Synthetic oligonucleotide
ccacuugggccugcagguu

SEQ ID NO: 2939778 - RNA, 19 nt, Artificial Sequence
  Description of Artificial Sequence: Synthetic oligonucleotide
ccugcagguugcggacgau

SEQ ID NO: 2939779 - RNA, 19 nt, Artificial Sequence
  Description of Artificial Sequence: Synthetic oligonucleotide
ggccggcaaggggcccagu

SEQ ID NO: 2939780 - RNA, 19 nt, Artificial Sequence
  Description of Artificial Sequence: Synthetic oligonucleotide
cgcgcgcaccgugcgcucu

SEQ ID NO: 2939781 - RNA, 19 nt, Artificial Sequence
  Description of Artificial Sequence: Synthetic oligonucleotide
cggccgccaggugcgcguu

SEQ ID NO: 2939782 - RNA, 19 nt, Artificial Sequence
  Description of Artificial Sequence: Synthetic oligonucleotide
aaaagaaugaguuagaugc

SEQ ID NO: 2939783 - RNA, 19 nt, Artificial Sequence
  Description of Artificial Sequence: Synthetic oligonucleotide
gacaaugacaguuaggagg

SEQ ID NO: 2939784 - RNA, 19 nt, Artificial Sequence
  Description of Artificial Sequence: Synthetic oligonucleotide
uaaaauagaaagcagccug

SEQ ID NO: 2939785 - RNA, 19 nt, Artificial Sequence
  Description of Artificial Sequence: Synthetic oligonucleotide
aauuuagauguucaggaag

SEQ ID NO: 2939786 - RNA, 19 nt, Artificial Sequence
  Description of Artificial Sequence: Synthetic oligonucleotide
gaagaaaagaaugaguuag

SEQ ID NO: 2939787 - RNA, 19 nt, Artificial Sequence
  Description of Artificial Sequence: Synthetic oligonucleotide
aauagaaagcagccugacc

SEQ ID NO: 2939788 - RNA, 19 nt, Artificial Sequence
  Description of Artificial Sequence: Synthetic oligonucleotide
auagaaagcagccugaccu

SEQ ID NO: 2939789 - RNA, 19 nt, Artificial Sequence
  Description of Artificial Sequence: Synthetic oligonucleotide
aagacaaugacaguuagga

SEQ ID NO: 2939790 - RNA, 19 nt, Artificial Sequence
  Description of Artificial Sequence: Synthetic oligonucleotide
acaauuuagauguucagga

SEQ ID NO: 2939791 - RNA, 19 nt, Artificial Sequence
  Description of Artificial Sequence: Synthetic oligonucleotide
ucaagaggcaagaagggag

SEQ ID NO: 2939792 - RNA, 19 nt, Artificial Sequence
  Description of Artificial Sequence: Synthetic oligonucleotide
gaauaaguggugcaggaag

SEQ ID NO: 2939793 - RNA, 19 nt, Artificial Sequence
  Description of Artificial Sequence: Synthetic oligonucleotide
uguuaaggaaggaagaaaa

SEQ ID NO: 2939794 - RNA, 19 nt, Artificial Sequence
  Description of Artificial Sequence: Synthetic oligonucleotide
gaaagagcuguaaacaagg

SEQ ID NO: 2939795 - RNA, 19 nt, Artificial Sequence
  Description of Artificial Sequence: Synthetic oligonucleotide
uacaauuuagauguucagg

SEQ ID NO: 2939796 - RNA, 19 nt, Artificial Sequence
  Description of Artificial Sequence: Synthetic oligonucleotide
uuagaugccaagacaauga

SEQ ID NO: 2939797 - RNA, 19 nt, Artificial Sequence
  Description of Artificial Sequence: Synthetic oligonucleotide
gaaaagaaugaguuagaug

SEQ ID NO: 2939798 - RNA, 19 nt, Artificial Sequence
  Description of Artificial Sequence: Synthetic oligonucleotide
augaguuagaugccaagac

SEQ ID NO: 2939799 - RNA, 19 nt, Artificial Sequence
  Description of Artificial Sequence: Synthetic oligonucleotide
aaugacaguuaggaggugg

SEQ ID NO: 2939800 - RNA, 19 nt, Artificial Sequence
  Description of Artificial Sequence: Synthetic oligonucleotide
uuuuacagaauaaguggug

SEQ ID NO: 2939801 - RNA, 19 nt, Artificial Sequence
  Description of Artificial Sequence: Synthetic oligonucleotide
agaagggagauccgcaggc

SEQ ID NO: 2939802 - RNA, 19 nt, Artificial Sequence
  Description of Artificial Sequence: Synthetic oligonucleotide
aaagaaugaguuagaugcc

SEQ ID NO: 2939803 - RNA, 19 nt, Artificial Sequence
  Description of Artificial Sequence: Synthetic oligonucleotide
gagaaaggaacccuguggc

SEQ ID NO: 2939804 - RNA, 19 nt, Artificial Sequence
  Description of Artificial Sequence: Synthetic oligonucleotide
aauaaguggugcaggaagg

SEQ ID NO: 2939805 - RNA, 19 nt, Artificial Sequence
  Description of Artificial Sequence: Synthetic oligonucleotide
uuuacagaauaaguggugc

SEQ ID NO: 2939806 - RNA, 19 nt, Artificial Sequence
  Description of Artificial Sequence: Synthetic oligonucleotide
auuuagauguucaggaagg

SEQ ID NO: 2939807 - RNA, 19 nt, Artificial Sequence
  Description of Artificial Sequence: Synthetic oligonucleotide
agcagccugaccuaaguac

SEQ ID NO: 2939808 - RNA, 19 nt, Artificial Sequence
  Description of Artificial Sequence: Synthetic oligonucleotide
aagguguuaaggaaggaag

SEQ ID NO: 2939809 - RNA, 19 nt, Artificial Sequence
  Description of Artificial Sequence: Synthetic oligonucleotide
ugaagaugguagcagggag

SEQ ID NO: 2939810 - RNA, 19 nt, Artificial Sequence
  Description of Artificial Sequence: Synthetic oligonucleotide
cagaguacaauuuagaugu

SEQ ID NO: 2939811 - RNA, 19 nt, Artificial Sequence
  Description of Artificial Sequence: Synthetic oligonucleotide
aaauagaaagcagccugac

SEQ ID NO: 2939812 - RNA, 19 nt, Artificial Sequence
  Description of Artificial Sequence: Synthetic oligonucleotide
gaggcaagaagggagaucc

SEQ ID NO: 2939813 - RNA, 19 nt, Artificial Sequence
  Description of Artificial Sequence: Synthetic oligonucleotide
agugcagagagguuuuccg

SEQ ID NO: 2939814 - RNA, 19 nt, Artificial Sequence
  Description of Artificial Sequence: Synthetic oligonucleotide
gaugguagcagggagauga

SEQ ID NO: 2939815 - RNA, 19 nt, Artificial Sequence
  Description of Artificial Sequence: Synthetic oligonucleotide
uccagaggcaggaagaagu

SEQ ID NO: 2939816 - RNA, 19 nt, Artificial Sequence
  Description of Artificial Sequence: Synthetic oligonucleotide
ggaucaagaggcaagaagg

SEQ ID NO: 2939817 - RNA, 19 nt, Artificial Sequence
  Description of Artificial Sequence: Synthetic oligonucleotide
aagaagggagauccgcagg

SEQ ID NO: 2939818 - RNA, 19 nt, Artificial Sequence
  Description of Artificial Sequence: Synthetic oligonucleotide
aaagagcuguaaacaaggc

SEQ ID NO: 2939819 - RNA, 19 nt, Artificial Sequence
  Description of Artificial Sequence: Synthetic oligonucleotide
aaugaguuagaugccaaga

SEQ ID NO: 2939820 - RNA, 19 nt, Artificial Sequence
  Description of Artificial Sequence: Synthetic oligonucleotide
agugcagggagaaaggaac

SEQ ID NO: 2939821 - RNA, 19 nt, Artificial Sequence
  Description of Artificial Sequence: Synthetic oligonucleotide
uuaauguucagaggagucc

SEQ ID NO: 2939822 - RNA, 19 nt, Artificial Sequence
  Description of Artificial Sequence: Synthetic oligonucleotide
cuuccagaagugcagagag

SEQ ID NO: 2939823 - RNA, 19 nt, Artificial Sequence
  Description of Artificial Sequence: Synthetic oligonucleotide
aaaagugcagggagaaagg

SEQ ID NO: 2939824 - RNA, 19 nt, Artificial Sequence
  Description of Artificial Sequence: Synthetic oligonucleotide
uuaaaauagaaagcagccu

SEQ ID NO: 2939825 - RNA, 19 nt, Artificial Sequence
  Description of Artificial Sequence: Synthetic oligonucleotide
uagauguucaggaaggcuu

SEQ ID NO: 2939826 - RNA, 19 nt, Artificial Sequence
  Description of Artificial Sequence: Synthetic oligonucleotide
agugggcugggagagaugc

SEQ ID NO: 2939827 - RNA, 19 nt, Artificial Sequence
  Description of Artificial Sequence: Synthetic oligonucleotide
uguucagaggaguccagag

SEQ ID NO: 2939828 - RNA, 19 nt, Artificial Sequence
  Description of Artificial Sequence: Synthetic oligonucleotide
ugcaggagcaggaaagagc

SEQ ID NO: 2939829 - RNA, 19 nt, Artificial Sequence
  Description of Artificial Sequence: Synthetic oligonucleotide
aagaagugcagugggcugg

SEQ ID NO: 2939830 - RNA, 19 nt, Artificial Sequence
  Description of Artificial Sequence: Synthetic oligonucleotide
uacagaauaaguggugcag

SEQ ID NO: 2939831 - RNA, 19 nt, Artificial Sequence
  Description of Artificial Sequence: Synthetic oligonucleotide
uguggcaaggggagcaagg

SEQ ID NO: 2939832 - RNA, 19 nt, Artificial Sequence
  Description of Artificial Sequence: Synthetic oligonucleotide
gaucaagaggcaagaaggg

SEQ ID NO: 2939833 - RNA, 19 nt, Artificial Sequence
  Description of Artificial Sequence: Synthetic oligonucleotide
aagugcagagagguuuucc

SEQ ID NO: 2939834 - RNA, 19 nt, Artificial Sequence
  Description of Artificial Sequence: Synthetic oligonucleotide
gaaugaguuagaugccaag

SEQ ID NO: 2939835 - RNA, 19 nt, Artificial Sequence
  Description of Artificial Sequence: Synthetic oligonucleotide
ugcagagagguuuuccgag

SEQ ID NO: 2939836 - RNA, 19 nt, Artificial Sequence
  Description of Artificial Sequence: Synthetic oligonucleotide
aaaauagaaagcagccuga

SEQ ID NO: 2939837 - RNA, 19 nt, Artificial Sequence
  Description of Artificial Sequence: Synthetic oligonucleotide
agaggagucagggaugugg

SEQ ID NO: 2939838 - RNA, 19 nt, Artificial Sequence
  Description of Artificial Sequence: Synthetic oligonucleotide
aggaaggaagaaaagaaug

SEQ ID NO: 2939839 - RNA, 19 nt, Artificial Sequence
  Description of Artificial Sequence: Synthetic oligonucleotide
uagcagggagaugagaagg

SEQ ID NO: 2939840 - RNA, 19 nt, Artificial Sequence
  Description of Artificial Sequence: Synthetic oligonucleotide
aaagcagccugaccuaagu

SEQ ID NO: 2939841 - RNA, 19 nt, Artificial Sequence
  Description of Artificial Sequence: Synthetic oligonucleotide
aagaaugaguuagaugcca

SEQ ID NO: 2939842 - RNA, 19 nt, Artificial Sequence
  Description of Artificial Sequence: Synthetic oligonucleotide
aaggugaagaugguagcag

SEQ ID NO: 2939843 - RNA, 19 nt, Artificial Sequence
  Description of Artificial Sequence: Synthetic oligonucleotide
uccagaagugcagagaggu

SEQ ID NO: 2939844 - RNA, 19 nt, Artificial Sequence
  Description of Artificial Sequence: Synthetic oligonucleotide
ugcagaguacaauuuagau

SEQ ID NO: 2939845 - RNA, 19 nt, Artificial Sequence
  Description of Artificial Sequence: Synthetic oligonucleotide
ggagaaaggaacccugugg

SEQ ID NO: 2939846 - RNA, 19 nt, Artificial Sequence
  Description of Artificial Sequence: Synthetic oligonucleotide
gaaaggaacccuguggcug

SEQ ID NO: 2939847 - RNA, 19 nt, Artificial Sequence
  Description of Artificial Sequence: Synthetic oligonucleotide
aguacaauuuagauguuca

SEQ ID NO: 2939848 - RNA, 19 nt, Artificial Sequence
  Description of Artificial Sequence: Synthetic oligonucleotide
agagagguuuuccgagugc

SEQ ID NO: 2939849 - RNA, 19 nt, Artificial Sequence
  Description of Artificial Sequence: Synthetic oligonucleotide
aggugaagaugguagcagg

SEQ ID NO: 2939850 - RNA, 19 nt, Artificial Sequence
  Description of Artificial Sequence: Synthetic oligonucleotide
aggaaggugaagaugguag

SEQ ID NO: 2939851 - RNA, 19 nt, Artificial Sequence
  Description of Artificial Sequence: Synthetic oligonucleotide
agguuuuccgagugcaggg

SEQ ID NO: 2939852 - RNA, 19 nt, Artificial Sequence
  Description of Artificial Sequence: Synthetic oligonucleotide
caggcaaaagugcagggag

SEQ ID NO: 2939853 - RNA, 19 nt, Artificial Sequence
  Description of Artificial Sequence: Synthetic oligonucleotide
uaauguucagaggagucca

SEQ ID NO: 2939854 - RNA, 19 nt, Artificial Sequence
  Description of Artificial Sequence: Synthetic oligonucleotide
acagaauaaguggugcagg

SEQ ID NO: 2939855 - RNA, 19 nt, Artificial Sequence
  Description of Artificial Sequence: Synthetic oligonucleotide
guacaauuuagauguucag

SEQ ID NO: 2939856 - RNA, 19 nt, Artificial Sequence
  Description of Artificial Sequence: Synthetic oligonucleotide
ugaccuaaguacugcagcu

SEQ ID NO: 2939857 - RNA, 19 nt, Artificial Sequence
  Description of Artificial Sequence: Synthetic oligonucleotide
aagugcagugggcugggag

SEQ ID NO: 2939858 - RNA, 19 nt, Artificial Sequence
  Description of Artificial Sequence: Synthetic oligonucleotide
aggaagaaaagaaugaguu

SEQ ID NO: 2939859 - RNA, 19 nt, Artificial Sequence
  Description of Artificial Sequence: Synthetic oligonucleotide
caagacaaugacaguuagg

SEQ ID NO: 2939860 - RNA, 19 nt, Artificial Sequence
  Description of Artificial Sequence: Synthetic oligonucleotide
guucagaggaguccagagg

SEQ ID NO: 2939861 - RNA, 19 nt, Artificial Sequence
  Description of Artificial Sequence: Synthetic oligonucleotide
gaugcagaggugcagagua

SEQ ID NO: 2939862 - RNA, 19 nt, Artificial Sequence
  Description of Artificial Sequence: Synthetic oligonucleotide
cugaccuaaguacugcagc

SEQ ID NO: 2939863 - RNA, 19 nt, Artificial Sequence
  Description of Artificial Sequence: Synthetic oligonucleotide
gagguuuuccgagugcagg

SEQ ID NO: 2939864 - RNA, 19 nt, Artificial Sequence
  Description of Artificial Sequence: Synthetic oligonucleotide
guuagaugccaagacaaug

SEQ ID NO: 2939865 - RNA, 19 nt, Artificial Sequence
  Description of Artificial Sequence: Synthetic oligonucleotide
guuaaggaaggaagaaaag

SEQ ID NO: 2939866 - RNA, 19 nt, Artificial Sequence
  Description of Artificial Sequence: Synthetic oligonucleotide
acaaugacaguuaggaggu

SEQ ID NO: 2939867 - RNA, 19 nt, Artificial Sequence
  Description of Artificial Sequence: Synthetic oligonucleotide
ucaggaaggcuuccagaag

SEQ ID NO: 2939868 - RNA, 19 nt, Artificial Sequence
  Description of Artificial Sequence: Synthetic oligonucleotide
gcagaguacaauuuagaug

SEQ ID NO: 2939869 - RNA, 19 nt, Artificial Sequence
  Description of Artificial Sequence: Synthetic oligonucleotide
uggcaguggagccuggcag

SEQ ID NO: 2939870 - RNA, 19 nt, Artificial Sequence
  Description of Artificial Sequence: Synthetic oligonucleotide
gggguuaauguucagagga

SEQ ID NO: 2939871 - RNA, 19 nt, Artificial Sequence
  Description of Artificial Sequence: Synthetic oligonucleotide
gaagaagugcagugggcug

SEQ ID NO: 2939872 - RNA, 19 nt, Artificial Sequence
  Description of Artificial Sequence: Synthetic oligonucleotide
uccgagugcaggguuaggg

SEQ ID NO: 2939873 - RNA, 19 nt, Artificial Sequence
  Description of Artificial Sequence: Synthetic oligonucleotide
agacaaugacaguuaggag

SEQ ID NO: 2939874 - RNA, 19 nt, Artificial Sequence
  Description of Artificial Sequence: Synthetic oligonucleotide
aggaaagagcuguaaacaa

SEQ ID NO: 2939875 - RNA, 19 nt, Artificial Sequence
  Description of Artificial Sequence: Synthetic oligonucleotide
agaggugcagaguacaauu

SEQ ID NO: 2939876 - RNA, 19 nt, Artificial Sequence
  Description of Artificial Sequence: Synthetic oligonucleotide
caagaagggagauccgcag

SEQ ID NO: 2939877 - RNA, 19 nt, Artificial Sequence
  Description of Artificial Sequence: Synthetic oligonucleotide
uuuagauguucaggaaggc

SEQ ID NO: 2939878 - RNA, 19 nt, Artificial Sequence
  Description of Artificial Sequence: Synthetic oligonucleotide
aagaaaagaaugaguuaga

SEQ ID NO: 2939879 - RNA, 19 nt, Artificial Sequence
  Description of Artificial Sequence: Synthetic oligonucleotide
uuagauguucaggaaggcu

SEQ ID NO: 2939880 - RNA, 19 nt, Artificial Sequence
  Description of Artificial Sequence: Synthetic oligonucleotide
gaguuagaugccaagacaa

SEQ ID NO: 2939881 - RNA, 19 nt, Artificial Sequence
  Description of Artificial Sequence: Synthetic oligonucleotide
uuccagaagugcagagagg

SEQ ID NO: 2939882 - RNA, 19 nt, Artificial Sequence
  Description of Artificial Sequence: Synthetic oligonucleotide
agcaagguguuaaggaagg

SEQ ID NO: 2939883 - RNA, 19 nt, Artificial Sequence
  Description of Artificial Sequence: Synthetic oligonucleotide
gagcaagguguuaaggaag

SEQ ID NO: 2939884 - RNA, 19 nt, Artificial Sequence
  Description of Artificial Sequence: Synthetic oligonucleotide
aaguggugcaggaagguga

SEQ ID NO: 2939885 - RNA, 19 nt, Artificial Sequence
  Description of Artificial Sequence: Synthetic oligonucleotide
gggaucaagaggcaagaag

SEQ ID NO: 2939886 - RNA, 19 nt, Artificial Sequence
  Description of Artificial Sequence: Synthetic oligonucleotide
agauccgcaggcaaaagug

SEQ ID NO: 2939887 - RNA, 19 nt, Artificial Sequence
  Description of Artificial Sequence: Synthetic oligonucleotide
agugcagugggcugggaga

SEQ ID NO: 2939888 - RNA, 19 nt, Artificial Sequence
  Description of Artificial Sequence: Synthetic oligonucleotide
guagcagggagaugagaag

SEQ ID NO: 2939889 - RNA, 19 nt, Artificial Sequence
  Description of Artificial Sequence: Synthetic oligonucleotide
aguggagccuggcaggaug

SEQ ID NO: 2939890 - RNA, 19 nt, Artificial Sequence
  Description of Artificial Sequence: Synthetic oligonucleotide
uccgcaggcaaaagugcag

SEQ ID NO: 2939891 - RNA, 19 nt, Artificial Sequence
  Description of Artificial Sequence: Synthetic oligonucleotide
gagaugcagaggugcagag

SEQ ID NO: 2939892 - RNA, 19 nt, Artificial Sequence
  Description of Artificial Sequence: Synthetic oligonucleotide
agcagggagaugagaaggc

SEQ ID NO: 2939893 - RNA, 19 nt, Artificial Sequence
  Description of Artificial Sequence: Synthetic oligonucleotide
guuaauguucagaggaguc

SEQ ID NO: 2939894 - RNA, 19 nt, Artificial Sequence
  Description of Artificial Sequence: Synthetic oligonucleotide
ugccaagacaaugacaguu

SEQ ID NO: 2939895 - RNA, 19 nt, Artificial Sequence
  Description of Artificial Sequence: Synthetic oligonucleotide
cagggagaugagaaggcag

SEQ ID NO: 2939896 - RNA, 19 nt, Artificial Sequence
  Description of Artificial Sequence: Synthetic oligonucleotide
agauguucaggaaggcuuc

SEQ ID NO: 2939897 - RNA, 19 nt, Artificial Sequence
  Description of Artificial Sequence: Synthetic oligonucleotide
agaaaggaacccuguggcu

SEQ ID NO: 2939898 - RNA, 19 nt, Artificial Sequence
  Description of Artificial Sequence: Synthetic oligonucleotide
gagucagggauguggcaag

SEQ ID NO: 2939899 - RNA, 19 nt, Artificial Sequence
  Description of Artificial Sequence: Synthetic oligonucleotide
uguggcuggcaguggagcc

SEQ ID NO: 2939900 - RNA, 19 nt, Artificial Sequence
  Description of Artificial Sequence: Synthetic oligonucleotide
aacccuguggcuggcagug

SEQ ID NO: 2939901 - RNA, 19 nt, Artificial Sequence
  Description of Artificial Sequence: Synthetic oligonucleotide
augacaguuaggagguggg

SEQ ID NO: 2939902 - RNA, 19 nt, Artificial Sequence
  Description of Artificial Sequence: Synthetic oligonucleotide
gcaggaaagagcuguaaac

SEQ ID NO: 2939903 - RNA, 19 nt, Artificial Sequence
  Description of Artificial Sequence: Synthetic oligonucleotide
ggaaagagcuguaaacaag

SEQ ID NO: 2939904 - RNA, 19 nt, Artificial Sequence
  Description of Artificial Sequence: Synthetic oligonucleotide
aagggagauccgcaggcaa

SEQ ID NO: 2939905 - RNA, 19 nt, Artificial Sequence
  Description of Artificial Sequence: Synthetic oligonucleotide
agcaggaaagagcuguaaa

SEQ ID NO: 2939906 - RNA, 19 nt, Artificial Sequence
  Description of Artificial Sequence: Synthetic oligonucleotide
ugacaguuaggaggugggg

SEQ ID NO: 2939907 - RNA, 19 nt, Artificial Sequence
  Description of Artificial Sequence: Synthetic oligonucleotide
aauguucagaggaguccag

SEQ ID NO: 2939908 - RNA, 19 nt, Artificial Sequence
  Description of Artificial Sequence: Synthetic oligonucleotide
uaaguggugcaggaaggug

SEQ ID NO: 2939909 - RNA, 19 nt, Artificial Sequence
  Description of Artificial Sequence: Synthetic oligonucleotide
gaaggcuuccagaagugca

SEQ ID NO: 2939910 - RNA, 19 nt, Artificial Sequence
  Description of Artificial Sequence: Synthetic oligonucleotide
gaaggugaagaugguagca

SEQ ID NO: 2939911 - RNA, 19 nt, Artificial Sequence
  Description of Artificial Sequence: Synthetic oligonucleotide
gauccgcaggcaaaagugc

SEQ ID NO: 2939912 - RNA, 19 nt, Artificial Sequence
  Description of Artificial Sequence: Synthetic oligonucleotide
ugcagggagaaaggaaccc

SEQ ID NO: 2939913 - RNA, 19 nt, Artificial Sequence
  Description of Artificial Sequence: Synthetic oligonucleotide
gaagaugguagcagggaga

SEQ ID NO: 2939914 - RNA, 19 nt, Artificial Sequence
  Description of Artificial Sequence: Synthetic oligonucleotide
uuuuccgagugcaggguua

SEQ ID NO: 2939915 - RNA, 19 nt, Artificial Sequence
  Description of Artificial Sequence: Synthetic oligonucleotide
agccugaccuaaguacugc

SEQ ID NO: 2939916 - RNA, 19 nt, Artificial Sequence
  Description of Artificial Sequence: Synthetic oligonucleotide
augagaaggcagaggaguc

SEQ ID NO: 2939917 - RNA, 19 nt, Artificial Sequence
  Description of Artificial Sequence: Synthetic oligonucleotide
ugagaaggcagaggaguca

SEQ ID NO: 2939918 - RNA, 19 nt, Artificial Sequence
  Description of Artificial Sequence: Synthetic oligonucleotide
ugcagaggugcagaguaca

SEQ ID NO: 2939919 - RNA, 19 nt, Artificial Sequence
  Description of Artificial Sequence: Synthetic oligonucleotide
caggaaagagcuguaaaca

SEQ ID NO: 2939920 - RNA, 19 nt, Artificial Sequence
  Description of Artificial Sequence: Synthetic oligonucleotide
cagggagaaaggaacccug

SEQ ID NO: 2939921 - RNA, 19 nt, Artificial Sequence
  Description of Artificial Sequence: Synthetic oligonucleotide
ggugcagaguacaauuuag

SEQ ID NO: 2939922 - RNA, 19 nt, Artificial Sequence
  Description of Artificial Sequence: Synthetic oligonucleotide
gaggagucagggauguggc

SEQ ID NO: 2939923 - RNA, 19 nt, Artificial Sequence
  Description of Artificial Sequence: Synthetic oligonucleotide
ggaaggugaagaugguagc

SEQ ID NO: 2939924 - RNA, 19 nt, Artificial Sequence
  Description of Artificial Sequence: Synthetic oligonucleotide
ggugaagaugguagcaggg

SEQ ID NO: 2939925 - RNA, 19 nt, Artificial Sequence
  Description of Artificial Sequence: Synthetic oligonucleotide
uggcaaggggagcaaggug

SEQ ID NO: 2939926 - RNA, 19 nt, Artificial Sequence
  Description of Artificial Sequence: Synthetic oligonucleotide
ggaugcaggagcaggaaag

SEQ ID NO: 2939927 - RNA, 19 nt, Artificial Sequence
  Description of Artificial Sequence: Synthetic oligonucleotide
uuuccgagugcaggguuag

SEQ ID NO: 2939928 - RNA, 19 nt, Artificial Sequence
  Description of Artificial Sequence: Synthetic oligonucleotide
aucaagaggcaagaaggga

SEQ ID NO: 2939929 - RNA, 19 nt, Artificial Sequence
  Description of Artificial Sequence: Synthetic oligonucleotide
cagaauaaguggugcagga

SEQ ID NO: 2939930 - RNA, 19 nt, Artificial Sequence
  Description of Artificial Sequence: Synthetic oligonucleotide
accuaaguacugcagcuuu

SEQ ID NO: 2939931 - RNA, 19 nt, Artificial Sequence
  Description of Artificial Sequence: Synthetic oligonucleotide
gagagguuuuccgagugca

SEQ ID NO: 2939932 - RNA, 19 nt, Artificial Sequence
  Description of Artificial Sequence: Synthetic oligonucleotide
agggauguggcaaggggag

SEQ ID NO: 2939933 - RNA, 19 nt, Artificial Sequence
  Description of Artificial Sequence: Synthetic oligonucleotide
ggcaggaagaagugcagug

SEQ ID NO: 2939934 - RNA, 19 nt, Artificial Sequence
  Description of Artificial Sequence: Synthetic oligonucleotide
agaggcaagaagggagauc

SEQ ID NO: 2939935 - RNA, 19 nt, Artificial Sequence
  Description of Artificial Sequence: Synthetic oligonucleotide
cagagagguuuuccgagug

SEQ ID NO: 2939936 - RNA, 19 nt, Artificial Sequence
  Description of Artificial Sequence: Synthetic oligonucleotide
uagaaagcagccugaccua

SEQ ID NO: 2939937 - RNA, 19 nt, Artificial Sequence
  Description of Artificial Sequence: Synthetic oligonucleotide
auaaguggugcaggaaggu

SEQ ID NO: 2939938 - RNA, 19 nt, Artificial Sequence
  Description of Artificial Sequence: Synthetic oligonucleotide
ugggagagaugcagaggug

SEQ ID NO: 2939939 - RNA, 19 nt, Artificial Sequence
  Description of Artificial Sequence: Synthetic oligonucleotide
ggaguccagaggcaggaag

SEQ ID NO: 2939940 - RNA, 19 nt, Artificial Sequence
  Description of Artificial Sequence: Synthetic oligonucleotide
agguguuaaggaaggaaga

SEQ ID NO: 2939941 - RNA, 19 nt, Artificial Sequence
  Description of Artificial Sequence: Synthetic oligonucleotide
gaaagcagccugaccuaag

SEQ ID NO: 2939942 - RNA, 19 nt, Artificial Sequence
  Description of Artificial Sequence: Synthetic oligonucleotide
gauguucaggaaggcuucc

SEQ ID NO: 2939943 - RNA, 19 nt, Artificial Sequence
  Description of Artificial Sequence: Synthetic oligonucleotide
aagugcagggagaaaggaa

SEQ ID NO: 2939944 - RNA, 19 nt, Artificial Sequence
  Description of Artificial Sequence: Synthetic oligonucleotide
gggagcaagguguuaagga

SEQ ID NO: 2939945 - RNA, 19 nt, Artificial Sequence
  Description of Artificial Sequence: Synthetic oligonucleotide
aggugcagaguacaauuua

SEQ ID NO: 2939946 - RNA, 19 nt, Artificial Sequence
  Description of Artificial Sequence: Synthetic oligonucleotide
gaggcaggaagaagugcag

SEQ ID NO: 2939947 - RNA, 19 nt, Artificial Sequence
  Description of Artificial Sequence: Synthetic oligonucleotide
aagcagccugaccuaagua

SEQ ID NO: 2939948 - RNA, 19 nt, Artificial Sequence
  Description of Artificial Sequence: Synthetic oligonucleotide
gaugcaggagcaggaaaga

SEQ ID NO: 2939949 - RNA, 19 nt, Artificial Sequence
  Description of Artificial Sequence: Synthetic oligonucleotide
gaguccagaggcaggaaga

SEQ ID NO: 2939950 - RNA, 19 nt, Artificial Sequence
  Description of Artificial Sequence: Synthetic oligonucleotide
aggggagcaagguguuaag

SEQ ID NO: 2939951 - RNA, 19 nt, Artificial Sequence
  Description of Artificial Sequence: Synthetic oligonucleotide
cagaggaguccagaggcag

SEQ ID NO: 2939952 - RNA, 19 nt, Artificial Sequence
  Description of Artificial Sequence: Synthetic oligonucleotide
agaugagaaggcagaggag

SEQ ID NO: 2939953 - RNA, 19 nt, Artificial Sequence
  Description of Artificial Sequence: Synthetic oligonucleotide
ggagcaagguguuaaggaa

SEQ ID NO: 2939954 - RNA, 19 nt, Artificial Sequence
  Description of Artificial Sequence: Synthetic oligonucleotide
agaagugcagugggcuggg

SEQ ID NO: 2939955 - RNA, 19 nt, Artificial Sequence
  Description of Artificial Sequence: Synthetic oligonucleotide
ggaagaaaagaaugaguua

SEQ ID NO: 2939956 - RNA, 19 nt, Artificial Sequence
  Description of Artificial Sequence: Synthetic oligonucleotide
gggagagaugcagaggugc

SEQ ID NO: 2939957 - RNA, 19 nt, Artificial Sequence
  Description of Artificial Sequence: Synthetic oligonucleotide
cugggagagaugcagaggu

SEQ ID NO: 2939958 - RNA, 19 nt, Artificial Sequence
  Description of Artificial Sequence: Synthetic oligonucleotide
agaauaaguggugcaggaa

SEQ ID NO: 2939959 - RNA, 19 nt, Artificial Sequence
  Description of Artificial Sequence: Synthetic oligonucleotide
guguuaaggaaggaagaaa

SEQ ID NO: 2939960 - RNA, 19 nt, Artificial Sequence
  Description of Artificial Sequence: Synthetic oligonucleotide
augcaggagcaggaaagag

SEQ ID NO: 2939961 - RNA, 19 nt, Artificial Sequence
  Description of Artificial Sequence: Synthetic oligonucleotide
aggaugcaggagcaggaaa

SEQ ID NO: 2939962 - RNA, 19 nt, Artificial Sequence
  Description of Artificial Sequence: Synthetic oligonucleotide
agaggaguccagaggcagg

SEQ ID NO: 2939963 - RNA, 19 nt, Artificial Sequence
  Description of Artificial Sequence: Synthetic oligonucleotide
ccaagacaaugacaguuag

SEQ ID NO: 2939964 - RNA, 19 nt, Artificial Sequence
  Description of Artificial Sequence: Synthetic oligonucleotide
caagguguuaaggaaggaa

SEQ ID NO: 2939965 - RNA, 19 nt, Artificial Sequence
  Description of Artificial Sequence: Synthetic oligonucleotide
gguagcagggagaugagaa

SEQ ID NO: 2939966 - RNA, 19 nt, Artificial Sequence
  Description of Artificial Sequence: Synthetic oligonucleotide
gagauccgcaggcaaaagu

SEQ ID NO: 2939967 - RNA, 19 nt, Artificial Sequence
  Description of Artificial Sequence: Synthetic oligonucleotide
ggcaagaagggagauccgc

SEQ ID NO: 2939968 - RNA, 19 nt, Artificial Sequence
  Description of Artificial Sequence: Synthetic oligonucleotide
agaaugaguuagaugccaa

SEQ ID NO: 2939969 - RNA, 19 nt, Artificial Sequence
  Description of Artificial Sequence: Synthetic oligonucleotide
agucagggauguggcaagg

SEQ ID NO: 2939970 - RNA, 19 nt, Artificial Sequence
  Description of Artificial Sequence: Synthetic oligonucleotide
gugcagagagguuuuccga

SEQ ID NO: 2939971 - RNA, 19 nt, Artificial Sequence
  Description of Artificial Sequence: Synthetic oligonucleotide
gugaagaugguagcaggga

SEQ ID NO: 2939972 - RNA, 19 nt, Artificial Sequence
  Description of Artificial Sequence: Synthetic oligonucleotide
gaggaguccagaggcagga

SEQ ID NO: 2939973 - RNA, 19 nt, Artificial Sequence
  Description of Artificial Sequence: Synthetic oligonucleotide
cagccugaccuaaguacug

SEQ ID NO: 2939974 - RNA, 19 nt, Artificial Sequence
  Description of Artificial Sequence: Synthetic oligonucleotide
gucagggauguggcaaggg

SEQ ID NO: 2939975 - RNA, 19 nt, Artificial Sequence
  Description of Artificial Sequence: Synthetic oligonucleotide
agagguuuuccgagugcag

SEQ ID NO: 2939976 - RNA, 19 nt, Artificial Sequence
  Description of Artificial Sequence: Synthetic oligonucleotide
ggguuaauguucagaggag

SEQ ID NO: 2939977 - RNA, 19 nt, Artificial Sequence
  Description of Artificial Sequence: Synthetic oligonucleotide
caggaaggcuuccagaagu

SEQ ID NO: 2939978 - RNA, 19 nt, Artificial Sequence
  Description of Artificial Sequence: Synthetic oligonucleotide
gugcagggagaaaggaacc

SEQ ID NO: 2939979 - RNA, 19 nt, Artificial Sequence
  Description of Artificial Sequence: Synthetic oligonucleotide
aguuagaugccaagacaau

SEQ ID NO: 2939980 - RNA, 19 nt, Artificial Sequence
  Description of Artificial Sequence: Synthetic oligonucleotide
auguucagaggaguccaga

SEQ ID NO: 2939981 - RNA, 19 nt, Artificial Sequence
  Description of Artificial Sequence: Synthetic oligonucleotide
gugcagaguacaauuuaga

SEQ ID NO: 2939982 - RNA, 19 nt, Artificial Sequence
  Description of Artificial Sequence: Synthetic oligonucleotide
ccugaccuaaguacugcag

SEQ ID NO: 2939983 - RNA, 19 nt, Artificial Sequence
  Description of Artificial Sequence: Synthetic oligonucleotide
agaaagcagccugaccuaa

SEQ ID NO: 2939984 - RNA, 19 nt, Artificial Sequence
  Description of Artificial Sequence: Synthetic oligonucleotide
augccaagacaaugacagu

SEQ ID NO: 2939985 - RNA, 19 nt, Artificial Sequence
  Description of Artificial Sequence: Synthetic oligonucleotide
augcagaggugcagaguac

SEQ ID NO: 2939986 - RNA, 19 nt, Artificial Sequence
  Description of Artificial Sequence: Synthetic oligonucleotide
gugcagugggcugggagag

SEQ ID NO: 2939987 - RNA, 19 nt, Artificial Sequence
  Description of Artificial Sequence: Synthetic oligonucleotide
ccgagugcaggguuagggg

SEQ ID NO: 2939988 - RNA, 19 nt, Artificial Sequence
  Description of Artificial Sequence: Synthetic oligonucleotide
ugguagcagggagaugaga

SEQ ID NO: 2939989 - RNA, 19 nt, Artificial Sequence
  Description of Artificial Sequence: Synthetic oligonucleotide
gguguuaaggaaggaagaa

SEQ ID NO: 2939990 - RNA, 19 nt, Artificial Sequence
  Description of Artificial Sequence: Synthetic oligonucleotide
cuggcaggaugcaggagca

SEQ ID NO: 2939991 - RNA, 19 nt, Artificial Sequence
  Description of Artificial Sequence: Synthetic oligonucleotide
aggaaggcuuccagaagug

SEQ ID NO: 2939992 - RNA, 19 nt, Artificial Sequence
  Description of Artificial Sequence: Synthetic oligonucleotide
agaugcagaggugcagagu

SEQ ID NO: 2939993 - RNA, 19 nt, Artificial Sequence
  Description of Artificial Sequence: Synthetic oligonucleotide
auccgcaggcaaaagugca

SEQ ID NO: 2939994 - RNA, 19 nt, Artificial Sequence
  Description of Artificial Sequence: Synthetic oligonucleotide
ggggagcaagguguuaagg

SEQ ID NO: 2939995 - RNA, 19 nt, Artificial Sequence
  Description of Artificial Sequence: Synthetic oligonucleotide
gaagggagauccgcaggca

SEQ ID NO: 2939996 - RNA, 19 nt, Artificial Sequence
  Description of Artificial Sequence: Synthetic oligonucleotide
agggagaaaggaacccugu

SEQ ID NO: 2939997 - RNA, 19 nt, Artificial Sequence
  Description of Artificial Sequence: Synthetic oligonucleotide
agaagugcagagagguuuu

SEQ ID NO: 2939998 - RNA, 19 nt, Artificial Sequence
  Description of Artificial Sequence: Synthetic oligonucleotide
aguccagaggcaggaagaa

SEQ ID NO: 2939999 - RNA, 19 nt, Artificial Sequence
  Description of Artificial Sequence: Synthetic oligonucleotide
guccagaggcaggaagaag

SEQ ID NO: 2940000 - RNA, 19 nt, Artificial Sequence
  Description of Artificial Sequence: Synthetic oligonucleotide
auguucaggaaggcuucca

SEQ ID NO: 2940001 - RNA, 19 nt, Artificial Sequence
  Description of Artificial Sequence: Synthetic oligonucleotide
gggagaugagaaggcagag

SEQ ID NO: 2940002 - RNA, 19 nt, Artificial Sequence
  Description of Artificial Sequence: Synthetic oligonucleotide
ggaaggcuuccagaagugc

SEQ ID NO: 2940003 - RNA, 19 nt, Artificial Sequence
  Description of Artificial Sequence: Synthetic oligonucleotide
aggcaggaagaagugcagu

SEQ ID NO: 2940004 - RNA, 19 nt, Artificial Sequence
  Description of Artificial Sequence: Synthetic oligonucleotide
aggcaaaagugcagggaga

SEQ ID NO: 2940005 - RNA, 19 nt, Artificial Sequence
  Description of Artificial Sequence: Synthetic oligonucleotide
aguggugcaggaaggugaa

SEQ ID NO: 2940006 - RNA, 19 nt, Artificial Sequence
  Description of Artificial Sequence: Synthetic oligonucleotide
gaagugcagagagguuuuc

SEQ ID NO: 2940007 - RNA, 19 nt, Artificial Sequence
  Description of Artificial Sequence: Synthetic oligonucleotide
guggagccuggcaggaugc

SEQ ID NO: 2940008 - RNA, 19 nt, Artificial Sequence
  Description of Artificial Sequence: Synthetic oligonucleotide
auguggcaaggggagcaag

SEQ ID NO: 2940009 - RNA, 19 nt, Artificial Sequence
  Description of Artificial Sequence: Synthetic oligonucleotide
gcugggagagaugcagagg

SEQ ID NO: 2940010 - RNA, 19 nt, Artificial Sequence
  Description of Artificial Sequence: Synthetic oligonucleotide
ccagaggcaggaagaagug

SEQ ID NO: 2940011 - RNA, 19 nt, Artificial Sequence
  Description of Artificial Sequence: Synthetic oligonucleotide
uuccgagugcaggguuagg

SEQ ID NO: 2940012 - RNA, 19 nt, Artificial Sequence
  Description of Artificial Sequence: Synthetic oligonucleotide
ggaagaagugcagugggcu

SEQ ID NO: 2940013 - RNA, 19 nt, Artificial Sequence
  Description of Artificial Sequence: Synthetic oligonucleotide
ggagucagggauguggcaa

SEQ ID NO: 2940014 - RNA, 19 nt, Artificial Sequence
  Description of Artificial Sequence: Synthetic oligonucleotide
augguagcagggagaugag

SEQ ID NO: 2940015 - RNA, 19 nt, Artificial Sequence
  Description of Artificial Sequence: Synthetic oligonucleotide
ggcaaggggagcaaggugu

SEQ ID NO: 2940016 - RNA, 19 nt, Artificial Sequence
  Description of Artificial Sequence: Synthetic oligonucleotide
gguuaauguucagaggagu

SEQ ID NO: 2940017 - RNA, 19 nt, Artificial Sequence
  Description of Artificial Sequence: Synthetic oligonucleotide
aggcaagaagggagauccg

SEQ ID NO: 2940018 - RNA, 19 nt, Artificial Sequence
  Description of Artificial Sequence: Synthetic oligonucleotide
gcaagaagggagauccgca

SEQ ID NO: 2940019 - RNA, 19 nt, Artificial Sequence
  Description of Artificial Sequence: Synthetic oligonucleotide
cagaagugcagagagguuu

SEQ ID NO: 2940020 - RNA, 19 nt, Artificial Sequence
  Description of Artificial Sequence: Synthetic oligonucleotide
gagcaggaaagagcuguaa

SEQ ID NO: 2940021 - RNA, 19 nt, Artificial Sequence
  Description of Artificial Sequence: Synthetic oligonucleotide
cuggcaguggagccuggca

SEQ ID NO: 2940022 - RNA, 19 nt, Artificial Sequence
  Description of Artificial Sequence: Synthetic oligonucleotide
gauguggcaaggggagcaa

SEQ ID NO: 2940023 - RNA, 19 nt, Artificial Sequence
  Description of Artificial Sequence: Synthetic oligonucleotide
uggcaggaugcaggagcag

SEQ ID NO: 2940024 - RNA, 19 nt, Artificial Sequence
  Description of Artificial Sequence: Synthetic oligonucleotide
agggagauccgcaggcaaa

SEQ ID NO: 2940025 - RNA, 19 nt, Artificial Sequence
  Description of Artificial Sequence: Synthetic oligonucleotide
agaugguagcagggagaug

SEQ ID NO: 2940026 - RNA, 19 nt, Artificial Sequence
  Description of Artificial Sequence: Synthetic oligonucleotide
ccgcaggcaaaagugcagg

SEQ ID NO: 2940027 - RNA, 19 nt, Artificial Sequence
  Description of Artificial Sequence: Synthetic oligonucleotide
ggagauccgcaggcaaaag

SEQ ID NO: 2940028 - RNA, 19 nt, Artificial Sequence
  Description of Artificial Sequence: Synthetic oligonucleotide
gcaggcaaaagugcaggga

SEQ ID NO: 2940029 - RNA, 19 nt, Artificial Sequence
  Description of Artificial Sequence: Synthetic oligonucleotide
caaugacaguuaggaggug

SEQ ID NO: 2940030 - RNA, 19 nt, Artificial Sequence
  Description of Artificial Sequence: Synthetic oligonucleotide
guuuuccgagugcaggguu

SEQ ID NO: 2940031 - RNA, 19 nt, Artificial Sequence
  Description of Artificial Sequence: Synthetic oligonucleotide
cgcaggcaaaagugcaggg

SEQ ID NO: 2940032 - RNA, 19 nt, Artificial Sequence
  Description of Artificial Sequence: Synthetic oligonucleotide
ugcagugggcugggagaga

SEQ ID NO: 2940033 - RNA, 19 nt, Artificial Sequence
  Description of Artificial Sequence: Synthetic oligonucleotide
gccugaccuaaguacugca

SEQ ID NO: 2940034 - RNA, 19 nt, Artificial Sequence
  Description of Artificial Sequence: Synthetic oligonucleotide
gaggugcagaguacaauuu

SEQ ID NO: 2940035 - RNA, 19 nt, Artificial Sequence
  Description of Artificial Sequence: Synthetic oligonucleotide
gcaggaugcaggagcagga

SEQ ID NO: 2940036 - RNA, 19 nt, Artificial Sequence
  Description of Artificial Sequence: Synthetic oligonucleotide
cagugggcugggagagaug

SEQ ID NO: 2940037 - RNA, 19 nt, Artificial Sequence
  Description of Artificial Sequence: Synthetic oligonucleotide
gccaagacaaugacaguua

SEQ ID NO: 2940038 - RNA, 19 nt, Artificial Sequence
  Description of Artificial Sequence: Synthetic oligonucleotide
caggaaggugaagauggua

SEQ ID NO: 2940039 - RNA, 19 nt, Artificial Sequence
  Description of Artificial Sequence: Synthetic oligonucleotide
gcagggagaugagaaggca

SEQ ID NO: 2940040 - RNA, 19 nt, Artificial Sequence
  Description of Artificial Sequence: Synthetic oligonucleotide
guggcaaggggagcaaggu

SEQ ID NO: 2940041 - RNA, 19 nt, Artificial Sequence
  Description of Artificial Sequence: Synthetic oligonucleotide
gaccuaaguacugcagcuu

SEQ ID NO: 2940042 - RNA, 19 nt, Artificial Sequence
  Description of Artificial Sequence: Synthetic oligonucleotide
gcagagagguuuuccgagu

SEQ ID NO: 2940043 - RNA, 19 nt, Artificial Sequence
  Description of Artificial Sequence: Synthetic oligonucleotide
gcagccugaccuaaguacu

SEQ ID NO: 2940044 - RNA, 19 nt, Artificial Sequence
  Description of Artificial Sequence: Synthetic oligonucleotide
gggagauccgcaggcaaaa

SEQ ID NO: 2940045 - RNA, 19 nt, Artificial Sequence
  Description of Artificial Sequence: Synthetic oligonucleotide
gggauguggcaaggggagc

SEQ ID NO: 2940046 - RNA, 19 nt, Artificial Sequence
  Description of Artificial Sequence: Synthetic oligonucleotide
caggaugcaggagcaggaa

SEQ ID NO: 2940047 - RNA, 19 nt, Artificial Sequence
  Description of Artificial Sequence: Synthetic oligonucleotide
gaagugcagugggcuggga

SEQ ID NO: 2940048 - RNA, 19 nt, Artificial Sequence
  Description of Artificial Sequence: Synthetic oligonucleotide
aggaguccagaggcaggaa

SEQ ID NO: 2940049 - RNA, 19 nt, Artificial Sequence
  Description of Artificial Sequence: Synthetic oligonucleotide
gcaagguguuaaggaagga

SEQ ID NO: 2940050 - RNA, 19 nt, Artificial Sequence
  Description of Artificial Sequence: Synthetic oligonucleotide
cagaggagucagggaugug

SEQ ID NO: 2940051 - RNA, 19 nt, Artificial Sequence
  Description of Artificial Sequence: Synthetic oligonucleotide
gguuuuccgagugcagggu

SEQ ID NO: 2940052 - RNA, 19 nt, Artificial Sequence
  Description of Artificial Sequence: Synthetic oligonucleotide
gcaaaagugcagggagaaa

SEQ ID NO: 2940053 - RNA, 19 nt, Artificial Sequence
  Description of Artificial Sequence: Synthetic oligonucleotide
cagaggugcagaguacaau

SEQ ID NO: 2940054 - RNA, 19 nt, Artificial Sequence
  Description of Artificial Sequence: Synthetic oligonucleotide
gcuggcaguggagccuggc

SEQ ID NO: 2940055 - RNA, 19 nt, Artificial Sequence
  Description of Artificial Sequence: Synthetic oligonucleotide
gcaguggagccuggcagga

SEQ ID NO: 2940056 - RNA, 19 nt, Artificial Sequence
  Description of Artificial Sequence: Synthetic oligonucleotide
ggagcaggaaagagcugua

SEQ ID NO: 2940057 - RNA, 19 nt, Artificial Sequence
  Description of Artificial Sequence: Synthetic oligonucleotide
ggggaucaagaggcaagaa

SEQ ID NO: 2940058 - RNA, 19 nt, Artificial Sequence
  Description of Artificial Sequence: Synthetic oligonucleotide
caaggggagcaagguguua

SEQ ID NO: 2940059 - RNA, 19 nt, Artificial Sequence
  Description of Artificial Sequence: Synthetic oligonucleotide
gcagugggcugggagagau

SEQ ID NO: 2940060 - RNA, 19 nt, Artificial Sequence
  Description of Artificial Sequence: Synthetic oligonucleotide
gccuggcaggaugcaggag

SEQ ID NO: 2940061 - RNA, 19 nt, Artificial Sequence
  Description of Artificial Sequence: Synthetic oligonucleotide
ccuaaguacugcagcuuuu

SEQ ID NO: 2940062 - RNA, 19 nt, Artificial Sequence
  Description of Artificial Sequence: Synthetic oligonucleotide
gcaggaaggugaagauggu

SEQ ID NO: 2940063 - RNA, 19 nt, Artificial Sequence
  Description of Artificial Sequence: Synthetic oligonucleotide
gcaaggggagcaagguguu

SEQ ID NO: 2940064 - RNA, 19 nt, Artificial Sequence
  Description of Artificial Sequence: Synthetic oligonucleotide
ccagaagugcagagagguu

SEQ ID NO: 2940065 - RNA, 19 nt, Artificial Sequence
  Description of Artificial Sequence: Synthetic oligonucleotide
caguggagccuggcaggau

SEQ ID NO: 2940066 - RNA, 19 nt, Artificial Sequence
  Description of Artificial Sequence: Synthetic oligonucleotide
aauaacauggugcaaacuc

SEQ ID NO: 2940067 - RNA, 19 nt, Artificial Sequence
  Description of Artificial Sequence: Synthetic oligonucleotide
cuucaucucaauaacaugg

SEQ ID NO: 2940068 - RNA, 19 nt, Artificial Sequence
  Description of Artificial Sequence: Synthetic oligonucleotide
auguguuucuuauacaguc

SEQ ID NO: 2940069 - RNA, 19 nt, Artificial Sequence
  Description of Artificial Sequence: Synthetic oligonucleotide
aauucgcucauucuucauc

SEQ ID NO: 2940070 - RNA, 19 nt, Artificial Sequence
  Description of Artificial Sequence: Synthetic oligonucleotide
ucucgaaugcacaugaugu

SEQ ID NO: 2940071 - RNA, 19 nt, Artificial Sequence
  Description of Artificial Sequence: Synthetic oligonucleotide
caucucaauaacauggugc

SEQ ID NO: 2940072 - RNA, 19 nt, Artificial Sequence
  Description of Artificial Sequence: Synthetic oligonucleotide
aaggauggacccuuccacc

SEQ ID NO: 2940073 - RNA, 19 nt, Artificial Sequence
  Description of Artificial Sequence: Synthetic oligonucleotide
uucaucugggccuggaugg

SEQ ID NO: 2940074 - RNA, 19 nt, Artificial Sequence
  Description of Artificial Sequence: Synthetic oligonucleotide
uguguuucuuauacagucg

SEQ ID NO: 2940075 - RNA, 19 nt, Artificial Sequence
  Description of Artificial Sequence: Synthetic oligonucleotide
ucauucuucaucucaauaa

SEQ ID NO: 2940076 - RNA, 19 nt, Artificial Sequence
  Description of Artificial Sequence: Synthetic oligonucleotide
uauacagucggcuaaggau

SEQ ID NO: 2940077 - RNA, 19 nt, Artificial Sequence
  Description of Artificial Sequence: Synthetic oligonucleotide
aagugucuuucucgaaugc

SEQ ID NO: 2940078 - RNA, 19 nt, Artificial Sequence
  Description of Artificial Sequence: Synthetic oligonucleotide
cugucuuccaccuuuuccg

SEQ ID NO: 2940079 - RNA, 19 nt, Artificial Sequence
  Description of Artificial Sequence: Synthetic oligonucleotide
aucucaauaacauggugca

SEQ ID NO: 2940080 - RNA, 19 nt, Artificial Sequence
  Description of Artificial Sequence: Synthetic oligonucleotide
ugcacaugaugucugcagg

SEQ ID NO: 2940081 - RNA, 19 nt, Artificial Sequence
  Description of Artificial Sequence: Synthetic oligonucleotide
ucugucuuccaccuuuucc

SEQ ID NO: 2940082 - RNA, 19 nt, Artificial Sequence
  Description of Artificial Sequence: Synthetic oligonucleotide
accagaagugucuuucucg

SEQ ID NO: 2940083 - RNA, 19 nt, Artificial Sequence
  Description of Artificial Sequence: Synthetic oligonucleotide
ugugauaaggcuggcauug

SEQ ID NO: 2940084 - RNA, 19 nt, Artificial Sequence
  Description of Artificial Sequence: Synthetic oligonucleotide
gauccuucccucuuugucc

SEQ ID NO: 2940085 - RNA, 19 nt, Artificial Sequence
  Description of Artificial Sequence: Synthetic oligonucleotide
aauucugucugucugucuu

SEQ ID NO: 2940086 - RNA, 19 nt, Artificial Sequence
  Description of Artificial Sequence: Synthetic oligonucleotide
ucugcaauggggcuuuggc

SEQ ID NO: 2940087 - RNA, 19 nt, Artificial Sequence
  Description of Artificial Sequence: Synthetic oligonucleotide
cuugcucccagaaugggcc

SEQ ID NO: 2940088 - RNA, 19 nt, Artificial Sequence
  Description of Artificial Sequence: Synthetic oligonucleotide
guguuucuuauacagucgg

SEQ ID NO: 2940089 - RNA, 19 nt, Artificial Sequence
  Description of Artificial Sequence: Synthetic oligonucleotide
uucucgaaugcacaugaug

SEQ ID NO: 2940090 - RNA, 19 nt, Artificial Sequence
  Description of Artificial Sequence: Synthetic oligonucleotide
aacucuccagcucuugcuc

SEQ ID NO: 2940091 - RNA, 19 nt, Artificial Sequence
  Description of Artificial Sequence: Synthetic oligonucleotide
agcucuugcucccagaaug

SEQ ID NO: 2940092 - RNA, 19 nt, Artificial Sequence
  Description of Artificial Sequence: Synthetic oligonucleotide
ggauguguuucuuauacag

SEQ ID NO: 2940093 - RNA, 19 nt, Artificial Sequence
  Description of Artificial Sequence: Synthetic oligonucleotide
uccagugucuccaauucug

SEQ ID NO: 2940094 - RNA, 19 nt, Artificial Sequence
  Description of Artificial Sequence: Synthetic oligonucleotide
ugcaauggggcuuuggccu

SEQ ID NO: 2940095 - RNA, 19 nt, Artificial Sequence
  Description of Artificial Sequence: Synthetic oligonucleotide
cuggauguguuucuuauac

SEQ ID NO: 2940096 - RNA, 19 nt, Artificial Sequence
  Description of Artificial Sequence: Synthetic oligonucleotide
gaagugucuuucucgaaug

SEQ ID NO: 2940097 - RNA, 19 nt, Artificial Sequence
  Description of Artificial Sequence: Synthetic oligonucleotide
aggaguucugcaauggggc

SEQ ID NO: 2940098 - RNA, 19 nt, Artificial Sequence
  Description of Artificial Sequence: Synthetic oligonucleotide
agugucuccaauucugucu

SEQ ID NO: 2940099 - RNA, 19 nt, Artificial Sequence
  Description of Artificial Sequence: Synthetic oligonucleotide
uuauacagucggcuaagga

SEQ ID NO: 2940100 - RNA, 19 nt, Artificial Sequence
  Description of Artificial Sequence: Synthetic oligonucleotide
cauucuucaucucaauaac

SEQ ID NO: 2940101 - RNA, 19 nt, Artificial Sequence
  Description of Artificial Sequence: Synthetic oligonucleotide
uugccaagccuccucaugc

SEQ ID NO: 2940102 - RNA, 19 nt, Artificial Sequence
  Description of Artificial Sequence: Synthetic oligonucleotide
ucaauaacauggugcaaac

SEQ ID NO: 2940103 - RNA, 19 nt, Artificial Sequence
  Description of Artificial Sequence: Synthetic oligonucleotide
uuccaccucguucaucugg

SEQ ID NO: 2940104 - RNA, 19 nt, Artificial Sequence
  Description of Artificial Sequence: Synthetic oligonucleotide
auggugcaaacucuccagc

SEQ ID NO: 2940105 - RNA, 19 nt, Artificial Sequence
  Description of Artificial Sequence: Synthetic oligonucleotide
ucaucucaauaacauggug

SEQ ID NO: 2940106 - RNA, 19 nt, Artificial Sequence
  Description of Artificial Sequence: Synthetic oligonucleotide
uucuuauacagucggcuaa

SEQ ID NO: 2940107 - RNA, 19 nt, Artificial Sequence
  Description of Artificial Sequence: Synthetic oligonucleotide
ucuuggacggagauaccag

SEQ ID NO: 2940108 - RNA, 19 nt, Artificial Sequence
  Description of Artificial Sequence: Synthetic oligonucleotide
auucgcucauucuucaucu

SEQ ID NO: 2940109 - RNA, 19 nt, Artificial Sequence
  Description of Artificial Sequence: Synthetic oligonucleotide
auaauccuggauguguuuc

SEQ ID NO: 2940110 - RNA, 19 nt, Artificial Sequence
  Description of Artificial Sequence: Synthetic oligonucleotide
uccaccucguucaucuggg

SEQ ID NO: 2940111 - RNA, 19 nt, Artificial Sequence
  Description of Artificial Sequence: Synthetic oligonucleotide
caggaguucugcaaugggg

SEQ ID NO: 2940112 - RNA, 19 nt, Artificial Sequence
  Description of Artificial Sequence: Synthetic oligonucleotide
uacagucggcuaaggaugg

SEQ ID NO: 2940113 - RNA, 19 nt, Artificial Sequence
  Description of Artificial Sequence: Synthetic oligonucleotide
uucaucucaauaacauggu

SEQ ID NO: 2940114 - RNA, 19 nt, Artificial Sequence
  Description of Artificial Sequence: Synthetic oligonucleotide
ucuccaacucgugaauucg

SEQ ID NO: 2940115 - RNA, 19 nt, Artificial Sequence
  Description of Artificial Sequence: Synthetic oligonucleotide
agcccauccugcuucgugc

SEQ ID NO: 2940116 - RNA, 19 nt, Artificial Sequence
  Description of Artificial Sequence: Synthetic oligonucleotide
gauaccagaagugucuuuc

SEQ ID NO: 2940117 - RNA, 19 nt, Artificial Sequence
  Description of Artificial Sequence: Synthetic oligonucleotide
uguuucuuauacagucggc

SEQ ID NO: 2940118 - RNA, 19 nt, Artificial Sequence
  Description of Artificial Sequence: Synthetic oligonucleotide
ugucuuucucgaaugcaca

SEQ ID NO: 2940119 - RNA, 19 nt, Artificial Sequence
  Description of Artificial Sequence: Synthetic oligonucleotide
ugaauucgcucauucuuca

SEQ ID NO: 2940120 - RNA, 19 nt, Artificial Sequence
  Description of Artificial Sequence: Synthetic oligonucleotide
agaagugucuuucucgaau

SEQ ID NO: 2940121 - RNA, 19 nt, Artificial Sequence
  Description of Artificial Sequence: Synthetic oligonucleotide
ucuugcucccagaaugggc

SEQ ID NO: 2940122 - RNA, 19 nt, Artificial Sequence
  Description of Artificial Sequence: Synthetic oligonucleotide
uuuuccgcgcgcuugcagc

SEQ ID NO: 2940123 - RNA, 19 nt, Artificial Sequence
  Description of Artificial Sequence: Synthetic oligonucleotide
ucuuauacagucggcuaag

SEQ ID NO: 2940124 - RNA, 19 nt, Artificial Sequence
  Description of Artificial Sequence: Synthetic oligonucleotide
cauggugcaaacucuccag

SEQ ID NO: 2940125 - RNA, 19 nt, Artificial Sequence
  Description of Artificial Sequence: Synthetic oligonucleotide
uggggcuuuggccucuugg

SEQ ID NO: 2940126 - RNA, 19 nt, Artificial Sequence
  Description of Artificial Sequence: Synthetic oligonucleotide
uggacggagauaccagaag

SEQ ID NO: 2940127 - RNA, 19 nt, Artificial Sequence
  Description of Artificial Sequence: Synthetic oligonucleotide
ucuuccaccuuuuccgcgc

SEQ ID NO: 2940128 - RNA, 19 nt, Artificial Sequence
  Description of Artificial Sequence: Synthetic oligonucleotide
uguccagugucuccaauuc

SEQ ID NO: 2940129 - RNA, 19 nt, Artificial Sequence
  Description of Artificial Sequence: Synthetic oligonucleotide
auacagucggcuaaggaug

SEQ ID NO: 2940130 - RNA, 19 nt, Artificial Sequence
  Description of Artificial Sequence: Synthetic oligonucleotide
uuucuuauacagucggcua

SEQ ID NO: 2940131 - RNA, 19 nt, Artificial Sequence
  Description of Artificial Sequence: Synthetic oligonucleotide
acaggaguucugcaauggg

SEQ ID NO: 2940132 - RNA, 19 nt, Artificial Sequence
  Description of Artificial Sequence: Synthetic oligonucleotide
uaacauggugcaaacucuc

SEQ ID NO: 2940133 - RNA, 19 nt, Artificial Sequence
  Description of Artificial Sequence: Synthetic oligonucleotide
ucuuuguccagugucucca

SEQ ID NO: 2940134 - RNA, 19 nt, Artificial Sequence
  Description of Artificial Sequence: Synthetic oligonucleotide
ucgcucauucuucaucuca

SEQ ID NO: 2940135 - RNA, 19 nt, Artificial Sequence
  Description of Artificial Sequence: Synthetic oligonucleotide
gacccuuccaccucguuca

SEQ ID NO: 2940136 - RNA, 19 nt, Artificial Sequence
  Description of Artificial Sequence: Synthetic oligonucleotide
cuuucucgaaugcacauga

SEQ ID NO: 2940137 - RNA, 19 nt, Artificial Sequence
  Description of Artificial Sequence: Synthetic oligonucleotide
auggccuccugugauaagg

SEQ ID NO: 2940138 - RNA, 19 nt, Artificial Sequence
  Description of Artificial Sequence: Synthetic oligonucleotide
accuuuuccgcgcgcuugc

SEQ ID NO: 2940139 - RNA, 19 nt, Artificial Sequence
  Description of Artificial Sequence: Synthetic oligonucleotide
ugcacaggaguucugcaau

SEQ ID NO: 2940140 - RNA, 19 nt, Artificial Sequence
  Description of Artificial Sequence: Synthetic oligonucleotide
gauaaggcuggcauugcac

SEQ ID NO: 2940141 - RNA, 19 nt, Artificial Sequence
  Description of Artificial Sequence: Synthetic oligonucleotide
auaacauggugcaaacucu

SEQ ID NO: 2940142 - RNA, 19 nt, Artificial Sequence
  Description of Artificial Sequence: Synthetic oligonucleotide
accucguucaucugggccu

SEQ ID NO: 2940143 - RNA, 19 nt, Artificial Sequence
  Description of Artificial Sequence: Synthetic oligonucleotide
auucugucugucugucuuc

SEQ ID NO: 2940144 - RNA, 19 nt, Artificial Sequence
  Description of Artificial Sequence: Synthetic oligonucleotide
uccaacucgugaauucgcu

SEQ ID NO: 2940145 - RNA, 19 nt, Artificial Sequence
  Description of Artificial Sequence: Synthetic oligonucleotide
uuuccgcgcgcuugcagcg

SEQ ID NO: 2940146 - RNA, 19 nt, Artificial Sequence
  Description of Artificial Sequence: Synthetic oligonucleotide
acauggugcaaacucucca

SEQ ID NO: 2940147 - RNA, 19 nt, Artificial Sequence
  Description of Artificial Sequence: Synthetic oligonucleotide
agucggcuaaggauggacc

SEQ ID NO: 2940148 - RNA, 19 nt, Artificial Sequence
  Description of Artificial Sequence: Synthetic oligonucleotide
cugcaauggggcuuuggcc

SEQ ID NO: 2940149 - RNA, 19 nt, Artificial Sequence
  Description of Artificial Sequence: Synthetic oligonucleotide
uaauccuggauguguuucu

SEQ ID NO: 2940150 - RNA, 19 nt, Artificial Sequence
  Description of Artificial Sequence: Synthetic oligonucleotide
ugcuucuccaacucgugaa

SEQ ID NO: 2940151 - RNA, 19 nt, Artificial Sequence
  Description of Artificial Sequence: Synthetic oligonucleotide
ucuuucucgaaugcacaug

SEQ ID NO: 2940152 - RNA, 19 nt, Artificial Sequence
  Description of Artificial Sequence: Synthetic oligonucleotide
ucuccaauucugucugucu

SEQ ID NO: 2940153 - RNA, 19 nt, Artificial Sequence
  Description of Artificial Sequence: Synthetic oligonucleotide
ugucuuccaccuuuuccgc

SEQ ID NO: 2940154 - RNA, 19 nt, Artificial Sequence
  Description of Artificial Sequence: Synthetic oligonucleotide
uucuccaacucgugaauuc

SEQ ID NO: 2940155 - RNA, 19 nt, Artificial Sequence
  Description of Artificial Sequence: Synthetic oligonucleotide
gucggcuaaggauggaccc

SEQ ID NO: 2940156 - RNA, 19 nt, Artificial Sequence
  Description of Artificial Sequence: Synthetic oligonucleotide
gacggagauaccagaagug

SEQ ID NO: 2940157 - RNA, 19 nt, Artificial Sequence
  Description of Artificial Sequence: Synthetic oligonucleotide
uggauguguuucuuauaca

SEQ ID NO: 2940158 - RNA, 19 nt, Artificial Sequence
  Description of Artificial Sequence: Synthetic oligonucleotide
ggcuuuggccucuuggacg

SEQ ID NO: 2940159 - RNA, 19 nt, Artificial Sequence
  Description of Artificial Sequence: Synthetic oligonucleotide
aaugcacaugaugucugca

SEQ ID NO: 2940160 - RNA, 19 nt, Artificial Sequence
  Description of Artificial Sequence: Synthetic oligonucleotide
uggugcaaacucuccagcu

SEQ ID NO: 2940161 - RNA, 19 nt, Artificial Sequence
  Description of Artificial Sequence: Synthetic oligonucleotide
uuggacggagauaccagaa

SEQ ID NO: 2940162 - RNA, 19 nt, Artificial Sequence
  Description of Artificial Sequence: Synthetic oligonucleotide
uccuggauguguuucuuau

SEQ ID NO: 2940163 - RNA, 19 nt, Artificial Sequence
  Description of Artificial Sequence: Synthetic oligonucleotide
caacucgugaauucgcuca

SEQ ID NO: 2940164 - RNA, 19 nt, Artificial Sequence
  Description of Artificial Sequence: Synthetic oligonucleotide
cucaauaacauggugcaaa

SEQ ID NO: 2940165 - RNA, 19 nt, Artificial Sequence
  Description of Artificial Sequence: Synthetic oligonucleotide
auugcacaggaguucugca

SEQ ID NO: 2940166 - RNA, 19 nt, Artificial Sequence
  Description of Artificial Sequence: Synthetic oligonucleotide
ugcuucgugcgucccgccg

SEQ ID NO: 2940167 - RNA, 19 nt, Artificial Sequence
  Description of Artificial Sequence: Synthetic oligonucleotide
ugugccugcagcccauccu

SEQ ID NO: 2940168 - RNA, 19 nt, Artificial Sequence
  Description of Artificial Sequence: Synthetic oligonucleotide
gcuuuggccucuuggacgg

SEQ ID NO: 2940169 - RNA, 19 nt, Artificial Sequence
  Description of Artificial Sequence: Synthetic oligonucleotide
cucgugaauucgcucauuc

SEQ ID NO: 2940170 - RNA, 19 nt, Artificial Sequence
  Description of Artificial Sequence: Synthetic oligonucleotide
aacucgugaauucgcucau

SEQ ID NO: 2940171 - RNA, 19 nt, Artificial Sequence
  Description of Artificial Sequence: Synthetic oligonucleotide
aggauggacccuuccaccu

SEQ ID NO: 2940172 - RNA, 19 nt, Artificial Sequence
  Description of Artificial Sequence: Synthetic oligonucleotide
cucgaaugcacaugauguc

SEQ ID NO: 2940173 - RNA, 19 nt, Artificial Sequence
  Description of Artificial Sequence: Synthetic oligonucleotide
ugggccagggcucccauaa

SEQ ID NO: 2940174 - RNA, 19 nt, Artificial Sequence
  Description of Artificial Sequence: Synthetic oligonucleotide
cuuauacagucggcuaagg

SEQ ID NO: 2940175 - RNA, 19 nt, Artificial Sequence
  Description of Artificial Sequence: Synthetic oligonucleotide
cucuuuguccagugucucc

SEQ ID NO: 2940176 - RNA, 19 nt, Artificial Sequence
  Description of Artificial Sequence: Synthetic oligonucleotide
ucgugaauucgcucauucu

SEQ ID NO: 2940177 - RNA, 19 nt, Artificial Sequence
  Description of Artificial Sequence: Synthetic oligonucleotide
uucugucugucugucuucc

SEQ ID NO: 2940178 - RNA, 19 nt, Artificial Sequence
  Description of Artificial Sequence: Synthetic oligonucleotide
uaccagaagugucuuucuc

SEQ ID NO: 2940179 - RNA, 19 nt, Artificial Sequence
  Description of Artificial Sequence: Synthetic oligonucleotide
auaccagaagugucuuucu

SEQ ID NO: 2940180 - RNA, 19 nt, Artificial Sequence
  Description of Artificial Sequence: Synthetic oligonucleotide
cuccaacucgugaauucgc

SEQ ID NO: 2940181 - RNA, 19 nt, Artificial Sequence
  Description of Artificial Sequence: Synthetic oligonucleotide
auucuucaucucaauaaca

SEQ ID NO: 2940182 - RNA, 19 nt, Artificial Sequence
  Description of Artificial Sequence: Synthetic oligonucleotide
ccuccugugauaaggcugg

SEQ ID NO: 2940183 - RNA, 19 nt, Artificial Sequence
  Description of Artificial Sequence: Synthetic oligonucleotide
uugcacaggaguucugcaa

SEQ ID NO: 2940184 - RNA, 19 nt, Artificial Sequence
  Description of Artificial Sequence: Synthetic oligonucleotide
acggagauaccagaagugu

SEQ ID NO: 2940185 - RNA, 19 nt, Artificial Sequence
  Description of Artificial Sequence: Synthetic oligonucleotide
gcacaugaugucugcaggg

SEQ ID NO: 2940186 - RNA, 19 nt, Artificial Sequence
  Description of Artificial Sequence: Synthetic oligonucleotide
uccugcuucgugcgucccg

SEQ ID NO: 2940187 - RNA, 19 nt, Artificial Sequence
  Description of Artificial Sequence: Synthetic oligonucleotide
cuaaggauggacccuucca

SEQ ID NO: 2940188 - RNA, 19 nt, Artificial Sequence
  Description of Artificial Sequence: Synthetic oligonucleotide
gugucuuucucgaaugcac

SEQ ID NO: 2940189 - RNA, 19 nt, Artificial Sequence
  Description of Artificial Sequence: Synthetic oligonucleotide
gucuuccaccuuuuccgcg

SEQ ID NO: 2940190 - RNA, 19 nt, Artificial Sequence
  Description of Artificial Sequence: Synthetic oligonucleotide
agugucuuucucgaaugca

SEQ ID NO: 2940191 - RNA, 19 nt, Artificial Sequence
  Description of Artificial Sequence: Synthetic oligonucleotide
uggccuccugugauaaggc

SEQ ID NO: 2940192 - RNA, 19 nt, Artificial Sequence
  Description of Artificial Sequence: Synthetic oligonucleotide
auccuucccucuuugucca

SEQ ID NO: 2940193 - RNA, 19 nt, Artificial Sequence
  Description of Artificial Sequence: Synthetic oligonucleotide
gugaauucgcucauucuuc

SEQ ID NO: 2940194 - RNA, 19 nt, Artificial Sequence
  Description of Artificial Sequence: Synthetic oligonucleotide
caccucguucaucugggcc

SEQ ID NO: 2940195 - RNA, 19 nt, Artificial Sequence
  Description of Artificial Sequence: Synthetic oligonucleotide
gcuugcagcggcugggucg

SEQ ID NO: 2940196 - RNA, 19 nt, Artificial Sequence
  Description of Artificial Sequence: Synthetic oligonucleotide
cuugccaagccuccucaug

SEQ ID NO: 2940197 - RNA, 19 nt, Artificial Sequence
  Description of Artificial Sequence: Synthetic oligonucleotide
guuucuuauacagucggcu

SEQ ID NO: 2940198 - RNA, 19 nt, Artificial Sequence
  Description of Artificial Sequence: Synthetic oligonucleotide
gaggaggagcugcuucucc

SEQ ID NO: 2940199 - RNA, 19 nt, Artificial Sequence
  Description of Artificial Sequence: Synthetic oligonucleotide
cuugcagcggcugggucgg

SEQ ID NO: 2940200 - RNA, 19 nt, Artificial Sequence
  Description of Artificial Sequence: Synthetic oligonucleotide
ugcagggcuugccaagccu

SEQ ID NO: 2940201 - RNA, 19 nt, Artificial Sequence
  Description of Artificial Sequence: Synthetic oligonucleotide
uuguccagugucuccaauu

SEQ ID NO: 2940202 - RNA, 19 nt, Artificial Sequence
  Description of Artificial Sequence: Synthetic oligonucleotide
uuuggccucuuggacggag

SEQ ID NO: 2940203 - RNA, 19 nt, Artificial Sequence
  Description of Artificial Sequence: Synthetic oligonucleotide
cuuggacggagauaccaga

SEQ ID NO: 2940204 - RNA, 19 nt, Artificial Sequence
  Description of Artificial Sequence: Synthetic oligonucleotide
uucugcaauggggcuuugg

SEQ ID NO: 2940205 - RNA, 19 nt, Artificial Sequence
  Description of Artificial Sequence: Synthetic oligonucleotide
gccucuuggacggagauac

SEQ ID NO: 2940206 - RNA, 19 nt, Artificial Sequence
  Description of Artificial Sequence: Synthetic oligonucleotide
gaugucugcagggcuugcc

SEQ ID NO: 2940207 - RNA, 19 nt, Artificial Sequence
  Description of Artificial Sequence: Synthetic oligonucleotide
ugccaagccuccucaugcc

SEQ ID NO: 2940208 - RNA, 19 nt, Artificial Sequence
  Description of Artificial Sequence: Synthetic oligonucleotide
cuuccaggauccuucccuc

SEQ ID NO: 2940209 - RNA, 19 nt, Artificial Sequence
  Description of Artificial Sequence: Synthetic oligonucleotide
ugcagcccauccugcuucg

SEQ ID NO: 2940210 - RNA, 19 nt, Artificial Sequence
  Description of Artificial Sequence: Synthetic oligonucleotide
cagggcucccauaauccug

SEQ ID NO: 2940211 - RNA, 19 nt, Artificial Sequence
  Description of Artificial Sequence: Synthetic oligonucleotide
cuucccucuuuguccagug

SEQ ID NO: 2940212 - RNA, 19 nt, Artificial Sequence
  Description of Artificial Sequence: Synthetic oligonucleotide
cauccugcuucgugcgucc

SEQ ID NO: 2940213 - RNA, 19 nt, Artificial Sequence
  Description of Artificial Sequence: Synthetic oligonucleotide
gucugcagggcuugccaag

SEQ ID NO: 2940214 - RNA, 19 nt, Artificial Sequence
  Description of Artificial Sequence: Synthetic oligonucleotide
uuucucgaaugcacaugau

SEQ ID NO: 2940215 - RNA, 19 nt, Artificial Sequence
  Description of Artificial Sequence: Synthetic oligonucleotide
ugucugcagggcuugccaa

SEQ ID NO: 2940216 - RNA, 19 nt, Artificial Sequence
  Description of Artificial Sequence: Synthetic oligonucleotide
cuuuuccgcgcgcuugcag

SEQ ID NO: 2940217 - RNA, 19 nt, Artificial Sequence
  Description of Artificial Sequence: Synthetic oligonucleotide
gucggcugugccugcagcc

SEQ ID NO: 2940218 - RNA, 19 nt, Artificial Sequence
  Description of Artificial Sequence: Synthetic oligonucleotide
ucgugcgucccgccgguug

SEQ ID NO: 2940219 - RNA, 19 nt, Artificial Sequence
  Description of Artificial Sequence: Synthetic oligonucleotide
cuuccaccuuuuccgcgcg

SEQ ID NO: 2940220 - RNA, 19 nt, Artificial Sequence
  Description of Artificial Sequence: Synthetic oligonucleotide
gauguguuucuuauacagu

SEQ ID NO: 2940221 - RNA, 19 nt, Artificial Sequence
  Description of Artificial Sequence: Synthetic oligonucleotide
ggauccuucccucuuuguc

SEQ ID NO: 2940222 - RNA, 19 nt, Artificial Sequence
  Description of Artificial Sequence: Synthetic oligonucleotide
uuggccucuuggacggaga

SEQ ID NO: 2940223 - RNA, 19 nt, Artificial Sequence
  Description of Artificial Sequence: Synthetic oligonucleotide
cucauucuucaucucaaua

SEQ ID NO: 2940224 - RNA, 19 nt, Artificial Sequence
  Description of Artificial Sequence: Synthetic oligonucleotide
cucuugcucccagaauggg

SEQ ID NO: 2940225 - RNA, 19 nt, Artificial Sequence
  Description of Artificial Sequence: Synthetic oligonucleotide
aauccuggauguguuucuu

SEQ ID NO: 2940226 - RNA, 19 nt, Artificial Sequence
  Description of Artificial Sequence: Synthetic oligonucleotide
gauggccuccugugauaag

SEQ ID NO: 2940227 - RNA, 19 nt, Artificial Sequence
  Description of Artificial Sequence: Synthetic oligonucleotide
augaugucugcagggcuug

SEQ ID NO: 2940228 - RNA, 19 nt, Artificial Sequence
  Description of Artificial Sequence: Synthetic oligonucleotide
ggugcaaacucuccagcuc

SEQ ID NO: 2940229 - RNA, 19 nt, Artificial Sequence
  Description of Artificial Sequence: Synthetic oligonucleotide
cucuuggacggagauacca

SEQ ID NO: 2940230 - RNA, 19 nt, Artificial Sequence
  Description of Artificial Sequence: Synthetic oligonucleotide
ucugucugucugucuucca

SEQ ID NO: 2940231 - RNA, 19 nt, Artificial Sequence
  Description of Artificial Sequence: Synthetic oligonucleotide
caggaggaggagcugcuuc

SEQ ID NO: 2940232 - RNA, 19 nt, Artificial Sequence
  Description of Artificial Sequence: Synthetic oligonucleotide
caagccuccucaugccuuc

SEQ ID NO: 2940233 - RNA, 19 nt, Artificial Sequence
  Description of Artificial Sequence: Synthetic oligonucleotide
cagggcuugccaagccucc

SEQ ID NO: 2940234 - RNA, 19 nt, Artificial Sequence
  Description of Artificial Sequence: Synthetic oligonucleotide
ucucaauaacauggugcaa

SEQ ID NO: 2940235 - RNA, 19 nt, Artificial Sequence
  Description of Artificial Sequence: Synthetic oligonucleotide
ucggcuaaggauggacccu

SEQ ID NO: 2940236 - RNA, 19 nt, Artificial Sequence
  Description of Artificial Sequence: Synthetic oligonucleotide
gugcaaacucuccagcucu

SEQ ID NO: 2940237 - RNA, 19 nt, Artificial Sequence
  Description of Artificial Sequence: Synthetic oligonucleotide
uuccaggauccuucccucu

SEQ ID NO: 2940238 - RNA, 19 nt, Artificial Sequence
  Description of Artificial Sequence: Synthetic oligonucleotide
uccugugauaaggcuggca

SEQ ID NO: 2940239 - RNA, 19 nt, Artificial Sequence
  Description of Artificial Sequence: Synthetic oligonucleotide
uccaccuuuuccgcgcgcu

SEQ ID NO: 2940240 - RNA, 19 nt, Artificial Sequence
  Description of Artificial Sequence: Synthetic oligonucleotide
ucggcugugccugcagccc

SEQ ID NO: 2940241 - RNA, 19 nt, Artificial Sequence
  Description of Artificial Sequence: Synthetic oligonucleotide
cagaaugggccagggcucc

SEQ ID NO: 2940242 - RNA, 19 nt, Artificial Sequence
  Description of Artificial Sequence: Synthetic oligonucleotide
gcuaaggauggacccuucc

SEQ ID NO: 2940243 - RNA, 19 nt, Artificial Sequence
  Description of Artificial Sequence: Synthetic oligonucleotide
ucccauaauccuggaugug

SEQ ID NO: 2940244 - RNA, 19 nt, Artificial Sequence
  Description of Artificial Sequence: Synthetic oligonucleotide
caggauccuucccucuuug

SEQ ID NO: 2940245 - RNA, 19 nt, Artificial Sequence
  Description of Artificial Sequence: Synthetic oligonucleotide
uggccucuuggacggagau

SEQ ID NO: 2940246 - RNA, 19 nt, Artificial Sequence
  Description of Artificial Sequence: Synthetic oligonucleotide
ugcaaacucuccagcucuu

SEQ ID NO: 2940247 - RNA, 19 nt, Artificial Sequence
  Description of Artificial Sequence: Synthetic oligonucleotide
agaaugggccagggcuccc

SEQ ID NO: 2940248 - RNA, 19 nt, Artificial Sequence
  Description of Artificial Sequence: Synthetic oligonucleotide
gcuggcauugcacaggagu

SEQ ID NO: 2940249 - RNA, 19 nt, Artificial Sequence
  Description of Artificial Sequence: Synthetic oligonucleotide
gcuucgugcgucccgccgg

SEQ ID NO: 2940250 - RNA, 19 nt, Artificial Sequence
  Description of Artificial Sequence: Synthetic oligonucleotide
uucgcucauucuucaucuc

SEQ ID NO: 2940251 - RNA, 19 nt, Artificial Sequence
  Description of Artificial Sequence: Synthetic oligonucleotide
agauaccagaagugucuuu

SEQ ID NO: 2940252 - RNA, 19 nt, Artificial Sequence
  Description of Artificial Sequence: Synthetic oligonucleotide
aggauccuucccucuuugu

SEQ ID NO: 2940253 - RNA, 19 nt, Artificial Sequence
  Description of Artificial Sequence: Synthetic oligonucleotide
uugcucccagaaugggcca

SEQ ID NO: 2940254 - RNA, 19 nt, Artificial Sequence
  Description of Artificial Sequence: Synthetic oligonucleotide
ugcucccagaaugggccag

SEQ ID NO: 2940255 - RNA, 19 nt, Artificial Sequence
  Description of Artificial Sequence: Synthetic oligonucleotide
gcucuugcucccagaaugg

SEQ ID NO: 2940256 - RNA, 19 nt, Artificial Sequence
  Description of Artificial Sequence: Synthetic oligonucleotide
cagucggcuaaggauggac

SEQ ID NO: 2940257 - RNA, 19 nt, Artificial Sequence
  Description of Artificial Sequence: Synthetic oligonucleotide
ugucuccaauucugucugu

SEQ ID NO: 2940258 - RNA, 19 nt, Artificial Sequence
  Description of Artificial Sequence: Synthetic oligonucleotide
gugauaaggcuggcauugc

SEQ ID NO: 2940259 - RNA, 19 nt, Artificial Sequence
  Description of Artificial Sequence: Synthetic oligonucleotide
ggagauaccagaagugucu

SEQ ID NO: 2940260 - RNA, 19 nt, Artificial Sequence
  Description of Artificial Sequence: Synthetic oligonucleotide
uggauggccuccugugaua

SEQ ID NO: 2940261 - RNA, 19 nt, Artificial Sequence
  Description of Artificial Sequence: Synthetic oligonucleotide
uccgcgcgcuugcagcggc

SEQ ID NO: 2940262 - RNA, 19 nt, Artificial Sequence
  Description of Artificial Sequence: Synthetic oligonucleotide
ggacggagauaccagaagu

SEQ ID NO: 2940263 - RNA, 19 nt, Artificial Sequence
  Description of Artificial Sequence: Synthetic oligonucleotide
ccagaagugucuuucucga

SEQ ID NO: 2940264 - RNA, 19 nt, Artificial Sequence
  Description of Artificial Sequence: Synthetic oligonucleotide
ggacccuuccaccucguuc

SEQ ID NO: 2940265 - RNA, 19 nt, Artificial Sequence
  Description of Artificial Sequence: Synthetic oligonucleotide
cagcccauccugcuucgug

SEQ ID NO: 2940266 - RNA, 19 nt, Artificial Sequence
  Description of Artificial Sequence: Synthetic oligonucleotide
cugugccugcagcccaucc

SEQ ID NO: 2940267 - RNA, 19 nt, Artificial Sequence
  Description of Artificial Sequence: Synthetic oligonucleotide
uuccaccuuuuccgcgcgc

SEQ ID NO: 2940268 - RNA, 19 nt, Artificial Sequence
  Description of Artificial Sequence: Synthetic oligonucleotide
ggggcuuuggccucuugga

SEQ ID NO: 2940269 - RNA, 19 nt, Artificial Sequence
  Description of Artificial Sequence: Synthetic oligonucleotide
caccuuuuccgcgcgcuug

SEQ ID NO: 2940270 - RNA, 19 nt, Artificial Sequence
  Description of Artificial Sequence: Synthetic oligonucleotide
auccuggauguguuucuua

SEQ ID NO: 2940271 - RNA, 19 nt, Artificial Sequence
  Description of Artificial Sequence: Synthetic oligonucleotide
cugcagggcuugccaagcc

SEQ ID NO: 2940272 - RNA, 19 nt, Artificial Sequence
  Description of Artificial Sequence: Synthetic oligonucleotide
gccagggcucccauaaucc

SEQ ID NO: 2940273 - RNA, 19 nt, Artificial Sequence
  Description of Artificial Sequence: Synthetic oligonucleotide
ccucaugccuuccuuccag

SEQ ID NO: 2940274 - RNA, 19 nt, Artificial Sequence
  Description of Artificial Sequence: Synthetic oligonucleotide
gcacaggaguucugcaaug

SEQ ID NO: 2940275 - RNA, 19 nt, Artificial Sequence
  Description of Artificial Sequence: Synthetic oligonucleotide
ugaugucugcagggcuugc

SEQ ID NO: 2940276 - RNA, 19 nt, Artificial Sequence
  Description of Artificial Sequence: Synthetic oligonucleotide
uccuucccucuuuguccag

SEQ ID NO: 2940277 - RNA, 19 nt, Artificial Sequence
  Description of Artificial Sequence: Synthetic oligonucleotide
cugcuucuccaacucguga

SEQ ID NO: 2940278 - RNA, 19 nt, Artificial Sequence
  Description of Artificial Sequence: Synthetic oligonucleotide
ucguucaucugggccugga

SEQ ID NO: 2940279 - RNA, 19 nt, Artificial Sequence
  Description of Artificial Sequence: Synthetic oligonucleotide
gcccauccugcuucgugcg

SEQ ID NO: 2940280 - RNA, 19 nt, Artificial Sequence
  Description of Artificial Sequence: Synthetic oligonucleotide
gucuuucucgaaugcacau

SEQ ID NO: 2940281 - RNA, 19 nt, Artificial Sequence
  Description of Artificial Sequence: Synthetic oligonucleotide
gggcuuuggccucuuggac

SEQ ID NO: 2940282 - RNA, 19 nt, Artificial Sequence
  Description of Artificial Sequence: Synthetic oligonucleotide
ccaacucgugaauucgcuc

SEQ ID NO: 2940283 - RNA, 19 nt, Artificial Sequence
  Description of Artificial Sequence: Synthetic oligonucleotide
caugaugucugcagggcuu

SEQ ID NO: 2940284 - RNA, 19 nt, Artificial Sequence
  Description of Artificial Sequence: Synthetic oligonucleotide
uuccgcgcgcuugcagcgg

SEQ ID NO: 2940285 - RNA, 19 nt, Artificial Sequence
  Description of Artificial Sequence: Synthetic oligonucleotide
gaauucgcucauucuucau

SEQ ID NO: 2940286 - RNA, 19 nt, Artificial Sequence
  Description of Artificial Sequence: Synthetic oligonucleotide
cuggcauugcacaggaguu

SEQ ID NO: 2940287 - RNA, 19 nt, Artificial Sequence
  Description of Artificial Sequence: Synthetic oligonucleotide
gcugggucggcugugccug

SEQ ID NO: 2940288 - RNA, 19 nt, Artificial Sequence
  Description of Artificial Sequence: Synthetic oligonucleotide
gaaugggccagggcuccca

SEQ ID NO: 2940289 - RNA, 19 nt, Artificial Sequence
  Description of Artificial Sequence: Synthetic oligonucleotide
agccuccucaugccuuccu

SEQ ID NO: 2940290 - RNA, 19 nt, Artificial Sequence
  Description of Artificial Sequence: Synthetic oligonucleotide
cugucugucuuccaccuuu

SEQ ID NO: 2940291 - RNA, 19 nt, Artificial Sequence
  Description of Artificial Sequence: Synthetic oligonucleotide
cagaagugucuuucucgaa

SEQ ID NO: 2940292 - RNA, 19 nt, Artificial Sequence
  Description of Artificial Sequence: Synthetic oligonucleotide
ggucggcugugccugcagc

SEQ ID NO: 2940293 - RNA, 19 nt, Artificial Sequence
  Description of Artificial Sequence: Synthetic oligonucleotide
cggagauaccagaaguguc

SEQ ID NO: 2940294 - RNA, 19 nt, Artificial Sequence
  Description of Artificial Sequence: Synthetic oligonucleotide
ggcuugccaagccuccuca

SEQ ID NO: 2940295 - RNA, 19 nt, Artificial Sequence
  Description of Artificial Sequence: Synthetic oligonucleotide
ggauggacccuuccaccuc

SEQ ID NO: 2940296 - RNA, 19 nt, Artificial Sequence
  Description of Artificial Sequence: Synthetic oligonucleotide
ccaauucugucugucuguc

SEQ ID NO: 2940297 - RNA, 19 nt, Artificial Sequence
  Description of Artificial Sequence: Synthetic oligonucleotide
cugcuucgugcgucccgcc

SEQ ID NO: 2940298 - RNA, 19 nt, Artificial Sequence
  Description of Artificial Sequence: Synthetic oligonucleotide
guccagugucuccaauucu

SEQ ID NO: 2940299 - RNA, 19 nt, Artificial Sequence
  Description of Artificial Sequence: Synthetic oligonucleotide
ccuccucaugccuuccuuc

SEQ ID NO: 2940300 - RNA, 19 nt, Artificial Sequence
  Description of Artificial Sequence: Synthetic oligonucleotide
ugcagcggcugggucggcu

SEQ ID NO: 2940301 - RNA, 19 nt, Artificial Sequence
  Description of Artificial Sequence: Synthetic oligonucleotide
gcaaacucuccagcucuug

SEQ ID NO: 2940302 - RNA, 19 nt, Artificial Sequence
  Description of Artificial Sequence: Synthetic oligonucleotide
gcugcuucuccaacucgug

SEQ ID NO: 2940303 - RNA, 19 nt, Artificial Sequence
  Description of Artificial Sequence: Synthetic oligonucleotide
ccugugauaaggcuggcau

SEQ ID NO: 2940304 - RNA, 19 nt, Artificial Sequence
  Description of Artificial Sequence: Synthetic oligonucleotide
cauaauccuggauguguuu

SEQ ID NO: 2940305 - RNA, 19 nt, Artificial Sequence
  Description of Artificial Sequence: Synthetic oligonucleotide
ccugcuucgugcgucccgc

SEQ ID NO: 2940306 - RNA, 19 nt, Artificial Sequence
  Description of Artificial Sequence: Synthetic oligonucleotide
ggaggagcugcuucuccaa

SEQ ID NO: 2940307 - RNA, 19 nt, Artificial Sequence
  Description of Artificial Sequence: Synthetic oligonucleotide
caauaacauggugcaaacu

SEQ ID NO: 2940308 - RNA, 19 nt, Artificial Sequence
  Description of Artificial Sequence: Synthetic oligonucleotide
gagauaccagaagugucuu

SEQ ID NO: 2940309 - RNA, 19 nt, Artificial Sequence
  Description of Artificial Sequence: Synthetic oligonucleotide
gcaauggggcuuuggccuc

SEQ ID NO: 2940310 - RNA, 19 nt, Artificial Sequence
  Description of Artificial Sequence: Synthetic oligonucleotide
ggaguucugcaauggggcu

SEQ ID NO: 2940311 - RNA, 19 nt, Artificial Sequence
  Description of Artificial Sequence: Synthetic oligonucleotide
uggacccuuccaccucguu

SEQ ID NO: 2940312 - RNA, 19 nt, Artificial Sequence
  Description of Artificial Sequence: Synthetic oligonucleotide
caauucugucugucugucu

SEQ ID NO: 2940313 - RNA, 19 nt, Artificial Sequence
  Description of Artificial Sequence: Synthetic oligonucleotide
ugcgucccgccgguuguga

SEQ ID NO: 2940314 - RNA, 19 nt, Artificial Sequence
  Description of Artificial Sequence: Synthetic oligonucleotide
cuggauggccuccugugau

SEQ ID NO: 2940315 - RNA, 19 nt, Artificial Sequence
  Description of Artificial Sequence: Synthetic oligonucleotide
cugggccuggauggccucc

SEQ ID NO: 2940316 - RNA, 19 nt, Artificial Sequence
  Description of Artificial Sequence: Synthetic oligonucleotide
agggcuugccaagccuccu

SEQ ID NO: 2940317 - RNA, 19 nt, Artificial Sequence
  Description of Artificial Sequence: Synthetic oligonucleotide
auggggcuuuggccucuug

SEQ ID NO: 2940318 - RNA, 19 nt, Artificial Sequence
  Description of Artificial Sequence: Synthetic oligonucleotide
cugggucggcugugccugc

SEQ ID NO: 2940319 - RNA, 19 nt, Artificial Sequence
  Description of Artificial Sequence: Synthetic oligonucleotide
acagucggcuaaggaugga

SEQ ID NO: 2940320 - RNA, 19 nt, Artificial Sequence
  Description of Artificial Sequence: Synthetic oligonucleotide
gaguucugcaauggggcuu

SEQ ID NO: 2940321 - RNA, 19 nt, Artificial Sequence
  Description of Artificial Sequence: Synthetic oligonucleotide
cuccugugauaaggcuggc

SEQ ID NO: 2940322 - RNA, 19 nt, Artificial Sequence
  Description of Artificial Sequence: Synthetic oligonucleotide
aauggggcuuuggccucuu

SEQ ID NO: 2940323 - RNA, 19 nt, Artificial Sequence
  Description of Artificial Sequence: Synthetic oligonucleotide
cucguucaucugggccugg

SEQ ID NO: 2940324 - RNA, 19 nt, Artificial Sequence
  Description of Artificial Sequence: Synthetic oligonucleotide
ugggucggcugugccugca

SEQ ID NO: 2940325 - RNA, 19 nt, Artificial Sequence
  Description of Artificial Sequence: Synthetic oligonucleotide
ggauggccuccugugauaa

SEQ ID NO: 2940326 - RNA, 19 nt, Artificial Sequence
  Description of Artificial Sequence: Synthetic oligonucleotide
gcagggcuugccaagccuc

SEQ ID NO: 2940327 - RNA, 19 nt, Artificial Sequence
  Description of Artificial Sequence: Synthetic oligonucleotide
cugugauaaggcuggcauu

SEQ ID NO: 2940328 - RNA, 19 nt, Artificial Sequence
  Description of Artificial Sequence: Synthetic oligonucleotide
acucgugaauucgcucauu

SEQ ID NO: 2940329 - RNA, 19 nt, Artificial Sequence
  Description of Artificial Sequence: Synthetic oligonucleotide
ccucuuuguccagugucuc

SEQ ID NO: 2940330 - RNA, 19 nt, Artificial Sequence
  Description of Artificial Sequence: Synthetic oligonucleotide
ccucuuggacggagauacc

SEQ ID NO: 2940331 - RNA, 19 nt, Artificial Sequence
  Description of Artificial Sequence: Synthetic oligonucleotide
gggucggcugugccugcag

SEQ ID NO: 2940332 - RNA, 19 nt, Artificial Sequence
  Description of Artificial Sequence: Synthetic oligonucleotide
ccagcucuugcucccagaa

SEQ ID NO: 2940333 - RNA, 19 nt, Artificial Sequence
  Description of Artificial Sequence: Synthetic oligonucleotide
ccauccugcuucgugcguc

SEQ ID NO: 2940334 - RNA, 19 nt, Artificial Sequence
  Description of Artificial Sequence: Synthetic oligonucleotide
gggcuugccaagccuccuc

SEQ ID NO: 2940335 - RNA, 19 nt, Artificial Sequence
  Description of Artificial Sequence: Synthetic oligonucleotide
agcggcugggucggcugug

SEQ ID NO: 2940336 - RNA, 19 nt, Artificial Sequence
  Description of Artificial Sequence: Synthetic oligonucleotide
cgugaauucgcucauucuu

SEQ ID NO: 2940337 - RNA, 19 nt, Artificial Sequence
  Description of Artificial Sequence: Synthetic oligonucleotide
gcgcgcuugcagcggcugg

SEQ ID NO: 2940338 - RNA, 19 nt, Artificial Sequence
  Description of Artificial Sequence: Synthetic oligonucleotide
augggccagggcucccaua

SEQ ID NO: 2940339 - RNA, 19 nt, Artificial Sequence
  Description of Artificial Sequence: Synthetic oligonucleotide
ggaggaggagcugcuucuc

SEQ ID NO: 2940340 - RNA, 19 nt, Artificial Sequence
  Description of Artificial Sequence: Synthetic oligonucleotide
ccaccucguucaucugggc

SEQ ID NO: 2940341 - RNA, 19 nt, Artificial Sequence
  Description of Artificial Sequence: Synthetic oligonucleotide
cccauaauccuggaugugu

SEQ ID NO: 2940342 - RNA, 19 nt, Artificial Sequence
  Description of Artificial Sequence: Synthetic oligonucleotide
cgcucauucuucaucucaa

SEQ ID NO: 2940343 - RNA, 19 nt, Artificial Sequence
  Description of Artificial Sequence: Synthetic oligonucleotide
cuucuccaacucgugaauu

SEQ ID NO: 2940344 - RNA, 19 nt, Artificial Sequence
  Description of Artificial Sequence: Synthetic oligonucleotide
gcauugcacaggaguucug

SEQ ID NO: 2940345 - RNA, 19 nt, Artificial Sequence
  Description of Artificial Sequence: Synthetic oligonucleotide
ccucguucaucugggccug

SEQ ID NO: 2940346 - RNA, 19 nt, Artificial Sequence
  Description of Artificial Sequence: Synthetic oligonucleotide
guucugcaauggggcuuug

SEQ ID NO: 2940347 - RNA, 19 nt, Artificial Sequence
  Description of Artificial Sequence: Synthetic oligonucleotide
gcucauucuucaucucaau

SEQ ID NO: 2940348 - RNA, 19 nt, Artificial Sequence
  Description of Artificial Sequence: Synthetic oligonucleotide
auggacccuuccaccucgu

SEQ ID NO: 2940349 - RNA, 19 nt, Artificial Sequence
  Description of Artificial Sequence: Synthetic oligonucleotide
ccauaauccuggauguguu

SEQ ID NO: 2940350 - RNA, 19 nt, Artificial Sequence
  Description of Artificial Sequence: Synthetic oligonucleotide
ggccuccugugauaaggcu

SEQ ID NO: 2940351 - RNA, 19 nt, Artificial Sequence
  Description of Artificial Sequence: Synthetic oligonucleotide
cuucgugcgucccgccggu

SEQ ID NO: 2940352 - RNA, 19 nt, Artificial Sequence
  Description of Artificial Sequence: Synthetic oligonucleotide
gugcgucccgccgguugug

SEQ ID NO: 2940353 - RNA, 19 nt, Artificial Sequence
  Description of Artificial Sequence: Synthetic oligonucleotide
cgcgcuugcagcggcuggg

SEQ ID NO: 2940354 - RNA, 19 nt, Artificial Sequence
  Description of Artificial Sequence: Synthetic oligonucleotide
ggcuaaggauggacccuuc

SEQ ID NO: 2940355 - RNA, 19 nt, Artificial Sequence
  Description of Artificial Sequence: Synthetic oligonucleotide
ggcuggcauugcacaggag

SEQ ID NO: 2940356 - RNA, 19 nt, Artificial Sequence
  Description of Artificial Sequence: Synthetic oligonucleotide
cagcucuugcucccagaau

SEQ ID NO: 2940357 - RNA, 19 nt, Artificial Sequence
  Description of Artificial Sequence: Synthetic oligonucleotide
gcgucccgccgguugugac

SEQ ID NO: 2940358 - RNA, 19 nt, Artificial Sequence
  Description of Artificial Sequence: Synthetic oligonucleotide
ccagggcucccauaauccu

SEQ ID NO: 2940359 - RNA, 19 nt, Artificial Sequence
  Description of Artificial Sequence: Synthetic oligonucleotide
cuuuggccucuuggacgga

SEQ ID NO: 2940360 - RNA, 19 nt, Artificial Sequence
  Description of Artificial Sequence: Synthetic oligonucleotide
uugcagcggcugggucggc

SEQ ID NO: 2940361 - RNA, 19 nt, Artificial Sequence
  Description of Artificial Sequence: Synthetic oligonucleotide
uucgugcgucccgccgguu

SEQ ID NO: 2940362 - RNA, 19 nt, Artificial Sequence
  Description of Artificial Sequence: Synthetic oligonucleotide
caauggggcuuuggccucu

SEQ ID NO: 2940363 - RNA, 19 nt, Artificial Sequence
  Description of Artificial Sequence: Synthetic oligonucleotide
ggccucuuggacggagaua

SEQ ID NO: 2940364 - RNA, 19 nt, Artificial Sequence
  Description of Artificial Sequence: Synthetic oligonucleotide
ccaagccuccucaugccuu

SEQ ID NO: 2940365 - RNA, 19 nt, Artificial Sequence
  Description of Artificial Sequence: Synthetic oligonucleotide
gcuugccaagccuccucau

SEQ ID NO: 2940366 - RNA, 19 nt, Artificial Sequence
  Description of Artificial Sequence: Synthetic oligonucleotide
cagcggcugggucggcugu

SEQ ID NO: 2940367 - RNA, 19 nt, Artificial Sequence
  Description of Artificial Sequence: Synthetic oligonucleotide
cccuuccaccucguucauc

SEQ ID NO: 2940368 - RNA, 19 nt, Artificial Sequence
  Description of Artificial Sequence: Synthetic oligonucleotide
gcugugccugcagcccauc

SEQ ID NO: 2940369 - RNA, 19 nt, Artificial Sequence
  Description of Artificial Sequence: Synthetic oligonucleotide
ccuuuuccgcgcgcuugca

SEQ ID NO: 2940370 - RNA, 19 nt, Artificial Sequence
  Description of Artificial Sequence: Synthetic oligonucleotide
cgcuugcagcggcuggguc

SEQ ID NO: 2940371 - RNA, 19 nt, Artificial Sequence
  Description of Artificial Sequence: Synthetic oligonucleotide
ccaggauccuucccucuuu

SEQ ID NO: 2940372 - RNA, 19 nt, Artificial Sequence
  Description of Artificial Sequence: Synthetic oligonucleotide
ccuucccucuuuguccagu

SEQ ID NO: 2940373 - RNA, 19 nt, Artificial Sequence
  Description of Artificial Sequence: Synthetic oligonucleotide
ccugcagcccauccugcuu

SEQ ID NO: 2940374 - RNA, 19 nt, Artificial Sequence
  Description of Artificial Sequence: Synthetic oligonucleotide
cgugcgucccgccgguugu

SEQ ID NO: 2940375 - RNA, 19 nt, Artificial Sequence
  Description of Artificial Sequence: Synthetic oligonucleotide
cguucaucugggccuggau

SEQ ID NO: 2940376 - RNA, 19 nt, Artificial Sequence
  Description of Artificial Sequence: Synthetic oligonucleotide
ggcugugccugcagcccau

SEQ ID NO: 2940377 - RNA, 19 nt, Artificial Sequence
  Description of Artificial Sequence: Synthetic oligonucleotide
cccauccugcuucgugcgu

SEQ ID NO: 2940378 - RNA, 19 nt, Artificial Sequence
  Description of Artificial Sequence: Synthetic oligonucleotide
gcgcuugcagcggcugggu

SEQ ID NO: 2940379 - RNA, 19 nt, Artificial Sequence
  Description of Artificial Sequence: Synthetic oligonucleotide
ccaccuuuuccgcgcgcuu

SEQ ID NO: 2940380 - RNA, 19 nt, Artificial Sequence
  Description of Artificial Sequence: Synthetic oligonucleotide
gcagcccauccugcuucgu

SEQ ID NO: 2940381 - RNA, 19 nt, Artificial Sequence
  Description of Artificial Sequence: Synthetic oligonucleotide
cggcuaaggauggacccuu

SEQ ID NO: 2940382 - RNA, 19 nt, Artificial Sequence
  Description of Artificial Sequence: Synthetic oligonucleotide
ccaggaggaggagcugcuu

SEQ ID NO: 2940383 - RNA, 19 nt, Artificial Sequence
  Description of Artificial Sequence: Synthetic oligonucleotide
uauagcauauccuugagca

SEQ ID NO: 2940384 - RNA, 19 nt, Artificial Sequence
  Description of Artificial Sequence: Synthetic oligonucleotide
auauccuugagcaugaagc

SEQ ID NO: 2940385 - RNA, 19 nt, Artificial Sequence
  Description of Artificial Sequence: Synthetic oligonucleotide
ucucaugaaguccaguggg

SEQ ID NO: 2940386 - RNA, 19 nt, Artificial Sequence
  Description of Artificial Sequence: Synthetic oligonucleotide
aguugcagggaccaccucc

SEQ ID NO: 2940387 - RNA, 19 nt, Artificial Sequence
  Description of Artificial Sequence: Synthetic oligonucleotide
agacccagcagccagcagc

SEQ ID NO: 2940388 - RNA, 19 nt, Artificial Sequence
  Description of Artificial Sequence: Synthetic oligonucleotide
uucucaugaaguccagugg

SEQ ID NO: 2940389 - RNA, 19 nt, Artificial Sequence
  Description of Artificial Sequence: Synthetic oligonucleotide
uggcacaagacacagcaag

SEQ ID NO: 2940390 - RNA, 19 nt, Artificial Sequence
  Description of Artificial Sequence: Synthetic oligonucleotide
ugugaggucacugagcacc

SEQ ID NO: 2940391 - RNA, 19 nt, Artificial Sequence
  Description of Artificial Sequence: Synthetic oligonucleotide
gagaccuccaucaucaucc

SEQ ID NO: 2940392 - RNA, 19 nt, Artificial Sequence
  Description of Artificial Sequence: Synthetic oligonucleotide
uugagcaugaagcuucuca

SEQ ID NO: 2940393 - RNA, 19 nt, Artificial Sequence
  Description of Artificial Sequence: Synthetic oligonucleotide
aaccagaguugccagaugu

SEQ ID NO: 2940394 - RNA, 19 nt, Artificial Sequence
  Description of Artificial Sequence: Synthetic oligonucleotide
uguaaaccagaguugccag

SEQ ID NO: 2940395 - RNA, 19 nt, Artificial Sequence
  Description of Artificial Sequence: Synthetic oligonucleotide
ucaucauccaggugcagcc

SEQ ID NO: 2940396 - RNA, 19 nt, Artificial Sequence
  Description of Artificial Sequence: Synthetic oligonucleotide
uaugcugccugccugcacc

SEQ ID NO: 2940397 - RNA, 19 nt, Artificial Sequence
  Description of Artificial Sequence: Synthetic oligonucleotide
gacacagcaagccucagca

SEQ ID NO: 2940398 - RNA, 19 nt, Artificial Sequence
  Description of Artificial Sequence: Synthetic oligonucleotide
gaugugugaggucacugag

SEQ ID NO: 2940399 - RNA, 19 nt, Artificial Sequence
  Description of Artificial Sequence: Synthetic oligonucleotide
cuucucaugaaguccagug

SEQ ID NO: 2940400 - RNA, 19 nt, Artificial Sequence
  Description of Artificial Sequence: Synthetic oligonucleotide
agcaugaagcuucucauga

SEQ ID NO: 2940401 - RNA, 19 nt, Artificial Sequence
  Description of Artificial Sequence: Synthetic oligonucleotide
uuugaggucaacuccuccu

SEQ ID NO: 2940402 - RNA, 19 nt, Artificial Sequence
  Description of Artificial Sequence: Synthetic oligonucleotide
ucuucaggugccaagcgcu

SEQ ID NO: 2940403 - RNA, 19 nt, Artificial Sequence
  Description of Artificial Sequence: Synthetic oligonucleotide
uuguaaaccagaguugcca

SEQ ID NO: 2940404 - RNA, 19 nt, Artificial Sequence
  Description of Artificial Sequence: Synthetic oligonucleotide
aucaucauccaggugcagc

SEQ ID NO: 2940405 - RNA, 19 nt, Artificial Sequence
  Description of Artificial Sequence: Synthetic oligonucleotide
uccuugagcaugaagcuuc

SEQ ID NO: 2940406 - RNA, 19 nt, Artificial Sequence
  Description of Artificial Sequence: Synthetic oligonucleotide
caugaagcuucucaugaag

SEQ ID NO: 2940407 - RNA, 19 nt, Artificial Sequence
  Description of Artificial Sequence: Synthetic oligonucleotide
uagcauauccuugagcaug

SEQ ID NO: 2940408 - RNA, 19 nt, Artificial Sequence
  Description of Artificial Sequence: Synthetic oligonucleotide
ucaaaggcagcccgaagac

SEQ ID NO: 2940409 - RNA, 19 nt, Artificial Sequence
  Description of Artificial Sequence: Synthetic oligonucleotide
uauccuugagcaugaagcu

SEQ ID NO: 2940410 - RNA, 19 nt, Artificial Sequence
  Description of Artificial Sequence: Synthetic oligonucleotide
uuuugaggucaacuccucc

SEQ ID NO: 2940411 - RNA, 19 nt, Artificial Sequence
  Description of Artificial Sequence: Synthetic oligonucleotide
agguauagcauauccuuga

SEQ ID NO: 2940412 - RNA, 19 nt, Artificial Sequence
  Description of Artificial Sequence: Synthetic oligonucleotide
auggaggaguugcagggac

SEQ ID NO: 2940413 - RNA, 19 nt, Artificial Sequence
  Description of Artificial Sequence: Synthetic oligonucleotide
aguggggagccacuggcac

SEQ ID NO: 2940414 - RNA, 19 nt, Artificial Sequence
  Description of Artificial Sequence: Synthetic oligonucleotide
acaagacacagcaagccuc

SEQ ID NO: 2940415 - RNA, 19 nt, Artificial Sequence
  Description of Artificial Sequence: Synthetic oligonucleotide
ugcaccaggucccaagaga

SEQ ID NO: 2940416 - RNA, 19 nt, Artificial Sequence
  Description of Artificial Sequence: Synthetic oligonucleotide
agaguugccagauguguga

SEQ ID NO: 2940417 - RNA, 19 nt, Artificial Sequence
  Description of Artificial Sequence: Synthetic oligonucleotide
aggaguugcagggaccacc

SEQ ID NO: 2940418 - RNA, 19 nt, Artificial Sequence
  Description of Artificial Sequence: Synthetic oligonucleotide
cucaugaaguccagugggg

SEQ ID NO: 2940419 - RNA, 19 nt, Artificial Sequence
  Description of Artificial Sequence: Synthetic oligonucleotide
ucugccaccucuucaggug

SEQ ID NO: 2940420 - RNA, 19 nt, Artificial Sequence
  Description of Artificial Sequence: Synthetic oligonucleotide
aucauccaggugcagccac

SEQ ID NO: 2940421 - RNA, 19 nt, Artificial Sequence
  Description of Artificial Sequence: Synthetic oligonucleotide
ggauggaggaguugcaggg

SEQ ID NO: 2940422 - RNA, 19 nt, Artificial Sequence
  Description of Artificial Sequence: Synthetic oligonucleotide
guauagcauauccuugagc

SEQ ID NO: 2940423 - RNA, 19 nt, Artificial Sequence
  Description of Artificial Sequence: Synthetic oligonucleotide
cuuguaaaccagaguugcc

SEQ ID NO: 2940424 - RNA, 19 nt, Artificial Sequence
  Description of Artificial Sequence: Synthetic oligonucleotide
accucuucaggugccaagc

SEQ ID NO: 2940425 - RNA, 19 nt, Artificial Sequence
  Description of Artificial Sequence: Synthetic oligonucleotide
ugcccaggcucaaaggcag

SEQ ID NO: 2940426 - RNA, 19 nt, Artificial Sequence
  Description of Artificial Sequence: Synthetic oligonucleotide
caugaaguccaguggggag

SEQ ID NO: 2940427 - RNA, 19 nt, Artificial Sequence
  Description of Artificial Sequence: Synthetic oligonucleotide
aaguccaguggggagccac

SEQ ID NO: 2940428 - RNA, 19 nt, Artificial Sequence
  Description of Artificial Sequence: Synthetic oligonucleotide
ucagcagccuccucuaccu

SEQ ID NO: 2940429 - RNA, 19 nt, Artificial Sequence
  Description of Artificial Sequence: Synthetic oligonucleotide
agaugugugaggucacuga

SEQ ID NO: 2940430 - RNA, 19 nt, Artificial Sequence
  Description of Artificial Sequence: Synthetic oligonucleotide
ugccagaugugugagguca

SEQ ID NO: 2940431 - RNA, 19 nt, Artificial Sequence
  Description of Artificial Sequence: Synthetic oligonucleotide
aggccagccagguauagca

SEQ ID NO: 2940432 - RNA, 19 nt, Artificial Sequence
  Description of Artificial Sequence: Synthetic oligonucleotide
cauauccuugagcaugaag

SEQ ID NO: 2940433 - RNA, 19 nt, Artificial Sequence
  Description of Artificial Sequence: Synthetic oligonucleotide
agcagccuccucuaccugg

SEQ ID NO: 2940434 - RNA, 19 nt, Artificial Sequence
  Description of Artificial Sequence: Synthetic oligonucleotide
ugaggucaacuccuccucc

SEQ ID NO: 2940435 - RNA, 19 nt, Artificial Sequence
  Description of Artificial Sequence: Synthetic oligonucleotide
cucugcagcccucagggag

SEQ ID NO: 2940436 - RNA, 19 nt, Artificial Sequence
  Description of Artificial Sequence: Synthetic oligonucleotide
uaaaccagaguugccagau

SEQ ID NO: 2940437 - RNA, 19 nt, Artificial Sequence
  Description of Artificial Sequence: Synthetic oligonucleotide
uccuccuccucucccagcc

SEQ ID NO: 2940438 - RNA, 19 nt, Artificial Sequence
  Description of Artificial Sequence: Synthetic oligonucleotide
cagguauagcauauccuug

SEQ ID NO: 2940439 - RNA, 19 nt, Artificial Sequence
  Description of Artificial Sequence: Synthetic oligonucleotide
agccacuggcacaagacac

SEQ ID NO: 2940440 - RNA, 19 nt, Artificial Sequence
  Description of Artificial Sequence: Synthetic oligonucleotide
guagagggcaggcuggcug

SEQ ID NO: 2940441 - RNA, 19 nt, Artificial Sequence
  Description of Artificial Sequence: Synthetic oligonucleotide
cucaaaggcagcccgaaga

SEQ ID NO: 2940442 - RNA, 19 nt, Artificial Sequence
  Description of Artificial Sequence: Synthetic oligonucleotide
gagcaugaagcuucucaug

SEQ ID NO: 2940443 - RNA, 19 nt, Artificial Sequence
  Description of Artificial Sequence: Synthetic oligonucleotide
ucaugaaguccagugggga

SEQ ID NO: 2940444 - RNA, 19 nt, Artificial Sequence
  Description of Artificial Sequence: Synthetic oligonucleotide
aaaccagaguugccagaug

SEQ ID NO: 2940445 - RNA, 19 nt, Artificial Sequence
  Description of Artificial Sequence: Synthetic oligonucleotide
ucugcagcccucagggaga

SEQ ID NO: 2940446 - RNA, 19 nt, Artificial Sequence
  Description of Artificial Sequence: Synthetic oligonucleotide
ucaacuccuccuccucucc

SEQ ID NO: 2940447 - RNA, 19 nt, Artificial Sequence
  Description of Artificial Sequence: Synthetic oligonucleotide
augugugaggucacugagc

SEQ ID NO: 2940448 - RNA, 19 nt, Artificial Sequence
  Description of Artificial Sequence: Synthetic oligonucleotide
ggugcagccacucugccac

SEQ ID NO: 2940449 - RNA, 19 nt, Artificial Sequence
  Description of Artificial Sequence: Synthetic oligonucleotide
cucuucaggugccaagcgc

SEQ ID NO: 2940450 - RNA, 19 nt, Artificial Sequence
  Description of Artificial Sequence: Synthetic oligonucleotide
gcuuguaaaccagaguugc

SEQ ID NO: 2940451 - RNA, 19 nt, Artificial Sequence
  Description of Artificial Sequence: Synthetic oligonucleotide
agccuccucuaccuggugg

SEQ ID NO: 2940452 - RNA, 19 nt, Artificial Sequence
  Description of Artificial Sequence: Synthetic oligonucleotide
cuggggauggaggaguugc

SEQ ID NO: 2940453 - RNA, 19 nt, Artificial Sequence
  Description of Artificial Sequence: Synthetic oligonucleotide
agggagaccuccaucauca

SEQ ID NO: 2940454 - RNA, 19 nt, Artificial Sequence
  Description of Artificial Sequence: Synthetic oligonucleotide
cucuaugcugccugccugc

SEQ ID NO: 2940455 - RNA, 19 nt, Artificial Sequence
  Description of Artificial Sequence: Synthetic oligonucleotide
agcgcucuaugcugccugc

SEQ ID NO: 2940456 - RNA, 19 nt, Artificial Sequence
  Description of Artificial Sequence: Synthetic oligonucleotide
ucaggugccaagcgcuugu

SEQ ID NO: 2940457 - RNA, 19 nt, Artificial Sequence
  Description of Artificial Sequence: Synthetic oligonucleotide
agcagcucucguuuguaca

SEQ ID NO: 2940458 - RNA, 19 nt, Artificial Sequence
  Description of Artificial Sequence: Synthetic oligonucleotide
aagcgcuuguaaaccagag

SEQ ID NO: 2940459 - RNA, 19 nt, Artificial Sequence
  Description of Artificial Sequence: Synthetic oligonucleotide
ugccaagcgcuuguaaacc

SEQ ID NO: 2940460 - RNA, 19 nt, Artificial Sequence
  Description of Artificial Sequence: Synthetic oligonucleotide
cagaguugccagaugugug

SEQ ID NO: 2940461 - RNA, 19 nt, Artificial Sequence
  Description of Artificial Sequence: Synthetic oligonucleotide
ugaaguccaguggggagcc

SEQ ID NO: 2940462 - RNA, 19 nt, Artificial Sequence
  Description of Artificial Sequence: Synthetic oligonucleotide
uccucuaccuggugggcug

SEQ ID NO: 2940463 - RNA, 19 nt, Artificial Sequence
  Description of Artificial Sequence: Synthetic oligonucleotide
gguauagcauauccuugag

SEQ ID NO: 2940464 - RNA, 19 nt, Artificial Sequence
  Description of Artificial Sequence: Synthetic oligonucleotide
agccagcagcgcucuaugc

SEQ ID NO: 2940465 - RNA, 19 nt, Artificial Sequence
  Description of Artificial Sequence: Synthetic oligonucleotide
gugccaagcgcuuguaaac

SEQ ID NO: 2940466 - RNA, 19 nt, Artificial Sequence
  Description of Artificial Sequence: Synthetic oligonucleotide
ugcuguguucagcagccuc

SEQ ID NO: 2940467 - RNA, 19 nt, Artificial Sequence
  Description of Artificial Sequence: Synthetic oligonucleotide
auagcauauccuugagcau

SEQ ID NO: 2940468 - RNA, 19 nt, Artificial Sequence
  Description of Artificial Sequence: Synthetic oligonucleotide
ugcagggaccaccuccucu

SEQ ID NO: 2940469 - RNA, 19 nt, Artificial Sequence
  Description of Artificial Sequence: Synthetic oligonucleotide
agcgcuuguaaaccagagu

SEQ ID NO: 2940470 - RNA, 19 nt, Artificial Sequence
  Description of Artificial Sequence: Synthetic oligonucleotide
aggucacugagcacccugc

SEQ ID NO: 2940471 - RNA, 19 nt, Artificial Sequence
  Description of Artificial Sequence: Synthetic oligonucleotide
uguucagcagccuccucua

SEQ ID NO: 2940472 - RNA, 19 nt, Artificial Sequence
  Description of Artificial Sequence: Synthetic oligonucleotide
caagacacagcaagccuca

SEQ ID NO: 2940473 - RNA, 19 nt, Artificial Sequence
  Description of Artificial Sequence: Synthetic oligonucleotide
cuggcagcugcccaggcuc

SEQ ID NO: 2940474 - RNA, 19 nt, Artificial Sequence
  Description of Artificial Sequence: Synthetic oligonucleotide
cugcguagagggcaggcug

SEQ ID NO: 2940475 - RNA, 19 nt, Artificial Sequence
  Description of Artificial Sequence: Synthetic oligonucleotide
caagccucagcagcucucg

SEQ ID NO: 2940476 - RNA, 19 nt, Artificial Sequence
  Description of Artificial Sequence: Synthetic oligonucleotide
cuaccuggugggcuggcag

SEQ ID NO: 2940477 - RNA, 19 nt, Artificial Sequence
  Description of Artificial Sequence: Synthetic oligonucleotide
gaguugccagaugugugag

SEQ ID NO: 2940478 - RNA, 19 nt, Artificial Sequence
  Description of Artificial Sequence: Synthetic oligonucleotide
uaccuggugggcuggcagc

SEQ ID NO: 2940479 - RNA, 19 nt, Artificial Sequence
  Description of Artificial Sequence: Synthetic oligonucleotide
ccugcuguguucagcagcc

SEQ ID NO: 2940480 - RNA, 19 nt, Artificial Sequence
  Description of Artificial Sequence: Synthetic oligonucleotide
guaaaccagaguugccaga

SEQ ID NO: 2940481 - RNA, 19 nt, Artificial Sequence
  Description of Artificial Sequence: Synthetic oligonucleotide
gagccacuggcacaagaca

SEQ ID NO: 2940482 - RNA, 19 nt, Artificial Sequence
  Description of Artificial Sequence: Synthetic oligonucleotide
gcugcccaggcucaaaggc

SEQ ID NO: 2940483 - RNA, 19 nt, Artificial Sequence
  Description of Artificial Sequence: Synthetic oligonucleotide
acacagcaagccucagcag

SEQ ID NO: 2940484 - RNA, 19 nt, Artificial Sequence
  Description of Artificial Sequence: Synthetic oligonucleotide
ucauccaggugcagccacu

SEQ ID NO: 2940485 - RNA, 19 nt, Artificial Sequence
  Description of Artificial Sequence: Synthetic oligonucleotide
gucacugagcacccugcug

SEQ ID NO: 2940486 - RNA, 19 nt, Artificial Sequence
  Description of Artificial Sequence: Synthetic oligonucleotide
agcccucagggagaccucc

SEQ ID NO: 2940487 - RNA, 19 nt, Artificial Sequence
  Description of Artificial Sequence: Synthetic oligonucleotide
cugccaccucuucaggugc

SEQ ID NO: 2940488 - RNA, 19 nt, Artificial Sequence
  Description of Artificial Sequence: Synthetic oligonucleotide
aagacccagcagccagcag

SEQ ID NO: 2940489 - RNA, 19 nt, Artificial Sequence
  Description of Artificial Sequence: Synthetic oligonucleotide
uggggauggaggaguugca

SEQ ID NO: 2940490 - RNA, 19 nt, Artificial Sequence
  Description of Artificial Sequence: Synthetic oligonucleotide
caccaggucccaagagagg

SEQ ID NO: 2940491 - RNA, 19 nt, Artificial Sequence
  Description of Artificial Sequence: Synthetic oligonucleotide
agcauauccuugagcauga

SEQ ID NO: 2940492 - RNA, 19 nt, Artificial Sequence
  Description of Artificial Sequence: Synthetic oligonucleotide
gcacaagacacagcaagcc

SEQ ID NO: 2940493 - RNA, 19 nt, Artificial Sequence
  Description of Artificial Sequence: Synthetic oligonucleotide
ucagggagaccuccaucau

SEQ ID NO: 2940494 - RNA, 19 nt, Artificial Sequence
  Description of Artificial Sequence: Synthetic oligonucleotide
caccucuucaggugccaag

SEQ ID NO: 2940495 - RNA, 19 nt, Artificial Sequence
  Description of Artificial Sequence: Synthetic oligonucleotide
agcucucguuuguacaaau

SEQ ID NO: 2940496 - RNA, 19 nt, Artificial Sequence
  Description of Artificial Sequence: Synthetic oligonucleotide
uucaggugccaagcgcuug

SEQ ID NO: 2940497 - RNA, 19 nt, Artificial Sequence
  Description of Artificial Sequence: Synthetic oligonucleotide
gucaacuccuccuccucuc

SEQ ID NO: 2940498 - RNA, 19 nt, Artificial Sequence
  Description of Artificial Sequence: Synthetic oligonucleotide
caagcgcuuguaaaccaga

SEQ ID NO: 2940499 - RNA, 19 nt, Artificial Sequence
  Description of Artificial Sequence: Synthetic oligonucleotide
caacuccuccuccucuccc

SEQ ID NO: 2940500 - RNA, 19 nt, Artificial Sequence
  Description of Artificial Sequence: Synthetic oligonucleotide
cagaugugugaggucacug

SEQ ID NO: 2940501 - RNA, 19 nt, Artificial Sequence
  Description of Artificial Sequence: Synthetic oligonucleotide
ugccaccucuucaggugcc

SEQ ID NO: 2940502 - RNA, 19 nt, Artificial Sequence
  Description of Artificial Sequence: Synthetic oligonucleotide
gcaccaggucccaagagag

SEQ ID NO: 2940503 - RNA, 19 nt, Artificial Sequence
  Description of Artificial Sequence: Synthetic oligonucleotide
uggggagccacuggcacaa

SEQ ID NO: 2940504 - RNA, 19 nt, Artificial Sequence
  Description of Artificial Sequence: Synthetic oligonucleotide
cacccugcuguguucagca

SEQ ID NO: 2940505 - RNA, 19 nt, Artificial Sequence
  Description of Artificial Sequence: Synthetic oligonucleotide
ggugccaagcgcuuguaaa

SEQ ID NO: 2940506 - RNA, 19 nt, Artificial Sequence
  Description of Artificial Sequence: Synthetic oligonucleotide
gggaccaccuccucucugc

SEQ ID NO: 2940507 - RNA, 19 nt, Artificial Sequence
  Description of Artificial Sequence: Synthetic oligonucleotide
ggcacaagacacagcaagc

SEQ ID NO: 2940508 - RNA, 19 nt, Artificial Sequence
  Description of Artificial Sequence: Synthetic oligonucleotide
gauggaggaguugcaggga

SEQ ID NO: 2940509 - RNA, 19 nt, Artificial Sequence
  Description of Artificial Sequence: Synthetic oligonucleotide
ucuaugcugccugccugca

SEQ ID NO: 2940510 - RNA, 19 nt, Artificial Sequence
  Description of Artificial Sequence: Synthetic oligonucleotide
gcuguguucagcagccucc

SEQ ID NO: 2940511 - RNA, 19 nt, Artificial Sequence
  Description of Artificial Sequence: Synthetic oligonucleotide
cagggagaccuccaucauc

SEQ ID NO: 2940512 - RNA, 19 nt, Artificial Sequence
  Description of Artificial Sequence: Synthetic oligonucleotide
gaagacccagcagccagca

SEQ ID NO: 2940513 - RNA, 19 nt, Artificial Sequence
  Description of Artificial Sequence: Synthetic oligonucleotide
cagcugcccaggcucaaag

SEQ ID NO: 2940514 - RNA, 19 nt, Artificial Sequence
  Description of Artificial Sequence: Synthetic oligonucleotide
ccugccugcaccagguccc

SEQ ID NO: 2940515 - RNA, 19 nt, Artificial Sequence
  Description of Artificial Sequence: Synthetic oligonucleotide
ccaagagaggccagccagg

SEQ ID NO: 2940516 - RNA, 19 nt, Artificial Sequence
  Description of Artificial Sequence: Synthetic oligonucleotide
aagccucagcagcucucgu

SEQ ID NO: 2940517 - RNA, 19 nt, Artificial Sequence
  Description of Artificial Sequence: Synthetic oligonucleotide
ugagcacccugcuguguuc

SEQ ID NO: 2940518 - RNA, 19 nt, Artificial Sequence
  Description of Artificial Sequence: Synthetic oligonucleotide
aggugcagccacucugcca

SEQ ID NO: 2940519 - RNA, 19 nt, Artificial Sequence
  Description of Artificial Sequence: Synthetic oligonucleotide
cagcagcucucguuuguac

SEQ ID NO: 2940520 - RNA, 19 nt, Artificial Sequence
  Description of Artificial Sequence: Synthetic oligonucleotide
uggcuggggauggaggagu

SEQ ID NO: 2940521 - RNA, 19 nt, Artificial Sequence
  Description of Artificial Sequence: Synthetic oligonucleotide
ccagcagcgcucuaugcug

SEQ ID NO: 2940522 - RNA, 19 nt, Artificial Sequence
  Description of Artificial Sequence: Synthetic oligonucleotide
cugcaccaggucccaagag

SEQ ID NO: 2940523 - RNA, 19 nt, Artificial Sequence
  Description of Artificial Sequence: Synthetic oligonucleotide
cugcccaggcucaaaggca

SEQ ID NO: 2940524 - RNA, 19 nt, Artificial Sequence
  Description of Artificial Sequence: Synthetic oligonucleotide
cagcgcucuaugcugccug

SEQ ID NO: 2940525 - RNA, 19 nt, Artificial Sequence
  Description of Artificial Sequence: Synthetic oligonucleotide
ccaagcgcuuguaaaccag

SEQ ID NO: 2940526 - RNA, 19 nt, Artificial Sequence
  Description of Artificial Sequence: Synthetic oligonucleotide
gucccaagagaggccagcc

SEQ ID NO: 2940527 - RNA, 19 nt, Artificial Sequence
  Description of Artificial Sequence: Synthetic oligonucleotide
accagaguugccagaugug

SEQ ID NO: 2940528 - RNA, 19 nt, Artificial Sequence
  Description of Artificial Sequence: Synthetic oligonucleotide
acugcguagagggcaggcu

SEQ ID NO: 2940529 - RNA, 19 nt, Artificial Sequence
  Description of Artificial Sequence: Synthetic oligonucleotide
ccaguggggagccacuggc

SEQ ID NO: 2940530 - RNA, 19 nt, Artificial Sequence
  Description of Artificial Sequence: Synthetic oligonucleotide
ucucugcagcccucaggga

SEQ ID NO: 2940531 - RNA, 19 nt, Artificial Sequence
  Description of Artificial Sequence: Synthetic oligonucleotide
ccaggugcagccacucugc

SEQ ID NO: 2940532 - RNA, 19 nt, Artificial Sequence
  Description of Artificial Sequence: Synthetic oligonucleotide
cacuggcacaagacacagc

SEQ ID NO: 2940533 - RNA, 19 nt, Artificial Sequence
  Description of Artificial Sequence: Synthetic oligonucleotide
gcgcuuguaaaccagaguu

SEQ ID NO: 2940534 - RNA, 19 nt, Artificial Sequence
  Description of Artificial Sequence: Synthetic oligonucleotide
gaggccagccagguauagc

SEQ ID NO: 2940535 - RNA, 19 nt, Artificial Sequence
  Description of Artificial Sequence: Synthetic oligonucleotide
gcucuaugcugccugccug

SEQ ID NO: 2940536 - RNA, 19 nt, Artificial Sequence
  Description of Artificial Sequence: Synthetic oligonucleotide
gaggucaacuccuccuccu

SEQ ID NO: 2940537 - RNA, 19 nt, Artificial Sequence
  Description of Artificial Sequence: Synthetic oligonucleotide
ggagccacuggcacaagac

SEQ ID NO: 2940538 - RNA, 19 nt, Artificial Sequence
  Description of Artificial Sequence: Synthetic oligonucleotide
uguguucagcagccuccuc

SEQ ID NO: 2940539 - RNA, 19 nt, Artificial Sequence
  Description of Artificial Sequence: Synthetic oligonucleotide
ucuaccuggugggcuggca

SEQ ID NO: 2940540 - RNA, 19 nt, Artificial Sequence
  Description of Artificial Sequence: Synthetic oligonucleotide
ccgaagacccagcagccag

SEQ ID NO: 2940541 - RNA, 19 nt, Artificial Sequence
  Description of Artificial Sequence: Synthetic oligonucleotide
uggugggcuggcagcugcc

SEQ ID NO: 2940542 - RNA, 19 nt, Artificial Sequence
  Description of Artificial Sequence: Synthetic oligonucleotide
gcugccugccugcaccagg

SEQ ID NO: 2940543 - RNA, 19 nt, Artificial Sequence
  Description of Artificial Sequence: Synthetic oligonucleotide
gugaggucacugagcaccc

SEQ ID NO: 2940544 - RNA, 19 nt, Artificial Sequence
  Description of Artificial Sequence: Synthetic oligonucleotide
uggcagcugcccaggcuca

SEQ ID NO: 2940545 - RNA, 19 nt, Artificial Sequence
  Description of Artificial Sequence: Synthetic oligonucleotide
ggagaccuccaucaucauc

SEQ ID NO: 2940546 - RNA, 19 nt, Artificial Sequence
  Description of Artificial Sequence: Synthetic oligonucleotide
ucagcagcucucguuugua

SEQ ID NO: 2940547 - RNA, 19 nt, Artificial Sequence
  Description of Artificial Sequence: Synthetic oligonucleotide
cacaagacacagcaagccu

SEQ ID NO: 2940548 - RNA, 19 nt, Artificial Sequence
  Description of Artificial Sequence: Synthetic oligonucleotide
agggaccaccuccucucug

SEQ ID NO: 2940549 - RNA, 19 nt, Artificial Sequence
  Description of Artificial Sequence: Synthetic oligonucleotide
cacugcguagagggcaggc

SEQ ID NO: 2940550 - RNA, 19 nt, Artificial Sequence
  Description of Artificial Sequence: Synthetic oligonucleotide
agccucagcagcucucguu

SEQ ID NO: 2940551 - RNA, 19 nt, Artificial Sequence
  Description of Artificial Sequence: Synthetic oligonucleotide
agaggccagccagguauag

SEQ ID NO: 2940552 - RNA, 19 nt, Artificial Sequence
  Description of Artificial Sequence: Synthetic oligonucleotide
caggugcagccacucugcc

SEQ ID NO: 2940553 - RNA, 19 nt, Artificial Sequence
  Description of Artificial Sequence: Synthetic oligonucleotide
cagccagcagcgcucuaug

SEQ ID NO: 2940554 - RNA, 19 nt, Artificial Sequence
  Description of Artificial Sequence: Synthetic oligonucleotide
agcacccugcuguguucag

SEQ ID NO: 2940555 - RNA, 19 nt, Artificial Sequence
  Description of Artificial Sequence: Synthetic oligonucleotide
auccuugagcaugaagcuu

SEQ ID NO: 2940556 - RNA, 19 nt, Artificial Sequence
  Description of Artificial Sequence: Synthetic oligonucleotide
cuaugcugccugccugcac

SEQ ID NO: 2940557 - RNA, 19 nt, Artificial Sequence
  Description of Artificial Sequence: Synthetic oligonucleotide
acccugcuguguucagcag

SEQ ID NO: 2940558 - RNA, 19 nt, Artificial Sequence
  Description of Artificial Sequence: Synthetic oligonucleotide
auccaggugcagccacucu

SEQ ID NO: 2940559 - RNA, 19 nt, Artificial Sequence
  Description of Artificial Sequence: Synthetic oligonucleotide
gccugccugcaccaggucc

SEQ ID NO: 2940560 - RNA, 19 nt, Artificial Sequence
  Description of Artificial Sequence: Synthetic oligonucleotide
gcagcucucguuuguacaa

SEQ ID NO: 2940561 - RNA, 19 nt, Artificial Sequence
  Description of Artificial Sequence: Synthetic oligonucleotide
ugcagccacucugccaccu

SEQ ID NO: 2940562 - RNA, 19 nt, Artificial Sequence
  Description of Artificial Sequence: Synthetic oligonucleotide
cuggcuggggauggaggag

SEQ ID NO: 2940563 - RNA, 19 nt, Artificial Sequence
  Description of Artificial Sequence: Synthetic oligonucleotide
guucagcagccuccucuac

SEQ ID NO: 2940564 - RNA, 19 nt, Artificial Sequence
  Description of Artificial Sequence: Synthetic oligonucleotide
augcugccugccugcacca

SEQ ID NO: 2940565 - RNA, 19 nt, Artificial Sequence
  Description of Artificial Sequence: Synthetic oligonucleotide
aggugccaagcgcuuguaa

SEQ ID NO: 2940566 - RNA, 19 nt, Artificial Sequence
  Description of Artificial Sequence: Synthetic oligonucleotide
aaggcagcccgaagaccca

SEQ ID NO: 2940567 - RNA, 19 nt, Artificial Sequence
  Description of Artificial Sequence: Synthetic oligonucleotide
ccucuucaggugccaagcg

SEQ ID NO: 2940568 - RNA, 19 nt, Artificial Sequence
  Description of Artificial Sequence: Synthetic oligonucleotide
cauccaggugcagccacuc

SEQ ID NO: 2940569 - RNA, 19 nt, Artificial Sequence
  Description of Artificial Sequence: Synthetic oligonucleotide
cuccaucaucauccaggug

SEQ ID NO: 2940570 - RNA, 19 nt, Artificial Sequence
  Description of Artificial Sequence: Synthetic oligonucleotide
gcucaaaggcagcccgaag

SEQ ID NO: 2940571 - RNA, 19 nt, Artificial Sequence
  Description of Artificial Sequence: Synthetic oligonucleotide
cgcuuguaaaccagaguug

SEQ ID NO: 2940572 - RNA, 19 nt, Artificial Sequence
  Description of Artificial Sequence: Synthetic oligonucleotide
gccugcaccaggucccaag

SEQ ID NO: 2940573 - RNA, 19 nt, Artificial Sequence
  Description of Artificial Sequence: Synthetic oligonucleotide
guggggagccacuggcaca

SEQ ID NO: 2940574 - RNA, 19 nt, Artificial Sequence
  Description of Artificial Sequence: Synthetic oligonucleotide
gagcacccugcuguguuca

SEQ ID NO: 2940575 - RNA, 19 nt, Artificial Sequence
  Description of Artificial Sequence: Synthetic oligonucleotide
gugugaggucacugagcac

SEQ ID NO: 2940576 - RNA, 19 nt, Artificial Sequence
  Description of Artificial Sequence: Synthetic oligonucleotide
guugcagggaccaccuccu

SEQ ID NO: 2940577 - RNA, 19 nt, Artificial Sequence
  Description of Artificial Sequence: Synthetic oligonucleotide
accuggugggcuggcagcu

SEQ ID NO: 2940578 - RNA, 19 nt, Artificial Sequence
  Description of Artificial Sequence: Synthetic oligonucleotide
gccaagcgcuuguaaacca

SEQ ID NO: 2940579 - RNA, 19 nt, Artificial Sequence
  Description of Artificial Sequence: Synthetic oligonucleotide
caucaucauccaggugcag

SEQ ID NO: 2940580 - RNA, 19 nt, Artificial Sequence
  Description of Artificial Sequence: Synthetic oligonucleotide
uugcagggaccaccuccuc

SEQ ID NO: 2940581 - RNA, 19 nt, Artificial Sequence
  Description of Artificial Sequence: Synthetic oligonucleotide
ccagguauagcauauccuu

SEQ ID NO: 2940582 - RNA, 19 nt, Artificial Sequence
  Description of Artificial Sequence: Synthetic oligonucleotide
ugaggucacugagcacccu

SEQ ID NO: 2940583 - RNA, 19 nt, Artificial Sequence
  Description of Artificial Sequence: Synthetic oligonucleotide
aggcuggcuggggauggag

SEQ ID NO: 2940584 - RNA, 19 nt, Artificial Sequence
  Description of Artificial Sequence: Synthetic oligonucleotide
gcaugaagcuucucaugaa

SEQ ID NO: 2940585 - RNA, 19 nt, Artificial Sequence
  Description of Artificial Sequence: Synthetic oligonucleotide
aggcagcccgaagacccag

SEQ ID NO: 2940586 - RNA, 19 nt, Artificial Sequence
  Description of Artificial Sequence: Synthetic oligonucleotide
gaguugcagggaccaccuc

SEQ ID NO: 2940587 - RNA, 19 nt, Artificial Sequence
  Description of Artificial Sequence: Synthetic oligonucleotide
caguggggagccacuggca

SEQ ID NO: 2940588 - RNA, 19 nt, Artificial Sequence
  Description of Artificial Sequence: Synthetic oligonucleotide
cuugagcaugaagcuucuc

SEQ ID NO: 2940589 - RNA, 19 nt, Artificial Sequence
  Description of Artificial Sequence: Synthetic oligonucleotide
cccacugcguagagggcag

SEQ ID NO: 2940590 - RNA, 19 nt, Artificial Sequence
  Description of Artificial Sequence: Synthetic oligonucleotide
gaggaguugcagggaccac

SEQ ID NO: 2940591 - RNA, 19 nt, Artificial Sequence
  Description of Artificial Sequence: Synthetic oligonucleotide
cuggcacaagacacagcaa

SEQ ID NO: 2940592 - RNA, 19 nt, Artificial Sequence
  Description of Artificial Sequence: Synthetic oligonucleotide
ugcugccugccugcaccag

SEQ ID NO: 2940593 - RNA, 19 nt, Artificial Sequence
  Description of Artificial Sequence: Synthetic oligonucleotide
cucugccaccucuucaggu

SEQ ID NO: 2940594 - RNA, 19 nt, Artificial Sequence
  Description of Artificial Sequence: Synthetic oligonucleotide
caucauccaggugcagcca

SEQ ID NO: 2940595 - RNA, 19 nt, Artificial Sequence
  Description of Artificial Sequence: Synthetic oligonucleotide
cccaggcucaaaggcagcc

SEQ ID NO: 2940596 - RNA, 19 nt, Artificial Sequence
  Description of Artificial Sequence: Synthetic oligonucleotide
gcagcccgaagacccagca

SEQ ID NO: 2940597 - RNA, 19 nt, Artificial Sequence
  Description of Artificial Sequence: Synthetic oligonucleotide
ugccugccugcaccagguc

SEQ ID NO: 2940598 - RNA, 19 nt, Artificial Sequence
  Description of Artificial Sequence: Synthetic oligonucleotide
caagagaggccagccaggu

SEQ ID NO: 2940599 - RNA, 19 nt, Artificial Sequence
  Description of Artificial Sequence: Synthetic oligonucleotide
cucuaccuggugggcuggc

SEQ ID NO: 2940600 - RNA, 19 nt, Artificial Sequence
  Description of Artificial Sequence: Synthetic oligonucleotide
ggucaacuccuccuccucu

SEQ ID NO: 2940601 - RNA, 19 nt, Artificial Sequence
  Description of Artificial Sequence: Synthetic oligonucleotide
gccagcagcgcucuaugcu

SEQ ID NO: 2940602 - RNA, 19 nt, Artificial Sequence
  Description of Artificial Sequence: Synthetic oligonucleotide
gccacuggcacaagacaca

SEQ ID NO: 2940603 - RNA, 19 nt, Artificial Sequence
  Description of Artificial Sequence: Synthetic oligonucleotide
cugcagcccucagggagac

SEQ ID NO: 2940604 - RNA, 19 nt, Artificial Sequence
  Description of Artificial Sequence: Synthetic oligonucleotide
cagcagccuccucuaccug

SEQ ID NO: 2940605 - RNA, 19 nt, Artificial Sequence
  Description of Artificial Sequence: Synthetic oligonucleotide
gugcagccacucugccacc

SEQ ID NO: 2940606 - RNA, 19 nt, Artificial Sequence
  Description of Artificial Sequence: Synthetic oligonucleotide
aggucccaagagaggccag

SEQ ID NO: 2940607 - RNA, 19 nt, Artificial Sequence
  Description of Artificial Sequence: Synthetic oligonucleotide
gcagcccucagggagaccu

SEQ ID NO: 2940608 - RNA, 19 nt, Artificial Sequence
  Description of Artificial Sequence: Synthetic oligonucleotide
gcccgaagacccagcagcc

SEQ ID NO: 2940609 - RNA, 19 nt, Artificial Sequence
  Description of Artificial Sequence: Synthetic oligonucleotide
cugccugccugcaccaggu

SEQ ID NO: 2940610 - RNA, 19 nt, Artificial Sequence
  Description of Artificial Sequence: Synthetic oligonucleotide
ccucagggagaccuccauc

SEQ ID NO: 2940611 - RNA, 19 nt, Artificial Sequence
  Description of Artificial Sequence: Synthetic oligonucleotide
ccucagcagcucucguuug

SEQ ID NO: 2940612 - RNA, 19 nt, Artificial Sequence
  Description of Artificial Sequence: Synthetic oligonucleotide
ggaguugcagggaccaccu

SEQ ID NO: 2940613 - RNA, 19 nt, Artificial Sequence
  Description of Artificial Sequence: Synthetic oligonucleotide
gagaggccagccagguaua

SEQ ID NO: 2940614 - RNA, 19 nt, Artificial Sequence
  Description of Artificial Sequence: Synthetic oligonucleotide
ggugggcuggcagcugccc

SEQ ID NO: 2940615 - RNA, 19 nt, Artificial Sequence
  Description of Artificial Sequence: Synthetic oligonucleotide
gccacucugccaccucuuc

SEQ ID NO: 2940616 - RNA, 19 nt, Artificial Sequence
  Description of Artificial Sequence: Synthetic oligonucleotide
cugagcacccugcuguguu

SEQ ID NO: 2940617 - RNA, 19 nt, Artificial Sequence
  Description of Artificial Sequence: Synthetic oligonucleotide
cagcccucagggagaccuc

SEQ ID NO: 2940618 - RNA, 19 nt, Artificial Sequence
  Description of Artificial Sequence: Synthetic oligonucleotide
gccagguauagcauauccu

SEQ ID NO: 2940619 - RNA, 19 nt, Artificial Sequence
  Description of Artificial Sequence: Synthetic oligonucleotide
gcacccugcuguguucagc

SEQ ID NO: 2940620 - RNA, 19 nt, Artificial Sequence
  Description of Artificial Sequence: Synthetic oligonucleotide
ccugcaccaggucccaaga

SEQ ID NO: 2940621 - RNA, 19 nt, Artificial Sequence
  Description of Artificial Sequence: Synthetic oligonucleotide
gaaguccaguggggagcca

SEQ ID NO: 2940622 - RNA, 19 nt, Artificial Sequence
  Description of Artificial Sequence: Synthetic oligonucleotide
ggcucaaaggcagcccgaa

SEQ ID NO: 2940623 - RNA, 19 nt, Artificial Sequence
  Description of Artificial Sequence: Synthetic oligonucleotide
gcaagccucagcagcucuc

SEQ ID NO: 2940624 - RNA, 19 nt, Artificial Sequence
  Description of Artificial Sequence: Synthetic oligonucleotide
ggucacugagcacccugcu

SEQ ID NO: 2940625 - RNA, 19 nt, Artificial Sequence
  Description of Artificial Sequence: Synthetic oligonucleotide
cagccacucugccaccucu

SEQ ID NO: 2940626 - RNA, 19 nt, Artificial Sequence
  Description of Artificial Sequence: Synthetic oligonucleotide
ugcagcccucagggagacc

SEQ ID NO: 2940627 - RNA, 19 nt, Artificial Sequence
  Description of Artificial Sequence: Synthetic oligonucleotide
ccagaguugccagaugugu

SEQ ID NO: 2940628 - RNA, 19 nt, Artificial Sequence
  Description of Artificial Sequence: Synthetic oligonucleotide
gccucagcagcucucguuu

SEQ ID NO: 2940629 - RNA, 19 nt, Artificial Sequence
  Description of Artificial Sequence: Synthetic oligonucleotide
cagcucucguuuguacaaa

SEQ ID NO: 2940630 - RNA, 19 nt, Artificial Sequence
  Description of Artificial Sequence: Synthetic oligonucleotide
cuguguucagcagccuccu

SEQ ID NO: 2940631 - RNA, 19 nt, Artificial Sequence
  Description of Artificial Sequence: Synthetic oligonucleotide
gccagaugugugaggucac

SEQ ID NO: 2940632 - RNA, 19 nt, Artificial Sequence
  Description of Artificial Sequence: Synthetic oligonucleotide
cuucaggugccaagcgcuu

SEQ ID NO: 2940633 - RNA, 19 nt, Artificial Sequence
  Description of Artificial Sequence: Synthetic oligonucleotide
gcguagagggcaggcuggc

SEQ ID NO: 2940634 - RNA, 19 nt, Artificial Sequence
  Description of Artificial Sequence: Synthetic oligonucleotide
ccucuaccuggugggcugg

SEQ ID NO: 2940635 - RNA, 19 nt, Artificial Sequence
  Description of Artificial Sequence: Synthetic oligonucleotide
ggcagcccgaagacccagc

SEQ ID NO: 2940636 - RNA, 19 nt, Artificial Sequence
  Description of Artificial Sequence: Synthetic oligonucleotide
ccagccagguauagcauau

SEQ ID NO: 2940637 - RNA, 19 nt, Artificial Sequence
  Description of Artificial Sequence: Synthetic oligonucleotide
cuccucuaccuggugggcu

SEQ ID NO: 2940638 - RNA, 19 nt, Artificial Sequence
  Description of Artificial Sequence: Synthetic oligonucleotide
gcagccacucugccaccuc

SEQ ID NO: 2940639 - RNA, 19 nt, Artificial Sequence
  Description of Artificial Sequence: Synthetic oligonucleotide
ccccacugcguagagggca

SEQ ID NO: 2940640 - RNA, 19 nt, Artificial Sequence
  Description of Artificial Sequence: Synthetic oligonucleotide
gcgcucuaugcugccugcc

SEQ ID NO: 2940641 - RNA, 19 nt, Artificial Sequence
  Description of Artificial Sequence: Synthetic oligonucleotide
ugccugcaccaggucccaa

SEQ ID NO: 2940642 - RNA, 19 nt, Artificial Sequence
  Description of Artificial Sequence: Synthetic oligonucleotide
gcuggcagcugcccaggcu

SEQ ID NO: 2940643 - RNA, 19 nt, Artificial Sequence
  Description of Artificial Sequence: Synthetic oligonucleotide
gcuucucaugaaguccagu

SEQ ID NO: 2940644 - RNA, 19 nt, Artificial Sequence
  Description of Artificial Sequence: Synthetic oligonucleotide
cugccugcaccagguccca

SEQ ID NO: 2940645 - RNA, 19 nt, Artificial Sequence
  Description of Artificial Sequence: Synthetic oligonucleotide
ccuugagcaugaagcuucu

SEQ ID NO: 2940646 - RNA, 19 nt, Artificial Sequence
  Description of Artificial Sequence: Synthetic oligonucleotide
ccacugcguagagggcagg

SEQ ID NO: 2940647 - RNA, 19 nt, Artificial Sequence
  Description of Artificial Sequence: Synthetic oligonucleotide
cagggaccaccuccucucu

SEQ ID NO: 2940648 - RNA, 19 nt, Artificial Sequence
  Description of Artificial Sequence: Synthetic oligonucleotide
gcccaggcucaaaggcagc

SEQ ID NO: 2940649 - RNA, 19 nt, Artificial Sequence
  Description of Artificial Sequence: Synthetic oligonucleotide
gcagccagcagcgcucuau

SEQ ID NO: 2940650 - RNA, 19 nt, Artificial Sequence
  Description of Artificial Sequence: Synthetic oligonucleotide
gcagccuccucuaccuggu

SEQ ID NO: 2940651 - RNA, 19 nt, Artificial Sequence
  Description of Artificial Sequence: Synthetic oligonucleotide
caggugccaagcgcuugua

SEQ ID NO: 2940652 - RNA, 19 nt, Artificial Sequence
  Description of Artificial Sequence: Synthetic oligonucleotide
gcauauccuugagcaugaa

SEQ ID NO: 2940653 - RNA, 19 nt, Artificial Sequence
  Description of Artificial Sequence: Synthetic oligonucleotide
caggcuggcuggggaugga

SEQ ID NO: 2940654 - RNA, 19 nt, Artificial Sequence
  Description of Artificial Sequence: Synthetic oligonucleotide
cccgaagacccagcagcca

SEQ ID NO: 2940655 - RNA, 19 nt, Artificial Sequence
  Description of Artificial Sequence: Synthetic oligonucleotide
gcagcugcccaggcucaaa

SEQ ID NO: 2940656 - RNA, 19 nt, Artificial Sequence
  Description of Artificial Sequence: Synthetic oligonucleotide
ccagaugugugaggucacu

SEQ ID NO: 2940657 - RNA, 19 nt, Artificial Sequence
  Description of Artificial Sequence: Synthetic oligonucleotide
gggagaccuccaucaucau

SEQ ID NO: 2940658 - RNA, 19 nt, Artificial Sequence
  Description of Artificial Sequence: Synthetic oligonucleotide
cugcuguguucagcagccu

SEQ ID NO: 2940659 - RNA, 19 nt, Artificial Sequence
  Description of Artificial Sequence: Synthetic oligonucleotide
ggcagcugcccaggcucaa

SEQ ID NO: 2940660 - RNA, 19 nt, Artificial Sequence
  Description of Artificial Sequence: Synthetic oligonucleotide
gcagcgcucuaugcugccu

SEQ ID NO: 2940661 - RNA, 19 nt, Artificial Sequence
  Description of Artificial Sequence: Synthetic oligonucleotide
ccaccucuucaggugccaa

SEQ ID NO: 2940662 - RNA, 19 nt, Artificial Sequence
  Description of Artificial Sequence: Synthetic oligonucleotide
ggcuggggauggaggaguu

SEQ ID NO: 2940663 - RNA, 19 nt, Artificial Sequence
  Description of Artificial Sequence: Synthetic oligonucleotide
cguagagggcaggcuggcu

SEQ ID NO: 2940664 - RNA, 19 nt, Artificial Sequence
  Description of Artificial Sequence: Synthetic oligonucleotide
uguucuuugagcaggcggg

SEQ ID NO: 2940665 - RNA, 19 nt, Artificial Sequence
  Description of Artificial Sequence: Synthetic oligonucleotide
uucuccaccauuccaaucc

SEQ ID NO: 2940666 - RNA, 19 nt, Artificial Sequence
  Description of Artificial Sequence: Synthetic oligonucleotide
aaacugggcggccuggacc

SEQ ID NO: 2940667 - RNA, 19 nt, Artificial Sequence
  Description of Artificial Sequence: Synthetic oligonucleotide
accauuccaauccacuggc

SEQ ID NO: 2940668 - RNA, 19 nt, Artificial Sequence
  Description of Artificial Sequence: Synthetic oligonucleotide
cuugcguucauucugcuug

SEQ ID NO: 2940669 - RNA, 19 nt, Artificial Sequence
  Description of Artificial Sequence: Synthetic oligonucleotide
uuuguagacauacuccagu

SEQ ID NO: 2940670 - RNA, 19 nt, Artificial Sequence
  Description of Artificial Sequence: Synthetic oligonucleotide
uuaagugccugguugaagu

SEQ ID NO: 2940671 - RNA, 19 nt, Artificial Sequence
  Description of Artificial Sequence: Synthetic oligonucleotide
caaagcuucggucaggcag

SEQ ID NO: 2940672 - RNA, 19 nt, Artificial Sequence
  Description of Artificial Sequence: Synthetic oligonucleotide
aauuuccuuaagugccugg

SEQ ID NO: 2940673 - RNA, 19 nt, Artificial Sequence
  Description of Artificial Sequence: Synthetic oligonucleotide
aauggugcgcauguccagc

SEQ ID NO: 2940674 - RNA, 19 nt, Artificial Sequence
  Description of Artificial Sequence: Synthetic oligonucleotide
guucauguaggccugggcc

SEQ ID NO: 2940675 - RNA, 19 nt, Artificial Sequence
  Description of Artificial Sequence: Synthetic oligonucleotide
uccaccaaagcuucgguca

SEQ ID NO: 2940676 - RNA, 19 nt, Artificial Sequence
  Description of Artificial Sequence: Synthetic oligonucleotide
acccacauugaggugaucc

SEQ ID NO: 2940677 - RNA, 19 nt, Artificial Sequence
  Description of Artificial Sequence: Synthetic oligonucleotide
uguagacauacuccagugc

SEQ ID NO: 2940678 - RNA, 19 nt, Artificial Sequence
  Description of Artificial Sequence: Synthetic oligonucleotide
aaagcuucggucaggcagg

SEQ ID NO: 2940679 - RNA, 19 nt, Artificial Sequence
  Description of Artificial Sequence: Synthetic oligonucleotide
auugaggugauccaccaaa

SEQ ID NO: 2940680 - RNA, 19 nt, Artificial Sequence
  Description of Artificial Sequence: Synthetic oligonucleotide
uuguagacauacuccagug

SEQ ID NO: 2940681 - RNA, 19 nt, Artificial Sequence
  Description of Artificial Sequence: Synthetic oligonucleotide
agcauggucgaaccuggcc

SEQ ID NO: 2940682 - RNA, 19 nt, Artificial Sequence
  Description of Artificial Sequence: Synthetic oligonucleotide
guagacauacuccagugca

SEQ ID NO: 2940683 - RNA, 19 nt, Artificial Sequence
  Description of Artificial Sequence: Synthetic oligonucleotide
ucaugguccagcuuucucu

SEQ ID NO: 2940684 - RNA, 19 nt, Artificial Sequence
  Description of Artificial Sequence: Synthetic oligonucleotide
ugcuuggcaaacugggcgg

SEQ ID NO: 2940685 - RNA, 19 nt, Artificial Sequence
  Description of Artificial Sequence: Synthetic oligonucleotide
ugucugcuuggcaaacugg

SEQ ID NO: 2940686 - RNA, 19 nt, Artificial Sequence
  Description of Artificial Sequence: Synthetic oligonucleotide
guguucuuugagcaggcgg

SEQ ID NO: 2940687 - RNA, 19 nt, Artificial Sequence
  Description of Artificial Sequence: Synthetic oligonucleotide
accuguagggucuucaccu

SEQ ID NO: 2940688 - RNA, 19 nt, Artificial Sequence
  Description of Artificial Sequence: Synthetic oligonucleotide
ugaaguucuccaccauucc

SEQ ID NO: 2940689 - RNA, 19 nt, Artificial Sequence
  Description of Artificial Sequence: Synthetic oligonucleotide
ucuccugcagcuccuugcg

SEQ ID NO: 2940690 - RNA, 19 nt, Artificial Sequence
  Description of Artificial Sequence: Synthetic oligonucleotide
uagacauacuccagugcag

SEQ ID NO: 2940691 - RNA, 19 nt, Artificial Sequence
  Description of Artificial Sequence: Synthetic oligonucleotide
uugaggugauccaccaaag

SEQ ID NO: 2940692 - RNA, 19 nt, Artificial Sequence
  Description of Artificial Sequence: Synthetic oligonucleotide
ugauccaccaaagcuucgg

SEQ ID NO: 2940693 - RNA, 19 nt, Artificial Sequence
  Description of Artificial Sequence: Synthetic oligonucleotide
cccaauuuccuuaagugcc

SEQ ID NO: 2940694 - RNA, 19 nt, Artificial Sequence
  Description of Artificial Sequence: Synthetic oligonucleotide
cauacuccagugcaguggc

SEQ ID NO: 2940695 - RNA, 19 nt, Artificial Sequence
  Description of Artificial Sequence: Synthetic oligonucleotide
auuccaauccacuggccug

SEQ ID NO: 2940696 - RNA, 19 nt, Artificial Sequence
  Description of Artificial Sequence: Synthetic oligonucleotide
ucuuugagcaggcgggaca

SEQ ID NO: 2940697 - RNA, 19 nt, Artificial Sequence
  Description of Artificial Sequence: Synthetic oligonucleotide
ugaggugauccaccaaagc

SEQ ID NO: 2940698 - RNA, 19 nt, Artificial Sequence
  Description of Artificial Sequence: Synthetic oligonucleotide
gcuucggucaggcaggugg

SEQ ID NO: 2940699 - RNA, 19 nt, Artificial Sequence
  Description of Artificial Sequence: Synthetic oligonucleotide
cuuuguagacauacuccag

SEQ ID NO: 2940700 - RNA, 19 nt, Artificial Sequence
  Description of Artificial Sequence: Synthetic oligonucleotide
cacauugaggugauccacc

SEQ ID NO: 2940701 - RNA, 19 nt, Artificial Sequence
  Description of Artificial Sequence: Synthetic oligonucleotide
acauacuccagugcagugg

SEQ ID NO: 2940702 - RNA, 19 nt, Artificial Sequence
  Description of Artificial Sequence: Synthetic oligonucleotide
uccaccauuccaauccacu

SEQ ID NO: 2940703 - RNA, 19 nt, Artificial Sequence
  Description of Artificial Sequence: Synthetic oligonucleotide
aacugggcggccuggaccu

SEQ ID NO: 2940704 - RNA, 19 nt, Artificial Sequence
  Description of Artificial Sequence: Synthetic oligonucleotide
caccauuccaauccacugg

SEQ ID NO: 2940705 - RNA, 19 nt, Artificial Sequence
  Description of Artificial Sequence: Synthetic oligonucleotide
uccagcucgaugcuccgag

SEQ ID NO: 2940706 - RNA, 19 nt, Artificial Sequence
  Description of Artificial Sequence: Synthetic oligonucleotide
uccacauccccaauuuccu

SEQ ID NO: 2940707 - RNA, 19 nt, Artificial Sequence
  Description of Artificial Sequence: Synthetic oligonucleotide
aagugccugguugaaguuc

SEQ ID NO: 2940708 - RNA, 19 nt, Artificial Sequence
  Description of Artificial Sequence: Synthetic oligonucleotide
accaaagcuucggucaggc

SEQ ID NO: 2940709 - RNA, 19 nt, Artificial Sequence
  Description of Artificial Sequence: Synthetic oligonucleotide
ugguugaaguucuccacca

SEQ ID NO: 2940710 - RNA, 19 nt, Artificial Sequence
  Description of Artificial Sequence: Synthetic oligonucleotide
gacagcauggucgaaccug

SEQ ID NO: 2940711 - RNA, 19 nt, Artificial Sequence
  Description of Artificial Sequence: Synthetic oligonucleotide
agcucgaugcuccgagccc

SEQ ID NO: 2940712 - RNA, 19 nt, Artificial Sequence
  Description of Artificial Sequence: Synthetic oligonucleotide
gcauggucgaaccuggccg

SEQ ID NO: 2940713 - RNA, 19 nt, Artificial Sequence
  Description of Artificial Sequence: Synthetic oligonucleotide
uccuuaagugccugguuga

SEQ ID NO: 2940714 - RNA, 19 nt, Artificial Sequence
  Description of Artificial Sequence: Synthetic oligonucleotide
auguccagcucgaugcucc

SEQ ID NO: 2940715 - RNA, 19 nt, Artificial Sequence
  Description of Artificial Sequence: Synthetic oligonucleotide
uccagugcaguggcaaugg

SEQ ID NO: 2940716 - RNA, 19 nt, Artificial Sequence
  Description of Artificial Sequence: Synthetic oligonucleotide
gucugcuuggcaaacuggg

SEQ ID NO: 2940717 - RNA, 19 nt, Artificial Sequence
  Description of Artificial Sequence: Synthetic oligonucleotide
gaaguucuccaccauucca

SEQ ID NO: 2940718 - RNA, 19 nt, Artificial Sequence
  Description of Artificial Sequence: Synthetic oligonucleotide
auccaccaaagcuucgguc

SEQ ID NO: 2940719 - RNA, 19 nt, Artificial Sequence
  Description of Artificial Sequence: Synthetic oligonucleotide
uucucugguucauguaggc

SEQ ID NO: 2940720 - RNA, 19 nt, Artificial Sequence
  Description of Artificial Sequence: Synthetic oligonucleotide
guucauucugcuuggccug

SEQ ID NO: 2940721 - RNA, 19 nt, Artificial Sequence
  Description of Artificial Sequence: Synthetic oligonucleotide
gaggugauccaccaaagcu

SEQ ID NO: 2940722 - RNA, 19 nt, Artificial Sequence
  Description of Artificial Sequence: Synthetic oligonucleotide
ugcagcugcccuuuguaga

SEQ ID NO: 2940723 - RNA, 19 nt, Artificial Sequence
  Description of Artificial Sequence: Synthetic oligonucleotide
cauggucgaaccuggccgg

SEQ ID NO: 2940724 - RNA, 19 nt, Artificial Sequence
  Description of Artificial Sequence: Synthetic oligonucleotide
caauccacuggccugucug

SEQ ID NO: 2940725 - RNA, 19 nt, Artificial Sequence
  Description of Artificial Sequence: Synthetic oligonucleotide
uugcguucauucugcuugg

SEQ ID NO: 2940726 - RNA, 19 nt, Artificial Sequence
  Description of Artificial Sequence: Synthetic oligonucleotide
guaggccugggccacaccc

SEQ ID NO: 2940727 - RNA, 19 nt, Artificial Sequence
  Description of Artificial Sequence: Synthetic oligonucleotide
acauugaggugauccacca

SEQ ID NO: 2940728 - RNA, 19 nt, Artificial Sequence
  Description of Artificial Sequence: Synthetic oligonucleotide
agcuuucucugguucaugu

SEQ ID NO: 2940729 - RNA, 19 nt, Artificial Sequence
  Description of Artificial Sequence: Synthetic oligonucleotide
aaccuggccgggugugggc

SEQ ID NO: 2940730 - RNA, 19 nt, Artificial Sequence
  Description of Artificial Sequence: Synthetic oligonucleotide
agggucuucaccucauggu

SEQ ID NO: 2940731 - RNA, 19 nt, Artificial Sequence
  Description of Artificial Sequence: Synthetic oligonucleotide
aaguucuccaccauuccaa

SEQ ID NO: 2940732 - RNA, 19 nt, Artificial Sequence
  Description of Artificial Sequence: Synthetic oligonucleotide
caugguccagcuuucucug

SEQ ID NO: 2940733 - RNA, 19 nt, Artificial Sequence
  Description of Artificial Sequence: Synthetic oligonucleotide
acaacgggccccucccucg

SEQ ID NO: 2940734 - RNA, 19 nt, Artificial Sequence
  Description of Artificial Sequence: Synthetic oligonucleotide
cuccuugcguucauucugc

SEQ ID NO: 2940735 - RNA, 19 nt, Artificial Sequence
  Description of Artificial Sequence: Synthetic oligonucleotide
gacauacuccagugcagug

SEQ ID NO: 2940736 - RNA, 19 nt, Artificial Sequence
  Description of Artificial Sequence: Synthetic oligonucleotide
gaccuguagggucuucacc

SEQ ID NO: 2940737 - RNA, 19 nt, Artificial Sequence
  Description of Artificial Sequence: Synthetic oligonucleotide
uccagcuuucucugguuca

SEQ ID NO: 2940738 - RNA, 19 nt, Artificial Sequence
  Description of Artificial Sequence: Synthetic oligonucleotide
auucugcuuggccuggugu

SEQ ID NO: 2940739 - RNA, 19 nt, Artificial Sequence
  Description of Artificial Sequence: Synthetic oligonucleotide
auuuccuuaagugccuggu

SEQ ID NO: 2940740 - RNA, 19 nt, Artificial Sequence
  Description of Artificial Sequence: Synthetic oligonucleotide
acagcauggucgaaccugg

SEQ ID NO: 2940741 - RNA, 19 nt, Artificial Sequence
  Description of Artificial Sequence: Synthetic oligonucleotide
uggccugguguucuuugag

SEQ ID NO: 2940742 - RNA, 19 nt, Artificial Sequence
  Description of Artificial Sequence: Synthetic oligonucleotide
cuuugagcaggcgggacag

SEQ ID NO: 2940743 - RNA, 19 nt, Artificial Sequence
  Description of Artificial Sequence: Synthetic oligonucleotide
ugcggugauggccucucgc

SEQ ID NO: 2940744 - RNA, 19 nt, Artificial Sequence
  Description of Artificial Sequence: Synthetic oligonucleotide
ugguguucuuugagcaggc

SEQ ID NO: 2940745 - RNA, 19 nt, Artificial Sequence
  Description of Artificial Sequence: Synthetic oligonucleotide
ucuccaccauuccaaucca

SEQ ID NO: 2940746 - RNA, 19 nt, Artificial Sequence
  Description of Artificial Sequence: Synthetic oligonucleotide
uaggauggcgcagacugca

SEQ ID NO: 2940747 - RNA, 19 nt, Artificial Sequence
  Description of Artificial Sequence: Synthetic oligonucleotide
cccuuuguagacauacucc

SEQ ID NO: 2940748 - RNA, 19 nt, Artificial Sequence
  Description of Artificial Sequence: Synthetic oligonucleotide
gaugcuccgagcccaguuc

SEQ ID NO: 2940749 - RNA, 19 nt, Artificial Sequence
  Description of Artificial Sequence: Synthetic oligonucleotide
aggcgggacagcauggucg

SEQ ID NO: 2940750 - RNA, 19 nt, Artificial Sequence
  Description of Artificial Sequence: Synthetic oligonucleotide
uucauucugcuuggccugg

SEQ ID NO: 2940751 - RNA, 19 nt, Artificial Sequence
  Description of Artificial Sequence: Synthetic oligonucleotide
uggccugucugcuuggcaa

SEQ ID NO: 2940752 - RNA, 19 nt, Artificial Sequence
  Description of Artificial Sequence: Synthetic oligonucleotide
ggugcgcauguccagcucg

SEQ ID NO: 2940753 - RNA, 19 nt, Artificial Sequence
  Description of Artificial Sequence: Synthetic oligonucleotide
cuuaagugccugguugaag

SEQ ID NO: 2940754 - RNA, 19 nt, Artificial Sequence
  Description of Artificial Sequence: Synthetic oligonucleotide
cagugcaguggcaauggug

SEQ ID NO: 2940755 - RNA, 19 nt, Artificial Sequence
  Description of Artificial Sequence: Synthetic oligonucleotide
cugcccuuuguagacauac

SEQ ID NO: 2940756 - RNA, 19 nt, Artificial Sequence
  Description of Artificial Sequence: Synthetic oligonucleotide
uguagggucuucaccucau

SEQ ID NO: 2940757 - RNA, 19 nt, Artificial Sequence
  Description of Artificial Sequence: Synthetic oligonucleotide
ggcaauggugcgcaugucc

SEQ ID NO: 2940758 - RNA, 19 nt, Artificial Sequence
  Description of Artificial Sequence: Synthetic oligonucleotide
uuuccuuaagugccugguu

SEQ ID NO: 2940759 - RNA, 19 nt, Artificial Sequence
  Description of Artificial Sequence: Synthetic oligonucleotide
cugucugcuuggcaaacug

SEQ ID NO: 2940760 - RNA, 19 nt, Artificial Sequence
  Description of Artificial Sequence: Synthetic oligonucleotide
agacauacuccagugcagu

SEQ ID NO: 2940761 - RNA, 19 nt, Artificial Sequence
  Description of Artificial Sequence: Synthetic oligonucleotide
cuuggccugguguucuuug

SEQ ID NO: 2940762 - RNA, 19 nt, Artificial Sequence
  Description of Artificial Sequence: Synthetic oligonucleotide
uggcgcagacugcagcugc

SEQ ID NO: 2940763 - RNA, 19 nt, Artificial Sequence
  Description of Artificial Sequence: Synthetic oligonucleotide
cucugguucauguaggccu

SEQ ID NO: 2940764 - RNA, 19 nt, Artificial Sequence
  Description of Artificial Sequence: Synthetic oligonucleotide
agcuggacugcgcccuggc

SEQ ID NO: 2940765 - RNA, 19 nt, Artificial Sequence
  Description of Artificial Sequence: Synthetic oligonucleotide
cuucggucaggcagguggc

SEQ ID NO: 2940766 - RNA, 19 nt, Artificial Sequence
  Description of Artificial Sequence: Synthetic oligonucleotide
ugcaguggcaauggugcgc

SEQ ID NO: 2940767 - RNA, 19 nt, Artificial Sequence
  Description of Artificial Sequence: Synthetic oligonucleotide
ccccaauuuccuuaagugc

SEQ ID NO: 2940768 - RNA, 19 nt, Artificial Sequence
  Description of Artificial Sequence: Synthetic oligonucleotide
cagcucgaugcuccgagcc

SEQ ID NO: 2940769 - RNA, 19 nt, Artificial Sequence
  Description of Artificial Sequence: Synthetic oligonucleotide
cuaggauggcgcagacugc

SEQ ID NO: 2940770 - RNA, 19 nt, Artificial Sequence
  Description of Artificial Sequence: Synthetic oligonucleotide
agcuccuugcguucauucu

SEQ ID NO: 2940771 - RNA, 19 nt, Artificial Sequence
  Description of Artificial Sequence: Synthetic oligonucleotide
cuggacugcgcccuggcuc

SEQ ID NO: 2940772 - RNA, 19 nt, Artificial Sequence
  Description of Artificial Sequence: Synthetic oligonucleotide
uuccaauccacuggccugu

SEQ ID NO: 2940773 - RNA, 19 nt, Artificial Sequence
  Description of Artificial Sequence: Synthetic oligonucleotide
caauggugcgcauguccag

SEQ ID NO: 2940774 - RNA, 19 nt, Artificial Sequence
  Description of Artificial Sequence: Synthetic oligonucleotide
uacuccagugcaguggcaa

SEQ ID NO: 2940775 - RNA, 19 nt, Artificial Sequence
  Description of Artificial Sequence: Synthetic oligonucleotide
uucugcuuggccugguguu

SEQ ID NO: 2940776 - RNA, 19 nt, Artificial Sequence
  Description of Artificial Sequence: Synthetic oligonucleotide
augguccagcuuucucugg

SEQ ID NO: 2940777 - RNA, 19 nt, Artificial Sequence
  Description of Artificial Sequence: Synthetic oligonucleotide
ccuuuguagacauacucca

SEQ ID NO: 2940778 - RNA, 19 nt, Artificial Sequence
  Description of Artificial Sequence: Synthetic oligonucleotide
cugcagcugcccuuuguag

SEQ ID NO: 2940779 - RNA, 19 nt, Artificial Sequence
  Description of Artificial Sequence: Synthetic oligonucleotide
agugccugguugaaguucu

SEQ ID NO: 2940780 - RNA, 19 nt, Artificial Sequence
  Description of Artificial Sequence: Synthetic oligonucleotide
ugguucauguaggccuggg

SEQ ID NO: 2940781 - RNA, 19 nt, Artificial Sequence
  Description of Artificial Sequence: Synthetic oligonucleotide
acugcagcugcccuuugua

SEQ ID NO: 2940782 - RNA, 19 nt, Artificial Sequence
  Description of Artificial Sequence: Synthetic oligonucleotide
acauccccaauuuccuuaa

SEQ ID NO: 2940783 - RNA, 19 nt, Artificial Sequence
  Description of Artificial Sequence: Synthetic oligonucleotide
aggugauccaccaaagcuu

SEQ ID NO: 2940784 - RNA, 19 nt, Artificial Sequence
  Description of Artificial Sequence: Synthetic oligonucleotide
ugcccuuuguagacauacu

SEQ ID NO: 2940785 - RNA, 19 nt, Artificial Sequence
  Description of Artificial Sequence: Synthetic oligonucleotide
ucgggcugcggggagcugg

SEQ ID NO: 2940786 - RNA, 19 nt, Artificial Sequence
  Description of Artificial Sequence: Synthetic oligonucleotide
uccugcagcuccuugcguu

SEQ ID NO: 2940787 - RNA, 19 nt, Artificial Sequence
  Description of Artificial Sequence: Synthetic oligonucleotide
gggacagcauggucgaacc

SEQ ID NO: 2940788 - RNA, 19 nt, Artificial Sequence
  Description of Artificial Sequence: Synthetic oligonucleotide
gcuccuugcguucauucug

SEQ ID NO: 2940789 - RNA, 19 nt, Artificial Sequence
  Description of Artificial Sequence: Synthetic oligonucleotide
cacacccacauugagguga

SEQ ID NO: 2940790 - RNA, 19 nt, Artificial Sequence
  Description of Artificial Sequence: Synthetic oligonucleotide
ugccugguugaaguucucc

SEQ ID NO: 2940791 - RNA, 19 nt, Artificial Sequence
  Description of Artificial Sequence: Synthetic oligonucleotide
uggaccuguagggucuuca

SEQ ID NO: 2940792 - RNA, 19 nt, Artificial Sequence
  Description of Artificial Sequence: Synthetic oligonucleotide
aguggcaauggugcgcaug

SEQ ID NO: 2940793 - RNA, 19 nt, Artificial Sequence
  Description of Artificial Sequence: Synthetic oligonucleotide
uaggccugggccacaccca

SEQ ID NO: 2940794 - RNA, 19 nt, Artificial Sequence
  Description of Artificial Sequence: Synthetic oligonucleotide
gcggccuggaccuguaggg

SEQ ID NO: 2940795 - RNA, 19 nt, Artificial Sequence
  Description of Artificial Sequence: Synthetic oligonucleotide
gugcaguggcaauggugcg

SEQ ID NO: 2940796 - RNA, 19 nt, Artificial Sequence
  Description of Artificial Sequence: Synthetic oligonucleotide
ggugauggccucucgccgc

SEQ ID NO: 2940797 - RNA, 19 nt, Artificial Sequence
  Description of Artificial Sequence: Synthetic oligonucleotide
uggcaaacugggcggccug

SEQ ID NO: 2940798 - RNA, 19 nt, Artificial Sequence
  Description of Artificial Sequence: Synthetic oligonucleotide
auggugcgcauguccagcu

SEQ ID NO: 2940799 - RNA, 19 nt, Artificial Sequence
  Description of Artificial Sequence: Synthetic oligonucleotide
cucaugguccagcuuucuc

SEQ ID NO: 2940800 - RNA, 19 nt, Artificial Sequence
  Description of Artificial Sequence: Synthetic oligonucleotide
gguucauguaggccugggc

SEQ ID NO: 2940801 - RNA, 19 nt, Artificial Sequence
  Description of Artificial Sequence: Synthetic oligonucleotide
acgggccccucccucgggc

SEQ ID NO: 2940802 - RNA, 19 nt, Artificial Sequence
  Description of Artificial Sequence: Synthetic oligonucleotide
gggucuucaccucaugguc

SEQ ID NO: 2940803 - RNA, 19 nt, Artificial Sequence
  Description of Artificial Sequence: Synthetic oligonucleotide
gcccuuuguagacauacuc

SEQ ID NO: 2940804 - RNA, 19 nt, Artificial Sequence
  Description of Artificial Sequence: Synthetic oligonucleotide
ggugugggcacaacgggcc

SEQ ID NO: 2940805 - RNA, 19 nt, Artificial Sequence
  Description of Artificial Sequence: Synthetic oligonucleotide
gcugcggggagcuggacug

SEQ ID NO: 2940806 - RNA, 19 nt, Artificial Sequence
  Description of Artificial Sequence: Synthetic oligonucleotide
uaagugccugguugaaguu

SEQ ID NO: 2940807 - RNA, 19 nt, Artificial Sequence
  Description of Artificial Sequence: Synthetic oligonucleotide
ggucuucaccucauggucc

SEQ ID NO: 2940808 - RNA, 19 nt, Artificial Sequence
  Description of Artificial Sequence: Synthetic oligonucleotide
caauuuccuuaagugccug

SEQ ID NO: 2940809 - RNA, 19 nt, Artificial Sequence
  Description of Artificial Sequence: Synthetic oligonucleotide
aacgggccccucccucggg

SEQ ID NO: 2940810 - RNA, 19 nt, Artificial Sequence
  Description of Artificial Sequence: Synthetic oligonucleotide
cauuccaauccacuggccu

SEQ ID NO: 2940811 - RNA, 19 nt, Artificial Sequence
  Description of Artificial Sequence: Synthetic oligonucleotide
uucuuugagcaggcgggac

SEQ ID NO: 2940812 - RNA, 19 nt, Artificial Sequence
  Description of Artificial Sequence: Synthetic oligonucleotide
uuggcaaacugggcggccu

SEQ ID NO: 2940813 - RNA, 19 nt, Artificial Sequence
  Description of Artificial Sequence: Synthetic oligonucleotide
cagcuccuugcguucauuc

SEQ ID NO: 2940814 - RNA, 19 nt, Artificial Sequence
  Description of Artificial Sequence: Synthetic oligonucleotide
ugugggcacaacgggcccc

SEQ ID NO: 2940815 - RNA, 19 nt, Artificial Sequence
  Description of Artificial Sequence: Synthetic oligonucleotide
ugagcaggcgggacagcau

SEQ ID NO: 2940816 - RNA, 19 nt, Artificial Sequence
  Description of Artificial Sequence: Synthetic oligonucleotide
uccgagcccaguucuccac

SEQ ID NO: 2940817 - RNA, 19 nt, Artificial Sequence
  Description of Artificial Sequence: Synthetic oligonucleotide
cacauccccaauuuccuua

SEQ ID NO: 2940818 - RNA, 19 nt, Artificial Sequence
  Description of Artificial Sequence: Synthetic oligonucleotide
gcagcugcccuuuguagac

SEQ ID NO: 2940819 - RNA, 19 nt, Artificial Sequence
  Description of Artificial Sequence: Synthetic oligonucleotide
agcugcccuuuguagacau

SEQ ID NO: 2940820 - RNA, 19 nt, Artificial Sequence
  Description of Artificial Sequence: Synthetic oligonucleotide
ggugauccaccaaagcuuc

SEQ ID NO: 2940821 - RNA, 19 nt, Artificial Sequence
  Description of Artificial Sequence: Synthetic oligonucleotide
guucuccaccauuccaauc

SEQ ID NO: 2940822 - RNA, 19 nt, Artificial Sequence
  Description of Artificial Sequence: Synthetic oligonucleotide
guagggucuucaccucaug

SEQ ID NO: 2940823 - RNA, 19 nt, Artificial Sequence
  Description of Artificial Sequence: Synthetic oligonucleotide
ucggucaggcagguggcug

SEQ ID NO: 2940824 - RNA, 19 nt, Artificial Sequence
  Description of Artificial Sequence: Synthetic oligonucleotide
cauucugcuuggccuggug

SEQ ID NO: 2940825 - RNA, 19 nt, Artificial Sequence
  Description of Artificial Sequence: Synthetic oligonucleotide
ggccacacccacauugagg

SEQ ID NO: 2940826 - RNA, 19 nt, Artificial Sequence
  Description of Artificial Sequence: Synthetic oligonucleotide
ugcggggagcuggacugcg

SEQ ID NO: 2940827 - RNA, 19 nt, Artificial Sequence
  Description of Artificial Sequence: Synthetic oligonucleotide
ccaccauuccaauccacug

SEQ ID NO: 2940828 - RNA, 19 nt, Artificial Sequence
  Description of Artificial Sequence: Synthetic oligonucleotide
guggcaauggugcgcaugu

SEQ ID NO: 2940829 - RNA, 19 nt, Artificial Sequence
  Description of Artificial Sequence: Synthetic oligonucleotide
caaacugggcggccuggac

SEQ ID NO: 2940830 - RNA, 19 nt, Artificial Sequence
  Description of Artificial Sequence: Synthetic oligonucleotide
ccgggugugggcacaacgg

SEQ ID NO: 2940831 - RNA, 19 nt, Artificial Sequence
  Description of Artificial Sequence: Synthetic oligonucleotide
ggcacaacgggccccuccc

SEQ ID NO: 2940832 - RNA, 19 nt, Artificial Sequence
  Description of Artificial Sequence: Synthetic oligonucleotide
ggcggccuggaccuguagg

SEQ ID NO: 2940833 - RNA, 19 nt, Artificial Sequence
  Description of Artificial Sequence: Synthetic oligonucleotide
gugauggccucucgccgcc

SEQ ID NO: 2940834 - RNA, 19 nt, Artificial Sequence
  Description of Artificial Sequence: Synthetic oligonucleotide
cuccagugcaguggcaaug

SEQ ID NO: 2940835 - RNA, 19 nt, Artificial Sequence
  Description of Artificial Sequence: Synthetic oligonucleotide
gguggcugcggugauggcc

SEQ ID NO: 2940836 - RNA, 19 nt, Artificial Sequence
  Description of Artificial Sequence: Synthetic oligonucleotide
ucgaaccuggccgggugug

SEQ ID NO: 2940837 - RNA, 19 nt, Artificial Sequence
  Description of Artificial Sequence: Synthetic oligonucleotide
guugaaguucuccaccauu

SEQ ID NO: 2940838 - RNA, 19 nt, Artificial Sequence
  Description of Artificial Sequence: Synthetic oligonucleotide
gcggugauggccucucgcc

SEQ ID NO: 2940839 - RNA, 19 nt, Artificial Sequence
  Description of Artificial Sequence: Synthetic oligonucleotide
cuuggcaaacugggcggcc

SEQ ID NO: 2940840 - RNA, 19 nt, Artificial Sequence
  Description of Artificial Sequence: Synthetic oligonucleotide
cuccaccauuccaauccac

SEQ ID NO: 2940841 - RNA, 19 nt, Artificial Sequence
  Description of Artificial Sequence: Synthetic oligonucleotide
gauccaccaaagcuucggu

SEQ ID NO: 2940842 - RNA, 19 nt, Artificial Sequence
  Description of Artificial Sequence: Synthetic oligonucleotide
acuccagugcaguggcaau

SEQ ID NO: 2940843 - RNA, 19 nt, Artificial Sequence
  Description of Artificial Sequence: Synthetic oligonucleotide
agcaggcgggacagcaugg

SEQ ID NO: 2940844 - RNA, 19 nt, Artificial Sequence
  Description of Artificial Sequence: Synthetic oligonucleotide
gccgggugugggcacaacg

SEQ ID NO: 2940845 - RNA, 19 nt, Artificial Sequence
  Description of Artificial Sequence: Synthetic oligonucleotide
aguucuccacauccccaau

SEQ ID NO: 2940846 - RNA, 19 nt, Artificial Sequence
  Description of Artificial Sequence: Synthetic oligonucleotide
cccaguucuccacaucccc

SEQ ID NO: 2940847 - RNA, 19 nt, Artificial Sequence
  Description of Artificial Sequence: Synthetic oligonucleotide
gcguucauucugcuuggcc

SEQ ID NO: 2940848 - RNA, 19 nt, Artificial Sequence
  Description of Artificial Sequence: Synthetic oligonucleotide
uccuugcguucauucugcu

SEQ ID NO: 2940849 - RNA, 19 nt, Artificial Sequence
  Description of Artificial Sequence: Synthetic oligonucleotide
accucaugguccagcuuuc

SEQ ID NO: 2940850 - RNA, 19 nt, Artificial Sequence
  Description of Artificial Sequence: Synthetic oligonucleotide
gugauccaccaaagcuucg

SEQ ID NO: 2940851 - RNA, 19 nt, Artificial Sequence
  Description of Artificial Sequence: Synthetic oligonucleotide
caguucuccacauccccaa

SEQ ID NO: 2940852 - RNA, 19 nt, Artificial Sequence
  Description of Artificial Sequence: Synthetic oligonucleotide
cuguagggucuucaccuca

SEQ ID NO: 2940853 - RNA, 19 nt, Artificial Sequence
  Description of Artificial Sequence: Synthetic oligonucleotide
cucgccgccucuucuccug

SEQ ID NO: 2940854 - RNA, 19 nt, Artificial Sequence
  Description of Artificial Sequence: Synthetic oligonucleotide
ccugguguucuuugagcag

SEQ ID NO: 2940855 - RNA, 19 nt, Artificial Sequence
  Description of Artificial Sequence: Synthetic oligonucleotide
caccaaagcuucggucagg

SEQ ID NO: 2940856 - RNA, 19 nt, Artificial Sequence
  Description of Artificial Sequence: Synthetic oligonucleotide
agguggcugcggugauggc

SEQ ID NO: 2940857 - RNA, 19 nt, Artificial Sequence
  Description of Artificial Sequence: Synthetic oligonucleotide
cacaacgggccccucccuc

SEQ ID NO: 2940858 - RNA, 19 nt, Artificial Sequence
  Description of Artificial Sequence: Synthetic oligonucleotide
cauccccaauuuccuuaag

SEQ ID NO: 2940859 - RNA, 19 nt, Artificial Sequence
  Description of Artificial Sequence: Synthetic oligonucleotide
gugugggcacaacgggccc

SEQ ID NO: 2940860 - RNA, 19 nt, Artificial Sequence
  Description of Artificial Sequence: Synthetic oligonucleotide
aggcagguggcugcgguga

SEQ ID NO: 2940861 - RNA, 19 nt, Artificial Sequence
  Description of Artificial Sequence: Synthetic oligonucleotide
gguguucuuugagcaggcg

SEQ ID NO: 2940862 - RNA, 19 nt, Artificial Sequence
  Description of Artificial Sequence: Synthetic oligonucleotide
auggucgaaccuggccggg

SEQ ID NO: 2940863 - RNA, 19 nt, Artificial Sequence
  Description of Artificial Sequence: Synthetic oligonucleotide
caacgggccccucccucgg

SEQ ID NO: 2940864 - RNA, 19 nt, Artificial Sequence
  Description of Artificial Sequence: Synthetic oligonucleotide
gcaauggugcgcaugucca

SEQ ID NO: 2940865 - RNA, 19 nt, Artificial Sequence
  Description of Artificial Sequence: Synthetic oligonucleotide
cauguccagcucgaugcuc

SEQ ID NO: 2940866 - RNA, 19 nt, Artificial Sequence
  Description of Artificial Sequence: Synthetic oligonucleotide
ggaccuguagggucuucac

SEQ ID NO: 2940867 - RNA, 19 nt, Artificial Sequence
  Description of Artificial Sequence: Synthetic oligonucleotide
ggucgaaccuggccgggug

SEQ ID NO: 2940868 - RNA, 19 nt, Artificial Sequence
  Description of Artificial Sequence: Synthetic oligonucleotide
guucuuugagcaggcggga

SEQ ID NO: 2940869 - RNA, 19 nt, Artificial Sequence
  Description of Artificial Sequence: Synthetic oligonucleotide
cagcauggucgaaccuggc

SEQ ID NO: 2940870 - RNA, 19 nt, Artificial Sequence
  Description of Artificial Sequence: Synthetic oligonucleotide
gauggccucucgccgccuc

SEQ ID NO: 2940871 - RNA, 19 nt, Artificial Sequence
  Description of Artificial Sequence: Synthetic oligonucleotide
ugcuccgagcccaguucuc

SEQ ID NO: 2940872 - RNA, 19 nt, Artificial Sequence
  Description of Artificial Sequence: Synthetic oligonucleotide
ucaccucaugguccagcuu

SEQ ID NO: 2940873 - RNA, 19 nt, Artificial Sequence
  Description of Artificial Sequence: Synthetic oligonucleotide
cugguucauguaggccugg

SEQ ID NO: 2940874 - RNA, 19 nt, Artificial Sequence
  Description of Artificial Sequence: Synthetic oligonucleotide
uccacuggccugucugcuu

SEQ ID NO: 2940875 - RNA, 19 nt, Artificial Sequence
  Description of Artificial Sequence: Synthetic oligonucleotide
aagcuucggucaggcaggu

SEQ ID NO: 2940876 - RNA, 19 nt, Artificial Sequence
  Description of Artificial Sequence: Synthetic oligonucleotide
gagcuggacugcgcccugg

SEQ ID NO: 2940877 - RNA, 19 nt, Artificial Sequence
  Description of Artificial Sequence: Synthetic oligonucleotide
caccucaugguccagcuuu

SEQ ID NO: 2940878 - RNA, 19 nt, Artificial Sequence
  Description of Artificial Sequence: Synthetic oligonucleotide
ccaccaaagcuucggucag

SEQ ID NO: 2940879 - RNA, 19 nt, Artificial Sequence
  Description of Artificial Sequence: Synthetic oligonucleotide
auggcgcagacugcagcug

SEQ ID NO: 2940880 - RNA, 19 nt, Artificial Sequence
  Description of Artificial Sequence: Synthetic oligonucleotide
auccacuggccugucugcu

SEQ ID NO: 2940881 - RNA, 19 nt, Artificial Sequence
  Description of Artificial Sequence: Synthetic oligonucleotide
uucggucaggcagguggcu

SEQ ID NO: 2940882 - RNA, 19 nt, Artificial Sequence
  Description of Artificial Sequence: Synthetic oligonucleotide
ccacauugaggugauccac

SEQ ID NO: 2940883 - RNA, 19 nt, Artificial Sequence
  Description of Artificial Sequence: Synthetic oligonucleotide
ucccucgggcugcggggag

SEQ ID NO: 2940884 - RNA, 19 nt, Artificial Sequence
  Description of Artificial Sequence: Synthetic oligonucleotide
gagcccaguucuccacauc

SEQ ID NO: 2940885 - RNA, 19 nt, Artificial Sequence
  Description of Artificial Sequence: Synthetic oligonucleotide
ccauuccaauccacuggcc

SEQ ID NO: 2940886 - RNA, 19 nt, Artificial Sequence
  Description of Artificial Sequence: Synthetic oligonucleotide
caggcgggacagcaugguc

SEQ ID NO: 2940887 - RNA, 19 nt, Artificial Sequence
  Description of Artificial Sequence: Synthetic oligonucleotide
auggccucucgccgccucu

SEQ ID NO: 2940888 - RNA, 19 nt, Artificial Sequence
  Description of Artificial Sequence: Synthetic oligonucleotide
cauugaggugauccaccaa

SEQ ID NO: 2940889 - RNA, 19 nt, Artificial Sequence
  Description of Artificial Sequence: Synthetic oligonucleotide
ggcaaacugggcggccugg

SEQ ID NO: 2940890 - RNA, 19 nt, Artificial Sequence
  Description of Artificial Sequence: Synthetic oligonucleotide
gcgcauguccagcucgaug

SEQ ID NO: 2940891 - RNA, 19 nt, Artificial Sequence
  Description of Artificial Sequence: Synthetic oligonucleotide
aggauggcgcagacugcag

SEQ ID NO: 2940892 - RNA, 19 nt, Artificial Sequence
  Description of Artificial Sequence: Synthetic oligonucleotide
ggcgggacagcauggucga

SEQ ID NO: 2940893 - RNA, 19 nt, Artificial Sequence
  Description of Artificial Sequence: Synthetic oligonucleotide
uggucgaaccuggccgggu

SEQ ID NO: 2940894 - RNA, 19 nt, Artificial Sequence
  Description of Artificial Sequence: Synthetic oligonucleotide
cugcggugauggccucucg

SEQ ID NO: 2940895 - RNA, 19 nt, Artificial Sequence
  Description of Artificial Sequence: Synthetic oligonucleotide
gacugcagcugcccuuugu

SEQ ID NO: 2940896 - RNA, 19 nt, Artificial Sequence
  Description of Artificial Sequence: Synthetic oligonucleotide
gcaguggcaauggugcgca

SEQ ID NO: 2940897 - RNA, 19 nt, Artificial Sequence
  Description of Artificial Sequence: Synthetic oligonucleotide
ccacuggccugucugcuug

SEQ ID NO: 2940898 - RNA, 19 nt, Artificial Sequence
  Description of Artificial Sequence: Synthetic oligonucleotide
agacugcagcugcccuuug

SEQ ID NO: 2940899 - RNA, 19 nt, Artificial Sequence
  Description of Artificial Sequence: Synthetic oligonucleotide
cguucauucugcuuggccu

SEQ ID NO: 2940900 - RNA, 19 nt, Artificial Sequence
  Description of Artificial Sequence: Synthetic oligonucleotide
ggucaggcagguggcugcg

SEQ ID NO: 2940901 - RNA, 19 nt, Artificial Sequence
  Description of Artificial Sequence: Synthetic oligonucleotide
cuccgagcccaguucucca

SEQ ID NO: 2940902 - RNA, 19 nt, Artificial Sequence
  Description of Artificial Sequence: Synthetic oligonucleotide
gcuccgagcccaguucucc

SEQ ID NO: 2940903 - RNA, 19 nt, Artificial Sequence
  Description of Artificial Sequence: Synthetic oligonucleotide
guucuccacauccccaauu

SEQ ID NO: 2940904 - RNA, 19 nt, Artificial Sequence
  Description of Artificial Sequence: Synthetic oligonucleotide
ggggagcuggacugcgccc

SEQ ID NO: 2940905 - RNA, 19 nt, Artificial Sequence
  Description of Artificial Sequence: Synthetic oligonucleotide
ccucccucgggcugcgggg

SEQ ID NO: 2940906 - RNA, 19 nt, Artificial Sequence
  Description of Artificial Sequence: Synthetic oligonucleotide
accuggccgggugugggca

SEQ ID NO: 2940907 - RNA, 19 nt, Artificial Sequence
  Description of Artificial Sequence: Synthetic oligonucleotide
gucaggcagguggcugcgg

SEQ ID NO: 2940908 - RNA, 19 nt, Artificial Sequence
  Description of Artificial Sequence: Synthetic oligonucleotide
gggcacaacgggccccucc

SEQ ID NO: 2940909 - RNA, 19 nt, Artificial Sequence
  Description of Artificial Sequence: Synthetic oligonucleotide
ccaguucuccacaucccca

SEQ ID NO: 2940910 - RNA, 19 nt, Artificial Sequence
  Description of Artificial Sequence: Synthetic oligonucleotide
ccuguagggucuucaccuc

SEQ ID NO: 2940911 - RNA, 19 nt, Artificial Sequence
  Description of Artificial Sequence: Synthetic oligonucleotide
cuggccugucugcuuggca

SEQ ID NO: 2940912 - RNA, 19 nt, Artificial Sequence
  Description of Artificial Sequence: Synthetic oligonucleotide
cggugauggccucucgccg

SEQ ID NO: 2940913 - RNA, 19 nt, Artificial Sequence
  Description of Artificial Sequence: Synthetic oligonucleotide
acacccacauugaggugau

SEQ ID NO: 2940914 - RNA, 19 nt, Artificial Sequence
  Description of Artificial Sequence: Synthetic oligonucleotide
uccaauccacuggccuguc

SEQ ID NO: 2940915 - RNA, 19 nt, Artificial Sequence
  Description of Artificial Sequence: Synthetic oligonucleotide
gcuuucucugguucaugua

SEQ ID NO: 2940916 - RNA, 19 nt, Artificial Sequence
  Description of Artificial Sequence: Synthetic oligonucleotide
gcucgaugcuccgagccca

SEQ ID NO: 2940917 - RNA, 19 nt, Artificial Sequence
  Description of Artificial Sequence: Synthetic oligonucleotide
ccagcucgaugcuccgagc

SEQ ID NO: 2940918 - RNA, 19 nt, Artificial Sequence
  Description of Artificial Sequence: Synthetic oligonucleotide
uggcaauggugcgcauguc

SEQ ID NO: 2940919 - RNA, 19 nt, Artificial Sequence
  Description of Artificial Sequence: Synthetic oligonucleotide
ucgaugcuccgagcccagu

SEQ ID NO: 2940920 - RNA, 19 nt, Artificial Sequence
  Description of Artificial Sequence: Synthetic oligonucleotide
ccaauuuccuuaagugccu

SEQ ID NO: 2940921 - RNA, 19 nt, Artificial Sequence
  Description of Artificial Sequence: Synthetic oligonucleotide
ugcgcauguccagcucgau

SEQ ID NO: 2940922 - RNA, 19 nt, Artificial Sequence
  Description of Artificial Sequence: Synthetic oligonucleotide
auacuccagugcaguggca

SEQ ID NO: 2940923 - RNA, 19 nt, Artificial Sequence
  Description of Artificial Sequence: Synthetic oligonucleotide
ugcuuggccugguguucuu

SEQ ID NO: 2940924 - RNA, 19 nt, Artificial Sequence
  Description of Artificial Sequence: Synthetic oligonucleotide
ugggcggccuggaccugua

SEQ ID NO: 2940925 - RNA, 19 nt, Artificial Sequence
  Description of Artificial Sequence: Synthetic oligonucleotide
ggagcuggacugcgcccug

SEQ ID NO: 2940926 - RNA, 19 nt, Artificial Sequence
  Description of Artificial Sequence: Synthetic oligonucleotide
gucgaaccuggccgggugu

SEQ ID NO: 2940927 - RNA, 19 nt, Artificial Sequence
  Description of Artificial Sequence: Synthetic oligonucleotide
cugcggggagcuggacugc

SEQ ID NO: 2940928 - RNA, 19 nt, Artificial Sequence
  Description of Artificial Sequence: Synthetic oligonucleotide
ugauggccucucgccgccu

SEQ ID NO: 2940929 - RNA, 19 nt, Artificial Sequence
  Description of Artificial Sequence: Synthetic oligonucleotide
ccgccucuucuccugcagc

SEQ ID NO: 2940930 - RNA, 19 nt, Artificial Sequence
  Description of Artificial Sequence: Synthetic oligonucleotide
ggcgcagacugcagcugcc

SEQ ID NO: 2940931 - RNA, 19 nt, Artificial Sequence
  Description of Artificial Sequence: Synthetic oligonucleotide
ccucucgccgccucuucuc

SEQ ID NO: 2940932 - RNA, 19 nt, Artificial Sequence
  Description of Artificial Sequence: Synthetic oligonucleotide
cggggagcuggacugcgcc

SEQ ID NO: 2940933 - RNA, 19 nt, Artificial Sequence
  Description of Artificial Sequence: Synthetic oligonucleotide
ggccugucugcuuggcaaa

SEQ ID NO: 2940934 - RNA, 19 nt, Artificial Sequence
  Description of Artificial Sequence: Synthetic oligonucleotide
gguugaaguucuccaccau

SEQ ID NO: 2940935 - RNA, 19 nt, Artificial Sequence
  Description of Artificial Sequence: Synthetic oligonucleotide
agcuucggucaggcaggug

SEQ ID NO: 2940936 - RNA, 19 nt, Artificial Sequence
  Description of Artificial Sequence: Synthetic oligonucleotide
cgggacagcauggucgaac

SEQ ID NO: 2940937 - RNA, 19 nt, Artificial Sequence
  Description of Artificial Sequence: Synthetic oligonucleotide
gcugcggugauggccucuc

SEQ ID NO: 2940938 - RNA, 19 nt, Artificial Sequence
  Description of Artificial Sequence: Synthetic oligonucleotide
gcgcagacugcagcugccc

SEQ ID NO: 2940939 - RNA, 19 nt, Artificial Sequence
  Description of Artificial Sequence: Synthetic oligonucleotide
uggcugcggugauggccuc

SEQ ID NO: 2940940 - RNA, 19 nt, Artificial Sequence
  Description of Artificial Sequence: Synthetic oligonucleotide
uggccucucgccgccucuu

SEQ ID NO: 2940941 - RNA, 19 nt, Artificial Sequence
  Description of Artificial Sequence: Synthetic oligonucleotide
ccacacccacauugaggug

SEQ ID NO: 2940942 - RNA, 19 nt, Artificial Sequence
  Description of Artificial Sequence: Synthetic oligonucleotide
guccagcucgaugcuccga

SEQ ID NO: 2940943 - RNA, 19 nt, Artificial Sequence
  Description of Artificial Sequence: Synthetic oligonucleotide
gccugucugcuuggcaaac

SEQ ID NO: 2940944 - RNA, 19 nt, Artificial Sequence
  Description of Artificial Sequence: Synthetic oligonucleotide
gcaaacugggcggccugga

SEQ ID NO: 2940945 - RNA, 19 nt, Artificial Sequence
  Description of Artificial Sequence: Synthetic oligonucleotide
cuggaccuguagggucuuc

SEQ ID NO: 2940946 - RNA, 19 nt, Artificial Sequence
  Description of Artificial Sequence: Synthetic oligonucleotide
gcagguggcugcggugaug

SEQ ID NO: 2940947 - RNA, 19 nt, Artificial Sequence
  Description of Artificial Sequence: Synthetic oligonucleotide
cagcugcccuuuguagaca

SEQ ID NO: 2940948 - RNA, 19 nt, Artificial Sequence
  Description of Artificial Sequence: Synthetic oligonucleotide
ccaaagcuucggucaggca

SEQ ID NO: 2940949 - RNA, 19 nt, Artificial Sequence
  Description of Artificial Sequence: Synthetic oligonucleotide
cucccucgggcugcgggga

SEQ ID NO: 2940950 - RNA, 19 nt, Artificial Sequence
  Description of Artificial Sequence: Synthetic oligonucleotide
ggcugcggggagcuggacu

SEQ ID NO: 2940951 - RNA, 19 nt, Artificial Sequence
  Description of Artificial Sequence: Synthetic oligonucleotide
cugcuuggccugguguucu

SEQ ID NO: 2940952 - RNA, 19 nt, Artificial Sequence
  Description of Artificial Sequence: Synthetic oligonucleotide
ggacagcauggucgaaccu

SEQ ID NO: 2940953 - RNA, 19 nt, Artificial Sequence
  Description of Artificial Sequence: Synthetic oligonucleotide
uggccgggugugggcacaa

SEQ ID NO: 2940954 - RNA, 19 nt, Artificial Sequence
  Description of Artificial Sequence: Synthetic oligonucleotide
acugggcggccuggaccug

SEQ ID NO: 2940955 - RNA, 19 nt, Artificial Sequence
  Description of Artificial Sequence: Synthetic oligonucleotide
gggagcuggacugcgcccu

SEQ ID NO: 2940956 - RNA, 19 nt, Artificial Sequence
  Description of Artificial Sequence: Synthetic oligonucleotide
cagacugcagcugcccuuu

SEQ ID NO: 2940957 - RNA, 19 nt, Artificial Sequence
  Description of Artificial Sequence: Synthetic oligonucleotide
gggccccucccucgggcug

SEQ ID NO: 2940958 - RNA, 19 nt, Artificial Sequence
  Description of Artificial Sequence: Synthetic oligonucleotide
gcauguccagcucgaugcu

SEQ ID NO: 2940959 - RNA, 19 nt, Artificial Sequence
  Description of Artificial Sequence: Synthetic oligonucleotide
gugccugguugaaguucuc

SEQ ID NO: 2940960 - RNA, 19 nt, Artificial Sequence
  Description of Artificial Sequence: Synthetic oligonucleotide
ccuuaagugccugguugaa

SEQ ID NO: 2940961 - RNA, 19 nt, Artificial Sequence
  Description of Artificial Sequence: Synthetic oligonucleotide
gugggcacaacgggccccu

SEQ ID NO: 2940962 - RNA, 19 nt, Artificial Sequence
  Description of Artificial Sequence: Synthetic oligonucleotide
cgaaccuggccgggugugg

SEQ ID NO: 2940963 - RNA, 19 nt, Artificial Sequence
  Description of Artificial Sequence: Synthetic oligonucleotide
gcagacugcagcugcccuu

SEQ ID NO: 2940964 - RNA, 19 nt, Artificial Sequence
  Description of Artificial Sequence: Synthetic oligonucleotide
ggccccucccucgggcugc

SEQ ID NO: 2940965 - RNA, 19 nt, Artificial Sequence
  Description of Artificial Sequence: Synthetic oligonucleotide
gggcggccuggaccuguag

SEQ ID NO: 2940966 - RNA, 19 nt, Artificial Sequence
  Description of Artificial Sequence: Synthetic oligonucleotide
ccuggccgggugugggcac

SEQ ID NO: 2940967 - RNA, 19 nt, Artificial Sequence
  Description of Artificial Sequence: Synthetic oligonucleotide
gguccagcuuucucugguu

SEQ ID NO: 2940968 - RNA, 19 nt, Artificial Sequence
  Description of Artificial Sequence: Synthetic oligonucleotide
ccgagcccaguucuccaca

SEQ ID NO: 2940969 - RNA, 19 nt, Artificial Sequence
  Description of Artificial Sequence: Synthetic oligonucleotide
cuggccgggugugggcaca

SEQ ID NO: 2940970 - RNA, 19 nt, Artificial Sequence
  Description of Artificial Sequence: Synthetic oligonucleotide
gccuggaccuguagggucu

SEQ ID NO: 2940971 - RNA, 19 nt, Artificial Sequence
  Description of Artificial Sequence: Synthetic oligonucleotide
cuccugcagcuccuugcgu

SEQ ID NO: 2940972 - RNA, 19 nt, Artificial Sequence
  Description of Artificial Sequence: Synthetic oligonucleotide
ggccucucgccgccucuuc

SEQ ID NO: 2940973 - RNA, 19 nt, Artificial Sequence
  Description of Artificial Sequence: Synthetic oligonucleotide
ugggcacaacgggccccuc

SEQ ID NO: 2940974 - RNA, 19 nt, Artificial Sequence
  Description of Artificial Sequence: Synthetic oligonucleotide
gcggggagcuggacugcgc

SEQ ID NO: 2940975 - RNA, 19 nt, Artificial Sequence
  Description of Artificial Sequence: Synthetic oligonucleotide
gcuggacugcgcccuggcu

SEQ ID NO: 2940976 - RNA, 19 nt, Artificial Sequence
  Description of Artificial Sequence: Synthetic oligonucleotide
cucgggcugcggggagcug

SEQ ID NO: 2940977 - RNA, 19 nt, Artificial Sequence
  Description of Artificial Sequence: Synthetic oligonucleotide
gccucucgccgccucuucu

SEQ ID NO: 2940978 - RNA, 19 nt, Artificial Sequence
  Description of Artificial Sequence: Synthetic oligonucleotide
cccucgggcugcggggagc

SEQ ID NO: 2940979 - RNA, 19 nt, Artificial Sequence
  Description of Artificial Sequence: Synthetic oligonucleotide
gcaggcgggacagcauggu

SEQ ID NO: 2940980 - RNA, 19 nt, Artificial Sequence
  Description of Artificial Sequence: Synthetic oligonucleotide
cgccucuucuccugcagcu

SEQ ID NO: 2940981 - RNA, 19 nt, Artificial Sequence
  Description of Artificial Sequence: Synthetic oligonucleotide
ccuugcguucauucugcuu

SEQ ID NO: 2940982 - RNA, 19 nt, Artificial Sequence
  Description of Artificial Sequence: Synthetic oligonucleotide
cugggcggccuggaccugu

SEQ ID NO: 2940983 - RNA, 19 nt, Artificial Sequence
  Description of Artificial Sequence: Synthetic oligonucleotide
gcacaacgggccccucccu

SEQ ID NO: 2940984 - RNA, 19 nt, Artificial Sequence
  Description of Artificial Sequence: Synthetic oligonucleotide
ccugucugcuuggcaaacu

SEQ ID NO: 2940985 - RNA, 19 nt, Artificial Sequence
  Description of Artificial Sequence: Synthetic oligonucleotide
ccacauccccaauuuccuu

SEQ ID NO: 2940986 - RNA, 19 nt, Artificial Sequence
  Description of Artificial Sequence: Synthetic oligonucleotide
ggcagguggcugcggugau

SEQ ID NO: 2940987 - RNA, 19 nt, Artificial Sequence
  Description of Artificial Sequence: Synthetic oligonucleotide
gccccucccucgggcugcg

SEQ ID NO: 2940988 - RNA, 19 nt, Artificial Sequence
  Description of Artificial Sequence: Synthetic oligonucleotide
gcugcccuuuguagacaua

SEQ ID NO: 2940989 - RNA, 19 nt, Artificial Sequence
  Description of Artificial Sequence: Synthetic oligonucleotide
ccagugcaguggcaauggu

SEQ ID NO: 2940990 - RNA, 19 nt, Artificial Sequence
  Description of Artificial Sequence: Synthetic oligonucleotide
ggccgggugugggcacaac

SEQ ID NO: 2940991 - RNA, 19 nt, Artificial Sequence
  Description of Artificial Sequence: Synthetic oligonucleotide
caguggcaauggugcgcau

SEQ ID NO: 2940992 - RNA, 19 nt, Artificial Sequence
  Description of Artificial Sequence: Synthetic oligonucleotide
ccucaugguccagcuuucu

SEQ ID NO: 2940993 - RNA, 19 nt, Artificial Sequence
  Description of Artificial Sequence: Synthetic oligonucleotide
gcuuggccugguguucuuu

SEQ ID NO: 2940994 - RNA, 19 nt, Artificial Sequence
  Description of Artificial Sequence: Synthetic oligonucleotide
gggcugcggggagcuggac

SEQ ID NO: 2940995 - RNA, 19 nt, Artificial Sequence
  Description of Artificial Sequence: Synthetic oligonucleotide
cgcagacugcagcugcccu

SEQ ID NO: 2940996 - RNA, 19 nt, Artificial Sequence
  Description of Artificial Sequence: Synthetic oligonucleotide
cgggcugcggggagcugga

SEQ ID NO: 2940997 - RNA, 19 nt, Artificial Sequence
  Description of Artificial Sequence: Synthetic oligonucleotide
ggcugcggugauggccucu

SEQ ID NO: 2940998 - RNA, 19 nt, Artificial Sequence
  Description of Artificial Sequence: Synthetic oligonucleotide
cgagcccaguucuccacau

SEQ ID NO: 2940999 - RNA, 19 nt, Artificial Sequence
  Description of Artificial Sequence: Synthetic oligonucleotide
cgaugcuccgagcccaguu

SEQ ID NO: 2941000 - RNA, 19 nt, Artificial Sequence
  Description of Artificial Sequence: Synthetic oligonucleotide
gcgggacagcauggucgaa

SEQ ID NO: 2941001 - RNA, 19 nt, Artificial Sequence
  Description of Artificial Sequence: Synthetic oligonucleotide
ccucgggcugcggggagcu

SEQ ID NO: 2941002 - RNA, 19 nt, Artificial Sequence
  Description of Artificial Sequence: Synthetic oligonucleotide
ccccucccucgggcugcgg

SEQ ID NO: 2941003 - RNA, 19 nt, Artificial Sequence
  Description of Artificial Sequence: Synthetic oligonucleotide
cgggccccucccucgggcu

SEQ ID NO: 2941004 - RNA, 19 nt, Artificial Sequence
  Description of Artificial Sequence: Synthetic oligonucleotide
aguaggaacccacagcucc

SEQ ID NO: 2941005 - RNA, 19 nt, Artificial Sequence
  Description of Artificial Sequence: Synthetic oligonucleotide
agauguaacugucaauagc

SEQ ID NO: 2941006 - RNA, 19 nt, Artificial Sequence
  Description of Artificial Sequence: Synthetic oligonucleotide
ucugaucugagucaaucgg

SEQ ID NO: 2941007 - RNA, 19 nt, Artificial Sequence
  Description of Artificial Sequence: Synthetic oligonucleotide
gauguaacugucaauagcc

SEQ ID NO: 2941008 - RNA, 19 nt, Artificial Sequence
  Description of Artificial Sequence: Synthetic oligonucleotide
gagucaaucggccauacag

SEQ ID NO: 2941009 - RNA, 19 nt, Artificial Sequence
  Description of Artificial Sequence: Synthetic oligonucleotide
uguuccuucugaaagagcu

SEQ ID NO: 2941010 - RNA, 19 nt, Artificial Sequence
  Description of Artificial Sequence: Synthetic oligonucleotide
uucucuucgaauuugcagc

SEQ ID NO: 2941011 - RNA, 19 nt, Artificial Sequence
  Description of Artificial Sequence: Synthetic oligonucleotide
ucaauagccagcaccacag

SEQ ID NO: 2941012 - RNA, 19 nt, Artificial Sequence
  Description of Artificial Sequence: Synthetic oligonucleotide
aaugaaagccgcucggaag

SEQ ID NO: 2941013 - RNA, 19 nt, Artificial Sequence
  Description of Artificial Sequence: Synthetic oligonucleotide
uucagagucauguaggaga

SEQ ID NO: 2941014 - RNA, 19 nt, Artificial Sequence
  Description of Artificial Sequence: Synthetic oligonucleotide
agagucauguaggagaggc

SEQ ID NO: 2941015 - RNA, 19 nt, Artificial Sequence
  Description of Artificial Sequence: Synthetic oligonucleotide
gaauuugcagcguaauucc

SEQ ID NO: 2941016 - RNA, 19 nt, Artificial Sequence
  Description of Artificial Sequence: Synthetic oligonucleotide
agcaccacagaguaggaac

SEQ ID NO: 2941017 - RNA, 19 nt, Artificial Sequence
  Description of Artificial Sequence: Synthetic oligonucleotide
aauagccagcaccacagag

SEQ ID NO: 2941018 - RNA, 19 nt, Artificial Sequence
  Description of Artificial Sequence: Synthetic oligonucleotide
gacauucagagucauguag

SEQ ID NO: 2941019 - RNA, 19 nt, Artificial Sequence
  Description of Artificial Sequence: Synthetic oligonucleotide
uuucucuucgaauuugcag

SEQ ID NO: 2941020 - RNA, 19 nt, Artificial Sequence
  Description of Artificial Sequence: Synthetic oligonucleotide
agcguaauuccacugacag

SEQ ID NO: 2941021 - RNA, 19 nt, Artificial Sequence
  Description of Artificial Sequence: Synthetic oligonucleotide
agaguaggaacccacagcu

SEQ ID NO: 2941022 - RNA, 19 nt, Artificial Sequence
  Description of Artificial Sequence: Synthetic oligonucleotide
aagauguaacugucaauag

SEQ ID NO: 2941023 - RNA, 19 nt, Artificial Sequence
  Description of Artificial Sequence: Synthetic oligonucleotide
uguaacugucaauagccag

SEQ ID NO: 2941024 - RNA, 19 nt, Artificial Sequence
  Description of Artificial Sequence: Synthetic oligonucleotide
aaaggcacuccaaugaaag

SEQ ID NO: 2941025 - RNA, 19 nt, Artificial Sequence
  Description of Artificial Sequence: Synthetic oligonucleotide
acugacagccaacaucccc

SEQ ID NO: 2941026 - RNA, 19 nt, Artificial Sequence
  Description of Artificial Sequence: Synthetic oligonucleotide
aaggcacuccaaugaaagc

SEQ ID NO: 2941027 - RNA, 19 nt, Artificial Sequence
  Description of Artificial Sequence: Synthetic oligonucleotide
uggaaaggcacuccaauga

SEQ ID NO: 2941028 - RNA, 19 nt, Artificial Sequence
  Description of Artificial Sequence: Synthetic oligonucleotide
aggcacuccaaugaaagcc

SEQ ID NO: 2941029 - RNA, 19 nt, Artificial Sequence
  Description of Artificial Sequence: Synthetic oligonucleotide
ucagagucauguaggagag

SEQ ID NO: 2941030 - RNA, 19 nt, Artificial Sequence
  Description of Artificial Sequence: Synthetic oligonucleotide
aacccacagcuccacacgc

SEQ ID NO: 2941031 - RNA, 19 nt, Artificial Sequence
  Description of Artificial Sequence: Synthetic oligonucleotide
ugaucugagucaaucggcc

SEQ ID NO: 2941032 - RNA, 19 nt, Artificial Sequence
  Description of Artificial Sequence: Synthetic oligonucleotide
acaaggaagucuuuagucu

SEQ ID NO: 2941033 - RNA, 19 nt, Artificial Sequence
  Description of Artificial Sequence: Synthetic oligonucleotide
ucucuucgaauuugcagcg

SEQ ID NO: 2941034 - RNA, 19 nt, Artificial Sequence
  Description of Artificial Sequence: Synthetic oligonucleotide
ucuuuagucuggaaaggca

SEQ ID NO: 2941035 - RNA, 19 nt, Artificial Sequence
  Description of Artificial Sequence: Synthetic oligonucleotide
gacaaggaagucuuuaguc

SEQ ID NO: 2941036 - RNA, 19 nt, Artificial Sequence
  Description of Artificial Sequence: Synthetic oligonucleotide
uggcuguuccuucugaaag

SEQ ID NO: 2941037 - RNA, 19 nt, Artificial Sequence
  Description of Artificial Sequence: Synthetic oligonucleotide
uccaaugaaagccgcucgg

SEQ ID NO: 2941038 - RNA, 19 nt, Artificial Sequence
  Description of Artificial Sequence: Synthetic oligonucleotide
cuuuagucuggaaaggcac

SEQ ID NO: 2941039 - RNA, 19 nt, Artificial Sequence
  Description of Artificial Sequence: Synthetic oligonucleotide
uugagugcucuccugagga

SEQ ID NO: 2941040 - RNA, 19 nt, Artificial Sequence
  Description of Artificial Sequence: Synthetic oligonucleotide
gaagauguaacugucaaua

SEQ ID NO: 2941041 - RNA, 19 nt, Artificial Sequence
  Description of Artificial Sequence: Synthetic oligonucleotide
cuccugaggacauucagag

SEQ ID NO: 2941042 - RNA, 19 nt, Artificial Sequence
  Description of Artificial Sequence: Synthetic oligonucleotide
ucugaaagagcucucugau

SEQ ID NO: 2941043 - RNA, 19 nt, Artificial Sequence
  Description of Artificial Sequence: Synthetic oligonucleotide
uucuacagcagcaggggug

SEQ ID NO: 2941044 - RNA, 19 nt, Artificial Sequence
  Description of Artificial Sequence: Synthetic oligonucleotide
ucuuucucuucgaauuugc

SEQ ID NO: 2941045 - RNA, 19 nt, Artificial Sequence
  Description of Artificial Sequence: Synthetic oligonucleotide
aggacauucagagucaugu

SEQ ID NO: 2941046 - RNA, 19 nt, Artificial Sequence
  Description of Artificial Sequence: Synthetic oligonucleotide
uucugaaagagcucucuga

SEQ ID NO: 2941047 - RNA, 19 nt, Artificial Sequence
  Description of Artificial Sequence: Synthetic oligonucleotide
caaucggccauacagccgc

SEQ ID NO: 2941048 - RNA, 19 nt, Artificial Sequence
  Description of Artificial Sequence: Synthetic oligonucleotide
uccacugacagccaacauc

SEQ ID NO: 2941049 - RNA, 19 nt, Artificial Sequence
  Description of Artificial Sequence: Synthetic oligonucleotide
ucucaggggagggauaugg

SEQ ID NO: 2941050 - RNA, 19 nt, Artificial Sequence
  Description of Artificial Sequence: Synthetic oligonucleotide
agucaaucggccauacagc

SEQ ID NO: 2941051 - RNA, 19 nt, Artificial Sequence
  Description of Artificial Sequence: Synthetic oligonucleotide
acauucagagucauguagg

SEQ ID NO: 2941052 - RNA, 19 nt, Artificial Sequence
  Description of Artificial Sequence: Synthetic oligonucleotide
uguaggagaggcuggagaa

SEQ ID NO: 2941053 - RNA, 19 nt, Artificial Sequence
  Description of Artificial Sequence: Synthetic oligonucleotide
caggggagggauauggugg

SEQ ID NO: 2941054 - RNA, 19 nt, Artificial Sequence
  Description of Artificial Sequence: Synthetic oligonucleotide
augaaagccgcucggaagu

SEQ ID NO: 2941055 - RNA, 19 nt, Artificial Sequence
  Description of Artificial Sequence: Synthetic oligonucleotide
uuuagucuggaaaggcacu

SEQ ID NO: 2941056 - RNA, 19 nt, Artificial Sequence
  Description of Artificial Sequence: Synthetic oligonucleotide
caaggaagucuuuagucug

SEQ ID NO: 2941057 - RNA, 19 nt, Artificial Sequence
  Description of Artificial Sequence: Synthetic oligonucleotide
ucaaucggccauacagccg

SEQ ID NO: 2941058 - RNA, 19 nt, Artificial Sequence
  Description of Artificial Sequence: Synthetic oligonucleotide
aggacaaggaagucuuuag

SEQ ID NO: 2941059 - RNA, 19 nt, Artificial Sequence
  Description of Artificial Sequence: Synthetic oligonucleotide
cauacagccgcucucucag

SEQ ID NO: 2941060 - RNA, 19 nt, Artificial Sequence
  Description of Artificial Sequence: Synthetic oligonucleotide
gauaugguggcuggggucc

SEQ ID NO: 2941061 - RNA, 19 nt, Artificial Sequence
  Description of Artificial Sequence: Synthetic oligonucleotide
acagaguaggaacccacag

SEQ ID NO: 2941062 - RNA, 19 nt, Artificial Sequence
  Description of Artificial Sequence: Synthetic oligonucleotide
cugaucugagucaaucggc

SEQ ID NO: 2941063 - RNA, 19 nt, Artificial Sequence
  Description of Artificial Sequence: Synthetic oligonucleotide
ucagccuucuacagcagca

SEQ ID NO: 2941064 - RNA, 19 nt, Artificial Sequence
  Description of Artificial Sequence: Synthetic oligonucleotide
aauuccacugacagccaac

SEQ ID NO: 2941065 - RNA, 19 nt, Artificial Sequence
  Description of Artificial Sequence: Synthetic oligonucleotide
cucugaucugagucaaucg

SEQ ID NO: 2941066 - RNA, 19 nt, Artificial Sequence
  Description of Artificial Sequence: Synthetic oligonucleotide
gucaaucggccauacagcc

SEQ ID NO: 2941067 - RNA, 19 nt, Artificial Sequence
  Description of Artificial Sequence: Synthetic oligonucleotide
guaacugucaauagccagc

SEQ ID NO: 2941068 - RNA, 19 nt, Artificial Sequence
  Description of Artificial Sequence: Synthetic oligonucleotide
ucuggaaaggcacuccaau

SEQ ID NO: 2941069 - RNA, 19 nt, Artificial Sequence
  Description of Artificial Sequence: Synthetic oligonucleotide
gaacccacagcuccacacg

SEQ ID NO: 2941070 - RNA, 19 nt, Artificial Sequence
  Description of Artificial Sequence: Synthetic oligonucleotide
uacagccgcucucucaggg

SEQ ID NO: 2941071 - RNA, 19 nt, Artificial Sequence
  Description of Artificial Sequence: Synthetic oligonucleotide
uuugcagcguaauuccacu

SEQ ID NO: 2941072 - RNA, 19 nt, Artificial Sequence
  Description of Artificial Sequence: Synthetic oligonucleotide
ucuccugaggacauucaga

SEQ ID NO: 2941073 - RNA, 19 nt, Artificial Sequence
  Description of Artificial Sequence: Synthetic oligonucleotide
cguaauuccacugacagcc

SEQ ID NO: 2941074 - RNA, 19 nt, Artificial Sequence
  Description of Artificial Sequence: Synthetic oligonucleotide
guggcugggguccagaaug

SEQ ID NO: 2941075 - RNA, 19 nt, Artificial Sequence
  Description of Artificial Sequence: Synthetic oligonucleotide
aaggaagucuuuagucugg

SEQ ID NO: 2941076 - RNA, 19 nt, Artificial Sequence
  Description of Artificial Sequence: Synthetic oligonucleotide
agucauguaggagaggcug

SEQ ID NO: 2941077 - RNA, 19 nt, Artificial Sequence
  Description of Artificial Sequence: Synthetic oligonucleotide
uuugucacucuucuuucuc

SEQ ID NO: 2941078 - RNA, 19 nt, Artificial Sequence
  Description of Artificial Sequence: Synthetic oligonucleotide
ugcagcguaauuccacuga

SEQ ID NO: 2941079 - RNA, 19 nt, Artificial Sequence
  Description of Artificial Sequence: Synthetic oligonucleotide
auuugcagcguaauuccac

SEQ ID NO: 2941080 - RNA, 19 nt, Artificial Sequence
  Description of Artificial Sequence: Synthetic oligonucleotide
aggggagggauaugguggc

SEQ ID NO: 2941081 - RNA, 19 nt, Artificial Sequence
  Description of Artificial Sequence: Synthetic oligonucleotide
uccagaauguuugucacuc

SEQ ID NO: 2941082 - RNA, 19 nt, Artificial Sequence
  Description of Artificial Sequence: Synthetic oligonucleotide
ucuguguugagugcucucc

SEQ ID NO: 2941083 - RNA, 19 nt, Artificial Sequence
  Description of Artificial Sequence: Synthetic oligonucleotide
uggagaagauguaacuguc

SEQ ID NO: 2941084 - RNA, 19 nt, Artificial Sequence
  Description of Artificial Sequence: Synthetic oligonucleotide
ucuuucucucucuugcuuc

SEQ ID NO: 2941085 - RNA, 19 nt, Artificial Sequence
  Description of Artificial Sequence: Synthetic oligonucleotide
uguugagugcucuccugag

SEQ ID NO: 2941086 - RNA, 19 nt, Artificial Sequence
  Description of Artificial Sequence: Synthetic oligonucleotide
uguuugucacucuucuuuc

SEQ ID NO: 2941087 - RNA, 19 nt, Artificial Sequence
  Description of Artificial Sequence: Synthetic oligonucleotide
cuuucucucucuugcuucc

SEQ ID NO: 2941088 - RNA, 19 nt, Artificial Sequence
  Description of Artificial Sequence: Synthetic oligonucleotide
cugggguccagaauguuug

SEQ ID NO: 2941089 - RNA, 19 nt, Artificial Sequence
  Description of Artificial Sequence: Synthetic oligonucleotide
ccacugacagccaacaucc

SEQ ID NO: 2941090 - RNA, 19 nt, Artificial Sequence
  Description of Artificial Sequence: Synthetic oligonucleotide
acagcuuguagggaugggg

SEQ ID NO: 2941091 - RNA, 19 nt, Artificial Sequence
  Description of Artificial Sequence: Synthetic oligonucleotide
agucuuuagucuggaaagg

SEQ ID NO: 2941092 - RNA, 19 nt, Artificial Sequence
  Description of Artificial Sequence: Synthetic oligonucleotide
acuccaaugaaagccgcuc

SEQ ID NO: 2941093 - RNA, 19 nt, Artificial Sequence
  Description of Artificial Sequence: Synthetic oligonucleotide
agaauguuugucacucuuc

SEQ ID NO: 2941094 - RNA, 19 nt, Artificial Sequence
  Description of Artificial Sequence: Synthetic oligonucleotide
uaacugucaauagccagca

SEQ ID NO: 2941095 - RNA, 19 nt, Artificial Sequence
  Description of Artificial Sequence: Synthetic oligonucleotide
ccugaggacauucagaguc

SEQ ID NO: 2941096 - RNA, 19 nt, Artificial Sequence
  Description of Artificial Sequence: Synthetic oligonucleotide
cagaguaggaacccacagc

SEQ ID NO: 2941097 - RNA, 19 nt, Artificial Sequence
  Description of Artificial Sequence: Synthetic oligonucleotide
guugagugcucuccugagg

SEQ ID NO: 2941098 - RNA, 19 nt, Artificial Sequence
  Description of Artificial Sequence: Synthetic oligonucleotide
ucuucgaauuugcagcgua

SEQ ID NO: 2941099 - RNA, 19 nt, Artificial Sequence
  Description of Artificial Sequence: Synthetic oligonucleotide
gaauguuugucacucuucu

SEQ ID NO: 2941100 - RNA, 19 nt, Artificial Sequence
  Description of Artificial Sequence: Synthetic oligonucleotide
cuccaaugaaagccgcucg

SEQ ID NO: 2941101 - RNA, 19 nt, Artificial Sequence
  Description of Artificial Sequence: Synthetic oligonucleotide
cucucucuugcuuccacag

SEQ ID NO: 2941102 - RNA, 19 nt, Artificial Sequence
  Description of Artificial Sequence: Synthetic oligonucleotide
cugucaauagccagcacca

SEQ ID NO: 2941103 - RNA, 19 nt, Artificial Sequence
  Description of Artificial Sequence: Synthetic oligonucleotide
cuggaaaggcacuccaaug

SEQ ID NO: 2941104 - RNA, 19 nt, Artificial Sequence
  Description of Artificial Sequence: Synthetic oligonucleotide
aacugucaauagccagcac

SEQ ID NO: 2941105 - RNA, 19 nt, Artificial Sequence
  Description of Artificial Sequence: Synthetic oligonucleotide
uugucacucuucuuucucu

SEQ ID NO: 2941106 - RNA, 19 nt, Artificial Sequence
  Description of Artificial Sequence: Synthetic oligonucleotide
uguguugagugcucuccug

SEQ ID NO: 2941107 - RNA, 19 nt, Artificial Sequence
  Description of Artificial Sequence: Synthetic oligonucleotide
aaggcgccuguccucuuuc

SEQ ID NO: 2941108 - RNA, 19 nt, Artificial Sequence
  Description of Artificial Sequence: Synthetic oligonucleotide
ucucugaucugagucaauc

SEQ ID NO: 2941109 - RNA, 19 nt, Artificial Sequence
  Description of Artificial Sequence: Synthetic oligonucleotide
ucacucuucuuucucucuc

SEQ ID NO: 2941110 - RNA, 19 nt, Artificial Sequence
  Description of Artificial Sequence: Synthetic oligonucleotide
uaggagaggcuggagaaga

SEQ ID NO: 2941111 - RNA, 19 nt, Artificial Sequence
  Description of Artificial Sequence: Synthetic oligonucleotide
agcuuguagggauggggag

SEQ ID NO: 2941112 - RNA, 19 nt, Artificial Sequence
  Description of Artificial Sequence: Synthetic oligonucleotide
uaauuccacugacagccaa

SEQ ID NO: 2941113 - RNA, 19 nt, Artificial Sequence
  Description of Artificial Sequence: Synthetic oligonucleotide
ucucucuugcuuccacagc

SEQ ID NO: 2941114 - RNA, 19 nt, Artificial Sequence
  Description of Artificial Sequence: Synthetic oligonucleotide
ucuugcuuccacagcuugu

SEQ ID NO: 2941115 - RNA, 19 nt, Artificial Sequence
  Description of Artificial Sequence: Synthetic oligonucleotide
agccuucuacagcagcagg

SEQ ID NO: 2941116 - RNA, 19 nt, Artificial Sequence
  Description of Artificial Sequence: Synthetic oligonucleotide
agucuggaaaggcacucca

SEQ ID NO: 2941117 - RNA, 19 nt, Artificial Sequence
  Description of Artificial Sequence: Synthetic oligonucleotide
gucuuuagucuggaaaggc

SEQ ID NO: 2941118 - RNA, 19 nt, Artificial Sequence
  Description of Artificial Sequence: Synthetic oligonucleotide
ucgaauuugcagcguaauu

SEQ ID NO: 2941119 - RNA, 19 nt, Artificial Sequence
  Description of Artificial Sequence: Synthetic oligonucleotide
cuucugaaagagcucucug

SEQ ID NO: 2941120 - RNA, 19 nt, Artificial Sequence
  Description of Artificial Sequence: Synthetic oligonucleotide
uuccacagcuuguagggau

SEQ ID NO: 2941121 - RNA, 19 nt, Artificial Sequence
  Description of Artificial Sequence: Synthetic oligonucleotide
aucugagucaaucggccau

SEQ ID NO: 2941122 - RNA, 19 nt, Artificial Sequence
  Description of Artificial Sequence: Synthetic oligonucleotide
agggauaugguggcugggg

SEQ ID NO: 2941123 - RNA, 19 nt, Artificial Sequence
  Description of Artificial Sequence: Synthetic oligonucleotide
aauuugcagcguaauucca

SEQ ID NO: 2941124 - RNA, 19 nt, Artificial Sequence
  Description of Artificial Sequence: Synthetic oligonucleotide
gucaauagccagcaccaca

SEQ ID NO: 2941125 - RNA, 19 nt, Artificial Sequence
  Description of Artificial Sequence: Synthetic oligonucleotide
ugucacucuucuuucucuc

SEQ ID NO: 2941126 - RNA, 19 nt, Artificial Sequence
  Description of Artificial Sequence: Synthetic oligonucleotide
uuagucuggaaaggcacuc

SEQ ID NO: 2941127 - RNA, 19 nt, Artificial Sequence
  Description of Artificial Sequence: Synthetic oligonucleotide
auucagagucauguaggag

SEQ ID NO: 2941128 - RNA, 19 nt, Artificial Sequence
  Description of Artificial Sequence: Synthetic oligonucleotide
cauucagagucauguagga

SEQ ID NO: 2941129 - RNA, 19 nt, Artificial Sequence
  Description of Artificial Sequence: Synthetic oligonucleotide
ucucucucuugcuuccaca

SEQ ID NO: 2941130 - RNA, 19 nt, Artificial Sequence
  Description of Artificial Sequence: Synthetic oligonucleotide
cucuccagcuggcuguucc

SEQ ID NO: 2941131 - RNA, 19 nt, Artificial Sequence
  Description of Artificial Sequence: Synthetic oligonucleotide
aagucuguguugagugcuc

SEQ ID NO: 2941132 - RNA, 19 nt, Artificial Sequence
  Description of Artificial Sequence: Synthetic oligonucleotide
cacagcuccacacgccagg

SEQ ID NO: 2941133 - RNA, 19 nt, Artificial Sequence
  Description of Artificial Sequence: Synthetic oligonucleotide
gucauguaggagaggcugg

SEQ ID NO: 2941134 - RNA, 19 nt, Artificial Sequence
  Description of Artificial Sequence: Synthetic oligonucleotide
uucccgggauggaagagaa

SEQ ID NO: 2941135 - RNA, 19 nt, Artificial Sequence
  Description of Artificial Sequence: Synthetic oligonucleotide
cacggccaggacaaggaag

SEQ ID NO: 2941136 - RNA, 19 nt, Artificial Sequence
  Description of Artificial Sequence: Synthetic oligonucleotide
ugcgcucuccagcuggcug

SEQ ID NO: 2941137 - RNA, 19 nt, Artificial Sequence
  Description of Artificial Sequence: Synthetic oligonucleotide
auagccagcaccacagagu

SEQ ID NO: 2941138 - RNA, 19 nt, Artificial Sequence
  Description of Artificial Sequence: Synthetic oligonucleotide
aaagccgcucggaagucug

SEQ ID NO: 2941139 - RNA, 19 nt, Artificial Sequence
  Description of Artificial Sequence: Synthetic oligonucleotide
ucauguaggagaggcugga

SEQ ID NO: 2941140 - RNA, 19 nt, Artificial Sequence
  Description of Artificial Sequence: Synthetic oligonucleotide
cugaaagagcucucugauc

SEQ ID NO: 2941141 - RNA, 19 nt, Artificial Sequence
  Description of Artificial Sequence: Synthetic oligonucleotide
gaucugagucaaucggcca

SEQ ID NO: 2941142 - RNA, 19 nt, Artificial Sequence
  Description of Artificial Sequence: Synthetic oligonucleotide
uguccucuuucucuucgaa

SEQ ID NO: 2941143 - RNA, 19 nt, Artificial Sequence
  Description of Artificial Sequence: Synthetic oligonucleotide
auuccacugacagccaaca

SEQ ID NO: 2941144 - RNA, 19 nt, Artificial Sequence
  Description of Artificial Sequence: Synthetic oligonucleotide
uugcagcguaauuccacug

SEQ ID NO: 2941145 - RNA, 19 nt, Artificial Sequence
  Description of Artificial Sequence: Synthetic oligonucleotide
aggcuggagaagauguaac

SEQ ID NO: 2941146 - RNA, 19 nt, Artificial Sequence
  Description of Artificial Sequence: Synthetic oligonucleotide
ggcacuccaaugaaagccg

SEQ ID NO: 2941147 - RNA, 19 nt, Artificial Sequence
  Description of Artificial Sequence: Synthetic oligonucleotide
acagccgcucucucagggg

SEQ ID NO: 2941148 - RNA, 19 nt, Artificial Sequence
  Description of Artificial Sequence: Synthetic oligonucleotide
ggagggauaugguggcugg

SEQ ID NO: 2941149 - RNA, 19 nt, Artificial Sequence
  Description of Artificial Sequence: Synthetic oligonucleotide
cucagccuucuacagcagc

SEQ ID NO: 2941150 - RNA, 19 nt, Artificial Sequence
  Description of Artificial Sequence: Synthetic oligonucleotide
uucgaauuugcagcguaau

SEQ ID NO: 2941151 - RNA, 19 nt, Artificial Sequence
  Description of Artificial Sequence: Synthetic oligonucleotide
ucggccauacagccgcucu

SEQ ID NO: 2941152 - RNA, 19 nt, Artificial Sequence
  Description of Artificial Sequence: Synthetic oligonucleotide
cccgggauggaagagaagg

SEQ ID NO: 2941153 - RNA, 19 nt, Artificial Sequence
  Description of Artificial Sequence: Synthetic oligonucleotide
uguagggauggggagggaa

SEQ ID NO: 2941154 - RNA, 19 nt, Artificial Sequence
  Description of Artificial Sequence: Synthetic oligonucleotide
ucggaagucuguguugagu

SEQ ID NO: 2941155 - RNA, 19 nt, Artificial Sequence
  Description of Artificial Sequence: Synthetic oligonucleotide
ugagucaaucggccauaca

SEQ ID NO: 2941156 - RNA, 19 nt, Artificial Sequence
  Description of Artificial Sequence: Synthetic oligonucleotide
cuggagaagauguaacugu

SEQ ID NO: 2941157 - RNA, 19 nt, Artificial Sequence
  Description of Artificial Sequence: Synthetic oligonucleotide
agcuccacacgccaggauu

SEQ ID NO: 2941158 - RNA, 19 nt, Artificial Sequence
  Description of Artificial Sequence: Synthetic oligonucleotide
cacacgccaggauucccgg

SEQ ID NO: 2941159 - RNA, 19 nt, Artificial Sequence
  Description of Artificial Sequence: Synthetic oligonucleotide
uagucuggaaaggcacucc

SEQ ID NO: 2941160 - RNA, 19 nt, Artificial Sequence
  Description of Artificial Sequence: Synthetic oligonucleotide
cucuugcuuccacagcuug

SEQ ID NO: 2941161 - RNA, 19 nt, Artificial Sequence
  Description of Artificial Sequence: Synthetic oligonucleotide
cucuuucucuucgaauuug

SEQ ID NO: 2941162 - RNA, 19 nt, Artificial Sequence
  Description of Artificial Sequence: Synthetic oligonucleotide
cuuucucuucgaauuugca

SEQ ID NO: 2941163 - RNA, 19 nt, Artificial Sequence
  Description of Artificial Sequence: Synthetic oligonucleotide
gguccagaauguuugucac

SEQ ID NO: 2941164 - RNA, 19 nt, Artificial Sequence
  Description of Artificial Sequence: Synthetic oligonucleotide
cuguuccuucugaaagagc

SEQ ID NO: 2941165 - RNA, 19 nt, Artificial Sequence
  Description of Artificial Sequence: Synthetic oligonucleotide
guguugagugcucuccuga

SEQ ID NO: 2941166 - RNA, 19 nt, Artificial Sequence
  Description of Artificial Sequence: Synthetic oligonucleotide
gcuggagaagauguaacug

SEQ ID NO: 2941167 - RNA, 19 nt, Artificial Sequence
  Description of Artificial Sequence: Synthetic oligonucleotide
ugugcgcucuccagcuggc

SEQ ID NO: 2941168 - RNA, 19 nt, Artificial Sequence
  Description of Artificial Sequence: Synthetic oligonucleotide
ggaagucuguguugagugc

SEQ ID NO: 2941169 - RNA, 19 nt, Artificial Sequence
  Description of Artificial Sequence: Synthetic oligonucleotide
aggauucccgggauggaag

SEQ ID NO: 2941170 - RNA, 19 nt, Artificial Sequence
  Description of Artificial Sequence: Synthetic oligonucleotide
gauucccgggauggaagag

SEQ ID NO: 2941171 - RNA, 19 nt, Artificial Sequence
  Description of Artificial Sequence: Synthetic oligonucleotide
acggccaggacaaggaagu

SEQ ID NO: 2941172 - RNA, 19 nt, Artificial Sequence
  Description of Artificial Sequence: Synthetic oligonucleotide
ucucucaggggagggauau

SEQ ID NO: 2941173 - RNA, 19 nt, Artificial Sequence
  Description of Artificial Sequence: Synthetic oligonucleotide
ugagugcucuccugaggac

SEQ ID NO: 2941174 - RNA, 19 nt, Artificial Sequence
  Description of Artificial Sequence: Synthetic oligonucleotide
ggguccagaauguuuguca

SEQ ID NO: 2941175 - RNA, 19 nt, Artificial Sequence
  Description of Artificial Sequence: Synthetic oligonucleotide
cgaauuugcagcguaauuc

SEQ ID NO: 2941176 - RNA, 19 nt, Artificial Sequence
  Description of Artificial Sequence: Synthetic oligonucleotide
aaaggcgccuguccucuuu

SEQ ID NO: 2941177 - RNA, 19 nt, Artificial Sequence
  Description of Artificial Sequence: Synthetic oligonucleotide
auacagccgcucucucagg

SEQ ID NO: 2941178 - RNA, 19 nt, Artificial Sequence
  Description of Artificial Sequence: Synthetic oligonucleotide
cagcuuguagggaugggga

SEQ ID NO: 2941179 - RNA, 19 nt, Artificial Sequence
  Description of Artificial Sequence: Synthetic oligonucleotide
gaagucuguguugagugcu

SEQ ID NO: 2941180 - RNA, 19 nt, Artificial Sequence
  Description of Artificial Sequence: Synthetic oligonucleotide
guaggagaggcuggagaag

SEQ ID NO: 2941181 - RNA, 19 nt, Artificial Sequence
  Description of Artificial Sequence: Synthetic oligonucleotide
gaaaggcacuccaaugaaa

SEQ ID NO: 2941182 - RNA, 19 nt, Artificial Sequence
  Description of Artificial Sequence: Synthetic oligonucleotide
aggggugugcgcucuccag

SEQ ID NO: 2941183 - RNA, 19 nt, Artificial Sequence
  Description of Artificial Sequence: Synthetic oligonucleotide
gagaggcuggagaagaugu

SEQ ID NO: 2941184 - RNA, 19 nt, Artificial Sequence
  Description of Artificial Sequence: Synthetic oligonucleotide
auguaacugucaauagcca

SEQ ID NO: 2941185 - RNA, 19 nt, Artificial Sequence
  Description of Artificial Sequence: Synthetic oligonucleotide
gaggcuggagaagauguaa

SEQ ID NO: 2941186 - RNA, 19 nt, Artificial Sequence
  Description of Artificial Sequence: Synthetic oligonucleotide
uccugaggacauucagagu

SEQ ID NO: 2941187 - RNA, 19 nt, Artificial Sequence
  Description of Artificial Sequence: Synthetic oligonucleotide
cugaggacauucagaguca

SEQ ID NO: 2941188 - RNA, 19 nt, Artificial Sequence
  Description of Artificial Sequence: Synthetic oligonucleotide
gagggauaugguggcuggg

SEQ ID NO: 2941189 - RNA, 19 nt, Artificial Sequence
  Description of Artificial Sequence: Synthetic oligonucleotide
agcagcaggggugugcgcu

SEQ ID NO: 2941190 - RNA, 19 nt, Artificial Sequence
  Description of Artificial Sequence: Synthetic oligonucleotide
gccuucuacagcagcaggg

SEQ ID NO: 2941191 - RNA, 19 nt, Artificial Sequence
  Description of Artificial Sequence: Synthetic oligonucleotide
gagugcucuccugaggaca

SEQ ID NO: 2941192 - RNA, 19 nt, Artificial Sequence
  Description of Artificial Sequence: Synthetic oligonucleotide
auucccgggauggaagaga

SEQ ID NO: 2941193 - RNA, 19 nt, Artificial Sequence
  Description of Artificial Sequence: Synthetic oligonucleotide
cacacggccaggacaagga

SEQ ID NO: 2941194 - RNA, 19 nt, Artificial Sequence
  Description of Artificial Sequence: Synthetic oligonucleotide
ugcucuccugaggacauuc

SEQ ID NO: 2941195 - RNA, 19 nt, Artificial Sequence
  Description of Artificial Sequence: Synthetic oligonucleotide
ucugagucaaucggccaua

SEQ ID NO: 2941196 - RNA, 19 nt, Artificial Sequence
  Description of Artificial Sequence: Synthetic oligonucleotide
ucucuugcuuccacagcuu

SEQ ID NO: 2941197 - RNA, 19 nt, Artificial Sequence
  Description of Artificial Sequence: Synthetic oligonucleotide
caaugaaagccgcucggaa

SEQ ID NO: 2941198 - RNA, 19 nt, Artificial Sequence
  Description of Artificial Sequence: Synthetic oligonucleotide
gccaggauucccgggaugg

SEQ ID NO: 2941199 - RNA, 19 nt, Artificial Sequence
  Description of Artificial Sequence: Synthetic oligonucleotide
acacgccaggauucccggg

SEQ ID NO: 2941200 - RNA, 19 nt, Artificial Sequence
  Description of Artificial Sequence: Synthetic oligonucleotide
ccuucuacagcagcagggg

SEQ ID NO: 2941201 - RNA, 19 nt, Artificial Sequence
  Description of Artificial Sequence: Synthetic oligonucleotide
caccacagaguaggaaccc

SEQ ID NO: 2941202 - RNA, 19 nt, Artificial Sequence
  Description of Artificial Sequence: Synthetic oligonucleotide
ugucaauagccagcaccac

SEQ ID NO: 2941203 - RNA, 19 nt, Artificial Sequence
  Description of Artificial Sequence: Synthetic oligonucleotide
cuucgaauuugcagcguaa

SEQ ID NO: 2941204 - RNA, 19 nt, Artificial Sequence
  Description of Artificial Sequence: Synthetic oligonucleotide
acccacagcuccacacgcc

SEQ ID NO: 2941205 - RNA, 19 nt, Artificial Sequence
  Description of Artificial Sequence: Synthetic oligonucleotide
uggcugggguccagaaugu

SEQ ID NO: 2941206 - RNA, 19 nt, Artificial Sequence
  Description of Artificial Sequence: Synthetic oligonucleotide
cauguaggagaggcuggag

SEQ ID NO: 2941207 - RNA, 19 nt, Artificial Sequence
  Description of Artificial Sequence: Synthetic oligonucleotide
gcagcguaauuccacugac

SEQ ID NO: 2941208 - RNA, 19 nt, Artificial Sequence
  Description of Artificial Sequence: Synthetic oligonucleotide
ggauggggagggaaaggcg

SEQ ID NO: 2941209 - RNA, 19 nt, Artificial Sequence
  Description of Artificial Sequence: Synthetic oligonucleotide
ugaggacauucagagucau

SEQ ID NO: 2941210 - RNA, 19 nt, Artificial Sequence
  Description of Artificial Sequence: Synthetic oligonucleotide
ggaaaggcacuccaaugaa

SEQ ID NO: 2941211 - RNA, 19 nt, Artificial Sequence
  Description of Artificial Sequence: Synthetic oligonucleotide
cggaagucuguguugagug

SEQ ID NO: 2941212 - RNA, 19 nt, Artificial Sequence
  Description of Artificial Sequence: Synthetic oligonucleotide
uuccacugacagccaacau

SEQ ID NO: 2941213 - RNA, 19 nt, Artificial Sequence
  Description of Artificial Sequence: Synthetic oligonucleotide
gaggacauucagagucaug

SEQ ID NO: 2941214 - RNA, 19 nt, Artificial Sequence
  Description of Artificial Sequence: Synthetic oligonucleotide
uuucucucucuugcuucca

SEQ ID NO: 2941215 - RNA, 19 nt, Artificial Sequence
  Description of Artificial Sequence: Synthetic oligonucleotide
ugggguccagaauguuugu

SEQ ID NO: 2941216 - RNA, 19 nt, Artificial Sequence
  Description of Artificial Sequence: Synthetic oligonucleotide
aggaagucuuuagucugga

SEQ ID NO: 2941217 - RNA, 19 nt, Artificial Sequence
  Description of Artificial Sequence: Synthetic oligonucleotide
cucggaagucuguguugag

SEQ ID NO: 2941218 - RNA, 19 nt, Artificial Sequence
  Description of Artificial Sequence: Synthetic oligonucleotide
cagccuucuacagcagcag

SEQ ID NO: 2941219 - RNA, 19 nt, Artificial Sequence
  Description of Artificial Sequence: Synthetic oligonucleotide
agcuggcuguuccuucuga

SEQ ID NO: 2941220 - RNA, 19 nt, Artificial Sequence
  Description of Artificial Sequence: Synthetic oligonucleotide
agucuguguugagugcucu

SEQ ID NO: 2941221 - RNA, 19 nt, Artificial Sequence
  Description of Artificial Sequence: Synthetic oligonucleotide
ucccgggauggaagagaag

SEQ ID NO: 2941222 - RNA, 19 nt, Artificial Sequence
  Description of Artificial Sequence: Synthetic oligonucleotide
ccacacgccaggauucccg

SEQ ID NO: 2941223 - RNA, 19 nt, Artificial Sequence
  Description of Artificial Sequence: Synthetic oligonucleotide
accacagaguaggaaccca

SEQ ID NO: 2941224 - RNA, 19 nt, Artificial Sequence
  Description of Artificial Sequence: Synthetic oligonucleotide
gcguaauuccacugacagc

SEQ ID NO: 2941225 - RNA, 19 nt, Artificial Sequence
  Description of Artificial Sequence: Synthetic oligonucleotide
uaggaacccacagcuccac

SEQ ID NO: 2941226 - RNA, 19 nt, Artificial Sequence
  Description of Artificial Sequence: Synthetic oligonucleotide
ggcuguuccuucugaaaga

SEQ ID NO: 2941227 - RNA, 19 nt, Artificial Sequence
  Description of Artificial Sequence: Synthetic oligonucleotide
cacugacagccaacauccc

SEQ ID NO: 2941228 - RNA, 19 nt, Artificial Sequence
  Description of Artificial Sequence: Synthetic oligonucleotide
guuugucacucuucuuucu

SEQ ID NO: 2941229 - RNA, 19 nt, Artificial Sequence
  Description of Artificial Sequence: Synthetic oligonucleotide
gcaccacagaguaggaacc

SEQ ID NO: 2941230 - RNA, 19 nt, Artificial Sequence
  Description of Artificial Sequence: Synthetic oligonucleotide
cuugcuuccacagcuugua

SEQ ID NO: 2941231 - RNA, 19 nt, Artificial Sequence
  Description of Artificial Sequence: Synthetic oligonucleotide
guuccuucugaaagagcuc

SEQ ID NO: 2941232 - RNA, 19 nt, Artificial Sequence
  Description of Artificial Sequence: Synthetic oligonucleotide
cacgccaggauucccggga

SEQ ID NO: 2941233 - RNA, 19 nt, Artificial Sequence
  Description of Artificial Sequence: Synthetic oligonucleotide
ugaaagccgcucggaaguc

SEQ ID NO: 2941234 - RNA, 19 nt, Artificial Sequence
  Description of Artificial Sequence: Synthetic oligonucleotide
cagcguaauuccacugaca

SEQ ID NO: 2941235 - RNA, 19 nt, Artificial Sequence
  Description of Artificial Sequence: Synthetic oligonucleotide
cugagucaaucggccauac

SEQ ID NO: 2941236 - RNA, 19 nt, Artificial Sequence
  Description of Artificial Sequence: Synthetic oligonucleotide
uccacacgccaggauuccc

SEQ ID NO: 2941237 - RNA, 19 nt, Artificial Sequence
  Description of Artificial Sequence: Synthetic oligonucleotide
ggagaggcuggagaagaug

SEQ ID NO: 2941238 - RNA, 19 nt, Artificial Sequence
  Description of Artificial Sequence: Synthetic oligonucleotide
cuggcuguuccuucugaaa

SEQ ID NO: 2941239 - RNA, 19 nt, Artificial Sequence
  Description of Artificial Sequence: Synthetic oligonucleotide
guaggaacccacagcucca

SEQ ID NO: 2941240 - RNA, 19 nt, Artificial Sequence
  Description of Artificial Sequence: Synthetic oligonucleotide
ggggugugcgcucuccagc

SEQ ID NO: 2941241 - RNA, 19 nt, Artificial Sequence
  Description of Artificial Sequence: Synthetic oligonucleotide
gaguaggaacccacagcuc

SEQ ID NO: 2941242 - RNA, 19 nt, Artificial Sequence
  Description of Artificial Sequence: Synthetic oligonucleotide
cacagcuuguagggauggg

SEQ ID NO: 2941243 - RNA, 19 nt, Artificial Sequence
  Description of Artificial Sequence: Synthetic oligonucleotide
cagagucauguaggagagg

SEQ ID NO: 2941244 - RNA, 19 nt, Artificial Sequence
  Description of Artificial Sequence: Synthetic oligonucleotide
uaugguggcugggguccag

SEQ ID NO: 2941245 - RNA, 19 nt, Artificial Sequence
  Description of Artificial Sequence: Synthetic oligonucleotide
agugcucuccugaggacau

SEQ ID NO: 2941246 - RNA, 19 nt, Artificial Sequence
  Description of Artificial Sequence: Synthetic oligonucleotide
aggaacccacagcuccaca

SEQ ID NO: 2941247 - RNA, 19 nt, Artificial Sequence
  Description of Artificial Sequence: Synthetic oligonucleotide
guagggauggggagggaaa

SEQ ID NO: 2941248 - RNA, 19 nt, Artificial Sequence
  Description of Artificial Sequence: Synthetic oligonucleotide
acacggccaggacaaggaa

SEQ ID NO: 2941249 - RNA, 19 nt, Artificial Sequence
  Description of Artificial Sequence: Synthetic oligonucleotide
ggauucccgggauggaaga

SEQ ID NO: 2941250 - RNA, 19 nt, Artificial Sequence
  Description of Artificial Sequence: Synthetic oligonucleotide
ugguggcugggguccagaa

SEQ ID NO: 2941251 - RNA, 19 nt, Artificial Sequence
  Description of Artificial Sequence: Synthetic oligonucleotide
ggacaaggaagucuuuagu

SEQ ID NO: 2941252 - RNA, 19 nt, Artificial Sequence
  Description of Artificial Sequence: Synthetic oligonucleotide
cuccacacgccaggauucc

SEQ ID NO: 2941253 - RNA, 19 nt, Artificial Sequence
  Description of Artificial Sequence: Synthetic oligonucleotide
guaauuccacugacagcca

SEQ ID NO: 2941254 - RNA, 19 nt, Artificial Sequence
  Description of Artificial Sequence: Synthetic oligonucleotide
gggagggauaugguggcug

SEQ ID NO: 2941255 - RNA, 19 nt, Artificial Sequence
  Description of Artificial Sequence: Synthetic oligonucleotide
aucggccauacagccgcuc

SEQ ID NO: 2941256 - RNA, 19 nt, Artificial Sequence
  Description of Artificial Sequence: Synthetic oligonucleotide
agcaggggugugcgcucuc

SEQ ID NO: 2941257 - RNA, 19 nt, Artificial Sequence
  Description of Artificial Sequence: Synthetic oligonucleotide
gucacucuucuuucucucu

SEQ ID NO: 2941258 - RNA, 19 nt, Artificial Sequence
  Description of Artificial Sequence: Synthetic oligonucleotide
ggcuggagaagauguaacu

SEQ ID NO: 2941259 - RNA, 19 nt, Artificial Sequence
  Description of Artificial Sequence: Synthetic oligonucleotide
cagaauguuugucacucuu

SEQ ID NO: 2941260 - RNA, 19 nt, Artificial Sequence
  Description of Artificial Sequence: Synthetic oligonucleotide
caggacaaggaagucuuua

SEQ ID NO: 2941261 - RNA, 19 nt, Artificial Sequence
  Description of Artificial Sequence: Synthetic oligonucleotide
cagccgcucucucagggga

SEQ ID NO: 2941262 - RNA, 19 nt, Artificial Sequence
  Description of Artificial Sequence: Synthetic oligonucleotide
caauagccagcaccacaga

SEQ ID NO: 2941263 - RNA, 19 nt, Artificial Sequence
  Description of Artificial Sequence: Synthetic oligonucleotide
agccgcucggaagucugug

SEQ ID NO: 2941264 - RNA, 19 nt, Artificial Sequence
  Description of Artificial Sequence: Synthetic oligonucleotide
cacucuucuuucucucucu

SEQ ID NO: 2941265 - RNA, 19 nt, Artificial Sequence
  Description of Artificial Sequence: Synthetic oligonucleotide
acgccaggauucccgggau

SEQ ID NO: 2941266 - RNA, 19 nt, Artificial Sequence
  Description of Artificial Sequence: Synthetic oligonucleotide
ccacagcuuguagggaugg

SEQ ID NO: 2941267 - RNA, 19 nt, Artificial Sequence
  Description of Artificial Sequence: Synthetic oligonucleotide
ggacauucagagucaugua

SEQ ID NO: 2941268 - RNA, 19 nt, Artificial Sequence
  Description of Artificial Sequence: Synthetic oligonucleotide
aaucggccauacagccgcu

SEQ ID NO: 2941269 - RNA, 19 nt, Artificial Sequence
  Description of Artificial Sequence: Synthetic oligonucleotide
cuucuacagcagcaggggu

SEQ ID NO: 2941270 - RNA, 19 nt, Artificial Sequence
  Description of Artificial Sequence: Synthetic oligonucleotide
aggcgccuguccucuuucu

SEQ ID NO: 2941271 - RNA, 19 nt, Artificial Sequence
  Description of Artificial Sequence: Synthetic oligonucleotide
cuuccacagcuuguaggga

SEQ ID NO: 2941272 - RNA, 19 nt, Artificial Sequence
  Description of Artificial Sequence: Synthetic oligonucleotide
guccucuuucucuucgaau

SEQ ID NO: 2941273 - RNA, 19 nt, Artificial Sequence
  Description of Artificial Sequence: Synthetic oligonucleotide
aagccgcucggaagucugu

SEQ ID NO: 2941274 - RNA, 19 nt, Artificial Sequence
  Description of Artificial Sequence: Synthetic oligonucleotide
gaaagccgcucggaagucu

SEQ ID NO: 2941275 - RNA, 19 nt, Artificial Sequence
  Description of Artificial Sequence: Synthetic oligonucleotide
cagcuggcuguuccuucug

SEQ ID NO: 2941276 - RNA, 19 nt, Artificial Sequence
  Description of Artificial Sequence: Synthetic oligonucleotide
auaugguggcuggggucca

SEQ ID NO: 2941277 - RNA, 19 nt, Artificial Sequence
  Description of Artificial Sequence: Synthetic oligonucleotide
ggaagucuuuagucuggaa

SEQ ID NO: 2941278 - RNA, 19 nt, Artificial Sequence
  Description of Artificial Sequence: Synthetic oligonucleotide
caggauucccgggauggaa

SEQ ID NO: 2941279 - RNA, 19 nt, Artificial Sequence
  Description of Artificial Sequence: Synthetic oligonucleotide
gucuggaaaggcacuccaa

SEQ ID NO: 2941280 - RNA, 19 nt, Artificial Sequence
  Description of Artificial Sequence: Synthetic oligonucleotide
gagucauguaggagaggcu

SEQ ID NO: 2941281 - RNA, 19 nt, Artificial Sequence
  Description of Artificial Sequence: Synthetic oligonucleotide
ccacacggccaggacaagg

SEQ ID NO: 2941282 - RNA, 19 nt, Artificial Sequence
  Description of Artificial Sequence: Synthetic oligonucleotide
cuguguugagugcucuccu

SEQ ID NO: 2941283 - RNA, 19 nt, Artificial Sequence
  Description of Artificial Sequence: Synthetic oligonucleotide
gcuccacacgccaggauuc

SEQ ID NO: 2941284 - RNA, 19 nt, Artificial Sequence
  Description of Artificial Sequence: Synthetic oligonucleotide
uuguagggauggggaggga

SEQ ID NO: 2941285 - RNA, 19 nt, Artificial Sequence
  Description of Artificial Sequence: Synthetic oligonucleotide
gcacuccaaugaaagccgc

SEQ ID NO: 2941286 - RNA, 19 nt, Artificial Sequence
  Description of Artificial Sequence: Synthetic oligonucleotide
cacuccaaugaaagccgcu

SEQ ID NO: 2941287 - RNA, 19 nt, Artificial Sequence
  Description of Artificial Sequence: Synthetic oligonucleotide
gggauaugguggcuggggu

SEQ ID NO: 2941288 - RNA, 19 nt, Artificial Sequence
  Description of Artificial Sequence: Synthetic oligonucleotide
agccgcucucucaggggag

SEQ ID NO: 2941289 - RNA, 19 nt, Artificial Sequence
  Description of Artificial Sequence: Synthetic oligonucleotide
ccauacagccgcucucuca

SEQ ID NO: 2941290 - RNA, 19 nt, Artificial Sequence
  Description of Artificial Sequence: Synthetic oligonucleotide
ggugugcgcucuccagcug

SEQ ID NO: 2941291 - RNA, 19 nt, Artificial Sequence
  Description of Artificial Sequence: Synthetic oligonucleotide
augguggcugggguccaga

SEQ ID NO: 2941292 - RNA, 19 nt, Artificial Sequence
  Description of Artificial Sequence: Synthetic oligonucleotide
gcuggcuguuccuucugaa

SEQ ID NO: 2941293 - RNA, 19 nt, Artificial Sequence
  Description of Artificial Sequence: Synthetic oligonucleotide
aggagaggcuggagaagau

SEQ ID NO: 2941294 - RNA, 19 nt, Artificial Sequence
  Description of Artificial Sequence: Synthetic oligonucleotide
cagcagcaggggugugcgc

SEQ ID NO: 2941295 - RNA, 19 nt, Artificial Sequence
  Description of Artificial Sequence: Synthetic oligonucleotide
cucucaggggagggauaug

SEQ ID NO: 2941296 - RNA, 19 nt, Artificial Sequence
  Description of Artificial Sequence: Synthetic oligonucleotide
cucaggggagggauauggu

SEQ ID NO: 2941297 - RNA, 19 nt, Artificial Sequence
  Description of Artificial Sequence: Synthetic oligonucleotide
gccgcucucucaggggagg

SEQ ID NO: 2941298 - RNA, 19 nt, Artificial Sequence
  Description of Artificial Sequence: Synthetic oligonucleotide
ccacagcuccacacgccag

SEQ ID NO: 2941299 - RNA, 19 nt, Artificial Sequence
  Description of Artificial Sequence: Synthetic oligonucleotide
ccaaugaaagccgcucgga

SEQ ID NO: 2941300 - RNA, 19 nt, Artificial Sequence
  Description of Artificial Sequence: Synthetic oligonucleotide
ggaaaggcgccuguccucu

SEQ ID NO: 2941301 - RNA, 19 nt, Artificial Sequence
  Description of Artificial Sequence: Synthetic oligonucleotide
gcucucugaucugagucaa

SEQ ID NO: 2941302 - RNA, 19 nt, Artificial Sequence
  Description of Artificial Sequence: Synthetic oligonucleotide
ggcgccuguccucuuucuc

SEQ ID NO: 2941303 - RNA, 19 nt, Artificial Sequence
  Description of Artificial Sequence: Synthetic oligonucleotide
caggggugugcgcucucca

SEQ ID NO: 2941304 - RNA, 19 nt, Artificial Sequence
  Description of Artificial Sequence: Synthetic oligonucleotide
ggagggaaaggcgccuguc

SEQ ID NO: 2941305 - RNA, 19 nt, Artificial Sequence
  Description of Artificial Sequence: Synthetic oligonucleotide
gggguccagaauguuuguc

SEQ ID NO: 2941306 - RNA, 19 nt, Artificial Sequence
  Description of Artificial Sequence: Synthetic oligonucleotide
ccgggauggaagagaagga

SEQ ID NO: 2941307 - RNA, 19 nt, Artificial Sequence
  Description of Artificial Sequence: Synthetic oligonucleotide
cucucucaggggagggaua

SEQ ID NO: 2941308 - RNA, 19 nt, Artificial Sequence
  Description of Artificial Sequence: Synthetic oligonucleotide
gggugugcgcucuccagcu

SEQ ID NO: 2941309 - RNA, 19 nt, Artificial Sequence
  Description of Artificial Sequence: Synthetic oligonucleotide
cccacagcuccacacgcca

SEQ ID NO: 2941310 - RNA, 19 nt, Artificial Sequence
  Description of Artificial Sequence: Synthetic oligonucleotide
ccccacacggccaggacaa

SEQ ID NO: 2941311 - RNA, 19 nt, Artificial Sequence
  Description of Artificial Sequence: Synthetic oligonucleotide
cgcucggaagucuguguug

SEQ ID NO: 2941312 - RNA, 19 nt, Artificial Sequence
  Description of Artificial Sequence: Synthetic oligonucleotide
gcaggggugugcgcucucc

SEQ ID NO: 2941313 - RNA, 19 nt, Artificial Sequence
  Description of Artificial Sequence: Synthetic oligonucleotide
ggccaggacaaggaagucu

SEQ ID NO: 2941314 - RNA, 19 nt, Artificial Sequence
  Description of Artificial Sequence: Synthetic oligonucleotide
gcagcaggggugugcgcuc

SEQ ID NO: 2941315 - RNA, 19 nt, Artificial Sequence
  Description of Artificial Sequence: Synthetic oligonucleotide
gccauacagccgcucucuc

SEQ ID NO: 2941316 - RNA, 19 nt, Artificial Sequence
  Description of Artificial Sequence: Synthetic oligonucleotide
ggccauacagccgcucucu

SEQ ID NO: 2941317 - RNA, 19 nt, Artificial Sequence
  Description of Artificial Sequence: Synthetic oligonucleotide
gcucuccugaggacauuca

SEQ ID NO: 2941318 - RNA, 19 nt, Artificial Sequence
  Description of Artificial Sequence: Synthetic oligonucleotide
ccuucugaaagagcucucu

SEQ ID NO: 2941319 - RNA, 19 nt, Artificial Sequence
  Description of Artificial Sequence: Synthetic oligonucleotide
gcgcucuccagcuggcugu

SEQ ID NO: 2941320 - RNA, 19 nt, Artificial Sequence
  Description of Artificial Sequence: Synthetic oligonucleotide
cucuucgaauuugcagcgu

SEQ ID NO: 2941321 - RNA, 19 nt, Artificial Sequence
  Description of Artificial Sequence: Synthetic oligonucleotide
cucucugaucugagucaau

SEQ ID NO: 2941322 - RNA, 19 nt, Artificial Sequence
  Description of Artificial Sequence: Synthetic oligonucleotide
gaaaggcgccuguccucuu

SEQ ID NO: 2941323 - RNA, 19 nt, Artificial Sequence
  Description of Artificial Sequence: Synthetic oligonucleotide
gggagggaaaggcgccugu

SEQ ID NO: 2941324 - RNA, 19 nt, Artificial Sequence
  Description of Artificial Sequence: Synthetic oligonucleotide
ccagaauguuugucacucu

SEQ ID NO: 2941325 - RNA, 19 nt, Artificial Sequence
  Description of Artificial Sequence: Synthetic oligonucleotide
ccgcucucucaggggaggg

SEQ ID NO: 2941326 - RNA, 19 nt, Artificial Sequence
  Description of Artificial Sequence: Synthetic oligonucleotide
gcucucucaggggagggau

SEQ ID NO: 2941327 - RNA, 19 nt, Artificial Sequence
  Description of Artificial Sequence: Synthetic oligonucleotide
gccgcucggaagucugugu

SEQ ID NO: 2941328 - RNA, 19 nt, Artificial Sequence
  Description of Artificial Sequence: Synthetic oligonucleotide
cggccauacagccgcucuc

SEQ ID NO: 2941329 - RNA, 19 nt, Artificial Sequence
  Description of Artificial Sequence: Synthetic oligonucleotide
cgccaggauucccgggaug

SEQ ID NO: 2941330 - RNA, 19 nt, Artificial Sequence
  Description of Artificial Sequence: Synthetic oligonucleotide
ccaggauucccgggaugga

SEQ ID NO: 2941331 - RNA, 19 nt, Artificial Sequence
  Description of Artificial Sequence: Synthetic oligonucleotide
cagcuccacacgccaggau

SEQ ID NO: 2941332 - RNA, 19 nt, Artificial Sequence
  Description of Artificial Sequence: Synthetic oligonucleotide
cagcaggggugugcgcucu

SEQ ID NO: 2941333 - RNA, 19 nt, Artificial Sequence
  Description of Artificial Sequence: Synthetic oligonucleotide
gugcgcucuccagcuggcu

SEQ ID NO: 2941334 - RNA, 19 nt, Artificial Sequence
  Description of Artificial Sequence: Synthetic oligonucleotide
cccacacggccaggacaag

SEQ ID NO: 2941335 - RNA, 19 nt, Artificial Sequence
  Description of Artificial Sequence: Synthetic oligonucleotide
ggggagggauaugguggcu

SEQ ID NO: 2941336 - RNA, 19 nt, Artificial Sequence
  Description of Artificial Sequence: Synthetic oligonucleotide
ccgcucggaagucuguguu

SEQ ID NO: 2941337 - RNA, 19 nt, Artificial Sequence
  Description of Artificial Sequence: Synthetic oligonucleotide
gcucuccagcuggcuguuc

SEQ ID NO: 2941338 - RNA, 19 nt, Artificial Sequence
  Description of Artificial Sequence: Synthetic oligonucleotide
ccaggacaaggaagucuuu

SEQ ID NO: 2941339 - RNA, 19 nt, Artificial Sequence
  Description of Artificial Sequence: Synthetic oligonucleotide
cggccaggacaaggaaguc

SEQ ID NO: 2941340 - RNA, 19 nt, Artificial Sequence
  Description of Artificial Sequence: Synthetic oligonucleotide
cgcucucucaggggaggga

SEQ ID NO: 2941341 - RNA, 19 nt, Artificial Sequence
  Description of Artificial Sequence: Synthetic oligonucleotide
gugcucuccugaggacauu

SEQ ID NO: 2941342 - RNA, 19 nt, Artificial Sequence
  Description of Artificial Sequence: Synthetic oligonucleotide
cgccuguccucuuucucuu

SEQ ID NO: 2941343 - RNA, 19 nt, Artificial Sequence
  Description of Artificial Sequence: Synthetic oligonucleotide
cgcucuccagcuggcuguu

SEQ ID NO: 2941344 - RNA, 19 nt, Artificial Sequence
  Description of Artificial Sequence: Synthetic oligonucleotide
auuauuaccagguaaaugg

SEQ ID NO: 2941345 - RNA, 19 nt, Artificial Sequence
  Description of Artificial Sequence: Synthetic oligonucleotide
ucagauaaaauauugagag

SEQ ID NO: 2941346 - RNA, 19 nt, Artificial Sequence
  Description of Artificial Sequence: Synthetic oligonucleotide
aauauugagaguucauuuc

SEQ ID NO: 2941347 - RNA, 19 nt, Artificial Sequence
  Description of Artificial Sequence: Synthetic oligonucleotide
uaacaauuaauccauaaca

SEQ ID NO: 2941348 - RNA, 19 nt, Artificial Sequence
  Description of Artificial Sequence: Synthetic oligonucleotide
caagaaauaaagaaugggg

SEQ ID NO: 2941349 - RNA, 19 nt, Artificial Sequence
  Description of Artificial Sequence: Synthetic oligonucleotide
ucugcuugaacucagauaa

SEQ ID NO: 2941350 - RNA, 19 nt, Artificial Sequence
  Description of Artificial Sequence: Synthetic oligonucleotide
caauuaauccauaacagcc

SEQ ID NO: 2941351 - RNA, 19 nt, Artificial Sequence
  Description of Artificial Sequence: Synthetic oligonucleotide
acaauuaauccauaacagc

SEQ ID NO: 2941352 - RNA, 19 nt, Artificial Sequence
  Description of Artificial Sequence: Synthetic oligonucleotide
aagcucuaacaauuaaucc

SEQ ID NO: 2941353 - RNA, 19 nt, Artificial Sequence
  Description of Artificial Sequence: Synthetic oligonucleotide
uaagacacagcaaacacug

SEQ ID NO: 2941354 - RNA, 19 nt, Artificial Sequence
  Description of Artificial Sequence: Synthetic oligonucleotide
guuuucaucacauggaaag

SEQ ID NO: 2941355 - RNA, 19 nt, Artificial Sequence
  Description of Artificial Sequence: Synthetic oligonucleotide
agaaauaaagaaugggguc

SEQ ID NO: 2941356 - RNA, 19 nt, Artificial Sequence
  Description of Artificial Sequence: Synthetic oligonucleotide
aagaaugggguccacacag

SEQ ID NO: 2941357 - RNA, 19 nt, Artificial Sequence
  Description of Artificial Sequence: Synthetic oligonucleotide
aaagcucuaacaauuaauc

SEQ ID NO: 2941358 - RNA, 19 nt, Artificial Sequence
  Description of Artificial Sequence: Synthetic oligonucleotide
uaaaucaaagcucuaacaa

SEQ ID NO: 2941359 - RNA, 19 nt, Artificial Sequence
  Description of Artificial Sequence: Synthetic oligonucleotide
acucagauaaaauauugag

SEQ ID NO: 2941360 - RNA, 19 nt, Artificial Sequence
  Description of Artificial Sequence: Synthetic oligonucleotide
auugaaagcacacauuucu

SEQ ID NO: 2941361 - RNA, 19 nt, Artificial Sequence
  Description of Artificial Sequence: Synthetic oligonucleotide
aacaauuaauccauaacag

SEQ ID NO: 2941362 - RNA, 19 nt, Artificial Sequence
  Description of Artificial Sequence: Synthetic oligonucleotide
aaauuggccucacuccucc

SEQ ID NO: 2941363 - RNA, 19 nt, Artificial Sequence
  Description of Artificial Sequence: Synthetic oligonucleotide
auggauuuccuucugagag

SEQ ID NO: 2941364 - RNA, 19 nt, Artificial Sequence
  Description of Artificial Sequence: Synthetic oligonucleotide
aacaauuauuaccagguaa

SEQ ID NO: 2941365 - RNA, 19 nt, Artificial Sequence
  Description of Artificial Sequence: Synthetic oligonucleotide
aaauggauuuccuucugag

SEQ ID NO: 2941366 - RNA, 19 nt, Artificial Sequence
  Description of Artificial Sequence: Synthetic oligonucleotide
ugguaagucgcauaaaccc

SEQ ID NO: 2941367 - RNA, 19 nt, Artificial Sequence
  Description of Artificial Sequence: Synthetic oligonucleotide
ucugaaaguaucuccagcc

SEQ ID NO: 2941368 - RNA, 19 nt, Artificial Sequence
  Description of Artificial Sequence: Synthetic oligonucleotide
aauucaucguuuucaucac

SEQ ID NO: 2941369 - RNA, 19 nt, Artificial Sequence
  Description of Artificial Sequence: Synthetic oligonucleotide
gaaauaaagaauggggucc

SEQ ID NO: 2941370 - RNA, 19 nt, Artificial Sequence
  Description of Artificial Sequence: Synthetic oligonucleotide
uguaaauuggccucacucc

SEQ ID NO: 2941371 - RNA, 19 nt, Artificial Sequence
  Description of Artificial Sequence: Synthetic oligonucleotide
ugaaagcacacauuucugg

SEQ ID NO: 2941372 - RNA, 19 nt, Artificial Sequence
  Description of Artificial Sequence: Synthetic oligonucleotide
agguaaauggauuuccuuc

SEQ ID NO: 2941373 - RNA, 19 nt, Artificial Sequence
  Description of Artificial Sequence: Synthetic oligonucleotide
  modified_base (6)..(6): a, c, u, g, unknown or other
ugugunuccguucugcuug

SEQ ID NO: 2941374 - RNA, 19 nt, Artificial Sequence
  Description of Artificial Sequence: Synthetic oligonucleotide
uaaacccugucauugaaag

SEQ ID NO: 2941375 - RNA, 19 nt, Artificial Sequence
  Description of Artificial Sequence: Synthetic oligonucleotide
uugaacucagauaaaauau

SEQ ID NO: 2941376 - RNA, 19 nt, Artificial Sequence
  Description of Artificial Sequence: Synthetic oligonucleotide
uucauuucuucacucuugg

SEQ ID NO: 2941377 - RNA, 19 nt, Artificial Sequence
  Description of Artificial Sequence: Synthetic oligonucleotide
guugagacuugcuagaccc

SEQ ID NO: 2941378 - RNA, 19 nt, Artificial Sequence
  Description of Artificial Sequence: Synthetic oligonucleotide
aagaaauaaagaauggggu

SEQ ID NO: 2941379 - RNA, 19 nt, Artificial Sequence
  Description of Artificial Sequence: Synthetic oligonucleotide
uguaaaucaaagcucuaac

SEQ ID NO: 2941380 - RNA, 19 nt, Artificial Sequence
  Description of Artificial Sequence: Synthetic oligonucleotide
uguaagacacagcaaacac

SEQ ID NO: 2941381 - RNA, 19 nt, Artificial Sequence
  Description of Artificial Sequence: Synthetic oligonucleotide
aaaucaaagcucuaacaau

SEQ ID NO: 2941382 - RNA, 19 nt, Artificial Sequence
  Description of Artificial Sequence: Synthetic oligonucleotide
agcucuaacaauuaaucca

SEQ ID NO: 2941383 - RNA, 19 nt, Artificial Sequence
  Description of Artificial Sequence: Synthetic oligonucleotide
ucuuggauuguaaauuggc

SEQ ID NO: 2941384 - RNA, 19 nt, Artificial Sequence
  Description of Artificial Sequence: Synthetic oligonucleotide
ucuuuguaaaucaaagcuc

SEQ ID NO: 2941385 - RNA, 19 nt, Artificial Sequence
  Description of Artificial Sequence: Synthetic oligonucleotide
caucguuuucaucacaugg

SEQ ID NO: 2941386 - RNA, 19 nt, Artificial Sequence
  Description of Artificial Sequence: Synthetic oligonucleotide
aauuauuaccagguaaaug

SEQ ID NO: 2941387 - RNA, 19 nt, Artificial Sequence
  Description of Artificial Sequence: Synthetic oligonucleotide
ucauugaaagcacacauuu

SEQ ID NO: 2941388 - RNA, 19 nt, Artificial Sequence
  Description of Artificial Sequence: Synthetic oligonucleotide
agggauguaagacacagca

SEQ ID NO: 2941389 - RNA, 19 nt, Artificial Sequence
  Description of Artificial Sequence: Synthetic oligonucleotide
aagaucagcaccaagggga

SEQ ID NO: 2941390 - RNA, 19 nt, Artificial Sequence
  Description of Artificial Sequence: Synthetic oligonucleotide
agauaaaauauugagaguu

SEQ ID NO: 2941391 - RNA, 19 nt, Artificial Sequence
  Description of Artificial Sequence: Synthetic oligonucleotide
aacccugucauugaaagca

SEQ ID NO: 2941392 - RNA, 19 nt, Artificial Sequence
  Description of Artificial Sequence: Synthetic oligonucleotide
uuguaaauuggccucacuc

SEQ ID NO: 2941393 - RNA, 19 nt, Artificial Sequence
  Description of Artificial Sequence: Synthetic oligonucleotide
aaacccugucauugaaagc

SEQ ID NO: 2941394 - RNA, 19 nt, Artificial Sequence
  Description of Artificial Sequence: Synthetic oligonucleotide
uuggauuguaaauuggccu

SEQ ID NO: 2941395 - RNA, 19 nt, Artificial Sequence
  Description of Artificial Sequence: Synthetic oligonucleotide
  modified_base (2)..(2): a, c, u, g, unknown or other
unuccguucugcuugaacu

SEQ ID NO: 2941396 - RNA, 19 nt, Artificial Sequence
  Description of Artificial Sequence: Synthetic oligonucleotide
cuaacaauuaauccauaac

SEQ ID NO: 2941397 - RNA, 19 nt, Artificial Sequence
  Description of Artificial Sequence: Synthetic oligonucleotide
cuuggauuguaaauuggcc

SEQ ID NO: 2941398 - RNA, 19 nt, Artificial Sequence
  Description of Artificial Sequence: Synthetic oligonucleotide
uaaagaaugggguccacac

SEQ ID NO: 2941399 - RNA, 19 nt, Artificial Sequence
  Description of Artificial Sequence: Synthetic oligonucleotide
auugagaguucauuucuuc

SEQ ID NO: 2941400 - RNA, 19 nt, Artificial Sequence
  Description of Artificial Sequence: Synthetic oligonucleotide
ugucauugaaagcacacau

SEQ ID NO: 2941401 - RNA, 19 nt, Artificial Sequence
  Description of Artificial Sequence: Synthetic oligonucleotide
auauugagaguucauuucu

SEQ ID NO: 2941402 - RNA, 19 nt, Artificial Sequence
  Description of Artificial Sequence: Synthetic oligonucleotide
agacacagcaaacacuguc

SEQ ID NO: 2941403 - RNA, 19 nt, Artificial Sequence
  Description of Artificial Sequence: Synthetic oligonucleotide
cagaacaauuauuaccagg

SEQ ID NO: 2941404 - RNA, 19 nt, Artificial Sequence
  Description of Artificial Sequence: Synthetic oligonucleotide
agaacaauuauuaccaggu

SEQ ID NO: 2941405 - RNA, 19 nt, Artificial Sequence
  Description of Artificial Sequence: Synthetic oligonucleotide
auggaaagggauguaagac

SEQ ID NO: 2941406 - RNA, 19 nt, Artificial Sequence
  Description of Artificial Sequence: Synthetic oligonucleotide
ucuaacaauuaauccauaa

SEQ ID NO: 2941407 - RNA, 19 nt, Artificial Sequence
  Description of Artificial Sequence: Synthetic oligonucleotide
aauggauuuccuucugaga

SEQ ID NO: 2941408 - RNA, 19 nt, Artificial Sequence
  Description of Artificial Sequence: Synthetic oligonucleotide
aaaauauugagaguucauu

SEQ ID NO: 2941409 - RNA, 19 nt, Artificial Sequence
  Description of Artificial Sequence: Synthetic oligonucleotide
acagcccaagaucagcacc

SEQ ID NO: 2941410 - RNA, 19 nt, Artificial Sequence
  Description of Artificial Sequence: Synthetic oligonucleotide
aucagcaccaaggggaugc

SEQ ID NO: 2941411 - RNA, 19 nt, Artificial Sequence
  Description of Artificial Sequence: Synthetic oligonucleotide
  modified_base (16)..(16): a, c, u, g, unknown or other
uucacaagcuugugunucc

SEQ ID NO: 2941412 - RNA, 19 nt, Artificial Sequence
  Description of Artificial Sequence: Synthetic oligonucleotide
auuaauccauaacagccca

SEQ ID NO: 2941413 - RNA, 19 nt, Artificial Sequence
  Description of Artificial Sequence: Synthetic oligonucleotide
gaacucagauaaaauauug

SEQ ID NO: 2941414 - RNA, 19 nt, Artificial Sequence
  Description of Artificial Sequence: Synthetic oligonucleotide
ugagaguucauuucuucac

SEQ ID NO: 2941415 - RNA, 19 nt, Artificial Sequence
  Description of Artificial Sequence: Synthetic oligonucleotide
aguaucuccagccaagaaa

SEQ ID NO: 2941416 - RNA, 19 nt, Artificial Sequence
  Description of Artificial Sequence: Synthetic oligonucleotide
auaacagcccaagaucagc

SEQ ID NO: 2941417 - RNA, 19 nt, Artificial Sequence
  Description of Artificial Sequence: Synthetic oligonucleotide
uuauuaccagguaaaugga

SEQ ID NO: 2941418 - RNA, 19 nt, Artificial Sequence
  Description of Artificial Sequence: Synthetic oligonucleotide
agcuguugagacuugcuag

SEQ ID NO: 2941419 - RNA, 19 nt, Artificial Sequence
  Description of Artificial Sequence: Synthetic oligonucleotide
agaguucauuucuucacuc

SEQ ID NO: 2941420 - RNA, 19 nt, Artificial Sequence
  Description of Artificial Sequence: Synthetic oligonucleotide
aaucaaagcucuaacaauu

SEQ ID NO: 2941421 - RNA, 19 nt, Artificial Sequence
  Description of Artificial Sequence: Synthetic oligonucleotide
guaaaucaaagcucuaaca

SEQ ID NO: 2941422 - RNA, 19 nt, Artificial Sequence
  Description of Artificial Sequence: Synthetic oligonucleotide
uccuucugaaaguaucucc

SEQ ID NO: 2941423 - RNA, 19 nt, Artificial Sequence
  Description of Artificial Sequence: Synthetic oligonucleotide
aagcacacauuucuggggu

SEQ ID NO: 2941424 - RNA, 19 nt, Artificial Sequence
  Description of Artificial Sequence: Synthetic oligonucleotide
agccaagaaauaaagaaug

SEQ ID NO: 2941425 - RNA, 19 nt, Artificial Sequence
  Description of Artificial Sequence: Synthetic oligonucleotide
auaaaauauugagaguuca

SEQ ID NO: 2941426 - RNA, 19 nt, Artificial Sequence
  Description of Artificial Sequence: Synthetic oligonucleotide
uugaaagcacacauuucug

SEQ ID NO: 2941427 - RNA, 19 nt, Artificial Sequence
  Description of Artificial Sequence: Synthetic oligonucleotide
gucuuuguaaaucaaagcu

SEQ ID NO: 2941428 - RNA, 19 nt, Artificial Sequence
  Description of Artificial Sequence: Synthetic oligonucleotide
uaauccauaacagcccaag

SEQ ID NO: 2941429 - RNA, 19 nt, Artificial Sequence
  Description of Artificial Sequence: Synthetic oligonucleotide
uucaucacauggaaaggga

SEQ ID NO: 2941430 - RNA, 19 nt, Artificial Sequence
  Description of Artificial Sequence: Synthetic oligonucleotide
uaaaauauugagaguucau

SEQ ID NO: 2941431 - RNA, 19 nt, Artificial Sequence
  Description of Artificial Sequence: Synthetic oligonucleotide
ugaaaguaucuccagccaa

SEQ ID NO: 2941432 - RNA, 19 nt, Artificial Sequence
  Description of Artificial Sequence: Synthetic oligonucleotide
agcaaacacugucagaaca

SEQ ID NO: 2941433 - RNA, 19 nt, Artificial Sequence
  Description of Artificial Sequence: Synthetic oligonucleotide
accagguaaauggauuucc

SEQ ID NO: 2941434 - RNA, 19 nt, Artificial Sequence
  Description of Artificial Sequence: Synthetic oligonucleotide
aacagcccaagaucagcac

SEQ ID NO: 2941435 - RNA, 19 nt, Artificial Sequence
  Description of Artificial Sequence: Synthetic oligonucleotide
acucuuggauuguaaauug

SEQ ID NO: 2941436 - RNA, 19 nt, Artificial Sequence
  Description of Artificial Sequence: Synthetic oligonucleotide
uaaauggauuuccuucuga

SEQ ID NO: 2941437 - RNA, 19 nt, Artificial Sequence
  Description of Artificial Sequence: Synthetic oligonucleotide
uggauuguaaauuggccuc

SEQ ID NO: 2941438 - RNA, 19 nt, Artificial Sequence
  Description of Artificial Sequence: Synthetic oligonucleotide
acuugcuagaccccguguc

SEQ ID NO: 2941439 - RNA, 19 nt, Artificial Sequence
  Description of Artificial Sequence: Synthetic oligonucleotide
gaaaguaucuccagccaag

SEQ ID NO: 2941440 - RNA, 19 nt, Artificial Sequence
  Description of Artificial Sequence: Synthetic oligonucleotide
acagcaaacacugucagaa

SEQ ID NO: 2941441 - RNA, 19 nt, Artificial Sequence
  Description of Artificial Sequence: Synthetic oligonucleotide
cucagauaaaauauugaga

SEQ ID NO: 2941442 - RNA, 19 nt, Artificial Sequence
  Description of Artificial Sequence: Synthetic oligonucleotide
ugaacucagauaaaauauu

SEQ ID NO: 2941443 - RNA, 19 nt, Artificial Sequence
  Description of Artificial Sequence: Synthetic oligonucleotide
aaauaaagaauggggucca

SEQ ID NO: 2941444 - RNA, 19 nt, Artificial Sequence
  Description of Artificial Sequence: Synthetic oligonucleotide
aaagaaugggguccacaca

SEQ ID NO: 2941445 - RNA, 19 nt, Artificial Sequence
  Description of Artificial Sequence: Synthetic oligonucleotide
uggaaauccagccgugccc

SEQ ID NO: 2941446 - RNA, 19 nt, Artificial Sequence
  Description of Artificial Sequence: Synthetic oligonucleotide
cugguaagucgcauaaacc

SEQ ID NO: 2941447 - RNA, 19 nt, Artificial Sequence
  Description of Artificial Sequence: Synthetic oligonucleotide
cuugaacucagauaaaaua

SEQ ID NO: 2941448 - RNA, 19 nt, Artificial Sequence
  Description of Artificial Sequence: Synthetic oligonucleotide
uucaucguuuucaucacau

SEQ ID NO: 2941449 - RNA, 19 nt, Artificial Sequence
  Description of Artificial Sequence: Synthetic oligonucleotide
ugagacuugcuagaccccg

SEQ ID NO: 2941450 - RNA, 19 nt, Artificial Sequence
  Description of Artificial Sequence: Synthetic oligonucleotide
uaacagcccaagaucagca

SEQ ID NO: 2941451 - RNA, 19 nt, Artificial Sequence
  Description of Artificial Sequence: Synthetic oligonucleotide
uguugagacuugcuagacc

SEQ ID NO: 2941452 - RNA, 19 nt, Artificial Sequence
  Description of Artificial Sequence: Synthetic oligonucleotide
  modified_base (11)..(11): a, c, u, g, unknown or other
aagcuugugunuccguucu

SEQ ID NO: 2941453 - RNA, 19 nt, Artificial Sequence
  Description of Artificial Sequence: Synthetic oligonucleotide
uccaggucuuuguaaauca

SEQ ID NO: 2941454 - RNA, 19 nt, Artificial Sequence
  Description of Artificial Sequence: Synthetic oligonucleotide
aacucagauaaaauauuga

SEQ ID NO: 2941455 - RNA, 19 nt, Artificial Sequence
  Description of Artificial Sequence: Synthetic oligonucleotide
gauaaaauauugagaguuc

SEQ ID NO: 2941456 - RNA, 19 nt, Artificial Sequence
  Description of Artificial Sequence: Synthetic oligonucleotide
aagcuuuccugguggcucg

SEQ ID NO: 2941457 - RNA, 19 nt, Artificial Sequence
  Description of Artificial Sequence: Synthetic oligonucleotide
aauccauaacagcccaaga

SEQ ID NO: 2941458 - RNA, 19 nt, Artificial Sequence
  Description of Artificial Sequence: Synthetic oligonucleotide
agucgcauaaacccuguca

SEQ ID NO: 2941459 - RNA, 19 nt, Artificial Sequence
  Description of Artificial Sequence: Synthetic oligonucleotide
ucagaacaauuauuaccag

SEQ ID NO: 2941460 - RNA, 19 nt, Artificial Sequence
  Description of Artificial Sequence: Synthetic oligonucleotide
auccauaacagcccaagau

SEQ ID NO: 2941461 - RNA, 19 nt, Artificial Sequence
  Description of Artificial Sequence: Synthetic oligonucleotide
augggguccacacagcugu

SEQ ID NO: 2941462 - RNA, 19 nt, Artificial Sequence
  Description of Artificial Sequence: Synthetic oligonucleotide
aauaaagaaugggguccac

SEQ ID NO: 2941463 - RNA, 19 nt, Artificial Sequence
  Description of Artificial Sequence: Synthetic oligonucleotide
ucguuuucaucacauggaa

SEQ ID NO: 2941464 - RNA, 19 nt, Artificial Sequence
  Description of Artificial Sequence: Synthetic oligonucleotide
acaauuauuaccagguaaa

SEQ ID NO: 2941465 - RNA, 19 nt, Artificial Sequence
  Description of Artificial Sequence: Synthetic oligonucleotide
cucuuggauuguaaauugg

SEQ ID NO: 2941466 - RNA, 19 nt, Artificial Sequence
  Description of Artificial Sequence: Synthetic oligonucleotide
uauuaccagguaaauggau

SEQ ID NO: 2941467 - RNA, 19 nt, Artificial Sequence
  Description of Artificial Sequence: Synthetic oligonucleotide
caagaucagcaccaagggg

SEQ ID NO: 2941468 - RNA, 19 nt, Artificial Sequence
  Description of Artificial Sequence: Synthetic oligonucleotide
cuggaagcuuuccuggugg

SEQ ID NO: 2941469 - RNA, 19 nt, Artificial Sequence
  Description of Artificial Sequence: Synthetic oligonucleotide
uuguaaaucaaagcucuaa

SEQ ID NO: 2941470 - RNA, 19 nt, Artificial Sequence
  Description of Artificial Sequence: Synthetic oligonucleotide
caucacauggaaagggaug

SEQ ID NO: 2941471 - RNA, 19 nt, Artificial Sequence
  Description of Artificial Sequence: Synthetic oligonucleotide
ucuccagccaagaaauaaa

SEQ ID NO: 2941472 - RNA, 19 nt, Artificial Sequence
  Description of Artificial Sequence: Synthetic oligonucleotide
cccaagaucagcaccaagg

SEQ ID NO: 2941473 - RNA, 19 nt, Artificial Sequence
  Description of Artificial Sequence: Synthetic oligonucleotide
ucugagaggggaguugucc

SEQ ID NO: 2941474 - RNA, 19 nt, Artificial Sequence
  Description of Artificial Sequence: Synthetic oligonucleotide
aggggaguuguccaggucu

SEQ ID NO: 2941475 - RNA, 19 nt, Artificial Sequence
  Description of Artificial Sequence: Synthetic oligonucleotide
uccagccaagaaauaaaga

SEQ ID NO: 2941476 - RNA, 19 nt, Artificial Sequence
  Description of Artificial Sequence: Synthetic oligonucleotide
cuccagccaagaaauaaag

SEQ ID NO: 2941477 - RNA, 19 nt, Artificial Sequence
  Description of Artificial Sequence: Synthetic oligonucleotide
acugucagaacaauuauua

SEQ ID NO: 2941478 - RNA, 19 nt, Artificial Sequence
  Description of Artificial Sequence: Synthetic oligonucleotide
uucacucuuggauuguaaa

SEQ ID NO: 2941479 - RNA, 19 nt, Artificial Sequence
  Description of Artificial Sequence: Synthetic oligonucleotide
uuaccagguaaauggauuu

SEQ ID NO: 2941480 - RNA, 19 nt, Artificial Sequence
  Description of Artificial Sequence: Synthetic oligonucleotide
ggauguaagacacagcaaa

SEQ ID NO: 2941481 - RNA, 19 nt, Artificial Sequence
  Description of Artificial Sequence: Synthetic oligonucleotide
aucacauggaaagggaugu

SEQ ID NO: 2941482 - RNA, 19 nt, Artificial Sequence
  Description of Artificial Sequence: Synthetic oligonucleotide
gauguaagacacagcaaac

SEQ ID NO: 2941483 - RNA, 19 nt, Artificial Sequence
  Description of Artificial Sequence: Synthetic oligonucleotide
ggucuuuguaaaucaaagc

SEQ ID NO: 2941484 - RNA, 19 nt, Artificial Sequence
  Description of Artificial Sequence: Synthetic oligonucleotide
ucaucacauggaaagggau

SEQ ID NO: 2941485 - RNA, 19 nt, Artificial Sequence
  Description of Artificial Sequence: Synthetic oligonucleotide
auuuccuucugagagggga

SEQ ID NO: 2941486 - RNA, 19 nt, Artificial Sequence
  Description of Artificial Sequence: Synthetic oligonucleotide
aagggauguaagacacagc

SEQ ID NO: 2941487 - RNA, 19 nt, Artificial Sequence
  Description of Artificial Sequence: Synthetic oligonucleotide
uuguccaggucuuuguaaa

SEQ ID NO: 2941488 - RNA, 19 nt, Artificial Sequence
  Description of Artificial Sequence: Synthetic oligonucleotide
uagaccccgugucaccugg

SEQ ID NO: 2941489 - RNA, 19 nt, Artificial Sequence
  Description of Artificial Sequence: Synthetic oligonucleotide
aaaguaucuccagccaaga

SEQ ID NO: 2941490 - RNA, 19 nt, Artificial Sequence
  Description of Artificial Sequence: Synthetic oligonucleotide
ucacucuuggauuguaaau

SEQ ID NO: 2941491 - RNA, 19 nt, Artificial Sequence
  Description of Artificial Sequence: Synthetic oligonucleotide
ugcuugaacucagauaaaa

SEQ ID NO: 2941492 - RNA, 19 nt, Artificial Sequence
  Description of Artificial Sequence: Synthetic oligonucleotide
cauaacagcccaagaucag

SEQ ID NO: 2941493 - RNA, 19 nt, Artificial Sequence
  Description of Artificial Sequence: Synthetic oligonucleotide
ccaagaaauaaagaauggg

SEQ ID NO: 2941494 - RNA, 19 nt, Artificial Sequence
  Description of Artificial Sequence: Synthetic oligonucleotide
uccacacagcuguugagac

SEQ ID NO: 2941495 - RNA, 19 nt, Artificial Sequence
  Description of Artificial Sequence: Synthetic oligonucleotide
ugagaggggaguuguccag

SEQ ID NO: 2941496 - RNA, 19 nt, Artificial Sequence
  Description of Artificial Sequence: Synthetic oligonucleotide
guaaauggauuuccuucug

SEQ ID NO: 2941497 - RNA, 19 nt, Artificial Sequence
  Description of Artificial Sequence: Synthetic oligonucleotide
aguucauuucuucacucuu

SEQ ID NO: 2941498 - RNA, 19 nt, Artificial Sequence
  Description of Artificial Sequence: Synthetic oligonucleotide
auguaagacacagcaaaca

SEQ ID NO: 2941499 - RNA, 19 nt, Artificial Sequence
  Description of Artificial Sequence: Synthetic oligonucleotide
ucaucguuuucaucacaug

SEQ ID NO: 2941500 - RNA, 19 nt, Artificial Sequence
  Description of Artificial Sequence: Synthetic oligonucleotide
cugucagaacaauuauuac

SEQ ID NO: 2941501 - RNA, 19 nt, Artificial Sequence
  Description of Artificial Sequence: Synthetic oligonucleotide
cauggaaagggauguaaga

SEQ ID NO: 2941502 - RNA, 19 nt, Artificial Sequence
  Description of Artificial Sequence: Synthetic oligonucleotide
cauugaaagcacacauuuc

SEQ ID NO: 2941503 - RNA, 19 nt, Artificial Sequence
  Description of Artificial Sequence: Synthetic oligonucleotide
uauugagaguucauuucuu

SEQ ID NO: 2941504 - RNA, 19 nt, Artificial Sequence
  Description of Artificial Sequence: Synthetic oligonucleotide
aagucgcauaaacccuguc

SEQ ID NO: 2941505 - RNA, 19 nt, Artificial Sequence
  Description of Artificial Sequence: Synthetic oligonucleotide
ggauuuccuucugagaggg

SEQ ID NO: 2941506 - RNA, 19 nt, Artificial Sequence
  Description of Artificial Sequence: Synthetic oligonucleotide
uucugcuugaacucagaua

SEQ ID NO: 2941507 - RNA, 19 nt, Artificial Sequence
  Description of Artificial Sequence: Synthetic oligonucleotide
gacacagcaaacacuguca

SEQ ID NO: 2941508 - RNA, 19 nt, Artificial Sequence
  Description of Artificial Sequence: Synthetic oligonucleotide
uaaauuggccucacuccuc

SEQ ID NO: 2941509 - RNA, 19 nt, Artificial Sequence
  Description of Artificial Sequence: Synthetic oligonucleotide
guaagucgcauaaacccug

SEQ ID NO: 2941510 - RNA, 19 nt, Artificial Sequence
  Description of Artificial Sequence: Synthetic oligonucleotide
  modified_base (15)..(15): a, c, u, g, unknown or other
ucacaagcuugugunuccg

SEQ ID NO: 2941511 - RNA, 19 nt, Artificial Sequence
  Description of Artificial Sequence: Synthetic oligonucleotide
acauggaaagggauguaag

SEQ ID NO: 2941512 - RNA, 19 nt, Artificial Sequence
  Description of Artificial Sequence: Synthetic oligonucleotide
  modified_base (12)..(12): a, c, u, g, unknown or other
caagcuugugunuccguuc

SEQ ID NO: 2941513 - RNA, 19 nt, Artificial Sequence
  Description of Artificial Sequence: Synthetic oligonucleotide
aucguuuucaucacaugga

SEQ ID NO: 2941514 - RNA, 19 nt, Artificial Sequence
  Description of Artificial Sequence: Synthetic oligonucleotide
gaagcuuuccugguggcuc

SEQ ID NO: 2941515 - RNA, 19 nt, Artificial Sequence
  Description of Artificial Sequence: Synthetic oligonucleotide
aaguaucuccagccaagaa

SEQ ID NO: 2941516 - RNA, 19 nt, Artificial Sequence
  Description of Artificial Sequence: Synthetic oligonucleotide
guucauuucuucacucuug

SEQ ID NO: 2941517 - RNA, 19 nt, Artificial Sequence
  Description of Artificial Sequence: Synthetic oligonucleotide
uugagacuugcuagacccc

SEQ ID NO: 2941518 - RNA, 19 nt, Artificial Sequence
  Description of Artificial Sequence: Synthetic oligonucleotide
uuuccugguggcucgggac

SEQ ID NO: 2941519 - RNA, 19 nt, Artificial Sequence
  Description of Artificial Sequence: Synthetic oligonucleotide
uaagucgcauaaacccugu

SEQ ID NO: 2941520 - RNA, 19 nt, Artificial Sequence
  Description of Artificial Sequence: Synthetic oligonucleotide
acacugucagaacaauuau

SEQ ID NO: 2941521 - RNA, 19 nt, Artificial Sequence
  Description of Artificial Sequence: Synthetic oligonucleotide
uuaauccauaacagcccaa

SEQ ID NO: 2941522 - RNA, 19 nt, Artificial Sequence
  Description of Artificial Sequence: Synthetic oligonucleotide
ccaagaucagcaccaaggg

SEQ ID NO: 2941523 - RNA, 19 nt, Artificial Sequence
  Description of Artificial Sequence: Synthetic oligonucleotide
guaaauuggccucacuccu

SEQ ID NO: 2941524 - RNA, 19 nt, Artificial Sequence
  Description of Artificial Sequence: Synthetic oligonucleotide
  modified_base (7)..(7): a, c, u, g, unknown or other
uugugunuccguucugcuu

SEQ ID NO: 2941525 - RNA, 19 nt, Artificial Sequence
  Description of Artificial Sequence: Synthetic oligonucleotide
ugccuucacaagcuugugu

SEQ ID NO: 2941526 - RNA, 19 nt, Artificial Sequence
  Description of Artificial Sequence: Synthetic oligonucleotide
auuggccucacuccuccug

SEQ ID NO: 2941527 - RNA, 19 nt, Artificial Sequence
  Description of Artificial Sequence: Synthetic oligonucleotide
uuccugguggcucgggaca

SEQ ID NO: 2941528 - RNA, 19 nt, Artificial Sequence
  Description of Artificial Sequence: Synthetic oligonucleotide
auuguaaauuggccucacu

SEQ ID NO: 2941529 - RNA, 19 nt, Artificial Sequence
  Description of Artificial Sequence: Synthetic oligonucleotide
auuaccagguaaauggauu

SEQ ID NO: 2941530 - RNA, 19 nt, Artificial Sequence
  Description of Artificial Sequence: Synthetic oligonucleotide
ucuggaaauccagccgugc

SEQ ID NO: 2941531 - RNA, 19 nt, Artificial Sequence
  Description of Artificial Sequence: Synthetic oligonucleotide
ucauuucuucacucuugga

SEQ ID NO: 2941532 - RNA, 19 nt, Artificial Sequence
  Description of Artificial Sequence: Synthetic oligonucleotide
ggaaauccagccgugcccg

SEQ ID NO: 2941533 - RNA, 19 nt, Artificial Sequence
  Description of Artificial Sequence: Synthetic oligonucleotide
gccaagaaauaaagaaugg

SEQ ID NO: 2941534 - RNA, 19 nt, Artificial Sequence
  Description of Artificial Sequence: Synthetic oligonucleotide
ccagccaagaaauaaagaa

SEQ ID NO: 2941535 - RNA, 19 nt, Artificial Sequence
  Description of Artificial Sequence: Synthetic oligonucleotide
auucaucguuuucaucaca

SEQ ID NO: 2941536 - RNA, 19 nt, Artificial Sequence
  Description of Artificial Sequence: Synthetic oligonucleotide
agcacacauuucugggguc

SEQ ID NO: 2941537 - RNA, 19 nt, Artificial Sequence
  Description of Artificial Sequence: Synthetic oligonucleotide
  modified_base (17)..(17): a, c, u, g, unknown or other
cuucacaagcuugugunuc

SEQ ID NO: 2941538 - RNA, 19 nt, Artificial Sequence
  Description of Artificial Sequence: Synthetic oligonucleotide
aaugggguccacacagcug

SEQ ID NO: 2941539 - RNA, 19 nt, Artificial Sequence
  Description of Artificial Sequence: Synthetic oligonucleotide
ccugguaagucgcauaaac

SEQ ID NO: 2941540 - RNA, 19 nt, Artificial Sequence
  Description of Artificial Sequence: Synthetic oligonucleotide
agaaugggguccacacagc

SEQ ID NO: 2941541 - RNA, 19 nt, Artificial Sequence
  Description of Artificial Sequence: Synthetic oligonucleotide
gagaggggaguuguccagg

SEQ ID NO: 2941542 - RNA, 19 nt, Artificial Sequence
  Description of Artificial Sequence: Synthetic oligonucleotide
agacuugcuagaccccgug

SEQ ID NO: 2941543 - RNA, 19 nt, Artificial Sequence
  Description of Artificial Sequence: Synthetic oligonucleotide
aucuccagccaagaaauaa

SEQ ID NO: 2941544 - RNA, 19 nt, Artificial Sequence
  Description of Artificial Sequence: Synthetic oligonucleotide
gggucuggaaauccagccg

SEQ ID NO: 2941545 - RNA, 19 nt, Artificial Sequence
  Description of Artificial Sequence: Synthetic oligonucleotide
gaacaauuauuaccaggua

SEQ ID NO: 2941546 - RNA, 19 nt, Artificial Sequence
  Description of Artificial Sequence: Synthetic oligonucleotide
gagaguucauuucuucacu

SEQ ID NO: 2941547 - RNA, 19 nt, Artificial Sequence
  Description of Artificial Sequence: Synthetic oligonucleotide
gguaaauggauuuccuucu

SEQ ID NO: 2941548 - RNA, 19 nt, Artificial Sequence
  Description of Artificial Sequence: Synthetic oligonucleotide
ggggucuggaaauccagcc

SEQ ID NO: 2941549 - RNA, 19 nt, Artificial Sequence
  Description of Artificial Sequence: Synthetic oligonucleotide
uggaagcuuuccugguggc

SEQ ID NO: 2941550 - RNA, 19 nt, Artificial Sequence
  Description of Artificial Sequence: Synthetic oligonucleotide
uggcucgggacaaucuccu

SEQ ID NO: 2941551 - RNA, 19 nt, Artificial Sequence
  Description of Artificial Sequence: Synthetic oligonucleotide
  modified_base (3)..(3): a, c, u, g, unknown or other
gunuccguucugcuugaac

SEQ ID NO: 2941552 - RNA, 19 nt, Artificial Sequence
  Description of Artificial Sequence: Synthetic oligonucleotide
gauuguaaauuggccucac

SEQ ID NO: 2941553 - RNA, 19 nt, Artificial Sequence
  Description of Artificial Sequence: Synthetic oligonucleotide
cugaaaguaucuccagcca

SEQ ID NO: 2941554 - RNA, 19 nt, Artificial Sequence
  Description of Artificial Sequence: Synthetic oligonucleotide
uccguucugcuugaacuca

SEQ ID NO: 2941555 - RNA, 19 nt, Artificial Sequence
  Description of Artificial Sequence: Synthetic oligonucleotide
aauccagccgugcccgcaa

SEQ ID NO: 2941556 - RNA, 19 nt, Artificial Sequence
  Description of Artificial Sequence: Synthetic oligonucleotide
cuugcuagaccccguguca

SEQ ID NO: 2941557 - RNA, 19 nt, Artificial Sequence
  Description of Artificial Sequence: Synthetic oligonucleotide
guuguccaggucuuuguaa

SEQ ID NO: 2941558 - RNA, 19 nt, Artificial Sequence
  Description of Artificial Sequence: Synthetic oligonucleotide
caaagcucuaacaauuaau

SEQ ID NO: 2941559 - RNA, 19 nt, Artificial Sequence
  Description of Artificial Sequence: Synthetic oligonucleotide
ugcuagaccccgugucacc

SEQ ID NO: 2941560 - RNA, 19 nt, Artificial Sequence
  Description of Artificial Sequence: Synthetic oligonucleotide
ccauaacagcccaagauca

SEQ ID NO: 2941561 - RNA, 19 nt, Artificial Sequence
  Description of Artificial Sequence: Synthetic oligonucleotide
ccugucauugaaagcacac

SEQ ID NO: 2941562 - RNA, 19 nt, Artificial Sequence
  Description of Artificial Sequence: Synthetic oligonucleotide
gggacaaucuccuucugaa

SEQ ID NO: 2941563 - RNA, 19 nt, Artificial Sequence
  Description of Artificial Sequence: Synthetic oligonucleotide
cgugcccgcaaauucaucg

SEQ ID NO: 2941564 - RNA, 19 nt, Artificial Sequence
  Description of Artificial Sequence: Synthetic oligonucleotide
gaguucauuucuucacucu

SEQ ID NO: 2941565 - RNA, 19 nt, Artificial Sequence
  Description of Artificial Sequence: Synthetic oligonucleotide
  modified_base (10)..(10): a, c, u, g, unknown or other
agcuugugunuccguucug

SEQ ID NO: 2941566 - RNA, 19 nt, Artificial Sequence
  Description of Artificial Sequence: Synthetic oligonucleotide
gucgcauaaacccugucau

SEQ ID NO: 2941567 - RNA, 19 nt, Artificial Sequence
  Description of Artificial Sequence: Synthetic oligonucleotide
cgugucaccugguaagucg

SEQ ID NO: 2941568 - RNA, 19 nt, Artificial Sequence
  Description of Artificial Sequence: Synthetic oligonucleotide
aauuggccucacuccuccu

SEQ ID NO: 2941569 - RNA, 19 nt, Artificial Sequence
  Description of Artificial Sequence: Synthetic oligonucleotide
guaucuccagccaagaaau

SEQ ID NO: 2941570 - RNA, 19 nt, Artificial Sequence
  Description of Artificial Sequence: Synthetic oligonucleotide
agaggggaguuguccaggu

SEQ ID NO: 2941571 - RNA, 19 nt, Artificial Sequence
  Description of Artificial Sequence: Synthetic oligonucleotide
gaaugggguccacacagcu

SEQ ID NO: 2941572 - RNA, 19 nt, Artificial Sequence
  Description of Artificial Sequence: Synthetic oligonucleotide
cauaaacccugucauugaa

SEQ ID NO: 2941573 - RNA, 19 nt, Artificial Sequence
  Description of Artificial Sequence: Synthetic oligonucleotide
aguuguccaggucuuugua

SEQ ID NO: 2941574 - RNA, 19 nt, Artificial Sequence
  Description of Artificial Sequence: Synthetic oligonucleotide
cagcccaagaucagcacca

SEQ ID NO: 2941575 - RNA, 19 nt, Artificial Sequence
  Description of Artificial Sequence: Synthetic oligonucleotide
agcaccaaggggaugcaga

SEQ ID NO: 2941576 - RNA, 19 nt, Artificial Sequence
  Description of Artificial Sequence: Synthetic oligonucleotide
cugagaggggaguugucca

SEQ ID NO: 2941577 - RNA, 19 nt, Artificial Sequence
  Description of Artificial Sequence: Synthetic oligonucleotide
caggucuuuguaaaucaaa

SEQ ID NO: 2941578 - RNA, 19 nt, Artificial Sequence
  Description of Artificial Sequence: Synthetic oligonucleotide
ucaccugguaagucgcaua

SEQ ID NO: 2941579 - RNA, 19 nt, Artificial Sequence
  Description of Artificial Sequence: Synthetic oligonucleotide
  modified_base (9)..(9): a, c, u, g, unknown or other
gcuugugunuccguucugc

SEQ ID NO: 2941580 - RNA, 19 nt, Artificial Sequence
  Description of Artificial Sequence: Synthetic oligonucleotide
ugguggcucgggacaaucu

SEQ ID NO: 2941581 - RNA, 19 nt, Artificial Sequence
  Description of Artificial Sequence: Synthetic oligonucleotide
cagcaaacacugucagaac

SEQ ID NO: 2941582 - RNA, 19 nt, Artificial Sequence
  Description of Artificial Sequence: Synthetic oligonucleotide
guaagacacagcaaacacu

SEQ ID NO: 2941583 - RNA, 19 nt, Artificial Sequence
  Description of Artificial Sequence: Synthetic oligonucleotide
uugcuagaccccgugucac

SEQ ID NO: 2941584 - RNA, 19 nt, Artificial Sequence
  Description of Artificial Sequence: Synthetic oligonucleotide
uaccagguaaauggauuuc

SEQ ID NO: 2941585 - RNA, 19 nt, Artificial Sequence
  Description of Artificial Sequence: Synthetic oligonucleotide
aaucuccuucugaaaguau

SEQ ID NO: 2941586 - RNA, 19 nt, Artificial Sequence
  Description of Artificial Sequence: Synthetic oligonucleotide
acccugucauugaaagcac

SEQ ID NO: 2941587 - RNA, 19 nt, Artificial Sequence
  Description of Artificial Sequence: Synthetic oligonucleotide
gcuguugagacuugcuaga

SEQ ID NO: 2941588 - RNA, 19 nt, Artificial Sequence
  Description of Artificial Sequence: Synthetic oligonucleotide
ccucacuccuccuggaagc

SEQ ID NO: 2941589 - RNA, 19 nt, Artificial Sequence
  Description of Artificial Sequence: Synthetic oligonucleotide
cuguugagacuugcuagac

SEQ ID NO: 2941590 - RNA, 19 nt, Artificial Sequence
  Description of Artificial Sequence: Synthetic oligonucleotide
auaaacccugucauugaaa

SEQ ID NO: 2941591 - RNA, 19 nt, Artificial Sequence
  Description of Artificial Sequence: Synthetic oligonucleotide
cagccaagaaauaaagaau

SEQ ID NO: 2941592 - RNA, 19 nt, Artificial Sequence
  Description of Artificial Sequence: Synthetic oligonucleotide
guggcucgggacaaucucc

SEQ ID NO: 2941593 - RNA, 19 nt, Artificial Sequence
  Description of Artificial Sequence: Synthetic oligonucleotide
cagauaaaauauugagagu

SEQ ID NO: 2941594 - RNA, 19 nt, Artificial Sequence
  Description of Artificial Sequence: Synthetic oligonucleotide
aucaaagcucuaacaauua

SEQ ID NO: 2941595 - RNA, 19 nt, Artificial Sequence
  Description of Artificial Sequence: Synthetic oligonucleotide
aagacacagcaaacacugu

SEQ ID NO: 2941596 - RNA, 19 nt, Artificial Sequence
  Description of Artificial Sequence: Synthetic oligonucleotide
ugcccgcaaauucaucguu

SEQ ID NO: 2941597 - RNA, 19 nt, Artificial Sequence
  Description of Artificial Sequence: Synthetic oligonucleotide
uaucuccagccaagaaaua

SEQ ID NO: 2941598 - RNA, 19 nt, Artificial Sequence
  Description of Artificial Sequence: Synthetic oligonucleotide
gaaagggauguaagacaca

SEQ ID NO: 2941599 - RNA, 19 nt, Artificial Sequence
  Description of Artificial Sequence: Synthetic oligonucleotide
  modified_base (13)..(13): a, c, u, g, unknown or other
acaagcuugugunuccguu

SEQ ID NO: 2941600 - RNA, 19 nt, Artificial Sequence
  Description of Artificial Sequence: Synthetic oligonucleotide
guccaggucuuuguaaauc

SEQ ID NO: 2941601 - RNA, 19 nt, Artificial Sequence
  Description of Artificial Sequence: Synthetic oligonucleotide
cacagcuguugagacuugc

SEQ ID NO: 2941602 - RNA, 19 nt, Artificial Sequence
  Description of Artificial Sequence: Synthetic oligonucleotide
  modified_base (19)..(19): a, c, u, g, unknown or other
gccuucacaagcuugugun

SEQ ID NO: 2941603 - RNA, 19 nt, Artificial Sequence
  Description of Artificial Sequence: Synthetic oligonucleotide
ucgcauaaacccugucauu

SEQ ID NO: 2941604 - RNA, 19 nt, Artificial Sequence
  Description of Artificial Sequence: Synthetic oligonucleotide
cugucauugaaagcacaca

SEQ ID NO: 2941605 - RNA, 19 nt, Artificial Sequence
  Description of Artificial Sequence: Synthetic oligonucleotide
uucugagaggggaguuguc

SEQ ID NO: 2941606 - RNA, 19 nt, Artificial Sequence
  Description of Artificial Sequence: Synthetic oligonucleotide
ucuucacucuuggauugua

SEQ ID NO: 2941607 - RNA, 19 nt, Artificial Sequence
  Description of Artificial Sequence: Synthetic oligonucleotide
guccacacagcuguugaga

SEQ ID NO: 2941608 - RNA, 19 nt, Artificial Sequence
  Description of Artificial Sequence: Synthetic oligonucleotide
ucgggacaaucuccuucug

SEQ ID NO: 2941609 - RNA, 19 nt, Artificial Sequence
  Description of Artificial Sequence: Synthetic oligonucleotide
cgcauaaacccugucauug

SEQ ID NO: 2941610 - RNA, 19 nt, Artificial Sequence
  Description of Artificial Sequence: Synthetic oligonucleotide
cacauggaaagggauguaa

SEQ ID NO: 2941611 - RNA, 19 nt, Artificial Sequence
  Description of Artificial Sequence: Synthetic oligonucleotide
acagcuguugagacuugcu

SEQ ID NO: 2941612 - RNA, 19 nt, Artificial Sequence
  Description of Artificial Sequence: Synthetic oligonucleotide
cagccgugcccgcaaauuc

SEQ ID NO: 2941613 - RNA, 19 nt, Artificial Sequence
  Description of Artificial Sequence: Synthetic oligonucleotide
caccugguaagucgcauaa

SEQ ID NO: 2941614 - RNA, 19 nt, Artificial Sequence
  Description of Artificial Sequence: Synthetic oligonucleotide
gguccacacagcuguugag

SEQ ID NO: 2941615 - RNA, 19 nt, Artificial Sequence
  Description of Artificial Sequence: Synthetic oligonucleotide
cacagcaaacacugucaga

SEQ ID NO: 2941616 - RNA, 19 nt, Artificial Sequence
  Description of Artificial Sequence: Synthetic oligonucleotide
gccucacuccuccuggaag

SEQ ID NO: 2941617 - RNA, 19 nt, Artificial Sequence
  Description of Artificial Sequence: Synthetic oligonucleotide
gcauaaacccugucauuga

SEQ ID NO: 2941618 - RNA, 19 nt, Artificial Sequence
  Description of Artificial Sequence: Synthetic oligonucleotide
ggucuggaaauccagccgu

SEQ ID NO: 2941619 - RNA, 19 nt, Artificial Sequence
  Description of Artificial Sequence: Synthetic oligonucleotide
cucgggacaaucuccuucu

SEQ ID NO: 2941620 - RNA, 19 nt, Artificial Sequence
  Description of Artificial Sequence: Synthetic oligonucleotide
gguggcucgggacaaucuc

SEQ ID NO: 2941621 - RNA, 19 nt, Artificial Sequence
  Description of Artificial Sequence: Synthetic oligonucleotide
cuagaccccgugucaccug

SEQ ID NO: 2941622 - RNA, 19 nt, Artificial Sequence
  Description of Artificial Sequence: Synthetic oligonucleotide
ccccgugucaccugguaag

SEQ ID NO: 2941623 - RNA, 19 nt, Artificial Sequence
  Description of Artificial Sequence: Synthetic oligonucleotide
agaucagcaccaaggggau

SEQ ID NO: 2941624 - RNA, 19 nt, Artificial Sequence
  Description of Artificial Sequence: Synthetic oligonucleotide
  modified_base (8)..(8): a, c, u, g, unknown or other
cuugugunuccguucugcu

SEQ ID NO: 2941625 - RNA, 19 nt, Artificial Sequence
  Description of Artificial Sequence: Synthetic oligonucleotide
ggauuguaaauuggccuca

SEQ ID NO: 2941626 - RNA, 19 nt, Artificial Sequence
  Description of Artificial Sequence: Synthetic oligonucleotide
gcucgggacaaucuccuuc

SEQ ID NO: 2941627 - RNA, 19 nt, Artificial Sequence
  Description of Artificial Sequence: Synthetic oligonucleotide
caaucuccuucugaaagua

SEQ ID NO: 2941628 - RNA, 19 nt, Artificial Sequence
  Description of Artificial Sequence: Synthetic oligonucleotide
cuuuccugguggcucggga

SEQ ID NO: 2941629 - RNA, 19 nt, Artificial Sequence
  Description of Artificial Sequence: Synthetic oligonucleotide
accccgugucaccugguaa

SEQ ID NO: 2941630 - RNA, 19 nt, Artificial Sequence
  Description of Artificial Sequence: Synthetic oligonucleotide
cagcuguugagacuugcua

SEQ ID NO: 2941631 - RNA, 19 nt, Artificial Sequence
  Description of Artificial Sequence: Synthetic oligonucleotide
  modified_base (5)..(5): a, c, u, g, unknown or other
gugunuccguucugcuuga

SEQ ID NO: 2941632 - RNA, 19 nt, Artificial Sequence
  Description of Artificial Sequence: Synthetic oligonucleotide
gaggggaguuguccagguc

SEQ ID NO: 2941633 - RNA, 19 nt, Artificial Sequence
  Description of Artificial Sequence: Synthetic oligonucleotide
gaucagcaccaaggggaug

SEQ ID NO: 2941634 - RNA, 19 nt, Artificial Sequence
  Description of Artificial Sequence: Synthetic oligonucleotide
gguaagucgcauaaacccu

SEQ ID NO: 2941635 - RNA, 19 nt, Artificial Sequence
  Description of Artificial Sequence: Synthetic oligonucleotide
gcaaacacugucagaacaa

SEQ ID NO: 2941636 - RNA, 19 nt, Artificial Sequence
  Description of Artificial Sequence: Synthetic oligonucleotide
agccgugcccgcaaauuca

SEQ ID NO: 2941637 - RNA, 19 nt, Artificial Sequence
  Description of Artificial Sequence: Synthetic oligonucleotide
cgcaaauucaucguuuuca

SEQ ID NO: 2941638 - RNA, 19 nt, Artificial Sequence
  Description of Artificial Sequence: Synthetic oligonucleotide
guucugcuugaacucagau

SEQ ID NO: 2941639 - RNA, 19 nt, Artificial Sequence
  Description of Artificial Sequence: Synthetic oligonucleotide
gcucuaacaauuaauccau

SEQ ID NO: 2941640 - RNA, 19 nt, Artificial Sequence
  Description of Artificial Sequence: Synthetic oligonucleotide
cacucuuggauuguaaauu

SEQ ID NO: 2941641 - RNA, 19 nt, Artificial Sequence
  Description of Artificial Sequence: Synthetic oligonucleotide
cucuaacaauuaauccaua

SEQ ID NO: 2941642 - RNA, 19 nt, Artificial Sequence
  Description of Artificial Sequence: Synthetic oligonucleotide
uggccucacuccuccugga

SEQ ID NO: 2941643 - RNA, 19 nt, Artificial Sequence
  Description of Artificial Sequence: Synthetic oligonucleotide
cacacagcuguugagacuu

SEQ ID NO: 2941644 - RNA, 19 nt, Artificial Sequence
  Description of Artificial Sequence: Synthetic oligonucleotide
uccuucugagaggggaguu

SEQ ID NO: 2941645 - RNA, 19 nt, Artificial Sequence
  Description of Artificial Sequence: Synthetic oligonucleotide
ccuggaagcuuuccuggug

SEQ ID NO: 2941646 - RNA, 19 nt, Artificial Sequence
  Description of Artificial Sequence: Synthetic oligonucleotide
uccagccgugcccgcaaau

SEQ ID NO: 2941647 - RNA, 19 nt, Artificial Sequence
  Description of Artificial Sequence: Synthetic oligonucleotide
gacuugcuagaccccgugu

SEQ ID NO: 2941648 - RNA, 19 nt, Artificial Sequence
  Description of Artificial Sequence: Synthetic oligonucleotide
caauuauuaccagguaaau

SEQ ID NO: 2941649 - RNA, 19 nt, Artificial Sequence
  Description of Artificial Sequence: Synthetic oligonucleotide
ggacaaucuccuucugaaa

SEQ ID NO: 2941650 - RNA, 19 nt, Artificial Sequence
  Description of Artificial Sequence: Synthetic oligonucleotide
  modified_base (4)..(4): a, c, u, g, unknown or other
ugunuccguucugcuugaa

SEQ ID NO: 2941651 - RNA, 19 nt, Artificial Sequence
  Description of Artificial Sequence: Synthetic oligonucleotide
agcuuuccugguggcucgg

SEQ ID NO: 2941652 - RNA, 19 nt, Artificial Sequence
  Description of Artificial Sequence: Synthetic oligonucleotide
uccugguggcucgggacaa

SEQ ID NO: 2941653 - RNA, 19 nt, Artificial Sequence
  Description of Artificial Sequence: Synthetic oligonucleotide
  modified_base (14)..(14): a, c, u, g, unknown or other
cacaagcuugugunuccgu

SEQ ID NO: 2941654 - RNA, 19 nt, Artificial Sequence
  Description of Artificial Sequence: Synthetic oligonucleotide
cacugucagaacaauuauu

SEQ ID NO: 2941655 - RNA, 19 nt, Artificial Sequence
  Description of Artificial Sequence: Synthetic oligonucleotide
cagguaaauggauuuccuu

SEQ ID NO: 2941656 - RNA, 19 nt, Artificial Sequence
  Description of Artificial Sequence: Synthetic oligonucleotide
cuucugagaggggaguugu

SEQ ID NO: 2941657 - RNA, 19 nt, Artificial Sequence
  Description of Artificial Sequence: Synthetic oligonucleotide
cugguggcucgggacaauc

SEQ ID NO: 2941658 - RNA, 19 nt, Artificial Sequence
  Description of Artificial Sequence: Synthetic oligonucleotide
gucauugaaagcacacauu

SEQ ID NO: 2941659 - RNA, 19 nt, Artificial Sequence
  Description of Artificial Sequence: Synthetic oligonucleotide
ccguucugcuugaacucag

SEQ ID NO: 2941660 - RNA, 19 nt, Artificial Sequence
  Description of Artificial Sequence: Synthetic oligonucleotide
gcccaagaucagcaccaag

SEQ ID NO: 2941661 - RNA, 19 nt, Artificial Sequence
  Description of Artificial Sequence: Synthetic oligonucleotide
cugcuugaacucagauaaa

SEQ ID NO: 2941662 - RNA, 19 nt, Artificial Sequence
  Description of Artificial Sequence: Synthetic oligonucleotide
gugcccgcaaauucaucgu

SEQ ID NO: 2941663 - RNA, 19 nt, Artificial Sequence
  Description of Artificial Sequence: Synthetic oligonucleotide
ccuucugagaggggaguug

SEQ ID NO: 2941664 - RNA, 19 nt, Artificial Sequence
  Description of Artificial Sequence: Synthetic oligonucleotide
caaacacugucagaacaau

SEQ ID NO: 2941665 - RNA, 19 nt, Artificial Sequence
  Description of Artificial Sequence: Synthetic oligonucleotide
gaccccgugucaccuggua

SEQ ID NO: 2941666 - RNA, 19 nt, Artificial Sequence
  Description of Artificial Sequence: Synthetic oligonucleotide
accugguaagucgcauaaa

SEQ ID NO: 2941667 - RNA, 19 nt, Artificial Sequence
  Description of Artificial Sequence: Synthetic oligonucleotide
ucacuccuccuggaagcuu

SEQ ID NO: 2941668 - RNA, 19 nt, Artificial Sequence
  Description of Artificial Sequence: Synthetic oligonucleotide
gggauguaagacacagcaa

SEQ ID NO: 2941669 - RNA, 19 nt, Artificial Sequence
  Description of Artificial Sequence: Synthetic oligonucleotide
gagacuugcuagaccccgu

SEQ ID NO: 2941670 - RNA, 19 nt, Artificial Sequence
  Description of Artificial Sequence: Synthetic oligonucleotide
ugggguccacacagcuguu

SEQ ID NO: 2941671 - RNA, 19 nt, Artificial Sequence
  Description of Artificial Sequence: Synthetic oligonucleotide
gcuugaacucagauaaaau

SEQ ID NO: 2941672 - RNA, 19 nt, Artificial Sequence
  Description of Artificial Sequence: Synthetic oligonucleotide
cacuccuccuggaagcuuu

SEQ ID NO: 2941673 - RNA, 19 nt, Artificial Sequence
  Description of Artificial Sequence: Synthetic oligonucleotide
ccgcaaauucaucguuuuc

SEQ ID NO: 2941674 - RNA, 19 nt, Artificial Sequence
  Description of Artificial Sequence: Synthetic oligonucleotide
ccagguaaauggauuuccu

SEQ ID NO: 2941675 - RNA, 19 nt, Artificial Sequence
  Description of Artificial Sequence: Synthetic oligonucleotide
ccaggucuuuguaaaucaa

SEQ ID NO: 2941676 - RNA, 19 nt, Artificial Sequence
  Description of Artificial Sequence: Synthetic oligonucleotide
gcuuuccugguggcucggg

SEQ ID NO: 2941677 - RNA, 19 nt, Artificial Sequence
  Description of Artificial Sequence: Synthetic oligonucleotide
cguuuucaucacauggaaa

SEQ ID NO: 2941678 - RNA, 19 nt, Artificial Sequence
  Description of Artificial Sequence: Synthetic oligonucleotide
auccagccgugcccgcaaa

SEQ ID NO: 2941679 - RNA, 19 nt, Artificial Sequence
  Description of Artificial Sequence: Synthetic oligonucleotide
cccugucauugaaagcaca

SEQ ID NO: 2941680 - RNA, 19 nt, Artificial Sequence
  Description of Artificial Sequence: Synthetic oligonucleotide
gcuagaccccgugucaccu

SEQ ID NO: 2941681 - RNA, 19 nt, Artificial Sequence
  Description of Artificial Sequence: Synthetic oligonucleotide
ggaagcuuuccugguggcu

SEQ ID NO: 2941682 - RNA, 19 nt, Artificial Sequence
  Description of Artificial Sequence: Synthetic oligonucleotide
cucacuccuccuggaagcu

SEQ ID NO: 2941683 - RNA, 19 nt, Artificial Sequence
  Description of Artificial Sequence: Synthetic oligonucleotide
ggccucacuccuccuggaa

SEQ ID NO: 2941684 - RNA, 19 nt, Artificial Sequence
  Description of Artificial Sequence: Synthetic oligonucleotide
cgggacaaucuccuucuga

SEQ ID NO: 2941685 - RNA, 19 nt, Artificial Sequence
  Description of Artificial Sequence: Synthetic oligonucleotide
agaccccgugucaccuggu

SEQ ID NO: 2941686 - RNA, 19 nt, Artificial Sequence
  Description of Artificial Sequence: Synthetic oligonucleotide
  modified_base (18)..(18): a, c, u, g, unknown or other
ccuucacaagcuugugunu

SEQ ID NO: 2941687 - RNA, 19 nt, Artificial Sequence
  Description of Artificial Sequence: Synthetic oligonucleotide
cguucugcuugaacucaga

SEQ ID NO: 2941688 - RNA, 19 nt, Artificial Sequence
  Description of Artificial Sequence: Synthetic oligonucleotide
ccgugucaccugguaaguc

SEQ ID NO: 2941689 - RNA, 19 nt, Artificial Sequence
  Description of Artificial Sequence: Synthetic oligonucleotide
cccgcaaauucaucguuuu

SEQ ID NO: 2941690 - RNA, 19 nt, Artificial Sequence
  Description of Artificial Sequence: Synthetic oligonucleotide
ccgugcccgcaaauucauc

SEQ ID NO: 2941691 - RNA, 19 nt, Artificial Sequence
  Description of Artificial Sequence: Synthetic oligonucleotide
ccacacagcuguugagacu

SEQ ID NO: 2941692 - RNA, 19 nt, Artificial Sequence
  Description of Artificial Sequence: Synthetic oligonucleotide
gcccgcaaauucaucguuu

SEQ ID NO: 2941693 - RNA, 19 nt, Artificial Sequence
  Description of Artificial Sequence: Synthetic oligonucleotide
gccgugcccgcaaauucau

SEQ ID NO: 2941694 - RNA, 19 nt, Artificial Sequence
  Description of Artificial Sequence: Synthetic oligonucleotide
ggcucgggacaaucuccuu

SEQ ID NO: 2941695 - RNA, 19 nt, Artificial Sequence
  Description of Artificial Sequence: Synthetic oligonucleotide
cccgugucaccugguaagu

SEQ ID NO: 2941696 - RNA, 19 nt, Artificial Sequence
  Description of Artificial Sequence: Synthetic oligonucleotide
gggaguuguccaggucuuu

SEQ ID NO: 2941697 - RNA, 19 nt, Artificial Sequence
  Description of Artificial Sequence: Synthetic oligonucleotide
ccagccgugcccgcaaauu

SEQ ID NO: 2941698 - RNA, 19 nt, Artificial Sequence
  Description of Artificial Sequence: Synthetic oligonucleotide
ccugguggcucgggacaau

SEQ ID NO: 2941699 - RNA, 19 nt, Artificial Sequence
  Description of Artificial Sequence: Synthetic oligonucleotide
agcaaaauaaggcagagac

SEQ ID NO: 2941700 - RNA, 19 nt, Artificial Sequence
  Description of Artificial Sequence: Synthetic oligonucleotide
uguggugucaaauacauag

SEQ ID NO: 2941701 - RNA, 19 nt, Artificial Sequence
  Description of Artificial Sequence: Synthetic oligonucleotide
uuuagcagcaaaauaaggc

SEQ ID NO: 2941702 - RNA, 19 nt, Artificial Sequence
  Description of Artificial Sequence: Synthetic oligonucleotide
aggacauacagacacaacc

SEQ ID NO: 2941703 - RNA, 19 nt, Artificial Sequence
  Description of Artificial Sequence: Synthetic oligonucleotide
uaauccuucaccaaggagc

SEQ ID NO: 2941704 - RNA, 19 nt, Artificial Sequence
  Description of Artificial Sequence: Synthetic oligonucleotide
aaaguaauccuucaccaag

SEQ ID NO: 2941705 - RNA, 19 nt, Artificial Sequence
  Description of Artificial Sequence: Synthetic oligonucleotide
acugaggacauacagacac

SEQ ID NO: 2941706 - RNA, 19 nt, Artificial Sequence
  Description of Artificial Sequence: Synthetic oligonucleotide
agcaaaguaauccuucacc

SEQ ID NO: 2941707 - RNA, 19 nt, Artificial Sequence
  Description of Artificial Sequence: Synthetic oligonucleotide
uuuugaggaagccacagag

SEQ ID NO: 2941708 - RNA, 19 nt, Artificial Sequence
  Description of Artificial Sequence: Synthetic oligonucleotide
agacugaggacauacagac

SEQ ID NO: 2941709 - RNA, 19 nt, Artificial Sequence
  Description of Artificial Sequence: Synthetic oligonucleotide
uucuuauuaagauucaaga

SEQ ID NO: 2941710 - RNA, 19 nt, Artificial Sequence
  Description of Artificial Sequence: Synthetic oligonucleotide
uuucuuauuaagauucaag

SEQ ID NO: 2941711 - RNA, 19 nt, Artificial Sequence
  Description of Artificial Sequence: Synthetic oligonucleotide
uuauuaagauucaagacau

SEQ ID NO: 2941712 - RNA, 19 nt, Artificial Sequence
  Description of Artificial Sequence: Synthetic oligonucleotide
ugagguugaauuuagcagc

SEQ ID NO: 2941713 - RNA, 19 nt, Artificial Sequence
  Description of Artificial Sequence: Synthetic oligonucleotide
uucaagacaugaaagaagu

SEQ ID NO: 2941714 - RNA, 19 nt, Artificial Sequence
  Description of Artificial Sequence: Synthetic oligonucleotide
caaaauaaggcagagacug

SEQ ID NO: 2941715 - RNA, 19 nt, Artificial Sequence
  Description of Artificial Sequence: Synthetic oligonucleotide
acauuucuuauuaagauuc

SEQ ID NO: 2941716 - RNA, 19 nt, Artificial Sequence
  Description of Artificial Sequence: Synthetic oligonucleotide
cacagagucuucuagaugc

SEQ ID NO: 2941717 - RNA, 19 nt, Artificial Sequence
  Description of Artificial Sequence: Synthetic oligonucleotide
cuuauuaagauucaagaca

SEQ ID NO: 2941718 - RNA, 19 nt, Artificial Sequence
  Description of Artificial Sequence: Synthetic oligonucleotide
uuagcagcaaaauaaggca

SEQ ID NO: 2941719 - RNA, 19 nt, Artificial Sequence
  Description of Artificial Sequence: Synthetic oligonucleotide
uaagauucaagacaugaaa

SEQ ID NO: 2941720 - RNA, 19 nt, Artificial Sequence
  Description of Artificial Sequence: Synthetic oligonucleotide
ucuuauuaagauucaagac

SEQ ID NO: 2941721 - RNA, 19 nt, Artificial Sequence
  Description of Artificial Sequence: Synthetic oligonucleotide
ucuucuagaugcaucagug

SEQ ID NO: 2941722 - RNA, 19 nt, Artificial Sequence
  Description of Artificial Sequence: Synthetic oligonucleotide
aacugggcggcccaguacc

SEQ ID NO: 2941723 - RNA, 19 nt, Artificial Sequence
  Description of Artificial Sequence: Synthetic oligonucleotide
aauccuucaccaaggagcc

SEQ ID NO: 2941724 - RNA, 19 nt, Artificial Sequence
  Description of Artificial Sequence: Synthetic oligonucleotide
agagauggggaauaacugg

SEQ ID NO: 2941725 - RNA, 19 nt, Artificial Sequence
  Description of Artificial Sequence: Synthetic oligonucleotide
gaauuuagcagcaaaauaa

SEQ ID NO: 2941726 - RNA, 19 nt, Artificial Sequence
  Description of Artificial Sequence: Synthetic oligonucleotide
ugaaagaaguccuuggcac

SEQ ID NO: 2941727 - RNA, 19 nt, Artificial Sequence
  Description of Artificial Sequence: Synthetic oligonucleotide
caagacaugaaagaagucc

SEQ ID NO: 2941728 - RNA, 19 nt, Artificial Sequence
  Description of Artificial Sequence: Synthetic oligonucleotide
aagauucaagacaugaaag

SEQ ID NO: 2941729 - RNA, 19 nt, Artificial Sequence
  Description of Artificial Sequence: Synthetic oligonucleotide
aauuuagcagcaaaauaag

SEQ ID NO: 2941730 - RNA, 19 nt, Artificial Sequence
  Description of Artificial Sequence: Synthetic oligonucleotide
ucaaauacauagugcaccc

SEQ ID NO: 2941731 - RNA, 19 nt, Artificial Sequence
  Description of Artificial Sequence: Synthetic oligonucleotide
ugucacauuucuuauuaag

SEQ ID NO: 2941732 - RNA, 19 nt, Artificial Sequence
  Description of Artificial Sequence: Synthetic oligonucleotide
acauagugcaccccaagac

SEQ ID NO: 2941733 - RNA, 19 nt, Artificial Sequence
  Description of Artificial Sequence: Synthetic oligonucleotide
aaauaaggcagagacugag

SEQ ID NO: 2941734 - RNA, 19 nt, Artificial Sequence
  Description of Artificial Sequence: Synthetic oligonucleotide
uucuagaugcaucagugac

SEQ ID NO: 2941735 - RNA, 19 nt, Artificial Sequence
  Description of Artificial Sequence: Synthetic oligonucleotide
gaugcugaaauccgcggcg

SEQ ID NO: 2941736 - RNA, 19 nt, Artificial Sequence
  Description of Artificial Sequence: Synthetic oligonucleotide
auuaagauucaagacauga

SEQ ID NO: 2941737 - RNA, 19 nt, Artificial Sequence
  Description of Artificial Sequence: Synthetic oligonucleotide
acaugaaagaaguccuugg

SEQ ID NO: 2941738 - RNA, 19 nt, Artificial Sequence
  Description of Artificial Sequence: Synthetic oligonucleotide
cugagguugaauuuagcag

SEQ ID NO: 2941739 - RNA, 19 nt, Artificial Sequence
  Description of Artificial Sequence: Synthetic oligonucleotide
agauucaagacaugaaaga

SEQ ID NO: 2941740 - RNA, 19 nt, Artificial Sequence
  Description of Artificial Sequence: Synthetic oligonucleotide
uuugaggugucacauuucu

SEQ ID NO: 2941741 - RNA, 19 nt, Artificial Sequence
  Description of Artificial Sequence: Synthetic oligonucleotide
ugaauuuagcagcaaaaua

SEQ ID NO: 2941742 - RNA, 19 nt, Artificial Sequence
  Description of Artificial Sequence: Synthetic oligonucleotide
agaugcaucagugacacug

SEQ ID NO: 2941743 - RNA, 19 nt, Artificial Sequence
  Description of Artificial Sequence: Synthetic oligonucleotide
uauacuuugaggugucaca

SEQ ID NO: 2941744 - RNA, 19 nt, Artificial Sequence
  Description of Artificial Sequence: Synthetic oligonucleotide
cugucuagcaaaguaaucc

SEQ ID NO: 2941745 - RNA, 19 nt, Artificial Sequence
  Description of Artificial Sequence: Synthetic oligonucleotide
uggugucaaauacauagug

SEQ ID NO: 2941746 - RNA, 19 nt, Artificial Sequence
  Description of Artificial Sequence: Synthetic oligonucleotide
ucacauuucuuauuaagau

SEQ ID NO: 2941747 - RNA, 19 nt, Artificial Sequence
  Description of Artificial Sequence: Synthetic oligonucleotide
gauggggaauaacugggcg

SEQ ID NO: 2941748 - RNA, 19 nt, Artificial Sequence
  Description of Artificial Sequence: Synthetic oligonucleotide
aucagugacacugagguug

SEQ ID NO: 2941749 - RNA, 19 nt, Artificial Sequence
  Description of Artificial Sequence: Synthetic oligonucleotide
cuuggcagugcagagaugg

SEQ ID NO: 2941750 - RNA, 19 nt, Artificial Sequence
  Description of Artificial Sequence: Synthetic oligonucleotide
acugagguugaauuuagca

SEQ ID NO: 2941751 - RNA, 19 nt, Artificial Sequence
  Description of Artificial Sequence: Synthetic oligonucleotide
ucuagcaaaguaauccuuc

SEQ ID NO: 2941752 - RNA, 19 nt, Artificial Sequence
  Description of Artificial Sequence: Synthetic oligonucleotide
uuaagauucaagacaugaa

SEQ ID NO: 2941753 - RNA, 19 nt, Artificial Sequence
  Description of Artificial Sequence: Synthetic oligonucleotide
uccaggaugcugaaauccg

SEQ ID NO: 2941754 - RNA, 19 nt, Artificial Sequence
  Description of Artificial Sequence: Synthetic oligonucleotide
agacuuuugaggaagccac

SEQ ID NO: 2941755 - RNA, 19 nt, Artificial Sequence
  Description of Artificial Sequence: Synthetic oligonucleotide
gugucaaauacauagugca

SEQ ID NO: 2941756 - RNA, 19 nt, Artificial Sequence
  Description of Artificial Sequence: Synthetic oligonucleotide
ucugacccaaccaggacag

SEQ ID NO: 2941757 - RNA, 19 nt, Artificial Sequence
  Description of Artificial Sequence: Synthetic oligonucleotide
gauaucggcguacaaacuc

SEQ ID NO: 2941758 - RNA, 19 nt, Artificial Sequence
  Description of Artificial Sequence: Synthetic oligonucleotide
aaagaaguccuuggcacuc

SEQ ID NO: 2941759 - RNA, 19 nt, Artificial Sequence
  Description of Artificial Sequence: Synthetic oligonucleotide
acaaccagcacucuauacu

SEQ ID NO: 2941760 - RNA, 19 nt, Artificial Sequence
  Description of Artificial Sequence: Synthetic oligonucleotide
aaggcagagacugaggaca

SEQ ID NO: 2941761 - RNA, 19 nt, Artificial Sequence
  Description of Artificial Sequence: Synthetic oligonucleotide
uagcagcaaaauaaggcag

SEQ ID NO: 2941762 - RNA, 19 nt, Artificial Sequence
  Description of Artificial Sequence: Synthetic oligonucleotide
uacaaacuccuucugacuc

SEQ ID NO: 2941763 - RNA, 19 nt, Artificial Sequence
  Description of Artificial Sequence: Synthetic oligonucleotide
ucuagaugcaucagugaca

SEQ ID NO: 2941764 - RNA, 19 nt, Artificial Sequence
  Description of Artificial Sequence: Synthetic oligonucleotide
gacauacagacacaaccag

SEQ ID NO: 2941765 - RNA, 19 nt, Artificial Sequence
  Description of Artificial Sequence: Synthetic oligonucleotide
cauaucugacccaaccagg

SEQ ID NO: 2941766 - RNA, 19 nt, Artificial Sequence
  Description of Artificial Sequence: Synthetic oligonucleotide
aagacaugaaagaaguccu

SEQ ID NO: 2941767 - RNA, 19 nt, Artificial Sequence
  Description of Artificial Sequence: Synthetic oligonucleotide
aaguaauccuucaccaagg

SEQ ID NO: 2941768 - RNA, 19 nt, Artificial Sequence
  Description of Artificial Sequence: Synthetic oligonucleotide
ugaggugucacauuucuua

SEQ ID NO: 2941769 - RNA, 19 nt, Artificial Sequence
  Description of Artificial Sequence: Synthetic oligonucleotide
auaaggcagagacugagga

SEQ ID NO: 2941770 - RNA, 19 nt, Artificial Sequence
  Description of Artificial Sequence: Synthetic oligonucleotide
uacagacacaaccagcacu

SEQ ID NO: 2941771 - RNA, 19 nt, Artificial Sequence
  Description of Artificial Sequence: Synthetic oligonucleotide
caccccaagacuuuugagg

SEQ ID NO: 2941772 - RNA, 19 nt, Artificial Sequence
  Description of Artificial Sequence: Synthetic oligonucleotide
gucaaauacauagugcacc

SEQ ID NO: 2941773 - RNA, 19 nt, Artificial Sequence
  Description of Artificial Sequence: Synthetic oligonucleotide
agcacucuauacuuugagg

SEQ ID NO: 2941774 - RNA, 19 nt, Artificial Sequence
  Description of Artificial Sequence: Synthetic oligonucleotide
ugugccggugauaucggcg

SEQ ID NO: 2941775 - RNA, 19 nt, Artificial Sequence
  Description of Artificial Sequence: Synthetic oligonucleotide
gagauggggaauaacuggg

SEQ ID NO: 2941776 - RNA, 19 nt, Artificial Sequence
  Description of Artificial Sequence: Synthetic oligonucleotide
caugaaagaaguccuuggc

SEQ ID NO: 2941777 - RNA, 19 nt, Artificial Sequence
  Description of Artificial Sequence: Synthetic oligonucleotide
gugauaucggcguacaaac

SEQ ID NO: 2941778 - RNA, 19 nt, Artificial Sequence
  Description of Artificial Sequence: Synthetic oligonucleotide
ucaacaugggcaguucgcg

SEQ ID NO: 2941779 - RNA, 19 nt, Artificial Sequence
  Description of Artificial Sequence: Synthetic oligonucleotide
ucugcugucuagcaaagua

SEQ ID NO: 2941780 - RNA, 19 nt, Artificial Sequence
  Description of Artificial Sequence: Synthetic oligonucleotide
aacaugggcaguucgcgcu

SEQ ID NO: 2941781 - RNA, 19 nt, Artificial Sequence
  Description of Artificial Sequence: Synthetic oligonucleotide
aauaaggcagagacugagg

SEQ ID NO: 2941782 - RNA, 19 nt, Artificial Sequence
  Description of Artificial Sequence: Synthetic oligonucleotide
auggggaauaacugggcgg

SEQ ID NO: 2941783 - RNA, 19 nt, Artificial Sequence
  Description of Artificial Sequence: Synthetic oligonucleotide
aaauccgcggcgauugugg

SEQ ID NO: 2941784 - RNA, 19 nt, Artificial Sequence
  Description of Artificial Sequence: Synthetic oligonucleotide
ugucuagcaaaguaauccu

SEQ ID NO: 2941785 - RNA, 19 nt, Artificial Sequence
  Description of Artificial Sequence: Synthetic oligonucleotide
ugcaucagugacacugagg

SEQ ID NO: 2941786 - RNA, 19 nt, Artificial Sequence
  Description of Artificial Sequence: Synthetic oligonucleotide
uucaccaaggagcccauga

SEQ ID NO: 2941787 - RNA, 19 nt, Artificial Sequence
  Description of Artificial Sequence: Synthetic oligonucleotide
uacauagugcaccccaaga

SEQ ID NO: 2941788 - RNA, 19 nt, Artificial Sequence
  Description of Artificial Sequence: Synthetic oligonucleotide
auucaagacaugaaagaag

SEQ ID NO: 2941789 - RNA, 19 nt, Artificial Sequence
  Description of Artificial Sequence: Synthetic oligonucleotide
aagacuuuugaggaagcca

SEQ ID NO: 2941790 - RNA, 19 nt, Artificial Sequence
  Description of Artificial Sequence: Synthetic oligonucleotide
auaucggcguacaaacucc

SEQ ID NO: 2941791 - RNA, 19 nt, Artificial Sequence
  Description of Artificial Sequence: Synthetic oligonucleotide
acauacagacacaaccagc

SEQ ID NO: 2941792 - RNA, 19 nt, Artificial Sequence
  Description of Artificial Sequence: Synthetic oligonucleotide
auuuagcagcaaaauaagg

SEQ ID NO: 2941793 - RNA, 19 nt, Artificial Sequence
  Description of Artificial Sequence: Synthetic oligonucleotide
ugacucuccaggaugcuga

SEQ ID NO: 2941794 - RNA, 19 nt, Artificial Sequence
  Description of Artificial Sequence: Synthetic oligonucleotide
acagacacaaccagcacuc

SEQ ID NO: 2941795 - RNA, 19 nt, Artificial Sequence
  Description of Artificial Sequence: Synthetic oligonucleotide
cuagaugcaucagugacac

SEQ ID NO: 2941796 - RNA, 19 nt, Artificial Sequence
  Description of Artificial Sequence: Synthetic oligonucleotide
gagucuucuagaugcauca

SEQ ID NO: 2941797 - RNA, 19 nt, Artificial Sequence
  Description of Artificial Sequence: Synthetic oligonucleotide
cacugugccggugauaucg

SEQ ID NO: 2941798 - RNA, 19 nt, Artificial Sequence
  Description of Artificial Sequence: Synthetic oligonucleotide
gauucaagacaugaaagaa

SEQ ID NO: 2941799 - RNA, 19 nt, Artificial Sequence
  Description of Artificial Sequence: Synthetic oligonucleotide
uauuaagauucaagacaug

SEQ ID NO: 2941800 - RNA, 19 nt, Artificial Sequence
  Description of Artificial Sequence: Synthetic oligonucleotide
accccaagacuuuugagga

SEQ ID NO: 2941801 - RNA, 19 nt, Artificial Sequence
  Description of Artificial Sequence: Synthetic oligonucleotide
acuuugaggugucacauuu

SEQ ID NO: 2941802 - RNA, 19 nt, Artificial Sequence
  Description of Artificial Sequence: Synthetic oligonucleotide
gacaugaaagaaguccuug

SEQ ID NO: 2941803 - RNA, 19 nt, Artificial Sequence
  Description of Artificial Sequence: Synthetic oligonucleotide
cagagauggggaauaacug

SEQ ID NO: 2941804 - RNA, 19 nt, Artificial Sequence
  Description of Artificial Sequence: Synthetic oligonucleotide
aucugacccaaccaggaca

SEQ ID NO: 2941805 - RNA, 19 nt, Artificial Sequence
  Description of Artificial Sequence: Synthetic oligonucleotide
caggaugcugaaauccgcg

SEQ ID NO: 2941806 - RNA, 19 nt, Artificial Sequence
  Description of Artificial Sequence: Synthetic oligonucleotide
guaauccuucaccaaggag

SEQ ID NO: 2941807 - RNA, 19 nt, Artificial Sequence
  Description of Artificial Sequence: Synthetic oligonucleotide
auacauagugcaccccaag

SEQ ID NO: 2941808 - RNA, 19 nt, Artificial Sequence
  Description of Artificial Sequence: Synthetic oligonucleotide
aggaugcugaaauccgcgg

SEQ ID NO: 2941809 - RNA, 19 nt, Artificial Sequence
  Description of Artificial Sequence: Synthetic oligonucleotide
agcauaucugacccaacca

SEQ ID NO: 2941810 - RNA, 19 nt, Artificial Sequence
  Description of Artificial Sequence: Synthetic oligonucleotide
cagcauaucugacccaacc

SEQ ID NO: 2941811 - RNA, 19 nt, Artificial Sequence
  Description of Artificial Sequence: Synthetic oligonucleotide
cagaggucaacaugggcag

SEQ ID NO: 2941812 - RNA, 19 nt, Artificial Sequence
  Description of Artificial Sequence: Synthetic oligonucleotide
ugcugucuagcaaaguaau

SEQ ID NO: 2941813 - RNA, 19 nt, Artificial Sequence
  Description of Artificial Sequence: Synthetic oligonucleotide
uggggaauaacugggcggc

SEQ ID NO: 2941814 - RNA, 19 nt, Artificial Sequence
  Description of Artificial Sequence: Synthetic oligonucleotide
accagcacucuauacuuug

SEQ ID NO: 2941815 - RNA, 19 nt, Artificial Sequence
  Description of Artificial Sequence: Synthetic oligonucleotide
cuucugacucuccaggaug

SEQ ID NO: 2941816 - RNA, 19 nt, Artificial Sequence
  Description of Artificial Sequence: Synthetic oligonucleotide
acucuauacuuugaggugu

SEQ ID NO: 2941817 - RNA, 19 nt, Artificial Sequence
  Description of Artificial Sequence: Synthetic oligonucleotide
cacucuauacuuugaggug

SEQ ID NO: 2941818 - RNA, 19 nt, Artificial Sequence
  Description of Artificial Sequence: Synthetic oligonucleotide
cuccuucugacucuccagg

SEQ ID NO: 2941819 - RNA, 19 nt, Artificial Sequence
  Description of Artificial Sequence: Synthetic oligonucleotide
acuuuugaggaagccacag

SEQ ID NO: 2941820 - RNA, 19 nt, Artificial Sequence
  Description of Artificial Sequence: Synthetic oligonucleotide
gcauaucugacccaaccag

SEQ ID NO: 2941821 - RNA, 19 nt, Artificial Sequence
  Description of Artificial Sequence: Synthetic oligonucleotide
uccuucaccaaggagccca

SEQ ID NO: 2941822 - RNA, 19 nt, Artificial Sequence
  Description of Artificial Sequence: Synthetic oligonucleotide
uagcaaaguaauccuucac

SEQ ID NO: 2941823 - RNA, 19 nt, Artificial Sequence
  Description of Artificial Sequence: Synthetic oligonucleotide
gucacauuucuuauuaaga

SEQ ID NO: 2941824 - RNA, 19 nt, Artificial Sequence
  Description of Artificial Sequence: Synthetic oligonucleotide
aguaauccuucaccaagga

SEQ ID NO: 2941825 - RNA, 19 nt, Artificial Sequence
  Description of Artificial Sequence: Synthetic oligonucleotide
auuguggugucaaauacau

SEQ ID NO: 2941826 - RNA, 19 nt, Artificial Sequence
  Description of Artificial Sequence: Synthetic oligonucleotide
ucggcguacaaacuccuuc

SEQ ID NO: 2941827 - RNA, 19 nt, Artificial Sequence
  Description of Artificial Sequence: Synthetic oligonucleotide
agagucuucuagaugcauc

SEQ ID NO: 2941828 - RNA, 19 nt, Artificial Sequence
  Description of Artificial Sequence: Synthetic oligonucleotide
agauggggaauaacugggc

SEQ ID NO: 2941829 - RNA, 19 nt, Artificial Sequence
  Description of Artificial Sequence: Synthetic oligonucleotide
ugauaucggcguacaaacu

SEQ ID NO: 2941830 - RNA, 19 nt, Artificial Sequence
  Description of Artificial Sequence: Synthetic oligonucleotide
cuccaggaugcugaaaucc

SEQ ID NO: 2941831 - RNA, 19 nt, Artificial Sequence
  Description of Artificial Sequence: Synthetic oligonucleotide
gcaaaguaauccuucacca

SEQ ID NO: 2941832 - RNA, 19 nt, Artificial Sequence
  Description of Artificial Sequence: Synthetic oligonucleotide
uaaggcagagacugaggac

SEQ ID NO: 2941833 - RNA, 19 nt, Artificial Sequence
  Description of Artificial Sequence: Synthetic oligonucleotide
ugcaccccaagacuuuuga

SEQ ID NO: 2941834 - RNA, 19 nt, Artificial Sequence
  Description of Artificial Sequence: Synthetic oligonucleotide
acaaacuccuucugacucu

SEQ ID NO: 2941835 - RNA, 19 nt, Artificial Sequence
  Description of Artificial Sequence: Synthetic oligonucleotide
guugaauuuagcagcaaaa

SEQ ID NO: 2941836 - RNA, 19 nt, Artificial Sequence
  Description of Artificial Sequence: Synthetic oligonucleotide
ucaagacaugaaagaaguc

SEQ ID NO: 2941837 - RNA, 19 nt, Artificial Sequence
  Description of Artificial Sequence: Synthetic oligonucleotide
ugaggacauacagacacaa

SEQ ID NO: 2941838 - RNA, 19 nt, Artificial Sequence
  Description of Artificial Sequence: Synthetic oligonucleotide
accaaggagcccaugaucu

SEQ ID NO: 2941839 - RNA, 19 nt, Artificial Sequence
  Description of Artificial Sequence: Synthetic oligonucleotide
ugacccaaccaggacaggc

SEQ ID NO: 2941840 - RNA, 19 nt, Artificial Sequence
  Description of Artificial Sequence: Synthetic oligonucleotide
cugaaauccgcggcgauug

SEQ ID NO: 2941841 - RNA, 19 nt, Artificial Sequence
  Description of Artificial Sequence: Synthetic oligonucleotide
aaaauaaggcagagacuga

SEQ ID NO: 2941842 - RNA, 19 nt, Artificial Sequence
  Description of Artificial Sequence: Synthetic oligonucleotide
gauuguggugucaaauaca

SEQ ID NO: 2941843 - RNA, 19 nt, Artificial Sequence
  Description of Artificial Sequence: Synthetic oligonucleotide
uaucugacccaaccaggac

SEQ ID NO: 2941844 - RNA, 19 nt, Artificial Sequence
  Description of Artificial Sequence: Synthetic oligonucleotide
cuagcaaaguaauccuuca

SEQ ID NO: 2941845 - RNA, 19 nt, Artificial Sequence
  Description of Artificial Sequence: Synthetic oligonucleotide
cuauacuuugaggugucac

SEQ ID NO: 2941846 - RNA, 19 nt, Artificial Sequence
  Description of Artificial Sequence: Synthetic oligonucleotide
uucgcgcugcuccucacug

SEQ ID NO: 2941847 - RNA, 19 nt, Artificial Sequence
  Description of Artificial Sequence: Synthetic oligonucleotide
aauacauagugcaccccaa

SEQ ID NO: 2941848 - RNA, 19 nt, Artificial Sequence
  Description of Artificial Sequence: Synthetic oligonucleotide
uacccgcucagcauaucug

SEQ ID NO: 2941849 - RNA, 19 nt, Artificial Sequence
  Description of Artificial Sequence: Synthetic oligonucleotide
auacuuugaggugucacau

SEQ ID NO: 2941850 - RNA, 19 nt, Artificial Sequence
  Description of Artificial Sequence: Synthetic oligonucleotide
gagacugaggacauacaga

SEQ ID NO: 2941851 - RNA, 19 nt, Artificial Sequence
  Description of Artificial Sequence: Synthetic oligonucleotide
auuucuuauuaagauucaa

SEQ ID NO: 2941852 - RNA, 19 nt, Artificial Sequence
  Description of Artificial Sequence: Synthetic oligonucleotide
uaucggcguacaaacuccu

SEQ ID NO: 2941853 - RNA, 19 nt, Artificial Sequence
  Description of Artificial Sequence: Synthetic oligonucleotide
cagcacucuauacuuugag

SEQ ID NO: 2941854 - RNA, 19 nt, Artificial Sequence
  Description of Artificial Sequence: Synthetic oligonucleotide
auaucugacccaaccagga

SEQ ID NO: 2941855 - RNA, 19 nt, Artificial Sequence
  Description of Artificial Sequence: Synthetic oligonucleotide
uccuucugacucuccagga

SEQ ID NO: 2941856 - RNA, 19 nt, Artificial Sequence
  Description of Artificial Sequence: Synthetic oligonucleotide
caaggagcccaugaucugc

SEQ ID NO: 2941857 - RNA, 19 nt, Artificial Sequence
  Description of Artificial Sequence: Synthetic oligonucleotide
caagacuuuugaggaagcc

SEQ ID NO: 2941858 - RNA, 19 nt, Artificial Sequence
  Description of Artificial Sequence: Synthetic oligonucleotide
caacaugggcaguucgcgc

SEQ ID NO: 2941859 - RNA, 19 nt, Artificial Sequence
  Description of Artificial Sequence: Synthetic oligonucleotide
uccgcggcgauuguggugu

SEQ ID NO: 2941860 - RNA, 19 nt, Artificial Sequence
  Description of Artificial Sequence: Synthetic oligonucleotide
ugcugggaaagcugaacuc

SEQ ID NO: 2941861 - RNA, 19 nt, Artificial Sequence
  Description of Artificial Sequence: Synthetic oligonucleotide
agccacagagucuucuaga

SEQ ID NO: 2941862 - RNA, 19 nt, Artificial Sequence
  Description of Artificial Sequence: Synthetic oligonucleotide
ugacacugagguugaauuu

SEQ ID NO: 2941863 - RNA, 19 nt, Artificial Sequence
  Description of Artificial Sequence: Synthetic oligonucleotide
cauuucuuauuaagauuca

SEQ ID NO: 2941864 - RNA, 19 nt, Artificial Sequence
  Description of Artificial Sequence: Synthetic oligonucleotide
ucugcugggaaagcugaac

SEQ ID NO: 2941865 - RNA, 19 nt, Artificial Sequence
  Description of Artificial Sequence: Synthetic oligonucleotide
gaaagaaguccuuggcacu

SEQ ID NO: 2941866 - RNA, 19 nt, Artificial Sequence
  Description of Artificial Sequence: Synthetic oligonucleotide
ggucaacaugggcaguucg

SEQ ID NO: 2941867 - RNA, 19 nt, Artificial Sequence
  Description of Artificial Sequence: Synthetic oligonucleotide
aauaacugggcggcccagu

SEQ ID NO: 2941868 - RNA, 19 nt, Artificial Sequence
  Description of Artificial Sequence: Synthetic oligonucleotide
aauccgcggcgauuguggu

SEQ ID NO: 2941869 - RNA, 19 nt, Artificial Sequence
  Description of Artificial Sequence: Synthetic oligonucleotide
ggugucacauuucuuauua

SEQ ID NO: 2941870 - RNA, 19 nt, Artificial Sequence
  Description of Artificial Sequence: Synthetic oligonucleotide
gacacugagguugaauuua

SEQ ID NO: 2941871 - RNA, 19 nt, Artificial Sequence
  Description of Artificial Sequence: Synthetic oligonucleotide
cacucugcugggaaagcug

SEQ ID NO: 2941872 - RNA, 19 nt, Artificial Sequence
  Description of Artificial Sequence: Synthetic oligonucleotide
augcaucagugacacugag

SEQ ID NO: 2941873 - RNA, 19 nt, Artificial Sequence
  Description of Artificial Sequence: Synthetic oligonucleotide
gucaacaugggcaguucgc

SEQ ID NO: 2941874 - RNA, 19 nt, Artificial Sequence
  Description of Artificial Sequence: Synthetic oligonucleotide
cuuugaggugucacauuuc

SEQ ID NO: 2941875 - RNA, 19 nt, Artificial Sequence
  Description of Artificial Sequence: Synthetic oligonucleotide
agcagcaaaauaaggcaga

SEQ ID NO: 2941876 - RNA, 19 nt, Artificial Sequence
  Description of Artificial Sequence: Synthetic oligonucleotide
acccgcucagcauaucuga

SEQ ID NO: 2941877 - RNA, 19 nt, Artificial Sequence
  Description of Artificial Sequence: Synthetic oligonucleotide
gagguugaauuuagcagca

SEQ ID NO: 2941878 - RNA, 19 nt, Artificial Sequence
  Description of Artificial Sequence: Synthetic oligonucleotide
cucuauacuuugagguguc

SEQ ID NO: 2941879 - RNA, 19 nt, Artificial Sequence
  Description of Artificial Sequence: Synthetic oligonucleotide
ggaugcugaaauccgcggc

SEQ ID NO: 2941880 - RNA, 19 nt, Artificial Sequence
  Description of Artificial Sequence: Synthetic oligonucleotide
cguacaaacuccuucugac

SEQ ID NO: 2941881 - RNA, 19 nt, Artificial Sequence
  Description of Artificial Sequence: Synthetic oligonucleotide
gaaauccgcggcgauugug

SEQ ID NO: 2941882 - RNA, 19 nt, Artificial Sequence
  Description of Artificial Sequence: Synthetic oligonucleotide
uggcacucugcugggaaag

SEQ ID NO: 2941883 - RNA, 19 nt, Artificial Sequence
  Description of Artificial Sequence: Synthetic oligonucleotide
cuucuagaugcaucaguga

SEQ ID NO: 2941884 - RNA, 19 nt, Artificial Sequence
  Description of Artificial Sequence: Synthetic oligonucleotide
uccuuggcacucugcuggg

SEQ ID NO: 2941885 - RNA, 19 nt, Artificial Sequence
  Description of Artificial Sequence: Synthetic oligonucleotide
ucagcauaucugacccaac

SEQ ID NO: 2941886 - RNA, 19 nt, Artificial Sequence
  Description of Artificial Sequence: Synthetic oligonucleotide
gcagaggucaacaugggca

SEQ ID NO: 2941887 - RNA, 19 nt, Artificial Sequence
  Description of Artificial Sequence: Synthetic oligonucleotide
gcugggaaagcugaacucc

SEQ ID NO: 2941888 - RNA, 19 nt, Artificial Sequence
  Description of Artificial Sequence: Synthetic oligonucleotide
gaugcaucagugacacuga

SEQ ID NO: 2941889 - RNA, 19 nt, Artificial Sequence
  Description of Artificial Sequence: Synthetic oligonucleotide
gcacucuauacuuugaggu

SEQ ID NO: 2941890 - RNA, 19 nt, Artificial Sequence
  Description of Artificial Sequence: Synthetic oligonucleotide
gguugaauuuagcagcaaa

SEQ ID NO: 2941891 - RNA, 19 nt, Artificial Sequence
  Description of Artificial Sequence: Synthetic oligonucleotide
uaacugggcggcccaguac

SEQ ID NO: 2941892 - RNA, 19 nt, Artificial Sequence
  Description of Artificial Sequence: Synthetic oligonucleotide
acacugagguugaauuuag

SEQ ID NO: 2941893 - RNA, 19 nt, Artificial Sequence
  Description of Artificial Sequence: Synthetic oligonucleotide
cacugagguugaauuuagc

SEQ ID NO: 2941894 - RNA, 19 nt, Artificial Sequence
  Description of Artificial Sequence: Synthetic oligonucleotide
gacuuggcagugcagagau

SEQ ID NO: 2941895 - RNA, 19 nt, Artificial Sequence
  Description of Artificial Sequence: Synthetic oligonucleotide
ucuauacuuugagguguca

SEQ ID NO: 2941896 - RNA, 19 nt, Artificial Sequence
  Description of Artificial Sequence: Synthetic oligonucleotide
caccaaggagcccaugauc

SEQ ID NO: 2941897 - RNA, 19 nt, Artificial Sequence
  Description of Artificial Sequence: Synthetic oligonucleotide
ggacauacagacacaacca

SEQ ID NO: 2941898 - RNA, 19 nt, Artificial Sequence
  Description of Artificial Sequence: Synthetic oligonucleotide
cauagugcaccccaagacu

SEQ ID NO: 2941899 - RNA, 19 nt, Artificial Sequence
  Description of Artificial Sequence: Synthetic oligonucleotide
aggacaggcagaggucaac

SEQ ID NO: 2941900 - RNA, 19 nt, Artificial Sequence
  Description of Artificial Sequence: Synthetic oligonucleotide
cugcugucuagcaaaguaa

SEQ ID NO: 2941901 - RNA, 19 nt, Artificial Sequence
  Description of Artificial Sequence: Synthetic oligonucleotide
auagugcaccccaagacuu

SEQ ID NO: 2941902 - RNA, 19 nt, Artificial Sequence
  Description of Artificial Sequence: Synthetic oligonucleotide
cuuuugaggaagccacaga

SEQ ID NO: 2941903 - RNA, 19 nt, Artificial Sequence
  Description of Artificial Sequence: Synthetic oligonucleotide
agugcagagauggggaaua

SEQ ID NO: 2941904 - RNA, 19 nt, Artificial Sequence
  Description of Artificial Sequence: Synthetic oligonucleotide
aaggagcccaugaucugcu

SEQ ID NO: 2941905 - RNA, 19 nt, Artificial Sequence
  Description of Artificial Sequence: Synthetic oligonucleotide
gaauaacugggcggcccag

SEQ ID NO: 2941906 - RNA, 19 nt, Artificial Sequence
  Description of Artificial Sequence: Synthetic oligonucleotide
gugacacugagguugaauu

SEQ ID NO: 2941907 - RNA, 19 nt, Artificial Sequence
  Description of Artificial Sequence: Synthetic oligonucleotide
acaugggcaguucgcgcug

SEQ ID NO: 2941908 - RNA, 19 nt, Artificial Sequence
  Description of Artificial Sequence: Synthetic oligonucleotide
ugaaauccgcggcgauugu

SEQ ID NO: 2941909 - RNA, 19 nt, Artificial Sequence
  Description of Artificial Sequence: Synthetic oligonucleotide
agucuucuagaugcaucag

SEQ ID NO: 2941910 - RNA, 19 nt, Artificial Sequence
  Description of Artificial Sequence: Synthetic oligonucleotide
auucugcugucuagcaaag

SEQ ID NO: 2941911 - RNA, 19 nt, Artificial Sequence
  Description of Artificial Sequence: Synthetic oligonucleotide
agacacaaccagcacucua

SEQ ID NO: 2941912 - RNA, 19 nt, Artificial Sequence
  Description of Artificial Sequence: Synthetic oligonucleotide
agugacacugagguugaau

SEQ ID NO: 2941913 - RNA, 19 nt, Artificial Sequence
  Description of Artificial Sequence: Synthetic oligonucleotide
auaacugggcggcccagua

SEQ ID NO: 2941914 - RNA, 19 nt, Artificial Sequence
  Description of Artificial Sequence: Synthetic oligonucleotide
ugcagagauggggaauaac

SEQ ID NO: 2941915 - RNA, 19 nt, Artificial Sequence
  Description of Artificial Sequence: Synthetic oligonucleotide
gcagagacugaggacauac

SEQ ID NO: 2941916 - RNA, 19 nt, Artificial Sequence
  Description of Artificial Sequence: Synthetic oligonucleotide
uugaggugucacauuucuu

SEQ ID NO: 2941917 - RNA, 19 nt, Artificial Sequence
  Description of Artificial Sequence: Synthetic oligonucleotide
gaagccacagagucuucua

SEQ ID NO: 2941918 - RNA, 19 nt, Artificial Sequence
  Description of Artificial Sequence: Synthetic oligonucleotide
ggugauaucggcguacaaa

SEQ ID NO: 2941919 - RNA, 19 nt, Artificial Sequence
  Description of Artificial Sequence: Synthetic oligonucleotide
aguucgcgcugcuccucac

SEQ ID NO: 2941920 - RNA, 19 nt, Artificial Sequence
  Description of Artificial Sequence: Synthetic oligonucleotide
gacacaaccagcacucuau

SEQ ID NO: 2941921 - RNA, 19 nt, Artificial Sequence
  Description of Artificial Sequence: Synthetic oligonucleotide
uuggcacucugcugggaaa

SEQ ID NO: 2941922 - RNA, 19 nt, Artificial Sequence
  Description of Artificial Sequence: Synthetic oligonucleotide
gaggacauacagacacaac

SEQ ID NO: 2941923 - RNA, 19 nt, Artificial Sequence
  Description of Artificial Sequence: Synthetic oligonucleotide
uacuuugaggugucacauu

SEQ ID NO: 2941924 - RNA, 19 nt, Artificial Sequence
  Description of Artificial Sequence: Synthetic oligonucleotide
gggcaguucgcgcugcucc

SEQ ID NO: 2941925 - RNA, 19 nt, Artificial Sequence
  Description of Artificial Sequence: Synthetic oligonucleotide
aggucaacaugggcaguuc

SEQ ID NO: 2941926 - RNA, 19 nt, Artificial Sequence
  Description of Artificial Sequence: Synthetic oligonucleotide
guacaaacuccuucugacu

SEQ ID NO: 2941927 - RNA, 19 nt, Artificial Sequence
  Description of Artificial Sequence: Synthetic oligonucleotide
gucuucuagaugcaucagu

SEQ ID NO: 2941928 - RNA, 19 nt, Artificial Sequence
  Description of Artificial Sequence: Synthetic oligonucleotide
uuguggugucaaauacaua

SEQ ID NO: 2941929 - RNA, 19 nt, Artificial Sequence
  Description of Artificial Sequence: Synthetic oligonucleotide
gggacuuggcagugcagag

SEQ ID NO: 2941930 - RNA, 19 nt, Artificial Sequence
  Description of Artificial Sequence: Synthetic oligonucleotide
cccaagacuuuugaggaag

SEQ ID NO: 2941931 - RNA, 19 nt, Artificial Sequence
  Description of Artificial Sequence: Synthetic oligonucleotide
ugggcggcccaguacccgc

SEQ ID NO: 2941932 - RNA, 19 nt, Artificial Sequence
  Description of Artificial Sequence: Synthetic oligonucleotide
cacauuucuuauuaagauu

SEQ ID NO: 2941933 - RNA, 19 nt, Artificial Sequence
  Description of Artificial Sequence: Synthetic oligonucleotide
cucuccaggaugcugaaau

SEQ ID NO: 2941934 - RNA, 19 nt, Artificial Sequence
  Description of Artificial Sequence: Synthetic oligonucleotide
gacccaaccaggacaggca

SEQ ID NO: 2941935 - RNA, 19 nt, Artificial Sequence
  Description of Artificial Sequence: Synthetic oligonucleotide
cgcucagcauaucugaccc

SEQ ID NO: 2941936 - RNA, 19 nt, Artificial Sequence
  Description of Artificial Sequence: Synthetic oligonucleotide
ugggaaagcugaacuccuu

SEQ ID NO: 2941937 - RNA, 19 nt, Artificial Sequence
  Description of Artificial Sequence: Synthetic oligonucleotide
gggaaagcugaacuccuuc

SEQ ID NO: 2941938 - RNA, 19 nt, Artificial Sequence
  Description of Artificial Sequence: Synthetic oligonucleotide
ccaggaugcugaaauccgc

SEQ ID NO: 2941939 - RNA, 19 nt, Artificial Sequence
  Description of Artificial Sequence: Synthetic oligonucleotide
ggcagaggucaacaugggc

SEQ ID NO: 2941940 - RNA, 19 nt, Artificial Sequence
  Description of Artificial Sequence: Synthetic oligonucleotide
cgauuguggugucaaauac

SEQ ID NO: 2941941 - RNA, 19 nt, Artificial Sequence
  Description of Artificial Sequence: Synthetic oligonucleotide
aggugucacauuucuuauu

SEQ ID NO: 2941942 - RNA, 19 nt, Artificial Sequence
  Description of Artificial Sequence: Synthetic oligonucleotide
cucagcauaucugacccaa

SEQ ID NO: 2941943 - RNA, 19 nt, Artificial Sequence
  Description of Artificial Sequence: Synthetic oligonucleotide
ccaaccaggacaggcagag

SEQ ID NO: 2941944 - RNA, 19 nt, Artificial Sequence
  Description of Artificial Sequence: Synthetic oligonucleotide
acugugccggugauaucgg

SEQ ID NO: 2941945 - RNA, 19 nt, Artificial Sequence
  Description of Artificial Sequence: Synthetic oligonucleotide
gaggugucacauuucuuau

SEQ ID NO: 2941946 - RNA, 19 nt, Artificial Sequence
  Description of Artificial Sequence: Synthetic oligonucleotide
cugacucuccaggaugcug

SEQ ID NO: 2941947 - RNA, 19 nt, Artificial Sequence
  Description of Artificial Sequence: Synthetic oligonucleotide
gacuuuugaggaagccaca

SEQ ID NO: 2941948 - RNA, 19 nt, Artificial Sequence
  Description of Artificial Sequence: Synthetic oligonucleotide
ugcugaaauccgcggcgau

SEQ ID NO: 2941949 - RNA, 19 nt, Artificial Sequence
  Description of Artificial Sequence: Synthetic oligonucleotide
ccaagacuuuugaggaagc

SEQ ID NO: 2941950 - RNA, 19 nt, Artificial Sequence
  Description of Artificial Sequence: Synthetic oligonucleotide
uagugcaccccaagacuuu

SEQ ID NO: 2941951 - RNA, 19 nt, Artificial Sequence
  Description of Artificial Sequence: Synthetic oligonucleotide
acacaaccagcacucuaua

SEQ ID NO: 2941952 - RNA, 19 nt, Artificial Sequence
  Description of Artificial Sequence: Synthetic oligonucleotide
cuuggcacucugcugggaa

SEQ ID NO: 2941953 - RNA, 19 nt, Artificial Sequence
  Description of Artificial Sequence: Synthetic oligonucleotide
cugaggacauacagacaca

SEQ ID NO: 2941954 - RNA, 19 nt, Artificial Sequence
  Description of Artificial Sequence: Synthetic oligonucleotide
gcagagauggggaauaacu

SEQ ID NO: 2941955 - RNA, 19 nt, Artificial Sequence
  Description of Artificial Sequence: Synthetic oligonucleotide
cugugccggugauaucggc

SEQ ID NO: 2941956 - RNA, 19 nt, Artificial Sequence
  Description of Artificial Sequence: Synthetic oligonucleotide
ggaauaacugggcggccca

SEQ ID NO: 2941957 - RNA, 19 nt, Artificial Sequence
  Description of Artificial Sequence: Synthetic oligonucleotide
agcccaugaucugcugggg

SEQ ID NO: 2941958 - RNA, 19 nt, Artificial Sequence
  Description of Artificial Sequence: Synthetic oligonucleotide
gggaauaacugggcggccc

SEQ ID NO: 2941959 - RNA, 19 nt, Artificial Sequence
  Description of Artificial Sequence: Synthetic oligonucleotide
acugggcggcccaguaccc

SEQ ID NO: 2941960 - RNA, 19 nt, Artificial Sequence
  Description of Artificial Sequence: Synthetic oligonucleotide
auccuucaccaaggagccc

SEQ ID NO: 2941961 - RNA, 19 nt, Artificial Sequence
  Description of Artificial Sequence: Synthetic oligonucleotide
auccgcggcgauuguggug

SEQ ID NO: 2941962 - RNA, 19 nt, Artificial Sequence
  Description of Artificial Sequence: Synthetic oligonucleotide
uucugcugucuagcaaagu

SEQ ID NO: 2941963 - RNA, 19 nt, Artificial Sequence
  Description of Artificial Sequence: Synthetic oligonucleotide
ggcguacaaacuccuucug

SEQ ID NO: 2941964 - RNA, 19 nt, Artificial Sequence
  Description of Artificial Sequence: Synthetic oligonucleotide
caaccagcacucuauacuu

SEQ ID NO: 2941965 - RNA, 19 nt, Artificial Sequence
  Description of Artificial Sequence: Synthetic oligonucleotide
augcugaaauccgcggcga

SEQ ID NO: 2941966 - RNA, 19 nt, Artificial Sequence
  Description of Artificial Sequence: Synthetic oligonucleotide
gacugaggacauacagaca

SEQ ID NO: 2941967 - RNA, 19 nt, Artificial Sequence
  Description of Artificial Sequence: Synthetic oligonucleotide
acagagucuucuagaugca

SEQ ID NO: 2941968 - RNA, 19 nt, Artificial Sequence
  Description of Artificial Sequence: Synthetic oligonucleotide
gugucacauuucuuauuaa

SEQ ID NO: 2941969 - RNA, 19 nt, Artificial Sequence
  Description of Artificial Sequence: Synthetic oligonucleotide
cucacugugccggugauau

SEQ ID NO: 2941970 - RNA, 19 nt, Artificial Sequence
  Description of Artificial Sequence: Synthetic oligonucleotide
uccucacugugccggugau

SEQ ID NO: 2941971 - RNA, 19 nt, Artificial Sequence
  Description of Artificial Sequence: Synthetic oligonucleotide
agacaugaaagaaguccuu

SEQ ID NO: 2941972 - RNA, 19 nt, Artificial Sequence
  Description of Artificial Sequence: Synthetic oligonucleotide
guacccgcucagcauaucu

SEQ ID NO: 2941973 - RNA, 19 nt, Artificial Sequence
  Description of Artificial Sequence: Synthetic oligonucleotide
gcguacaaacuccuucuga

SEQ ID NO: 2941974 - RNA, 19 nt, Artificial Sequence
  Description of Artificial Sequence: Synthetic oligonucleotide
gcaccccaagacuuuugag

SEQ ID NO: 2941975 - RNA, 19 nt, Artificial Sequence
  Description of Artificial Sequence: Synthetic oligonucleotide
ccgcucagcauaucugacc

SEQ ID NO: 2941976 - RNA, 19 nt, Artificial Sequence
  Description of Artificial Sequence: Synthetic oligonucleotide
aguacccgcucagcauauc

SEQ ID NO: 2941977 - RNA, 19 nt, Artificial Sequence
  Description of Artificial Sequence: Synthetic oligonucleotide
ggcagugcagagaugggga

SEQ ID NO: 2941978 - RNA, 19 nt, Artificial Sequence
  Description of Artificial Sequence: Synthetic oligonucleotide
aaccagcacucuauacuuu

SEQ ID NO: 2941979 - RNA, 19 nt, Artificial Sequence
  Description of Artificial Sequence: Synthetic oligonucleotide
gcgauuguggugucaaaua

SEQ ID NO: 2941980 - RNA, 19 nt, Artificial Sequence
  Description of Artificial Sequence: Synthetic oligonucleotide
cugggaaagcugaacuccu

SEQ ID NO: 2941981 - RNA, 19 nt, Artificial Sequence
  Description of Artificial Sequence: Synthetic oligonucleotide
gugccggugauaucggcgu

SEQ ID NO: 2941982 - RNA, 19 nt, Artificial Sequence
  Description of Artificial Sequence: Synthetic oligonucleotide
gacucuccaggaugcugaa

SEQ ID NO: 2941983 - RNA, 19 nt, Artificial Sequence
  Description of Artificial Sequence: Synthetic oligonucleotide
agugcaccccaagacuuuu

SEQ ID NO: 2941984 - RNA, 19 nt, Artificial Sequence
  Description of Artificial Sequence: Synthetic oligonucleotide
caugggcaguucgcgcugc

SEQ ID NO: 2941985 - RNA, 19 nt, Artificial Sequence
  Description of Artificial Sequence: Synthetic oligonucleotide
ggggacuuggcagugcaga

SEQ ID NO: 2941986 - RNA, 19 nt, Artificial Sequence
  Description of Artificial Sequence: Synthetic oligonucleotide
gacaggcagaggucaacau

SEQ ID NO: 2941987 - RNA, 19 nt, Artificial Sequence
  Description of Artificial Sequence: Synthetic oligonucleotide
cagcaaaauaaggcagaga

SEQ ID NO: 2941988 - RNA, 19 nt, Artificial Sequence
  Description of Artificial Sequence: Synthetic oligonucleotide
ccacagagucuucuagaug

SEQ ID NO: 2941989 - RNA, 19 nt, Artificial Sequence
  Description of Artificial Sequence: Synthetic oligonucleotide
guggugucaaauacauagu

SEQ ID NO: 2941990 - RNA, 19 nt, Artificial Sequence
  Description of Artificial Sequence: Synthetic oligonucleotide
cugggcggcccaguacccg

SEQ ID NO: 2941991 - RNA, 19 nt, Artificial Sequence
  Description of Artificial Sequence: Synthetic oligonucleotide
gcugucuagcaaaguaauc

SEQ ID NO: 2941992 - RNA, 19 nt, Artificial Sequence
  Description of Artificial Sequence: Synthetic oligonucleotide
ucacugugccggugauauc

SEQ ID NO: 2941993 - RNA, 19 nt, Artificial Sequence
  Description of Artificial Sequence: Synthetic oligonucleotide
ggacaggcagaggucaaca

SEQ ID NO: 2941994 - RNA, 19 nt, Artificial Sequence
  Description of Artificial Sequence: Synthetic oligonucleotide
ccaaggagcccaugaucug

SEQ ID NO: 2941995 - RNA, 19 nt, Artificial Sequence
  Description of Artificial Sequence: Synthetic oligonucleotide
agguugaauuuagcagcaa

SEQ ID NO: 2941996 - RNA, 19 nt, Artificial Sequence
  Description of Artificial Sequence: Synthetic oligonucleotide
gcaaaauaaggcagagacu

SEQ ID NO: 2941997 - RNA, 19 nt, Artificial Sequence
  Description of Artificial Sequence: Synthetic oligonucleotide
augggcaguucgcgcugcu

SEQ ID NO: 2941998 - RNA, 19 nt, Artificial Sequence
  Description of Artificial Sequence: Synthetic oligonucleotide
cugacccaaccaggacagg

SEQ ID NO: 2941999 - RNA, 19 nt, Artificial Sequence
  Description of Artificial Sequence: Synthetic oligonucleotide
aggaagccacagagucuuc

SEQ ID NO: 2942000 - RNA, 19 nt, Artificial Sequence
  Description of Artificial Sequence: Synthetic oligonucleotide
caguucgcgcugcuccuca

SEQ ID NO: 2942001 - RNA, 19 nt, Artificial Sequence
  Description of Artificial Sequence: Synthetic oligonucleotide
ggacuuggcagugcagaga

SEQ ID NO: 2942002 - RNA, 19 nt, Artificial Sequence
  Description of Artificial Sequence: Synthetic oligonucleotide
ugggcaguucgcgcugcuc

SEQ ID NO: 2942003 - RNA, 19 nt, Artificial Sequence
  Description of Artificial Sequence: Synthetic oligonucleotide
cuucaccaaggagcccaug

SEQ ID NO: 2942004 - RNA, 19 nt, Artificial Sequence
  Description of Artificial Sequence: Synthetic oligonucleotide
aggcagagacugaggacau

SEQ ID NO: 2942005 - RNA, 19 nt, Artificial Sequence
  Description of Artificial Sequence: Synthetic oligonucleotide
gcccaguacccgcucagca

SEQ ID NO: 2942006 - RNA, 19 nt, Artificial Sequence
  Description of Artificial Sequence: Synthetic oligonucleotide
gccacagagucuucuagau

SEQ ID NO: 2942007 - RNA, 19 nt, Artificial Sequence
  Description of Artificial Sequence: Synthetic oligonucleotide
gcagugcagagauggggaa

SEQ ID NO: 2942008 - RNA, 19 nt, Artificial Sequence
  Description of Artificial Sequence: Synthetic oligonucleotide
acuuggcagugcagagaug

SEQ ID NO: 2942009 - RNA, 19 nt, Artificial Sequence
  Description of Artificial Sequence: Synthetic oligonucleotide
cucugcugggaaagcugaa

SEQ ID NO: 2942010 - RNA, 19 nt, Artificial Sequence
  Description of Artificial Sequence: Synthetic oligonucleotide
gucuagcaaaguaauccuu

SEQ ID NO: 2942011 - RNA, 19 nt, Artificial Sequence
  Description of Artificial Sequence: Synthetic oligonucleotide
cccgcucagcauaucugac

SEQ ID NO: 2942012 - RNA, 19 nt, Artificial Sequence
  Description of Artificial Sequence: Synthetic oligonucleotide
ggcacucugcugggaaagc

SEQ ID NO: 2942013 - RNA, 19 nt, Artificial Sequence
  Description of Artificial Sequence: Synthetic oligonucleotide
caggacaggcagaggucaa

SEQ ID NO: 2942014 - RNA, 19 nt, Artificial Sequence
  Description of Artificial Sequence: Synthetic oligonucleotide
ccaggacaggcagagguca

SEQ ID NO: 2942015 - RNA, 19 nt, Artificial Sequence
  Description of Artificial Sequence: Synthetic oligonucleotide
ccagcacucuauacuuuga

SEQ ID NO: 2942016 - RNA, 19 nt, Artificial Sequence
  Description of Artificial Sequence: Synthetic oligonucleotide
acucuccaggaugcugaaa

SEQ ID NO: 2942017 - RNA, 19 nt, Artificial Sequence
  Description of Artificial Sequence: Synthetic oligonucleotide
ggggaauaacugggcggcc

SEQ ID NO: 2942018 - RNA, 19 nt, Artificial Sequence
  Description of Artificial Sequence: Synthetic oligonucleotide
ggcgauuguggugucaaau

SEQ ID NO: 2942019 - RNA, 19 nt, Artificial Sequence
  Description of Artificial Sequence: Synthetic oligonucleotide
ccaguacccgcucagcaua

SEQ ID NO: 2942020 - RNA, 19 nt, Artificial Sequence
  Description of Artificial Sequence: Synthetic oligonucleotide
ggaagccacagagucuucu

SEQ ID NO: 2942021 - RNA, 19 nt, Artificial Sequence
  Description of Artificial Sequence: Synthetic oligonucleotide
gcucagcauaucugaccca

SEQ ID NO: 2942022 - RNA, 19 nt, Artificial Sequence
  Description of Artificial Sequence: Synthetic oligonucleotide
gccggugauaucggcguac

SEQ ID NO: 2942023 - RNA, 19 nt, Artificial Sequence
  Description of Artificial Sequence: Synthetic oligonucleotide
guucgcgcugcuccucacu

SEQ ID NO: 2942024 - RNA, 19 nt, Artificial Sequence
  Description of Artificial Sequence: Synthetic oligonucleotide
aucggcguacaaacuccuu

SEQ ID NO: 2942025 - RNA, 19 nt, Artificial Sequence
  Description of Artificial Sequence: Synthetic oligonucleotide
gugcagagauggggaauaa

SEQ ID NO: 2942026 - RNA, 19 nt, Artificial Sequence
  Description of Artificial Sequence: Synthetic oligonucleotide
cgcgcugcuccucacugug

SEQ ID NO: 2942027 - RNA, 19 nt, Artificial Sequence
  Description of Artificial Sequence: Synthetic oligonucleotide
ggcccaguacccgcucagc

SEQ ID NO: 2942028 - RNA, 19 nt, Artificial Sequence
  Description of Artificial Sequence: Synthetic oligonucleotide
caucagugacacugagguu

SEQ ID NO: 2942029 - RNA, 19 nt, Artificial Sequence
  Description of Artificial Sequence: Synthetic oligonucleotide
gcggcgauuguggugucaa

SEQ ID NO: 2942030 - RNA, 19 nt, Artificial Sequence
  Description of Artificial Sequence: Synthetic oligonucleotide
ggcaguucgcgcugcuccu

SEQ ID NO: 2942031 - RNA, 19 nt, Artificial Sequence
  Description of Artificial Sequence: Synthetic oligonucleotide
cagagucuucuagaugcau

SEQ ID NO: 2942032 - RNA, 19 nt, Artificial Sequence
  Description of Artificial Sequence: Synthetic oligonucleotide
caguacccgcucagcauau

SEQ ID NO: 2942033 - RNA, 19 nt, Artificial Sequence
  Description of Artificial Sequence: Synthetic oligonucleotide
cagugcagagauggggaau

SEQ ID NO: 2942034 - RNA, 19 nt, Artificial Sequence
  Description of Artificial Sequence: Synthetic oligonucleotide
gcacucugcugggaaagcu

SEQ ID NO: 2942035 - RNA, 19 nt, Artificial Sequence
  Description of Artificial Sequence: Synthetic oligonucleotide
ccccaagacuuuugaggaa

SEQ ID NO: 2942036 - RNA, 19 nt, Artificial Sequence
  Description of Artificial Sequence: Synthetic oligonucleotide
cggcguacaaacuccuucu

SEQ ID NO: 2942037 - RNA, 19 nt, Artificial Sequence
  Description of Artificial Sequence: Synthetic oligonucleotide
ccuucugacucuccaggau

SEQ ID NO: 2942038 - RNA, 19 nt, Artificial Sequence
  Description of Artificial Sequence: Synthetic oligonucleotide
gcaguucgcgcugcuccuc

SEQ ID NO: 2942039 - RNA, 19 nt, Artificial Sequence
  Description of Artificial Sequence: Synthetic oligonucleotide
cagacacaaccagcacucu

SEQ ID NO: 2942040 - RNA, 19 nt, Artificial Sequence
  Description of Artificial Sequence: Synthetic oligonucleotide
gcgcugcuccucacugugc

SEQ ID NO: 2942041 - RNA, 19 nt, Artificial Sequence
  Description of Artificial Sequence: Synthetic oligonucleotide
gcugaaauccgcggcgauu

SEQ ID NO: 2942042 - RNA, 19 nt, Artificial Sequence
  Description of Artificial Sequence: Synthetic oligonucleotide
ccggugauaucggcguaca

SEQ ID NO: 2942043 - RNA, 19 nt, Artificial Sequence
  Description of Artificial Sequence: Synthetic oligonucleotide
gcggcccaguacccgcuca

SEQ ID NO: 2942044 - RNA, 19 nt, Artificial Sequence
  Description of Artificial Sequence: Synthetic oligonucleotide
cggcccaguacccgcucag

SEQ ID NO: 2942045 - RNA, 19 nt, Artificial Sequence
  Description of Artificial Sequence: Synthetic oligonucleotide
cccaguacccgcucagcau

SEQ ID NO: 2942046 - RNA, 19 nt, Artificial Sequence
  Description of Artificial Sequence: Synthetic oligonucleotide
ggcagagacugaggacaua

SEQ ID NO: 2942047 - RNA, 19 nt, Artificial Sequence
  Description of Artificial Sequence: Synthetic oligonucleotide
cagugacacugagguugaa

SEQ ID NO: 2942048 - RNA, 19 nt, Artificial Sequence
  Description of Artificial Sequence: Synthetic oligonucleotide
ccuuggcacucugcuggga

SEQ ID NO: 2942049 - RNA, 19 nt, Artificial Sequence
  Description of Artificial Sequence: Synthetic oligonucleotide
ccuucaccaaggagcccau

SEQ ID NO: 2942050 - RNA, 19 nt, Artificial Sequence
  Description of Artificial Sequence: Synthetic oligonucleotide
cggugauaucggcguacaa

SEQ ID NO: 2942051 - RNA, 19 nt, Artificial Sequence
  Description of Artificial Sequence: Synthetic oligonucleotide
ccucacugugccggugaua

SEQ ID NO: 2942052 - RNA, 19 nt, Artificial Sequence
  Description of Artificial Sequence: Synthetic oligonucleotide
cggcgauuguggugucaaa

SEQ ID NO: 2942053 - RNA, 19 nt, Artificial Sequence
  Description of Artificial Sequence: Synthetic oligonucleotide
ccgcggcgauugugguguc

SEQ ID NO: 2942054 - RNA, 19 nt, Artificial Sequence
  Description of Artificial Sequence: Synthetic oligonucleotide
cgcggcgauugugguguca

SEQ ID NO: 2942055 - RNA, 19 nt, Artificial Sequence
  Description of Artificial Sequence: Synthetic oligonucleotide
aacaaucucuauucuaggc

SEQ ID NO: 2942056 - RNA, 19 nt, Artificial Sequence
  Description of Artificial Sequence: Synthetic oligonucleotide
gauguacacagccugaggg

SEQ ID NO: 2942057 - RNA, 19 nt, Artificial Sequence
  Description of Artificial Sequence: Synthetic oligonucleotide
accacaacaaucucuauuc

SEQ ID NO: 2942058 - RNA, 19 nt, Artificial Sequence
  Description of Artificial Sequence: Synthetic oligonucleotide
aguugaaaguggcacaggc

SEQ ID NO: 2942059 - RNA, 19 nt, Artificial Sequence
  Description of Artificial Sequence: Synthetic oligonucleotide
uuuuggagcagagagaugc

SEQ ID NO: 2942060 - RNA, 19 nt, Artificial Sequence
  Description of Artificial Sequence: Synthetic oligonucleotide
uucggugauaucccgaugg

SEQ ID NO: 2942061 - RNA, 19 nt, Artificial Sequence
  Description of Artificial Sequence: Synthetic oligonucleotide
ugucacucgaccuucgugg

SEQ ID NO: 2942062 - RNA, 19 nt, Artificial Sequence
  Description of Artificial Sequence: Synthetic oligonucleotide
aaagggagaagcucucuuc

SEQ ID NO: 2942063 - RNA, 19 nt, Artificial Sequence
  Description of Artificial Sequence: Synthetic oligonucleotide
aagggagaagcucucuucg

SEQ ID NO: 2942064 - RNA, 19 nt, Artificial Sequence
  Description of Artificial Sequence: Synthetic oligonucleotide
auccagaaaagggagaagc

SEQ ID NO: 2942065 - RNA, 19 nt, Artificial Sequence
  Description of Artificial Sequence: Synthetic oligonucleotide
agggaacucguuuuggagc

SEQ ID NO: 2942066 - RNA, 19 nt, Artificial Sequence
  Description of Artificial Sequence: Synthetic oligonucleotide
cucguuuuggagcagagag

SEQ ID NO: 2942067 - RNA, 19 nt, Artificial Sequence
  Description of Artificial Sequence: Synthetic oligonucleotide
uugaaaguggcacaggcau

SEQ ID NO: 2942068 - RNA, 19 nt, Artificial Sequence
  Description of Artificial Sequence: Synthetic oligonucleotide
aggaaguugaaaguggcac

SEQ ID NO: 2942069 - RNA, 19 nt, Artificial Sequence
  Description of Artificial Sequence: Synthetic oligonucleotide
uggcacaggaaguugaaag

SEQ ID NO: 2942070 - RNA, 19 nt, Artificial Sequence
  Description of Artificial Sequence: Synthetic oligonucleotide
aauaagggcggcuccuguc

SEQ ID NO: 2942071 - RNA, 19 nt, Artificial Sequence
  Description of Artificial Sequence: Synthetic oligonucleotide
acaacaaucucuauucuag

SEQ ID NO: 2942072 - RNA, 19 nt, Artificial Sequence
  Description of Artificial Sequence: Synthetic oligonucleotide
uauucuaggcuccagcauc

SEQ ID NO: 2942073 - RNA, 19 nt, Artificial Sequence
  Description of Artificial Sequence: Synthetic oligonucleotide
ucuauucuaggcuccagca

SEQ ID NO: 2942074 - RNA, 19 nt, Artificial Sequence
  Description of Artificial Sequence: Synthetic oligonucleotide
acaaucucuauucuaggcu

SEQ ID NO: 2942075 - RNA, 19 nt, Artificial Sequence
  Description of Artificial Sequence: Synthetic oligonucleotide
ugucgauguacacagccug

SEQ ID NO: 2942076 - RNA, 19 nt, Artificial Sequence
  Description of Artificial Sequence: Synthetic oligonucleotide
uagcugucgauguacacag

SEQ ID NO: 2942077 - RNA, 19 nt, Artificial Sequence
  Description of Artificial Sequence: Synthetic oligonucleotide
uggagcagagagaugcgcg

SEQ ID NO: 2942078 - RNA, 19 nt, Artificial Sequence
  Description of Artificial Sequence: Synthetic oligonucleotide
aaucucuauucuaggcucc

SEQ ID NO: 2942079 - RNA, 19 nt, Artificial Sequence
  Description of Artificial Sequence: Synthetic oligonucleotide
uccagugcccaccacaaca

SEQ ID NO: 2942080 - RNA, 19 nt, Artificial Sequence
  Description of Artificial Sequence: Synthetic oligonucleotide
gaaguugaaaguggcacag

SEQ ID NO: 2942081 - RNA, 19 nt, Artificial Sequence
  Description of Artificial Sequence: Synthetic oligonucleotide
uggccuguagcacuugggg

SEQ ID NO: 2942082 - RNA, 19 nt, Artificial Sequence
  Description of Artificial Sequence: Synthetic oligonucleotide
guauccugcaccuccacag

SEQ ID NO: 2942083 - RNA, 19 nt, Artificial Sequence
  Description of Artificial Sequence: Synthetic oligonucleotide
auugggcguauccugcacc

SEQ ID NO: 2942084 - RNA, 19 nt, Artificial Sequence
  Description of Artificial Sequence: Synthetic oligonucleotide
cacaggaaguugaaagugg

SEQ ID NO: 2942085 - RNA, 19 nt, Artificial Sequence
  Description of Artificial Sequence: Synthetic oligonucleotide
accuucguggcacaggaag

SEQ ID NO: 2942086 - RNA, 19 nt, Artificial Sequence
  Description of Artificial Sequence: Synthetic oligonucleotide
ucagucuuguuuccagugc

SEQ ID NO: 2942087 - RNA, 19 nt, Artificial Sequence
  Description of Artificial Sequence: Synthetic oligonucleotide
acaggaaguugaaaguggc

SEQ ID NO: 2942088 - RNA, 19 nt, Artificial Sequence
  Description of Artificial Sequence: Synthetic oligonucleotide
ugcaccuccacagcgaugc

SEQ ID NO: 2942089 - RNA, 19 nt, Artificial Sequence
  Description of Artificial Sequence: Synthetic oligonucleotide
gaaaguggcacaggcauug

SEQ ID NO: 2942090 - RNA, 19 nt, Artificial Sequence
  Description of Artificial Sequence: Synthetic oligonucleotide
aguggcacaggcauugggc

SEQ ID NO: 2942091 - RNA, 19 nt, Artificial Sequence
  Description of Artificial Sequence: Synthetic oligonucleotide
uuuggagcagagagaugcg

SEQ ID NO: 2942092 - RNA, 19 nt, Artificial Sequence
  Description of Artificial Sequence: Synthetic oligonucleotide
caaucucuauucuaggcuc

SEQ ID NO: 2942093 - RNA, 19 nt, Artificial Sequence
  Description of Artificial Sequence: Synthetic oligonucleotide
ucccacauuccacuggacc

SEQ ID NO: 2942094 - RNA, 19 nt, Artificial Sequence
  Description of Artificial Sequence: Synthetic oligonucleotide
ucugcuguuguagcugucg

SEQ ID NO: 2942095 - RNA, 19 nt, Artificial Sequence
  Description of Artificial Sequence: Synthetic oligonucleotide
ucauccgcgggagagagcc

SEQ ID NO: 2942096 - RNA, 19 nt, Artificial Sequence
  Description of Artificial Sequence: Synthetic oligonucleotide
aaguggcacaggcauuggg

SEQ ID NO: 2942097 - RNA, 19 nt, Artificial Sequence
  Description of Artificial Sequence: Synthetic oligonucleotide
uugaucgugaagccucugc

SEQ ID NO: 2942098 - RNA, 19 nt, Artificial Sequence
  Description of Artificial Sequence: Synthetic oligonucleotide
acagcgaugccucgcugcc

SEQ ID NO: 2942099 - RNA, 19 nt, Artificial Sequence
  Description of Artificial Sequence: Synthetic oligonucleotide
ugaucgugaagccucugcu

SEQ ID NO: 2942100 - RNA, 19 nt, Artificial Sequence
  Description of Artificial Sequence: Synthetic oligonucleotide
gaugggaucccacauucca

SEQ ID NO: 2942101 - RNA, 19 nt, Artificial Sequence
  Description of Artificial Sequence: Synthetic oligonucleotide
gagggaacucguuuuggag

SEQ ID NO: 2942102 - RNA, 19 nt, Artificial Sequence
  Description of Artificial Sequence: Synthetic oligonucleotide
caacaaucucuauucuagg

SEQ ID NO: 2942103 - RNA, 19 nt, Artificial Sequence
  Description of Artificial Sequence: Synthetic oligonucleotide
ugauaucccgaugggaucc

SEQ ID NO: 2942104 - RNA, 19 nt, Artificial Sequence
  Description of Artificial Sequence: Synthetic oligonucleotide
agagaugcgcguccgcugg

SEQ ID NO: 2942105 - RNA, 19 nt, Artificial Sequence
  Description of Artificial Sequence: Synthetic oligonucleotide
acgcgguuuccguugaucg

SEQ ID NO: 2942106 - RNA, 19 nt, Artificial Sequence
  Description of Artificial Sequence: Synthetic oligonucleotide
aaaagggagaagcucucuu

SEQ ID NO: 2942107 - RNA, 19 nt, Artificial Sequence
  Description of Artificial Sequence: Synthetic oligonucleotide
gaagccucugcuguuguag

SEQ ID NO: 2942108 - RNA, 19 nt, Artificial Sequence
  Description of Artificial Sequence: Synthetic oligonucleotide
auucuaggcuccagcaucc

SEQ ID NO: 2942109 - RNA, 19 nt, Artificial Sequence
  Description of Artificial Sequence: Synthetic oligonucleotide
ucggugauaucccgauggg

SEQ ID NO: 2942110 - RNA, 19 nt, Artificial Sequence
  Description of Artificial Sequence: Synthetic oligonucleotide
aucgugaagccucugcugu

SEQ ID NO: 2942111 - RNA, 19 nt, Artificial Sequence
  Description of Artificial Sequence: Synthetic oligonucleotide
guggcacaggcauugggcg

SEQ ID NO: 2942112 - RNA, 19 nt, Artificial Sequence
  Description of Artificial Sequence: Synthetic oligonucleotide
agccgcucagucuuguuuc

SEQ ID NO: 2942113 - RNA, 19 nt, Artificial Sequence
  Description of Artificial Sequence: Synthetic oligonucleotide
cucuauucuaggcuccagc

SEQ ID NO: 2942114 - RNA, 19 nt, Artificial Sequence
  Description of Artificial Sequence: Synthetic oligonucleotide
cucucuucggugauauccc

SEQ ID NO: 2942115 - RNA, 19 nt, Artificial Sequence
  Description of Artificial Sequence: Synthetic oligonucleotide
gaucgugaagccucugcug

SEQ ID NO: 2942116 - RNA, 19 nt, Artificial Sequence
  Description of Artificial Sequence: Synthetic oligonucleotide
uuuccagugcccaccacaa

SEQ ID NO: 2942117 - RNA, 19 nt, Artificial Sequence
  Description of Artificial Sequence: Synthetic oligonucleotide
ucucuucggugauaucccg

SEQ ID NO: 2942118 - RNA, 19 nt, Artificial Sequence
  Description of Artificial Sequence: Synthetic oligonucleotide
uacagcucgucauccgcgg

SEQ ID NO: 2942119 - RNA, 19 nt, Artificial Sequence
  Description of Artificial Sequence: Synthetic oligonucleotide
ugagggaacucguuuugga

SEQ ID NO: 2942120 - RNA, 19 nt, Artificial Sequence
  Description of Artificial Sequence: Synthetic oligonucleotide
cagucuuguuuccagugcc

SEQ ID NO: 2942121 - RNA, 19 nt, Artificial Sequence
  Description of Artificial Sequence: Synthetic oligonucleotide
ucguuuuggagcagagaga

SEQ ID NO: 2942122 - RNA, 19 nt, Artificial Sequence
  Description of Artificial Sequence: Synthetic oligonucleotide
cagcauccagaaaagggag

SEQ ID NO: 2942123 - RNA, 19 nt, Artificial Sequence
  Description of Artificial Sequence: Synthetic oligonucleotide
ucuaggcuccagcauccag

SEQ ID NO: 2942124 - RNA, 19 nt, Artificial Sequence
  Description of Artificial Sequence: Synthetic oligonucleotide
aagcacgcgguuuccguug

SEQ ID NO: 2942125 - RNA, 19 nt, Artificial Sequence
  Description of Artificial Sequence: Synthetic oligonucleotide
ugggaucccacauuccacu

SEQ ID NO: 2942126 - RNA, 19 nt, Artificial Sequence
  Description of Artificial Sequence: Synthetic oligonucleotide
aaguugaaaguggcacagg

SEQ ID NO: 2942127 - RNA, 19 nt, Artificial Sequence
  Description of Artificial Sequence: Synthetic oligonucleotide
auaagggcggcuccuguca

SEQ ID NO: 2942128 - RNA, 19 nt, Artificial Sequence
  Description of Artificial Sequence: Synthetic oligonucleotide
auccugcaccuccacagcg

SEQ ID NO: 2942129 - RNA, 19 nt, Artificial Sequence
  Description of Artificial Sequence: Synthetic oligonucleotide
gaucccacauuccacugga

SEQ ID NO: 2942130 - RNA, 19 nt, Artificial Sequence
  Description of Artificial Sequence: Synthetic oligonucleotide
uuccacuggaccaccgucu

SEQ ID NO: 2942131 - RNA, 19 nt, Artificial Sequence
  Description of Artificial Sequence: Synthetic oligonucleotide
agcgaugccucgcugccuc

SEQ ID NO: 2942132 - RNA, 19 nt, Artificial Sequence
  Description of Artificial Sequence: Synthetic oligonucleotide
ucuucggugauaucccgau

SEQ ID NO: 2942133 - RNA, 19 nt, Artificial Sequence
  Description of Artificial Sequence: Synthetic oligonucleotide
agggagaagcucucuucgg

SEQ ID NO: 2942134 - RNA, 19 nt, Artificial Sequence
  Description of Artificial Sequence: Synthetic oligonucleotide
uauccugcaccuccacagc

SEQ ID NO: 2942135 - RNA, 19 nt, Artificial Sequence
  Description of Artificial Sequence: Synthetic oligonucleotide
auguacacagccugaggga

SEQ ID NO: 2942136 - RNA, 19 nt, Artificial Sequence
  Description of Artificial Sequence: Synthetic oligonucleotide
uuguagcugucgauguaca

SEQ ID NO: 2942137 - RNA, 19 nt, Artificial Sequence
  Description of Artificial Sequence: Synthetic oligonucleotide
uguacacagccugagggaa

SEQ ID NO: 2942138 - RNA, 19 nt, Artificial Sequence
  Description of Artificial Sequence: Synthetic oligonucleotide
cacuggaccaccgucugcg

SEQ ID NO: 2942139 - RNA, 19 nt, Artificial Sequence
  Description of Artificial Sequence: Synthetic oligonucleotide
guuguagcugucgauguac

SEQ ID NO: 2942140 - RNA, 19 nt, Artificial Sequence
  Description of Artificial Sequence: Synthetic oligonucleotide
ucgauguacacagccugag

SEQ ID NO: 2942141 - RNA, 19 nt, Artificial Sequence
  Description of Artificial Sequence: Synthetic oligonucleotide
agaaaagggagaagcucuc

SEQ ID NO: 2942142 - RNA, 19 nt, Artificial Sequence
  Description of Artificial Sequence: Synthetic oligonucleotide
ucguggcacaggaaguuga

SEQ ID NO: 2942143 - RNA, 19 nt, Artificial Sequence
  Description of Artificial Sequence: Synthetic oligonucleotide
gcugucgauguacacagcc

SEQ ID NO: 2942144 - RNA, 19 nt, Artificial Sequence
  Description of Artificial Sequence: Synthetic oligonucleotide
guuuccagugcccaccaca

SEQ ID NO: 2942145 - RNA, 19 nt, Artificial Sequence
  Description of Artificial Sequence: Synthetic oligonucleotide
gagaagcucucuucgguga

SEQ ID NO: 2942146 - RNA, 19 nt, Artificial Sequence
  Description of Artificial Sequence: Synthetic oligonucleotide
agugcccaccacaacaauc

SEQ ID NO: 2942147 - RNA, 19 nt, Artificial Sequence
  Description of Artificial Sequence: Synthetic oligonucleotide
augccucgcugccucaugg

SEQ ID NO: 2942148 - RNA, 19 nt, Artificial Sequence
  Description of Artificial Sequence: Synthetic oligonucleotide
uguagcugucgauguacac

SEQ ID NO: 2942149 - RNA, 19 nt, Artificial Sequence
  Description of Artificial Sequence: Synthetic oligonucleotide
aaaguggcacaggcauugg

SEQ ID NO: 2942150 - RNA, 19 nt, Artificial Sequence
  Description of Artificial Sequence: Synthetic oligonucleotide
ggcuccagcauccagaaaa

SEQ ID NO: 2942151 - RNA, 19 nt, Artificial Sequence
  Description of Artificial Sequence: Synthetic oligonucleotide
uuccguugaucgugaagcc

SEQ ID NO: 2942152 - RNA, 19 nt, Artificial Sequence
  Description of Artificial Sequence: Synthetic oligonucleotide
uccacuggaccaccgucug

SEQ ID NO: 2942153 - RNA, 19 nt, Artificial Sequence
  Description of Artificial Sequence: Synthetic oligonucleotide
gcucucuucggugauaucc

SEQ ID NO: 2942154 - RNA, 19 nt, Artificial Sequence
  Description of Artificial Sequence: Synthetic oligonucleotide
uggaccaccgucugcggga

SEQ ID NO: 2942155 - RNA, 19 nt, Artificial Sequence
  Description of Artificial Sequence: Synthetic oligonucleotide
uuguuuccagugcccacca

SEQ ID NO: 2942156 - RNA, 19 nt, Artificial Sequence
  Description of Artificial Sequence: Synthetic oligonucleotide
cacagcgaugccucgcugc

SEQ ID NO: 2942157 - RNA, 19 nt, Artificial Sequence
  Description of Artificial Sequence: Synthetic oligonucleotide
cuaggcuccagcauccaga

SEQ ID NO: 2942158 - RNA, 19 nt, Artificial Sequence
  Description of Artificial Sequence: Synthetic oligonucleotide
cagaaaagggagaagcucu

SEQ ID NO: 2942159 - RNA, 19 nt, Artificial Sequence
  Description of Artificial Sequence: Synthetic oligonucleotide
uugggcguauccugcaccu

SEQ ID NO: 2942160 - RNA, 19 nt, Artificial Sequence
  Description of Artificial Sequence: Synthetic oligonucleotide
guagcugucgauguacaca

SEQ ID NO: 2942161 - RNA, 19 nt, Artificial Sequence
  Description of Artificial Sequence: Synthetic oligonucleotide
aacucguuuuggagcagag

SEQ ID NO: 2942162 - RNA, 19 nt, Artificial Sequence
  Description of Artificial Sequence: Synthetic oligonucleotide
uuggagcagagagaugcgc

SEQ ID NO: 2942163 - RNA, 19 nt, Artificial Sequence
  Description of Artificial Sequence: Synthetic oligonucleotide
uccacagcgaugccucgcu

SEQ ID NO: 2942164 - RNA, 19 nt, Artificial Sequence
  Description of Artificial Sequence: Synthetic oligonucleotide
gagagaugcgcguccgcug

SEQ ID NO: 2942165 - RNA, 19 nt, Artificial Sequence
  Description of Artificial Sequence: Synthetic oligonucleotide
guacagcucgucauccgcg

SEQ ID NO: 2942166 - RNA, 19 nt, Artificial Sequence
  Description of Artificial Sequence: Synthetic oligonucleotide
uacacagccugagggaacu

SEQ ID NO: 2942167 - RNA, 19 nt, Artificial Sequence
  Description of Artificial Sequence: Synthetic oligonucleotide
ugcgggagcagcgcgcacg

SEQ ID NO: 2942168 - RNA, 19 nt, Artificial Sequence
  Description of Artificial Sequence: Synthetic oligonucleotide
uccugucacucgaccuucg

SEQ ID NO: 2942169 - RNA, 19 nt, Artificial Sequence
  Description of Artificial Sequence: Synthetic oligonucleotide
gguacagcucgucauccgc

SEQ ID NO: 2942170 - RNA, 19 nt, Artificial Sequence
  Description of Artificial Sequence: Synthetic oligonucleotide
agagccgguggccccgucg

SEQ ID NO: 2942171 - RNA, 19 nt, Artificial Sequence
  Description of Artificial Sequence: Synthetic oligonucleotide
ugaaaguggcacaggcauu

SEQ ID NO: 2942172 - RNA, 19 nt, Artificial Sequence
  Description of Artificial Sequence: Synthetic oligonucleotide
cucgucauccgcgggagag

SEQ ID NO: 2942173 - RNA, 19 nt, Artificial Sequence
  Description of Artificial Sequence: Synthetic oligonucleotide
accuccacagcgaugccuc

SEQ ID NO: 2942174 - RNA, 19 nt, Artificial Sequence
  Description of Artificial Sequence: Synthetic oligonucleotide
uccugcaccuccacagcga

SEQ ID NO: 2942175 - RNA, 19 nt, Artificial Sequence
  Description of Artificial Sequence: Synthetic oligonucleotide
ggaaguugaaaguggcaca

SEQ ID NO: 2942176 - RNA, 19 nt, Artificial Sequence
  Description of Artificial Sequence: Synthetic oligonucleotide
ggagaagcucucuucggug

SEQ ID NO: 2942177 - RNA, 19 nt, Artificial Sequence
  Description of Artificial Sequence: Synthetic oligonucleotide
aagcucucuucggugauau

SEQ ID NO: 2942178 - RNA, 19 nt, Artificial Sequence
  Description of Artificial Sequence: Synthetic oligonucleotide
agagagaugcgcguccgcu

SEQ ID NO: 2942179 - RNA, 19 nt, Artificial Sequence
  Description of Artificial Sequence: Synthetic oligonucleotide
ucgaccuucguggcacagg

SEQ ID NO: 2942180 - RNA, 19 nt, Artificial Sequence
  Description of Artificial Sequence: Synthetic oligonucleotide
cacagccugagggaacucg

SEQ ID NO: 2942181 - RNA, 19 nt, Artificial Sequence
  Description of Artificial Sequence: Synthetic oligonucleotide
cugagggaacucguuuugg

SEQ ID NO: 2942182 - RNA, 19 nt, Artificial Sequence
  Description of Artificial Sequence: Synthetic oligonucleotide
gugauaucccgaugggauc

SEQ ID NO: 2942183 - RNA, 19 nt, Artificial Sequence
  Description of Artificial Sequence: Synthetic oligonucleotide
ggaucccacauuccacugg

SEQ ID NO: 2942184 - RNA, 19 nt, Artificial Sequence
  Description of Artificial Sequence: Synthetic oligonucleotide
gcuguuguagcugucgaug

SEQ ID NO: 2942185 - RNA, 19 nt, Artificial Sequence
  Description of Artificial Sequence: Synthetic oligonucleotide
uaucccgaugggaucccac

SEQ ID NO: 2942186 - RNA, 19 nt, Artificial Sequence
  Description of Artificial Sequence: Synthetic oligonucleotide
ucucuauucuaggcuccag

SEQ ID NO: 2942187 - RNA, 19 nt, Artificial Sequence
  Description of Artificial Sequence: Synthetic oligonucleotide
ugcgcguccgcugguacag

SEQ ID NO: 2942188 - RNA, 19 nt, Artificial Sequence
  Description of Artificial Sequence: Synthetic oligonucleotide
cugucacucgaccuucgug

SEQ ID NO: 2942189 - RNA, 19 nt, Artificial Sequence
  Description of Artificial Sequence: Synthetic oligonucleotide
guugaaaguggcacaggca

SEQ ID NO: 2942190 - RNA, 19 nt, Artificial Sequence
  Description of Artificial Sequence: Synthetic oligonucleotide
acagcucgucauccgcggg

SEQ ID NO: 2942191 - RNA, 19 nt, Artificial Sequence
  Description of Artificial Sequence: Synthetic oligonucleotide
gucacucgaccuucguggc

SEQ ID NO: 2942192 - RNA, 19 nt, Artificial Sequence
  Description of Artificial Sequence: Synthetic oligonucleotide
uucguggcacaggaaguug

SEQ ID NO: 2942193 - RNA, 19 nt, Artificial Sequence
  Description of Artificial Sequence: Synthetic oligonucleotide
cacaacaaucucuauucua

SEQ ID NO: 2942194 - RNA, 19 nt, Artificial Sequence
  Description of Artificial Sequence: Synthetic oligonucleotide
aucccgaugggaucccaca

SEQ ID NO: 2942195 - RNA, 19 nt, Artificial Sequence
  Description of Artificial Sequence: Synthetic oligonucleotide
uccguugaucgugaagccu

SEQ ID NO: 2942196 - RNA, 19 nt, Artificial Sequence
  Description of Artificial Sequence: Synthetic oligonucleotide
ucacucgaccuucguggca

SEQ ID NO: 2942197 - RNA, 19 nt, Artificial Sequence
  Description of Artificial Sequence: Synthetic oligonucleotide
gggaacucguuuuggagca

SEQ ID NO: 2942198 - RNA, 19 nt, Artificial Sequence
  Description of Artificial Sequence: Synthetic oligonucleotide
ccagcauccagaaaaggga

SEQ ID NO: 2942199 - RNA, 19 nt, Artificial Sequence
  Description of Artificial Sequence: Synthetic oligonucleotide
cuggaccaccgucugcggg

SEQ ID NO: 2942200 - RNA, 19 nt, Artificial Sequence
  Description of Artificial Sequence: Synthetic oligonucleotide
auccgcgggagagagccgg

SEQ ID NO: 2942201 - RNA, 19 nt, Artificial Sequence
  Description of Artificial Sequence: Synthetic oligonucleotide
acuggaccaccgucugcgg

SEQ ID NO: 2942202 - RNA, 19 nt, Artificial Sequence
  Description of Artificial Sequence: Synthetic oligonucleotide
uaagggcggcuccugucac

SEQ ID NO: 2942203 - RNA, 19 nt, Artificial Sequence
  Description of Artificial Sequence: Synthetic oligonucleotide
cacucgaccuucguggcac

SEQ ID NO: 2942204 - RNA, 19 nt, Artificial Sequence
  Description of Artificial Sequence: Synthetic oligonucleotide
gcacaggaaguugaaagug

SEQ ID NO: 2942205 - RNA, 19 nt, Artificial Sequence
  Description of Artificial Sequence: Synthetic oligonucleotide
gaugccucgcugccucaug

SEQ ID NO: 2942206 - RNA, 19 nt, Artificial Sequence
  Description of Artificial Sequence: Synthetic oligonucleotide
agaagcucucuucggugau

SEQ ID NO: 2942207 - RNA, 19 nt, Artificial Sequence
  Description of Artificial Sequence: Synthetic oligonucleotide
ucccgaugggaucccacau

SEQ ID NO: 2942208 - RNA, 19 nt, Artificial Sequence
  Description of Artificial Sequence: Synthetic oligonucleotide
gauaucccgaugggauccc

SEQ ID NO: 2942209 - RNA, 19 nt, Artificial Sequence
  Description of Artificial Sequence: Synthetic oligonucleotide
cauccagaaaagggagaag

SEQ ID NO: 2942210 - RNA, 19 nt, Artificial Sequence
  Description of Artificial Sequence: Synthetic oligonucleotide
gagagagccgguggccccg

SEQ ID NO: 2942211 - RNA, 19 nt, Artificial Sequence
  Description of Artificial Sequence: Synthetic oligonucleotide
gaugcgcguccgcugguac

SEQ ID NO: 2942212 - RNA, 19 nt, Artificial Sequence
  Description of Artificial Sequence: Synthetic oligonucleotide
cuccagcauccagaaaagg

SEQ ID NO: 2942213 - RNA, 19 nt, Artificial Sequence
  Description of Artificial Sequence: Synthetic oligonucleotide
cugccucauggccuguagc

SEQ ID NO: 2942214 - RNA, 19 nt, Artificial Sequence
  Description of Artificial Sequence: Synthetic oligonucleotide
uggcacaggcauugggcgu

SEQ ID NO: 2942215 - RNA, 19 nt, Artificial Sequence
  Description of Artificial Sequence: Synthetic oligonucleotide
caggaaguugaaaguggca

SEQ ID NO: 2942216 - RNA, 19 nt, Artificial Sequence
  Description of Artificial Sequence: Synthetic oligonucleotide
gggcguauccugcaccucc

SEQ ID NO: 2942217 - RNA, 19 nt, Artificial Sequence
  Description of Artificial Sequence: Synthetic oligonucleotide
aagggcggcuccugucacu

SEQ ID NO: 2942218 - RNA, 19 nt, Artificial Sequence
  Description of Artificial Sequence: Synthetic oligonucleotide
cauugggcguauccugcac

SEQ ID NO: 2942219 - RNA, 19 nt, Artificial Sequence
  Description of Artificial Sequence: Synthetic oligonucleotide
gaacucguuuuggagcaga

SEQ ID NO: 2942220 - RNA, 19 nt, Artificial Sequence
  Description of Artificial Sequence: Synthetic oligonucleotide
agggcggcuccugucacuc

SEQ ID NO: 2942221 - RNA, 19 nt, Artificial Sequence
  Description of Artificial Sequence: Synthetic oligonucleotide
agccugagggaacucguuu

SEQ ID NO: 2942222 - RNA, 19 nt, Artificial Sequence
  Description of Artificial Sequence: Synthetic oligonucleotide
gcacgggccaagcacgcgg

SEQ ID NO: 2942223 - RNA, 19 nt, Artificial Sequence
  Description of Artificial Sequence: Synthetic oligonucleotide
ccguugaucgugaagccuc

SEQ ID NO: 2942224 - RNA, 19 nt, Artificial Sequence
  Description of Artificial Sequence: Synthetic oligonucleotide
aucucuauucuaggcucca

SEQ ID NO: 2942225 - RNA, 19 nt, Artificial Sequence
  Description of Artificial Sequence: Synthetic oligonucleotide
uguuuccagugcccaccac

SEQ ID NO: 2942226 - RNA, 19 nt, Artificial Sequence
  Description of Artificial Sequence: Synthetic oligonucleotide
ucugcgggagcagcgcgca

SEQ ID NO: 2942227 - RNA, 19 nt, Artificial Sequence
  Description of Artificial Sequence: Synthetic oligonucleotide
cuucggugauaucccgaug

SEQ ID NO: 2942228 - RNA, 19 nt, Artificial Sequence
  Description of Artificial Sequence: Synthetic oligonucleotide
acauuccacuggaccaccg

SEQ ID NO: 2942229 - RNA, 19 nt, Artificial Sequence
  Description of Artificial Sequence: Synthetic oligonucleotide
ccagaaaagggagaagcuc

SEQ ID NO: 2942230 - RNA, 19 nt, Artificial Sequence
  Description of Artificial Sequence: Synthetic oligonucleotide
accaccgucugcgggagca

SEQ ID NO: 2942231 - RNA, 19 nt, Artificial Sequence
  Description of Artificial Sequence: Synthetic oligonucleotide
agcucgucauccgcgggag

SEQ ID NO: 2942232 - RNA, 19 nt, Artificial Sequence
  Description of Artificial Sequence: Synthetic oligonucleotide
uuccagugcccaccacaac

SEQ ID NO: 2942233 - RNA, 19 nt, Artificial Sequence
  Description of Artificial Sequence: Synthetic oligonucleotide
acucguuuuggagcagaga

SEQ ID NO: 2942234 - RNA, 19 nt, Artificial Sequence
  Description of Artificial Sequence: Synthetic oligonucleotide
ggggaauaagggcggcucc

SEQ ID NO: 2942235 - RNA, 19 nt, Artificial Sequence
  Description of Artificial Sequence: Synthetic oligonucleotide
gaauaagggcggcuccugu

SEQ ID NO: 2942236 - RNA, 19 nt, Artificial Sequence
  Description of Artificial Sequence: Synthetic oligonucleotide
gucuuguuuccagugccca

SEQ ID NO: 2942237 - RNA, 19 nt, Artificial Sequence
  Description of Artificial Sequence: Synthetic oligonucleotide
agcucucuucggugauauc

SEQ ID NO: 2942238 - RNA, 19 nt, Artificial Sequence
  Description of Artificial Sequence: Synthetic oligonucleotide
cucuucggugauaucccga

SEQ ID NO: 2942239 - RNA, 19 nt, Artificial Sequence
  Description of Artificial Sequence: Synthetic oligonucleotide
ugaagccgcucagucuugu

SEQ ID NO: 2942240 - RNA, 19 nt, Artificial Sequence
  Description of Artificial Sequence: Synthetic oligonucleotide
ggugauaucccgaugggau

SEQ ID NO: 2942241 - RNA, 19 nt, Artificial Sequence
  Description of Artificial Sequence: Synthetic oligonucleotide
ugaagccucugcuguugua

SEQ ID NO: 2942242 - RNA, 19 nt, Artificial Sequence
  Description of Artificial Sequence: Synthetic oligonucleotide
accgucugcgggagcagcg

SEQ ID NO: 2942243 - RNA, 19 nt, Artificial Sequence
  Description of Artificial Sequence: Synthetic oligonucleotide
gugcccaccacaacaaucu

SEQ ID NO: 2942244 - RNA, 19 nt, Artificial Sequence
  Description of Artificial Sequence: Synthetic oligonucleotide
cagagagaugcgcguccgc

SEQ ID NO: 2942245 - RNA, 19 nt, Artificial Sequence
  Description of Artificial Sequence: Synthetic oligonucleotide
acagccugagggaacucgu

SEQ ID NO: 2942246 - RNA, 19 nt, Artificial Sequence
  Description of Artificial Sequence: Synthetic oligonucleotide
gaaaagggagaagcucucu

SEQ ID NO: 2942247 - RNA, 19 nt, Artificial Sequence
  Description of Artificial Sequence: Synthetic oligonucleotide
agcugucgauguacacagc

SEQ ID NO: 2942248 - RNA, 19 nt, Artificial Sequence
  Description of Artificial Sequence: Synthetic oligonucleotide
guuuuggagcagagagaug

SEQ ID NO: 2942249 - RNA, 19 nt, Artificial Sequence
  Description of Artificial Sequence: Synthetic oligonucleotide
gucgauguacacagccuga

SEQ ID NO: 2942250 - RNA, 19 nt, Artificial Sequence
  Description of Artificial Sequence: Synthetic oligonucleotide
gcgguuuccguugaucgug

SEQ ID NO: 2942251 - RNA, 19 nt, Artificial Sequence
  Description of Artificial Sequence: Synthetic oligonucleotide
ccgaugggaucccacauuc

SEQ ID NO: 2942252 - RNA, 19 nt, Artificial Sequence
  Description of Artificial Sequence: Synthetic oligonucleotide
gagcagagagaugcgcguc

SEQ ID NO: 2942253 - RNA, 19 nt, Artificial Sequence
  Description of Artificial Sequence: Synthetic oligonucleotide
ggugaagccgcucagucuu

SEQ ID NO: 2942254 - RNA, 19 nt, Artificial Sequence
  Description of Artificial Sequence: Synthetic oligonucleotide
agcacgcgguuuccguuga

SEQ ID NO: 2942255 - RNA, 19 nt, Artificial Sequence
  Description of Artificial Sequence: Synthetic oligonucleotide
gagccgguggccccgucga

SEQ ID NO: 2942256 - RNA, 19 nt, Artificial Sequence
  Description of Artificial Sequence: Synthetic oligonucleotide
augcgcguccgcugguaca

SEQ ID NO: 2942257 - RNA, 19 nt, Artificial Sequence
  Description of Artificial Sequence: Synthetic oligonucleotide
gcagagagaugcgcguccg

SEQ ID NO: 2942258 - RNA, 19 nt, Artificial Sequence
  Description of Artificial Sequence: Synthetic oligonucleotide
gcauccagaaaagggagaa

SEQ ID NO: 2942259 - RNA, 19 nt, Artificial Sequence
  Description of Artificial Sequence: Synthetic oligonucleotide
ggaauaagggcggcuccug

SEQ ID NO: 2942260 - RNA, 19 nt, Artificial Sequence
  Description of Artificial Sequence: Synthetic oligonucleotide
cuccacagcgaugccucgc

SEQ ID NO: 2942261 - RNA, 19 nt, Artificial Sequence
  Description of Artificial Sequence: Synthetic oligonucleotide
ccugagggaacucguuuug

SEQ ID NO: 2942262 - RNA, 19 nt, Artificial Sequence
  Description of Artificial Sequence: Synthetic oligonucleotide
ucgucauccgcgggagaga

SEQ ID NO: 2942263 - RNA, 19 nt, Artificial Sequence
  Description of Artificial Sequence: Synthetic oligonucleotide
gggaucccacauuccacug

SEQ ID NO: 2942264 - RNA, 19 nt, Artificial Sequence
  Description of Artificial Sequence: Synthetic oligonucleotide
ucgugaagccucugcuguu

SEQ ID NO: 2942265 - RNA, 19 nt, Artificial Sequence
  Description of Artificial Sequence: Synthetic oligonucleotide
guacacagccugagggaac

SEQ ID NO: 2942266 - RNA, 19 nt, Artificial Sequence
  Description of Artificial Sequence: Synthetic oligonucleotide
ggagagagccgguggcccc

SEQ ID NO: 2942267 - RNA, 19 nt, Artificial Sequence
  Description of Artificial Sequence: Synthetic oligonucleotide
uucuaggcuccagcaucca

SEQ ID NO: 2942268 - RNA, 19 nt, Artificial Sequence
  Description of Artificial Sequence: Synthetic oligonucleotide
cguccgcugguacagcucg

SEQ ID NO: 2942269 - RNA, 19 nt, Artificial Sequence
  Description of Artificial Sequence: Synthetic oligonucleotide
uccgcugguacagcucguc

SEQ ID NO: 2942270 - RNA, 19 nt, Artificial Sequence
  Description of Artificial Sequence: Synthetic oligonucleotide
aucccacauuccacuggac

SEQ ID NO: 2942271 - RNA, 19 nt, Artificial Sequence
  Description of Artificial Sequence: Synthetic oligonucleotide
cuccugucacucgaccuuc

SEQ ID NO: 2942272 - RNA, 19 nt, Artificial Sequence
  Description of Artificial Sequence: Synthetic oligonucleotide
cugucgauguacacagccu

SEQ ID NO: 2942273 - RNA, 19 nt, Artificial Sequence
  Description of Artificial Sequence: Synthetic oligonucleotide
guugaucgugaagccucug

SEQ ID NO: 2942274 - RNA, 19 nt, Artificial Sequence
  Description of Artificial Sequence: Synthetic oligonucleotide
cacgcgguuuccguugauc

SEQ ID NO: 2942275 - RNA, 19 nt, Artificial Sequence
  Description of Artificial Sequence: Synthetic oligonucleotide
cauccgcgggagagagccg

SEQ ID NO: 2942276 - RNA, 19 nt, Artificial Sequence
  Description of Artificial Sequence: Synthetic oligonucleotide
cuauucuaggcuccagcau

SEQ ID NO: 2942277 - RNA, 19 nt, Artificial Sequence
  Description of Artificial Sequence: Synthetic oligonucleotide
gcugccucauggccuguag

SEQ ID NO: 2942278 - RNA, 19 nt, Artificial Sequence
  Description of Artificial Sequence: Synthetic oligonucleotide
cgauguacacagccugagg

SEQ ID NO: 2942279 - RNA, 19 nt, Artificial Sequence
  Description of Artificial Sequence: Synthetic oligonucleotide
caccacaacaaucucuauu

SEQ ID NO: 2942280 - RNA, 19 nt, Artificial Sequence
  Description of Artificial Sequence: Synthetic oligonucleotide
gccucgcugccucauggcc

SEQ ID NO: 2942281 - RNA, 19 nt, Artificial Sequence
  Description of Artificial Sequence: Synthetic oligonucleotide
agcgcgcacgggccaagca

SEQ ID NO: 2942282 - RNA, 19 nt, Artificial Sequence
  Description of Artificial Sequence: Synthetic oligonucleotide
cccaccacaacaaucucua

SEQ ID NO: 2942283 - RNA, 19 nt, Artificial Sequence
  Description of Artificial Sequence: Synthetic oligonucleotide
gcgggagagagccgguggc

SEQ ID NO: 2942284 - RNA, 19 nt, Artificial Sequence
  Description of Artificial Sequence: Synthetic oligonucleotide
gggagagagccgguggccc

SEQ ID NO: 2942285 - RNA, 19 nt, Artificial Sequence
  Description of Artificial Sequence: Synthetic oligonucleotide
cagcucgucauccgcggga

SEQ ID NO: 2942286 - RNA, 19 nt, Artificial Sequence
  Description of Artificial Sequence: Synthetic oligonucleotide
cucugcuguuguagcuguc

SEQ ID NO: 2942287 - RNA, 19 nt, Artificial Sequence
  Description of Artificial Sequence: Synthetic oligonucleotide
gucugcgggagcagcgcgc

SEQ ID NO: 2942288 - RNA, 19 nt, Artificial Sequence
  Description of Artificial Sequence: Synthetic oligonucleotide
cucgaccuucguggcacag

SEQ ID NO: 2942289 - RNA, 19 nt, Artificial Sequence
  Description of Artificial Sequence: Synthetic oligonucleotide
gggagaagcucucuucggu

SEQ ID NO: 2942290 - RNA, 19 nt, Artificial Sequence
  Description of Artificial Sequence: Synthetic oligonucleotide
gcgggagcagcgcgcacgg

SEQ ID NO: 2942291 - RNA, 19 nt, Artificial Sequence
  Description of Artificial Sequence: Synthetic oligonucleotide
cugcaccuccacagcgaug

SEQ ID NO: 2942292 - RNA, 19 nt, Artificial Sequence
  Description of Artificial Sequence: Synthetic oligonucleotide
acacagccugagggaacuc

SEQ ID NO: 2942293 - RNA, 19 nt, Artificial Sequence
  Description of Artificial Sequence: Synthetic oligonucleotide
uccgcgggagagagccggu

SEQ ID NO: 2942294 - RNA, 19 nt, Artificial Sequence
  Description of Artificial Sequence: Synthetic oligonucleotide
gggccaagcacgcgguuuc

SEQ ID NO: 2942295 - RNA, 19 nt, Artificial Sequence
  Description of Artificial Sequence: Synthetic oligonucleotide
ggagcagagagaugcgcgu

SEQ ID NO: 2942296 - RNA, 19 nt, Artificial Sequence
  Description of Artificial Sequence: Synthetic oligonucleotide
acucgaccuucguggcaca

SEQ ID NO: 2942297 - RNA, 19 nt, Artificial Sequence
  Description of Artificial Sequence: Synthetic oligonucleotide
auaucccgaugggauccca

SEQ ID NO: 2942298 - RNA, 19 nt, Artificial Sequence
  Description of Artificial Sequence: Synthetic oligonucleotide
gaagcucucuucggugaua

SEQ ID NO: 2942299 - RNA, 19 nt, Artificial Sequence
  Description of Artificial Sequence: Synthetic oligonucleotide
cgcgcacgggccaagcacg

SEQ ID NO: 2942300 - RNA, 19 nt, Artificial Sequence
  Description of Artificial Sequence: Synthetic oligonucleotide
caccgucugcgggagcagc

SEQ ID NO: 2942301 - RNA, 19 nt, Artificial Sequence
  Description of Artificial Sequence: Synthetic oligonucleotide
gccgcucagucuuguuucc

SEQ ID NO: 2942302 - RNA, 19 nt, Artificial Sequence
  Description of Artificial Sequence: Synthetic oligonucleotide
cgcucagucuuguuuccag

SEQ ID NO: 2942303 - RNA, 19 nt, Artificial Sequence
  Description of Artificial Sequence: Synthetic oligonucleotide
gccaagcacgcgguuuccg

SEQ ID NO: 2942304 - RNA, 19 nt, Artificial Sequence
  Description of Artificial Sequence: Synthetic oligonucleotide
cauuccacuggaccaccgu

SEQ ID NO: 2942305 - RNA, 19 nt, Artificial Sequence
  Description of Artificial Sequence: Synthetic oligonucleotide
ggcggcuccugucacucga

SEQ ID NO: 2942306 - RNA, 19 nt, Artificial Sequence
  Description of Artificial Sequence: Synthetic oligonucleotide
ggaacucguuuuggagcag

SEQ ID NO: 2942307 - RNA, 19 nt, Artificial Sequence
  Description of Artificial Sequence: Synthetic oligonucleotide
agccgguggccccgucgag

SEQ ID NO: 2942308 - RNA, 19 nt, Artificial Sequence
  Description of Artificial Sequence: Synthetic oligonucleotide
guggcacaggaaguugaaa

SEQ ID NO: 2942309 - RNA, 19 nt, Artificial Sequence
  Description of Artificial Sequence: Synthetic oligonucleotide
gcgcgcacgggccaagcac

SEQ ID NO: 2942310 - RNA, 19 nt, Artificial Sequence
  Description of Artificial Sequence: Synthetic oligonucleotide
gagcagcgcgcacgggcca

SEQ ID NO: 2942311 - RNA, 19 nt, Artificial Sequence
  Description of Artificial Sequence: Synthetic oligonucleotide
caggcauugggcguauccu

SEQ ID NO: 2942312 - RNA, 19 nt, Artificial Sequence
  Description of Artificial Sequence: Synthetic oligonucleotide
gugaagccucugcuguugu

SEQ ID NO: 2942313 - RNA, 19 nt, Artificial Sequence
  Description of Artificial Sequence: Synthetic oligonucleotide
ugggcguauccugcaccuc

SEQ ID NO: 2942314 - RNA, 19 nt, Artificial Sequence
  Description of Artificial Sequence: Synthetic oligonucleotide
cgaugggaucccacauucc

SEQ ID NO: 2942315 - RNA, 19 nt, Artificial Sequence
  Description of Artificial Sequence: Synthetic oligonucleotide
gccgguggccccgucgagg

SEQ ID NO: 2942316 - RNA, 19 nt, Artificial Sequence
  Description of Artificial Sequence: Synthetic oligonucleotide
gaccaccgucugcgggagc

SEQ ID NO: 2942317 - RNA, 19 nt, Artificial Sequence
  Description of Artificial Sequence: Synthetic oligonucleotide
ccagugcccaccacaacaa

SEQ ID NO: 2942318 - RNA, 19 nt, Artificial Sequence
  Description of Artificial Sequence: Synthetic oligonucleotide
gccucauggccuguagcac

SEQ ID NO: 2942319 - RNA, 19 nt, Artificial Sequence
  Description of Artificial Sequence: Synthetic oligonucleotide
gucauccgcgggagagagc

SEQ ID NO: 2942320 - RNA, 19 nt, Artificial Sequence
  Description of Artificial Sequence: Synthetic oligonucleotide
ggaccaccgucugcgggag

SEQ ID NO: 2942321 - RNA, 19 nt, Artificial Sequence
  Description of Artificial Sequence: Synthetic oligonucleotide
ggcuccugucacucgaccu

SEQ ID NO: 2942322 - RNA, 19 nt, Artificial Sequence
  Description of Artificial Sequence: Synthetic oligonucleotide
agaugcgcguccgcuggua

SEQ ID NO: 2942323 - RNA, 19 nt, Artificial Sequence
  Description of Artificial Sequence: Synthetic oligonucleotide
cgcgggagagagccggugg

SEQ ID NO: 2942324 - RNA, 19 nt, Artificial Sequence
  Description of Artificial Sequence: Synthetic oligonucleotide
cgucauccgcgggagagag

SEQ ID NO: 2942325 - RNA, 19 nt, Artificial Sequence
  Description of Artificial Sequence: Synthetic oligonucleotide
cgugaagccucugcuguug

SEQ ID NO: 2942326 - RNA, 19 nt, Artificial Sequence
  Description of Artificial Sequence: Synthetic oligonucleotide
gcucagucuuguuuccagu

SEQ ID NO: 2942327 - RNA, 19 nt, Artificial Sequence
  Description of Artificial Sequence: Synthetic oligonucleotide
cgaccuucguggcacagga

SEQ ID NO: 2942328 - RNA, 19 nt, Artificial Sequence
  Description of Artificial Sequence: Synthetic oligonucleotide
cuucguggcacaggaaguu

SEQ ID NO: 2942329 - RNA, 19 nt, Artificial Sequence
  Description of Artificial Sequence: Synthetic oligonucleotide
caagcacgcgguuuccguu

SEQ ID NO: 2942330 - RNA, 19 nt, Artificial Sequence
  Description of Artificial Sequence: Synthetic oligonucleotide
ccacuggaccaccgucugc

SEQ ID NO: 2942331 - RNA, 19 nt, Artificial Sequence
  Description of Artificial Sequence: Synthetic oligonucleotide
cguuuuggagcagagagau

SEQ ID NO: 2942332 - RNA, 19 nt, Artificial Sequence
  Description of Artificial Sequence: Synthetic oligonucleotide
ggcacaggcauugggcgua

SEQ ID NO: 2942333 - RNA, 19 nt, Artificial Sequence
  Description of Artificial Sequence: Synthetic oligonucleotide
gagaugcgcguccgcuggu

SEQ ID NO: 2942334 - RNA, 19 nt, Artificial Sequence
  Description of Artificial Sequence: Synthetic oligonucleotide
cgucugcgggagcagcgcg

SEQ ID NO: 2942335 - RNA, 19 nt, Artificial Sequence
  Description of Artificial Sequence: Synthetic oligonucleotide
gggaauaagggcggcuccu

SEQ ID NO: 2942336 - RNA, 19 nt, Artificial Sequence
  Description of Artificial Sequence: Synthetic oligonucleotide
gaagccgcucagucuuguu

SEQ ID NO: 2942337 - RNA, 19 nt, Artificial Sequence
  Description of Artificial Sequence: Synthetic oligonucleotide
ggcguauccugcaccucca

SEQ ID NO: 2942338 - RNA, 19 nt, Artificial Sequence
  Description of Artificial Sequence: Synthetic oligonucleotide
gggcggcuccugucacucg

SEQ ID NO: 2942339 - RNA, 19 nt, Artificial Sequence
  Description of Artificial Sequence: Synthetic oligonucleotide
gcguauccugcaccuccac

SEQ ID NO: 2942340 - RNA, 19 nt, Artificial Sequence
  Description of Artificial Sequence: Synthetic oligonucleotide
gaccuucguggcacaggaa

SEQ ID NO: 2942341 - RNA, 19 nt, Artificial Sequence
  Description of Artificial Sequence: Synthetic oligonucleotide
gguuuccguugaucgugaa

SEQ ID NO: 2942342 - RNA, 19 nt, Artificial Sequence
  Description of Artificial Sequence: Synthetic oligonucleotide
agagagccgguggccccgu

SEQ ID NO: 2942343 - RNA, 19 nt, Artificial Sequence
  Description of Artificial Sequence: Synthetic oligonucleotide
gguggccccgucgaggugu

SEQ ID NO: 2942344 - RNA, 19 nt, Artificial Sequence
  Description of Artificial Sequence: Synthetic oligonucleotide
ccuucguggcacaggaagu

SEQ ID NO: 2942345 - RNA, 19 nt, Artificial Sequence
  Description of Artificial Sequence: Synthetic oligonucleotide
agcagcgcgcacgggccaa

SEQ ID NO: 2942346 - RNA, 19 nt, Artificial Sequence
  Description of Artificial Sequence: Synthetic oligonucleotide
gcuccugucacucgaccuu

SEQ ID NO: 2942347 - RNA, 19 nt, Artificial Sequence
  Description of Artificial Sequence: Synthetic oligonucleotide
cagcgcgcacgggccaagc

SEQ ID NO: 2942348 - RNA, 19 nt, Artificial Sequence
  Description of Artificial Sequence: Synthetic oligonucleotide
acgggccaagcacgcgguu

SEQ ID NO: 2942349 - RNA, 19 nt, Artificial Sequence
  Description of Artificial Sequence: Synthetic oligonucleotide
ggccaagcacgcgguuucc

SEQ ID NO: 2942350 - RNA, 19 nt, Artificial Sequence
  Description of Artificial Sequence: Synthetic oligonucleotide
gccugagggaacucguuuu

SEQ ID NO: 2942351 - RNA, 19 nt, Artificial Sequence
  Description of Artificial Sequence: Synthetic oligonucleotide
cacgggccaagcacgcggu

SEQ ID NO: 2942352 - RNA, 19 nt, Artificial Sequence
  Description of Artificial Sequence: Synthetic oligonucleotide
cguauccugcaccuccaca

SEQ ID NO: 2942353 - RNA, 19 nt, Artificial Sequence
  Description of Artificial Sequence: Synthetic oligonucleotide
cugcgggagcagcgcgcac

SEQ ID NO: 2942354 - RNA, 19 nt, Artificial Sequence
  Description of Artificial Sequence: Synthetic oligonucleotide
gagagccgguggccccguc

SEQ ID NO: 2942355 - RNA, 19 nt, Artificial Sequence
  Description of Artificial Sequence: Synthetic oligonucleotide
gcccaccacaacaaucucu

SEQ ID NO: 2942356 - RNA, 19 nt, Artificial Sequence
  Description of Artificial Sequence: Synthetic oligonucleotide
ccgucugcgggagcagcgc

SEQ ID NO: 2942357 - RNA, 19 nt, Artificial Sequence
  Description of Artificial Sequence: Synthetic oligonucleotide
ccacaacaaucucuauucu

SEQ ID NO: 2942358 - RNA, 19 nt, Artificial Sequence
  Description of Artificial Sequence: Synthetic oligonucleotide
ccgucgagguguccuccac

SEQ ID NO: 2942359 - RNA, 19 nt, Artificial Sequence
  Description of Artificial Sequence: Synthetic oligonucleotide
ccacagcgaugccucgcug

SEQ ID NO: 2942360 - RNA, 19 nt, Artificial Sequence
  Description of Artificial Sequence: Synthetic oligonucleotide
ccaagcacgcgguuuccgu

SEQ ID NO: 2942361 - RNA, 19 nt, Artificial Sequence
  Description of Artificial Sequence: Synthetic oligonucleotide
ccucugcuguuguagcugu

SEQ ID NO: 2942362 - RNA, 19 nt, Artificial Sequence
  Description of Artificial Sequence: Synthetic oligonucleotide
cggcuccugucacucgacc

SEQ ID NO: 2942363 - RNA, 19 nt, Artificial Sequence
  Description of Artificial Sequence: Synthetic oligonucleotide
cgggagagagccgguggcc

SEQ ID NO: 2942364 - RNA, 19 nt, Artificial Sequence
  Description of Artificial Sequence: Synthetic oligonucleotide
cguggcacaggaaguugaa

SEQ ID NO: 2942365 - RNA, 19 nt, Artificial Sequence
  Description of Artificial Sequence: Synthetic oligonucleotide
gcgcacgggccaagcacgc

SEQ ID NO: 2942366 - RNA, 19 nt, Artificial Sequence
  Description of Artificial Sequence: Synthetic oligonucleotide
uggccccgucgaggugucc

SEQ ID NO: 2942367 - RNA, 19 nt, Artificial Sequence
  Description of Artificial Sequence: Synthetic oligonucleotide
gccccgucgagguguccuc

SEQ ID NO: 2942368 - RNA, 19 nt, Artificial Sequence
  Description of Artificial Sequence: Synthetic oligonucleotide
cagccugagggaacucguu

SEQ ID NO: 2942369 - RNA, 19 nt, Artificial Sequence
  Description of Artificial Sequence: Synthetic oligonucleotide
ucgcugccucauggccugu

SEQ ID NO: 2942370 - RNA, 19 nt, Artificial Sequence
  Description of Artificial Sequence: Synthetic oligonucleotide
ccccgucgagguguccucc

SEQ ID NO: 2942371 - RNA, 19 nt, Artificial Sequence
  Description of Artificial Sequence: Synthetic oligonucleotide
cagugcccaccacaacaau

SEQ ID NO: 2942372 - RNA, 19 nt, Artificial Sequence
  Description of Artificial Sequence: Synthetic oligonucleotide
cgguuuccguugaucguga

SEQ ID NO: 2942373 - RNA, 19 nt, Artificial Sequence
  Description of Artificial Sequence: Synthetic oligonucleotide
gcucgucauccgcgggaga

SEQ ID NO: 2942374 - RNA, 19 nt, Artificial Sequence
  Description of Artificial Sequence: Synthetic oligonucleotide
guggccccgucgagguguc

SEQ ID NO: 2942375 - RNA, 19 nt, Artificial Sequence
  Description of Artificial Sequence: Synthetic oligonucleotide
cgucgagguguccuccaca

SEQ ID NO: 2942376 - RNA, 19 nt, Artificial Sequence
  Description of Artificial Sequence: Synthetic oligonucleotide
cggugauaucccgauggga

SEQ ID NO: 2942377 - RNA, 19 nt, Artificial Sequence
  Description of Artificial Sequence: Synthetic oligonucleotide
gcagcgcgcacgggccaag

SEQ ID NO: 2942378 - RNA, 19 nt, Artificial Sequence
  Description of Artificial Sequence: Synthetic oligonucleotide
gcggcuccugucacucgac

SEQ ID NO: 2942379 - RNA, 19 nt, Artificial Sequence
  Description of Artificial Sequence: Synthetic oligonucleotide
cccgucgagguguccucca

SEQ ID NO: 2942380 - RNA, 19 nt, Artificial Sequence
  Description of Artificial Sequence: Synthetic oligonucleotide
gcgaugccucgcugccuca

SEQ ID NO: 2942381 - RNA, 19 nt, Artificial Sequence
  Description of Artificial Sequence: Synthetic oligonucleotide
ccaccgucugcgggagcag

SEQ ID NO: 2942382 - RNA, 19 nt, Artificial Sequence
  Description of Artificial Sequence: Synthetic oligonucleotide
ggccccgucgagguguccu

SEQ ID NO: 2942383 - RNA, 19 nt, Artificial Sequence
  Description of Artificial Sequence: Synthetic oligonucleotide
cguugaucgugaagccucu

SEQ ID NO: 2942384 - RNA, 19 nt, Artificial Sequence
  Description of Artificial Sequence: Synthetic oligonucleotide
ccugcaccuccacagcgau

SEQ ID NO: 2942385 - RNA, 19 nt, Artificial Sequence
  Description of Artificial Sequence: Synthetic oligonucleotide
cgcacgggccaagcacgcg

SEQ ID NO: 2942386 - RNA, 19 nt, Artificial Sequence
  Description of Artificial Sequence: Synthetic oligonucleotide
ccugucacucgaccuucgu

SEQ ID NO: 2942387 - RNA, 19 nt, Artificial Sequence
  Description of Artificial Sequence: Synthetic oligonucleotide
cgcugguacagcucgucau

SEQ ID NO: 2942388 - RNA, 19 nt, Artificial Sequence
  Description of Artificial Sequence: Synthetic oligonucleotide
ccgguggccccgucgaggu

SEQ ID NO: 2942389 - RNA, 19 nt, Artificial Sequence
  Description of Artificial Sequence: Synthetic oligonucleotide
ccgcgggagagagccggug

SEQ ID NO: 2942390 - RNA, 19 nt, Artificial Sequence
  Description of Artificial Sequence: Synthetic oligonucleotide
ccgcucagucuuguuucca

SEQ ID NO: 2942391 - RNA, 19 nt, Artificial Sequence
  Description of Artificial Sequence: Synthetic oligonucleotide
guccgcugguacagcucgu

SEQ ID NO: 2942392 - RNA, 19 nt, Artificial Sequence
  Description of Artificial Sequence: Synthetic oligonucleotide
cagcgaugccucgcugccu

SEQ ID NO: 2942393 - RNA, 19 nt, Artificial Sequence
  Description of Artificial Sequence: Synthetic oligonucleotide
cccgaugggaucccacauu

SEQ ID NO: 2942394 - RNA, 19 nt, Artificial Sequence
  Description of Artificial Sequence: Synthetic oligonucleotide
gcgcguccgcugguacagc

SEQ ID NO: 2942395 - RNA, 19 nt, Artificial Sequence
  Description of Artificial Sequence: Synthetic oligonucleotide
cgcgguuuccguugaucgu

SEQ ID NO: 2942396 - RNA, 19 nt, Artificial Sequence
  Description of Artificial Sequence: Synthetic oligonucleotide
ccaccacaacaaucucuau

SEQ ID NO: 2942397 - RNA, 19 nt, Artificial Sequence
  Description of Artificial Sequence: Synthetic oligonucleotide
cgcguccgcugguacagcu

SEQ ID NO: 2942398 - RNA, 19 nt, Artificial Sequence
  Description of Artificial Sequence: Synthetic oligonucleotide
cgggagcagcgcgcacggg

SEQ ID NO: 2942399 - RNA, 19 nt, Artificial Sequence
  Description of Artificial Sequence: Synthetic oligonucleotide
cgguggccccgucgaggug

SEQ ID NO: 2942400 - RNA, 19 nt, Artificial Sequence
  Description of Artificial Sequence: Synthetic oligonucleotide
gcacgcgguuuccguugau

SEQ ID NO: 2942401 - RNA, 19 nt, Artificial Sequence
  Description of Artificial Sequence: Synthetic oligonucleotide
cgggccaagcacgcgguuu

SEQ ID NO: 2942402 - RNA, 19 nt, Artificial Sequence
  Description of Artificial Sequence: Synthetic oligonucleotide
cgaugccucgcugccucau

SEQ ID NO: 2942403 - RNA, 19 nt, Artificial Sequence
  Description of Artificial Sequence: Synthetic oligonucleotide
aaauguaaucuagacaucc

SEQ ID NO: 2942404 - RNA, 19 nt, Artificial Sequence
  Description of Artificial Sequence: Synthetic oligonucleotide
aaauauaacagguaugcca

SEQ ID NO: 2942405 - RNA, 19 nt, Artificial Sequence
  Description of Artificial Sequence: Synthetic oligonucleotide
aacaugucuaaugugaacc

SEQ ID NO: 2942406 - RNA, 19 nt, Artificial Sequence
  Description of Artificial Sequence: Synthetic oligonucleotide
gauacauuccuguugacgg

SEQ ID NO: 2942407 - RNA, 19 nt, Artificial Sequence
  Description of Artificial Sequence: Synthetic oligonucleotide
auugaugacaaaaugauac

SEQ ID NO: 2942408 - RNA, 19 nt, Artificial Sequence
  Description of Artificial Sequence: Synthetic oligonucleotide
aaugagaaacacuaguaag

SEQ ID NO: 2942409 - RNA, 19 nt, Artificial Sequence
  Description of Artificial Sequence: Synthetic oligonucleotide
aauguauccacguuuuggg

SEQ ID NO: 2942410 - RNA, 19 nt, Artificial Sequence
  Description of Artificial Sequence: Synthetic oligonucleotide
uuuaagucaaugaaaaugu

SEQ ID NO: 2942411 - RNA, 19 nt, Artificial Sequence
  Description of Artificial Sequence: Synthetic oligonucleotide
cauaauuuguguaagcagg

SEQ ID NO: 2942412 - RNA, 19 nt, Artificial Sequence
  Description of Artificial Sequence: Synthetic oligonucleotide
aauuuguguaagcagguuc

SEQ ID NO: 2942413 - RNA, 19 nt, Artificial Sequence
  Description of Artificial Sequence: Synthetic oligonucleotide
ucuaaugugaaccaaggcu

SEQ ID NO: 2942414 - RNA, 19 nt, Artificial Sequence
  Description of Artificial Sequence: Synthetic oligonucleotide
augacaaaaugauacauuc

SEQ ID NO: 2942415 - RNA, 19 nt, Artificial Sequence
  Description of Artificial Sequence: Synthetic oligonucleotide
aaugauacauuccuguuga

SEQ ID NO: 2942416 - RNA, 19 nt, Artificial Sequence
  Description of Artificial Sequence: Synthetic oligonucleotide
ugaaacaugucuaauguga

SEQ ID NO: 2942417 - RNA, 19 nt, Artificial Sequence
  Description of Artificial Sequence: Synthetic oligonucleotide
uucuaaagcauuuaaguca

SEQ ID NO: 2942418 - RNA, 19 nt, Artificial Sequence
  Description of Artificial Sequence: Synthetic oligonucleotide
aauauaacagguaugccag

SEQ ID NO: 2942419 - RNA, 19 nt, Artificial Sequence
  Description of Artificial Sequence: Synthetic oligonucleotide
augaaaauguaaucuagac

SEQ ID NO: 2942420 - RNA, 19 nt, Artificial Sequence
  Description of Artificial Sequence: Synthetic oligonucleotide
gaaaauguaaucuagacau

SEQ ID NO: 2942421 - RNA, 19 nt, Artificial Sequence
  Description of Artificial Sequence: Synthetic oligonucleotide
aaagcauuuaagucaauga

SEQ ID NO: 2942422 - RNA, 19 nt, Artificial Sequence
  Description of Artificial Sequence: Synthetic oligonucleotide
auuuaagucaaugaaaaug

SEQ ID NO: 2942423 - RNA, 19 nt, Artificial Sequence
  Description of Artificial Sequence: Synthetic oligonucleotide
caaaauauaacagguaugc

SEQ ID NO: 2942424 - RNA, 19 nt, Artificial Sequence
  Description of Artificial Sequence: Synthetic oligonucleotide
aaaugauacauuccuguug

SEQ ID NO: 2942425 - RNA, 19 nt, Artificial Sequence
  Description of Artificial Sequence: Synthetic oligonucleotide
uaugccaggauacagauua

SEQ ID NO: 2942426 - RNA, 19 nt, Artificial Sequence
  Description of Artificial Sequence: Synthetic oligonucleotide
acuucuaaagcauuuaagu

SEQ ID NO: 2942427 - RNA, 19 nt, Artificial Sequence
  Description of Artificial Sequence: Synthetic oligonucleotide
ugaaaauguaaucuagaca

SEQ ID NO: 2942428 - RNA, 19 nt, Artificial Sequence
  Description of Artificial Sequence: Synthetic oligonucleotide
acuuguucaacuucuaaag

SEQ ID NO: 2942429 - RNA, 19 nt, Artificial Sequence
  Description of Artificial Sequence: Synthetic oligonucleotide
aaaauauaacagguaugcc

SEQ ID NO: 2942430 - RNA, 19 nt, Artificial Sequence
  Description of Artificial Sequence: Synthetic oligonucleotide
aucggaaggaaugagaaac

SEQ ID NO: 2942431 - RNA, 19 nt, Artificial Sequence
  Description of Artificial Sequence: Synthetic oligonucleotide
aagcagguucaccacaagc

SEQ ID NO: 2942432 - RNA, 19 nt, Artificial Sequence
  Description of Artificial Sequence: Synthetic oligonucleotide
aaacaugucuaaugugaac

SEQ ID NO: 2942433 - RNA, 19 nt, Artificial Sequence
  Description of Artificial Sequence: Synthetic oligonucleotide
uuucaguuugaaaaggugu

SEQ ID NO: 2942434 - RNA, 19 nt, Artificial Sequence
  Description of Artificial Sequence: Synthetic oligonucleotide
ugucuaaugugaaccaagg

SEQ ID NO: 2942435 - RNA, 19 nt, Artificial Sequence
  Description of Artificial Sequence: Synthetic oligonucleotide
agagauggguauuagcaac

SEQ ID NO: 2942436 - RNA, 19 nt, Artificial Sequence
  Description of Artificial Sequence: Synthetic oligonucleotide
uguguaagcagguucacca

SEQ ID NO: 2942437 - RNA, 19 nt, Artificial Sequence
  Description of Artificial Sequence: Synthetic oligonucleotide
auuugaaugagacgaaugu

SEQ ID NO: 2942438 - RNA, 19 nt, Artificial Sequence
  Description of Artificial Sequence: Synthetic oligonucleotide
ugugugagagacauguugc

SEQ ID NO: 2942439 - RNA, 19 nt, Artificial Sequence
  Description of Artificial Sequence: Synthetic oligonucleotide
uagacauccgugaaagccg

SEQ ID NO: 2942440 - RNA, 19 nt, Artificial Sequence
  Description of Artificial Sequence: Synthetic oligonucleotide
aauguugccauugaugaca

SEQ ID NO: 2942441 - RNA, 19 nt, Artificial Sequence
  Description of Artificial Sequence: Synthetic oligonucleotide
ucuccacaaaauauaacag

SEQ ID NO: 2942442 - RNA, 19 nt, Artificial Sequence
  Description of Artificial Sequence: Synthetic oligonucleotide
uuguucaacuucuaaagca

SEQ ID NO: 2942443 - RNA, 19 nt, Artificial Sequence
  Description of Artificial Sequence: Synthetic oligonucleotide
uucaguuugaaaaggugug

SEQ ID NO: 2942444 - RNA, 19 nt, Artificial Sequence
  Description of Artificial Sequence: Synthetic oligonucleotide
aguagagauggguauuagc

SEQ ID NO: 2942445 - RNA, 19 nt, Artificial Sequence
  Description of Artificial Sequence: Synthetic oligonucleotide
uacuauuaaagucuccaca

SEQ ID NO: 2942446 - RNA, 19 nt, Artificial Sequence
  Description of Artificial Sequence: Synthetic oligonucleotide
uguacuauuaaagucucca

SEQ ID NO: 2942447 - RNA, 19 nt, Artificial Sequence
  Description of Artificial Sequence: Synthetic oligonucleotide
gauuacaugaaacaugucu

SEQ ID NO: 2942448 - RNA, 19 nt, Artificial Sequence
  Description of Artificial Sequence: Synthetic oligonucleotide
guaauguugccauugauga

SEQ ID NO: 2942449 - RNA, 19 nt, Artificial Sequence
  Description of Artificial Sequence: Synthetic oligonucleotide
aagcauuuaagucaaugaa

SEQ ID NO: 2942450 - RNA, 19 nt, Artificial Sequence
  Description of Artificial Sequence: Synthetic oligonucleotide
acauaauuuguguaagcag

SEQ ID NO: 2942451 - RNA, 19 nt, Artificial Sequence
  Description of Artificial Sequence: Synthetic oligonucleotide
aacauaauuuguguaagca

SEQ ID NO: 2942452 - RNA, 19 nt, Artificial Sequence
  Description of Artificial Sequence: Synthetic oligonucleotide
ugccauuugaaugagacga

SEQ ID NO: 2942453 - RNA, 19 nt, Artificial Sequence
  Description of Artificial Sequence: Synthetic oligonucleotide
ucuaaagcauuuaagucaa

SEQ ID NO: 2942454 - RNA, 19 nt, Artificial Sequence
  Description of Artificial Sequence: Synthetic oligonucleotide
uuuucaguuugaaaaggug

SEQ ID NO: 2942455 - RNA, 19 nt, Artificial Sequence
  Description of Artificial Sequence: Synthetic oligonucleotide
uugaaaaggugugugagag

SEQ ID NO: 2942456 - RNA, 19 nt, Artificial Sequence
  Description of Artificial Sequence: Synthetic oligonucleotide
agucaaugaaaauguaauc

SEQ ID NO: 2942457 - RNA, 19 nt, Artificial Sequence
  Description of Artificial Sequence: Synthetic oligonucleotide
uguaaucuagacauccgug

SEQ ID NO: 2942458 - RNA, 19 nt, Artificial Sequence
  Description of Artificial Sequence: Synthetic oligonucleotide
uugaaugagacgaauguau

SEQ ID NO: 2942459 - RNA, 19 nt, Artificial Sequence
  Description of Artificial Sequence: Synthetic oligonucleotide
ugauccucaguaauguugc

SEQ ID NO: 2942460 - RNA, 19 nt, Artificial Sequence
  Description of Artificial Sequence: Synthetic oligonucleotide
uaaagucuccacaaaauau

SEQ ID NO: 2942461 - RNA, 19 nt, Artificial Sequence
  Description of Artificial Sequence: Synthetic oligonucleotide
uaagucaaugaaaauguaa

SEQ ID NO: 2942462 - RNA, 19 nt, Artificial Sequence
  Description of Artificial Sequence: Synthetic oligonucleotide
gaauguauccacguuuugg

SEQ ID NO: 2942463 - RNA, 19 nt, Artificial Sequence
  Description of Artificial Sequence: Synthetic oligonucleotide
agacauguugcaucuuucc

SEQ ID NO: 2942464 - RNA, 19 nt, Artificial Sequence
  Description of Artificial Sequence: Synthetic oligonucleotide
cuccacaaaauauaacagg

SEQ ID NO: 2942465 - RNA, 19 nt, Artificial Sequence
  Description of Artificial Sequence: Synthetic oligonucleotide
ugacgguguacuauuaaag

SEQ ID NO: 2942466 - RNA, 19 nt, Artificial Sequence
  Description of Artificial Sequence: Synthetic oligonucleotide
acauguugcaucuuuccuc

SEQ ID NO: 2942467 - RNA, 19 nt, Artificial Sequence
  Description of Artificial Sequence: Synthetic oligonucleotide
acuauuaaagucuccacaa

SEQ ID NO: 2942468 - RNA, 19 nt, Artificial Sequence
  Description of Artificial Sequence: Synthetic oligonucleotide
gaaugagacgaauguaucc

SEQ ID NO: 2942469 - RNA, 19 nt, Artificial Sequence
  Description of Artificial Sequence: Synthetic oligonucleotide
augagaaacacuaguaagg

SEQ ID NO: 2942470 - RNA, 19 nt, Artificial Sequence
  Description of Artificial Sequence: Synthetic oligonucleotide
aaugagacgaauguaucca

SEQ ID NO: 2942471 - RNA, 19 nt, Artificial Sequence
  Description of Artificial Sequence: Synthetic oligonucleotide
acaugaaacaugucuaaug

SEQ ID NO: 2942472 - RNA, 19 nt, Artificial Sequence
  Description of Artificial Sequence: Synthetic oligonucleotide
gauacagauuacaugaaac

SEQ ID NO: 2942473 - RNA, 19 nt, Artificial Sequence
  Description of Artificial Sequence: Synthetic oligonucleotide
auacagauuacaugaaaca

SEQ ID NO: 2942474 - RNA, 19 nt, Artificial Sequence
  Description of Artificial Sequence: Synthetic oligonucleotide
gaaaaggugugugagagac

SEQ ID NO: 2942475 - RNA, 19 nt, Artificial Sequence
  Description of Artificial Sequence: Synthetic oligonucleotide
aacagguaugccaggauac

SEQ ID NO: 2942476 - RNA, 19 nt, Artificial Sequence
  Description of Artificial Sequence: Synthetic oligonucleotide
uucuucaugacuagguaac

SEQ ID NO: 2942477 - RNA, 19 nt, Artificial Sequence
  Description of Artificial Sequence: Synthetic oligonucleotide
caggauacagauuacauga

SEQ ID NO: 2942478 - RNA, 19 nt, Artificial Sequence
  Description of Artificial Sequence: Synthetic oligonucleotide
ugauacauuccuguugacg

SEQ ID NO: 2942479 - RNA, 19 nt, Artificial Sequence
  Description of Artificial Sequence: Synthetic oligonucleotide
acgguguacuauuaaaguc

SEQ ID NO: 2942480 - RNA, 19 nt, Artificial Sequence
  Description of Artificial Sequence: Synthetic oligonucleotide
gucuccacaaaauauaaca

SEQ ID NO: 2942481 - RNA, 19 nt, Artificial Sequence
  Description of Artificial Sequence: Synthetic oligonucleotide
uucaugauccucaguaaug

SEQ ID NO: 2942482 - RNA, 19 nt, Artificial Sequence
  Description of Artificial Sequence: Synthetic oligonucleotide
  modified_base (14)..(14): a, c, u, g, unknown or other
cuaguaaggccugnggugg

SEQ ID NO: 2942483 - RNA, 19 nt, Artificial Sequence
  Description of Artificial Sequence: Synthetic oligonucleotide
aagucaaugaaaauguaau

SEQ ID NO: 2942484 - RNA, 19 nt, Artificial Sequence
  Description of Artificial Sequence: Synthetic oligonucleotide
cuucuaaagcauuuaaguc

SEQ ID NO: 2942485 - RNA, 19 nt, Artificial Sequence
  Description of Artificial Sequence: Synthetic oligonucleotide
aauguaaucuagacauccg

SEQ ID NO: 2942486 - RNA, 19 nt, Artificial Sequence
  Description of Artificial Sequence: Synthetic oligonucleotide
cuagacauccgugaaagcc

SEQ ID NO: 2942487 - RNA, 19 nt, Artificial Sequence
  Description of Artificial Sequence: Synthetic oligonucleotide
ucaaugaaaauguaaucua

SEQ ID NO: 2942488 - RNA, 19 nt, Artificial Sequence
  Description of Artificial Sequence: Synthetic oligonucleotide
acugccauuugaaugagac

SEQ ID NO: 2942489 - RNA, 19 nt, Artificial Sequence
  Description of Artificial Sequence: Synthetic oligonucleotide
gacaaaaugauacauuccu

SEQ ID NO: 2942490 - RNA, 19 nt, Artificial Sequence
  Description of Artificial Sequence: Synthetic oligonucleotide
ugagaaacacuaguaaggc

SEQ ID NO: 2942491 - RNA, 19 nt, Artificial Sequence
  Description of Artificial Sequence: Synthetic oligonucleotide
ugacaaaaugauacauucc

SEQ ID NO: 2942492 - RNA, 19 nt, Artificial Sequence
  Description of Artificial Sequence: Synthetic oligonucleotide
augacuagguaacggaauc

SEQ ID NO: 2942493 - RNA, 19 nt, Artificial Sequence
  Description of Artificial Sequence: Synthetic oligonucleotide
uaaagcauuuaagucaaug

SEQ ID NO: 2942494 - RNA, 19 nt, Artificial Sequence
  Description of Artificial Sequence: Synthetic oligonucleotide
ugagacgaauguauccacg

SEQ ID NO: 2942495 - RNA, 19 nt, Artificial Sequence
  Description of Artificial Sequence: Synthetic oligonucleotide
uguauccacguuuugggug

SEQ ID NO: 2942496 - RNA, 19 nt, Artificial Sequence
  Description of Artificial Sequence: Synthetic oligonucleotide
acaagcacuuuucaguuug

SEQ ID NO: 2942497 - RNA, 19 nt, Artificial Sequence
  Description of Artificial Sequence: Synthetic oligonucleotide
ugaucggaaggaaugagaa

SEQ ID NO: 2942498 - RNA, 19 nt, Artificial Sequence
  Description of Artificial Sequence: Synthetic oligonucleotide
  modified_base (15)..(15): a, c, u, g, unknown or other
acuaguaaggccugnggug

SEQ ID NO: 2942499 - RNA, 19 nt, Artificial Sequence
  Description of Artificial Sequence: Synthetic oligonucleotide
uguucaacuucuaaagcau

SEQ ID NO: 2942500 - RNA, 19 nt, Artificial Sequence
  Description of Artificial Sequence: Synthetic oligonucleotide
gaaggaaugagaaacacua

SEQ ID NO: 2942501 - RNA, 19 nt, Artificial Sequence
  Description of Artificial Sequence: Synthetic oligonucleotide
aacggaaucacuuguucaa

SEQ ID NO: 2942502 - RNA, 19 nt, Artificial Sequence
  Description of Artificial Sequence: Synthetic oligonucleotide
ugaaccaaggcuacugcca

SEQ ID NO: 2942503 - RNA, 19 nt, Artificial Sequence
  Description of Artificial Sequence: Synthetic oligonucleotide
aggaaugagaaacacuagu

SEQ ID NO: 2942504 - RNA, 19 nt, Artificial Sequence
  Description of Artificial Sequence: Synthetic oligonucleotide
aacuucuaaagcauuuaag

SEQ ID NO: 2942505 - RNA, 19 nt, Artificial Sequence
  Description of Artificial Sequence: Synthetic oligonucleotide
uucaugacuagguaacgga

SEQ ID NO: 2942506 - RNA, 19 nt, Artificial Sequence
  Description of Artificial Sequence: Synthetic oligonucleotide
accacaagcacuuuucagu

SEQ ID NO: 2942507 - RNA, 19 nt, Artificial Sequence
  Description of Artificial Sequence: Synthetic oligonucleotide
aaaggugugugagagacau

SEQ ID NO: 2942508 - RNA, 19 nt, Artificial Sequence
  Description of Artificial Sequence: Synthetic oligonucleotide
agcccagucuucaugaucc

SEQ ID NO: 2942509 - RNA, 19 nt, Artificial Sequence
  Description of Artificial Sequence: Synthetic oligonucleotide
guauuagcaacacauaucu

SEQ ID NO: 2942510 - RNA, 19 nt, Artificial Sequence
  Description of Artificial Sequence: Synthetic oligonucleotide
uuugaaaaggugugugaga

SEQ ID NO: 2942511 - RNA, 19 nt, Artificial Sequence
  Description of Artificial Sequence: Synthetic oligonucleotide
aguaauguugccauugaug

SEQ ID NO: 2942512 - RNA, 19 nt, Artificial Sequence
  Description of Artificial Sequence: Synthetic oligonucleotide
uugaugacaaaaugauaca

SEQ ID NO: 2942513 - RNA, 19 nt, Artificial Sequence
  Description of Artificial Sequence: Synthetic oligonucleotide
gaaugagaaacacuaguaa

SEQ ID NO: 2942514 - RNA, 19 nt, Artificial Sequence
  Description of Artificial Sequence: Synthetic oligonucleotide
ugccauugaugacaaaaug

SEQ ID NO: 2942515 - RNA, 19 nt, Artificial Sequence
  Description of Artificial Sequence: Synthetic oligonucleotide
aucuagacauccgugaaag

SEQ ID NO: 2942516 - RNA, 19 nt, Artificial Sequence
  Description of Artificial Sequence: Synthetic oligonucleotide
cacuuuucaguuugaaaag

SEQ ID NO: 2942517 - RNA, 19 nt, Artificial Sequence
  Description of Artificial Sequence: Synthetic oligonucleotide
acuuuucaguuugaaaagg

SEQ ID NO: 2942518 - RNA, 19 nt, Artificial Sequence
  Description of Artificial Sequence: Synthetic oligonucleotide
cauuugaaugagacgaaug

SEQ ID NO: 2942519 - RNA, 19 nt, Artificial Sequence
  Description of Artificial Sequence: Synthetic oligonucleotide
ugagagacauguugcaucu

SEQ ID NO: 2942520 - RNA, 19 nt, Artificial Sequence
  Description of Artificial Sequence: Synthetic oligonucleotide
aaaauguaaucuagacauc

SEQ ID NO: 2942521 - RNA, 19 nt, Artificial Sequence
  Description of Artificial Sequence: Synthetic oligonucleotide
aaucacuuguucaacuucu

SEQ ID NO: 2942522 - RNA, 19 nt, Artificial Sequence
  Description of Artificial Sequence: Synthetic oligonucleotide
guagagauggguauuagca

SEQ ID NO: 2942523 - RNA, 19 nt, Artificial Sequence
  Description of Artificial Sequence: Synthetic oligonucleotide
ugaaugagacgaauguauc

SEQ ID NO: 2942524 - RNA, 19 nt, Artificial Sequence
  Description of Artificial Sequence: Synthetic oligonucleotide
uguaagcagguucaccaca

SEQ ID NO: 2942525 - RNA, 19 nt, Artificial Sequence
  Description of Artificial Sequence: Synthetic oligonucleotide
aaagccgccaacauaauuu

SEQ ID NO: 2942526 - RNA, 19 nt, Artificial Sequence
  Description of Artificial Sequence: Synthetic oligonucleotide
uaacggaaucacuuguuca

SEQ ID NO: 2942527 - RNA, 19 nt, Artificial Sequence
  Description of Artificial Sequence: Synthetic oligonucleotide
ugugaaccaaggcuacugc

SEQ ID NO: 2942528 - RNA, 19 nt, Artificial Sequence
  Description of Artificial Sequence: Synthetic oligonucleotide
augagacgaauguauccac

SEQ ID NO: 2942529 - RNA, 19 nt, Artificial Sequence
  Description of Artificial Sequence: Synthetic oligonucleotide
aagcccagucuucaugauc

SEQ ID NO: 2942530 - RNA, 19 nt, Artificial Sequence
  Description of Artificial Sequence: Synthetic oligonucleotide
guaaucuagacauccguga

SEQ ID NO: 2942531 - RNA, 19 nt, Artificial Sequence
  Description of Artificial Sequence: Synthetic oligonucleotide
uuacaugaaacaugucuaa

SEQ ID NO: 2942532 - RNA, 19 nt, Artificial Sequence
  Description of Artificial Sequence: Synthetic oligonucleotide
uucaccacaagcacuuuuc

SEQ ID NO: 2942533 - RNA, 19 nt, Artificial Sequence
  Description of Artificial Sequence: Synthetic oligonucleotide
acagauuacaugaaacaug

SEQ ID NO: 2942534 - RNA, 19 nt, Artificial Sequence
  Description of Artificial Sequence: Synthetic oligonucleotide
ugcaucuuuccucuucccc

SEQ ID NO: 2942535 - RNA, 19 nt, Artificial Sequence
  Description of Artificial Sequence: Synthetic oligonucleotide
uaaucuagacauccgugaa

SEQ ID NO: 2942536 - RNA, 19 nt, Artificial Sequence
  Description of Artificial Sequence: Synthetic oligonucleotide
auguaaucuagacauccgu

SEQ ID NO: 2942537 - RNA, 19 nt, Artificial Sequence
  Description of Artificial Sequence: Synthetic oligonucleotide
uacagauuacaugaaacau

SEQ ID NO: 2942538 - RNA, 19 nt, Artificial Sequence
  Description of Artificial Sequence: Synthetic oligonucleotide
aaucuagacauccgugaaa

SEQ ID NO: 2942539 - RNA, 19 nt, Artificial Sequence
  Description of Artificial Sequence: Synthetic oligonucleotide
gugugugagagacauguug

SEQ ID NO: 2942540 - RNA, 19 nt, Artificial Sequence
  Description of Artificial Sequence: Synthetic oligonucleotide
aagccgccaacauaauuug

SEQ ID NO: 2942541 - RNA, 19 nt, Artificial Sequence
  Description of Artificial Sequence: Synthetic oligonucleotide
gagaaacacuaguaaggcc

SEQ ID NO: 2942542 - RNA, 19 nt, Artificial Sequence
  Description of Artificial Sequence: Synthetic oligonucleotide
aaagucuccacaaaauaua

SEQ ID NO: 2942543 - RNA, 19 nt, Artificial Sequence
  Description of Artificial Sequence: Synthetic oligonucleotide
uuugggugccaguagagau

SEQ ID NO: 2942544 - RNA, 19 nt, Artificial Sequence
  Description of Artificial Sequence: Synthetic oligonucleotide
aguuugaaaagguguguga

SEQ ID NO: 2942545 - RNA, 19 nt, Artificial Sequence
  Description of Artificial Sequence: Synthetic oligonucleotide
uauaacagguaugccagga

SEQ ID NO: 2942546 - RNA, 19 nt, Artificial Sequence
  Description of Artificial Sequence: Synthetic oligonucleotide
caacauaauuuguguaagc

SEQ ID NO: 2942547 - RNA, 19 nt, Artificial Sequence
  Description of Artificial Sequence: Synthetic oligonucleotide
  modified_base (17)..(17): a, c, u, g, unknown or other
acacuaguaaggccugngg

SEQ ID NO: 2942548 - RNA, 19 nt, Artificial Sequence
  Description of Artificial Sequence: Synthetic oligonucleotide
aacuucuucaugacuaggu

SEQ ID NO: 2942549 - RNA, 19 nt, Artificial Sequence
  Description of Artificial Sequence: Synthetic oligonucleotide
ucaguaauguugccauuga

SEQ ID NO: 2942550 - RNA, 19 nt, Artificial Sequence
  Description of Artificial Sequence: Synthetic oligonucleotide
augaaacaugucuaaugug

SEQ ID NO: 2942551 - RNA, 19 nt, Artificial Sequence
  Description of Artificial Sequence: Synthetic oligonucleotide
auggguauuagcaacacau

SEQ ID NO: 2942552 - RNA, 19 nt, Artificial Sequence
  Description of Artificial Sequence: Synthetic oligonucleotide
uagguaacggaaucacuug

SEQ ID NO: 2942553 - RNA, 19 nt, Artificial Sequence
  Description of Artificial Sequence: Synthetic oligonucleotide
acaaaauauaacagguaug

SEQ ID NO: 2942554 - RNA, 19 nt, Artificial Sequence
  Description of Artificial Sequence: Synthetic oligonucleotide
guauccacguuuugggugc

SEQ ID NO: 2942555 - RNA, 19 nt, Artificial Sequence
  Description of Artificial Sequence: Synthetic oligonucleotide
  modified_base (18)..(18): a, c, u, g, unknown or other
aacacuaguaaggccugng

SEQ ID NO: 2942556 - RNA, 19 nt, Artificial Sequence
  Description of Artificial Sequence: Synthetic oligonucleotide
ucaugacuagguaacggaa

SEQ ID NO: 2942557 - RNA, 19 nt, Artificial Sequence
  Description of Artificial Sequence: Synthetic oligonucleotide
ucaugauccucaguaaugu

SEQ ID NO: 2942558 - RNA, 19 nt, Artificial Sequence
  Description of Artificial Sequence: Synthetic oligonucleotide
uucaacuucuaaagcauuu

SEQ ID NO: 2942559 - RNA, 19 nt, Artificial Sequence
  Description of Artificial Sequence: Synthetic oligonucleotide
uaaugugaaccaaggcuac

SEQ ID NO: 2942560 - RNA, 19 nt, Artificial Sequence
  Description of Artificial Sequence: Synthetic oligonucleotide
gcacuuuucaguuugaaaa

SEQ ID NO: 2942561 - RNA, 19 nt, Artificial Sequence
  Description of Artificial Sequence: Synthetic oligonucleotide
ucuucaugacuagguaacg

SEQ ID NO: 2942562 - RNA, 19 nt, Artificial Sequence
  Description of Artificial Sequence: Synthetic oligonucleotide
auuacaugaaacaugucua

SEQ ID NO: 2942563 - RNA, 19 nt, Artificial Sequence
  Description of Artificial Sequence: Synthetic oligonucleotide
guugcaucuuuccucuucc

SEQ ID NO: 2942564 - RNA, 19 nt, Artificial Sequence
  Description of Artificial Sequence: Synthetic oligonucleotide
ugaugacaaaaugauacau

SEQ ID NO: 2942565 - RNA, 19 nt, Artificial Sequence
  Description of Artificial Sequence: Synthetic oligonucleotide
auauaacagguaugccagg

SEQ ID NO: 2942566 - RNA, 19 nt, Artificial Sequence
  Description of Artificial Sequence: Synthetic oligonucleotide
ugggugccaguagagaugg

SEQ ID NO: 2942567 - RNA, 19 nt, Artificial Sequence
  Description of Artificial Sequence: Synthetic oligonucleotide
aggugugugagagacaugu

SEQ ID NO: 2942568 - RNA, 19 nt, Artificial Sequence
  Description of Artificial Sequence: Synthetic oligonucleotide
uccucaguaauguugccau

SEQ ID NO: 2942569 - RNA, 19 nt, Artificial Sequence
  Description of Artificial Sequence: Synthetic oligonucleotide
auuuguguaagcagguuca

SEQ ID NO: 2942570 - RNA, 19 nt, Artificial Sequence
  Description of Artificial Sequence: Synthetic oligonucleotide
gucuucaugauccucagua

SEQ ID NO: 2942571 - RNA, 19 nt, Artificial Sequence
  Description of Artificial Sequence: Synthetic oligonucleotide
uugacgguguacuauuaaa

SEQ ID NO: 2942572 - RNA, 19 nt, Artificial Sequence
  Description of Artificial Sequence: Synthetic oligonucleotide
auuaaagucuccacaaaau

SEQ ID NO: 2942573 - RNA, 19 nt, Artificial Sequence
  Description of Artificial Sequence: Synthetic oligonucleotide
uuaagucaaugaaaaugua

SEQ ID NO: 2942574 - RNA, 19 nt, Artificial Sequence
  Description of Artificial Sequence: Synthetic oligonucleotide
cuucaugacuagguaacgg

SEQ ID NO: 2942575 - RNA, 19 nt, Artificial Sequence
  Description of Artificial Sequence: Synthetic oligonucleotide
gucaaugaaaauguaaucu

SEQ ID NO: 2942576 - RNA, 19 nt, Artificial Sequence
  Description of Artificial Sequence: Synthetic oligonucleotide
uugccauugaugacaaaau

SEQ ID NO: 2942577 - RNA, 19 nt, Artificial Sequence
  Description of Artificial Sequence: Synthetic oligonucleotide
uagagauggguauuagcaa

SEQ ID NO: 2942578 - RNA, 19 nt, Artificial Sequence
  Description of Artificial Sequence: Synthetic oligonucleotide
ucggaaggaaugagaaaca

SEQ ID NO: 2942579 - RNA, 19 nt, Artificial Sequence
  Description of Artificial Sequence: Synthetic oligonucleotide
caaaaugauacauuccugu

SEQ ID NO: 2942580 - RNA, 19 nt, Artificial Sequence
  Description of Artificial Sequence: Synthetic oligonucleotide
augauccucaguaauguug

SEQ ID NO: 2942581 - RNA, 19 nt, Artificial Sequence
  Description of Artificial Sequence: Synthetic oligonucleotide
uguugcaucuuuccucuuc

SEQ ID NO: 2942582 - RNA, 19 nt, Artificial Sequence
  Description of Artificial Sequence: Synthetic oligonucleotide
acaugucuaaugugaacca

SEQ ID NO: 2942583 - RNA, 19 nt, Artificial Sequence
  Description of Artificial Sequence: Synthetic oligonucleotide
aaggaaugagaaacacuag

SEQ ID NO: 2942584 - RNA, 19 nt, Artificial Sequence
  Description of Artificial Sequence: Synthetic oligonucleotide
uuugaaugagacgaaugua

SEQ ID NO: 2942585 - RNA, 19 nt, Artificial Sequence
  Description of Artificial Sequence: Synthetic oligonucleotide
  modified_base (10)..(10): a, c, u, g, unknown or other
uaaggccugngguggaacu

SEQ ID NO: 2942586 - RNA, 19 nt, Artificial Sequence
  Description of Artificial Sequence: Synthetic oligonucleotide
cagauuacaugaaacaugu

SEQ ID NO: 2942587 - RNA, 19 nt, Artificial Sequence
  Description of Artificial Sequence: Synthetic oligonucleotide
ugugaucggaaggaaugag

SEQ ID NO: 2942588 - RNA, 19 nt, Artificial Sequence
  Description of Artificial Sequence: Synthetic oligonucleotide
guacuauuaaagucuccac

SEQ ID NO: 2942589 - RNA, 19 nt, Artificial Sequence
  Description of Artificial Sequence: Synthetic oligonucleotide
uggaagcccagucuucaug

SEQ ID NO: 2942590 - RNA, 19 nt, Artificial Sequence
  Description of Artificial Sequence: Synthetic oligonucleotide
ucuucaugauccucaguaa

SEQ ID NO: 2942591 - RNA, 19 nt, Artificial Sequence
  Description of Artificial Sequence: Synthetic oligonucleotide
gcuacugccauuugaauga

SEQ ID NO: 2942592 - RNA, 19 nt, Artificial Sequence
  Description of Artificial Sequence: Synthetic oligonucleotide
guugccauugaugacaaaa

SEQ ID NO: 2942593 - RNA, 19 nt, Artificial Sequence
  Description of Artificial Sequence: Synthetic oligonucleotide
gugagagacauguugcauc

SEQ ID NO: 2942594 - RNA, 19 nt, Artificial Sequence
  Description of Artificial Sequence: Synthetic oligonucleotide
gucuaaugugaaccaaggc

SEQ ID NO: 2942595 - RNA, 19 nt, Artificial Sequence
  Description of Artificial Sequence: Synthetic oligonucleotide
caugaaacaugucuaaugu

SEQ ID NO: 2942596 - RNA, 19 nt, Artificial Sequence
  Description of Artificial Sequence: Synthetic oligonucleotide
agcauuuaagucaaugaaa

SEQ ID NO: 2942597 - RNA, 19 nt, Artificial Sequence
  Description of Artificial Sequence: Synthetic oligonucleotide
gugaaagccgccaacauaa

SEQ ID NO: 2942598 - RNA, 19 nt, Artificial Sequence
  Description of Artificial Sequence: Synthetic oligonucleotide
auaauuuguguaagcaggu

SEQ ID NO: 2942599 - RNA, 19 nt, Artificial Sequence
  Description of Artificial Sequence: Synthetic oligonucleotide
guaacggaaucacuuguuc

SEQ ID NO: 2942600 - RNA, 19 nt, Artificial Sequence
  Description of Artificial Sequence: Synthetic oligonucleotide
ucaguuugaaaaggugugu

SEQ ID NO: 2942601 - RNA, 19 nt, Artificial Sequence
  Description of Artificial Sequence: Synthetic oligonucleotide
acaaaaugauacauuccug

SEQ ID NO: 2942602 - RNA, 19 nt, Artificial Sequence
  Description of Artificial Sequence: Synthetic oligonucleotide
  modified_base (3)..(3): a, c, u, g, unknown or other
ugngguggaacuucuucau

SEQ ID NO: 2942603 - RNA, 19 nt, Artificial Sequence
  Description of Artificial Sequence: Synthetic oligonucleotide
augucuaaugugaaccaag

SEQ ID NO: 2942604 - RNA, 19 nt, Artificial Sequence
  Description of Artificial Sequence: Synthetic oligonucleotide
agguaacggaaucacuugu

SEQ ID NO: 2942605 - RNA, 19 nt, Artificial Sequence
  Description of Artificial Sequence: Synthetic oligonucleotide
cugccauuugaaugagacg

SEQ ID NO: 2942606 - RNA, 19 nt, Artificial Sequence
  Description of Artificial Sequence: Synthetic oligonucleotide
uaauguugccauugaugac

SEQ ID NO: 2942607 - RNA, 19 nt, Artificial Sequence
  Description of Artificial Sequence: Synthetic oligonucleotide
auuccuguugacgguguac

SEQ ID NO: 2942608 - RNA, 19 nt, Artificial Sequence
  Description of Artificial Sequence: Synthetic oligonucleotide
aagucuccacaaaauauaa

SEQ ID NO: 2942609 - RNA, 19 nt, Artificial Sequence
  Description of Artificial Sequence: Synthetic oligonucleotide
agauggguauuagcaacac

SEQ ID NO: 2942610 - RNA, 19 nt, Artificial Sequence
  Description of Artificial Sequence: Synthetic oligonucleotide
gaaacacuaguaaggccug

SEQ ID NO: 2942611 - RNA, 19 nt, Artificial Sequence
  Description of Artificial Sequence: Synthetic oligonucleotide
aaggcuacugccauuugaa

SEQ ID NO: 2942612 - RNA, 19 nt, Artificial Sequence
  Description of Artificial Sequence: Synthetic oligonucleotide
agacauccgugaaagccgc

SEQ ID NO: 2942613 - RNA, 19 nt, Artificial Sequence
  Description of Artificial Sequence: Synthetic oligonucleotide
gacuagguaacggaaucac

SEQ ID NO: 2942614 - RNA, 19 nt, Artificial Sequence
  Description of Artificial Sequence: Synthetic oligonucleotide
ggcuacugccauuugaaug

SEQ ID NO: 2942615 - RNA, 19 nt, Artificial Sequence
  Description of Artificial Sequence: Synthetic oligonucleotide
ugaaaaggugugugagaga

SEQ ID NO: 2942616 - RNA, 19 nt, Artificial Sequence
  Description of Artificial Sequence: Synthetic oligonucleotide
gugaaccaaggcuacugcc

SEQ ID NO: 2942617 - RNA, 19 nt, Artificial Sequence
  Description of Artificial Sequence: Synthetic oligonucleotide
gacgguguacuauuaaagu

SEQ ID NO: 2942618 - RNA, 19 nt, Artificial Sequence
  Description of Artificial Sequence: Synthetic oligonucleotide
uaagcagguucaccacaag

SEQ ID NO: 2942619 - RNA, 19 nt, Artificial Sequence
  Description of Artificial Sequence: Synthetic oligonucleotide
cuuuccucuuccccauugg

SEQ ID NO: 2942620 - RNA, 19 nt, Artificial Sequence
  Description of Artificial Sequence: Synthetic oligonucleotide
uacauuccuguugacggug

SEQ ID NO: 2942621 - RNA, 19 nt, Artificial Sequence
  Description of Artificial Sequence: Synthetic oligonucleotide
  modified_base (4)..(4): a, c, u, g, unknown or other
cugngguggaacuucuuca

SEQ ID NO: 2942622 - RNA, 19 nt, Artificial Sequence
  Description of Artificial Sequence: Synthetic oligonucleotide
augauacauuccuguugac

SEQ ID NO: 2942623 - RNA, 19 nt, Artificial Sequence
  Description of Artificial Sequence: Synthetic oligonucleotide
ucaacuucuaaagcauuua

SEQ ID NO: 2942624 - RNA, 19 nt, Artificial Sequence
  Description of Artificial Sequence: Synthetic oligonucleotide
agucuccacaaaauauaac

SEQ ID NO: 2942625 - RNA, 19 nt, Artificial Sequence
  Description of Artificial Sequence: Synthetic oligonucleotide
ucuagacauccgugaaagc

SEQ ID NO: 2942626 - RNA, 19 nt, Artificial Sequence
  Description of Artificial Sequence: Synthetic oligonucleotide
auccgugaaagccgccaac

SEQ ID NO: 2942627 - RNA, 19 nt, Artificial Sequence
  Description of Artificial Sequence: Synthetic oligonucleotide
acuucuucaugacuaggua

SEQ ID NO: 2942628 - RNA, 19 nt, Artificial Sequence
  Description of Artificial Sequence: Synthetic oligonucleotide
uuuugggugccaguagaga

SEQ ID NO: 2942629 - RNA, 19 nt, Artificial Sequence
  Description of Artificial Sequence: Synthetic oligonucleotide
ugacuagguaacggaauca

SEQ ID NO: 2942630 - RNA, 19 nt, Artificial Sequence
  Description of Artificial Sequence: Synthetic oligonucleotide
caccacaagcacuuuucag

SEQ ID NO: 2942631 - RNA, 19 nt, Artificial Sequence
  Description of Artificial Sequence: Synthetic oligonucleotide
augugaaccaaggcuacug

SEQ ID NO: 2942632 - RNA, 19 nt, Artificial Sequence
  Description of Artificial Sequence: Synthetic oligonucleotide
cuucuucaugacuagguaa

SEQ ID NO: 2942633 - RNA, 19 nt, Artificial Sequence
  Description of Artificial Sequence: Synthetic oligonucleotide
uuccuguugacgguguacu

SEQ ID NO: 2942634 - RNA, 19 nt, Artificial Sequence
  Description of Artificial Sequence: Synthetic oligonucleotide
  modified_base (2)..(2): a, c, u, g, unknown or other
gngguggaacuucuucaug

SEQ ID NO: 2942635 - RNA, 19 nt, Artificial Sequence
  Description of Artificial Sequence: Synthetic oligonucleotide
gaaacaugucuaaugugaa

SEQ ID NO: 2942636 - RNA, 19 nt, Artificial Sequence
  Description of Artificial Sequence: Synthetic oligonucleotide
acggaaucacuuguucaac

SEQ ID NO: 2942637 - RNA, 19 nt, Artificial Sequence
  Description of Artificial Sequence: Synthetic oligonucleotide
caguuugaaaaggugugug

SEQ ID NO: 2942638 - RNA, 19 nt, Artificial Sequence
  Description of Artificial Sequence: Synthetic oligonucleotide
auacauuccuguugacggu

SEQ ID NO: 2942639 - RNA, 19 nt, Artificial Sequence
  Description of Artificial Sequence: Synthetic oligonucleotide
aaugugaaccaaggcuacu

SEQ ID NO: 2942640 - RNA, 19 nt, Artificial Sequence
  Description of Artificial Sequence: Synthetic oligonucleotide
uggguauuagcaacacaua

SEQ ID NO: 2942641 - RNA, 19 nt, Artificial Sequence
  Description of Artificial Sequence: Synthetic oligonucleotide
uuguguaagcagguucacc

SEQ ID NO: 2942642 - RNA, 19 nt, Artificial Sequence
  Description of Artificial Sequence: Synthetic oligonucleotide
ggaacuucuucaugacuag

SEQ ID NO: 2942643 - RNA, 19 nt, Artificial Sequence
  Description of Artificial Sequence: Synthetic oligonucleotide
auguauccacguuuugggu

SEQ ID NO: 2942644 - RNA, 19 nt, Artificial Sequence
  Description of Artificial Sequence: Synthetic oligonucleotide
uccgugaaagccgccaaca

SEQ ID NO: 2942645 - RNA, 19 nt, Artificial Sequence
  Description of Artificial Sequence: Synthetic oligonucleotide
auuggaagcccagucuuca

SEQ ID NO: 2942646 - RNA, 19 nt, Artificial Sequence
  Description of Artificial Sequence: Synthetic oligonucleotide
gcauuuaagucaaugaaaa

SEQ ID NO: 2942647 - RNA, 19 nt, Artificial Sequence
  Description of Artificial Sequence: Synthetic oligonucleotide
gauggguauuagcaacaca

SEQ ID NO: 2942648 - RNA, 19 nt, Artificial Sequence
  Description of Artificial Sequence: Synthetic oligonucleotide
uuccccauuggaagcccag

SEQ ID NO: 2942649 - RNA, 19 nt, Artificial Sequence
  Description of Artificial Sequence: Synthetic oligonucleotide
uacaugaaacaugucuaau

SEQ ID NO: 2942650 - RNA, 19 nt, Artificial Sequence
  Description of Artificial Sequence: Synthetic oligonucleotide
gguauuagcaacacauauc

SEQ ID NO: 2942651 - RNA, 19 nt, Artificial Sequence
  Description of Artificial Sequence: Synthetic oligonucleotide
ugccaguagagauggguau

SEQ ID NO: 2942652 - RNA, 19 nt, Artificial Sequence
  Description of Artificial Sequence: Synthetic oligonucleotide
acguuuugggugccaguag

SEQ ID NO: 2942653 - RNA, 19 nt, Artificial Sequence
  Description of Artificial Sequence: Synthetic oligonucleotide
gagacgaauguauccacgu

SEQ ID NO: 2942654 - RNA, 19 nt, Artificial Sequence
  Description of Artificial Sequence: Synthetic oligonucleotide
ugugagagacauguugcau

SEQ ID NO: 2942655 - RNA, 19 nt, Artificial Sequence
  Description of Artificial Sequence: Synthetic oligonucleotide
gauccucaguaauguugcc

SEQ ID NO: 2942656 - RNA, 19 nt, Artificial Sequence
  Description of Artificial Sequence: Synthetic oligonucleotide
ccaggauacagauuacaug

SEQ ID NO: 2942657 - RNA, 19 nt, Artificial Sequence
  Description of Artificial Sequence: Synthetic oligonucleotide
gagauggguauuagcaaca

SEQ ID NO: 2942658 - RNA, 19 nt, Artificial Sequence
  Description of Artificial Sequence: Synthetic oligonucleotide
cuuuucaguuugaaaaggu

SEQ ID NO: 2942659 - RNA, 19 nt, Artificial Sequence
  Description of Artificial Sequence: Synthetic oligonucleotide
cuagguaacggaaucacuu

SEQ ID NO: 2942660 - RNA, 19 nt, Artificial Sequence
  Description of Artificial Sequence: Synthetic oligonucleotide
gacauguugcaucuuuccu

SEQ ID NO: 2942661 - RNA, 19 nt, Artificial Sequence
  Description of Artificial Sequence: Synthetic oligonucleotide
ugccaggauacagauuaca

SEQ ID NO: 2942662 - RNA, 19 nt, Artificial Sequence
  Description of Artificial Sequence: Synthetic oligonucleotide
uuuguguaagcagguucac

SEQ ID NO: 2942663 - RNA, 19 nt, Artificial Sequence
  Description of Artificial Sequence: Synthetic oligonucleotide
gacgaauguauccacguuu

SEQ ID NO: 2942664 - RNA, 19 nt, Artificial Sequence
  Description of Artificial Sequence: Synthetic oligonucleotide
gccaacauaauuuguguaa

SEQ ID NO: 2942665 - RNA, 19 nt, Artificial Sequence
  Description of Artificial Sequence: Synthetic oligonucleotide
gccauugaugacaaaauga

SEQ ID NO: 2942666 - RNA, 19 nt, Artificial Sequence
  Description of Artificial Sequence: Synthetic oligonucleotide
uccacguuuugggugccag

SEQ ID NO: 2942667 - RNA, 19 nt, Artificial Sequence
  Description of Artificial Sequence: Synthetic oligonucleotide
uguugacgguguacuauua

SEQ ID NO: 2942668 - RNA, 19 nt, Artificial Sequence
  Description of Artificial Sequence: Synthetic oligonucleotide
cauuggaagcccagucuuc

SEQ ID NO: 2942669 - RNA, 19 nt, Artificial Sequence
  Description of Artificial Sequence: Synthetic oligonucleotide
cauguugcaucuuuccucu

SEQ ID NO: 2942670 - RNA, 19 nt, Artificial Sequence
  Description of Artificial Sequence: Synthetic oligonucleotide
cauugaugacaaaaugaua

SEQ ID NO: 2942671 - RNA, 19 nt, Artificial Sequence
  Description of Artificial Sequence: Synthetic oligonucleotide
uugcaucuuuccucuuccc

SEQ ID NO: 2942672 - RNA, 19 nt, Artificial Sequence
  Description of Artificial Sequence: Synthetic oligonucleotide
cagguaugccaggauacag

SEQ ID NO: 2942673 - RNA, 19 nt, Artificial Sequence
  Description of Artificial Sequence: Synthetic oligonucleotide
  modified_base (13)..(13): a, c, u, g, unknown or other
uaguaaggccugnggugga

SEQ ID NO: 2942674 - RNA, 19 nt, Artificial Sequence
  Description of Artificial Sequence: Synthetic oligonucleotide
gaucggaaggaaugagaaa

SEQ ID NO: 2942675 - RNA, 19 nt, Artificial Sequence
  Description of Artificial Sequence: Synthetic oligonucleotide
ccaacauaauuuguguaag

SEQ ID NO: 2942676 - RNA, 19 nt, Artificial Sequence
  Description of Artificial Sequence: Synthetic oligonucleotide
caacuucuaaagcauuuaa

SEQ ID NO: 2942677 - RNA, 19 nt, Artificial Sequence
  Description of Artificial Sequence: Synthetic oligonucleotide
  modified_base (16)..(16): a, c, u, g, unknown or other
cacuaguaaggccugnggu

SEQ ID NO: 2942678 - RNA, 19 nt, Artificial Sequence
  Description of Artificial Sequence: Synthetic oligonucleotide
  modified_base (19)..(19): a, c, u, g, unknown or other
aaacacuaguaaggccugn

SEQ ID NO: 2942679 - RNA, 19 nt, Artificial Sequence
  Description of Artificial Sequence: Synthetic oligonucleotide
ggaagcccagucuucauga

SEQ ID NO: 2942680 - RNA, 19 nt, Artificial Sequence
  Description of Artificial Sequence: Synthetic oligonucleotide
cuauuaaagucuccacaaa

SEQ ID NO: 2942681 - RNA, 19 nt, Artificial Sequence
  Description of Artificial Sequence: Synthetic oligonucleotide
auccucaguaauguugcca

SEQ ID NO: 2942682 - RNA, 19 nt, Artificial Sequence
  Description of Artificial Sequence: Synthetic oligonucleotide
aaaaggugugugagagaca

SEQ ID NO: 2942683 - RNA, 19 nt, Artificial Sequence
  Description of Artificial Sequence: Synthetic oligonucleotide
gaugacaaaaugauacauu

SEQ ID NO: 2942684 - RNA, 19 nt, Artificial Sequence
  Description of Artificial Sequence: Synthetic oligonucleotide
uaauuuguguaagcagguu

SEQ ID NO: 2942685 - RNA, 19 nt, Artificial Sequence
  Description of Artificial Sequence: Synthetic oligonucleotide
gagacauguugcaucuuuc

SEQ ID NO: 2942686 - RNA, 19 nt, Artificial Sequence
  Description of Artificial Sequence: Synthetic oligonucleotide
caaggcuacugccauuuga

SEQ ID NO: 2942687 - RNA, 19 nt, Artificial Sequence
  Description of Artificial Sequence: Synthetic oligonucleotide
augugaucggaaggaauga

SEQ ID NO: 2942688 - RNA, 19 nt, Artificial Sequence
  Description of Artificial Sequence: Synthetic oligonucleotide
gugugagagacauguugca

SEQ ID NO: 2942689 - RNA, 19 nt, Artificial Sequence
  Description of Artificial Sequence: Synthetic oligonucleotide
ggauacagauuacaugaaa

SEQ ID NO: 2942690 - RNA, 19 nt, Artificial Sequence
  Description of Artificial Sequence: Synthetic oligonucleotide
acuagguaacggaaucacu

SEQ ID NO: 2942691 - RNA, 19 nt, Artificial Sequence
  Description of Artificial Sequence: Synthetic oligonucleotide
agauuacaugaaacauguc

SEQ ID NO: 2942692 - RNA, 19 nt, Artificial Sequence
  Description of Artificial Sequence: Synthetic oligonucleotide
  modified_base (8)..(8): a, c, u, g, unknown or other
aggccugngguggaacuuc

SEQ ID NO: 2942693 - RNA, 19 nt, Artificial Sequence
  Description of Artificial Sequence: Synthetic oligonucleotide
ggaaugagaaacacuagua

SEQ ID NO: 2942694 - RNA, 19 nt, Artificial Sequence
  Description of Artificial Sequence: Synthetic oligonucleotide
agguaugccaggauacaga

SEQ ID NO: 2942695 - RNA, 19 nt, Artificial Sequence
  Description of Artificial Sequence: Synthetic oligonucleotide
agacgaauguauccacguu

SEQ ID NO: 2942696 - RNA, 19 nt, Artificial Sequence
  Description of Artificial Sequence: Synthetic oligonucleotide
guugacgguguacuauuaa

SEQ ID NO: 2942697 - RNA, 19 nt, Artificial Sequence
  Description of Artificial Sequence: Synthetic oligonucleotide
acauccgugaaagccgcca

SEQ ID NO: 2942698 - RNA, 19 nt, Artificial Sequence
  Description of Artificial Sequence: Synthetic oligonucleotide
aagcacuuuucaguuugaa

SEQ ID NO: 2942699 - RNA, 19 nt, Artificial Sequence
  Description of Artificial Sequence: Synthetic oligonucleotide
gugaucggaaggaaugaga

SEQ ID NO: 2942700 - RNA, 19 nt, Artificial Sequence
  Description of Artificial Sequence: Synthetic oligonucleotide
acagguaugccaggauaca

SEQ ID NO: 2942701 - RNA, 19 nt, Artificial Sequence
  Description of Artificial Sequence: Synthetic oligonucleotide
acgaauguauccacguuuu

SEQ ID NO: 2942702 - RNA, 19 nt, Artificial Sequence
  Description of Artificial Sequence: Synthetic oligonucleotide
ugaaagccgccaacauaau

SEQ ID NO: 2942703 - RNA, 19 nt, Artificial Sequence
  Description of Artificial Sequence: Synthetic oligonucleotide
agucuucaugauccucagu

SEQ ID NO: 2942704 - RNA, 19 nt, Artificial Sequence
  Description of Artificial Sequence: Synthetic oligonucleotide
accaaggcuacugccauuu

SEQ ID NO: 2942705 - RNA, 19 nt, Artificial Sequence
  Description of Artificial Sequence: Synthetic oligonucleotide
gguguacuauuaaagucuc

SEQ ID NO: 2942706 - RNA, 19 nt, Artificial Sequence
  Description of Artificial Sequence: Synthetic oligonucleotide
guaagcagguucaccacaa

SEQ ID NO: 2942707 - RNA, 19 nt, Artificial Sequence
  Description of Artificial Sequence: Synthetic oligonucleotide
gccgccaacauaauuugug

SEQ ID NO: 2942708 - RNA, 19 nt, Artificial Sequence
  Description of Artificial Sequence: Synthetic oligonucleotide
ccagucuucaugauccuca

SEQ ID NO: 2942709 - RNA, 19 nt, Artificial Sequence
  Description of Artificial Sequence: Synthetic oligonucleotide
agguucaccacaagcacuu

SEQ ID NO: 2942710 - RNA, 19 nt, Artificial Sequence
  Description of Artificial Sequence: Synthetic oligonucleotide
ggguauuagcaacacauau

SEQ ID NO: 2942711 - RNA, 19 nt, Artificial Sequence
  Description of Artificial Sequence: Synthetic oligonucleotide
gaaccaaggcuacugccau

SEQ ID NO: 2942712 - RNA, 19 nt, Artificial Sequence
  Description of Artificial Sequence: Synthetic oligonucleotide
guguacuauuaaagucucc

SEQ ID NO: 2942713 - RNA, 19 nt, Artificial Sequence
  Description of Artificial Sequence: Synthetic oligonucleotide
  modified_base (5)..(5): a, c, u, g, unknown or other
ccugngguggaacuucuuc

SEQ ID NO: 2942714 - RNA, 19 nt, Artificial Sequence
  Description of Artificial Sequence: Synthetic oligonucleotide
aaccaaggcuacugccauu

SEQ ID NO: 2942715 - RNA, 19 nt, Artificial Sequence
  Description of Artificial Sequence: Synthetic oligonucleotide
cuacugccauuugaaugag

SEQ ID NO: 2942716 - RNA, 19 nt, Artificial Sequence
  Description of Artificial Sequence: Synthetic oligonucleotide
cuucaugauccucaguaau

SEQ ID NO: 2942717 - RNA, 19 nt, Artificial Sequence
  Description of Artificial Sequence: Synthetic oligonucleotide
aggcuacugccauuugaau

SEQ ID NO: 2942718 - RNA, 19 nt, Artificial Sequence
  Description of Artificial Sequence: Synthetic oligonucleotide
caugacuagguaacggaau

SEQ ID NO: 2942719 - RNA, 19 nt, Artificial Sequence
  Description of Artificial Sequence: Synthetic oligonucleotide
  modified_base (9)..(9): a, c, u, g, unknown or other
aaggccugngguggaacuu

SEQ ID NO: 2942720 - RNA, 19 nt, Artificial Sequence
  Description of Artificial Sequence: Synthetic oligonucleotide
uuggaagcccagucuucau

SEQ ID NO: 2942721 - RNA, 19 nt, Artificial Sequence
  Description of Artificial Sequence: Synthetic oligonucleotide
uccuguugacgguguacua

SEQ ID NO: 2942722 - RNA, 19 nt, Artificial Sequence
  Description of Artificial Sequence: Synthetic oligonucleotide
ccauugaugacaaaaugau

SEQ ID NO: 2942723 - RNA, 19 nt, Artificial Sequence
  Description of Artificial Sequence: Synthetic oligonucleotide
ccucuuccccauuggaagc

SEQ ID NO: 2942724 - RNA, 19 nt, Artificial Sequence
  Description of Artificial Sequence: Synthetic oligonucleotide
gaaagccgccaacauaauu

SEQ ID NO: 2942725 - RNA, 19 nt, Artificial Sequence
  Description of Artificial Sequence: Synthetic oligonucleotide
augccaggauacagauuac

SEQ ID NO: 2942726 - RNA, 19 nt, Artificial Sequence
  Description of Artificial Sequence: Synthetic oligonucleotide
caugucuaaugugaaccaa

SEQ ID NO: 2942727 - RNA, 19 nt, Artificial Sequence
  Description of Artificial Sequence: Synthetic oligonucleotide
  modified_base (11)..(11): a, c, u, g, unknown or other
guaaggccugngguggaac

SEQ ID NO: 2942728 - RNA, 19 nt, Artificial Sequence
  Description of Artificial Sequence: Synthetic oligonucleotide
aggauacagauuacaugaa

SEQ ID NO: 2942729 - RNA, 19 nt, Artificial Sequence
  Description of Artificial Sequence: Synthetic oligonucleotide
gguaugccaggauacagau

SEQ ID NO: 2942730 - RNA, 19 nt, Artificial Sequence
  Description of Artificial Sequence: Synthetic oligonucleotide
aaggugugugagagacaug

SEQ ID NO: 2942731 - RNA, 19 nt, Artificial Sequence
  Description of Artificial Sequence: Synthetic oligonucleotide
uccccauuggaagcccagu

SEQ ID NO: 2942732 - RNA, 19 nt, Artificial Sequence
  Description of Artificial Sequence: Synthetic oligonucleotide
uauccacguuuugggugcc

SEQ ID NO: 2942733 - RNA, 19 nt, Artificial Sequence
  Description of Artificial Sequence: Synthetic oligonucleotide
  modified_base (12)..(12): a, c, u, g, unknown or other
aguaaggccugngguggaa

SEQ ID NO: 2942734 - RNA, 19 nt, Artificial Sequence
  Description of Artificial Sequence: Synthetic oligonucleotide
cacguuuugggugccagua

SEQ ID NO: 2942735 - RNA, 19 nt, Artificial Sequence
  Description of Artificial Sequence: Synthetic oligonucleotide
acauuccuguugacggugu

SEQ ID NO: 2942736 - RNA, 19 nt, Artificial Sequence
  Description of Artificial Sequence: Synthetic oligonucleotide
gacauccgugaaagccgcc

SEQ ID NO: 2942737 - RNA, 19 nt, Artificial Sequence
  Description of Artificial Sequence: Synthetic oligonucleotide
gugccaguagagaugggua

SEQ ID NO: 2942738 - RNA, 19 nt, Artificial Sequence
  Description of Artificial Sequence: Synthetic oligonucleotide
uguugccauugaugacaaa

SEQ ID NO: 2942739 - RNA, 19 nt, Artificial Sequence
  Description of Artificial Sequence: Synthetic oligonucleotide
ggaaggaaugagaaacacu

SEQ ID NO: 2942740 - RNA, 19 nt, Artificial Sequence
  Description of Artificial Sequence: Synthetic oligonucleotide
cuuccccauuggaagccca

SEQ ID NO: 2942741 - RNA, 19 nt, Artificial Sequence
  Description of Artificial Sequence: Synthetic oligonucleotide
cgguguacuauuaaagucu

SEQ ID NO: 2942742 - RNA, 19 nt, Artificial Sequence
  Description of Artificial Sequence: Synthetic oligonucleotide
aucacuuguucaacuucua

SEQ ID NO: 2942743 - RNA, 19 nt, Artificial Sequence
  Description of Artificial Sequence: Synthetic oligonucleotide
cauccgugaaagccgccaa

SEQ ID NO: 2942744 - RNA, 19 nt, Artificial Sequence
  Description of Artificial Sequence: Synthetic oligonucleotide
guucaccacaagcacuuuu

SEQ ID NO: 2942745 - RNA, 19 nt, Artificial Sequence
  Description of Artificial Sequence: Synthetic oligonucleotide
cuguugacgguguacuauu

SEQ ID NO: 2942746 - RNA, 19 nt, Artificial Sequence
  Description of Artificial Sequence: Synthetic oligonucleotide
ggugccaguagagaugggu

SEQ ID NO: 2942747 - RNA, 19 nt, Artificial Sequence
  Description of Artificial Sequence: Synthetic oligonucleotide
gaagcccagucuucaugau

SEQ ID NO: 2942748 - RNA, 19 nt, Artificial Sequence
  Description of Artificial Sequence: Synthetic oligonucleotide
ccccauuggaagcccaguc

SEQ ID NO: 2942749 - RNA, 19 nt, Artificial Sequence
  Description of Artificial Sequence: Synthetic oligonucleotide
cggaaggaaugagaaacac

SEQ ID NO: 2942750 - RNA, 19 nt, Artificial Sequence
  Description of Artificial Sequence: Synthetic oligonucleotide
agccgccaacauaauuugu

SEQ ID NO: 2942751 - RNA, 19 nt, Artificial Sequence
  Description of Artificial Sequence: Synthetic oligonucleotide
guucaacuucuaaagcauu

SEQ ID NO: 2942752 - RNA, 19 nt, Artificial Sequence
  Description of Artificial Sequence: Synthetic oligonucleotide
caguaauguugccauugau

SEQ ID NO: 2942753 - RNA, 19 nt, Artificial Sequence
  Description of Artificial Sequence: Synthetic oligonucleotide
cguuuugggugccaguaga

SEQ ID NO: 2942754 - RNA, 19 nt, Artificial Sequence
  Description of Artificial Sequence: Synthetic oligonucleotide
auguugcaucuuuccucuu

SEQ ID NO: 2942755 - RNA, 19 nt, Artificial Sequence
  Description of Artificial Sequence: Synthetic oligonucleotide
caugauccucaguaauguu

SEQ ID NO: 2942756 - RNA, 19 nt, Artificial Sequence
  Description of Artificial Sequence: Synthetic oligonucleotide
cgaauguauccacguuuug

SEQ ID NO: 2942757 - RNA, 19 nt, Artificial Sequence
  Description of Artificial Sequence: Synthetic oligonucleotide
cauuccuguugacggugua

SEQ ID NO: 2942758 - RNA, 19 nt, Artificial Sequence
  Description of Artificial Sequence: Synthetic oligonucleotide
gccauuugaaugagacgaa

SEQ ID NO: 2942759 - RNA, 19 nt, Artificial Sequence
  Description of Artificial Sequence: Synthetic oligonucleotide
gccaggauacagauuacau

SEQ ID NO: 2942760 - RNA, 19 nt, Artificial Sequence
  Description of Artificial Sequence: Synthetic oligonucleotide
auccacguuuugggugcca

SEQ ID NO: 2942761 - RNA, 19 nt, Artificial Sequence
  Description of Artificial Sequence: Synthetic oligonucleotide
gguaacggaaucacuuguu

SEQ ID NO: 2942762 - RNA, 19 nt, Artificial Sequence
  Description of Artificial Sequence: Synthetic oligonucleotide
cuaaagcauuuaagucaau

SEQ ID NO: 2942763 - RNA, 19 nt, Artificial Sequence
  Description of Artificial Sequence: Synthetic oligonucleotide
cacaagcacuuuucaguuu

SEQ ID NO: 2942764 - RNA, 19 nt, Artificial Sequence
  Description of Artificial Sequence: Synthetic oligonucleotide
ccacaagcacuuuucaguu

SEQ ID NO: 2942765 - RNA, 19 nt, Artificial Sequence
  Description of Artificial Sequence: Synthetic oligonucleotide
ccgccaacauaauuugugu

SEQ ID NO: 2942766 - RNA, 19 nt, Artificial Sequence
  Description of Artificial Sequence: Synthetic oligonucleotide
cccauuggaagcccagucu

SEQ ID NO: 2942767 - RNA, 19 nt, Artificial Sequence
  Description of Artificial Sequence: Synthetic oligonucleotide
ccaaggcuacugccauuug

SEQ ID NO: 2942768 - RNA, 19 nt, Artificial Sequence
  Description of Artificial Sequence: Synthetic oligonucleotide
cccagucuucaugauccuc

SEQ ID NO: 2942769 - RNA, 19 nt, Artificial Sequence
  Description of Artificial Sequence: Synthetic oligonucleotide
ccauuggaagcccagucuu

SEQ ID NO: 2942770 - RNA, 19 nt, Artificial Sequence
  Description of Artificial Sequence: Synthetic oligonucleotide
cgccaacauaauuugugua

SEQ ID NO: 2942771 - RNA, 19 nt, Artificial Sequence
  Description of Artificial Sequence: Synthetic oligonucleotide
guaugccaggauacagauu

SEQ ID NO: 2942772 - RNA, 19 nt, Artificial Sequence
  Description of Artificial Sequence: Synthetic oligonucleotide
ccuguugacgguguacuau

SEQ ID NO: 2942773 - RNA, 19 nt, Artificial Sequence
  Description of Artificial Sequence: Synthetic oligonucleotide
ccauuugaaugagacgaau

SEQ ID NO: 2942774 - RNA, 19 nt, Artificial Sequence
  Description of Artificial Sequence: Synthetic oligonucleotide
gagagacauguugcaucuu

SEQ ID NO: 2942775 - RNA, 19 nt, Artificial Sequence
  Description of Artificial Sequence: Synthetic oligonucleotide
  modified_base (7)..(7): a, c, u, g, unknown or other
ggccugngguggaacuucu

SEQ ID NO: 2942776 - RNA, 19 nt, Artificial Sequence
  Description of Artificial Sequence: Synthetic oligonucleotide
gggugccaguagagauggg

SEQ ID NO: 2942777 - RNA, 19 nt, Artificial Sequence
  Description of Artificial Sequence: Synthetic oligonucleotide
ggugugugagagacauguu

SEQ ID NO: 2942778 - RNA, 19 nt, Artificial Sequence
  Description of Artificial Sequence: Synthetic oligonucleotide
ccacguuuugggugccagu

SEQ ID NO: 2942779 - RNA, 19 nt, Artificial Sequence
  Description of Artificial Sequence: Synthetic oligonucleotide
gguucaccacaagcacuuu

SEQ ID NO: 2942780 - RNA, 19 nt, Artificial Sequence
  Description of Artificial Sequence: Synthetic oligonucleotide
  modified_base (6)..(6): a, c, u, g, unknown or other
gccugngguggaacuucuu

SEQ ID NO: 2942781 - RNA, 19 nt, Artificial Sequence
  Description of Artificial Sequence: Synthetic oligonucleotide
  modified_base (1)..(1): a, c, u, g, unknown or other
ngguggaacuucuucauga

SEQ ID NO: 2942782 - RNA, 19 nt, Artificial Sequence
  Description of Artificial Sequence: Synthetic oligonucleotide
uucucagcagaaaugaugg

SEQ ID NO: 2942783 - RNA, 19 nt, Artificial Sequence
  Description of Artificial Sequence: Synthetic oligonucleotide
gugagauccacauugaggg

SEQ ID NO: 2942784 - RNA, 19 nt, Artificial Sequence
  Description of Artificial Sequence: Synthetic oligonucleotide
uugagguugguauaggugg

SEQ ID NO: 2942785 - RNA, 19 nt, Artificial Sequence
  Description of Artificial Sequence: Synthetic oligonucleotide
ugaaagcacagucugagug

SEQ ID NO: 2942786 - RNA, 19 nt, Artificial Sequence
  Description of Artificial Sequence: Synthetic oligonucleotide
uuucucagcagaaaugaug

SEQ ID NO: 2942787 - RNA, 19 nt, Artificial Sequence
  Description of Artificial Sequence: Synthetic oligonucleotide
uucaccaucuggcuguugg

SEQ ID NO: 2942788 - RNA, 19 nt, Artificial Sequence
  Description of Artificial Sequence: Synthetic oligonucleotide
aauucugggauaggguacc

SEQ ID NO: 2942789 - RNA, 19 nt, Artificial Sequence
  Description of Artificial Sequence: Synthetic oligonucleotide
ugauugaggacacaaucug

SEQ ID NO: 2942790 - RNA, 19 nt, Artificial Sequence
  Description of Artificial Sequence: Synthetic oligonucleotide
uaccacgucaccucgauag

SEQ ID NO: 2942791 - RNA, 19 nt, Artificial Sequence
  Description of Artificial Sequence: Synthetic oligonucleotide
uguucuagcgucgugugcg

SEQ ID NO: 2942792 - RNA, 19 nt, Artificial Sequence
  Description of Artificial Sequence: Synthetic oligonucleotide
ucaaaacaggaacugguga

SEQ ID NO: 2942793 - RNA, 19 nt, Artificial Sequence
  Description of Artificial Sequence: Synthetic oligonucleotide
augucuagguuccugcggc

SEQ ID NO: 2942794 - RNA, 19 nt, Artificial Sequence
  Description of Artificial Sequence: Synthetic oligonucleotide
ucugggauaggguaccagg

SEQ ID NO: 2942795 - RNA, 19 nt, Artificial Sequence
  Description of Artificial Sequence: Synthetic oligonucleotide
auugaggacacaaucuggc

SEQ ID NO: 2942796 - RNA, 19 nt, Artificial Sequence
  Description of Artificial Sequence: Synthetic oligonucleotide
uccaucaaagcggagagag

SEQ ID NO: 2942797 - RNA, 19 nt, Artificial Sequence
  Description of Artificial Sequence: Synthetic oligonucleotide
ugagggcuccaucaaagcg

SEQ ID NO: 2942798 - RNA, 19 nt, Artificial Sequence
  Description of Artificial Sequence: Synthetic oligonucleotide
agugaauucugggauaggg

SEQ ID NO: 2942799 - RNA, 19 nt, Artificial Sequence
  Description of Artificial Sequence: Synthetic oligonucleotide
aacuggugaucucugccac

SEQ ID NO: 2942800 - RNA, 19 nt, Artificial Sequence
  Description of Artificial Sequence: Synthetic oligonucleotide
ugcguaagugaccaacggg

SEQ ID NO: 2942801 - RNA, 19 nt, Artificial Sequence
  Description of Artificial Sequence: Synthetic oligonucleotide
uugggcucaaaacaggaac

SEQ ID NO: 2942802 - RNA, 19 nt, Artificial Sequence
  Description of Artificial Sequence: Synthetic oligonucleotide
ugaggacacaaucuggcug

SEQ ID NO: 2942803 - RNA, 19 nt, Artificial Sequence
  Description of Artificial Sequence: Synthetic oligonucleotide
cucggugagauccacauug

SEQ ID NO: 2942804 - RNA, 19 nt, Artificial Sequence
  Description of Artificial Sequence: Synthetic oligonucleotide
uugguuuggaacucgguga

SEQ ID NO: 2942805 - RNA, 19 nt, Artificial Sequence
  Description of Artificial Sequence: Synthetic oligonucleotide
caucaaagcggagagaggc

SEQ ID NO: 2942806 - RNA, 19 nt, Artificial Sequence
  Description of Artificial Sequence: Synthetic oligonucleotide
aaugaugggugcguaagug

SEQ ID NO: 2942807 - RNA, 19 nt, Artificial Sequence
  Description of Artificial Sequence: Synthetic oligonucleotide
ugaauucugggauagggua

SEQ ID NO: 2942808 - RNA, 19 nt, Artificial Sequence
  Description of Artificial Sequence: Synthetic oligonucleotide
acgugggucacacuucacc

SEQ ID NO: 2942809 - RNA, 19 nt, Artificial Sequence
  Description of Artificial Sequence: Synthetic oligonucleotide
gaugucuagguuccugcgg

SEQ ID NO: 2942810 - RNA, 19 nt, Artificial Sequence
  Description of Artificial Sequence: Synthetic oligonucleotide
gaaaugaugggugcguaag

SEQ ID NO: 2942811 - RNA, 19 nt, Artificial Sequence
  Description of Artificial Sequence: Synthetic oligonucleotide
acagucugaguguucuagc

SEQ ID NO: 2942812 - RNA, 19 nt, Artificial Sequence
  Description of Artificial Sequence: Synthetic oligonucleotide
guugguuuggaacucggug

SEQ ID NO: 2942813 - RNA, 19 nt, Artificial Sequence
  Description of Artificial Sequence: Synthetic oligonucleotide
gauugaggacacaaucugg

SEQ ID NO: 2942814 - RNA, 19 nt, Artificial Sequence
  Description of Artificial Sequence: Synthetic oligonucleotide
gaagugaauucugggauag

SEQ ID NO: 2942815 - RNA, 19 nt, Artificial Sequence
  Description of Artificial Sequence: Synthetic oligonucleotide
uaagugaccaacgggaagu

SEQ ID NO: 2942816 - RNA, 19 nt, Artificial Sequence
  Description of Artificial Sequence: Synthetic oligonucleotide
caugaaagcacagucugag

SEQ ID NO: 2942817 - RNA, 19 nt, Artificial Sequence
  Description of Artificial Sequence: Synthetic oligonucleotide
ucugaguguucuagcgucg

SEQ ID NO: 2942818 - RNA, 19 nt, Artificial Sequence
  Description of Artificial Sequence: Synthetic oligonucleotide
ugguuuggaacucggugag

SEQ ID NO: 2942819 - RNA, 19 nt, Artificial Sequence
  Description of Artificial Sequence: Synthetic oligonucleotide
uguugggcucaaaacagga

SEQ ID NO: 2942820 - RNA, 19 nt, Artificial Sequence
  Description of Artificial Sequence: Synthetic oligonucleotide
cacagauagcugcucaugg

SEQ ID NO: 2942821 - RNA, 19 nt, Artificial Sequence
  Description of Artificial Sequence: Synthetic oligonucleotide
ucuagcgucgugugcgugg

SEQ ID NO: 2942822 - RNA, 19 nt, Artificial Sequence
  Description of Artificial Sequence: Synthetic oligonucleotide
gagggcuccaucaaagcgg

SEQ ID NO: 2942823 - RNA, 19 nt, Artificial Sequence
  Description of Artificial Sequence: Synthetic oligonucleotide
ugaugggugcguaagugac

SEQ ID NO: 2942824 - RNA, 19 nt, Artificial Sequence
  Description of Artificial Sequence: Synthetic oligonucleotide
uagagcaugcagcaagcca

SEQ ID NO: 2942825 - RNA, 19 nt, Artificial Sequence
  Description of Artificial Sequence: Synthetic oligonucleotide
accucgauagagcaugcag

SEQ ID NO: 2942826 - RNA, 19 nt, Artificial Sequence
  Description of Artificial Sequence: Synthetic oligonucleotide
accaacgggaagugaauuc

SEQ ID NO: 2942827 - RNA, 19 nt, Artificial Sequence
  Description of Artificial Sequence: Synthetic oligonucleotide
cucaaaacaggaacuggug

SEQ ID NO: 2942828 - RNA, 19 nt, Artificial Sequence
  Description of Artificial Sequence: Synthetic oligonucleotide
aacgggaagugaauucugg

SEQ ID NO: 2942829 - RNA, 19 nt, Artificial Sequence
  Description of Artificial Sequence: Synthetic oligonucleotide
cagucugaguguucuagcg

SEQ ID NO: 2942830 - RNA, 19 nt, Artificial Sequence
  Description of Artificial Sequence: Synthetic oligonucleotide
aaacaggaacuggugaucu

SEQ ID NO: 2942831 - RNA, 19 nt, Artificial Sequence
  Description of Artificial Sequence: Synthetic oligonucleotide
ucaaagcggagagaggcag

SEQ ID NO: 2942832 - RNA, 19 nt, Artificial Sequence
  Description of Artificial Sequence: Synthetic oligonucleotide
ugggcucaaaacaggaacu

SEQ ID NO: 2942833 - RNA, 19 nt, Artificial Sequence
  Description of Artificial Sequence: Synthetic oligonucleotide
ucgaugucuagguuccugc

SEQ ID NO: 2942834 - RNA, 19 nt, Artificial Sequence
  Description of Artificial Sequence: Synthetic oligonucleotide
ugcguggucaggauggagu

SEQ ID NO: 2942835 - RNA, 19 nt, Artificial Sequence
  Description of Artificial Sequence: Synthetic oligonucleotide
aacaggaacuggugaucuc

SEQ ID NO: 2942836 - RNA, 19 nt, Artificial Sequence
  Description of Artificial Sequence: Synthetic oligonucleotide
acgggaagugaauucuggg

SEQ ID NO: 2942837 - RNA, 19 nt, Artificial Sequence
  Description of Artificial Sequence: Synthetic oligonucleotide
gaggacacaaucuggcuga

SEQ ID NO: 2942838 - RNA, 19 nt, Artificial Sequence
  Description of Artificial Sequence: Synthetic oligonucleotide
acauugacauccuugggua

SEQ ID NO: 2942839 - RNA, 19 nt, Artificial Sequence
  Description of Artificial Sequence: Synthetic oligonucleotide
aggaacuggugaucucugc

SEQ ID NO: 2942840 - RNA, 19 nt, Artificial Sequence
  Description of Artificial Sequence: Synthetic oligonucleotide
gagagaggcagugauugag

SEQ ID NO: 2942841 - RNA, 19 nt, Artificial Sequence
  Description of Artificial Sequence: Synthetic oligonucleotide
auagcugcucaugguaggc

SEQ ID NO: 2942842 - RNA, 19 nt, Artificial Sequence
  Description of Artificial Sequence: Synthetic oligonucleotide
gauggcuucguuguccacc

SEQ ID NO: 2942843 - RNA, 19 nt, Artificial Sequence
  Description of Artificial Sequence: Synthetic oligonucleotide
gacauugacauccuugggu

SEQ ID NO: 2942844 - RNA, 19 nt, Artificial Sequence
  Description of Artificial Sequence: Synthetic oligonucleotide
guaagugaccaacgggaag

SEQ ID NO: 2942845 - RNA, 19 nt, Artificial Sequence
  Description of Artificial Sequence: Synthetic oligonucleotide
ggugagauccacauugagg

SEQ ID NO: 2942846 - RNA, 19 nt, Artificial Sequence
  Description of Artificial Sequence: Synthetic oligonucleotide
gauagagcaugcagcaagc

SEQ ID NO: 2942847 - RNA, 19 nt, Artificial Sequence
  Description of Artificial Sequence: Synthetic oligonucleotide
uggguaccacgucaccucg

SEQ ID NO: 2942848 - RNA, 19 nt, Artificial Sequence
  Description of Artificial Sequence: Synthetic oligonucleotide
ucugccacagauagcugcu

SEQ ID NO: 2942849 - RNA, 19 nt, Artificial Sequence
  Description of Artificial Sequence: Synthetic oligonucleotide
auguauuugccaugacgug

SEQ ID NO: 2942850 - RNA, 19 nt, Artificial Sequence
  Description of Artificial Sequence: Synthetic oligonucleotide
auagagcaugcagcaagcc

SEQ ID NO: 2942851 - RNA, 19 nt, Artificial Sequence
  Description of Artificial Sequence: Synthetic oligonucleotide
guugguauagguggggcgc

SEQ ID NO: 2942852 - RNA, 19 nt, Artificial Sequence
  Description of Artificial Sequence: Synthetic oligonucleotide
ucucagcagaaaugauggg

SEQ ID NO: 2942853 - RNA, 19 nt, Artificial Sequence
  Description of Artificial Sequence: Synthetic oligonucleotide
aguguucuagcgucgugug

SEQ ID NO: 2942854 - RNA, 19 nt, Artificial Sequence
  Description of Artificial Sequence: Synthetic oligonucleotide
ugacgugggucacacuuca

SEQ ID NO: 2942855 - RNA, 19 nt, Artificial Sequence
  Description of Artificial Sequence: Synthetic oligonucleotide
gaacuggugaucucugcca

SEQ ID NO: 2942856 - RNA, 19 nt, Artificial Sequence
  Description of Artificial Sequence: Synthetic oligonucleotide
gucaccucgauagagcaug

SEQ ID NO: 2942857 - RNA, 19 nt, Artificial Sequence
  Description of Artificial Sequence: Synthetic oligonucleotide
ucaccaucuggcuguuggg

SEQ ID NO: 2942858 - RNA, 19 nt, Artificial Sequence
  Description of Artificial Sequence: Synthetic oligonucleotide
cucgauagagcaugcagca

SEQ ID NO: 2942859 - RNA, 19 nt, Artificial Sequence
  Description of Artificial Sequence: Synthetic oligonucleotide
gaauucugggauaggguac

SEQ ID NO: 2942860 - RNA, 19 nt, Artificial Sequence
  Description of Artificial Sequence: Synthetic oligonucleotide
cuguugggcucaaaacagg

SEQ ID NO: 2942861 - RNA, 19 nt, Artificial Sequence
  Description of Artificial Sequence: Synthetic oligonucleotide
acagauagcugcucauggu

SEQ ID NO: 2942862 - RNA, 19 nt, Artificial Sequence
  Description of Artificial Sequence: Synthetic oligonucleotide
augaugggugcguaaguga

SEQ ID NO: 2942863 - RNA, 19 nt, Artificial Sequence
  Description of Artificial Sequence: Synthetic oligonucleotide
gucugaguguucuagcguc

SEQ ID NO: 2942864 - RNA, 19 nt, Artificial Sequence
  Description of Artificial Sequence: Synthetic oligonucleotide
gugugcguggucaggaugg

SEQ ID NO: 2942865 - RNA, 19 nt, Artificial Sequence
  Description of Artificial Sequence: Synthetic oligonucleotide
uugagggcuccaucaaagc

SEQ ID NO: 2942866 - RNA, 19 nt, Artificial Sequence
  Description of Artificial Sequence: Synthetic oligonucleotide
gugcguaagugaccaacgg

SEQ ID NO: 2942867 - RNA, 19 nt, Artificial Sequence
  Description of Artificial Sequence: Synthetic oligonucleotide
agauagcugcucaugguag

SEQ ID NO: 2942868 - RNA, 19 nt, Artificial Sequence
  Description of Artificial Sequence: Synthetic oligonucleotide
agucugaguguucuagcgu

SEQ ID NO: 2942869 - RNA, 19 nt, Artificial Sequence
  Description of Artificial Sequence: Synthetic oligonucleotide
uagauggcuucguugucca

SEQ ID NO: 2942870 - RNA, 19 nt, Artificial Sequence
  Description of Artificial Sequence: Synthetic oligonucleotide
ugagauccacauugagggc

SEQ ID NO: 2942871 - RNA, 19 nt, Artificial Sequence
  Description of Artificial Sequence: Synthetic oligonucleotide
cacgucaccucgauagagc

SEQ ID NO: 2942872 - RNA, 19 nt, Artificial Sequence
  Description of Artificial Sequence: Synthetic oligonucleotide
agagaggcagugauugagg

SEQ ID NO: 2942873 - RNA, 19 nt, Artificial Sequence
  Description of Artificial Sequence: Synthetic oligonucleotide
ucuagguuccugcggcaga

SEQ ID NO: 2942874 - RNA, 19 nt, Artificial Sequence
  Description of Artificial Sequence: Synthetic oligonucleotide
agagcaugcagcaagccau

SEQ ID NO: 2942875 - RNA, 19 nt, Artificial Sequence
  Description of Artificial Sequence: Synthetic oligonucleotide
ugccacagauagcugcuca

SEQ ID NO: 2942876 - RNA, 19 nt, Artificial Sequence
  Description of Artificial Sequence: Synthetic oligonucleotide
acaggaacuggugaucucu

SEQ ID NO: 2942877 - RNA, 19 nt, Artificial Sequence
  Description of Artificial Sequence: Synthetic oligonucleotide
uuggguaccacgucaccuc

SEQ ID NO: 2942878 - RNA, 19 nt, Artificial Sequence
  Description of Artificial Sequence: Synthetic oligonucleotide
cacagucugaguguucuag

SEQ ID NO: 2942879 - RNA, 19 nt, Artificial Sequence
  Description of Artificial Sequence: Synthetic oligonucleotide
gaaagcacagucugagugu

SEQ ID NO: 2942880 - RNA, 19 nt, Artificial Sequence
  Description of Artificial Sequence: Synthetic oligonucleotide
gagaggcagugauugagga

SEQ ID NO: 2942881 - RNA, 19 nt, Artificial Sequence
  Description of Artificial Sequence: Synthetic oligonucleotide
ggaacuggugaucucugcc

SEQ ID NO: 2942882 - RNA, 19 nt, Artificial Sequence
  Description of Artificial Sequence: Synthetic oligonucleotide
agaaaugaugggugcguaa

SEQ ID NO: 2942883 - RNA, 19 nt, Artificial Sequence
  Description of Artificial Sequence: Synthetic oligonucleotide
gguugguauagguggggcg

SEQ ID NO: 2942884 - RNA, 19 nt, Artificial Sequence
  Description of Artificial Sequence: Synthetic oligonucleotide
aagugaauucugggauagg

SEQ ID NO: 2942885 - RNA, 19 nt, Artificial Sequence
  Description of Artificial Sequence: Synthetic oligonucleotide
uggcuguugggcucaaaac

SEQ ID NO: 2942886 - RNA, 19 nt, Artificial Sequence
  Description of Artificial Sequence: Synthetic oligonucleotide
acgucaccucgauagagca

SEQ ID NO: 2942887 - RNA, 19 nt, Artificial Sequence
  Description of Artificial Sequence: Synthetic oligonucleotide
auccuuggguaccacguca

SEQ ID NO: 2942888 - RNA, 19 nt, Artificial Sequence
  Description of Artificial Sequence: Synthetic oligonucleotide
aaagcacagucugaguguu

SEQ ID NO: 2942889 - RNA, 19 nt, Artificial Sequence
  Description of Artificial Sequence: Synthetic oligonucleotide
ugaguguucuagcgucgug

SEQ ID NO: 2942890 - RNA, 19 nt, Artificial Sequence
  Description of Artificial Sequence: Synthetic oligonucleotide
gggauaggguaccagguug

SEQ ID NO: 2942891 - RNA, 19 nt, Artificial Sequence
  Description of Artificial Sequence: Synthetic oligonucleotide
ccucgauagagcaugcagc

SEQ ID NO: 2942892 - RNA, 19 nt, Artificial Sequence
  Description of Artificial Sequence: Synthetic oligonucleotide
auggcuucguuguccacca

SEQ ID NO: 2942893 - RNA, 19 nt, Artificial Sequence
  Description of Artificial Sequence: Synthetic oligonucleotide
accaucuggcuguugggcu

SEQ ID NO: 2942894 - RNA, 19 nt, Artificial Sequence
  Description of Artificial Sequence: Synthetic oligonucleotide
gcuccaucaaagcggagag

SEQ ID NO: 2942895 - RNA, 19 nt, Artificial Sequence
  Description of Artificial Sequence: Synthetic oligonucleotide
uccuuggguaccacgucac

SEQ ID NO: 2942896 - RNA, 19 nt, Artificial Sequence
  Description of Artificial Sequence: Synthetic oligonucleotide
ucggugagauccacauuga

SEQ ID NO: 2942897 - RNA, 19 nt, Artificial Sequence
  Description of Artificial Sequence: Synthetic oligonucleotide
ugaccaacgggaagugaau

SEQ ID NO: 2942898 - RNA, 19 nt, Artificial Sequence
  Description of Artificial Sequence: Synthetic oligonucleotide
augaaagcacagucugagu

SEQ ID NO: 2942899 - RNA, 19 nt, Artificial Sequence
  Description of Artificial Sequence: Synthetic oligonucleotide
augggugcguaagugacca

SEQ ID NO: 2942900 - RNA, 19 nt, Artificial Sequence
  Description of Artificial Sequence: Synthetic oligonucleotide
gcuguugggcucaaaacag

SEQ ID NO: 2942901 - RNA, 19 nt, Artificial Sequence
  Description of Artificial Sequence: Synthetic oligonucleotide
acauccuuggguaccacgu

SEQ ID NO: 2942902 - RNA, 19 nt, Artificial Sequence
  Description of Artificial Sequence: Synthetic oligonucleotide
gaugggugcguaagugacc

SEQ ID NO: 2942903 - RNA, 19 nt, Artificial Sequence
  Description of Artificial Sequence: Synthetic oligonucleotide
uggaacucggugagaucca

SEQ ID NO: 2942904 - RNA, 19 nt, Artificial Sequence
  Description of Artificial Sequence: Synthetic oligonucleotide
ugggauaggguaccagguu

SEQ ID NO: 2942905 - RNA, 19 nt, Artificial Sequence
  Description of Artificial Sequence: Synthetic oligonucleotide
ggugcguaagugaccaacg

SEQ ID NO: 2942906 - RNA, 19 nt, Artificial Sequence
  Description of Artificial Sequence: Synthetic oligonucleotide
uugacauccuuggguacca

SEQ ID NO: 2942907 - RNA, 19 nt, Artificial Sequence
  Description of Artificial Sequence: Synthetic oligonucleotide
aagugaccaacgggaagug

SEQ ID NO: 2942908 - RNA, 19 nt, Artificial Sequence
  Description of Artificial Sequence: Synthetic oligonucleotide
uuuggaacucggugagauc

SEQ ID NO: 2942909 - RNA, 19 nt, Artificial Sequence
  Description of Artificial Sequence: Synthetic oligonucleotide
caacgggaagugaauucug

SEQ ID NO: 2942910 - RNA, 19 nt, Artificial Sequence
  Description of Artificial Sequence: Synthetic oligonucleotide
ucaccucgauagagcaugc

SEQ ID NO: 2942911 - RNA, 19 nt, Artificial Sequence
  Description of Artificial Sequence: Synthetic oligonucleotide
ggauaggguaccagguugg

SEQ ID NO: 2942912 - RNA, 19 nt, Artificial Sequence
  Description of Artificial Sequence: Synthetic oligonucleotide
agauccacauugagggcuc

SEQ ID NO: 2942913 - RNA, 19 nt, Artificial Sequence
  Description of Artificial Sequence: Synthetic oligonucleotide
guuccugcggcagauguca

SEQ ID NO: 2942914 - RNA, 19 nt, Artificial Sequence
  Description of Artificial Sequence: Synthetic oligonucleotide
ggcucaaaacaggaacugg

SEQ ID NO: 2942915 - RNA, 19 nt, Artificial Sequence
  Description of Artificial Sequence: Synthetic oligonucleotide
gagauccacauugagggcu

SEQ ID NO: 2942916 - RNA, 19 nt, Artificial Sequence
  Description of Artificial Sequence: Synthetic oligonucleotide
uucugggauaggguaccag

SEQ ID NO: 2942917 - RNA, 19 nt, Artificial Sequence
  Description of Artificial Sequence: Synthetic oligonucleotide
ugucuagguuccugcggca

SEQ ID NO: 2942918 - RNA, 19 nt, Artificial Sequence
  Description of Artificial Sequence: Synthetic oligonucleotide
augacgugggucacacuuc

SEQ ID NO: 2942919 - RNA, 19 nt, Artificial Sequence
  Description of Artificial Sequence: Synthetic oligonucleotide
agauggcuucguuguccac

SEQ ID NO: 2942920 - RNA, 19 nt, Artificial Sequence
  Description of Artificial Sequence: Synthetic oligonucleotide
gugauugaggacacaaucu

SEQ ID NO: 2942921 - RNA, 19 nt, Artificial Sequence
  Description of Artificial Sequence: Synthetic oligonucleotide
caccaucuggcuguugggc

SEQ ID NO: 2942922 - RNA, 19 nt, Artificial Sequence
  Description of Artificial Sequence: Synthetic oligonucleotide
gugaccaacgggaagugaa

SEQ ID NO: 2942923 - RNA, 19 nt, Artificial Sequence
  Description of Artificial Sequence: Synthetic oligonucleotide
acuggugaucucugccaca

SEQ ID NO: 2942924 - RNA, 19 nt, Artificial Sequence
  Description of Artificial Sequence: Synthetic oligonucleotide
guguucuagcgucgugugc

SEQ ID NO: 2942925 - RNA, 19 nt, Artificial Sequence
  Description of Artificial Sequence: Synthetic oligonucleotide
cagauagcugcucauggua

SEQ ID NO: 2942926 - RNA, 19 nt, Artificial Sequence
  Description of Artificial Sequence: Synthetic oligonucleotide
gcguaagugaccaacggga

SEQ ID NO: 2942927 - RNA, 19 nt, Artificial Sequence
  Description of Artificial Sequence: Synthetic oligonucleotide
agcgucgugugcgugguca

SEQ ID NO: 2942928 - RNA, 19 nt, Artificial Sequence
  Description of Artificial Sequence: Synthetic oligonucleotide
agguugguuuggaacucgg

SEQ ID NO: 2942929 - RNA, 19 nt, Artificial Sequence
  Description of Artificial Sequence: Synthetic oligonucleotide
cucgaugucuagguuccug

SEQ ID NO: 2942930 - RNA, 19 nt, Artificial Sequence
  Description of Artificial Sequence: Synthetic oligonucleotide
aagcacagucugaguguuc

SEQ ID NO: 2942931 - RNA, 19 nt, Artificial Sequence
  Description of Artificial Sequence: Synthetic oligonucleotide
caugacgugggucacacuu

SEQ ID NO: 2942932 - RNA, 19 nt, Artificial Sequence
  Description of Artificial Sequence: Synthetic oligonucleotide
uugguauagguggggcgcu

SEQ ID NO: 2942933 - RNA, 19 nt, Artificial Sequence
  Description of Artificial Sequence: Synthetic oligonucleotide
gaguguucuagcgucgugu

SEQ ID NO: 2942934 - RNA, 19 nt, Artificial Sequence
  Description of Artificial Sequence: Synthetic oligonucleotide
cucagcagaaaugaugggu

SEQ ID NO: 2942935 - RNA, 19 nt, Artificial Sequence
  Description of Artificial Sequence: Synthetic oligonucleotide
cuggcuguugggcucaaaa

SEQ ID NO: 2942936 - RNA, 19 nt, Artificial Sequence
  Description of Artificial Sequence: Synthetic oligonucleotide
gucuagguuccugcggcag

SEQ ID NO: 2942937 - RNA, 19 nt, Artificial Sequence
  Description of Artificial Sequence: Synthetic oligonucleotide
accacgucaccucgauaga

SEQ ID NO: 2942938 - RNA, 19 nt, Artificial Sequence
  Description of Artificial Sequence: Synthetic oligonucleotide
gguauagguggggcgcucg

SEQ ID NO: 2942939 - RNA, 19 nt, Artificial Sequence
  Description of Artificial Sequence: Synthetic oligonucleotide
guuuggaacucggugagau

SEQ ID NO: 2942940 - RNA, 19 nt, Artificial Sequence
  Description of Artificial Sequence: Synthetic oligonucleotide
gggaagugaauucugggau

SEQ ID NO: 2942941 - RNA, 19 nt, Artificial Sequence
  Description of Artificial Sequence: Synthetic oligonucleotide
ucgauagagcaugcagcaa

SEQ ID NO: 2942942 - RNA, 19 nt, Artificial Sequence
  Description of Artificial Sequence: Synthetic oligonucleotide
ccaucaaagcggagagagg

SEQ ID NO: 2942943 - RNA, 19 nt, Artificial Sequence
  Description of Artificial Sequence: Synthetic oligonucleotide
ggaagugaauucugggaua

SEQ ID NO: 2942944 - RNA, 19 nt, Artificial Sequence
  Description of Artificial Sequence: Synthetic oligonucleotide
uauagguggggcgcucgau

SEQ ID NO: 2942945 - RNA, 19 nt, Artificial Sequence
  Description of Artificial Sequence: Synthetic oligonucleotide
ggcuccaucaaagcggaga

SEQ ID NO: 2942946 - RNA, 19 nt, Artificial Sequence
  Description of Artificial Sequence: Synthetic oligonucleotide
agugaccaacgggaaguga

SEQ ID NO: 2942947 - RNA, 19 nt, Artificial Sequence
  Description of Artificial Sequence: Synthetic oligonucleotide
gggcucaaaacaggaacug

SEQ ID NO: 2942948 - RNA, 19 nt, Artificial Sequence
  Description of Artificial Sequence: Synthetic oligonucleotide
gauccacauugagggcucc

SEQ ID NO: 2942949 - RNA, 19 nt, Artificial Sequence
  Description of Artificial Sequence: Synthetic oligonucleotide
aagcggagagaggcaguga

SEQ ID NO: 2942950 - RNA, 19 nt, Artificial Sequence
  Description of Artificial Sequence: Synthetic oligonucleotide
gugaauucugggauagggu

SEQ ID NO: 2942951 - RNA, 19 nt, Artificial Sequence
  Description of Artificial Sequence: Synthetic oligonucleotide
uucuagcgucgugugcgug

SEQ ID NO: 2942952 - RNA, 19 nt, Artificial Sequence
  Description of Artificial Sequence: Synthetic oligonucleotide
cgcucgaugucuagguucc

SEQ ID NO: 2942953 - RNA, 19 nt, Artificial Sequence
  Description of Artificial Sequence: Synthetic oligonucleotide
guauagguggggcgcucga

SEQ ID NO: 2942954 - RNA, 19 nt, Artificial Sequence
  Description of Artificial Sequence: Synthetic oligonucleotide
ugugcguggucaggaugga

SEQ ID NO: 2942955 - RNA, 19 nt, Artificial Sequence
  Description of Artificial Sequence: Synthetic oligonucleotide
gggugcguaagugaccaac

SEQ ID NO: 2942956 - RNA, 19 nt, Artificial Sequence
  Description of Artificial Sequence: Synthetic oligonucleotide
guugggcucaaaacaggaa

SEQ ID NO: 2942957 - RNA, 19 nt, Artificial Sequence
  Description of Artificial Sequence: Synthetic oligonucleotide
gucgugugcguggucagga

SEQ ID NO: 2942958 - RNA, 19 nt, Artificial Sequence
  Description of Artificial Sequence: Synthetic oligonucleotide
gcgcucgaugucuagguuc

SEQ ID NO: 2942959 - RNA, 19 nt, Artificial Sequence
  Description of Artificial Sequence: Synthetic oligonucleotide
gaacucggugagauccaca

SEQ ID NO: 2942960 - RNA, 19 nt, Artificial Sequence
  Description of Artificial Sequence: Synthetic oligonucleotide
cgaugucuagguuccugcg

SEQ ID NO: 2942961 - RNA, 19 nt, Artificial Sequence
  Description of Artificial Sequence: Synthetic oligonucleotide
cggagagaggcagugauug

SEQ ID NO: 2942962 - RNA, 19 nt, Artificial Sequence
  Description of Artificial Sequence: Synthetic oligonucleotide
uccugcggcagaugucaua

SEQ ID NO: 2942963 - RNA, 19 nt, Artificial Sequence
  Description of Artificial Sequence: Synthetic oligonucleotide
gcucaaaacaggaacuggu

SEQ ID NO: 2942964 - RNA, 19 nt, Artificial Sequence
  Description of Artificial Sequence: Synthetic oligonucleotide
ucgugugcguggucaggau

SEQ ID NO: 2942965 - RNA, 19 nt, Artificial Sequence
  Description of Artificial Sequence: Synthetic oligonucleotide
agcaugcagcaagccaugu

SEQ ID NO: 2942966 - RNA, 19 nt, Artificial Sequence
  Description of Artificial Sequence: Synthetic oligonucleotide
acucggugagauccacauu

SEQ ID NO: 2942967 - RNA, 19 nt, Artificial Sequence
  Description of Artificial Sequence: Synthetic oligonucleotide
auucugggauaggguacca

SEQ ID NO: 2942968 - RNA, 19 nt, Artificial Sequence
  Description of Artificial Sequence: Synthetic oligonucleotide
ugccaugacgugggucaca

SEQ ID NO: 2942969 - RNA, 19 nt, Artificial Sequence
  Description of Artificial Sequence: Synthetic oligonucleotide
uugccaugacgugggucac

SEQ ID NO: 2942970 - RNA, 19 nt, Artificial Sequence
  Description of Artificial Sequence: Synthetic oligonucleotide
gauaggguaccagguuggu

SEQ ID NO: 2942971 - RNA, 19 nt, Artificial Sequence
  Description of Artificial Sequence: Synthetic oligonucleotide
ggagagaggcagugauuga

SEQ ID NO: 2942972 - RNA, 19 nt, Artificial Sequence
  Description of Artificial Sequence: Synthetic oligonucleotide
uuccugcggcagaugucau

SEQ ID NO: 2942973 - RNA, 19 nt, Artificial Sequence
  Description of Artificial Sequence: Synthetic oligonucleotide
ugacauccuuggguaccac

SEQ ID NO: 2942974 - RNA, 19 nt, Artificial Sequence
  Description of Artificial Sequence: Synthetic oligonucleotide
cgacauugacauccuuggg

SEQ ID NO: 2942975 - RNA, 19 nt, Artificial Sequence
  Description of Artificial Sequence: Synthetic oligonucleotide
ccaucuggcuguugggcuc

SEQ ID NO: 2942976 - RNA, 19 nt, Artificial Sequence
  Description of Artificial Sequence: Synthetic oligonucleotide
ugguauagguggggcgcuc

SEQ ID NO: 2942977 - RNA, 19 nt, Artificial Sequence
  Description of Artificial Sequence: Synthetic oligonucleotide
gccaugacgugggucacac

SEQ ID NO: 2942978 - RNA, 19 nt, Artificial Sequence
  Description of Artificial Sequence: Synthetic oligonucleotide
gugcguggucaggauggag

SEQ ID NO: 2942979 - RNA, 19 nt, Artificial Sequence
  Description of Artificial Sequence: Synthetic oligonucleotide
gugaucucugccacagaua

SEQ ID NO: 2942980 - RNA, 19 nt, Artificial Sequence
  Description of Artificial Sequence: Synthetic oligonucleotide
cgugggucacacuucacca

SEQ ID NO: 2942981 - RNA, 19 nt, Artificial Sequence
  Description of Artificial Sequence: Synthetic oligonucleotide
ccacgucaccucgauagag

SEQ ID NO: 2942982 - RNA, 19 nt, Artificial Sequence
  Description of Artificial Sequence: Synthetic oligonucleotide
ccacagauagcugcucaug

SEQ ID NO: 2942983 - RNA, 19 nt, Artificial Sequence
  Description of Artificial Sequence: Synthetic oligonucleotide
ggaacucggugagauccac

SEQ ID NO: 2942984 - RNA, 19 nt, Artificial Sequence
  Description of Artificial Sequence: Synthetic oligonucleotide
cgggaagugaauucuggga

SEQ ID NO: 2942985 - RNA, 19 nt, Artificial Sequence
  Description of Artificial Sequence: Synthetic oligonucleotide
augcagcaagccauguauu

SEQ ID NO: 2942986 - RNA, 19 nt, Artificial Sequence
  Description of Artificial Sequence: Synthetic oligonucleotide
gacgugggucacacuucac

SEQ ID NO: 2942987 - RNA, 19 nt, Artificial Sequence
  Description of Artificial Sequence: Synthetic oligonucleotide
ccuuggguaccacgucacc

SEQ ID NO: 2942988 - RNA, 19 nt, Artificial Sequence
  Description of Artificial Sequence: Synthetic oligonucleotide
caucuggcuguugggcuca

SEQ ID NO: 2942989 - RNA, 19 nt, Artificial Sequence
  Description of Artificial Sequence: Synthetic oligonucleotide
gugggucacacuucaccau

SEQ ID NO: 2942990 - RNA, 19 nt, Artificial Sequence
  Description of Artificial Sequence: Synthetic oligonucleotide
caaagcggagagaggcagu

SEQ ID NO: 2942991 - RNA, 19 nt, Artificial Sequence
  Description of Artificial Sequence: Synthetic oligonucleotide
ugggugcguaagugaccaa

SEQ ID NO: 2942992 - RNA, 19 nt, Artificial Sequence
  Description of Artificial Sequence: Synthetic oligonucleotide
guucuagcgucgugugcgu

SEQ ID NO: 2942993 - RNA, 19 nt, Artificial Sequence
  Description of Artificial Sequence: Synthetic oligonucleotide
gcagaaaugaugggugcgu

SEQ ID NO: 2942994 - RNA, 19 nt, Artificial Sequence
  Description of Artificial Sequence: Synthetic oligonucleotide
gaccaacgggaagugaauu

SEQ ID NO: 2942995 - RNA, 19 nt, Artificial Sequence
  Description of Artificial Sequence: Synthetic oligonucleotide
cugccacagauagcugcuc

SEQ ID NO: 2942996 - RNA, 19 nt, Artificial Sequence
  Description of Artificial Sequence: Synthetic oligonucleotide
cuccaucaaagcggagaga

SEQ ID NO: 2942997 - RNA, 19 nt, Artificial Sequence
  Description of Artificial Sequence: Synthetic oligonucleotide
cggugagauccacauugag

SEQ ID NO: 2942998 - RNA, 19 nt, Artificial Sequence
  Description of Artificial Sequence: Synthetic oligonucleotide
ucuggcugaugaggcgguu

SEQ ID NO: 2942999 - RNA, 19 nt, Artificial Sequence
  Description of Artificial Sequence: Synthetic oligonucleotide
gcgucgugugcguggucag

SEQ ID NO: 2943000 - RNA, 19 nt, Artificial Sequence
  Description of Artificial Sequence: Synthetic oligonucleotide
gguaccacgucaccucgau

SEQ ID NO: 2943001 - RNA, 19 nt, Artificial Sequence
  Description of Artificial Sequence: Synthetic oligonucleotide
cgugugcguggucaggaug

SEQ ID NO: 2943002 - RNA, 19 nt, Artificial Sequence
  Description of Artificial Sequence: Synthetic oligonucleotide
guaccacgucaccucgaua

SEQ ID NO: 2943003 - RNA, 19 nt, Artificial Sequence
  Description of Artificial Sequence: Synthetic oligonucleotide
aggacacaaucuggcugau

SEQ ID NO: 2943004 - RNA, 19 nt, Artificial Sequence
  Description of Artificial Sequence: Synthetic oligonucleotide
cuucaccaucuggcuguug

SEQ ID NO: 2943005 - RNA, 19 nt, Artificial Sequence
  Description of Artificial Sequence: Synthetic oligonucleotide
cguaagugaccaacgggaa

SEQ ID NO: 2943006 - RNA, 19 nt, Artificial Sequence
  Description of Artificial Sequence: Synthetic oligonucleotide
gguuccugcggcagauguc

SEQ ID NO: 2943007 - RNA, 19 nt, Artificial Sequence
  Description of Artificial Sequence: Synthetic oligonucleotide
ucuggcuguugggcucaaa

SEQ ID NO: 2943008 - RNA, 19 nt, Artificial Sequence
  Description of Artificial Sequence: Synthetic oligonucleotide
uggcuucguuguccaccau

SEQ ID NO: 2943009 - RNA, 19 nt, Artificial Sequence
  Description of Artificial Sequence: Synthetic oligonucleotide
uagcgucgugugcgugguc

SEQ ID NO: 2943010 - RNA, 19 nt, Artificial Sequence
  Description of Artificial Sequence: Synthetic oligonucleotide
ccaacgggaagugaauucu

SEQ ID NO: 2943011 - RNA, 19 nt, Artificial Sequence
  Description of Artificial Sequence: Synthetic oligonucleotide
acuucaccaucuggcuguu

SEQ ID NO: 2943012 - RNA, 19 nt, Artificial Sequence
  Description of Artificial Sequence: Synthetic oligonucleotide
gguuuggaacucggugaga

SEQ ID NO: 2943013 - RNA, 19 nt, Artificial Sequence
  Description of Artificial Sequence: Synthetic oligonucleotide
cugcggcagaugucauaga

SEQ ID NO: 2943014 - RNA, 19 nt, Artificial Sequence
  Description of Artificial Sequence: Synthetic oligonucleotide
cugaguguucuagcgucgu

SEQ ID NO: 2943015 - RNA, 19 nt, Artificial Sequence
  Description of Artificial Sequence: Synthetic oligonucleotide
caccucgauagagcaugca

SEQ ID NO: 2943016 - RNA, 19 nt, Artificial Sequence
  Description of Artificial Sequence: Synthetic oligonucleotide
gggcgcucgaugucuaggu

SEQ ID NO: 2943017 - RNA, 19 nt, Artificial Sequence
  Description of Artificial Sequence: Synthetic oligonucleotide
cuagcgucgugugcguggu

SEQ ID NO: 2943018 - RNA, 19 nt, Artificial Sequence
  Description of Artificial Sequence: Synthetic oligonucleotide
gguugguuuggaacucggu

SEQ ID NO: 2943019 - RNA, 19 nt, Artificial Sequence
  Description of Artificial Sequence: Synthetic oligonucleotide
gccacagauagcugcucau

SEQ ID NO: 2943020 - RNA, 19 nt, Artificial Sequence
  Description of Artificial Sequence: Synthetic oligonucleotide
gcguggucaggauggaguu

SEQ ID NO: 2943021 - RNA, 19 nt, Artificial Sequence
  Description of Artificial Sequence: Synthetic oligonucleotide
cgucgugugcguggucagg

SEQ ID NO: 2943022 - RNA, 19 nt, Artificial Sequence
  Description of Artificial Sequence: Synthetic oligonucleotide
gcacagucugaguguucua

SEQ ID NO: 2943023 - RNA, 19 nt, Artificial Sequence
  Description of Artificial Sequence: Synthetic oligonucleotide
ggguaccacgucaccucga

SEQ ID NO: 2943024 - RNA, 19 nt, Artificial Sequence
  Description of Artificial Sequence: Synthetic oligonucleotide
ggcgcucgaugucuagguu

SEQ ID NO: 2943025 - RNA, 19 nt, Artificial Sequence
  Description of Artificial Sequence: Synthetic oligonucleotide
gcggagagaggcagugauu

SEQ ID NO: 2943026 - RNA, 19 nt, Artificial Sequence
  Description of Artificial Sequence: Synthetic oligonucleotide
gcucgaugucuagguuccu

SEQ ID NO: 2943027 - RNA, 19 nt, Artificial Sequence
  Description of Artificial Sequence: Synthetic oligonucleotide
cgucaccucgauagagcau

SEQ ID NO: 2943028 - RNA, 19 nt, Artificial Sequence
  Description of Artificial Sequence: Synthetic oligonucleotide
ccaugacgugggucacacu

SEQ ID NO: 2943029 - RNA, 19 nt, Artificial Sequence
  Description of Artificial Sequence: Synthetic oligonucleotide
aaucucacgagcuucaucc

SEQ ID NO: 2943030 - RNA, 19 nt, Artificial Sequence
  Description of Artificial Sequence: Synthetic oligonucleotide
aauaucggauguuauuucc

SEQ ID NO: 2943031 - RNA, 19 nt, Artificial Sequence
  Description of Artificial Sequence: Synthetic oligonucleotide
gacauuaucgccuaggacc

SEQ ID NO: 2943032 - RNA, 19 nt, Artificial Sequence
  Description of Artificial Sequence: Synthetic oligonucleotide
aauguuuccaacuguacag

SEQ ID NO: 2943033 - RNA, 19 nt, Artificial Sequence
  Description of Artificial Sequence: Synthetic oligonucleotide
aguuucaugacucaauuuc

SEQ ID NO: 2943034 - RNA, 19 nt, Artificial Sequence
  Description of Artificial Sequence: Synthetic oligonucleotide
uuagauuucaccuuaggcu

SEQ ID NO: 2943035 - RNA, 19 nt, Artificial Sequence
  Description of Artificial Sequence: Synthetic oligonucleotide
aaguaauguauccagaggu

SEQ ID NO: 2943036 - RNA, 19 nt, Artificial Sequence
  Description of Artificial Sequence: Synthetic oligonucleotide
uuuagauuucaccuuaggc

SEQ ID NO: 2943037 - RNA, 19 nt, Artificial Sequence
  Description of Artificial Sequence: Synthetic oligonucleotide
uagaauaaaauaucggaug

SEQ ID NO: 2943038 - RNA, 19 nt, Artificial Sequence
  Description of Artificial Sequence: Synthetic oligonucleotide
aauguauccagagguaagc

SEQ ID NO: 2943039 - RNA, 19 nt, Artificial Sequence
  Description of Artificial Sequence: Synthetic oligonucleotide
uguuccauucuucaauucg

SEQ ID NO: 2943040 - RNA, 19 nt, Artificial Sequence
  Description of Artificial Sequence: Synthetic oligonucleotide
uuaagauguguauucaugc

SEQ ID NO: 2943041 - RNA, 19 nt, Artificial Sequence
  Description of Artificial Sequence: Synthetic oligonucleotide
uucagggucauuuucacag

SEQ ID NO: 2943042 - RNA, 19 nt, Artificial Sequence
  Description of Artificial Sequence: Synthetic oligonucleotide
uuucacagcuuuaagaugu

SEQ ID NO: 2943043 - RNA, 19 nt, Artificial Sequence
  Description of Artificial Sequence: Synthetic oligonucleotide
uuuaagauguguauucaug

SEQ ID NO: 2943044 - RNA, 19 nt, Artificial Sequence
  Description of Artificial Sequence: Synthetic oligonucleotide
uguguauucaugcugacau

SEQ ID NO: 2943045 - RNA, 19 nt, Artificial Sequence
  Description of Artificial Sequence: Synthetic oligonucleotide
aaauaucggauguuauuuc

SEQ ID NO: 2943046 - RNA, 19 nt, Artificial Sequence
  Description of Artificial Sequence: Synthetic oligonucleotide
ucaacauccacaaguaaug

SEQ ID NO: 2943047 - RNA, 19 nt, Artificial Sequence
  Description of Artificial Sequence: Synthetic oligonucleotide
ucaugacucaauuucauca

SEQ ID NO: 2943048 - RNA, 19 nt, Artificial Sequence
  Description of Artificial Sequence: Synthetic oligonucleotide
ugguagaauaaaauaucgg

SEQ ID NO: 2943049 - RNA, 19 nt, Artificial Sequence
  Description of Artificial Sequence: Synthetic oligonucleotide
agaauaaaauaucggaugu

SEQ ID NO: 2943050 - RNA, 19 nt, Artificial Sequence
  Description of Artificial Sequence: Synthetic oligonucleotide
cugguagaauaaaauaucg

SEQ ID NO: 2943051 - RNA, 19 nt, Artificial Sequence
  Description of Artificial Sequence: Synthetic oligonucleotide
acaaguaauguauccagag

SEQ ID NO: 2943052 - RNA, 19 nt, Artificial Sequence
  Description of Artificial Sequence: Synthetic oligonucleotide
agcuuuaagauguguauuc

SEQ ID NO: 2943053 - RNA, 19 nt, Artificial Sequence
  Description of Artificial Sequence: Synthetic oligonucleotide
uucaauucgaugguuacag

SEQ ID NO: 2943054 - RNA, 19 nt, Artificial Sequence
  Description of Artificial Sequence: Synthetic oligonucleotide
cuuuucuuuagauuucacc

SEQ ID NO: 2943055 - RNA, 19 nt, Artificial Sequence
  Description of Artificial Sequence: Synthetic oligonucleotide
ucugguagaauaaaauauc

SEQ ID NO: 2943056 - RNA, 19 nt, Artificial Sequence
  Description of Artificial Sequence: Synthetic oligonucleotide
auguuauuuccucggauac

SEQ ID NO: 2943057 - RNA, 19 nt, Artificial Sequence
  Description of Artificial Sequence: Synthetic oligonucleotide
aaaauaucggauguuauuu

SEQ ID NO: 2943058 - RNA, 19 nt, Artificial Sequence
  Description of Artificial Sequence: Synthetic oligonucleotide
aauaaaauaucggauguua

SEQ ID NO: 2943059 - RNA, 19 nt, Artificial Sequence
  Description of Artificial Sequence: Synthetic oligonucleotide
uuuccaacuguacagguuc

SEQ ID NO: 2943060 - RNA, 19 nt, Artificial Sequence
  Description of Artificial Sequence: Synthetic oligonucleotide
auccacaaguaauguaucc

SEQ ID NO: 2943061 - RNA, 19 nt, Artificial Sequence
  Description of Artificial Sequence: Synthetic oligonucleotide
uagauuucaccuuaggcuc

SEQ ID NO: 2943062 - RNA, 19 nt, Artificial Sequence
  Description of Artificial Sequence: Synthetic oligonucleotide
uacucaauguuuccaacug

SEQ ID NO: 2943063 - RNA, 19 nt, Artificial Sequence
  Description of Artificial Sequence: Synthetic oligonucleotide
augguuacaguuucaugac

SEQ ID NO: 2943064 - RNA, 19 nt, Artificial Sequence
  Description of Artificial Sequence: Synthetic oligonucleotide
ugugauuguuccauggacu

SEQ ID NO: 2943065 - RNA, 19 nt, Artificial Sequence
  Description of Artificial Sequence: Synthetic oligonucleotide
gguagaauaaaauaucgga

SEQ ID NO: 2943066 - RNA, 19 nt, Artificial Sequence
  Description of Artificial Sequence: Synthetic oligonucleotide
ccauucuucaauucgaugg

SEQ ID NO: 2943067 - RNA, 19 nt, Artificial Sequence
  Description of Artificial Sequence: Synthetic oligonucleotide
acaucuacaccugugauug

SEQ ID NO: 2943068 - RNA, 19 nt, Artificial Sequence
  Description of Artificial Sequence: Synthetic oligonucleotide
uaauguauccagagguaag

SEQ ID NO: 2943069 - RNA, 19 nt, Artificial Sequence
  Description of Artificial Sequence: Synthetic oligonucleotide
acgagcuucauccuagcgg

SEQ ID NO: 2943070 - RNA, 19 nt, Artificial Sequence
  Description of Artificial Sequence: Synthetic oligonucleotide
uaagcugucugguagaaua

SEQ ID NO: 2943071 - RNA, 19 nt, Artificial Sequence
  Description of Artificial Sequence: Synthetic oligonucleotide
aaagacucaccgacuaggc

SEQ ID NO: 2943072 - RNA, 19 nt, Artificial Sequence
  Description of Artificial Sequence: Synthetic oligonucleotide
aaaucucacgagcuucauc

SEQ ID NO: 2943073 - RNA, 19 nt, Artificial Sequence
  Description of Artificial Sequence: Synthetic oligonucleotide
ucggauguuauuuccucgg

SEQ ID NO: 2943074 - RNA, 19 nt, Artificial Sequence
  Description of Artificial Sequence: Synthetic oligonucleotide
gagguaagcugucugguag

SEQ ID NO: 2943075 - RNA, 19 nt, Artificial Sequence
  Description of Artificial Sequence: Synthetic oligonucleotide
uuuccucggauacucaaug

SEQ ID NO: 2943076 - RNA, 19 nt, Artificial Sequence
  Description of Artificial Sequence: Synthetic oligonucleotide
uguauucaugcugacaucu

SEQ ID NO: 2943077 - RNA, 19 nt, Artificial Sequence
  Description of Artificial Sequence: Synthetic oligonucleotide
auucgaugguuacaguuuc

SEQ ID NO: 2943078 - RNA, 19 nt, Artificial Sequence
  Description of Artificial Sequence: Synthetic oligonucleotide
aagacucaccgacuaggcg

SEQ ID NO: 2943079 - RNA, 19 nt, Artificial Sequence
  Description of Artificial Sequence: Synthetic oligonucleotide
caaguaauguauccagagg

SEQ ID NO: 2943080 - RNA, 19 nt, Artificial Sequence
  Description of Artificial Sequence: Synthetic oligonucleotide
caccuuaggcucaacaucc

SEQ ID NO: 2943081 - RNA, 19 nt, Artificial Sequence
  Description of Artificial Sequence: Synthetic oligonucleotide
aacuguacagguucucugu

SEQ ID NO: 2943082 - RNA, 19 nt, Artificial Sequence
  Description of Artificial Sequence: Synthetic oligonucleotide
ucauuuucacagcuuuaag

SEQ ID NO: 2943083 - RNA, 19 nt, Artificial Sequence
  Description of Artificial Sequence: Synthetic oligonucleotide
auggacuuguguuccauuc

SEQ ID NO: 2943084 - RNA, 19 nt, Artificial Sequence
  Description of Artificial Sequence: Synthetic oligonucleotide
gaauucgagcuccaaagac

SEQ ID NO: 2943085 - RNA, 19 nt, Artificial Sequence
  Description of Artificial Sequence: Synthetic oligonucleotide
uauucaugcugacaucuac

SEQ ID NO: 2943086 - RNA, 19 nt, Artificial Sequence
  Description of Artificial Sequence: Synthetic oligonucleotide
uuuucacagcuuuaagaug

SEQ ID NO: 2943087 - RNA, 19 nt, Artificial Sequence
  Description of Artificial Sequence: Synthetic oligonucleotide
uaaaauaucggauguuauu

SEQ ID NO: 2943088 - RNA, 19 nt, Artificial Sequence
  Description of Artificial Sequence: Synthetic oligonucleotide
cuaggcguaugaauggccg

SEQ ID NO: 2943089 - RNA, 19 nt, Artificial Sequence
  Description of Artificial Sequence: Synthetic oligonucleotide
uguuccauggacuuguguu

SEQ ID NO: 2943090 - RNA, 19 nt, Artificial Sequence
  Description of Artificial Sequence: Synthetic oligonucleotide
ugucugguagaauaaaaua

SEQ ID NO: 2943091 - RNA, 19 nt, Artificial Sequence
  Description of Artificial Sequence: Synthetic oligonucleotide
aggcucaacauccacaagu

SEQ ID NO: 2943092 - RNA, 19 nt, Artificial Sequence
  Description of Artificial Sequence: Synthetic oligonucleotide
uuaggcucaacauccacaa

SEQ ID NO: 2943093 - RNA, 19 nt, Artificial Sequence
  Description of Artificial Sequence: Synthetic oligonucleotide
aauucgagcuccaaagacu

SEQ ID NO: 2943094 - RNA, 19 nt, Artificial Sequence
  Description of Artificial Sequence: Synthetic oligonucleotide
agacucaccgacuaggcgu

SEQ ID NO: 2943095 - RNA, 19 nt, Artificial Sequence
  Description of Artificial Sequence: Synthetic oligonucleotide
uguauccagagguaagcug

SEQ ID NO: 2943096 - RNA, 19 nt, Artificial Sequence
  Description of Artificial Sequence: Synthetic oligonucleotide
auuaucgccuaggaccucc

SEQ ID NO: 2943097 - RNA, 19 nt, Artificial Sequence
  Description of Artificial Sequence: Synthetic oligonucleotide
cuuuagauuucaccuuagg

SEQ ID NO: 2943098 - RNA, 19 nt, Artificial Sequence
  Description of Artificial Sequence: Synthetic oligonucleotide
uucaugcugacaucuacac

SEQ ID NO: 2943099 - RNA, 19 nt, Artificial Sequence
  Description of Artificial Sequence: Synthetic oligonucleotide
uuucaccuuaggcucaaca

SEQ ID NO: 2943100 - RNA, 19 nt, Artificial Sequence
  Description of Artificial Sequence: Synthetic oligonucleotide
ucuucaauucgaugguuac

SEQ ID NO: 2943101 - RNA, 19 nt, Artificial Sequence
  Description of Artificial Sequence: Synthetic oligonucleotide
auacucaauguuuccaacu

SEQ ID NO: 2943102 - RNA, 19 nt, Artificial Sequence
  Description of Artificial Sequence: Synthetic oligonucleotide
caaagacucaccgacuagg

SEQ ID NO: 2943103 - RNA, 19 nt, Artificial Sequence
  Description of Artificial Sequence: Synthetic oligonucleotide
aacagcuucccuuuucuuu

SEQ ID NO: 2943104 - RNA, 19 nt, Artificial Sequence
  Description of Artificial Sequence: Synthetic oligonucleotide
ucuuuagauuucaccuuag

SEQ ID NO: 2943105 - RNA, 19 nt, Artificial Sequence
  Description of Artificial Sequence: Synthetic oligonucleotide
aucggauguuauuuccucg

SEQ ID NO: 2943106 - RNA, 19 nt, Artificial Sequence
  Description of Artificial Sequence: Synthetic oligonucleotide
ucaauguuuccaacuguac

SEQ ID NO: 2943107 - RNA, 19 nt, Artificial Sequence
  Description of Artificial Sequence: Synthetic oligonucleotide
ugacucaauuucaucaaaa

SEQ ID NO: 2943108 - RNA, 19 nt, Artificial Sequence
  Description of Artificial Sequence: Synthetic oligonucleotide
acagcuuuaagauguguau

SEQ ID NO: 2943109 - RNA, 19 nt, Artificial Sequence
  Description of Artificial Sequence: Synthetic oligonucleotide
gauacucaauguuuccaac

SEQ ID NO: 2943110 - RNA, 19 nt, Artificial Sequence
  Description of Artificial Sequence: Synthetic oligonucleotide
ucaccuuaggcucaacauc

SEQ ID NO: 2943111 - RNA, 19 nt, Artificial Sequence
  Description of Artificial Sequence: Synthetic oligonucleotide
gauguuauuuccucggaua

SEQ ID NO: 2943112 - RNA, 19 nt, Artificial Sequence
  Description of Artificial Sequence: Synthetic oligonucleotide
aucgccuaggaccuccucg

SEQ ID NO: 2943113 - RNA, 19 nt, Artificial Sequence
  Description of Artificial Sequence: Synthetic oligonucleotide
cuggacacggaauucgagc

SEQ ID NO: 2943114 - RNA, 19 nt, Artificial Sequence
  Description of Artificial Sequence: Synthetic oligonucleotide
ucugccucggccucgaccu

SEQ ID NO: 2943115 - RNA, 19 nt, Artificial Sequence
  Description of Artificial Sequence: Synthetic oligonucleotide
acuuguguuccauucuuca

SEQ ID NO: 2943116 - RNA, 19 nt, Artificial Sequence
  Description of Artificial Sequence: Synthetic oligonucleotide
uggacacggaauucgagcu

SEQ ID NO: 2943117 - RNA, 19 nt, Artificial Sequence
  Description of Artificial Sequence: Synthetic oligonucleotide
uuucaugacucaauuucau

SEQ ID NO: 2943118 - RNA, 19 nt, Artificial Sequence
  Description of Artificial Sequence: Synthetic oligonucleotide
uucaccuuaggcucaacau

SEQ ID NO: 2943119 - RNA, 19 nt, Artificial Sequence
  Description of Artificial Sequence: Synthetic oligonucleotide
auucgagcuccaaagacuc

SEQ ID NO: 2943120 - RNA, 19 nt, Artificial Sequence
  Description of Artificial Sequence: Synthetic oligonucleotide
ucucuguucuucaggguca

SEQ ID NO: 2943121 - RNA, 19 nt, Artificial Sequence
  Description of Artificial Sequence: Synthetic oligonucleotide
uacaguuucaugacucaau

SEQ ID NO: 2943122 - RNA, 19 nt, Artificial Sequence
  Description of Artificial Sequence: Synthetic oligonucleotide
uccacaaguaauguaucca

SEQ ID NO: 2943123 - RNA, 19 nt, Artificial Sequence
  Description of Artificial Sequence: Synthetic oligonucleotide
uccagagguaagcugucug

SEQ ID NO: 2943124 - RNA, 19 nt, Artificial Sequence
  Description of Artificial Sequence: Synthetic oligonucleotide
aacauccacaaguaaugua

SEQ ID NO: 2943125 - RNA, 19 nt, Artificial Sequence
  Description of Artificial Sequence: Synthetic oligonucleotide
aauucgaugguuacaguuu

SEQ ID NO: 2943126 - RNA, 19 nt, Artificial Sequence
  Description of Artificial Sequence: Synthetic oligonucleotide
acauccacaaguaauguau

SEQ ID NO: 2943127 - RNA, 19 nt, Artificial Sequence
  Description of Artificial Sequence: Synthetic oligonucleotide
uucuucaauucgaugguua

SEQ ID NO: 2943128 - RNA, 19 nt, Artificial Sequence
  Description of Artificial Sequence: Synthetic oligonucleotide
cucacgagcuucauccuag

SEQ ID NO: 2943129 - RNA, 19 nt, Artificial Sequence
  Description of Artificial Sequence: Synthetic oligonucleotide
uccaaagacucaccgacua

SEQ ID NO: 2943130 - RNA, 19 nt, Artificial Sequence
  Description of Artificial Sequence: Synthetic oligonucleotide
agguucucuguucuucagg

SEQ ID NO: 2943131 - RNA, 19 nt, Artificial Sequence
  Description of Artificial Sequence: Synthetic oligonucleotide
cuacaccugugauuguucc

SEQ ID NO: 2943132 - RNA, 19 nt, Artificial Sequence
  Description of Artificial Sequence: Synthetic oligonucleotide
acaguuucaugacucaauu

SEQ ID NO: 2943133 - RNA, 19 nt, Artificial Sequence
  Description of Artificial Sequence: Synthetic oligonucleotide
uguuuccaacuguacaggu

SEQ ID NO: 2943134 - RNA, 19 nt, Artificial Sequence
  Description of Artificial Sequence: Synthetic oligonucleotide
cugugauuguuccauggac

SEQ ID NO: 2943135 - RNA, 19 nt, Artificial Sequence
  Description of Artificial Sequence: Synthetic oligonucleotide
gacacggaauucgagcucc

SEQ ID NO: 2943136 - RNA, 19 nt, Artificial Sequence
  Description of Artificial Sequence: Synthetic oligonucleotide
uaucggauguuauuuccuc

SEQ ID NO: 2943137 - RNA, 19 nt, Artificial Sequence
  Description of Artificial Sequence: Synthetic oligonucleotide
ucugccgcgaccacguccu

SEQ ID NO: 2943138 - RNA, 19 nt, Artificial Sequence
  Description of Artificial Sequence: Synthetic oligonucleotide
uucaugacucaauuucauc

SEQ ID NO: 2943139 - RNA, 19 nt, Artificial Sequence
  Description of Artificial Sequence: Synthetic oligonucleotide
cucggauacucaauguuuc

SEQ ID NO: 2943140 - RNA, 19 nt, Artificial Sequence
  Description of Artificial Sequence: Synthetic oligonucleotide
cuacuggacacggaauucg

SEQ ID NO: 2943141 - RNA, 19 nt, Artificial Sequence
  Description of Artificial Sequence: Synthetic oligonucleotide
ucggauacucaauguuucc

SEQ ID NO: 2943142 - RNA, 19 nt, Artificial Sequence
  Description of Artificial Sequence: Synthetic oligonucleotide
auguuuccaacuguacagg

SEQ ID NO: 2943143 - RNA, 19 nt, Artificial Sequence
  Description of Artificial Sequence: Synthetic oligonucleotide
caauguuuccaacuguaca

SEQ ID NO: 2943144 - RNA, 19 nt, Artificial Sequence
  Description of Artificial Sequence: Synthetic oligonucleotide
agauguguauucaugcuga

SEQ ID NO: 2943145 - RNA, 19 nt, Artificial Sequence
  Description of Artificial Sequence: Synthetic oligonucleotide
ucaccgacuaggcguauga

SEQ ID NO: 2943146 - RNA, 19 nt, Artificial Sequence
  Description of Artificial Sequence: Synthetic oligonucleotide
uaggcguaugaauggccgg

SEQ ID NO: 2943147 - RNA, 19 nt, Artificial Sequence
  Description of Artificial Sequence: Synthetic oligonucleotide
acuaggcguaugaauggcc

SEQ ID NO: 2943148 - RNA, 19 nt, Artificial Sequence
  Description of Artificial Sequence: Synthetic oligonucleotide
agcuucauccuagcggcgc

SEQ ID NO: 2943149 - RNA, 19 nt, Artificial Sequence
  Description of Artificial Sequence: Synthetic oligonucleotide
ucuacaccugugauuguuc

SEQ ID NO: 2943150 - RNA, 19 nt, Artificial Sequence
  Description of Artificial Sequence: Synthetic oligonucleotide
uggacuuguguuccauucu

SEQ ID NO: 2943151 - RNA, 19 nt, Artificial Sequence
  Description of Artificial Sequence: Synthetic oligonucleotide
acucaauguuuccaacugu

SEQ ID NO: 2943152 - RNA, 19 nt, Artificial Sequence
  Description of Artificial Sequence: Synthetic oligonucleotide
cuuaggcucaacauccaca

SEQ ID NO: 2943153 - RNA, 19 nt, Artificial Sequence
  Description of Artificial Sequence: Synthetic oligonucleotide
auccuagcggcgcagccuc

SEQ ID NO: 2943154 - RNA, 19 nt, Artificial Sequence
  Description of Artificial Sequence: Synthetic oligonucleotide
uccuacuggacacggaauu

SEQ ID NO: 2943155 - RNA, 19 nt, Artificial Sequence
  Description of Artificial Sequence: Synthetic oligonucleotide
ugguuacaguuucaugacu

SEQ ID NO: 2943156 - RNA, 19 nt, Artificial Sequence
  Description of Artificial Sequence: Synthetic oligonucleotide
ugacaucuacaccugugau

SEQ ID NO: 2943157 - RNA, 19 nt, Artificial Sequence
  Description of Artificial Sequence: Synthetic oligonucleotide
caacuguacagguucucug

SEQ ID NO: 2943158 - RNA, 19 nt, Artificial Sequence
  Description of Artificial Sequence: Synthetic oligonucleotide
guuacaguuucaugacuca

SEQ ID NO: 2943159 - RNA, 19 nt, Artificial Sequence
  Description of Artificial Sequence: Synthetic oligonucleotide
gcuccaaagacucaccgac

SEQ ID NO: 2943160 - RNA, 19 nt, Artificial Sequence
  Description of Artificial Sequence: Synthetic oligonucleotide
ucagggucauuuucacagc

SEQ ID NO: 2943161 - RNA, 19 nt, Artificial Sequence
  Description of Artificial Sequence: Synthetic oligonucleotide
auaaaauaucggauguuau

SEQ ID NO: 2943162 - RNA, 19 nt, Artificial Sequence
  Description of Artificial Sequence: Synthetic oligonucleotide
uacuggacacggaauucga

SEQ ID NO: 2943163 - RNA, 19 nt, Artificial Sequence
  Description of Artificial Sequence: Synthetic oligonucleotide
guuucaugacucaauuuca

SEQ ID NO: 2943164 - RNA, 19 nt, Artificial Sequence
  Description of Artificial Sequence: Synthetic oligonucleotide
uguuauuuccucggauacu

SEQ ID NO: 2943165 - RNA, 19 nt, Artificial Sequence
  Description of Artificial Sequence: Synthetic oligonucleotide
uucacagcuuuaagaugug

SEQ ID NO: 2943166 - RNA, 19 nt, Artificial Sequence
  Description of Artificial Sequence: Synthetic oligonucleotide
uuccauucuucaauucgau

SEQ ID NO: 2943167 - RNA, 19 nt, Artificial Sequence
  Description of Artificial Sequence: Synthetic oligonucleotide
uccucggauacucaauguu

SEQ ID NO: 2943168 - RNA, 19 nt, Artificial Sequence
  Description of Artificial Sequence: Synthetic oligonucleotide
acagguucucuguucuuca

SEQ ID NO: 2943169 - RNA, 19 nt, Artificial Sequence
  Description of Artificial Sequence: Synthetic oligonucleotide
acauuaucgccuaggaccu

SEQ ID NO: 2943170 - RNA, 19 nt, Artificial Sequence
  Description of Artificial Sequence: Synthetic oligonucleotide
ucauccuagcggcgcagcc

SEQ ID NO: 2943171 - RNA, 19 nt, Artificial Sequence
  Description of Artificial Sequence: Synthetic oligonucleotide
ucgaccucuuccugcaaca

SEQ ID NO: 2943172 - RNA, 19 nt, Artificial Sequence
  Description of Artificial Sequence: Synthetic oligonucleotide
ccacaaguaauguauccag

SEQ ID NO: 2943173 - RNA, 19 nt, Artificial Sequence
  Description of Artificial Sequence: Synthetic oligonucleotide
ucgagcuccaaagacucac

SEQ ID NO: 2943174 - RNA, 19 nt, Artificial Sequence
  Description of Artificial Sequence: Synthetic oligonucleotide
uucgaugguuacaguuuca

SEQ ID NO: 2943175 - RNA, 19 nt, Artificial Sequence
  Description of Artificial Sequence: Synthetic oligonucleotide
guagaauaaaauaucggau

SEQ ID NO: 2943176 - RNA, 19 nt, Artificial Sequence
  Description of Artificial Sequence: Synthetic oligonucleotide
cauccacaaguaauguauc

SEQ ID NO: 2943177 - RNA, 19 nt, Artificial Sequence
  Description of Artificial Sequence: Synthetic oligonucleotide
gauuguuccauggacuugu

SEQ ID NO: 2943178 - RNA, 19 nt, Artificial Sequence
  Description of Artificial Sequence: Synthetic oligonucleotide
uccugcaacagcuucccuu

SEQ ID NO: 2943179 - RNA, 19 nt, Artificial Sequence
  Description of Artificial Sequence: Synthetic oligonucleotide
ugcaacagcuucccuuuuc

SEQ ID NO: 2943180 - RNA, 19 nt, Artificial Sequence
  Description of Artificial Sequence: Synthetic oligonucleotide
ccgacuaggcguaugaaug

SEQ ID NO: 2943181 - RNA, 19 nt, Artificial Sequence
  Description of Artificial Sequence: Synthetic oligonucleotide
uacagguucucuguucuuc

SEQ ID NO: 2943182 - RNA, 19 nt, Artificial Sequence
  Description of Artificial Sequence: Synthetic oligonucleotide
guaauguauccagagguaa

SEQ ID NO: 2943183 - RNA, 19 nt, Artificial Sequence
  Description of Artificial Sequence: Synthetic oligonucleotide
ucaauucgaugguuacagu

SEQ ID NO: 2943184 - RNA, 19 nt, Artificial Sequence
  Description of Artificial Sequence: Synthetic oligonucleotide
cucaauguuuccaacugua

SEQ ID NO: 2943185 - RNA, 19 nt, Artificial Sequence
  Description of Artificial Sequence: Synthetic oligonucleotide
caugacucaauuucaucaa

SEQ ID NO: 2943186 - RNA, 19 nt, Artificial Sequence
  Description of Artificial Sequence: Synthetic oligonucleotide
uccucugccgcgaccacgu

SEQ ID NO: 2943187 - RNA, 19 nt, Artificial Sequence
  Description of Artificial Sequence: Synthetic oligonucleotide
accgacuaggcguaugaau

SEQ ID NO: 2943188 - RNA, 19 nt, Artificial Sequence
  Description of Artificial Sequence: Synthetic oligonucleotide
cucccucugguccuacugg

SEQ ID NO: 2943189 - RNA, 19 nt, Artificial Sequence
  Description of Artificial Sequence: Synthetic oligonucleotide
guuccauucuucaauucga

SEQ ID NO: 2943190 - RNA, 19 nt, Artificial Sequence
  Description of Artificial Sequence: Synthetic oligonucleotide
uacaccugugauuguucca

SEQ ID NO: 2943191 - RNA, 19 nt, Artificial Sequence
  Description of Artificial Sequence: Synthetic oligonucleotide
uuacaguuucaugacucaa

SEQ ID NO: 2943192 - RNA, 19 nt, Artificial Sequence
  Description of Artificial Sequence: Synthetic oligonucleotide
ucugguccuacuggacacg

SEQ ID NO: 2943193 - RNA, 19 nt, Artificial Sequence
  Description of Artificial Sequence: Synthetic oligonucleotide
gacuaggcguaugaauggc

SEQ ID NO: 2943194 - RNA, 19 nt, Artificial Sequence
  Description of Artificial Sequence: Synthetic oligonucleotide
ugauuguuccauggacuug

SEQ ID NO: 2943195 - RNA, 19 nt, Artificial Sequence
  Description of Artificial Sequence: Synthetic oligonucleotide
gucauuuucacagcuuuaa

SEQ ID NO: 2943196 - RNA, 19 nt, Artificial Sequence
  Description of Artificial Sequence: Synthetic oligonucleotide
cuuccugcaacagcuuccc

SEQ ID NO: 2943197 - RNA, 19 nt, Artificial Sequence
  Description of Artificial Sequence: Synthetic oligonucleotide
cugacaucuacaccuguga

SEQ ID NO: 2943198 - RNA, 19 nt, Artificial Sequence
  Description of Artificial Sequence: Synthetic oligonucleotide
uuguuccauggacuugugu

SEQ ID NO: 2943199 - RNA, 19 nt, Artificial Sequence
  Description of Artificial Sequence: Synthetic oligonucleotide
uuccaacuguacagguucu

SEQ ID NO: 2943200 - RNA, 19 nt, Artificial Sequence
  Description of Artificial Sequence: Synthetic oligonucleotide
gguuacaguuucaugacuc

SEQ ID NO: 2943201 - RNA, 19 nt, Artificial Sequence
  Description of Artificial Sequence: Synthetic oligonucleotide
ucgccuaggaccuccucgu

SEQ ID NO: 2943202 - RNA, 19 nt, Artificial Sequence
  Description of Artificial Sequence: Synthetic oligonucleotide
uauccagagguaagcuguc

SEQ ID NO: 2943203 - RNA, 19 nt, Artificial Sequence
  Description of Artificial Sequence: Synthetic oligonucleotide
uuccucggauacucaaugu

SEQ ID NO: 2943204 - RNA, 19 nt, Artificial Sequence
  Description of Artificial Sequence: Synthetic oligonucleotide
cacaaguaauguauccaga

SEQ ID NO: 2943205 - RNA, 19 nt, Artificial Sequence
  Description of Artificial Sequence: Synthetic oligonucleotide
ucucacgagcuucauccua

SEQ ID NO: 2943206 - RNA, 19 nt, Artificial Sequence
  Description of Artificial Sequence: Synthetic oligonucleotide
acggaauucgagcuccaaa

SEQ ID NO: 2943207 - RNA, 19 nt, Artificial Sequence
  Description of Artificial Sequence: Synthetic oligonucleotide
auaucggauguuauuuccu

SEQ ID NO: 2943208 - RNA, 19 nt, Artificial Sequence
  Description of Artificial Sequence: Synthetic oligonucleotide
uaggcucaacauccacaag

SEQ ID NO: 2943209 - RNA, 19 nt, Artificial Sequence
  Description of Artificial Sequence: Synthetic oligonucleotide
ccagagguaagcugucugg

SEQ ID NO: 2943210 - RNA, 19 nt, Artificial Sequence
  Description of Artificial Sequence: Synthetic oligonucleotide
ucgaugguuacaguuucau

SEQ ID NO: 2943211 - RNA, 19 nt, Artificial Sequence
  Description of Artificial Sequence: Synthetic oligonucleotide
gucugguagaauaaaauau

SEQ ID NO: 2943212 - RNA, 19 nt, Artificial Sequence
  Description of Artificial Sequence: Synthetic oligonucleotide
cgagcuucauccuagcggc

SEQ ID NO: 2943213 - RNA, 19 nt, Artificial Sequence
  Description of Artificial Sequence: Synthetic oligonucleotide
agguaagcugucugguaga

SEQ ID NO: 2943214 - RNA, 19 nt, Artificial Sequence
  Description of Artificial Sequence: Synthetic oligonucleotide
cggaauucgagcuccaaag

SEQ ID NO: 2943215 - RNA, 19 nt, Artificial Sequence
  Description of Artificial Sequence: Synthetic oligonucleotide
cuguacagguucucuguuc

SEQ ID NO: 2943216 - RNA, 19 nt, Artificial Sequence
  Description of Artificial Sequence: Synthetic oligonucleotide
cacgagcuucauccuagcg

SEQ ID NO: 2943217 - RNA, 19 nt, Artificial Sequence
  Description of Artificial Sequence: Synthetic oligonucleotide
guauccagagguaagcugu

SEQ ID NO: 2943218 - RNA, 19 nt, Artificial Sequence
  Description of Artificial Sequence: Synthetic oligonucleotide
aguaauguauccagaggua

SEQ ID NO: 2943219 - RNA, 19 nt, Artificial Sequence
  Description of Artificial Sequence: Synthetic oligonucleotide
cacagcuuuaagaugugua

SEQ ID NO: 2943220 - RNA, 19 nt, Artificial Sequence
  Description of Artificial Sequence: Synthetic oligonucleotide
ucccucugguccuacugga

SEQ ID NO: 2943221 - RNA, 19 nt, Artificial Sequence
  Description of Artificial Sequence: Synthetic oligonucleotide
auguauccagagguaagcu

SEQ ID NO: 2943222 - RNA, 19 nt, Artificial Sequence
  Description of Artificial Sequence: Synthetic oligonucleotide
agagguaagcugucuggua

SEQ ID NO: 2943223 - RNA, 19 nt, Artificial Sequence
  Description of Artificial Sequence: Synthetic oligonucleotide
ugcugacaucuacaccugu

SEQ ID NO: 2943224 - RNA, 19 nt, Artificial Sequence
  Description of Artificial Sequence: Synthetic oligonucleotide
acuguacagguucucuguu

SEQ ID NO: 2943225 - RNA, 19 nt, Artificial Sequence
  Description of Artificial Sequence: Synthetic oligonucleotide
cucgaccucuuccugcaac

SEQ ID NO: 2943226 - RNA, 19 nt, Artificial Sequence
  Description of Artificial Sequence: Synthetic oligonucleotide
ggauacucaauguuuccaa

SEQ ID NO: 2943227 - RNA, 19 nt, Artificial Sequence
  Description of Artificial Sequence: Synthetic oligonucleotide
ucguccucugccgcgacca

SEQ ID NO: 2943228 - RNA, 19 nt, Artificial Sequence
  Description of Artificial Sequence: Synthetic oligonucleotide
cuuguguuccauucuucaa

SEQ ID NO: 2943229 - RNA, 19 nt, Artificial Sequence
  Description of Artificial Sequence: Synthetic oligonucleotide
cagguucucuguucuucag

SEQ ID NO: 2943230 - RNA, 19 nt, Artificial Sequence
  Description of Artificial Sequence: Synthetic oligonucleotide
cucugccgcgaccacgucc

SEQ ID NO: 2943231 - RNA, 19 nt, Artificial Sequence
  Description of Artificial Sequence: Synthetic oligonucleotide
ggaauucgagcuccaaaga

SEQ ID NO: 2943232 - RNA, 19 nt, Artificial Sequence
  Description of Artificial Sequence: Synthetic oligonucleotide
ucacagcuuuaagaugugu

SEQ ID NO: 2943233 - RNA, 19 nt, Artificial Sequence
  Description of Artificial Sequence: Synthetic oligonucleotide
uuaucgccuaggaccuccu

SEQ ID NO: 2943234 - RNA, 19 nt, Artificial Sequence
  Description of Artificial Sequence: Synthetic oligonucleotide
cucugccucggccucgacc

SEQ ID NO: 2943235 - RNA, 19 nt, Artificial Sequence
  Description of Artificial Sequence: Synthetic oligonucleotide
acuggacacggaauucgag

SEQ ID NO: 2943236 - RNA, 19 nt, Artificial Sequence
  Description of Artificial Sequence: Synthetic oligonucleotide
gacaucuacaccugugauu

SEQ ID NO: 2943237 - RNA, 19 nt, Artificial Sequence
  Description of Artificial Sequence: Synthetic oligonucleotide
cugguccuacuggacacgg

SEQ ID NO: 2943238 - RNA, 19 nt, Artificial Sequence
  Description of Artificial Sequence: Synthetic oligonucleotide
cauucuucaauucgauggu

SEQ ID NO: 2943239 - RNA, 19 nt, Artificial Sequence
  Description of Artificial Sequence: Synthetic oligonucleotide
caauucgaugguuacaguu

SEQ ID NO: 2943240 - RNA, 19 nt, Artificial Sequence
  Description of Artificial Sequence: Synthetic oligonucleotide
guguauucaugcugacauc

SEQ ID NO: 2943241 - RNA, 19 nt, Artificial Sequence
  Description of Artificial Sequence: Synthetic oligonucleotide
cuuuaagauguguauucau

SEQ ID NO: 2943242 - RNA, 19 nt, Artificial Sequence
  Description of Artificial Sequence: Synthetic oligonucleotide
aagcugucugguagaauaa

SEQ ID NO: 2943243 - RNA, 19 nt, Artificial Sequence
  Description of Artificial Sequence: Synthetic oligonucleotide
gacuuguguuccauucuuc

SEQ ID NO: 2943244 - RNA, 19 nt, Artificial Sequence
  Description of Artificial Sequence: Synthetic oligonucleotide
aucucacgagcuucauccu

SEQ ID NO: 2943245 - RNA, 19 nt, Artificial Sequence
  Description of Artificial Sequence: Synthetic oligonucleotide
uucauccuagcggcgcagc

SEQ ID NO: 2943246 - RNA, 19 nt, Artificial Sequence
  Description of Artificial Sequence: Synthetic oligonucleotide
cuucaauucgaugguuaca

SEQ ID NO: 2943247 - RNA, 19 nt, Artificial Sequence
  Description of Artificial Sequence: Synthetic oligonucleotide
cugucugguagaauaaaau

SEQ ID NO: 2943248 - RNA, 19 nt, Artificial Sequence
  Description of Artificial Sequence: Synthetic oligonucleotide
aucuacaccugugauuguu

SEQ ID NO: 2943249 - RNA, 19 nt, Artificial Sequence
  Description of Artificial Sequence: Synthetic oligonucleotide
agauuucaccuuaggcuca

SEQ ID NO: 2943250 - RNA, 19 nt, Artificial Sequence
  Description of Artificial Sequence: Synthetic oligonucleotide
guguuccauucuucaauuc

SEQ ID NO: 2943251 - RNA, 19 nt, Artificial Sequence
  Description of Artificial Sequence: Synthetic oligonucleotide
gguccuacuggacacggaa

SEQ ID NO: 2943252 - RNA, 19 nt, Artificial Sequence
  Description of Artificial Sequence: Synthetic oligonucleotide
aggaccuccucguccucug

SEQ ID NO: 2943253 - RNA, 19 nt, Artificial Sequence
  Description of Artificial Sequence: Synthetic oligonucleotide
auuuccucggauacucaau

SEQ ID NO: 2943254 - RNA, 19 nt, Artificial Sequence
  Description of Artificial Sequence: Synthetic oligonucleotide
aggcguaugaauggccgga

SEQ ID NO: 2943255 - RNA, 19 nt, Artificial Sequence
  Description of Artificial Sequence: Synthetic oligonucleotide
gugauuguuccauggacuu

SEQ ID NO: 2943256 - RNA, 19 nt, Artificial Sequence
  Description of Artificial Sequence: Synthetic oligonucleotide
ugguccuacuggacacgga

SEQ ID NO: 2943257 - RNA, 19 nt, Artificial Sequence
  Description of Artificial Sequence: Synthetic oligonucleotide
auucuucaauucgaugguu

SEQ ID NO: 2943258 - RNA, 19 nt, Artificial Sequence
  Description of Artificial Sequence: Synthetic oligonucleotide
uccaacuguacagguucuc

SEQ ID NO: 2943259 - RNA, 19 nt, Artificial Sequence
  Description of Artificial Sequence: Synthetic oligonucleotide
gcuuuaagauguguauuca

SEQ ID NO: 2943260 - RNA, 19 nt, Artificial Sequence
  Description of Artificial Sequence: Synthetic oligonucleotide
gcugacaucuacaccugug

SEQ ID NO: 2943261 - RNA, 19 nt, Artificial Sequence
  Description of Artificial Sequence: Synthetic oligonucleotide
cgacuaggcguaugaaugg

SEQ ID NO: 2943262 - RNA, 19 nt, Artificial Sequence
  Description of Artificial Sequence: Synthetic oligonucleotide
agcggcgcagccucccucu

SEQ ID NO: 2943263 - RNA, 19 nt, Artificial Sequence
  Description of Artificial Sequence: Synthetic oligonucleotide
auuucaccuuaggcucaac

SEQ ID NO: 2943264 - RNA, 19 nt, Artificial Sequence
  Description of Artificial Sequence: Synthetic oligonucleotide
gagcuucauccuagcggcg

SEQ ID NO: 2943265 - RNA, 19 nt, Artificial Sequence
  Description of Artificial Sequence: Synthetic oligonucleotide
uaggaccuccucguccucu

SEQ ID NO: 2943266 - RNA, 19 nt, Artificial Sequence
  Description of Artificial Sequence: Synthetic oligonucleotide
gccuaggaccuccucgucc

SEQ ID NO: 2943267 - RNA, 19 nt, Artificial Sequence
  Description of Artificial Sequence: Synthetic oligonucleotide
agcuucccuuuucuuuaga

SEQ ID NO: 2943268 - RNA, 19 nt, Artificial Sequence
  Description of Artificial Sequence: Synthetic oligonucleotide
caccugugauuguuccaug

SEQ ID NO: 2943269 - RNA, 19 nt, Artificial Sequence
  Description of Artificial Sequence: Synthetic oligonucleotide
cuucauccuagcggcgcag

SEQ ID NO: 2943270 - RNA, 19 nt, Artificial Sequence
  Description of Artificial Sequence: Synthetic oligonucleotide
uaucgccuaggaccuccuc

SEQ ID NO: 2943271 - RNA, 19 nt, Artificial Sequence
  Description of Artificial Sequence: Synthetic oligonucleotide
gauuucaccuuaggcucaa

SEQ ID NO: 2943272 - RNA, 19 nt, Artificial Sequence
  Description of Artificial Sequence: Synthetic oligonucleotide
agcugucugguagaauaaa

SEQ ID NO: 2943273 - RNA, 19 nt, Artificial Sequence
  Description of Artificial Sequence: Synthetic oligonucleotide
ccaaagacucaccgacuag

SEQ ID NO: 2943274 - RNA, 19 nt, Artificial Sequence
  Description of Artificial Sequence: Synthetic oligonucleotide
guccucugccgcgaccacg

SEQ ID NO: 2943275 - RNA, 19 nt, Artificial Sequence
  Description of Artificial Sequence: Synthetic oligonucleotide
augcugacaucuacaccug

SEQ ID NO: 2943276 - RNA, 19 nt, Artificial Sequence
  Description of Artificial Sequence: Synthetic oligonucleotide
uuccugcaacagcuucccu

SEQ ID NO: 2943277 - RNA, 19 nt, Artificial Sequence
  Description of Artificial Sequence: Synthetic oligonucleotide
auccagagguaagcugucu

SEQ ID NO: 2943278 - RNA, 19 nt, Artificial Sequence
  Description of Artificial Sequence: Synthetic oligonucleotide
cuucccuuuucuuuagauu

SEQ ID NO: 2943279 - RNA, 19 nt, Artificial Sequence
  Description of Artificial Sequence: Synthetic oligonucleotide
uccucguccucugccgcga

SEQ ID NO: 2943280 - RNA, 19 nt, Artificial Sequence
  Description of Artificial Sequence: Synthetic oligonucleotide
ggccucgaccucuuccugc

SEQ ID NO: 2943281 - RNA, 19 nt, Artificial Sequence
  Description of Artificial Sequence: Synthetic oligonucleotide
cucguccucugccgcgacc

SEQ ID NO: 2943282 - RNA, 19 nt, Artificial Sequence
  Description of Artificial Sequence: Synthetic oligonucleotide
ccuuaggcucaacauccac

SEQ ID NO: 2943283 - RNA, 19 nt, Artificial Sequence
  Description of Artificial Sequence: Synthetic oligonucleotide
uccuagcggcgcagccucc

SEQ ID NO: 2943284 - RNA, 19 nt, Artificial Sequence
  Description of Artificial Sequence: Synthetic oligonucleotide
gacucaccgacuaggcgua

SEQ ID NO: 2943285 - RNA, 19 nt, Artificial Sequence
  Description of Artificial Sequence: Synthetic oligonucleotide
cucaccgacuaggcguaug

SEQ ID NO: 2943286 - RNA, 19 nt, Artificial Sequence
  Description of Artificial Sequence: Synthetic oligonucleotide
ggacacggaauucgagcuc

SEQ ID NO: 2943287 - RNA, 19 nt, Artificial Sequence
  Description of Artificial Sequence: Synthetic oligonucleotide
cagggucauuuucacagcu

SEQ ID NO: 2943288 - RNA, 19 nt, Artificial Sequence
  Description of Artificial Sequence: Synthetic oligonucleotide
guauucaugcugacaucua

SEQ ID NO: 2943289 - RNA, 19 nt, Artificial Sequence
  Description of Artificial Sequence: Synthetic oligonucleotide
gcaacagcuucccuuuucu

SEQ ID NO: 2943290 - RNA, 19 nt, Artificial Sequence
  Description of Artificial Sequence: Synthetic oligonucleotide
gcugucugguagaauaaaa

SEQ ID NO: 2943291 - RNA, 19 nt, Artificial Sequence
  Description of Artificial Sequence: Synthetic oligonucleotide
uagcggcgcagccucccuc

SEQ ID NO: 2943292 - RNA, 19 nt, Artificial Sequence
  Description of Artificial Sequence: Synthetic oligonucleotide
ggauguuauuuccucggau

SEQ ID NO: 2943293 - RNA, 19 nt, Artificial Sequence
  Description of Artificial Sequence: Synthetic oligonucleotide
cgaugguuacaguuucaug

SEQ ID NO: 2943294 - RNA, 19 nt, Artificial Sequence
  Description of Artificial Sequence: Synthetic oligonucleotide
ccugugauuguuccaugga

SEQ ID NO: 2943295 - RNA, 19 nt, Artificial Sequence
  Description of Artificial Sequence: Synthetic oligonucleotide
accuuaggcucaacaucca

SEQ ID NO: 2943296 - RNA, 19 nt, Artificial Sequence
  Description of Artificial Sequence: Synthetic oligonucleotide
caacauccacaaguaaugu

SEQ ID NO: 2943297 - RNA, 19 nt, Artificial Sequence
  Description of Artificial Sequence: Synthetic oligonucleotide
ggcucaacauccacaagua

SEQ ID NO: 2943298 - RNA, 19 nt, Artificial Sequence
  Description of Artificial Sequence: Synthetic oligonucleotide
ccuacuggacacggaauuc

SEQ ID NO: 2943299 - RNA, 19 nt, Artificial Sequence
  Description of Artificial Sequence: Synthetic oligonucleotide
agggucauuuucacagcuu

SEQ ID NO: 2943300 - RNA, 19 nt, Artificial Sequence
  Description of Artificial Sequence: Synthetic oligonucleotide
cuccaaagacucaccgacu

SEQ ID NO: 2943301 - RNA, 19 nt, Artificial Sequence
  Description of Artificial Sequence: Synthetic oligonucleotide
uccucugccucggccucga

SEQ ID NO: 2943302 - RNA, 19 nt, Artificial Sequence
  Description of Artificial Sequence: Synthetic oligonucleotide
gcuucauccuagcggcgca

SEQ ID NO: 2943303 - RNA, 19 nt, Artificial Sequence
  Description of Artificial Sequence: Synthetic oligonucleotide
gcucaacauccacaaguaa

SEQ ID NO: 2943304 - RNA, 19 nt, Artificial Sequence
  Description of Artificial Sequence: Synthetic oligonucleotide
cgagcuccaaagacucacc

SEQ ID NO: 2943305 - RNA, 19 nt, Artificial Sequence
  Description of Artificial Sequence: Synthetic oligonucleotide
gguaagcugucugguagaa

SEQ ID NO: 2943306 - RNA, 19 nt, Artificial Sequence
  Description of Artificial Sequence: Synthetic oligonucleotide
ccucugguccuacuggaca

SEQ ID NO: 2943307 - RNA, 19 nt, Artificial Sequence
  Description of Artificial Sequence: Synthetic oligonucleotide
caguuucaugacucaauuu

SEQ ID NO: 2943308 - RNA, 19 nt, Artificial Sequence
  Description of Artificial Sequence: Synthetic oligonucleotide
cuaggaccuccucguccuc

SEQ ID NO: 2943309 - RNA, 19 nt, Artificial Sequence
  Description of Artificial Sequence: Synthetic oligonucleotide
gccucgaccucuuccugca

SEQ ID NO: 2943310 - RNA, 19 nt, Artificial Sequence
  Description of Artificial Sequence: Synthetic oligonucleotide
cagagguaagcugucuggu

SEQ ID NO: 2943311 - RNA, 19 nt, Artificial Sequence
  Description of Artificial Sequence: Synthetic oligonucleotide
ggacuuguguuccauucuu

SEQ ID NO: 2943312 - RNA, 19 nt, Artificial Sequence
  Description of Artificial Sequence: Synthetic oligonucleotide
gcuucccuuuucuuuagau

SEQ ID NO: 2943313 - RNA, 19 nt, Artificial Sequence
  Description of Artificial Sequence: Synthetic oligonucleotide
cauuaucgccuaggaccuc

SEQ ID NO: 2943314 - RNA, 19 nt, Artificial Sequence
  Description of Artificial Sequence: Synthetic oligonucleotide
cagcuuuaagauguguauu

SEQ ID NO: 2943315 - RNA, 19 nt, Artificial Sequence
  Description of Artificial Sequence: Synthetic oligonucleotide
ggaccuccucguccucugc

SEQ ID NO: 2943316 - RNA, 19 nt, Artificial Sequence
  Description of Artificial Sequence: Synthetic oligonucleotide
acacggaauucgagcucca

SEQ ID NO: 2943317 - RNA, 19 nt, Artificial Sequence
  Description of Artificial Sequence: Synthetic oligonucleotide
cccucugguccuacuggac

SEQ ID NO: 2943318 - RNA, 19 nt, Artificial Sequence
  Description of Artificial Sequence: Synthetic oligonucleotide
ccuaggaccuccucguccu

SEQ ID NO: 2943319 - RNA, 19 nt, Artificial Sequence
  Description of Artificial Sequence: Synthetic oligonucleotide
cauggacuuguguuccauu

SEQ ID NO: 2943320 - RNA, 19 nt, Artificial Sequence
  Description of Artificial Sequence: Synthetic oligonucleotide
cauccuagcggcgcagccu

SEQ ID NO: 2943321 - RNA, 19 nt, Artificial Sequence
  Description of Artificial Sequence: Synthetic oligonucleotide
cgcgaccacguccucuucc

SEQ ID NO: 2943322 - RNA, 19 nt, Artificial Sequence
  Description of Artificial Sequence: Synthetic oligonucleotide
ccucggauacucaauguuu

SEQ ID NO: 2943323 - RNA, 19 nt, Artificial Sequence
  Description of Artificial Sequence: Synthetic oligonucleotide
cggauacucaauguuucca

SEQ ID NO: 2943324 - RNA, 19 nt, Artificial Sequence
  Description of Artificial Sequence: Synthetic oligonucleotide
ccugcaacagcuucccuuu

SEQ ID NO: 2943325 - RNA, 19 nt, Artificial Sequence
  Description of Artificial Sequence: Synthetic oligonucleotide
guaagcugucugguagaau

SEQ ID NO: 2943326 - RNA, 19 nt, Artificial Sequence
  Description of Artificial Sequence: Synthetic oligonucleotide
cacggaauucgagcuccaa

SEQ ID NO: 2943327 - RNA, 19 nt, Artificial Sequence
  Description of Artificial Sequence: Synthetic oligonucleotide
ccuagcggcgcagccuccc

SEQ ID NO: 2943328 - RNA, 19 nt, Artificial Sequence
  Description of Artificial Sequence: Synthetic oligonucleotide
guacagguucucuguucuu

SEQ ID NO: 2943329 - RNA, 19 nt, Artificial Sequence
  Description of Artificial Sequence: Synthetic oligonucleotide
ggcguaugaauggccggaa

SEQ ID NO: 2943330 - RNA, 19 nt, Artificial Sequence
  Description of Artificial Sequence: Synthetic oligonucleotide
gcgaccacguccucuuccu

SEQ ID NO: 2943331 - RNA, 19 nt, Artificial Sequence
  Description of Artificial Sequence: Synthetic oligonucleotide
ggcgcagccucccucuggu

SEQ ID NO: 2943332 - RNA, 19 nt, Artificial Sequence
  Description of Artificial Sequence: Synthetic oligonucleotide
caacagcuucccuuuucuu

SEQ ID NO: 2943333 - RNA, 19 nt, Artificial Sequence
  Description of Artificial Sequence: Synthetic oligonucleotide
caucuacaccugugauugu

SEQ ID NO: 2943334 - RNA, 19 nt, Artificial Sequence
  Description of Artificial Sequence: Synthetic oligonucleotide
guccuacuggacacggaau

SEQ ID NO: 2943335 - RNA, 19 nt, Artificial Sequence
  Description of Artificial Sequence: Synthetic oligonucleotide
ccaacuguacagguucucu

SEQ ID NO: 2943336 - RNA, 19 nt, Artificial Sequence
  Description of Artificial Sequence: Synthetic oligonucleotide
caccgacuaggcguaugaa

SEQ ID NO: 2943337 - RNA, 19 nt, Artificial Sequence
  Description of Artificial Sequence: Synthetic oligonucleotide
cggauguuauuuccucgga

SEQ ID NO: 2943338 - RNA, 19 nt, Artificial Sequence
  Description of Artificial Sequence: Synthetic oligonucleotide
cgaccucuuccugcaacag

SEQ ID NO: 2943339 - RNA, 19 nt, Artificial Sequence
  Description of Artificial Sequence: Synthetic oligonucleotide
cugccucggccucgaccuc

SEQ ID NO: 2943340 - RNA, 19 nt, Artificial Sequence
  Description of Artificial Sequence: Synthetic oligonucleotide
acucaccgacuaggcguau

SEQ ID NO: 2943341 - RNA, 19 nt, Artificial Sequence
  Description of Artificial Sequence: Synthetic oligonucleotide
cuagcggcgcagccucccu

SEQ ID NO: 2943342 - RNA, 19 nt, Artificial Sequence
  Description of Artificial Sequence: Synthetic oligonucleotide
cucuguucuucagggucau

SEQ ID NO: 2943343 - RNA, 19 nt, Artificial Sequence
  Description of Artificial Sequence: Synthetic oligonucleotide
cggcgcagccucccucugg

SEQ ID NO: 2943344 - RNA, 19 nt, Artificial Sequence
  Description of Artificial Sequence: Synthetic oligonucleotide
gccgcgaccacguccucuu

SEQ ID NO: 2943345 - RNA, 19 nt, Artificial Sequence
  Description of Artificial Sequence: Synthetic oligonucleotide
cugccgcgaccacguccuc

SEQ ID NO: 2943346 - RNA, 19 nt, Artificial Sequence
  Description of Artificial Sequence: Synthetic oligonucleotide
gcggcgcagccucccucug

SEQ ID NO: 2943347 - RNA, 19 nt, Artificial Sequence
  Description of Artificial Sequence: Synthetic oligonucleotide
ccucguccucugccgcgac

SEQ ID NO: 2943348 - RNA, 19 nt, Artificial Sequence
  Description of Artificial Sequence: Synthetic oligonucleotide
cgaccacguccucuuccuc

SEQ ID NO: 2943349 - RNA, 19 nt, Artificial Sequence
  Description of Artificial Sequence: Synthetic oligonucleotide
cggccucgaccucuuccug

SEQ ID NO: 2943350 - RNA, 19 nt, Artificial Sequence
  Description of Artificial Sequence: Synthetic oligonucleotide
gcgcagccucccucugguc

SEQ ID NO: 2943351 - RNA, 19 nt, Artificial Sequence
  Description of Artificial Sequence: Synthetic oligonucleotide
cgccuaggaccuccucguc

SEQ ID NO: 2943352 - RNA, 19 nt, Artificial Sequence
  Description of Artificial Sequence: Synthetic oligonucleotide
cguccucugccgcgaccac

SEQ ID NO: 2943353 - RNA, 19 nt, Artificial Sequence
  Description of Artificial Sequence: Synthetic oligonucleotide
ccauggacuuguguuccau

SEQ ID NO: 2943354 - RNA, 19 nt, Artificial Sequence
  Description of Artificial Sequence: Synthetic oligonucleotide
ccucugccgcgaccacguc

SEQ ID NO: 2943355 - RNA, 19 nt, Artificial Sequence
  Description of Artificial Sequence: Synthetic oligonucleotide
ccgcgaccacguccucuuc

SEQ ID NO: 2943356 - RNA, 19 nt, Artificial Sequence
  Description of Artificial Sequence: Synthetic oligonucleotide
ccucgaccucuuccugcaa

SEQ ID NO: 2943357 - RNA, 19 nt, Artificial Sequence
  Description of Artificial Sequence: Synthetic oligonucleotide
cagccucccucugguccua

SEQ ID NO: 2943358 - RNA, 19 nt, Artificial Sequence
  Description of Artificial Sequence: Synthetic oligonucleotide
ccucugccucggccucgac

SEQ ID NO: 2943359 - RNA, 19 nt, Artificial Sequence
  Description of Artificial Sequence: Synthetic oligonucleotide
aauuccaagacuuucaucu

SEQ ID NO: 2943360 - RNA, 19 nt, Artificial Sequence
  Description of Artificial Sequence: Synthetic oligonucleotide
aauaugaaaugauccaagc

SEQ ID NO: 2943361 - RNA, 19 nt, Artificial Sequence
  Description of Artificial Sequence: Synthetic oligonucleotide
uaugaaaugauccaagcca

SEQ ID NO: 2943362 - RNA, 19 nt, Artificial Sequence
  Description of Artificial Sequence: Synthetic oligonucleotide
uccucuaugaagaugaugc

SEQ ID NO: 2943363 - RNA, 19 nt, Artificial Sequence
  Description of Artificial Sequence: Synthetic oligonucleotide
aaugcuggcauaaaauucc

SEQ ID NO: 2943364 - RNA, 19 nt, Artificial Sequence
  Description of Artificial Sequence: Synthetic oligonucleotide
aacaccuccucacugacac

SEQ ID NO: 2943365 - RNA, 19 nt, Artificial Sequence
  Description of Artificial Sequence: Synthetic oligonucleotide
auaugaaaugauccaagcc

SEQ ID NO: 2943366 - RNA, 19 nt, Artificial Sequence
  Description of Artificial Sequence: Synthetic oligonucleotide
uucaacacaucccagaaca

SEQ ID NO: 2943367 - RNA, 19 nt, Artificial Sequence
  Description of Artificial Sequence: Synthetic oligonucleotide
uaggcuauucaacacaucc

SEQ ID NO: 2943368 - RNA, 19 nt, Artificial Sequence
  Description of Artificial Sequence: Synthetic oligonucleotide
uccugcuuaacaaugcugg

SEQ ID NO: 2943369 - RNA, 19 nt, Artificial Sequence
  Description of Artificial Sequence: Synthetic oligonucleotide
augaagaugaugcauagga

SEQ ID NO: 2943370 - RNA, 19 nt, Artificial Sequence
  Description of Artificial Sequence: Synthetic oligonucleotide
acaauuguccucuaugaag

SEQ ID NO: 2943371 - RNA, 19 nt, Artificial Sequence
  Description of Artificial Sequence: Synthetic oligonucleotide
uaaaauuccaagacuuuca

SEQ ID NO: 2943372 - RNA, 19 nt, Artificial Sequence
  Description of Artificial Sequence: Synthetic oligonucleotide
cucacugacacaauugucc

SEQ ID NO: 2943373 - RNA, 19 nt, Artificial Sequence
  Description of Artificial Sequence: Synthetic oligonucleotide
aaauccucugugaugagac

SEQ ID NO: 2943374 - RNA, 19 nt, Artificial Sequence
  Description of Artificial Sequence: Synthetic oligonucleotide
uuguccucuaugaagauga

SEQ ID NO: 2943375 - RNA, 19 nt, Artificial Sequence
  Description of Artificial Sequence: Synthetic oligonucleotide
aggacaauuauaaccaggc

SEQ ID NO: 2943376 - RNA, 19 nt, Artificial Sequence
  Description of Artificial Sequence: Synthetic oligonucleotide
aaauaugaaaugauccaag

SEQ ID NO: 2943377 - RNA, 19 nt, Artificial Sequence
  Description of Artificial Sequence: Synthetic oligonucleotide
gaagaugaugcauaggaca

SEQ ID NO: 2943378 - RNA, 19 nt, Artificial Sequence
  Description of Artificial Sequence: Synthetic oligonucleotide
cauaggacaauuauaacca

SEQ ID NO: 2943379 - RNA, 19 nt, Artificial Sequence
  Description of Artificial Sequence: Synthetic oligonucleotide
auaaaauuccaagacuuuc

SEQ ID NO: 2943380 - RNA, 19 nt, Artificial Sequence
  Description of Artificial Sequence: Synthetic oligonucleotide
aaagccucugcauacuucu

SEQ ID NO: 2943381 - RNA, 19 nt, Artificial Sequence
  Description of Artificial Sequence: Synthetic oligonucleotide
ucuaggauccugcuuaaca

SEQ ID NO: 2943382 - RNA, 19 nt, Artificial Sequence
  Description of Artificial Sequence: Synthetic oligonucleotide
aaauuccaagacuuucauc

SEQ ID NO: 2943383 - RNA, 19 nt, Artificial Sequence
  Description of Artificial Sequence: Synthetic oligonucleotide
uaggacaauuauaaccagg

SEQ ID NO: 2943384 - RNA, 19 nt, Artificial Sequence
  Description of Artificial Sequence: Synthetic oligonucleotide
ugugaugagacuccugggc

SEQ ID NO: 2943385 - RNA, 19 nt, Artificial Sequence
  Description of Artificial Sequence: Synthetic oligonucleotide
uccaagacuuucaucuugg

SEQ ID NO: 2943386 - RNA, 19 nt, Artificial Sequence
  Description of Artificial Sequence: Synthetic oligonucleotide
ucuaugaagaugaugcaua

SEQ ID NO: 2943387 - RNA, 19 nt, Artificial Sequence
  Description of Artificial Sequence: Synthetic oligonucleotide
uggcauaaaauuccaagac

SEQ ID NO: 2943388 - RNA, 19 nt, Artificial Sequence
  Description of Artificial Sequence: Synthetic oligonucleotide
auuauaaccaggccugucu

SEQ ID NO: 2943389 - RNA, 19 nt, Artificial Sequence
  Description of Artificial Sequence: Synthetic oligonucleotide
aaugauccaagccagcaua

SEQ ID NO: 2943390 - RNA, 19 nt, Artificial Sequence
  Description of Artificial Sequence: Synthetic oligonucleotide
gcauaggacaauuauaacc

SEQ ID NO: 2943391 - RNA, 19 nt, Artificial Sequence
  Description of Artificial Sequence: Synthetic oligonucleotide
acaaaauccucugugauga

SEQ ID NO: 2943392 - RNA, 19 nt, Artificial Sequence
  Description of Artificial Sequence: Synthetic oligonucleotide
aaaauuccaagacuuucau

SEQ ID NO: 2943393 - RNA, 19 nt, Artificial Sequence
  Description of Artificial Sequence: Synthetic oligonucleotide
gacacaauuguccucuaug

SEQ ID NO: 2943394 - RNA, 19 nt, Artificial Sequence
  Description of Artificial Sequence: Synthetic oligonucleotide
acagcuguugggcaccugc

SEQ ID NO: 2943395 - RNA, 19 nt, Artificial Sequence
  Description of Artificial Sequence: Synthetic oligonucleotide
ucugcauaggcccucgggc

SEQ ID NO: 2943396 - RNA, 19 nt, Artificial Sequence
  Description of Artificial Sequence: Synthetic oligonucleotide
gacaauuauaaccaggccu

SEQ ID NO: 2943397 - RNA, 19 nt, Artificial Sequence
  Description of Artificial Sequence: Synthetic oligonucleotide
acaauuauaaccaggccug

SEQ ID NO: 2943398 - RNA, 19 nt, Artificial Sequence
  Description of Artificial Sequence: Synthetic oligonucleotide
gauccaagccagcauacag

SEQ ID NO: 2943399 - RNA, 19 nt, Artificial Sequence
  Description of Artificial Sequence: Synthetic oligonucleotide
uauucaacacaucccagaa

SEQ ID NO: 2943400 - RNA, 19 nt, Artificial Sequence
  Description of Artificial Sequence: Synthetic oligonucleotide
cucugcauacuucucaggg

SEQ ID NO: 2943401 - RNA, 19 nt, Artificial Sequence
  Description of Artificial Sequence: Synthetic oligonucleotide
ugaugcauaggacaauuau

SEQ ID NO: 2943402 - RNA, 19 nt, Artificial Sequence
  Description of Artificial Sequence: Synthetic oligonucleotide
gugguuucugcauaggccc

SEQ ID NO: 2943403 - RNA, 19 nt, Artificial Sequence
  Description of Artificial Sequence: Synthetic oligonucleotide
uccaagccagcauacagcc

SEQ ID NO: 2943404 - RNA, 19 nt, Artificial Sequence
  Description of Artificial Sequence: Synthetic oligonucleotide
caggguaggaucuaggauc

SEQ ID NO: 2943405 - RNA, 19 nt, Artificial Sequence
  Description of Artificial Sequence: Synthetic oligonucleotide
ugcuuaacaaugcuggcau

SEQ ID NO: 2943406 - RNA, 19 nt, Artificial Sequence
  Description of Artificial Sequence: Synthetic oligonucleotide
cacaggaacucauagcgag

SEQ ID NO: 2943407 - RNA, 19 nt, Artificial Sequence
  Description of Artificial Sequence: Synthetic oligonucleotide
cccaaauaugaaaugaucc

SEQ ID NO: 2943408 - RNA, 19 nt, Artificial Sequence
  Description of Artificial Sequence: Synthetic oligonucleotide
aauuauaaccaggccuguc

SEQ ID NO: 2943409 - RNA, 19 nt, Artificial Sequence
  Description of Artificial Sequence: Synthetic oligonucleotide
ugaagaugaugcauaggac

SEQ ID NO: 2943410 - RNA, 19 nt, Artificial Sequence
  Description of Artificial Sequence: Synthetic oligonucleotide
cuaugaagaugaugcauag

SEQ ID NO: 2943411 - RNA, 19 nt, Artificial Sequence
  Description of Artificial Sequence: Synthetic oligonucleotide
acacaauuguccucuauga

SEQ ID NO: 2943412 - RNA, 19 nt, Artificial Sequence
  Description of Artificial Sequence: Synthetic oligonucleotide
ugcacaaaauccucuguga

SEQ ID NO: 2943413 - RNA, 19 nt, Artificial Sequence
  Description of Artificial Sequence: Synthetic oligonucleotide
uuccaagacuuucaucuug

SEQ ID NO: 2943414 - RNA, 19 nt, Artificial Sequence
  Description of Artificial Sequence: Synthetic oligonucleotide
uucugcauaggcccucggg

SEQ ID NO: 2943415 - RNA, 19 nt, Artificial Sequence
  Description of Artificial Sequence: Synthetic oligonucleotide
aacacaucccagaacaccu

SEQ ID NO: 2943416 - RNA, 19 nt, Artificial Sequence
  Description of Artificial Sequence: Synthetic oligonucleotide
caauuguccucuaugaaga

SEQ ID NO: 2943417 - RNA, 19 nt, Artificial Sequence
  Description of Artificial Sequence: Synthetic oligonucleotide
cucauagcgaggaggacag

SEQ ID NO: 2943418 - RNA, 19 nt, Artificial Sequence
  Description of Artificial Sequence: Synthetic oligonucleotide
aaaugauccaagccagcau

SEQ ID NO: 2943419 - RNA, 19 nt, Artificial Sequence
  Description of Artificial Sequence: Synthetic oligonucleotide
caaugcuggcauaaaauuc

SEQ ID NO: 2943420 - RNA, 19 nt, Artificial Sequence
  Description of Artificial Sequence: Synthetic oligonucleotide
agaacaccuccucacugac

SEQ ID NO: 2943421 - RNA, 19 nt, Artificial Sequence
  Description of Artificial Sequence: Synthetic oligonucleotide
aggaggacagcuguugggc

SEQ ID NO: 2943422 - RNA, 19 nt, Artificial Sequence
  Description of Artificial Sequence: Synthetic oligonucleotide
augaaaugauccaagccag

SEQ ID NO: 2943423 - RNA, 19 nt, Artificial Sequence
  Description of Artificial Sequence: Synthetic oligonucleotide
auaaccaggccugucuugg

SEQ ID NO: 2943424 - RNA, 19 nt, Artificial Sequence
  Description of Artificial Sequence: Synthetic oligonucleotide
uaugaagaugaugcauagg

SEQ ID NO: 2943425 - RNA, 19 nt, Artificial Sequence
  Description of Artificial Sequence: Synthetic oligonucleotide
gcuggcauaaaauuccaag

SEQ ID NO: 2943426 - RNA, 19 nt, Artificial Sequence
  Description of Artificial Sequence: Synthetic oligonucleotide
ugaaaugauccaagccagc

SEQ ID NO: 2943427 - RNA, 19 nt, Artificial Sequence
  Description of Artificial Sequence: Synthetic oligonucleotide
auaggacaauuauaaccag

SEQ ID NO: 2943428 - RNA, 19 nt, Artificial Sequence
  Description of Artificial Sequence: Synthetic oligonucleotide
acugacacaauuguccucu

SEQ ID NO: 2943429 - RNA, 19 nt, Artificial Sequence
  Description of Artificial Sequence: Synthetic oligonucleotide
cacaaaauccucugugaug

SEQ ID NO: 2943430 - RNA, 19 nt, Artificial Sequence
  Description of Artificial Sequence: Synthetic oligonucleotide
aagaugaugcauaggacaa

SEQ ID NO: 2943431 - RNA, 19 nt, Artificial Sequence
  Description of Artificial Sequence: Synthetic oligonucleotide
ucaucuuggugguuucugc

SEQ ID NO: 2943432 - RNA, 19 nt, Artificial Sequence
  Description of Artificial Sequence: Synthetic oligonucleotide
ucucaggguaggaucuagg

SEQ ID NO: 2943433 - RNA, 19 nt, Artificial Sequence
  Description of Artificial Sequence: Synthetic oligonucleotide
cccacaggaacucauagcg

SEQ ID NO: 2943434 - RNA, 19 nt, Artificial Sequence
  Description of Artificial Sequence: Synthetic oligonucleotide
cuccacauacccuuccugc

SEQ ID NO: 2943435 - RNA, 19 nt, Artificial Sequence
  Description of Artificial Sequence: Synthetic oligonucleotide
uggugguuucugcauaggc

SEQ ID NO: 2943436 - RNA, 19 nt, Artificial Sequence
  Description of Artificial Sequence: Synthetic oligonucleotide
ucacugacacaauuguccu

SEQ ID NO: 2943437 - RNA, 19 nt, Artificial Sequence
  Description of Artificial Sequence: Synthetic oligonucleotide
aaaauccucugugaugaga

SEQ ID NO: 2943438 - RNA, 19 nt, Artificial Sequence
  Description of Artificial Sequence: Synthetic oligonucleotide
uugcugcucccucaaagcc

SEQ ID NO: 2943439 - RNA, 19 nt, Artificial Sequence
  Description of Artificial Sequence: Synthetic oligonucleotide
augcauaggacaauuauaa

SEQ ID NO: 2943440 - RNA, 19 nt, Artificial Sequence
  Description of Artificial Sequence: Synthetic oligonucleotide
aggguaggaucuaggaucc

SEQ ID NO: 2943441 - RNA, 19 nt, Artificial Sequence
  Description of Artificial Sequence: Synthetic oligonucleotide
gaggaggacagcuguuggg

SEQ ID NO: 2943442 - RNA, 19 nt, Artificial Sequence
  Description of Artificial Sequence: Synthetic oligonucleotide
gaaaugauccaagccagca

SEQ ID NO: 2943443 - RNA, 19 nt, Artificial Sequence
  Description of Artificial Sequence: Synthetic oligonucleotide
cuggcauaaaauuccaaga

SEQ ID NO: 2943444 - RNA, 19 nt, Artificial Sequence
  Description of Artificial Sequence: Synthetic oligonucleotide
cugccuguacuccacauac

SEQ ID NO: 2943445 - RNA, 19 nt, Artificial Sequence
  Description of Artificial Sequence: Synthetic oligonucleotide
aggcuauucaacacauccc

SEQ ID NO: 2943446 - RNA, 19 nt, Artificial Sequence
  Description of Artificial Sequence: Synthetic oligonucleotide
uacuucucaggguaggauc

SEQ ID NO: 2943447 - RNA, 19 nt, Artificial Sequence
  Description of Artificial Sequence: Synthetic oligonucleotide
caagacuuucaucuuggug

SEQ ID NO: 2943448 - RNA, 19 nt, Artificial Sequence
  Description of Artificial Sequence: Synthetic oligonucleotide
ugcauacuucucaggguag

SEQ ID NO: 2943449 - RNA, 19 nt, Artificial Sequence
  Description of Artificial Sequence: Synthetic oligonucleotide
uauaaccaggccugucuug

SEQ ID NO: 2943450 - RNA, 19 nt, Artificial Sequence
  Description of Artificial Sequence: Synthetic oligonucleotide
ucugcauacuucucagggu

SEQ ID NO: 2943451 - RNA, 19 nt, Artificial Sequence
  Description of Artificial Sequence: Synthetic oligonucleotide
cuauucaacacaucccaga

SEQ ID NO: 2943452 - RNA, 19 nt, Artificial Sequence
  Description of Artificial Sequence: Synthetic oligonucleotide
ucuuggguacaccuacaac

SEQ ID NO: 2943453 - RNA, 19 nt, Artificial Sequence
  Description of Artificial Sequence: Synthetic oligonucleotide
uccccaaauaugaaaugau

SEQ ID NO: 2943454 - RNA, 19 nt, Artificial Sequence
  Description of Artificial Sequence: Synthetic oligonucleotide
ggaacucauagcgaggagg

SEQ ID NO: 2943455 - RNA, 19 nt, Artificial Sequence
  Description of Artificial Sequence: Synthetic oligonucleotide
auccucugugaugagacuc

SEQ ID NO: 2943456 - RNA, 19 nt, Artificial Sequence
  Description of Artificial Sequence: Synthetic oligonucleotide
agcccuaggcuauucaaca

SEQ ID NO: 2943457 - RNA, 19 nt, Artificial Sequence
  Description of Artificial Sequence: Synthetic oligonucleotide
uccugcacaaaauccucug

SEQ ID NO: 2943458 - RNA, 19 nt, Artificial Sequence
  Description of Artificial Sequence: Synthetic oligonucleotide
acccuuccugcacaaaauc

SEQ ID NO: 2943459 - RNA, 19 nt, Artificial Sequence
  Description of Artificial Sequence: Synthetic oligonucleotide
ugcauaggacaauuauaac

SEQ ID NO: 2943460 - RNA, 19 nt, Artificial Sequence
  Description of Artificial Sequence: Synthetic oligonucleotide
uuauaaccaggccugucuu

SEQ ID NO: 2943461 - RNA, 19 nt, Artificial Sequence
  Description of Artificial Sequence: Synthetic oligonucleotide
aauuguccucuaugaagau

SEQ ID NO: 2943462 - RNA, 19 nt, Artificial Sequence
  Description of Artificial Sequence: Synthetic oligonucleotide
caacacaucccagaacacc

SEQ ID NO: 2943463 - RNA, 19 nt, Artificial Sequence
  Description of Artificial Sequence: Synthetic oligonucleotide
uccacauacccuuccugca

SEQ ID NO: 2943464 - RNA, 19 nt, Artificial Sequence
  Description of Artificial Sequence: Synthetic oligonucleotide
uugggcaccugccuguacu

SEQ ID NO: 2943465 - RNA, 19 nt, Artificial Sequence
  Description of Artificial Sequence: Synthetic oligonucleotide
auacccuuccugcacaaaa

SEQ ID NO: 2943466 - RNA, 19 nt, Artificial Sequence
  Description of Artificial Sequence: Synthetic oligonucleotide
cugucuuggguacaccuac

SEQ ID NO: 2943467 - RNA, 19 nt, Artificial Sequence
  Description of Artificial Sequence: Synthetic oligonucleotide
acucauagcgaggaggaca

SEQ ID NO: 2943468 - RNA, 19 nt, Artificial Sequence
  Description of Artificial Sequence: Synthetic oligonucleotide
agacuuucaucuugguggu

SEQ ID NO: 2943469 - RNA, 19 nt, Artificial Sequence
  Description of Artificial Sequence: Synthetic oligonucleotide
gaacucauagcgaggagga

SEQ ID NO: 2943470 - RNA, 19 nt, Artificial Sequence
  Description of Artificial Sequence: Synthetic oligonucleotide
aauccucugugaugagacu

SEQ ID NO: 2943471 - RNA, 19 nt, Artificial Sequence
  Description of Artificial Sequence: Synthetic oligonucleotide
uuuuacacgacugggcguu

SEQ ID NO: 2943472 - RNA, 19 nt, Artificial Sequence
  Description of Artificial Sequence: Synthetic oligonucleotide
ucaacacaucccagaacac

SEQ ID NO: 2943473 - RNA, 19 nt, Artificial Sequence
  Description of Artificial Sequence: Synthetic oligonucleotide
aacucauagcgaggaggac

SEQ ID NO: 2943474 - RNA, 19 nt, Artificial Sequence
  Description of Artificial Sequence: Synthetic oligonucleotide
gaugcauaggacaauuaua

SEQ ID NO: 2943475 - RNA, 19 nt, Artificial Sequence
  Description of Artificial Sequence: Synthetic oligonucleotide
cugcauaggcccucgggcc

SEQ ID NO: 2943476 - RNA, 19 nt, Artificial Sequence
  Description of Artificial Sequence: Synthetic oligonucleotide
ugcauaggcccucgggccc

SEQ ID NO: 2943477 - RNA, 19 nt, Artificial Sequence
  Description of Artificial Sequence: Synthetic oligonucleotide
cuccucacugacacaauug

SEQ ID NO: 2943478 - RNA, 19 nt, Artificial Sequence
  Description of Artificial Sequence: Synthetic oligonucleotide
caaauaugaaaugauccaa

SEQ ID NO: 2943479 - RNA, 19 nt, Artificial Sequence
  Description of Artificial Sequence: Synthetic oligonucleotide
uuccugcacaaaauccucu

SEQ ID NO: 2943480 - RNA, 19 nt, Artificial Sequence
  Description of Artificial Sequence: Synthetic oligonucleotide
guaggaucuaggauccugc

SEQ ID NO: 2943481 - RNA, 19 nt, Artificial Sequence
  Description of Artificial Sequence: Synthetic oligonucleotide
cuaggauccugcuuaacaa

SEQ ID NO: 2943482 - RNA, 19 nt, Artificial Sequence
  Description of Artificial Sequence: Synthetic oligonucleotide
gaugagacuccugggcucc

SEQ ID NO: 2943483 - RNA, 19 nt, Artificial Sequence
  Description of Artificial Sequence: Synthetic oligonucleotide
cugugaugagacuccuggg

SEQ ID NO: 2943484 - RNA, 19 nt, Artificial Sequence
  Description of Artificial Sequence: Synthetic oligonucleotide
ggcuauucaacacauccca

SEQ ID NO: 2943485 - RNA, 19 nt, Artificial Sequence
  Description of Artificial Sequence: Synthetic oligonucleotide
ugcugcucccucaaagccu

SEQ ID NO: 2943486 - RNA, 19 nt, Artificial Sequence
  Description of Artificial Sequence: Synthetic oligonucleotide
ucccagaacaccuccucac

SEQ ID NO: 2943487 - RNA, 19 nt, Artificial Sequence
  Description of Artificial Sequence: Synthetic oligonucleotide
cuuccugcacaaaauccuc

SEQ ID NO: 2943488 - RNA, 19 nt, Artificial Sequence
  Description of Artificial Sequence: Synthetic oligonucleotide
aaccaggccugucuugggu

SEQ ID NO: 2943489 - RNA, 19 nt, Artificial Sequence
  Description of Artificial Sequence: Synthetic oligonucleotide
uagcgaggaggacagcugu

SEQ ID NO: 2943490 - RNA, 19 nt, Artificial Sequence
  Description of Artificial Sequence: Synthetic oligonucleotide
ucuuggugguuucugcaua

SEQ ID NO: 2943491 - RNA, 19 nt, Artificial Sequence
  Description of Artificial Sequence: Synthetic oligonucleotide
augauccaagccagcauac

SEQ ID NO: 2943492 - RNA, 19 nt, Artificial Sequence
  Description of Artificial Sequence: Synthetic oligonucleotide
ccaaauaugaaaugaucca

SEQ ID NO: 2943493 - RNA, 19 nt, Artificial Sequence
  Description of Artificial Sequence: Synthetic oligonucleotide
cacaucccagaacaccucc

SEQ ID NO: 2943494 - RNA, 19 nt, Artificial Sequence
  Description of Artificial Sequence: Synthetic oligonucleotide
acgacugggcguucucugg

SEQ ID NO: 2943495 - RNA, 19 nt, Artificial Sequence
  Description of Artificial Sequence: Synthetic oligonucleotide
ugaugagacuccugggcuc

SEQ ID NO: 2943496 - RNA, 19 nt, Artificial Sequence
  Description of Artificial Sequence: Synthetic oligonucleotide
uaggauccugcuuaacaau

SEQ ID NO: 2943497 - RNA, 19 nt, Artificial Sequence
  Description of Artificial Sequence: Synthetic oligonucleotide
auuguccucuaugaagaug

SEQ ID NO: 2943498 - RNA, 19 nt, Artificial Sequence
  Description of Artificial Sequence: Synthetic oligonucleotide
ggaucuaggauccugcuua

SEQ ID NO: 2943499 - RNA, 19 nt, Artificial Sequence
  Description of Artificial Sequence: Synthetic oligonucleotide
uuaacaaugcuggcauaaa

SEQ ID NO: 2943500 - RNA, 19 nt, Artificial Sequence
  Description of Artificial Sequence: Synthetic oligonucleotide
aggacagcuguugggcacc

SEQ ID NO: 2943501 - RNA, 19 nt, Artificial Sequence
  Description of Artificial Sequence: Synthetic oligonucleotide
uccugggcuccccaaauau

SEQ ID NO: 2943502 - RNA, 19 nt, Artificial Sequence
  Description of Artificial Sequence: Synthetic oligonucleotide
acuccacauacccuuccug

SEQ ID NO: 2943503 - RNA, 19 nt, Artificial Sequence
  Description of Artificial Sequence: Synthetic oligonucleotide
gccuguacuccacauaccc

SEQ ID NO: 2943504 - RNA, 19 nt, Artificial Sequence
  Description of Artificial Sequence: Synthetic oligonucleotide
agccucugcauacuucuca

SEQ ID NO: 2943505 - RNA, 19 nt, Artificial Sequence
  Description of Artificial Sequence: Synthetic oligonucleotide
cugggcuccccaaauauga

SEQ ID NO: 2943506 - RNA, 19 nt, Artificial Sequence
  Description of Artificial Sequence: Synthetic oligonucleotide
ggugguuucugcauaggcc

SEQ ID NO: 2943507 - RNA, 19 nt, Artificial Sequence
  Description of Artificial Sequence: Synthetic oligonucleotide
uacuccacauacccuuccu

SEQ ID NO: 2943508 - RNA, 19 nt, Artificial Sequence
  Description of Artificial Sequence: Synthetic oligonucleotide
ccagcauacagcccuaggc

SEQ ID NO: 2943509 - RNA, 19 nt, Artificial Sequence
  Description of Artificial Sequence: Synthetic oligonucleotide
ugucuuggguacaccuaca

SEQ ID NO: 2943510 - RNA, 19 nt, Artificial Sequence
  Description of Artificial Sequence: Synthetic oligonucleotide
gaggacagcuguugggcac

SEQ ID NO: 2943511 - RNA, 19 nt, Artificial Sequence
  Description of Artificial Sequence: Synthetic oligonucleotide
cuaggcccgcucuugcugc

SEQ ID NO: 2943512 - RNA, 19 nt, Artificial Sequence
  Description of Artificial Sequence: Synthetic oligonucleotide
aggauccugcuuaacaaug

SEQ ID NO: 2943513 - RNA, 19 nt, Artificial Sequence
  Description of Artificial Sequence: Synthetic oligonucleotide
uacccuuccugcacaaaau

SEQ ID NO: 2943514 - RNA, 19 nt, Artificial Sequence
  Description of Artificial Sequence: Synthetic oligonucleotide
uaaccaggccugucuuggg

SEQ ID NO: 2943515 - RNA, 19 nt, Artificial Sequence
  Description of Artificial Sequence: Synthetic oligonucleotide
uacagcccuaggcuauuca

SEQ ID NO: 2943516 - RNA, 19 nt, Artificial Sequence
  Description of Artificial Sequence: Synthetic oligonucleotide
uuucugcauaggcccucgg

SEQ ID NO: 2943517 - RNA, 19 nt, Artificial Sequence
  Description of Artificial Sequence: Synthetic oligonucleotide
uaggaucuaggauccugcu

SEQ ID NO: 2943518 - RNA, 19 nt, Artificial Sequence
  Description of Artificial Sequence: Synthetic oligonucleotide
acuucucaggguaggaucu

SEQ ID NO: 2943519 - RNA, 19 nt, Artificial Sequence
  Description of Artificial Sequence: Synthetic oligonucleotide
agcauacagcccuaggcua

SEQ ID NO: 2943520 - RNA, 19 nt, Artificial Sequence
  Description of Artificial Sequence: Synthetic oligonucleotide
ggacaauuauaaccaggcc

SEQ ID NO: 2943521 - RNA, 19 nt, Artificial Sequence
  Description of Artificial Sequence: Synthetic oligonucleotide
uucucaggguaggaucuag

SEQ ID NO: 2943522 - RNA, 19 nt, Artificial Sequence
  Description of Artificial Sequence: Synthetic oligonucleotide
caaagccucugcauacuuc

SEQ ID NO: 2943523 - RNA, 19 nt, Artificial Sequence
  Description of Artificial Sequence: Synthetic oligonucleotide
aucuuggugguuucugcau

SEQ ID NO: 2943524 - RNA, 19 nt, Artificial Sequence
  Description of Artificial Sequence: Synthetic oligonucleotide
cguucucuggccuaggccc

SEQ ID NO: 2943525 - RNA, 19 nt, Artificial Sequence
  Description of Artificial Sequence: Synthetic oligonucleotide
acaggaacucauagcgagg

SEQ ID NO: 2943526 - RNA, 19 nt, Artificial Sequence
  Description of Artificial Sequence: Synthetic oligonucleotide
ucuggccuaggcccgcucu

SEQ ID NO: 2943527 - RNA, 19 nt, Artificial Sequence
  Description of Artificial Sequence: Synthetic oligonucleotide
ugccuguacuccacauacc

SEQ ID NO: 2943528 - RNA, 19 nt, Artificial Sequence
  Description of Artificial Sequence: Synthetic oligonucleotide
ugacacaauuguccucuau

SEQ ID NO: 2943529 - RNA, 19 nt, Artificial Sequence
  Description of Artificial Sequence: Synthetic oligonucleotide
acagcccuaggcuauucaa

SEQ ID NO: 2943530 - RNA, 19 nt, Artificial Sequence
  Description of Artificial Sequence: Synthetic oligonucleotide
uuggugguuucugcauagg

SEQ ID NO: 2943531 - RNA, 19 nt, Artificial Sequence
  Description of Artificial Sequence: Synthetic oligonucleotide
aggaacucauagcgaggag

SEQ ID NO: 2943532 - RNA, 19 nt, Artificial Sequence
  Description of Artificial Sequence: Synthetic oligonucleotide
cagcccuaggcuauucaac

SEQ ID NO: 2943533 - RNA, 19 nt, Artificial Sequence
  Description of Artificial Sequence: Synthetic oligonucleotide
ugguuucugcauaggcccu

SEQ ID NO: 2943534 - RNA, 19 nt, Artificial Sequence
  Description of Artificial Sequence: Synthetic oligonucleotide
guuucugcauaggcccucg

SEQ ID NO: 2943535 - RNA, 19 nt, Artificial Sequence
  Description of Artificial Sequence: Synthetic oligonucleotide
cuccccaaauaugaaauga

SEQ ID NO: 2943536 - RNA, 19 nt, Artificial Sequence
  Description of Artificial Sequence: Synthetic oligonucleotide
guacuccacauacccuucc

SEQ ID NO: 2943537 - RNA, 19 nt, Artificial Sequence
  Description of Artificial Sequence: Synthetic oligonucleotide
gacugggcguucucuggcc

SEQ ID NO: 2943538 - RNA, 19 nt, Artificial Sequence
  Description of Artificial Sequence: Synthetic oligonucleotide
ugauccaagccagcauaca

SEQ ID NO: 2943539 - RNA, 19 nt, Artificial Sequence
  Description of Artificial Sequence: Synthetic oligonucleotide
caucuuggugguuucugca

SEQ ID NO: 2943540 - RNA, 19 nt, Artificial Sequence
  Description of Artificial Sequence: Synthetic oligonucleotide
auuccaagacuuucaucuu

SEQ ID NO: 2943541 - RNA, 19 nt, Artificial Sequence
  Description of Artificial Sequence: Synthetic oligonucleotide
caaaauccucugugaugag

SEQ ID NO: 2943542 - RNA, 19 nt, Artificial Sequence
  Description of Artificial Sequence: Synthetic oligonucleotide
cagaacaccuccucacuga

SEQ ID NO: 2943543 - RNA, 19 nt, Artificial Sequence
  Description of Artificial Sequence: Synthetic oligonucleotide
cugcauacuucucagggua

SEQ ID NO: 2943544 - RNA, 19 nt, Artificial Sequence
  Description of Artificial Sequence: Synthetic oligonucleotide
ugcuggcauaaaauuccaa

SEQ ID NO: 2943545 - RNA, 19 nt, Artificial Sequence
  Description of Artificial Sequence: Synthetic oligonucleotide
ggcauaaaauuccaagacu

SEQ ID NO: 2943546 - RNA, 19 nt, Artificial Sequence
  Description of Artificial Sequence: Synthetic oligonucleotide
gauccugcuuaacaaugcu

SEQ ID NO: 2943547 - RNA, 19 nt, Artificial Sequence
  Description of Artificial Sequence: Synthetic oligonucleotide
caucccagaacaccuccuc

SEQ ID NO: 2943548 - RNA, 19 nt, Artificial Sequence
  Description of Artificial Sequence: Synthetic oligonucleotide
ucccucaaagccucugcau

SEQ ID NO: 2943549 - RNA, 19 nt, Artificial Sequence
  Description of Artificial Sequence: Synthetic oligonucleotide
auccugcuuaacaaugcug

SEQ ID NO: 2943550 - RNA, 19 nt, Artificial Sequence
  Description of Artificial Sequence: Synthetic oligonucleotide
cccuuccugcacaaaaucc

SEQ ID NO: 2943551 - RNA, 19 nt, Artificial Sequence
  Description of Artificial Sequence: Synthetic oligonucleotide
auagcgaggaggacagcug

SEQ ID NO: 2943552 - RNA, 19 nt, Artificial Sequence
  Description of Artificial Sequence: Synthetic oligonucleotide
gguaggaucuaggauccug

SEQ ID NO: 2943553 - RNA, 19 nt, Artificial Sequence
  Description of Artificial Sequence: Synthetic oligonucleotide
cacgacugggcguucucug

SEQ ID NO: 2943554 - RNA, 19 nt, Artificial Sequence
  Description of Artificial Sequence: Synthetic oligonucleotide
cagcuguugggcaccugcc

SEQ ID NO: 2943555 - RNA, 19 nt, Artificial Sequence
  Description of Artificial Sequence: Synthetic oligonucleotide
cuaggcuauucaacacauc

SEQ ID NO: 2943556 - RNA, 19 nt, Artificial Sequence
  Description of Artificial Sequence: Synthetic oligonucleotide
cugcuuaacaaugcuggca

SEQ ID NO: 2943557 - RNA, 19 nt, Artificial Sequence
  Description of Artificial Sequence: Synthetic oligonucleotide
gugaugagacuccugggcu

SEQ ID NO: 2943558 - RNA, 19 nt, Artificial Sequence
  Description of Artificial Sequence: Synthetic oligonucleotide
aggaucuaggauccugcuu

SEQ ID NO: 2943559 - RNA, 19 nt, Artificial Sequence
  Description of Artificial Sequence: Synthetic oligonucleotide
aagccucugcauacuucuc

SEQ ID NO: 2943560 - RNA, 19 nt, Artificial Sequence
  Description of Artificial Sequence: Synthetic oligonucleotide
guucucuggccuaggcccg

SEQ ID NO: 2943561 - RNA, 19 nt, Artificial Sequence
  Description of Artificial Sequence: Synthetic oligonucleotide
ccccaaauaugaaaugauc

SEQ ID NO: 2943562 - RNA, 19 nt, Artificial Sequence
  Description of Artificial Sequence: Synthetic oligonucleotide
gaugaugcauaggacaauu

SEQ ID NO: 2943563 - RNA, 19 nt, Artificial Sequence
  Description of Artificial Sequence: Synthetic oligonucleotide
cacaauuguccucuaugaa

SEQ ID NO: 2943564 - RNA, 19 nt, Artificial Sequence
  Description of Artificial Sequence: Synthetic oligonucleotide
gaucuaggauccugcuuaa

SEQ ID NO: 2943565 - RNA, 19 nt, Artificial Sequence
  Description of Artificial Sequence: Synthetic oligonucleotide
auacuucucaggguaggau

SEQ ID NO: 2943566 - RNA, 19 nt, Artificial Sequence
  Description of Artificial Sequence: Synthetic oligonucleotide
caggaacucauagcgagga

SEQ ID NO: 2943567 - RNA, 19 nt, Artificial Sequence
  Description of Artificial Sequence: Synthetic oligonucleotide
ggauccugcuuaacaaugc

SEQ ID NO: 2943568 - RNA, 19 nt, Artificial Sequence
  Description of Artificial Sequence: Synthetic oligonucleotide
guccucuaugaagaugaug

SEQ ID NO: 2943569 - RNA, 19 nt, Artificial Sequence
  Description of Artificial Sequence: Synthetic oligonucleotide
ugggcuccccaaauaugaa

SEQ ID NO: 2943570 - RNA, 19 nt, Artificial Sequence
  Description of Artificial Sequence: Synthetic oligonucleotide
gccucugcauacuucucag

SEQ ID NO: 2943571 - RNA, 19 nt, Artificial Sequence
  Description of Artificial Sequence: Synthetic oligonucleotide
acacaucccagaacaccuc

SEQ ID NO: 2943572 - RNA, 19 nt, Artificial Sequence
  Description of Artificial Sequence: Synthetic oligonucleotide
gcauacuucucaggguagg

SEQ ID NO: 2943573 - RNA, 19 nt, Artificial Sequence
  Description of Artificial Sequence: Synthetic oligonucleotide
ugggcguucucuggccuag

SEQ ID NO: 2943574 - RNA, 19 nt, Artificial Sequence
  Description of Artificial Sequence: Synthetic oligonucleotide
acugggcguucucuggccu

SEQ ID NO: 2943575 - RNA, 19 nt, Artificial Sequence
  Description of Artificial Sequence: Synthetic oligonucleotide
uacacgacugggcguucuc

SEQ ID NO: 2943576 - RNA, 19 nt, Artificial Sequence
  Description of Artificial Sequence: Synthetic oligonucleotide
cacugacacaauuguccuc

SEQ ID NO: 2943577 - RNA, 19 nt, Artificial Sequence
  Description of Artificial Sequence: Synthetic oligonucleotide
cucugugaugagacuccug

SEQ ID NO: 2943578 - RNA, 19 nt, Artificial Sequence
  Description of Artificial Sequence: Synthetic oligonucleotide
gcuauucaacacaucccag

SEQ ID NO: 2943579 - RNA, 19 nt, Artificial Sequence
  Description of Artificial Sequence: Synthetic oligonucleotide
aggccugucuuggguacac

SEQ ID NO: 2943580 - RNA, 19 nt, Artificial Sequence
  Description of Artificial Sequence: Synthetic oligonucleotide
gcuguugggcaccugccug

SEQ ID NO: 2943581 - RNA, 19 nt, Artificial Sequence
  Description of Artificial Sequence: Synthetic oligonucleotide
acuccugggcuccccaaau

SEQ ID NO: 2943582 - RNA, 19 nt, Artificial Sequence
  Description of Artificial Sequence: Synthetic oligonucleotide
cacauacccuuccugcaca

SEQ ID NO: 2943583 - RNA, 19 nt, Artificial Sequence
  Description of Artificial Sequence: Synthetic oligonucleotide
uguccucuaugaagaugau

SEQ ID NO: 2943584 - RNA, 19 nt, Artificial Sequence
  Description of Artificial Sequence: Synthetic oligonucleotide
ccugcuuaacaaugcuggc

SEQ ID NO: 2943585 - RNA, 19 nt, Artificial Sequence
  Description of Artificial Sequence: Synthetic oligonucleotide
gucuuggguacaccuacaa

SEQ ID NO: 2943586 - RNA, 19 nt, Artificial Sequence
  Description of Artificial Sequence: Synthetic oligonucleotide
gcauaaaauuccaagacuu

SEQ ID NO: 2943587 - RNA, 19 nt, Artificial Sequence
  Description of Artificial Sequence: Synthetic oligonucleotide
auacagcccuaggcuauuc

SEQ ID NO: 2943588 - RNA, 19 nt, Artificial Sequence
  Description of Artificial Sequence: Synthetic oligonucleotide
acauacccuuccugcacaa

SEQ ID NO: 2943589 - RNA, 19 nt, Artificial Sequence
  Description of Artificial Sequence: Synthetic oligonucleotide
cagcauacagcccuaggcu

SEQ ID NO: 2943590 - RNA, 19 nt, Artificial Sequence
  Description of Artificial Sequence: Synthetic oligonucleotide
agaugaugcauaggacaau

SEQ ID NO: 2943591 - RNA, 19 nt, Artificial Sequence
  Description of Artificial Sequence: Synthetic oligonucleotide
uuacacgacugggcguucu

SEQ ID NO: 2943592 - RNA, 19 nt, Artificial Sequence
  Description of Artificial Sequence: Synthetic oligonucleotide
gcuccccaaauaugaaaug

SEQ ID NO: 2943593 - RNA, 19 nt, Artificial Sequence
  Description of Artificial Sequence: Synthetic oligonucleotide
ugggcaccugccuguacuc

SEQ ID NO: 2943594 - RNA, 19 nt, Artificial Sequence
  Description of Artificial Sequence: Synthetic oligonucleotide
cauacuucucaggguagga

SEQ ID NO: 2943595 - RNA, 19 nt, Artificial Sequence
  Description of Artificial Sequence: Synthetic oligonucleotide
gccccacaggaacucauag

SEQ ID NO: 2943596 - RNA, 19 nt, Artificial Sequence
  Description of Artificial Sequence: Synthetic oligonucleotide
accaggccugucuugggua

SEQ ID NO: 2943597 - RNA, 19 nt, Artificial Sequence
  Description of Artificial Sequence: Synthetic oligonucleotide
ugagacuccugggcucccc

SEQ ID NO: 2943598 - RNA, 19 nt, Artificial Sequence
  Description of Artificial Sequence: Synthetic oligonucleotide
augagacuccugggcuccc

SEQ ID NO: 2943599 - RNA, 19 nt, Artificial Sequence
  Description of Artificial Sequence: Synthetic oligonucleotide
ugcucccucaaagccucug

SEQ ID NO: 2943600 - RNA, 19 nt, Artificial Sequence
  Description of Artificial Sequence: Synthetic oligonucleotide
ccagaacaccuccucacug

SEQ ID NO: 2943601 - RNA, 19 nt, Artificial Sequence
  Description of Artificial Sequence: Synthetic oligonucleotide
cauagcgaggaggacagcu

SEQ ID NO: 2943602 - RNA, 19 nt, Artificial Sequence
  Description of Artificial Sequence: Synthetic oligonucleotide
cucccucaaagccucugca

SEQ ID NO: 2943603 - RNA, 19 nt, Artificial Sequence
  Description of Artificial Sequence: Synthetic oligonucleotide
gccagcauacagcccuagg

SEQ ID NO: 2943604 - RNA, 19 nt, Artificial Sequence
  Description of Artificial Sequence: Synthetic oligonucleotide
augcuggcauaaaauucca

SEQ ID NO: 2943605 - RNA, 19 nt, Artificial Sequence
  Description of Artificial Sequence: Synthetic oligonucleotide
gcguucucuggccuaggcc

SEQ ID NO: 2943606 - RNA, 19 nt, Artificial Sequence
  Description of Artificial Sequence: Synthetic oligonucleotide
accugccuguacuccacau

SEQ ID NO: 2943607 - RNA, 19 nt, Artificial Sequence
  Description of Artificial Sequence: Synthetic oligonucleotide
caccuccucacugacacaa

SEQ ID NO: 2943608 - RNA, 19 nt, Artificial Sequence
  Description of Artificial Sequence: Synthetic oligonucleotide
acacgacugggcguucucu

SEQ ID NO: 2943609 - RNA, 19 nt, Artificial Sequence
  Description of Artificial Sequence: Synthetic oligonucleotide
cucuaugaagaugaugcau

SEQ ID NO: 2943610 - RNA, 19 nt, Artificial Sequence
  Description of Artificial Sequence: Synthetic oligonucleotide
ccccacaggaacucauagc

SEQ ID NO: 2943611 - RNA, 19 nt, Artificial Sequence
  Description of Artificial Sequence: Synthetic oligonucleotide
gcucccucaaagccucugc

SEQ ID NO: 2943612 - RNA, 19 nt, Artificial Sequence
  Description of Artificial Sequence: Synthetic oligonucleotide
uggccuaggcccgcucuug

SEQ ID NO: 2943613 - RNA, 19 nt, Artificial Sequence
  Description of Artificial Sequence: Synthetic oligonucleotide
gaacaccuccucacugaca

SEQ ID NO: 2943614 - RNA, 19 nt, Artificial Sequence
  Description of Artificial Sequence: Synthetic oligonucleotide
gacuccugggcuccccaaa

SEQ ID NO: 2943615 - RNA, 19 nt, Artificial Sequence
  Description of Artificial Sequence: Synthetic oligonucleotide
ccacauacccuuccugcac

SEQ ID NO: 2943616 - RNA, 19 nt, Artificial Sequence
  Description of Artificial Sequence: Synthetic oligonucleotide
ccucacugacacaauuguc

SEQ ID NO: 2943617 - RNA, 19 nt, Artificial Sequence
  Description of Artificial Sequence: Synthetic oligonucleotide
uucucuggccuaggcccgc

SEQ ID NO: 2943618 - RNA, 19 nt, Artificial Sequence
  Description of Artificial Sequence: Synthetic oligonucleotide
ggaggacagcuguugggca

SEQ ID NO: 2943619 - RNA, 19 nt, Artificial Sequence
  Description of Artificial Sequence: Synthetic oligonucleotide
uuuacacgacugggcguuc

SEQ ID NO: 2943620 - RNA, 19 nt, Artificial Sequence
  Description of Artificial Sequence: Synthetic oligonucleotide
augaugcauaggacaauua

SEQ ID NO: 2943621 - RNA, 19 nt, Artificial Sequence
  Description of Artificial Sequence: Synthetic oligonucleotide
ucauagcgaggaggacagc

SEQ ID NO: 2943622 - RNA, 19 nt, Artificial Sequence
  Description of Artificial Sequence: Synthetic oligonucleotide
ggcguucucuggccuaggc

SEQ ID NO: 2943623 - RNA, 19 nt, Artificial Sequence
  Description of Artificial Sequence: Synthetic oligonucleotide
uaggcccucgggccccaca

SEQ ID NO: 2943624 - RNA, 19 nt, Artificial Sequence
  Description of Artificial Sequence: Synthetic oligonucleotide
ccugggcuccccaaauaug

SEQ ID NO: 2943625 - RNA, 19 nt, Artificial Sequence
  Description of Artificial Sequence: Synthetic oligonucleotide
ccuuccugcacaaaauccu

SEQ ID NO: 2943626 - RNA, 19 nt, Artificial Sequence
  Description of Artificial Sequence: Synthetic oligonucleotide
ggcaccugccuguacucca

SEQ ID NO: 2943627 - RNA, 19 nt, Artificial Sequence
  Description of Artificial Sequence: Synthetic oligonucleotide
gcgaggaggacagcuguug

SEQ ID NO: 2943628 - RNA, 19 nt, Artificial Sequence
  Description of Artificial Sequence: Synthetic oligonucleotide
ccuaggcccgcucuugcug

SEQ ID NO: 2943629 - RNA, 19 nt, Artificial Sequence
  Description of Artificial Sequence: Synthetic oligonucleotide
gcacaaaauccucugugau

SEQ ID NO: 2943630 - RNA, 19 nt, Artificial Sequence
  Description of Artificial Sequence: Synthetic oligonucleotide
gcccuaggcuauucaacac

SEQ ID NO: 2943631 - RNA, 19 nt, Artificial Sequence
  Description of Artificial Sequence: Synthetic oligonucleotide
guugggcaccugccuguac

SEQ ID NO: 2943632 - RNA, 19 nt, Artificial Sequence
  Description of Artificial Sequence: Synthetic oligonucleotide
cccuaggcuauucaacaca

SEQ ID NO: 2943633 - RNA, 19 nt, Artificial Sequence
  Description of Artificial Sequence: Synthetic oligonucleotide
uaggcccgcucuugcugcu

SEQ ID NO: 2943634 - RNA, 19 nt, Artificial Sequence
  Description of Artificial Sequence: Synthetic oligonucleotide
uguugggcaccugccugua

SEQ ID NO: 2943635 - RNA, 19 nt, Artificial Sequence
  Description of Artificial Sequence: Synthetic oligonucleotide
ccucuaugaagaugaugca

SEQ ID NO: 2943636 - RNA, 19 nt, Artificial Sequence
  Description of Artificial Sequence: Synthetic oligonucleotide
ccaagccagcauacagccc

SEQ ID NO: 2943637 - RNA, 19 nt, Artificial Sequence
  Description of Artificial Sequence: Synthetic oligonucleotide
gggcuccccaaauaugaaa

SEQ ID NO: 2943638 - RNA, 19 nt, Artificial Sequence
  Description of Artificial Sequence: Synthetic oligonucleotide
ccucgggccccacaggaac

SEQ ID NO: 2943639 - RNA, 19 nt, Artificial Sequence
  Description of Artificial Sequence: Synthetic oligonucleotide
ccaggccugucuuggguac

SEQ ID NO: 2943640 - RNA, 19 nt, Artificial Sequence
  Description of Artificial Sequence: Synthetic oligonucleotide
cuguugggcaccugccugu

SEQ ID NO: 2943641 - RNA, 19 nt, Artificial Sequence
  Description of Artificial Sequence: Synthetic oligonucleotide
ggcuccccaaauaugaaau

SEQ ID NO: 2943642 - RNA, 19 nt, Artificial Sequence
  Description of Artificial Sequence: Synthetic oligonucleotide
gguuucugcauaggcccuc

SEQ ID NO: 2943643 - RNA, 19 nt, Artificial Sequence
  Description of Artificial Sequence: Synthetic oligonucleotide
ggccuaggcccgcucuugc

SEQ ID NO: 2943644 - RNA, 19 nt, Artificial Sequence
  Description of Artificial Sequence: Synthetic oligonucleotide
caauuauaaccaggccugu

SEQ ID NO: 2943645 - RNA, 19 nt, Artificial Sequence
  Description of Artificial Sequence: Synthetic oligonucleotide
aagccagcauacagcccua

SEQ ID NO: 2943646 - RNA, 19 nt, Artificial Sequence
  Description of Artificial Sequence: Synthetic oligonucleotide
gacagcuguugggcaccug

SEQ ID NO: 2943647 - RNA, 19 nt, Artificial Sequence
  Description of Artificial Sequence: Synthetic oligonucleotide
ucucuggccuaggcccgcu

SEQ ID NO: 2943648 - RNA, 19 nt, Artificial Sequence
  Description of Artificial Sequence: Synthetic oligonucleotide
ccacaggaacucauagcga

SEQ ID NO: 2943649 - RNA, 19 nt, Artificial Sequence
  Description of Artificial Sequence: Synthetic oligonucleotide
gccugucuuggguacaccu

SEQ ID NO: 2943650 - RNA, 19 nt, Artificial Sequence
  Description of Artificial Sequence: Synthetic oligonucleotide
ccuaggcuauucaacacau

SEQ ID NO: 2943651 - RNA, 19 nt, Artificial Sequence
  Description of Artificial Sequence: Synthetic oligonucleotide
cccucaaagccucugcaua

SEQ ID NO: 2943652 - RNA, 19 nt, Artificial Sequence
  Description of Artificial Sequence: Synthetic oligonucleotide
cgacugggcguucucuggc

SEQ ID NO: 2943653 - RNA, 19 nt, Artificial Sequence
  Description of Artificial Sequence: Synthetic oligonucleotide
gcuuaacaaugcuggcaua

SEQ ID NO: 2943654 - RNA, 19 nt, Artificial Sequence
  Description of Artificial Sequence: Synthetic oligonucleotide
aggcccgcucuugcugcuc

SEQ ID NO: 2943655 - RNA, 19 nt, Artificial Sequence
  Description of Artificial Sequence: Synthetic oligonucleotide
gcccucgggccccacagga

SEQ ID NO: 2943656 - RNA, 19 nt, Artificial Sequence
  Description of Artificial Sequence: Synthetic oligonucleotide
cugacacaauuguccucua

SEQ ID NO: 2943657 - RNA, 19 nt, Artificial Sequence
  Description of Artificial Sequence: Synthetic oligonucleotide
gcauaggcccucgggcccc

SEQ ID NO: 2943658 - RNA, 19 nt, Artificial Sequence
  Description of Artificial Sequence: Synthetic oligonucleotide
agcgaggaggacagcuguu

SEQ ID NO: 2943659 - RNA, 19 nt, Artificial Sequence
  Description of Artificial Sequence: Synthetic oligonucleotide
gggcaccugccuguacucc

SEQ ID NO: 2943660 - RNA, 19 nt, Artificial Sequence
  Description of Artificial Sequence: Synthetic oligonucleotide
ccugucuuggguacaccua

SEQ ID NO: 2943661 - RNA, 19 nt, Artificial Sequence
  Description of Artificial Sequence: Synthetic oligonucleotide
cucuggccuaggcccgcuc

SEQ ID NO: 2943662 - RNA, 19 nt, Artificial Sequence
  Description of Artificial Sequence: Synthetic oligonucleotide
cauacccuuccugcacaaa

SEQ ID NO: 2943663 - RNA, 19 nt, Artificial Sequence
  Description of Artificial Sequence: Synthetic oligonucleotide
cuccugggcuccccaaaua

SEQ ID NO: 2943664 - RNA, 19 nt, Artificial Sequence
  Description of Artificial Sequence: Synthetic oligonucleotide
caccugccuguacuccaca

SEQ ID NO: 2943665 - RNA, 19 nt, Artificial Sequence
  Description of Artificial Sequence: Synthetic oligonucleotide
cugggcguucucuggccua

SEQ ID NO: 2943666 - RNA, 19 nt, Artificial Sequence
  Description of Artificial Sequence: Synthetic oligonucleotide
cuucucaggguaggaucua

SEQ ID NO: 2943667 - RNA, 19 nt, Artificial Sequence
  Description of Artificial Sequence: Synthetic oligonucleotide
cucgggccccacaggaacu

SEQ ID NO: 2943668 - RNA, 19 nt, Artificial Sequence
  Description of Artificial Sequence: Synthetic oligonucleotide
gcaccugccuguacuccac

SEQ ID NO: 2943669 - RNA, 19 nt, Artificial Sequence
  Description of Artificial Sequence: Synthetic oligonucleotide
ccuguacuccacauacccu

SEQ ID NO: 2943670 - RNA, 19 nt, Artificial Sequence
  Description of Artificial Sequence: Synthetic oligonucleotide
accuccucacugacacaau

SEQ ID NO: 2943671 - RNA, 19 nt, Artificial Sequence
  Description of Artificial Sequence: Synthetic oligonucleotide
gcauacagcccuaggcuau

SEQ ID NO: 2943672 - RNA, 19 nt, Artificial Sequence
  Description of Artificial Sequence: Synthetic oligonucleotide
ggccugucuuggguacacc

SEQ ID NO: 2943673 - RNA, 19 nt, Artificial Sequence
  Description of Artificial Sequence: Synthetic oligonucleotide
ccugccuguacuccacaua

SEQ ID NO: 2943674 - RNA, 19 nt, Artificial Sequence
  Description of Artificial Sequence: Synthetic oligonucleotide
gggcguucucuggccuagg

SEQ ID NO: 2943675 - RNA, 19 nt, Artificial Sequence
  Description of Artificial Sequence: Synthetic oligonucleotide
ccaagacuuucaucuuggu

SEQ ID NO: 2943676 - RNA, 19 nt, Artificial Sequence
  Description of Artificial Sequence: Synthetic oligonucleotide
cauacagcccuaggcuauu

SEQ ID NO: 2943677 - RNA, 19 nt, Artificial Sequence
  Description of Artificial Sequence: Synthetic oligonucleotide
ccuccucacugacacaauu

SEQ ID NO: 2943678 - RNA, 19 nt, Artificial Sequence
  Description of Artificial Sequence: Synthetic oligonucleotide
cuggccuaggcccgcucuu

SEQ ID NO: 2943679 - RNA, 19 nt, Artificial Sequence
  Description of Artificial Sequence: Synthetic oligonucleotide
gccuaggcccgcucuugcu

SEQ ID NO: 2943680 - RNA, 19 nt, Artificial Sequence
  Description of Artificial Sequence: Synthetic oligonucleotide
ggccccacaggaacucaua

SEQ ID NO: 2943681 - RNA, 19 nt, Artificial Sequence
  Description of Artificial Sequence: Synthetic oligonucleotide
cugcucccucaaagccucu

SEQ ID NO: 2943682 - RNA, 19 nt, Artificial Sequence
  Description of Artificial Sequence: Synthetic oligonucleotide
ccucugugaugagacuccu

SEQ ID NO: 2943683 - RNA, 19 nt, Artificial Sequence
  Description of Artificial Sequence: Synthetic oligonucleotide
ggacagcuguugggcaccu

SEQ ID NO: 2943684 - RNA, 19 nt, Artificial Sequence
  Description of Artificial Sequence: Synthetic oligonucleotide
ggguaggaucuaggauccu

SEQ ID NO: 2943685 - RNA, 19 nt, Artificial Sequence
  Description of Artificial Sequence: Synthetic oligonucleotide
gggccccacaggaacucau

SEQ ID NO: 2943686 - RNA, 19 nt, Artificial Sequence
  Description of Artificial Sequence: Synthetic oligonucleotide
cccgcucuugcugcucccu

SEQ ID NO: 2943687 - RNA, 19 nt, Artificial Sequence
  Description of Artificial Sequence: Synthetic oligonucleotide
cgggccccacaggaacuca

SEQ ID NO: 2943688 - RNA, 19 nt, Artificial Sequence
  Description of Artificial Sequence: Synthetic oligonucleotide
ugauagaggaugaagaagg

SEQ ID NO: 2943689 - RNA, 19 nt, Artificial Sequence
  Description of Artificial Sequence: Synthetic oligonucleotide
aaggccagcgauuugagcc

SEQ ID NO: 2943690 - RNA, 19 nt, Artificial Sequence
  Description of Artificial Sequence: Synthetic oligonucleotide
aguccaaucagccaucucg

SEQ ID NO: 2943691 - RNA, 19 nt, Artificial Sequence
  Description of Artificial Sequence: Synthetic oligonucleotide
ucuagaaucuccuccacag

SEQ ID NO: 2943692 - RNA, 19 nt, Artificial Sequence
  Description of Artificial Sequence: Synthetic oligonucleotide
gauaagaggugauagagga

SEQ ID NO: 2943693 - RNA, 19 nt, Artificial Sequence
  Description of Artificial Sequence: Synthetic oligonucleotide
uuuguaaucagguccucag

SEQ ID NO: 2943694 - RNA, 19 nt, Artificial Sequence
  Description of Artificial Sequence: Synthetic oligonucleotide
auuaagaccauggccauac

SEQ ID NO: 2943695 - RNA, 19 nt, Artificial Sequence
  Description of Artificial Sequence: Synthetic oligonucleotide
acaauuaagaccauggcca

SEQ ID NO: 2943696 - RNA, 19 nt, Artificial Sequence
  Description of Artificial Sequence: Synthetic oligonucleotide
uguaaucagguccucagga

SEQ ID NO: 2943697 - RNA, 19 nt, Artificial Sequence
  Description of Artificial Sequence: Synthetic oligonucleotide
cacaauuaagaccauggcc

SEQ ID NO: 2943698 - RNA, 19 nt, Artificial Sequence
  Description of Artificial Sequence: Synthetic oligonucleotide
ucgauaagaggugauagag

SEQ ID NO: 2943699 - RNA, 19 nt, Artificial Sequence
  Description of Artificial Sequence: Synthetic oligonucleotide
uagaaucuccuccacagca

SEQ ID NO: 2943700 - RNA, 19 nt, Artificial Sequence
  Description of Artificial Sequence: Synthetic oligonucleotide
aaacgcuucacacucccug

SEQ ID NO: 2943701 - RNA, 19 nt, Artificial Sequence
  Description of Artificial Sequence: Synthetic oligonucleotide
acuggugaagucugagucc

SEQ ID NO: 2943702 - RNA, 19 nt, Artificial Sequence
  Description of Artificial Sequence: Synthetic oligonucleotide
aagaaggccacaauuaaga

SEQ ID NO: 2943703 - RNA, 19 nt, Artificial Sequence
  Description of Artificial Sequence: Synthetic oligonucleotide
gaagcuuccgguugucucg

SEQ ID NO: 2943704 - RNA, 19 nt, Artificial Sequence
  Description of Artificial Sequence: Synthetic oligonucleotide
aaaccaggauaccaggugu

SEQ ID NO: 2943705 - RNA, 19 nt, Artificial Sequence
  Description of Artificial Sequence: Synthetic oligonucleotide
uagguaucgguucuggucu

SEQ ID NO: 2943706 - RNA, 19 nt, Artificial Sequence
  Description of Artificial Sequence: Synthetic oligonucleotide
ggccauaccacacagaagc

SEQ ID NO: 2943707 - RNA, 19 nt, Artificial Sequence
  Description of Artificial Sequence: Synthetic oligonucleotide
gaguaggccagucacacug

SEQ ID NO: 2943708 - RNA, 19 nt, Artificial Sequence
  Description of Artificial Sequence: Synthetic oligonucleotide
aaucagguccucaggaaac

SEQ ID NO: 2943709 - RNA, 19 nt, Artificial Sequence
  Description of Artificial Sequence: Synthetic oligonucleotide
gguugucucgcccagaccg

SEQ ID NO: 2943710 - RNA, 19 nt, Artificial Sequence
  Description of Artificial Sequence: Synthetic oligonucleotide
auagaggaugaagaaggcc

SEQ ID NO: 2943711 - RNA, 19 nt, Artificial Sequence
  Description of Artificial Sequence: Synthetic oligonucleotide
ucggucuagaaucuccucc

SEQ ID NO: 2943712 - RNA, 19 nt, Artificial Sequence
  Description of Artificial Sequence: Synthetic oligonucleotide
ucagccauccgcuuguucu

SEQ ID NO: 2943713 - RNA, 19 nt, Artificial Sequence
  Description of Artificial Sequence: Synthetic oligonucleotide
agaaggccacaauuaagac

SEQ ID NO: 2943714 - RNA, 19 nt, Artificial Sequence
  Description of Artificial Sequence: Synthetic oligonucleotide
gaaaccaggauaccaggug

SEQ ID NO: 2943715 - RNA, 19 nt, Artificial Sequence
  Description of Artificial Sequence: Synthetic oligonucleotide
ugaagaaggccacaauuaa

SEQ ID NO: 2943716 - RNA, 19 nt, Artificial Sequence
  Description of Artificial Sequence: Synthetic oligonucleotide
uucugugucccuaucgaug

SEQ ID NO: 2943717 - RNA, 19 nt, Artificial Sequence
  Description of Artificial Sequence: Synthetic oligonucleotide
gauaccagguguaggagag

SEQ ID NO: 2943718 - RNA, 19 nt, Artificial Sequence
  Description of Artificial Sequence: Synthetic oligonucleotide
ugaagucugaguccaugcc

SEQ ID NO: 2943719 - RNA, 19 nt, Artificial Sequence
  Description of Artificial Sequence: Synthetic oligonucleotide
ucuucugugucccuaucga

SEQ ID NO: 2943720 - RNA, 19 nt, Artificial Sequence
  Description of Artificial Sequence: Synthetic oligonucleotide
guucucucggucuagaauc

SEQ ID NO: 2943721 - RNA, 19 nt, Artificial Sequence
  Description of Artificial Sequence: Synthetic oligonucleotide
agaagcuuccgguugucuc

SEQ ID NO: 2943722 - RNA, 19 nt, Artificial Sequence
  Description of Artificial Sequence: Synthetic oligonucleotide
uguaggagagccuggcugc

SEQ ID NO: 2943723 - RNA, 19 nt, Artificial Sequence
  Description of Artificial Sequence: Synthetic oligonucleotide
uaagaccauggccauacca

SEQ ID NO: 2943724 - RNA, 19 nt, Artificial Sequence
  Description of Artificial Sequence: Synthetic oligonucleotide
ucccuaucgauguccaagg

SEQ ID NO: 2943725 - RNA, 19 nt, Artificial Sequence
  Description of Artificial Sequence: Synthetic oligonucleotide
cauaccacacagaagcuuc

SEQ ID NO: 2943726 - RNA, 19 nt, Artificial Sequence
  Description of Artificial Sequence: Synthetic oligonucleotide
uccuuguccucgauaagag

SEQ ID NO: 2943727 - RNA, 19 nt, Artificial Sequence
  Description of Artificial Sequence: Synthetic oligonucleotide
ucugugucccuaucgaugu

SEQ ID NO: 2943728 - RNA, 19 nt, Artificial Sequence
  Description of Artificial Sequence: Synthetic oligonucleotide
cucccauuggcucacgucc

SEQ ID NO: 2943729 - RNA, 19 nt, Artificial Sequence
  Description of Artificial Sequence: Synthetic oligonucleotide
uaaucagguccucaggaaa

SEQ ID NO: 2943730 - RNA, 19 nt, Artificial Sequence
  Description of Artificial Sequence: Synthetic oligonucleotide
uccacagcaccagagcucg

SEQ ID NO: 2943731 - RNA, 19 nt, Artificial Sequence
  Description of Artificial Sequence: Synthetic oligonucleotide
aggaaaccaggauaccagg

SEQ ID NO: 2943732 - RNA, 19 nt, Artificial Sequence
  Description of Artificial Sequence: Synthetic oligonucleotide
cuagguaucgguucugguc

SEQ ID NO: 2943733 - RNA, 19 nt, Artificial Sequence
  Description of Artificial Sequence: Synthetic oligonucleotide
gaagaaggccacaauuaag

SEQ ID NO: 2943734 - RNA, 19 nt, Artificial Sequence
  Description of Artificial Sequence: Synthetic oligonucleotide
uccucaggaaaccaggaua

SEQ ID NO: 2943735 - RNA, 19 nt, Artificial Sequence
  Description of Artificial Sequence: Synthetic oligonucleotide
caggaaaccaggauaccag

SEQ ID NO: 2943736 - RNA, 19 nt, Artificial Sequence
  Description of Artificial Sequence: Synthetic oligonucleotide
ucaggaaaccaggauacca

SEQ ID NO: 2943737 - RNA, 19 nt, Artificial Sequence
  Description of Artificial Sequence: Synthetic oligonucleotide
ugaguccaugccaucuagg

SEQ ID NO: 2943738 - RNA, 19 nt, Artificial Sequence
  Description of Artificial Sequence: Synthetic oligonucleotide
auggccauaccacacagaa

SEQ ID NO: 2943739 - RNA, 19 nt, Artificial Sequence
  Description of Artificial Sequence: Synthetic oligonucleotide
uuggcucacguccuugucc

SEQ ID NO: 2943740 - RNA, 19 nt, Artificial Sequence
  Description of Artificial Sequence: Synthetic oligonucleotide
aggccagucacacugguga

SEQ ID NO: 2943741 - RNA, 19 nt, Artificial Sequence
  Description of Artificial Sequence: Synthetic oligonucleotide
ucugggacaccgcagcaca

SEQ ID NO: 2943742 - RNA, 19 nt, Artificial Sequence
  Description of Artificial Sequence: Synthetic oligonucleotide
ugcgcgaguccaaucagcc

SEQ ID NO: 2943743 - RNA, 19 nt, Artificial Sequence
  Description of Artificial Sequence: Synthetic oligonucleotide
uccagagccccacucuggg

SEQ ID NO: 2943744 - RNA, 19 nt, Artificial Sequence
  Description of Artificial Sequence: Synthetic oligonucleotide
agcaccagagcucggugcg

SEQ ID NO: 2943745 - RNA, 19 nt, Artificial Sequence
  Description of Artificial Sequence: Synthetic oligonucleotide
gaagucugaguccaugcca

SEQ ID NO: 2943746 - RNA, 19 nt, Artificial Sequence
  Description of Artificial Sequence: Synthetic oligonucleotide
gaggugauagaggaugaag

SEQ ID NO: 2943747 - RNA, 19 nt, Artificial Sequence
  Description of Artificial Sequence: Synthetic oligonucleotide
agcgauuugagccuuggua

SEQ ID NO: 2943748 - RNA, 19 nt, Artificial Sequence
  Description of Artificial Sequence: Synthetic oligonucleotide
ucgauguccaaggccagcg

SEQ ID NO: 2943749 - RNA, 19 nt, Artificial Sequence
  Description of Artificial Sequence: Synthetic oligonucleotide
uguucucucggucuagaau

SEQ ID NO: 2943750 - RNA, 19 nt, Artificial Sequence
  Description of Artificial Sequence: Synthetic oligonucleotide
aacgcuucacacucccugu

SEQ ID NO: 2943751 - RNA, 19 nt, Artificial Sequence
  Description of Artificial Sequence: Synthetic oligonucleotide
gugauagaggaugaagaag

SEQ ID NO: 2943752 - RNA, 19 nt, Artificial Sequence
  Description of Artificial Sequence: Synthetic oligonucleotide
uuggaggccaggcuaucag

SEQ ID NO: 2943753 - RNA, 19 nt, Artificial Sequence
  Description of Artificial Sequence: Synthetic oligonucleotide
cacuggugaagucugaguc

SEQ ID NO: 2943754 - RNA, 19 nt, Artificial Sequence
  Description of Artificial Sequence: Synthetic oligonucleotide
uuguccucgauaagaggug

SEQ ID NO: 2943755 - RNA, 19 nt, Artificial Sequence
  Description of Artificial Sequence: Synthetic oligonucleotide
gucuucugugucccuaucg

SEQ ID NO: 2943756 - RNA, 19 nt, Artificial Sequence
  Description of Artificial Sequence: Synthetic oligonucleotide
ugugaguaggccagucaca

SEQ ID NO: 2943757 - RNA, 19 nt, Artificial Sequence
  Description of Artificial Sequence: Synthetic oligonucleotide
gccacaauuaagaccaugg

SEQ ID NO: 2943758 - RNA, 19 nt, Artificial Sequence
  Description of Artificial Sequence: Synthetic oligonucleotide
ugugucccuaucgaugucc

SEQ ID NO: 2943759 - RNA, 19 nt, Artificial Sequence
  Description of Artificial Sequence: Synthetic oligonucleotide
gauagaggaugaagaaggc

SEQ ID NO: 2943760 - RNA, 19 nt, Artificial Sequence
  Description of Artificial Sequence: Synthetic oligonucleotide
gauuugagccuugguaacc

SEQ ID NO: 2943761 - RNA, 19 nt, Artificial Sequence
  Description of Artificial Sequence: Synthetic oligonucleotide
cugugaguaggccagucac

SEQ ID NO: 2943762 - RNA, 19 nt, Artificial Sequence
  Description of Artificial Sequence: Synthetic oligonucleotide
uugguaaccuuggaggcca

SEQ ID NO: 2943763 - RNA, 19 nt, Artificial Sequence
  Description of Artificial Sequence: Synthetic oligonucleotide
uccaaggccagcgauuuga

SEQ ID NO: 2943764 - RNA, 19 nt, Artificial Sequence
  Description of Artificial Sequence: Synthetic oligonucleotide
cucucggucuagaaucucc

SEQ ID NO: 2943765 - RNA, 19 nt, Artificial Sequence
  Description of Artificial Sequence: Synthetic oligonucleotide
accacacagaagcuuccgg

SEQ ID NO: 2943766 - RNA, 19 nt, Artificial Sequence
  Description of Artificial Sequence: Synthetic oligonucleotide
acacagaagcuuccgguug

SEQ ID NO: 2943767 - RNA, 19 nt, Artificial Sequence
  Description of Artificial Sequence: Synthetic oligonucleotide
gaugaagaaggccacaauu

SEQ ID NO: 2943768 - RNA, 19 nt, Artificial Sequence
  Description of Artificial Sequence: Synthetic oligonucleotide
aucagguccucaggaaacc

SEQ ID NO: 2943769 - RNA, 19 nt, Artificial Sequence
  Description of Artificial Sequence: Synthetic oligonucleotide
aaccuuggaggccaggcua

SEQ ID NO: 2943770 - RNA, 19 nt, Artificial Sequence
  Description of Artificial Sequence: Synthetic oligonucleotide
ucucggucuagaaucuccu

SEQ ID NO: 2943771 - RNA, 19 nt, Artificial Sequence
  Description of Artificial Sequence: Synthetic oligonucleotide
aggugauagaggaugaaga

SEQ ID NO: 2943772 - RNA, 19 nt, Artificial Sequence
  Description of Artificial Sequence: Synthetic oligonucleotide
aagcuuccgguugucucgc

SEQ ID NO: 2943773 - RNA, 19 nt, Artificial Sequence
  Description of Artificial Sequence: Synthetic oligonucleotide
ucgguucuggucuucugug

SEQ ID NO: 2943774 - RNA, 19 nt, Artificial Sequence
  Description of Artificial Sequence: Synthetic oligonucleotide
cuuguccucgauaagaggu

SEQ ID NO: 2943775 - RNA, 19 nt, Artificial Sequence
  Description of Artificial Sequence: Synthetic oligonucleotide
agaaucuccuccacagcac

SEQ ID NO: 2943776 - RNA, 19 nt, Artificial Sequence
  Description of Artificial Sequence: Synthetic oligonucleotide
acguccuuguccucgauaa

SEQ ID NO: 2943777 - RNA, 19 nt, Artificial Sequence
  Description of Artificial Sequence: Synthetic oligonucleotide
aucgguucuggucuucugu

SEQ ID NO: 2943778 - RNA, 19 nt, Artificial Sequence
  Description of Artificial Sequence: Synthetic oligonucleotide
cuagaaucuccuccacagc

SEQ ID NO: 2943779 - RNA, 19 nt, Artificial Sequence
  Description of Artificial Sequence: Synthetic oligonucleotide
uaaccuuggaggccaggcu

SEQ ID NO: 2943780 - RNA, 19 nt, Artificial Sequence
  Description of Artificial Sequence: Synthetic oligonucleotide
caugccaucuagguaucgg

SEQ ID NO: 2943781 - RNA, 19 nt, Artificial Sequence
  Description of Artificial Sequence: Synthetic oligonucleotide
uucacacucccugugagua

SEQ ID NO: 2943782 - RNA, 19 nt, Artificial Sequence
  Description of Artificial Sequence: Synthetic oligonucleotide
uaucgauguccaaggccag

SEQ ID NO: 2943783 - RNA, 19 nt, Artificial Sequence
  Description of Artificial Sequence: Synthetic oligonucleotide
caggauaccagguguagga

SEQ ID NO: 2943784 - RNA, 19 nt, Artificial Sequence
  Description of Artificial Sequence: Synthetic oligonucleotide
agucacacuggugaagucu

SEQ ID NO: 2943785 - RNA, 19 nt, Artificial Sequence
  Description of Artificial Sequence: Synthetic oligonucleotide
gucccuaucgauguccaag

SEQ ID NO: 2943786 - RNA, 19 nt, Artificial Sequence
  Description of Artificial Sequence: Synthetic oligonucleotide
agaccauggccauaccaca

SEQ ID NO: 2943787 - RNA, 19 nt, Artificial Sequence
  Description of Artificial Sequence: Synthetic oligonucleotide
uucucucggucuagaaucu

SEQ ID NO: 2943788 - RNA, 19 nt, Artificial Sequence
  Description of Artificial Sequence: Synthetic oligonucleotide
guaaccuuggaggccaggc

SEQ ID NO: 2943789 - RNA, 19 nt, Artificial Sequence
  Description of Artificial Sequence: Synthetic oligonucleotide
cuugguaaccuuggaggcc

SEQ ID NO: 2943790 - RNA, 19 nt, Artificial Sequence
  Description of Artificial Sequence: Synthetic oligonucleotide
auaccacacagaagcuucc

SEQ ID NO: 2943791 - RNA, 19 nt, Artificial Sequence
  Description of Artificial Sequence: Synthetic oligonucleotide
augccaucuagguaucggu

SEQ ID NO: 2943792 - RNA, 19 nt, Artificial Sequence
  Description of Artificial Sequence: Synthetic oligonucleotide
uggcucacguccuuguccu

SEQ ID NO: 2943793 - RNA, 19 nt, Artificial Sequence
  Description of Artificial Sequence: Synthetic oligonucleotide
aucuagguaucgguucugg

SEQ ID NO: 2943794 - RNA, 19 nt, Artificial Sequence
  Description of Artificial Sequence: Synthetic oligonucleotide
ucagccaucucgcccucca

SEQ ID NO: 2943795 - RNA, 19 nt, Artificial Sequence
  Description of Artificial Sequence: Synthetic oligonucleotide
acucccugugaguaggcca

SEQ ID NO: 2943796 - RNA, 19 nt, Artificial Sequence
  Description of Artificial Sequence: Synthetic oligonucleotide
ucuagguaucgguucuggu

SEQ ID NO: 2943797 - RNA, 19 nt, Artificial Sequence
  Description of Artificial Sequence: Synthetic oligonucleotide
cacucugggacaccgcagc

SEQ ID NO: 2943798 - RNA, 19 nt, Artificial Sequence
  Description of Artificial Sequence: Synthetic oligonucleotide
aagucugaguccaugccau

SEQ ID NO: 2943799 - RNA, 19 nt, Artificial Sequence
  Description of Artificial Sequence: Synthetic oligonucleotide
uggccauaccacacagaag

SEQ ID NO: 2943800 - RNA, 19 nt, Artificial Sequence
  Description of Artificial Sequence: Synthetic oligonucleotide
aaucagccaucucgcccuc

SEQ ID NO: 2943801 - RNA, 19 nt, Artificial Sequence
  Description of Artificial Sequence: Synthetic oligonucleotide
guccaugccaucuagguau

SEQ ID NO: 2943802 - RNA, 19 nt, Artificial Sequence
  Description of Artificial Sequence: Synthetic oligonucleotide
augaagaaggccacaauua

SEQ ID NO: 2943803 - RNA, 19 nt, Artificial Sequence
  Description of Artificial Sequence: Synthetic oligonucleotide
uccaaucagccaucucgcc

SEQ ID NO: 2943804 - RNA, 19 nt, Artificial Sequence
  Description of Artificial Sequence: Synthetic oligonucleotide
auuugagccuugguaaccu

SEQ ID NO: 2943805 - RNA, 19 nt, Artificial Sequence
  Description of Artificial Sequence: Synthetic oligonucleotide
aucgauguccaaggccagc

SEQ ID NO: 2943806 - RNA, 19 nt, Artificial Sequence
  Description of Artificial Sequence: Synthetic oligonucleotide
uaccacacagaagcuuccg

SEQ ID NO: 2943807 - RNA, 19 nt, Artificial Sequence
  Description of Artificial Sequence: Synthetic oligonucleotide
ugcccuuggcucccauugg

SEQ ID NO: 2943808 - RNA, 19 nt, Artificial Sequence
  Description of Artificial Sequence: Synthetic oligonucleotide
cagagccccacucugggac

SEQ ID NO: 2943809 - RNA, 19 nt, Artificial Sequence
  Description of Artificial Sequence: Synthetic oligonucleotide
uuaagaccauggccauacc

SEQ ID NO: 2943810 - RNA, 19 nt, Artificial Sequence
  Description of Artificial Sequence: Synthetic oligonucleotide
uccgcuuguucucucgguc

SEQ ID NO: 2943811 - RNA, 19 nt, Artificial Sequence
  Description of Artificial Sequence: Synthetic oligonucleotide
ucugaguccaugccaucua

SEQ ID NO: 2943812 - RNA, 19 nt, Artificial Sequence
  Description of Artificial Sequence: Synthetic oligonucleotide
cugaguccaugccaucuag

SEQ ID NO: 2943813 - RNA, 19 nt, Artificial Sequence
  Description of Artificial Sequence: Synthetic oligonucleotide
cacacucccugugaguagg

SEQ ID NO: 2943814 - RNA, 19 nt, Artificial Sequence
  Description of Artificial Sequence: Synthetic oligonucleotide
ucacacucccugugaguag

SEQ ID NO: 2943815 - RNA, 19 nt, Artificial Sequence
  Description of Artificial Sequence: Synthetic oligonucleotide
gugaguaggccagucacac

SEQ ID NO: 2943816 - RNA, 19 nt, Artificial Sequence
  Description of Artificial Sequence: Synthetic oligonucleotide
ccucaggaaaccaggauac

SEQ ID NO: 2943817 - RNA, 19 nt, Artificial Sequence
  Description of Artificial Sequence: Synthetic oligonucleotide
uggaggccaggcuaucagc

SEQ ID NO: 2943818 - RNA, 19 nt, Artificial Sequence
  Description of Artificial Sequence: Synthetic oligonucleotide
ccuaucgauguccaaggcc

SEQ ID NO: 2943819 - RNA, 19 nt, Artificial Sequence
  Description of Artificial Sequence: Synthetic oligonucleotide
uguccucgauaagagguga

SEQ ID NO: 2943820 - RNA, 19 nt, Artificial Sequence
  Description of Artificial Sequence: Synthetic oligonucleotide
ggugauagaggaugaagaa

SEQ ID NO: 2943821 - RNA, 19 nt, Artificial Sequence
  Description of Artificial Sequence: Synthetic oligonucleotide
cucgauaagaggugauaga

SEQ ID NO: 2943822 - RNA, 19 nt, Artificial Sequence
  Description of Artificial Sequence: Synthetic oligonucleotide
gucacacuggugaagucug

SEQ ID NO: 2943823 - RNA, 19 nt, Artificial Sequence
  Description of Artificial Sequence: Synthetic oligonucleotide
guaaucagguccucaggaa

SEQ ID NO: 2943824 - RNA, 19 nt, Artificial Sequence
  Description of Artificial Sequence: Synthetic oligonucleotide
accauggccauaccacaca

SEQ ID NO: 2943825 - RNA, 19 nt, Artificial Sequence
  Description of Artificial Sequence: Synthetic oligonucleotide
gaguccaugccaucuaggu

SEQ ID NO: 2943826 - RNA, 19 nt, Artificial Sequence
  Description of Artificial Sequence: Synthetic oligonucleotide
guccaaucagccaucucgc

SEQ ID NO: 2943827 - RNA, 19 nt, Artificial Sequence
  Description of Artificial Sequence: Synthetic oligonucleotide
ccuugguaaccuuggaggc

SEQ ID NO: 2943828 - RNA, 19 nt, Artificial Sequence
  Description of Artificial Sequence: Synthetic oligonucleotide
cauccgcuuguucucucgg

SEQ ID NO: 2943829 - RNA, 19 nt, Artificial Sequence
  Description of Artificial Sequence: Synthetic oligonucleotide
uaggccagucacacuggug

SEQ ID NO: 2943830 - RNA, 19 nt, Artificial Sequence
  Description of Artificial Sequence: Synthetic oligonucleotide
agucugaguccaugccauc

SEQ ID NO: 2943831 - RNA, 19 nt, Artificial Sequence
  Description of Artificial Sequence: Synthetic oligonucleotide
uaucgguucuggucuucug

SEQ ID NO: 2943832 - RNA, 19 nt, Artificial Sequence
  Description of Artificial Sequence: Synthetic oligonucleotide
gcgauuugagccuugguaa

SEQ ID NO: 2943833 - RNA, 19 nt, Artificial Sequence
  Description of Artificial Sequence: Synthetic oligonucleotide
acagcaccagagcucggug

SEQ ID NO: 2943834 - RNA, 19 nt, Artificial Sequence
  Description of Artificial Sequence: Synthetic oligonucleotide
ugccaucuagguaucgguu

SEQ ID NO: 2943835 - RNA, 19 nt, Artificial Sequence
  Description of Artificial Sequence: Synthetic oligonucleotide
aucagccauccgcuuguuc

SEQ ID NO: 2943836 - RNA, 19 nt, Artificial Sequence
  Description of Artificial Sequence: Synthetic oligonucleotide
auaccagguguaggagagc

SEQ ID NO: 2943837 - RNA, 19 nt, Artificial Sequence
  Description of Artificial Sequence: Synthetic oligonucleotide
cuccuccacagcaccagag

SEQ ID NO: 2943838 - RNA, 19 nt, Artificial Sequence
  Description of Artificial Sequence: Synthetic oligonucleotide
ucccauuggcucacguccu

SEQ ID NO: 2943839 - RNA, 19 nt, Artificial Sequence
  Description of Artificial Sequence: Synthetic oligonucleotide
aggauaccagguguaggag

SEQ ID NO: 2943840 - RNA, 19 nt, Artificial Sequence
  Description of Artificial Sequence: Synthetic oligonucleotide
guccuuguccucgauaaga

SEQ ID NO: 2943841 - RNA, 19 nt, Artificial Sequence
  Description of Artificial Sequence: Synthetic oligonucleotide
uuccgguugucucgcccag

SEQ ID NO: 2943842 - RNA, 19 nt, Artificial Sequence
  Description of Artificial Sequence: Synthetic oligonucleotide
ccaaucagccaucucgccc

SEQ ID NO: 2943843 - RNA, 19 nt, Artificial Sequence
  Description of Artificial Sequence: Synthetic oligonucleotide
accaggauaccagguguag

SEQ ID NO: 2943844 - RNA, 19 nt, Artificial Sequence
  Description of Artificial Sequence: Synthetic oligonucleotide
gcuaucagccauccgcuug

SEQ ID NO: 2943845 - RNA, 19 nt, Artificial Sequence
  Description of Artificial Sequence: Synthetic oligonucleotide
aauuaagaccauggccaua

SEQ ID NO: 2943846 - RNA, 19 nt, Artificial Sequence
  Description of Artificial Sequence: Synthetic oligonucleotide
gucuagaaucuccuccaca

SEQ ID NO: 2943847 - RNA, 19 nt, Artificial Sequence
  Description of Artificial Sequence: Synthetic oligonucleotide
uguccaaggccagcgauuu

SEQ ID NO: 2943848 - RNA, 19 nt, Artificial Sequence
  Description of Artificial Sequence: Synthetic oligonucleotide
aguccaugccaucuaggua

SEQ ID NO: 2943849 - RNA, 19 nt, Artificial Sequence
  Description of Artificial Sequence: Synthetic oligonucleotide
ccacaauuaagaccauggc

SEQ ID NO: 2943850 - RNA, 19 nt, Artificial Sequence
  Description of Artificial Sequence: Synthetic oligonucleotide
cgauaagaggugauagagg

SEQ ID NO: 2943851 - RNA, 19 nt, Artificial Sequence
  Description of Artificial Sequence: Synthetic oligonucleotide
ugucucgcccagaccgugc

SEQ ID NO: 2943852 - RNA, 19 nt, Artificial Sequence
  Description of Artificial Sequence: Synthetic oligonucleotide
agagccuggcugcccuugg

SEQ ID NO: 2943853 - RNA, 19 nt, Artificial Sequence
  Description of Artificial Sequence: Synthetic oligonucleotide
gaccgugccauuguggaaa

SEQ ID NO: 2943854 - RNA, 19 nt, Artificial Sequence
  Description of Artificial Sequence: Synthetic oligonucleotide
aggccagcgauuugagccu

SEQ ID NO: 2943855 - RNA, 19 nt, Artificial Sequence
  Description of Artificial Sequence: Synthetic oligonucleotide
aaucuccuccacagcacca

SEQ ID NO: 2943856 - RNA, 19 nt, Artificial Sequence
  Description of Artificial Sequence: Synthetic oligonucleotide
aguaggccagucacacugg

SEQ ID NO: 2943857 - RNA, 19 nt, Artificial Sequence
  Description of Artificial Sequence: Synthetic oligonucleotide
cuuggcucccauuggcuca

SEQ ID NO: 2943858 - RNA, 19 nt, Artificial Sequence
  Description of Artificial Sequence: Synthetic oligonucleotide
uuguucucucggucuagaa

SEQ ID NO: 2943859 - RNA, 19 nt, Artificial Sequence
  Description of Artificial Sequence: Synthetic oligonucleotide
agccaucucgcccuccaga

SEQ ID NO: 2943860 - RNA, 19 nt, Artificial Sequence
  Description of Artificial Sequence: Synthetic oligonucleotide
ugaguaggccagucacacu

SEQ ID NO: 2943861 - RNA, 19 nt, Artificial Sequence
  Description of Artificial Sequence: Synthetic oligonucleotide
gcuucacacucccugugag

SEQ ID NO: 2943862 - RNA, 19 nt, Artificial Sequence
  Description of Artificial Sequence: Synthetic oligonucleotide
ccucgauaagaggugauag

SEQ ID NO: 2943863 - RNA, 19 nt, Artificial Sequence
  Description of Artificial Sequence: Synthetic oligonucleotide
aaaacgcuucacacucccu

SEQ ID NO: 2943864 - RNA, 19 nt, Artificial Sequence
  Description of Artificial Sequence: Synthetic oligonucleotide
caaucagccaucucgcccu

SEQ ID NO: 2943865 - RNA, 19 nt, Artificial Sequence
  Description of Artificial Sequence: Synthetic oligonucleotide
aggagagccuggcugcccu

SEQ ID NO: 2943866 - RNA, 19 nt, Artificial Sequence
  Description of Artificial Sequence: Synthetic oligonucleotide
agagcucggugcgcgaguc

SEQ ID NO: 2943867 - RNA, 19 nt, Artificial Sequence
  Description of Artificial Sequence: Synthetic oligonucleotide
gaccauggccauaccacac

SEQ ID NO: 2943868 - RNA, 19 nt, Artificial Sequence
  Description of Artificial Sequence: Synthetic oligonucleotide
ugggacaccgcagcacagc

SEQ ID NO: 2943869 - RNA, 19 nt, Artificial Sequence
  Description of Artificial Sequence: Synthetic oligonucleotide
uccucgauaagaggugaua

SEQ ID NO: 2943870 - RNA, 19 nt, Artificial Sequence
  Description of Artificial Sequence: Synthetic oligonucleotide
ggauaccagguguaggaga

SEQ ID NO: 2943871 - RNA, 19 nt, Artificial Sequence
  Description of Artificial Sequence: Synthetic oligonucleotide
acgcuucacacucccugug

SEQ ID NO: 2943872 - RNA, 19 nt, Artificial Sequence
  Description of Artificial Sequence: Synthetic oligonucleotide
gccaucucgcccuccagag

SEQ ID NO: 2943873 - RNA, 19 nt, Artificial Sequence
  Description of Artificial Sequence: Synthetic oligonucleotide
uggucuucugugucccuau

SEQ ID NO: 2943874 - RNA, 19 nt, Artificial Sequence
  Description of Artificial Sequence: Synthetic oligonucleotide
gguucuggucuucuguguc

SEQ ID NO: 2943875 - RNA, 19 nt, Artificial Sequence
  Description of Artificial Sequence: Synthetic oligonucleotide
cucaggaaaccaggauacc

SEQ ID NO: 2943876 - RNA, 19 nt, Artificial Sequence
  Description of Artificial Sequence: Synthetic oligonucleotide
uccaugccaucuagguauc

SEQ ID NO: 2943877 - RNA, 19 nt, Artificial Sequence
  Description of Artificial Sequence: Synthetic oligonucleotide
acagaagcuuccgguuguc

SEQ ID NO: 2943878 - RNA, 19 nt, Artificial Sequence
  Description of Artificial Sequence: Synthetic oligonucleotide
cuuccgguugucucgccca

SEQ ID NO: 2943879 - RNA, 19 nt, Artificial Sequence
  Description of Artificial Sequence: Synthetic oligonucleotide
gauguccaaggccagcgau

SEQ ID NO: 2943880 - RNA, 19 nt, Artificial Sequence
  Description of Artificial Sequence: Synthetic oligonucleotide
gccaucuagguaucgguuc

SEQ ID NO: 2943881 - RNA, 19 nt, Artificial Sequence
  Description of Artificial Sequence: Synthetic oligonucleotide
ggaggccaggcuaucagcc

SEQ ID NO: 2943882 - RNA, 19 nt, Artificial Sequence
  Description of Artificial Sequence: Synthetic oligonucleotide
ccuuguccucgauaagagg

SEQ ID NO: 2943883 - RNA, 19 nt, Artificial Sequence
  Description of Artificial Sequence: Synthetic oligonucleotide
gaggccaggcuaucagcca

SEQ ID NO: 2943884 - RNA, 19 nt, Artificial Sequence
  Description of Artificial Sequence: Synthetic oligonucleotide
cucggucuagaaucuccuc

SEQ ID NO: 2943885 - RNA, 19 nt, Artificial Sequence
  Description of Artificial Sequence: Synthetic oligonucleotide
agccuggcugcccuuggcu

SEQ ID NO: 2943886 - RNA, 19 nt, Artificial Sequence
  Description of Artificial Sequence: Synthetic oligonucleotide
agcuuccgguugucucgcc

SEQ ID NO: 2943887 - RNA, 19 nt, Artificial Sequence
  Description of Artificial Sequence: Synthetic oligonucleotide
caccagagcucggugcgcg

SEQ ID NO: 2943888 - RNA, 19 nt, Artificial Sequence
  Description of Artificial Sequence: Synthetic oligonucleotide
gucucgcccagaccgugcc

SEQ ID NO: 2943889 - RNA, 19 nt, Artificial Sequence
  Description of Artificial Sequence: Synthetic oligonucleotide
auccgcuuguucucucggu

SEQ ID NO: 2943890 - RNA, 19 nt, Artificial Sequence
  Description of Artificial Sequence: Synthetic oligonucleotide
auaagaggugauagaggau

SEQ ID NO: 2943891 - RNA, 19 nt, Artificial Sequence
  Description of Artificial Sequence: Synthetic oligonucleotide
aggcuaucagccauccgcu

SEQ ID NO: 2943892 - RNA, 19 nt, Artificial Sequence
  Description of Artificial Sequence: Synthetic oligonucleotide
agagccccacucugggaca

SEQ ID NO: 2943893 - RNA, 19 nt, Artificial Sequence
  Description of Artificial Sequence: Synthetic oligonucleotide
aaccaggauaccaggugua

SEQ ID NO: 2943894 - RNA, 19 nt, Artificial Sequence
  Description of Artificial Sequence: Synthetic oligonucleotide
uugucucgcccagaccgug

SEQ ID NO: 2943895 - RNA, 19 nt, Artificial Sequence
  Description of Artificial Sequence: Synthetic oligonucleotide
ugguaaccuuggaggccag

SEQ ID NO: 2943896 - RNA, 19 nt, Artificial Sequence
  Description of Artificial Sequence: Synthetic oligonucleotide
ggugcgcgaguccaaucag

SEQ ID NO: 2943897 - RNA, 19 nt, Artificial Sequence
  Description of Artificial Sequence: Synthetic oligonucleotide
gcucacguccuuguccucg

SEQ ID NO: 2943898 - RNA, 19 nt, Artificial Sequence
  Description of Artificial Sequence: Synthetic oligonucleotide
ccagaccgugccauugugg

SEQ ID NO: 2943899 - RNA, 19 nt, Artificial Sequence
  Description of Artificial Sequence: Synthetic oligonucleotide
agcucggugcgcgagucca

SEQ ID NO: 2943900 - RNA, 19 nt, Artificial Sequence
  Description of Artificial Sequence: Synthetic oligonucleotide
cugggacaccgcagcacag

SEQ ID NO: 2943901 - RNA, 19 nt, Artificial Sequence
  Description of Artificial Sequence: Synthetic oligonucleotide
cagccauccgcuuguucuc

SEQ ID NO: 2943902 - RNA, 19 nt, Artificial Sequence
  Description of Artificial Sequence: Synthetic oligonucleotide
acacucccugugaguaggc

SEQ ID NO: 2943903 - RNA, 19 nt, Artificial Sequence
  Description of Artificial Sequence: Synthetic oligonucleotide
gaggaugaagaaggccaca

SEQ ID NO: 2943904 - RNA, 19 nt, Artificial Sequence
  Description of Artificial Sequence: Synthetic oligonucleotide
ucuggucuucugugucccu

SEQ ID NO: 2943905 - RNA, 19 nt, Artificial Sequence
  Description of Artificial Sequence: Synthetic oligonucleotide
cuaucagccauccgcuugu

SEQ ID NO: 2943906 - RNA, 19 nt, Artificial Sequence
  Description of Artificial Sequence: Synthetic oligonucleotide
cucugggacaccgcagcac

SEQ ID NO: 2943907 - RNA, 19 nt, Artificial Sequence
  Description of Artificial Sequence: Synthetic oligonucleotide
uuggcucccauuggcucac

SEQ ID NO: 2943908 - RNA, 19 nt, Artificial Sequence
  Description of Artificial Sequence: Synthetic oligonucleotide
gagccuggcugcccuuggc

SEQ ID NO: 2943909 - RNA, 19 nt, Artificial Sequence
  Description of Artificial Sequence: Synthetic oligonucleotide
caucuagguaucgguucug

SEQ ID NO: 2943910 - RNA, 19 nt, Artificial Sequence
  Description of Artificial Sequence: Synthetic oligonucleotide
agaggugauagaggaugaa

SEQ ID NO: 2943911 - RNA, 19 nt, Artificial Sequence
  Description of Artificial Sequence: Synthetic oligonucleotide
ucucgcccagaccgugcca

SEQ ID NO: 2943912 - RNA, 19 nt, Artificial Sequence
  Description of Artificial Sequence: Synthetic oligonucleotide
gagagccuggcugcccuug

SEQ ID NO: 2943913 - RNA, 19 nt, Artificial Sequence
  Description of Artificial Sequence: Synthetic oligonucleotide
gagccuugguaaccuugga

SEQ ID NO: 2943914 - RNA, 19 nt, Artificial Sequence
  Description of Artificial Sequence: Synthetic oligonucleotide
ugucccuaucgauguccaa

SEQ ID NO: 2943915 - RNA, 19 nt, Artificial Sequence
  Description of Artificial Sequence: Synthetic oligonucleotide
gaguccaaucagccaucuc

SEQ ID NO: 2943916 - RNA, 19 nt, Artificial Sequence
  Description of Artificial Sequence: Synthetic oligonucleotide
cauggccauaccacacaga

SEQ ID NO: 2943917 - RNA, 19 nt, Artificial Sequence
  Description of Artificial Sequence: Synthetic oligonucleotide
caauuaagaccauggccau

SEQ ID NO: 2943918 - RNA, 19 nt, Artificial Sequence
  Description of Artificial Sequence: Synthetic oligonucleotide
ccaggauaccagguguagg

SEQ ID NO: 2943919 - RNA, 19 nt, Artificial Sequence
  Description of Artificial Sequence: Synthetic oligonucleotide
ucucgcccuccagagcccc

SEQ ID NO: 2943920 - RNA, 19 nt, Artificial Sequence
  Description of Artificial Sequence: Synthetic oligonucleotide
gugcgcgaguccaaucagc

SEQ ID NO: 2943921 - RNA, 19 nt, Artificial Sequence
  Description of Artificial Sequence: Synthetic oligonucleotide
ccauccgcuuguucucucg

SEQ ID NO: 2943922 - RNA, 19 nt, Artificial Sequence
  Description of Artificial Sequence: Synthetic oligonucleotide
cuuguucucucggucuaga

SEQ ID NO: 2943923 - RNA, 19 nt, Artificial Sequence
  Description of Artificial Sequence: Synthetic oligonucleotide
cagucacacuggugaaguc

SEQ ID NO: 2943924 - RNA, 19 nt, Artificial Sequence
  Description of Artificial Sequence: Synthetic oligonucleotide
ucucucggucuagaaucuc

SEQ ID NO: 2943925 - RNA, 19 nt, Artificial Sequence
  Description of Artificial Sequence: Synthetic oligonucleotide
gcuuccgguugucucgccc

SEQ ID NO: 2943926 - RNA, 19 nt, Artificial Sequence
  Description of Artificial Sequence: Synthetic oligonucleotide
cgauuugagccuugguaac

SEQ ID NO: 2943927 - RNA, 19 nt, Artificial Sequence
  Description of Artificial Sequence: Synthetic oligonucleotide
gagcucggugcgcgagucc

SEQ ID NO: 2943928 - RNA, 19 nt, Artificial Sequence
  Description of Artificial Sequence: Synthetic oligonucleotide
accgugccauuguggaaaa

SEQ ID NO: 2943929 - RNA, 19 nt, Artificial Sequence
  Description of Artificial Sequence: Synthetic oligonucleotide
gcccuuggcucccauuggc

SEQ ID NO: 2943930 - RNA, 19 nt, Artificial Sequence
  Description of Artificial Sequence: Synthetic oligonucleotide
uggugaagucugaguccau

SEQ ID NO: 2943931 - RNA, 19 nt, Artificial Sequence
  Description of Artificial Sequence: Synthetic oligonucleotide
cuuggaggccaggcuauca

SEQ ID NO: 2943932 - RNA, 19 nt, Artificial Sequence
  Description of Artificial Sequence: Synthetic oligonucleotide
ucggugcgcgaguccaauc

SEQ ID NO: 2943933 - RNA, 19 nt, Artificial Sequence
  Description of Artificial Sequence: Synthetic oligonucleotide
gguaaccuuggaggccagg

SEQ ID NO: 2943934 - RNA, 19 nt, Artificial Sequence
  Description of Artificial Sequence: Synthetic oligonucleotide
ccuuggcucccauuggcuc

SEQ ID NO: 2943935 - RNA, 19 nt, Artificial Sequence
  Description of Artificial Sequence: Synthetic oligonucleotide
ccaaggccagcgauuugag

SEQ ID NO: 2943936 - RNA, 19 nt, Artificial Sequence
  Description of Artificial Sequence: Synthetic oligonucleotide
gucugaguccaugccaucu

SEQ ID NO: 2943937 - RNA, 19 nt, Artificial Sequence
  Description of Artificial Sequence: Synthetic oligonucleotide
auguccaaggccagcgauu

SEQ ID NO: 2943938 - RNA, 19 nt, Artificial Sequence
  Description of Artificial Sequence: Synthetic oligonucleotide
cacagaagcuuccgguugu

SEQ ID NO: 2943939 - RNA, 19 nt, Artificial Sequence
  Description of Artificial Sequence: Synthetic oligonucleotide
ggccacaauuaagaccaug

SEQ ID NO: 2943940 - RNA, 19 nt, Artificial Sequence
  Description of Artificial Sequence: Synthetic oligonucleotide
cuggcugcccuuggcuccc

SEQ ID NO: 2943941 - RNA, 19 nt, Artificial Sequence
  Description of Artificial Sequence: Synthetic oligonucleotide
agguaucgguucuggucuu

SEQ ID NO: 2943942 - RNA, 19 nt, Artificial Sequence
  Description of Artificial Sequence: Synthetic oligonucleotide
cuucacacucccugugagu

SEQ ID NO: 2943943 - RNA, 19 nt, Artificial Sequence
  Description of Artificial Sequence: Synthetic oligonucleotide
cauuggcucacguccuugu

SEQ ID NO: 2943944 - RNA, 19 nt, Artificial Sequence
  Description of Artificial Sequence: Synthetic oligonucleotide
gcucccauuggcucacguc

SEQ ID NO: 2943945 - RNA, 19 nt, Artificial Sequence
  Description of Artificial Sequence: Synthetic oligonucleotide
gccagucacacuggugaag

SEQ ID NO: 2943946 - RNA, 19 nt, Artificial Sequence
  Description of Artificial Sequence: Synthetic oligonucleotide
accagagcucggugcgcga

SEQ ID NO: 2943947 - RNA, 19 nt, Artificial Sequence
  Description of Artificial Sequence: Synthetic oligonucleotide
cacacagaagcuuccgguu

SEQ ID NO: 2943948 - RNA, 19 nt, Artificial Sequence
  Description of Artificial Sequence: Synthetic oligonucleotide
gugucccuaucgaugucca

SEQ ID NO: 2943949 - RNA, 19 nt, Artificial Sequence
  Description of Artificial Sequence: Synthetic oligonucleotide
ucacguccuuguccucgau

SEQ ID NO: 2943950 - RNA, 19 nt, Artificial Sequence
  Description of Artificial Sequence: Synthetic oligonucleotide
accuuggaggccaggcuau

SEQ ID NO: 2943951 - RNA, 19 nt, Artificial Sequence
  Description of Artificial Sequence: Synthetic oligonucleotide
ccagcgauuugagccuugg

SEQ ID NO: 2943952 - RNA, 19 nt, Artificial Sequence
  Description of Artificial Sequence: Synthetic oligonucleotide
guccaaggccagcgauuug

SEQ ID NO: 2943953 - RNA, 19 nt, Artificial Sequence
  Description of Artificial Sequence: Synthetic oligonucleotide
agccccacucugggacacc

SEQ ID NO: 2943954 - RNA, 19 nt, Artificial Sequence
  Description of Artificial Sequence: Synthetic oligonucleotide
cagccaucucgcccuccag

SEQ ID NO: 2943955 - RNA, 19 nt, Artificial Sequence
  Description of Artificial Sequence: Synthetic oligonucleotide
cccuaucgauguccaaggc

SEQ ID NO: 2943956 - RNA, 19 nt, Artificial Sequence
  Description of Artificial Sequence: Synthetic oligonucleotide
cugugucccuaucgauguc

SEQ ID NO: 2943957 - RNA, 19 nt, Artificial Sequence
  Description of Artificial Sequence: Synthetic oligonucleotide
gcuuguucucucggucuag

SEQ ID NO: 2943958 - RNA, 19 nt, Artificial Sequence
  Description of Artificial Sequence: Synthetic oligonucleotide
guaggccagucacacuggu

SEQ ID NO: 2943959 - RNA, 19 nt, Artificial Sequence
  Description of Artificial Sequence: Synthetic oligonucleotide
ccgguugucucgcccagac

SEQ ID NO: 2943960 - RNA, 19 nt, Artificial Sequence
  Description of Artificial Sequence: Synthetic oligonucleotide
uccgguugucucgcccaga

SEQ ID NO: 2943961 - RNA, 19 nt, Artificial Sequence
  Description of Artificial Sequence: Synthetic oligonucleotide
gagccccacucugggacac

SEQ ID NO: 2943962 - RNA, 19 nt, Artificial Sequence
  Description of Artificial Sequence: Synthetic oligonucleotide
ccacucugggacaccgcag

SEQ ID NO: 2943963 - RNA, 19 nt, Artificial Sequence
  Description of Artificial Sequence: Synthetic oligonucleotide
ucgcccuccagagccccac

SEQ ID NO: 2943964 - RNA, 19 nt, Artificial Sequence
  Description of Artificial Sequence: Synthetic oligonucleotide
guccucaggaaaccaggau

SEQ ID NO: 2943965 - RNA, 19 nt, Artificial Sequence
  Description of Artificial Sequence: Synthetic oligonucleotide
ggaaaccaggauaccaggu

SEQ ID NO: 2943966 - RNA, 19 nt, Artificial Sequence
  Description of Artificial Sequence: Synthetic oligonucleotide
ggucuucugugucccuauc

SEQ ID NO: 2943967 - RNA, 19 nt, Artificial Sequence
  Description of Artificial Sequence: Synthetic oligonucleotide
gccaggcuaucagccaucc

SEQ ID NO: 2943968 - RNA, 19 nt, Artificial Sequence
  Description of Artificial Sequence: Synthetic oligonucleotide
guaucgguucuggucuucu

SEQ ID NO: 2943969 - RNA, 19 nt, Artificial Sequence
  Description of Artificial Sequence: Synthetic oligonucleotide
ccugugaguaggccaguca

SEQ ID NO: 2943970 - RNA, 19 nt, Artificial Sequence
  Description of Artificial Sequence: Synthetic oligonucleotide
cacguccuuguccucgaua

SEQ ID NO: 2943971 - RNA, 19 nt, Artificial Sequence
  Description of Artificial Sequence: Synthetic oligonucleotide
ccaucucgcccuccagagc

SEQ ID NO: 2943972 - RNA, 19 nt, Artificial Sequence
  Description of Artificial Sequence: Synthetic oligonucleotide
ccacacagaagcuuccggu

SEQ ID NO: 2943973 - RNA, 19 nt, Artificial Sequence
  Description of Artificial Sequence: Synthetic oligonucleotide
cccacucugggacaccgca

SEQ ID NO: 2943974 - RNA, 19 nt, Artificial Sequence
  Description of Artificial Sequence: Synthetic oligonucleotide
ccaggcuaucagccauccg

SEQ ID NO: 2943975 - RNA, 19 nt, Artificial Sequence
  Description of Artificial Sequence: Synthetic oligonucleotide
uaucagccauccgcuuguu

SEQ ID NO: 2943976 - RNA, 19 nt, Artificial Sequence
  Description of Artificial Sequence: Synthetic oligonucleotide
uggcucccauuggcucacg

SEQ ID NO: 2943977 - RNA, 19 nt, Artificial Sequence
  Description of Artificial Sequence: Synthetic oligonucleotide
cccagaccgugccauugug

SEQ ID NO: 2943978 - RNA, 19 nt, Artificial Sequence
  Description of Artificial Sequence: Synthetic oligonucleotide
gguaucgguucuggucuuc

SEQ ID NO: 2943979 - RNA, 19 nt, Artificial Sequence
  Description of Artificial Sequence: Synthetic oligonucleotide
cacagcaccagagcucggu

SEQ ID NO: 2943980 - RNA, 19 nt, Artificial Sequence
  Description of Artificial Sequence: Synthetic oligonucleotide
ccaucuagguaucgguucu

SEQ ID NO: 2943981 - RNA, 19 nt, Artificial Sequence
  Description of Artificial Sequence: Synthetic oligonucleotide
ccaugccaucuagguaucg

SEQ ID NO: 2943982 - RNA, 19 nt, Artificial Sequence
  Description of Artificial Sequence: Synthetic oligonucleotide
guugucucgcccagaccgu

SEQ ID NO: 2943983 - RNA, 19 nt, Artificial Sequence
  Description of Artificial Sequence: Synthetic oligonucleotide
ccauuggcucacguccuug

SEQ ID NO: 2943984 - RNA, 19 nt, Artificial Sequence
  Description of Artificial Sequence: Synthetic oligonucleotide
ggccagucacacuggugaa

SEQ ID NO: 2943985 - RNA, 19 nt, Artificial Sequence
  Description of Artificial Sequence: Synthetic oligonucleotide
ucgcccagaccgugccauu

SEQ ID NO: 2943986 - RNA, 19 nt, Artificial Sequence
  Description of Artificial Sequence: Synthetic oligonucleotide
gcgcgaguccaaucagcca

SEQ ID NO: 2943987 - RNA, 19 nt, Artificial Sequence
  Description of Artificial Sequence: Synthetic oligonucleotide
ccagucacacuggugaagu

SEQ ID NO: 2943988 - RNA, 19 nt, Artificial Sequence
  Description of Artificial Sequence: Synthetic oligonucleotide
gcgaguccaaucagccauc

SEQ ID NO: 2943989 - RNA, 19 nt, Artificial Sequence
  Description of Artificial Sequence: Synthetic oligonucleotide
cggugcgcgaguccaauca

SEQ ID NO: 2943990 - RNA, 19 nt, Artificial Sequence
  Description of Artificial Sequence: Synthetic oligonucleotide
gccauccgcuuguucucuc

SEQ ID NO: 2943991 - RNA, 19 nt, Artificial Sequence
  Description of Artificial Sequence: Synthetic oligonucleotide
cagaagcuuccgguugucu

SEQ ID NO: 2943992 - RNA, 19 nt, Artificial Sequence
  Description of Artificial Sequence: Synthetic oligonucleotide
cagcgauuugagccuuggu

SEQ ID NO: 2943993 - RNA, 19 nt, Artificial Sequence
  Description of Artificial Sequence: Synthetic oligonucleotide
cgcgaguccaaucagccau

SEQ ID NO: 2943994 - RNA, 19 nt, Artificial Sequence
  Description of Artificial Sequence: Synthetic oligonucleotide
cucgcccagaccgugccau

SEQ ID NO: 2943995 - RNA, 19 nt, Artificial Sequence
  Description of Artificial Sequence: Synthetic oligonucleotide
cagagcucggugcgcgagu

SEQ ID NO: 2943996 - RNA, 19 nt, Artificial Sequence
  Description of Artificial Sequence: Synthetic oligonucleotide
ccccacucugggacaccgc

SEQ ID NO: 2943997 - RNA, 19 nt, Artificial Sequence
  Description of Artificial Sequence: Synthetic oligonucleotide
ccacagcaccagagcucgg

SEQ ID NO: 2943998 - RNA, 19 nt, Artificial Sequence
  Description of Artificial Sequence: Synthetic oligonucleotide
ggccaggcuaucagccauc

SEQ ID NO: 2943999 - RNA, 19 nt, Artificial Sequence
  Description of Artificial Sequence: Synthetic oligonucleotide
cgguugucucgcccagacc

SEQ ID NO: 2944000 - RNA, 19 nt, Artificial Sequence
  Description of Artificial Sequence: Synthetic oligonucleotide
guccucgauaagaggugau

SEQ ID NO: 2944001 - RNA, 19 nt, Artificial Sequence
  Description of Artificial Sequence: Synthetic oligonucleotide
cgcuucacacucccuguga

SEQ ID NO: 2944002 - RNA, 19 nt, Artificial Sequence
  Description of Artificial Sequence: Synthetic oligonucleotide
ccagagccccacucuggga

SEQ ID NO: 2944003 - RNA, 19 nt, Artificial Sequence
  Description of Artificial Sequence: Synthetic oligonucleotide
ccgcuuguucucucggucu

SEQ ID NO: 2944004 - RNA, 19 nt, Artificial Sequence
  Description of Artificial Sequence: Synthetic oligonucleotide
ggcucacguccuuguccuc

SEQ ID NO: 2944005 - RNA, 19 nt, Artificial Sequence
  Description of Artificial Sequence: Synthetic oligonucleotide
gccauaccacacagaagcu

SEQ ID NO: 2944006 - RNA, 19 nt, Artificial Sequence
  Description of Artificial Sequence: Synthetic oligonucleotide
gccagcgauuugagccuug

SEQ ID NO: 2944007 - RNA, 19 nt, Artificial Sequence
  Description of Artificial Sequence: Synthetic oligonucleotide
aggccacaauuaagaccau

SEQ ID NO: 2944008 - RNA, 19 nt, Artificial Sequence
  Description of Artificial Sequence: Synthetic oligonucleotide
ccuuggaggccaggcuauc

SEQ ID NO: 2944009 - RNA, 19 nt, Artificial Sequence
  Description of Artificial Sequence: Synthetic oligonucleotide
ggcucccauuggcucacgu

SEQ ID NO: 2944010 - RNA, 19 nt, Artificial Sequence
  Description of Artificial Sequence: Synthetic oligonucleotide
gcccagaccgugccauugu

SEQ ID NO: 2944011 - RNA, 19 nt, Artificial Sequence
  Description of Artificial Sequence: Synthetic oligonucleotide
cccuuggcucccauuggcu

SEQ ID NO: 2944012 - RNA, 19 nt, Artificial Sequence
  Description of Artificial Sequence: Synthetic oligonucleotide
ggcuaucagccauccgcuu

SEQ ID NO: 2944013 - RNA, 19 nt, Artificial Sequence
  Description of Artificial Sequence: Synthetic oligonucleotide
cucggugcgcgaguccaau

SEQ ID NO: 2944014 - RNA, 19 nt, Artificial Sequence
  Description of Artificial Sequence: Synthetic oligonucleotide
cgauguccaaggccagcga

SEQ ID NO: 2944015 - RNA, 19 nt, Artificial Sequence
  Description of Artificial Sequence: Synthetic oligonucleotide
ccauaccacacagaagcuu

SEQ ID NO: 2944016 - RNA, 19 nt, Artificial Sequence
  Description of Artificial Sequence: Synthetic oligonucleotide
cgcccagaccgugccauug

SEQ ID NO: 2944017 - RNA, 19 nt, Artificial Sequence
  Description of Artificial Sequence: Synthetic oligonucleotide
cgcuuguucucucggucua

SEQ ID NO: 2944018 - RNA, 19 nt, Artificial Sequence
  Description of Artificial Sequence: Synthetic oligonucleotide
cgguucuggucuucugugu

SEQ ID NO: 2944019 - RNA, 19 nt, Artificial Sequence
  Description of Artificial Sequence: Synthetic oligonucleotide
gcugcccuuggcucccauu

SEQ ID NO: 2944020 - RNA, 19 nt, Artificial Sequence
  Description of Artificial Sequence: Synthetic oligonucleotide
gcucggugcgcgaguccaa

SEQ ID NO: 2944021 - RNA, 19 nt, Artificial Sequence
  Description of Artificial Sequence: Synthetic oligonucleotide
cgaguccaaucagccaucu

SEQ ID NO: 2944022 - RNA, 19 nt, Artificial Sequence
  Description of Artificial Sequence: Synthetic oligonucleotide
ggccagcgauuugagccuu

SEQ ID NO: 2944023 - RNA, 19 nt, Artificial Sequence
  Description of Artificial Sequence: Synthetic oligonucleotide
cccauuggcucacguccuu

SEQ ID NO: 2944024 - RNA, 19 nt, Artificial Sequence
  Description of Artificial Sequence: Synthetic oligonucleotide
cgcccuccagagccccacu

SEQ ID NO: 2944025 - RNA, 19 nt, Artificial Sequence
  Description of Artificial Sequence: Synthetic oligonucleotide
aauggugccacuccccuga

SEQ ID NO: 2944026 - RNA, 19 nt, Artificial Sequence
  Description of Artificial Sequence: Synthetic oligonucleotide
acuccccugaauuuggggu

SEQ ID NO: 2944027 - RNA, 19 nt, Artificial Sequence
  Description of Artificial Sequence: Synthetic oligonucleotide
cuauuucccggagagcugc

SEQ ID NO: 2944028 - RNA, 19 nt, Artificial Sequence
  Description of Artificial Sequence: Synthetic oligonucleotide
aaauggugccacuccccug

SEQ ID NO: 2944029 - RNA, 19 nt, Artificial Sequence
  Description of Artificial Sequence: Synthetic oligonucleotide
cacuccccugaauuugggg

SEQ ID NO: 2944030 - RNA, 19 nt, Artificial Sequence
  Description of Artificial Sequence: Synthetic oligonucleotide
ugccacuccccugaauuug

SEQ ID NO: 2944031 - RNA, 19 nt, Artificial Sequence
  Description of Artificial Sequence: Synthetic oligonucleotide
cuccccugaauuugggguc

SEQ ID NO: 2944032 - RNA, 19 nt, Artificial Sequence
  Description of Artificial Sequence: Synthetic oligonucleotide
uccccugaauuuggggucc

SEQ ID NO: 2944033 - RNA, 19 nt, Artificial Sequence
  Description of Artificial Sequence: Synthetic oligonucleotide
uauuucccggagagcugcu

SEQ ID NO: 2944034 - RNA, 19 nt, Artificial Sequence
  Description of Artificial Sequence: Synthetic oligonucleotide
auuucccggagagcugcuc

SEQ ID NO: 2944035 - RNA, 19 nt, Artificial Sequence
  Description of Artificial Sequence: Synthetic oligonucleotide
gccacuccccugaauuugg

SEQ ID NO: 2944036 - RNA, 19 nt, Artificial Sequence
  Description of Artificial Sequence: Synthetic oligonucleotide
ccuauuucccggagagcug

SEQ ID NO: 2944037 - RNA, 19 nt, Artificial Sequence
  Description of Artificial Sequence: Synthetic oligonucleotide
ggugccacuccccugaauu

SEQ ID NO: 2944038 - RNA, 19 nt, Artificial Sequence
  Description of Artificial Sequence: Synthetic oligonucleotide
uggugccacuccccugaau

SEQ ID NO: 2944039 - RNA, 19 nt, Artificial Sequence
  Description of Artificial Sequence: Synthetic oligonucleotide
ccacuccccugaauuuggg

SEQ ID NO: 2944040 - RNA, 19 nt, Artificial Sequence
  Description of Artificial Sequence: Synthetic oligonucleotide
auggugccacuccccugaa

SEQ ID NO: 2944041 - RNA, 19 nt, Artificial Sequence
  Description of Artificial Sequence: Synthetic oligonucleotide
gugccacuccccugaauuu

SEQ ID NO: 2944042 - RNA, 19 nt, Artificial Sequence
  Description of Artificial Sequence: Synthetic oligonucleotide
aaaggaagcauuuggcucc

SEQ ID NO: 2944043 - RNA, 19 nt, Artificial Sequence
  Description of Artificial Sequence: Synthetic oligonucleotide
aaauguaacccauaaaagu

SEQ ID NO: 2944044 - RNA, 19 nt, Artificial Sequence
  Description of Artificial Sequence: Synthetic oligonucleotide
aauguaacccauaaaaguc

SEQ ID NO: 2944045 - RNA, 19 nt, Artificial Sequence
  Description of Artificial Sequence: Synthetic oligonucleotide
ucauuuuccacacuuaaug

SEQ ID NO: 2944046 - RNA, 19 nt, Artificial Sequence
  Description of Artificial Sequence: Synthetic oligonucleotide
augacaauggucucuaggc

SEQ ID NO: 2944047 - RNA, 19 nt, Artificial Sequence
  Description of Artificial Sequence: Synthetic oligonucleotide
cuuaauguaaauguaaccc

SEQ ID NO: 2944048 - RNA, 19 nt, Artificial Sequence
  Description of Artificial Sequence: Synthetic oligonucleotide
aagcauuuggcucccaccc

SEQ ID NO: 2944049 - RNA, 19 nt, Artificial Sequence
  Description of Artificial Sequence: Synthetic oligonucleotide
acuuaauguaaauguaacc

SEQ ID NO: 2944050 - RNA, 19 nt, Artificial Sequence
  Description of Artificial Sequence: Synthetic oligonucleotide
aaugacaauggucucuagg

SEQ ID NO: 2944051 - RNA, 19 nt, Artificial Sequence
  Description of Artificial Sequence: Synthetic oligonucleotide
guaaauguaacccauaaaa

SEQ ID NO: 2944052 - RNA, 19 nt, Artificial Sequence
  Description of Artificial Sequence: Synthetic oligonucleotide
aaaggaguccuccagugag

SEQ ID NO: 2944053 - RNA, 19 nt, Artificial Sequence
  Description of Artificial Sequence: Synthetic oligonucleotide
aaaagucccauuucuaaga

SEQ ID NO: 2944054 - RNA, 19 nt, Artificial Sequence
  Description of Artificial Sequence: Synthetic oligonucleotide
uuaauguaaauguaaccca

SEQ ID NO: 2944055 - RNA, 19 nt, Artificial Sequence
  Description of Artificial Sequence: Synthetic oligonucleotide
ucaaaaggaagcauuuggc

SEQ ID NO: 2944056 - RNA, 19 nt, Artificial Sequence
  Description of Artificial Sequence: Synthetic oligonucleotide
ucucuaggcagacaaaacc

SEQ ID NO: 2944057 - RNA, 19 nt, Artificial Sequence
  Description of Artificial Sequence: Synthetic oligonucleotide
cacaaagaagccaucauag

SEQ ID NO: 2944058 - RNA, 19 nt, Artificial Sequence
  Description of Artificial Sequence: Synthetic oligonucleotide
cucaaaaggaagcauuugg

SEQ ID NO: 2944059 - RNA, 19 nt, Artificial Sequence
  Description of Artificial Sequence: Synthetic oligonucleotide
uucuaagaagcccagcuca

SEQ ID NO: 2944060 - RNA, 19 nt, Artificial Sequence
  Description of Artificial Sequence: Synthetic oligonucleotide
agacucagaauucauuuuc

SEQ ID NO: 2944061 - RNA, 19 nt, Artificial Sequence
  Description of Artificial Sequence: Synthetic oligonucleotide
uaaaagucccauuucuaag

SEQ ID NO: 2944062 - RNA, 19 nt, Artificial Sequence
  Description of Artificial Sequence: Synthetic oligonucleotide
auuucuaagaagcccagcu

SEQ ID NO: 2944063 - RNA, 19 nt, Artificial Sequence
  Description of Artificial Sequence: Synthetic oligonucleotide
uuuuccacacuuaauguaa

SEQ ID NO: 2944064 - RNA, 19 nt, Artificial Sequence
  Description of Artificial Sequence: Synthetic oligonucleotide
ugagugcuaaugacaaugg

SEQ ID NO: 2944065 - RNA, 19 nt, Artificial Sequence
  Description of Artificial Sequence: Synthetic oligonucleotide
uguugaacuggccacgagc

SEQ ID NO: 2944066 - RNA, 19 nt, Artificial Sequence
  Description of Artificial Sequence: Synthetic oligonucleotide
agaagcccagcucaaaagg

SEQ ID NO: 2944067 - RNA, 19 nt, Artificial Sequence
  Description of Artificial Sequence: Synthetic oligonucleotide
cucaacagaggucacaaag

SEQ ID NO: 2944068 - RNA, 19 nt, Artificial Sequence
  Description of Artificial Sequence: Synthetic oligonucleotide
aagaagcccagcucaaaag

SEQ ID NO: 2944069 - RNA, 19 nt, Artificial Sequence
  Description of Artificial Sequence: Synthetic oligonucleotide
gacaauggucucuaggcag

SEQ ID NO: 2944070 - RNA, 19 nt, Artificial Sequence
  Description of Artificial Sequence: Synthetic oligonucleotide
aaagaagccaucauagccu

SEQ ID NO: 2944071 - RNA, 19 nt, Artificial Sequence
  Description of Artificial Sequence: Synthetic oligonucleotide
ucaacagaggucacaaaga

SEQ ID NO: 2944072 - RNA, 19 nt, Artificial Sequence
  Description of Artificial Sequence: Synthetic oligonucleotide
uuagacucagaauucauuu

SEQ ID NO: 2944073 - RNA, 19 nt, Artificial Sequence
  Description of Artificial Sequence: Synthetic oligonucleotide
uguaacccauaaaaguccc

SEQ ID NO: 2944074 - RNA, 19 nt, Artificial Sequence
  Description of Artificial Sequence: Synthetic oligonucleotide
auguaacccauaaaagucc

SEQ ID NO: 2944075 - RNA, 19 nt, Artificial Sequence
  Description of Artificial Sequence: Synthetic oligonucleotide
agugcuaaugacaaugguc

SEQ ID NO: 2944076 - RNA, 19 nt, Artificial Sequence
  Description of Artificial Sequence: Synthetic oligonucleotide
aaccacaaaggaguccucc

SEQ ID NO: 2944077 - RNA, 19 nt, Artificial Sequence
  Description of Artificial Sequence: Synthetic oligonucleotide
uaauguaaauguaacccau

SEQ ID NO: 2944078 - RNA, 19 nt, Artificial Sequence
  Description of Artificial Sequence: Synthetic oligonucleotide
auaaaagucccauuucuaa

SEQ ID NO: 2944079 - RNA, 19 nt, Artificial Sequence
  Description of Artificial Sequence: Synthetic oligonucleotide
uccacuguuguugaacugg

SEQ ID NO: 2944080 - RNA, 19 nt, Artificial Sequence
  Description of Artificial Sequence: Synthetic oligonucleotide
acuguuguugaacuggcca

SEQ ID NO: 2944081 - RNA, 19 nt, Artificial Sequence
  Description of Artificial Sequence: Synthetic oligonucleotide
cuggccacgagccuggucg

SEQ ID NO: 2944082 - RNA, 19 nt, Artificial Sequence
  Description of Artificial Sequence: Synthetic oligonucleotide
gacaaaaccacaaaggagu

SEQ ID NO: 2944083 - RNA, 19 nt, Artificial Sequence
  Description of Artificial Sequence: Synthetic oligonucleotide
aucauagccuugcacccgc

SEQ ID NO: 2944084 - RNA, 19 nt, Artificial Sequence
  Description of Artificial Sequence: Synthetic oligonucleotide
uguaaauguaacccauaaa

SEQ ID NO: 2944085 - RNA, 19 nt, Artificial Sequence
  Description of Artificial Sequence: Synthetic oligonucleotide
uacugcucaacagagguca

SEQ ID NO: 2944086 - RNA, 19 nt, Artificial Sequence
  Description of Artificial Sequence: Synthetic oligonucleotide
cagaauucauuuuccacac

SEQ ID NO: 2944087 - RNA, 19 nt, Artificial Sequence
  Description of Artificial Sequence: Synthetic oligonucleotide
ucuaggcagacaaaaccac

SEQ ID NO: 2944088 - RNA, 19 nt, Artificial Sequence
  Description of Artificial Sequence: Synthetic oligonucleotide
gaagcauuuggcucccacc

SEQ ID NO: 2944089 - RNA, 19 nt, Artificial Sequence
  Description of Artificial Sequence: Synthetic oligonucleotide
aagccuggcgcacagcucu

SEQ ID NO: 2944090 - RNA, 19 nt, Artificial Sequence
  Description of Artificial Sequence: Synthetic oligonucleotide
auguaaauguaacccauaa

SEQ ID NO: 2944091 - RNA, 19 nt, Artificial Sequence
  Description of Artificial Sequence: Synthetic oligonucleotide
uaagaagcccagcucaaaa

SEQ ID NO: 2944092 - RNA, 19 nt, Artificial Sequence
  Description of Artificial Sequence: Synthetic oligonucleotide
aaagucccauuucuaagaa

SEQ ID NO: 2944093 - RNA, 19 nt, Artificial Sequence
  Description of Artificial Sequence: Synthetic oligonucleotide
ugacaauggucucuaggca

SEQ ID NO: 2944094 - RNA, 19 nt, Artificial Sequence
  Description of Artificial Sequence: Synthetic oligonucleotide
uguuguugaacuggccacg

SEQ ID NO: 2944095 - RNA, 19 nt, Artificial Sequence
  Description of Artificial Sequence: Synthetic oligonucleotide
gaagccaucauagccuugc

SEQ ID NO: 2944096 - RNA, 19 nt, Artificial Sequence
  Description of Artificial Sequence: Synthetic oligonucleotide
ugagcucccagcucuugcg

SEQ ID NO: 2944097 - RNA, 19 nt, Artificial Sequence
  Description of Artificial Sequence: Synthetic oligonucleotide
ugcgcuguccgacaguucu

SEQ ID NO: 2944098 - RNA, 19 nt, Artificial Sequence
  Description of Artificial Sequence: Synthetic oligonucleotide
gugagugcuaaugacaaug

SEQ ID NO: 2944099 - RNA, 19 nt, Artificial Sequence
  Description of Artificial Sequence: Synthetic oligonucleotide
uuucuaagaagcccagcuc

SEQ ID NO: 2944100 - RNA, 19 nt, Artificial Sequence
  Description of Artificial Sequence: Synthetic oligonucleotide
agacaaaaccacaaaggag

SEQ ID NO: 2944101 - RNA, 19 nt, Artificial Sequence
  Description of Artificial Sequence: Synthetic oligonucleotide
ucuggguacugcucaacag

SEQ ID NO: 2944102 - RNA, 19 nt, Artificial Sequence
  Description of Artificial Sequence: Synthetic oligonucleotide
gaguccuccagugagcucc

SEQ ID NO: 2944103 - RNA, 19 nt, Artificial Sequence
  Description of Artificial Sequence: Synthetic oligonucleotide
uaggcagacaaaaccacaa

SEQ ID NO: 2944104 - RNA, 19 nt, Artificial Sequence
  Description of Artificial Sequence: Synthetic oligonucleotide
aagucccauuucuaagaag

SEQ ID NO: 2944105 - RNA, 19 nt, Artificial Sequence
  Description of Artificial Sequence: Synthetic oligonucleotide
cagacaaaaccacaaagga

SEQ ID NO: 2944106 - RNA, 19 nt, Artificial Sequence
  Description of Artificial Sequence: Synthetic oligonucleotide
gcagacaaaaccacaaagg

SEQ ID NO: 2944107 - RNA, 19 nt, Artificial Sequence
  Description of Artificial Sequence: Synthetic oligonucleotide
uucccguagucuuugcugc

SEQ ID NO: 2944108 - RNA, 19 nt, Artificial Sequence
  Description of Artificial Sequence: Synthetic oligonucleotide
auuuuccacacuuaaugua

SEQ ID NO: 2944109 - RNA, 19 nt, Artificial Sequence
  Description of Artificial Sequence: Synthetic oligonucleotide
guugaacuggccacgagcc

SEQ ID NO: 2944110 - RNA, 19 nt, Artificial Sequence
  Description of Artificial Sequence: Synthetic oligonucleotide
uguccgacaguucugggua

SEQ ID NO: 2944111 - RNA, 19 nt, Artificial Sequence
  Description of Artificial Sequence: Synthetic oligonucleotide
uucauuuuccacacuuaau

SEQ ID NO: 2944112 - RNA, 19 nt, Artificial Sequence
  Description of Artificial Sequence: Synthetic oligonucleotide
ugccuucucccuucgaucc

SEQ ID NO: 2944113 - RNA, 19 nt, Artificial Sequence
  Description of Artificial Sequence: Synthetic oligonucleotide
ggcagacaaaaccacaaag

SEQ ID NO: 2944114 - RNA, 19 nt, Artificial Sequence
  Description of Artificial Sequence: Synthetic oligonucleotide
agcauuuggcucccacccc

SEQ ID NO: 2944115 - RNA, 19 nt, Artificial Sequence
  Description of Artificial Sequence: Synthetic oligonucleotide
gccaucauagccuugcacc

SEQ ID NO: 2944116 - RNA, 19 nt, Artificial Sequence
  Description of Artificial Sequence: Synthetic oligonucleotide
auggucucuaggcagacaa

SEQ ID NO: 2944117 - RNA, 19 nt, Artificial Sequence
  Description of Artificial Sequence: Synthetic oligonucleotide
cuucgauccacuguuguug

SEQ ID NO: 2944118 - RNA, 19 nt, Artificial Sequence
  Description of Artificial Sequence: Synthetic oligonucleotide
uucuggguacugcucaaca

SEQ ID NO: 2944119 - RNA, 19 nt, Artificial Sequence
  Description of Artificial Sequence: Synthetic oligonucleotide
acccauaaaagucccauuu

SEQ ID NO: 2944120 - RNA, 19 nt, Artificial Sequence
  Description of Artificial Sequence: Synthetic oligonucleotide
cuucccguagucuuugcug

SEQ ID NO: 2944121 - RNA, 19 nt, Artificial Sequence
  Description of Artificial Sequence: Synthetic oligonucleotide
ucccauuucuaagaagccc

SEQ ID NO: 2944122 - RNA, 19 nt, Artificial Sequence
  Description of Artificial Sequence: Synthetic oligonucleotide
aaggaguccuccagugagc

SEQ ID NO: 2944123 - RNA, 19 nt, Artificial Sequence
  Description of Artificial Sequence: Synthetic oligonucleotide
gacucagaauucauuuucc

SEQ ID NO: 2944124 - RNA, 19 nt, Artificial Sequence
  Description of Artificial Sequence: Synthetic oligonucleotide
aaggaagcauuuggcuccc

SEQ ID NO: 2944125 - RNA, 19 nt, Artificial Sequence
  Description of Artificial Sequence: Synthetic oligonucleotide
cuguuguugaacuggccac

SEQ ID NO: 2944126 - RNA, 19 nt, Artificial Sequence
  Description of Artificial Sequence: Synthetic oligonucleotide
ugaacuggccacgagccug

SEQ ID NO: 2944127 - RNA, 19 nt, Artificial Sequence
  Description of Artificial Sequence: Synthetic oligonucleotide
cucuaggcagacaaaacca

SEQ ID NO: 2944128 - RNA, 19 nt, Artificial Sequence
  Description of Artificial Sequence: Synthetic oligonucleotide
acucagaauucauuuucca

SEQ ID NO: 2944129 - RNA, 19 nt, Artificial Sequence
  Description of Artificial Sequence: Synthetic oligonucleotide
ucuaagaagcccagcucaa

SEQ ID NO: 2944130 - RNA, 19 nt, Artificial Sequence
  Description of Artificial Sequence: Synthetic oligonucleotide
aagaagccaucauagccuu

SEQ ID NO: 2944131 - RNA, 19 nt, Artificial Sequence
  Description of Artificial Sequence: Synthetic oligonucleotide
ucccagagccuccugugag

SEQ ID NO: 2944132 - RNA, 19 nt, Artificial Sequence
  Description of Artificial Sequence: Synthetic oligonucleotide
gaauucauuuuccacacuu

SEQ ID NO: 2944133 - RNA, 19 nt, Artificial Sequence
  Description of Artificial Sequence: Synthetic oligonucleotide
uaacccauaaaagucccau

SEQ ID NO: 2944134 - RNA, 19 nt, Artificial Sequence
  Description of Artificial Sequence: Synthetic oligonucleotide
uuuccacacuuaauguaaa

SEQ ID NO: 2944135 - RNA, 19 nt, Artificial Sequence
  Description of Artificial Sequence: Synthetic oligonucleotide
acaaaaccacaaaggaguc

SEQ ID NO: 2944136 - RNA, 19 nt, Artificial Sequence
  Description of Artificial Sequence: Synthetic oligonucleotide
uccugugagugcuaaugac

SEQ ID NO: 2944137 - RNA, 19 nt, Artificial Sequence
  Description of Artificial Sequence: Synthetic oligonucleotide
uucgauccacuguuguuga

SEQ ID NO: 2944138 - RNA, 19 nt, Artificial Sequence
  Description of Artificial Sequence: Synthetic oligonucleotide
ucucccuucgauccacugu

SEQ ID NO: 2944139 - RNA, 19 nt, Artificial Sequence
  Description of Artificial Sequence: Synthetic oligonucleotide
acacuuaauguaaauguaa

SEQ ID NO: 2944140 - RNA, 19 nt, Artificial Sequence
  Description of Artificial Sequence: Synthetic oligonucleotide
ucuuugcugcucccgggcc

SEQ ID NO: 2944141 - RNA, 19 nt, Artificial Sequence
  Description of Artificial Sequence: Synthetic oligonucleotide
uggcgcacagcucucugcc

SEQ ID NO: 2944142 - RNA, 19 nt, Artificial Sequence
  Description of Artificial Sequence: Synthetic oligonucleotide
cagaggucacaaagaagcc

SEQ ID NO: 2944143 - RNA, 19 nt, Artificial Sequence
  Description of Artificial Sequence: Synthetic oligonucleotide
aauguaaauguaacccaua

SEQ ID NO: 2944144 - RNA, 19 nt, Artificial Sequence
  Description of Artificial Sequence: Synthetic oligonucleotide
agcucuugcgcuguccgac

SEQ ID NO: 2944145 - RNA, 19 nt, Artificial Sequence
  Description of Artificial Sequence: Synthetic oligonucleotide
guguucagcaccugcugcc

SEQ ID NO: 2944146 - RNA, 19 nt, Artificial Sequence
  Description of Artificial Sequence: Synthetic oligonucleotide
aauucauuuuccacacuua

SEQ ID NO: 2944147 - RNA, 19 nt, Artificial Sequence
  Description of Artificial Sequence: Synthetic oligonucleotide
gugcuaaugacaauggucu

SEQ ID NO: 2944148 - RNA, 19 nt, Artificial Sequence
  Description of Artificial Sequence: Synthetic oligonucleotide
agcaccccgugccuucucc

SEQ ID NO: 2944149 - RNA, 19 nt, Artificial Sequence
  Description of Artificial Sequence: Synthetic oligonucleotide
uagacucagaauucauuuu

SEQ ID NO: 2944150 - RNA, 19 nt, Artificial Sequence
  Description of Artificial Sequence: Synthetic oligonucleotide
uuguugaacuggccacgag

SEQ ID NO: 2944151 - RNA, 19 nt, Artificial Sequence
  Description of Artificial Sequence: Synthetic oligonucleotide
agaggucacaaagaagcca

SEQ ID NO: 2944152 - RNA, 19 nt, Artificial Sequence
  Description of Artificial Sequence: Synthetic oligonucleotide
auagccuugcacccgcccu

SEQ ID NO: 2944153 - RNA, 19 nt, Artificial Sequence
  Description of Artificial Sequence: Synthetic oligonucleotide
guagucuuugcugcucccg

SEQ ID NO: 2944154 - RNA, 19 nt, Artificial Sequence
  Description of Artificial Sequence: Synthetic oligonucleotide
caaaaccacaaaggagucc

SEQ ID NO: 2944155 - RNA, 19 nt, Artificial Sequence
  Description of Artificial Sequence: Synthetic oligonucleotide
uguccaggcccgcaggccu

SEQ ID NO: 2944156 - RNA, 19 nt, Artificial Sequence
  Description of Artificial Sequence: Synthetic oligonucleotide
aacccauaaaagucccauu

SEQ ID NO: 2944157 - RNA, 19 nt, Artificial Sequence
  Description of Artificial Sequence: Synthetic oligonucleotide
cugugagugcuaaugacaa

SEQ ID NO: 2944158 - RNA, 19 nt, Artificial Sequence
  Description of Artificial Sequence: Synthetic oligonucleotide
caaaaggaagcauuuggcu

SEQ ID NO: 2944159 - RNA, 19 nt, Artificial Sequence
  Description of Artificial Sequence: Synthetic oligonucleotide
cauaaaagucccauuucua

SEQ ID NO: 2944160 - RNA, 19 nt, Artificial Sequence
  Description of Artificial Sequence: Synthetic oligonucleotide
uaaugacaauggucucuag

SEQ ID NO: 2944161 - RNA, 19 nt, Artificial Sequence
  Description of Artificial Sequence: Synthetic oligonucleotide
gauccacuguuguugaacu

SEQ ID NO: 2944162 - RNA, 19 nt, Artificial Sequence
  Description of Artificial Sequence: Synthetic oligonucleotide
cuaggcagacaaaaccaca

SEQ ID NO: 2944163 - RNA, 19 nt, Artificial Sequence
  Description of Artificial Sequence: Synthetic oligonucleotide
cacacuuaauguaaaugua

SEQ ID NO: 2944164 - RNA, 19 nt, Artificial Sequence
  Description of Artificial Sequence: Synthetic oligonucleotide
agaauucauuuuccacacu

SEQ ID NO: 2944165 - RNA, 19 nt, Artificial Sequence
  Description of Artificial Sequence: Synthetic oligonucleotide
caacagaggucacaaagaa

SEQ ID NO: 2944166 - RNA, 19 nt, Artificial Sequence
  Description of Artificial Sequence: Synthetic oligonucleotide
uagccuugcacccgcccug

SEQ ID NO: 2944167 - RNA, 19 nt, Artificial Sequence
  Description of Artificial Sequence: Synthetic oligonucleotide
gaacuggccacgagccugg

SEQ ID NO: 2944168 - RNA, 19 nt, Artificial Sequence
  Description of Artificial Sequence: Synthetic oligonucleotide
uuccacacuuaauguaaau

SEQ ID NO: 2944169 - RNA, 19 nt, Artificial Sequence
  Description of Artificial Sequence: Synthetic oligonucleotide
cuuugcugcucccgggccc

SEQ ID NO: 2944170 - RNA, 19 nt, Artificial Sequence
  Description of Artificial Sequence: Synthetic oligonucleotide
caucauagccuugcacccg

SEQ ID NO: 2944171 - RNA, 19 nt, Artificial Sequence
  Description of Artificial Sequence: Synthetic oligonucleotide
gguacugcucaacagaggu

SEQ ID NO: 2944172 - RNA, 19 nt, Artificial Sequence
  Description of Artificial Sequence: Synthetic oligonucleotide
gaagcccagcucaaaagga

SEQ ID NO: 2944173 - RNA, 19 nt, Artificial Sequence
  Description of Artificial Sequence: Synthetic oligonucleotide
cauuuuccacacuuaaugu

SEQ ID NO: 2944174 - RNA, 19 nt, Artificial Sequence
  Description of Artificial Sequence: Synthetic oligonucleotide
agcuuagacucagaauuca

SEQ ID NO: 2944175 - RNA, 19 nt, Artificial Sequence
  Description of Artificial Sequence: Synthetic oligonucleotide
agagccuccugugagugcu

SEQ ID NO: 2944176 - RNA, 19 nt, Artificial Sequence
  Description of Artificial Sequence: Synthetic oligonucleotide
cauuucuaagaagcccagc

SEQ ID NO: 2944177 - RNA, 19 nt, Artificial Sequence
  Description of Artificial Sequence: Synthetic oligonucleotide
ugcuaaugacaauggucuc

SEQ ID NO: 2944178 - RNA, 19 nt, Artificial Sequence
  Description of Artificial Sequence: Synthetic oligonucleotide
gucuuugcugcucccgggc

SEQ ID NO: 2944179 - RNA, 19 nt, Artificial Sequence
  Description of Artificial Sequence: Synthetic oligonucleotide
gacaguucuggguacugcu

SEQ ID NO: 2944180 - RNA, 19 nt, Artificial Sequence
  Description of Artificial Sequence: Synthetic oligonucleotide
acaguucuggguacugcuc

SEQ ID NO: 2944181 - RNA, 19 nt, Artificial Sequence
  Description of Artificial Sequence: Synthetic oligonucleotide
aaaccacaaaggaguccuc

SEQ ID NO: 2944182 - RNA, 19 nt, Artificial Sequence
  Description of Artificial Sequence: Synthetic oligonucleotide
cacuguuguugaacuggcc

SEQ ID NO: 2944183 - RNA, 19 nt, Artificial Sequence
  Description of Artificial Sequence: Synthetic oligonucleotide
aagccaucauagccuugca

SEQ ID NO: 2944184 - RNA, 19 nt, Artificial Sequence
  Description of Artificial Sequence: Synthetic oligonucleotide
cauagccuugcacccgccc

SEQ ID NO: 2944185 - RNA, 19 nt, Artificial Sequence
  Description of Artificial Sequence: Synthetic oligonucleotide
uucucccuucgauccacug

SEQ ID NO: 2944186 - RNA, 19 nt, Artificial Sequence
  Description of Artificial Sequence: Synthetic oligonucleotide
auccacuguuguugaacug

SEQ ID NO: 2944187 - RNA, 19 nt, Artificial Sequence
  Description of Artificial Sequence: Synthetic oligonucleotide
aagcccagcucaaaaggaa

SEQ ID NO: 2944188 - RNA, 19 nt, Artificial Sequence
  Description of Artificial Sequence: Synthetic oligonucleotide
aauggucucuaggcagaca

SEQ ID NO: 2944189 - RNA, 19 nt, Artificial Sequence
  Description of Artificial Sequence: Synthetic oligonucleotide
ugugagugcuaaugacaau

SEQ ID NO: 2944190 - RNA, 19 nt, Artificial Sequence
  Description of Artificial Sequence: Synthetic oligonucleotide
gugagcucccagcucuugc

SEQ ID NO: 2944191 - RNA, 19 nt, Artificial Sequence
  Description of Artificial Sequence: Synthetic oligonucleotide
uccagugagcucccagcuc

SEQ ID NO: 2944192 - RNA, 19 nt, Artificial Sequence
  Description of Artificial Sequence: Synthetic oligonucleotide
uguucagcaccugcugccu

SEQ ID NO: 2944193 - RNA, 19 nt, Artificial Sequence
  Description of Artificial Sequence: Synthetic oligonucleotide
gucccauuucuaagaagcc

SEQ ID NO: 2944194 - RNA, 19 nt, Artificial Sequence
  Description of Artificial Sequence: Synthetic oligonucleotide
agcccagcucaaaaggaag

SEQ ID NO: 2944195 - RNA, 19 nt, Artificial Sequence
  Description of Artificial Sequence: Synthetic oligonucleotide
aggcagacaaaaccacaaa

SEQ ID NO: 2944196 - RNA, 19 nt, Artificial Sequence
  Description of Artificial Sequence: Synthetic oligonucleotide
gagcucccagcucuugcgc

SEQ ID NO: 2944197 - RNA, 19 nt, Artificial Sequence
  Description of Artificial Sequence: Synthetic oligonucleotide
cccauuucuaagaagccca

SEQ ID NO: 2944198 - RNA, 19 nt, Artificial Sequence
  Description of Artificial Sequence: Synthetic oligonucleotide
cuggcgcacagcucucugc

SEQ ID NO: 2944199 - RNA, 19 nt, Artificial Sequence
  Description of Artificial Sequence: Synthetic oligonucleotide
uuugcugcucccgggccca

SEQ ID NO: 2944200 - RNA, 19 nt, Artificial Sequence
  Description of Artificial Sequence: Synthetic oligonucleotide
cuaaugacaauggucucua

SEQ ID NO: 2944201 - RNA, 19 nt, Artificial Sequence
  Description of Artificial Sequence: Synthetic oligonucleotide
ugccuggccagcucccagc

SEQ ID NO: 2944202 - RNA, 19 nt, Artificial Sequence
  Description of Artificial Sequence: Synthetic oligonucleotide
ucauagccuugcacccgcc

SEQ ID NO: 2944203 - RNA, 19 nt, Artificial Sequence
  Description of Artificial Sequence: Synthetic oligonucleotide
agcucaaaaggaagcauuu

SEQ ID NO: 2944204 - RNA, 19 nt, Artificial Sequence
  Description of Artificial Sequence: Synthetic oligonucleotide
ugcucccgggcccaagccu

SEQ ID NO: 2944205 - RNA, 19 nt, Artificial Sequence
  Description of Artificial Sequence: Synthetic oligonucleotide
ucuugcgcuguccgacagu

SEQ ID NO: 2944206 - RNA, 19 nt, Artificial Sequence
  Description of Artificial Sequence: Synthetic oligonucleotide
gucucuaggcagacaaaac

SEQ ID NO: 2944207 - RNA, 19 nt, Artificial Sequence
  Description of Artificial Sequence: Synthetic oligonucleotide
ccacacuuaauguaaaugu

SEQ ID NO: 2944208 - RNA, 19 nt, Artificial Sequence
  Description of Artificial Sequence: Synthetic oligonucleotide
aguucuggguacugcucaa

SEQ ID NO: 2944209 - RNA, 19 nt, Artificial Sequence
  Description of Artificial Sequence: Synthetic oligonucleotide
ucccuucgauccacuguug

SEQ ID NO: 2944210 - RNA, 19 nt, Artificial Sequence
  Description of Artificial Sequence: Synthetic oligonucleotide
cuuccuccccuucccguag

SEQ ID NO: 2944211 - RNA, 19 nt, Artificial Sequence
  Description of Artificial Sequence: Synthetic oligonucleotide
caaaggaguccuccaguga

SEQ ID NO: 2944212 - RNA, 19 nt, Artificial Sequence
  Description of Artificial Sequence: Synthetic oligonucleotide
agcucccagcucuugcgcu

SEQ ID NO: 2944213 - RNA, 19 nt, Artificial Sequence
  Description of Artificial Sequence: Synthetic oligonucleotide
gugccuucucccuucgauc

SEQ ID NO: 2944214 - RNA, 19 nt, Artificial Sequence
  Description of Artificial Sequence: Synthetic oligonucleotide
cuuagacucagaauucauu

SEQ ID NO: 2944215 - RNA, 19 nt, Artificial Sequence
  Description of Artificial Sequence: Synthetic oligonucleotide
ccugugagugcuaaugaca

SEQ ID NO: 2944216 - RNA, 19 nt, Artificial Sequence
  Description of Artificial Sequence: Synthetic oligonucleotide
cuccugugagugcuaauga

SEQ ID NO: 2944217 - RNA, 19 nt, Artificial Sequence
  Description of Artificial Sequence: Synthetic oligonucleotide
uggucucuaggcagacaaa

SEQ ID NO: 2944218 - RNA, 19 nt, Artificial Sequence
  Description of Artificial Sequence: Synthetic oligonucleotide
gcucccagcaccccgugcc

SEQ ID NO: 2944219 - RNA, 19 nt, Artificial Sequence
  Description of Artificial Sequence: Synthetic oligonucleotide
cucuugcgcuguccgacag

SEQ ID NO: 2944220 - RNA, 19 nt, Artificial Sequence
  Description of Artificial Sequence: Synthetic oligonucleotide
acuggccacgagccugguc

SEQ ID NO: 2944221 - RNA, 19 nt, Artificial Sequence
  Description of Artificial Sequence: Synthetic oligonucleotide
acugcucaacagaggucac

SEQ ID NO: 2944222 - RNA, 19 nt, Artificial Sequence
  Description of Artificial Sequence: Synthetic oligonucleotide
ccauuucuaagaagcccag

SEQ ID NO: 2944223 - RNA, 19 nt, Artificial Sequence
  Description of Artificial Sequence: Synthetic oligonucleotide
ccacuguuguugaacuggc

SEQ ID NO: 2944224 - RNA, 19 nt, Artificial Sequence
  Description of Artificial Sequence: Synthetic oligonucleotide
guuguugaacuggccacga

SEQ ID NO: 2944225 - RNA, 19 nt, Artificial Sequence
  Description of Artificial Sequence: Synthetic oligonucleotide
ugcacccgcccuguguuca

SEQ ID NO: 2944226 - RNA, 19 nt, Artificial Sequence
  Description of Artificial Sequence: Synthetic oligonucleotide
ccagcucuugcgcuguccg

SEQ ID NO: 2944227 - RNA, 19 nt, Artificial Sequence
  Description of Artificial Sequence: Synthetic oligonucleotide
cccauaaaagucccauuuc

SEQ ID NO: 2944228 - RNA, 19 nt, Artificial Sequence
  Description of Artificial Sequence: Synthetic oligonucleotide
ucccguagucuuugcugcu

SEQ ID NO: 2944229 - RNA, 19 nt, Artificial Sequence
  Description of Artificial Sequence: Synthetic oligonucleotide
ccacaaaggaguccuccag

SEQ ID NO: 2944230 - RNA, 19 nt, Artificial Sequence
  Description of Artificial Sequence: Synthetic oligonucleotide
gcucaaaaggaagcauuug

SEQ ID NO: 2944231 - RNA, 19 nt, Artificial Sequence
  Description of Artificial Sequence: Synthetic oligonucleotide
uccgacaguucuggguacu

SEQ ID NO: 2944232 - RNA, 19 nt, Artificial Sequence
  Description of Artificial Sequence: Synthetic oligonucleotide
ccuccugugagugcuaaug

SEQ ID NO: 2944233 - RNA, 19 nt, Artificial Sequence
  Description of Artificial Sequence: Synthetic oligonucleotide
ggucucuaggcagacaaaa

SEQ ID NO: 2944234 - RNA, 19 nt, Artificial Sequence
  Description of Artificial Sequence: Synthetic oligonucleotide
cagagccuccugugagugc

SEQ ID NO: 2944235 - RNA, 19 nt, Artificial Sequence
  Description of Artificial Sequence: Synthetic oligonucleotide
caagccuggcgcacagcuc

SEQ ID NO: 2944236 - RNA, 19 nt, Artificial Sequence
  Description of Artificial Sequence: Synthetic oligonucleotide
ccauaaaagucccauuucu

SEQ ID NO: 2944237 - RNA, 19 nt, Artificial Sequence
  Description of Artificial Sequence: Synthetic oligonucleotide
guaacccauaaaaguccca

SEQ ID NO: 2944238 - RNA, 19 nt, Artificial Sequence
  Description of Artificial Sequence: Synthetic oligonucleotide
agugagcucccagcucuug

SEQ ID NO: 2944239 - RNA, 19 nt, Artificial Sequence
  Description of Artificial Sequence: Synthetic oligonucleotide
ucgauccacuguuguugaa

SEQ ID NO: 2944240 - RNA, 19 nt, Artificial Sequence
  Description of Artificial Sequence: Synthetic oligonucleotide
guacugcucaacagagguc

SEQ ID NO: 2944241 - RNA, 19 nt, Artificial Sequence
  Description of Artificial Sequence: Synthetic oligonucleotide
cacaaaggaguccuccagu

SEQ ID NO: 2944242 - RNA, 19 nt, Artificial Sequence
  Description of Artificial Sequence: Synthetic oligonucleotide
uuccuccccuucccguagu

SEQ ID NO: 2944243 - RNA, 19 nt, Artificial Sequence
  Description of Artificial Sequence: Synthetic oligonucleotide
uccccuucccguagucuuu

SEQ ID NO: 2944244 - RNA, 19 nt, Artificial Sequence
  Description of Artificial Sequence: Synthetic oligonucleotide
guucuggguacugcucaac

SEQ ID NO: 2944245 - RNA, 19 nt, Artificial Sequence
  Description of Artificial Sequence: Synthetic oligonucleotide
guccgacaguucuggguac

SEQ ID NO: 2944246 - RNA, 19 nt, Artificial Sequence
  Description of Artificial Sequence: Synthetic oligonucleotide
gcuaaugacaauggucucu

SEQ ID NO: 2944247 - RNA, 19 nt, Artificial Sequence
  Description of Artificial Sequence: Synthetic oligonucleotide
acccgcccuguguucagca

SEQ ID NO: 2944248 - RNA, 19 nt, Artificial Sequence
  Description of Artificial Sequence: Synthetic oligonucleotide
cagcucaaaaggaagcauu

SEQ ID NO: 2944249 - RNA, 19 nt, Artificial Sequence
  Description of Artificial Sequence: Synthetic oligonucleotide
uccuccccuucccguaguc

SEQ ID NO: 2944250 - RNA, 19 nt, Artificial Sequence
  Description of Artificial Sequence: Synthetic oligonucleotide
gcgcacagcucucugccug

SEQ ID NO: 2944251 - RNA, 19 nt, Artificial Sequence
  Description of Artificial Sequence: Synthetic oligonucleotide
cuguccgacaguucugggu

SEQ ID NO: 2944252 - RNA, 19 nt, Artificial Sequence
  Description of Artificial Sequence: Synthetic oligonucleotide
gcccagcucaaaaggaagc

SEQ ID NO: 2944253 - RNA, 19 nt, Artificial Sequence
  Description of Artificial Sequence: Synthetic oligonucleotide
ccguagucuuugcugcucc

SEQ ID NO: 2944254 - RNA, 19 nt, Artificial Sequence
  Description of Artificial Sequence: Synthetic oligonucleotide
cuaagaagcccagcucaaa

SEQ ID NO: 2944255 - RNA, 19 nt, Artificial Sequence
  Description of Artificial Sequence: Synthetic oligonucleotide
cucccgggcccaagccugg

SEQ ID NO: 2944256 - RNA, 19 nt, Artificial Sequence
  Description of Artificial Sequence: Synthetic oligonucleotide
cugccuggccagcucccag

SEQ ID NO: 2944257 - RNA, 19 nt, Artificial Sequence
  Description of Artificial Sequence: Synthetic oligonucleotide
cccuguguucagcaccugc

SEQ ID NO: 2944258 - RNA, 19 nt, Artificial Sequence
  Description of Artificial Sequence: Synthetic oligonucleotide
uggccacgagccuggucgu

SEQ ID NO: 2944259 - RNA, 19 nt, Artificial Sequence
  Description of Artificial Sequence: Synthetic oligonucleotide
cucccuucgauccacuguu

SEQ ID NO: 2944260 - RNA, 19 nt, Artificial Sequence
  Description of Artificial Sequence: Synthetic oligonucleotide
cucucugccuggccagcuc

SEQ ID NO: 2944261 - RNA, 19 nt, Artificial Sequence
  Description of Artificial Sequence: Synthetic oligonucleotide
agaagccaucauagccuug

SEQ ID NO: 2944262 - RNA, 19 nt, Artificial Sequence
  Description of Artificial Sequence: Synthetic oligonucleotide
uugcgcuguccgacaguuc

SEQ ID NO: 2944263 - RNA, 19 nt, Artificial Sequence
  Description of Artificial Sequence: Synthetic oligonucleotide
gcucccagcucuugcgcug

SEQ ID NO: 2944264 - RNA, 19 nt, Artificial Sequence
  Description of Artificial Sequence: Synthetic oligonucleotide
uugcacccgcccuguguuc

SEQ ID NO: 2944265 - RNA, 19 nt, Artificial Sequence
  Description of Artificial Sequence: Synthetic oligonucleotide
ccgcccuguguucagcacc

SEQ ID NO: 2944266 - RNA, 19 nt, Artificial Sequence
  Description of Artificial Sequence: Synthetic oligonucleotide
cuccagugagcucccagcu

SEQ ID NO: 2944267 - RNA, 19 nt, Artificial Sequence
  Description of Artificial Sequence: Synthetic oligonucleotide
cgauccacuguuguugaac

SEQ ID NO: 2944268 - RNA, 19 nt, Artificial Sequence
  Description of Artificial Sequence: Synthetic oligonucleotide
cugcucaacagaggucaca

SEQ ID NO: 2944269 - RNA, 19 nt, Artificial Sequence
  Description of Artificial Sequence: Synthetic oligonucleotide
cuugcacccgcccuguguu

SEQ ID NO: 2944270 - RNA, 19 nt, Artificial Sequence
  Description of Artificial Sequence: Synthetic oligonucleotide
ccagagccuccugugagug

SEQ ID NO: 2944271 - RNA, 19 nt, Artificial Sequence
  Description of Artificial Sequence: Synthetic oligonucleotide
ccucuguccaggcccgcag

SEQ ID NO: 2944272 - RNA, 19 nt, Artificial Sequence
  Description of Artificial Sequence: Synthetic oligonucleotide
ccagugagcucccagcucu

SEQ ID NO: 2944273 - RNA, 19 nt, Artificial Sequence
  Description of Artificial Sequence: Synthetic oligonucleotide
cagcaccugcugccucucc

SEQ ID NO: 2944274 - RNA, 19 nt, Artificial Sequence
  Description of Artificial Sequence: Synthetic oligonucleotide
cguagucuuugcugcuccc

SEQ ID NO: 2944275 - RNA, 19 nt, Artificial Sequence
  Description of Artificial Sequence: Synthetic oligonucleotide
cccaucucccagagccucc

SEQ ID NO: 2944276 - RNA, 19 nt, Artificial Sequence
  Description of Artificial Sequence: Synthetic oligonucleotide
agccuugcacccgcccugu

SEQ ID NO: 2944277 - RNA, 19 nt, Artificial Sequence
  Description of Artificial Sequence: Synthetic oligonucleotide
ccuguguucagcaccugcu

SEQ ID NO: 2944278 - RNA, 19 nt, Artificial Sequence
  Description of Artificial Sequence: Synthetic oligonucleotide
ccgggcccaagccuggcgc

SEQ ID NO: 2944279 - RNA, 19 nt, Artificial Sequence
  Description of Artificial Sequence: Synthetic oligonucleotide
gccacgagccuggucguug

SEQ ID NO: 2944280 - RNA, 19 nt, Artificial Sequence
  Description of Artificial Sequence: Synthetic oligonucleotide
ccuucucccuucgauccac

SEQ ID NO: 2944281 - RNA, 19 nt, Artificial Sequence
  Description of Artificial Sequence: Synthetic oligonucleotide
gcucccgggcccaagccug

SEQ ID NO: 2944282 - RNA, 19 nt, Artificial Sequence
  Description of Artificial Sequence: Synthetic oligonucleotide
cagcucuugcgcuguccga

SEQ ID NO: 2944283 - RNA, 19 nt, Artificial Sequence
  Description of Artificial Sequence: Synthetic oligonucleotide
agccuccugugagugcuaa

SEQ ID NO: 2944284 - RNA, 19 nt, Artificial Sequence
  Description of Artificial Sequence: Synthetic oligonucleotide
aacuggccacgagccuggu

SEQ ID NO: 2944285 - RNA, 19 nt, Artificial Sequence
  Description of Artificial Sequence: Synthetic oligonucleotide
gcaccccgugccuucuccc

SEQ ID NO: 2944286 - RNA, 19 nt, Artificial Sequence
  Description of Artificial Sequence: Synthetic oligonucleotide
cgcuguccgacaguucugg

SEQ ID NO: 2944287 - RNA, 19 nt, Artificial Sequence
  Description of Artificial Sequence: Synthetic oligonucleotide
cuccccuucccguagucuu

SEQ ID NO: 2944288 - RNA, 19 nt, Artificial Sequence
  Description of Artificial Sequence: Synthetic oligonucleotide
cuugcgcuguccgacaguu

SEQ ID NO: 2944289 - RNA, 19 nt, Artificial Sequence
  Description of Artificial Sequence: Synthetic oligonucleotide
gcucuugcgcuguccgaca

SEQ ID NO: 2944290 - RNA, 19 nt, Artificial Sequence
  Description of Artificial Sequence: Synthetic oligonucleotide
ucccagcucuugcgcuguc

SEQ ID NO: 2944291 - RNA, 19 nt, Artificial Sequence
  Description of Artificial Sequence: Synthetic oligonucleotide
agccuggcgcacagcucuc

SEQ ID NO: 2944292 - RNA, 19 nt, Artificial Sequence
  Description of Artificial Sequence: Synthetic oligonucleotide
cacccgcccuguguucagc

SEQ ID NO: 2944293 - RNA, 19 nt, Artificial Sequence
  Description of Artificial Sequence: Synthetic oligonucleotide
cagcucccagcaccccgug

SEQ ID NO: 2944294 - RNA, 19 nt, Artificial Sequence
  Description of Artificial Sequence: Synthetic oligonucleotide
gcucaacagaggucacaaa

SEQ ID NO: 2944295 - RNA, 19 nt, Artificial Sequence
  Description of Artificial Sequence: Synthetic oligonucleotide
ccaagccuggcgcacagcu

SEQ ID NO: 2944296 - RNA, 19 nt, Artificial Sequence
  Description of Artificial Sequence: Synthetic oligonucleotide
ucccgggcccaagccuggc

SEQ ID NO: 2944297 - RNA, 19 nt, Artificial Sequence
  Description of Artificial Sequence: Synthetic oligonucleotide
ccuggcgcacagcucucug

SEQ ID NO: 2944298 - RNA, 19 nt, Artificial Sequence
  Description of Artificial Sequence: Synthetic oligonucleotide
ucccagcaccccgugccuu

SEQ ID NO: 2944299 - RNA, 19 nt, Artificial Sequence
  Description of Artificial Sequence: Synthetic oligonucleotide
gcccgcaggccuuccuccc

SEQ ID NO: 2944300 - RNA, 19 nt, Artificial Sequence
  Description of Artificial Sequence: Synthetic oligonucleotide
gcuuagacucagaauucau

SEQ ID NO: 2944301 - RNA, 19 nt, Artificial Sequence
  Description of Artificial Sequence: Synthetic oligonucleotide
gccuucucccuucgaucca

SEQ ID NO: 2944302 - RNA, 19 nt, Artificial Sequence
  Description of Artificial Sequence: Synthetic oligonucleotide
gcacccgcccuguguucag

SEQ ID NO: 2944303 - RNA, 19 nt, Artificial Sequence
  Description of Artificial Sequence: Synthetic oligonucleotide
aggaagcauuuggcuccca

SEQ ID NO: 2944304 - RNA, 19 nt, Artificial Sequence
  Description of Artificial Sequence: Synthetic oligonucleotide
cuucucccuucgauccacu

SEQ ID NO: 2944305 - RNA, 19 nt, Artificial Sequence
  Description of Artificial Sequence: Synthetic oligonucleotide
cccagcucuugcgcugucc

SEQ ID NO: 2944306 - RNA, 19 nt, Artificial Sequence
  Description of Artificial Sequence: Synthetic oligonucleotide
ccgacaguucuggguacug

SEQ ID NO: 2944307 - RNA, 19 nt, Artificial Sequence
  Description of Artificial Sequence: Synthetic oligonucleotide
cccagcaccccgugccuuc

SEQ ID NO: 2944308 - RNA, 19 nt, Artificial Sequence
  Description of Artificial Sequence: Synthetic oligonucleotide
cccgcaggccuuccucccc

SEQ ID NO: 2944309 - RNA, 19 nt, Artificial Sequence
  Description of Artificial Sequence: Synthetic oligonucleotide
cccguagucuuugcugcuc

SEQ ID NO: 2944310 - RNA, 19 nt, Artificial Sequence
  Description of Artificial Sequence: Synthetic oligonucleotide
cccgugccuucucccuucg

SEQ ID NO: 2944311 - RNA, 19 nt, Artificial Sequence
  Description of Artificial Sequence: Synthetic oligonucleotide
ccccaucucccagagccuc

SEQ ID NO: 2944312 - RNA, 19 nt, Artificial Sequence
  Description of Artificial Sequence: Synthetic oligonucleotide
caccccgugccuucucccu

SEQ ID NO: 2944313 - RNA, 19 nt, Artificial Sequence
  Description of Artificial Sequence: Synthetic oligonucleotide
cccgggcccaagccuggcg

SEQ ID NO: 2944314 - RNA, 19 nt, Artificial Sequence
  Description of Artificial Sequence: Synthetic oligonucleotide
cccgcccuguguucagcac

SEQ ID NO: 2944315 - RNA, 19 nt, Artificial Sequence
  Description of Artificial Sequence: Synthetic oligonucleotide
cagcaccccgugccuucuc

SEQ ID NO: 2944316 - RNA, 19 nt, Artificial Sequence
  Description of Artificial Sequence: Synthetic oligonucleotide
gcgcuguccgacaguucug

SEQ ID NO: 2944317 - RNA, 19 nt, Artificial Sequence
  Description of Artificial Sequence: Synthetic oligonucleotide
ccuuccuccccuucccgua

SEQ ID NO: 2944318 - RNA, 19 nt, Artificial Sequence
  Description of Artificial Sequence: Synthetic oligonucleotide
cucccagcaccccgugccu

SEQ ID NO: 2944319 - RNA, 19 nt, Artificial Sequence
  Description of Artificial Sequence: Synthetic oligonucleotide
ccuucgauccacuguuguu

SEQ ID NO: 2944320 - RNA, 19 nt, Artificial Sequence
  Description of Artificial Sequence: Synthetic oligonucleotide
gccuuccuccccuucccgu

SEQ ID NO: 2944321 - RNA, 19 nt, Artificial Sequence
  Description of Artificial Sequence: Synthetic oligonucleotide
cccuucgauccacuguugu

SEQ ID NO: 2944322 - RNA, 19 nt, Artificial Sequence
  Description of Artificial Sequence: Synthetic oligonucleotide
ggcgcacagcucucugccu

SEQ ID NO: 2944323 - RNA, 19 nt, Artificial Sequence
  Description of Artificial Sequence: Synthetic oligonucleotide
uugcugcucccgggcccaa

SEQ ID NO: 2944324 - RNA, 19 nt, Artificial Sequence
  Description of Artificial Sequence: Synthetic oligonucleotide
gagccuccugugagugcua

SEQ ID NO: 2944325 - RNA, 19 nt, Artificial Sequence
  Description of Artificial Sequence: Synthetic oligonucleotide
ccuugcacccgcccugugu

SEQ ID NO: 2944326 - RNA, 19 nt, Artificial Sequence
  Description of Artificial Sequence: Synthetic oligonucleotide
cucccagcucuugcgcugu

SEQ ID NO: 2944327 - RNA, 19 nt, Artificial Sequence
  Description of Artificial Sequence: Synthetic oligonucleotide
ccagcucaaaaggaagcau

SEQ ID NO: 2944328 - RNA, 19 nt, Artificial Sequence
  Description of Artificial Sequence: Synthetic oligonucleotide
gccuugcacccgcccugug

SEQ ID NO: 2944329 - RNA, 19 nt, Artificial Sequence
  Description of Artificial Sequence: Synthetic oligonucleotide
cgugccuucucccuucgau

SEQ ID NO: 2944330 - RNA, 19 nt, Artificial Sequence
  Description of Artificial Sequence: Synthetic oligonucleotide
ccagcucccagcaccccgu

SEQ ID NO: 2944331 - RNA, 19 nt, Artificial Sequence
  Description of Artificial Sequence: Synthetic oligonucleotide
cccagagccuccugugagu

SEQ ID NO: 2944332 - RNA, 19 nt, Artificial Sequence
  Description of Artificial Sequence: Synthetic oligonucleotide
cccaagccuggcgcacagc

SEQ ID NO: 2944333 - RNA, 19 nt, Artificial Sequence
  Description of Artificial Sequence: Synthetic oligonucleotide
guccuccagugagcuccca

SEQ ID NO: 2944334 - RNA, 19 nt, Artificial Sequence
  Description of Artificial Sequence: Synthetic oligonucleotide
gcccuguguucagcaccug

SEQ ID NO: 2944335 - RNA, 19 nt, Artificial Sequence
  Description of Artificial Sequence: Synthetic oligonucleotide
caggcccgcaggccuuccu

SEQ ID NO: 2944336 - RNA, 19 nt, Artificial Sequence
  Description of Artificial Sequence: Synthetic oligonucleotide
cgggcccaagccuggcgca

SEQ ID NO: 2944337 - RNA, 19 nt, Artificial Sequence
  Description of Artificial Sequence: Synthetic oligonucleotide
gccuccugugagugcuaau

SEQ ID NO: 2944338 - RNA, 19 nt, Artificial Sequence
  Description of Artificial Sequence: Synthetic oligonucleotide
ccccucuguccaggcccgc

SEQ ID NO: 2944339 - RNA, 19 nt, Artificial Sequence
  Description of Artificial Sequence: Synthetic oligonucleotide
ccuccccuucccguagucu

SEQ ID NO: 2944340 - RNA, 19 nt, Artificial Sequence
  Description of Artificial Sequence: Synthetic oligonucleotide
ccgcaggccuuccuccccu

SEQ ID NO: 2944341 - RNA, 19 nt, Artificial Sequence
  Description of Artificial Sequence: Synthetic oligonucleotide
ccgugccuucucccuucga

SEQ ID NO: 2944342 - RNA, 19 nt, Artificial Sequence
  Description of Artificial Sequence: Synthetic oligonucleotide
gccuggcgcacagcucucu

SEQ ID NO: 2944343 - RNA, 19 nt, Artificial Sequence
  Description of Artificial Sequence: Synthetic oligonucleotide
ggccacgagccuggucguu

SEQ ID NO: 2944344 - RNA, 19 nt, Artificial Sequence
  Description of Artificial Sequence: Synthetic oligonucleotide
agaaaucugggauauaugc

SEQ ID NO: 2944345 - RNA, 19 nt, Artificial Sequence
  Description of Artificial Sequence: Synthetic oligonucleotide
aaaagcaagacaccggucg

SEQ ID NO: 2944346 - RNA, 19 nt, Artificial Sequence
  Description of Artificial Sequence: Synthetic oligonucleotide
ucgaagaugaucuuggcgg

SEQ ID NO: 2944347 - RNA, 19 nt, Artificial Sequence
  Description of Artificial Sequence: Synthetic oligonucleotide
augaauaugguagacagac

SEQ ID NO: 2944348 - RNA, 19 nt, Artificial Sequence
  Description of Artificial Sequence: Synthetic oligonucleotide
gaauaugguagacagacug

SEQ ID NO: 2944349 - RNA, 19 nt, Artificial Sequence
  Description of Artificial Sequence: Synthetic oligonucleotide
agaugaauaugguagacag

SEQ ID NO: 2944350 - RNA, 19 nt, Artificial Sequence
  Description of Artificial Sequence: Synthetic oligonucleotide
ucugcuacagaaaucuggg

SEQ ID NO: 2944351 - RNA, 19 nt, Artificial Sequence
  Description of Artificial Sequence: Synthetic oligonucleotide
aacauggagaugaauaugg

SEQ ID NO: 2944352 - RNA, 19 nt, Artificial Sequence
  Description of Artificial Sequence: Synthetic oligonucleotide
cauuaaauguccuagaaga

SEQ ID NO: 2944353 - RNA, 19 nt, Artificial Sequence
  Description of Artificial Sequence: Synthetic oligonucleotide
ucauuaaauguccuagaag

SEQ ID NO: 2944354 - RNA, 19 nt, Artificial Sequence
  Description of Artificial Sequence: Synthetic oligonucleotide
ugggauauaugcuucuugg

SEQ ID NO: 2944355 - RNA, 19 nt, Artificial Sequence
  Description of Artificial Sequence: Synthetic oligonucleotide
accaccauccgauagcccc

SEQ ID NO: 2944356 - RNA, 19 nt, Artificial Sequence
  Description of Artificial Sequence: Synthetic oligonucleotide
uccuagaagacuuucguca

SEQ ID NO: 2944357 - RNA, 19 nt, Artificial Sequence
  Description of Artificial Sequence: Synthetic oligonucleotide
ugaaaagcaagacaccggu

SEQ ID NO: 2944358 - RNA, 19 nt, Artificial Sequence
  Description of Artificial Sequence: Synthetic oligonucleotide
aaaucugggauauaugcuu

SEQ ID NO: 2944359 - RNA, 19 nt, Artificial Sequence
  Description of Artificial Sequence: Synthetic oligonucleotide
uuggguaucaccaggaaau

SEQ ID NO: 2944360 - RNA, 19 nt, Artificial Sequence
  Description of Artificial Sequence: Synthetic oligonucleotide
auggagaugaauaugguag

SEQ ID NO: 2944361 - RNA, 19 nt, Artificial Sequence
  Description of Artificial Sequence: Synthetic oligonucleotide
aaccugcuuaaccaggagg

SEQ ID NO: 2944362 - RNA, 19 nt, Artificial Sequence
  Description of Artificial Sequence: Synthetic oligonucleotide
aauucauccugccgacccc

SEQ ID NO: 2944363 - RNA, 19 nt, Artificial Sequence
  Description of Artificial Sequence: Synthetic oligonucleotide
uuugcggaugaucuugccg

SEQ ID NO: 2944364 - RNA, 19 nt, Artificial Sequence
  Description of Artificial Sequence: Synthetic oligonucleotide
caugaaaagcaagacaccg

SEQ ID NO: 2944365 - RNA, 19 nt, Artificial Sequence
  Description of Artificial Sequence: Synthetic oligonucleotide
aaugucaugaaaagcaaga

SEQ ID NO: 2944366 - RNA, 19 nt, Artificial Sequence
  Description of Artificial Sequence: Synthetic oligonucleotide
gucaugaaaagcaagacac

SEQ ID NO: 2944367 - RNA, 19 nt, Artificial Sequence
  Description of Artificial Sequence: Synthetic oligonucleotide
ugucaugaaaagcaagaca

SEQ ID NO: 2944368 - RNA, 19 nt, Artificial Sequence
  Description of Artificial Sequence: Synthetic oligonucleotide
aaucucgucagccaucgca

SEQ ID NO: 2944369 - RNA, 19 nt, Artificial Sequence
  Description of Artificial Sequence: Synthetic oligonucleotide
auguguuggugcuugaggg

SEQ ID NO: 2944370 - RNA, 19 nt, Artificial Sequence
  Description of Artificial Sequence: Synthetic oligonucleotide
augaucuugccgaagaucg

SEQ ID NO: 2944371 - RNA, 19 nt, Artificial Sequence
  Description of Artificial Sequence: Synthetic oligonucleotide
uagaagacuuucgucaucg

SEQ ID NO: 2944372 - RNA, 19 nt, Artificial Sequence
  Description of Artificial Sequence: Synthetic oligonucleotide
aaucauuaaauguccuaga

SEQ ID NO: 2944373 - RNA, 19 nt, Artificial Sequence
  Description of Artificial Sequence: Synthetic oligonucleotide
caacaaucauuaaaugucc

SEQ ID NO: 2944374 - RNA, 19 nt, Artificial Sequence
  Description of Artificial Sequence: Synthetic oligonucleotide
aagacuuucgucaucgucu

SEQ ID NO: 2944375 - RNA, 19 nt, Artificial Sequence
  Description of Artificial Sequence: Synthetic oligonucleotide
uuaaauguccuagaagacu

SEQ ID NO: 2944376 - RNA, 19 nt, Artificial Sequence
  Description of Artificial Sequence: Synthetic oligonucleotide
ugcuucuuggguaucacca

SEQ ID NO: 2944377 - RNA, 19 nt, Artificial Sequence
  Description of Artificial Sequence: Synthetic oligonucleotide
auagccccgguucaggccc

SEQ ID NO: 2944378 - RNA, 19 nt, Artificial Sequence
  Description of Artificial Sequence: Synthetic oligonucleotide
caaucauuaaauguccuag

SEQ ID NO: 2944379 - RNA, 19 nt, Artificial Sequence
  Description of Artificial Sequence: Synthetic oligonucleotide
uuaaccaggaggccaauuc

SEQ ID NO: 2944380 - RNA, 19 nt, Artificial Sequence
  Description of Artificial Sequence: Synthetic oligonucleotide
ugcuacagaaaucugggau

SEQ ID NO: 2944381 - RNA, 19 nt, Artificial Sequence
  Description of Artificial Sequence: Synthetic oligonucleotide
aauguccuagaagacuuuc

SEQ ID NO: 2944382 - RNA, 19 nt, Artificial Sequence
  Description of Artificial Sequence: Synthetic oligonucleotide
ucaccaggaaauguguugg

SEQ ID NO: 2944383 - RNA, 19 nt, Artificial Sequence
  Description of Artificial Sequence: Synthetic oligonucleotide
ucaugaaaagcaagacacc

SEQ ID NO: 2944384 - RNA, 19 nt, Artificial Sequence
  Description of Artificial Sequence: Synthetic oligonucleotide
auuaaauguccuagaagac

SEQ ID NO: 2944385 - RNA, 19 nt, Artificial Sequence
  Description of Artificial Sequence: Synthetic oligonucleotide
aaaugucaugaaaagcaag

SEQ ID NO: 2944386 - RNA, 19 nt, Artificial Sequence
  Description of Artificial Sequence: Synthetic oligonucleotide
uguccuagaagacuuucgu

SEQ ID NO: 2944387 - RNA, 19 nt, Artificial Sequence
  Description of Artificial Sequence: Synthetic oligonucleotide
auuucuuugcggaugaucu

SEQ ID NO: 2944388 - RNA, 19 nt, Artificial Sequence
  Description of Artificial Sequence: Synthetic oligonucleotide
uuucuugccaacaaucauu

SEQ ID NO: 2944389 - RNA, 19 nt, Artificial Sequence
  Description of Artificial Sequence: Synthetic oligonucleotide
auccccaaccugcuuaacc

SEQ ID NO: 2944390 - RNA, 19 nt, Artificial Sequence
  Description of Artificial Sequence: Synthetic oligonucleotide
agaacauggagaugaauau

SEQ ID NO: 2944391 - RNA, 19 nt, Artificial Sequence
  Description of Artificial Sequence: Synthetic oligonucleotide
uugagccuuggcaaucucg

SEQ ID NO: 2944392 - RNA, 19 nt, Artificial Sequence
  Description of Artificial Sequence: Synthetic oligonucleotide
ccaacaaucauuaaauguc

SEQ ID NO: 2944393 - RNA, 19 nt, Artificial Sequence
  Description of Artificial Sequence: Synthetic oligonucleotide
acauuucuugccaacaauc

SEQ ID NO: 2944394 - RNA, 19 nt, Artificial Sequence
  Description of Artificial Sequence: Synthetic oligonucleotide
uugcggaugaucuugccga

SEQ ID NO: 2944395 - RNA, 19 nt, Artificial Sequence
  Description of Artificial Sequence: Synthetic oligonucleotide
gauauaugcuucuugggua

SEQ ID NO: 2944396 - RNA, 19 nt, Artificial Sequence
  Description of Artificial Sequence: Synthetic oligonucleotide
ugcuugaggggaaauguca

SEQ ID NO: 2944397 - RNA, 19 nt, Artificial Sequence
  Description of Artificial Sequence: Synthetic oligonucleotide
auaugguagacagacuguc

SEQ ID NO: 2944398 - RNA, 19 nt, Artificial Sequence
  Description of Artificial Sequence: Synthetic oligonucleotide
uccgucugcaccuucauuc

SEQ ID NO: 2944399 - RNA, 19 nt, Artificial Sequence
  Description of Artificial Sequence: Synthetic oligonucleotide
uguguuggugcuugagggg

SEQ ID NO: 2944400 - RNA, 19 nt, Artificial Sequence
  Description of Artificial Sequence: Synthetic oligonucleotide
uaugguagacagacugucc

SEQ ID NO: 2944401 - RNA, 19 nt, Artificial Sequence
  Description of Artificial Sequence: Synthetic oligonucleotide
aucauuaaauguccuagaa

SEQ ID NO: 2944402 - RNA, 19 nt, Artificial Sequence
  Description of Artificial Sequence: Synthetic oligonucleotide
caauucauccugccgaccc

SEQ ID NO: 2944403 - RNA, 19 nt, Artificial Sequence
  Description of Artificial Sequence: Synthetic oligonucleotide
aaucugggauauaugcuuc

SEQ ID NO: 2944404 - RNA, 19 nt, Artificial Sequence
  Description of Artificial Sequence: Synthetic oligonucleotide
cucgaagaugaucuuggcg

SEQ ID NO: 2944405 - RNA, 19 nt, Artificial Sequence
  Description of Artificial Sequence: Synthetic oligonucleotide
acuguccuccgucugcacc

SEQ ID NO: 2944406 - RNA, 19 nt, Artificial Sequence
  Description of Artificial Sequence: Synthetic oligonucleotide
augucaugaaaagcaagac

SEQ ID NO: 2944407 - RNA, 19 nt, Artificial Sequence
  Description of Artificial Sequence: Synthetic oligonucleotide
aagaucgugucgccgccgg

SEQ ID NO: 2944408 - RNA, 19 nt, Artificial Sequence
  Description of Artificial Sequence: Synthetic oligonucleotide
aaagcaagacaccggucgu

SEQ ID NO: 2944409 - RNA, 19 nt, Artificial Sequence
  Description of Artificial Sequence: Synthetic oligonucleotide
ugagccuuggcaaucucgu

SEQ ID NO: 2944410 - RNA, 19 nt, Artificial Sequence
  Description of Artificial Sequence: Synthetic oligonucleotide
uaaccaggaggccaauuca

SEQ ID NO: 2944411 - RNA, 19 nt, Artificial Sequence
  Description of Artificial Sequence: Synthetic oligonucleotide
uugaggggaaaugucauga

SEQ ID NO: 2944412 - RNA, 19 nt, Artificial Sequence
  Description of Artificial Sequence: Synthetic oligonucleotide
augguagacagacuguccu

SEQ ID NO: 2944413 - RNA, 19 nt, Artificial Sequence
  Description of Artificial Sequence: Synthetic oligonucleotide
aucgucuucugcuacagaa

SEQ ID NO: 2944414 - RNA, 19 nt, Artificial Sequence
  Description of Artificial Sequence: Synthetic oligonucleotide
uucuugccaacaaucauua

SEQ ID NO: 2944415 - RNA, 19 nt, Artificial Sequence
  Description of Artificial Sequence: Synthetic oligonucleotide
aauaugguagacagacugu

SEQ ID NO: 2944416 - RNA, 19 nt, Artificial Sequence
  Description of Artificial Sequence: Synthetic oligonucleotide
aaauguguuggugcuugag

SEQ ID NO: 2944417 - RNA, 19 nt, Artificial Sequence
  Description of Artificial Sequence: Synthetic oligonucleotide
uucuuugcggaugaucuug

SEQ ID NO: 2944418 - RNA, 19 nt, Artificial Sequence
  Description of Artificial Sequence: Synthetic oligonucleotide
uggagaugaauaugguaga

SEQ ID NO: 2944419 - RNA, 19 nt, Artificial Sequence
  Description of Artificial Sequence: Synthetic oligonucleotide
uccccaaccugcuuaacca

SEQ ID NO: 2944420 - RNA, 19 nt, Artificial Sequence
  Description of Artificial Sequence: Synthetic oligonucleotide
ugcaccuucauuccaccac

SEQ ID NO: 2944421 - RNA, 19 nt, Artificial Sequence
  Description of Artificial Sequence: Synthetic oligonucleotide
uccaccaccauccgauagc

SEQ ID NO: 2944422 - RNA, 19 nt, Artificial Sequence
  Description of Artificial Sequence: Synthetic oligonucleotide
acagaaaucugggauauau

SEQ ID NO: 2944423 - RNA, 19 nt, Artificial Sequence
  Description of Artificial Sequence: Synthetic oligonucleotide
augcuucuuggguaucacc

SEQ ID NO: 2944424 - RNA, 19 nt, Artificial Sequence
  Description of Artificial Sequence: Synthetic oligonucleotide
gagaacauggagaugaaua

SEQ ID NO: 2944425 - RNA, 19 nt, Artificial Sequence
  Description of Artificial Sequence: Synthetic oligonucleotide
agcaagacaccggucgucc

SEQ ID NO: 2944426 - RNA, 19 nt, Artificial Sequence
  Description of Artificial Sequence: Synthetic oligonucleotide
agacagacuguccuccguc

SEQ ID NO: 2944427 - RNA, 19 nt, Artificial Sequence
  Description of Artificial Sequence: Synthetic oligonucleotide
uucuuggguaucaccagga

SEQ ID NO: 2944428 - RNA, 19 nt, Artificial Sequence
  Description of Artificial Sequence: Synthetic oligonucleotide
cuucuuggguaucaccagg

SEQ ID NO: 2944429 - RNA, 19 nt, Artificial Sequence
  Description of Artificial Sequence: Synthetic oligonucleotide
agauccgcagcacauuucu

SEQ ID NO: 2944430 - RNA, 19 nt, Artificial Sequence
  Description of Artificial Sequence: Synthetic oligonucleotide
auauaugcuucuuggguau

SEQ ID NO: 2944431 - RNA, 19 nt, Artificial Sequence
  Description of Artificial Sequence: Synthetic oligonucleotide
gaagacuuucgucaucguc

SEQ ID NO: 2944432 - RNA, 19 nt, Artificial Sequence
  Description of Artificial Sequence: Synthetic oligonucleotide
auccgcagcacauuucuug

SEQ ID NO: 2944433 - RNA, 19 nt, Artificial Sequence
  Description of Artificial Sequence: Synthetic oligonucleotide
aagacaccggucguccucg

SEQ ID NO: 2944434 - RNA, 19 nt, Artificial Sequence
  Description of Artificial Sequence: Synthetic oligonucleotide
cuugccgaagaucgugucg

SEQ ID NO: 2944435 - RNA, 19 nt, Artificial Sequence
  Description of Artificial Sequence: Synthetic oligonucleotide
augaaaagcaagacaccgg

SEQ ID NO: 2944436 - RNA, 19 nt, Artificial Sequence
  Description of Artificial Sequence: Synthetic oligonucleotide
auuucuugccaacaaucau

SEQ ID NO: 2944437 - RNA, 19 nt, Artificial Sequence
  Description of Artificial Sequence: Synthetic oligonucleotide
ucuuugcggaugaucuugc

SEQ ID NO: 2944438 - RNA, 19 nt, Artificial Sequence
  Description of Artificial Sequence: Synthetic oligonucleotide
uucauuccaccaccauccg

SEQ ID NO: 2944439 - RNA, 19 nt, Artificial Sequence
  Description of Artificial Sequence: Synthetic oligonucleotide
gaacauggagaugaauaug

SEQ ID NO: 2944440 - RNA, 19 nt, Artificial Sequence
  Description of Artificial Sequence: Synthetic oligonucleotide
cauuucuugccaacaauca

SEQ ID NO: 2944441 - RNA, 19 nt, Artificial Sequence
  Description of Artificial Sequence: Synthetic oligonucleotide
ugaauaugguagacagacu

SEQ ID NO: 2944442 - RNA, 19 nt, Artificial Sequence
  Description of Artificial Sequence: Synthetic oligonucleotide
acaaucauuaaauguccua

SEQ ID NO: 2944443 - RNA, 19 nt, Artificial Sequence
  Description of Artificial Sequence: Synthetic oligonucleotide
uccgcagcacauuucuugc

SEQ ID NO: 2944444 - RNA, 19 nt, Artificial Sequence
  Description of Artificial Sequence: Synthetic oligonucleotide
cuuggcaaucucgucagcc

SEQ ID NO: 2944445 - RNA, 19 nt, Artificial Sequence
  Description of Artificial Sequence: Synthetic oligonucleotide
aacaaucauuaaauguccu

SEQ ID NO: 2944446 - RNA, 19 nt, Artificial Sequence
  Description of Artificial Sequence: Synthetic oligonucleotide
acuuucgucaucgucuucu

SEQ ID NO: 2944447 - RNA, 19 nt, Artificial Sequence
  Description of Artificial Sequence: Synthetic oligonucleotide
ggggaaaugucaugaaaag

SEQ ID NO: 2944448 - RNA, 19 nt, Artificial Sequence
  Description of Artificial Sequence: Synthetic oligonucleotide
uuggcaaucucgucagcca

SEQ ID NO: 2944449 - RNA, 19 nt, Artificial Sequence
  Description of Artificial Sequence: Synthetic oligonucleotide
uugccgaagaucgugucgc

SEQ ID NO: 2944450 - RNA, 19 nt, Artificial Sequence
  Description of Artificial Sequence: Synthetic oligonucleotide
uuccaccaccauccgauag

SEQ ID NO: 2944451 - RNA, 19 nt, Artificial Sequence
  Description of Artificial Sequence: Synthetic oligonucleotide
gaucuugccgaagaucgug

SEQ ID NO: 2944452 - RNA, 19 nt, Artificial Sequence
  Description of Artificial Sequence: Synthetic oligonucleotide
aucgcagccgcucgcuggc

SEQ ID NO: 2944453 - RNA, 19 nt, Artificial Sequence
  Description of Artificial Sequence: Synthetic oligonucleotide
gaugaucuugccgaagauc

SEQ ID NO: 2944454 - RNA, 19 nt, Artificial Sequence
  Description of Artificial Sequence: Synthetic oligonucleotide
acaccggucguccucgaag

SEQ ID NO: 2944455 - RNA, 19 nt, Artificial Sequence
  Description of Artificial Sequence: Synthetic oligonucleotide
gguaucaccaggaaaugug

SEQ ID NO: 2944456 - RNA, 19 nt, Artificial Sequence
  Description of Artificial Sequence: Synthetic oligonucleotide
cuuggcggggauuucuuug

SEQ ID NO: 2944457 - RNA, 19 nt, Artificial Sequence
  Description of Artificial Sequence: Synthetic oligonucleotide
gauuucuuugcggaugauc

SEQ ID NO: 2944458 - RNA, 19 nt, Artificial Sequence
  Description of Artificial Sequence: Synthetic oligonucleotide
gggauauaugcuucuuggg

SEQ ID NO: 2944459 - RNA, 19 nt, Artificial Sequence
  Description of Artificial Sequence: Synthetic oligonucleotide
cauccgauagccccgguuc

SEQ ID NO: 2944460 - RNA, 19 nt, Artificial Sequence
  Description of Artificial Sequence: Synthetic oligonucleotide
aagaugaucuuggcgggga

SEQ ID NO: 2944461 - RNA, 19 nt, Artificial Sequence
  Description of Artificial Sequence: Synthetic oligonucleotide
aggccaauucauccugccg

SEQ ID NO: 2944462 - RNA, 19 nt, Artificial Sequence
  Description of Artificial Sequence: Synthetic oligonucleotide
ugcuuaaccaggaggccaa

SEQ ID NO: 2944463 - RNA, 19 nt, Artificial Sequence
  Description of Artificial Sequence: Synthetic oligonucleotide
cagaaaucugggauauaug

SEQ ID NO: 2944464 - RNA, 19 nt, Artificial Sequence
  Description of Artificial Sequence: Synthetic oligonucleotide
gaaaugucaugaaaagcaa

SEQ ID NO: 2944465 - RNA, 19 nt, Artificial Sequence
  Description of Artificial Sequence: Synthetic oligonucleotide
uuucgucaucgucuucugc

SEQ ID NO: 2944466 - RNA, 19 nt, Artificial Sequence
  Description of Artificial Sequence: Synthetic oligonucleotide
aagcaagacaccggucguc

SEQ ID NO: 2944467 - RNA, 19 nt, Artificial Sequence
  Description of Artificial Sequence: Synthetic oligonucleotide
gauagccccgguucaggcc

SEQ ID NO: 2944468 - RNA, 19 nt, Artificial Sequence
  Description of Artificial Sequence: Synthetic oligonucleotide
ccaggaaauguguuggugc

SEQ ID NO: 2944469 - RNA, 19 nt, Artificial Sequence
  Description of Artificial Sequence: Synthetic oligonucleotide
guagacagacuguccuccg

SEQ ID NO: 2944470 - RNA, 19 nt, Artificial Sequence
  Description of Artificial Sequence: Synthetic oligonucleotide
gagaugaauaugguagaca

SEQ ID NO: 2944471 - RNA, 19 nt, Artificial Sequence
  Description of Artificial Sequence: Synthetic oligonucleotide
ucugcaccuucauuccacc

SEQ ID NO: 2944472 - RNA, 19 nt, Artificial Sequence
  Description of Artificial Sequence: Synthetic oligonucleotide
ucaucgucuucugcuacag

SEQ ID NO: 2944473 - RNA, 19 nt, Artificial Sequence
  Description of Artificial Sequence: Synthetic oligonucleotide
cuugaggggaaaugucaug

SEQ ID NO: 2944474 - RNA, 19 nt, Artificial Sequence
  Description of Artificial Sequence: Synthetic oligonucleotide
aggggaaaugucaugaaaa

SEQ ID NO: 2944475 - RNA, 19 nt, Artificial Sequence
  Description of Artificial Sequence: Synthetic oligonucleotide
cugggauauaugcuucuug

SEQ ID NO: 2944476 - RNA, 19 nt, Artificial Sequence
  Description of Artificial Sequence: Synthetic oligonucleotide
ucgucagccaucgcagccg

SEQ ID NO: 2944477 - RNA, 19 nt, Artificial Sequence
  Description of Artificial Sequence: Synthetic oligonucleotide
aggaggccaauucauccug

SEQ ID NO: 2944478 - RNA, 19 nt, Artificial Sequence
  Description of Artificial Sequence: Synthetic oligonucleotide
ucgucuucugcuacagaaa

SEQ ID NO: 2944479 - RNA, 19 nt, Artificial Sequence
  Description of Artificial Sequence: Synthetic oligonucleotide
ucauuccaccaccauccga

SEQ ID NO: 2944480 - RNA, 19 nt, Artificial Sequence
  Description of Artificial Sequence: Synthetic oligonucleotide
auguccuagaagacuuucg

SEQ ID NO: 2944481 - RNA, 19 nt, Artificial Sequence
  Description of Artificial Sequence: Synthetic oligonucleotide
gaggccaauucauccugcc

SEQ ID NO: 2944482 - RNA, 19 nt, Artificial Sequence
  Description of Artificial Sequence: Synthetic oligonucleotide
uucaggcccagauccgcag

SEQ ID NO: 2944483 - RNA, 19 nt, Artificial Sequence
  Description of Artificial Sequence: Synthetic oligonucleotide
uuauccccaaccugcuuaa

SEQ ID NO: 2944484 - RNA, 19 nt, Artificial Sequence
  Description of Artificial Sequence: Synthetic oligonucleotide
ucuuggguaucaccaggaa

SEQ ID NO: 2944485 - RNA, 19 nt, Artificial Sequence
  Description of Artificial Sequence: Synthetic oligonucleotide
ggaaauguguuggugcuug

SEQ ID NO: 2944486 - RNA, 19 nt, Artificial Sequence
  Description of Artificial Sequence: Synthetic oligonucleotide
uaucaccaggaaauguguu

SEQ ID NO: 2944487 - RNA, 19 nt, Artificial Sequence
  Description of Artificial Sequence: Synthetic oligonucleotide
caucgcagccgcucgcugg

SEQ ID NO: 2944488 - RNA, 19 nt, Artificial Sequence
  Description of Artificial Sequence: Synthetic oligonucleotide
aucucgucagccaucgcag

SEQ ID NO: 2944489 - RNA, 19 nt, Artificial Sequence
  Description of Artificial Sequence: Synthetic oligonucleotide
gaggggaaaugucaugaaa

SEQ ID NO: 2944490 - RNA, 19 nt, Artificial Sequence
  Description of Artificial Sequence: Synthetic oligonucleotide
cucgucagccaucgcagcc

SEQ ID NO: 2944491 - RNA, 19 nt, Artificial Sequence
  Description of Artificial Sequence: Synthetic oligonucleotide
gaugaauaugguagacaga

SEQ ID NO: 2944492 - RNA, 19 nt, Artificial Sequence
  Description of Artificial Sequence: Synthetic oligonucleotide
gggaaaugucaugaaaagc

SEQ ID NO: 2944493 - RNA, 19 nt, Artificial Sequence
  Description of Artificial Sequence: Synthetic oligonucleotide
gaaaucugggauauaugcu

SEQ ID NO: 2944494 - RNA, 19 nt, Artificial Sequence
  Description of Artificial Sequence: Synthetic oligonucleotide
uagacagacuguccuccgu

SEQ ID NO: 2944495 - RNA, 19 nt, Artificial Sequence
  Description of Artificial Sequence: Synthetic oligonucleotide
uggcggggauuucuuugcg

SEQ ID NO: 2944496 - RNA, 19 nt, Artificial Sequence
  Description of Artificial Sequence: Synthetic oligonucleotide
ugaucuugccgaagaucgu

SEQ ID NO: 2944497 - RNA, 19 nt, Artificial Sequence
  Description of Artificial Sequence: Synthetic oligonucleotide
aucgugucgccgccgggcg

SEQ ID NO: 2944498 - RNA, 19 nt, Artificial Sequence
  Description of Artificial Sequence: Synthetic oligonucleotide
agcacauuucuugccaaca

SEQ ID NO: 2944499 - RNA, 19 nt, Artificial Sequence
  Description of Artificial Sequence: Synthetic oligonucleotide
ggauauaugcuucuugggu

SEQ ID NO: 2944500 - RNA, 19 nt, Artificial Sequence
  Description of Artificial Sequence: Synthetic oligonucleotide
ugaggggaaaugucaugaa

SEQ ID NO: 2944501 - RNA, 19 nt, Artificial Sequence
  Description of Artificial Sequence: Synthetic oligonucleotide
cauggagaugaauauggua

SEQ ID NO: 2944502 - RNA, 19 nt, Artificial Sequence
  Description of Artificial Sequence: Synthetic oligonucleotide
uggcaaucucgucagccau

SEQ ID NO: 2944503 - RNA, 19 nt, Artificial Sequence
  Description of Artificial Sequence: Synthetic oligonucleotide
ccaggaggccaauucaucc

SEQ ID NO: 2944504 - RNA, 19 nt, Artificial Sequence
  Description of Artificial Sequence: Synthetic oligonucleotide
cuuugcggaugaucuugcc

SEQ ID NO: 2944505 - RNA, 19 nt, Artificial Sequence
  Description of Artificial Sequence: Synthetic oligonucleotide
ggccaauucauccugccga

SEQ ID NO: 2944506 - RNA, 19 nt, Artificial Sequence
  Description of Artificial Sequence: Synthetic oligonucleotide
ccgguucaggcccagaucc

SEQ ID NO: 2944507 - RNA, 19 nt, Artificial Sequence
  Description of Artificial Sequence: Synthetic oligonucleotide
accaggaaauguguuggug

SEQ ID NO: 2944508 - RNA, 19 nt, Artificial Sequence
  Description of Artificial Sequence: Synthetic oligonucleotide
ucaggcccagauccgcagc

SEQ ID NO: 2944509 - RNA, 19 nt, Artificial Sequence
  Description of Artificial Sequence: Synthetic oligonucleotide
gaucgugucgccgccgggc

SEQ ID NO: 2944510 - RNA, 19 nt, Artificial Sequence
  Description of Artificial Sequence: Synthetic oligonucleotide
cuuucgucaucgucuucug

SEQ ID NO: 2944511 - RNA, 19 nt, Artificial Sequence
  Description of Artificial Sequence: Synthetic oligonucleotide
guccuagaagacuuucguc

SEQ ID NO: 2944512 - RNA, 19 nt, Artificial Sequence
  Description of Artificial Sequence: Synthetic oligonucleotide
auaugcuucuuggguauca

SEQ ID NO: 2944513 - RNA, 19 nt, Artificial Sequence
  Description of Artificial Sequence: Synthetic oligonucleotide
uaugcuucuuggguaucac

SEQ ID NO: 2944514 - RNA, 19 nt, Artificial Sequence
  Description of Artificial Sequence: Synthetic oligonucleotide
uccuccgucugcaccuuca

SEQ ID NO: 2944515 - RNA, 19 nt, Artificial Sequence
  Description of Artificial Sequence: Synthetic oligonucleotide
gcaaucucgucagccaucg

SEQ ID NO: 2944516 - RNA, 19 nt, Artificial Sequence
  Description of Artificial Sequence: Synthetic oligonucleotide
gaagaucgugucgccgccg

SEQ ID NO: 2944517 - RNA, 19 nt, Artificial Sequence
  Description of Artificial Sequence: Synthetic oligonucleotide
cuagaagacuuucgucauc

SEQ ID NO: 2944518 - RNA, 19 nt, Artificial Sequence
  Description of Artificial Sequence: Synthetic oligonucleotide
gccaacaaucauuaaaugu

SEQ ID NO: 2944519 - RNA, 19 nt, Artificial Sequence
  Description of Artificial Sequence: Synthetic oligonucleotide
uggguaucaccaggaaaug

SEQ ID NO: 2944520 - RNA, 19 nt, Artificial Sequence
  Description of Artificial Sequence: Synthetic oligonucleotide
uggugcuugaggggaaaug

SEQ ID NO: 2944521 - RNA, 19 nt, Artificial Sequence
  Description of Artificial Sequence: Synthetic oligonucleotide
agacuuucgucaucgucuu

SEQ ID NO: 2944522 - RNA, 19 nt, Artificial Sequence
  Description of Artificial Sequence: Synthetic oligonucleotide
cuuggguaucaccaggaaa

SEQ ID NO: 2944523 - RNA, 19 nt, Artificial Sequence
  Description of Artificial Sequence: Synthetic oligonucleotide
aaccaggaggccaauucau

SEQ ID NO: 2944524 - RNA, 19 nt, Artificial Sequence
  Description of Artificial Sequence: Synthetic oligonucleotide
ucucgucagccaucgcagc

SEQ ID NO: 2944525 - RNA, 19 nt, Artificial Sequence
  Description of Artificial Sequence: Synthetic oligonucleotide
cuucugcuacagaaaucug

SEQ ID NO: 2944526 - RNA, 19 nt, Artificial Sequence
  Description of Artificial Sequence: Synthetic oligonucleotide
uuucuuugcggaugaucuu

SEQ ID NO: 2944527 - RNA, 19 nt, Artificial Sequence
  Description of Artificial Sequence: Synthetic oligonucleotide
gaaaagcaagacaccgguc

SEQ ID NO: 2944528 - RNA, 19 nt, Artificial Sequence
  Description of Artificial Sequence: Synthetic oligonucleotide
cauuccaccaccauccgau

SEQ ID NO: 2944529 - RNA, 19 nt, Artificial Sequence
  Description of Artificial Sequence: Synthetic oligonucleotide
ucuugccgaagaucguguc

SEQ ID NO: 2944530 - RNA, 19 nt, Artificial Sequence
  Description of Artificial Sequence: Synthetic oligonucleotide
agccaucgcagccgcucgc

SEQ ID NO: 2944531 - RNA, 19 nt, Artificial Sequence
  Description of Artificial Sequence: Synthetic oligonucleotide
uguuggugcuugaggggaa

SEQ ID NO: 2944532 - RNA, 19 nt, Artificial Sequence
  Description of Artificial Sequence: Synthetic oligonucleotide
accaggaggccaauucauc

SEQ ID NO: 2944533 - RNA, 19 nt, Artificial Sequence
  Description of Artificial Sequence: Synthetic oligonucleotide
gcuucuuggguaucaccag

SEQ ID NO: 2944534 - RNA, 19 nt, Artificial Sequence
  Description of Artificial Sequence: Synthetic oligonucleotide
gcaccuucauuccaccacc

SEQ ID NO: 2944535 - RNA, 19 nt, Artificial Sequence
  Description of Artificial Sequence: Synthetic oligonucleotide
gaaauguguuggugcuuga

SEQ ID NO: 2944536 - RNA, 19 nt, Artificial Sequence
  Description of Artificial Sequence: Synthetic oligonucleotide
caagacaccggucguccuc

SEQ ID NO: 2944537 - RNA, 19 nt, Artificial Sequence
  Description of Artificial Sequence: Synthetic oligonucleotide
augaucuuggcggggauuu

SEQ ID NO: 2944538 - RNA, 19 nt, Artificial Sequence
  Description of Artificial Sequence: Synthetic oligonucleotide
gcuacagaaaucugggaua

SEQ ID NO: 2944539 - RNA, 19 nt, Artificial Sequence
  Description of Artificial Sequence: Synthetic oligonucleotide
gggcguggccacuugagcc

SEQ ID NO: 2944540 - RNA, 19 nt, Artificial Sequence
  Description of Artificial Sequence: Synthetic oligonucleotide
ucgucaucgucuucugcua

SEQ ID NO: 2944541 - RNA, 19 nt, Artificial Sequence
  Description of Artificial Sequence: Synthetic oligonucleotide
caaccugcuuaaccaggag

SEQ ID NO: 2944542 - RNA, 19 nt, Artificial Sequence
  Description of Artificial Sequence: Synthetic oligonucleotide
uccgauagccccgguucag

SEQ ID NO: 2944543 - RNA, 19 nt, Artificial Sequence
  Description of Artificial Sequence: Synthetic oligonucleotide
agaagacuuucgucaucgu

SEQ ID NO: 2944544 - RNA, 19 nt, Artificial Sequence
  Description of Artificial Sequence: Synthetic oligonucleotide
cagcacauuucuugccaac

SEQ ID NO: 2944545 - RNA, 19 nt, Artificial Sequence
  Description of Artificial Sequence: Synthetic oligonucleotide
auccgauagccccgguuca

SEQ ID NO: 2944546 - RNA, 19 nt, Artificial Sequence
  Description of Artificial Sequence: Synthetic oligonucleotide
gccuuggcaaucucgucag

SEQ ID NO: 2944547 - RNA, 19 nt, Artificial Sequence
  Description of Artificial Sequence: Synthetic oligonucleotide
gccacuugagccuuggcaa

SEQ ID NO: 2944548 - RNA, 19 nt, Artificial Sequence
  Description of Artificial Sequence: Synthetic oligonucleotide
acuugagccuuggcaaucu

SEQ ID NO: 2944549 - RNA, 19 nt, Artificial Sequence
  Description of Artificial Sequence: Synthetic oligonucleotide
gucaucgucuucugcuaca

SEQ ID NO: 2944550 - RNA, 19 nt, Artificial Sequence
  Description of Artificial Sequence: Synthetic oligonucleotide
ggagaugaauaugguagac

SEQ ID NO: 2944551 - RNA, 19 nt, Artificial Sequence
  Description of Artificial Sequence: Synthetic oligonucleotide
ccgaagaucgugucgccgc

SEQ ID NO: 2944552 - RNA, 19 nt, Artificial Sequence
  Description of Artificial Sequence: Synthetic oligonucleotide
acauggagaugaauauggu

SEQ ID NO: 2944553 - RNA, 19 nt, Artificial Sequence
  Description of Artificial Sequence: Synthetic oligonucleotide
guguuggugcuugagggga

SEQ ID NO: 2944554 - RNA, 19 nt, Artificial Sequence
  Description of Artificial Sequence: Synthetic oligonucleotide
agaucgugucgccgccggg

SEQ ID NO: 2944555 - RNA, 19 nt, Artificial Sequence
  Description of Artificial Sequence: Synthetic oligonucleotide
ccuucauuccaccaccauc

SEQ ID NO: 2944556 - RNA, 19 nt, Artificial Sequence
  Description of Artificial Sequence: Synthetic oligonucleotide
ggccacuugagccuuggca

SEQ ID NO: 2944557 - RNA, 19 nt, Artificial Sequence
  Description of Artificial Sequence: Synthetic oligonucleotide
ggcggggauuucuuugcgg

SEQ ID NO: 2944558 - RNA, 19 nt, Artificial Sequence
  Description of Artificial Sequence: Synthetic oligonucleotide
uauaugcuucuuggguauc

SEQ ID NO: 2944559 - RNA, 19 nt, Artificial Sequence
  Description of Artificial Sequence: Synthetic oligonucleotide
gggauuucuuugcggauga

SEQ ID NO: 2944560 - RNA, 19 nt, Artificial Sequence
  Description of Artificial Sequence: Synthetic oligonucleotide
cgaagaugaucuuggcggg

SEQ ID NO: 2944561 - RNA, 19 nt, Artificial Sequence
  Description of Artificial Sequence: Synthetic oligonucleotide
ucugggauauaugcuucuu

SEQ ID NO: 2944562 - RNA, 19 nt, Artificial Sequence
  Description of Artificial Sequence: Synthetic oligonucleotide
cccaaccugcuuaaccagg

SEQ ID NO: 2944563 - RNA, 19 nt, Artificial Sequence
  Description of Artificial Sequence: Synthetic oligonucleotide
ugccgaagaucgugucgcc

SEQ ID NO: 2944564 - RNA, 19 nt, Artificial Sequence
  Description of Artificial Sequence: Synthetic oligonucleotide
ggggauuucuuugcggaug

SEQ ID NO: 2944565 - RNA, 19 nt, Artificial Sequence
  Description of Artificial Sequence: Synthetic oligonucleotide
caggaaauguguuggugcu

SEQ ID NO: 2944566 - RNA, 19 nt, Artificial Sequence
  Description of Artificial Sequence: Synthetic oligonucleotide
ugcggaugaucuugccgaa

SEQ ID NO: 2944567 - RNA, 19 nt, Artificial Sequence
  Description of Artificial Sequence: Synthetic oligonucleotide
cugcuuaaccaggaggcca

SEQ ID NO: 2944568 - RNA, 19 nt, Artificial Sequence
  Description of Artificial Sequence: Synthetic oligonucleotide
agaugaucuuggcggggau

SEQ ID NO: 2944569 - RNA, 19 nt, Artificial Sequence
  Description of Artificial Sequence: Synthetic oligonucleotide
cagauccgcagcacauuuc

SEQ ID NO: 2944570 - RNA, 19 nt, Artificial Sequence
  Description of Artificial Sequence: Synthetic oligonucleotide
cucgcuggccuucccgcgc

SEQ ID NO: 2944571 - RNA, 19 nt, Artificial Sequence
  Description of Artificial Sequence: Synthetic oligonucleotide
aucuugccgaagaucgugu

SEQ ID NO: 2944572 - RNA, 19 nt, Artificial Sequence
  Description of Artificial Sequence: Synthetic oligonucleotide
gacagacuguccuccgucu

SEQ ID NO: 2944573 - RNA, 19 nt, Artificial Sequence
  Description of Artificial Sequence: Synthetic oligonucleotide
accuucauuccaccaccau

SEQ ID NO: 2944574 - RNA, 19 nt, Artificial Sequence
  Description of Artificial Sequence: Synthetic oligonucleotide
ucuuggcggggauuucuuu

SEQ ID NO: 2944575 - RNA, 19 nt, Artificial Sequence
  Description of Artificial Sequence: Synthetic oligonucleotide
agacuguccuccgucugca

SEQ ID NO: 2944576 - RNA, 19 nt, Artificial Sequence
  Description of Artificial Sequence: Synthetic oligonucleotide
guaucaccaggaaaugugu

SEQ ID NO: 2944577 - RNA, 19 nt, Artificial Sequence
  Description of Artificial Sequence: Synthetic oligonucleotide
gagccuuggcaaucucguc

SEQ ID NO: 2944578 - RNA, 19 nt, Artificial Sequence
  Description of Artificial Sequence: Synthetic oligonucleotide
gccaauucauccugccgac

SEQ ID NO: 2944579 - RNA, 19 nt, Artificial Sequence
  Description of Artificial Sequence: Synthetic oligonucleotide
cugcuacagaaaucuggga

SEQ ID NO: 2944580 - RNA, 19 nt, Artificial Sequence
  Description of Artificial Sequence: Synthetic oligonucleotide
gcggggauuucuuugcgga

SEQ ID NO: 2944581 - RNA, 19 nt, Artificial Sequence
  Description of Artificial Sequence: Synthetic oligonucleotide
caccggucguccucgaaga

SEQ ID NO: 2944582 - RNA, 19 nt, Artificial Sequence
  Description of Artificial Sequence: Synthetic oligonucleotide
ccaccauccgauagccccg

SEQ ID NO: 2944583 - RNA, 19 nt, Artificial Sequence
  Description of Artificial Sequence: Synthetic oligonucleotide
gucuucugcuacagaaauc

SEQ ID NO: 2944584 - RNA, 19 nt, Artificial Sequence
  Description of Artificial Sequence: Synthetic oligonucleotide
gguucaggcccagauccgc

SEQ ID NO: 2944585 - RNA, 19 nt, Artificial Sequence
  Description of Artificial Sequence: Synthetic oligonucleotide
gaucuuggcggggauuucu

SEQ ID NO: 2944586 - RNA, 19 nt, Artificial Sequence
  Description of Artificial Sequence: Synthetic oligonucleotide
cuugagccuuggcaaucuc

SEQ ID NO: 2944587 - RNA, 19 nt, Artificial Sequence
  Description of Artificial Sequence: Synthetic oligonucleotide
gucguccucgaagaugauc

SEQ ID NO: 2944588 - RNA, 19 nt, Artificial Sequence
  Description of Artificial Sequence: Synthetic oligonucleotide
uggccuucccgcgccgcgg

SEQ ID NO: 2944589 - RNA, 19 nt, Artificial Sequence
  Description of Artificial Sequence: Synthetic oligonucleotide
cacuugagccuuggcaauc

SEQ ID NO: 2944590 - RNA, 19 nt, Artificial Sequence
  Description of Artificial Sequence: Synthetic oligonucleotide
uggccacuugagccuuggc

SEQ ID NO: 2944591 - RNA, 19 nt, Artificial Sequence
  Description of Artificial Sequence: Synthetic oligonucleotide
gugcuugaggggaaauguc

SEQ ID NO: 2944592 - RNA, 19 nt, Artificial Sequence
  Description of Artificial Sequence: Synthetic oligonucleotide
ggugcuugaggggaaaugu

SEQ ID NO: 2944593 - RNA, 19 nt, Artificial Sequence
  Description of Artificial Sequence: Synthetic oligonucleotide
ccgucugcaccuucauucc

SEQ ID NO: 2944594 - RNA, 19 nt, Artificial Sequence
  Description of Artificial Sequence: Synthetic oligonucleotide
cuacagaaaucugggauau

SEQ ID NO: 2944595 - RNA, 19 nt, Artificial Sequence
  Description of Artificial Sequence: Synthetic oligonucleotide
auuccaccaccauccgaua

SEQ ID NO: 2944596 - RNA, 19 nt, Artificial Sequence
  Description of Artificial Sequence: Synthetic oligonucleotide
gcacauuucuugccaacaa

SEQ ID NO: 2944597 - RNA, 19 nt, Artificial Sequence
  Description of Artificial Sequence: Synthetic oligonucleotide
caccauccgauagccccgg

SEQ ID NO: 2944598 - RNA, 19 nt, Artificial Sequence
  Description of Artificial Sequence: Synthetic oligonucleotide
gacuuucgucaucgucuuc

SEQ ID NO: 2944599 - RNA, 19 nt, Artificial Sequence
  Description of Artificial Sequence: Synthetic oligonucleotide
gacuguccuccgucugcac

SEQ ID NO: 2944600 - RNA, 19 nt, Artificial Sequence
  Description of Artificial Sequence: Synthetic oligonucleotide
caaucucgucagccaucgc

SEQ ID NO: 2944601 - RNA, 19 nt, Artificial Sequence
  Description of Artificial Sequence: Synthetic oligonucleotide
uuggugcuugaggggaaau

SEQ ID NO: 2944602 - RNA, 19 nt, Artificial Sequence
  Description of Artificial Sequence: Synthetic oligonucleotide
gccgaagaucgugucgccg

SEQ ID NO: 2944603 - RNA, 19 nt, Artificial Sequence
  Description of Artificial Sequence: Synthetic oligonucleotide
cuguccuccgucugcaccu

SEQ ID NO: 2944604 - RNA, 19 nt, Artificial Sequence
  Description of Artificial Sequence: Synthetic oligonucleotide
caccuucauuccaccacca

SEQ ID NO: 2944605 - RNA, 19 nt, Artificial Sequence
  Description of Artificial Sequence: Synthetic oligonucleotide
caggaggccaauucauccu

SEQ ID NO: 2944606 - RNA, 19 nt, Artificial Sequence
  Description of Artificial Sequence: Synthetic oligonucleotide
cugcaccuucauuccacca

SEQ ID NO: 2944607 - RNA, 19 nt, Artificial Sequence
  Description of Artificial Sequence: Synthetic oligonucleotide
ucccgcgccgcggccacgg

SEQ ID NO: 2944608 - RNA, 19 nt, Artificial Sequence
  Description of Artificial Sequence: Synthetic oligonucleotide
ccaccaccauccgauagcc

SEQ ID NO: 2944609 - RNA, 19 nt, Artificial Sequence
  Description of Artificial Sequence: Synthetic oligonucleotide
aggaaauguguuggugcuu

SEQ ID NO: 2944610 - RNA, 19 nt, Artificial Sequence
  Description of Artificial Sequence: Synthetic oligonucleotide
ccaaccugcuuaaccagga

SEQ ID NO: 2944611 - RNA, 19 nt, Artificial Sequence
  Description of Artificial Sequence: Synthetic oligonucleotide
ggaggccaauucauccugc

SEQ ID NO: 2944612 - RNA, 19 nt, Artificial Sequence
  Description of Artificial Sequence: Synthetic oligonucleotide
uauccccaaccugcuuaac

SEQ ID NO: 2944613 - RNA, 19 nt, Artificial Sequence
  Description of Artificial Sequence: Synthetic oligonucleotide
ccugcuuaaccaggaggcc

SEQ ID NO: 2944614 - RNA, 19 nt, Artificial Sequence
  Description of Artificial Sequence: Synthetic oligonucleotide
guucaggcccagauccgca

SEQ ID NO: 2944615 - RNA, 19 nt, Artificial Sequence
  Description of Artificial Sequence: Synthetic oligonucleotide
ccccaaccugcuuaaccag

SEQ ID NO: 2944616 - RNA, 19 nt, Artificial Sequence
  Description of Artificial Sequence: Synthetic oligonucleotide
gcucgcuggccuucccgcg

SEQ ID NO: 2944617 - RNA, 19 nt, Artificial Sequence
  Description of Artificial Sequence: Synthetic oligonucleotide
ucgugucgccgccgggcgu

SEQ ID NO: 2944618 - RNA, 19 nt, Artificial Sequence
  Description of Artificial Sequence: Synthetic oligonucleotide
cggucguccucgaagauga

SEQ ID NO: 2944619 - RNA, 19 nt, Artificial Sequence
  Description of Artificial Sequence: Synthetic oligonucleotide
caucgucuucugcuacaga

SEQ ID NO: 2944620 - RNA, 19 nt, Artificial Sequence
  Description of Artificial Sequence: Synthetic oligonucleotide
gucgccgccgggcguggcc

SEQ ID NO: 2944621 - RNA, 19 nt, Artificial Sequence
  Description of Artificial Sequence: Synthetic oligonucleotide
gcagcacauuucuugccaa

SEQ ID NO: 2944622 - RNA, 19 nt, Artificial Sequence
  Description of Artificial Sequence: Synthetic oligonucleotide
accggucguccucgaagau

SEQ ID NO: 2944623 - RNA, 19 nt, Artificial Sequence
  Description of Artificial Sequence: Synthetic oligonucleotide
cgauagccccgguucaggc

SEQ ID NO: 2944624 - RNA, 19 nt, Artificial Sequence
  Description of Artificial Sequence: Synthetic oligonucleotide
guuggugcuugaggggaaa

SEQ ID NO: 2944625 - RNA, 19 nt, Artificial Sequence
  Description of Artificial Sequence: Synthetic oligonucleotide
uagccccgguucaggccca

SEQ ID NO: 2944626 - RNA, 19 nt, Artificial Sequence
  Description of Artificial Sequence: Synthetic oligonucleotide
gacaccggucguccucgaa

SEQ ID NO: 2944627 - RNA, 19 nt, Artificial Sequence
  Description of Artificial Sequence: Synthetic oligonucleotide
gaugaucuuggcggggauu

SEQ ID NO: 2944628 - RNA, 19 nt, Artificial Sequence
  Description of Artificial Sequence: Synthetic oligonucleotide
ccgcagcacauuucuugcc

SEQ ID NO: 2944629 - RNA, 19 nt, Artificial Sequence
  Description of Artificial Sequence: Synthetic oligonucleotide
cuucccgcgccgcggccac

SEQ ID NO: 2944630 - RNA, 19 nt, Artificial Sequence
  Description of Artificial Sequence: Synthetic oligonucleotide
ccaauucauccugccgacc

SEQ ID NO: 2944631 - RNA, 19 nt, Artificial Sequence
  Description of Artificial Sequence: Synthetic oligonucleotide
cgaagaucgugucgccgcc

SEQ ID NO: 2944632 - RNA, 19 nt, Artificial Sequence
  Description of Artificial Sequence: Synthetic oligonucleotide
ggcaaucucgucagccauc

SEQ ID NO: 2944633 - RNA, 19 nt, Artificial Sequence
  Description of Artificial Sequence: Synthetic oligonucleotide
aucuuggcggggauuucuu

SEQ ID NO: 2944634 - RNA, 19 nt, Artificial Sequence
  Description of Artificial Sequence: Synthetic oligonucleotide
gcggccacgguggggagag

SEQ ID NO: 2944635 - RNA, 19 nt, Artificial Sequence
  Description of Artificial Sequence: Synthetic oligonucleotide
cggaugaucuugccgaaga

SEQ ID NO: 2944636 - RNA, 19 nt, Artificial Sequence
  Description of Artificial Sequence: Synthetic oligonucleotide
ggcccagauccgcagcaca

SEQ ID NO: 2944637 - RNA, 19 nt, Artificial Sequence
  Description of Artificial Sequence: Synthetic oligonucleotide
ucgccgccgggcguggcca

SEQ ID NO: 2944638 - RNA, 19 nt, Artificial Sequence
  Description of Artificial Sequence: Synthetic oligonucleotide
agacaccggucguccucga

SEQ ID NO: 2944639 - RNA, 19 nt, Artificial Sequence
  Description of Artificial Sequence: Synthetic oligonucleotide
cgcgccgcggccacggugg

SEQ ID NO: 2944640 - RNA, 19 nt, Artificial Sequence
  Description of Artificial Sequence: Synthetic oligonucleotide
ccgauagccccgguucagg

SEQ ID NO: 2944641 - RNA, 19 nt, Artificial Sequence
  Description of Artificial Sequence: Synthetic oligonucleotide
ccgggcguggccacuugag

SEQ ID NO: 2944642 - RNA, 19 nt, Artificial Sequence
  Description of Artificial Sequence: Synthetic oligonucleotide
gcggaugaucuugccgaag

SEQ ID NO: 2944643 - RNA, 19 nt, Artificial Sequence
  Description of Artificial Sequence: Synthetic oligonucleotide
accauccgauagccccggu

SEQ ID NO: 2944644 - RNA, 19 nt, Artificial Sequence
  Description of Artificial Sequence: Synthetic oligonucleotide
ggcguggccacuugagccu

SEQ ID NO: 2944645 - RNA, 19 nt, Artificial Sequence
  Description of Artificial Sequence: Synthetic oligonucleotide
ggaugaucuugccgaagau

SEQ ID NO: 2944646 - RNA, 19 nt, Artificial Sequence
  Description of Artificial Sequence: Synthetic oligonucleotide
ccuagaagacuuucgucau

SEQ ID NO: 2944647 - RNA, 19 nt, Artificial Sequence
  Description of Artificial Sequence: Synthetic oligonucleotide
cgucaucgucuucugcuac

SEQ ID NO: 2944648 - RNA, 19 nt, Artificial Sequence
  Description of Artificial Sequence: Synthetic oligonucleotide
cgcagcacauuucuugcca

SEQ ID NO: 2944649 - RNA, 19 nt, Artificial Sequence
  Description of Artificial Sequence: Synthetic oligonucleotide
caccaggaaauguguuggu

SEQ ID NO: 2944650 - RNA, 19 nt, Artificial Sequence
  Description of Artificial Sequence: Synthetic oligonucleotide
ccggucguccucgaagaug

SEQ ID NO: 2944651 - RNA, 19 nt, Artificial Sequence
  Description of Artificial Sequence: Synthetic oligonucleotide
ggguaucaccaggaaaugu

SEQ ID NO: 2944652 - RNA, 19 nt, Artificial Sequence
  Description of Artificial Sequence: Synthetic oligonucleotide
cgguucaggcccagauccg

SEQ ID NO: 2944653 - RNA, 19 nt, Artificial Sequence
  Description of Artificial Sequence: Synthetic oligonucleotide
cccgguucaggcccagauc

SEQ ID NO: 2944654 - RNA, 19 nt, Artificial Sequence
  Description of Artificial Sequence: Synthetic oligonucleotide
cgcucgcuggccuucccgc

SEQ ID NO: 2944655 - RNA, 19 nt, Artificial Sequence
  Description of Artificial Sequence: Synthetic oligonucleotide
ccuuggcaaucucgucagc

SEQ ID NO: 2944656 - RNA, 19 nt, Artificial Sequence
  Description of Artificial Sequence: Synthetic oligonucleotide
ggccacgguggggagagga

SEQ ID NO: 2944657 - RNA, 19 nt, Artificial Sequence
  Description of Artificial Sequence: Synthetic oligonucleotide
ccgcucgcuggccuucccg

SEQ ID NO: 2944658 - RNA, 19 nt, Artificial Sequence
  Description of Artificial Sequence: Synthetic oligonucleotide
ucgcagccgcucgcuggcc

SEQ ID NO: 2944659 - RNA, 19 nt, Artificial Sequence
  Description of Artificial Sequence: Synthetic oligonucleotide
gcuugaggggaaaugucau

SEQ ID NO: 2944660 - RNA, 19 nt, Artificial Sequence
  Description of Artificial Sequence: Synthetic oligonucleotide
ggccuucccgcgccgcggc

SEQ ID NO: 2944661 - RNA, 19 nt, Artificial Sequence
  Description of Artificial Sequence: Synthetic oligonucleotide
cgucagccaucgcagccgc

SEQ ID NO: 2944662 - RNA, 19 nt, Artificial Sequence
  Description of Artificial Sequence: Synthetic oligonucleotide
gccgcggccacggugggga

SEQ ID NO: 2944663 - RNA, 19 nt, Artificial Sequence
  Description of Artificial Sequence: Synthetic oligonucleotide
cuuaaccaggaggccaauu

SEQ ID NO: 2944664 - RNA, 19 nt, Artificial Sequence
  Description of Artificial Sequence: Synthetic oligonucleotide
cgggcguggccacuugagc

SEQ ID NO: 2944665 - RNA, 19 nt, Artificial Sequence
  Description of Artificial Sequence: Synthetic oligonucleotide
gugucgccgccgggcgugg

SEQ ID NO: 2944666 - RNA, 19 nt, Artificial Sequence
  Description of Artificial Sequence: Synthetic oligonucleotide
cgucuucugcuacagaaau

SEQ ID NO: 2944667 - RNA, 19 nt, Artificial Sequence
  Description of Artificial Sequence: Synthetic oligonucleotide
gauccgcagcacauuucuu

SEQ ID NO: 2944668 - RNA, 19 nt, Artificial Sequence
  Description of Artificial Sequence: Synthetic oligonucleotide
ccaucgcagccgcucgcug

SEQ ID NO: 2944669 - RNA, 19 nt, Artificial Sequence
  Description of Artificial Sequence: Synthetic oligonucleotide
ugucgccgccgggcguggc

SEQ ID NO: 2944670 - RNA, 19 nt, Artificial Sequence
  Description of Artificial Sequence: Synthetic oligonucleotide
cagccgcucgcuggccuuc

SEQ ID NO: 2944671 - RNA, 19 nt, Artificial Sequence
  Description of Artificial Sequence: Synthetic oligonucleotide
gcaagacaccggucguccu

SEQ ID NO: 2944672 - RNA, 19 nt, Artificial Sequence
  Description of Artificial Sequence: Synthetic oligonucleotide
agccccgguucaggcccag

SEQ ID NO: 2944673 - RNA, 19 nt, Artificial Sequence
  Description of Artificial Sequence: Synthetic oligonucleotide
ccagauccgcagcacauuu

SEQ ID NO: 2944674 - RNA, 19 nt, Artificial Sequence
  Description of Artificial Sequence: Synthetic oligonucleotide
gcuggccuucccgcgccgc

SEQ ID NO: 2944675 - RNA, 19 nt, Artificial Sequence
  Description of Artificial Sequence: Synthetic oligonucleotide
gccgggcguggccacuuga

SEQ ID NO: 2944676 - RNA, 19 nt, Artificial Sequence
  Description of Artificial Sequence: Synthetic oligonucleotide
cgugucgccgccgggcgug

SEQ ID NO: 2944677 - RNA, 19 nt, Artificial Sequence
  Description of Artificial Sequence: Synthetic oligonucleotide
ccacuugagccuuggcaau

SEQ ID NO: 2944678 - RNA, 19 nt, Artificial Sequence
  Description of Artificial Sequence: Synthetic oligonucleotide
gccacgguggggagaggaa

SEQ ID NO: 2944679 - RNA, 19 nt, Artificial Sequence
  Description of Artificial Sequence: Synthetic oligonucleotide
gccuucccgcgccgcggcc

SEQ ID NO: 2944680 - RNA, 19 nt, Artificial Sequence
  Description of Artificial Sequence: Synthetic oligonucleotide
ccccgagaacauggagaug

SEQ ID NO: 2944681 - RNA, 19 nt, Artificial Sequence
  Description of Artificial Sequence: Synthetic oligonucleotide
gcgccgcggccacgguggg

SEQ ID NO: 2944682 - RNA, 19 nt, Artificial Sequence
  Description of Artificial Sequence: Synthetic oligonucleotide
gcccagauccgcagcacau

SEQ ID NO: 2944683 - RNA, 19 nt, Artificial Sequence
  Description of Artificial Sequence: Synthetic oligonucleotide
cguggccacuugagccuug

SEQ ID NO: 2944684 - RNA, 19 nt, Artificial Sequence
  Description of Artificial Sequence: Synthetic oligonucleotide
ggauuucuuugcggaugau

SEQ ID NO: 2944685 - RNA, 19 nt, Artificial Sequence
  Description of Artificial Sequence: Synthetic oligonucleotide
ccgcgccgcggccacggug

SEQ ID NO: 2944686 - RNA, 19 nt, Artificial Sequence
  Description of Artificial Sequence: Synthetic oligonucleotide
ccauccgauagccccgguu

SEQ ID NO: 2944687 - RNA, 19 nt, Artificial Sequence
  Description of Artificial Sequence: Synthetic oligonucleotide
ccuucccgcgccgcggcca

SEQ ID NO: 2944688 - RNA, 19 nt, Artificial Sequence
  Description of Artificial Sequence: Synthetic oligonucleotide
ccccgguucaggcccagau

SEQ ID NO: 2944689 - RNA, 19 nt, Artificial Sequence
  Description of Artificial Sequence: Synthetic oligonucleotide
cgcuggccuucccgcgccg

SEQ ID NO: 2944690 - RNA, 19 nt, Artificial Sequence
  Description of Artificial Sequence: Synthetic oligonucleotide
gcuuaaccaggaggccaau

SEQ ID NO: 2944691 - RNA, 19 nt, Artificial Sequence
  Description of Artificial Sequence: Synthetic oligonucleotide
gcagccgcucgcuggccuu

SEQ ID NO: 2944692 - RNA, 19 nt, Artificial Sequence
  Description of Artificial Sequence: Synthetic oligonucleotide
cgagaacauggagaugaau

SEQ ID NO: 2944693 - RNA, 19 nt, Artificial Sequence
  Description of Artificial Sequence: Synthetic oligonucleotide
ccgcggccacgguggggag

SEQ ID NO: 2944694 - RNA, 19 nt, Artificial Sequence
  Description of Artificial Sequence: Synthetic oligonucleotide
cggggauuucuuugcggau

SEQ ID NO: 2944695 - RNA, 19 nt, Artificial Sequence
  Description of Artificial Sequence: Synthetic oligonucleotide
cccagauccgcagcacauu

SEQ ID NO: 2944696 - RNA, 19 nt, Artificial Sequence
  Description of Artificial Sequence: Synthetic oligonucleotide
gcguggccacuugagccuu

SEQ ID NO: 2944697 - RNA, 19 nt, Artificial Sequence
  Description of Artificial Sequence: Synthetic oligonucleotide
gccccgguucaggcccaga

SEQ ID NO: 2944698 - RNA, 19 nt, Artificial Sequence
  Description of Artificial Sequence: Synthetic oligonucleotide
cguccucgaagaugaucuu

SEQ ID NO: 2944699 - RNA, 19 nt, Artificial Sequence
  Description of Artificial Sequence: Synthetic oligonucleotide
cgccgggcguggccacuug

SEQ ID NO: 2944700 - RNA, 19 nt, Artificial Sequence
  Description of Artificial Sequence: Synthetic oligonucleotide
cgccgcggccacggugggg

SEQ ID NO: 2944701 - RNA, 19 nt, Artificial Sequence
  Description of Artificial Sequence: Synthetic oligonucleotide
cgccgccgggcguggccac

SEQ ID NO: 2944702 - RNA, 19 nt, Artificial Sequence
  Description of Artificial Sequence: Synthetic oligonucleotide
cgcagccgcucgcuggccu

SEQ ID NO: 2944703 - RNA, 19 nt, Artificial Sequence
  Description of Artificial Sequence: Synthetic oligonucleotide
cgcggccacgguggggaga

SEQ ID NO: 2944704 - RNA, 19 nt, Artificial Sequence
  Description of Artificial Sequence: Synthetic oligonucleotide
cggccacgguggggagagg

SEQ ID NO: 2944705 - RNA, 19 nt, Artificial Sequence
  Description of Artificial Sequence: Synthetic oligonucleotide
gccgccgggcguggccacu

SEQ ID NO: 2944706 - RNA, 19 nt, Artificial Sequence
  Description of Artificial Sequence: Synthetic oligonucleotide
ccgccgggcguggccacuu

SEQ ID NO: 2944707 - RNA, 19 nt, Artificial Sequence
  Description of Artificial Sequence: Synthetic oligonucleotide
cccgcgccgcggccacggu

SEQ ID NO: 2944708 - RNA, 19 nt, Artificial Sequence
  Description of Artificial Sequence: Synthetic oligonucleotide
aacacagucaacuccaagc

SEQ ID NO: 2944709 - RNA, 19 nt, Artificial Sequence
  Description of Artificial Sequence: Synthetic oligonucleotide
guagguaucaucaacacag

SEQ ID NO: 2944710 - RNA, 19 nt, Artificial Sequence
  Description of Artificial Sequence: Synthetic oligonucleotide
gauaaggugcaauuggucc

SEQ ID NO: 2944711 - RNA, 19 nt, Artificial Sequence
  Description of Artificial Sequence: Synthetic oligonucleotide
acugccucauuguagaagc

SEQ ID NO: 2944712 - RNA, 19 nt, Artificial Sequence
  Description of Artificial Sequence: Synthetic oligonucleotide
guaucaucaacacaguucc

SEQ ID NO: 2944713 - RNA, 19 nt, Artificial Sequence
  Description of Artificial Sequence: Synthetic oligonucleotide
gagaaaaguggccaggagg

SEQ ID NO: 2944714 - RNA, 19 nt, Artificial Sequence
  Description of Artificial Sequence: Synthetic oligonucleotide
acugcauccaagcugguac

SEQ ID NO: 2944715 - RNA, 19 nt, Artificial Sequence
  Description of Artificial Sequence: Synthetic oligonucleotide
auaauugacugccucauug

SEQ ID NO: 2944716 - RNA, 19 nt, Artificial Sequence
  Description of Artificial Sequence: Synthetic oligonucleotide
ucugcuucagcucacuccc

SEQ ID NO: 2944717 - RNA, 19 nt, Artificial Sequence
  Description of Artificial Sequence: Synthetic oligonucleotide
cauuguagaagccagguuc

SEQ ID NO: 2944718 - RNA, 19 nt, Artificial Sequence
  Description of Artificial Sequence: Synthetic oligonucleotide
cauaccauugccugguugg

SEQ ID NO: 2944719 - RNA, 19 nt, Artificial Sequence
  Description of Artificial Sequence: Synthetic oligonucleotide
cauacagugucccuggugc

SEQ ID NO: 2944720 - RNA, 19 nt, Artificial Sequence
  Description of Artificial Sequence: Synthetic oligonucleotide
agaagccagguucacaugg

SEQ ID NO: 2944721 - RNA, 19 nt, Artificial Sequence
  Description of Artificial Sequence: Synthetic oligonucleotide
guuuucauaauugacugcc

SEQ ID NO: 2944722 - RNA, 19 nt, Artificial Sequence
  Description of Artificial Sequence: Synthetic oligonucleotide
ucaacuccaagcuuguggc

SEQ ID NO: 2944723 - RNA, 19 nt, Artificial Sequence
  Description of Artificial Sequence: Synthetic oligonucleotide
aguuuucauaauugacugc

SEQ ID NO: 2944724 - RNA, 19 nt, Artificial Sequence
  Description of Artificial Sequence: Synthetic oligonucleotide
aucaucaacacaguuccgc

SEQ ID NO: 2944725 - RNA, 19 nt, Artificial Sequence
  Description of Artificial Sequence: Synthetic oligonucleotide
agggaacacagucaacucc

SEQ ID NO: 2944726 - RNA, 19 nt, Artificial Sequence
  Description of Artificial Sequence: Synthetic oligonucleotide
agaaaaguggccaggaggg

SEQ ID NO: 2944727 - RNA, 19 nt, Artificial Sequence
  Description of Artificial Sequence: Synthetic oligonucleotide
aggugugcaauucugcuuc

SEQ ID NO: 2944728 - RNA, 19 nt, Artificial Sequence
  Description of Artificial Sequence: Synthetic oligonucleotide
cagacugcauccaagcugg

SEQ ID NO: 2944729 - RNA, 19 nt, Artificial Sequence
  Description of Artificial Sequence: Synthetic oligonucleotide
cauuacagcacuugugacc

SEQ ID NO: 2944730 - RNA, 19 nt, Artificial Sequence
  Description of Artificial Sequence: Synthetic oligonucleotide
acauggguggcauacagug

SEQ ID NO: 2944731 - RNA, 19 nt, Artificial Sequence
  Description of Artificial Sequence: Synthetic oligonucleotide
gucaacuccaagcuugugg

SEQ ID NO: 2944732 - RNA, 19 nt, Artificial Sequence
  Description of Artificial Sequence: Synthetic oligonucleotide
caguuuucauaauugacug

SEQ ID NO: 2944733 - RNA, 19 nt, Artificial Sequence
  Description of Artificial Sequence: Synthetic oligonucleotide
ucagcucacucccacuucg

SEQ ID NO: 2944734 - RNA, 19 nt, Artificial Sequence
  Description of Artificial Sequence: Synthetic oligonucleotide
auggguggcauacaguguc

SEQ ID NO: 2944735 - RNA, 19 nt, Artificial Sequence
  Description of Artificial Sequence: Synthetic oligonucleotide
uucauaauugacugccuca

SEQ ID NO: 2944736 - RNA, 19 nt, Artificial Sequence
  Description of Artificial Sequence: Synthetic oligonucleotide
ugcaguuuucauaauugac

SEQ ID NO: 2944737 - RNA, 19 nt, Artificial Sequence
  Description of Artificial Sequence: Synthetic oligonucleotide
ugcauuggcagacaguauc

SEQ ID NO: 2944738 - RNA, 19 nt, Artificial Sequence
  Description of Artificial Sequence: Synthetic oligonucleotide
ucugcuucccagauaaggu

SEQ ID NO: 2944739 - RNA, 19 nt, Artificial Sequence
  Description of Artificial Sequence: Synthetic oligonucleotide
guugccuggagaaaagugg

SEQ ID NO: 2944740 - RNA, 19 nt, Artificial Sequence
  Description of Artificial Sequence: Synthetic oligonucleotide
agcacuugugaccacuggg

SEQ ID NO: 2944741 - RNA, 19 nt, Artificial Sequence
  Description of Artificial Sequence: Synthetic oligonucleotide
uuucauaauugacugccuc

SEQ ID NO: 2944742 - RNA, 19 nt, Artificial Sequence
  Description of Artificial Sequence: Synthetic oligonucleotide
cucacucccacuucguugg

SEQ ID NO: 2944743 - RNA, 19 nt, Artificial Sequence
  Description of Artificial Sequence: Synthetic oligonucleotide
uugacugccucauuguaga

SEQ ID NO: 2944744 - RNA, 19 nt, Artificial Sequence
  Description of Artificial Sequence: Synthetic oligonucleotide
ugugcaauucugcuucagc

SEQ ID NO: 2944745 - RNA, 19 nt, Artificial Sequence
  Description of Artificial Sequence: Synthetic oligonucleotide
uguugccuggagaaaagug

SEQ ID NO: 2944746 - RNA, 19 nt, Artificial Sequence
  Description of Artificial Sequence: Synthetic oligonucleotide
auuacagcacuugugacca

SEQ ID NO: 2944747 - RNA, 19 nt, Artificial Sequence
  Description of Artificial Sequence: Synthetic oligonucleotide
ucaucaacacaguuccgcc

SEQ ID NO: 2944748 - RNA, 19 nt, Artificial Sequence
  Description of Artificial Sequence: Synthetic oligonucleotide
accauugccugguuggcac

SEQ ID NO: 2944749 - RNA, 19 nt, Artificial Sequence
  Description of Artificial Sequence: Synthetic oligonucleotide
cucaccauaccauugccug

SEQ ID NO: 2944750 - RNA, 19 nt, Artificial Sequence
  Description of Artificial Sequence: Synthetic oligonucleotide
ucacauggguggcauacag

SEQ ID NO: 2944751 - RNA, 19 nt, Artificial Sequence
  Description of Artificial Sequence: Synthetic oligonucleotide
ugcuucccagauaaggugc

SEQ ID NO: 2944752 - RNA, 19 nt, Artificial Sequence
  Description of Artificial Sequence: Synthetic oligonucleotide
auaaggugcaauuggucca

SEQ ID NO: 2944753 - RNA, 19 nt, Artificial Sequence
  Description of Artificial Sequence: Synthetic oligonucleotide
agcuccaaaugugaguccc

SEQ ID NO: 2944754 - RNA, 19 nt, Artificial Sequence
  Description of Artificial Sequence: Synthetic oligonucleotide
ucugcauuggcagacagua

SEQ ID NO: 2944755 - RNA, 19 nt, Artificial Sequence
  Description of Artificial Sequence: Synthetic oligonucleotide
aguaggugugcaauucugc

SEQ ID NO: 2944756 - RNA, 19 nt, Artificial Sequence
  Description of Artificial Sequence: Synthetic oligonucleotide
aucaacacaguuccgccug

SEQ ID NO: 2944757 - RNA, 19 nt, Artificial Sequence
  Description of Artificial Sequence: Synthetic oligonucleotide
uaauugacugccucauugu

SEQ ID NO: 2944758 - RNA, 19 nt, Artificial Sequence
  Description of Artificial Sequence: Synthetic oligonucleotide
uuuucauaauugacugccu

SEQ ID NO: 2944759 - RNA, 19 nt, Artificial Sequence
  Description of Artificial Sequence: Synthetic oligonucleotide
uccaagcugguacuggcug

SEQ ID NO: 2944760 - RNA, 19 nt, Artificial Sequence
  Description of Artificial Sequence: Synthetic oligonucleotide
aacuccaagcuuguggcug

SEQ ID NO: 2944761 - RNA, 19 nt, Artificial Sequence
  Description of Artificial Sequence: Synthetic oligonucleotide
acagucaacuccaagcuug

SEQ ID NO: 2944762 - RNA, 19 nt, Artificial Sequence
  Description of Artificial Sequence: Synthetic oligonucleotide
aguuccgccuggcugcagc

SEQ ID NO: 2944763 - RNA, 19 nt, Artificial Sequence
  Description of Artificial Sequence: Synthetic oligonucleotide
auacagugucccuggugcc

SEQ ID NO: 2944764 - RNA, 19 nt, Artificial Sequence
  Description of Artificial Sequence: Synthetic oligonucleotide
aauugacugccucauugua

SEQ ID NO: 2944765 - RNA, 19 nt, Artificial Sequence
  Description of Artificial Sequence: Synthetic oligonucleotide
ucaccauaccauugccugg

SEQ ID NO: 2944766 - RNA, 19 nt, Artificial Sequence
  Description of Artificial Sequence: Synthetic oligonucleotide
uggcauacagugucccugg

SEQ ID NO: 2944767 - RNA, 19 nt, Artificial Sequence
  Description of Artificial Sequence: Synthetic oligonucleotide
ugaguaggugugcaauucu

SEQ ID NO: 2944768 - RNA, 19 nt, Artificial Sequence
  Description of Artificial Sequence: Synthetic oligonucleotide
acugcuugcaguuuucaua

SEQ ID NO: 2944769 - RNA, 19 nt, Artificial Sequence
  Description of Artificial Sequence: Synthetic oligonucleotide
gucugcuucccagauaagg

SEQ ID NO: 2944770 - RNA, 19 nt, Artificial Sequence
  Description of Artificial Sequence: Synthetic oligonucleotide
uaucaucaacacaguuccg

SEQ ID NO: 2944771 - RNA, 19 nt, Artificial Sequence
  Description of Artificial Sequence: Synthetic oligonucleotide
ucauuacagcacuugugac

SEQ ID NO: 2944772 - RNA, 19 nt, Artificial Sequence
  Description of Artificial Sequence: Synthetic oligonucleotide
ugcaauucugcuucagcuc

SEQ ID NO: 2944773 - RNA, 19 nt, Artificial Sequence
  Description of Artificial Sequence: Synthetic oligonucleotide
uugcagaccugguuguugc

SEQ ID NO: 2944774 - RNA, 19 nt, Artificial Sequence
  Description of Artificial Sequence: Synthetic oligonucleotide
auuggcagacaguauccug

SEQ ID NO: 2944775 - RNA, 19 nt, Artificial Sequence
  Description of Artificial Sequence: Synthetic oligonucleotide
ccagauaaggugcaauugg

SEQ ID NO: 2944776 - RNA, 19 nt, Artificial Sequence
  Description of Artificial Sequence: Synthetic oligonucleotide
agauaaggugcaauugguc

SEQ ID NO: 2944777 - RNA, 19 nt, Artificial Sequence
  Description of Artificial Sequence: Synthetic oligonucleotide
ucaacacaguuccgccugg

SEQ ID NO: 2944778 - RNA, 19 nt, Artificial Sequence
  Description of Artificial Sequence: Synthetic oligonucleotide
cagacaguauccugaguag

SEQ ID NO: 2944779 - RNA, 19 nt, Artificial Sequence
  Description of Artificial Sequence: Synthetic oligonucleotide
acucccacuucguugguug

SEQ ID NO: 2944780 - RNA, 19 nt, Artificial Sequence
  Description of Artificial Sequence: Synthetic oligonucleotide
agacaguauccugaguagg

SEQ ID NO: 2944781 - RNA, 19 nt, Artificial Sequence
  Description of Artificial Sequence: Synthetic oligonucleotide
auugacugccucauuguag

SEQ ID NO: 2944782 - RNA, 19 nt, Artificial Sequence
  Description of Artificial Sequence: Synthetic oligonucleotide
uuggcacucauuacagcac

SEQ ID NO: 2944783 - RNA, 19 nt, Artificial Sequence
  Description of Artificial Sequence: Synthetic oligonucleotide
gccagguucacaugggugg

SEQ ID NO: 2944784 - RNA, 19 nt, Artificial Sequence
  Description of Artificial Sequence: Synthetic oligonucleotide
ucauaauugacugccucau

SEQ ID NO: 2944785 - RNA, 19 nt, Artificial Sequence
  Description of Artificial Sequence: Synthetic oligonucleotide
guugguugcacuguguaca

SEQ ID NO: 2944786 - RNA, 19 nt, Artificial Sequence
  Description of Artificial Sequence: Synthetic oligonucleotide
cauccaagcugguacuggc

SEQ ID NO: 2944787 - RNA, 19 nt, Artificial Sequence
  Description of Artificial Sequence: Synthetic oligonucleotide
gguugcacuguguacacug

SEQ ID NO: 2944788 - RNA, 19 nt, Artificial Sequence
  Description of Artificial Sequence: Synthetic oligonucleotide
uaaggugcaauugguccag

SEQ ID NO: 2944789 - RNA, 19 nt, Artificial Sequence
  Description of Artificial Sequence: Synthetic oligonucleotide
aaaguggccaggagggcag

SEQ ID NO: 2944790 - RNA, 19 nt, Artificial Sequence
  Description of Artificial Sequence: Synthetic oligonucleotide
gguaucaucaacacaguuc

SEQ ID NO: 2944791 - RNA, 19 nt, Artificial Sequence
  Description of Artificial Sequence: Synthetic oligonucleotide
auaccauugccugguuggc

SEQ ID NO: 2944792 - RNA, 19 nt, Artificial Sequence
  Description of Artificial Sequence: Synthetic oligonucleotide
uggcacucauuacagcacu

SEQ ID NO: 2944793 - RNA, 19 nt, Artificial Sequence
  Description of Artificial Sequence: Synthetic oligonucleotide
gaagccagguucacauggg

SEQ ID NO: 2944794 - RNA, 19 nt, Artificial Sequence
  Description of Artificial Sequence: Synthetic oligonucleotide
auugguccagggcuugcag

SEQ ID NO: 2944795 - RNA, 19 nt, Artificial Sequence
  Description of Artificial Sequence: Synthetic oligonucleotide
aggugcaauugguccaggg

SEQ ID NO: 2944796 - RNA, 19 nt, Artificial Sequence
  Description of Artificial Sequence: Synthetic oligonucleotide
aagccagguucacaugggu

SEQ ID NO: 2944797 - RNA, 19 nt, Artificial Sequence
  Description of Artificial Sequence: Synthetic oligonucleotide
cugcuucccagauaaggug

SEQ ID NO: 2944798 - RNA, 19 nt, Artificial Sequence
  Description of Artificial Sequence: Synthetic oligonucleotide
ugguccagggcuugcagac

SEQ ID NO: 2944799 - RNA, 19 nt, Artificial Sequence
  Description of Artificial Sequence: Synthetic oligonucleotide
cugguuggcacucauuaca

SEQ ID NO: 2944800 - RNA, 19 nt, Artificial Sequence
  Description of Artificial Sequence: Synthetic oligonucleotide
gacugccucauuguagaag

SEQ ID NO: 2944801 - RNA, 19 nt, Artificial Sequence
  Description of Artificial Sequence: Synthetic oligonucleotide
uggcagacaguauccugag

SEQ ID NO: 2944802 - RNA, 19 nt, Artificial Sequence
  Description of Artificial Sequence: Synthetic oligonucleotide
cuggcugcagcuccaaaug

SEQ ID NO: 2944803 - RNA, 19 nt, Artificial Sequence
  Description of Artificial Sequence: Synthetic oligonucleotide
uagguaucaucaacacagu

SEQ ID NO: 2944804 - RNA, 19 nt, Artificial Sequence
  Description of Artificial Sequence: Synthetic oligonucleotide
acucauuacagcacuugug

SEQ ID NO: 2944805 - RNA, 19 nt, Artificial Sequence
  Description of Artificial Sequence: Synthetic oligonucleotide
cuuguggcugcugucuucc

SEQ ID NO: 2944806 - RNA, 19 nt, Artificial Sequence
  Description of Artificial Sequence: Synthetic oligonucleotide
cugcuugcaguuuucauaa

SEQ ID NO: 2944807 - RNA, 19 nt, Artificial Sequence
  Description of Artificial Sequence: Synthetic oligonucleotide
gaguaggugugcaauucug

SEQ ID NO: 2944808 - RNA, 19 nt, Artificial Sequence
  Description of Artificial Sequence: Synthetic oligonucleotide
uugcacuguguacacugcu

SEQ ID NO: 2944809 - RNA, 19 nt, Artificial Sequence
  Description of Artificial Sequence: Synthetic oligonucleotide
ucauuguagaagccagguu

SEQ ID NO: 2944810 - RNA, 19 nt, Artificial Sequence
  Description of Artificial Sequence: Synthetic oligonucleotide
guucacauggguggcauac

SEQ ID NO: 2944811 - RNA, 19 nt, Artificial Sequence
  Description of Artificial Sequence: Synthetic oligonucleotide
ugccucauuguagaagcca

SEQ ID NO: 2944812 - RNA, 19 nt, Artificial Sequence
  Description of Artificial Sequence: Synthetic oligonucleotide
ugcuucagcucacucccac

SEQ ID NO: 2944813 - RNA, 19 nt, Artificial Sequence
  Description of Artificial Sequence: Synthetic oligonucleotide
ucguugguugcacugugua

SEQ ID NO: 2944814 - RNA, 19 nt, Artificial Sequence
  Description of Artificial Sequence: Synthetic oligonucleotide
uccgccuggcugcagcucc

SEQ ID NO: 2944815 - RNA, 19 nt, Artificial Sequence
  Description of Artificial Sequence: Synthetic oligonucleotide
uauccugaguaggugugca

SEQ ID NO: 2944816 - RNA, 19 nt, Artificial Sequence
  Description of Artificial Sequence: Synthetic oligonucleotide
uugguugcacuguguacac

SEQ ID NO: 2944817 - RNA, 19 nt, Artificial Sequence
  Description of Artificial Sequence: Synthetic oligonucleotide
aguauccugaguaggugug

SEQ ID NO: 2944818 - RNA, 19 nt, Artificial Sequence
  Description of Artificial Sequence: Synthetic oligonucleotide
aauucugcuucagcucacu

SEQ ID NO: 2944819 - RNA, 19 nt, Artificial Sequence
  Description of Artificial Sequence: Synthetic oligonucleotide
ugcaauugguccagggcuu

SEQ ID NO: 2944820 - RNA, 19 nt, Artificial Sequence
  Description of Artificial Sequence: Synthetic oligonucleotide
aauugguccagggcuugca

SEQ ID NO: 2944821 - RNA, 19 nt, Artificial Sequence
  Description of Artificial Sequence: Synthetic oligonucleotide
ucccagauaaggugcaauu

SEQ ID NO: 2944822 - RNA, 19 nt, Artificial Sequence
  Description of Artificial Sequence: Synthetic oligonucleotide
cacuucguugguugcacug

SEQ ID NO: 2944823 - RNA, 19 nt, Artificial Sequence
  Description of Artificial Sequence: Synthetic oligonucleotide
guuguugccuggagaaaag

SEQ ID NO: 2944824 - RNA, 19 nt, Artificial Sequence
  Description of Artificial Sequence: Synthetic oligonucleotide
cugguuguugccuggagaa

SEQ ID NO: 2944825 - RNA, 19 nt, Artificial Sequence
  Description of Artificial Sequence: Synthetic oligonucleotide
ugcacuguguacacugcuu

SEQ ID NO: 2944826 - RNA, 19 nt, Artificial Sequence
  Description of Artificial Sequence: Synthetic oligonucleotide
acuguguacacugcuugca

SEQ ID NO: 2944827 - RNA, 19 nt, Artificial Sequence
  Description of Artificial Sequence: Synthetic oligonucleotide
gcaauucugcuucagcuca

SEQ ID NO: 2944828 - RNA, 19 nt, Artificial Sequence
  Description of Artificial Sequence: Synthetic oligonucleotide
uucguugguugcacugugu

SEQ ID NO: 2944829 - RNA, 19 nt, Artificial Sequence
  Description of Artificial Sequence: Synthetic oligonucleotide
uggguggcauacagugucc

SEQ ID NO: 2944830 - RNA, 19 nt, Artificial Sequence
  Description of Artificial Sequence: Synthetic oligonucleotide
agaccugguuguugccugg

SEQ ID NO: 2944831 - RNA, 19 nt, Artificial Sequence
  Description of Artificial Sequence: Synthetic oligonucleotide
uacagcacuugugaccacu

SEQ ID NO: 2944832 - RNA, 19 nt, Artificial Sequence
  Description of Artificial Sequence: Synthetic oligonucleotide
acuggcugggugccggguc

SEQ ID NO: 2944833 - RNA, 19 nt, Artificial Sequence
  Description of Artificial Sequence: Synthetic oligonucleotide
gcugguacuggcugggugc

SEQ ID NO: 2944834 - RNA, 19 nt, Artificial Sequence
  Description of Artificial Sequence: Synthetic oligonucleotide
guggcauacagugucccug

SEQ ID NO: 2944835 - RNA, 19 nt, Artificial Sequence
  Description of Artificial Sequence: Synthetic oligonucleotide
gugcaauucugcuucagcu

SEQ ID NO: 2944836 - RNA, 19 nt, Artificial Sequence
  Description of Artificial Sequence: Synthetic oligonucleotide
aucacagcgccucaccaua

SEQ ID NO: 2944837 - RNA, 19 nt, Artificial Sequence
  Description of Artificial Sequence: Synthetic oligonucleotide
uacacugcuugcaguuuuc

SEQ ID NO: 2944838 - RNA, 19 nt, Artificial Sequence
  Description of Artificial Sequence: Synthetic oligonucleotide
uaggugugcaauucugcuu

SEQ ID NO: 2944839 - RNA, 19 nt, Artificial Sequence
  Description of Artificial Sequence: Synthetic oligonucleotide
uggcugcagcuccaaaugu

SEQ ID NO: 2944840 - RNA, 19 nt, Artificial Sequence
  Description of Artificial Sequence: Synthetic oligonucleotide
gcacuugugaccacugggg

SEQ ID NO: 2944841 - RNA, 19 nt, Artificial Sequence
  Description of Artificial Sequence: Synthetic oligonucleotide
acagcgccucaccauacca

SEQ ID NO: 2944842 - RNA, 19 nt, Artificial Sequence
  Description of Artificial Sequence: Synthetic oligonucleotide
caagcugguacuggcuggg

SEQ ID NO: 2944843 - RNA, 19 nt, Artificial Sequence
  Description of Artificial Sequence: Synthetic oligonucleotide
gaaaaguggccaggagggc

SEQ ID NO: 2944844 - RNA, 19 nt, Artificial Sequence
  Description of Artificial Sequence: Synthetic oligonucleotide
agcugguacuggcugggug

SEQ ID NO: 2944845 - RNA, 19 nt, Artificial Sequence
  Description of Artificial Sequence: Synthetic oligonucleotide
cuucguugguugcacugug

SEQ ID NO: 2944846 - RNA, 19 nt, Artificial Sequence
  Description of Artificial Sequence: Synthetic oligonucleotide
agguaucaucaacacaguu

SEQ ID NO: 2944847 - RNA, 19 nt, Artificial Sequence
  Description of Artificial Sequence: Synthetic oligonucleotide
cugaguaggugugcaauuc

SEQ ID NO: 2944848 - RNA, 19 nt, Artificial Sequence
  Description of Artificial Sequence: Synthetic oligonucleotide
cuccaaaugugagucccag

SEQ ID NO: 2944849 - RNA, 19 nt, Artificial Sequence
  Description of Artificial Sequence: Synthetic oligonucleotide
uucagcucacucccacuuc

SEQ ID NO: 2944850 - RNA, 19 nt, Artificial Sequence
  Description of Artificial Sequence: Synthetic oligonucleotide
gucccuggugccaucacag

SEQ ID NO: 2944851 - RNA, 19 nt, Artificial Sequence
  Description of Artificial Sequence: Synthetic oligonucleotide
ucuucccggggcugggugc

SEQ ID NO: 2944852 - RNA, 19 nt, Artificial Sequence
  Description of Artificial Sequence: Synthetic oligonucleotide
uccugaguaggugugcaau

SEQ ID NO: 2944853 - RNA, 19 nt, Artificial Sequence
  Description of Artificial Sequence: Synthetic oligonucleotide
cugcagcuccaaaugugag

SEQ ID NO: 2944854 - RNA, 19 nt, Artificial Sequence
  Description of Artificial Sequence: Synthetic oligonucleotide
cuugcagaccugguuguug

SEQ ID NO: 2944855 - RNA, 19 nt, Artificial Sequence
  Description of Artificial Sequence: Synthetic oligonucleotide
cagggaacacagucaacuc

SEQ ID NO: 2944856 - RNA, 19 nt, Artificial Sequence
  Description of Artificial Sequence: Synthetic oligonucleotide
cuggugccaucacagcgcc

SEQ ID NO: 2944857 - RNA, 19 nt, Artificial Sequence
  Description of Artificial Sequence: Synthetic oligonucleotide
gggcuugcagaccugguug

SEQ ID NO: 2944858 - RNA, 19 nt, Artificial Sequence
  Description of Artificial Sequence: Synthetic oligonucleotide
gcacuguguacacugcuug

SEQ ID NO: 2944859 - RNA, 19 nt, Artificial Sequence
  Description of Artificial Sequence: Synthetic oligonucleotide
acuucguugguugcacugu

SEQ ID NO: 2944860 - RNA, 19 nt, Artificial Sequence
  Description of Artificial Sequence: Synthetic oligonucleotide
gguagguaucaucaacaca

SEQ ID NO: 2944861 - RNA, 19 nt, Artificial Sequence
  Description of Artificial Sequence: Synthetic oligonucleotide
ugccgggucugcuucccag

SEQ ID NO: 2944862 - RNA, 19 nt, Artificial Sequence
  Description of Artificial Sequence: Synthetic oligonucleotide
uuguugccuggagaaaagu

SEQ ID NO: 2944863 - RNA, 19 nt, Artificial Sequence
  Description of Artificial Sequence: Synthetic oligonucleotide
gggucugcuucccagauaa

SEQ ID NO: 2944864 - RNA, 19 nt, Artificial Sequence
  Description of Artificial Sequence: Synthetic oligonucleotide
gcugcugucuucccggggc

SEQ ID NO: 2944865 - RNA, 19 nt, Artificial Sequence
  Description of Artificial Sequence: Synthetic oligonucleotide
caauucugcuucagcucac

SEQ ID NO: 2944866 - RNA, 19 nt, Artificial Sequence
  Description of Artificial Sequence: Synthetic oligonucleotide
ugcauccaagcugguacug

SEQ ID NO: 2944867 - RNA, 19 nt, Artificial Sequence
  Description of Artificial Sequence: Synthetic oligonucleotide
ucacagcgccucaccauac

SEQ ID NO: 2944868 - RNA, 19 nt, Artificial Sequence
  Description of Artificial Sequence: Synthetic oligonucleotide
cuggucugcauuggcagac

SEQ ID NO: 2944869 - RNA, 19 nt, Artificial Sequence
  Description of Artificial Sequence: Synthetic oligonucleotide
aaggugcaauugguccagg

SEQ ID NO: 2944870 - RNA, 19 nt, Artificial Sequence
  Description of Artificial Sequence: Synthetic oligonucleotide
uggccaggagggcagggaa

SEQ ID NO: 2944871 - RNA, 19 nt, Artificial Sequence
  Description of Artificial Sequence: Synthetic oligonucleotide
ccuggugccaucacagcgc

SEQ ID NO: 2944872 - RNA, 19 nt, Artificial Sequence
  Description of Artificial Sequence: Synthetic oligonucleotide
cagcacuugugaccacugg

SEQ ID NO: 2944873 - RNA, 19 nt, Artificial Sequence
  Description of Artificial Sequence: Synthetic oligonucleotide
gcagcuccaaaugugaguc

SEQ ID NO: 2944874 - RNA, 19 nt, Artificial Sequence
  Description of Artificial Sequence: Synthetic oligonucleotide
caagcuuguggcugcuguc

SEQ ID NO: 2944875 - RNA, 19 nt, Artificial Sequence
  Description of Artificial Sequence: Synthetic oligonucleotide
ugcagaccugguuguugcc

SEQ ID NO: 2944876 - RNA, 19 nt, Artificial Sequence
  Description of Artificial Sequence: Synthetic oligonucleotide
ggguagguaucaucaacac

SEQ ID NO: 2944877 - RNA, 19 nt, Artificial Sequence
  Description of Artificial Sequence: Synthetic oligonucleotide
gacaguauccugaguaggu

SEQ ID NO: 2944878 - RNA, 19 nt, Artificial Sequence
  Description of Artificial Sequence: Synthetic oligonucleotide
gcucacucccacuucguug

SEQ ID NO: 2944879 - RNA, 19 nt, Artificial Sequence
  Description of Artificial Sequence: Synthetic oligonucleotide
guauccugaguaggugugc

SEQ ID NO: 2944880 - RNA, 19 nt, Artificial Sequence
  Description of Artificial Sequence: Synthetic oligonucleotide
uucacauggguggcauaca

SEQ ID NO: 2944881 - RNA, 19 nt, Artificial Sequence
  Description of Artificial Sequence: Synthetic oligonucleotide
guugcacuguguacacugc

SEQ ID NO: 2944882 - RNA, 19 nt, Artificial Sequence
  Description of Artificial Sequence: Synthetic oligonucleotide
gccuggucugcauuggcag

SEQ ID NO: 2944883 - RNA, 19 nt, Artificial Sequence
  Description of Artificial Sequence: Synthetic oligonucleotide
accugguuguugccuggag

SEQ ID NO: 2944884 - RNA, 19 nt, Artificial Sequence
  Description of Artificial Sequence: Synthetic oligonucleotide
cagauaaggugcaauuggu

SEQ ID NO: 2944885 - RNA, 19 nt, Artificial Sequence
  Description of Artificial Sequence: Synthetic oligonucleotide
cugccucauuguagaagcc

SEQ ID NO: 2944886 - RNA, 19 nt, Artificial Sequence
  Description of Artificial Sequence: Synthetic oligonucleotide
gggaacacagucaacucca

SEQ ID NO: 2944887 - RNA, 19 nt, Artificial Sequence
  Description of Artificial Sequence: Synthetic oligonucleotide
uucccagauaaggugcaau

SEQ ID NO: 2944888 - RNA, 19 nt, Artificial Sequence
  Description of Artificial Sequence: Synthetic oligonucleotide
uaccauugccugguuggca

SEQ ID NO: 2944889 - RNA, 19 nt, Artificial Sequence
  Description of Artificial Sequence: Synthetic oligonucleotide
ugggugccgggucugcuuc

SEQ ID NO: 2944890 - RNA, 19 nt, Artificial Sequence
  Description of Artificial Sequence: Synthetic oligonucleotide
gccucauuguagaagccag

SEQ ID NO: 2944891 - RNA, 19 nt, Artificial Sequence
  Description of Artificial Sequence: Synthetic oligonucleotide
gcauuggcagacaguaucc

SEQ ID NO: 2944892 - RNA, 19 nt, Artificial Sequence
  Description of Artificial Sequence: Synthetic oligonucleotide
gguacuggcugggugccgg

SEQ ID NO: 2944893 - RNA, 19 nt, Artificial Sequence
  Description of Artificial Sequence: Synthetic oligonucleotide
agcgccucaccauaccauu

SEQ ID NO: 2944894 - RNA, 19 nt, Artificial Sequence
  Description of Artificial Sequence: Synthetic oligonucleotide
uggcugcugucuucccggg

SEQ ID NO: 2944895 - RNA, 19 nt, Artificial Sequence
  Description of Artificial Sequence: Synthetic oligonucleotide
ccucauuguagaagccagg

SEQ ID NO: 2944896 - RNA, 19 nt, Artificial Sequence
  Description of Artificial Sequence: Synthetic oligonucleotide
ucccuggugccaucacagc

SEQ ID NO: 2944897 - RNA, 19 nt, Artificial Sequence
  Description of Artificial Sequence: Synthetic oligonucleotide
agggcuugcagaccugguu

SEQ ID NO: 2944898 - RNA, 19 nt, Artificial Sequence
  Description of Artificial Sequence: Synthetic oligonucleotide
cccuggugccaucacagcg

SEQ ID NO: 2944899 - RNA, 19 nt, Artificial Sequence
  Description of Artificial Sequence: Synthetic oligonucleotide
ggucugcauuggcagacag

SEQ ID NO: 2944900 - RNA, 19 nt, Artificial Sequence
  Description of Artificial Sequence: Synthetic oligonucleotide
agccagguucacaugggug

SEQ ID NO: 2944901 - RNA, 19 nt, Artificial Sequence
  Description of Artificial Sequence: Synthetic oligonucleotide
ccaagcugguacuggcugg

SEQ ID NO: 2944902 - RNA, 19 nt, Artificial Sequence
  Description of Artificial Sequence: Synthetic oligonucleotide
cagcuccaaaugugagucc

SEQ ID NO: 2944903 - RNA, 19 nt, Artificial Sequence
  Description of Artificial Sequence: Synthetic oligonucleotide
cacagcgccucaccauacc

SEQ ID NO: 2944904 - RNA, 19 nt, Artificial Sequence
  Description of Artificial Sequence: Synthetic oligonucleotide
cucccacuucguugguugc

SEQ ID NO: 2944905 - RNA, 19 nt, Artificial Sequence
  Description of Artificial Sequence: Synthetic oligonucleotide
uguacacugcuugcaguuu

SEQ ID NO: 2944906 - RNA, 19 nt, Artificial Sequence
  Description of Artificial Sequence: Synthetic oligonucleotide
ggugccaucacagcgccuc

SEQ ID NO: 2944907 - RNA, 19 nt, Artificial Sequence
  Description of Artificial Sequence: Synthetic oligonucleotide
gguuggcacucauuacagc

SEQ ID NO: 2944908 - RNA, 19 nt, Artificial Sequence
  Description of Artificial Sequence: Synthetic oligonucleotide
cugguacuggcugggugcc

SEQ ID NO: 2944909 - RNA, 19 nt, Artificial Sequence
  Description of Artificial Sequence: Synthetic oligonucleotide
ucccacuucguugguugca

SEQ ID NO: 2944910 - RNA, 19 nt, Artificial Sequence
  Description of Artificial Sequence: Synthetic oligonucleotide
gcauacagugucccuggug

SEQ ID NO: 2944911 - RNA, 19 nt, Artificial Sequence
  Description of Artificial Sequence: Synthetic oligonucleotide
acagcacuugugaccacug

SEQ ID NO: 2944912 - RNA, 19 nt, Artificial Sequence
  Description of Artificial Sequence: Synthetic oligonucleotide
gcauccaagcugguacugg

SEQ ID NO: 2944913 - RNA, 19 nt, Artificial Sequence
  Description of Artificial Sequence: Synthetic oligonucleotide
cucauuguagaagccaggu

SEQ ID NO: 2944914 - RNA, 19 nt, Artificial Sequence
  Description of Artificial Sequence: Synthetic oligonucleotide
gguuguugccuggagaaaa

SEQ ID NO: 2944915 - RNA, 19 nt, Artificial Sequence
  Description of Artificial Sequence: Synthetic oligonucleotide
ugacugccucauuguagaa

SEQ ID NO: 2944916 - RNA, 19 nt, Artificial Sequence
  Description of Artificial Sequence: Synthetic oligonucleotide
uccagggcuugcagaccug

SEQ ID NO: 2944917 - RNA, 19 nt, Artificial Sequence
  Description of Artificial Sequence: Synthetic oligonucleotide
caguauccugaguaggugu

SEQ ID NO: 2944918 - RNA, 19 nt, Artificial Sequence
  Description of Artificial Sequence: Synthetic oligonucleotide
guacuggcugggugccggg

SEQ ID NO: 2944919 - RNA, 19 nt, Artificial Sequence
  Description of Artificial Sequence: Synthetic oligonucleotide
gucuucccggggcugggug

SEQ ID NO: 2944920 - RNA, 19 nt, Artificial Sequence
  Description of Artificial Sequence: Synthetic oligonucleotide
agugucccuggugccauca

SEQ ID NO: 2944921 - RNA, 19 nt, Artificial Sequence
  Description of Artificial Sequence: Synthetic oligonucleotide
caauugguccagggcuugc

SEQ ID NO: 2944922 - RNA, 19 nt, Artificial Sequence
  Description of Artificial Sequence: Synthetic oligonucleotide
auccugaguaggugugcaa

SEQ ID NO: 2944923 - RNA, 19 nt, Artificial Sequence
  Description of Artificial Sequence: Synthetic oligonucleotide
gugugcaauucugcuucag

SEQ ID NO: 2944924 - RNA, 19 nt, Artificial Sequence
  Description of Artificial Sequence: Synthetic oligonucleotide
cacucauuacagcacuugu

SEQ ID NO: 2944925 - RNA, 19 nt, Artificial Sequence
  Description of Artificial Sequence: Synthetic oligonucleotide
gcagggaacacagucaacu

SEQ ID NO: 2944926 - RNA, 19 nt, Artificial Sequence
  Description of Artificial Sequence: Synthetic oligonucleotide
acacugcuugcaguuuuca

SEQ ID NO: 2944927 - RNA, 19 nt, Artificial Sequence
  Description of Artificial Sequence: Synthetic oligonucleotide
agcucacucccacuucguu

SEQ ID NO: 2944928 - RNA, 19 nt, Artificial Sequence
  Description of Artificial Sequence: Synthetic oligonucleotide
ugguuguugccuggagaaa

SEQ ID NO: 2944929 - RNA, 19 nt, Artificial Sequence
  Description of Artificial Sequence: Synthetic oligonucleotide
caacacaguuccgccuggc

SEQ ID NO: 2944930 - RNA, 19 nt, Artificial Sequence
  Description of Artificial Sequence: Synthetic oligonucleotide
cccagauaaggugcaauug

SEQ ID NO: 2944931 - RNA, 19 nt, Artificial Sequence
  Description of Artificial Sequence: Synthetic oligonucleotide
cauugccugguuggcacuc

SEQ ID NO: 2944932 - RNA, 19 nt, Artificial Sequence
  Description of Artificial Sequence: Synthetic oligonucleotide
ugguacuggcugggugccg

SEQ ID NO: 2944933 - RNA, 19 nt, Artificial Sequence
  Description of Artificial Sequence: Synthetic oligonucleotide
agguucacauggguggcau

SEQ ID NO: 2944934 - RNA, 19 nt, Artificial Sequence
  Description of Artificial Sequence: Synthetic oligonucleotide
uuacagcacuugugaccac

SEQ ID NO: 2944935 - RNA, 19 nt, Artificial Sequence
  Description of Artificial Sequence: Synthetic oligonucleotide
uggucugcauuggcagaca

SEQ ID NO: 2944936 - RNA, 19 nt, Artificial Sequence
  Description of Artificial Sequence: Synthetic oligonucleotide
cuucccggggcugggugcc

SEQ ID NO: 2944937 - RNA, 19 nt, Artificial Sequence
  Description of Artificial Sequence: Synthetic oligonucleotide
gccugguuggcacucauua

SEQ ID NO: 2944938 - RNA, 19 nt, Artificial Sequence
  Description of Artificial Sequence: Synthetic oligonucleotide
agucaacuccaagcuugug

SEQ ID NO: 2944939 - RNA, 19 nt, Artificial Sequence
  Description of Artificial Sequence: Synthetic oligonucleotide
caucaacacaguuccgccu

SEQ ID NO: 2944940 - RNA, 19 nt, Artificial Sequence
  Description of Artificial Sequence: Synthetic oligonucleotide
ugggugccuggucugcauu

SEQ ID NO: 2944941 - RNA, 19 nt, Artificial Sequence
  Description of Artificial Sequence: Synthetic oligonucleotide
auccaagcugguacuggcu

SEQ ID NO: 2944942 - RNA, 19 nt, Artificial Sequence
  Description of Artificial Sequence: Synthetic oligonucleotide
gggugccuggucugcauug

SEQ ID NO: 2944943 - RNA, 19 nt, Artificial Sequence
  Description of Artificial Sequence: Synthetic oligonucleotide
ugcuugcaguuuucauaau

SEQ ID NO: 2944944 - RNA, 19 nt, Artificial Sequence
  Description of Artificial Sequence: Synthetic oligonucleotide
ccugguuggcacucauuac

SEQ ID NO: 2944945 - RNA, 19 nt, Artificial Sequence
  Description of Artificial Sequence: Synthetic oligonucleotide
gcugcagcuccaaauguga

SEQ ID NO: 2944946 - RNA, 19 nt, Artificial Sequence
  Description of Artificial Sequence: Synthetic oligonucleotide
gccucaccauaccauugcc

SEQ ID NO: 2944947 - RNA, 19 nt, Artificial Sequence
  Description of Artificial Sequence: Synthetic oligonucleotide
uccaagcuuguggcugcug

SEQ ID NO: 2944948 - RNA, 19 nt, Artificial Sequence
  Description of Artificial Sequence: Synthetic oligonucleotide
ucacucccacuucguuggu

SEQ ID NO: 2944949 - RNA, 19 nt, Artificial Sequence
  Description of Artificial Sequence: Synthetic oligonucleotide
gccuggagaaaaguggcca

SEQ ID NO: 2944950 - RNA, 19 nt, Artificial Sequence
  Description of Artificial Sequence: Synthetic oligonucleotide
guccagggcuugcagaccu

SEQ ID NO: 2944951 - RNA, 19 nt, Artificial Sequence
  Description of Artificial Sequence: Synthetic oligonucleotide
aagcugguacuggcugggu

SEQ ID NO: 2944952 - RNA, 19 nt, Artificial Sequence
  Description of Artificial Sequence: Synthetic oligonucleotide
gggcagggaacacagucaa

SEQ ID NO: 2944953 - RNA, 19 nt, Artificial Sequence
  Description of Artificial Sequence: Synthetic oligonucleotide
auugccugguuggcacuca

SEQ ID NO: 2944954 - RNA, 19 nt, Artificial Sequence
  Description of Artificial Sequence: Synthetic oligonucleotide
ugguugcacuguguacacu

SEQ ID NO: 2944955 - RNA, 19 nt, Artificial Sequence
  Description of Artificial Sequence: Synthetic oligonucleotide
ccauaccauugccugguug

SEQ ID NO: 2944956 - RNA, 19 nt, Artificial Sequence
  Description of Artificial Sequence: Synthetic oligonucleotide
ugccugguuggcacucauu

SEQ ID NO: 2944957 - RNA, 19 nt, Artificial Sequence
  Description of Artificial Sequence: Synthetic oligonucleotide
guacacugcuugcaguuuu

SEQ ID NO: 2944958 - RNA, 19 nt, Artificial Sequence
  Description of Artificial Sequence: Synthetic oligonucleotide
gacugcauccaagcuggua

SEQ ID NO: 2944959 - RNA, 19 nt, Artificial Sequence
  Description of Artificial Sequence: Synthetic oligonucleotide
cuucagcucacucccacuu

SEQ ID NO: 2944960 - RNA, 19 nt, Artificial Sequence
  Description of Artificial Sequence: Synthetic oligonucleotide
cguugguugcacuguguac

SEQ ID NO: 2944961 - RNA, 19 nt, Artificial Sequence
  Description of Artificial Sequence: Synthetic oligonucleotide
ggcugcugucuucccgggg

SEQ ID NO: 2944962 - RNA, 19 nt, Artificial Sequence
  Description of Artificial Sequence: Synthetic oligonucleotide
gcaauugguccagggcuug

SEQ ID NO: 2944963 - RNA, 19 nt, Artificial Sequence
  Description of Artificial Sequence: Synthetic oligonucleotide
ggguggcauacaguguccc

SEQ ID NO: 2944964 - RNA, 19 nt, Artificial Sequence
  Description of Artificial Sequence: Synthetic oligonucleotide
ccugguuguugccuggaga

SEQ ID NO: 2944965 - RNA, 19 nt, Artificial Sequence
  Description of Artificial Sequence: Synthetic oligonucleotide
caggagggcagggaacaca

SEQ ID NO: 2944966 - RNA, 19 nt, Artificial Sequence
  Description of Artificial Sequence: Synthetic oligonucleotide
ccagguucacauggguggc

SEQ ID NO: 2944967 - RNA, 19 nt, Artificial Sequence
  Description of Artificial Sequence: Synthetic oligonucleotide
gaccugguuguugccugga

SEQ ID NO: 2944968 - RNA, 19 nt, Artificial Sequence
  Description of Artificial Sequence: Synthetic oligonucleotide
cacauggguggcauacagu

SEQ ID NO: 2944969 - RNA, 19 nt, Artificial Sequence
  Description of Artificial Sequence: Synthetic oligonucleotide
uggugccaucacagcgccu

SEQ ID NO: 2944970 - RNA, 19 nt, Artificial Sequence
  Description of Artificial Sequence: Synthetic oligonucleotide
accauaccauugccugguu

SEQ ID NO: 2944971 - RNA, 19 nt, Artificial Sequence
  Description of Artificial Sequence: Synthetic oligonucleotide
ggugugcaauucugcuuca

SEQ ID NO: 2944972 - RNA, 19 nt, Artificial Sequence
  Description of Artificial Sequence: Synthetic oligonucleotide
caccauaccauugccuggu

SEQ ID NO: 2944973 - RNA, 19 nt, Artificial Sequence
  Description of Artificial Sequence: Synthetic oligonucleotide
ccagggcuugcagaccugg

SEQ ID NO: 2944974 - RNA, 19 nt, Artificial Sequence
  Description of Artificial Sequence: Synthetic oligonucleotide
cugcauccaagcugguacu

SEQ ID NO: 2944975 - RNA, 19 nt, Artificial Sequence
  Description of Artificial Sequence: Synthetic oligonucleotide
cgccucaccauaccauugc

SEQ ID NO: 2944976 - RNA, 19 nt, Artificial Sequence
  Description of Artificial Sequence: Synthetic oligonucleotide
acaguuccgccuggcugca

SEQ ID NO: 2944977 - RNA, 19 nt, Artificial Sequence
  Description of Artificial Sequence: Synthetic oligonucleotide
cagucaacuccaagcuugu

SEQ ID NO: 2944978 - RNA, 19 nt, Artificial Sequence
  Description of Artificial Sequence: Synthetic oligonucleotide
cauuggcagacaguauccu

SEQ ID NO: 2944979 - RNA, 19 nt, Artificial Sequence
  Description of Artificial Sequence: Synthetic oligonucleotide
cauaauugacugccucauu

SEQ ID NO: 2944980 - RNA, 19 nt, Artificial Sequence
  Description of Artificial Sequence: Synthetic oligonucleotide
cccacuucguugguugcac

SEQ ID NO: 2944981 - RNA, 19 nt, Artificial Sequence
  Description of Artificial Sequence: Synthetic oligonucleotide
gcuucccagauaaggugca

SEQ ID NO: 2944982 - RNA, 19 nt, Artificial Sequence
  Description of Artificial Sequence: Synthetic oligonucleotide
gugccaucacagcgccuca

SEQ ID NO: 2944983 - RNA, 19 nt, Artificial Sequence
  Description of Artificial Sequence: Synthetic oligonucleotide
guggccaggagggcaggga

SEQ ID NO: 2944984 - RNA, 19 nt, Artificial Sequence
  Description of Artificial Sequence: Synthetic oligonucleotide
caacuccaagcuuguggcu

SEQ ID NO: 2944985 - RNA, 19 nt, Artificial Sequence
  Description of Artificial Sequence: Synthetic oligonucleotide
gguccagggcuugcagacc

SEQ ID NO: 2944986 - RNA, 19 nt, Artificial Sequence
  Description of Artificial Sequence: Synthetic oligonucleotide
ggggcugggugccuggucu

SEQ ID NO: 2944987 - RNA, 19 nt, Artificial Sequence
  Description of Artificial Sequence: Synthetic oligonucleotide
cugcuucagcucacuccca

SEQ ID NO: 2944988 - RNA, 19 nt, Artificial Sequence
  Description of Artificial Sequence: Synthetic oligonucleotide
uuccgccuggcugcagcuc

SEQ ID NO: 2944989 - RNA, 19 nt, Artificial Sequence
  Description of Artificial Sequence: Synthetic oligonucleotide
ggcuugcagaccugguugu

SEQ ID NO: 2944990 - RNA, 19 nt, Artificial Sequence
  Description of Artificial Sequence: Synthetic oligonucleotide
cagguucacauggguggca

SEQ ID NO: 2944991 - RNA, 19 nt, Artificial Sequence
  Description of Artificial Sequence: Synthetic oligonucleotide
ggugccgggucugcuuccc

SEQ ID NO: 2944992 - RNA, 19 nt, Artificial Sequence
  Description of Artificial Sequence: Synthetic oligonucleotide
gucugcauuggcagacagu

SEQ ID NO: 2944993 - RNA, 19 nt, Artificial Sequence
  Description of Artificial Sequence: Synthetic oligonucleotide
cuucccagauaaggugcaa

SEQ ID NO: 2944994 - RNA, 19 nt, Artificial Sequence
  Description of Artificial Sequence: Synthetic oligonucleotide
ccuggucugcauuggcaga

SEQ ID NO: 2944995 - RNA, 19 nt, Artificial Sequence
  Description of Artificial Sequence: Synthetic oligonucleotide
gggcugggugccuggucug

SEQ ID NO: 2944996 - RNA, 19 nt, Artificial Sequence
  Description of Artificial Sequence: Synthetic oligonucleotide
gcgccucaccauaccauug

SEQ ID NO: 2944997 - RNA, 19 nt, Artificial Sequence
  Description of Artificial Sequence: Synthetic oligonucleotide
cagugucccuggugccauc

SEQ ID NO: 2944998 - RNA, 19 nt, Artificial Sequence
  Description of Artificial Sequence: Synthetic oligonucleotide
ggucugcuucccagauaag

SEQ ID NO: 2944999 - RNA, 19 nt, Artificial Sequence
  Description of Artificial Sequence: Synthetic oligonucleotide
cuggcugggugccgggucu

SEQ ID NO: 2945000 - RNA, 19 nt, Artificial Sequence
  Description of Artificial Sequence: Synthetic oligonucleotide
ccaagcuuguggcugcugu

SEQ ID NO: 2945001 - RNA, 19 nt, Artificial Sequence
  Description of Artificial Sequence: Synthetic oligonucleotide
ggaacacagucaacuccaa

SEQ ID NO: 2945002 - RNA, 19 nt, Artificial Sequence
  Description of Artificial Sequence: Synthetic oligonucleotide
gcuccaaaugugaguccca

SEQ ID NO: 2945003 - RNA, 19 nt, Artificial Sequence
  Description of Artificial Sequence: Synthetic oligonucleotide
gggugccgggucugcuucc

SEQ ID NO: 2945004 - RNA, 19 nt, Artificial Sequence
  Description of Artificial Sequence: Synthetic oligonucleotide
ggcagggaacacagucaac

SEQ ID NO: 2945005 - RNA, 19 nt, Artificial Sequence
  Description of Artificial Sequence: Synthetic oligonucleotide
ggccaggagggcagggaac

SEQ ID NO: 2945006 - RNA, 19 nt, Artificial Sequence
  Description of Artificial Sequence: Synthetic oligonucleotide
cagcgccucaccauaccau

SEQ ID NO: 2945007 - RNA, 19 nt, Artificial Sequence
  Description of Artificial Sequence: Synthetic oligonucleotide
ggcugggugccuggucugc

SEQ ID NO: 2945008 - RNA, 19 nt, Artificial Sequence
  Description of Artificial Sequence: Synthetic oligonucleotide
cugcauuggcagacaguau

SEQ ID NO: 2945009 - RNA, 19 nt, Artificial Sequence
  Description of Artificial Sequence: Synthetic oligonucleotide
ccuggcugcagcuccaaau

SEQ ID NO: 2945010 - RNA, 19 nt, Artificial Sequence
  Description of Artificial Sequence: Synthetic oligonucleotide
gccgggucugcuucccaga

SEQ ID NO: 2945011 - RNA, 19 nt, Artificial Sequence
  Description of Artificial Sequence: Synthetic oligonucleotide
gguucacauggguggcaua

SEQ ID NO: 2945012 - RNA, 19 nt, Artificial Sequence
  Description of Artificial Sequence: Synthetic oligonucleotide
ccucaccauaccauugccu

SEQ ID NO: 2945013 - RNA, 19 nt, Artificial Sequence
  Description of Artificial Sequence: Synthetic oligonucleotide
gcagaccugguuguugccu

SEQ ID NO: 2945014 - RNA, 19 nt, Artificial Sequence
  Description of Artificial Sequence: Synthetic oligonucleotide
agacugcauccaagcuggu

SEQ ID NO: 2945015 - RNA, 19 nt, Artificial Sequence
  Description of Artificial Sequence: Synthetic oligonucleotide
gugccgggucugcuuccca

SEQ ID NO: 2945016 - RNA, 19 nt, Artificial Sequence
  Description of Artificial Sequence: Synthetic oligonucleotide
cagcucacucccacuucgu

SEQ ID NO: 2945017 - RNA, 19 nt, Artificial Sequence
  Description of Artificial Sequence: Synthetic oligonucleotide
cugcugucuucccggggcu

SEQ ID NO: 2945018 - RNA, 19 nt, Artificial Sequence
  Description of Artificial Sequence: Synthetic oligonucleotide
ggcagacaguauccugagu

SEQ ID NO: 2945019 - RNA, 19 nt, Artificial Sequence
  Description of Artificial Sequence: Synthetic oligonucleotide
uucccggggcugggugccu

SEQ ID NO: 2945020 - RNA, 19 nt, Artificial Sequence
  Description of Artificial Sequence: Synthetic oligonucleotide
caguuccgccuggcugcag

SEQ ID NO: 2945021 - RNA, 19 nt, Artificial Sequence
  Description of Artificial Sequence: Synthetic oligonucleotide
ccugaguaggugugcaauu

SEQ ID NO: 2945022 - RNA, 19 nt, Artificial Sequence
  Description of Artificial Sequence: Synthetic oligonucleotide
ggcauacagugucccuggu

SEQ ID NO: 2945023 - RNA, 19 nt, Artificial Sequence
  Description of Artificial Sequence: Synthetic oligonucleotide
cugggugccuggucugcau

SEQ ID NO: 2945024 - RNA, 19 nt, Artificial Sequence
  Description of Artificial Sequence: Synthetic oligonucleotide
gcugggugccuggucugca

SEQ ID NO: 2945025 - RNA, 19 nt, Artificial Sequence
  Description of Artificial Sequence: Synthetic oligonucleotide
cugggugccgggucugcuu

SEQ ID NO: 2945026 - RNA, 19 nt, Artificial Sequence
  Description of Artificial Sequence: Synthetic oligonucleotide
ggcugggugccgggucugc

SEQ ID NO: 2945027 - RNA, 19 nt, Artificial Sequence
  Description of Artificial Sequence: Synthetic oligonucleotide
ggcacucauuacagcacuu

SEQ ID NO: 2945028 - RNA, 19 nt, Artificial Sequence
  Description of Artificial Sequence: Synthetic oligonucleotide
cuccaagcuuguggcugcu

SEQ ID NO: 2945029 - RNA, 19 nt, Artificial Sequence
  Description of Artificial Sequence: Synthetic oligonucleotide
gccuggcugcagcuccaaa

SEQ ID NO: 2945030 - RNA, 19 nt, Artificial Sequence
  Description of Artificial Sequence: Synthetic oligonucleotide
ccacuucguugguugcacu

SEQ ID NO: 2945031 - RNA, 19 nt, Artificial Sequence
  Description of Artificial Sequence: Synthetic oligonucleotide
cacucccacuucguugguu

SEQ ID NO: 2945032 - RNA, 19 nt, Artificial Sequence
  Description of Artificial Sequence: Synthetic oligonucleotide
ccgccuggcugcagcucca

SEQ ID NO: 2945033 - RNA, 19 nt, Artificial Sequence
  Description of Artificial Sequence: Synthetic oligonucleotide
gcugggugccgggucugcu

SEQ ID NO: 2945034 - RNA, 19 nt, Artificial Sequence
  Description of Artificial Sequence: Synthetic oligonucleotide
gcuugcagaccugguuguu

SEQ ID NO: 2945035 - RNA, 19 nt, Artificial Sequence
  Description of Artificial Sequence: Synthetic oligonucleotide
cgccuggcugcagcuccaa

SEQ ID NO: 2945036 - RNA, 19 nt, Artificial Sequence
  Description of Artificial Sequence: Synthetic oligonucleotide
ccggggcugggugccuggu

SEQ ID NO: 2945037 - RNA, 19 nt, Artificial Sequence
  Description of Artificial Sequence: Synthetic oligonucleotide
aacacauacccacauaagg

SEQ ID NO: 2945038 - RNA, 19 nt, Artificial Sequence
  Description of Artificial Sequence: Synthetic oligonucleotide
aaguccaauguccaaauuc

SEQ ID NO: 2945039 - RNA, 19 nt, Artificial Sequence
  Description of Artificial Sequence: Synthetic oligonucleotide
uuuucuuuucuuuuaaagc

SEQ ID NO: 2945040 - RNA, 19 nt, Artificial Sequence
  Description of Artificial Sequence: Synthetic oligonucleotide
auauuagucucucccaugc

SEQ ID NO: 2945041 - RNA, 19 nt, Artificial Sequence
  Description of Artificial Sequence: Synthetic oligonucleotide
uuucuuuucuuuuaaagcu

SEQ ID NO: 2945042 - RNA, 19 nt, Artificial Sequence
  Description of Artificial Sequence: Synthetic oligonucleotide
acucgugacacuuuuagac

SEQ ID NO: 2945043 - RNA, 19 nt, Artificial Sequence
  Description of Artificial Sequence: Synthetic oligonucleotide
aaggcauucauuucauagg

SEQ ID NO: 2945044 - RNA, 19 nt, Artificial Sequence
  Description of Artificial Sequence: Synthetic oligonucleotide
uaaggcauucauuucauag

SEQ ID NO: 2945045 - RNA, 19 nt, Artificial Sequence
  Description of Artificial Sequence: Synthetic oligonucleotide
auuggcuucagcuugucuc

SEQ ID NO: 2945046 - RNA, 19 nt, Artificial Sequence
  Description of Artificial Sequence: Synthetic oligonucleotide
ucugacaucuuacauguug

SEQ ID NO: 2945047 - RNA, 19 nt, Artificial Sequence
  Description of Artificial Sequence: Synthetic oligonucleotide
ucuuacauguugcuuauug

SEQ ID NO: 2945048 - RNA, 19 nt, Artificial Sequence
  Description of Artificial Sequence: Synthetic oligonucleotide
aggcauucauuucauaggc

SEQ ID NO: 2945049 - RNA, 19 nt, Artificial Sequence
  Description of Artificial Sequence: Synthetic oligonucleotide
uuuaaagcuuucuucagcu

SEQ ID NO: 2945050 - RNA, 19 nt, Artificial Sequence
  Description of Artificial Sequence: Synthetic oligonucleotide
uuucugacaucuuacaugu

SEQ ID NO: 2945051 - RNA, 19 nt, Artificial Sequence
  Description of Artificial Sequence: Synthetic oligonucleotide
uuacauguugcuuauuggc

SEQ ID NO: 2945052 - RNA, 19 nt, Artificial Sequence
  Description of Artificial Sequence: Synthetic oligonucleotide
acucauaaguccaaugucc

SEQ ID NO: 2945053 - RNA, 19 nt, Artificial Sequence
  Description of Artificial Sequence: Synthetic oligonucleotide
auuucugacaucuuacaug

SEQ ID NO: 2945054 - RNA, 19 nt, Artificial Sequence
  Description of Artificial Sequence: Synthetic oligonucleotide
uuccuuugcacucauaagu

SEQ ID NO: 2945055 - RNA, 19 nt, Artificial Sequence
  Description of Artificial Sequence: Synthetic oligonucleotide
uuuuccuuugcacucauaa

SEQ ID NO: 2945056 - RNA, 19 nt, Artificial Sequence
  Description of Artificial Sequence: Synthetic oligonucleotide
aggaggaugaggcagaugu

SEQ ID NO: 2945057 - RNA, 19 nt, Artificial Sequence
  Description of Artificial Sequence: Synthetic oligonucleotide
aaaguuaagaggaggagcu

SEQ ID NO: 2945058 - RNA, 19 nt, Artificial Sequence
  Description of Artificial Sequence: Synthetic oligonucleotide
cucuauauuagucucuccc

SEQ ID NO: 2945059 - RNA, 19 nt, Artificial Sequence
  Description of Artificial Sequence: Synthetic oligonucleotide
ucugaugaagacucacugg

SEQ ID NO: 2945060 - RNA, 19 nt, Artificial Sequence
  Description of Artificial Sequence: Synthetic oligonucleotide
aguccaauguccaaauucc

SEQ ID NO: 2945061 - RNA, 19 nt, Artificial Sequence
  Description of Artificial Sequence: Synthetic oligonucleotide
acuuuuagaccucuucuuc

SEQ ID NO: 2945062 - RNA, 19 nt, Artificial Sequence
  Description of Artificial Sequence: Synthetic oligonucleotide
acuuucuuuuccuuugcac

SEQ ID NO: 2945063 - RNA, 19 nt, Artificial Sequence
  Description of Artificial Sequence: Synthetic oligonucleotide
acacauacccacauaaggc

SEQ ID NO: 2945064 - RNA, 19 nt, Artificial Sequence
  Description of Artificial Sequence: Synthetic oligonucleotide
cugaugaagacucacuggc

SEQ ID NO: 2945065 - RNA, 19 nt, Artificial Sequence
  Description of Artificial Sequence: Synthetic oligonucleotide
uguucuugaaggccugugg

SEQ ID NO: 2945066 - RNA, 19 nt, Artificial Sequence
  Description of Artificial Sequence: Synthetic oligonucleotide
uuuucucucuauauuaguc

SEQ ID NO: 2945067 - RNA, 19 nt, Artificial Sequence
  Description of Artificial Sequence: Synthetic oligonucleotide
ucuauauuagucucuccca

SEQ ID NO: 2945068 - RNA, 19 nt, Artificial Sequence
  Description of Artificial Sequence: Synthetic oligonucleotide
uugcuuauuggcuucagcu

SEQ ID NO: 2945069 - RNA, 19 nt, Artificial Sequence
  Description of Artificial Sequence: Synthetic oligonucleotide
acauaaggcauucauuuca

SEQ ID NO: 2945070 - RNA, 19 nt, Artificial Sequence
  Description of Artificial Sequence: Synthetic oligonucleotide
cuuacauguugcuuauugg

SEQ ID NO: 2945071 - RNA, 19 nt, Artificial Sequence
  Description of Artificial Sequence: Synthetic oligonucleotide
gaacucgugacacuuuuag

SEQ ID NO: 2945072 - RNA, 19 nt, Artificial Sequence
  Description of Artificial Sequence: Synthetic oligonucleotide
uaggcaguagacuuaaaac

SEQ ID NO: 2945073 - RNA, 19 nt, Artificial Sequence
  Description of Artificial Sequence: Synthetic oligonucleotide
uuucucucuauauuagucu

SEQ ID NO: 2945074 - RNA, 19 nt, Artificial Sequence
  Description of Artificial Sequence: Synthetic oligonucleotide
aggcaguagacuuaaaacu

SEQ ID NO: 2945075 - RNA, 19 nt, Artificial Sequence
  Description of Artificial Sequence: Synthetic oligonucleotide
uuagaccucuucuucuugg

SEQ ID NO: 2945076 - RNA, 19 nt, Artificial Sequence
  Description of Artificial Sequence: Synthetic oligonucleotide
guagacuuaaaacuuaaaa

SEQ ID NO: 2945077 - RNA, 19 nt, Artificial Sequence
  Description of Artificial Sequence: Synthetic oligonucleotide
cuucggaggaggaugaggc

SEQ ID NO: 2945078 - RNA, 19 nt, Artificial Sequence
  Description of Artificial Sequence: Synthetic oligonucleotide
uuucauaggcaguagacuu

SEQ ID NO: 2945079 - RNA, 19 nt, Artificial Sequence
  Description of Artificial Sequence: Synthetic oligonucleotide
cauuucauaggcaguagac

SEQ ID NO: 2945080 - RNA, 19 nt, Artificial Sequence
  Description of Artificial Sequence: Synthetic oligonucleotide
aaauuccaagcauuucuga

SEQ ID NO: 2945081 - RNA, 19 nt, Artificial Sequence
  Description of Artificial Sequence: Synthetic oligonucleotide
uacauguugcuuauuggcu

SEQ ID NO: 2945082 - RNA, 19 nt, Artificial Sequence
  Description of Artificial Sequence: Synthetic oligonucleotide
uuugcugcaacaaucuauu

SEQ ID NO: 2945083 - RNA, 19 nt, Artificial Sequence
  Description of Artificial Sequence: Synthetic oligonucleotide
cugacaucuuacauguugc

SEQ ID NO: 2945084 - RNA, 19 nt, Artificial Sequence
  Description of Artificial Sequence: Synthetic oligonucleotide
uaacacauacccacauaag

SEQ ID NO: 2945085 - RNA, 19 nt, Artificial Sequence
  Description of Artificial Sequence: Synthetic oligonucleotide
uauauuagucucucccaug

SEQ ID NO: 2945086 - RNA, 19 nt, Artificial Sequence
  Description of Artificial Sequence: Synthetic oligonucleotide
auuccaagcauuucugaca

SEQ ID NO: 2945087 - RNA, 19 nt, Artificial Sequence
  Description of Artificial Sequence: Synthetic oligonucleotide
uuuucuuuuaaagcuuucu

SEQ ID NO: 2945088 - RNA, 19 nt, Artificial Sequence
  Description of Artificial Sequence: Synthetic oligonucleotide
acaucuuacauguugcuua

SEQ ID NO: 2945089 - RNA, 19 nt, Artificial Sequence
  Description of Artificial Sequence: Synthetic oligonucleotide
ucauuucauaggcaguaga

SEQ ID NO: 2945090 - RNA, 19 nt, Artificial Sequence
  Description of Artificial Sequence: Synthetic oligonucleotide
uuuccuuugcacucauaag

SEQ ID NO: 2945091 - RNA, 19 nt, Artificial Sequence
  Description of Artificial Sequence: Synthetic oligonucleotide
acacuuuuagaccucuucu

SEQ ID NO: 2945092 - RNA, 19 nt, Artificial Sequence
  Description of Artificial Sequence: Synthetic oligonucleotide
agguacuggaacucgugac

SEQ ID NO: 2945093 - RNA, 19 nt, Artificial Sequence
  Description of Artificial Sequence: Synthetic oligonucleotide
uuucuuuuccuuugcacuc

SEQ ID NO: 2945094 - RNA, 19 nt, Artificial Sequence
  Description of Artificial Sequence: Synthetic oligonucleotide
auaggcaguagacuuaaaa

SEQ ID NO: 2945095 - RNA, 19 nt, Artificial Sequence
  Description of Artificial Sequence: Synthetic oligonucleotide
agcauuucugacaucuuac

SEQ ID NO: 2945096 - RNA, 19 nt, Artificial Sequence
  Description of Artificial Sequence: Synthetic oligonucleotide
uggagguacuuucuuuucc

SEQ ID NO: 2945097 - RNA, 19 nt, Artificial Sequence
  Description of Artificial Sequence: Synthetic oligonucleotide
aguuaagaggaggagcuag

SEQ ID NO: 2945098 - RNA, 19 nt, Artificial Sequence
  Description of Artificial Sequence: Synthetic oligonucleotide
gcauucauuucauaggcag

SEQ ID NO: 2945099 - RNA, 19 nt, Artificial Sequence
  Description of Artificial Sequence: Synthetic oligonucleotide
uucuugaaggccuguggag

SEQ ID NO: 2945100 - RNA, 19 nt, Artificial Sequence
  Description of Artificial Sequence: Synthetic oligonucleotide
cucgugacacuuuuagacc

SEQ ID NO: 2945101 - RNA, 19 nt, Artificial Sequence
  Description of Artificial Sequence: Synthetic oligonucleotide
uugucuccgagcuaucagc

SEQ ID NO: 2945102 - RNA, 19 nt, Artificial Sequence
  Description of Artificial Sequence: Synthetic oligonucleotide
uuccaagcauuucugacau

SEQ ID NO: 2945103 - RNA, 19 nt, Artificial Sequence
  Description of Artificial Sequence: Synthetic oligonucleotide
ugcuuugcugcaacaaucu

SEQ ID NO: 2945104 - RNA, 19 nt, Artificial Sequence
  Description of Artificial Sequence: Synthetic oligonucleotide
ucugcuguucuugaaggcc

SEQ ID NO: 2945105 - RNA, 19 nt, Artificial Sequence
  Description of Artificial Sequence: Synthetic oligonucleotide
uccuuugcacucauaaguc

SEQ ID NO: 2945106 - RNA, 19 nt, Artificial Sequence
  Description of Artificial Sequence: Synthetic oligonucleotide
uccaauguccaaauuccaa

SEQ ID NO: 2945107 - RNA, 19 nt, Artificial Sequence
  Description of Artificial Sequence: Synthetic oligonucleotide
aagcauuucugacaucuua

SEQ ID NO: 2945108 - RNA, 19 nt, Artificial Sequence
  Description of Artificial Sequence: Synthetic oligonucleotide
uucucucuauauuagucuc

SEQ ID NO: 2945109 - RNA, 19 nt, Artificial Sequence
  Description of Artificial Sequence: Synthetic oligonucleotide
uuggcuucagcuugucucc

SEQ ID NO: 2945110 - RNA, 19 nt, Artificial Sequence
  Description of Artificial Sequence: Synthetic oligonucleotide
cucugaugaagacucacug

SEQ ID NO: 2945111 - RNA, 19 nt, Artificial Sequence
  Description of Artificial Sequence: Synthetic oligonucleotide
ucgugacacuuuuagaccu

SEQ ID NO: 2945112 - RNA, 19 nt, Artificial Sequence
  Description of Artificial Sequence: Synthetic oligonucleotide
uuaagaggaggagcuagag

SEQ ID NO: 2945113 - RNA, 19 nt, Artificial Sequence
  Description of Artificial Sequence: Synthetic oligonucleotide
uaagaggaggagcuagaga

SEQ ID NO: 2945114 - RNA, 19 nt, Artificial Sequence
  Description of Artificial Sequence: Synthetic oligonucleotide
uguccaaauuccaagcauu

SEQ ID NO: 2945115 - RNA, 19 nt, Artificial Sequence
  Description of Artificial Sequence: Synthetic oligonucleotide
gcugcaacaaucuauuuuc

SEQ ID NO: 2945116 - RNA, 19 nt, Artificial Sequence
  Description of Artificial Sequence: Synthetic oligonucleotide
ugucuccgagcuaucagcc

SEQ ID NO: 2945117 - RNA, 19 nt, Artificial Sequence
  Description of Artificial Sequence: Synthetic oligonucleotide
ucuccgagcuaucagccga

SEQ ID NO: 2945118 - RNA, 19 nt, Artificial Sequence
  Description of Artificial Sequence: Synthetic oligonucleotide
gagucacugucuucggagg

SEQ ID NO: 2945119 - RNA, 19 nt, Artificial Sequence
  Description of Artificial Sequence: Synthetic oligonucleotide
ucucugaugaagacucacu

SEQ ID NO: 2945120 - RNA, 19 nt, Artificial Sequence
  Description of Artificial Sequence: Synthetic oligonucleotide
auccgagucacugucuucg

SEQ ID NO: 2945121 - RNA, 19 nt, Artificial Sequence
  Description of Artificial Sequence: Synthetic oligonucleotide
ugcugcaacaaucuauuuu

SEQ ID NO: 2945122 - RNA, 19 nt, Artificial Sequence
  Description of Artificial Sequence: Synthetic oligonucleotide
uucuuuucuuuuaaagcuu

SEQ ID NO: 2945123 - RNA, 19 nt, Artificial Sequence
  Description of Artificial Sequence: Synthetic oligonucleotide
gguacuuucuuuuccuuug

SEQ ID NO: 2945124 - RNA, 19 nt, Artificial Sequence
  Description of Artificial Sequence: Synthetic oligonucleotide
aacucgugacacuuuuaga

SEQ ID NO: 2945125 - RNA, 19 nt, Artificial Sequence
  Description of Artificial Sequence: Synthetic oligonucleotide
uuggcuuuucucucuauau

SEQ ID NO: 2945126 - RNA, 19 nt, Artificial Sequence
  Description of Artificial Sequence: Synthetic oligonucleotide
ggagucgccaucuuggagc

SEQ ID NO: 2945127 - RNA, 19 nt, Artificial Sequence
  Description of Artificial Sequence: Synthetic oligonucleotide
auuucauaggcaguagacu

SEQ ID NO: 2945128 - RNA, 19 nt, Artificial Sequence
  Description of Artificial Sequence: Synthetic oligonucleotide
ugcacucauaaguccaaug

SEQ ID NO: 2945129 - RNA, 19 nt, Artificial Sequence
  Description of Artificial Sequence: Synthetic oligonucleotide
ucucucuauauuagucucu

SEQ ID NO: 2945130 - RNA, 19 nt, Artificial Sequence
  Description of Artificial Sequence: Synthetic oligonucleotide
ucuucggaggaggaugagg

SEQ ID NO: 2945131 - RNA, 19 nt, Artificial Sequence
  Description of Artificial Sequence: Synthetic oligonucleotide
auaaguccaauguccaaau

SEQ ID NO: 2945132 - RNA, 19 nt, Artificial Sequence
  Description of Artificial Sequence: Synthetic oligonucleotide
ugcuagagguacuggaacu

SEQ ID NO: 2945133 - RNA, 19 nt, Artificial Sequence
  Description of Artificial Sequence: Synthetic oligonucleotide
aagacucacuggccgaacu

SEQ ID NO: 2945134 - RNA, 19 nt, Artificial Sequence
  Description of Artificial Sequence: Synthetic oligonucleotide
augucucgcucucugauga

SEQ ID NO: 2945135 - RNA, 19 nt, Artificial Sequence
  Description of Artificial Sequence: Synthetic oligonucleotide
uguggagguacuuucuuuu

SEQ ID NO: 2945136 - RNA, 19 nt, Artificial Sequence
  Description of Artificial Sequence: Synthetic oligonucleotide
agaggcugucauccgaguc

SEQ ID NO: 2945137 - RNA, 19 nt, Artificial Sequence
  Description of Artificial Sequence: Synthetic oligonucleotide
uuagucucucccaugcuuu

SEQ ID NO: 2945138 - RNA, 19 nt, Artificial Sequence
  Description of Artificial Sequence: Synthetic oligonucleotide
cuuugcacucauaagucca

SEQ ID NO: 2945139 - RNA, 19 nt, Artificial Sequence
  Description of Artificial Sequence: Synthetic oligonucleotide
ucucgcucucugaugaaga

SEQ ID NO: 2945140 - RNA, 19 nt, Artificial Sequence
  Description of Artificial Sequence: Synthetic oligonucleotide
gaggaggagcuagagaggc

SEQ ID NO: 2945141 - RNA, 19 nt, Artificial Sequence
  Description of Artificial Sequence: Synthetic oligonucleotide
uaucagccgaugcauggga

SEQ ID NO: 2945142 - RNA, 19 nt, Artificial Sequence
  Description of Artificial Sequence: Synthetic oligonucleotide
auuagucucucccaugcuu

SEQ ID NO: 2945143 - RNA, 19 nt, Artificial Sequence
  Description of Artificial Sequence: Synthetic oligonucleotide
ugucuucggaggaggauga

SEQ ID NO: 2945144 - RNA, 19 nt, Artificial Sequence
  Description of Artificial Sequence: Synthetic oligonucleotide
uuugcacucauaaguccaa

SEQ ID NO: 2945145 - RNA, 19 nt, Artificial Sequence
  Description of Artificial Sequence: Synthetic oligonucleotide
gaugucucgcucucugaug

SEQ ID NO: 2945146 - RNA, 19 nt, Artificial Sequence
  Description of Artificial Sequence: Synthetic oligonucleotide
augggagucgccaucuugg

SEQ ID NO: 2945147 - RNA, 19 nt, Artificial Sequence
  Description of Artificial Sequence: Synthetic oligonucleotide
cacauacccacauaaggca

SEQ ID NO: 2945148 - RNA, 19 nt, Artificial Sequence
  Description of Artificial Sequence: Synthetic oligonucleotide
cuagagguacuggaacucg

SEQ ID NO: 2945149 - RNA, 19 nt, Artificial Sequence
  Description of Artificial Sequence: Synthetic oligonucleotide
uucauuucauaggcaguag

SEQ ID NO: 2945150 - RNA, 19 nt, Artificial Sequence
  Description of Artificial Sequence: Synthetic oligonucleotide
augcuuugcugcaacaauc

SEQ ID NO: 2945151 - RNA, 19 nt, Artificial Sequence
  Description of Artificial Sequence: Synthetic oligonucleotide
uuuuagaccucuucuucuu

SEQ ID NO: 2945152 - RNA, 19 nt, Artificial Sequence
  Description of Artificial Sequence: Synthetic oligonucleotide
uagagaggcugucauccga

SEQ ID NO: 2945153 - RNA, 19 nt, Artificial Sequence
  Description of Artificial Sequence: Synthetic oligonucleotide
gaugaggcagaugucucgc

SEQ ID NO: 2945154 - RNA, 19 nt, Artificial Sequence
  Description of Artificial Sequence: Synthetic oligonucleotide
ccaauguccaaauuccaag

SEQ ID NO: 2945155 - RNA, 19 nt, Artificial Sequence
  Description of Artificial Sequence: Synthetic oligonucleotide
uucauaggcaguagacuua

SEQ ID NO: 2945156 - RNA, 19 nt, Artificial Sequence
  Description of Artificial Sequence: Synthetic oligonucleotide
cacucauaaguccaauguc

SEQ ID NO: 2945157 - RNA, 19 nt, Artificial Sequence
  Description of Artificial Sequence: Synthetic oligonucleotide
cuugucuccgagcuaucag

SEQ ID NO: 2945158 - RNA, 19 nt, Artificial Sequence
  Description of Artificial Sequence: Synthetic oligonucleotide
auucauuucauaggcagua

SEQ ID NO: 2945159 - RNA, 19 nt, Artificial Sequence
  Description of Artificial Sequence: Synthetic oligonucleotide
gcuaucagccgaugcaugg

SEQ ID NO: 2945160 - RNA, 19 nt, Artificial Sequence
  Description of Artificial Sequence: Synthetic oligonucleotide
acauguugcuuauuggcuu

SEQ ID NO: 2945161 - RNA, 19 nt, Artificial Sequence
  Description of Artificial Sequence: Synthetic oligonucleotide
ucacuggccgaacugucac

SEQ ID NO: 2945162 - RNA, 19 nt, Artificial Sequence
  Description of Artificial Sequence: Synthetic oligonucleotide
ucucuauauuagucucucc

SEQ ID NO: 2945163 - RNA, 19 nt, Artificial Sequence
  Description of Artificial Sequence: Synthetic oligonucleotide
cucauaaguccaaugucca

SEQ ID NO: 2945164 - RNA, 19 nt, Artificial Sequence
  Description of Artificial Sequence: Synthetic oligonucleotide
ugacaucuuacauguugcu

SEQ ID NO: 2945165 - RNA, 19 nt, Artificial Sequence
  Description of Artificial Sequence: Synthetic oligonucleotide
ucacugucuucggaggagg

SEQ ID NO: 2945166 - RNA, 19 nt, Artificial Sequence
  Description of Artificial Sequence: Synthetic oligonucleotide
uauuagucucucccaugcu

SEQ ID NO: 2945167 - RNA, 19 nt, Artificial Sequence
  Description of Artificial Sequence: Synthetic oligonucleotide
guucuugaaggccugugga

SEQ ID NO: 2945168 - RNA, 19 nt, Artificial Sequence
  Description of Artificial Sequence: Synthetic oligonucleotide
guugcuuauuggcuucagc

SEQ ID NO: 2945169 - RNA, 19 nt, Artificial Sequence
  Description of Artificial Sequence: Synthetic oligonucleotide
uuaaagcuuucuucagcuc

SEQ ID NO: 2945170 - RNA, 19 nt, Artificial Sequence
  Description of Artificial Sequence: Synthetic oligonucleotide
gcuagagaggcugucaucc

SEQ ID NO: 2945171 - RNA, 19 nt, Artificial Sequence
  Description of Artificial Sequence: Synthetic oligonucleotide
cucucccaugcuuugcugc

SEQ ID NO: 2945172 - RNA, 19 nt, Artificial Sequence
  Description of Artificial Sequence: Synthetic oligonucleotide
uagaccucuucuucuuggc

SEQ ID NO: 2945173 - RNA, 19 nt, Artificial Sequence
  Description of Artificial Sequence: Synthetic oligonucleotide
cuagagaggcugucauccg

SEQ ID NO: 2945174 - RNA, 19 nt, Artificial Sequence
  Description of Artificial Sequence: Synthetic oligonucleotide
cuuucuucagcucugcugu

SEQ ID NO: 2945175 - RNA, 19 nt, Artificial Sequence
  Description of Artificial Sequence: Synthetic oligonucleotide
cauguugcuuauuggcuuc

SEQ ID NO: 2945176 - RNA, 19 nt, Artificial Sequence
  Description of Artificial Sequence: Synthetic oligonucleotide
ugcuuauuggcuucagcuu

SEQ ID NO: 2945177 - RNA, 19 nt, Artificial Sequence
  Description of Artificial Sequence: Synthetic oligonucleotide
ucauaaguccaauguccaa

SEQ ID NO: 2945178 - RNA, 19 nt, Artificial Sequence
  Description of Artificial Sequence: Synthetic oligonucleotide
agcuagagaggcugucauc

SEQ ID NO: 2945179 - RNA, 19 nt, Artificial Sequence
  Description of Artificial Sequence: Synthetic oligonucleotide
auacccacauaaggcauuc

SEQ ID NO: 2945180 - RNA, 19 nt, Artificial Sequence
  Description of Artificial Sequence: Synthetic oligonucleotide
ugaggcagaugucucgcuc

SEQ ID NO: 2945181 - RNA, 19 nt, Artificial Sequence
  Description of Artificial Sequence: Synthetic oligonucleotide
ucauaggcaguagacuuaa

SEQ ID NO: 2945182 - RNA, 19 nt, Artificial Sequence
  Description of Artificial Sequence: Synthetic oligonucleotide
uagagguacuggaacucgu

SEQ ID NO: 2945183 - RNA, 19 nt, Artificial Sequence
  Description of Artificial Sequence: Synthetic oligonucleotide
guacuuucuuuuccuuugc

SEQ ID NO: 2945184 - RNA, 19 nt, Artificial Sequence
  Description of Artificial Sequence: Synthetic oligonucleotide
ugcaacaaucuauuuucuu

SEQ ID NO: 2945185 - RNA, 19 nt, Artificial Sequence
  Description of Artificial Sequence: Synthetic oligonucleotide
ucucccaugcuuugcugca

SEQ ID NO: 2945186 - RNA, 19 nt, Artificial Sequence
  Description of Artificial Sequence: Synthetic oligonucleotide
agaugucucgcucucugau

SEQ ID NO: 2945187 - RNA, 19 nt, Artificial Sequence
  Description of Artificial Sequence: Synthetic oligonucleotide
acccacauaaggcauucau

SEQ ID NO: 2945188 - RNA, 19 nt, Artificial Sequence
  Description of Artificial Sequence: Synthetic oligonucleotide
cugcuagagguacuggaac

SEQ ID NO: 2945189 - RNA, 19 nt, Artificial Sequence
  Description of Artificial Sequence: Synthetic oligonucleotide
ggaugaggcagaugucucg

SEQ ID NO: 2945190 - RNA, 19 nt, Artificial Sequence
  Description of Artificial Sequence: Synthetic oligonucleotide
uggaacucgugacacuuuu

SEQ ID NO: 2945191 - RNA, 19 nt, Artificial Sequence
  Description of Artificial Sequence: Synthetic oligonucleotide
uggcuuuucucucuauauu

SEQ ID NO: 2945192 - RNA, 19 nt, Artificial Sequence
  Description of Artificial Sequence: Synthetic oligonucleotide
gagguacuggaacucguga

SEQ ID NO: 2945193 - RNA, 19 nt, Artificial Sequence
  Description of Artificial Sequence: Synthetic oligonucleotide
cuaucagccgaugcauggg

SEQ ID NO: 2945194 - RNA, 19 nt, Artificial Sequence
  Description of Artificial Sequence: Synthetic oligonucleotide
uggccgaacugucacugcu

SEQ ID NO: 2945195 - RNA, 19 nt, Artificial Sequence
  Description of Artificial Sequence: Synthetic oligonucleotide
ucagccgaugcaugggagu

SEQ ID NO: 2945196 - RNA, 19 nt, Artificial Sequence
  Description of Artificial Sequence: Synthetic oligonucleotide
uucuuuuccuuugcacuca

SEQ ID NO: 2945197 - RNA, 19 nt, Artificial Sequence
  Description of Artificial Sequence: Synthetic oligonucleotide
cugucuucggaggaggaug

SEQ ID NO: 2945198 - RNA, 19 nt, Artificial Sequence
  Description of Artificial Sequence: Synthetic oligonucleotide
cucucuauauuagucucuc

SEQ ID NO: 2945199 - RNA, 19 nt, Artificial Sequence
  Description of Artificial Sequence: Synthetic oligonucleotide
agucucucccaugcuuugc

SEQ ID NO: 2945200 - RNA, 19 nt, Artificial Sequence
  Description of Artificial Sequence: Synthetic oligonucleotide
augcaugggagucgccauc

SEQ ID NO: 2945201 - RNA, 19 nt, Artificial Sequence
  Description of Artificial Sequence: Synthetic oligonucleotide
agucacugucuucggagga

SEQ ID NO: 2945202 - RNA, 19 nt, Artificial Sequence
  Description of Artificial Sequence: Synthetic oligonucleotide
caugggagucgccaucuug

SEQ ID NO: 2945203 - RNA, 19 nt, Artificial Sequence
  Description of Artificial Sequence: Synthetic oligonucleotide
ugcuguucuugaaggccug

SEQ ID NO: 2945204 - RNA, 19 nt, Artificial Sequence
  Description of Artificial Sequence: Synthetic oligonucleotide
agguacuuucuuuuccuuu

SEQ ID NO: 2945205 - RNA, 19 nt, Artificial Sequence
  Description of Artificial Sequence: Synthetic oligonucleotide
agaccucuucuucuuggcu

SEQ ID NO: 2945206 - RNA, 19 nt, Artificial Sequence
  Description of Artificial Sequence: Synthetic oligonucleotide
ucacugcuagagguacugg

SEQ ID NO: 2945207 - RNA, 19 nt, Artificial Sequence
  Description of Artificial Sequence: Synthetic oligonucleotide
gguacuggaacucgugaca

SEQ ID NO: 2945208 - RNA, 19 nt, Artificial Sequence
  Description of Artificial Sequence: Synthetic oligonucleotide
uagucucucccaugcuuug

SEQ ID NO: 2945209 - RNA, 19 nt, Artificial Sequence
  Description of Artificial Sequence: Synthetic oligonucleotide
cuuuuagaccucuucuucu

SEQ ID NO: 2945210 - RNA, 19 nt, Artificial Sequence
  Description of Artificial Sequence: Synthetic oligonucleotide
acuggccgaacugucacug

SEQ ID NO: 2945211 - RNA, 19 nt, Artificial Sequence
  Description of Artificial Sequence: Synthetic oligonucleotide
guacuggaacucgugacac

SEQ ID NO: 2945212 - RNA, 19 nt, Artificial Sequence
  Description of Artificial Sequence: Synthetic oligonucleotide
gucuccgagcuaucagccg

SEQ ID NO: 2945213 - RNA, 19 nt, Artificial Sequence
  Description of Artificial Sequence: Synthetic oligonucleotide
agagaggcugucauccgag

SEQ ID NO: 2945214 - RNA, 19 nt, Artificial Sequence
  Description of Artificial Sequence: Synthetic oligonucleotide
cucgcucucugaugaagac

SEQ ID NO: 2945215 - RNA, 19 nt, Artificial Sequence
  Description of Artificial Sequence: Synthetic oligonucleotide
gcuuuucucucuauauuag

SEQ ID NO: 2945216 - RNA, 19 nt, Artificial Sequence
  Description of Artificial Sequence: Synthetic oligonucleotide
ucucucccaugcuuugcug

SEQ ID NO: 2945217 - RNA, 19 nt, Artificial Sequence
  Description of Artificial Sequence: Synthetic oligonucleotide
cuuugcugcaacaaucuau

SEQ ID NO: 2945218 - RNA, 19 nt, Artificial Sequence
  Description of Artificial Sequence: Synthetic oligonucleotide
ucccaugcuuugcugcaac

SEQ ID NO: 2945219 - RNA, 19 nt, Artificial Sequence
  Description of Artificial Sequence: Synthetic oligonucleotide
acuggaacucgugacacuu

SEQ ID NO: 2945220 - RNA, 19 nt, Artificial Sequence
  Description of Artificial Sequence: Synthetic oligonucleotide
uucggaggaggaugaggca

SEQ ID NO: 2945221 - RNA, 19 nt, Artificial Sequence
  Description of Artificial Sequence: Synthetic oligonucleotide
uguugcuuauuggcuucag

SEQ ID NO: 2945222 - RNA, 19 nt, Artificial Sequence
  Description of Artificial Sequence: Synthetic oligonucleotide
ggcuuuucucucuauauua

SEQ ID NO: 2945223 - RNA, 19 nt, Artificial Sequence
  Description of Artificial Sequence: Synthetic oligonucleotide
uaaguccaauguccaaauu

SEQ ID NO: 2945224 - RNA, 19 nt, Artificial Sequence
  Description of Artificial Sequence: Synthetic oligonucleotide
ugcaugggagucgccaucu

SEQ ID NO: 2945225 - RNA, 19 nt, Artificial Sequence
  Description of Artificial Sequence: Synthetic oligonucleotide
ccuuugcacucauaagucc

SEQ ID NO: 2945226 - RNA, 19 nt, Artificial Sequence
  Description of Artificial Sequence: Synthetic oligonucleotide
ugaaggccuguggagguac

SEQ ID NO: 2945227 - RNA, 19 nt, Artificial Sequence
  Description of Artificial Sequence: Synthetic oligonucleotide
cugucacugcuagagguac

SEQ ID NO: 2945228 - RNA, 19 nt, Artificial Sequence
  Description of Artificial Sequence: Synthetic oligonucleotide
caguagacuuaaaacuuaa

SEQ ID NO: 2945229 - RNA, 19 nt, Artificial Sequence
  Description of Artificial Sequence: Synthetic oligonucleotide
gaggaugaggcagaugucu

SEQ ID NO: 2945230 - RNA, 19 nt, Artificial Sequence
  Description of Artificial Sequence: Synthetic oligonucleotide
cacugcuagagguacugga

SEQ ID NO: 2945231 - RNA, 19 nt, Artificial Sequence
  Description of Artificial Sequence: Synthetic oligonucleotide
ggaggagcuagagaggcug

SEQ ID NO: 2945232 - RNA, 19 nt, Artificial Sequence
  Description of Artificial Sequence: Synthetic oligonucleotide
gucacugucuucggaggag

SEQ ID NO: 2945233 - RNA, 19 nt, Artificial Sequence
  Description of Artificial Sequence: Synthetic oligonucleotide
agagguacuggaacucgug

SEQ ID NO: 2945234 - RNA, 19 nt, Artificial Sequence
  Description of Artificial Sequence: Synthetic oligonucleotide
guuaagaggaggagcuaga

SEQ ID NO: 2945235 - RNA, 19 nt, Artificial Sequence
  Description of Artificial Sequence: Synthetic oligonucleotide
acugcuagagguacuggaa

SEQ ID NO: 2945236 - RNA, 19 nt, Artificial Sequence
  Description of Artificial Sequence: Synthetic oligonucleotide
gcugucauccgagucacug

SEQ ID NO: 2945237 - RNA, 19 nt, Artificial Sequence
  Description of Artificial Sequence: Synthetic oligonucleotide
uacuggaacucgugacacu

SEQ ID NO: 2945238 - RNA, 19 nt, Artificial Sequence
  Description of Artificial Sequence: Synthetic oligonucleotide
ugggagucgccaucuugga

SEQ ID NO: 2945239 - RNA, 19 nt, Artificial Sequence
  Description of Artificial Sequence: Synthetic oligonucleotide
auaaggcauucauuucaua

SEQ ID NO: 2945240 - RNA, 19 nt, Artificial Sequence
  Description of Artificial Sequence: Synthetic oligonucleotide
guggagguacuuucuuuuc

SEQ ID NO: 2945241 - RNA, 19 nt, Artificial Sequence
  Description of Artificial Sequence: Synthetic oligonucleotide
cuuuucucucuauauuagu

SEQ ID NO: 2945242 - RNA, 19 nt, Artificial Sequence
  Description of Artificial Sequence: Synthetic oligonucleotide
ucgcucucugaugaagacu

SEQ ID NO: 2945243 - RNA, 19 nt, Artificial Sequence
  Description of Artificial Sequence: Synthetic oligonucleotide
gcagaugucucgcucucug

SEQ ID NO: 2945244 - RNA, 19 nt, Artificial Sequence
  Description of Artificial Sequence: Synthetic oligonucleotide
aguagacuuaaaacuuaaa

SEQ ID NO: 2945245 - RNA, 19 nt, Artificial Sequence
  Description of Artificial Sequence: Synthetic oligonucleotide
aggagcuagagaggcuguc

SEQ ID NO: 2945246 - RNA, 19 nt, Artificial Sequence
  Description of Artificial Sequence: Synthetic oligonucleotide
gcauuucugacaucuuaca

SEQ ID NO: 2945247 - RNA, 19 nt, Artificial Sequence
  Description of Artificial Sequence: Synthetic oligonucleotide
acucacuggccgaacuguc

SEQ ID NO: 2945248 - RNA, 19 nt, Artificial Sequence
  Description of Artificial Sequence: Synthetic oligonucleotide
cuauauuagucucucccau

SEQ ID NO: 2945249 - RNA, 19 nt, Artificial Sequence
  Description of Artificial Sequence: Synthetic oligonucleotide
aaguuaagaggaggagcua

SEQ ID NO: 2945250 - RNA, 19 nt, Artificial Sequence
  Description of Artificial Sequence: Synthetic oligonucleotide
gcacucauaaguccaaugu

SEQ ID NO: 2945251 - RNA, 19 nt, Artificial Sequence
  Description of Artificial Sequence: Synthetic oligonucleotide
gccgaacugucacugcuag

SEQ ID NO: 2945252 - RNA, 19 nt, Artificial Sequence
  Description of Artificial Sequence: Synthetic oligonucleotide
uggcuucagcuugucuccg

SEQ ID NO: 2945253 - RNA, 19 nt, Artificial Sequence
  Description of Artificial Sequence: Synthetic oligonucleotide
ucagcuugucuccgagcua

SEQ ID NO: 2945254 - RNA, 19 nt, Artificial Sequence
  Description of Artificial Sequence: Synthetic oligonucleotide
acauacccacauaaggcau

SEQ ID NO: 2945255 - RNA, 19 nt, Artificial Sequence
  Description of Artificial Sequence: Synthetic oligonucleotide
gaggcagaugucucgcucu

SEQ ID NO: 2945256 - RNA, 19 nt, Artificial Sequence
  Description of Artificial Sequence: Synthetic oligonucleotide
augaggcagaugucucgcu

SEQ ID NO: 2945257 - RNA, 19 nt, Artificial Sequence
  Description of Artificial Sequence: Synthetic oligonucleotide
cauucauuucauaggcagu

SEQ ID NO: 2945258 - RNA, 19 nt, Artificial Sequence
  Description of Artificial Sequence: Synthetic oligonucleotide
cgcucucugaugaagacuc

SEQ ID NO: 2945259 - RNA, 19 nt, Artificial Sequence
  Description of Artificial Sequence: Synthetic oligonucleotide
cucacuggccgaacuguca

SEQ ID NO: 2945260 - RNA, 19 nt, Artificial Sequence
  Description of Artificial Sequence: Synthetic oligonucleotide
aucagccgaugcaugggag

SEQ ID NO: 2945261 - RNA, 19 nt, Artificial Sequence
  Description of Artificial Sequence: Synthetic oligonucleotide
cuguucuugaaggccugug

SEQ ID NO: 2945262 - RNA, 19 nt, Artificial Sequence
  Description of Artificial Sequence: Synthetic oligonucleotide
cuuggcuuuucucucuaua

SEQ ID NO: 2945263 - RNA, 19 nt, Artificial Sequence
  Description of Artificial Sequence: Synthetic oligonucleotide
agccgaugcaugggagucg

SEQ ID NO: 2945264 - RNA, 19 nt, Artificial Sequence
  Description of Artificial Sequence: Synthetic oligonucleotide
cauuucugacaucuuacau

SEQ ID NO: 2945265 - RNA, 19 nt, Artificial Sequence
  Description of Artificial Sequence: Synthetic oligonucleotide
gaccucuucuucuuggcuu

SEQ ID NO: 2945266 - RNA, 19 nt, Artificial Sequence
  Description of Artificial Sequence: Synthetic oligonucleotide
cuuauuggcuucagcuugu

SEQ ID NO: 2945267 - RNA, 19 nt, Artificial Sequence
  Description of Artificial Sequence: Synthetic oligonucleotide
gaagacucacuggccgaac

SEQ ID NO: 2945268 - RNA, 19 nt, Artificial Sequence
  Description of Artificial Sequence: Synthetic oligonucleotide
ugacacuuuuagaccucuu

SEQ ID NO: 2945269 - RNA, 19 nt, Artificial Sequence
  Description of Artificial Sequence: Synthetic oligonucleotide
gaugcaugggagucgccau

SEQ ID NO: 2945270 - RNA, 19 nt, Artificial Sequence
  Description of Artificial Sequence: Synthetic oligonucleotide
cuugaaggccuguggaggu

SEQ ID NO: 2945271 - RNA, 19 nt, Artificial Sequence
  Description of Artificial Sequence: Synthetic oligonucleotide
ggagguacuuucuuuuccu

SEQ ID NO: 2945272 - RNA, 19 nt, Artificial Sequence
  Description of Artificial Sequence: Synthetic oligonucleotide
uuauuggcuucagcuuguc

SEQ ID NO: 2945273 - RNA, 19 nt, Artificial Sequence
  Description of Artificial Sequence: Synthetic oligonucleotide
uugcugcaacaaucuauuu

SEQ ID NO: 2945274 - RNA, 19 nt, Artificial Sequence
  Description of Artificial Sequence: Synthetic oligonucleotide
acugucuucggaggaggau

SEQ ID NO: 2945275 - RNA, 19 nt, Artificial Sequence
  Description of Artificial Sequence: Synthetic oligonucleotide
gggagucgccaucuuggag

SEQ ID NO: 2945276 - RNA, 19 nt, Artificial Sequence
  Description of Artificial Sequence: Synthetic oligonucleotide
cagccgaugcaugggaguc

SEQ ID NO: 2945277 - RNA, 19 nt, Artificial Sequence
  Description of Artificial Sequence: Synthetic oligonucleotide
guccaauguccaaauucca

SEQ ID NO: 2945278 - RNA, 19 nt, Artificial Sequence
  Description of Artificial Sequence: Synthetic oligonucleotide
uuucuucagcucugcuguu

SEQ ID NO: 2945279 - RNA, 19 nt, Artificial Sequence
  Description of Artificial Sequence: Synthetic oligonucleotide
gagcuagagaggcugucau

SEQ ID NO: 2945280 - RNA, 19 nt, Artificial Sequence
  Description of Artificial Sequence: Synthetic oligonucleotide
uugcacucauaaguccaau

SEQ ID NO: 2945281 - RNA, 19 nt, Artificial Sequence
  Description of Artificial Sequence: Synthetic oligonucleotide
cugcuguucuugaaggccu

SEQ ID NO: 2945282 - RNA, 19 nt, Artificial Sequence
  Description of Artificial Sequence: Synthetic oligonucleotide
auguugcuuauuggcuuca

SEQ ID NO: 2945283 - RNA, 19 nt, Artificial Sequence
  Description of Artificial Sequence: Synthetic oligonucleotide
ugucucgcucucugaugaa

SEQ ID NO: 2945284 - RNA, 19 nt, Artificial Sequence
  Description of Artificial Sequence: Synthetic oligonucleotide
ccacauaaggcauucauuu

SEQ ID NO: 2945285 - RNA, 19 nt, Artificial Sequence
  Description of Artificial Sequence: Synthetic oligonucleotide
gacaucuuacauguugcuu

SEQ ID NO: 2945286 - RNA, 19 nt, Artificial Sequence
  Description of Artificial Sequence: Synthetic oligonucleotide
gacucacuggccgaacugu

SEQ ID NO: 2945287 - RNA, 19 nt, Artificial Sequence
  Description of Artificial Sequence: Synthetic oligonucleotide
cacuuuuagaccucuucuu

SEQ ID NO: 2945288 - RNA, 19 nt, Artificial Sequence
  Description of Artificial Sequence: Synthetic oligonucleotide
gcuagagguacuggaacuc

SEQ ID NO: 2945289 - RNA, 19 nt, Artificial Sequence
  Description of Artificial Sequence: Synthetic oligonucleotide
uccaagcauuucugacauc

SEQ ID NO: 2945290 - RNA, 19 nt, Artificial Sequence
  Description of Artificial Sequence: Synthetic oligonucleotide
cagaugucucgcucucuga

SEQ ID NO: 2945291 - RNA, 19 nt, Artificial Sequence
  Description of Artificial Sequence: Synthetic oligonucleotide
uucugacaucuuacauguu

SEQ ID NO: 2945292 - RNA, 19 nt, Artificial Sequence
  Description of Artificial Sequence: Synthetic oligonucleotide
caucuuacauguugcuuau

SEQ ID NO: 2945293 - RNA, 19 nt, Artificial Sequence
  Description of Artificial Sequence: Synthetic oligonucleotide
ggccuguggagguacuuuc

SEQ ID NO: 2945294 - RNA, 19 nt, Artificial Sequence
  Description of Artificial Sequence: Synthetic oligonucleotide
uccgagcuaucagccgaug

SEQ ID NO: 2945295 - RNA, 19 nt, Artificial Sequence
  Description of Artificial Sequence: Synthetic oligonucleotide
ccaagcauuucugacaucu

SEQ ID NO: 2945296 - RNA, 19 nt, Artificial Sequence
  Description of Artificial Sequence: Synthetic oligonucleotide
aaggccuguggagguacuu

SEQ ID NO: 2945297 - RNA, 19 nt, Artificial Sequence
  Description of Artificial Sequence: Synthetic oligonucleotide
uacccacauaaggcauuca

SEQ ID NO: 2945298 - RNA, 19 nt, Artificial Sequence
  Description of Artificial Sequence: Synthetic oligonucleotide
gucucucccaugcuuugcu

SEQ ID NO: 2945299 - RNA, 19 nt, Artificial Sequence
  Description of Artificial Sequence: Synthetic oligonucleotide
gagcuaucagccgaugcau

SEQ ID NO: 2945300 - RNA, 19 nt, Artificial Sequence
  Description of Artificial Sequence: Synthetic oligonucleotide
uugaaggccuguggaggua

SEQ ID NO: 2945301 - RNA, 19 nt, Artificial Sequence
  Description of Artificial Sequence: Synthetic oligonucleotide
ggcaguagacuuaaaacuu

SEQ ID NO: 2945302 - RNA, 19 nt, Artificial Sequence
  Description of Artificial Sequence: Synthetic oligonucleotide
ggagcuagagaggcuguca

SEQ ID NO: 2945303 - RNA, 19 nt, Artificial Sequence
  Description of Artificial Sequence: Synthetic oligonucleotide
cugcaacaaucuauuuucu

SEQ ID NO: 2945304 - RNA, 19 nt, Artificial Sequence
  Description of Artificial Sequence: Synthetic oligonucleotide
cacugucuucggaggagga

SEQ ID NO: 2945305 - RNA, 19 nt, Artificial Sequence
  Description of Artificial Sequence: Synthetic oligonucleotide
gagguacuuucuuuuccuu

SEQ ID NO: 2945306 - RNA, 19 nt, Artificial Sequence
  Description of Artificial Sequence: Synthetic oligonucleotide
cgagcuaucagccgaugca

SEQ ID NO: 2945307 - RNA, 19 nt, Artificial Sequence
  Description of Artificial Sequence: Synthetic oligonucleotide
gagaggcugucauccgagu

SEQ ID NO: 2945308 - RNA, 19 nt, Artificial Sequence
  Description of Artificial Sequence: Synthetic oligonucleotide
cugucauccgagucacugu

SEQ ID NO: 2945309 - RNA, 19 nt, Artificial Sequence
  Description of Artificial Sequence: Synthetic oligonucleotide
gucuucggaggaggaugag

SEQ ID NO: 2945310 - RNA, 19 nt, Artificial Sequence
  Description of Artificial Sequence: Synthetic oligonucleotide
gccgaugcaugggagucgc

SEQ ID NO: 2945311 - RNA, 19 nt, Artificial Sequence
  Description of Artificial Sequence: Synthetic oligonucleotide
cauacccacauaaggcauu

SEQ ID NO: 2945312 - RNA, 19 nt, Artificial Sequence
  Description of Artificial Sequence: Synthetic oligonucleotide
agcuugucuccgagcuauc

SEQ ID NO: 2945313 - RNA, 19 nt, Artificial Sequence
  Description of Artificial Sequence: Synthetic oligonucleotide
gugacacuuuuagaccucu

SEQ ID NO: 2945314 - RNA, 19 nt, Artificial Sequence
  Description of Artificial Sequence: Synthetic oligonucleotide
aggccuguggagguacuuu

SEQ ID NO: 2945315 - RNA, 19 nt, Artificial Sequence
  Description of Artificial Sequence: Synthetic oligonucleotide
cuuuuccuuugcacucaua

SEQ ID NO: 2945316 - RNA, 19 nt, Artificial Sequence
  Description of Artificial Sequence: Synthetic oligonucleotide
cauaggcaguagacuuaaa

SEQ ID NO: 2945317 - RNA, 19 nt, Artificial Sequence
  Description of Artificial Sequence: Synthetic oligonucleotide
gcuugucuccgagcuauca

SEQ ID NO: 2945318 - RNA, 19 nt, Artificial Sequence
  Description of Artificial Sequence: Synthetic oligonucleotide
cuguggagguacuuucuuu

SEQ ID NO: 2945319 - RNA, 19 nt, Artificial Sequence
  Description of Artificial Sequence: Synthetic oligonucleotide
cagcuugucuccgagcuau

SEQ ID NO: 2945320 - RNA, 19 nt, Artificial Sequence
  Description of Artificial Sequence: Synthetic oligonucleotide
aucuuacauguugcuuauu

SEQ ID NO: 2945321 - RNA, 19 nt, Artificial Sequence
  Description of Artificial Sequence: Synthetic oligonucleotide
gcuuugcugcaacaaucua

SEQ ID NO: 2945322 - RNA, 19 nt, Artificial Sequence
  Description of Artificial Sequence: Synthetic oligonucleotide
cgugacacuuuuagaccuc

SEQ ID NO: 2945323 - RNA, 19 nt, Artificial Sequence
  Description of Artificial Sequence: Synthetic oligonucleotide
ggcuucagcuugucuccga

SEQ ID NO: 2945324 - RNA, 19 nt, Artificial Sequence
  Description of Artificial Sequence: Synthetic oligonucleotide
gaggagcuagagaggcugu

SEQ ID NO: 2945325 - RNA, 19 nt, Artificial Sequence
  Description of Artificial Sequence: Synthetic oligonucleotide
caagcauuucugacaucuu

SEQ ID NO: 2945326 - RNA, 19 nt, Artificial Sequence
  Description of Artificial Sequence: Synthetic oligonucleotide
ccaugcuuugcugcaacaa

SEQ ID NO: 2945327 - RNA, 19 nt, Artificial Sequence
  Description of Artificial Sequence: Synthetic oligonucleotide
ggaacucgugacacuuuua

SEQ ID NO: 2945328 - RNA, 19 nt, Artificial Sequence
  Description of Artificial Sequence: Synthetic oligonucleotide
cgaugcaugggagucgcca

SEQ ID NO: 2945329 - RNA, 19 nt, Artificial Sequence
  Description of Artificial Sequence: Synthetic oligonucleotide
gaaggccuguggagguacu

SEQ ID NO: 2945330 - RNA, 19 nt, Artificial Sequence
  Description of Artificial Sequence: Synthetic oligonucleotide
cacuggccgaacugucacu

SEQ ID NO: 2945331 - RNA, 19 nt, Artificial Sequence
  Description of Artificial Sequence: Synthetic oligonucleotide
cccacauaaggcauucauu

SEQ ID NO: 2945332 - RNA, 19 nt, Artificial Sequence
  Description of Artificial Sequence: Synthetic oligonucleotide
cuggaacucgugacacuuu

SEQ ID NO: 2945333 - RNA, 19 nt, Artificial Sequence
  Description of Artificial Sequence: Synthetic oligonucleotide
cucccaugcuuugcugcaa

SEQ ID NO: 2945334 - RNA, 19 nt, Artificial Sequence
  Description of Artificial Sequence: Synthetic oligonucleotide
cuccgagcuaucagccgau

SEQ ID NO: 2945335 - RNA, 19 nt, Artificial Sequence
  Description of Artificial Sequence: Synthetic oligonucleotide
ccgagucacugucuucgga

SEQ ID NO: 2945336 - RNA, 19 nt, Artificial Sequence
  Description of Artificial Sequence: Synthetic oligonucleotide
ccgaugcaugggagucgcc

SEQ ID NO: 2945337 - RNA, 19 nt, Artificial Sequence
  Description of Artificial Sequence: Synthetic oligonucleotide
ccgaacugucacugcuaga

SEQ ID NO: 2945338 - RNA, 19 nt, Artificial Sequence
  Description of Artificial Sequence: Synthetic oligonucleotide
ggccgaacugucacugcua

SEQ ID NO: 2945339 - RNA, 19 nt, Artificial Sequence
  Description of Artificial Sequence: Synthetic oligonucleotide
gccuguggagguacuuucu

SEQ ID NO: 2945340 - RNA, 19 nt, Artificial Sequence
  Description of Artificial Sequence: Synthetic oligonucleotide
ccuguggagguacuuucuu

SEQ ID NO: 2945341 - RNA, 19 nt, Artificial Sequence
  Description of Artificial Sequence: Synthetic oligonucleotide
ggcagaugucucgcucucu

SEQ ID NO: 2945342 - RNA, 19 nt, Artificial Sequence
  Description of Artificial Sequence: Synthetic oligonucleotide
gcaugggagucgccaucuu

SEQ ID NO: 2945343 - RNA, 19 nt, Artificial Sequence
  Description of Artificial Sequence: Synthetic oligonucleotide
ggcugucauccgagucacu

SEQ ID NO: 2945344 - RNA, 19 nt, Artificial Sequence
  Description of Artificial Sequence: Synthetic oligonucleotide
aauacauauaauuacaucc

SEQ ID NO: 2945345 - RNA, 19 nt, Artificial Sequence
  Description of Artificial Sequence: Synthetic oligonucleotide
uuaaauaauacuuuuauug

SEQ ID NO: 2945346 - RNA, 19 nt, Artificial Sequence
  Description of Artificial Sequence: Synthetic oligonucleotide
aacaaaaugcaauuuacac

SEQ ID NO: 2945347 - RNA, 19 nt, Artificial Sequence
  Description of Artificial Sequence: Synthetic oligonucleotide
aaaaugaauacacacaaga

SEQ ID NO: 2945348 - RNA, 19 nt, Artificial Sequence
  Description of Artificial Sequence: Synthetic oligonucleotide
uuuacuaugguaaguaagg

SEQ ID NO: 2945349 - RNA, 19 nt, Artificial Sequence
  Description of Artificial Sequence: Synthetic oligonucleotide
uauugaaauguauauaagg

SEQ ID NO: 2945350 - RNA, 19 nt, Artificial Sequence
  Description of Artificial Sequence: Synthetic oligonucleotide
aauacuuuuauugaaaugu

SEQ ID NO: 2945351 - RNA, 19 nt, Artificial Sequence
  Description of Artificial Sequence: Synthetic oligonucleotide
aggagaaugacauaaaauc

SEQ ID NO: 2945352 - RNA, 19 nt, Artificial Sequence
  Description of Artificial Sequence: Synthetic oligonucleotide
guaaguaaggaacaaaugg

SEQ ID NO: 2945353 - RNA, 19 nt, Artificial Sequence
  Description of Artificial Sequence: Synthetic oligonucleotide
ugaaauguauauaaggcag

SEQ ID NO: 2945354 - RNA, 19 nt, Artificial Sequence
  Description of Artificial Sequence: Synthetic oligonucleotide
aaaugauacaguuuuagga

SEQ ID NO: 2945355 - RNA, 19 nt, Artificial Sequence
  Description of Artificial Sequence: Synthetic oligonucleotide
aaaugcaauuuacacaugg

SEQ ID NO: 2945356 - RNA, 19 nt, Artificial Sequence
  Description of Artificial Sequence: Synthetic oligonucleotide
uaaguaaggaacaaauggg

SEQ ID NO: 2945357 - RNA, 19 nt, Artificial Sequence
  Description of Artificial Sequence: Synthetic oligonucleotide
auugaaauguauauaaggc

SEQ ID NO: 2945358 - RNA, 19 nt, Artificial Sequence
  Description of Artificial Sequence: Synthetic oligonucleotide
uauaauuacauccuaucug

SEQ ID NO: 2945359 - RNA, 19 nt, Artificial Sequence
  Description of Artificial Sequence: Synthetic oligonucleotide
auguauauaaggcagaucu

SEQ ID NO: 2945360 - RNA, 19 nt, Artificial Sequence
  Description of Artificial Sequence: Synthetic oligonucleotide
uguaacuuuacuaugguaa

SEQ ID NO: 2945361 - RNA, 19 nt, Artificial Sequence
  Description of Artificial Sequence: Synthetic oligonucleotide
uuagaaaugauacaguuuu

SEQ ID NO: 2945362 - RNA, 19 nt, Artificial Sequence
  Description of Artificial Sequence: Synthetic oligonucleotide
aacaccagcacugagaaag

SEQ ID NO: 2945363 - RNA, 19 nt, Artificial Sequence
  Description of Artificial Sequence: Synthetic oligonucleotide
aaugaauacacacaagaaa

SEQ ID NO: 2945364 - RNA, 19 nt, Artificial Sequence
  Description of Artificial Sequence: Synthetic oligonucleotide
uuaggaagaauacauauaa

SEQ ID NO: 2945365 - RNA, 19 nt, Artificial Sequence
  Description of Artificial Sequence: Synthetic oligonucleotide
aaugauacaguuuuaggaa

SEQ ID NO: 2945366 - RNA, 19 nt, Artificial Sequence
  Description of Artificial Sequence: Synthetic oligonucleotide
gaagaauacauauaauuac

SEQ ID NO: 2945367 - RNA, 19 nt, Artificial Sequence
  Description of Artificial Sequence: Synthetic oligonucleotide
uaaauaauacuuuuauuga

SEQ ID NO: 2945368 - RNA, 19 nt, Artificial Sequence
  Description of Artificial Sequence: Synthetic oligonucleotide
auuacauccuaucuguaac

SEQ ID NO: 2945369 - RNA, 19 nt, Artificial Sequence
  Description of Artificial Sequence: Synthetic oligonucleotide
aaugacauaaaaucauggu

SEQ ID NO: 2945370 - RNA, 19 nt, Artificial Sequence
  Description of Artificial Sequence: Synthetic oligonucleotide
ugacauaaaaucaugguau

SEQ ID NO: 2945371 - RNA, 19 nt, Artificial Sequence
  Description of Artificial Sequence: Synthetic oligonucleotide
uauuuuaccggauacagau

SEQ ID NO: 2945372 - RNA, 19 nt, Artificial Sequence
  Description of Artificial Sequence: Synthetic oligonucleotide
aaaauuugaacaaaaugca

SEQ ID NO: 2945373 - RNA, 19 nt, Artificial Sequence
  Description of Artificial Sequence: Synthetic oligonucleotide
auaauuacauccuaucugu

SEQ ID NO: 2945374 - RNA, 19 nt, Artificial Sequence
  Description of Artificial Sequence: Synthetic oligonucleotide
acuaugguaaguaaggaac

SEQ ID NO: 2945375 - RNA, 19 nt, Artificial Sequence
  Description of Artificial Sequence: Synthetic oligonucleotide
ugucaagaguauuuuaccg

SEQ ID NO: 2945376 - RNA, 19 nt, Artificial Sequence
  Description of Artificial Sequence: Synthetic oligonucleotide
gaaaugauacaguuuuagg

SEQ ID NO: 2945377 - RNA, 19 nt, Artificial Sequence
  Description of Artificial Sequence: Synthetic oligonucleotide
aaauaauacuuuuauugaa

SEQ ID NO: 2945378 - RNA, 19 nt, Artificial Sequence
  Description of Artificial Sequence: Synthetic oligonucleotide
uauaaggcagaucuaggag

SEQ ID NO: 2945379 - RNA, 19 nt, Artificial Sequence
  Description of Artificial Sequence: Synthetic oligonucleotide
ugaacaaaaugcaauuuac

SEQ ID NO: 2945380 - RNA, 19 nt, Artificial Sequence
  Description of Artificial Sequence: Synthetic oligonucleotide
uuuuaccggauacagaugu

SEQ ID NO: 2945381 - RNA, 19 nt, Artificial Sequence
  Description of Artificial Sequence: Synthetic oligonucleotide
uacaguuuuaggaagaaua

SEQ ID NO: 2945382 - RNA, 19 nt, Artificial Sequence
  Description of Artificial Sequence: Synthetic oligonucleotide
uugaaauguauauaaggca

SEQ ID NO: 2945383 - RNA, 19 nt, Artificial Sequence
  Description of Artificial Sequence: Synthetic oligonucleotide
agaguauuuuaccggauac

SEQ ID NO: 2945384 - RNA, 19 nt, Artificial Sequence
  Description of Artificial Sequence: Synthetic oligonucleotide
aacauuaaauaauacuuuu

SEQ ID NO: 2945385 - RNA, 19 nt, Artificial Sequence
  Description of Artificial Sequence: Synthetic oligonucleotide
uuuuaggaagaauacauau

SEQ ID NO: 2945386 - RNA, 19 nt, Artificial Sequence
  Description of Artificial Sequence: Synthetic oligonucleotide
uuauugaaauguauauaag

SEQ ID NO: 2945387 - RNA, 19 nt, Artificial Sequence
  Description of Artificial Sequence: Synthetic oligonucleotide
aaguaaggaacaaaugggg

SEQ ID NO: 2945388 - RNA, 19 nt, Artificial Sequence
  Description of Artificial Sequence: Synthetic oligonucleotide
uguaguacaucccaaaauu

SEQ ID NO: 2945389 - RNA, 19 nt, Artificial Sequence
  Description of Artificial Sequence: Synthetic oligonucleotide
acaaaaugcaauuuacaca

SEQ ID NO: 2945390 - RNA, 19 nt, Artificial Sequence
  Description of Artificial Sequence: Synthetic oligonucleotide
aaaaucaugguaugcaauu

SEQ ID NO: 2945391 - RNA, 19 nt, Artificial Sequence
  Description of Artificial Sequence: Synthetic oligonucleotide
guagcuuuagaaaugauac

SEQ ID NO: 2945392 - RNA, 19 nt, Artificial Sequence
  Description of Artificial Sequence: Synthetic oligonucleotide
uaugcaauuugucaagagu

SEQ ID NO: 2945393 - RNA, 19 nt, Artificial Sequence
  Description of Artificial Sequence: Synthetic oligonucleotide
aaucaugguaugcaauuug

SEQ ID NO: 2945394 - RNA, 19 nt, Artificial Sequence
  Description of Artificial Sequence: Synthetic oligonucleotide
uuacacauggaacaccagc

SEQ ID NO: 2945395 - RNA, 19 nt, Artificial Sequence
  Description of Artificial Sequence: Synthetic oligonucleotide
gaaugacauaaaaucaugg

SEQ ID NO: 2945396 - RNA, 19 nt, Artificial Sequence
  Description of Artificial Sequence: Synthetic oligonucleotide
auauaauuacauccuaucu

SEQ ID NO: 2945397 - RNA, 19 nt, Artificial Sequence
  Description of Artificial Sequence: Synthetic oligonucleotide
agcuuuagaaaugauacag

SEQ ID NO: 2945398 - RNA, 19 nt, Artificial Sequence
  Description of Artificial Sequence: Synthetic oligonucleotide
cuuuacuaugguaaguaag

SEQ ID NO: 2945399 - RNA, 19 nt, Artificial Sequence
  Description of Artificial Sequence: Synthetic oligonucleotide
uaguacaucccaaaauuug

SEQ ID NO: 2945400 - RNA, 19 nt, Artificial Sequence
  Description of Artificial Sequence: Synthetic oligonucleotide
aauuugaacaaaaugcaau

SEQ ID NO: 2945401 - RNA, 19 nt, Artificial Sequence
  Description of Artificial Sequence: Synthetic oligonucleotide
aguauuuuaccggauacag

SEQ ID NO: 2945402 - RNA, 19 nt, Artificial Sequence
  Description of Artificial Sequence: Synthetic oligonucleotide
aagaauacauauaauuaca

SEQ ID NO: 2945403 - RNA, 19 nt, Artificial Sequence
  Description of Artificial Sequence: Synthetic oligonucleotide
gucaagaguauuuuaccgg

SEQ ID NO: 2945404 - RNA, 19 nt, Artificial Sequence
  Description of Artificial Sequence: Synthetic oligonucleotide
aauuacauccuaucuguaa

SEQ ID NO: 2945405 - RNA, 19 nt, Artificial Sequence
  Description of Artificial Sequence: Synthetic oligonucleotide
aggaagaauacauauaauu

SEQ ID NO: 2945406 - RNA, 19 nt, Artificial Sequence
  Description of Artificial Sequence: Synthetic oligonucleotide
cauauaauuacauccuauc

SEQ ID NO: 2945407 - RNA, 19 nt, Artificial Sequence
  Description of Artificial Sequence: Synthetic oligonucleotide
uacacauggaacaccagca

SEQ ID NO: 2945408 - RNA, 19 nt, Artificial Sequence
  Description of Artificial Sequence: Synthetic oligonucleotide
aguagguagcuuuagaaau

SEQ ID NO: 2945409 - RNA, 19 nt, Artificial Sequence
  Description of Artificial Sequence: Synthetic oligonucleotide
aauaauacuuuuauugaaa

SEQ ID NO: 2945410 - RNA, 19 nt, Artificial Sequence
  Description of Artificial Sequence: Synthetic oligonucleotide
gaugguuggagucaaguca

SEQ ID NO: 2945411 - RNA, 19 nt, Artificial Sequence
  Description of Artificial Sequence: Synthetic oligonucleotide
ucaagaguauuuuaccgga

SEQ ID NO: 2945412 - RNA, 19 nt, Artificial Sequence
  Description of Artificial Sequence: Synthetic oligonucleotide
guauauaaggcagaucuag

SEQ ID NO: 2945413 - RNA, 19 nt, Artificial Sequence
  Description of Artificial Sequence: Synthetic oligonucleotide
acaucccaaaauuugaaca

SEQ ID NO: 2945414 - RNA, 19 nt, Artificial Sequence
  Description of Artificial Sequence: Synthetic oligonucleotide
uaauacuuuuauugaaaug

SEQ ID NO: 2945415 - RNA, 19 nt, Artificial Sequence
  Description of Artificial Sequence: Synthetic oligonucleotide
agaaaugauacaguuuuag

SEQ ID NO: 2945416 - RNA, 19 nt, Artificial Sequence
  Description of Artificial Sequence: Synthetic oligonucleotide
aauguaguacaucccaaaa

SEQ ID NO: 2945417 - RNA, 19 nt, Artificial Sequence
  Description of Artificial Sequence: Synthetic oligonucleotide
ugguaaguaaggaacaaau

SEQ ID NO: 2945418 - RNA, 19 nt, Artificial Sequence
  Description of Artificial Sequence: Synthetic oligonucleotide
uguguaugauuccacaaaa

SEQ ID NO: 2945419 - RNA, 19 nt, Artificial Sequence
  Description of Artificial Sequence: Synthetic oligonucleotide
acauaaaaucaugguaugc

SEQ ID NO: 2945420 - RNA, 19 nt, Artificial Sequence
  Description of Artificial Sequence: Synthetic oligonucleotide
gaauacauauaauuacauc

SEQ ID NO: 2945421 - RNA, 19 nt, Artificial Sequence
  Description of Artificial Sequence: Synthetic oligonucleotide
gauacagauguuuagcaaa

SEQ ID NO: 2945422 - RNA, 19 nt, Artificial Sequence
  Description of Artificial Sequence: Synthetic oligonucleotide
guaacuuuacuaugguaag

SEQ ID NO: 2945423 - RNA, 19 nt, Artificial Sequence
  Description of Artificial Sequence: Synthetic oligonucleotide
auaauacuuuuauugaaau

SEQ ID NO: 2945424 - RNA, 19 nt, Artificial Sequence
  Description of Artificial Sequence: Synthetic oligonucleotide
auauaaggcagaucuagga

SEQ ID NO: 2945425 - RNA, 19 nt, Artificial Sequence
  Description of Artificial Sequence: Synthetic oligonucleotide
uugucaagaguauuuuacc

SEQ ID NO: 2945426 - RNA, 19 nt, Artificial Sequence
  Description of Artificial Sequence: Synthetic oligonucleotide
auaaggcagaucuaggaga

SEQ ID NO: 2945427 - RNA, 19 nt, Artificial Sequence
  Description of Artificial Sequence: Synthetic oligonucleotide
augauacaguuuuaggaag

SEQ ID NO: 2945428 - RNA, 19 nt, Artificial Sequence
  Description of Artificial Sequence: Synthetic oligonucleotide
acaguuuuaggaagaauac

SEQ ID NO: 2945429 - RNA, 19 nt, Artificial Sequence
  Description of Artificial Sequence: Synthetic oligonucleotide
aaauguaguacaucccaaa

SEQ ID NO: 2945430 - RNA, 19 nt, Artificial Sequence
  Description of Artificial Sequence: Synthetic oligonucleotide
aauguauauaaggcagauc

SEQ ID NO: 2945431 - RNA, 19 nt, Artificial Sequence
  Description of Artificial Sequence: Synthetic oligonucleotide
uuuaggaagaauacauaua

SEQ ID NO: 2945432 - RNA, 19 nt, Artificial Sequence
  Description of Artificial Sequence: Synthetic oligonucleotide
gacauaaaaucaugguaug

SEQ ID NO: 2945433 - RNA, 19 nt, Artificial Sequence
  Description of Artificial Sequence: Synthetic oligonucleotide
augacauaaaaucauggua

SEQ ID NO: 2945434 - RNA, 19 nt, Artificial Sequence
  Description of Artificial Sequence: Synthetic oligonucleotide
gagucaagucaguagguag

SEQ ID NO: 2945435 - RNA, 19 nt, Artificial Sequence
  Description of Artificial Sequence: Synthetic oligonucleotide
ucaguagguagcuuuagaa

SEQ ID NO: 2945436 - RNA, 19 nt, Artificial Sequence
  Description of Artificial Sequence: Synthetic oligonucleotide
ucuuucuucuucuucuucu

SEQ ID NO: 2945437 - RNA, 19 nt, Artificial Sequence
  Description of Artificial Sequence: Synthetic oligonucleotide
augaauacacacaagaaaa

SEQ ID NO: 2945438 - RNA, 19 nt, Artificial Sequence
  Description of Artificial Sequence: Synthetic oligonucleotide
ugauacaguuuuaggaaga

SEQ ID NO: 2945439 - RNA, 19 nt, Artificial Sequence
  Description of Artificial Sequence: Synthetic oligonucleotide
uaggagaaugacauaaaau

SEQ ID NO: 2945440 - RNA, 19 nt, Artificial Sequence
  Description of Artificial Sequence: Synthetic oligonucleotide
agucaagucaguagguagc

SEQ ID NO: 2945441 - RNA, 19 nt, Artificial Sequence
  Description of Artificial Sequence: Synthetic oligonucleotide
uaaaaucaugguaugcaau

SEQ ID NO: 2945442 - RNA, 19 nt, Artificial Sequence
  Description of Artificial Sequence: Synthetic oligonucleotide
aucuguaacuuuacuaugg

SEQ ID NO: 2945443 - RNA, 19 nt, Artificial Sequence
  Description of Artificial Sequence: Synthetic oligonucleotide
uaucuguaacuuuacuaug

SEQ ID NO: 2945444 - RNA, 19 nt, Artificial Sequence
  Description of Artificial Sequence: Synthetic oligonucleotide
guuggagucaagucaguag

SEQ ID NO: 2945445 - RNA, 19 nt, Artificial Sequence
  Description of Artificial Sequence: Synthetic oligonucleotide
caaaaugcaauuuacacau

SEQ ID NO: 2945446 - RNA, 19 nt, Artificial Sequence
  Description of Artificial Sequence: Synthetic oligonucleotide
auaaaaucaugguaugcaa

SEQ ID NO: 2945447 - RNA, 19 nt, Artificial Sequence
  Description of Artificial Sequence: Synthetic oligonucleotide
aguuuuaggaagaauacau

SEQ ID NO: 2945448 - RNA, 19 nt, Artificial Sequence
  Description of Artificial Sequence: Synthetic oligonucleotide
agaucuaggagaaugacau

SEQ ID NO: 2945449 - RNA, 19 nt, Artificial Sequence
  Description of Artificial Sequence: Synthetic oligonucleotide
aaaugaauacacacaagaa

SEQ ID NO: 2945450 - RNA, 19 nt, Artificial Sequence
  Description of Artificial Sequence: Synthetic oligonucleotide
ucuguaacuuuacuauggu

SEQ ID NO: 2945451 - RNA, 19 nt, Artificial Sequence
  Description of Artificial Sequence: Synthetic oligonucleotide
caugguaugcaauuuguca

SEQ ID NO: 2945452 - RNA, 19 nt, Artificial Sequence
  Description of Artificial Sequence: Synthetic oligonucleotide
ugguaugcaauuugucaag

SEQ ID NO: 2945453 - RNA, 19 nt, Artificial Sequence
  Description of Artificial Sequence: Synthetic oligonucleotide
aaauguauauaaggcagau

SEQ ID NO: 2945454 - RNA, 19 nt, Artificial Sequence
  Description of Artificial Sequence: Synthetic oligonucleotide
augguaugcaauuugucaa

SEQ ID NO: 2945455 - RNA, 19 nt, Artificial Sequence
  Description of Artificial Sequence: Synthetic oligonucleotide
uucuucuucuucuucuucu

SEQ ID NO: 2945456 - RNA, 19 nt, Artificial Sequence
  Description of Artificial Sequence: Synthetic oligonucleotide
uacuuuuauugaaauguau

SEQ ID NO: 2945457 - RNA, 19 nt, Artificial Sequence
  Description of Artificial Sequence: Synthetic oligonucleotide
aacuuuacuaugguaagua

SEQ ID NO: 2945458 - RNA, 19 nt, Artificial Sequence
  Description of Artificial Sequence: Synthetic oligonucleotide
acacauggaacaccagcac

SEQ ID NO: 2945459 - RNA, 19 nt, Artificial Sequence
  Description of Artificial Sequence: Synthetic oligonucleotide
aagaguauuuuaccggaua

SEQ ID NO: 2945460 - RNA, 19 nt, Artificial Sequence
  Description of Artificial Sequence: Synthetic oligonucleotide
aaauuugaacaaaaugcaa

SEQ ID NO: 2945461 - RNA, 19 nt, Artificial Sequence
  Description of Artificial Sequence: Synthetic oligonucleotide
auacauauaauuacauccu

SEQ ID NO: 2945462 - RNA, 19 nt, Artificial Sequence
  Description of Artificial Sequence: Synthetic oligonucleotide
augcaauuuacacauggaa

SEQ ID NO: 2945463 - RNA, 19 nt, Artificial Sequence
  Description of Artificial Sequence: Synthetic oligonucleotide
uaaggcagaucuaggagaa

SEQ ID NO: 2945464 - RNA, 19 nt, Artificial Sequence
  Description of Artificial Sequence: Synthetic oligonucleotide
cauaaaaucaugguaugca

SEQ ID NO: 2945465 - RNA, 19 nt, Artificial Sequence
  Description of Artificial Sequence: Synthetic oligonucleotide
uacuaugguaaguaaggaa

SEQ ID NO: 2945466 - RNA, 19 nt, Artificial Sequence
  Description of Artificial Sequence: Synthetic oligonucleotide
uacauauaauuacauccua

SEQ ID NO: 2945467 - RNA, 19 nt, Artificial Sequence
  Description of Artificial Sequence: Synthetic oligonucleotide
uacaucccaaaauuugaac

SEQ ID NO: 2945468 - RNA, 19 nt, Artificial Sequence
  Description of Artificial Sequence: Synthetic oligonucleotide
uuacauccuaucuguaacu

SEQ ID NO: 2945469 - RNA, 19 nt, Artificial Sequence
  Description of Artificial Sequence: Synthetic oligonucleotide
aauuugucaagaguauuuu

SEQ ID NO: 2945470 - RNA, 19 nt, Artificial Sequence
  Description of Artificial Sequence: Synthetic oligonucleotide
ucccaaaauuugaacaaaa

SEQ ID NO: 2945471 - RNA, 19 nt, Artificial Sequence
  Description of Artificial Sequence: Synthetic oligonucleotide
ugcaauuugucaagaguau

SEQ ID NO: 2945472 - RNA, 19 nt, Artificial Sequence
  Description of Artificial Sequence: Synthetic oligonucleotide
uguguguaugauuccacaa

SEQ ID NO: 2945473 - RNA, 19 nt, Artificial Sequence
  Description of Artificial Sequence: Synthetic oligonucleotide
auuuacacauggaacacca

SEQ ID NO: 2945474 - RNA, 19 nt, Artificial Sequence
  Description of Artificial Sequence: Synthetic oligonucleotide
aaugcaauuuacacaugga

SEQ ID NO: 2945475 - RNA, 19 nt, Artificial Sequence
  Description of Artificial Sequence: Synthetic oligonucleotide
uaaggaacaaauggggaaa

SEQ ID NO: 2945476 - RNA, 19 nt, Artificial Sequence
  Description of Artificial Sequence: Synthetic oligonucleotide
agaaugacauaaaaucaug

SEQ ID NO: 2945477 - RNA, 19 nt, Artificial Sequence
  Description of Artificial Sequence: Synthetic oligonucleotide
uuuacacauggaacaccag

SEQ ID NO: 2945478 - RNA, 19 nt, Artificial Sequence
  Description of Artificial Sequence: Synthetic oligonucleotide
guaaggaacaaauggggaa

SEQ ID NO: 2945479 - RNA, 19 nt, Artificial Sequence
  Description of Artificial Sequence: Synthetic oligonucleotide
ucuucuucuucuucucucu

SEQ ID NO: 2945480 - RNA, 19 nt, Artificial Sequence
  Description of Artificial Sequence: Synthetic oligonucleotide
ucuucuucuucucucucuc

SEQ ID NO: 2945481 - RNA, 19 nt, Artificial Sequence
  Description of Artificial Sequence: Synthetic oligonucleotide
aucuaggagaaugacauaa

SEQ ID NO: 2945482 - RNA, 19 nt, Artificial Sequence
  Description of Artificial Sequence: Synthetic oligonucleotide
uguguguguaugauuccac

SEQ ID NO: 2945483 - RNA, 19 nt, Artificial Sequence
  Description of Artificial Sequence: Synthetic oligonucleotide
auguaguacaucccaaaau

SEQ ID NO: 2945484 - RNA, 19 nt, Artificial Sequence
  Description of Artificial Sequence: Synthetic oligonucleotide
guaugcaauuugucaagag

SEQ ID NO: 2945485 - RNA, 19 nt, Artificial Sequence
  Description of Artificial Sequence: Synthetic oligonucleotide
gaacaaaaugcaauuuaca

SEQ ID NO: 2945486 - RNA, 19 nt, Artificial Sequence
  Description of Artificial Sequence: Synthetic oligonucleotide
cauuaaauaauacuuuuau

SEQ ID NO: 2945487 - RNA, 19 nt, Artificial Sequence
  Description of Artificial Sequence: Synthetic oligonucleotide
uuacuaugguaaguaagga

SEQ ID NO: 2945488 - RNA, 19 nt, Artificial Sequence
  Description of Artificial Sequence: Synthetic oligonucleotide
aguacaucccaaaauuuga

SEQ ID NO: 2945489 - RNA, 19 nt, Artificial Sequence
  Description of Artificial Sequence: Synthetic oligonucleotide
ucuaggagaaugacauaaa

SEQ ID NO: 2945490 - RNA, 19 nt, Artificial Sequence
  Description of Artificial Sequence: Synthetic oligonucleotide
uguauauaaggcagaucua

SEQ ID NO: 2945491 - RNA, 19 nt, Artificial Sequence
  Description of Artificial Sequence: Synthetic oligonucleotide
uagcuuuagaaaugauaca

SEQ ID NO: 2945492 - RNA, 19 nt, Artificial Sequence
  Description of Artificial Sequence: Synthetic oligonucleotide
uucuucuucucucucucuc

SEQ ID NO: 2945493 - RNA, 19 nt, Artificial Sequence
  Description of Artificial Sequence: Synthetic oligonucleotide
acuuuuauugaaauguaua

SEQ ID NO: 2945494 - RNA, 19 nt, Artificial Sequence
  Description of Artificial Sequence: Synthetic oligonucleotide
aaaauguaguacaucccaa

SEQ ID NO: 2945495 - RNA, 19 nt, Artificial Sequence
  Description of Artificial Sequence: Synthetic oligonucleotide
ucaugguaugcaauuuguc

SEQ ID NO: 2945496 - RNA, 19 nt, Artificial Sequence
  Description of Artificial Sequence: Synthetic oligonucleotide
accggauacagauguuuag

SEQ ID NO: 2945497 - RNA, 19 nt, Artificial Sequence
  Description of Artificial Sequence: Synthetic oligonucleotide
uuugaacaaaaugcaauuu

SEQ ID NO: 2945498 - RNA, 19 nt, Artificial Sequence
  Description of Artificial Sequence: Synthetic oligonucleotide
ugaugguuggagucaaguc

SEQ ID NO: 2945499 - RNA, 19 nt, Artificial Sequence
  Description of Artificial Sequence: Synthetic oligonucleotide
gaaauguauauaaggcaga

SEQ ID NO: 2945500 - RNA, 19 nt, Artificial Sequence
  Description of Artificial Sequence: Synthetic oligonucleotide
uucuucuucuucuucucuc

SEQ ID NO: 2945501 - RNA, 19 nt, Artificial Sequence
  Description of Artificial Sequence: Synthetic oligonucleotide
uagguagcuuuagaaauga

SEQ ID NO: 2945502 - RNA, 19 nt, Artificial Sequence
  Description of Artificial Sequence: Synthetic oligonucleotide
cuaugguaaguaaggaaca

SEQ ID NO: 2945503 - RNA, 19 nt, Artificial Sequence
  Description of Artificial Sequence: Synthetic oligonucleotide
agaauacauauaauuacau

SEQ ID NO: 2945504 - RNA, 19 nt, Artificial Sequence
  Description of Artificial Sequence: Synthetic oligonucleotide
ucuucuucucucucucucu

SEQ ID NO: 2945505 - RNA, 19 nt, Artificial Sequence
  Description of Artificial Sequence: Synthetic oligonucleotide
uucuucuucuucucucucu

SEQ ID NO: 2945506 - RNA, 19 nt, Artificial Sequence
  Description of Artificial Sequence: Synthetic oligonucleotide
ucuucucucucucucucuc

SEQ ID NO: 2945507 - RNA, 19 nt, Artificial Sequence
  Description of Artificial Sequence: Synthetic oligonucleotide
aguaaggaacaaaugggga

SEQ ID NO: 2945508 - RNA, 19 nt, Artificial Sequence
  Description of Artificial Sequence: Synthetic oligonucleotide
uaggaagaauacauauaau

SEQ ID NO: 2945509 - RNA, 19 nt, Artificial Sequence
  Description of Artificial Sequence: Synthetic oligonucleotide
augguuggagucaagucag

SEQ ID NO: 2945510 - RNA, 19 nt, Artificial Sequence
  Description of Artificial Sequence: Synthetic oligonucleotide
uguguguguguguguauga

SEQ ID NO: 2945511 - RNA, 19 nt, Artificial Sequence
  Description of Artificial Sequence: Synthetic oligonucleotide
uugaugguuggagucaagu

SEQ ID NO: 2945512 - RNA, 19 nt, Artificial Sequence
  Description of Artificial Sequence: Synthetic oligonucleotide
acauggaacaccagcacug

SEQ ID NO: 2945513 - RNA, 19 nt, Artificial Sequence
  Description of Artificial Sequence: Synthetic oligonucleotide
guguguguguguaugauuc

SEQ ID NO: 2945514 - RNA, 19 nt, Artificial Sequence
  Description of Artificial Sequence: Synthetic oligonucleotide
uuucuucuucuucuucuuc

SEQ ID NO: 2945515 - RNA, 19 nt, Artificial Sequence
  Description of Artificial Sequence: Synthetic oligonucleotide
aaaucaugguaugcaauuu

SEQ ID NO: 2945516 - RNA, 19 nt, Artificial Sequence
  Description of Artificial Sequence: Synthetic oligonucleotide
augcaauuugucaagagua

SEQ ID NO: 2945517 - RNA, 19 nt, Artificial Sequence
  Description of Artificial Sequence: Synthetic oligonucleotide
uaugguaaguaaggaacaa

SEQ ID NO: 2945518 - RNA, 19 nt, Artificial Sequence
  Description of Artificial Sequence: Synthetic oligonucleotide
uccuaucuguaacuuuacu

SEQ ID NO: 2945519 - RNA, 19 nt, Artificial Sequence
  Description of Artificial Sequence: Synthetic oligonucleotide
guagguagcuuuagaaaug

SEQ ID NO: 2945520 - RNA, 19 nt, Artificial Sequence
  Description of Artificial Sequence: Synthetic oligonucleotide
acuuuacuaugguaaguaa

SEQ ID NO: 2945521 - RNA, 19 nt, Artificial Sequence
  Description of Artificial Sequence: Synthetic oligonucleotide
uaacuuuacuaugguaagu

SEQ ID NO: 2945522 - RNA, 19 nt, Artificial Sequence
  Description of Artificial Sequence: Synthetic oligonucleotide
ggagaaugacauaaaauca

SEQ ID NO: 2945523 - RNA, 19 nt, Artificial Sequence
  Description of Artificial Sequence: Synthetic oligonucleotide
aggcagaucuaggagaaug

SEQ ID NO: 2945524 - RNA, 19 nt, Artificial Sequence
  Description of Artificial Sequence: Synthetic oligonucleotide
ucuucuucuucuucuucuc

SEQ ID NO: 2945525 - RNA, 19 nt, Artificial Sequence
  Description of Artificial Sequence: Synthetic oligonucleotide
cauccuaucuguaacuuua

SEQ ID NO: 2945526 - RNA, 19 nt, Artificial Sequence
  Description of Artificial Sequence: Synthetic oligonucleotide
caucccaaaauuugaacaa

SEQ ID NO: 2945527 - RNA, 19 nt, Artificial Sequence
  Description of Artificial Sequence: Synthetic oligonucleotide
auuugucaagaguauuuua

SEQ ID NO: 2945528 - RNA, 19 nt, Artificial Sequence
  Description of Artificial Sequence: Synthetic oligonucleotide
uuugaugguuggagucaag

SEQ ID NO: 2945529 - RNA, 19 nt, Artificial Sequence
  Description of Artificial Sequence: Synthetic oligonucleotide
ggaagaauacauauaauua

SEQ ID NO: 2945530 - RNA, 19 nt, Artificial Sequence
  Description of Artificial Sequence: Synthetic oligonucleotide
uucuuucuucuucuucuuc

SEQ ID NO: 2945531 - RNA, 19 nt, Artificial Sequence
  Description of Artificial Sequence: Synthetic oligonucleotide
uggagucaagucaguaggu

SEQ ID NO: 2945532 - RNA, 19 nt, Artificial Sequence
  Description of Artificial Sequence: Synthetic oligonucleotide
acauauaauuacauccuau

SEQ ID NO: 2945533 - RNA, 19 nt, Artificial Sequence
  Description of Artificial Sequence: Synthetic oligonucleotide
gguaaguaaggaacaaaug

SEQ ID NO: 2945534 - RNA, 19 nt, Artificial Sequence
  Description of Artificial Sequence: Synthetic oligonucleotide
cuuuagaaaugauacaguu

SEQ ID NO: 2945535 - RNA, 19 nt, Artificial Sequence
  Description of Artificial Sequence: Synthetic oligonucleotide
uucucucucucucucucuc

SEQ ID NO: 2945536 - RNA, 19 nt, Artificial Sequence
  Description of Artificial Sequence: Synthetic oligonucleotide
cucucucucucucugugug

SEQ ID NO: 2945537 - RNA, 19 nt, Artificial Sequence
  Description of Artificial Sequence: Synthetic oligonucleotide
uaauuacauccuaucugua

SEQ ID NO: 2945538 - RNA, 19 nt, Artificial Sequence
  Description of Artificial Sequence: Synthetic oligonucleotide
gagaaugacauaaaaucau

SEQ ID NO: 2945539 - RNA, 19 nt, Artificial Sequence
  Description of Artificial Sequence: Synthetic oligonucleotide
cuaggagaaugacauaaaa

SEQ ID NO: 2945540 - RNA, 19 nt, Artificial Sequence
  Description of Artificial Sequence: Synthetic oligonucleotide
aucaugguaugcaauuugu

SEQ ID NO: 2945541 - RNA, 19 nt, Artificial Sequence
  Description of Artificial Sequence: Synthetic oligonucleotide
aaaaugcaauuuacacaug

SEQ ID NO: 2945542 - RNA, 19 nt, Artificial Sequence
  Description of Artificial Sequence: Synthetic oligonucleotide
cagaucuaggagaaugaca

SEQ ID NO: 2945543 - RNA, 19 nt, Artificial Sequence
  Description of Artificial Sequence: Synthetic oligonucleotide
uuuugaugguuggagucaa

SEQ ID NO: 2945544 - RNA, 19 nt, Artificial Sequence
  Description of Artificial Sequence: Synthetic oligonucleotide
acauuaaauaauacuuuua

SEQ ID NO: 2945545 - RNA, 19 nt, Artificial Sequence
  Description of Artificial Sequence: Synthetic oligonucleotide
guguguaugauuccacaaa

SEQ ID NO: 2945546 - RNA, 19 nt, Artificial Sequence
  Description of Artificial Sequence: Synthetic oligonucleotide
gaguauuuuaccggauaca

SEQ ID NO: 2945547 - RNA, 19 nt, Artificial Sequence
  Description of Artificial Sequence: Synthetic oligonucleotide
uaccggauacagauguuua

SEQ ID NO: 2945548 - RNA, 19 nt, Artificial Sequence
  Description of Artificial Sequence: Synthetic oligonucleotide
uguguguguguguaugauu

SEQ ID NO: 2945549 - RNA, 19 nt, Artificial Sequence
  Description of Artificial Sequence: Synthetic oligonucleotide
aaggaacaaauggggaaaa

SEQ ID NO: 2945550 - RNA, 19 nt, Artificial Sequence
  Description of Artificial Sequence: Synthetic oligonucleotide
uuaccggauacagauguuu

SEQ ID NO: 2945551 - RNA, 19 nt, Artificial Sequence
  Description of Artificial Sequence: Synthetic oligonucleotide
gauacaguuuuaggaagaa

SEQ ID NO: 2945552 - RNA, 19 nt, Artificial Sequence
  Description of Artificial Sequence: Synthetic oligonucleotide
ucuucuucuucuucuucuu

SEQ ID NO: 2945553 - RNA, 19 nt, Artificial Sequence
  Description of Artificial Sequence: Synthetic oligonucleotide
auggaacaccagcacugag

SEQ ID NO: 2945554 - RNA, 19 nt, Artificial Sequence
  Description of Artificial Sequence: Synthetic oligonucleotide
caguagguagcuuuagaaa

SEQ ID NO: 2945555 - RNA, 19 nt, Artificial Sequence
  Description of Artificial Sequence: Synthetic oligonucleotide
cucucugugugugugugug

SEQ ID NO: 2945556 - RNA, 19 nt, Artificial Sequence
  Description of Artificial Sequence: Synthetic oligonucleotide
guguguguaugauuccaca

SEQ ID NO: 2945557 - RNA, 19 nt, Artificial Sequence
  Description of Artificial Sequence: Synthetic oligonucleotide
uucuucucucucucucucu

SEQ ID NO: 2945558 - RNA, 19 nt, Artificial Sequence
  Description of Artificial Sequence: Synthetic oligonucleotide
auccuaucuguaacuuuac

SEQ ID NO: 2945559 - RNA, 19 nt, Artificial Sequence
  Description of Artificial Sequence: Synthetic oligonucleotide
auacagauguuuagcaaaa

SEQ ID NO: 2945560 - RNA, 19 nt, Artificial Sequence
  Description of Artificial Sequence: Synthetic oligonucleotide
cuucuucucucucucucuc

SEQ ID NO: 2945561 - RNA, 19 nt, Artificial Sequence
  Description of Artificial Sequence: Synthetic oligonucleotide
cucucucucucucucugug

SEQ ID NO: 2945562 - RNA, 19 nt, Artificial Sequence
  Description of Artificial Sequence: Synthetic oligonucleotide
ugugugugugugugugugu

SEQ ID NO: 2945563 - RNA, 19 nt, Artificial Sequence
  Description of Artificial Sequence: Synthetic oligonucleotide
cuucuucuucuucuucuuc

SEQ ID NO: 2945564 - RNA, 19 nt, Artificial Sequence
  Description of Artificial Sequence: Synthetic oligonucleotide
ucucucucucucucugugu

SEQ ID NO: 2945565 - RNA, 19 nt, Artificial Sequence
  Description of Artificial Sequence: Synthetic oligonucleotide
ucugugugugugugugugu

SEQ ID NO: 2945566 - RNA, 19 nt, Artificial Sequence
  Description of Artificial Sequence: Synthetic oligonucleotide
cucugugugugugugugug

SEQ ID NO: 2945567 - RNA, 19 nt, Artificial Sequence
  Description of Artificial Sequence: Synthetic oligonucleotide
cucucucucucucucucug

SEQ ID NO: 2945568 - RNA, 19 nt, Artificial Sequence
  Description of Artificial Sequence: Synthetic oligonucleotide
agucaguagguagcuuuag

SEQ ID NO: 2945569 - RNA, 19 nt, Artificial Sequence
  Description of Artificial Sequence: Synthetic oligonucleotide
auuuuaccggauacagaug

SEQ ID NO: 2945570 - RNA, 19 nt, Artificial Sequence
  Description of Artificial Sequence: Synthetic oligonucleotide
guguguguguguguguaug

SEQ ID NO: 2945571 - RNA, 19 nt, Artificial Sequence
  Description of Artificial Sequence: Synthetic oligonucleotide
acauccuaucuguaacuuu

SEQ ID NO: 2945572 - RNA, 19 nt, Artificial Sequence
  Description of Artificial Sequence: Synthetic oligonucleotide
auacuuuuauugaaaugua

SEQ ID NO: 2945573 - RNA, 19 nt, Artificial Sequence
  Description of Artificial Sequence: Synthetic oligonucleotide
uuuaccggauacagauguu

SEQ ID NO: 2945574 - RNA, 19 nt, Artificial Sequence
  Description of Artificial Sequence: Synthetic oligonucleotide
cugugugugugugugugug

SEQ ID NO: 2945575 - RNA, 19 nt, Artificial Sequence
  Description of Artificial Sequence: Synthetic oligonucleotide
caauuugucaagaguauuu

SEQ ID NO: 2945576 - RNA, 19 nt, Artificial Sequence
  Description of Artificial Sequence: Synthetic oligonucleotide
uacauccuaucuguaacuu

SEQ ID NO: 2945577 - RNA, 19 nt, Artificial Sequence
  Description of Artificial Sequence: Synthetic oligonucleotide
gugugugugugugugugug

SEQ ID NO: 2945578 - RNA, 19 nt, Artificial Sequence
  Description of Artificial Sequence: Synthetic oligonucleotide
gucaguagguagcuuuaga

SEQ ID NO: 2945579 - RNA, 19 nt, Artificial Sequence
  Description of Artificial Sequence: Synthetic oligonucleotide
ucucucucucucucucucu

SEQ ID NO: 2945580 - RNA, 19 nt, Artificial Sequence
  Description of Artificial Sequence: Synthetic oligonucleotide
augguaaguaaggaacaaa

SEQ ID NO: 2945581 - RNA, 19 nt, Artificial Sequence
  Description of Artificial Sequence: Synthetic oligonucleotide
caguuuuaggaagaauaca

SEQ ID NO: 2945582 - RNA, 19 nt, Artificial Sequence
  Description of Artificial Sequence: Synthetic oligonucleotide
ucucucucucucugugugu

SEQ ID NO: 2945583 - RNA, 19 nt, Artificial Sequence
  Description of Artificial Sequence: Synthetic oligonucleotide
guauuuuaccggauacaga

SEQ ID NO: 2945584 - RNA, 19 nt, Artificial Sequence
  Description of Artificial Sequence: Synthetic oligonucleotide
cucucucucucugugugug

SEQ ID NO: 2945585 - RNA, 19 nt, Artificial Sequence
  Description of Artificial Sequence: Synthetic oligonucleotide
ucucucucucucucucugu

SEQ ID NO: 2945586 - RNA, 19 nt, Artificial Sequence
  Description of Artificial Sequence: Synthetic oligonucleotide
gguagcuuuagaaaugaua

SEQ ID NO: 2945587 - RNA, 19 nt, Artificial Sequence
  Description of Artificial Sequence: Synthetic oligonucleotide
ggauacagauguuuagcaa

SEQ ID NO: 2945588 - RNA, 19 nt, Artificial Sequence
  Description of Artificial Sequence: Synthetic oligonucleotide
uguguguguguguguguau

SEQ ID NO: 2945589 - RNA, 19 nt, Artificial Sequence
  Description of Artificial Sequence: Synthetic oligonucleotide
aagucaguagguagcuuua

SEQ ID NO: 2945590 - RNA, 19 nt, Artificial Sequence
  Description of Artificial Sequence: Synthetic oligonucleotide
ccuaucuguaacuuuacua

SEQ ID NO: 2945591 - RNA, 19 nt, Artificial Sequence
  Description of Artificial Sequence: Synthetic oligonucleotide
ucucucugugugugugugu

SEQ ID NO: 2945592 - RNA, 19 nt, Artificial Sequence
  Description of Artificial Sequence: Synthetic oligonucleotide
auacaguuuuaggaagaau

SEQ ID NO: 2945593 - RNA, 19 nt, Artificial Sequence
  Description of Artificial Sequence: Synthetic oligonucleotide
ucucugugugugugugugu

SEQ ID NO: 2945594 - RNA, 19 nt, Artificial Sequence
  Description of Artificial Sequence: Synthetic oligonucleotide
cucucucucugugugugug

SEQ ID NO: 2945595 - RNA, 19 nt, Artificial Sequence
  Description of Artificial Sequence: Synthetic oligonucleotide
guacaucccaaaauuugaa

SEQ ID NO: 2945596 - RNA, 19 nt, Artificial Sequence
  Description of Artificial Sequence: Synthetic oligonucleotide
cucucucugugugugugug

SEQ ID NO: 2945597 - RNA, 19 nt, Artificial Sequence
  Description of Artificial Sequence: Synthetic oligonucleotide
caagucaguagguagcuuu

SEQ ID NO: 2945598 - RNA, 19 nt, Artificial Sequence
  Description of Artificial Sequence: Synthetic oligonucleotide
cuguaacuuuacuauggua

SEQ ID NO: 2945599 - RNA, 19 nt, Artificial Sequence
  Description of Artificial Sequence: Synthetic oligonucleotide
ugguuggagucaagucagu

SEQ ID NO: 2945600 - RNA, 19 nt, Artificial Sequence
  Description of Artificial Sequence: Synthetic oligonucleotide
ccggauacagauguuuagc

SEQ ID NO: 2945601 - RNA, 19 nt, Artificial Sequence
  Description of Artificial Sequence: Synthetic oligonucleotide
gaucuaggagaaugacaua

SEQ ID NO: 2945602 - RNA, 19 nt, Artificial Sequence
  Description of Artificial Sequence: Synthetic oligonucleotide
accagcacugagaaaguuu

SEQ ID NO: 2945603 - RNA, 19 nt, Artificial Sequence
  Description of Artificial Sequence: Synthetic oligonucleotide
gguaugcaauuugucaaga

SEQ ID NO: 2945604 - RNA, 19 nt, Artificial Sequence
  Description of Artificial Sequence: Synthetic oligonucleotide
cacauggaacaccagcacu

SEQ ID NO: 2945605 - RNA, 19 nt, Artificial Sequence
  Description of Artificial Sequence: Synthetic oligonucleotide
gcagaucuaggagaaugac

SEQ ID NO: 2945606 - RNA, 19 nt, Artificial Sequence
  Description of Artificial Sequence: Synthetic oligonucleotide
cauggaacaccagcacuga

SEQ ID NO: 2945607 - RNA, 19 nt, Artificial Sequence
  Description of Artificial Sequence: Synthetic oligonucleotide
ucaagucaguagguagcuu

SEQ ID NO: 2945608 - RNA, 19 nt, Artificial Sequence
  Description of Artificial Sequence: Synthetic oligonucleotide
ggcagaucuaggagaauga

SEQ ID NO: 2945609 - RNA, 19 nt, Artificial Sequence
  Description of Artificial Sequence: Synthetic oligonucleotide
guaguacaucccaaaauuu

SEQ ID NO: 2945610 - RNA, 19 nt, Artificial Sequence
  Description of Artificial Sequence: Synthetic oligonucleotide
gucaagucaguagguagcu

SEQ ID NO: 2945611 - RNA, 19 nt, Artificial Sequence
  Description of Artificial Sequence: Synthetic oligonucleotide
aaggcagaucuaggagaau

SEQ ID NO: 2945612 - RNA, 19 nt, Artificial Sequence
  Description of Artificial Sequence: Synthetic oligonucleotide
cuucuucuucuucuucucu

SEQ ID NO: 2945613 - RNA, 19 nt, Artificial Sequence
  Description of Artificial Sequence: Synthetic oligonucleotide
gugugugugugugugugua

SEQ ID NO: 2945614 - RNA, 19 nt, Artificial Sequence
  Description of Artificial Sequence: Synthetic oligonucleotide
gaacaccagcacugagaaa

SEQ ID NO: 2945615 - RNA, 19 nt, Artificial Sequence
  Description of Artificial Sequence: Synthetic oligonucleotide
cuuucuucuucuucuucuu

SEQ ID NO: 2945616 - RNA, 19 nt, Artificial Sequence
  Description of Artificial Sequence: Synthetic oligonucleotide
cggauacagauguuuagca

SEQ ID NO: 2945617 - RNA, 19 nt, Artificial Sequence
  Description of Artificial Sequence: Synthetic oligonucleotide
gcuuuagaaaugauacagu

SEQ ID NO: 2945618 - RNA, 19 nt, Artificial Sequence
  Description of Artificial Sequence: Synthetic oligonucleotide
caagaguauuuuaccggau

SEQ ID NO: 2945619 - RNA, 19 nt, Artificial Sequence
  Description of Artificial Sequence: Synthetic oligonucleotide
ggagucaagucaguaggua

SEQ ID NO: 2945620 - RNA, 19 nt, Artificial Sequence
  Description of Artificial Sequence: Synthetic oligonucleotide
cuucuucuucucucucucu

SEQ ID NO: 2945621 - RNA, 19 nt, Artificial Sequence
  Description of Artificial Sequence: Synthetic oligonucleotide
cuucucucucucucucucu

SEQ ID NO: 2945622 - RNA, 19 nt, Artificial Sequence
  Description of Artificial Sequence: Synthetic oligonucleotide
agguagcuuuagaaaugau

SEQ ID NO: 2945623 - RNA, 19 nt, Artificial Sequence
  Description of Artificial Sequence: Synthetic oligonucleotide
gguuggagucaagucagua

SEQ ID NO: 2945624 - RNA, 19 nt, Artificial Sequence
  Description of Artificial Sequence: Synthetic oligonucleotide
guguguguguguguaugau

SEQ ID NO: 2945625 - RNA, 19 nt, Artificial Sequence
  Description of Artificial Sequence: Synthetic oligonucleotide
gcaauuugucaagaguauu

SEQ ID NO: 2945626 - RNA, 19 nt, Artificial Sequence
  Description of Artificial Sequence: Synthetic oligonucleotide
caccagcacugagaaaguu

SEQ ID NO: 2945627 - RNA, 19 nt, Artificial Sequence
  Description of Artificial Sequence: Synthetic oligonucleotide
aaauuuaacccuugaaggc

SEQ ID NO: 2945628 - RNA, 19 nt, Artificial Sequence
  Description of Artificial Sequence: Synthetic oligonucleotide
caaauuuaacccuugaagg

SEQ ID NO: 2945629 - RNA, 19 nt, Artificial Sequence
  Description of Artificial Sequence: Synthetic oligonucleotide
acaaauuuaacccuugaag

SEQ ID NO: 2945630 - RNA, 19 nt, Artificial Sequence
  Description of Artificial Sequence: Synthetic oligonucleotide
gccauuaacaaauuuaacc

SEQ ID NO: 2945631 - RNA, 19 nt, Artificial Sequence
  Description of Artificial Sequence: Synthetic oligonucleotide
ccauuaacaaauuuaaccc

SEQ ID NO: 2945632 - RNA, 19 nt, Artificial Sequence
  Description of Artificial Sequence: Synthetic oligonucleotide
aauuuaacccuugaaggca

SEQ ID NO: 2945633 - RNA, 19 nt, Artificial Sequence
  Description of Artificial Sequence: Synthetic oligonucleotide
uuaacaaauuuaacccuug

SEQ ID NO: 2945634 - RNA, 19 nt, Artificial Sequence
  Description of Artificial Sequence: Synthetic oligonucleotide
aacaaauuuaacccuugaa

SEQ ID NO: 2945635 - RNA, 19 nt, Artificial Sequence
  Description of Artificial Sequence: Synthetic oligonucleotide
ucugggugggaucugcugg

SEQ ID NO: 2945636 - RNA, 19 nt, Artificial Sequence
  Description of Artificial Sequence: Synthetic oligonucleotide
uaggugaagggucugggug

SEQ ID NO: 2945637 - RNA, 19 nt, Artificial Sequence
  Description of Artificial Sequence: Synthetic oligonucleotide
cuguguguggcacuggugg

SEQ ID NO: 2945638 - RNA, 19 nt, Artificial Sequence
  Description of Artificial Sequence: Synthetic oligonucleotide
gugguauugagguagguga

SEQ ID NO: 2945639 - RNA, 19 nt, Artificial Sequence
  Description of Artificial Sequence: Synthetic oligonucleotide
uaacaaauuuaacccuuga

SEQ ID NO: 2945640 - RNA, 19 nt, Artificial Sequence
  Description of Artificial Sequence: Synthetic oligonucleotide
guauugagguaggugaagg

SEQ ID NO: 2945641 - RNA, 19 nt, Artificial Sequence
  Description of Artificial Sequence: Synthetic oligonucleotide
uugagguaggugaaggguc

SEQ ID NO: 2945642 - RNA, 19 nt, Artificial Sequence
  Description of Artificial Sequence: Synthetic oligonucleotide
ugguuuagcuucuccagga

SEQ ID NO: 2945643 - RNA, 19 nt, Artificial Sequence
  Description of Artificial Sequence: Synthetic oligonucleotide
gaucugcugguuuagcuuc

SEQ ID NO: 2945644 - RNA, 19 nt, Artificial Sequence
  Description of Artificial Sequence: Synthetic oligonucleotide
cugguuuagcuucuccagg

SEQ ID NO: 2945645 - RNA, 19 nt, Artificial Sequence
  Description of Artificial Sequence: Synthetic oligonucleotide
ugccauuaacaaauuuaac

SEQ ID NO: 2945646 - RNA, 19 nt, Artificial Sequence
  Description of Artificial Sequence: Synthetic oligonucleotide
auuaacaaauuuaacccuu

SEQ ID NO: 2945647 - RNA, 19 nt, Artificial Sequence
  Description of Artificial Sequence: Synthetic oligonucleotide
uguguggcacugguggugg

SEQ ID NO: 2945648 - RNA, 19 nt, Artificial Sequence
  Description of Artificial Sequence: Synthetic oligonucleotide
gguggugguauugagguag

SEQ ID NO: 2945649 - RNA, 19 nt, Artificial Sequence
  Description of Artificial Sequence: Synthetic oligonucleotide
ugguauugagguaggugaa

SEQ ID NO: 2945650 - RNA, 19 nt, Artificial Sequence
  Description of Artificial Sequence: Synthetic oligonucleotide
acugguggugguauugagg

SEQ ID NO: 2945651 - RNA, 19 nt, Artificial Sequence
  Description of Artificial Sequence: Synthetic oligonucleotide
ugaggaugguggcugugcu

SEQ ID NO: 2945652 - RNA, 19 nt, Artificial Sequence
  Description of Artificial Sequence: Synthetic oligonucleotide
cauuaacaaauuuaacccu

SEQ ID NO: 2945653 - RNA, 19 nt, Artificial Sequence
  Description of Artificial Sequence: Synthetic oligonucleotide
ugugcuguguguggcacug

SEQ ID NO: 2945654 - RNA, 19 nt, Artificial Sequence
  Description of Artificial Sequence: Synthetic oligonucleotide
uaacccuugaaggcaauuc

SEQ ID NO: 2945655 - RNA, 19 nt, Artificial Sequence
  Description of Artificial Sequence: Synthetic oligonucleotide
gugccauuaacaaauuuaa

SEQ ID NO: 2945656 - RNA, 19 nt, Artificial Sequence
  Description of Artificial Sequence: Synthetic oligonucleotide
ugcuguguguggcacuggu

SEQ ID NO: 2945657 - RNA, 19 nt, Artificial Sequence
  Description of Artificial Sequence: Synthetic oligonucleotide
guggcugugcugugugugg

SEQ ID NO: 2945658 - RNA, 19 nt, Artificial Sequence
  Description of Artificial Sequence: Synthetic oligonucleotide
uguguguggcacugguggu

SEQ ID NO: 2945659 - RNA, 19 nt, Artificial Sequence
  Description of Artificial Sequence: Synthetic oligonucleotide
cugguggugguauugaggu

SEQ ID NO: 2945660 - RNA, 19 nt, Artificial Sequence
  Description of Artificial Sequence: Synthetic oligonucleotide
ggugguauugagguaggug

SEQ ID NO: 2945661 - RNA, 19 nt, Artificial Sequence
  Description of Artificial Sequence: Synthetic oligonucleotide
auuuaacccuugaaggcaa

SEQ ID NO: 2945662 - RNA, 19 nt, Artificial Sequence
  Description of Artificial Sequence: Synthetic oligonucleotide
agguaggugaagggucugg

SEQ ID NO: 2945663 - RNA, 19 nt, Artificial Sequence
  Description of Artificial Sequence: Synthetic oligonucleotide
gguaggugaagggucuggg

SEQ ID NO: 2945664 - RNA, 19 nt, Artificial Sequence
  Description of Artificial Sequence: Synthetic oligonucleotide
ugaagggucugggugggau

SEQ ID NO: 2945665 - RNA, 19 nt, Artificial Sequence
  Description of Artificial Sequence: Synthetic oligonucleotide
cacugguggugguauugag

SEQ ID NO: 2945666 - RNA, 19 nt, Artificial Sequence
  Description of Artificial Sequence: Synthetic oligonucleotide
gucugggugggaucugcug

SEQ ID NO: 2945667 - RNA, 19 nt, Artificial Sequence
  Description of Artificial Sequence: Synthetic oligonucleotide
cugcugguuuagcuucucc

SEQ ID NO: 2945668 - RNA, 19 nt, Artificial Sequence
  Description of Artificial Sequence: Synthetic oligonucleotide
uuaacccuugaaggcaauu

SEQ ID NO: 2945669 - RNA, 19 nt, Artificial Sequence
  Description of Artificial Sequence: Synthetic oligonucleotide
guggugguauugagguagg

SEQ ID NO: 2945670 - RNA, 19 nt, Artificial Sequence
  Description of Artificial Sequence: Synthetic oligonucleotide
ugggaucugcugguuuagc

SEQ ID NO: 2945671 - RNA, 19 nt, Artificial Sequence
  Description of Artificial Sequence: Synthetic oligonucleotide
guguguggcacugguggug

SEQ ID NO: 2945672 - RNA, 19 nt, Artificial Sequence
  Description of Artificial Sequence: Synthetic oligonucleotide
gagguaggugaagggucug

SEQ ID NO: 2945673 - RNA, 19 nt, Artificial Sequence
  Description of Artificial Sequence: Synthetic oligonucleotide
gguggcugugcugugugug

SEQ ID NO: 2945674 - RNA, 19 nt, Artificial Sequence
  Description of Artificial Sequence: Synthetic oligonucleotide
uguggcacuggugguggua

SEQ ID NO: 2945675 - RNA, 19 nt, Artificial Sequence
  Description of Artificial Sequence: Synthetic oligonucleotide
guaggugaagggucugggu

SEQ ID NO: 2945676 - RNA, 19 nt, Artificial Sequence
  Description of Artificial Sequence: Synthetic oligonucleotide
ggugggaucugcugguuua

SEQ ID NO: 2945677 - RNA, 19 nt, Artificial Sequence
  Description of Artificial Sequence: Synthetic oligonucleotide
uggugguauugagguaggu

SEQ ID NO: 2945678 - RNA, 19 nt, Artificial Sequence
  Description of Artificial Sequence: Synthetic oligonucleotide
ugguggugguauugaggua

SEQ ID NO: 2945679 - RNA, 19 nt, Artificial Sequence
  Description of Artificial Sequence: Synthetic oligonucleotide
ugguggcugugcugugugu

SEQ ID NO: 2945680 - RNA, 19 nt, Artificial Sequence
  Description of Artificial Sequence: Synthetic oligonucleotide
gcugugcuguguguggcac

SEQ ID NO: 2945681 - RNA, 19 nt, Artificial Sequence
  Description of Artificial Sequence: Synthetic oligonucleotide
gcuguguguggcacuggug

SEQ ID NO: 2945682 - RNA, 19 nt, Artificial Sequence
  Description of Artificial Sequence: Synthetic oligonucleotide
gggucugggugggaucugc

SEQ ID NO: 2945683 - RNA, 19 nt, Artificial Sequence
  Description of Artificial Sequence: Synthetic oligonucleotide
ggcugugcuguguguggca

SEQ ID NO: 2945684 - RNA, 19 nt, Artificial Sequence
  Description of Artificial Sequence: Synthetic oligonucleotide
gguuuagcuucuccaggau

SEQ ID NO: 2945685 - RNA, 19 nt, Artificial Sequence
  Description of Artificial Sequence: Synthetic oligonucleotide
ugggugggaucugcugguu

SEQ ID NO: 2945686 - RNA, 19 nt, Artificial Sequence
  Description of Artificial Sequence: Synthetic oligonucleotide
agggucugggugggaucug

SEQ ID NO: 2945687 - RNA, 19 nt, Artificial Sequence
  Description of Artificial Sequence: Synthetic oligonucleotide
gcacugguggugguauuga

SEQ ID NO: 2945688 - RNA, 19 nt, Artificial Sequence
  Description of Artificial Sequence: Synthetic oligonucleotide
cugugcuguguguggcacu

SEQ ID NO: 2945689 - RNA, 19 nt, Artificial Sequence
  Description of Artificial Sequence: Synthetic oligonucleotide
gugaagggucuggguggga

SEQ ID NO: 2945690 - RNA, 19 nt, Artificial Sequence
  Description of Artificial Sequence: Synthetic oligonucleotide
guguggcacuggugguggu

SEQ ID NO: 2945691 - RNA, 19 nt, Artificial Sequence
  Description of Artificial Sequence: Synthetic oligonucleotide
gggugggaucugcugguuu

SEQ ID NO: 2945692 - RNA, 19 nt, Artificial Sequence
  Description of Artificial Sequence: Synthetic oligonucleotide
ggucugggugggaucugcu

SEQ ID NO: 2945693 - RNA, 19 nt, Artificial Sequence
  Description of Artificial Sequence: Synthetic oligonucleotide
uuugagacaaaucugagag

SEQ ID NO: 2945694 - RNA, 19 nt, Artificial Sequence
  Description of Artificial Sequence: Synthetic oligonucleotide
aauguagaaguccucgggc

SEQ ID NO: 2945695 - RNA, 19 nt, Artificial Sequence
  Description of Artificial Sequence: Synthetic oligonucleotide
aacacguucacauagcugu

SEQ ID NO: 2945696 - RNA, 19 nt, Artificial Sequence
  Description of Artificial Sequence: Synthetic oligonucleotide
ucuauguaaucuuugaagc

SEQ ID NO: 2945697 - RNA, 19 nt, Artificial Sequence
  Description of Artificial Sequence: Synthetic oligonucleotide
auggcugcuacuuugagac

SEQ ID NO: 2945698 - RNA, 19 nt, Artificial Sequence
  Description of Artificial Sequence: Synthetic oligonucleotide
uucuauguaaucuuugaag

SEQ ID NO: 2945699 - RNA, 19 nt, Artificial Sequence
  Description of Artificial Sequence: Synthetic oligonucleotide
aucuuugaagccuuugucc

SEQ ID NO: 2945700 - RNA, 19 nt, Artificial Sequence
  Description of Artificial Sequence: Synthetic oligonucleotide
aauguauguguucugacgu

SEQ ID NO: 2945701 - RNA, 19 nt, Artificial Sequence
  Description of Artificial Sequence: Synthetic oligonucleotide
uguucaaggaacaaguacu

SEQ ID NO: 2945702 - RNA, 19 nt, Artificial Sequence
  Description of Artificial Sequence: Synthetic oligonucleotide
aaucuuugaagccuuuguc

SEQ ID NO: 2945703 - RNA, 19 nt, Artificial Sequence
  Description of Artificial Sequence: Synthetic oligonucleotide
uuguuacucagcuuggugg

SEQ ID NO: 2945704 - RNA, 19 nt, Artificial Sequence
  Description of Artificial Sequence: Synthetic oligonucleotide
aaguucaauguagaagucc

SEQ ID NO: 2945705 - RNA, 19 nt, Artificial Sequence
  Description of Artificial Sequence: Synthetic oligonucleotide
ugagacaaaucugagagag

SEQ ID NO: 2945706 - RNA, 19 nt, Artificial Sequence
  Description of Artificial Sequence: Synthetic oligonucleotide
ucuaaguucaauguagaag

SEQ ID NO: 2945707 - RNA, 19 nt, Artificial Sequence
  Description of Artificial Sequence: Synthetic oligonucleotide
uaauguauguguucugacg

SEQ ID NO: 2945708 - RNA, 19 nt, Artificial Sequence
  Description of Artificial Sequence: Synthetic oligonucleotide
uuuauucuguucaaggaac

SEQ ID NO: 2945709 - RNA, 19 nt, Artificial Sequence
  Description of Artificial Sequence: Synthetic oligonucleotide
gaaaugggagucuaacacg

SEQ ID NO: 2945710 - RNA, 19 nt, Artificial Sequence
  Description of Artificial Sequence: Synthetic oligonucleotide
uagaacugcauguagauuc

SEQ ID NO: 2945711 - RNA, 19 nt, Artificial Sequence
  Description of Artificial Sequence: Synthetic oligonucleotide
aggaacaaguacuagaacu

SEQ ID NO: 2945712 - RNA, 19 nt, Artificial Sequence
  Description of Artificial Sequence: Synthetic oligonucleotide
uuuuauucuguucaaggaa

SEQ ID NO: 2945713 - RNA, 19 nt, Artificial Sequence
  Description of Artificial Sequence: Synthetic oligonucleotide
uacuuugagacaaaucuga

SEQ ID NO: 2945714 - RNA, 19 nt, Artificial Sequence
  Description of Artificial Sequence: Synthetic oligonucleotide
aaguacuagaacugcaugu

SEQ ID NO: 2945715 - RNA, 19 nt, Artificial Sequence
  Description of Artificial Sequence: Synthetic oligonucleotide
uucaauguagaaguccucg

SEQ ID NO: 2945716 - RNA, 19 nt, Artificial Sequence
  Description of Artificial Sequence: Synthetic oligonucleotide
auuggaaaagcacugggca

SEQ ID NO: 2945717 - RNA, 19 nt, Artificial Sequence
  Description of Artificial Sequence: Synthetic oligonucleotide
uuguccauaauguaugugu

SEQ ID NO: 2945718 - RNA, 19 nt, Artificial Sequence
  Description of Artificial Sequence: Synthetic oligonucleotide
uucuguucaaggaacaagu

SEQ ID NO: 2945719 - RNA, 19 nt, Artificial Sequence
  Description of Artificial Sequence: Synthetic oligonucleotide
ucaaggaacaaguacuaga

SEQ ID NO: 2945720 - RNA, 19 nt, Artificial Sequence
  Description of Artificial Sequence: Synthetic oligonucleotide
auaauguauguguucugac

SEQ ID NO: 2945721 - RNA, 19 nt, Artificial Sequence
  Description of Artificial Sequence: Synthetic oligonucleotide
aaaucugagagagaguagu

SEQ ID NO: 2945722 - RNA, 19 nt, Artificial Sequence
  Description of Artificial Sequence: Synthetic oligonucleotide
agacaaaucugagagagag

SEQ ID NO: 2945723 - RNA, 19 nt, Artificial Sequence
  Description of Artificial Sequence: Synthetic oligonucleotide
aaggaacaaguacuagaac

SEQ ID NO: 2945724 - RNA, 19 nt, Artificial Sequence
  Description of Artificial Sequence: Synthetic oligonucleotide
uguuacucagcuugguggg

SEQ ID NO: 2945725 - RNA, 19 nt, Artificial Sequence
  Description of Artificial Sequence: Synthetic oligonucleotide
  modified_base (11)..(11): a, c, u, g, unknown or other
uguccaguccncaagugcc

SEQ ID NO: 2945726 - RNA, 19 nt, Artificial Sequence
  Description of Artificial Sequence: Synthetic oligonucleotide
acugcauguagauucuuuc

SEQ ID NO: 2945727 - RNA, 19 nt, Artificial Sequence
  Description of Artificial Sequence: Synthetic oligonucleotide
uauguaaucuuugaagccu

SEQ ID NO: 2945728 - RNA, 19 nt, Artificial Sequence
  Description of Artificial Sequence: Synthetic oligonucleotide
aaaagcacugggcauggcu

SEQ ID NO: 2945729 - RNA, 19 nt, Artificial Sequence
  Description of Artificial Sequence: Synthetic oligonucleotide
cuauguaaucuuugaagcc

SEQ ID NO: 2945730 - RNA, 19 nt, Artificial Sequence
  Description of Artificial Sequence: Synthetic oligonucleotide
ucaauguagaaguccucgg

SEQ ID NO: 2945731 - RNA, 19 nt, Artificial Sequence
  Description of Artificial Sequence: Synthetic oligonucleotide
ucugagagagaguagucug

SEQ ID NO: 2945732 - RNA, 19 nt, Artificial Sequence
  Description of Artificial Sequence: Synthetic oligonucleotide
ugugucucugucaagggac

SEQ ID NO: 2945733 - RNA, 19 nt, Artificial Sequence
  Description of Artificial Sequence: Synthetic oligonucleotide
uguagaaguccucgggcgg

SEQ ID NO: 2945734 - RNA, 19 nt, Artificial Sequence
  Description of Artificial Sequence: Synthetic oligonucleotide
ucuuucuauguaaucuuug

SEQ ID NO: 2945735 - RNA, 19 nt, Artificial Sequence
  Description of Artificial Sequence: Synthetic oligonucleotide
cuaaguucaauguagaagu

SEQ ID NO: 2945736 - RNA, 19 nt, Artificial Sequence
  Description of Artificial Sequence: Synthetic oligonucleotide
ugaguguggcucauugugg

SEQ ID NO: 2945737 - RNA, 19 nt, Artificial Sequence
  Description of Artificial Sequence: Synthetic oligonucleotide
auguagaaguccucgggcg

SEQ ID NO: 2945738 - RNA, 19 nt, Artificial Sequence
  Description of Artificial Sequence: Synthetic oligonucleotide
aagcacugggcauggcugc

SEQ ID NO: 2945739 - RNA, 19 nt, Artificial Sequence
  Description of Artificial Sequence: Synthetic oligonucleotide
gucuaacacguucacauag

SEQ ID NO: 2945740 - RNA, 19 nt, Artificial Sequence
  Description of Artificial Sequence: Synthetic oligonucleotide
ucuaacacguucacauagc

SEQ ID NO: 2945741 - RNA, 19 nt, Artificial Sequence
  Description of Artificial Sequence: Synthetic oligonucleotide
uccauaauguauguguucu

SEQ ID NO: 2945742 - RNA, 19 nt, Artificial Sequence
  Description of Artificial Sequence: Synthetic oligonucleotide
uacuagaacugcauguaga

SEQ ID NO: 2945743 - RNA, 19 nt, Artificial Sequence
  Description of Artificial Sequence: Synthetic oligonucleotide
agagagaguagucugugcu

SEQ ID NO: 2945744 - RNA, 19 nt, Artificial Sequence
  Description of Artificial Sequence: Synthetic oligonucleotide
uguagauucuuucuaugua

SEQ ID NO: 2945745 - RNA, 19 nt, Artificial Sequence
  Description of Artificial Sequence: Synthetic oligonucleotide
agauucuuucuauguaauc

SEQ ID NO: 2945746 - RNA, 19 nt, Artificial Sequence
  Description of Artificial Sequence: Synthetic oligonucleotide
guucacauagcuguagggg

SEQ ID NO: 2945747 - RNA, 19 nt, Artificial Sequence
  Description of Artificial Sequence: Synthetic oligonucleotide
gaggugucuaaguucaaug

SEQ ID NO: 2945748 - RNA, 19 nt, Artificial Sequence
  Description of Artificial Sequence: Synthetic oligonucleotide
ugcugugucucugucaagg

SEQ ID NO: 2945749 - RNA, 19 nt, Artificial Sequence
  Description of Artificial Sequence: Synthetic oligonucleotide
uguguucugacgucugucc

SEQ ID NO: 2945750 - RNA, 19 nt, Artificial Sequence
  Description of Artificial Sequence: Synthetic oligonucleotide
uuauucuguucaaggaaca

SEQ ID NO: 2945751 - RNA, 19 nt, Artificial Sequence
  Description of Artificial Sequence: Synthetic oligonucleotide
augggagucuaacacguuc

SEQ ID NO: 2945752 - RNA, 19 nt, Artificial Sequence
  Description of Artificial Sequence: Synthetic oligonucleotide
agcuugguggggcuguucc

SEQ ID NO: 2945753 - RNA, 19 nt, Artificial Sequence
  Description of Artificial Sequence: Synthetic oligonucleotide
ugucuaaguucaauguaga

SEQ ID NO: 2945754 - RNA, 19 nt, Artificial Sequence
  Description of Artificial Sequence: Synthetic oligonucleotide
caauguagaaguccucggg

SEQ ID NO: 2945755 - RNA, 19 nt, Artificial Sequence
  Description of Artificial Sequence: Synthetic oligonucleotide
cugucaagggacuuguuac

SEQ ID NO: 2945756 - RNA, 19 nt, Artificial Sequence
  Description of Artificial Sequence: Synthetic oligonucleotide
ggaaaugggagucuaacac

SEQ ID NO: 2945757 - RNA, 19 nt, Artificial Sequence
  Description of Artificial Sequence: Synthetic oligonucleotide
aaaugggagucuaacacgu

SEQ ID NO: 2945758 - RNA, 19 nt, Artificial Sequence
  Description of Artificial Sequence: Synthetic oligonucleotide
auguagauucuuucuaugu

SEQ ID NO: 2945759 - RNA, 19 nt, Artificial Sequence
  Description of Artificial Sequence: Synthetic oligonucleotide
ggacuuguuacucagcuug

SEQ ID NO: 2945760 - RNA, 19 nt, Artificial Sequence
  Description of Artificial Sequence: Synthetic oligonucleotide
acaaaucugagagagagua

SEQ ID NO: 2945761 - RNA, 19 nt, Artificial Sequence
  Description of Artificial Sequence: Synthetic oligonucleotide
gugucuaaguucaauguag

SEQ ID NO: 2945762 - RNA, 19 nt, Artificial Sequence
  Description of Artificial Sequence: Synthetic oligonucleotide
cuacuuugagacaaaucug

SEQ ID NO: 2945763 - RNA, 19 nt, Artificial Sequence
  Description of Artificial Sequence: Synthetic oligonucleotide
  modified_base (4)..(4): a, c, u, g, unknown or other
uccncaagugccuggugag

SEQ ID NO: 2945764 - RNA, 19 nt, Artificial Sequence
  Description of Artificial Sequence: Synthetic oligonucleotide
agagaguagucugugcugg

SEQ ID NO: 2945765 - RNA, 19 nt, Artificial Sequence
  Description of Artificial Sequence: Synthetic oligonucleotide
gugaguguggcucauugug

SEQ ID NO: 2945766 - RNA, 19 nt, Artificial Sequence
  Description of Artificial Sequence: Synthetic oligonucleotide
acuagaacugcauguagau

SEQ ID NO: 2945767 - RNA, 19 nt, Artificial Sequence
  Description of Artificial Sequence: Synthetic oligonucleotide
cuguucaaggaacaaguac

SEQ ID NO: 2945768 - RNA, 19 nt, Artificial Sequence
  Description of Artificial Sequence: Synthetic oligonucleotide
gauucuuucuauguaaucu

SEQ ID NO: 2945769 - RNA, 19 nt, Artificial Sequence
  Description of Artificial Sequence: Synthetic oligonucleotide
ucugucaagggacuuguua

SEQ ID NO: 2945770 - RNA, 19 nt, Artificial Sequence
  Description of Artificial Sequence: Synthetic oligonucleotide
ucugacgucuguccagucc

SEQ ID NO: 2945771 - RNA, 19 nt, Artificial Sequence
  Description of Artificial Sequence: Synthetic oligonucleotide
gcuacuuugagacaaaucu

SEQ ID NO: 2945772 - RNA, 19 nt, Artificial Sequence
  Description of Artificial Sequence: Synthetic oligonucleotide
uguucugacgucuguccag

SEQ ID NO: 2945773 - RNA, 19 nt, Artificial Sequence
  Description of Artificial Sequence: Synthetic oligonucleotide
aaagcacugggcauggcug

SEQ ID NO: 2945774 - RNA, 19 nt, Artificial Sequence
  Description of Artificial Sequence: Synthetic oligonucleotide
uggaaaugggagucuaaca

SEQ ID NO: 2945775 - RNA, 19 nt, Artificial Sequence
  Description of Artificial Sequence: Synthetic oligonucleotide
uggcauuggaaaagcacug

SEQ ID NO: 2945776 - RNA, 19 nt, Artificial Sequence
  Description of Artificial Sequence: Synthetic oligonucleotide
ugcauguagauucuuucua

SEQ ID NO: 2945777 - RNA, 19 nt, Artificial Sequence
  Description of Artificial Sequence: Synthetic oligonucleotide
uaacacguucacauagcug

SEQ ID NO: 2945778 - RNA, 19 nt, Artificial Sequence
  Description of Artificial Sequence: Synthetic oligonucleotide
uuccuguccagagugcugg

SEQ ID NO: 2945779 - RNA, 19 nt, Artificial Sequence
  Description of Artificial Sequence: Synthetic oligonucleotide
aaucugagagagaguaguc

SEQ ID NO: 2945780 - RNA, 19 nt, Artificial Sequence
  Description of Artificial Sequence: Synthetic oligonucleotide
ugggagucuaacacguuca

SEQ ID NO: 2945781 - RNA, 19 nt, Artificial Sequence
  Description of Artificial Sequence: Synthetic oligonucleotide
guagauucuuucuauguaa

SEQ ID NO: 2945782 - RNA, 19 nt, Artificial Sequence
  Description of Artificial Sequence: Synthetic oligonucleotide
aguucaauguagaaguccu

SEQ ID NO: 2945783 - RNA, 19 nt, Artificial Sequence
  Description of Artificial Sequence: Synthetic oligonucleotide
ugugguagcuggcauugga

SEQ ID NO: 2945784 - RNA, 19 nt, Artificial Sequence
  Description of Artificial Sequence: Synthetic oligonucleotide
auucuguucaaggaacaag

SEQ ID NO: 2945785 - RNA, 19 nt, Artificial Sequence
  Description of Artificial Sequence: Synthetic oligonucleotide
gaacaaguacuagaacugc

SEQ ID NO: 2945786 - RNA, 19 nt, Artificial Sequence
  Description of Artificial Sequence: Synthetic oligonucleotide
cauguagauucuuucuaug

SEQ ID NO: 2945787 - RNA, 19 nt, Artificial Sequence
  Description of Artificial Sequence: Synthetic oligonucleotide
aggugucuaaguucaaugu

SEQ ID NO: 2945788 - RNA, 19 nt, Artificial Sequence
  Description of Artificial Sequence: Synthetic oligonucleotide
gagucuaacacguucacau

SEQ ID NO: 2945789 - RNA, 19 nt, Artificial Sequence
  Description of Artificial Sequence: Synthetic oligonucleotide
uggaaaagcacugggcaug

SEQ ID NO: 2945790 - RNA, 19 nt, Artificial Sequence
  Description of Artificial Sequence: Synthetic oligonucleotide
acguucacauagcuguagg

SEQ ID NO: 2945791 - RNA, 19 nt, Artificial Sequence
  Description of Artificial Sequence: Synthetic oligonucleotide
uggugaguguggcucauug

SEQ ID NO: 2945792 - RNA, 19 nt, Artificial Sequence
  Description of Artificial Sequence: Synthetic oligonucleotide
uagauucuuucuauguaau

SEQ ID NO: 2945793 - RNA, 19 nt, Artificial Sequence
  Description of Artificial Sequence: Synthetic oligonucleotide
agggacuuguuacucagcu

SEQ ID NO: 2945794 - RNA, 19 nt, Artificial Sequence
  Description of Artificial Sequence: Synthetic oligonucleotide
gaguguggcucauuguggc

SEQ ID NO: 2945795 - RNA, 19 nt, Artificial Sequence
  Description of Artificial Sequence: Synthetic oligonucleotide
auguauguguucugacguc

SEQ ID NO: 2945796 - RNA, 19 nt, Artificial Sequence
  Description of Artificial Sequence: Synthetic oligonucleotide
caaggaacaaguacuagaa

SEQ ID NO: 2945797 - RNA, 19 nt, Artificial Sequence
  Description of Artificial Sequence: Synthetic oligonucleotide
auucuuucuauguaaucuu

SEQ ID NO: 2945798 - RNA, 19 nt, Artificial Sequence
  Description of Artificial Sequence: Synthetic oligonucleotide
ugaucuggaaaugggaguc

SEQ ID NO: 2945799 - RNA, 19 nt, Artificial Sequence
  Description of Artificial Sequence: Synthetic oligonucleotide
ucauuguggcggcugaggu

SEQ ID NO: 2945800 - RNA, 19 nt, Artificial Sequence
  Description of Artificial Sequence: Synthetic oligonucleotide
caagggacuuguuacucag

SEQ ID NO: 2945801 - RNA, 19 nt, Artificial Sequence
  Description of Artificial Sequence: Synthetic oligonucleotide
gagagaguagucugugcug

SEQ ID NO: 2945802 - RNA, 19 nt, Artificial Sequence
  Description of Artificial Sequence: Synthetic oligonucleotide
uguauguguucugacgucu

SEQ ID NO: 2945803 - RNA, 19 nt, Artificial Sequence
  Description of Artificial Sequence: Synthetic oligonucleotide
cuuguuacucagcuuggug

SEQ ID NO: 2945804 - RNA, 19 nt, Artificial Sequence
  Description of Artificial Sequence: Synthetic oligonucleotide
guacuagaacugcauguag

SEQ ID NO: 2945805 - RNA, 19 nt, Artificial Sequence
  Description of Artificial Sequence: Synthetic oligonucleotide
aacaaguacuagaacugca

SEQ ID NO: 2945806 - RNA, 19 nt, Artificial Sequence
  Description of Artificial Sequence: Synthetic oligonucleotide
caaguacuagaacugcaug

SEQ ID NO: 2945807 - RNA, 19 nt, Artificial Sequence
  Description of Artificial Sequence: Synthetic oligonucleotide
uagucugugcuggucaucc

SEQ ID NO: 2945808 - RNA, 19 nt, Artificial Sequence
  Description of Artificial Sequence: Synthetic oligonucleotide
ucaagggacuuguuacuca

SEQ ID NO: 2945809 - RNA, 19 nt, Artificial Sequence
  Description of Artificial Sequence: Synthetic oligonucleotide
auuguggcggcugaggugu

SEQ ID NO: 2945810 - RNA, 19 nt, Artificial Sequence
  Description of Artificial Sequence: Synthetic oligonucleotide
uguccauaauguauguguu

SEQ ID NO: 2945811 - RNA, 19 nt, Artificial Sequence
  Description of Artificial Sequence: Synthetic oligonucleotide
uucaaggaacaaguacuag

SEQ ID NO: 2945812 - RNA, 19 nt, Artificial Sequence
  Description of Artificial Sequence: Synthetic oligonucleotide
uaaguucaauguagaaguc

SEQ ID NO: 2945813 - RNA, 19 nt, Artificial Sequence
  Description of Artificial Sequence: Synthetic oligonucleotide
guagcuggcauuggaaaag

SEQ ID NO: 2945814 - RNA, 19 nt, Artificial Sequence
  Description of Artificial Sequence: Synthetic oligonucleotide
ugucaagggacuuguuacu

SEQ ID NO: 2945815 - RNA, 19 nt, Artificial Sequence
  Description of Artificial Sequence: Synthetic oligonucleotide
caaaucugagagagaguag

SEQ ID NO: 2945816 - RNA, 19 nt, Artificial Sequence
  Description of Artificial Sequence: Synthetic oligonucleotide
ggaacaaguacuagaacug

SEQ ID NO: 2945817 - RNA, 19 nt, Artificial Sequence
  Description of Artificial Sequence: Synthetic oligonucleotide
cuuugagacaaaucugaga

SEQ ID NO: 2945818 - RNA, 19 nt, Artificial Sequence
  Description of Artificial Sequence: Synthetic oligonucleotide
uauguguucugacgucugu

SEQ ID NO: 2945819 - RNA, 19 nt, Artificial Sequence
  Description of Artificial Sequence: Synthetic oligonucleotide
uucuuucuauguaaucuuu

SEQ ID NO: 2945820 - RNA, 19 nt, Artificial Sequence
  Description of Artificial Sequence: Synthetic oligonucleotide
uugagacaaaucugagaga

SEQ ID NO: 2945821 - RNA, 19 nt, Artificial Sequence
  Description of Artificial Sequence: Synthetic oligonucleotide
uuuguccauaauguaugug

SEQ ID NO: 2945822 - RNA, 19 nt, Artificial Sequence
  Description of Artificial Sequence: Synthetic oligonucleotide
ugcuacuuugagacaaauc

SEQ ID NO: 2945823 - RNA, 19 nt, Artificial Sequence
  Description of Artificial Sequence: Synthetic oligonucleotide
aaguccucgggcgggguac

SEQ ID NO: 2945824 - RNA, 19 nt, Artificial Sequence
  Description of Artificial Sequence: Synthetic oligonucleotide
  modified_base (12)..(12): a, c, u, g, unknown or other
cuguccaguccncaagugc

SEQ ID NO: 2945825 - RNA, 19 nt, Artificial Sequence
  Description of Artificial Sequence: Synthetic oligonucleotide
ucuguucaaggaacaagua

SEQ ID NO: 2945826 - RNA, 19 nt, Artificial Sequence
  Description of Artificial Sequence: Synthetic oligonucleotide
agugccuggugaguguggc

SEQ ID NO: 2945827 - RNA, 19 nt, Artificial Sequence
  Description of Artificial Sequence: Synthetic oligonucleotide
aguguggcucauuguggcg

SEQ ID NO: 2945828 - RNA, 19 nt, Artificial Sequence
  Description of Artificial Sequence: Synthetic oligonucleotide
uuggaaaagcacugggcau

SEQ ID NO: 2945829 - RNA, 19 nt, Artificial Sequence
  Description of Artificial Sequence: Synthetic oligonucleotide
gcauuggaaaagcacuggg

SEQ ID NO: 2945830 - RNA, 19 nt, Artificial Sequence
  Description of Artificial Sequence: Synthetic oligonucleotide
gagagagaguagucugugc

SEQ ID NO: 2945831 - RNA, 19 nt, Artificial Sequence
  Description of Artificial Sequence: Synthetic oligonucleotide
cauaauguauguguucuga

SEQ ID NO: 2945832 - RNA, 19 nt, Artificial Sequence
  Description of Artificial Sequence: Synthetic oligonucleotide
gaguagucugugcugguca

SEQ ID NO: 2945833 - RNA, 19 nt, Artificial Sequence
  Description of Artificial Sequence: Synthetic oligonucleotide
ccuuuguccauaauguaug

SEQ ID NO: 2945834 - RNA, 19 nt, Artificial Sequence
  Description of Artificial Sequence: Synthetic oligonucleotide
gacuuguuacucagcuugg

SEQ ID NO: 2945835 - RNA, 19 nt, Artificial Sequence
  Description of Artificial Sequence: Synthetic oligonucleotide
gccagugugugguagcugg

SEQ ID NO: 2945836 - RNA, 19 nt, Artificial Sequence
  Description of Artificial Sequence: Synthetic oligonucleotide
guggcaggcaccccgcacg

SEQ ID NO: 2945837 - RNA, 19 nt, Artificial Sequence
  Description of Artificial Sequence: Synthetic oligonucleotide
agggcacugaucuggaaau

SEQ ID NO: 2945838 - RNA, 19 nt, Artificial Sequence
  Description of Artificial Sequence: Synthetic oligonucleotide
acuuugagacaaaucugag

SEQ ID NO: 2945839 - RNA, 19 nt, Artificial Sequence
  Description of Artificial Sequence: Synthetic oligonucleotide
aguacuagaacugcaugua

SEQ ID NO: 2945840 - RNA, 19 nt, Artificial Sequence
  Description of Artificial Sequence: Synthetic oligonucleotide
cuggaaaugggagucuaac

SEQ ID NO: 2945841 - RNA, 19 nt, Artificial Sequence
  Description of Artificial Sequence: Synthetic oligonucleotide
gcuguuccuguccagagug

SEQ ID NO: 2945842 - RNA, 19 nt, Artificial Sequence
  Description of Artificial Sequence: Synthetic oligonucleotide
uuacucagcuugguggggc

SEQ ID NO: 2945843 - RNA, 19 nt, Artificial Sequence
  Description of Artificial Sequence: Synthetic oligonucleotide
aucugagagagaguagucu

SEQ ID NO: 2945844 - RNA, 19 nt, Artificial Sequence
  Description of Artificial Sequence: Synthetic oligonucleotide
guguggcucauuguggcgg

SEQ ID NO: 2945845 - RNA, 19 nt, Artificial Sequence
  Description of Artificial Sequence: Synthetic oligonucleotide
uauucuguucaaggaacaa

SEQ ID NO: 2945846 - RNA, 19 nt, Artificial Sequence
  Description of Artificial Sequence: Synthetic oligonucleotide
ucuggaaaugggagucuaa

SEQ ID NO: 2945847 - RNA, 19 nt, Artificial Sequence
  Description of Artificial Sequence: Synthetic oligonucleotide
agaguagucugugcugguc

SEQ ID NO: 2945848 - RNA, 19 nt, Artificial Sequence
  Description of Artificial Sequence: Synthetic oligonucleotide
auguguucugacgucuguc

SEQ ID NO: 2945849 - RNA, 19 nt, Artificial Sequence
  Description of Artificial Sequence: Synthetic oligonucleotide
guagaaguccucgggcggg

SEQ ID NO: 2945850 - RNA, 19 nt, Artificial Sequence
  Description of Artificial Sequence: Synthetic oligonucleotide
ucucugucaagggacuugu

SEQ ID NO: 2945851 - RNA, 19 nt, Artificial Sequence
  Description of Artificial Sequence: Synthetic oligonucleotide
ugugcuggucauccucaug

SEQ ID NO: 2945852 - RNA, 19 nt, Artificial Sequence
  Description of Artificial Sequence: Synthetic oligonucleotide
cucauuguggcggcugagg

SEQ ID NO: 2945853 - RNA, 19 nt, Artificial Sequence
  Description of Artificial Sequence: Synthetic oligonucleotide
uguuccuguccagagugcu

SEQ ID NO: 2945854 - RNA, 19 nt, Artificial Sequence
  Description of Artificial Sequence: Synthetic oligonucleotide
ggcacugaucuggaaaugg

SEQ ID NO: 2945855 - RNA, 19 nt, Artificial Sequence
  Description of Artificial Sequence: Synthetic oligonucleotide
acaaguacuagaacugcau

SEQ ID NO: 2945856 - RNA, 19 nt, Artificial Sequence
  Description of Artificial Sequence: Synthetic oligonucleotide
guccauaauguauguguuc

SEQ ID NO: 2945857 - RNA, 19 nt, Artificial Sequence
  Description of Artificial Sequence: Synthetic oligonucleotide
uuugaagccuuuguccaua

SEQ ID NO: 2945858 - RNA, 19 nt, Artificial Sequence
  Description of Artificial Sequence: Synthetic oligonucleotide
  modified_base (5)..(5): a, c, u, g, unknown or other
guccncaagugccugguga

SEQ ID NO: 2945859 - RNA, 19 nt, Artificial Sequence
  Description of Artificial Sequence: Synthetic oligonucleotide
cuggcauuggaaaagcacu

SEQ ID NO: 2945860 - RNA, 19 nt, Artificial Sequence
  Description of Artificial Sequence: Synthetic oligonucleotide
  modified_base (19)..(19): a, c, u, g, unknown or other
cugacgucuguccaguccn

SEQ ID NO: 2945861 - RNA, 19 nt, Artificial Sequence
  Description of Artificial Sequence: Synthetic oligonucleotide
uguggcucauuguggcggc

SEQ ID NO: 2945862 - RNA, 19 nt, Artificial Sequence
  Description of Artificial Sequence: Synthetic oligonucleotide
  modified_base (2)..(2): a, c, u, g, unknown or other
cncaagugccuggugagug

SEQ ID NO: 2945863 - RNA, 19 nt, Artificial Sequence
  Description of Artificial Sequence: Synthetic oligonucleotide
guaccuggccuccagggca

SEQ ID NO: 2945864 - RNA, 19 nt, Artificial Sequence
  Description of Artificial Sequence: Synthetic oligonucleotide
cauuguggcggcugaggug

SEQ ID NO: 2945865 - RNA, 19 nt, Artificial Sequence
  Description of Artificial Sequence: Synthetic oligonucleotide
ugaggugucuaaguucaau

SEQ ID NO: 2945866 - RNA, 19 nt, Artificial Sequence
  Description of Artificial Sequence: Synthetic oligonucleotide
agugugugguagcuggcau

SEQ ID NO: 2945867 - RNA, 19 nt, Artificial Sequence
  Description of Artificial Sequence: Synthetic oligonucleotide
aguagucugugcuggucau

SEQ ID NO: 2945868 - RNA, 19 nt, Artificial Sequence
  Description of Artificial Sequence: Synthetic oligonucleotide
guuacucagcuuggugggg

SEQ ID NO: 2945869 - RNA, 19 nt, Artificial Sequence
  Description of Artificial Sequence: Synthetic oligonucleotide
aacugcauguagauucuuu

SEQ ID NO: 2945870 - RNA, 19 nt, Artificial Sequence
  Description of Artificial Sequence: Synthetic oligonucleotide
uagcuggcauuggaaaagc

SEQ ID NO: 2945871 - RNA, 19 nt, Artificial Sequence
  Description of Artificial Sequence: Synthetic oligonucleotide
gcugguggcaggcaccccg

SEQ ID NO: 2945872 - RNA, 19 nt, Artificial Sequence
  Description of Artificial Sequence: Synthetic oligonucleotide
gucuaaguucaauguagaa

SEQ ID NO: 2945873 - RNA, 19 nt, Artificial Sequence
  Description of Artificial Sequence: Synthetic oligonucleotide
cauggcugcuacuuugaga

SEQ ID NO: 2945874 - RNA, 19 nt, Artificial Sequence
  Description of Artificial Sequence: Synthetic oligonucleotide
ggaaaagcacugggcaugg

SEQ ID NO: 2945875 - RNA, 19 nt, Artificial Sequence
  Description of Artificial Sequence: Synthetic oligonucleotide
agaacugcauguagauucu

SEQ ID NO: 2945876 - RNA, 19 nt, Artificial Sequence
  Description of Artificial Sequence: Synthetic oligonucleotide
ugccuggugaguguggcuc

SEQ ID NO: 2945877 - RNA, 19 nt, Artificial Sequence
  Description of Artificial Sequence: Synthetic oligonucleotide
cuugguggggcuguuccug

SEQ ID NO: 2945878 - RNA, 19 nt, Artificial Sequence
  Description of Artificial Sequence: Synthetic oligonucleotide
  modified_base (16)..(16): a, c, u, g, unknown or other
acgucuguccaguccncaa

SEQ ID NO: 2945879 - RNA, 19 nt, Artificial Sequence
  Description of Artificial Sequence: Synthetic oligonucleotide
uagaaguccucgggcgggg

SEQ ID NO: 2945880 - RNA, 19 nt, Artificial Sequence
  Description of Artificial Sequence: Synthetic oligonucleotide
agucuaacacguucacaua

SEQ ID NO: 2945881 - RNA, 19 nt, Artificial Sequence
  Description of Artificial Sequence: Synthetic oligonucleotide
ggguaccuggccuccaggg

SEQ ID NO: 2945882 - RNA, 19 nt, Artificial Sequence
  Description of Artificial Sequence: Synthetic oligonucleotide
uugaagccuuuguccauaa

SEQ ID NO: 2945883 - RNA, 19 nt, Artificial Sequence
  Description of Artificial Sequence: Synthetic oligonucleotide
cacguucacauagcuguag

SEQ ID NO: 2945884 - RNA, 19 nt, Artificial Sequence
  Description of Artificial Sequence: Synthetic oligonucleotide
  modified_base (9)..(9): a, c, u, g, unknown or other
uccaguccncaagugccug

SEQ ID NO: 2945885 - RNA, 19 nt, Artificial Sequence
  Description of Artificial Sequence: Synthetic oligonucleotide
aagugccuggugagugugg

SEQ ID NO: 2945886 - RNA, 19 nt, Artificial Sequence
  Description of Artificial Sequence: Synthetic oligonucleotide
cuggcugguggcaggcacc

SEQ ID NO: 2945887 - RNA, 19 nt, Artificial Sequence
  Description of Artificial Sequence: Synthetic oligonucleotide
gucaagggacuuguuacuc

SEQ ID NO: 2945888 - RNA, 19 nt, Artificial Sequence
  Description of Artificial Sequence: Synthetic oligonucleotide
guauguguucugacgucug

SEQ ID NO: 2945889 - RNA, 19 nt, Artificial Sequence
  Description of Artificial Sequence: Synthetic oligonucleotide
ggugucuaaguucaaugua

SEQ ID NO: 2945890 - RNA, 19 nt, Artificial Sequence
  Description of Artificial Sequence: Synthetic oligonucleotide
cacgccagugugugguagc

SEQ ID NO: 2945891 - RNA, 19 nt, Artificial Sequence
  Description of Artificial Sequence: Synthetic oligonucleotide
gucucugucaagggacuug

SEQ ID NO: 2945892 - RNA, 19 nt, Artificial Sequence
  Description of Artificial Sequence: Synthetic oligonucleotide
uacucagcuugguggggcu

SEQ ID NO: 2945893 - RNA, 19 nt, Artificial Sequence
  Description of Artificial Sequence: Synthetic oligonucleotide
acuuguuacucagcuuggu

SEQ ID NO: 2945894 - RNA, 19 nt, Artificial Sequence
  Description of Artificial Sequence: Synthetic oligonucleotide
cuaacacguucacauagcu

SEQ ID NO: 2945895 - RNA, 19 nt, Artificial Sequence
  Description of Artificial Sequence: Synthetic oligonucleotide
guguucugacgucugucca

SEQ ID NO: 2945896 - RNA, 19 nt, Artificial Sequence
  Description of Artificial Sequence: Synthetic oligonucleotide
gcuggcauuggaaaagcac

SEQ ID NO: 2945897 - RNA, 19 nt, Artificial Sequence
  Description of Artificial Sequence: Synthetic oligonucleotide
  modified_base (18)..(18): a, c, u, g, unknown or other
ugacgucuguccaguccnc

SEQ ID NO: 2945898 - RNA, 19 nt, Artificial Sequence
  Description of Artificial Sequence: Synthetic oligonucleotide
guucaaggaacaaguacua

SEQ ID NO: 2945899 - RNA, 19 nt, Artificial Sequence
  Description of Artificial Sequence: Synthetic oligonucleotide
uggcaggcaccccgcacgc

SEQ ID NO: 2945900 - RNA, 19 nt, Artificial Sequence
  Description of Artificial Sequence: Synthetic oligonucleotide
  modified_base (6)..(6): a, c, u, g, unknown or other
aguccncaagugccuggug

SEQ ID NO: 2945901 - RNA, 19 nt, Artificial Sequence
  Description of Artificial Sequence: Synthetic oligonucleotide
uugguggggcuguuccugu

SEQ ID NO: 2945902 - RNA, 19 nt, Artificial Sequence
  Description of Artificial Sequence: Synthetic oligonucleotide
uaccuggccuccagggcac

SEQ ID NO: 2945903 - RNA, 19 nt, Artificial Sequence
  Description of Artificial Sequence: Synthetic oligonucleotide
gguagcuggcauuggaaaa

SEQ ID NO: 2945904 - RNA, 19 nt, Artificial Sequence
  Description of Artificial Sequence: Synthetic oligonucleotide
cguucacauagcuguaggg

SEQ ID NO: 2945905 - RNA, 19 nt, Artificial Sequence
  Description of Artificial Sequence: Synthetic oligonucleotide
cugugucucugucaaggga

SEQ ID NO: 2945906 - RNA, 19 nt, Artificial Sequence
  Description of Artificial Sequence: Synthetic oligonucleotide
caagugccuggugagugug

SEQ ID NO: 2945907 - RNA, 19 nt, Artificial Sequence
  Description of Artificial Sequence: Synthetic oligonucleotide
cugaucuggaaaugggagu

SEQ ID NO: 2945908 - RNA, 19 nt, Artificial Sequence
  Description of Artificial Sequence: Synthetic oligonucleotide
gguaccuggccuccagggc

SEQ ID NO: 2945909 - RNA, 19 nt, Artificial Sequence
  Description of Artificial Sequence: Synthetic oligonucleotide
gagacaaaucugagagaga

SEQ ID NO: 2945910 - RNA, 19 nt, Artificial Sequence
  Description of Artificial Sequence: Synthetic oligonucleotide
cagggcacugaucuggaaa

SEQ ID NO: 2945911 - RNA, 19 nt, Artificial Sequence
  Description of Artificial Sequence: Synthetic oligonucleotide
uggccuggcugguggcagg

SEQ ID NO: 2945912 - RNA, 19 nt, Artificial Sequence
  Description of Artificial Sequence: Synthetic oligonucleotide
gggcauggcugcuacuuug

SEQ ID NO: 2945913 - RNA, 19 nt, Artificial Sequence
  Description of Artificial Sequence: Synthetic oligonucleotide
auguaaucuuugaagccuu

SEQ ID NO: 2945914 - RNA, 19 nt, Artificial Sequence
  Description of Artificial Sequence: Synthetic oligonucleotide
ucgggcgggguaccuggcc

SEQ ID NO: 2945915 - RNA, 19 nt, Artificial Sequence
  Description of Artificial Sequence: Synthetic oligonucleotide
cugguggcaggcaccccgc

SEQ ID NO: 2945916 - RNA, 19 nt, Artificial Sequence
  Description of Artificial Sequence: Synthetic oligonucleotide
cugcauguagauucuuucu

SEQ ID NO: 2945917 - RNA, 19 nt, Artificial Sequence
  Description of Artificial Sequence: Synthetic oligonucleotide
uggcucauuguggcggcug

SEQ ID NO: 2945918 - RNA, 19 nt, Artificial Sequence
  Description of Artificial Sequence: Synthetic oligonucleotide
cuuuguccauaauguaugu

SEQ ID NO: 2945919 - RNA, 19 nt, Artificial Sequence
  Description of Artificial Sequence: Synthetic oligonucleotide
gguggggcuguuccugucc

SEQ ID NO: 2945920 - RNA, 19 nt, Artificial Sequence
  Description of Artificial Sequence: Synthetic oligonucleotide
cacugggcauggcugcuac

SEQ ID NO: 2945921 - RNA, 19 nt, Artificial Sequence
  Description of Artificial Sequence: Synthetic oligonucleotide
ugggcauggcugcuacuuu

SEQ ID NO: 2945922 - RNA, 19 nt, Artificial Sequence
  Description of Artificial Sequence: Synthetic oligonucleotide
uccuguccagagugcuggc

SEQ ID NO: 2945923 - RNA, 19 nt, Artificial Sequence
  Description of Artificial Sequence: Synthetic oligonucleotide
uggggcuguuccuguccag

SEQ ID NO: 2945924 - RNA, 19 nt, Artificial Sequence
  Description of Artificial Sequence: Synthetic oligonucleotide
aguccucgggcgggguacc

SEQ ID NO: 2945925 - RNA, 19 nt, Artificial Sequence
  Description of Artificial Sequence: Synthetic oligonucleotide
aaugggagucuaacacguu

SEQ ID NO: 2945926 - RNA, 19 nt, Artificial Sequence
  Description of Artificial Sequence: Synthetic oligonucleotide
gaaaagcacugggcauggc

SEQ ID NO: 2945927 - RNA, 19 nt, Artificial Sequence
  Description of Artificial Sequence: Synthetic oligonucleotide
ccauaauguauguguucug

SEQ ID NO: 2945928 - RNA, 19 nt, Artificial Sequence
  Description of Artificial Sequence: Synthetic oligonucleotide
guuccuguccagagugcug

SEQ ID NO: 2945929 - RNA, 19 nt, Artificial Sequence
  Description of Artificial Sequence: Synthetic oligonucleotide
cugagagagaguagucugu

SEQ ID NO: 2945930 - RNA, 19 nt, Artificial Sequence
  Description of Artificial Sequence: Synthetic oligonucleotide
gggagucuaacacguucac

SEQ ID NO: 2945931 - RNA, 19 nt, Artificial Sequence
  Description of Artificial Sequence: Synthetic oligonucleotide
gggcuguuccuguccagag

SEQ ID NO: 2945932 - RNA, 19 nt, Artificial Sequence
  Description of Artificial Sequence: Synthetic oligonucleotide
guccagagugcuggccugg

SEQ ID NO: 2945933 - RNA, 19 nt, Artificial Sequence
  Description of Artificial Sequence: Synthetic oligonucleotide
uccagagugcuggccuggc

SEQ ID NO: 2945934 - RNA, 19 nt, Artificial Sequence
  Description of Artificial Sequence: Synthetic oligonucleotide
uggcugcuacuuugagaca

SEQ ID NO: 2945935 - RNA, 19 nt, Artificial Sequence
  Description of Artificial Sequence: Synthetic oligonucleotide
aucuggaaaugggagucua

SEQ ID NO: 2945936 - RNA, 19 nt, Artificial Sequence
  Description of Artificial Sequence: Synthetic oligonucleotide
ggcugcuacuuugagacaa

SEQ ID NO: 2945937 - RNA, 19 nt, Artificial Sequence
  Description of Artificial Sequence: Synthetic oligonucleotide
gacaaaucugagagagagu

SEQ ID NO: 2945938 - RNA, 19 nt, Artificial Sequence
  Description of Artificial Sequence: Synthetic oligonucleotide
uucugacgucuguccaguc

SEQ ID NO: 2945939 - RNA, 19 nt, Artificial Sequence
  Description of Artificial Sequence: Synthetic oligonucleotide
  modified_base (8)..(8): a, c, u, g, unknown or other
ccaguccncaagugccugg

SEQ ID NO: 2945940 - RNA, 19 nt, Artificial Sequence
  Description of Artificial Sequence: Synthetic oligonucleotide
gcauggcugcuacuuugag

SEQ ID NO: 2945941 - RNA, 19 nt, Artificial Sequence
  Description of Artificial Sequence: Synthetic oligonucleotide
gugguagcuggcauuggaa

SEQ ID NO: 2945942 - RNA, 19 nt, Artificial Sequence
  Description of Artificial Sequence: Synthetic oligonucleotide
  modified_base (17)..(17): a, c, u, g, unknown or other
gacgucuguccaguccnca

SEQ ID NO: 2945943 - RNA, 19 nt, Artificial Sequence
  Description of Artificial Sequence: Synthetic oligonucleotide
gcauguagauucuuucuau

SEQ ID NO: 2945944 - RNA, 19 nt, Artificial Sequence
  Description of Artificial Sequence: Synthetic oligonucleotide
uggccuccagggcacugau

SEQ ID NO: 2945945 - RNA, 19 nt, Artificial Sequence
  Description of Artificial Sequence: Synthetic oligonucleotide
guggggcuguuccugucca

SEQ ID NO: 2945946 - RNA, 19 nt, Artificial Sequence
  Description of Artificial Sequence: Synthetic oligonucleotide
ugguggcaggcaccccgca

SEQ ID NO: 2945947 - RNA, 19 nt, Artificial Sequence
  Description of Artificial Sequence: Synthetic oligonucleotide
acugggcauggcugcuacu

SEQ ID NO: 2945948 - RNA, 19 nt, Artificial Sequence
  Description of Artificial Sequence: Synthetic oligonucleotide
ccugcugugucucugucaa

SEQ ID NO: 2945949 - RNA, 19 nt, Artificial Sequence
  Description of Artificial Sequence: Synthetic oligonucleotide
gugugguagcuggcauugg

SEQ ID NO: 2945950 - RNA, 19 nt, Artificial Sequence
  Description of Artificial Sequence: Synthetic oligonucleotide
ugucucugucaagggacuu

SEQ ID NO: 2945951 - RNA, 19 nt, Artificial Sequence
  Description of Artificial Sequence: Synthetic oligonucleotide
cugcugugucucugucaag

SEQ ID NO: 2945952 - RNA, 19 nt, Artificial Sequence
  Description of Artificial Sequence: Synthetic oligonucleotide
agugcuggccuggcuggug

SEQ ID NO: 2945953 - RNA, 19 nt, Artificial Sequence
  Description of Artificial Sequence: Synthetic oligonucleotide
cuguccagagugcuggccu

SEQ ID NO: 2945954 - RNA, 19 nt, Artificial Sequence
  Description of Artificial Sequence: Synthetic oligonucleotide
gaucuggaaaugggagucu

SEQ ID NO: 2945955 - RNA, 19 nt, Artificial Sequence
  Description of Artificial Sequence: Synthetic oligonucleotide
caggcaccccgcacgccag

SEQ ID NO: 2945956 - RNA, 19 nt, Artificial Sequence
  Description of Artificial Sequence: Synthetic oligonucleotide
ccucgggcgggguaccugg

SEQ ID NO: 2945957 - RNA, 19 nt, Artificial Sequence
  Description of Artificial Sequence: Synthetic oligonucleotide
gaaguccucgggcggggua

SEQ ID NO: 2945958 - RNA, 19 nt, Artificial Sequence
  Description of Artificial Sequence: Synthetic oligonucleotide
ggagucuaacacguucaca

SEQ ID NO: 2945959 - RNA, 19 nt, Artificial Sequence
  Description of Artificial Sequence: Synthetic oligonucleotide
gagaguagucugugcuggu

SEQ ID NO: 2945960 - RNA, 19 nt, Artificial Sequence
  Description of Artificial Sequence: Synthetic oligonucleotide
uguggcggcugaggugucu

SEQ ID NO: 2945961 - RNA, 19 nt, Artificial Sequence
  Description of Artificial Sequence: Synthetic oligonucleotide
acucagcuugguggggcug

SEQ ID NO: 2945962 - RNA, 19 nt, Artificial Sequence
  Description of Artificial Sequence: Synthetic oligonucleotide
cuuugaagccuuuguccau

SEQ ID NO: 2945963 - RNA, 19 nt, Artificial Sequence
  Description of Artificial Sequence: Synthetic oligonucleotide
cagugugugguagcuggca

SEQ ID NO: 2945964 - RNA, 19 nt, Artificial Sequence
  Description of Artificial Sequence: Synthetic oligonucleotide
ugguggggcuguuccuguc

SEQ ID NO: 2945965 - RNA, 19 nt, Artificial Sequence
  Description of Artificial Sequence: Synthetic oligonucleotide
guagucugugcuggucauc

SEQ ID NO: 2945966 - RNA, 19 nt, Artificial Sequence
  Description of Artificial Sequence: Synthetic oligonucleotide
guucugacgucuguccagu

SEQ ID NO: 2945967 - RNA, 19 nt, Artificial Sequence
  Description of Artificial Sequence: Synthetic oligonucleotide
uccucgggcgggguaccug

SEQ ID NO: 2945968 - RNA, 19 nt, Artificial Sequence
  Description of Artificial Sequence: Synthetic oligonucleotide
gcaggcaccccgcacgcca

SEQ ID NO: 2945969 - RNA, 19 nt, Artificial Sequence
  Description of Artificial Sequence: Synthetic oligonucleotide
ccagugugugguagcuggc

SEQ ID NO: 2945970 - RNA, 19 nt, Artificial Sequence
  Description of Artificial Sequence: Synthetic oligonucleotide
cucgggcgggguaccuggc

SEQ ID NO: 2945971 - RNA, 19 nt, Artificial Sequence
  Description of Artificial Sequence: Synthetic oligonucleotide
gguggcaggcaccccgcac

SEQ ID NO: 2945972 - RNA, 19 nt, Artificial Sequence
  Description of Artificial Sequence: Synthetic oligonucleotide
ggcucauuguggcggcuga

SEQ ID NO: 2945973 - RNA, 19 nt, Artificial Sequence
  Description of Artificial Sequence: Synthetic oligonucleotide
ccuggcugguggcaggcac

SEQ ID NO: 2945974 - RNA, 19 nt, Artificial Sequence
  Description of Artificial Sequence: Synthetic oligonucleotide
ggguccagccugcuguguc

SEQ ID NO: 2945975 - RNA, 19 nt, Artificial Sequence
  Description of Artificial Sequence: Synthetic oligonucleotide
ggcggcugaggugucuaag

SEQ ID NO: 2945976 - RNA, 19 nt, Artificial Sequence
  Description of Artificial Sequence: Synthetic oligonucleotide
uggcggcugaggugucuaa

SEQ ID NO: 2945977 - RNA, 19 nt, Artificial Sequence
  Description of Artificial Sequence: Synthetic oligonucleotide
agaaguccucgggcggggu

SEQ ID NO: 2945978 - RNA, 19 nt, Artificial Sequence
  Description of Artificial Sequence: Synthetic oligonucleotide
gccuuuguccauaauguau

SEQ ID NO: 2945979 - RNA, 19 nt, Artificial Sequence
  Description of Artificial Sequence: Synthetic oligonucleotide
  modified_base (10)..(10): a, c, u, g, unknown or other
guccaguccncaagugccu

SEQ ID NO: 2945980 - RNA, 19 nt, Artificial Sequence
  Description of Artificial Sequence: Synthetic oligonucleotide
ggugaguguggcucauugu

SEQ ID NO: 2945981 - RNA, 19 nt, Artificial Sequence
  Description of Artificial Sequence: Synthetic oligonucleotide
ggcauggcugcuacuuuga

SEQ ID NO: 2945982 - RNA, 19 nt, Artificial Sequence
  Description of Artificial Sequence: Synthetic oligonucleotide
acacguucacauagcugua

SEQ ID NO: 2945983 - RNA, 19 nt, Artificial Sequence
  Description of Artificial Sequence: Synthetic oligonucleotide
ccuguccagagugcuggcc

SEQ ID NO: 2945984 - RNA, 19 nt, Artificial Sequence
  Description of Artificial Sequence: Synthetic oligonucleotide
gugugugguagcuggcauu

SEQ ID NO: 2945985 - RNA, 19 nt, Artificial Sequence
  Description of Artificial Sequence: Synthetic oligonucleotide
gcucauuguggcggcugag

SEQ ID NO: 2945986 - RNA, 19 nt, Artificial Sequence
  Description of Artificial Sequence: Synthetic oligonucleotide
uuguggcggcugagguguc

SEQ ID NO: 2945987 - RNA, 19 nt, Artificial Sequence
  Description of Artificial Sequence: Synthetic oligonucleotide
gggcacugaucuggaaaug

SEQ ID NO: 2945988 - RNA, 19 nt, Artificial Sequence
  Description of Artificial Sequence: Synthetic oligonucleotide
gcacgccagugugugguag

SEQ ID NO: 2945989 - RNA, 19 nt, Artificial Sequence
  Description of Artificial Sequence: Synthetic oligonucleotide
gugucucugucaagggacu

SEQ ID NO: 2945990 - RNA, 19 nt, Artificial Sequence
  Description of Artificial Sequence: Synthetic oligonucleotide
ucagcuugguggggcuguu

SEQ ID NO: 2945991 - RNA, 19 nt, Artificial Sequence
  Description of Artificial Sequence: Synthetic oligonucleotide
  modified_base (7)..(7): a, c, u, g, unknown or other
caguccncaagugccuggu

SEQ ID NO: 2945992 - RNA, 19 nt, Artificial Sequence
  Description of Artificial Sequence: Synthetic oligonucleotide
cuagaacugcauguagauu

SEQ ID NO: 2945993 - RNA, 19 nt, Artificial Sequence
  Description of Artificial Sequence: Synthetic oligonucleotide
cugaggugucuaaguucaa

SEQ ID NO: 2945994 - RNA, 19 nt, Artificial Sequence
  Description of Artificial Sequence: Synthetic oligonucleotide
ggggcuguuccuguccaga

SEQ ID NO: 2945995 - RNA, 19 nt, Artificial Sequence
  Description of Artificial Sequence: Synthetic oligonucleotide
cuggccuccagggcacuga

SEQ ID NO: 2945996 - RNA, 19 nt, Artificial Sequence
  Description of Artificial Sequence: Synthetic oligonucleotide
gcggcugaggugucuaagu

SEQ ID NO: 2945997 - RNA, 19 nt, Artificial Sequence
  Description of Artificial Sequence: Synthetic oligonucleotide
cugggcauggcugcuacuu

SEQ ID NO: 2945998 - RNA, 19 nt, Artificial Sequence
  Description of Artificial Sequence: Synthetic oligonucleotide
aggcaccccgcacgccagu

SEQ ID NO: 2945999 - RNA, 19 nt, Artificial Sequence
  Description of Artificial Sequence: Synthetic oligonucleotide
gccuggugaguguggcuca

SEQ ID NO: 2946000 - RNA, 19 nt, Artificial Sequence
  Description of Artificial Sequence: Synthetic oligonucleotide
ggcuguuccuguccagagu

SEQ ID NO: 2946001 - RNA, 19 nt, Artificial Sequence
  Description of Artificial Sequence: Synthetic oligonucleotide
cucagcuugguggggcugu

SEQ ID NO: 2946002 - RNA, 19 nt, Artificial Sequence
  Description of Artificial Sequence: Synthetic oligonucleotide
gaacugcauguagauucuu

SEQ ID NO: 2946003 - RNA, 19 nt, Artificial Sequence
  Description of Artificial Sequence: Synthetic oligonucleotide
ccuccagggcacugaucug

SEQ ID NO: 2946004 - RNA, 19 nt, Artificial Sequence
  Description of Artificial Sequence: Synthetic oligonucleotide
cagcuugguggggcuguuc

SEQ ID NO: 2946005 - RNA, 19 nt, Artificial Sequence
  Description of Artificial Sequence: Synthetic oligonucleotide
ggcgggguaccuggccucc

SEQ ID NO: 2946006 - RNA, 19 nt, Artificial Sequence
  Description of Artificial Sequence: Synthetic oligonucleotide
gcugcuacuuugagacaaa

SEQ ID NO: 2946007 - RNA, 19 nt, Artificial Sequence
  Description of Artificial Sequence: Synthetic oligonucleotide
cugcuacuuugagacaaau

SEQ ID NO: 2946008 - RNA, 19 nt, Artificial Sequence
  Description of Artificial Sequence: Synthetic oligonucleotide
ggccuggcugguggcaggc

SEQ ID NO: 2946009 - RNA, 19 nt, Artificial Sequence
  Description of Artificial Sequence: Synthetic oligonucleotide
gugccuggugaguguggcu

SEQ ID NO: 2946010 - RNA, 19 nt, Artificial Sequence
  Description of Artificial Sequence: Synthetic oligonucleotide
guggcggcugaggugucua

SEQ ID NO: 2946011 - RNA, 19 nt, Artificial Sequence
  Description of Artificial Sequence: Synthetic oligonucleotide
ggcaccccgcacgccagug

SEQ ID NO: 2946012 - RNA, 19 nt, Artificial Sequence
  Description of Artificial Sequence: Synthetic oligonucleotide
accccgcacgccagugugu

SEQ ID NO: 2946013 - RNA, 19 nt, Artificial Sequence
  Description of Artificial Sequence: Synthetic oligonucleotide
gggacuuguuacucagcuu

SEQ ID NO: 2946014 - RNA, 19 nt, Artificial Sequence
  Description of Artificial Sequence: Synthetic oligonucleotide
gggcgggguaccuggccuc

SEQ ID NO: 2946015 - RNA, 19 nt, Artificial Sequence
  Description of Artificial Sequence: Synthetic oligonucleotide
cagccugcugugucucugu

SEQ ID NO: 2946016 - RNA, 19 nt, Artificial Sequence
  Description of Artificial Sequence: Synthetic oligonucleotide
cccgcacgccagugugugg

SEQ ID NO: 2946017 - RNA, 19 nt, Artificial Sequence
  Description of Artificial Sequence: Synthetic oligonucleotide
gcuugguggggcuguuccu

SEQ ID NO: 2946018 - RNA, 19 nt, Artificial Sequence
  Description of Artificial Sequence: Synthetic oligonucleotide
ccccgcacgccagugugug

SEQ ID NO: 2946019 - RNA, 19 nt, Artificial Sequence
  Description of Artificial Sequence: Synthetic oligonucleotide
gagugcuggccuggcuggu

SEQ ID NO: 2946020 - RNA, 19 nt, Artificial Sequence
  Description of Artificial Sequence: Synthetic oligonucleotide
ggcaggcaccccgcacgcc

SEQ ID NO: 2946021 - RNA, 19 nt, Artificial Sequence
  Description of Artificial Sequence: Synthetic oligonucleotide
cucugucaagggacuuguu

SEQ ID NO: 2946022 - RNA, 19 nt, Artificial Sequence
  Description of Artificial Sequence: Synthetic oligonucleotide
guggcucauuguggcggcu

SEQ ID NO: 2946023 - RNA, 19 nt, Artificial Sequence
  Description of Artificial Sequence: Synthetic oligonucleotide
ggccuccagggcacugauc

SEQ ID NO: 2946024 - RNA, 19 nt, Artificial Sequence
  Description of Artificial Sequence: Synthetic oligonucleotide
ccagggcacugaucuggaa

SEQ ID NO: 2946025 - RNA, 19 nt, Artificial Sequence
  Description of Artificial Sequence: Synthetic oligonucleotide
  modified_base (3)..(3): a, c, u, g, unknown or other
ccncaagugccuggugagu

SEQ ID NO: 2946026 - RNA, 19 nt, Artificial Sequence
  Description of Artificial Sequence: Synthetic oligonucleotide
cgccagugugugguagcug

SEQ ID NO: 2946027 - RNA, 19 nt, Artificial Sequence
  Description of Artificial Sequence: Synthetic oligonucleotide
ccagagugcuggccuggcu

SEQ ID NO: 2946028 - RNA, 19 nt, Artificial Sequence
  Description of Artificial Sequence: Synthetic oligonucleotide
cuggugaguguggcucauu

SEQ ID NO: 2946029 - RNA, 19 nt, Artificial Sequence
  Description of Artificial Sequence: Synthetic oligonucleotide
gccuggcugguggcaggca

SEQ ID NO: 2946030 - RNA, 19 nt, Artificial Sequence
  Description of Artificial Sequence: Synthetic oligonucleotide
guccucgggcgggguaccu

SEQ ID NO: 2946031 - RNA, 19 nt, Artificial Sequence
  Description of Artificial Sequence: Synthetic oligonucleotide
gcgggguaccuggccucca

SEQ ID NO: 2946032 - RNA, 19 nt, Artificial Sequence
  Description of Artificial Sequence: Synthetic oligonucleotide
gggguccagccugcugugu

SEQ ID NO: 2946033 - RNA, 19 nt, Artificial Sequence
  Description of Artificial Sequence: Synthetic oligonucleotide
cgggcgggguaccuggccu

SEQ ID NO: 2946034 - RNA, 19 nt, Artificial Sequence
  Description of Artificial Sequence: Synthetic oligonucleotide
cgcacgccaguguguggua

SEQ ID NO: 2946035 - RNA, 19 nt, Artificial Sequence
  Description of Artificial Sequence: Synthetic oligonucleotide
  modified_base (1)..(1): a, c, u, g, unknown or other
ncaagugccuggugagugu

SEQ ID NO: 2946036 - RNA, 19 nt, Artificial Sequence
  Description of Artificial Sequence: Synthetic oligonucleotide
uaaaguacuaucuugaaga

SEQ ID NO: 2946037 - RNA, 19 nt, Artificial Sequence
  Description of Artificial Sequence: Synthetic oligonucleotide
gaaaaguuuaucuuguuag

SEQ ID NO: 2946038 - RNA, 19 nt, Artificial Sequence
  Description of Artificial Sequence: Synthetic oligonucleotide
aaaugaaaaguuuaucuug

SEQ ID NO: 2946039 - RNA, 19 nt, Artificial Sequence
  Description of Artificial Sequence: Synthetic oligonucleotide
uaagaugcuaauauuagag

SEQ ID NO: 2946040 - RNA, 19 nt, Artificial Sequence
  Description of Artificial Sequence: Synthetic oligonucleotide
uuaaguuuacuuuauacug

SEQ ID NO: 2946041 - RNA, 19 nt, Artificial Sequence
  Description of Artificial Sequence: Synthetic oligonucleotide
cauggaaacauuuucaagg

SEQ ID NO: 2946042 - RNA, 19 nt, Artificial Sequence
  Description of Artificial Sequence: Synthetic oligonucleotide
auuuaaguuuacuuuauac

SEQ ID NO: 2946043 - RNA, 19 nt, Artificial Sequence
  Description of Artificial Sequence: Synthetic oligonucleotide
ucuaauauuagacucgucu

SEQ ID NO: 2946044 - RNA, 19 nt, Artificial Sequence
  Description of Artificial Sequence: Synthetic oligonucleotide
uuuacuuuauacugggugg

SEQ ID NO: 2946045 - RNA, 19 nt, Artificial Sequence
  Description of Artificial Sequence: Synthetic oligonucleotide
aagaugcuaauauuagagc

SEQ ID NO: 2946046 - RNA, 19 nt, Artificial Sequence
  Description of Artificial Sequence: Synthetic oligonucleotide
auuauguucaggcaaggac

SEQ ID NO: 2946047 - RNA, 19 nt, Artificial Sequence
  Description of Artificial Sequence: Synthetic oligonucleotide
uaauauuagacucgucugg

SEQ ID NO: 2946048 - RNA, 19 nt, Artificial Sequence
  Description of Artificial Sequence: Synthetic oligonucleotide
uaaguuuacuuuauacugg

SEQ ID NO: 2946049 - RNA, 19 nt, Artificial Sequence
  Description of Artificial Sequence: Synthetic oligonucleotide
uuauaaaguacuaucuuga

SEQ ID NO: 2946050 - RNA, 19 nt, Artificial Sequence
  Description of Artificial Sequence: Synthetic oligonucleotide
agacuuuuaaugaugaggc

SEQ ID NO: 2946051 - RNA, 19 nt, Artificial Sequence
  Description of Artificial Sequence: Synthetic oligonucleotide
uaauuauaaaguacuaucu

SEQ ID NO: 2946052 - RNA, 19 nt, Artificial Sequence
  Description of Artificial Sequence: Synthetic oligonucleotide
aaguuuacuuuauacuggg

SEQ ID NO: 2946053 - RNA, 19 nt, Artificial Sequence
  Description of Artificial Sequence: Synthetic oligonucleotide
cuaauuauaaaguacuauc

SEQ ID NO: 2946054 - RNA, 19 nt, Artificial Sequence
  Description of Artificial Sequence: Synthetic oligonucleotide
uuuuacuugguagaaauag

SEQ ID NO: 2946055 - RNA, 19 nt, Artificial Sequence
  Description of Artificial Sequence: Synthetic oligonucleotide
aaaguacuaucuugaagac

SEQ ID NO: 2946056 - RNA, 19 nt, Artificial Sequence
  Description of Artificial Sequence: Synthetic oligonucleotide
uagacuuuuaaugaugagg

SEQ ID NO: 2946057 - RNA, 19 nt, Artificial Sequence
  Description of Artificial Sequence: Synthetic oligonucleotide
uauucauggacucuaauau

SEQ ID NO: 2946058 - RNA, 19 nt, Artificial Sequence
  Description of Artificial Sequence: Synthetic oligonucleotide
auggaaacauuuucaaggc

SEQ ID NO: 2946059 - RNA, 19 nt, Artificial Sequence
  Description of Artificial Sequence: Synthetic oligonucleotide
cuuuuaaugaugaggcugg

SEQ ID NO: 2946060 - RNA, 19 nt, Artificial Sequence
  Description of Artificial Sequence: Synthetic oligonucleotide
cucuguagacauaagaugc

SEQ ID NO: 2946061 - RNA, 19 nt, Artificial Sequence
  Description of Artificial Sequence: Synthetic oligonucleotide
aagaggccuucuuauaagc

SEQ ID NO: 2946062 - RNA, 19 nt, Artificial Sequence
  Description of Artificial Sequence: Synthetic oligonucleotide
ucagcaguuaagauuaccc

SEQ ID NO: 2946063 - RNA, 19 nt, Artificial Sequence
  Description of Artificial Sequence: Synthetic oligonucleotide
uucacaacauaaaugaaaa

SEQ ID NO: 2946064 - RNA, 19 nt, Artificial Sequence
  Description of Artificial Sequence: Synthetic oligonucleotide
aauauuagacucgucuggg

SEQ ID NO: 2946065 - RNA, 19 nt, Artificial Sequence
  Description of Artificial Sequence: Synthetic oligonucleotide
uuauguucaggcaaggacu

SEQ ID NO: 2946066 - RNA, 19 nt, Artificial Sequence
  Description of Artificial Sequence: Synthetic oligonucleotide
uaucuugaagacuaguagc

SEQ ID NO: 2946067 - RNA, 19 nt, Artificial Sequence
  Description of Artificial Sequence: Synthetic oligonucleotide
aauuauaaaguacuaucuu

SEQ ID NO: 2946068 - RNA, 19 nt, Artificial Sequence
  Description of Artificial Sequence: Synthetic oligonucleotide
uuacuugguagaaauagac

SEQ ID NO: 2946069 - RNA, 19 nt, Artificial Sequence
  Description of Artificial Sequence: Synthetic oligonucleotide
acagguaagugcuaaaucu

SEQ ID NO: 2946070 - RNA, 19 nt, Artificial Sequence
  Description of Artificial Sequence: Synthetic oligonucleotide
cauaagaugcuaauauuag

SEQ ID NO: 2946071 - RNA, 19 nt, Artificial Sequence
  Description of Artificial Sequence: Synthetic oligonucleotide
agaugcuaauauuagagca

SEQ ID NO: 2946072 - RNA, 19 nt, Artificial Sequence
  Description of Artificial Sequence: Synthetic oligonucleotide
guuuacuuuauacugggug

SEQ ID NO: 2946073 - RNA, 19 nt, Artificial Sequence
  Description of Artificial Sequence: Synthetic oligonucleotide
aaaaguuuaucuuguuaga

SEQ ID NO: 2946074 - RNA, 19 nt, Artificial Sequence
  Description of Artificial Sequence: Synthetic oligonucleotide
uccuugauuauguucaggc

SEQ ID NO: 2946075 - RNA, 19 nt, Artificial Sequence
  Description of Artificial Sequence: Synthetic oligonucleotide
uucuuauaagcacagguaa

SEQ ID NO: 2946076 - RNA, 19 nt, Artificial Sequence
  Description of Artificial Sequence: Synthetic oligonucleotide
auaaaguacuaucuugaag

SEQ ID NO: 2946077 - RNA, 19 nt, Artificial Sequence
  Description of Artificial Sequence: Synthetic oligonucleotide
uugauuauguucaggcaag

SEQ ID NO: 2946078 - RNA, 19 nt, Artificial Sequence
  Description of Artificial Sequence: Synthetic oligonucleotide
aagacuaguagccauggaa

SEQ ID NO: 2946079 - RNA, 19 nt, Artificial Sequence
  Description of Artificial Sequence: Synthetic oligonucleotide
uggcuaauuauaaaguacu

SEQ ID NO: 2946080 - RNA, 19 nt, Artificial Sequence
  Description of Artificial Sequence: Synthetic oligonucleotide
ucuuauaagcacagguaag

SEQ ID NO: 2946081 - RNA, 19 nt, Artificial Sequence
  Description of Artificial Sequence: Synthetic oligonucleotide
aaaagaggccuucuuauaa

SEQ ID NO: 2946082 - RNA, 19 nt, Artificial Sequence
  Description of Artificial Sequence: Synthetic oligonucleotide
uaaaucuccuugauuaugu

SEQ ID NO: 2946083 - RNA, 19 nt, Artificial Sequence
  Description of Artificial Sequence: Synthetic oligonucleotide
gaugaggcuggagagaugg

SEQ ID NO: 2946084 - RNA, 19 nt, Artificial Sequence
  Description of Artificial Sequence: Synthetic oligonucleotide
aaagaggccuucuuauaag

SEQ ID NO: 2946085 - RNA, 19 nt, Artificial Sequence
  Description of Artificial Sequence: Synthetic oligonucleotide
ucucuguagacauaagaug

SEQ ID NO: 2946086 - RNA, 19 nt, Artificial Sequence
  Description of Artificial Sequence: Synthetic oligonucleotide
aucuugaagacuaguagcc

SEQ ID NO: 2946087 - RNA, 19 nt, Artificial Sequence
  Description of Artificial Sequence: Synthetic oligonucleotide
cuaauauuagacucgucug

SEQ ID NO: 2946088 - RNA, 19 nt, Artificial Sequence
  Description of Artificial Sequence: Synthetic oligonucleotide
uaaugaugaggcuggagag

SEQ ID NO: 2946089 - RNA, 19 nt, Artificial Sequence
  Description of Artificial Sequence: Synthetic oligonucleotide
aaugaaaaguuuaucuugu

SEQ ID NO: 2946090 - RNA, 19 nt, Artificial Sequence
  Description of Artificial Sequence: Synthetic oligonucleotide
cuaucuugaagacuaguag

SEQ ID NO: 2946091 - RNA, 19 nt, Artificial Sequence
  Description of Artificial Sequence: Synthetic oligonucleotide
agacauaagaugcuaauau

SEQ ID NO: 2946092 - RNA, 19 nt, Artificial Sequence
  Description of Artificial Sequence: Synthetic oligonucleotide
acuugguagaaauagacuu

SEQ ID NO: 2946093 - RNA, 19 nt, Artificial Sequence
  Description of Artificial Sequence: Synthetic oligonucleotide
aauagacuuuuaaugauga

SEQ ID NO: 2946094 - RNA, 19 nt, Artificial Sequence
  Description of Artificial Sequence: Synthetic oligonucleotide
aguuuaucuuguuagauuu

SEQ ID NO: 2946095 - RNA, 19 nt, Artificial Sequence
  Description of Artificial Sequence: Synthetic oligonucleotide
uuuacuugguagaaauaga

SEQ ID NO: 2946096 - RNA, 19 nt, Artificial Sequence
  Description of Artificial Sequence: Synthetic oligonucleotide
aaauagacuuuuaaugaug

SEQ ID NO: 2946097 - RNA, 19 nt, Artificial Sequence
  Description of Artificial Sequence: Synthetic oligonucleotide
aguuaagauuacccagugc

SEQ ID NO: 2946098 - RNA, 19 nt, Artificial Sequence
  Description of Artificial Sequence: Synthetic oligonucleotide
uaagugcuaaaucuccuug

SEQ ID NO: 2946099 - RNA, 19 nt, Artificial Sequence
  Description of Artificial Sequence: Synthetic oligonucleotide
guuaagauuacccagugcu

SEQ ID NO: 2946100 - RNA, 19 nt, Artificial Sequence
  Description of Artificial Sequence: Synthetic oligonucleotide
gugguggcuaauuauaaag

SEQ ID NO: 2946101 - RNA, 19 nt, Artificial Sequence
  Description of Artificial Sequence: Synthetic oligonucleotide
auggacucuaauauuagac

SEQ ID NO: 2946102 - RNA, 19 nt, Artificial Sequence
  Description of Artificial Sequence: Synthetic oligonucleotide
uucauggacucuaauauua

SEQ ID NO: 2946103 - RNA, 19 nt, Artificial Sequence
  Description of Artificial Sequence: Synthetic oligonucleotide
acuuuuaaugaugaggcug

SEQ ID NO: 2946104 - RNA, 19 nt, Artificial Sequence
  Description of Artificial Sequence: Synthetic oligonucleotide
gacucuaauauuagacucg

SEQ ID NO: 2946105 - RNA, 19 nt, Artificial Sequence
  Description of Artificial Sequence: Synthetic oligonucleotide
ugaaaaguuuaucuuguua

SEQ ID NO: 2946106 - RNA, 19 nt, Artificial Sequence
  Description of Artificial Sequence: Synthetic oligonucleotide
aacauaaaugaaaaguuua

SEQ ID NO: 2946107 - RNA, 19 nt, Artificial Sequence
  Description of Artificial Sequence: Synthetic oligonucleotide
auuuucaaggcugccaccg

SEQ ID NO: 2946108 - RNA, 19 nt, Artificial Sequence
  Description of Artificial Sequence: Synthetic oligonucleotide
acaggcucacaccauaguc

SEQ ID NO: 2946109 - RNA, 19 nt, Artificial Sequence
  Description of Artificial Sequence: Synthetic oligonucleotide
auaagaugcuaauauuaga

SEQ ID NO: 2946110 - RNA, 19 nt, Artificial Sequence
  Description of Artificial Sequence: Synthetic oligonucleotide
aaguuuaucuuguuagauu

SEQ ID NO: 2946111 - RNA, 19 nt, Artificial Sequence
  Description of Artificial Sequence: Synthetic oligonucleotide
uggacucuaauauuagacu

SEQ ID NO: 2946112 - RNA, 19 nt, Artificial Sequence
  Description of Artificial Sequence: Synthetic oligonucleotide
aguacuaucuugaagacua

SEQ ID NO: 2946113 - RNA, 19 nt, Artificial Sequence
  Description of Artificial Sequence: Synthetic oligonucleotide
aaaguuuaucuuguuagau

SEQ ID NO: 2946114 - RNA, 19 nt, Artificial Sequence
  Description of Artificial Sequence: Synthetic oligonucleotide
aaacauuuucaaggcugcc

SEQ ID NO: 2946115 - RNA, 19 nt, Artificial Sequence
  Description of Artificial Sequence: Synthetic oligonucleotide
ucauggacucuaauauuag

SEQ ID NO: 2946116 - RNA, 19 nt, Artificial Sequence
  Description of Artificial Sequence: Synthetic oligonucleotide
ucucccaccauuuaaguuu

SEQ ID NO: 2946117 - RNA, 19 nt, Artificial Sequence
  Description of Artificial Sequence: Synthetic oligonucleotide
ugaagacuaguagccaugg

SEQ ID NO: 2946118 - RNA, 19 nt, Artificial Sequence
  Description of Artificial Sequence: Synthetic oligonucleotide
uaagauuacccagugcucu

SEQ ID NO: 2946119 - RNA, 19 nt, Artificial Sequence
  Description of Artificial Sequence: Synthetic oligonucleotide
agguaagugcuaaaucucc

SEQ ID NO: 2946120 - RNA, 19 nt, Artificial Sequence
  Description of Artificial Sequence: Synthetic oligonucleotide
aagugcuaaaucuccuuga

SEQ ID NO: 2946121 - RNA, 19 nt, Artificial Sequence
  Description of Artificial Sequence: Synthetic oligonucleotide
gaaacauuuucaaggcugc

SEQ ID NO: 2946122 - RNA, 19 nt, Artificial Sequence
  Description of Artificial Sequence: Synthetic oligonucleotide
uacuugguagaaauagacu

SEQ ID NO: 2946123 - RNA, 19 nt, Artificial Sequence
  Description of Artificial Sequence: Synthetic oligonucleotide
uauaaaguacuaucuugaa

SEQ ID NO: 2946124 - RNA, 19 nt, Artificial Sequence
  Description of Artificial Sequence: Synthetic oligonucleotide
cuuuauacugggugguggc

SEQ ID NO: 2946125 - RNA, 19 nt, Artificial Sequence
  Description of Artificial Sequence: Synthetic oligonucleotide
accauuuaaguuuacuuua

SEQ ID NO: 2946126 - RNA, 19 nt, Artificial Sequence
  Description of Artificial Sequence: Synthetic oligonucleotide
gaugcuaauauuagagcac

SEQ ID NO: 2946127 - RNA, 19 nt, Artificial Sequence
  Description of Artificial Sequence: Synthetic oligonucleotide
uugaagacuaguagccaug

SEQ ID NO: 2946128 - RNA, 19 nt, Artificial Sequence
  Description of Artificial Sequence: Synthetic oligonucleotide
uguagacauaagaugcuaa

SEQ ID NO: 2946129 - RNA, 19 nt, Artificial Sequence
  Description of Artificial Sequence: Synthetic oligonucleotide
ucacaacauaaaugaaaag

SEQ ID NO: 2946130 - RNA, 19 nt, Artificial Sequence
  Description of Artificial Sequence: Synthetic oligonucleotide
ucuguagacauaagaugcu

SEQ ID NO: 2946131 - RNA, 19 nt, Artificial Sequence
  Description of Artificial Sequence: Synthetic oligonucleotide
ugguggcuaauuauaaagu

SEQ ID NO: 2946132 - RNA, 19 nt, Artificial Sequence
  Description of Artificial Sequence: Synthetic oligonucleotide
uuaagauuacccagugcuc

SEQ ID NO: 2946133 - RNA, 19 nt, Artificial Sequence
  Description of Artificial Sequence: Synthetic oligonucleotide
uggaucagcaguuaagauu

SEQ ID NO: 2946134 - RNA, 19 nt, Artificial Sequence
  Description of Artificial Sequence: Synthetic oligonucleotide
uuacccagugcucuuccag

SEQ ID NO: 2946135 - RNA, 19 nt, Artificial Sequence
  Description of Artificial Sequence: Synthetic oligonucleotide
uuccaggggaccaagguuc

SEQ ID NO: 2946136 - RNA, 19 nt, Artificial Sequence
  Description of Artificial Sequence: Synthetic oligonucleotide
acuuuauacuggguggugg

SEQ ID NO: 2946137 - RNA, 19 nt, Artificial Sequence
  Description of Artificial Sequence: Synthetic oligonucleotide
uuauaagcacagguaagug

SEQ ID NO: 2946138 - RNA, 19 nt, Artificial Sequence
  Description of Artificial Sequence: Synthetic oligonucleotide
uauguucaggcaaggacuc

SEQ ID NO: 2946139 - RNA, 19 nt, Artificial Sequence
  Description of Artificial Sequence: Synthetic oligonucleotide
cuugauuauguucaggcaa

SEQ ID NO: 2946140 - RNA, 19 nt, Artificial Sequence
  Description of Artificial Sequence: Synthetic oligonucleotide
accauagucucucuguaga

SEQ ID NO: 2946141 - RNA, 19 nt, Artificial Sequence
  Description of Artificial Sequence: Synthetic oligonucleotide
cauaaaugaaaaguuuauc

SEQ ID NO: 2946142 - RNA, 19 nt, Artificial Sequence
  Description of Artificial Sequence: Synthetic oligonucleotide
uuagacucgucugggacag

SEQ ID NO: 2946143 - RNA, 19 nt, Artificial Sequence
  Description of Artificial Sequence: Synthetic oligonucleotide
auagucucucuguagacau

SEQ ID NO: 2946144 - RNA, 19 nt, Artificial Sequence
  Description of Artificial Sequence: Synthetic oligonucleotide
uuuaaugaugaggcuggag

SEQ ID NO: 2946145 - RNA, 19 nt, Artificial Sequence
  Description of Artificial Sequence: Synthetic oligonucleotide
auuagacucgucugggaca

SEQ ID NO: 2946146 - RNA, 19 nt, Artificial Sequence
  Description of Artificial Sequence: Synthetic oligonucleotide
auagacuuuuaaugaugag

SEQ ID NO: 2946147 - RNA, 19 nt, Artificial Sequence
  Description of Artificial Sequence: Synthetic oligonucleotide
ggaaacauuuucaaggcug

SEQ ID NO: 2946148 - RNA, 19 nt, Artificial Sequence
  Description of Artificial Sequence: Synthetic oligonucleotide
gauggaucagcaguuaaga

SEQ ID NO: 2946149 - RNA, 19 nt, Artificial Sequence
  Description of Artificial Sequence: Synthetic oligonucleotide
gaggccuucuuauaagcac

SEQ ID NO: 2946150 - RNA, 19 nt, Artificial Sequence
  Description of Artificial Sequence: Synthetic oligonucleotide
ucaagugauccguuuauuu

SEQ ID NO: 2946151 - RNA, 19 nt, Artificial Sequence
  Description of Artificial Sequence: Synthetic oligonucleotide
gacuaguagccauggaaac

SEQ ID NO: 2946152 - RNA, 19 nt, Artificial Sequence
  Description of Artificial Sequence: Synthetic oligonucleotide
acucgucugggacaggcuc

SEQ ID NO: 2946153 - RNA, 19 nt, Artificial Sequence
  Description of Artificial Sequence: Synthetic oligonucleotide
aucagcaguuaagauuacc

SEQ ID NO: 2946154 - RNA, 19 nt, Artificial Sequence
  Description of Artificial Sequence: Synthetic oligonucleotide
uagccauggaaacauuuuc

SEQ ID NO: 2946155 - RNA, 19 nt, Artificial Sequence
  Description of Artificial Sequence: Synthetic oligonucleotide
uacccagugcucuuccagg

SEQ ID NO: 2946156 - RNA, 19 nt, Artificial Sequence
  Description of Artificial Sequence: Synthetic oligonucleotide
ucuuccaggggaccaaggu

SEQ ID NO: 2946157 - RNA, 19 nt, Artificial Sequence
  Description of Artificial Sequence: Synthetic oligonucleotide
acauaagaugcuaauauua

SEQ ID NO: 2946158 - RNA, 19 nt, Artificial Sequence
  Description of Artificial Sequence: Synthetic oligonucleotide
ugauuauguucaggcaagg

SEQ ID NO: 2946159 - RNA, 19 nt, Artificial Sequence
  Description of Artificial Sequence: Synthetic oligonucleotide
uucaaggcugccaccgacc

SEQ ID NO: 2946160 - RNA, 19 nt, Artificial Sequence
  Description of Artificial Sequence: Synthetic oligonucleotide
cacaacauaaaugaaaagu

SEQ ID NO: 2946161 - RNA, 19 nt, Artificial Sequence
  Description of Artificial Sequence: Synthetic oligonucleotide
agacucgucugggacaggc

SEQ ID NO: 2946162 - RNA, 19 nt, Artificial Sequence
  Description of Artificial Sequence: Synthetic oligonucleotide
uuucaaggcugccaccgac

SEQ ID NO: 2946163 - RNA, 19 nt, Artificial Sequence
  Description of Artificial Sequence: Synthetic oligonucleotide
uuacuuuauacuggguggu

SEQ ID NO: 2946164 - RNA, 19 nt, Artificial Sequence
  Description of Artificial Sequence: Synthetic oligonucleotide
cuaaaucuccuugauuaug

SEQ ID NO: 2946165 - RNA, 19 nt, Artificial Sequence
  Description of Artificial Sequence: Synthetic oligonucleotide
aaguacuaucuugaagacu

SEQ ID NO: 2946166 - RNA, 19 nt, Artificial Sequence
  Description of Artificial Sequence: Synthetic oligonucleotide
ucugggacaggcucacacc

SEQ ID NO: 2946167 - RNA, 19 nt, Artificial Sequence
  Description of Artificial Sequence: Synthetic oligonucleotide
ggacucuaauauuagacuc

SEQ ID NO: 2946168 - RNA, 19 nt, Artificial Sequence
  Description of Artificial Sequence: Synthetic oligonucleotide
aaggcugccaccgaccuau

SEQ ID NO: 2946169 - RNA, 19 nt, Artificial Sequence
  Description of Artificial Sequence: Synthetic oligonucleotide
guggcuaauuauaaaguac

SEQ ID NO: 2946170 - RNA, 19 nt, Artificial Sequence
  Description of Artificial Sequence: Synthetic oligonucleotide
acauaaaugaaaaguuuau

SEQ ID NO: 2946171 - RNA, 19 nt, Artificial Sequence
  Description of Artificial Sequence: Synthetic oligonucleotide
gauuacccagugcucuucc

SEQ ID NO: 2946172 - RNA, 19 nt, Artificial Sequence
  Description of Artificial Sequence: Synthetic oligonucleotide
gacucucccaccauuuaag

SEQ ID NO: 2946173 - RNA, 19 nt, Artificial Sequence
  Description of Artificial Sequence: Synthetic oligonucleotide
cuauucauggacucuaaua

SEQ ID NO: 2946174 - RNA, 19 nt, Artificial Sequence
  Description of Artificial Sequence: Synthetic oligonucleotide
cagguaagugcuaaaucuc

SEQ ID NO: 2946175 - RNA, 19 nt, Artificial Sequence
  Description of Artificial Sequence: Synthetic oligonucleotide
agugcuaaaucuccuugau

SEQ ID NO: 2946176 - RNA, 19 nt, Artificial Sequence
  Description of Artificial Sequence: Synthetic oligonucleotide
cuucuuauaagcacaggua

SEQ ID NO: 2946177 - RNA, 19 nt, Artificial Sequence
  Description of Artificial Sequence: Synthetic oligonucleotide
ucuugaagacuaguagcca

SEQ ID NO: 2946178 - RNA, 19 nt, Artificial Sequence
  Description of Artificial Sequence: Synthetic oligonucleotide
ucaggcaaggacucuccca

SEQ ID NO: 2946179 - RNA, 19 nt, Artificial Sequence
  Description of Artificial Sequence: Synthetic oligonucleotide
ucaaggcugccaccgaccu

SEQ ID NO: 2946180 - RNA, 19 nt, Artificial Sequence
  Description of Artificial Sequence: Synthetic oligonucleotide
augcuaauauuagagcacu

SEQ ID NO: 2946181 - RNA, 19 nt, Artificial Sequence
  Description of Artificial Sequence: Synthetic oligonucleotide
agauggaucagcaguuaag

SEQ ID NO: 2946182 - RNA, 19 nt, Artificial Sequence
  Description of Artificial Sequence: Synthetic oligonucleotide
caggcaaggacucucccac

SEQ ID NO: 2946183 - RNA, 19 nt, Artificial Sequence
  Description of Artificial Sequence: Synthetic oligonucleotide
ugggugguggcuaauuaua

SEQ ID NO: 2946184 - RNA, 19 nt, Artificial Sequence
  Description of Artificial Sequence: Synthetic oligonucleotide
auauuagacucgucuggga

SEQ ID NO: 2946185 - RNA, 19 nt, Artificial Sequence
  Description of Artificial Sequence: Synthetic oligonucleotide
acucuaauauuagacucgu

SEQ ID NO: 2946186 - RNA, 19 nt, Artificial Sequence
  Description of Artificial Sequence: Synthetic oligonucleotide
acccagugcucuuccaggg

SEQ ID NO: 2946187 - RNA, 19 nt, Artificial Sequence
  Description of Artificial Sequence: Synthetic oligonucleotide
uagacauaagaugcuaaua

SEQ ID NO: 2946188 - RNA, 19 nt, Artificial Sequence
  Description of Artificial Sequence: Synthetic oligonucleotide
gccaccgaccuauucaugg

SEQ ID NO: 2946189 - RNA, 19 nt, Artificial Sequence
  Description of Artificial Sequence: Synthetic oligonucleotide
ucacaccauagucucucug

SEQ ID NO: 2946190 - RNA, 19 nt, Artificial Sequence
  Description of Artificial Sequence: Synthetic oligonucleotide
aaaucuccuugauuauguu

SEQ ID NO: 2946191 - RNA, 19 nt, Artificial Sequence
  Description of Artificial Sequence: Synthetic oligonucleotide
uuuucaaggcugccaccga

SEQ ID NO: 2946192 - RNA, 19 nt, Artificial Sequence
  Description of Artificial Sequence: Synthetic oligonucleotide
cacagguaagugcuaaauc

SEQ ID NO: 2946193 - RNA, 19 nt, Artificial Sequence
  Description of Artificial Sequence: Synthetic oligonucleotide
auucauggacucuaauauu

SEQ ID NO: 2946194 - RNA, 19 nt, Artificial Sequence
  Description of Artificial Sequence: Synthetic oligonucleotide
acuaguagccauggaaaca

SEQ ID NO: 2946195 - RNA, 19 nt, Artificial Sequence
  Description of Artificial Sequence: Synthetic oligonucleotide
caguuaagauuacccagug

SEQ ID NO: 2946196 - RNA, 19 nt, Artificial Sequence
  Description of Artificial Sequence: Synthetic oligonucleotide
cauuuucaaggcugccacc

SEQ ID NO: 2946197 - RNA, 19 nt, Artificial Sequence
  Description of Artificial Sequence: Synthetic oligonucleotide
acuaucuugaagacuagua

SEQ ID NO: 2946198 - RNA, 19 nt, Artificial Sequence
  Description of Artificial Sequence: Synthetic oligonucleotide
uucaggcaaggacucuccc

SEQ ID NO: 2946199 - RNA, 19 nt, Artificial Sequence
  Description of Artificial Sequence: Synthetic oligonucleotide
aagauuacccagugcucuu

SEQ ID NO: 2946200 - RNA, 19 nt, Artificial Sequence
  Description of Artificial Sequence: Synthetic oligonucleotide
uauacugggugguggcuaa

SEQ ID NO: 2946201 - RNA, 19 nt, Artificial Sequence
  Description of Artificial Sequence: Synthetic oligonucleotide
agacuaguagccauggaaa

SEQ ID NO: 2946202 - RNA, 19 nt, Artificial Sequence
  Description of Artificial Sequence: Synthetic oligonucleotide
uuuauacugggugguggcu

SEQ ID NO: 2946203 - RNA, 19 nt, Artificial Sequence
  Description of Artificial Sequence: Synthetic oligonucleotide
agugcucuuccaggggacc

SEQ ID NO: 2946204 - RNA, 19 nt, Artificial Sequence
  Description of Artificial Sequence: Synthetic oligonucleotide
gauuauguucaggcaagga

SEQ ID NO: 2946205 - RNA, 19 nt, Artificial Sequence
  Description of Artificial Sequence: Synthetic oligonucleotide
ggaucagcaguuaagauua

SEQ ID NO: 2946206 - RNA, 19 nt, Artificial Sequence
  Description of Artificial Sequence: Synthetic oligonucleotide
caccauagucucucuguag

SEQ ID NO: 2946207 - RNA, 19 nt, Artificial Sequence
  Description of Artificial Sequence: Synthetic oligonucleotide
uacuaucuugaagacuagu

SEQ ID NO: 2946208 - RNA, 19 nt, Artificial Sequence
  Description of Artificial Sequence: Synthetic oligonucleotide
uguucaggcaaggacucuc

SEQ ID NO: 2946209 - RNA, 19 nt, Artificial Sequence
  Description of Artificial Sequence: Synthetic oligonucleotide
uacuuuauacuggguggug

SEQ ID NO: 2946210 - RNA, 19 nt, Artificial Sequence
  Description of Artificial Sequence: Synthetic oligonucleotide
aggcaaggacucucccacc

SEQ ID NO: 2946211 - RNA, 19 nt, Artificial Sequence
  Description of Artificial Sequence: Synthetic oligonucleotide
agauuacccagugcucuuc

SEQ ID NO: 2946212 - RNA, 19 nt, Artificial Sequence
  Description of Artificial Sequence: Synthetic oligonucleotide
cagcaguuaagauuaccca

SEQ ID NO: 2946213 - RNA, 19 nt, Artificial Sequence
  Description of Artificial Sequence: Synthetic oligonucleotide
agucucucuguagacauaa

SEQ ID NO: 2946214 - RNA, 19 nt, Artificial Sequence
  Description of Artificial Sequence: Synthetic oligonucleotide
acucucccaccauuuaagu

SEQ ID NO: 2946215 - RNA, 19 nt, Artificial Sequence
  Description of Artificial Sequence: Synthetic oligonucleotide
auggaucagcaguuaagau

SEQ ID NO: 2946216 - RNA, 19 nt, Artificial Sequence
  Description of Artificial Sequence: Synthetic oligonucleotide
gucugggacaggcucacac

SEQ ID NO: 2946217 - RNA, 19 nt, Artificial Sequence
  Description of Artificial Sequence: Synthetic oligonucleotide
cauggacucuaauauuaga

SEQ ID NO: 2946218 - RNA, 19 nt, Artificial Sequence
  Description of Artificial Sequence: Synthetic oligonucleotide
cuuauaagcacagguaagu

SEQ ID NO: 2946219 - RNA, 19 nt, Artificial Sequence
  Description of Artificial Sequence: Synthetic oligonucleotide
agccauggaaacauuuuca

SEQ ID NO: 2946220 - RNA, 19 nt, Artificial Sequence
  Description of Artificial Sequence: Synthetic oligonucleotide
gacauaagaugcuaauauu

SEQ ID NO: 2946221 - RNA, 19 nt, Artificial Sequence
  Description of Artificial Sequence: Synthetic oligonucleotide
accgguucaagugauccgu

SEQ ID NO: 2946222 - RNA, 19 nt, Artificial Sequence
  Description of Artificial Sequence: Synthetic oligonucleotide
uuauacugggugguggcua

SEQ ID NO: 2946223 - RNA, 19 nt, Artificial Sequence
  Description of Artificial Sequence: Synthetic oligonucleotide
uuuuaaugaugaggcugga

SEQ ID NO: 2946224 - RNA, 19 nt, Artificial Sequence
  Description of Artificial Sequence: Synthetic oligonucleotide
caccgguucaagugauccg

SEQ ID NO: 2946225 - RNA, 19 nt, Artificial Sequence
  Description of Artificial Sequence: Synthetic oligonucleotide
gagauggaucagcaguuaa

SEQ ID NO: 2946226 - RNA, 19 nt, Artificial Sequence
  Description of Artificial Sequence: Synthetic oligonucleotide
aagcacagguaagugcuaa

SEQ ID NO: 2946227 - RNA, 19 nt, Artificial Sequence
  Description of Artificial Sequence: Synthetic oligonucleotide
gguggcuaauuauaaagua

SEQ ID NO: 2946228 - RNA, 19 nt, Artificial Sequence
  Description of Artificial Sequence: Synthetic oligonucleotide
ccauggaaacauuuucaag

SEQ ID NO: 2946229 - RNA, 19 nt, Artificial Sequence
  Description of Artificial Sequence: Synthetic oligonucleotide
guagacauaagaugcuaau

SEQ ID NO: 2946230 - RNA, 19 nt, Artificial Sequence
  Description of Artificial Sequence: Synthetic oligonucleotide
ugcuaauauuagagcacuu

SEQ ID NO: 2946231 - RNA, 19 nt, Artificial Sequence
  Description of Artificial Sequence: Synthetic oligonucleotide
caacauaaaugaaaaguuu

SEQ ID NO: 2946232 - RNA, 19 nt, Artificial Sequence
  Description of Artificial Sequence: Synthetic oligonucleotide
acaccauagucucucugua

SEQ ID NO: 2946233 - RNA, 19 nt, Artificial Sequence
  Description of Artificial Sequence: Synthetic oligonucleotide
auuacccagugcucuucca

SEQ ID NO: 2946234 - RNA, 19 nt, Artificial Sequence
  Description of Artificial Sequence: Synthetic oligonucleotide
cucuuccaggggaccaagg

SEQ ID NO: 2946235 - RNA, 19 nt, Artificial Sequence
  Description of Artificial Sequence: Synthetic oligonucleotide
ugaugaggcuggagagaug

SEQ ID NO: 2946236 - RNA, 19 nt, Artificial Sequence
  Description of Artificial Sequence: Synthetic oligonucleotide
gaagacuaguagccaugga

SEQ ID NO: 2946237 - RNA, 19 nt, Artificial Sequence
  Description of Artificial Sequence: Synthetic oligonucleotide
cauagucucucuguagaca

SEQ ID NO: 2946238 - RNA, 19 nt, Artificial Sequence
  Description of Artificial Sequence: Synthetic oligonucleotide
uaagcacagguaagugcua

SEQ ID NO: 2946239 - RNA, 19 nt, Artificial Sequence
  Description of Artificial Sequence: Synthetic oligonucleotide
caccgaccuauucauggac

SEQ ID NO: 2946240 - RNA, 19 nt, Artificial Sequence
  Description of Artificial Sequence: Synthetic oligonucleotide
gacuuuuaaugaugaggcu

SEQ ID NO: 2946241 - RNA, 19 nt, Artificial Sequence
  Description of Artificial Sequence: Synthetic oligonucleotide
cugggacaggcucacacca

SEQ ID NO: 2946242 - RNA, 19 nt, Artificial Sequence
  Description of Artificial Sequence: Synthetic oligonucleotide
aguagccauggaaacauuu

SEQ ID NO: 2946243 - RNA, 19 nt, Artificial Sequence
  Description of Artificial Sequence: Synthetic oligonucleotide
caccauuuaaguuuacuuu

SEQ ID NO: 2946244 - RNA, 19 nt, Artificial Sequence
  Description of Artificial Sequence: Synthetic oligonucleotide
aggccuucuuauaagcaca

SEQ ID NO: 2946245 - RNA, 19 nt, Artificial Sequence
  Description of Artificial Sequence: Synthetic oligonucleotide
acugggugguggcuaauua

SEQ ID NO: 2946246 - RNA, 19 nt, Artificial Sequence
  Description of Artificial Sequence: Synthetic oligonucleotide
cuugaagacuaguagccau

SEQ ID NO: 2946247 - RNA, 19 nt, Artificial Sequence
  Description of Artificial Sequence: Synthetic oligonucleotide
agaggccuucuuauaagca

SEQ ID NO: 2946248 - RNA, 19 nt, Artificial Sequence
  Description of Artificial Sequence: Synthetic oligonucleotide
guucaggcaaggacucucc

SEQ ID NO: 2946249 - RNA, 19 nt, Artificial Sequence
  Description of Artificial Sequence: Synthetic oligonucleotide
cucuaauauuagacucguc

SEQ ID NO: 2946250 - RNA, 19 nt, Artificial Sequence
  Description of Artificial Sequence: Synthetic oligonucleotide
cauuuaaguuuacuuuaua

SEQ ID NO: 2946251 - RNA, 19 nt, Artificial Sequence
  Description of Artificial Sequence: Synthetic oligonucleotide
aggggaccaagguucaauu

SEQ ID NO: 2946252 - RNA, 19 nt, Artificial Sequence
  Description of Artificial Sequence: Synthetic oligonucleotide
aaggacucucccaccauuu

SEQ ID NO: 2946253 - RNA, 19 nt, Artificial Sequence
  Description of Artificial Sequence: Synthetic oligonucleotide
uucaagugauccguuuauu

SEQ ID NO: 2946254 - RNA, 19 nt, Artificial Sequence
  Description of Artificial Sequence: Synthetic oligonucleotide
gcugccaccgaccuauuca

SEQ ID NO: 2946255 - RNA, 19 nt, Artificial Sequence
  Description of Artificial Sequence: Synthetic oligonucleotide
gaccuauucauggacucua

SEQ ID NO: 2946256 - RNA, 19 nt, Artificial Sequence
  Description of Artificial Sequence: Synthetic oligonucleotide
cuugguagaaauagacuuu

SEQ ID NO: 2946257 - RNA, 19 nt, Artificial Sequence
  Description of Artificial Sequence: Synthetic oligonucleotide
guacuaucuugaagacuag

SEQ ID NO: 2946258 - RNA, 19 nt, Artificial Sequence
  Description of Artificial Sequence: Synthetic oligonucleotide
cacaccauagucucucugu

SEQ ID NO: 2946259 - RNA, 19 nt, Artificial Sequence
  Description of Artificial Sequence: Synthetic oligonucleotide
aguuuacuuuauacugggu

SEQ ID NO: 2946260 - RNA, 19 nt, Artificial Sequence
  Description of Artificial Sequence: Synthetic oligonucleotide
caagugauccguuuauuuu

SEQ ID NO: 2946261 - RNA, 19 nt, Artificial Sequence
  Description of Artificial Sequence: Synthetic oligonucleotide
cuaguagccauggaaacau

SEQ ID NO: 2946262 - RNA, 19 nt, Artificial Sequence
  Description of Artificial Sequence: Synthetic oligonucleotide
guucaagugauccguuuau

SEQ ID NO: 2946263 - RNA, 19 nt, Artificial Sequence
  Description of Artificial Sequence: Synthetic oligonucleotide
agcacagguaagugcuaaa

SEQ ID NO: 2946264 - RNA, 19 nt, Artificial Sequence
  Description of Artificial Sequence: Synthetic oligonucleotide
caggcucacaccauagucu

SEQ ID NO: 2946265 - RNA, 19 nt, Artificial Sequence
  Description of Artificial Sequence: Synthetic oligonucleotide
ugccaccgaccuauucaug

SEQ ID NO: 2946266 - RNA, 19 nt, Artificial Sequence
  Description of Artificial Sequence: Synthetic oligonucleotide
cccagcaccgguucaagug

SEQ ID NO: 2946267 - RNA, 19 nt, Artificial Sequence
  Description of Artificial Sequence: Synthetic oligonucleotide
gccauggaaacauuuucaa

SEQ ID NO: 2946268 - RNA, 19 nt, Artificial Sequence
  Description of Artificial Sequence: Synthetic oligonucleotide
accgaccuauucauggacu

SEQ ID NO: 2946269 - RNA, 19 nt, Artificial Sequence
  Description of Artificial Sequence: Synthetic oligonucleotide
cagugcucuuccaggggac

SEQ ID NO: 2946270 - RNA, 19 nt, Artificial Sequence
  Description of Artificial Sequence: Synthetic oligonucleotide
gcaccgguucaagugaucc

SEQ ID NO: 2946271 - RNA, 19 nt, Artificial Sequence
  Description of Artificial Sequence: Synthetic oligonucleotide
gguucaagugauccguuua

SEQ ID NO: 2946272 - RNA, 19 nt, Artificial Sequence
  Description of Artificial Sequence: Synthetic oligonucleotide
ccuucuuauaagcacaggu

SEQ ID NO: 2946273 - RNA, 19 nt, Artificial Sequence
  Description of Artificial Sequence: Synthetic oligonucleotide
uagucucucuguagacaua

SEQ ID NO: 2946274 - RNA, 19 nt, Artificial Sequence
  Description of Artificial Sequence: Synthetic oligonucleotide
guaagugcuaaaucuccuu

SEQ ID NO: 2946275 - RNA, 19 nt, Artificial Sequence
  Description of Artificial Sequence: Synthetic oligonucleotide
ugggacaggcucacaccau

SEQ ID NO: 2946276 - RNA, 19 nt, Artificial Sequence
  Description of Artificial Sequence: Synthetic oligonucleotide
cucgucugggacaggcuca

SEQ ID NO: 2946277 - RNA, 19 nt, Artificial Sequence
  Description of Artificial Sequence: Synthetic oligonucleotide
ccauagucucucuguagac

SEQ ID NO: 2946278 - RNA, 19 nt, Artificial Sequence
  Description of Artificial Sequence: Synthetic oligonucleotide
gcuaauuauaaaguacuau

SEQ ID NO: 2946279 - RNA, 19 nt, Artificial Sequence
  Description of Artificial Sequence: Synthetic oligonucleotide
ggcaaggacucucccacca

SEQ ID NO: 2946280 - RNA, 19 nt, Artificial Sequence
  Description of Artificial Sequence: Synthetic oligonucleotide
ggugguggcuaauuauaaa

SEQ ID NO: 2946281 - RNA, 19 nt, Artificial Sequence
  Description of Artificial Sequence: Synthetic oligonucleotide
auucccagcaccgguucaa

SEQ ID NO: 2946282 - RNA, 19 nt, Artificial Sequence
  Description of Artificial Sequence: Synthetic oligonucleotide
uaguagccauggaaacauu

SEQ ID NO: 2946283 - RNA, 19 nt, Artificial Sequence
  Description of Artificial Sequence: Synthetic oligonucleotide
ucgucugggacaggcucac

SEQ ID NO: 2946284 - RNA, 19 nt, Artificial Sequence
  Description of Artificial Sequence: Synthetic oligonucleotide
ggccuucuuauaagcacag

SEQ ID NO: 2946285 - RNA, 19 nt, Artificial Sequence
  Description of Artificial Sequence: Synthetic oligonucleotide
agagauggaucagcaguua

SEQ ID NO: 2946286 - RNA, 19 nt, Artificial Sequence
  Description of Artificial Sequence: Synthetic oligonucleotide
ccuugauuauguucaggca

SEQ ID NO: 2946287 - RNA, 19 nt, Artificial Sequence
  Description of Artificial Sequence: Synthetic oligonucleotide
gacaggcucacaccauagu

SEQ ID NO: 2946288 - RNA, 19 nt, Artificial Sequence
  Description of Artificial Sequence: Synthetic oligonucleotide
gaucagcaguuaagauuac

SEQ ID NO: 2946289 - RNA, 19 nt, Artificial Sequence
  Description of Artificial Sequence: Synthetic oligonucleotide
ggacaggcucacaccauag

SEQ ID NO: 2946290 - RNA, 19 nt, Artificial Sequence
  Description of Artificial Sequence: Synthetic oligonucleotide
cucccaccauuuaaguuua

SEQ ID NO: 2946291 - RNA, 19 nt, Artificial Sequence
  Description of Artificial Sequence: Synthetic oligonucleotide
cuguagacauaagaugcua

SEQ ID NO: 2946292 - RNA, 19 nt, Artificial Sequence
  Description of Artificial Sequence: Synthetic oligonucleotide
gcucacaccauagucucuc

SEQ ID NO: 2946293 - RNA, 19 nt, Artificial Sequence
  Description of Artificial Sequence: Synthetic oligonucleotide
gucucucuguagacauaag

SEQ ID NO: 2946294 - RNA, 19 nt, Artificial Sequence
  Description of Artificial Sequence: Synthetic oligonucleotide
ggggaccaagguucaauuc

SEQ ID NO: 2946295 - RNA, 19 nt, Artificial Sequence
  Description of Artificial Sequence: Synthetic oligonucleotide
agcaccgguucaagugauc

SEQ ID NO: 2946296 - RNA, 19 nt, Artificial Sequence
  Description of Artificial Sequence: Synthetic oligonucleotide
uacugggugguggcuaauu

SEQ ID NO: 2946297 - RNA, 19 nt, Artificial Sequence
  Description of Artificial Sequence: Synthetic oligonucleotide
ccgaccuauucauggacuc

SEQ ID NO: 2946298 - RNA, 19 nt, Artificial Sequence
  Description of Artificial Sequence: Synthetic oligonucleotide
gcaguuaagauuacccagu

SEQ ID NO: 2946299 - RNA, 19 nt, Artificial Sequence
  Description of Artificial Sequence: Synthetic oligonucleotide
auguucaggcaaggacucu

SEQ ID NO: 2946300 - RNA, 19 nt, Artificial Sequence
  Description of Artificial Sequence: Synthetic oligonucleotide
ucccaccauuuaaguuuac

SEQ ID NO: 2946301 - RNA, 19 nt, Artificial Sequence
  Description of Artificial Sequence: Synthetic oligonucleotide
ggcuaauuauaaaguacua

SEQ ID NO: 2946302 - RNA, 19 nt, Artificial Sequence
  Description of Artificial Sequence: Synthetic oligonucleotide
guagccauggaaacauuuu

SEQ ID NO: 2946303 - RNA, 19 nt, Artificial Sequence
  Description of Artificial Sequence: Synthetic oligonucleotide
gccuucuuauaagcacagg

SEQ ID NO: 2946304 - RNA, 19 nt, Artificial Sequence
  Description of Artificial Sequence: Synthetic oligonucleotide
gcuaauauuagagcacuuu

SEQ ID NO: 2946305 - RNA, 19 nt, Artificial Sequence
  Description of Artificial Sequence: Synthetic oligonucleotide
uagacucgucugggacagg

SEQ ID NO: 2946306 - RNA, 19 nt, Artificial Sequence
  Description of Artificial Sequence: Synthetic oligonucleotide
accuauucauggacucuaa

SEQ ID NO: 2946307 - RNA, 19 nt, Artificial Sequence
  Description of Artificial Sequence: Synthetic oligonucleotide
gguaagugcuaaaucuccu

SEQ ID NO: 2946308 - RNA, 19 nt, Artificial Sequence
  Description of Artificial Sequence: Synthetic oligonucleotide
cccagugcucuuccagggg

SEQ ID NO: 2946309 - RNA, 19 nt, Artificial Sequence
  Description of Artificial Sequence: Synthetic oligonucleotide
cugggugguggcuaauuau

SEQ ID NO: 2946310 - RNA, 19 nt, Artificial Sequence
  Description of Artificial Sequence: Synthetic oligonucleotide
ccagcaccgguucaaguga

SEQ ID NO: 2946311 - RNA, 19 nt, Artificial Sequence
  Description of Artificial Sequence: Synthetic oligonucleotide
cuuccaggggaccaagguu

SEQ ID NO: 2946312 - RNA, 19 nt, Artificial Sequence
  Description of Artificial Sequence: Synthetic oligonucleotide
ccagugcucuuccagggga

SEQ ID NO: 2946313 - RNA, 19 nt, Artificial Sequence
  Description of Artificial Sequence: Synthetic oligonucleotide
guuuaucuuguuagauuuu

SEQ ID NO: 2946314 - RNA, 19 nt, Artificial Sequence
  Description of Artificial Sequence: Synthetic oligonucleotide
ccaccauuuaaguuuacuu

SEQ ID NO: 2946315 - RNA, 19 nt, Artificial Sequence
  Description of Artificial Sequence: Synthetic oligonucleotide
gggacaggcucacaccaua

SEQ ID NO: 2946316 - RNA, 19 nt, Artificial Sequence
  Description of Artificial Sequence: Synthetic oligonucleotide
cugccaccgaccuauucau

SEQ ID NO: 2946317 - RNA, 19 nt, Artificial Sequence
  Description of Artificial Sequence: Synthetic oligonucleotide
gggugguggcuaauuauaa

SEQ ID NO: 2946318 - RNA, 19 nt, Artificial Sequence
  Description of Artificial Sequence: Synthetic oligonucleotide
cucucccaccauuuaaguu

SEQ ID NO: 2946319 - RNA, 19 nt, Artificial Sequence
  Description of Artificial Sequence: Synthetic oligonucleotide
ccauuuaaguuuacuuuau

SEQ ID NO: 2946320 - RNA, 19 nt, Artificial Sequence
  Description of Artificial Sequence: Synthetic oligonucleotide
gcucuuccaggggaccaag

SEQ ID NO: 2946321 - RNA, 19 nt, Artificial Sequence
  Description of Artificial Sequence: Synthetic oligonucleotide
augaggcuggagagaugga

SEQ ID NO: 2946322 - RNA, 19 nt, Artificial Sequence
  Description of Artificial Sequence: Synthetic oligonucleotide
caaggacucucccaccauu

SEQ ID NO: 2946323 - RNA, 19 nt, Artificial Sequence
  Description of Artificial Sequence: Synthetic oligonucleotide
cucacaccauagucucucu

SEQ ID NO: 2946324 - RNA, 19 nt, Artificial Sequence
  Description of Artificial Sequence: Synthetic oligonucleotide
ccaccgaccuauucaugga

SEQ ID NO: 2946325 - RNA, 19 nt, Artificial Sequence
  Description of Artificial Sequence: Synthetic oligonucleotide
gacucgucugggacaggcu

SEQ ID NO: 2946326 - RNA, 19 nt, Artificial Sequence
  Description of Artificial Sequence: Synthetic oligonucleotide
auacugggugguggcuaau

SEQ ID NO: 2946327 - RNA, 19 nt, Artificial Sequence
  Description of Artificial Sequence: Synthetic oligonucleotide
gcacagguaagugcuaaau

SEQ ID NO: 2946328 - RNA, 19 nt, Artificial Sequence
  Description of Artificial Sequence: Synthetic oligonucleotide
ggcugccaccgaccuauuc

SEQ ID NO: 2946329 - RNA, 19 nt, Artificial Sequence
  Description of Artificial Sequence: Synthetic oligonucleotide
caggggaccaagguucaau

SEQ ID NO: 2946330 - RNA, 19 nt, Artificial Sequence
  Description of Artificial Sequence: Synthetic oligonucleotide
caaggcugccaccgaccua

SEQ ID NO: 2946331 - RNA, 19 nt, Artificial Sequence
  Description of Artificial Sequence: Synthetic oligonucleotide
cagcaccgguucaagugau

SEQ ID NO: 2946332 - RNA, 19 nt, Artificial Sequence
  Description of Artificial Sequence: Synthetic oligonucleotide
ccuauucauggacucuaau

SEQ ID NO: 2946333 - RNA, 19 nt, Artificial Sequence
  Description of Artificial Sequence: Synthetic oligonucleotide
cccaccauuuaaguuuacu

SEQ ID NO: 2946334 - RNA, 19 nt, Artificial Sequence
  Description of Artificial Sequence: Synthetic oligonucleotide
gcaaggacucucccaccau

SEQ ID NO: 2946335 - RNA, 19 nt, Artificial Sequence
  Description of Artificial Sequence: Synthetic oligonucleotide
ggcucacaccauagucucu

SEQ ID NO: 2946336 - RNA, 19 nt, Artificial Sequence
  Description of Artificial Sequence: Synthetic oligonucleotide
cgaccuauucauggacucu

SEQ ID NO: 2946337 - RNA, 19 nt, Artificial Sequence
  Description of Artificial Sequence: Synthetic oligonucleotide
ccgguucaagugauccguu

SEQ ID NO: 2946338 - RNA, 19 nt, Artificial Sequence
  Description of Artificial Sequence: Synthetic oligonucleotide
aggcugccaccgaccuauu

SEQ ID NO: 2946339 - RNA, 19 nt, Artificial Sequence
  Description of Artificial Sequence: Synthetic oligonucleotide
cgguucaagugauccguuu

SEQ ID NO: 2946340 - RNA, 19 nt, Artificial Sequence
  Description of Artificial Sequence: Synthetic oligonucleotide
uauaucaacgccaagacag

SEQ ID NO: 2946341 - RNA, 19 nt, Artificial Sequence
  Description of Artificial Sequence: Synthetic oligonucleotide
ucucacaucuauaucaacg

SEQ ID NO: 2946342 - RNA, 19 nt, Artificial Sequence
  Description of Artificial Sequence: Synthetic oligonucleotide
aauccuucaguccugacug

SEQ ID NO: 2946343 - RNA, 19 nt, Artificial Sequence
  Description of Artificial Sequence: Synthetic oligonucleotide
auaaugaagagcugugagc

SEQ ID NO: 2946344 - RNA, 19 nt, Artificial Sequence
  Description of Artificial Sequence: Synthetic oligonucleotide
ugucuauacacuuugugag

SEQ ID NO: 2946345 - RNA, 19 nt, Artificial Sequence
  Description of Artificial Sequence: Synthetic oligonucleotide
uuucuuucauucuuuagag

SEQ ID NO: 2946346 - RNA, 19 nt, Artificial Sequence
  Description of Artificial Sequence: Synthetic oligonucleotide
aguaguuugaacugugcuc

SEQ ID NO: 2946347 - RNA, 19 nt, Artificial Sequence
  Description of Artificial Sequence: Synthetic oligonucleotide
uuuucaaggagcagcuugg

SEQ ID NO: 2946348 - RNA, 19 nt, Artificial Sequence
  Description of Artificial Sequence: Synthetic oligonucleotide
cuuggcuaugucaacaugg

SEQ ID NO: 2946349 - RNA, 19 nt, Artificial Sequence
  Description of Artificial Sequence: Synthetic oligonucleotide
gauaacaguaguuugaacu

SEQ ID NO: 2946350 - RNA, 19 nt, Artificial Sequence
  Description of Artificial Sequence: Synthetic oligonucleotide
aaucguauggcuucauucu

SEQ ID NO: 2946351 - RNA, 19 nt, Artificial Sequence
  Description of Artificial Sequence: Synthetic oligonucleotide
uucagaauccuucaguccu

SEQ ID NO: 2946352 - RNA, 19 nt, Artificial Sequence
  Description of Artificial Sequence: Synthetic oligonucleotide
gacaccaggaaucguaugg

SEQ ID NO: 2946353 - RNA, 19 nt, Artificial Sequence
  Description of Artificial Sequence: Synthetic oligonucleotide
ucuauaucaacgccaagac

SEQ ID NO: 2946354 - RNA, 19 nt, Artificial Sequence
  Description of Artificial Sequence: Synthetic oligonucleotide
auaacaguaguuugaacug

SEQ ID NO: 2946355 - RNA, 19 nt, Artificial Sequence
  Description of Artificial Sequence: Synthetic oligonucleotide
ucuuucauucuuuagaguu

SEQ ID NO: 2946356 - RNA, 19 nt, Artificial Sequence
  Description of Artificial Sequence: Synthetic oligonucleotide
guaguuugaacugugcucg

SEQ ID NO: 2946357 - RNA, 19 nt, Artificial Sequence
  Description of Artificial Sequence: Synthetic oligonucleotide
auucgguuuucuuucauuc

SEQ ID NO: 2946358 - RNA, 19 nt, Artificial Sequence
  Description of Artificial Sequence: Synthetic oligonucleotide
aacauggccacacugaauu

SEQ ID NO: 2946359 - RNA, 19 nt, Artificial Sequence
  Description of Artificial Sequence: Synthetic oligonucleotide
ugcucucacaucuauauca

SEQ ID NO: 2946360 - RNA, 19 nt, Artificial Sequence
  Description of Artificial Sequence: Synthetic oligonucleotide
ugucuuugcucucacaucu

SEQ ID NO: 2946361 - RNA, 19 nt, Artificial Sequence
  Description of Artificial Sequence: Synthetic oligonucleotide
ucaaguaccugaaggaugu

SEQ ID NO: 2946362 - RNA, 19 nt, Artificial Sequence
  Description of Artificial Sequence: Synthetic oligonucleotide
ugcaggaggaaccuggugc

SEQ ID NO: 2946363 - RNA, 19 nt, Artificial Sequence
  Description of Artificial Sequence: Synthetic oligonucleotide
uaaugaagagcugugagcu

SEQ ID NO: 2946364 - RNA, 19 nt, Artificial Sequence
  Description of Artificial Sequence: Synthetic oligonucleotide
ugaagagcaagccuugugu

SEQ ID NO: 2946365 - RNA, 19 nt, Artificial Sequence
  Description of Artificial Sequence: Synthetic oligonucleotide
ugaaggaugucuauacacu

SEQ ID NO: 2946366 - RNA, 19 nt, Artificial Sequence
  Description of Artificial Sequence: Synthetic oligonucleotide
ucuuuagaguugaugguug

SEQ ID NO: 2946367 - RNA, 19 nt, Artificial Sequence
  Description of Artificial Sequence: Synthetic oligonucleotide
cauaaugaagagcugugag

SEQ ID NO: 2946368 - RNA, 19 nt, Artificial Sequence
  Description of Artificial Sequence: Synthetic oligonucleotide
cucacaucuauaucaacgc

SEQ ID NO: 2946369 - RNA, 19 nt, Artificial Sequence
  Description of Artificial Sequence: Synthetic oligonucleotide
gaugucuauacacuuugug

SEQ ID NO: 2946370 - RNA, 19 nt, Artificial Sequence
  Description of Artificial Sequence: Synthetic oligonucleotide
accugaaggaugucuauac

SEQ ID NO: 2946371 - RNA, 19 nt, Artificial Sequence
  Description of Artificial Sequence: Synthetic oligonucleotide
augucuauacacuuuguga

SEQ ID NO: 2946372 - RNA, 19 nt, Artificial Sequence
  Description of Artificial Sequence: Synthetic oligonucleotide
ucaacgccaagacaggaca

SEQ ID NO: 2946373 - RNA, 19 nt, Artificial Sequence
  Description of Artificial Sequence: Synthetic oligonucleotide
gaaucguauggcuucauuc

SEQ ID NO: 2946374 - RNA, 19 nt, Artificial Sequence
  Description of Artificial Sequence: Synthetic oligonucleotide
uuagaguugaugguuggcc

SEQ ID NO: 2946375 - RNA, 19 nt, Artificial Sequence
  Description of Artificial Sequence: Synthetic oligonucleotide
ucuucagaauccuucaguc

SEQ ID NO: 2946376 - RNA, 19 nt, Artificial Sequence
  Description of Artificial Sequence: Synthetic oligonucleotide
cugaaggaugucuauacac

SEQ ID NO: 2946377 - RNA, 19 nt, Artificial Sequence
  Description of Artificial Sequence: Synthetic oligonucleotide
ucaaggagcagcuuggcua

SEQ ID NO: 2946378 - RNA, 19 nt, Artificial Sequence
  Description of Artificial Sequence: Synthetic oligonucleotide
aacgccaagacaggacacc

SEQ ID NO: 2946379 - RNA, 19 nt, Artificial Sequence
  Description of Artificial Sequence: Synthetic oligonucleotide
ucacaucuauaucaacgcc

SEQ ID NO: 2946380 - RNA, 19 nt, Artificial Sequence
  Description of Artificial Sequence: Synthetic oligonucleotide
cuucauucugcccagugac

SEQ ID NO: 2946381 - RNA, 19 nt, Artificial Sequence
  Description of Artificial Sequence: Synthetic oligonucleotide
aggaugucuauacacuuug

SEQ ID NO: 2946382 - RNA, 19 nt, Artificial Sequence
  Description of Artificial Sequence: Synthetic oligonucleotide
uauacacuuugugaguugc

SEQ ID NO: 2946383 - RNA, 19 nt, Artificial Sequence
  Description of Artificial Sequence: Synthetic oligonucleotide
agaguugaugguuggccac

SEQ ID NO: 2946384 - RNA, 19 nt, Artificial Sequence
  Description of Artificial Sequence: Synthetic oligonucleotide
uuggcuaugucaacauggc

SEQ ID NO: 2946385 - RNA, 19 nt, Artificial Sequence
  Description of Artificial Sequence: Synthetic oligonucleotide
aagacaggacaccaggaau

SEQ ID NO: 2946386 - RNA, 19 nt, Artificial Sequence
  Description of Artificial Sequence: Synthetic oligonucleotide
ugaugguuggccacccggg

SEQ ID NO: 2946387 - RNA, 19 nt, Artificial Sequence
  Description of Artificial Sequence: Synthetic oligonucleotide
gaugcgagggcugauucgg

SEQ ID NO: 2946388 - RNA, 19 nt, Artificial Sequence
  Description of Artificial Sequence: Synthetic oligonucleotide
cuuucauucuuuagaguug

SEQ ID NO: 2946389 - RNA, 19 nt, Artificial Sequence
  Description of Artificial Sequence: Synthetic oligonucleotide
agagcugugagcugcguug

SEQ ID NO: 2946390 - RNA, 19 nt, Artificial Sequence
  Description of Artificial Sequence: Synthetic oligonucleotide
ucagcugaagagcaagccu

SEQ ID NO: 2946391 - RNA, 19 nt, Artificial Sequence
  Description of Artificial Sequence: Synthetic oligonucleotide
gcuaucuucagcugaagag

SEQ ID NO: 2946392 - RNA, 19 nt, Artificial Sequence
  Description of Artificial Sequence: Synthetic oligonucleotide
uggucaaguaccugaagga

SEQ ID NO: 2946393 - RNA, 19 nt, Artificial Sequence
  Description of Artificial Sequence: Synthetic oligonucleotide
ucauucuuuagaguugaug

SEQ ID NO: 2946394 - RNA, 19 nt, Artificial Sequence
  Description of Artificial Sequence: Synthetic oligonucleotide
ugucaacauggccacacug

SEQ ID NO: 2946395 - RNA, 19 nt, Artificial Sequence
  Description of Artificial Sequence: Synthetic oligonucleotide
cuuuagaguugaugguugg

SEQ ID NO: 2946396 - RNA, 19 nt, Artificial Sequence
  Description of Artificial Sequence: Synthetic oligonucleotide
cacuuugugaguugcuggg

SEQ ID NO: 2946397 - RNA, 19 nt, Artificial Sequence
  Description of Artificial Sequence: Synthetic oligonucleotide
auucuuuagaguugauggu

SEQ ID NO: 2946398 - RNA, 19 nt, Artificial Sequence
  Description of Artificial Sequence: Synthetic oligonucleotide
aaugaagagcugugagcug

SEQ ID NO: 2946399 - RNA, 19 nt, Artificial Sequence
  Description of Artificial Sequence: Synthetic oligonucleotide
cuuugugaguugcugggcc

SEQ ID NO: 2946400 - RNA, 19 nt, Artificial Sequence
  Description of Artificial Sequence: Synthetic oligonucleotide
uuggcugcauaaugaagag

SEQ ID NO: 2946401 - RNA, 19 nt, Artificial Sequence
  Description of Artificial Sequence: Synthetic oligonucleotide
ucaacauggccacacugaa

SEQ ID NO: 2946402 - RNA, 19 nt, Artificial Sequence
  Description of Artificial Sequence: Synthetic oligonucleotide
uaugucaacauggccacac

SEQ ID NO: 2946403 - RNA, 19 nt, Artificial Sequence
  Description of Artificial Sequence: Synthetic oligonucleotide
agugacugcugcccggugg

SEQ ID NO: 2946404 - RNA, 19 nt, Artificial Sequence
  Description of Artificial Sequence: Synthetic oligonucleotide
uuugaacugugcucgucug

SEQ ID NO: 2946405 - RNA, 19 nt, Artificial Sequence
  Description of Artificial Sequence: Synthetic oligonucleotide
uacacuuugugaguugcug

SEQ ID NO: 2946406 - RNA, 19 nt, Artificial Sequence
  Description of Artificial Sequence: Synthetic oligonucleotide
gacugcaggaggaaccugg

SEQ ID NO: 2946407 - RNA, 19 nt, Artificial Sequence
  Description of Artificial Sequence: Synthetic oligonucleotide
ucauucugcccagugacug

SEQ ID NO: 2946408 - RNA, 19 nt, Artificial Sequence
  Description of Artificial Sequence: Synthetic oligonucleotide
acugcugcccgguggaggg

SEQ ID NO: 2946409 - RNA, 19 nt, Artificial Sequence
  Description of Artificial Sequence: Synthetic oligonucleotide
ugaagagcugugagcugcg

SEQ ID NO: 2946410 - RNA, 19 nt, Artificial Sequence
  Description of Artificial Sequence: Synthetic oligonucleotide
aacugugcucgucuguccu

SEQ ID NO: 2946411 - RNA, 19 nt, Artificial Sequence
  Description of Artificial Sequence: Synthetic oligonucleotide
cacaucuauaucaacgcca

SEQ ID NO: 2946412 - RNA, 19 nt, Artificial Sequence
  Description of Artificial Sequence: Synthetic oligonucleotide
agacaggacaccaggaauc

SEQ ID NO: 2946413 - RNA, 19 nt, Artificial Sequence
  Description of Artificial Sequence: Synthetic oligonucleotide
acaccaggaaucguauggc

SEQ ID NO: 2946414 - RNA, 19 nt, Artificial Sequence
  Description of Artificial Sequence: Synthetic oligonucleotide
gacaggacaccaggaaucg

SEQ ID NO: 2946415 - RNA, 19 nt, Artificial Sequence
  Description of Artificial Sequence: Synthetic oligonucleotide
cuucaguccugacugcagg

SEQ ID NO: 2946416 - RNA, 19 nt, Artificial Sequence
  Description of Artificial Sequence: Synthetic oligonucleotide
aacaguaguuugaacugug

SEQ ID NO: 2946417 - RNA, 19 nt, Artificial Sequence
  Description of Artificial Sequence: Synthetic oligonucleotide
aagccacaugcugaccugc

SEQ ID NO: 2946418 - RNA, 19 nt, Artificial Sequence
  Description of Artificial Sequence: Synthetic oligonucleotide
gaugguuggccacccgggg

SEQ ID NO: 2946419 - RNA, 19 nt, Artificial Sequence
  Description of Artificial Sequence: Synthetic oligonucleotide
ccuggugcaagccacaugc

SEQ ID NO: 2946420 - RNA, 19 nt, Artificial Sequence
  Description of Artificial Sequence: Synthetic oligonucleotide
uggugcaagccacaugcug

SEQ ID NO: 2946421 - RNA, 19 nt, Artificial Sequence
  Description of Artificial Sequence: Synthetic oligonucleotide
agcugcguugucuuugcuc

SEQ ID NO: 2946422 - RNA, 19 nt, Artificial Sequence
  Description of Artificial Sequence: Synthetic oligonucleotide
ucagaauccuucaguccug

SEQ ID NO: 2946423 - RNA, 19 nt, Artificial Sequence
  Description of Artificial Sequence: Synthetic oligonucleotide
uucagcugaagagcaagcc

SEQ ID NO: 2946424 - RNA, 19 nt, Artificial Sequence
  Description of Artificial Sequence: Synthetic oligonucleotide
ugcacaggccagaugcgag

SEQ ID NO: 2946425 - RNA, 19 nt, Artificial Sequence
  Description of Artificial Sequence: Synthetic oligonucleotide
cacaugcugaccugcacag

SEQ ID NO: 2946426 - RNA, 19 nt, Artificial Sequence
  Description of Artificial Sequence: Synthetic oligonucleotide
aaguaccugaaggaugucu

SEQ ID NO: 2946427 - RNA, 19 nt, Artificial Sequence
  Description of Artificial Sequence: Synthetic oligonucleotide
acaguaguuugaacugugc

SEQ ID NO: 2946428 - RNA, 19 nt, Artificial Sequence
  Description of Artificial Sequence: Synthetic oligonucleotide
ucgguuuucuuucauucuu

SEQ ID NO: 2946429 - RNA, 19 nt, Artificial Sequence
  Description of Artificial Sequence: Synthetic oligonucleotide
aucguauggcuucauucug

SEQ ID NO: 2946430 - RNA, 19 nt, Artificial Sequence
  Description of Artificial Sequence: Synthetic oligonucleotide
cuuccuuggcugcauaaug

SEQ ID NO: 2946431 - RNA, 19 nt, Artificial Sequence
  Description of Artificial Sequence: Synthetic oligonucleotide
uucgguuuucuuucauucu

SEQ ID NO: 2946432 - RNA, 19 nt, Artificial Sequence
  Description of Artificial Sequence: Synthetic oligonucleotide
acuuugugaguugcugggc

SEQ ID NO: 2946433 - RNA, 19 nt, Artificial Sequence
  Description of Artificial Sequence: Synthetic oligonucleotide
agaugcgagggcugauucg

SEQ ID NO: 2946434 - RNA, 19 nt, Artificial Sequence
  Description of Artificial Sequence: Synthetic oligonucleotide
ucuauacacuuugugaguu

SEQ ID NO: 2946435 - RNA, 19 nt, Artificial Sequence
  Description of Artificial Sequence: Synthetic oligonucleotide
uucuuuagaguugaugguu

SEQ ID NO: 2946436 - RNA, 19 nt, Artificial Sequence
  Description of Artificial Sequence: Synthetic oligonucleotide
aguugcugggccagggugc

SEQ ID NO: 2946437 - RNA, 19 nt, Artificial Sequence
  Description of Artificial Sequence: Synthetic oligonucleotide
uucaaggagcagcuuggcu

SEQ ID NO: 2946438 - RNA, 19 nt, Artificial Sequence
  Description of Artificial Sequence: Synthetic oligonucleotide
uggcuaugucaacauggcc

SEQ ID NO: 2946439 - RNA, 19 nt, Artificial Sequence
  Description of Artificial Sequence: Synthetic oligonucleotide
aguugaugguuggccaccc

SEQ ID NO: 2946440 - RNA, 19 nt, Artificial Sequence
  Description of Artificial Sequence: Synthetic oligonucleotide
uaacaguaguuugaacugu

SEQ ID NO: 2946441 - RNA, 19 nt, Artificial Sequence
  Description of Artificial Sequence: Synthetic oligonucleotide
gucaaguaccugaaggaug

SEQ ID NO: 2946442 - RNA, 19 nt, Artificial Sequence
  Description of Artificial Sequence: Synthetic oligonucleotide
auaucaacgccaagacagg

SEQ ID NO: 2946443 - RNA, 19 nt, Artificial Sequence
  Description of Artificial Sequence: Synthetic oligonucleotide
aucaacgccaagacaggac

SEQ ID NO: 2946444 - RNA, 19 nt, Artificial Sequence
  Description of Artificial Sequence: Synthetic oligonucleotide
ucgucuguccuuccuuggc

SEQ ID NO: 2946445 - RNA, 19 nt, Artificial Sequence
  Description of Artificial Sequence: Synthetic oligonucleotide
uucauucugcccagugacu

SEQ ID NO: 2946446 - RNA, 19 nt, Artificial Sequence
  Description of Artificial Sequence: Synthetic oligonucleotide
ugcugaccugcacaggcca

SEQ ID NO: 2946447 - RNA, 19 nt, Artificial Sequence
  Description of Artificial Sequence: Synthetic oligonucleotide
ugagcugcguugucuuugc

SEQ ID NO: 2946448 - RNA, 19 nt, Artificial Sequence
  Description of Artificial Sequence: Synthetic oligonucleotide
cuauacacuuugugaguug

SEQ ID NO: 2946449 - RNA, 19 nt, Artificial Sequence
  Description of Artificial Sequence: Synthetic oligonucleotide
uucaguccugacugcagga

SEQ ID NO: 2946450 - RNA, 19 nt, Artificial Sequence
  Description of Artificial Sequence: Synthetic oligonucleotide
gccaagacaggacaccagg

SEQ ID NO: 2946451 - RNA, 19 nt, Artificial Sequence
  Description of Artificial Sequence: Synthetic oligonucleotide
ugaacugugcucgucuguc

SEQ ID NO: 2946452 - RNA, 19 nt, Artificial Sequence
  Description of Artificial Sequence: Synthetic oligonucleotide
ugcccguuaggucuucaga

SEQ ID NO: 2946453 - RNA, 19 nt, Artificial Sequence
  Description of Artificial Sequence: Synthetic oligonucleotide
gcugauucgguuuucuuuc

SEQ ID NO: 2946454 - RNA, 19 nt, Artificial Sequence
  Description of Artificial Sequence: Synthetic oligonucleotide
uugaacugugcucgucugu

SEQ ID NO: 2946455 - RNA, 19 nt, Artificial Sequence
  Description of Artificial Sequence: Synthetic oligonucleotide
gccacacugaauugcaucc

SEQ ID NO: 2946456 - RNA, 19 nt, Artificial Sequence
  Description of Artificial Sequence: Synthetic oligonucleotide
auccuucaguccugacugc

SEQ ID NO: 2946457 - RNA, 19 nt, Artificial Sequence
  Description of Artificial Sequence: Synthetic oligonucleotide
ggcuaugucaacauggcca

SEQ ID NO: 2946458 - RNA, 19 nt, Artificial Sequence
  Description of Artificial Sequence: Synthetic oligonucleotide
ucuguccuuccuuggcugc

SEQ ID NO: 2946459 - RNA, 19 nt, Artificial Sequence
  Description of Artificial Sequence: Synthetic oligonucleotide
agaauccuucaguccugac

SEQ ID NO: 2946460 - RNA, 19 nt, Artificial Sequence
  Description of Artificial Sequence: Synthetic oligonucleotide
uaucaacgccaagacagga

SEQ ID NO: 2946461 - RNA, 19 nt, Artificial Sequence
  Description of Artificial Sequence: Synthetic oligonucleotide
gaacugugcucgucugucc

SEQ ID NO: 2946462 - RNA, 19 nt, Artificial Sequence
  Description of Artificial Sequence: Synthetic oligonucleotide
auggcuucauucugcccag

SEQ ID NO: 2946463 - RNA, 19 nt, Artificial Sequence
  Description of Artificial Sequence: Synthetic oligonucleotide
uccuuggcugcauaaugaa

SEQ ID NO: 2946464 - RNA, 19 nt, Artificial Sequence
  Description of Artificial Sequence: Synthetic oligonucleotide
caguccugacugcaggagg

SEQ ID NO: 2946465 - RNA, 19 nt, Artificial Sequence
  Description of Artificial Sequence: Synthetic oligonucleotide
aguuugaacugugcucguc

SEQ ID NO: 2946466 - RNA, 19 nt, Artificial Sequence
  Description of Artificial Sequence: Synthetic oligonucleotide
cugaagagcaagccuugug

SEQ ID NO: 2946467 - RNA, 19 nt, Artificial Sequence
  Description of Artificial Sequence: Synthetic oligonucleotide
cauucugcccagugacugc

SEQ ID NO: 2946468 - RNA, 19 nt, Artificial Sequence
  Description of Artificial Sequence: Synthetic oligonucleotide
gcuaugucaacauggccac

SEQ ID NO: 2946469 - RNA, 19 nt, Artificial Sequence
  Description of Artificial Sequence: Synthetic oligonucleotide
cuauaucaacgccaagaca

SEQ ID NO: 2946470 - RNA, 19 nt, Artificial Sequence
  Description of Artificial Sequence: Synthetic oligonucleotide
aagagcugugagcugcguu

SEQ ID NO: 2946471 - RNA, 19 nt, Artificial Sequence
  Description of Artificial Sequence: Synthetic oligonucleotide
uuucaaggagcagcuuggc

SEQ ID NO: 2946472 - RNA, 19 nt, Artificial Sequence
  Description of Artificial Sequence: Synthetic oligonucleotide
uugugaguugcugggccag

SEQ ID NO: 2946473 - RNA, 19 nt, Artificial Sequence
  Description of Artificial Sequence: Synthetic oligonucleotide
gaguugaugguuggccacc

SEQ ID NO: 2946474 - RNA, 19 nt, Artificial Sequence
  Description of Artificial Sequence: Synthetic oligonucleotide
gucaacauggccacacuga

SEQ ID NO: 2946475 - RNA, 19 nt, Artificial Sequence
  Description of Artificial Sequence: Synthetic oligonucleotide
ugauucgguuuucuuucau

SEQ ID NO: 2946476 - RNA, 19 nt, Artificial Sequence
  Description of Artificial Sequence: Synthetic oligonucleotide
cucgucuguccuuccuugg

SEQ ID NO: 2946477 - RNA, 19 nt, Artificial Sequence
  Description of Artificial Sequence: Synthetic oligonucleotide
uugcucucacaucuauauc

SEQ ID NO: 2946478 - RNA, 19 nt, Artificial Sequence
  Description of Artificial Sequence: Synthetic oligonucleotide
ugcugggccagggugcccg

SEQ ID NO: 2946479 - RNA, 19 nt, Artificial Sequence
  Description of Artificial Sequence: Synthetic oligonucleotide
ccugacugcaggaggaacc

SEQ ID NO: 2946480 - RNA, 19 nt, Artificial Sequence
  Description of Artificial Sequence: Synthetic oligonucleotide
aaggaugucuauacacuuu

SEQ ID NO: 2946481 - RNA, 19 nt, Artificial Sequence
  Description of Artificial Sequence: Synthetic oligonucleotide
ugaguugcugggccagggu

SEQ ID NO: 2946482 - RNA, 19 nt, Artificial Sequence
  Description of Artificial Sequence: Synthetic oligonucleotide
gagcagcuuggcuauguca

SEQ ID NO: 2946483 - RNA, 19 nt, Artificial Sequence
  Description of Artificial Sequence: Synthetic oligonucleotide
ugcccagugacugcugccc

SEQ ID NO: 2946484 - RNA, 19 nt, Artificial Sequence
  Description of Artificial Sequence: Synthetic oligonucleotide
agcagcuuggcuaugucaa

SEQ ID NO: 2946485 - RNA, 19 nt, Artificial Sequence
  Description of Artificial Sequence: Synthetic oligonucleotide
gaaggaugucuauacacuu

SEQ ID NO: 2946486 - RNA, 19 nt, Artificial Sequence
  Description of Artificial Sequence: Synthetic oligonucleotide
guuugaacugugcucgucu

SEQ ID NO: 2946487 - RNA, 19 nt, Artificial Sequence
  Description of Artificial Sequence: Synthetic oligonucleotide
uuaggucuucagaauccuu

SEQ ID NO: 2946488 - RNA, 19 nt, Artificial Sequence
  Description of Artificial Sequence: Synthetic oligonucleotide
guugaugguuggccacccg

SEQ ID NO: 2946489 - RNA, 19 nt, Artificial Sequence
  Description of Artificial Sequence: Synthetic oligonucleotide
cucucacaucuauaucaac

SEQ ID NO: 2946490 - RNA, 19 nt, Artificial Sequence
  Description of Artificial Sequence: Synthetic oligonucleotide
acauggccacacugaauug

SEQ ID NO: 2946491 - RNA, 19 nt, Artificial Sequence
  Description of Artificial Sequence: Synthetic oligonucleotide
agagcaagccuuguguuuu

SEQ ID NO: 2946492 - RNA, 19 nt, Artificial Sequence
  Description of Artificial Sequence: Synthetic oligonucleotide
ugugaguugcugggccagg

SEQ ID NO: 2946493 - RNA, 19 nt, Artificial Sequence
  Description of Artificial Sequence: Synthetic oligonucleotide
ugcguugucuuugcucuca

SEQ ID NO: 2946494 - RNA, 19 nt, Artificial Sequence
  Description of Artificial Sequence: Synthetic oligonucleotide
augcugaccugcacaggcc

SEQ ID NO: 2946495 - RNA, 19 nt, Artificial Sequence
  Description of Artificial Sequence: Synthetic oligonucleotide
aguaccugaaggaugucua

SEQ ID NO: 2946496 - RNA, 19 nt, Artificial Sequence
  Description of Artificial Sequence: Synthetic oligonucleotide
agcuuggcuaugucaacau

SEQ ID NO: 2946497 - RNA, 19 nt, Artificial Sequence
  Description of Artificial Sequence: Synthetic oligonucleotide
caagccacaugcugaccug

SEQ ID NO: 2946498 - RNA, 19 nt, Artificial Sequence
  Description of Artificial Sequence: Synthetic oligonucleotide
gacugcugcccgguggagg

SEQ ID NO: 2946499 - RNA, 19 nt, Artificial Sequence
  Description of Artificial Sequence: Synthetic oligonucleotide
aggaggaaccuggugcaag

SEQ ID NO: 2946500 - RNA, 19 nt, Artificial Sequence
  Description of Artificial Sequence: Synthetic oligonucleotide
ggaggaaccuggugcaagc

SEQ ID NO: 2946501 - RNA, 19 nt, Artificial Sequence
  Description of Artificial Sequence: Synthetic oligonucleotide
caagacaggacaccaggaa

SEQ ID NO: 2946502 - RNA, 19 nt, Artificial Sequence
  Description of Artificial Sequence: Synthetic oligonucleotide
caacgccaagacaggacac

SEQ ID NO: 2946503 - RNA, 19 nt, Artificial Sequence
  Description of Artificial Sequence: Synthetic oligonucleotide
cacaggccagaugcgaggg

SEQ ID NO: 2946504 - RNA, 19 nt, Artificial Sequence
  Description of Artificial Sequence: Synthetic oligonucleotide
uggcugcauaaugaagagc

SEQ ID NO: 2946505 - RNA, 19 nt, Artificial Sequence
  Description of Artificial Sequence: Synthetic oligonucleotide
cagaugcgagggcugauuc

SEQ ID NO: 2946506 - RNA, 19 nt, Artificial Sequence
  Description of Artificial Sequence: Synthetic oligonucleotide
ccaggaaucguauggcuuc

SEQ ID NO: 2946507 - RNA, 19 nt, Artificial Sequence
  Description of Artificial Sequence: Synthetic oligonucleotide
gucuucagaauccuucagu

SEQ ID NO: 2946508 - RNA, 19 nt, Artificial Sequence
  Description of Artificial Sequence: Synthetic oligonucleotide
cguuaggucuucagaaucc

SEQ ID NO: 2946509 - RNA, 19 nt, Artificial Sequence
  Description of Artificial Sequence: Synthetic oligonucleotide
caucuauaucaacgccaag

SEQ ID NO: 2946510 - RNA, 19 nt, Artificial Sequence
  Description of Artificial Sequence: Synthetic oligonucleotide
gugcaagccacaugcugac

SEQ ID NO: 2946511 - RNA, 19 nt, Artificial Sequence
  Description of Artificial Sequence: Synthetic oligonucleotide
aguccugacugcaggagga

SEQ ID NO: 2946512 - RNA, 19 nt, Artificial Sequence
  Description of Artificial Sequence: Synthetic oligonucleotide
uccuuccuuggcugcauaa

SEQ ID NO: 2946513 - RNA, 19 nt, Artificial Sequence
  Description of Artificial Sequence: Synthetic oligonucleotide
augucaacauggccacacu

SEQ ID NO: 2946514 - RNA, 19 nt, Artificial Sequence
  Description of Artificial Sequence: Synthetic oligonucleotide
auucugcccagugacugcu

SEQ ID NO: 2946515 - RNA, 19 nt, Artificial Sequence
  Description of Artificial Sequence: Synthetic oligonucleotide
gugagcugcguugucuuug

SEQ ID NO: 2946516 - RNA, 19 nt, Artificial Sequence
  Description of Artificial Sequence: Synthetic oligonucleotide
uaguuugaacugugcucgu

SEQ ID NO: 2946517 - RNA, 19 nt, Artificial Sequence
  Description of Artificial Sequence: Synthetic oligonucleotide
ggugcaagccacaugcuga

SEQ ID NO: 2946518 - RNA, 19 nt, Artificial Sequence
  Description of Artificial Sequence: Synthetic oligonucleotide
gucuauacacuuugugagu

SEQ ID NO: 2946519 - RNA, 19 nt, Artificial Sequence
  Description of Artificial Sequence: Synthetic oligonucleotide
ggauaacaguaguuugaac

SEQ ID NO: 2946520 - RNA, 19 nt, Artificial Sequence
  Description of Artificial Sequence: Synthetic oligonucleotide
caggacaccaggaaucgua

SEQ ID NO: 2946521 - RNA, 19 nt, Artificial Sequence
  Description of Artificial Sequence: Synthetic oligonucleotide
ugugcucgucuguccuucc

SEQ ID NO: 2946522 - RNA, 19 nt, Artificial Sequence
  Description of Artificial Sequence: Synthetic oligonucleotide
ugcucgucuguccuuccuu

SEQ ID NO: 2946523 - RNA, 19 nt, Artificial Sequence
  Description of Artificial Sequence: Synthetic oligonucleotide
uaccugaaggaugucuaua

SEQ ID NO: 2946524 - RNA, 19 nt, Artificial Sequence
  Description of Artificial Sequence: Synthetic oligonucleotide
gauucgguuuucuuucauu

SEQ ID NO: 2946525 - RNA, 19 nt, Artificial Sequence
  Description of Artificial Sequence: Synthetic oligonucleotide
ggggauaacaguaguuuga

SEQ ID NO: 2946526 - RNA, 19 nt, Artificial Sequence
  Description of Artificial Sequence: Synthetic oligonucleotide
auggccacacugaauugca

SEQ ID NO: 2946527 - RNA, 19 nt, Artificial Sequence
  Description of Artificial Sequence: Synthetic oligonucleotide
agcugugagcugcguuguc

SEQ ID NO: 2946528 - RNA, 19 nt, Artificial Sequence
  Description of Artificial Sequence: Synthetic oligonucleotide
ggaaccuggugcaagccac

SEQ ID NO: 2946529 - RNA, 19 nt, Artificial Sequence
  Description of Artificial Sequence: Synthetic oligonucleotide
gugacugcugcccggugga

SEQ ID NO: 2946530 - RNA, 19 nt, Artificial Sequence
  Description of Artificial Sequence: Synthetic oligonucleotide
agcugaagagcaagccuug

SEQ ID NO: 2946531 - RNA, 19 nt, Artificial Sequence
  Description of Artificial Sequence: Synthetic oligonucleotide
caguaguuugaacugugcu

SEQ ID NO: 2946532 - RNA, 19 nt, Artificial Sequence
  Description of Artificial Sequence: Synthetic oligonucleotide
gcugcguugucuuugcucu

SEQ ID NO: 2946533 - RNA, 19 nt, Artificial Sequence
  Description of Artificial Sequence: Synthetic oligonucleotide
uccugacugcaggaggaac

SEQ ID NO: 2946534 - RNA, 19 nt, Artificial Sequence
  Description of Artificial Sequence: Synthetic oligonucleotide
ggccacacugaauugcauc

SEQ ID NO: 2946535 - RNA, 19 nt, Artificial Sequence
  Description of Artificial Sequence: Synthetic oligonucleotide
accuggugcaagccacaug

SEQ ID NO: 2946536 - RNA, 19 nt, Artificial Sequence
  Description of Artificial Sequence: Synthetic oligonucleotide
ggcuaucuucagcugaaga

SEQ ID NO: 2946537 - RNA, 19 nt, Artificial Sequence
  Description of Artificial Sequence: Synthetic oligonucleotide
cagggugcccguuaggucu

SEQ ID NO: 2946538 - RNA, 19 nt, Artificial Sequence
  Description of Artificial Sequence: Synthetic oligonucleotide
gugcccguuaggucuucag

SEQ ID NO: 2946539 - RNA, 19 nt, Artificial Sequence
  Description of Artificial Sequence: Synthetic oligonucleotide
acgccaagacaggacacca

SEQ ID NO: 2946540 - RNA, 19 nt, Artificial Sequence
  Description of Artificial Sequence: Synthetic oligonucleotide
gcuucauucugcccaguga

SEQ ID NO: 2946541 - RNA, 19 nt, Artificial Sequence
  Description of Artificial Sequence: Synthetic oligonucleotide
ggcuucauucugcccagug

SEQ ID NO: 2946542 - RNA, 19 nt, Artificial Sequence
  Description of Artificial Sequence: Synthetic oligonucleotide
caggcuaucuucagcugaa

SEQ ID NO: 2946543 - RNA, 19 nt, Artificial Sequence
  Description of Artificial Sequence: Synthetic oligonucleotide
cugauucgguuuucuuuca

SEQ ID NO: 2946544 - RNA, 19 nt, Artificial Sequence
  Description of Artificial Sequence: Synthetic oligonucleotide
aaccuggugcaagccacau

SEQ ID NO: 2946545 - RNA, 19 nt, Artificial Sequence
  Description of Artificial Sequence: Synthetic oligonucleotide
guugcugggccagggugcc

SEQ ID NO: 2946546 - RNA, 19 nt, Artificial Sequence
  Description of Artificial Sequence: Synthetic oligonucleotide
ugcgagggcugauucgguu

SEQ ID NO: 2946547 - RNA, 19 nt, Artificial Sequence
  Description of Artificial Sequence: Synthetic oligonucleotide
ugcaagccacaugcugacc

SEQ ID NO: 2946548 - RNA, 19 nt, Artificial Sequence
  Description of Artificial Sequence: Synthetic oligonucleotide
ugugagcugcguugucuuu

SEQ ID NO: 2946549 - RNA, 19 nt, Artificial Sequence
  Description of Artificial Sequence: Synthetic oligonucleotide
ccguuaggucuucagaauc

SEQ ID NO: 2946550 - RNA, 19 nt, Artificial Sequence
  Description of Artificial Sequence: Synthetic oligonucleotide
gcaggaggaaccuggugca

SEQ ID NO: 2946551 - RNA, 19 nt, Artificial Sequence
  Description of Artificial Sequence: Synthetic oligonucleotide
auacacuuugugaguugcu

SEQ ID NO: 2946552 - RNA, 19 nt, Artificial Sequence
  Description of Artificial Sequence: Synthetic oligonucleotide
gcucgucuguccuuccuug

SEQ ID NO: 2946553 - RNA, 19 nt, Artificial Sequence
  Description of Artificial Sequence: Synthetic oligonucleotide
accaggaaucguauggcuu

SEQ ID NO: 2946554 - RNA, 19 nt, Artificial Sequence
  Description of Artificial Sequence: Synthetic oligonucleotide
aggagcagcuuggcuaugu

SEQ ID NO: 2946555 - RNA, 19 nt, Artificial Sequence
  Description of Artificial Sequence: Synthetic oligonucleotide
ugcugcccgguggagggcc

SEQ ID NO: 2946556 - RNA, 19 nt, Artificial Sequence
  Description of Artificial Sequence: Synthetic oligonucleotide
gcuuggcuaugucaacaug

SEQ ID NO: 2946557 - RNA, 19 nt, Artificial Sequence
  Description of Artificial Sequence: Synthetic oligonucleotide
cugcaggaggaaccuggug

SEQ ID NO: 2946558 - RNA, 19 nt, Artificial Sequence
  Description of Artificial Sequence: Synthetic oligonucleotide
gcccguuaggucuucagaa

SEQ ID NO: 2946559 - RNA, 19 nt, Artificial Sequence
  Description of Artificial Sequence: Synthetic oligonucleotide
ugacugcaggaggaaccug

SEQ ID NO: 2946560 - RNA, 19 nt, Artificial Sequence
  Description of Artificial Sequence: Synthetic oligonucleotide
uggccacacugaauugcau

SEQ ID NO: 2946561 - RNA, 19 nt, Artificial Sequence
  Description of Artificial Sequence: Synthetic oligonucleotide
gggauaacaguaguuugaa

SEQ ID NO: 2946562 - RNA, 19 nt, Artificial Sequence
  Description of Artificial Sequence: Synthetic oligonucleotide
gcauaaugaagagcuguga

SEQ ID NO: 2946563 - RNA, 19 nt, Artificial Sequence
  Description of Artificial Sequence: Synthetic oligonucleotide
aggacaccaggaaucguau

SEQ ID NO: 2946564 - RNA, 19 nt, Artificial Sequence
  Description of Artificial Sequence: Synthetic oligonucleotide
ccuucaguccugacugcag

SEQ ID NO: 2946565 - RNA, 19 nt, Artificial Sequence
  Description of Artificial Sequence: Synthetic oligonucleotide
guuaggucuucagaauccu

SEQ ID NO: 2946566 - RNA, 19 nt, Artificial Sequence
  Description of Artificial Sequence: Synthetic oligonucleotide
agggcugauucgguuuucu

SEQ ID NO: 2946567 - RNA, 19 nt, Artificial Sequence
  Description of Artificial Sequence: Synthetic oligonucleotide
cagcugaagagcaagccuu

SEQ ID NO: 2946568 - RNA, 19 nt, Artificial Sequence
  Description of Artificial Sequence: Synthetic oligonucleotide
cagcuuggcuaugucaaca

SEQ ID NO: 2946569 - RNA, 19 nt, Artificial Sequence
  Description of Artificial Sequence: Synthetic oligonucleotide
ggacaccaggaaucguaug

SEQ ID NO: 2946570 - RNA, 19 nt, Artificial Sequence
  Description of Artificial Sequence: Synthetic oligonucleotide
acugugcucgucuguccuu

SEQ ID NO: 2946571 - RNA, 19 nt, Artificial Sequence
  Description of Artificial Sequence: Synthetic oligonucleotide
cugugcucgucuguccuuc

SEQ ID NO: 2946572 - RNA, 19 nt, Artificial Sequence
  Description of Artificial Sequence: Synthetic oligonucleotide
gcaagccacaugcugaccu

SEQ ID NO: 2946573 - RNA, 19 nt, Artificial Sequence
  Description of Artificial Sequence: Synthetic oligonucleotide
aggcuaucuucagcugaag

SEQ ID NO: 2946574 - RNA, 19 nt, Artificial Sequence
  Description of Artificial Sequence: Synthetic oligonucleotide
acugcaggaggaaccuggu

SEQ ID NO: 2946575 - RNA, 19 nt, Artificial Sequence
  Description of Artificial Sequence: Synthetic oligonucleotide
ugaccugcacaggccagau

SEQ ID NO: 2946576 - RNA, 19 nt, Artificial Sequence
  Description of Artificial Sequence: Synthetic oligonucleotide
gaaccuggugcaagccaca

SEQ ID NO: 2946577 - RNA, 19 nt, Artificial Sequence
  Description of Artificial Sequence: Synthetic oligonucleotide
caaggagcagcuuggcuau

SEQ ID NO: 2946578 - RNA, 19 nt, Artificial Sequence
  Description of Artificial Sequence: Synthetic oligonucleotide
ugacugcugcccgguggag

SEQ ID NO: 2946579 - RNA, 19 nt, Artificial Sequence
  Description of Artificial Sequence: Synthetic oligonucleotide
ccgguggagggccugggcc

SEQ ID NO: 2946580 - RNA, 19 nt, Artificial Sequence
  Description of Artificial Sequence: Synthetic oligonucleotide
ugcccgguggagggccugg

SEQ ID NO: 2946581 - RNA, 19 nt, Artificial Sequence
  Description of Artificial Sequence: Synthetic oligonucleotide
gcagcuuggcuaugucaac

SEQ ID NO: 2946582 - RNA, 19 nt, Artificial Sequence
  Description of Artificial Sequence: Synthetic oligonucleotide
acaggacaccaggaaucgu

SEQ ID NO: 2946583 - RNA, 19 nt, Artificial Sequence
  Description of Artificial Sequence: Synthetic oligonucleotide
ggcugauucgguuuucuuu

SEQ ID NO: 2946584 - RNA, 19 nt, Artificial Sequence
  Description of Artificial Sequence: Synthetic oligonucleotide
ccaggcuaucuucagcuga

SEQ ID NO: 2946585 - RNA, 19 nt, Artificial Sequence
  Description of Artificial Sequence: Synthetic oligonucleotide
ccaagacaggacaccagga

SEQ ID NO: 2946586 - RNA, 19 nt, Artificial Sequence
  Description of Artificial Sequence: Synthetic oligonucleotide
gcccagugacugcugcccg

SEQ ID NO: 2946587 - RNA, 19 nt, Artificial Sequence
  Description of Artificial Sequence: Synthetic oligonucleotide
cagaauccuucaguccuga

SEQ ID NO: 2946588 - RNA, 19 nt, Artificial Sequence
  Description of Artificial Sequence: Synthetic oligonucleotide
ccacaugcugaccugcaca

SEQ ID NO: 2946589 - RNA, 19 nt, Artificial Sequence
  Description of Artificial Sequence: Synthetic oligonucleotide
cugcguugucuuugcucuc

SEQ ID NO: 2946590 - RNA, 19 nt, Artificial Sequence
  Description of Artificial Sequence: Synthetic oligonucleotide
cccagugacugcugcccgg

SEQ ID NO: 2946591 - RNA, 19 nt, Artificial Sequence
  Description of Artificial Sequence: Synthetic oligonucleotide
ccugaaggaugucuauaca

SEQ ID NO: 2946592 - RNA, 19 nt, Artificial Sequence
  Description of Artificial Sequence: Synthetic oligonucleotide
caccaggaaucguauggcu

SEQ ID NO: 2946593 - RNA, 19 nt, Artificial Sequence
  Description of Artificial Sequence: Synthetic oligonucleotide
aucuucagcugaagagcaa

SEQ ID NO: 2946594 - RNA, 19 nt, Artificial Sequence
  Description of Artificial Sequence: Synthetic oligonucleotide
cugcacaggccagaugcga

SEQ ID NO: 2946595 - RNA, 19 nt, Artificial Sequence
  Description of Artificial Sequence: Synthetic oligonucleotide
ggagcagcuuggcuauguc

SEQ ID NO: 2946596 - RNA, 19 nt, Artificial Sequence
  Description of Artificial Sequence: Synthetic oligonucleotide
caggaaucguauggcuuca

SEQ ID NO: 2946597 - RNA, 19 nt, Artificial Sequence
  Description of Artificial Sequence: Synthetic oligonucleotide
agccacaugcugaccugca

SEQ ID NO: 2946598 - RNA, 19 nt, Artificial Sequence
  Description of Artificial Sequence: Synthetic oligonucleotide
cugaccugcacaggccaga

SEQ ID NO: 2946599 - RNA, 19 nt, Artificial Sequence
  Description of Artificial Sequence: Synthetic oligonucleotide
gcucucacaucuauaucaa

SEQ ID NO: 2946600 - RNA, 19 nt, Artificial Sequence
  Description of Artificial Sequence: Synthetic oligonucleotide
gccacaugcugaccugcac

SEQ ID NO: 2946601 - RNA, 19 nt, Artificial Sequence
  Description of Artificial Sequence: Synthetic oligonucleotide
caaguaccugaaggauguc

SEQ ID NO: 2946602 - RNA, 19 nt, Artificial Sequence
  Description of Artificial Sequence: Synthetic oligonucleotide
ggucaaguaccugaaggau

SEQ ID NO: 2946603 - RNA, 19 nt, Artificial Sequence
  Description of Artificial Sequence: Synthetic oligonucleotide
cugacugcaggaggaaccu

SEQ ID NO: 2946604 - RNA, 19 nt, Artificial Sequence
  Description of Artificial Sequence: Synthetic oligonucleotide
aggccagaugcgagggcug

SEQ ID NO: 2946605 - RNA, 19 nt, Artificial Sequence
  Description of Artificial Sequence: Synthetic oligonucleotide
cagugacugcugcccggug

SEQ ID NO: 2946606 - RNA, 19 nt, Artificial Sequence
  Description of Artificial Sequence: Synthetic oligonucleotide
gagggcugauucgguuuuc

SEQ ID NO: 2946607 - RNA, 19 nt, Artificial Sequence
  Description of Artificial Sequence: Synthetic oligonucleotide
aggaaucguauggcuucau

SEQ ID NO: 2946608 - RNA, 19 nt, Artificial Sequence
  Description of Artificial Sequence: Synthetic oligonucleotide
gggccagggugcccguuag

SEQ ID NO: 2946609 - RNA, 19 nt, Artificial Sequence
  Description of Artificial Sequence: Synthetic oligonucleotide
gagcugugagcugcguugu

SEQ ID NO: 2946610 - RNA, 19 nt, Artificial Sequence
  Description of Artificial Sequence: Synthetic oligonucleotide
gcugaccugcacaggccag

SEQ ID NO: 2946611 - RNA, 19 nt, Artificial Sequence
  Description of Artificial Sequence: Synthetic oligonucleotide
cuaugucaacauggccaca

SEQ ID NO: 2946612 - RNA, 19 nt, Artificial Sequence
  Description of Artificial Sequence: Synthetic oligonucleotide
ggccagggugcccguuagg

SEQ ID NO: 2946613 - RNA, 19 nt, Artificial Sequence
  Description of Artificial Sequence: Synthetic oligonucleotide
ccagggugcccguuagguc

SEQ ID NO: 2946614 - RNA, 19 nt, Artificial Sequence
  Description of Artificial Sequence: Synthetic oligonucleotide
caacauggccacacugaau

SEQ ID NO: 2946615 - RNA, 19 nt, Artificial Sequence
  Description of Artificial Sequence: Synthetic oligonucleotide
cuguccuuccuuggcugca

SEQ ID NO: 2946616 - RNA, 19 nt, Artificial Sequence
  Description of Artificial Sequence: Synthetic oligonucleotide
cccaggcuaucuucagcug

SEQ ID NO: 2946617 - RNA, 19 nt, Artificial Sequence
  Description of Artificial Sequence: Synthetic oligonucleotide
cugugagcugcguugucuu

SEQ ID NO: 2946618 - RNA, 19 nt, Artificial Sequence
  Description of Artificial Sequence: Synthetic oligonucleotide
gguggagggccugggcccc

SEQ ID NO: 2946619 - RNA, 19 nt, Artificial Sequence
  Description of Artificial Sequence: Synthetic oligonucleotide
cgguggagggccugggccc

SEQ ID NO: 2946620 - RNA, 19 nt, Artificial Sequence
  Description of Artificial Sequence: Synthetic oligonucleotide
uggcuucauucugcccagu

SEQ ID NO: 2946621 - RNA, 19 nt, Artificial Sequence
  Description of Artificial Sequence: Synthetic oligonucleotide
gaagagcugugagcugcgu

SEQ ID NO: 2946622 - RNA, 19 nt, Artificial Sequence
  Description of Artificial Sequence: Synthetic oligonucleotide
ggaaucguauggcuucauu

SEQ ID NO: 2946623 - RNA, 19 nt, Artificial Sequence
  Description of Artificial Sequence: Synthetic oligonucleotide
augcgagggcugauucggu

SEQ ID NO: 2946624 - RNA, 19 nt, Artificial Sequence
  Description of Artificial Sequence: Synthetic oligonucleotide
ccccaggcuaucuucagcu

SEQ ID NO: 2946625 - RNA, 19 nt, Artificial Sequence
  Description of Artificial Sequence: Synthetic oligonucleotide
gucuuugcucucacaucua

SEQ ID NO: 2946626 - RNA, 19 nt, Artificial Sequence
  Description of Artificial Sequence: Synthetic oligonucleotide
gcugugagcugcguugucu

SEQ ID NO: 2946627 - RNA, 19 nt, Artificial Sequence
  Description of Artificial Sequence: Synthetic oligonucleotide
cgccaagacaggacaccag

SEQ ID NO: 2946628 - RNA, 19 nt, Artificial Sequence
  Description of Artificial Sequence: Synthetic oligonucleotide
cuggugcaagccacaugcu

SEQ ID NO: 2946629 - RNA, 19 nt, Artificial Sequence
  Description of Artificial Sequence: Synthetic oligonucleotide
ggaugucuauacacuuugu

SEQ ID NO: 2946630 - RNA, 19 nt, Artificial Sequence
  Description of Artificial Sequence: Synthetic oligonucleotide
guccugacugcaggaggaa

SEQ ID NO: 2946631 - RNA, 19 nt, Artificial Sequence
  Description of Artificial Sequence: Synthetic oligonucleotide
gugcucgucuguccuuccu

SEQ ID NO: 2946632 - RNA, 19 nt, Artificial Sequence
  Description of Artificial Sequence: Synthetic oligonucleotide
guccuuccuuggcugcaua

SEQ ID NO: 2946633 - RNA, 19 nt, Artificial Sequence
  Description of Artificial Sequence: Synthetic oligonucleotide
cugcugcccgguggagggc

SEQ ID NO: 2946634 - RNA, 19 nt, Artificial Sequence
  Description of Artificial Sequence: Synthetic oligonucleotide
gagcugcguugucuuugcu

SEQ ID NO: 2946635 - RNA, 19 nt, Artificial Sequence
  Description of Artificial Sequence: Synthetic oligonucleotide
ggccagaugcgagggcuga

SEQ ID NO: 2946636 - RNA, 19 nt, Artificial Sequence
  Description of Artificial Sequence: Synthetic oligonucleotide
gccagggugcccguuaggu

SEQ ID NO: 2946637 - RNA, 19 nt, Artificial Sequence
  Description of Artificial Sequence: Synthetic oligonucleotide
caggaggaaccuggugcaa

SEQ ID NO: 2946638 - RNA, 19 nt, Artificial Sequence
  Description of Artificial Sequence: Synthetic oligonucleotide
agggugcccguuaggucuu

SEQ ID NO: 2946639 - RNA, 19 nt, Artificial Sequence
  Description of Artificial Sequence: Synthetic oligonucleotide
cccgguggagggccugggc

SEQ ID NO: 2946640 - RNA, 19 nt, Artificial Sequence
  Description of Artificial Sequence: Synthetic oligonucleotide
gcugaagagcaagccuugu

SEQ ID NO: 2946641 - RNA, 19 nt, Artificial Sequence
  Description of Artificial Sequence: Synthetic oligonucleotide
gcgagggcugauucgguuu

SEQ ID NO: 2946642 - RNA, 19 nt, Artificial Sequence
  Description of Artificial Sequence: Synthetic oligonucleotide
cugcccgguggagggccug

SEQ ID NO: 2946643 - RNA, 19 nt, Artificial Sequence
  Description of Artificial Sequence: Synthetic oligonucleotide
cccguuaggucuucagaau

SEQ ID NO: 2946644 - RNA, 19 nt, Artificial Sequence
  Description of Artificial Sequence: Synthetic oligonucleotide
ggugcccguuaggucuuca

SEQ ID NO: 2946645 - RNA, 19 nt, Artificial Sequence
  Description of Artificial Sequence: Synthetic oligonucleotide
gcccgguggagggccuggg

SEQ ID NO: 2946646 - RNA, 19 nt, Artificial Sequence
  Description of Artificial Sequence: Synthetic oligonucleotide
cgucuguccuuccuuggcu

SEQ ID NO: 2946647 - RNA, 19 nt, Artificial Sequence
  Description of Artificial Sequence: Synthetic oligonucleotide
cgguuuucuuucauucuuu

SEQ ID NO: 2946648 - RNA, 19 nt, Artificial Sequence
  Description of Artificial Sequence: Synthetic oligonucleotide
ccuuccuuggcugcauaau

SEQ ID NO: 2946649 - RNA, 19 nt, Artificial Sequence
  Description of Artificial Sequence: Synthetic oligonucleotide
ccagugacugcugcccggu

SEQ ID NO: 2946650 - RNA, 19 nt, Artificial Sequence
  Description of Artificial Sequence: Synthetic oligonucleotide
ccagaugcgagggcugauu

SEQ ID NO: 2946651 - RNA, 19 nt, Artificial Sequence
  Description of Artificial Sequence: Synthetic oligonucleotide
gggugcccguuaggucuuc

SEQ ID NO: 2946652 - RNA, 19 nt, Artificial Sequence
  Description of Artificial Sequence: Synthetic oligonucleotide
cgagggcugauucgguuuu

SEQ ID NO: 2946653 - RNA, 19 nt, Artificial Sequence
  Description of Artificial Sequence: Synthetic oligonucleotide
gcugggccagggugcccgu

SEQ ID NO: 2946654 - RNA, 19 nt, Artificial Sequence
  Description of Artificial Sequence: Synthetic oligonucleotide
gccagaugcgagggcugau

SEQ ID NO: 2946655 - RNA, 19 nt, Artificial Sequence
  Description of Artificial Sequence: Synthetic oligonucleotide
gcugcccgguggagggccu

SEQ ID NO: 2946656 - RNA, 19 nt, Artificial Sequence
  Description of Artificial Sequence: Synthetic oligonucleotide
cugggccagggugcccguu

SEQ ID NO: 2946657 - RNA, 19 nt, Artificial Sequence
  Description of Artificial Sequence: Synthetic oligonucleotide
agaaacaagaacaacaucc

SEQ ID NO: 2946658 - RNA, 19 nt, Artificial Sequence
  Description of Artificial Sequence: Synthetic oligonucleotide
uguaugcaaauucagaacg

SEQ ID NO: 2946659 - RNA, 19 nt, Artificial Sequence
  Description of Artificial Sequence: Synthetic oligonucleotide
ugacaaauuaacuuaagag

SEQ ID NO: 2946660 - RNA, 19 nt, Artificial Sequence
  Description of Artificial Sequence: Synthetic oligonucleotide
uaacuuaagagucaugucc

SEQ ID NO: 2946661 - RNA, 19 nt, Artificial Sequence
  Description of Artificial Sequence: Synthetic oligonucleotide
agaacaacauccuuucucc

SEQ ID NO: 2946662 - RNA, 19 nt, Artificial Sequence
  Description of Artificial Sequence: Synthetic oligonucleotide
aagaacaacauccuuucuc

SEQ ID NO: 2946663 - RNA, 19 nt, Artificial Sequence
  Description of Artificial Sequence: Synthetic oligonucleotide
ucuuagauacaaaugcagg

SEQ ID NO: 2946664 - RNA, 19 nt, Artificial Sequence
  Description of Artificial Sequence: Synthetic oligonucleotide
gagucuuagauacaaaugc

SEQ ID NO: 2946665 - RNA, 19 nt, Artificial Sequence
  Description of Artificial Sequence: Synthetic oligonucleotide
gucauaaccacccaugugg

SEQ ID NO: 2946666 - RNA, 19 nt, Artificial Sequence
  Description of Artificial Sequence: Synthetic oligonucleotide
aaauucagaacgcucuggg

SEQ ID NO: 2946667 - RNA, 19 nt, Artificial Sequence
  Description of Artificial Sequence: Synthetic oligonucleotide
uuaacccugguacagagag

SEQ ID NO: 2946668 - RNA, 19 nt, Artificial Sequence
  Description of Artificial Sequence: Synthetic oligonucleotide
acaaauuaacuuaagaguc

SEQ ID NO: 2946669 - RNA, 19 nt, Artificial Sequence
  Description of Artificial Sequence: Synthetic oligonucleotide
uaaaucacaugcuaguugc

SEQ ID NO: 2946670 - RNA, 19 nt, Artificial Sequence
  Description of Artificial Sequence: Synthetic oligonucleotide
gaucuuugacguuugaagg

SEQ ID NO: 2946671 - RNA, 19 nt, Artificial Sequence
  Description of Artificial Sequence: Synthetic oligonucleotide
uuccacguaaaucacaugc

SEQ ID NO: 2946672 - RNA, 19 nt, Artificial Sequence
  Description of Artificial Sequence: Synthetic oligonucleotide
cuuagauacaaaugcaggc

SEQ ID NO: 2946673 - RNA, 19 nt, Artificial Sequence
  Description of Artificial Sequence: Synthetic oligonucleotide
uacaaaugcaggcaaagga

SEQ ID NO: 2946674 - RNA, 19 nt, Artificial Sequence
  Description of Artificial Sequence: Synthetic oligonucleotide
uuggguuccacguaaauca

SEQ ID NO: 2946675 - RNA, 19 nt, Artificial Sequence
  Description of Artificial Sequence: Synthetic oligonucleotide
caaaccuuaacccugguac

SEQ ID NO: 2946676 - RNA, 19 nt, Artificial Sequence
  Description of Artificial Sequence: Synthetic oligonucleotide
uuaagagucauguccacgc

SEQ ID NO: 2946677 - RNA, 19 nt, Artificial Sequence
  Description of Artificial Sequence: Synthetic oligonucleotide
acaagaacaacauccuuuc

SEQ ID NO: 2946678 - RNA, 19 nt, Artificial Sequence
  Description of Artificial Sequence: Synthetic oligonucleotide
aaggaggcuuuacucaagc

SEQ ID NO: 2946679 - RNA, 19 nt, Artificial Sequence
  Description of Artificial Sequence: Synthetic oligonucleotide
aagaaacaagaacaacauc

SEQ ID NO: 2946680 - RNA, 19 nt, Artificial Sequence
  Description of Artificial Sequence: Synthetic oligonucleotide
caugcugucauaaccaccc

SEQ ID NO: 2946681 - RNA, 19 nt, Artificial Sequence
  Description of Artificial Sequence: Synthetic oligonucleotide
uuugcugacaaauuaacuu

SEQ ID NO: 2946682 - RNA, 19 nt, Artificial Sequence
  Description of Artificial Sequence: Synthetic oligonucleotide
gacaaauuaacuuaagagu

SEQ ID NO: 2946683 - RNA, 19 nt, Artificial Sequence
  Description of Artificial Sequence: Synthetic oligonucleotide
ugcaaauucagaacgcucu

SEQ ID NO: 2946684 - RNA, 19 nt, Artificial Sequence
  Description of Artificial Sequence: Synthetic oligonucleotide
ucggagaggaucuuugacg

SEQ ID NO: 2946685 - RNA, 19 nt, Artificial Sequence
  Description of Artificial Sequence: Synthetic oligonucleotide
aaaggaagcgacuugcaaa

SEQ ID NO: 2946686 - RNA, 19 nt, Artificial Sequence
  Description of Artificial Sequence: Synthetic oligonucleotide
cuuacaggagggaaggagg

SEQ ID NO: 2946687 - RNA, 19 nt, Artificial Sequence
  Description of Artificial Sequence: Synthetic oligonucleotide
aaugcaggcaaaggaagcg

SEQ ID NO: 2946688 - RNA, 19 nt, Artificial Sequence
  Description of Artificial Sequence: Synthetic oligonucleotide
aaaugcaggcaaaggaagc

SEQ ID NO: 2946689 - RNA, 19 nt, Artificial Sequence
  Description of Artificial Sequence: Synthetic oligonucleotide
aucuuugacguuugaaggg

SEQ ID NO: 2946690 - RNA, 19 nt, Artificial Sequence
  Description of Artificial Sequence: Synthetic oligonucleotide
acaagaaacaagaacaaca

SEQ ID NO: 2946691 - RNA, 19 nt, Artificial Sequence
  Description of Artificial Sequence: Synthetic oligonucleotide
gguacagagagcaacagcg

SEQ ID NO: 2946692 - RNA, 19 nt, Artificial Sequence
  Description of Artificial Sequence: Synthetic oligonucleotide
acuguaugcaaauucagaa

SEQ ID NO: 2946693 - RNA, 19 nt, Artificial Sequence
  Description of Artificial Sequence: Synthetic oligonucleotide
uuugacguuugaagggugg

SEQ ID NO: 2946694 - RNA, 19 nt, Artificial Sequence
  Description of Artificial Sequence: Synthetic oligonucleotide
uuagauacaaaugcaggca

SEQ ID NO: 2946695 - RNA, 19 nt, Artificial Sequence
  Description of Artificial Sequence: Synthetic oligonucleotide
aagccagccauucucccac

SEQ ID NO: 2946696 - RNA, 19 nt, Artificial Sequence
  Description of Artificial Sequence: Synthetic oligonucleotide
acaacauccuuucucccac

SEQ ID NO: 2946697 - RNA, 19 nt, Artificial Sequence
  Description of Artificial Sequence: Synthetic oligonucleotide
gaaccaugcugucauaacc

SEQ ID NO: 2946698 - RNA, 19 nt, Artificial Sequence
  Description of Artificial Sequence: Synthetic oligonucleotide
aacaacauccuuucuccca

SEQ ID NO: 2946699 - RNA, 19 nt, Artificial Sequence
  Description of Artificial Sequence: Synthetic oligonucleotide
accauauguacccaaccuc

SEQ ID NO: 2946700 - RNA, 19 nt, Artificial Sequence
  Description of Artificial Sequence: Synthetic oligonucleotide
gauacaaaugcaggcaaag

SEQ ID NO: 2946701 - RNA, 19 nt, Artificial Sequence
  Description of Artificial Sequence: Synthetic oligonucleotide
uuuugcugacaaauuaacu

SEQ ID NO: 2946702 - RNA, 19 nt, Artificial Sequence
  Description of Artificial Sequence: Synthetic oligonucleotide
aacauccuuucucccacac

SEQ ID NO: 2946703 - RNA, 19 nt, Artificial Sequence
  Description of Artificial Sequence: Synthetic oligonucleotide
caaaucugggcccaaagug

SEQ ID NO: 2946704 - RNA, 19 nt, Artificial Sequence
  Description of Artificial Sequence: Synthetic oligonucleotide
aaggaagcgacuugcaaau

SEQ ID NO: 2946705 - RNA, 19 nt, Artificial Sequence
  Description of Artificial Sequence: Synthetic oligonucleotide
aaccuuacaggagggaagg

SEQ ID NO: 2946706 - RNA, 19 nt, Artificial Sequence
  Description of Artificial Sequence: Synthetic oligonucleotide
ucuuccaaaccuuaacccu

SEQ ID NO: 2946707 - RNA, 19 nt, Artificial Sequence
  Description of Artificial Sequence: Synthetic oligonucleotide
ggaucuuugacguuugaag

SEQ ID NO: 2946708 - RNA, 19 nt, Artificial Sequence
  Description of Artificial Sequence: Synthetic oligonucleotide
acucaagccagccauucuc

SEQ ID NO: 2946709 - RNA, 19 nt, Artificial Sequence
  Description of Artificial Sequence: Synthetic oligonucleotide
guaaaucacaugcuaguug

SEQ ID NO: 2946710 - RNA, 19 nt, Artificial Sequence
  Description of Artificial Sequence: Synthetic oligonucleotide
caaaugcaggcaaaggaag

SEQ ID NO: 2946711 - RNA, 19 nt, Artificial Sequence
  Description of Artificial Sequence: Synthetic oligonucleotide
ucucccacugaaaacaaaa

SEQ ID NO: 2946712 - RNA, 19 nt, Artificial Sequence
  Description of Artificial Sequence: Synthetic oligonucleotide
agggaaggaggcuuuacuc

SEQ ID NO: 2946713 - RNA, 19 nt, Artificial Sequence
  Description of Artificial Sequence: Synthetic oligonucleotide
aaauuaacuuaagagucau

SEQ ID NO: 2946714 - RNA, 19 nt, Artificial Sequence
  Description of Artificial Sequence: Synthetic oligonucleotide
gaguccuccuccuuguggg

SEQ ID NO: 2946715 - RNA, 19 nt, Artificial Sequence
  Description of Artificial Sequence: Synthetic oligonucleotide
uaccauauguacccaaccu

SEQ ID NO: 2946716 - RNA, 19 nt, Artificial Sequence
  Description of Artificial Sequence: Synthetic oligonucleotide
auucagaacgcucugggaa

SEQ ID NO: 2946717 - RNA, 19 nt, Artificial Sequence
  Description of Artificial Sequence: Synthetic oligonucleotide
uucagaacgcucugggaag

SEQ ID NO: 2946718 - RNA, 19 nt, Artificial Sequence
  Description of Artificial Sequence: Synthetic oligonucleotide
aacaagaacaacauccuuu

SEQ ID NO: 2946719 - RNA, 19 nt, Artificial Sequence
  Description of Artificial Sequence: Synthetic oligonucleotide
uuccaaaccuuaacccugg

SEQ ID NO: 2946720 - RNA, 19 nt, Artificial Sequence
  Description of Artificial Sequence: Synthetic oligonucleotide
cacguaaaucacaugcuag

SEQ ID NO: 2946721 - RNA, 19 nt, Artificial Sequence
  Description of Artificial Sequence: Synthetic oligonucleotide
gaggcuuuacucaagccag

SEQ ID NO: 2946722 - RNA, 19 nt, Artificial Sequence
  Description of Artificial Sequence: Synthetic oligonucleotide
uagauacaaaugcaggcaa

SEQ ID NO: 2946723 - RNA, 19 nt, Artificial Sequence
  Description of Artificial Sequence: Synthetic oligonucleotide
uuacaggagggaaggaggc

SEQ ID NO: 2946724 - RNA, 19 nt, Artificial Sequence
  Description of Artificial Sequence: Synthetic oligonucleotide
ugaguccuccuccuugugg

SEQ ID NO: 2946725 - RNA, 19 nt, Artificial Sequence
  Description of Artificial Sequence: Synthetic oligonucleotide
aauucagaacgcucuggga

SEQ ID NO: 2946726 - RNA, 19 nt, Artificial Sequence
  Description of Artificial Sequence: Synthetic oligonucleotide
aucggagaggaucuuugac

SEQ ID NO: 2946727 - RNA, 19 nt, Artificial Sequence
  Description of Artificial Sequence: Synthetic oligonucleotide
aagagucauguccacgcug

SEQ ID NO: 2946728 - RNA, 19 nt, Artificial Sequence
  Description of Artificial Sequence: Synthetic oligonucleotide
aagugaguccuccuccuug

SEQ ID NO: 2946729 - RNA, 19 nt, Artificial Sequence
  Description of Artificial Sequence: Synthetic oligonucleotide
gucuuccaaaccuuaaccc

SEQ ID NO: 2946730 - RNA, 19 nt, Artificial Sequence
  Description of Artificial Sequence: Synthetic oligonucleotide
agagcaacagcggagaaga

SEQ ID NO: 2946731 - RNA, 19 nt, Artificial Sequence
  Description of Artificial Sequence: Synthetic oligonucleotide
uacagagagcaacagcgga

SEQ ID NO: 2946732 - RNA, 19 nt, Artificial Sequence
  Description of Artificial Sequence: Synthetic oligonucleotide
aaaaccuuacaggagggaa

SEQ ID NO: 2946733 - RNA, 19 nt, Artificial Sequence
  Description of Artificial Sequence: Synthetic oligonucleotide
ugaucggagaggaucuuug

SEQ ID NO: 2946734 - RNA, 19 nt, Artificial Sequence
  Description of Artificial Sequence: Synthetic oligonucleotide
ggcacuaccauauguaccc

SEQ ID NO: 2946735 - RNA, 19 nt, Artificial Sequence
  Description of Artificial Sequence: Synthetic oligonucleotide
uugcugacaaauuaacuua

SEQ ID NO: 2946736 - RNA, 19 nt, Artificial Sequence
  Description of Artificial Sequence: Synthetic oligonucleotide
uuaacuuaagagucauguc

SEQ ID NO: 2946737 - RNA, 19 nt, Artificial Sequence
  Description of Artificial Sequence: Synthetic oligonucleotide
aaaccuuacaggagggaag

SEQ ID NO: 2946738 - RNA, 19 nt, Artificial Sequence
  Description of Artificial Sequence: Synthetic oligonucleotide
ugcaaaucugggcccaaag

SEQ ID NO: 2946739 - RNA, 19 nt, Artificial Sequence
  Description of Artificial Sequence: Synthetic oligonucleotide
ugaaggguggggcuccccg

SEQ ID NO: 2946740 - RNA, 19 nt, Artificial Sequence
  Description of Artificial Sequence: Synthetic oligonucleotide
cuuccaaaccuuaacccug

SEQ ID NO: 2946741 - RNA, 19 nt, Artificial Sequence
  Description of Artificial Sequence: Synthetic oligonucleotide
uccuuucucccacacaacu

SEQ ID NO: 2946742 - RNA, 19 nt, Artificial Sequence
  Description of Artificial Sequence: Synthetic oligonucleotide
cuguaugcaaauucagaac

SEQ ID NO: 2946743 - RNA, 19 nt, Artificial Sequence
  Description of Artificial Sequence: Synthetic oligonucleotide
aaaucugggcccaaaguga

SEQ ID NO: 2946744 - RNA, 19 nt, Artificial Sequence
  Description of Artificial Sequence: Synthetic oligonucleotide
cacaacuguaugcaaauuc

SEQ ID NO: 2946745 - RNA, 19 nt, Artificial Sequence
  Description of Artificial Sequence: Synthetic oligonucleotide
acguaaaucacaugcuagu

SEQ ID NO: 2946746 - RNA, 19 nt, Artificial Sequence
  Description of Artificial Sequence: Synthetic oligonucleotide
acuuaagagucauguccac

SEQ ID NO: 2946747 - RNA, 19 nt, Artificial Sequence
  Description of Artificial Sequence: Synthetic oligonucleotide
gucuuagauacaaaugcag

SEQ ID NO: 2946748 - RNA, 19 nt, Artificial Sequence
  Description of Artificial Sequence: Synthetic oligonucleotide
ugucauaaccacccaugug

SEQ ID NO: 2946749 - RNA, 19 nt, Artificial Sequence
  Description of Artificial Sequence: Synthetic oligonucleotide
ucucccacacaacuguaug

SEQ ID NO: 2946750 - RNA, 19 nt, Artificial Sequence
  Description of Artificial Sequence: Synthetic oligonucleotide
auaaccacccaugugggug

SEQ ID NO: 2946751 - RNA, 19 nt, Artificial Sequence
  Description of Artificial Sequence: Synthetic oligonucleotide
uaugcaaauucagaacgcu

SEQ ID NO: 2946752 - RNA, 19 nt, Artificial Sequence
  Description of Artificial Sequence: Synthetic oligonucleotide
auacaaaugcaggcaaagg

SEQ ID NO: 2946753 - RNA, 19 nt, Artificial Sequence
  Description of Artificial Sequence: Synthetic oligonucleotide
aacuguaugcaaauucaga

SEQ ID NO: 2946754 - RNA, 19 nt, Artificial Sequence
  Description of Artificial Sequence: Synthetic oligonucleotide
aaccuuaacccugguacag

SEQ ID NO: 2946755 - RNA, 19 nt, Artificial Sequence
  Description of Artificial Sequence: Synthetic oligonucleotide
ugugggcacuaccauaugu

SEQ ID NO: 2946756 - RNA, 19 nt, Artificial Sequence
  Description of Artificial Sequence: Synthetic oligonucleotide
uccacguaaaucacaugcu

SEQ ID NO: 2946757 - RNA, 19 nt, Artificial Sequence
  Description of Artificial Sequence: Synthetic oligonucleotide
ugcugacaaauuaacuuaa

SEQ ID NO: 2946758 - RNA, 19 nt, Artificial Sequence
  Description of Artificial Sequence: Synthetic oligonucleotide
ugguacagagagcaacagc

SEQ ID NO: 2946759 - RNA, 19 nt, Artificial Sequence
  Description of Artificial Sequence: Synthetic oligonucleotide
accaugcugucauaaccac

SEQ ID NO: 2946760 - RNA, 19 nt, Artificial Sequence
  Description of Artificial Sequence: Synthetic oligonucleotide
aaacaagaacaacauccuu

SEQ ID NO: 2946761 - RNA, 19 nt, Artificial Sequence
  Description of Artificial Sequence: Synthetic oligonucleotide
agagucauguccacgcugg

SEQ ID NO: 2946762 - RNA, 19 nt, Artificial Sequence
  Description of Artificial Sequence: Synthetic oligonucleotide
cuuaagagucauguccacg

SEQ ID NO: 2946763 - RNA, 19 nt, Artificial Sequence
  Description of Artificial Sequence: Synthetic oligonucleotide
caacuguaugcaaauucag

SEQ ID NO: 2946764 - RNA, 19 nt, Artificial Sequence
  Description of Artificial Sequence: Synthetic oligonucleotide
aggaggcuuuacucaagcc

SEQ ID NO: 2946765 - RNA, 19 nt, Artificial Sequence
  Description of Artificial Sequence: Synthetic oligonucleotide
ucacaugcuaguugcaaaa

SEQ ID NO: 2946766 - RNA, 19 nt, Artificial Sequence
  Description of Artificial Sequence: Synthetic oligonucleotide
agcaacagcggagaagagg

SEQ ID NO: 2946767 - RNA, 19 nt, Artificial Sequence
  Description of Artificial Sequence: Synthetic oligonucleotide
cuaccauauguacccaacc

SEQ ID NO: 2946768 - RNA, 19 nt, Artificial Sequence
  Description of Artificial Sequence: Synthetic oligonucleotide
auuguuggguuccacguaa

SEQ ID NO: 2946769 - RNA, 19 nt, Artificial Sequence
  Description of Artificial Sequence: Synthetic oligonucleotide
aaccaugcugucauaacca

SEQ ID NO: 2946770 - RNA, 19 nt, Artificial Sequence
  Description of Artificial Sequence: Synthetic oligonucleotide
aaucugggcccaaagugag

SEQ ID NO: 2946771 - RNA, 19 nt, Artificial Sequence
  Description of Artificial Sequence: Synthetic oligonucleotide
acuaccauauguacccaac

SEQ ID NO: 2946772 - RNA, 19 nt, Artificial Sequence
  Description of Artificial Sequence: Synthetic oligonucleotide
ucuuugacguuugaagggu

SEQ ID NO: 2946773 - RNA, 19 nt, Artificial Sequence
  Description of Artificial Sequence: Synthetic oligonucleotide
cugacaaauuaacuuaaga

SEQ ID NO: 2946774 - RNA, 19 nt, Artificial Sequence
  Description of Artificial Sequence: Synthetic oligonucleotide
gacguuugaaggguggggc

SEQ ID NO: 2946775 - RNA, 19 nt, Artificial Sequence
  Description of Artificial Sequence: Synthetic oligonucleotide
ggucuuccaaaccuuaacc

SEQ ID NO: 2946776 - RNA, 19 nt, Artificial Sequence
  Description of Artificial Sequence: Synthetic oligonucleotide
caaauucagaacgcucugg

SEQ ID NO: 2946777 - RNA, 19 nt, Artificial Sequence
  Description of Artificial Sequence: Synthetic oligonucleotide
aaucacaugcuaguugcaa

SEQ ID NO: 2946778 - RNA, 19 nt, Artificial Sequence
  Description of Artificial Sequence: Synthetic oligonucleotide
uugacguuugaaggguggg

SEQ ID NO: 2946779 - RNA, 19 nt, Artificial Sequence
  Description of Artificial Sequence: Synthetic oligonucleotide
aacagcggagaagaggccu

SEQ ID NO: 2946780 - RNA, 19 nt, Artificial Sequence
  Description of Artificial Sequence: Synthetic oligonucleotide
ugacguuugaagggugggg

SEQ ID NO: 2946781 - RNA, 19 nt, Artificial Sequence
  Description of Artificial Sequence: Synthetic oligonucleotide
gacuugcaaaucugggccc

SEQ ID NO: 2946782 - RNA, 19 nt, Artificial Sequence
  Description of Artificial Sequence: Synthetic oligonucleotide
aagcgacuugcaaaucugg

SEQ ID NO: 2946783 - RNA, 19 nt, Artificial Sequence
  Description of Artificial Sequence: Synthetic oligonucleotide
cauucucccacugaaaaca

SEQ ID NO: 2946784 - RNA, 19 nt, Artificial Sequence
  Description of Artificial Sequence: Synthetic oligonucleotide
gaacaacauccuuucuccc

SEQ ID NO: 2946785 - RNA, 19 nt, Artificial Sequence
  Description of Artificial Sequence: Synthetic oligonucleotide
uccacgcugggaaccaugc

SEQ ID NO: 2946786 - RNA, 19 nt, Artificial Sequence
  Description of Artificial Sequence: Synthetic oligonucleotide
acaaaugcaggcaaaggaa

SEQ ID NO: 2946787 - RNA, 19 nt, Artificial Sequence
  Description of Artificial Sequence: Synthetic oligonucleotide
gaagcgacuugcaaaucug

SEQ ID NO: 2946788 - RNA, 19 nt, Artificial Sequence
  Description of Artificial Sequence: Synthetic oligonucleotide
ugggcacuaccauauguac

SEQ ID NO: 2946789 - RNA, 19 nt, Artificial Sequence
  Description of Artificial Sequence: Synthetic oligonucleotide
cauccuuucucccacacaa

SEQ ID NO: 2946790 - RNA, 19 nt, Artificial Sequence
  Description of Artificial Sequence: Synthetic oligonucleotide
cucccacacaacuguaugc

SEQ ID NO: 2946791 - RNA, 19 nt, Artificial Sequence
  Description of Artificial Sequence: Synthetic oligonucleotide
ucagaacgcucugggaagg

SEQ ID NO: 2946792 - RNA, 19 nt, Artificial Sequence
  Description of Artificial Sequence: Synthetic oligonucleotide
uaagagucauguccacgcu

SEQ ID NO: 2946793 - RNA, 19 nt, Artificial Sequence
  Description of Artificial Sequence: Synthetic oligonucleotide
cacgcugggaaccaugcug

SEQ ID NO: 2946794 - RNA, 19 nt, Artificial Sequence
  Description of Artificial Sequence: Synthetic oligonucleotide
caugugggugaucggagag

SEQ ID NO: 2946795 - RNA, 19 nt, Artificial Sequence
  Description of Artificial Sequence: Synthetic oligonucleotide
ucccacacaacuguaugca

SEQ ID NO: 2946796 - RNA, 19 nt, Artificial Sequence
  Description of Artificial Sequence: Synthetic oligonucleotide
gaaggggucuuccaaaccu

SEQ ID NO: 2946797 - RNA, 19 nt, Artificial Sequence
  Description of Artificial Sequence: Synthetic oligonucleotide
agucuuagauacaaaugca

SEQ ID NO: 2946798 - RNA, 19 nt, Artificial Sequence
  Description of Artificial Sequence: Synthetic oligonucleotide
guaugcaaauucagaacgc

SEQ ID NO: 2946799 - RNA, 19 nt, Artificial Sequence
  Description of Artificial Sequence: Synthetic oligonucleotide
gcaacagcggagaagaggc

SEQ ID NO: 2946800 - RNA, 19 nt, Artificial Sequence
  Description of Artificial Sequence: Synthetic oligonucleotide
ugggugaucggagaggauc

SEQ ID NO: 2946801 - RNA, 19 nt, Artificial Sequence
  Description of Artificial Sequence: Synthetic oligonucleotide
aucacaugcuaguugcaaa

SEQ ID NO: 2946802 - RNA, 19 nt, Artificial Sequence
  Description of Artificial Sequence: Synthetic oligonucleotide
gaaacaagaacaacauccu

SEQ ID NO: 2946803 - RNA, 19 nt, Artificial Sequence
  Description of Artificial Sequence: Synthetic oligonucleotide
augcaaauucagaacgcuc

SEQ ID NO: 2946804 - RNA, 19 nt, Artificial Sequence
  Description of Artificial Sequence: Synthetic oligonucleotide
gagagcaacagcggagaag

SEQ ID NO: 2946805 - RNA, 19 nt, Artificial Sequence
  Description of Artificial Sequence: Synthetic oligonucleotide
ggaggcuuuacucaagcca

SEQ ID NO: 2946806 - RNA, 19 nt, Artificial Sequence
  Description of Artificial Sequence: Synthetic oligonucleotide
agugaguccuccuccuugu

SEQ ID NO: 2946807 - RNA, 19 nt, Artificial Sequence
  Description of Artificial Sequence: Synthetic oligonucleotide
ucaagccagccauucuccc

SEQ ID NO: 2946808 - RNA, 19 nt, Artificial Sequence
  Description of Artificial Sequence: Synthetic oligonucleotide
uaaccacccauguggguga

SEQ ID NO: 2946809 - RNA, 19 nt, Artificial Sequence
  Description of Artificial Sequence: Synthetic oligonucleotide
ucugggcccaaagugaguc

SEQ ID NO: 2946810 - RNA, 19 nt, Artificial Sequence
  Description of Artificial Sequence: Synthetic oligonucleotide
aacgcucugggaagggguc

SEQ ID NO: 2946811 - RNA, 19 nt, Artificial Sequence
  Description of Artificial Sequence: Synthetic oligonucleotide
gucauguccacgcugggaa

SEQ ID NO: 2946812 - RNA, 19 nt, Artificial Sequence
  Description of Artificial Sequence: Synthetic oligonucleotide
guacagagagcaacagcgg

SEQ ID NO: 2946813 - RNA, 19 nt, Artificial Sequence
  Description of Artificial Sequence: Synthetic oligonucleotide
ggagucuuagauacaaaug

SEQ ID NO: 2946814 - RNA, 19 nt, Artificial Sequence
  Description of Artificial Sequence: Synthetic oligonucleotide
agcgacuugcaaaucuggg

SEQ ID NO: 2946815 - RNA, 19 nt, Artificial Sequence
  Description of Artificial Sequence: Synthetic oligonucleotide
uuuacucaagccagccauu

SEQ ID NO: 2946816 - RNA, 19 nt, Artificial Sequence
  Description of Artificial Sequence: Synthetic oligonucleotide
gccucggagucuuagauac

SEQ ID NO: 2946817 - RNA, 19 nt, Artificial Sequence
  Description of Artificial Sequence: Synthetic oligonucleotide
cuuugacguuugaagggug

SEQ ID NO: 2946818 - RNA, 19 nt, Artificial Sequence
  Description of Artificial Sequence: Synthetic oligonucleotide
guuggguuccacguaaauc

SEQ ID NO: 2946819 - RNA, 19 nt, Artificial Sequence
  Description of Artificial Sequence: Synthetic oligonucleotide
uuacucaagccagccauuc

SEQ ID NO: 2946820 - RNA, 19 nt, Artificial Sequence
  Description of Artificial Sequence: Synthetic oligonucleotide
uguuggguuccacguaaau

SEQ ID NO: 2946821 - RNA, 19 nt, Artificial Sequence
  Description of Artificial Sequence: Synthetic oligonucleotide
uggguuccacguaaaucac

SEQ ID NO: 2946822 - RNA, 19 nt, Artificial Sequence
  Description of Artificial Sequence: Synthetic oligonucleotide
uaacccugguacagagagc

SEQ ID NO: 2946823 - RNA, 19 nt, Artificial Sequence
  Description of Artificial Sequence: Synthetic oligonucleotide
uacucaagccagccauucu

SEQ ID NO: 2946824 - RNA, 19 nt, Artificial Sequence
  Description of Artificial Sequence: Synthetic oligonucleotide
aaagugaguccuccuccuu

SEQ ID NO: 2946825 - RNA, 19 nt, Artificial Sequence
  Description of Artificial Sequence: Synthetic oligonucleotide
ugggaaggggucuuccaaa

SEQ ID NO: 2946826 - RNA, 19 nt, Artificial Sequence
  Description of Artificial Sequence: Synthetic oligonucleotide
aaggguggggcuccccgca

SEQ ID NO: 2946827 - RNA, 19 nt, Artificial Sequence
  Description of Artificial Sequence: Synthetic oligonucleotide
cuuuacucaagccagccau

SEQ ID NO: 2946828 - RNA, 19 nt, Artificial Sequence
  Description of Artificial Sequence: Synthetic oligonucleotide
agaacgcucugggaagggg

SEQ ID NO: 2946829 - RNA, 19 nt, Artificial Sequence
  Description of Artificial Sequence: Synthetic oligonucleotide
cauguccacgcugggaacc

SEQ ID NO: 2946830 - RNA, 19 nt, Artificial Sequence
  Description of Artificial Sequence: Synthetic oligonucleotide
gaucggagaggaucuuuga

SEQ ID NO: 2946831 - RNA, 19 nt, Artificial Sequence
  Description of Artificial Sequence: Synthetic oligonucleotide
ggcaaaggaagcgacuugc

SEQ ID NO: 2946832 - RNA, 19 nt, Artificial Sequence
  Description of Artificial Sequence: Synthetic oligonucleotide
gaaggaggcuuuacucaag

SEQ ID NO: 2946833 - RNA, 19 nt, Artificial Sequence
  Description of Artificial Sequence: Synthetic oligonucleotide
gcgacuugcaaaucugggc

SEQ ID NO: 2946834 - RNA, 19 nt, Artificial Sequence
  Description of Artificial Sequence: Synthetic oligonucleotide
cgacuugcaaaucugggcc

SEQ ID NO: 2946835 - RNA, 19 nt, Artificial Sequence
  Description of Artificial Sequence: Synthetic oligonucleotide
ccaaagugaguccuccucc

SEQ ID NO: 2946836 - RNA, 19 nt, Artificial Sequence
  Description of Artificial Sequence: Synthetic oligonucleotide
aaaucacaugcuaguugca

SEQ ID NO: 2946837 - RNA, 19 nt, Artificial Sequence
  Description of Artificial Sequence: Synthetic oligonucleotide
augugggugaucggagagg

SEQ ID NO: 2946838 - RNA, 19 nt, Artificial Sequence
  Description of Artificial Sequence: Synthetic oligonucleotide
gagucauguccacgcuggg

SEQ ID NO: 2946839 - RNA, 19 nt, Artificial Sequence
  Description of Artificial Sequence: Synthetic oligonucleotide
aggcaaaggaagcgacuug

SEQ ID NO: 2946840 - RNA, 19 nt, Artificial Sequence
  Description of Artificial Sequence: Synthetic oligonucleotide
acguuugaaggguggggcu

SEQ ID NO: 2946841 - RNA, 19 nt, Artificial Sequence
  Description of Artificial Sequence: Synthetic oligonucleotide
gaaggguggggcuccccgc

SEQ ID NO: 2946842 - RNA, 19 nt, Artificial Sequence
  Description of Artificial Sequence: Synthetic oligonucleotide
gcaaauucagaacgcucug

SEQ ID NO: 2946843 - RNA, 19 nt, Artificial Sequence
  Description of Artificial Sequence: Synthetic oligonucleotide
cuuucucccacacaacugu

SEQ ID NO: 2946844 - RNA, 19 nt, Artificial Sequence
  Description of Artificial Sequence: Synthetic oligonucleotide
aggccugcgggccucggag

SEQ ID NO: 2946845 - RNA, 19 nt, Artificial Sequence
  Description of Artificial Sequence: Synthetic oligonucleotide
ggagaagaggccugcgggc

SEQ ID NO: 2946846 - RNA, 19 nt, Artificial Sequence
  Description of Artificial Sequence: Synthetic oligonucleotide
acauccuuucucccacaca

SEQ ID NO: 2946847 - RNA, 19 nt, Artificial Sequence
  Description of Artificial Sequence: Synthetic oligonucleotide
gggaaggaggcuuuacuca

SEQ ID NO: 2946848 - RNA, 19 nt, Artificial Sequence
  Description of Artificial Sequence: Synthetic oligonucleotide
uucucccacugaaaacaaa

SEQ ID NO: 2946849 - RNA, 19 nt, Artificial Sequence
  Description of Artificial Sequence: Synthetic oligonucleotide
ccuuaacccugguacagag

SEQ ID NO: 2946850 - RNA, 19 nt, Artificial Sequence
  Description of Artificial Sequence: Synthetic oligonucleotide
aggcuuuacucaagccagc

SEQ ID NO: 2946851 - RNA, 19 nt, Artificial Sequence
  Description of Artificial Sequence: Synthetic oligonucleotide
ugggcccaaagugaguccu

SEQ ID NO: 2946852 - RNA, 19 nt, Artificial Sequence
  Description of Artificial Sequence: Synthetic oligonucleotide
cuugugggcacuaccauau

SEQ ID NO: 2946853 - RNA, 19 nt, Artificial Sequence
  Description of Artificial Sequence: Synthetic oligonucleotide
caaaggaagcgacuugcaa

SEQ ID NO: 2946854 - RNA, 19 nt, Artificial Sequence
  Description of Artificial Sequence: Synthetic oligonucleotide
cugguacagagagcaacag

SEQ ID NO: 2946855 - RNA, 19 nt, Artificial Sequence
  Description of Artificial Sequence: Synthetic oligonucleotide
ucggagucuuagauacaaa

SEQ ID NO: 2946856 - RNA, 19 nt, Artificial Sequence
  Description of Artificial Sequence: Synthetic oligonucleotide
guuccacguaaaucacaug

SEQ ID NO: 2946857 - RNA, 19 nt, Artificial Sequence
  Description of Artificial Sequence: Synthetic oligonucleotide
ggaaccaugcugucauaac

SEQ ID NO: 2946858 - RNA, 19 nt, Artificial Sequence
  Description of Artificial Sequence: Synthetic oligonucleotide
uugugggcacuaccauaug

SEQ ID NO: 2946859 - RNA, 19 nt, Artificial Sequence
  Description of Artificial Sequence: Synthetic oligonucleotide
aggaucuuugacguuugaa

SEQ ID NO: 2946860 - RNA, 19 nt, Artificial Sequence
  Description of Artificial Sequence: Synthetic oligonucleotide
uuguuggguuccacguaaa

SEQ ID NO: 2946861 - RNA, 19 nt, Artificial Sequence
  Description of Artificial Sequence: Synthetic oligonucleotide
acccaugugggugaucgga

SEQ ID NO: 2946862 - RNA, 19 nt, Artificial Sequence
  Description of Artificial Sequence: Synthetic oligonucleotide
acuugcaaaucugggccca

SEQ ID NO: 2946863 - RNA, 19 nt, Artificial Sequence
  Description of Artificial Sequence: Synthetic oligonucleotide
agaagaggccugcgggccu

SEQ ID NO: 2946864 - RNA, 19 nt, Artificial Sequence
  Description of Artificial Sequence: Synthetic oligonucleotide
caacagcggagaagaggcc

SEQ ID NO: 2946865 - RNA, 19 nt, Artificial Sequence
  Description of Artificial Sequence: Synthetic oligonucleotide
gggucuuccaaaccuuaac

SEQ ID NO: 2946866 - RNA, 19 nt, Artificial Sequence
  Description of Artificial Sequence: Synthetic oligonucleotide
auccuuucucccacacaac

SEQ ID NO: 2946867 - RNA, 19 nt, Artificial Sequence
  Description of Artificial Sequence: Synthetic oligonucleotide
agauacaaaugcaggcaaa

SEQ ID NO: 2946868 - RNA, 19 nt, Artificial Sequence
  Description of Artificial Sequence: Synthetic oligonucleotide
ggaaggaggcuuuacucaa

SEQ ID NO: 2946869 - RNA, 19 nt, Artificial Sequence
  Description of Artificial Sequence: Synthetic oligonucleotide
cuuaacccugguacagaga

SEQ ID NO: 2946870 - RNA, 19 nt, Artificial Sequence
  Description of Artificial Sequence: Synthetic oligonucleotide
uccaaaccuuaacccuggu

SEQ ID NO: 2946871 - RNA, 19 nt, Artificial Sequence
  Description of Artificial Sequence: Synthetic oligonucleotide
ccuuacaggagggaaggag

SEQ ID NO: 2946872 - RNA, 19 nt, Artificial Sequence
  Description of Artificial Sequence: Synthetic oligonucleotide
agaggaucuuugacguuug

SEQ ID NO: 2946873 - RNA, 19 nt, Artificial Sequence
  Description of Artificial Sequence: Synthetic oligonucleotide
agucauguccacgcuggga

SEQ ID NO: 2946874 - RNA, 19 nt, Artificial Sequence
  Description of Artificial Sequence: Synthetic oligonucleotide
acaggagggaaggaggcuu

SEQ ID NO: 2946875 - RNA, 19 nt, Artificial Sequence
  Description of Artificial Sequence: Synthetic oligonucleotide
gcugacaaauuaacuuaag

SEQ ID NO: 2946876 - RNA, 19 nt, Artificial Sequence
  Description of Artificial Sequence: Synthetic oligonucleotide
cugggcccaaagugagucc

SEQ ID NO: 2946877 - RNA, 19 nt, Artificial Sequence
  Description of Artificial Sequence: Synthetic oligonucleotide
augcaggcaaaggaagcga

SEQ ID NO: 2946878 - RNA, 19 nt, Artificial Sequence
  Description of Artificial Sequence: Synthetic oligonucleotide
cucggagucuuagauacaa

SEQ ID NO: 2946879 - RNA, 19 nt, Artificial Sequence
  Description of Artificial Sequence: Synthetic oligonucleotide
gccauucucccacugaaaa

SEQ ID NO: 2946880 - RNA, 19 nt, Artificial Sequence
  Description of Artificial Sequence: Synthetic oligonucleotide
ggaagcgacuugcaaaucu

SEQ ID NO: 2946881 - RNA, 19 nt, Artificial Sequence
  Description of Artificial Sequence: Synthetic oligonucleotide
ccuuucucccacacaacug

SEQ ID NO: 2946882 - RNA, 19 nt, Artificial Sequence
  Description of Artificial Sequence: Synthetic oligonucleotide
agagagcaacagcggagaa

SEQ ID NO: 2946883 - RNA, 19 nt, Artificial Sequence
  Description of Artificial Sequence: Synthetic oligonucleotide
caagccagccauucuccca

SEQ ID NO: 2946884 - RNA, 19 nt, Artificial Sequence
  Description of Artificial Sequence: Synthetic oligonucleotide
gggcuccccgcauuguugg

SEQ ID NO: 2946885 - RNA, 19 nt, Artificial Sequence
  Description of Artificial Sequence: Synthetic oligonucleotide
gggaaggggucuuccaaac

SEQ ID NO: 2946886 - RNA, 19 nt, Artificial Sequence
  Description of Artificial Sequence: Synthetic oligonucleotide
ggcuuuacucaagccagcc

SEQ ID NO: 2946887 - RNA, 19 nt, Artificial Sequence
  Description of Artificial Sequence: Synthetic oligonucleotide
aggaagcgacuugcaaauc

SEQ ID NO: 2946888 - RNA, 19 nt, Artificial Sequence
  Description of Artificial Sequence: Synthetic oligonucleotide
acgcugggaaccaugcugu

SEQ ID NO: 2946889 - RNA, 19 nt, Artificial Sequence
  Description of Artificial Sequence: Synthetic oligonucleotide
gcggagaagaggccugcgg

SEQ ID NO: 2946890 - RNA, 19 nt, Artificial Sequence
  Description of Artificial Sequence: Synthetic oligonucleotide
ccaugcugucauaaccacc

SEQ ID NO: 2946891 - RNA, 19 nt, Artificial Sequence
  Description of Artificial Sequence: Synthetic oligonucleotide
cacacaacuguaugcaaau

SEQ ID NO: 2946892 - RNA, 19 nt, Artificial Sequence
  Description of Artificial Sequence: Synthetic oligonucleotide
aaggggucuuccaaaccuu

SEQ ID NO: 2946893 - RNA, 19 nt, Artificial Sequence
  Description of Artificial Sequence: Synthetic oligonucleotide
accuuaacccugguacaga

SEQ ID NO: 2946894 - RNA, 19 nt, Artificial Sequence
  Description of Artificial Sequence: Synthetic oligonucleotide
acagcggagaagaggccug

SEQ ID NO: 2946895 - RNA, 19 nt, Artificial Sequence
  Description of Artificial Sequence: Synthetic oligonucleotide
gaggaucuuugacguuuga

SEQ ID NO: 2946896 - RNA, 19 nt, Artificial Sequence
  Description of Artificial Sequence: Synthetic oligonucleotide
gggcacuaccauauguacc

SEQ ID NO: 2946897 - RNA, 19 nt, Artificial Sequence
  Description of Artificial Sequence: Synthetic oligonucleotide
cagccauucucccacugaa

SEQ ID NO: 2946898 - RNA, 19 nt, Artificial Sequence
  Description of Artificial Sequence: Synthetic oligonucleotide
augcugucauaaccaccca

SEQ ID NO: 2946899 - RNA, 19 nt, Artificial Sequence
  Description of Artificial Sequence: Synthetic oligonucleotide
cagaacgcucugggaaggg

SEQ ID NO: 2946900 - RNA, 19 nt, Artificial Sequence
  Description of Artificial Sequence: Synthetic oligonucleotide
agcggagaagaggccugcg

SEQ ID NO: 2946901 - RNA, 19 nt, Artificial Sequence
  Description of Artificial Sequence: Synthetic oligonucleotide
caaagugaguccuccuccu

SEQ ID NO: 2946902 - RNA, 19 nt, Artificial Sequence
  Description of Artificial Sequence: Synthetic oligonucleotide
ccugguacagagagcaaca

SEQ ID NO: 2946903 - RNA, 19 nt, Artificial Sequence
  Description of Artificial Sequence: Synthetic oligonucleotide
gugggcacuaccauaugua

SEQ ID NO: 2946904 - RNA, 19 nt, Artificial Sequence
  Description of Artificial Sequence: Synthetic oligonucleotide
cacccaugugggugaucgg

SEQ ID NO: 2946905 - RNA, 19 nt, Artificial Sequence
  Description of Artificial Sequence: Synthetic oligonucleotide
cugggaaccaugcugucau

SEQ ID NO: 2946906 - RNA, 19 nt, Artificial Sequence
  Description of Artificial Sequence: Synthetic oligonucleotide
cccaaagugaguccuccuc

SEQ ID NO: 2946907 - RNA, 19 nt, Artificial Sequence
  Description of Artificial Sequence: Synthetic oligonucleotide
auucucccacugaaaacaa

SEQ ID NO: 2946908 - RNA, 19 nt, Artificial Sequence
  Description of Artificial Sequence: Synthetic oligonucleotide
uggggcuccccgcauuguu

SEQ ID NO: 2946909 - RNA, 19 nt, Artificial Sequence
  Description of Artificial Sequence: Synthetic oligonucleotide
cauuguuggguuccacgua

SEQ ID NO: 2946910 - RNA, 19 nt, Artificial Sequence
  Description of Artificial Sequence: Synthetic oligonucleotide
uugcaaaucugggcccaaa

SEQ ID NO: 2946911 - RNA, 19 nt, Artificial Sequence
  Description of Artificial Sequence: Synthetic oligonucleotide
cacuaccauauguacccaa

SEQ ID NO: 2946912 - RNA, 19 nt, Artificial Sequence
  Description of Artificial Sequence: Synthetic oligonucleotide
gcuuuacucaagccagcca

SEQ ID NO: 2946913 - RNA, 19 nt, Artificial Sequence
  Description of Artificial Sequence: Synthetic oligonucleotide
gugaguccuccuccuugug

SEQ ID NO: 2946914 - RNA, 19 nt, Artificial Sequence
  Description of Artificial Sequence: Synthetic oligonucleotide
gaacgcucugggaaggggu

SEQ ID NO: 2946915 - RNA, 19 nt, Artificial Sequence
  Description of Artificial Sequence: Synthetic oligonucleotide
gagcaacagcggagaagag

SEQ ID NO: 2946916 - RNA, 19 nt, Artificial Sequence
  Description of Artificial Sequence: Synthetic oligonucleotide
gcaaaucugggcccaaagu

SEQ ID NO: 2946917 - RNA, 19 nt, Artificial Sequence
  Description of Artificial Sequence: Synthetic oligonucleotide
auguccacgcugggaacca

SEQ ID NO: 2946918 - RNA, 19 nt, Artificial Sequence
  Description of Artificial Sequence: Synthetic oligonucleotide
acacaacuguaugcaaauu

SEQ ID NO: 2946919 - RNA, 19 nt, Artificial Sequence
  Description of Artificial Sequence: Synthetic oligonucleotide
uugaaggguggggcucccc

SEQ ID NO: 2946920 - RNA, 19 nt, Artificial Sequence
  Description of Artificial Sequence: Synthetic oligonucleotide
gguggggcuccccgcauug

SEQ ID NO: 2946921 - RNA, 19 nt, Artificial Sequence
  Description of Artificial Sequence: Synthetic oligonucleotide
ggcccaaagugaguccucc

SEQ ID NO: 2946922 - RNA, 19 nt, Artificial Sequence
  Description of Artificial Sequence: Synthetic oligonucleotide
gaagaggccugcgggccuc

SEQ ID NO: 2946923 - RNA, 19 nt, Artificial Sequence
  Description of Artificial Sequence: Synthetic oligonucleotide
cccugguacagagagcaac

SEQ ID NO: 2946924 - RNA, 19 nt, Artificial Sequence
  Description of Artificial Sequence: Synthetic oligonucleotide
gguuccacguaaaucacau

SEQ ID NO: 2946925 - RNA, 19 nt, Artificial Sequence
  Description of Artificial Sequence: Synthetic oligonucleotide
caacauccuuucucccaca

SEQ ID NO: 2946926 - RNA, 19 nt, Artificial Sequence
  Description of Artificial Sequence: Synthetic oligonucleotide
cagcggagaagaggccugc

SEQ ID NO: 2946927 - RNA, 19 nt, Artificial Sequence
  Description of Artificial Sequence: Synthetic oligonucleotide
guccacgcugggaaccaug

SEQ ID NO: 2946928 - RNA, 19 nt, Artificial Sequence
  Description of Artificial Sequence: Synthetic oligonucleotide
ugggaaccaugcugucaua

SEQ ID NO: 2946929 - RNA, 19 nt, Artificial Sequence
  Description of Artificial Sequence: Synthetic oligonucleotide
caagaacaacauccuuucu

SEQ ID NO: 2946930 - RNA, 19 nt, Artificial Sequence
  Description of Artificial Sequence: Synthetic oligonucleotide
accuuacaggagggaagga

SEQ ID NO: 2946931 - RNA, 19 nt, Artificial Sequence
  Description of Artificial Sequence: Synthetic oligonucleotide
cauaaccacccaugugggu

SEQ ID NO: 2946932 - RNA, 19 nt, Artificial Sequence
  Description of Artificial Sequence: Synthetic oligonucleotide
gggaaccaugcugucauaa

SEQ ID NO: 2946933 - RNA, 19 nt, Artificial Sequence
  Description of Artificial Sequence: Synthetic oligonucleotide
uccccgcauuguuggguuc

SEQ ID NO: 2946934 - RNA, 19 nt, Artificial Sequence
  Description of Artificial Sequence: Synthetic oligonucleotide
agccauucucccacugaaa

SEQ ID NO: 2946935 - RNA, 19 nt, Artificial Sequence
  Description of Artificial Sequence: Synthetic oligonucleotide
ccacguaaaucacaugcua

SEQ ID NO: 2946936 - RNA, 19 nt, Artificial Sequence
  Description of Artificial Sequence: Synthetic oligonucleotide
ggagggaaggaggcuuuac

SEQ ID NO: 2946937 - RNA, 19 nt, Artificial Sequence
  Description of Artificial Sequence: Synthetic oligonucleotide
acgcucugggaaggggucu

SEQ ID NO: 2946938 - RNA, 19 nt, Artificial Sequence
  Description of Artificial Sequence: Synthetic oligonucleotide
aggggucuuccaaaccuua

SEQ ID NO: 2946939 - RNA, 19 nt, Artificial Sequence
  Description of Artificial Sequence: Synthetic oligonucleotide
gcaaaggaagcgacuugca

SEQ ID NO: 2946940 - RNA, 19 nt, Artificial Sequence
  Description of Artificial Sequence: Synthetic oligonucleotide
gaggccugcgggccucgga

SEQ ID NO: 2946941 - RNA, 19 nt, Artificial Sequence
  Description of Artificial Sequence: Synthetic oligonucleotide
ggcuccccgcauuguuggg

SEQ ID NO: 2946942 - RNA, 19 nt, Artificial Sequence
  Description of Artificial Sequence: Synthetic oligonucleotide
aucugggcccaaagugagu

SEQ ID NO: 2946943 - RNA, 19 nt, Artificial Sequence
  Description of Artificial Sequence: Synthetic oligonucleotide
caggcaaaggaagcgacuu

SEQ ID NO: 2946944 - RNA, 19 nt, Artificial Sequence
  Description of Artificial Sequence: Synthetic oligonucleotide
accacccaugugggugauc

SEQ ID NO: 2946945 - RNA, 19 nt, Artificial Sequence
  Description of Artificial Sequence: Synthetic oligonucleotide
aaccacccaugugggugau

SEQ ID NO: 2946946 - RNA, 19 nt, Artificial Sequence
  Description of Artificial Sequence: Synthetic oligonucleotide
ggguuccacguaaaucaca

SEQ ID NO: 2946947 - RNA, 19 nt, Artificial Sequence
  Description of Artificial Sequence: Synthetic oligonucleotide
ggggcuccccgcauuguug

SEQ ID NO: 2946948 - RNA, 19 nt, Artificial Sequence
  Description of Artificial Sequence: Synthetic oligonucleotide
gccagccauucucccacug

SEQ ID NO: 2946949 - RNA, 19 nt, Artificial Sequence
  Description of Artificial Sequence: Synthetic oligonucleotide
ccaugugggugaucggaga

SEQ ID NO: 2946950 - RNA, 19 nt, Artificial Sequence
  Description of Artificial Sequence: Synthetic oligonucleotide
uguccacgcugggaaccau

SEQ ID NO: 2946951 - RNA, 19 nt, Artificial Sequence
  Description of Artificial Sequence: Synthetic oligonucleotide
aggguggggcuccccgcau

SEQ ID NO: 2946952 - RNA, 19 nt, Artificial Sequence
  Description of Artificial Sequence: Synthetic oligonucleotide
gggugaucggagaggaucu

SEQ ID NO: 2946953 - RNA, 19 nt, Artificial Sequence
  Description of Artificial Sequence: Synthetic oligonucleotide
ccccgcauuguuggguucc

SEQ ID NO: 2946954 - RNA, 19 nt, Artificial Sequence
  Description of Artificial Sequence: Synthetic oligonucleotide
cuugcaaaucugggcccaa

SEQ ID NO: 2946955 - RNA, 19 nt, Artificial Sequence
  Description of Artificial Sequence: Synthetic oligonucleotide
ccagccauucucccacuga

SEQ ID NO: 2946956 - RNA, 19 nt, Artificial Sequence
  Description of Artificial Sequence: Synthetic oligonucleotide
ggccucggagucuuagaua

SEQ ID NO: 2946957 - RNA, 19 nt, Artificial Sequence
  Description of Artificial Sequence: Synthetic oligonucleotide
cggagaggaucuuugacgu

SEQ ID NO: 2946958 - RNA, 19 nt, Artificial Sequence
  Description of Artificial Sequence: Synthetic oligonucleotide
cggagucuuagauacaaau

SEQ ID NO: 2946959 - RNA, 19 nt, Artificial Sequence
  Description of Artificial Sequence: Synthetic oligonucleotide
aggagggaaggaggcuuua

SEQ ID NO: 2946960 - RNA, 19 nt, Artificial Sequence
  Description of Artificial Sequence: Synthetic oligonucleotide
ccaaaccuuaacccuggua

SEQ ID NO: 2946961 - RNA, 19 nt, Artificial Sequence
  Description of Artificial Sequence: Synthetic oligonucleotide
gggccucggagucuuagau

SEQ ID NO: 2946962 - RNA, 19 nt, Artificial Sequence
  Description of Artificial Sequence: Synthetic oligonucleotide
ggggucuuccaaaccuuaa

SEQ ID NO: 2946963 - RNA, 19 nt, Artificial Sequence
  Description of Artificial Sequence: Synthetic oligonucleotide
gugaucggagaggaucuuu

SEQ ID NO: 2946964 - RNA, 19 nt, Artificial Sequence
  Description of Artificial Sequence: Synthetic oligonucleotide
gccugcgggccucggaguc

SEQ ID NO: 2946965 - RNA, 19 nt, Artificial Sequence
  Description of Artificial Sequence: Synthetic oligonucleotide
gcgggccucggagucuuag

SEQ ID NO: 2946966 - RNA, 19 nt, Artificial Sequence
  Description of Artificial Sequence: Synthetic oligonucleotide
gcacuaccauauguaccca

SEQ ID NO: 2946967 - RNA, 19 nt, Artificial Sequence
  Description of Artificial Sequence: Synthetic oligonucleotide
cuccccgcauuguuggguu

SEQ ID NO: 2946968 - RNA, 19 nt, Artificial Sequence
  Description of Artificial Sequence: Synthetic oligonucleotide
gcaggcaaaggaagcgacu

SEQ ID NO: 2946969 - RNA, 19 nt, Artificial Sequence
  Description of Artificial Sequence: Synthetic oligonucleotide
acccugguacagagagcaa

SEQ ID NO: 2946970 - RNA, 19 nt, Artificial Sequence
  Description of Artificial Sequence: Synthetic oligonucleotide
ccucggagucuuagauaca

SEQ ID NO: 2946971 - RNA, 19 nt, Artificial Sequence
  Description of Artificial Sequence: Synthetic oligonucleotide
ugcgggccucggagucuua

SEQ ID NO: 2946972 - RNA, 19 nt, Artificial Sequence
  Description of Artificial Sequence: Synthetic oligonucleotide
ggagaggaucuuugacguu

SEQ ID NO: 2946973 - RNA, 19 nt, Artificial Sequence
  Description of Artificial Sequence: Synthetic oligonucleotide
gcccaaagugaguccuccu

SEQ ID NO: 2946974 - RNA, 19 nt, Artificial Sequence
  Description of Artificial Sequence: Synthetic oligonucleotide
gggcccaaagugaguccuc

SEQ ID NO: 2946975 - RNA, 19 nt, Artificial Sequence
  Description of Artificial Sequence: Synthetic oligonucleotide
cguaaaucacaugcuaguu

SEQ ID NO: 2946976 - RNA, 19 nt, Artificial Sequence
  Description of Artificial Sequence: Synthetic oligonucleotide
gcuccccgcauuguugggu

SEQ ID NO: 2946977 - RNA, 19 nt, Artificial Sequence
  Description of Artificial Sequence: Synthetic oligonucleotide
ccgcauuguuggguuccac

SEQ ID NO: 2946978 - RNA, 19 nt, Artificial Sequence
  Description of Artificial Sequence: Synthetic oligonucleotide
cgcugggaaccaugcuguc

SEQ ID NO: 2946979 - RNA, 19 nt, Artificial Sequence
  Description of Artificial Sequence: Synthetic oligonucleotide
gugggugaucggagaggau

SEQ ID NO: 2946980 - RNA, 19 nt, Artificial Sequence
  Description of Artificial Sequence: Synthetic oligonucleotide
guggggcuccccgcauugu

SEQ ID NO: 2946981 - RNA, 19 nt, Artificial Sequence
  Description of Artificial Sequence: Synthetic oligonucleotide
ggccugcgggccucggagu

SEQ ID NO: 2946982 - RNA, 19 nt, Artificial Sequence
  Description of Artificial Sequence: Synthetic oligonucleotide
ggugaucggagaggaucuu

SEQ ID NO: 2946983 - RNA, 19 nt, Artificial Sequence
  Description of Artificial Sequence: Synthetic oligonucleotide
cgggccucggagucuuaga

SEQ ID NO: 2946984 - RNA, 19 nt, Artificial Sequence
  Description of Artificial Sequence: Synthetic oligonucleotide
cccgcauuguuggguucca

SEQ ID NO: 2946985 - RNA, 19 nt, Artificial Sequence
  Description of Artificial Sequence: Synthetic oligonucleotide
cugcgggccucggagucuu

SEQ ID NO: 2946986 - RNA, 19 nt, Artificial Sequence
  Description of Artificial Sequence: Synthetic oligonucleotide
ccacgcugggaaccaugcu

SEQ ID NO: 2946987 - RNA, 19 nt, Artificial Sequence
  Description of Artificial Sequence: Synthetic oligonucleotide
ggguggggcuccccgcauu

SEQ ID NO: 2946988 - RNA, 19 nt, Artificial Sequence
  Description of Artificial Sequence: Synthetic oligonucleotide
ccugcgggccucggagucu

SEQ ID NO: 2946989 - RNA, 19 nt, Artificial Sequence
  Description of Artificial Sequence: Synthetic oligonucleotide
agaagcaucacucaaaccc

SEQ ID NO: 2946990 - RNA, 19 nt, Artificial Sequence
  Description of Artificial Sequence: Synthetic oligonucleotide
  modified_base (4)..(4): a, c, u, g, unknown or other
cacngaaagagauagagag

SEQ ID NO: 2946991 - RNA, 19 nt, Artificial Sequence
  Description of Artificial Sequence: Synthetic oligonucleotide
gaaagagauagagagaagg

SEQ ID NO: 2946992 - RNA, 19 nt, Artificial Sequence
  Description of Artificial Sequence: Synthetic oligonucleotide
auagagagaaggcauaagg

SEQ ID NO: 2946993 - RNA, 19 nt, Artificial Sequence
  Description of Artificial Sequence: Synthetic oligonucleotide
uaaguagugggacagcagg

SEQ ID NO: 2946994 - RNA, 19 nt, Artificial Sequence
  Description of Artificial Sequence: Synthetic oligonucleotide
uuaagguagaggcaggugc

SEQ ID NO: 2946995 - RNA, 19 nt, Artificial Sequence
  Description of Artificial Sequence: Synthetic oligonucleotide
aaagagauagagagaaggc

SEQ ID NO: 2946996 - RNA, 19 nt, Artificial Sequence
  Description of Artificial Sequence: Synthetic oligonucleotide
ucuuucaaauuccuuuucg

SEQ ID NO: 2946997 - RNA, 19 nt, Artificial Sequence
  Description of Artificial Sequence: Synthetic oligonucleotide
uucaaauuccuuuucguga

SEQ ID NO: 2946998 - RNA, 19 nt, Artificial Sequence
  Description of Artificial Sequence: Synthetic oligonucleotide
agaucugguaaguaguggg

SEQ ID NO: 2946999 - RNA, 19 nt, Artificial Sequence
  Description of Artificial Sequence: Synthetic oligonucleotide
ucaaauuccuuuucgugag

SEQ ID NO: 2947000 - RNA, 19 nt, Artificial Sequence
  Description of Artificial Sequence: Synthetic oligonucleotide
aacagacacccacagcucg

SEQ ID NO: 2947001 - RNA, 19 nt, Artificial Sequence
  Description of Artificial Sequence: Synthetic oligonucleotide
uuucaaauuccuuuucgug

SEQ ID NO: 2947002 - RNA, 19 nt, Artificial Sequence
  Description of Artificial Sequence: Synthetic oligonucleotide
aaggcauaaggcaccaucc

SEQ ID NO: 2947003 - RNA, 19 nt, Artificial Sequence
  Description of Artificial Sequence: Synthetic oligonucleotide
uagagagaaggcauaaggc

SEQ ID NO: 2947004 - RNA, 19 nt, Artificial Sequence
  Description of Artificial Sequence: Synthetic oligonucleotide
  modified_base (14)..(14): a, c, u, g, unknown or other
cacacacacacacngaaag

SEQ ID NO: 2947005 - RNA, 19 nt, Artificial Sequence
  Description of Artificial Sequence: Synthetic oligonucleotide
auuccuuuucgugaguucc

SEQ ID NO: 2947006 - RNA, 19 nt, Artificial Sequence
  Description of Artificial Sequence: Synthetic oligonucleotide
agagagaaggcauaaggca

SEQ ID NO: 2947007 - RNA, 19 nt, Artificial Sequence
  Description of Artificial Sequence: Synthetic oligonucleotide
uuucgugaguuccugcagg

SEQ ID NO: 2947008 - RNA, 19 nt, Artificial Sequence
  Description of Artificial Sequence: Synthetic oligonucleotide
cuaucaguccuucaucugg

SEQ ID NO: 2947009 - RNA, 19 nt, Artificial Sequence
  Description of Artificial Sequence: Synthetic oligonucleotide
uaaggcaccauccgcaccc

SEQ ID NO: 2947010 - RNA, 19 nt, Artificial Sequence
  Description of Artificial Sequence: Synthetic oligonucleotide
aauuccuuuucgugaguuc

SEQ ID NO: 2947011 - RNA, 19 nt, Artificial Sequence
  Description of Artificial Sequence: Synthetic oligonucleotide
ucucaaguccuuuuggcug

SEQ ID NO: 2947012 - RNA, 19 nt, Artificial Sequence
  Description of Artificial Sequence: Synthetic oligonucleotide
ugcacacacacacacacac

SEQ ID NO: 2947013 - RNA, 19 nt, Artificial Sequence
  Description of Artificial Sequence: Synthetic oligonucleotide
acagcuuuguccuccacag

SEQ ID NO: 2947014 - RNA, 19 nt, Artificial Sequence
  Description of Artificial Sequence: Synthetic oligonucleotide
aucacucaaacccagcgug

SEQ ID NO: 2947015 - RNA, 19 nt, Artificial Sequence
  Description of Artificial Sequence: Synthetic oligonucleotide
cucucucugaacaacacug

SEQ ID NO: 2947016 - RNA, 19 nt, Artificial Sequence
  Description of Artificial Sequence: Synthetic oligonucleotide
aagagauagagagaaggca

SEQ ID NO: 2947017 - RNA, 19 nt, Artificial Sequence
  Description of Artificial Sequence: Synthetic oligonucleotide
auggcagggcaacagacac

SEQ ID NO: 2947018 - RNA, 19 nt, Artificial Sequence
  Description of Artificial Sequence: Synthetic oligonucleotide
uucucuuucaaauuccuuu

SEQ ID NO: 2947019 - RNA, 19 nt, Artificial Sequence
  Description of Artificial Sequence: Synthetic oligonucleotide
cuugcuucgaccucugcag

SEQ ID NO: 2947020 - RNA, 19 nt, Artificial Sequence
  Description of Artificial Sequence: Synthetic oligonucleotide
  modified_base (6)..(6): a, c, u, g, unknown or other
cacacngaaagagauagag

SEQ ID NO: 2947021 - RNA, 19 nt, Artificial Sequence
  Description of Artificial Sequence: Synthetic oligonucleotide
  modified_base (18)..(18): a, c, u, g, unknown or other
cacacacacacacacacng

SEQ ID NO: 2947022 - RNA, 19 nt, Artificial Sequence
  Description of Artificial Sequence: Synthetic oligonucleotide
ucucucugaacaacacugg

SEQ ID NO: 2947023 - RNA, 19 nt, Artificial Sequence
  Description of Artificial Sequence: Synthetic oligonucleotide
  modified_base (8)..(8): a, c, u, g, unknown or other
cacacacngaaagagauag

SEQ ID NO: 2947024 - RNA, 19 nt, Artificial Sequence
  Description of Artificial Sequence: Synthetic oligonucleotide
agcuuuguccuccacagug

SEQ ID NO: 2947025 - RNA, 19 nt, Artificial Sequence
  Description of Artificial Sequence: Synthetic oligonucleotide
acaggaacacucauguccc

SEQ ID NO: 2947026 - RNA, 19 nt, Artificial Sequence
  Description of Artificial Sequence: Synthetic oligonucleotide
ugcagaucugguaaguagu

SEQ ID NO: 2947027 - RNA, 19 nt, Artificial Sequence
  Description of Artificial Sequence: Synthetic oligonucleotide
agugaaguccucuaucagu

SEQ ID NO: 2947028 - RNA, 19 nt, Artificial Sequence
  Description of Artificial Sequence: Synthetic oligonucleotide
acucuuaagguagaggcag

SEQ ID NO: 2947029 - RNA, 19 nt, Artificial Sequence
  Description of Artificial Sequence: Synthetic oligonucleotide
uuuucgugaguuccugcag

SEQ ID NO: 2947030 - RNA, 19 nt, Artificial Sequence
  Description of Artificial Sequence: Synthetic oligonucleotide
acagugaaguccucuauca

SEQ ID NO: 2947031 - RNA, 19 nt, Artificial Sequence
  Description of Artificial Sequence: Synthetic oligonucleotide
aguagugggacagcaggcc

SEQ ID NO: 2947032 - RNA, 19 nt, Artificial Sequence
  Description of Artificial Sequence: Synthetic oligonucleotide
uaagguagaggcaggugca

SEQ ID NO: 2947033 - RNA, 19 nt, Artificial Sequence
  Description of Artificial Sequence: Synthetic oligonucleotide
gaaggcauaaggcaccauc

SEQ ID NO: 2947034 - RNA, 19 nt, Artificial Sequence
  Description of Artificial Sequence: Synthetic oligonucleotide
gcacucuuaagguagaggc

SEQ ID NO: 2947035 - RNA, 19 nt, Artificial Sequence
  Description of Artificial Sequence: Synthetic oligonucleotide
ugcuccacagcuuuguccu

SEQ ID NO: 2947036 - RNA, 19 nt, Artificial Sequence
  Description of Artificial Sequence: Synthetic oligonucleotide
agagaaggcauaaggcacc

SEQ ID NO: 2947037 - RNA, 19 nt, Artificial Sequence
  Description of Artificial Sequence: Synthetic oligonucleotide
ucacucaaacccagcgugg

SEQ ID NO: 2947038 - RNA, 19 nt, Artificial Sequence
  Description of Artificial Sequence: Synthetic oligonucleotide
acacuggggacccagggag

SEQ ID NO: 2947039 - RNA, 19 nt, Artificial Sequence
  Description of Artificial Sequence: Synthetic oligonucleotide
uucgugaguuccugcaggg

SEQ ID NO: 2947040 - RNA, 19 nt, Artificial Sequence
  Description of Artificial Sequence: Synthetic oligonucleotide
aucuggagaagcaucacuc

SEQ ID NO: 2947041 - RNA, 19 nt, Artificial Sequence
  Description of Artificial Sequence: Synthetic oligonucleotide
cugaacaacacuggggacc

SEQ ID NO: 2947042 - RNA, 19 nt, Artificial Sequence
  Description of Artificial Sequence: Synthetic oligonucleotide
ucugguaaguagugggaca

SEQ ID NO: 2947043 - RNA, 19 nt, Artificial Sequence
  Description of Artificial Sequence: Synthetic oligonucleotide
auaaggcaccauccgcacc

SEQ ID NO: 2947044 - RNA, 19 nt, Artificial Sequence
  Description of Artificial Sequence: Synthetic oligonucleotide
gagagaaggcauaaggcac

SEQ ID NO: 2947045 - RNA, 19 nt, Artificial Sequence
  Description of Artificial Sequence: Synthetic oligonucleotide
uccucuaucaguccuucau

SEQ ID NO: 2947046 - RNA, 19 nt, Artificial Sequence
  Description of Artificial Sequence: Synthetic oligonucleotide
uaucaguccuucaucugga

SEQ ID NO: 2947047 - RNA, 19 nt, Artificial Sequence
  Description of Artificial Sequence: Synthetic oligonucleotide
cucugaacaacacugggga

SEQ ID NO: 2947048 - RNA, 19 nt, Artificial Sequence
  Description of Artificial Sequence: Synthetic oligonucleotide
uauggcagggcaacagaca

SEQ ID NO: 2947049 - RNA, 19 nt, Artificial Sequence
  Description of Artificial Sequence: Synthetic oligonucleotide
cuuuuggcuggcuuggcug

SEQ ID NO: 2947050 - RNA, 19 nt, Artificial Sequence
  Description of Artificial Sequence: Synthetic oligonucleotide
cucucugaacaacacuggg

SEQ ID NO: 2947051 - RNA, 19 nt, Artificial Sequence
  Description of Artificial Sequence: Synthetic oligonucleotide
aacaacacuggggacccag

SEQ ID NO: 2947052 - RNA, 19 nt, Artificial Sequence
  Description of Artificial Sequence: Synthetic oligonucleotide
ucuggagaagcaucacuca

SEQ ID NO: 2947053 - RNA, 19 nt, Artificial Sequence
  Description of Artificial Sequence: Synthetic oligonucleotide
aucugguaaguagugggac

SEQ ID NO: 2947054 - RNA, 19 nt, Artificial Sequence
  Description of Artificial Sequence: Synthetic oligonucleotide
cugcagaucugguaaguag

SEQ ID NO: 2947055 - RNA, 19 nt, Artificial Sequence
  Description of Artificial Sequence: Synthetic oligonucleotide
ucuaucaguccuucaucug

SEQ ID NO: 2947056 - RNA, 19 nt, Artificial Sequence
  Description of Artificial Sequence: Synthetic oligonucleotide
aguccuuuuggcuggcuug

SEQ ID NO: 2947057 - RNA, 19 nt, Artificial Sequence
  Description of Artificial Sequence: Synthetic oligonucleotide
  modified_base (2)..(2): a, c, u, g, unknown or other
cngaaagagauagagagaa

SEQ ID NO: 2947058 - RNA, 19 nt, Artificial Sequence
  Description of Artificial Sequence: Synthetic oligonucleotide
aggcauaaggcaccauccg

SEQ ID NO: 2947059 - RNA, 19 nt, Artificial Sequence
  Description of Artificial Sequence: Synthetic oligonucleotide
acucaaacccagcgugggc

SEQ ID NO: 2947060 - RNA, 19 nt, Artificial Sequence
  Description of Artificial Sequence: Synthetic oligonucleotide
ucgaccucugcagaucugg

SEQ ID NO: 2947061 - RNA, 19 nt, Artificial Sequence
  Description of Artificial Sequence: Synthetic oligonucleotide
aacacuggggacccaggga

SEQ ID NO: 2947062 - RNA, 19 nt, Artificial Sequence
  Description of Artificial Sequence: Synthetic oligonucleotide
gauagagagaaggcauaag

SEQ ID NO: 2947063 - RNA, 19 nt, Artificial Sequence
  Description of Artificial Sequence: Synthetic oligonucleotide
uugcuccacagcuuugucc

SEQ ID NO: 2947064 - RNA, 19 nt, Artificial Sequence
  Description of Artificial Sequence: Synthetic oligonucleotide
agagauagagagaaggcau

SEQ ID NO: 2947065 - RNA, 19 nt, Artificial Sequence
  Description of Artificial Sequence: Synthetic oligonucleotide
uggcuuggcugucagcugc

SEQ ID NO: 2947066 - RNA, 19 nt, Artificial Sequence
  Description of Artificial Sequence: Synthetic oligonucleotide
cuucaucuggagaagcauc

SEQ ID NO: 2947067 - RNA, 19 nt, Artificial Sequence
  Description of Artificial Sequence: Synthetic oligonucleotide
gaggcaggugcacacacac

SEQ ID NO: 2947068 - RNA, 19 nt, Artificial Sequence
  Description of Artificial Sequence: Synthetic oligonucleotide
ucaguccuucaucuggaga

SEQ ID NO: 2947069 - RNA, 19 nt, Artificial Sequence
  Description of Artificial Sequence: Synthetic oligonucleotide
uuugaucccagcacucuua

SEQ ID NO: 2947070 - RNA, 19 nt, Artificial Sequence
  Description of Artificial Sequence: Synthetic oligonucleotide
accucugcagaucugguaa

SEQ ID NO: 2947071 - RNA, 19 nt, Artificial Sequence
  Description of Artificial Sequence: Synthetic oligonucleotide
uuuguccuccacagugaag

SEQ ID NO: 2947072 - RNA, 19 nt, Artificial Sequence
  Description of Artificial Sequence: Synthetic oligonucleotide
gcaucacucaaacccagcg

SEQ ID NO: 2947073 - RNA, 19 nt, Artificial Sequence
  Description of Artificial Sequence: Synthetic oligonucleotide
ggugcacacacacacacac

SEQ ID NO: 2947074 - RNA, 19 nt, Artificial Sequence
  Description of Artificial Sequence: Synthetic oligonucleotide
gacccagggaguauggcag

SEQ ID NO: 2947075 - RNA, 19 nt, Artificial Sequence
  Description of Artificial Sequence: Synthetic oligonucleotide
aagguagaggcaggugcac

SEQ ID NO: 2947076 - RNA, 19 nt, Artificial Sequence
  Description of Artificial Sequence: Synthetic oligonucleotide
cugguaaguagugggacag

SEQ ID NO: 2947077 - RNA, 19 nt, Artificial Sequence
  Description of Artificial Sequence: Synthetic oligonucleotide
aguauggcagggcaacaga

SEQ ID NO: 2947078 - RNA, 19 nt, Artificial Sequence
  Description of Artificial Sequence: Synthetic oligonucleotide
agcacucuuaagguagagg

SEQ ID NO: 2947079 - RNA, 19 nt, Artificial Sequence
  Description of Artificial Sequence: Synthetic oligonucleotide
ugaaguccucuaucagucc

SEQ ID NO: 2947080 - RNA, 19 nt, Artificial Sequence
  Description of Artificial Sequence: Synthetic oligonucleotide
aucccagcacucuuaaggu

SEQ ID NO: 2947081 - RNA, 19 nt, Artificial Sequence
  Description of Artificial Sequence: Synthetic oligonucleotide
gagaagcaucacucaaacc

SEQ ID NO: 2947082 - RNA, 19 nt, Artificial Sequence
  Description of Artificial Sequence: Synthetic oligonucleotide
uuuuggcuggcuuggcugu

SEQ ID NO: 2947083 - RNA, 19 nt, Artificial Sequence
  Description of Artificial Sequence: Synthetic oligonucleotide
gaagcaucacucaaaccca

SEQ ID NO: 2947084 - RNA, 19 nt, Artificial Sequence
  Description of Artificial Sequence: Synthetic oligonucleotide
cuuuucgugaguuccugca

SEQ ID NO: 2947085 - RNA, 19 nt, Artificial Sequence
  Description of Artificial Sequence: Synthetic oligonucleotide
agugggacagcaggccucc

SEQ ID NO: 2947086 - RNA, 19 nt, Artificial Sequence
  Description of Artificial Sequence: Synthetic oligonucleotide
caggugcacacacacacac

SEQ ID NO: 2947087 - RNA, 19 nt, Artificial Sequence
  Description of Artificial Sequence: Synthetic oligonucleotide
cucuuaagguagaggcagg

SEQ ID NO: 2947088 - RNA, 19 nt, Artificial Sequence
  Description of Artificial Sequence: Synthetic oligonucleotide
  modified_base (16)..(16): a, c, u, g, unknown or other
cacacacacacacacngaa

SEQ ID NO: 2947089 - RNA, 19 nt, Artificial Sequence
  Description of Artificial Sequence: Synthetic oligonucleotide
uggcacaggaacacucaug

SEQ ID NO: 2947090 - RNA, 19 nt, Artificial Sequence
  Description of Artificial Sequence: Synthetic oligonucleotide
acagcucggcucucaaguc

SEQ ID NO: 2947091 - RNA, 19 nt, Artificial Sequence
  Description of Artificial Sequence: Synthetic oligonucleotide
ucugaacaacacuggggac

SEQ ID NO: 2947092 - RNA, 19 nt, Artificial Sequence
  Description of Artificial Sequence: Synthetic oligonucleotide
cauaaggcaccauccgcac

SEQ ID NO: 2947093 - RNA, 19 nt, Artificial Sequence
  Description of Artificial Sequence: Synthetic oligonucleotide
ucuuaagguagaggcaggu

SEQ ID NO: 2947094 - RNA, 19 nt, Artificial Sequence
  Description of Artificial Sequence: Synthetic oligonucleotide
caguccuucaucuggagaa

SEQ ID NO: 2947095 - RNA, 19 nt, Artificial Sequence
  Description of Artificial Sequence: Synthetic oligonucleotide
cagggcaacagacacccac

SEQ ID NO: 2947096 - RNA, 19 nt, Artificial Sequence
  Description of Artificial Sequence: Synthetic oligonucleotide
caggccucccaccaguugc

SEQ ID NO: 2947097 - RNA, 19 nt, Artificial Sequence
  Description of Artificial Sequence: Synthetic oligonucleotide
ggcaggugcacacacacac

SEQ ID NO: 2947098 - RNA, 19 nt, Artificial Sequence
  Description of Artificial Sequence: Synthetic oligonucleotide
gaguauggcagggcaacag

SEQ ID NO: 2947099 - RNA, 19 nt, Artificial Sequence
  Description of Artificial Sequence: Synthetic oligonucleotide
aggaacacucauguccccg

SEQ ID NO: 2947100 - RNA, 19 nt, Artificial Sequence
  Description of Artificial Sequence: Synthetic oligonucleotide
caacacuggggacccaggg

SEQ ID NO: 2947101 - RNA, 19 nt, Artificial Sequence
  Description of Artificial Sequence: Synthetic oligonucleotide
gcaacagacacccacagcu

SEQ ID NO: 2947102 - RNA, 19 nt, Artificial Sequence
  Description of Artificial Sequence: Synthetic oligonucleotide
accauccgcacccucucuc

SEQ ID NO: 2947103 - RNA, 19 nt, Artificial Sequence
  Description of Artificial Sequence: Synthetic oligonucleotide
uugaucccagcacucuuaa

SEQ ID NO: 2947104 - RNA, 19 nt, Artificial Sequence
  Description of Artificial Sequence: Synthetic oligonucleotide
uuccuuuucgugaguuccu

SEQ ID NO: 2947105 - RNA, 19 nt, Artificial Sequence
  Description of Artificial Sequence: Synthetic oligonucleotide
cacagugaaguccucuauc

SEQ ID NO: 2947106 - RNA, 19 nt, Artificial Sequence
  Description of Artificial Sequence: Synthetic oligonucleotide
aagcaucacucaaacccag

SEQ ID NO: 2947107 - RNA, 19 nt, Artificial Sequence
  Description of Artificial Sequence: Synthetic oligonucleotide
uuggcugucagcugcuuuu

SEQ ID NO: 2947108 - RNA, 19 nt, Artificial Sequence
  Description of Artificial Sequence: Synthetic oligonucleotide
aaguccuuuuggcuggcuu

SEQ ID NO: 2947109 - RNA, 19 nt, Artificial Sequence
  Description of Artificial Sequence: Synthetic oligonucleotide
ugcagggcuugcuucgacc

SEQ ID NO: 2947110 - RNA, 19 nt, Artificial Sequence
  Description of Artificial Sequence: Synthetic oligonucleotide
aaacccagcgugggcucgc

SEQ ID NO: 2947111 - RNA, 19 nt, Artificial Sequence
  Description of Artificial Sequence: Synthetic oligonucleotide
cagaucugguaaguagugg

SEQ ID NO: 2947112 - RNA, 19 nt, Artificial Sequence
  Description of Artificial Sequence: Synthetic oligonucleotide
  modified_base (10)..(10): a, c, u, g, unknown or other
cacacacacngaaagagau

SEQ ID NO: 2947113 - RNA, 19 nt, Artificial Sequence
  Description of Artificial Sequence: Synthetic oligonucleotide
  modified_base (3)..(3): a, c, u, g, unknown or other
acngaaagagauagagaga

SEQ ID NO: 2947114 - RNA, 19 nt, Artificial Sequence
  Description of Artificial Sequence: Synthetic oligonucleotide
acacccacagcucggcucu

SEQ ID NO: 2947115 - RNA, 19 nt, Artificial Sequence
  Description of Artificial Sequence: Synthetic oligonucleotide
guaaguagugggacagcag

SEQ ID NO: 2947116 - RNA, 19 nt, Artificial Sequence
  Description of Artificial Sequence: Synthetic oligonucleotide
uccacagugaaguccucua

SEQ ID NO: 2947117 - RNA, 19 nt, Artificial Sequence
  Description of Artificial Sequence: Synthetic oligonucleotide
ugucggaggucccggucag

SEQ ID NO: 2947118 - RNA, 19 nt, Artificial Sequence
  Description of Artificial Sequence: Synthetic oligonucleotide
cucuuucaaauuccuuuuc

SEQ ID NO: 2947119 - RNA, 19 nt, Artificial Sequence
  Description of Artificial Sequence: Synthetic oligonucleotide
cuuucaaauuccuuuucgu

SEQ ID NO: 2947120 - RNA, 19 nt, Artificial Sequence
  Description of Artificial Sequence: Synthetic oligonucleotide
ggcauaaggcaccauccgc

SEQ ID NO: 2947121 - RNA, 19 nt, Artificial Sequence
  Description of Artificial Sequence: Synthetic oligonucleotide
aucaguccuucaucuggag

SEQ ID NO: 2947122 - RNA, 19 nt, Artificial Sequence
  Description of Artificial Sequence: Synthetic oligonucleotide
cagugaaguccucuaucag

SEQ ID NO: 2947123 - RNA, 19 nt, Artificial Sequence
  Description of Artificial Sequence: Synthetic oligonucleotide
cccagcacucuuaagguag

SEQ ID NO: 2947124 - RNA, 19 nt, Artificial Sequence
  Description of Artificial Sequence: Synthetic oligonucleotide
gacagcaggccucccacca

SEQ ID NO: 2947125 - RNA, 19 nt, Artificial Sequence
  Description of Artificial Sequence: Synthetic oligonucleotide
gaucugguaaguaguggga

SEQ ID NO: 2947126 - RNA, 19 nt, Artificial Sequence
  Description of Artificial Sequence: Synthetic oligonucleotide
cacucaaacccagcguggg

SEQ ID NO: 2947127 - RNA, 19 nt, Artificial Sequence
  Description of Artificial Sequence: Synthetic oligonucleotide
gaaguccucuaucaguccu

SEQ ID NO: 2947128 - RNA, 19 nt, Artificial Sequence
  Description of Artificial Sequence: Synthetic oligonucleotide
cuuaagguagaggcaggug

SEQ ID NO: 2947129 - RNA, 19 nt, Artificial Sequence
  Description of Artificial Sequence: Synthetic oligonucleotide
gacacccacagcucggcuc

SEQ ID NO: 2947130 - RNA, 19 nt, Artificial Sequence
  Description of Artificial Sequence: Synthetic oligonucleotide
aguccucuaucaguccuuc

SEQ ID NO: 2947131 - RNA, 19 nt, Artificial Sequence
  Description of Artificial Sequence: Synthetic oligonucleotide
agauagagagaaggcauaa

SEQ ID NO: 2947132 - RNA, 19 nt, Artificial Sequence
  Description of Artificial Sequence: Synthetic oligonucleotide
  modified_base (5)..(5): a, c, u, g, unknown or other
acacngaaagagauagaga

SEQ ID NO: 2947133 - RNA, 19 nt, Artificial Sequence
  Description of Artificial Sequence: Synthetic oligonucleotide
ggcagggcaacagacaccc

SEQ ID NO: 2947134 - RNA, 19 nt, Artificial Sequence
  Description of Artificial Sequence: Synthetic oligonucleotide
ggcucucaaguccuuuugg

SEQ ID NO: 2947135 - RNA, 19 nt, Artificial Sequence
  Description of Artificial Sequence: Synthetic oligonucleotide
guccuuuuggcuggcuugg

SEQ ID NO: 2947136 - RNA, 19 nt, Artificial Sequence
  Description of Artificial Sequence: Synthetic oligonucleotide
uugcuucgaccucugcaga

SEQ ID NO: 2947137 - RNA, 19 nt, Artificial Sequence
  Description of Artificial Sequence: Synthetic oligonucleotide
uccuuuucgugaguuccug

SEQ ID NO: 2947138 - RNA, 19 nt, Artificial Sequence
  Description of Artificial Sequence: Synthetic oligonucleotide
ggaggucccggucaggagc

SEQ ID NO: 2947139 - RNA, 19 nt, Artificial Sequence
  Description of Artificial Sequence: Synthetic oligonucleotide
ugaucccagcacucuuaag

SEQ ID NO: 2947140 - RNA, 19 nt, Artificial Sequence
  Description of Artificial Sequence: Synthetic oligonucleotide
ugggacagcaggccuccca

SEQ ID NO: 2947141 - RNA, 19 nt, Artificial Sequence
  Description of Artificial Sequence: Synthetic oligonucleotide
gcucucaaguccuuuuggc

SEQ ID NO: 2947142 - RNA, 19 nt, Artificial Sequence
  Description of Artificial Sequence: Synthetic oligonucleotide
cagcucggcucucaagucc

SEQ ID NO: 2947143 - RNA, 19 nt, Artificial Sequence
  Description of Artificial Sequence: Synthetic oligonucleotide
aguugcuccacagcuuugu

SEQ ID NO: 2947144 - RNA, 19 nt, Artificial Sequence
  Description of Artificial Sequence: Synthetic oligonucleotide
uagugggacagcaggccuc

SEQ ID NO: 2947145 - RNA, 19 nt, Artificial Sequence
  Description of Artificial Sequence: Synthetic oligonucleotide
uggcagggcaacagacacc

SEQ ID NO: 2947146 - RNA, 19 nt, Artificial Sequence
  Description of Artificial Sequence: Synthetic oligonucleotide
caacagacacccacagcuc

SEQ ID NO: 2947147 - RNA, 19 nt, Artificial Sequence
  Description of Artificial Sequence: Synthetic oligonucleotide
gucaggagcccguccgggg

SEQ ID NO: 2947148 - RNA, 19 nt, Artificial Sequence
  Description of Artificial Sequence: Synthetic oligonucleotide
ggaacacucauguccccgc

SEQ ID NO: 2947149 - RNA, 19 nt, Artificial Sequence
  Description of Artificial Sequence: Synthetic oligonucleotide
cacucuuaagguagaggca

SEQ ID NO: 2947150 - RNA, 19 nt, Artificial Sequence
  Description of Artificial Sequence: Synthetic oligonucleotide
acagacacccacagcucgg

SEQ ID NO: 2947151 - RNA, 19 nt, Artificial Sequence
  Description of Artificial Sequence: Synthetic oligonucleotide
acccagggaguauggcagg

SEQ ID NO: 2947152 - RNA, 19 nt, Artificial Sequence
  Description of Artificial Sequence: Synthetic oligonucleotide
cucuaucaguccuucaucu

SEQ ID NO: 2947153 - RNA, 19 nt, Artificial Sequence
  Description of Artificial Sequence: Synthetic oligonucleotide
cugcuuuucucuuucaaau

SEQ ID NO: 2947154 - RNA, 19 nt, Artificial Sequence
  Description of Artificial Sequence: Synthetic oligonucleotide
agcugcuuuucucuuucaa

SEQ ID NO: 2947155 - RNA, 19 nt, Artificial Sequence
  Description of Artificial Sequence: Synthetic oligonucleotide
ggcacaggaacacucaugu

SEQ ID NO: 2947156 - RNA, 19 nt, Artificial Sequence
  Description of Artificial Sequence: Synthetic oligonucleotide
ucugcagaucugguaagua

SEQ ID NO: 2947157 - RNA, 19 nt, Artificial Sequence
  Description of Artificial Sequence: Synthetic oligonucleotide
cuccacagcuuuguccucc

SEQ ID NO: 2947158 - RNA, 19 nt, Artificial Sequence
  Description of Artificial Sequence: Synthetic oligonucleotide
  modified_base (13)..(13): a, c, u, g, unknown or other
acacacacacacngaaaga

SEQ ID NO: 2947159 - RNA, 19 nt, Artificial Sequence
  Description of Artificial Sequence: Synthetic oligonucleotide
gguaaguagugggacagca

SEQ ID NO: 2947160 - RNA, 19 nt, Artificial Sequence
  Description of Artificial Sequence: Synthetic oligonucleotide
ucggaggucccggucagga

SEQ ID NO: 2947161 - RNA, 19 nt, Artificial Sequence
  Description of Artificial Sequence: Synthetic oligonucleotide
ugcuucgaccucugcagau

SEQ ID NO: 2947162 - RNA, 19 nt, Artificial Sequence
  Description of Artificial Sequence: Synthetic oligonucleotide
cacagcuuuguccuccaca

SEQ ID NO: 2947163 - RNA, 19 nt, Artificial Sequence
  Description of Artificial Sequence: Synthetic oligonucleotide
guccuccacagugaagucc

SEQ ID NO: 2947164 - RNA, 19 nt, Artificial Sequence
  Description of Artificial Sequence: Synthetic oligonucleotide
gagauagagagaaggcaua

SEQ ID NO: 2947165 - RNA, 19 nt, Artificial Sequence
  Description of Artificial Sequence: Synthetic oligonucleotide
ugaguuccugcagggcuug

SEQ ID NO: 2947166 - RNA, 19 nt, Artificial Sequence
  Description of Artificial Sequence: Synthetic oligonucleotide
uucgaccucugcagaucug

SEQ ID NO: 2947167 - RNA, 19 nt, Artificial Sequence
  Description of Artificial Sequence: Synthetic oligonucleotide
gaggucccggucaggagcc

SEQ ID NO: 2947168 - RNA, 19 nt, Artificial Sequence
  Description of Artificial Sequence: Synthetic oligonucleotide
ggggcgguggcacaggaac

SEQ ID NO: 2947169 - RNA, 19 nt, Artificial Sequence
  Description of Artificial Sequence: Synthetic oligonucleotide
uccacagcuuuguccucca

SEQ ID NO: 2947170 - RNA, 19 nt, Artificial Sequence
  Description of Artificial Sequence: Synthetic oligonucleotide
ugguaaguagugggacagc

SEQ ID NO: 2947171 - RNA, 19 nt, Artificial Sequence
  Description of Artificial Sequence: Synthetic oligonucleotide
uggggacccagggaguaug

SEQ ID NO: 2947172 - RNA, 19 nt, Artificial Sequence
  Description of Artificial Sequence: Synthetic oligonucleotide
aacccagcgugggcucgcc

SEQ ID NO: 2947173 - RNA, 19 nt, Artificial Sequence
  Description of Artificial Sequence: Synthetic oligonucleotide
cucgccggccuccaggcug

SEQ ID NO: 2947174 - RNA, 19 nt, Artificial Sequence
  Description of Artificial Sequence: Synthetic oligonucleotide
agggcuugcuucgaccucu

SEQ ID NO: 2947175 - RNA, 19 nt, Artificial Sequence
  Description of Artificial Sequence: Synthetic oligonucleotide
cagggaguauggcagggca

SEQ ID NO: 2947176 - RNA, 19 nt, Artificial Sequence
  Description of Artificial Sequence: Synthetic oligonucleotide
ugucagcugcuuuucucuu

SEQ ID NO: 2947177 - RNA, 19 nt, Artificial Sequence
  Description of Artificial Sequence: Synthetic oligonucleotide
uccgcacccucucucugaa

SEQ ID NO: 2947178 - RNA, 19 nt, Artificial Sequence
  Description of Artificial Sequence: Synthetic oligonucleotide
gcuugcuucgaccucugca

SEQ ID NO: 2947179 - RNA, 19 nt, Artificial Sequence
  Description of Artificial Sequence: Synthetic oligonucleotide
caggaacacucaugucccc

SEQ ID NO: 2947180 - RNA, 19 nt, Artificial Sequence
  Description of Artificial Sequence: Synthetic oligonucleotide
cucucaaguccuuuuggcu

SEQ ID NO: 2947181 - RNA, 19 nt, Artificial Sequence
  Description of Artificial Sequence: Synthetic oligonucleotide
guccuucaucuggagaagc

SEQ ID NO: 2947182 - RNA, 19 nt, Artificial Sequence
  Description of Artificial Sequence: Synthetic oligonucleotide
ucccagcacucuuaaggua

SEQ ID NO: 2947183 - RNA, 19 nt, Artificial Sequence
  Description of Artificial Sequence: Synthetic oligonucleotide
gagaaggcauaaggcacca

SEQ ID NO: 2947184 - RNA, 19 nt, Artificial Sequence
  Description of Artificial Sequence: Synthetic oligonucleotide
cuuuguccuccacagugaa

SEQ ID NO: 2947185 - RNA, 19 nt, Artificial Sequence
  Description of Artificial Sequence: Synthetic oligonucleotide
cacagcucggcucucaagu

SEQ ID NO: 2947186 - RNA, 19 nt, Artificial Sequence
  Description of Artificial Sequence: Synthetic oligonucleotide
auccgcacccucucucuga

SEQ ID NO: 2947187 - RNA, 19 nt, Artificial Sequence
  Description of Artificial Sequence: Synthetic oligonucleotide
ucgugaguuccugcagggc

SEQ ID NO: 2947188 - RNA, 19 nt, Artificial Sequence
  Description of Artificial Sequence: Synthetic oligonucleotide
gggcaacagacacccacag

SEQ ID NO: 2947189 - RNA, 19 nt, Artificial Sequence
  Description of Artificial Sequence: Synthetic oligonucleotide
gcauaaggcaccauccgca

SEQ ID NO: 2947190 - RNA, 19 nt, Artificial Sequence
  Description of Artificial Sequence: Synthetic oligonucleotide
gcagaucugguaaguagug

SEQ ID NO: 2947191 - RNA, 19 nt, Artificial Sequence
  Description of Artificial Sequence: Synthetic oligonucleotide
ggacccagggaguauggca

SEQ ID NO: 2947192 - RNA, 19 nt, Artificial Sequence
  Description of Artificial Sequence: Synthetic oligonucleotide
cugucagcugcuuuucucu

SEQ ID NO: 2947193 - RNA, 19 nt, Artificial Sequence
  Description of Artificial Sequence: Synthetic oligonucleotide
guugcuccacagcuuuguc

SEQ ID NO: 2947194 - RNA, 19 nt, Artificial Sequence
  Description of Artificial Sequence: Synthetic oligonucleotide
  modified_base (7)..(7): a, c, u, g, unknown or other
acacacngaaagagauaga

SEQ ID NO: 2947195 - RNA, 19 nt, Artificial Sequence
  Description of Artificial Sequence: Synthetic oligonucleotide
agggcaacagacacccaca

SEQ ID NO: 2947196 - RNA, 19 nt, Artificial Sequence
  Description of Artificial Sequence: Synthetic oligonucleotide
ucaaguccuuuuggcuggc

SEQ ID NO: 2947197 - RNA, 19 nt, Artificial Sequence
  Description of Artificial Sequence: Synthetic oligonucleotide
cuggcuuggcugucagcug

SEQ ID NO: 2947198 - RNA, 19 nt, Artificial Sequence
  Description of Artificial Sequence: Synthetic oligonucleotide
caggcugucggaggucccg

SEQ ID NO: 2947199 - RNA, 19 nt, Artificial Sequence
  Description of Artificial Sequence: Synthetic oligonucleotide
cagacacccacagcucggc

SEQ ID NO: 2947200 - RNA, 19 nt, Artificial Sequence
  Description of Artificial Sequence: Synthetic oligonucleotide
ggcaacagacacccacagc

SEQ ID NO: 2947201 - RNA, 19 nt, Artificial Sequence
  Description of Artificial Sequence: Synthetic oligonucleotide
aaguccucuaucaguccuu

SEQ ID NO: 2947202 - RNA, 19 nt, Artificial Sequence
  Description of Artificial Sequence: Synthetic oligonucleotide
gcugucagcugcuuuucuc

SEQ ID NO: 2947203 - RNA, 19 nt, Artificial Sequence
  Description of Artificial Sequence: Synthetic oligonucleotide
gaccucugcagaucuggua

SEQ ID NO: 2947204 - RNA, 19 nt, Artificial Sequence
  Description of Artificial Sequence: Synthetic oligonucleotide
gggaguauggcagggcaac

SEQ ID NO: 2947205 - RNA, 19 nt, Artificial Sequence
  Description of Artificial Sequence: Synthetic oligonucleotide
cugucggaggucccgguca

SEQ ID NO: 2947206 - RNA, 19 nt, Artificial Sequence
  Description of Artificial Sequence: Synthetic oligonucleotide
aguuccugcagggcuugcu

SEQ ID NO: 2947207 - RNA, 19 nt, Artificial Sequence
  Description of Artificial Sequence: Synthetic oligonucleotide
ccuuuucgugaguuccugc

SEQ ID NO: 2947208 - RNA, 19 nt, Artificial Sequence
  Description of Artificial Sequence: Synthetic oligonucleotide
  modified_base (17)..(17): a, c, u, g, unknown or other
acacacacacacacacnga

SEQ ID NO: 2947209 - RNA, 19 nt, Artificial Sequence
  Description of Artificial Sequence: Synthetic oligonucleotide
agcucggcucucaaguccu

SEQ ID NO: 2947210 - RNA, 19 nt, Artificial Sequence
  Description of Artificial Sequence: Synthetic oligonucleotide
guagugggacagcaggccu

SEQ ID NO: 2947211 - RNA, 19 nt, Artificial Sequence
  Description of Artificial Sequence: Synthetic oligonucleotide
caucuggagaagcaucacu

SEQ ID NO: 2947212 - RNA, 19 nt, Artificial Sequence
  Description of Artificial Sequence: Synthetic oligonucleotide
cacccucucucugaacaac

SEQ ID NO: 2947213 - RNA, 19 nt, Artificial Sequence
  Description of Artificial Sequence: Synthetic oligonucleotide
uccuuuuggcuggcuuggc

SEQ ID NO: 2947214 - RNA, 19 nt, Artificial Sequence
  Description of Artificial Sequence: Synthetic oligonucleotide
agacacccacagcucggcu

SEQ ID NO: 2947215 - RNA, 19 nt, Artificial Sequence
  Description of Artificial Sequence: Synthetic oligonucleotide
cauccgcacccucucucug

SEQ ID NO: 2947216 - RNA, 19 nt, Artificial Sequence
  Description of Artificial Sequence: Synthetic oligonucleotide
  modified_base (15)..(15): a, c, u, g, unknown or other
acacacacacacacngaaa

SEQ ID NO: 2947217 - RNA, 19 nt, Artificial Sequence
  Description of Artificial Sequence: Synthetic oligonucleotide
caucacucaaacccagcgu

SEQ ID NO: 2947218 - RNA, 19 nt, Artificial Sequence
  Description of Artificial Sequence: Synthetic oligonucleotide
caguugcuccacagcuuug

SEQ ID NO: 2947219 - RNA, 19 nt, Artificial Sequence
  Description of Artificial Sequence: Synthetic oligonucleotide
ucgccggccuccaggcugu

SEQ ID NO: 2947220 - RNA, 19 nt, Artificial Sequence
  Description of Artificial Sequence: Synthetic oligonucleotide
  modified_base (9)..(9): a, c, u, g, unknown or other
acacacacngaaagagaua

SEQ ID NO: 2947221 - RNA, 19 nt, Artificial Sequence
  Description of Artificial Sequence: Synthetic oligonucleotide
aggcugucggaggucccgg

SEQ ID NO: 2947222 - RNA, 19 nt, Artificial Sequence
  Description of Artificial Sequence: Synthetic oligonucleotide
gccuccaggcugucggagg

SEQ ID NO: 2947223 - RNA, 19 nt, Artificial Sequence
  Description of Artificial Sequence: Synthetic oligonucleotide
cagcacucuuaagguagag

SEQ ID NO: 2947224 - RNA, 19 nt, Artificial Sequence
  Description of Artificial Sequence: Synthetic oligonucleotide
cccagcgugggcucgccgg

SEQ ID NO: 2947225 - RNA, 19 nt, Artificial Sequence
  Description of Artificial Sequence: Synthetic oligonucleotide
cuucgaccucugcagaucu

SEQ ID NO: 2947226 - RNA, 19 nt, Artificial Sequence
  Description of Artificial Sequence: Synthetic oligonucleotide
ggucaggagcccguccggg

SEQ ID NO: 2947227 - RNA, 19 nt, Artificial Sequence
  Description of Artificial Sequence: Synthetic oligonucleotide
uuuggcuggcuuggcuguc

SEQ ID NO: 2947228 - RNA, 19 nt, Artificial Sequence
  Description of Artificial Sequence: Synthetic oligonucleotide
ccucugcagaucugguaag

SEQ ID NO: 2947229 - RNA, 19 nt, Artificial Sequence
  Description of Artificial Sequence: Synthetic oligonucleotide
agaggcaggugcacacaca

SEQ ID NO: 2947230 - RNA, 19 nt, Artificial Sequence
  Description of Artificial Sequence: Synthetic oligonucleotide
acccagcgugggcucgccg

SEQ ID NO: 2947231 - RNA, 19 nt, Artificial Sequence
  Description of Artificial Sequence: Synthetic oligonucleotide
gguggcacaggaacacuca

SEQ ID NO: 2947232 - RNA, 19 nt, Artificial Sequence
  Description of Artificial Sequence: Synthetic oligonucleotide
agcgugggcucgccggccu

SEQ ID NO: 2947233 - RNA, 19 nt, Artificial Sequence
  Description of Artificial Sequence: Synthetic oligonucleotide
acuggggacccagggagua

SEQ ID NO: 2947234 - RNA, 19 nt, Artificial Sequence
  Description of Artificial Sequence: Synthetic oligonucleotide
aggugcacacacacacaca

SEQ ID NO: 2947235 - RNA, 19 nt, Artificial Sequence
  Description of Artificial Sequence: Synthetic oligonucleotide
gggcucgccggccuccagg

SEQ ID NO: 2947236 - RNA, 19 nt, Artificial Sequence
  Description of Artificial Sequence: Synthetic oligonucleotide
gcuggcuuggcugucagcu

SEQ ID NO: 2947237 - RNA, 19 nt, Artificial Sequence
  Description of Artificial Sequence: Synthetic oligonucleotide
ggcucgccggccuccaggc

SEQ ID NO: 2947238 - RNA, 19 nt, Artificial Sequence
  Description of Artificial Sequence: Synthetic oligonucleotide
cugcagggcuugcuucgac

SEQ ID NO: 2947239 - RNA, 19 nt, Artificial Sequence
  Description of Artificial Sequence: Synthetic oligonucleotide
cccucucucugaacaacac

SEQ ID NO: 2947240 - RNA, 19 nt, Artificial Sequence
  Description of Artificial Sequence: Synthetic oligonucleotide
ggacagcaggccucccacc

SEQ ID NO: 2947241 - RNA, 19 nt, Artificial Sequence
  Description of Artificial Sequence: Synthetic oligonucleotide
cagggcuugcuucgaccuc

SEQ ID NO: 2947242 - RNA, 19 nt, Artificial Sequence
  Description of Artificial Sequence: Synthetic oligonucleotide
agggaguauggcagggcaa

SEQ ID NO: 2947243 - RNA, 19 nt, Artificial Sequence
  Description of Artificial Sequence: Synthetic oligonucleotide
ggcgguggcacaggaacac

SEQ ID NO: 2947244 - RNA, 19 nt, Artificial Sequence
  Description of Artificial Sequence: Synthetic oligonucleotide
guccucuaucaguccuuca

SEQ ID NO: 2947245 - RNA, 19 nt, Artificial Sequence
  Description of Artificial Sequence: Synthetic oligonucleotide
gcuuuguccuccacaguga

SEQ ID NO: 2947246 - RNA, 19 nt, Artificial Sequence
  Description of Artificial Sequence: Synthetic oligonucleotide
gccucccaccaguugcucc

SEQ ID NO: 2947247 - RNA, 19 nt, Artificial Sequence
  Description of Artificial Sequence: Synthetic oligonucleotide
gugcacacacacacacaca

SEQ ID NO: 2947248 - RNA, 19 nt, Artificial Sequence
  Description of Artificial Sequence: Synthetic oligonucleotide
ugggcucgccggccuccag

SEQ ID NO: 2947249 - RNA, 19 nt, Artificial Sequence
  Description of Artificial Sequence: Synthetic oligonucleotide
caaauuccuuuucgugagu

SEQ ID NO: 2947250 - RNA, 19 nt, Artificial Sequence
  Description of Artificial Sequence: Synthetic oligonucleotide
aggucccggucaggagccc

SEQ ID NO: 2947251 - RNA, 19 nt, Artificial Sequence
  Description of Artificial Sequence: Synthetic oligonucleotide
ggucccggucaggagcccg

SEQ ID NO: 2947252 - RNA, 19 nt, Artificial Sequence
  Description of Artificial Sequence: Synthetic oligonucleotide
guuccugcagggcuugcuu

SEQ ID NO: 2947253 - RNA, 19 nt, Artificial Sequence
  Description of Artificial Sequence: Synthetic oligonucleotide
ccucccaccaguugcucca

SEQ ID NO: 2947254 - RNA, 19 nt, Artificial Sequence
  Description of Artificial Sequence: Synthetic oligonucleotide
gcuucgaccucugcagauc

SEQ ID NO: 2947255 - RNA, 19 nt, Artificial Sequence
  Description of Artificial Sequence: Synthetic oligonucleotide
agaaggcauaaggcaccau

SEQ ID NO: 2947256 - RNA, 19 nt, Artificial Sequence
  Description of Artificial Sequence: Synthetic oligonucleotide
gcagggcuugcuucgaccu

SEQ ID NO: 2947257 - RNA, 19 nt, Artificial Sequence
  Description of Artificial Sequence: Synthetic oligonucleotide
gucggaggucccggucagg

SEQ ID NO: 2947258 - RNA, 19 nt, Artificial Sequence
  Description of Artificial Sequence: Synthetic oligonucleotide
aggccucccaccaguugcu

SEQ ID NO: 2947259 - RNA, 19 nt, Artificial Sequence
  Description of Artificial Sequence: Synthetic oligonucleotide
guggcacaggaacacucau

SEQ ID NO: 2947260 - RNA, 19 nt, Artificial Sequence
  Description of Artificial Sequence: Synthetic oligonucleotide
cgcacccucucucugaaca

SEQ ID NO: 2947261 - RNA, 19 nt, Artificial Sequence
  Description of Artificial Sequence: Synthetic oligonucleotide
aggcaggugcacacacaca

SEQ ID NO: 2947262 - RNA, 19 nt, Artificial Sequence
  Description of Artificial Sequence: Synthetic oligonucleotide
ccacagcucggcucucaag

SEQ ID NO: 2947263 - RNA, 19 nt, Artificial Sequence
  Description of Artificial Sequence: Synthetic oligonucleotide
gcaggccucccaccaguug

SEQ ID NO: 2947264 - RNA, 19 nt, Artificial Sequence
  Description of Artificial Sequence: Synthetic oligonucleotide
cccagggaguauggcaggg

SEQ ID NO: 2947265 - RNA, 19 nt, Artificial Sequence
  Description of Artificial Sequence: Synthetic oligonucleotide
ggaguauggcagggcaaca

SEQ ID NO: 2947266 - RNA, 19 nt, Artificial Sequence
  Description of Artificial Sequence: Synthetic oligonucleotide
gcugucggaggucccgguc

SEQ ID NO: 2947267 - RNA, 19 nt, Artificial Sequence
  Description of Artificial Sequence: Synthetic oligonucleotide
  modified_base (19)..(19): a, c, u, g, unknown or other
gcacacacacacacacacn

SEQ ID NO: 2947268 - RNA, 19 nt, Artificial Sequence
  Description of Artificial Sequence: Synthetic oligonucleotide
ccagcgugggcucgccggc

SEQ ID NO: 2947269 - RNA, 19 nt, Artificial Sequence
  Description of Artificial Sequence: Synthetic oligonucleotide
acccacagcucggcucuca

SEQ ID NO: 2947270 - RNA, 19 nt, Artificial Sequence
  Description of Artificial Sequence: Synthetic oligonucleotide
ggcuugcuucgaccucugc

SEQ ID NO: 2947271 - RNA, 19 nt, Artificial Sequence
  Description of Artificial Sequence: Synthetic oligonucleotide
cucccaccaguugcuccac

SEQ ID NO: 2947272 - RNA, 19 nt, Artificial Sequence
  Description of Artificial Sequence: Synthetic oligonucleotide
cgguggcacaggaacacuc

SEQ ID NO: 2947273 - RNA, 19 nt, Artificial Sequence
  Description of Artificial Sequence: Synthetic oligonucleotide
ccagcacucuuaagguaga

SEQ ID NO: 2947274 - RNA, 19 nt, Artificial Sequence
  Description of Artificial Sequence: Synthetic oligonucleotide
ggcuggcuuggcugucagc

SEQ ID NO: 2947275 - RNA, 19 nt, Artificial Sequence
  Description of Artificial Sequence: Synthetic oligonucleotide
ggccuccaggcugucggag

SEQ ID NO: 2947276 - RNA, 19 nt, Artificial Sequence
  Description of Artificial Sequence: Synthetic oligonucleotide
gaacaacacuggggaccca

SEQ ID NO: 2947277 - RNA, 19 nt, Artificial Sequence
  Description of Artificial Sequence: Synthetic oligonucleotide
cagcgugggcucgccggcc

SEQ ID NO: 2947278 - RNA, 19 nt, Artificial Sequence
  Description of Artificial Sequence: Synthetic oligonucleotide
gcacccucucucugaacaa

SEQ ID NO: 2947279 - RNA, 19 nt, Artificial Sequence
  Description of Artificial Sequence: Synthetic oligonucleotide
gcaggugcacacacacaca

SEQ ID NO: 2947280 - RNA, 19 nt, Artificial Sequence
  Description of Artificial Sequence: Synthetic oligonucleotide
cuuggcugucagcugcuuu

SEQ ID NO: 2947281 - RNA, 19 nt, Artificial Sequence
  Description of Artificial Sequence: Synthetic oligonucleotide
gugaguuccugcagggcuu

SEQ ID NO: 2947282 - RNA, 19 nt, Artificial Sequence
  Description of Artificial Sequence: Synthetic oligonucleotide
cuccaggcugucggagguc

SEQ ID NO: 2947283 - RNA, 19 nt, Artificial Sequence
  Description of Artificial Sequence: Synthetic oligonucleotide
cgugaguuccugcagggcu

SEQ ID NO: 2947284 - RNA, 19 nt, Artificial Sequence
  Description of Artificial Sequence: Synthetic oligonucleotide
ucccggucaggagcccguc

SEQ ID NO: 2947285 - RNA, 19 nt, Artificial Sequence
  Description of Artificial Sequence: Synthetic oligonucleotide
cagcaggccucccaccagu

SEQ ID NO: 2947286 - RNA, 19 nt, Artificial Sequence
  Description of Artificial Sequence: Synthetic oligonucleotide
ccaggcugucggagguccc

SEQ ID NO: 2947287 - RNA, 19 nt, Artificial Sequence
  Description of Artificial Sequence: Synthetic oligonucleotide
agcaggccucccaccaguu

SEQ ID NO: 2947288 - RNA, 19 nt, Artificial Sequence
  Description of Artificial Sequence: Synthetic oligonucleotide
cacuggggacccagggagu

SEQ ID NO: 2947289 - RNA, 19 nt, Artificial Sequence
  Description of Artificial Sequence: Synthetic oligonucleotide
ccucucucugaacaacacu

SEQ ID NO: 2947290 - RNA, 19 nt, Artificial Sequence
  Description of Artificial Sequence: Synthetic oligonucleotide
ccaguugcuccacagcuuu

SEQ ID NO: 2947291 - RNA, 19 nt, Artificial Sequence
  Description of Artificial Sequence: Synthetic oligonucleotide
gcuccacagcuuuguccuc

SEQ ID NO: 2947292 - RNA, 19 nt, Artificial Sequence
  Description of Artificial Sequence: Synthetic oligonucleotide
cggucaggagcccguccgg

SEQ ID NO: 2947293 - RNA, 19 nt, Artificial Sequence
  Description of Artificial Sequence: Synthetic oligonucleotide
gugggacagcaggccuccc

SEQ ID NO: 2947294 - RNA, 19 nt, Artificial Sequence
  Description of Artificial Sequence: Synthetic oligonucleotide
gggcgguggcacaggaaca

SEQ ID NO: 2947295 - RNA, 19 nt, Artificial Sequence
  Description of Artificial Sequence: Synthetic oligonucleotide
cagcuuuguccuccacagu

SEQ ID NO: 2947296 - RNA, 19 nt, Artificial Sequence
  Description of Artificial Sequence: Synthetic oligonucleotide
ccuuuuggcuggcuuggcu

SEQ ID NO: 2947297 - RNA, 19 nt, Artificial Sequence
  Description of Artificial Sequence: Synthetic oligonucleotide
gggcuugcuucgaccucug

SEQ ID NO: 2947298 - RNA, 19 nt, Artificial Sequence
  Description of Artificial Sequence: Synthetic oligonucleotide
ccacagcuuuguccuccac

SEQ ID NO: 2947299 - RNA, 19 nt, Artificial Sequence
  Description of Artificial Sequence: Synthetic oligonucleotide
ccuucaucuggagaagcau

SEQ ID NO: 2947300 - RNA, 19 nt, Artificial Sequence
  Description of Artificial Sequence: Synthetic oligonucleotide
caccauccgcacccucucu

SEQ ID NO: 2947301 - RNA, 19 nt, Artificial Sequence
  Description of Artificial Sequence: Synthetic oligonucleotide
ccauccgcacccucucucu

SEQ ID NO: 2947302 - RNA, 19 nt, Artificial Sequence
  Description of Artificial Sequence: Synthetic oligonucleotide
gugggcucgccggccucca

SEQ ID NO: 2947303 - RNA, 19 nt, Artificial Sequence
  Description of Artificial Sequence: Synthetic oligonucleotide
ccuccaggcugucggaggu

SEQ ID NO: 2947304 - RNA, 19 nt, Artificial Sequence
  Description of Artificial Sequence: Synthetic oligonucleotide
ccacagugaaguccucuau

SEQ ID NO: 2947305 - RNA, 19 nt, Artificial Sequence
  Description of Artificial Sequence: Synthetic oligonucleotide
gucccggucaggagcccgu

SEQ ID NO: 2947306 - RNA, 19 nt, Artificial Sequence
  Description of Artificial Sequence: Synthetic oligonucleotide
caaguccuuuuggcuggcu

SEQ ID NO: 2947307 - RNA, 19 nt, Artificial Sequence
  Description of Artificial Sequence: Synthetic oligonucleotide
cacccacagcucggcucuc

SEQ ID NO: 2947308 - RNA, 19 nt, Artificial Sequence
  Description of Artificial Sequence: Synthetic oligonucleotide
cgugggcucgccggccucc

SEQ ID NO: 2947309 - RNA, 19 nt, Artificial Sequence
  Description of Artificial Sequence: Synthetic oligonucleotide
ggcugucggaggucccggu

SEQ ID NO: 2947310 - RNA, 19 nt, Artificial Sequence
  Description of Artificial Sequence: Synthetic oligonucleotide
ccgcacccucucucugaac

SEQ ID NO: 2947311 - RNA, 19 nt, Artificial Sequence
  Description of Artificial Sequence: Synthetic oligonucleotide
ggccucccaccaguugcuc

SEQ ID NO: 2947312 - RNA, 19 nt, Artificial Sequence
  Description of Artificial Sequence: Synthetic oligonucleotide
cccacagcucggcucucaa

SEQ ID NO: 2947313 - RNA, 19 nt, Artificial Sequence
  Description of Artificial Sequence: Synthetic oligonucleotide
ggcuuggcugucagcugcu

SEQ ID NO: 2947314 - RNA, 19 nt, Artificial Sequence
  Description of Artificial Sequence: Synthetic oligonucleotide
gcgugggcucgccggccuc

SEQ ID NO: 2947315 - RNA, 19 nt, Artificial Sequence
  Description of Artificial Sequence: Synthetic oligonucleotide
cuggggacccagggaguau

SEQ ID NO: 2947316 - RNA, 19 nt, Artificial Sequence
  Description of Artificial Sequence: Synthetic oligonucleotide
gcgguggcacaggaacacu

SEQ ID NO: 2947317 - RNA, 19 nt, Artificial Sequence
  Description of Artificial Sequence: Synthetic oligonucleotide
cgaccucugcagaucuggu

SEQ ID NO: 2947318 - RNA, 19 nt, Artificial Sequence
  Description of Artificial Sequence: Synthetic oligonucleotide
gcucgccggccuccaggcu

SEQ ID NO: 2947319 - RNA, 19 nt, Artificial Sequence
  Description of Artificial Sequence: Synthetic oligonucleotide
cggccuccaggcugucgga

SEQ ID NO: 2947320 - RNA, 19 nt, Artificial Sequence
  Description of Artificial Sequence: Synthetic oligonucleotide
gcucggcucucaaguccuu

SEQ ID NO: 2947321 - RNA, 19 nt, Artificial Sequence
  Description of Artificial Sequence: Synthetic oligonucleotide
aagauauaagcuuauuuuc

SEQ ID NO: 2947322 - RNA, 19 nt, Artificial Sequence
  Description of Artificial Sequence: Synthetic oligonucleotide
uuuucuuccaaauggauag

SEQ ID NO: 2947323 - RNA, 19 nt, Artificial Sequence
  Description of Artificial Sequence: Synthetic oligonucleotide
aacagcaugaugcugagca

SEQ ID NO: 2947324 - RNA, 19 nt, Artificial Sequence
  Description of Artificial Sequence: Synthetic oligonucleotide
ucaacaaggacuaacuuac

SEQ ID NO: 2947325 - RNA, 19 nt, Artificial Sequence
  Description of Artificial Sequence: Synthetic oligonucleotide
aacaaggacuaacuuacac

SEQ ID NO: 2947326 - RNA, 19 nt, Artificial Sequence
  Description of Artificial Sequence: Synthetic oligonucleotide
aauggauagcuauuucaac

SEQ ID NO: 2947327 - RNA, 19 nt, Artificial Sequence
  Description of Artificial Sequence: Synthetic oligonucleotide
cuuacaggcauuuuggccc

SEQ ID NO: 2947328 - RNA, 19 nt, Artificial Sequence
  Description of Artificial Sequence: Synthetic oligonucleotide
ucgucaucgaccaagcggg

SEQ ID NO: 2947329 - RNA, 19 nt, Artificial Sequence
  Description of Artificial Sequence: Synthetic oligonucleotide
uauaagcuuauuuucuucc

SEQ ID NO: 2947330 - RNA, 19 nt, Artificial Sequence
  Description of Artificial Sequence: Synthetic oligonucleotide
agagacaggagguggagcc

SEQ ID NO: 2947331 - RNA, 19 nt, Artificial Sequence
  Description of Artificial Sequence: Synthetic oligonucleotide
acaaggacuaacuuacacg

SEQ ID NO: 2947332 - RNA, 19 nt, Artificial Sequence
  Description of Artificial Sequence: Synthetic oligonucleotide
uucaagggcagccagagac

SEQ ID NO: 2947333 - RNA, 19 nt, Artificial Sequence
  Description of Artificial Sequence: Synthetic oligonucleotide
gauagcuauuucaacaagg

SEQ ID NO: 2947334 - RNA, 19 nt, Artificial Sequence
  Description of Artificial Sequence: Synthetic oligonucleotide
aacaggagagagcaaaugu

SEQ ID NO: 2947335 - RNA, 19 nt, Artificial Sequence
  Description of Artificial Sequence: Synthetic oligonucleotide
aucgucaucgaccaagcgg

SEQ ID NO: 2947336 - RNA, 19 nt, Artificial Sequence
  Description of Artificial Sequence: Synthetic oligonucleotide
uuauuuucuuccaaaugga

SEQ ID NO: 2947337 - RNA, 19 nt, Artificial Sequence
  Description of Artificial Sequence: Synthetic oligonucleotide
auauaagcuuauuuucuuc

SEQ ID NO: 2947338 - RNA, 19 nt, Artificial Sequence
  Description of Artificial Sequence: Synthetic oligonucleotide
acuaacuuacacgaucacc

SEQ ID NO: 2947339 - RNA, 19 nt, Artificial Sequence
  Description of Artificial Sequence: Synthetic oligonucleotide
aggacuaacuuacacgauc

SEQ ID NO: 2947340 - RNA, 19 nt, Artificial Sequence
  Description of Artificial Sequence: Synthetic oligonucleotide
ucuguguacccuucaaggg

SEQ ID NO: 2947341 - RNA, 19 nt, Artificial Sequence
  Description of Artificial Sequence: Synthetic oligonucleotide
ucaagauauaagcuuauuu

SEQ ID NO: 2947342 - RNA, 19 nt, Artificial Sequence
  Description of Artificial Sequence: Synthetic oligonucleotide
caugccaucgucaucgacc

SEQ ID NO: 2947343 - RNA, 19 nt, Artificial Sequence
  Description of Artificial Sequence: Synthetic oligonucleotide
auggauagcuauuucaaca

SEQ ID NO: 2947344 - RNA, 19 nt, Artificial Sequence
  Description of Artificial Sequence: Synthetic oligonucleotide
agcuauuucaacaaggacu

SEQ ID NO: 2947345 - RNA, 19 nt, Artificial Sequence
  Description of Artificial Sequence: Synthetic oligonucleotide
gucuguguacccuucaagg

SEQ ID NO: 2947346 - RNA, 19 nt, Artificial Sequence
  Description of Artificial Sequence: Synthetic oligonucleotide
ucuuacaggcauuuuggcc

SEQ ID NO: 2947347 - RNA, 19 nt, Artificial Sequence
  Description of Artificial Sequence: Synthetic oligonucleotide
uacacgaucaccuguccag

SEQ ID NO: 2947348 - RNA, 19 nt, Artificial Sequence
  Description of Artificial Sequence: Synthetic oligonucleotide
uguuguaacaggagagagc

SEQ ID NO: 2947349 - RNA, 19 nt, Artificial Sequence
  Description of Artificial Sequence: Synthetic oligonucleotide
uucaacaaggacuaacuua

SEQ ID NO: 2947350 - RNA, 19 nt, Artificial Sequence
  Description of Artificial Sequence: Synthetic oligonucleotide
ugcuuugugaucccggaca

SEQ ID NO: 2947351 - RNA, 19 nt, Artificial Sequence
  Description of Artificial Sequence: Synthetic oligonucleotide
acuguugcagggcagcagg

SEQ ID NO: 2947352 - RNA, 19 nt, Artificial Sequence
  Description of Artificial Sequence: Synthetic oligonucleotide
agagcuagucuguguaccc

SEQ ID NO: 2947353 - RNA, 19 nt, Artificial Sequence
  Description of Artificial Sequence: Synthetic oligonucleotide
ugcagccuuauguagacug

SEQ ID NO: 2947354 - RNA, 19 nt, Artificial Sequence
  Description of Artificial Sequence: Synthetic oligonucleotide
gagagagcaaauguccucg

SEQ ID NO: 2947355 - RNA, 19 nt, Artificial Sequence
  Description of Artificial Sequence: Synthetic oligonucleotide
guuguaacaggagagagca

SEQ ID NO: 2947356 - RNA, 19 nt, Artificial Sequence
  Description of Artificial Sequence: Synthetic oligonucleotide
uucaaagcccucccaagcc

SEQ ID NO: 2947357 - RNA, 19 nt, Artificial Sequence
  Description of Artificial Sequence: Synthetic oligonucleotide
ucccggacagccuucaggg

SEQ ID NO: 2947358 - RNA, 19 nt, Artificial Sequence
  Description of Artificial Sequence: Synthetic oligonucleotide
uguaacaggagagagcaaa

SEQ ID NO: 2947359 - RNA, 19 nt, Artificial Sequence
  Description of Artificial Sequence: Synthetic oligonucleotide
uuauguagacuggucaugc

SEQ ID NO: 2947360 - RNA, 19 nt, Artificial Sequence
  Description of Artificial Sequence: Synthetic oligonucleotide
uauuucaacaaggacuaac

SEQ ID NO: 2947361 - RNA, 19 nt, Artificial Sequence
  Description of Artificial Sequence: Synthetic oligonucleotide
gacaggggcucuuacaggc

SEQ ID NO: 2947362 - RNA, 19 nt, Artificial Sequence
  Description of Artificial Sequence: Synthetic oligonucleotide
caaggacuaacuuacacga

SEQ ID NO: 2947363 - RNA, 19 nt, Artificial Sequence
  Description of Artificial Sequence: Synthetic oligonucleotide
uguguacccuucaagggca

SEQ ID NO: 2947364 - RNA, 19 nt, Artificial Sequence
  Description of Artificial Sequence: Synthetic oligonucleotide
agagcaaauguccucguga

SEQ ID NO: 2947365 - RNA, 19 nt, Artificial Sequence
  Description of Artificial Sequence: Synthetic oligonucleotide
aacuuacacgaucaccugu

SEQ ID NO: 2947366 - RNA, 19 nt, Artificial Sequence
  Description of Artificial Sequence: Synthetic oligonucleotide
aggcucacagccuucaaag

SEQ ID NO: 2947367 - RNA, 19 nt, Artificial Sequence
  Description of Artificial Sequence: Synthetic oligonucleotide
cuguguuguaacaggagag

SEQ ID NO: 2947368 - RNA, 19 nt, Artificial Sequence
  Description of Artificial Sequence: Synthetic oligonucleotide
aaauggauagcuauuucaa

SEQ ID NO: 2947369 - RNA, 19 nt, Artificial Sequence
  Description of Artificial Sequence: Synthetic oligonucleotide
cucacagccuucaaagccc

SEQ ID NO: 2947370 - RNA, 19 nt, Artificial Sequence
  Description of Artificial Sequence: Synthetic oligonucleotide
cuaacuuacacgaucaccu

SEQ ID NO: 2947371 - RNA, 19 nt, Artificial Sequence
  Description of Artificial Sequence: Synthetic oligonucleotide
ugggcuguguuguaacagg

SEQ ID NO: 2947372 - RNA, 19 nt, Artificial Sequence
  Description of Artificial Sequence: Synthetic oligonucleotide
caaauggauagcuauuuca

SEQ ID NO: 2947373 - RNA, 19 nt, Artificial Sequence
  Description of Artificial Sequence: Synthetic oligonucleotide
aagcuuauuuucuuccaaa

SEQ ID NO: 2947374 - RNA, 19 nt, Artificial Sequence
  Description of Artificial Sequence: Synthetic oligonucleotide
uggauagcuauuucaacaa

SEQ ID NO: 2947375 - RNA, 19 nt, Artificial Sequence
  Description of Artificial Sequence: Synthetic oligonucleotide
uauuuucuuccaaauggau

SEQ ID NO: 2947376 - RNA, 19 nt, Artificial Sequence
  Description of Artificial Sequence: Synthetic oligonucleotide
ggucaugccaucgucaucg

SEQ ID NO: 2947377 - RNA, 19 nt, Artificial Sequence
  Description of Artificial Sequence: Synthetic oligonucleotide
ugaugcugagcaaggcagg

SEQ ID NO: 2947378 - RNA, 19 nt, Artificial Sequence
  Description of Artificial Sequence: Synthetic oligonucleotide
agauauaagcuuauuuucu

SEQ ID NO: 2947379 - RNA, 19 nt, Artificial Sequence
  Description of Artificial Sequence: Synthetic oligonucleotide
ucaaagcccucccaagccc

SEQ ID NO: 2947380 - RNA, 19 nt, Artificial Sequence
  Description of Artificial Sequence: Synthetic oligonucleotide
uaagcuuauuuucuuccaa

SEQ ID NO: 2947381 - RNA, 19 nt, Artificial Sequence
  Description of Artificial Sequence: Synthetic oligonucleotide
agcaaauguccucgugacc

SEQ ID NO: 2947382 - RNA, 19 nt, Artificial Sequence
  Description of Artificial Sequence: Synthetic oligonucleotide
cuguguacccuucaagggc

SEQ ID NO: 2947383 - RNA, 19 nt, Artificial Sequence
  Description of Artificial Sequence: Synthetic oligonucleotide
auuucaacaaggacuaacu

SEQ ID NO: 2947384 - RNA, 19 nt, Artificial Sequence
  Description of Artificial Sequence: Synthetic oligonucleotide
uguagacuggucaugccau

SEQ ID NO: 2947385 - RNA, 19 nt, Artificial Sequence
  Description of Artificial Sequence: Synthetic oligonucleotide
auaagcuuauuuucuucca

SEQ ID NO: 2947386 - RNA, 19 nt, Artificial Sequence
  Description of Artificial Sequence: Synthetic oligonucleotide
cuucaaagcccucccaagc

SEQ ID NO: 2947387 - RNA, 19 nt, Artificial Sequence
  Description of Artificial Sequence: Synthetic oligonucleotide
cagacaggggcucuuacag

SEQ ID NO: 2947388 - RNA, 19 nt, Artificial Sequence
  Description of Artificial Sequence: Synthetic oligonucleotide
acaggagagagcaaauguc

SEQ ID NO: 2947389 - RNA, 19 nt, Artificial Sequence
  Description of Artificial Sequence: Synthetic oligonucleotide
ugcugagcaaggcaggggu

SEQ ID NO: 2947390 - RNA, 19 nt, Artificial Sequence
  Description of Artificial Sequence: Synthetic oligonucleotide
auguagacuggucaugcca

SEQ ID NO: 2947391 - RNA, 19 nt, Artificial Sequence
  Description of Artificial Sequence: Synthetic oligonucleotide
uguguuguaacaggagaga

SEQ ID NO: 2947392 - RNA, 19 nt, Artificial Sequence
  Description of Artificial Sequence: Synthetic oligonucleotide
uagcuauuucaacaaggac

SEQ ID NO: 2947393 - RNA, 19 nt, Artificial Sequence
  Description of Artificial Sequence: Synthetic oligonucleotide
auagcuauuucaacaagga

SEQ ID NO: 2947394 - RNA, 19 nt, Artificial Sequence
  Description of Artificial Sequence: Synthetic oligonucleotide
uaggcgugcuuugugaucc

SEQ ID NO: 2947395 - RNA, 19 nt, Artificial Sequence
  Description of Artificial Sequence: Synthetic oligonucleotide
ucucugcagccuuauguag

SEQ ID NO: 2947396 - RNA, 19 nt, Artificial Sequence
  Description of Artificial Sequence: Synthetic oligonucleotide
gagcaaauguccucgugac

SEQ ID NO: 2947397 - RNA, 19 nt, Artificial Sequence
  Description of Artificial Sequence: Synthetic oligonucleotide
augaugcugagcaaggcag

SEQ ID NO: 2947398 - RNA, 19 nt, Artificial Sequence
  Description of Artificial Sequence: Synthetic oligonucleotide
acuuacacgaucaccuguc

SEQ ID NO: 2947399 - RNA, 19 nt, Artificial Sequence
  Description of Artificial Sequence: Synthetic oligonucleotide
uuacacgaucaccugucca

SEQ ID NO: 2947400 - RNA, 19 nt, Artificial Sequence
  Description of Artificial Sequence: Synthetic oligonucleotide
uagacuggucaugccaucg

SEQ ID NO: 2947401 - RNA, 19 nt, Artificial Sequence
  Description of Artificial Sequence: Synthetic oligonucleotide
uaacuuacacgaucaccug

SEQ ID NO: 2947402 - RNA, 19 nt, Artificial Sequence
  Description of Artificial Sequence: Synthetic oligonucleotide
gguuccauccaacagcaug

SEQ ID NO: 2947403 - RNA, 19 nt, Artificial Sequence
  Description of Artificial Sequence: Synthetic oligonucleotide
ucugcagccuuauguagac

SEQ ID NO: 2947404 - RNA, 19 nt, Artificial Sequence
  Description of Artificial Sequence: Synthetic oligonucleotide
caagauauaagcuuauuuu

SEQ ID NO: 2947405 - RNA, 19 nt, Artificial Sequence
  Description of Artificial Sequence: Synthetic oligonucleotide
ggcauuuuggcccugguuc

SEQ ID NO: 2947406 - RNA, 19 nt, Artificial Sequence
  Description of Artificial Sequence: Synthetic oligonucleotide
cuccccacuggccagacag

SEQ ID NO: 2947407 - RNA, 19 nt, Artificial Sequence
  Description of Artificial Sequence: Synthetic oligonucleotide
uuucaacaaggacuaacuu

SEQ ID NO: 2947408 - RNA, 19 nt, Artificial Sequence
  Description of Artificial Sequence: Synthetic oligonucleotide
uauguagacuggucaugcc

SEQ ID NO: 2947409 - RNA, 19 nt, Artificial Sequence
  Description of Artificial Sequence: Synthetic oligonucleotide
agcuuauuuucuuccaaau

SEQ ID NO: 2947410 - RNA, 19 nt, Artificial Sequence
  Description of Artificial Sequence: Synthetic oligonucleotide
uuuggcccugguuccaucc

SEQ ID NO: 2947411 - RNA, 19 nt, Artificial Sequence
  Description of Artificial Sequence: Synthetic oligonucleotide
aucccggacagccuucagg

SEQ ID NO: 2947412 - RNA, 19 nt, Artificial Sequence
  Description of Artificial Sequence: Synthetic oligonucleotide
cucuuacaggcauuuuggc

SEQ ID NO: 2947413 - RNA, 19 nt, Artificial Sequence
  Description of Artificial Sequence: Synthetic oligonucleotide
uucucugcagccuuaugua

SEQ ID NO: 2947414 - RNA, 19 nt, Artificial Sequence
  Description of Artificial Sequence: Synthetic oligonucleotide
ucaagggcagccagagaca

SEQ ID NO: 2947415 - RNA, 19 nt, Artificial Sequence
  Description of Artificial Sequence: Synthetic oligonucleotide
gagagcuagucuguguacc

SEQ ID NO: 2947416 - RNA, 19 nt, Artificial Sequence
  Description of Artificial Sequence: Synthetic oligonucleotide
ucuuccaaauggauagcua

SEQ ID NO: 2947417 - RNA, 19 nt, Artificial Sequence
  Description of Artificial Sequence: Synthetic oligonucleotide
guguuguaacaggagagag

SEQ ID NO: 2947418 - RNA, 19 nt, Artificial Sequence
  Description of Artificial Sequence: Synthetic oligonucleotide
agcaggucacaugcuaggc

SEQ ID NO: 2947419 - RNA, 19 nt, Artificial Sequence
  Description of Artificial Sequence: Synthetic oligonucleotide
gcuuauuuucuuccaaaug

SEQ ID NO: 2947420 - RNA, 19 nt, Artificial Sequence
  Description of Artificial Sequence: Synthetic oligonucleotide
cuuauguagacuggucaug

SEQ ID NO: 2947421 - RNA, 19 nt, Artificial Sequence
  Description of Artificial Sequence: Synthetic oligonucleotide
aagcccuccccacuggcca

SEQ ID NO: 2947422 - RNA, 19 nt, Artificial Sequence
  Description of Artificial Sequence: Synthetic oligonucleotide
ugugaucccggacagccuu

SEQ ID NO: 2947423 - RNA, 19 nt, Artificial Sequence
  Description of Artificial Sequence: Synthetic oligonucleotide
agacaggggcucuuacagg

SEQ ID NO: 2947424 - RNA, 19 nt, Artificial Sequence
  Description of Artificial Sequence: Synthetic oligonucleotide
augccaucgucaucgacca

SEQ ID NO: 2947425 - RNA, 19 nt, Artificial Sequence
  Description of Artificial Sequence: Synthetic oligonucleotide
uccaaauggauagcuauuu

SEQ ID NO: 2947426 - RNA, 19 nt, Artificial Sequence
  Description of Artificial Sequence: Synthetic oligonucleotide
ugcuaggcgugcuuuguga

SEQ ID NO: 2947427 - RNA, 19 nt, Artificial Sequence
  Description of Artificial Sequence: Synthetic oligonucleotide
gauauaagcuuauuuucuu

SEQ ID NO: 2947428 - RNA, 19 nt, Artificial Sequence
  Description of Artificial Sequence: Synthetic oligonucleotide
gcucuuacaggcauuuugg

SEQ ID NO: 2947429 - RNA, 19 nt, Artificial Sequence
  Description of Artificial Sequence: Synthetic oligonucleotide
ggcucuuacaggcauuuug

SEQ ID NO: 2947430 - RNA, 19 nt, Artificial Sequence
  Description of Artificial Sequence: Synthetic oligonucleotide
gcucacagccuucaaagcc

SEQ ID NO: 2947431 - RNA, 19 nt, Artificial Sequence
  Description of Artificial Sequence: Synthetic oligonucleotide
ccugguuccauccaacagc

SEQ ID NO: 2947432 - RNA, 19 nt, Artificial Sequence
  Description of Artificial Sequence: Synthetic oligonucleotide
cuuacacgaucaccugucc

SEQ ID NO: 2947433 - RNA, 19 nt, Artificial Sequence
  Description of Artificial Sequence: Synthetic oligonucleotide
agcaugaugcugagcaagg

SEQ ID NO: 2947434 - RNA, 19 nt, Artificial Sequence
  Description of Artificial Sequence: Synthetic oligonucleotide
uuccaaauggauagcuauu

SEQ ID NO: 2947435 - RNA, 19 nt, Artificial Sequence
  Description of Artificial Sequence: Synthetic oligonucleotide
uggccaacaggucccgcag

SEQ ID NO: 2947436 - RNA, 19 nt, Artificial Sequence
  Description of Artificial Sequence: Synthetic oligonucleotide
auuuucuuccaaauggaua

SEQ ID NO: 2947437 - RNA, 19 nt, Artificial Sequence
  Description of Artificial Sequence: Synthetic oligonucleotide
cagcaggucacaugcuagg

SEQ ID NO: 2947438 - RNA, 19 nt, Artificial Sequence
  Description of Artificial Sequence: Synthetic oligonucleotide
gagagcaaauguccucgug

SEQ ID NO: 2947439 - RNA, 19 nt, Artificial Sequence
  Description of Artificial Sequence: Synthetic oligonucleotide
aauguccucgugacccuuc

SEQ ID NO: 2947440 - RNA, 19 nt, Artificial Sequence
  Description of Artificial Sequence: Synthetic oligonucleotide
caugaugcugagcaaggca

SEQ ID NO: 2947441 - RNA, 19 nt, Artificial Sequence
  Description of Artificial Sequence: Synthetic oligonucleotide
ggcagccagagacaggagg

SEQ ID NO: 2947442 - RNA, 19 nt, Artificial Sequence
  Description of Artificial Sequence: Synthetic oligonucleotide
caccuguccaggcucacag

SEQ ID NO: 2947443 - RNA, 19 nt, Artificial Sequence
  Description of Artificial Sequence: Synthetic oligonucleotide
uuacaggcauuuuggcccu

SEQ ID NO: 2947444 - RNA, 19 nt, Artificial Sequence
  Description of Artificial Sequence: Synthetic oligonucleotide
aacaggucccgcaggccac

SEQ ID NO: 2947445 - RNA, 19 nt, Artificial Sequence
  Description of Artificial Sequence: Synthetic oligonucleotide
guugcagggcagcagguca

SEQ ID NO: 2947446 - RNA, 19 nt, Artificial Sequence
  Description of Artificial Sequence: Synthetic oligonucleotide
ucccgcaggccacuguugc

SEQ ID NO: 2947447 - RNA, 19 nt, Artificial Sequence
  Description of Artificial Sequence: Synthetic oligonucleotide
gacuaacuuacacgaucac

SEQ ID NO: 2947448 - RNA, 19 nt, Artificial Sequence
  Description of Artificial Sequence: Synthetic oligonucleotide
ggauagcuauuucaacaag

SEQ ID NO: 2947449 - RNA, 19 nt, Artificial Sequence
  Description of Artificial Sequence: Synthetic oligonucleotide
accuguccaggcucacagc

SEQ ID NO: 2947450 - RNA, 19 nt, Artificial Sequence
  Description of Artificial Sequence: Synthetic oligonucleotide
cagcaugaugcugagcaag

SEQ ID NO: 2947451 - RNA, 19 nt, Artificial Sequence
  Description of Artificial Sequence: Synthetic oligonucleotide
ucacagccuucaaagcccu

SEQ ID NO: 2947452 - RNA, 19 nt, Artificial Sequence
  Description of Artificial Sequence: Synthetic oligonucleotide
uccucgugacccuucucug

SEQ ID NO: 2947453 - RNA, 19 nt, Artificial Sequence
  Description of Artificial Sequence: Synthetic oligonucleotide
uagucuguguacccuucaa

SEQ ID NO: 2947454 - RNA, 19 nt, Artificial Sequence
  Description of Artificial Sequence: Synthetic oligonucleotide
cuuccaaauggauagcuau

SEQ ID NO: 2947455 - RNA, 19 nt, Artificial Sequence
  Description of Artificial Sequence: Synthetic oligonucleotide
uguggagagcuagucugug

SEQ ID NO: 2947456 - RNA, 19 nt, Artificial Sequence
  Description of Artificial Sequence: Synthetic oligonucleotide
guacccuucaagggcagcc

SEQ ID NO: 2947457 - RNA, 19 nt, Artificial Sequence
  Description of Artificial Sequence: Synthetic oligonucleotide
gcuguguuguaacaggaga

SEQ ID NO: 2947458 - RNA, 19 nt, Artificial Sequence
  Description of Artificial Sequence: Synthetic oligonucleotide
acacgaucaccuguccagg

SEQ ID NO: 2947459 - RNA, 19 nt, Artificial Sequence
  Description of Artificial Sequence: Synthetic oligonucleotide
gcaggucacaugcuaggcg

SEQ ID NO: 2947460 - RNA, 19 nt, Artificial Sequence
  Description of Artificial Sequence: Synthetic oligonucleotide
acaugcuaggcgugcuuug

SEQ ID NO: 2947461 - RNA, 19 nt, Artificial Sequence
  Description of Artificial Sequence: Synthetic oligonucleotide
acgaucaccuguccaggcu

SEQ ID NO: 2947462 - RNA, 19 nt, Artificial Sequence
  Description of Artificial Sequence: Synthetic oligonucleotide
gcuauuucaacaaggacua

SEQ ID NO: 2947463 - RNA, 19 nt, Artificial Sequence
  Description of Artificial Sequence: Synthetic oligonucleotide
cuucucugcagccuuaugu

SEQ ID NO: 2947464 - RNA, 19 nt, Artificial Sequence
  Description of Artificial Sequence: Synthetic oligonucleotide
caagggcagccagagacag

SEQ ID NO: 2947465 - RNA, 19 nt, Artificial Sequence
  Description of Artificial Sequence: Synthetic oligonucleotide
gacuggucaugccaucguc

SEQ ID NO: 2947466 - RNA, 19 nt, Artificial Sequence
  Description of Artificial Sequence: Synthetic oligonucleotide
cacgaucaccuguccaggc

SEQ ID NO: 2947467 - RNA, 19 nt, Artificial Sequence
  Description of Artificial Sequence: Synthetic oligonucleotide
gcauuuuggcccugguucc

SEQ ID NO: 2947468 - RNA, 19 nt, Artificial Sequence
  Description of Artificial Sequence: Synthetic oligonucleotide
gcuuugugaucccggacag

SEQ ID NO: 2947469 - RNA, 19 nt, Artificial Sequence
  Description of Artificial Sequence: Synthetic oligonucleotide
uccccacuggccagacagg

SEQ ID NO: 2947470 - RNA, 19 nt, Artificial Sequence
  Description of Artificial Sequence: Synthetic oligonucleotide
ucaugccaucgucaucgac

SEQ ID NO: 2947471 - RNA, 19 nt, Artificial Sequence
  Description of Artificial Sequence: Synthetic oligonucleotide
uugcagggcagcaggucac

SEQ ID NO: 2947472 - RNA, 19 nt, Artificial Sequence
  Description of Artificial Sequence: Synthetic oligonucleotide
cucugcagccuuauguaga

SEQ ID NO: 2947473 - RNA, 19 nt, Artificial Sequence
  Description of Artificial Sequence: Synthetic oligonucleotide
caucgucaucgaccaagcg

SEQ ID NO: 2947474 - RNA, 19 nt, Artificial Sequence
  Description of Artificial Sequence: Synthetic oligonucleotide
acccuucaagggcagccag

SEQ ID NO: 2947475 - RNA, 19 nt, Artificial Sequence
  Description of Artificial Sequence: Synthetic oligonucleotide
agacuggucaugccaucgu

SEQ ID NO: 2947476 - RNA, 19 nt, Artificial Sequence
  Description of Artificial Sequence: Synthetic oligonucleotide
agagagcaaauguccucgu

SEQ ID NO: 2947477 - RNA, 19 nt, Artificial Sequence
  Description of Artificial Sequence: Synthetic oligonucleotide
agccuuauguagacugguc

SEQ ID NO: 2947478 - RNA, 19 nt, Artificial Sequence
  Description of Artificial Sequence: Synthetic oligonucleotide
gccuuauguagacugguca

SEQ ID NO: 2947479 - RNA, 19 nt, Artificial Sequence
  Description of Artificial Sequence: Synthetic oligonucleotide
cuaggcgugcuuugugauc

SEQ ID NO: 2947480 - RNA, 19 nt, Artificial Sequence
  Description of Artificial Sequence: Synthetic oligonucleotide
caagcccuccccacuggcc

SEQ ID NO: 2947481 - RNA, 19 nt, Artificial Sequence
  Description of Artificial Sequence: Synthetic oligonucleotide
gccaucgucaucgaccaag

SEQ ID NO: 2947482 - RNA, 19 nt, Artificial Sequence
  Description of Artificial Sequence: Synthetic oligonucleotide
cagccuucaaagcccuccc

SEQ ID NO: 2947483 - RNA, 19 nt, Artificial Sequence
  Description of Artificial Sequence: Synthetic oligonucleotide
aggagagagcaaauguccu

SEQ ID NO: 2947484 - RNA, 19 nt, Artificial Sequence
  Description of Artificial Sequence: Synthetic oligonucleotide
ggacuaacuuacacgauca

SEQ ID NO: 2947485 - RNA, 19 nt, Artificial Sequence
  Description of Artificial Sequence: Synthetic oligonucleotide
gugacccuucucugcagcc

SEQ ID NO: 2947486 - RNA, 19 nt, Artificial Sequence
  Description of Artificial Sequence: Synthetic oligonucleotide
acuggucaugccaucguca

SEQ ID NO: 2947487 - RNA, 19 nt, Artificial Sequence
  Description of Artificial Sequence: Synthetic oligonucleotide
uugugaucccggacagccu

SEQ ID NO: 2947488 - RNA, 19 nt, Artificial Sequence
  Description of Artificial Sequence: Synthetic oligonucleotide
augcuaggcgugcuuugug

SEQ ID NO: 2947489 - RNA, 19 nt, Artificial Sequence
  Description of Artificial Sequence: Synthetic oligonucleotide
aaagcccucccaagcccuc

SEQ ID NO: 2947490 - RNA, 19 nt, Artificial Sequence
  Description of Artificial Sequence: Synthetic oligonucleotide
uuggcccugguuccaucca

SEQ ID NO: 2947491 - RNA, 19 nt, Artificial Sequence
  Description of Artificial Sequence: Synthetic oligonucleotide
ccacuggccagacaggggc

SEQ ID NO: 2947492 - RNA, 19 nt, Artificial Sequence
  Description of Artificial Sequence: Synthetic oligonucleotide
acaggcauuuuggcccugg

SEQ ID NO: 2947493 - RNA, 19 nt, Artificial Sequence
  Description of Artificial Sequence: Synthetic oligonucleotide
ggagagagcaaauguccuc

SEQ ID NO: 2947494 - RNA, 19 nt, Artificial Sequence
  Description of Artificial Sequence: Synthetic oligonucleotide
uggagccucagcuggccaa

SEQ ID NO: 2947495 - RNA, 19 nt, Artificial Sequence
  Description of Artificial Sequence: Synthetic oligonucleotide
gagcaaggcaggggugugg

SEQ ID NO: 2947496 - RNA, 19 nt, Artificial Sequence
  Description of Artificial Sequence: Synthetic oligonucleotide
ucgugacccuucucugcag

SEQ ID NO: 2947497 - RNA, 19 nt, Artificial Sequence
  Description of Artificial Sequence: Synthetic oligonucleotide
ccuucaaagcccucccaag

SEQ ID NO: 2947498 - RNA, 19 nt, Artificial Sequence
  Description of Artificial Sequence: Synthetic oligonucleotide
aaggacuaacuuacacgau

SEQ ID NO: 2947499 - RNA, 19 nt, Artificial Sequence
  Description of Artificial Sequence: Synthetic oligonucleotide
agcuagucuguguacccuu

SEQ ID NO: 2947500 - RNA, 19 nt, Artificial Sequence
  Description of Artificial Sequence: Synthetic oligonucleotide
aggcgugcuuugugauccc

SEQ ID NO: 2947501 - RNA, 19 nt, Artificial Sequence
  Description of Artificial Sequence: Synthetic oligonucleotide
ugagcaaggcaggggugug

SEQ ID NO: 2947502 - RNA, 19 nt, Artificial Sequence
  Description of Artificial Sequence: Synthetic oligonucleotide
uuguaacaggagagagcaa

SEQ ID NO: 2947503 - RNA, 19 nt, Artificial Sequence
  Description of Artificial Sequence: Synthetic oligonucleotide
agccucagcuggccaacag

SEQ ID NO: 2947504 - RNA, 19 nt, Artificial Sequence
  Description of Artificial Sequence: Synthetic oligonucleotide
cucgugacccuucucugca

SEQ ID NO: 2947505 - RNA, 19 nt, Artificial Sequence
  Description of Artificial Sequence: Synthetic oligonucleotide
uacccuucaagggcagcca

SEQ ID NO: 2947506 - RNA, 19 nt, Artificial Sequence
  Description of Artificial Sequence: Synthetic oligonucleotide
uccaggcucacagccuuca

SEQ ID NO: 2947507 - RNA, 19 nt, Artificial Sequence
  Description of Artificial Sequence: Synthetic oligonucleotide
aggccacuguugcagggca

SEQ ID NO: 2947508 - RNA, 19 nt, Artificial Sequence
  Description of Artificial Sequence: Synthetic oligonucleotide
ugacccuucucugcagccu

SEQ ID NO: 2947509 - RNA, 19 nt, Artificial Sequence
  Description of Artificial Sequence: Synthetic oligonucleotide
uguugcagggcagcagguc

SEQ ID NO: 2947510 - RNA, 19 nt, Artificial Sequence
  Description of Artificial Sequence: Synthetic oligonucleotide
gccucagcuggccaacagg

SEQ ID NO: 2947511 - RNA, 19 nt, Artificial Sequence
  Description of Artificial Sequence: Synthetic oligonucleotide
ggagguggagccucagcug

SEQ ID NO: 2947512 - RNA, 19 nt, Artificial Sequence
  Description of Artificial Sequence: Synthetic oligonucleotide
ucacaugcuaggcgugcuu

SEQ ID NO: 2947513 - RNA, 19 nt, Artificial Sequence
  Description of Artificial Sequence: Synthetic oligonucleotide
uguacccuucaagggcagc

SEQ ID NO: 2947514 - RNA, 19 nt, Artificial Sequence
  Description of Artificial Sequence: Synthetic oligonucleotide
caggucacaugcuaggcgu

SEQ ID NO: 2947515 - RNA, 19 nt, Artificial Sequence
  Description of Artificial Sequence: Synthetic oligonucleotide
auguccucgugacccuucu

SEQ ID NO: 2947516 - RNA, 19 nt, Artificial Sequence
  Description of Artificial Sequence: Synthetic oligonucleotide
gguuggacccgugggacag

SEQ ID NO: 2947517 - RNA, 19 nt, Artificial Sequence
  Description of Artificial Sequence: Synthetic oligonucleotide
cagggguguggagagcuag

SEQ ID NO: 2947518 - RNA, 19 nt, Artificial Sequence
  Description of Artificial Sequence: Synthetic oligonucleotide
cuuugugaucccggacagc

SEQ ID NO: 2947519 - RNA, 19 nt, Artificial Sequence
  Description of Artificial Sequence: Synthetic oligonucleotide
guagacuggucaugccauc

SEQ ID NO: 2947520 - RNA, 19 nt, Artificial Sequence
  Description of Artificial Sequence: Synthetic oligonucleotide
cagggcagcaggucacaug

SEQ ID NO: 2947521 - RNA, 19 nt, Artificial Sequence
  Description of Artificial Sequence: Synthetic oligonucleotide
uuuuggcccugguuccauc

SEQ ID NO: 2947522 - RNA, 19 nt, Artificial Sequence
  Description of Artificial Sequence: Synthetic oligonucleotide
uggucaugccaucgucauc

SEQ ID NO: 2947523 - RNA, 19 nt, Artificial Sequence
  Description of Artificial Sequence: Synthetic oligonucleotide
guccucgugacccuucucu

SEQ ID NO: 2947524 - RNA, 19 nt, Artificial Sequence
  Description of Artificial Sequence: Synthetic oligonucleotide
agcaaggcaggggugugga

SEQ ID NO: 2947525 - RNA, 19 nt, Artificial Sequence
  Description of Artificial Sequence: Synthetic oligonucleotide
uuggacccgugggacagca

SEQ ID NO: 2947526 - RNA, 19 nt, Artificial Sequence
  Description of Artificial Sequence: Synthetic oligonucleotide
agccuucagggcugggcug

SEQ ID NO: 2947527 - RNA, 19 nt, Artificial Sequence
  Description of Artificial Sequence: Synthetic oligonucleotide
aaauguccucgugacccuu

SEQ ID NO: 2947528 - RNA, 19 nt, Artificial Sequence
  Description of Artificial Sequence: Synthetic oligonucleotide
aggcauuuuggcccugguu

SEQ ID NO: 2947529 - RNA, 19 nt, Artificial Sequence
  Description of Artificial Sequence: Synthetic oligonucleotide
gugcuuugugaucccggac

SEQ ID NO: 2947530 - RNA, 19 nt, Artificial Sequence
  Description of Artificial Sequence: Synthetic oligonucleotide
ggcucacagccuucaaagc

SEQ ID NO: 2947531 - RNA, 19 nt, Artificial Sequence
  Description of Artificial Sequence: Synthetic oligonucleotide
ugaucccggacagccuuca

SEQ ID NO: 2947532 - RNA, 19 nt, Artificial Sequence
  Description of Artificial Sequence: Synthetic oligonucleotide
cucagcuggccaacagguc

SEQ ID NO: 2947533 - RNA, 19 nt, Artificial Sequence
  Description of Artificial Sequence: Synthetic oligonucleotide
uggcccugguuccauccaa

SEQ ID NO: 2947534 - RNA, 19 nt, Artificial Sequence
  Description of Artificial Sequence: Synthetic oligonucleotide
agccuucaaagcccuccca

SEQ ID NO: 2947535 - RNA, 19 nt, Artificial Sequence
  Description of Artificial Sequence: Synthetic oligonucleotide
gccaacaggucccgcaggc

SEQ ID NO: 2947536 - RNA, 19 nt, Artificial Sequence
  Description of Artificial Sequence: Synthetic oligonucleotide
cuggccaacaggucccgca

SEQ ID NO: 2947537 - RNA, 19 nt, Artificial Sequence
  Description of Artificial Sequence: Synthetic oligonucleotide
ccuucaagggcagccagag

SEQ ID NO: 2947538 - RNA, 19 nt, Artificial Sequence
  Description of Artificial Sequence: Synthetic oligonucleotide
ccaucgucaucgaccaagc

SEQ ID NO: 2947539 - RNA, 19 nt, Artificial Sequence
  Description of Artificial Sequence: Synthetic oligonucleotide
gcagccuuauguagacugg

SEQ ID NO: 2947540 - RNA, 19 nt, Artificial Sequence
  Description of Artificial Sequence: Synthetic oligonucleotide
ccaaauggauagcuauuuc

SEQ ID NO: 2947541 - RNA, 19 nt, Artificial Sequence
  Description of Artificial Sequence: Synthetic oligonucleotide
gaucccggacagccuucag

SEQ ID NO: 2947542 - RNA, 19 nt, Artificial Sequence
  Description of Artificial Sequence: Synthetic oligonucleotide
agguggagccucagcuggc

SEQ ID NO: 2947543 - RNA, 19 nt, Artificial Sequence
  Description of Artificial Sequence: Synthetic oligonucleotide
gaucaccuguccaggcuca

SEQ ID NO: 2947544 - RNA, 19 nt, Artificial Sequence
  Description of Artificial Sequence: Synthetic oligonucleotide
gcagcaggucacaugcuag

SEQ ID NO: 2947545 - RNA, 19 nt, Artificial Sequence
  Description of Artificial Sequence: Synthetic oligonucleotide
cacuguugcagggcagcag

SEQ ID NO: 2947546 - RNA, 19 nt, Artificial Sequence
  Description of Artificial Sequence: Synthetic oligonucleotide
cauccaacagcaugaugcu

SEQ ID NO: 2947547 - RNA, 19 nt, Artificial Sequence
  Description of Artificial Sequence: Synthetic oligonucleotide
caacaaggacuaacuuaca

SEQ ID NO: 2947548 - RNA, 19 nt, Artificial Sequence
  Description of Artificial Sequence: Synthetic oligonucleotide
ggcuguguuguaacaggag

SEQ ID NO: 2947549 - RNA, 19 nt, Artificial Sequence
  Description of Artificial Sequence: Synthetic oligonucleotide
aucaccuguccaggcucac

SEQ ID NO: 2947550 - RNA, 19 nt, Artificial Sequence
  Description of Artificial Sequence: Synthetic oligonucleotide
ucaccuguccaggcucaca

SEQ ID NO: 2947551 - RNA, 19 nt, Artificial Sequence
  Description of Artificial Sequence: Synthetic oligonucleotide
ccaacagcaugaugcugag

SEQ ID NO: 2947552 - RNA, 19 nt, Artificial Sequence
  Description of Artificial Sequence: Synthetic oligonucleotide
uguccucgugacccuucuc

SEQ ID NO: 2947553 - RNA, 19 nt, Artificial Sequence
  Description of Artificial Sequence: Synthetic oligonucleotide
gcaggccacuguugcaggg

SEQ ID NO: 2947554 - RNA, 19 nt, Artificial Sequence
  Description of Artificial Sequence: Synthetic oligonucleotide
uggacccgugggacagcag

SEQ ID NO: 2947555 - RNA, 19 nt, Artificial Sequence
  Description of Artificial Sequence: Synthetic oligonucleotide
ccucgugacccuucucugc

SEQ ID NO: 2947556 - RNA, 19 nt, Artificial Sequence
  Description of Artificial Sequence: Synthetic oligonucleotide
ggucacaugcuaggcgugc

SEQ ID NO: 2947557 - RNA, 19 nt, Artificial Sequence
  Description of Artificial Sequence: Synthetic oligonucleotide
agcccuccccacuggccag

SEQ ID NO: 2947558 - RNA, 19 nt, Artificial Sequence
  Description of Artificial Sequence: Synthetic oligonucleotide
ugcagggcagcaggucaca

SEQ ID NO: 2947559 - RNA, 19 nt, Artificial Sequence
  Description of Artificial Sequence: Synthetic oligonucleotide
caggcucacagccuucaaa

SEQ ID NO: 2947560 - RNA, 19 nt, Artificial Sequence
  Description of Artificial Sequence: Synthetic oligonucleotide
auuuuggcccugguuccau

SEQ ID NO: 2947561 - RNA, 19 nt, Artificial Sequence
  Description of Artificial Sequence: Synthetic oligonucleotide
caacagcaugaugcugagc

SEQ ID NO: 2947562 - RNA, 19 nt, Artificial Sequence
  Description of Artificial Sequence: Synthetic oligonucleotide
cccugguuccauccaacag

SEQ ID NO: 2947563 - RNA, 19 nt, Artificial Sequence
  Description of Artificial Sequence: Synthetic oligonucleotide
ggccaacaggucccgcagg

SEQ ID NO: 2947564 - RNA, 19 nt, Artificial Sequence
  Description of Artificial Sequence: Synthetic oligonucleotide
cagccagagacaggaggug

SEQ ID NO: 2947565 - RNA, 19 nt, Artificial Sequence
  Description of Artificial Sequence: Synthetic oligonucleotide
gcaugaugcugagcaaggc

SEQ ID NO: 2947566 - RNA, 19 nt, Artificial Sequence
  Description of Artificial Sequence: Synthetic oligonucleotide
ggcugggcuguguuguaac

SEQ ID NO: 2947567 - RNA, 19 nt, Artificial Sequence
  Description of Artificial Sequence: Synthetic oligonucleotide
caaagcccucccaagcccu

SEQ ID NO: 2947568 - RNA, 19 nt, Artificial Sequence
  Description of Artificial Sequence: Synthetic oligonucleotide
aggucacaugcuaggcgug

SEQ ID NO: 2947569 - RNA, 19 nt, Artificial Sequence
  Description of Artificial Sequence: Synthetic oligonucleotide
gccuucaaagcccucccaa

SEQ ID NO: 2947570 - RNA, 19 nt, Artificial Sequence
  Description of Artificial Sequence: Synthetic oligonucleotide
guaacaggagagagcaaau

SEQ ID NO: 2947571 - RNA, 19 nt, Artificial Sequence
  Description of Artificial Sequence: Synthetic oligonucleotide
aggcagggguguggagagc

SEQ ID NO: 2947572 - RNA, 19 nt, Artificial Sequence
  Description of Artificial Sequence: Synthetic oligonucleotide
ugguuccauccaacagcau

SEQ ID NO: 2947573 - RNA, 19 nt, Artificial Sequence
  Description of Artificial Sequence: Synthetic oligonucleotide
gcgugcuuugugaucccgg

SEQ ID NO: 2947574 - RNA, 19 nt, Artificial Sequence
  Description of Artificial Sequence: Synthetic oligonucleotide
cuggucaugccaucgucau

SEQ ID NO: 2947575 - RNA, 19 nt, Artificial Sequence
  Description of Artificial Sequence: Synthetic oligonucleotide
ggcagcaggucacaugcua

SEQ ID NO: 2947576 - RNA, 19 nt, Artificial Sequence
  Description of Artificial Sequence: Synthetic oligonucleotide
gccacuguugcagggcagc

SEQ ID NO: 2947577 - RNA, 19 nt, Artificial Sequence
  Description of Artificial Sequence: Synthetic oligonucleotide
cauuuuggcccugguucca

SEQ ID NO: 2947578 - RNA, 19 nt, Artificial Sequence
  Description of Artificial Sequence: Synthetic oligonucleotide
gguggagccucagcuggcc

SEQ ID NO: 2947579 - RNA, 19 nt, Artificial Sequence
  Description of Artificial Sequence: Synthetic oligonucleotide
caaauguccucgugacccu

SEQ ID NO: 2947580 - RNA, 19 nt, Artificial Sequence
  Description of Artificial Sequence: Synthetic oligonucleotide
ggcgugcuuugugaucccg

SEQ ID NO: 2947581 - RNA, 19 nt, Artificial Sequence
  Description of Artificial Sequence: Synthetic oligonucleotide
cuucaagggcagccagaga

SEQ ID NO: 2947582 - RNA, 19 nt, Artificial Sequence
  Description of Artificial Sequence: Synthetic oligonucleotide
gggguuggacccgugggac

SEQ ID NO: 2947583 - RNA, 19 nt, Artificial Sequence
  Description of Artificial Sequence: Synthetic oligonucleotide
gagcuagucuguguacccu

SEQ ID NO: 2947584 - RNA, 19 nt, Artificial Sequence
  Description of Artificial Sequence: Synthetic oligonucleotide
acaggggcucuuacaggca

SEQ ID NO: 2947585 - RNA, 19 nt, Artificial Sequence
  Description of Artificial Sequence: Synthetic oligonucleotide
cccacuggccagacagggg

SEQ ID NO: 2947586 - RNA, 19 nt, Artificial Sequence
  Description of Artificial Sequence: Synthetic oligonucleotide
gacagccuucagggcuggg

SEQ ID NO: 2947587 - RNA, 19 nt, Artificial Sequence
  Description of Artificial Sequence: Synthetic oligonucleotide
gcugggcuguguuguaaca

SEQ ID NO: 2947588 - RNA, 19 nt, Artificial Sequence
  Description of Artificial Sequence: Synthetic oligonucleotide
agggguguggagagcuagu

SEQ ID NO: 2947589 - RNA, 19 nt, Artificial Sequence
  Description of Artificial Sequence: Synthetic oligonucleotide
gucaugccaucgucaucga

SEQ ID NO: 2947590 - RNA, 19 nt, Artificial Sequence
  Description of Artificial Sequence: Synthetic oligonucleotide
guggagccucagcuggcca

SEQ ID NO: 2947591 - RNA, 19 nt, Artificial Sequence
  Description of Artificial Sequence: Synthetic oligonucleotide
cugagcaaggcaggggugu

SEQ ID NO: 2947592 - RNA, 19 nt, Artificial Sequence
  Description of Artificial Sequence: Synthetic oligonucleotide
gacccuucucugcagccuu

SEQ ID NO: 2947593 - RNA, 19 nt, Artificial Sequence
  Description of Artificial Sequence: Synthetic oligonucleotide
uacaggcauuuuggcccug

SEQ ID NO: 2947594 - RNA, 19 nt, Artificial Sequence
  Description of Artificial Sequence: Synthetic oligonucleotide
aggucccgcaggccacugu

SEQ ID NO: 2947595 - RNA, 19 nt, Artificial Sequence
  Description of Artificial Sequence: Synthetic oligonucleotide
ccagacaggggcucuuaca

SEQ ID NO: 2947596 - RNA, 19 nt, Artificial Sequence
  Description of Artificial Sequence: Synthetic oligonucleotide
gggcuguguuguaacagga

SEQ ID NO: 2947597 - RNA, 19 nt, Artificial Sequence
  Description of Artificial Sequence: Synthetic oligonucleotide
ccuuauguagacuggucau

SEQ ID NO: 2947598 - RNA, 19 nt, Artificial Sequence
  Description of Artificial Sequence: Synthetic oligonucleotide
ccaagcccuccccacuggc

SEQ ID NO: 2947599 - RNA, 19 nt, Artificial Sequence
  Description of Artificial Sequence: Synthetic oligonucleotide
cgaucaccuguccaggcuc

SEQ ID NO: 2947600 - RNA, 19 nt, Artificial Sequence
  Description of Artificial Sequence: Synthetic oligonucleotide
gggguguggagagcuaguc

SEQ ID NO: 2947601 - RNA, 19 nt, Artificial Sequence
  Description of Artificial Sequence: Synthetic oligonucleotide
cgugacccuucucugcagc

SEQ ID NO: 2947602 - RNA, 19 nt, Artificial Sequence
  Description of Artificial Sequence: Synthetic oligonucleotide
gagacaggagguggagccu

SEQ ID NO: 2947603 - RNA, 19 nt, Artificial Sequence
  Description of Artificial Sequence: Synthetic oligonucleotide
gcuagucuguguacccuuc

SEQ ID NO: 2947604 - RNA, 19 nt, Artificial Sequence
  Description of Artificial Sequence: Synthetic oligonucleotide
acaggucccgcaggccacu

SEQ ID NO: 2947605 - RNA, 19 nt, Artificial Sequence
  Description of Artificial Sequence: Synthetic oligonucleotide
gcugagcaaggcaggggug

SEQ ID NO: 2947606 - RNA, 19 nt, Artificial Sequence
  Description of Artificial Sequence: Synthetic oligonucleotide
ugccaucgucaucgaccaa

SEQ ID NO: 2947607 - RNA, 19 nt, Artificial Sequence
  Description of Artificial Sequence: Synthetic oligonucleotide
ccgcaggccacuguugcag

SEQ ID NO: 2947608 - RNA, 19 nt, Artificial Sequence
  Description of Artificial Sequence: Synthetic oligonucleotide
gccagacaggggcucuuac

SEQ ID NO: 2947609 - RNA, 19 nt, Artificial Sequence
  Description of Artificial Sequence: Synthetic oligonucleotide
gucccgcaggccacuguug

SEQ ID NO: 2947610 - RNA, 19 nt, Artificial Sequence
  Description of Artificial Sequence: Synthetic oligonucleotide
ccucagcuggccaacaggu

SEQ ID NO: 2947611 - RNA, 19 nt, Artificial Sequence
  Description of Artificial Sequence: Synthetic oligonucleotide
ggagccucagcuggccaac

SEQ ID NO: 2947612 - RNA, 19 nt, Artificial Sequence
  Description of Artificial Sequence: Synthetic oligonucleotide
gcccugguuccauccaaca

SEQ ID NO: 2947613 - RNA, 19 nt, Artificial Sequence
  Description of Artificial Sequence: Synthetic oligonucleotide
gugaucccggacagccuuc

SEQ ID NO: 2947614 - RNA, 19 nt, Artificial Sequence
  Description of Artificial Sequence: Synthetic oligonucleotide
guguggagagcuagucugu

SEQ ID NO: 2947615 - RNA, 19 nt, Artificial Sequence
  Description of Artificial Sequence: Synthetic oligonucleotide
ggguuggacccgugggaca

SEQ ID NO: 2947616 - RNA, 19 nt, Artificial Sequence
  Description of Artificial Sequence: Synthetic oligonucleotide
cagccuuauguagacuggu

SEQ ID NO: 2947617 - RNA, 19 nt, Artificial Sequence
  Description of Artificial Sequence: Synthetic oligonucleotide
ccaacaggucccgcaggcc

SEQ ID NO: 2947618 - RNA, 19 nt, Artificial Sequence
  Description of Artificial Sequence: Synthetic oligonucleotide
gccagagacaggaggugga

SEQ ID NO: 2947619 - RNA, 19 nt, Artificial Sequence
  Description of Artificial Sequence: Synthetic oligonucleotide
cccaagcccuccccacugg

SEQ ID NO: 2947620 - RNA, 19 nt, Artificial Sequence
  Description of Artificial Sequence: Synthetic oligonucleotide
cgugcuuugugaucccgga

SEQ ID NO: 2947621 - RNA, 19 nt, Artificial Sequence
  Description of Artificial Sequence: Synthetic oligonucleotide
gagccucagcuggccaaca

SEQ ID NO: 2947622 - RNA, 19 nt, Artificial Sequence
  Description of Artificial Sequence: Synthetic oligonucleotide
gucacaugcuaggcgugcu

SEQ ID NO: 2947623 - RNA, 19 nt, Artificial Sequence
  Description of Artificial Sequence: Synthetic oligonucleotide
cuguugcagggcagcaggu

SEQ ID NO: 2947624 - RNA, 19 nt, Artificial Sequence
  Description of Artificial Sequence: Synthetic oligonucleotide
ggacagccuucagggcugg

SEQ ID NO: 2947625 - RNA, 19 nt, Artificial Sequence
  Description of Artificial Sequence: Synthetic oligonucleotide
ccuucucugcagccuuaug

SEQ ID NO: 2947626 - RNA, 19 nt, Artificial Sequence
  Description of Artificial Sequence: Synthetic oligonucleotide
cccggacagccuucagggc

SEQ ID NO: 2947627 - RNA, 19 nt, Artificial Sequence
  Description of Artificial Sequence: Synthetic oligonucleotide
gcuaggcgugcuuugugau

SEQ ID NO: 2947628 - RNA, 19 nt, Artificial Sequence
  Description of Artificial Sequence: Synthetic oligonucleotide
cgcaggccacuguugcagg

SEQ ID NO: 2947629 - RNA, 19 nt, Artificial Sequence
  Description of Artificial Sequence: Synthetic oligonucleotide
cgucaucgaccaagcgggg

SEQ ID NO: 2947630 - RNA, 19 nt, Artificial Sequence
  Description of Artificial Sequence: Synthetic oligonucleotide
ggcagggguguggagagcu

SEQ ID NO: 2947631 - RNA, 19 nt, Artificial Sequence
  Description of Artificial Sequence: Synthetic oligonucleotide
ggcccugguuccauccaac

SEQ ID NO: 2947632 - RNA, 19 nt, Artificial Sequence
  Description of Artificial Sequence: Synthetic oligonucleotide
ggccacuguugcagggcag

SEQ ID NO: 2947633 - RNA, 19 nt, Artificial Sequence
  Description of Artificial Sequence: Synthetic oligonucleotide
caggggcucuuacaggcau

SEQ ID NO: 2947634 - RNA, 19 nt, Artificial Sequence
  Description of Artificial Sequence: Synthetic oligonucleotide
cucccaagcccuccccacu

SEQ ID NO: 2947635 - RNA, 19 nt, Artificial Sequence
  Description of Artificial Sequence: Synthetic oligonucleotide
uggccagacaggggcucuu

SEQ ID NO: 2947636 - RNA, 19 nt, Artificial Sequence
  Description of Artificial Sequence: Synthetic oligonucleotide
cacaugcuaggcgugcuuu

SEQ ID NO: 2947637 - RNA, 19 nt, Artificial Sequence
  Description of Artificial Sequence: Synthetic oligonucleotide
cccuucaagggcagccaga

SEQ ID NO: 2947638 - RNA, 19 nt, Artificial Sequence
  Description of Artificial Sequence: Synthetic oligonucleotide
cacuggccagacaggggcu

SEQ ID NO: 2947639 - RNA, 19 nt, Artificial Sequence
  Description of Artificial Sequence: Synthetic oligonucleotide
guccaggcucacagccuuc

SEQ ID NO: 2947640 - RNA, 19 nt, Artificial Sequence
  Description of Artificial Sequence: Synthetic oligonucleotide
caggucccgcaggccacug

SEQ ID NO: 2947641 - RNA, 19 nt, Artificial Sequence
  Description of Artificial Sequence: Synthetic oligonucleotide
caggcauuuuggcccuggu

SEQ ID NO: 2947642 - RNA, 19 nt, Artificial Sequence
  Description of Artificial Sequence: Synthetic oligonucleotide
ggucccgcaggccacuguu

SEQ ID NO: 2947643 - RNA, 19 nt, Artificial Sequence
  Description of Artificial Sequence: Synthetic oligonucleotide
gggcagccagagacaggag

SEQ ID NO: 2947644 - RNA, 19 nt, Artificial Sequence
  Description of Artificial Sequence: Synthetic oligonucleotide
ggggcucuuacaggcauuu

SEQ ID NO: 2947645 - RNA, 19 nt, Artificial Sequence
  Description of Artificial Sequence: Synthetic oligonucleotide
gccuucagggcugggcugu

SEQ ID NO: 2947646 - RNA, 19 nt, Artificial Sequence
  Description of Artificial Sequence: Synthetic oligonucleotide
gggcugggcuguguuguaa

SEQ ID NO: 2947647 - RNA, 19 nt, Artificial Sequence
  Description of Artificial Sequence: Synthetic oligonucleotide
ccacuguugcagggcagca

SEQ ID NO: 2947648 - RNA, 19 nt, Artificial Sequence
  Description of Artificial Sequence: Synthetic oligonucleotide
cccgcaggccacuguugca

SEQ ID NO: 2947649 - RNA, 19 nt, Artificial Sequence
  Description of Artificial Sequence: Synthetic oligonucleotide
cugcagccuuauguagacu

SEQ ID NO: 2947650 - RNA, 19 nt, Artificial Sequence
  Description of Artificial Sequence: Synthetic oligonucleotide
cuucagggcugggcugugu

SEQ ID NO: 2947651 - RNA, 19 nt, Artificial Sequence
  Description of Artificial Sequence: Synthetic oligonucleotide
ggccagacaggggcucuua

SEQ ID NO: 2947652 - RNA, 19 nt, Artificial Sequence
  Description of Artificial Sequence: Synthetic oligonucleotide
gcagggguguggagagcua

SEQ ID NO: 2947653 - RNA, 19 nt, Artificial Sequence
  Description of Artificial Sequence: Synthetic oligonucleotide
gcagggcagcaggucacau

SEQ ID NO: 2947654 - RNA, 19 nt, Artificial Sequence
  Description of Artificial Sequence: Synthetic oligonucleotide
gggcagcaggucacaugcu

SEQ ID NO: 2947655 - RNA, 19 nt, Artificial Sequence
  Description of Artificial Sequence: Synthetic oligonucleotide
gggcucuuacaggcauuuu

SEQ ID NO: 2947656 - RNA, 19 nt, Artificial Sequence
  Description of Artificial Sequence: Synthetic oligonucleotide
aagacgaccauccaguugg

SEQ ID NO: 2947657 - RNA, 19 nt, Artificial Sequence
  Description of Artificial Sequence: Synthetic oligonucleotide
uucauugucauaaagagau

SEQ ID NO: 2947658 - RNA, 19 nt, Artificial Sequence
  Description of Artificial Sequence: Synthetic oligonucleotide
aagacauugauuucauuuc

SEQ ID NO: 2947659 - RNA, 19 nt, Artificial Sequence
  Description of Artificial Sequence: Synthetic oligonucleotide
auugauuucauuuccaaug

SEQ ID NO: 2947660 - RNA, 19 nt, Artificial Sequence
  Description of Artificial Sequence: Synthetic oligonucleotide
ucauauuuuacugggaugg

SEQ ID NO: 2947661 - RNA, 19 nt, Artificial Sequence
  Description of Artificial Sequence: Synthetic oligonucleotide
aacugugaaacuguagucc

SEQ ID NO: 2947662 - RNA, 19 nt, Artificial Sequence
  Description of Artificial Sequence: Synthetic oligonucleotide
uuuccaaugucacuagugg

SEQ ID NO: 2947663 - RNA, 19 nt, Artificial Sequence
  Description of Artificial Sequence: Synthetic oligonucleotide
acuucauugucauaaagag

SEQ ID NO: 2947664 - RNA, 19 nt, Artificial Sequence
  Description of Artificial Sequence: Synthetic oligonucleotide
acuuguugcaauuaaauga

SEQ ID NO: 2947665 - RNA, 19 nt, Artificial Sequence
  Description of Artificial Sequence: Synthetic oligonucleotide
auauauuuacuucauuguc

SEQ ID NO: 2947666 - RNA, 19 nt, Artificial Sequence
  Description of Artificial Sequence: Synthetic oligonucleotide
uggggaaagagauugacag

SEQ ID NO: 2947667 - RNA, 19 nt, Artificial Sequence
  Description of Artificial Sequence: Synthetic oligonucleotide
uuugauauuuucauuuucu

SEQ ID NO: 2947668 - RNA, 19 nt, Artificial Sequence
  Description of Artificial Sequence: Synthetic oligonucleotide
ucuuuugagauccucagac

SEQ ID NO: 2947669 - RNA, 19 nt, Artificial Sequence
  Description of Artificial Sequence: Synthetic oligonucleotide
ugucauaaagagauugggg

SEQ ID NO: 2947670 - RNA, 19 nt, Artificial Sequence
  Description of Artificial Sequence: Synthetic oligonucleotide
ucugaugucaaguugggga

SEQ ID NO: 2947671 - RNA, 19 nt, Artificial Sequence
  Description of Artificial Sequence: Synthetic oligonucleotide
uuccugaucauguagaaga

SEQ ID NO: 2947672 - RNA, 19 nt, Artificial Sequence
  Description of Artificial Sequence: Synthetic oligonucleotide
uucacaguucacaugauca

SEQ ID NO: 2947673 - RNA, 19 nt, Artificial Sequence
  Description of Artificial Sequence: Synthetic oligonucleotide
gacuucauauuuuacuggg

SEQ ID NO: 2947674 - RNA, 19 nt, Artificial Sequence
  Description of Artificial Sequence: Synthetic oligonucleotide
agacauugauuucauuucc

SEQ ID NO: 2947675 - RNA, 19 nt, Artificial Sequence
  Description of Artificial Sequence: Synthetic oligonucleotide
agaguugauaccaaaaggg

SEQ ID NO: 2947676 - RNA, 19 nt, Artificial Sequence
  Description of Artificial Sequence: Synthetic oligonucleotide
ucacuaguggaauugauga

SEQ ID NO: 2947677 - RNA, 19 nt, Artificial Sequence
  Description of Artificial Sequence: Synthetic oligonucleotide
uguugcaauuaaaugaaug

SEQ ID NO: 2947678 - RNA, 19 nt, Artificial Sequence
  Description of Artificial Sequence: Synthetic oligonucleotide
aauugaugaguucagggau

SEQ ID NO: 2947679 - RNA, 19 nt, Artificial Sequence
  Description of Artificial Sequence: Synthetic oligonucleotide
agaacugugaaacuguagu

SEQ ID NO: 2947680 - RNA, 19 nt, Artificial Sequence
  Description of Artificial Sequence: Synthetic oligonucleotide
gauggauauauuuacuuca

SEQ ID NO: 2947681 - RNA, 19 nt, Artificial Sequence
  Description of Artificial Sequence: Synthetic oligonucleotide
acucgaagaacugugaaac

SEQ ID NO: 2947682 - RNA, 19 nt, Artificial Sequence
  Description of Artificial Sequence: Synthetic oligonucleotide
uacuucauugucauaaaga

SEQ ID NO: 2947683 - RNA, 19 nt, Artificial Sequence
  Description of Artificial Sequence: Synthetic oligonucleotide
aagagauugggguuguucu

SEQ ID NO: 2947684 - RNA, 19 nt, Artificial Sequence
  Description of Artificial Sequence: Synthetic oligonucleotide
gaucauguagaagacauug

SEQ ID NO: 2947685 - RNA, 19 nt, Artificial Sequence
  Description of Artificial Sequence: Synthetic oligonucleotide
ggauauauuuacuucauug

SEQ ID NO: 2947686 - RNA, 19 nt, Artificial Sequence
  Description of Artificial Sequence: Synthetic oligonucleotide
aaaaggguccucaaggcuc

SEQ ID NO: 2947687 - RNA, 19 nt, Artificial Sequence
  Description of Artificial Sequence: Synthetic oligonucleotide
acugugaaacuguaguccg

SEQ ID NO: 2947688 - RNA, 19 nt, Artificial Sequence
  Description of Artificial Sequence: Synthetic oligonucleotide
ucagacuuugauauuuuca

SEQ ID NO: 2947689 - RNA, 19 nt, Artificial Sequence
  Description of Artificial Sequence: Synthetic oligonucleotide
ucagaagacgaccauccag

SEQ ID NO: 2947690 - RNA, 19 nt, Artificial Sequence
  Description of Artificial Sequence: Synthetic oligonucleotide
aaguuggggaaagagauug

SEQ ID NO: 2947691 - RNA, 19 nt, Artificial Sequence
  Description of Artificial Sequence: Synthetic oligonucleotide
guugcaauuaaaugaauga

SEQ ID NO: 2947692 - RNA, 19 nt, Artificial Sequence
  Description of Artificial Sequence: Synthetic oligonucleotide
guugauaccaaaagggucc

SEQ ID NO: 2947693 - RNA, 19 nt, Artificial Sequence
  Description of Artificial Sequence: Synthetic oligonucleotide
ucagggauagucucauugg

SEQ ID NO: 2947694 - RNA, 19 nt, Artificial Sequence
  Description of Artificial Sequence: Synthetic oligonucleotide
aaagagauugggguuguuc

SEQ ID NO: 2947695 - RNA, 19 nt, Artificial Sequence
  Description of Artificial Sequence: Synthetic oligonucleotide
auuuacuucauugucauaa

SEQ ID NO: 2947696 - RNA, 19 nt, Artificial Sequence
  Description of Artificial Sequence: Synthetic oligonucleotide
ucauuuucuucccagaguu

SEQ ID NO: 2947697 - RNA, 19 nt, Artificial Sequence
  Description of Artificial Sequence: Synthetic oligonucleotide
auugggguuguucuucggc

SEQ ID NO: 2947698 - RNA, 19 nt, Artificial Sequence
  Description of Artificial Sequence: Synthetic oligonucleotide
uugucauaaagagauuggg

SEQ ID NO: 2947699 - RNA, 19 nt, Artificial Sequence
  Description of Artificial Sequence: Synthetic oligonucleotide
aaugucacuaguggaauug

SEQ ID NO: 2947700 - RNA, 19 nt, Artificial Sequence
  Description of Artificial Sequence: Synthetic oligonucleotide
uacuuguugcaauuaaaug

SEQ ID NO: 2947701 - RNA, 19 nt, Artificial Sequence
  Description of Artificial Sequence: Synthetic oligonucleotide
uacaggauaaccaucugau

SEQ ID NO: 2947702 - RNA, 19 nt, Artificial Sequence
  Description of Artificial Sequence: Synthetic oligonucleotide
uuacuucauugucauaaag

SEQ ID NO: 2947703 - RNA, 19 nt, Artificial Sequence
  Description of Artificial Sequence: Synthetic oligonucleotide
ugcaauuaaaugaaugauu

SEQ ID NO: 2947704 - RNA, 19 nt, Artificial Sequence
  Description of Artificial Sequence: Synthetic oligonucleotide
cagaguugauaccaaaagg

SEQ ID NO: 2947705 - RNA, 19 nt, Artificial Sequence
  Description of Artificial Sequence: Synthetic oligonucleotide
ucauguagaagacauugau

SEQ ID NO: 2947706 - RNA, 19 nt, Artificial Sequence
  Description of Artificial Sequence: Synthetic oligonucleotide
aggauaaccaucugauguc

SEQ ID NO: 2947707 - RNA, 19 nt, Artificial Sequence
  Description of Artificial Sequence: Synthetic oligonucleotide
ugaaguucuggcauuggga

SEQ ID NO: 2947708 - RNA, 19 nt, Artificial Sequence
  Description of Artificial Sequence: Synthetic oligonucleotide
gaauugaugaguucaggga

SEQ ID NO: 2947709 - RNA, 19 nt, Artificial Sequence
  Description of Artificial Sequence: Synthetic oligonucleotide
ggaauugaugaguucaggg

SEQ ID NO: 2947710 - RNA, 19 nt, Artificial Sequence
  Description of Artificial Sequence: Synthetic oligonucleotide
ugugccucuuuugagaucc

SEQ ID NO: 2947711 - RNA, 19 nt, Artificial Sequence
  Description of Artificial Sequence: Synthetic oligonucleotide
ugagaugugguguucacuc

SEQ ID NO: 2947712 - RNA, 19 nt, Artificial Sequence
  Description of Artificial Sequence: Synthetic oligonucleotide
auuucauuuccaaugucac

SEQ ID NO: 2947713 - RNA, 19 nt, Artificial Sequence
  Description of Artificial Sequence: Synthetic oligonucleotide
uuuugagauccucagacuu

SEQ ID NO: 2947714 - RNA, 19 nt, Artificial Sequence
  Description of Artificial Sequence: Synthetic oligonucleotide
agauugacagcugaaguuc

SEQ ID NO: 2947715 - RNA, 19 nt, Artificial Sequence
  Description of Artificial Sequence: Synthetic oligonucleotide
acaugaucagaagacgacc

SEQ ID NO: 2947716 - RNA, 19 nt, Artificial Sequence
  Description of Artificial Sequence: Synthetic oligonucleotide
ucacaugaucagaagacga

SEQ ID NO: 2947717 - RNA, 19 nt, Artificial Sequence
  Description of Artificial Sequence: Synthetic oligonucleotide
uauuuuacugggauggaua

SEQ ID NO: 2947718 - RNA, 19 nt, Artificial Sequence
  Description of Artificial Sequence: Synthetic oligonucleotide
aagagauugacagcugaag

SEQ ID NO: 2947719 - RNA, 19 nt, Artificial Sequence
  Description of Artificial Sequence: Synthetic oligonucleotide
aguucacaugaucagaaga

SEQ ID NO: 2947720 - RNA, 19 nt, Artificial Sequence
  Description of Artificial Sequence: Synthetic oligonucleotide
uucacaugaucagaagacg

SEQ ID NO: 2947721 - RNA, 19 nt, Artificial Sequence
  Description of Artificial Sequence: Synthetic oligonucleotide
auauuuacuucauugucau

SEQ ID NO: 2947722 - RNA, 19 nt, Artificial Sequence
  Description of Artificial Sequence: Synthetic oligonucleotide
uucauuuccaaugucacua

SEQ ID NO: 2947723 - RNA, 19 nt, Artificial Sequence
  Description of Artificial Sequence: Synthetic oligonucleotide
uucauauuuuacugggaug

SEQ ID NO: 2947724 - RNA, 19 nt, Artificial Sequence
  Description of Artificial Sequence: Synthetic oligonucleotide
gaucagaagacgaccaucc

SEQ ID NO: 2947725 - RNA, 19 nt, Artificial Sequence
  Description of Artificial Sequence: Synthetic oligonucleotide
uccgacuucauauuuuacu

SEQ ID NO: 2947726 - RNA, 19 nt, Artificial Sequence
  Description of Artificial Sequence: Synthetic oligonucleotide
uccaaugucacuaguggaa

SEQ ID NO: 2947727 - RNA, 19 nt, Artificial Sequence
  Description of Artificial Sequence: Synthetic oligonucleotide
gauuucauuuccaauguca

SEQ ID NO: 2947728 - RNA, 19 nt, Artificial Sequence
  Description of Artificial Sequence: Synthetic oligonucleotide
gaugaguucagggauaguc

SEQ ID NO: 2947729 - RNA, 19 nt, Artificial Sequence
  Description of Artificial Sequence: Synthetic oligonucleotide
cuggcauugggaaauggcc

SEQ ID NO: 2947730 - RNA, 19 nt, Artificial Sequence
  Description of Artificial Sequence: Synthetic oligonucleotide
aguggaauugaugaguuca

SEQ ID NO: 2947731 - RNA, 19 nt, Artificial Sequence
  Description of Artificial Sequence: Synthetic oligonucleotide
caauuaaaugaaugauugc

SEQ ID NO: 2947732 - RNA, 19 nt, Artificial Sequence
  Description of Artificial Sequence: Synthetic oligonucleotide
aguuggguagaguacagga

SEQ ID NO: 2947733 - RNA, 19 nt, Artificial Sequence
  Description of Artificial Sequence: Synthetic oligonucleotide
uggauugugccucuuuuga

SEQ ID NO: 2947734 - RNA, 19 nt, Artificial Sequence
  Description of Artificial Sequence: Synthetic oligonucleotide
ucuggcauugggaaauggc

SEQ ID NO: 2947735 - RNA, 19 nt, Artificial Sequence
  Description of Artificial Sequence: Synthetic oligonucleotide
ugugguguucacucgaaga

SEQ ID NO: 2947736 - RNA, 19 nt, Artificial Sequence
  Description of Artificial Sequence: Synthetic oligonucleotide
agagauugacagcugaagu

SEQ ID NO: 2947737 - RNA, 19 nt, Artificial Sequence
  Description of Artificial Sequence: Synthetic oligonucleotide
aguugauaccaaaaggguc

SEQ ID NO: 2947738 - RNA, 19 nt, Artificial Sequence
  Description of Artificial Sequence: Synthetic oligonucleotide
cauugucauaaagagauug

SEQ ID NO: 2947739 - RNA, 19 nt, Artificial Sequence
  Description of Artificial Sequence: Synthetic oligonucleotide
auugucauaaagagauugg

SEQ ID NO: 2947740 - RNA, 19 nt, Artificial Sequence
  Description of Artificial Sequence: Synthetic oligonucleotide
auaaccaucugaugucaag

SEQ ID NO: 2947741 - RNA, 19 nt, Artificial Sequence
  Description of Artificial Sequence: Synthetic oligonucleotide
ucgaagaacugugaaacug

SEQ ID NO: 2947742 - RNA, 19 nt, Artificial Sequence
  Description of Artificial Sequence: Synthetic oligonucleotide
aaaggguccucaaggcucc

SEQ ID NO: 2947743 - RNA, 19 nt, Artificial Sequence
  Description of Artificial Sequence: Synthetic oligonucleotide
uucauuuucuucccagagu

SEQ ID NO: 2947744 - RNA, 19 nt, Artificial Sequence
  Description of Artificial Sequence: Synthetic oligonucleotide
ugaaacuguaguccgacuu

SEQ ID NO: 2947745 - RNA, 19 nt, Artificial Sequence
  Description of Artificial Sequence: Synthetic oligonucleotide
uggcauugggaaauggccc

SEQ ID NO: 2947746 - RNA, 19 nt, Artificial Sequence
  Description of Artificial Sequence: Synthetic oligonucleotide
ucuacuuguugcaauuaaa

SEQ ID NO: 2947747 - RNA, 19 nt, Artificial Sequence
  Description of Artificial Sequence: Synthetic oligonucleotide
uccaauugagauguggugu

SEQ ID NO: 2947748 - RNA, 19 nt, Artificial Sequence
  Description of Artificial Sequence: Synthetic oligonucleotide
uagaguacaggauaaccau

SEQ ID NO: 2947749 - RNA, 19 nt, Artificial Sequence
  Description of Artificial Sequence: Synthetic oligonucleotide
uuggguagaguacaggaua

SEQ ID NO: 2947750 - RNA, 19 nt, Artificial Sequence
  Description of Artificial Sequence: Synthetic oligonucleotide
gaagacauugauuucauuu

SEQ ID NO: 2947751 - RNA, 19 nt, Artificial Sequence
  Description of Artificial Sequence: Synthetic oligonucleotide
ucucauuggcuccaauuga

SEQ ID NO: 2947752 - RNA, 19 nt, Artificial Sequence
  Description of Artificial Sequence: Synthetic oligonucleotide
gaaauggccccuuuuccug

SEQ ID NO: 2947753 - RNA, 19 nt, Artificial Sequence
  Description of Artificial Sequence: Synthetic oligonucleotide
auugagaugugguguucac

SEQ ID NO: 2947754 - RNA, 19 nt, Artificial Sequence
  Description of Artificial Sequence: Synthetic oligonucleotide
gucucauuggcuccaauug

SEQ ID NO: 2947755 - RNA, 19 nt, Artificial Sequence
  Description of Artificial Sequence: Synthetic oligonucleotide
cuuguugcaauuaaaugaa

SEQ ID NO: 2947756 - RNA, 19 nt, Artificial Sequence
  Description of Artificial Sequence: Synthetic oligonucleotide
cugggauggauauauuuac

SEQ ID NO: 2947757 - RNA, 19 nt, Artificial Sequence
  Description of Artificial Sequence: Synthetic oligonucleotide
ugucaaguuggggaaagag

SEQ ID NO: 2947758 - RNA, 19 nt, Artificial Sequence
  Description of Artificial Sequence: Synthetic oligonucleotide
cauaaagagauugggguug

SEQ ID NO: 2947759 - RNA, 19 nt, Artificial Sequence
  Description of Artificial Sequence: Synthetic oligonucleotide
gauugugccucuuuugaga

SEQ ID NO: 2947760 - RNA, 19 nt, Artificial Sequence
  Description of Artificial Sequence: Synthetic oligonucleotide
gucauaaagagauuggggu

SEQ ID NO: 2947761 - RNA, 19 nt, Artificial Sequence
  Description of Artificial Sequence: Synthetic oligonucleotide
auuggcuccaauugagaug

SEQ ID NO: 2947762 - RNA, 19 nt, Artificial Sequence
  Description of Artificial Sequence: Synthetic oligonucleotide
cucauuggcuccaauugag

SEQ ID NO: 2947763 - RNA, 19 nt, Artificial Sequence
  Description of Artificial Sequence: Synthetic oligonucleotide
aaggcuccgggguucacag

SEQ ID NO: 2947764 - RNA, 19 nt, Artificial Sequence
  Description of Artificial Sequence: Synthetic oligonucleotide
auuuuacugggauggauau

SEQ ID NO: 2947765 - RNA, 19 nt, Artificial Sequence
  Description of Artificial Sequence: Synthetic oligonucleotide
uguucuucggcuugucuac

SEQ ID NO: 2947766 - RNA, 19 nt, Artificial Sequence
  Description of Artificial Sequence: Synthetic oligonucleotide
ugcaauccuggauugugcc

SEQ ID NO: 2947767 - RNA, 19 nt, Artificial Sequence
  Description of Artificial Sequence: Synthetic oligonucleotide
gauccucagacuuugauau

SEQ ID NO: 2947768 - RNA, 19 nt, Artificial Sequence
  Description of Artificial Sequence: Synthetic oligonucleotide
auuuucuucccagaguuga

SEQ ID NO: 2947769 - RNA, 19 nt, Artificial Sequence
  Description of Artificial Sequence: Synthetic oligonucleotide
acuaguggaauugaugagu

SEQ ID NO: 2947770 - RNA, 19 nt, Artificial Sequence
  Description of Artificial Sequence: Synthetic oligonucleotide
ucauuuccaaugucacuag

SEQ ID NO: 2947771 - RNA, 19 nt, Artificial Sequence
  Description of Artificial Sequence: Synthetic oligonucleotide
ucauaaagagauugggguu

SEQ ID NO: 2947772 - RNA, 19 nt, Artificial Sequence
  Description of Artificial Sequence: Synthetic oligonucleotide
gaaacuguaguccgacuuc

SEQ ID NO: 2947773 - RNA, 19 nt, Artificial Sequence
  Description of Artificial Sequence: Synthetic oligonucleotide
aauugagaugugguguuca

SEQ ID NO: 2947774 - RNA, 19 nt, Artificial Sequence
  Description of Artificial Sequence: Synthetic oligonucleotide
uauuuucauuuucuuccca

SEQ ID NO: 2947775 - RNA, 19 nt, Artificial Sequence
  Description of Artificial Sequence: Synthetic oligonucleotide
cuuugauauuuucauuuuc

SEQ ID NO: 2947776 - RNA, 19 nt, Artificial Sequence
  Description of Artificial Sequence: Synthetic oligonucleotide
uugacagcugaaguucugg

SEQ ID NO: 2947777 - RNA, 19 nt, Artificial Sequence
  Description of Artificial Sequence: Synthetic oligonucleotide
uuggggaaagagauugaca

SEQ ID NO: 2947778 - RNA, 19 nt, Artificial Sequence
  Description of Artificial Sequence: Synthetic oligonucleotide
guucacaugaucagaagac

SEQ ID NO: 2947779 - RNA, 19 nt, Artificial Sequence
  Description of Artificial Sequence: Synthetic oligonucleotide
uuucauuuccaaugucacu

SEQ ID NO: 2947780 - RNA, 19 nt, Artificial Sequence
  Description of Artificial Sequence: Synthetic oligonucleotide
cugaaguucuggcauuggg

SEQ ID NO: 2947781 - RNA, 19 nt, Artificial Sequence
  Description of Artificial Sequence: Synthetic oligonucleotide
gauaccaaaaggguccuca

SEQ ID NO: 2947782 - RNA, 19 nt, Artificial Sequence
  Description of Artificial Sequence: Synthetic oligonucleotide
gaacugugaaacuguaguc

SEQ ID NO: 2947783 - RNA, 19 nt, Artificial Sequence
  Description of Artificial Sequence: Synthetic oligonucleotide
gagaugugguguucacucg

SEQ ID NO: 2947784 - RNA, 19 nt, Artificial Sequence
  Description of Artificial Sequence: Synthetic oligonucleotide
ccaucugaugucaaguugg

SEQ ID NO: 2947785 - RNA, 19 nt, Artificial Sequence
  Description of Artificial Sequence: Synthetic oligonucleotide
uugaugaguucagggauag

SEQ ID NO: 2947786 - RNA, 19 nt, Artificial Sequence
  Description of Artificial Sequence: Synthetic oligonucleotide
uggaauugaugaguucagg

SEQ ID NO: 2947787 - RNA, 19 nt, Artificial Sequence
  Description of Artificial Sequence: Synthetic oligonucleotide
uuccaaugucacuagugga

SEQ ID NO: 2947788 - RNA, 19 nt, Artificial Sequence
  Description of Artificial Sequence: Synthetic oligonucleotide
agauugggguuguucuucg

SEQ ID NO: 2947789 - RNA, 19 nt, Artificial Sequence
  Description of Artificial Sequence: Synthetic oligonucleotide
uuuacuucauugucauaaa

SEQ ID NO: 2947790 - RNA, 19 nt, Artificial Sequence
  Description of Artificial Sequence: Synthetic oligonucleotide
uguagaagacauugauuuc

SEQ ID NO: 2947791 - RNA, 19 nt, Artificial Sequence
  Description of Artificial Sequence: Synthetic oligonucleotide
uucacucgaagaacuguga

SEQ ID NO: 2947792 - RNA, 19 nt, Artificial Sequence
  Description of Artificial Sequence: Synthetic oligonucleotide
ugggaaauggccccuuuuc

SEQ ID NO: 2947793 - RNA, 19 nt, Artificial Sequence
  Description of Artificial Sequence: Synthetic oligonucleotide
uugauauuuucauuuucuu

SEQ ID NO: 2947794 - RNA, 19 nt, Artificial Sequence
  Description of Artificial Sequence: Synthetic oligonucleotide
accaucugaugucaaguug

SEQ ID NO: 2947795 - RNA, 19 nt, Artificial Sequence
  Description of Artificial Sequence: Synthetic oligonucleotide
gaugucaaguuggggaaag

SEQ ID NO: 2947796 - RNA, 19 nt, Artificial Sequence
  Description of Artificial Sequence: Synthetic oligonucleotide
auuuccaaugucacuagug

SEQ ID NO: 2947797 - RNA, 19 nt, Artificial Sequence
  Description of Artificial Sequence: Synthetic oligonucleotide
uaaccaucugaugucaagu

SEQ ID NO: 2947798 - RNA, 19 nt, Artificial Sequence
  Description of Artificial Sequence: Synthetic oligonucleotide
uuguucuucggcuugucua

SEQ ID NO: 2947799 - RNA, 19 nt, Artificial Sequence
  Description of Artificial Sequence: Synthetic oligonucleotide
uugagauccucagacuuug

SEQ ID NO: 2947800 - RNA, 19 nt, Artificial Sequence
  Description of Artificial Sequence: Synthetic oligonucleotide
uuuuccugaucauguagaa

SEQ ID NO: 2947801 - RNA, 19 nt, Artificial Sequence
  Description of Artificial Sequence: Synthetic oligonucleotide
aagaacugugaaacuguag

SEQ ID NO: 2947802 - RNA, 19 nt, Artificial Sequence
  Description of Artificial Sequence: Synthetic oligonucleotide
ugugaaacuguaguccgac

SEQ ID NO: 2947803 - RNA, 19 nt, Artificial Sequence
  Description of Artificial Sequence: Synthetic oligonucleotide
aaacuguaguccgacuuca

SEQ ID NO: 2947804 - RNA, 19 nt, Artificial Sequence
  Description of Artificial Sequence: Synthetic oligonucleotide
guagaguacaggauaacca

SEQ ID NO: 2947805 - RNA, 19 nt, Artificial Sequence
  Description of Artificial Sequence: Synthetic oligonucleotide
caucugaugucaaguuggg

SEQ ID NO: 2947806 - RNA, 19 nt, Artificial Sequence
  Description of Artificial Sequence: Synthetic oligonucleotide
ugggauggauauauuuacu

SEQ ID NO: 2947807 - RNA, 19 nt, Artificial Sequence
  Description of Artificial Sequence: Synthetic oligonucleotide
uccaguuggguagaguaca

SEQ ID NO: 2947808 - RNA, 19 nt, Artificial Sequence
  Description of Artificial Sequence: Synthetic oligonucleotide
aaauggccccuuuuccuga

SEQ ID NO: 2947809 - RNA, 19 nt, Artificial Sequence
  Description of Artificial Sequence: Synthetic oligonucleotide
uuuccugaucauguagaag

SEQ ID NO: 2947810 - RNA, 19 nt, Artificial Sequence
  Description of Artificial Sequence: Synthetic oligonucleotide
uuugagauccucagacuuu

SEQ ID NO: 2947811 - RNA, 19 nt, Artificial Sequence
  Description of Artificial Sequence: Synthetic oligonucleotide
ucauuggcuccaauugaga

SEQ ID NO: 2947812 - RNA, 19 nt, Artificial Sequence
  Description of Artificial Sequence: Synthetic oligonucleotide
aaccaucugaugucaaguu

SEQ ID NO: 2947813 - RNA, 19 nt, Artificial Sequence
  Description of Artificial Sequence: Synthetic oligonucleotide
gaagacgaccauccaguug

SEQ ID NO: 2947814 - RNA, 19 nt, Artificial Sequence
  Description of Artificial Sequence: Synthetic oligonucleotide
caugaucagaagacgacca

SEQ ID NO: 2947815 - RNA, 19 nt, Artificial Sequence
  Description of Artificial Sequence: Synthetic oligonucleotide
ucuucggcuugucuacuug

SEQ ID NO: 2947816 - RNA, 19 nt, Artificial Sequence
  Description of Artificial Sequence: Synthetic oligonucleotide
ugacagcugaaguucuggc

SEQ ID NO: 2947817 - RNA, 19 nt, Artificial Sequence
  Description of Artificial Sequence: Synthetic oligonucleotide
ucacucgaagaacugugaa

SEQ ID NO: 2947818 - RNA, 19 nt, Artificial Sequence
  Description of Artificial Sequence: Synthetic oligonucleotide
cuccaauugagauguggug

SEQ ID NO: 2947819 - RNA, 19 nt, Artificial Sequence
  Description of Artificial Sequence: Synthetic oligonucleotide
auugugccucuuuugagau

SEQ ID NO: 2947820 - RNA, 19 nt, Artificial Sequence
  Description of Artificial Sequence: Synthetic oligonucleotide
uagaagacauugauuucau

SEQ ID NO: 2947821 - RNA, 19 nt, Artificial Sequence
  Description of Artificial Sequence: Synthetic oligonucleotide
uugggguuguucuucggcu

SEQ ID NO: 2947822 - RNA, 19 nt, Artificial Sequence
  Description of Artificial Sequence: Synthetic oligonucleotide
acuuugauauuuucauuuu

SEQ ID NO: 2947823 - RNA, 19 nt, Artificial Sequence
  Description of Artificial Sequence: Synthetic oligonucleotide
acaggauaaccaucugaug

SEQ ID NO: 2947824 - RNA, 19 nt, Artificial Sequence
  Description of Artificial Sequence: Synthetic oligonucleotide
cagggauagucucauuggc

SEQ ID NO: 2947825 - RNA, 19 nt, Artificial Sequence
  Description of Artificial Sequence: Synthetic oligonucleotide
ucggcuugucuacuuguug

SEQ ID NO: 2947826 - RNA, 19 nt, Artificial Sequence
  Description of Artificial Sequence: Synthetic oligonucleotide
agaugugguguucacucga

SEQ ID NO: 2947827 - RNA, 19 nt, Artificial Sequence
  Description of Artificial Sequence: Synthetic oligonucleotide
uccugaucauguagaagac

SEQ ID NO: 2947828 - RNA, 19 nt, Artificial Sequence
  Description of Artificial Sequence: Synthetic oligonucleotide
uguucacucgaagaacugu

SEQ ID NO: 2947829 - RNA, 19 nt, Artificial Sequence
  Description of Artificial Sequence: Synthetic oligonucleotide
guacaggauaaccaucuga

SEQ ID NO: 2947830 - RNA, 19 nt, Artificial Sequence
  Description of Artificial Sequence: Synthetic oligonucleotide
agauccucagacuuugaua

SEQ ID NO: 2947831 - RNA, 19 nt, Artificial Sequence
  Description of Artificial Sequence: Synthetic oligonucleotide
cuucauugucauaaagaga

SEQ ID NO: 2947832 - RNA, 19 nt, Artificial Sequence
  Description of Artificial Sequence: Synthetic oligonucleotide
agaguacaggauaaccauc

SEQ ID NO: 2947833 - RNA, 19 nt, Artificial Sequence
  Description of Artificial Sequence: Synthetic oligonucleotide
gucacuaguggaauugaug

SEQ ID NO: 2947834 - RNA, 19 nt, Artificial Sequence
  Description of Artificial Sequence: Synthetic oligonucleotide
gacagcugaaguucuggca

SEQ ID NO: 2947835 - RNA, 19 nt, Artificial Sequence
  Description of Artificial Sequence: Synthetic oligonucleotide
caggauaaccaucugaugu

SEQ ID NO: 2947836 - RNA, 19 nt, Artificial Sequence
  Description of Artificial Sequence: Synthetic oligonucleotide
cacuaguggaauugaugag

SEQ ID NO: 2947837 - RNA, 19 nt, Artificial Sequence
  Description of Artificial Sequence: Synthetic oligonucleotide
gguagaguacaggauaacc

SEQ ID NO: 2947838 - RNA, 19 nt, Artificial Sequence
  Description of Artificial Sequence: Synthetic oligonucleotide
aaagagauugacagcugaa

SEQ ID NO: 2947839 - RNA, 19 nt, Artificial Sequence
  Description of Artificial Sequence: Synthetic oligonucleotide
ggguucacaguucacauga

SEQ ID NO: 2947840 - RNA, 19 nt, Artificial Sequence
  Description of Artificial Sequence: Synthetic oligonucleotide
guucacucgaagaacugug

SEQ ID NO: 2947841 - RNA, 19 nt, Artificial Sequence
  Description of Artificial Sequence: Synthetic oligonucleotide
aguucuggcauugggaaau

SEQ ID NO: 2947842 - RNA, 19 nt, Artificial Sequence
  Description of Artificial Sequence: Synthetic oligonucleotide
ugaucagaagacgaccauc

SEQ ID NO: 2947843 - RNA, 19 nt, Artificial Sequence
  Description of Artificial Sequence: Synthetic oligonucleotide
gauugggguuguucuucgg

SEQ ID NO: 2947844 - RNA, 19 nt, Artificial Sequence
  Description of Artificial Sequence: Synthetic oligonucleotide
ccagaguugauaccaaaag

SEQ ID NO: 2947845 - RNA, 19 nt, Artificial Sequence
  Description of Artificial Sequence: Synthetic oligonucleotide
aguacaggauaaccaucug

SEQ ID NO: 2947846 - RNA, 19 nt, Artificial Sequence
  Description of Artificial Sequence: Synthetic oligonucleotide
cugcaauccuggauugugc

SEQ ID NO: 2947847 - RNA, 19 nt, Artificial Sequence
  Description of Artificial Sequence: Synthetic oligonucleotide
agucucauuggcuccaauu

SEQ ID NO: 2947848 - RNA, 19 nt, Artificial Sequence
  Description of Artificial Sequence: Synthetic oligonucleotide
uguaguccgacuucauauu

SEQ ID NO: 2947849 - RNA, 19 nt, Artificial Sequence
  Description of Artificial Sequence: Synthetic oligonucleotide
aauccuggauugugccucu

SEQ ID NO: 2947850 - RNA, 19 nt, Artificial Sequence
  Description of Artificial Sequence: Synthetic oligonucleotide
uggccccuuuuccugauca

SEQ ID NO: 2947851 - RNA, 19 nt, Artificial Sequence
  Description of Artificial Sequence: Synthetic oligonucleotide
uugucuacuuguugcaauu

SEQ ID NO: 2947852 - RNA, 19 nt, Artificial Sequence
  Description of Artificial Sequence: Synthetic oligonucleotide
cuggauugugccucuuuug

SEQ ID NO: 2947853 - RNA, 19 nt, Artificial Sequence
  Description of Artificial Sequence: Synthetic oligonucleotide
ccgacuucauauuuuacug

SEQ ID NO: 2947854 - RNA, 19 nt, Artificial Sequence
  Description of Artificial Sequence: Synthetic oligonucleotide
uggauauauuuacuucauu

SEQ ID NO: 2947855 - RNA, 19 nt, Artificial Sequence
  Description of Artificial Sequence: Synthetic oligonucleotide
uccucagacuuugauauuu

SEQ ID NO: 2947856 - RNA, 19 nt, Artificial Sequence
  Description of Artificial Sequence: Synthetic oligonucleotide
cugaucauguagaagacau

SEQ ID NO: 2947857 - RNA, 19 nt, Artificial Sequence
  Description of Artificial Sequence: Synthetic oligonucleotide
acgaccauccaguugggua

SEQ ID NO: 2947858 - RNA, 19 nt, Artificial Sequence
  Description of Artificial Sequence: Synthetic oligonucleotide
ugucacuaguggaauugau

SEQ ID NO: 2947859 - RNA, 19 nt, Artificial Sequence
  Description of Artificial Sequence: Synthetic oligonucleotide
cucagacuuugauauuuuc

SEQ ID NO: 2947860 - RNA, 19 nt, Artificial Sequence
  Description of Artificial Sequence: Synthetic oligonucleotide
cauccaguuggguagagua

SEQ ID NO: 2947861 - RNA, 19 nt, Artificial Sequence
  Description of Artificial Sequence: Synthetic oligonucleotide
guucacaguucacaugauc

SEQ ID NO: 2947862 - RNA, 19 nt, Artificial Sequence
  Description of Artificial Sequence: Synthetic oligonucleotide
aguccgacuucauauuuua

SEQ ID NO: 2947863 - RNA, 19 nt, Artificial Sequence
  Description of Artificial Sequence: Synthetic oligonucleotide
uuuucuucccagaguugau

SEQ ID NO: 2947864 - RNA, 19 nt, Artificial Sequence
  Description of Artificial Sequence: Synthetic oligonucleotide
cauuuucuucccagaguug

SEQ ID NO: 2947865 - RNA, 19 nt, Artificial Sequence
  Description of Artificial Sequence: Synthetic oligonucleotide
gugguguucacucgaagaa

SEQ ID NO: 2947866 - RNA, 19 nt, Artificial Sequence
  Description of Artificial Sequence: Synthetic oligonucleotide
caguucacaugaucagaag

SEQ ID NO: 2947867 - RNA, 19 nt, Artificial Sequence
  Description of Artificial Sequence: Synthetic oligonucleotide
auauuuuacugggauggau

SEQ ID NO: 2947868 - RNA, 19 nt, Artificial Sequence
  Description of Artificial Sequence: Synthetic oligonucleotide
guuggggaaagagauugac

SEQ ID NO: 2947869 - RNA, 19 nt, Artificial Sequence
  Description of Artificial Sequence: Synthetic oligonucleotide
caauccuggauugugccuc

SEQ ID NO: 2947870 - RNA, 19 nt, Artificial Sequence
  Description of Artificial Sequence: Synthetic oligonucleotide
guggaauugaugaguucag

SEQ ID NO: 2947871 - RNA, 19 nt, Artificial Sequence
  Description of Artificial Sequence: Synthetic oligonucleotide
uuguugcaauuaaaugaau

SEQ ID NO: 2947872 - RNA, 19 nt, Artificial Sequence
  Description of Artificial Sequence: Synthetic oligonucleotide
gagauugacagcugaaguu

SEQ ID NO: 2947873 - RNA, 19 nt, Artificial Sequence
  Description of Artificial Sequence: Synthetic oligonucleotide
auccaguuggguagaguac

SEQ ID NO: 2947874 - RNA, 19 nt, Artificial Sequence
  Description of Artificial Sequence: Synthetic oligonucleotide
augugguguucacucgaag

SEQ ID NO: 2947875 - RNA, 19 nt, Artificial Sequence
  Description of Artificial Sequence: Synthetic oligonucleotide
gauagucucauuggcucca

SEQ ID NO: 2947876 - RNA, 19 nt, Artificial Sequence
  Description of Artificial Sequence: Synthetic oligonucleotide
ggcauugggaaauggcccc

SEQ ID NO: 2947877 - RNA, 19 nt, Artificial Sequence
  Description of Artificial Sequence: Synthetic oligonucleotide
acaguucacaugaucagaa

SEQ ID NO: 2947878 - RNA, 19 nt, Artificial Sequence
  Description of Artificial Sequence: Synthetic oligonucleotide
uucuggcauugggaaaugg

SEQ ID NO: 2947879 - RNA, 19 nt, Artificial Sequence
  Description of Artificial Sequence: Synthetic oligonucleotide
cagacuuugauauuuucau

SEQ ID NO: 2947880 - RNA, 19 nt, Artificial Sequence
  Description of Artificial Sequence: Synthetic oligonucleotide
ugguguucacucgaagaac

SEQ ID NO: 2947881 - RNA, 19 nt, Artificial Sequence
  Description of Artificial Sequence: Synthetic oligonucleotide
gaguacaggauaaccaucu

SEQ ID NO: 2947882 - RNA, 19 nt, Artificial Sequence
  Description of Artificial Sequence: Synthetic oligonucleotide
ugaucauguagaagacauu

SEQ ID NO: 2947883 - RNA, 19 nt, Artificial Sequence
  Description of Artificial Sequence: Synthetic oligonucleotide
ggauugugccucuuuugag

SEQ ID NO: 2947884 - RNA, 19 nt, Artificial Sequence
  Description of Artificial Sequence: Synthetic oligonucleotide
cugaugucaaguuggggaa

SEQ ID NO: 2947885 - RNA, 19 nt, Artificial Sequence
  Description of Artificial Sequence: Synthetic oligonucleotide
gggaaauggccccuuuucc

SEQ ID NO: 2947886 - RNA, 19 nt, Artificial Sequence
  Description of Artificial Sequence: Synthetic oligonucleotide
cuacuuguugcaauuaaau

SEQ ID NO: 2947887 - RNA, 19 nt, Artificial Sequence
  Description of Artificial Sequence: Synthetic oligonucleotide
uugagaugugguguucacu

SEQ ID NO: 2947888 - RNA, 19 nt, Artificial Sequence
  Description of Artificial Sequence: Synthetic oligonucleotide
acuguaguccgacuucaua

SEQ ID NO: 2947889 - RNA, 19 nt, Artificial Sequence
  Description of Artificial Sequence: Synthetic oligonucleotide
cuucauauuuuacugggau

SEQ ID NO: 2947890 - RNA, 19 nt, Artificial Sequence
  Description of Artificial Sequence: Synthetic oligonucleotide
augaucagaagacgaccau

SEQ ID NO: 2947891 - RNA, 19 nt, Artificial Sequence
  Description of Artificial Sequence: Synthetic oligonucleotide
gaguugauaccaaaagggu

SEQ ID NO: 2947892 - RNA, 19 nt, Artificial Sequence
  Description of Artificial Sequence: Synthetic oligonucleotide
uaguccgacuucauauuuu

SEQ ID NO: 2947893 - RNA, 19 nt, Artificial Sequence
  Description of Artificial Sequence: Synthetic oligonucleotide
aucagaagacgaccaucca

SEQ ID NO: 2947894 - RNA, 19 nt, Artificial Sequence
  Description of Artificial Sequence: Synthetic oligonucleotide
ggauagucucauuggcucc

SEQ ID NO: 2947895 - RNA, 19 nt, Artificial Sequence
  Description of Artificial Sequence: Synthetic oligonucleotide
uugauaccaaaaggguccu

SEQ ID NO: 2947896 - RNA, 19 nt, Artificial Sequence
  Description of Artificial Sequence: Synthetic oligonucleotide
cagaagacgaccauccagu

SEQ ID NO: 2947897 - RNA, 19 nt, Artificial Sequence
  Description of Artificial Sequence: Synthetic oligonucleotide
auaaagagauugggguugu

SEQ ID NO: 2947898 - RNA, 19 nt, Artificial Sequence
  Description of Artificial Sequence: Synthetic oligonucleotide
ccucuuuugagauccucag

SEQ ID NO: 2947899 - RNA, 19 nt, Artificial Sequence
  Description of Artificial Sequence: Synthetic oligonucleotide
ucauugucauaaagagauu

SEQ ID NO: 2947900 - RNA, 19 nt, Artificial Sequence
  Description of Artificial Sequence: Synthetic oligonucleotide
auggauauauuuacuucau

SEQ ID NO: 2947901 - RNA, 19 nt, Artificial Sequence
  Description of Artificial Sequence: Synthetic oligonucleotide
ccuuuuccugaucauguag

SEQ ID NO: 2947902 - RNA, 19 nt, Artificial Sequence
  Description of Artificial Sequence: Synthetic oligonucleotide
ugagauccucagacuuuga

SEQ ID NO: 2947903 - RNA, 19 nt, Artificial Sequence
  Description of Artificial Sequence: Synthetic oligonucleotide
gucuacuuguugcaauuaa

SEQ ID NO: 2947904 - RNA, 19 nt, Artificial Sequence
  Description of Artificial Sequence: Synthetic oligonucleotide
uugggaaauggccccuuuu

SEQ ID NO: 2947905 - RNA, 19 nt, Artificial Sequence
  Description of Artificial Sequence: Synthetic oligonucleotide
aguucagggauagucucau

SEQ ID NO: 2947906 - RNA, 19 nt, Artificial Sequence
  Description of Artificial Sequence: Synthetic oligonucleotide
uauuuacuucauugucaua

SEQ ID NO: 2947907 - RNA, 19 nt, Artificial Sequence
  Description of Artificial Sequence: Synthetic oligonucleotide
aauggccccuuuuccugau

SEQ ID NO: 2947908 - RNA, 19 nt, Artificial Sequence
  Description of Artificial Sequence: Synthetic oligonucleotide
acuucauauuuuacuggga

SEQ ID NO: 2947909 - RNA, 19 nt, Artificial Sequence
  Description of Artificial Sequence: Synthetic oligonucleotide
uaguggaauugaugaguuc

SEQ ID NO: 2947910 - RNA, 19 nt, Artificial Sequence
  Description of Artificial Sequence: Synthetic oligonucleotide
cuguaguccgacuucauau

SEQ ID NO: 2947911 - RNA, 19 nt, Artificial Sequence
  Description of Artificial Sequence: Synthetic oligonucleotide
ggggaaagagauugacagc

SEQ ID NO: 2947912 - RNA, 19 nt, Artificial Sequence
  Description of Artificial Sequence: Synthetic oligonucleotide
ggcuccaauugagaugugg

SEQ ID NO: 2947913 - RNA, 19 nt, Artificial Sequence
  Description of Artificial Sequence: Synthetic oligonucleotide
ucccagaguugauaccaaa

SEQ ID NO: 2947914 - RNA, 19 nt, Artificial Sequence
  Description of Artificial Sequence: Synthetic oligonucleotide
uucggcuugucuacuuguu

SEQ ID NO: 2947915 - RNA, 19 nt, Artificial Sequence
  Description of Artificial Sequence: Synthetic oligonucleotide
agcugaaguucuggcauug

SEQ ID NO: 2947916 - RNA, 19 nt, Artificial Sequence
  Description of Artificial Sequence: Synthetic oligonucleotide
cgacuucauauuuuacugg

SEQ ID NO: 2947917 - RNA, 19 nt, Artificial Sequence
  Description of Artificial Sequence: Synthetic oligonucleotide
cacucgaagaacugugaaa

SEQ ID NO: 2947918 - RNA, 19 nt, Artificial Sequence
  Description of Artificial Sequence: Synthetic oligonucleotide
uucccagaguugauaccaa

SEQ ID NO: 2947919 - RNA, 19 nt, Artificial Sequence
  Description of Artificial Sequence: Synthetic oligonucleotide
auugaugaguucagggaua

SEQ ID NO: 2947920 - RNA, 19 nt, Artificial Sequence
  Description of Artificial Sequence: Synthetic oligonucleotide
ugucuacuuguugcaauua

SEQ ID NO: 2947921 - RNA, 19 nt, Artificial Sequence
  Description of Artificial Sequence: Synthetic oligonucleotide
caguuggguagaguacagg

SEQ ID NO: 2947922 - RNA, 19 nt, Artificial Sequence
  Description of Artificial Sequence: Synthetic oligonucleotide
agaagacgaccauccaguu

SEQ ID NO: 2947923 - RNA, 19 nt, Artificial Sequence
  Description of Artificial Sequence: Synthetic oligonucleotide
agaagacauugauuucauu

SEQ ID NO: 2947924 - RNA, 19 nt, Artificial Sequence
  Description of Artificial Sequence: Synthetic oligonucleotide
ggguccucaaggcuccggg

SEQ ID NO: 2947925 - RNA, 19 nt, Artificial Sequence
  Description of Artificial Sequence: Synthetic oligonucleotide
auugacagcugaaguucug

SEQ ID NO: 2947926 - RNA, 19 nt, Artificial Sequence
  Description of Artificial Sequence: Synthetic oligonucleotide
ugaugucaaguuggggaaa

SEQ ID NO: 2947927 - RNA, 19 nt, Artificial Sequence
  Description of Artificial Sequence: Synthetic oligonucleotide
uuuuacugggauggauaua

SEQ ID NO: 2947928 - RNA, 19 nt, Artificial Sequence
  Description of Artificial Sequence: Synthetic oligonucleotide
augucacuaguggaauuga

SEQ ID NO: 2947929 - RNA, 19 nt, Artificial Sequence
  Description of Artificial Sequence: Synthetic oligonucleotide
cucuuuugagauccucaga

SEQ ID NO: 2947930 - RNA, 19 nt, Artificial Sequence
  Description of Artificial Sequence: Synthetic oligonucleotide
cacaguucacaugaucaga

SEQ ID NO: 2947931 - RNA, 19 nt, Artificial Sequence
  Description of Artificial Sequence: Synthetic oligonucleotide
cuuuugagauccucagacu

SEQ ID NO: 2947932 - RNA, 19 nt, Artificial Sequence
  Description of Artificial Sequence: Synthetic oligonucleotide
cauugauuucauuuccaau

SEQ ID NO: 2947933 - RNA, 19 nt, Artificial Sequence
  Description of Artificial Sequence: Synthetic oligonucleotide
ugggguuguucuucggcuu

SEQ ID NO: 2947934 - RNA, 19 nt, Artificial Sequence
  Description of Artificial Sequence: Synthetic oligonucleotide
gagauccucagacuuugau

SEQ ID NO: 2947935 - RNA, 19 nt, Artificial Sequence
  Description of Artificial Sequence: Synthetic oligonucleotide
gguccucaaggcuccgggg

SEQ ID NO: 2947936 - RNA, 19 nt, Artificial Sequence
  Description of Artificial Sequence: Synthetic oligonucleotide
gauaaccaucugaugucaa

SEQ ID NO: 2947937 - RNA, 19 nt, Artificial Sequence
  Description of Artificial Sequence: Synthetic oligonucleotide
gauugacagcugaaguucu

SEQ ID NO: 2947938 - RNA, 19 nt, Artificial Sequence
  Description of Artificial Sequence: Synthetic oligonucleotide
guguucacucgaagaacug

SEQ ID NO: 2947939 - RNA, 19 nt, Artificial Sequence
  Description of Artificial Sequence: Synthetic oligonucleotide
cauuggcuccaauugagau

SEQ ID NO: 2947940 - RNA, 19 nt, Artificial Sequence
  Description of Artificial Sequence: Synthetic oligonucleotide
uccuggauugugccucuuu

SEQ ID NO: 2947941 - RNA, 19 nt, Artificial Sequence
  Description of Artificial Sequence: Synthetic oligonucleotide
cuaguggaauugaugaguu

SEQ ID NO: 2947942 - RNA, 19 nt, Artificial Sequence
  Description of Artificial Sequence: Synthetic oligonucleotide
auugggaaauggccccuuu

SEQ ID NO: 2947943 - RNA, 19 nt, Artificial Sequence
  Description of Artificial Sequence: Synthetic oligonucleotide
cauauuuuacugggaugga

SEQ ID NO: 2947944 - RNA, 19 nt, Artificial Sequence
  Description of Artificial Sequence: Synthetic oligonucleotide
caauugagaugugguguuc

SEQ ID NO: 2947945 - RNA, 19 nt, Artificial Sequence
  Description of Artificial Sequence: Synthetic oligonucleotide
ggaaauggccccuuuuccu

SEQ ID NO: 2947946 - RNA, 19 nt, Artificial Sequence
  Description of Artificial Sequence: Synthetic oligonucleotide
uucuucggcuugucuacuu

SEQ ID NO: 2947947 - RNA, 19 nt, Artificial Sequence
  Description of Artificial Sequence: Synthetic oligonucleotide
caaaaggguccucaaggcu

SEQ ID NO: 2947948 - RNA, 19 nt, Artificial Sequence
  Description of Artificial Sequence: Synthetic oligonucleotide
cugugaaacuguaguccga

SEQ ID NO: 2947949 - RNA, 19 nt, Artificial Sequence
  Description of Artificial Sequence: Synthetic oligonucleotide
ggauaaccaucugauguca

SEQ ID NO: 2947950 - RNA, 19 nt, Artificial Sequence
  Description of Artificial Sequence: Synthetic oligonucleotide
cuugucuacuuguugcaau

SEQ ID NO: 2947951 - RNA, 19 nt, Artificial Sequence
  Description of Artificial Sequence: Synthetic oligonucleotide
uugugccucuuuugagauc

SEQ ID NO: 2947952 - RNA, 19 nt, Artificial Sequence
  Description of Artificial Sequence: Synthetic oligonucleotide
gggguucacaguucacaug

SEQ ID NO: 2947953 - RNA, 19 nt, Artificial Sequence
  Description of Artificial Sequence: Synthetic oligonucleotide
ggaaagagauugacagcug

SEQ ID NO: 2947954 - RNA, 19 nt, Artificial Sequence
  Description of Artificial Sequence: Synthetic oligonucleotide
auggccccuuuuccugauc

SEQ ID NO: 2947955 - RNA, 19 nt, Artificial Sequence
  Description of Artificial Sequence: Synthetic oligonucleotide
gggguuguucuucggcuug

SEQ ID NO: 2947956 - RNA, 19 nt, Artificial Sequence
  Description of Artificial Sequence: Synthetic oligonucleotide
ggcuugucuacuuguugca

SEQ ID NO: 2947957 - RNA, 19 nt, Artificial Sequence
  Description of Artificial Sequence: Synthetic oligonucleotide
uccgggguucacaguucac

SEQ ID NO: 2947958 - RNA, 19 nt, Artificial Sequence
  Description of Artificial Sequence: Synthetic oligonucleotide
gggauggauauauuuacuu

SEQ ID NO: 2947959 - RNA, 19 nt, Artificial Sequence
  Description of Artificial Sequence: Synthetic oligonucleotide
aaggguccucaaggcuccg

SEQ ID NO: 2947960 - RNA, 19 nt, Artificial Sequence
  Description of Artificial Sequence: Synthetic oligonucleotide
guuguucuucggcuugucu

SEQ ID NO: 2947961 - RNA, 19 nt, Artificial Sequence
  Description of Artificial Sequence: Synthetic oligonucleotide
aacuguaguccgacuucau

SEQ ID NO: 2947962 - RNA, 19 nt, Artificial Sequence
  Description of Artificial Sequence: Synthetic oligonucleotide
gguguucacucgaagaacu

SEQ ID NO: 2947963 - RNA, 19 nt, Artificial Sequence
  Description of Artificial Sequence: Synthetic oligonucleotide
uagucucauuggcuccaau

SEQ ID NO: 2947964 - RNA, 19 nt, Artificial Sequence
  Description of Artificial Sequence: Synthetic oligonucleotide
ugccucuuuugagauccuc

SEQ ID NO: 2947965 - RNA, 19 nt, Artificial Sequence
  Description of Artificial Sequence: Synthetic oligonucleotide
augucaaguuggggaaaga

SEQ ID NO: 2947966 - RNA, 19 nt, Artificial Sequence
  Description of Artificial Sequence: Synthetic oligonucleotide
guaguccgacuucauauuu

SEQ ID NO: 2947967 - RNA, 19 nt, Artificial Sequence
  Description of Artificial Sequence: Synthetic oligonucleotide
ugaugaguucagggauagu

SEQ ID NO: 2947968 - RNA, 19 nt, Artificial Sequence
  Description of Artificial Sequence: Synthetic oligonucleotide
gcugaaguucuggcauugg

SEQ ID NO: 2947969 - RNA, 19 nt, Artificial Sequence
  Description of Artificial Sequence: Synthetic oligonucleotide
aggguccucaaggcuccgg

SEQ ID NO: 2947970 - RNA, 19 nt, Artificial Sequence
  Description of Artificial Sequence: Synthetic oligonucleotide
ugauaccaaaaggguccuc

SEQ ID NO: 2947971 - RNA, 19 nt, Artificial Sequence
  Description of Artificial Sequence: Synthetic oligonucleotide
guucuggcauugggaaaug

SEQ ID NO: 2947972 - RNA, 19 nt, Artificial Sequence
  Description of Artificial Sequence: Synthetic oligonucleotide
auccucagacuuugauauu

SEQ ID NO: 2947973 - RNA, 19 nt, Artificial Sequence
  Description of Artificial Sequence: Synthetic oligonucleotide
guccucaaggcuccggggu

SEQ ID NO: 2947974 - RNA, 19 nt, Artificial Sequence
  Description of Artificial Sequence: Synthetic oligonucleotide
cucgaagaacugugaaacu

SEQ ID NO: 2947975 - RNA, 19 nt, Artificial Sequence
  Description of Artificial Sequence: Synthetic oligonucleotide
cuucggcuugucuacuugu

SEQ ID NO: 2947976 - RNA, 19 nt, Artificial Sequence
  Description of Artificial Sequence: Synthetic oligonucleotide
guccgacuucauauuuuac

SEQ ID NO: 2947977 - RNA, 19 nt, Artificial Sequence
  Description of Artificial Sequence: Synthetic oligonucleotide
guuggguagaguacaggau

SEQ ID NO: 2947978 - RNA, 19 nt, Artificial Sequence
  Description of Artificial Sequence: Synthetic oligonucleotide
agacgaccauccaguuggg

SEQ ID NO: 2947979 - RNA, 19 nt, Artificial Sequence
  Description of Artificial Sequence: Synthetic oligonucleotide
cuccgggguucacaguuca

SEQ ID NO: 2947980 - RNA, 19 nt, Artificial Sequence
  Description of Artificial Sequence: Synthetic oligonucleotide
gccucuuuugagauccuca

SEQ ID NO: 2947981 - RNA, 19 nt, Artificial Sequence
  Description of Artificial Sequence: Synthetic oligonucleotide
accauccaguuggguagag

SEQ ID NO: 2947982 - RNA, 19 nt, Artificial Sequence
  Description of Artificial Sequence: Synthetic oligonucleotide
cauuuccaaugucacuagu

SEQ ID NO: 2947983 - RNA, 19 nt, Artificial Sequence
  Description of Artificial Sequence: Synthetic oligonucleotide
gugaaacuguaguccgacu

SEQ ID NO: 2947984 - RNA, 19 nt, Artificial Sequence
  Description of Artificial Sequence: Synthetic oligonucleotide
gaccauccaguuggguaga

SEQ ID NO: 2947985 - RNA, 19 nt, Artificial Sequence
  Description of Artificial Sequence: Synthetic oligonucleotide
cccagaguugauaccaaaa

SEQ ID NO: 2947986 - RNA, 19 nt, Artificial Sequence
  Description of Artificial Sequence: Synthetic oligonucleotide
uaaagagauugggguuguu

SEQ ID NO: 2947987 - RNA, 19 nt, Artificial Sequence
  Description of Artificial Sequence: Synthetic oligonucleotide
gccccuuuuccugaucaug

SEQ ID NO: 2947988 - RNA, 19 nt, Artificial Sequence
  Description of Artificial Sequence: Synthetic oligonucleotide
auagucucauuggcuccaa

SEQ ID NO: 2947989 - RNA, 19 nt, Artificial Sequence
  Description of Artificial Sequence: Synthetic oligonucleotide
uggcuccaauugagaugug

SEQ ID NO: 2947990 - RNA, 19 nt, Artificial Sequence
  Description of Artificial Sequence: Synthetic oligonucleotide
gcuccaauugagauguggu

SEQ ID NO: 2947991 - RNA, 19 nt, Artificial Sequence
  Description of Artificial Sequence: Synthetic oligonucleotide
ggguagaguacaggauaac

SEQ ID NO: 2947992 - RNA, 19 nt, Artificial Sequence
  Description of Artificial Sequence: Synthetic oligonucleotide
caaguuggggaaagagauu

SEQ ID NO: 2947993 - RNA, 19 nt, Artificial Sequence
  Description of Artificial Sequence: Synthetic oligonucleotide
caaugucacuaguggaauu

SEQ ID NO: 2947994 - RNA, 19 nt, Artificial Sequence
  Description of Artificial Sequence: Synthetic oligonucleotide
ccugaucauguagaagaca

SEQ ID NO: 2947995 - RNA, 19 nt, Artificial Sequence
  Description of Artificial Sequence: Synthetic oligonucleotide
cgaagaacugugaaacugu

SEQ ID NO: 2947996 - RNA, 19 nt, Artificial Sequence
  Description of Artificial Sequence: Synthetic oligonucleotide
gcaauccuggauugugccu

SEQ ID NO: 2947997 - RNA, 19 nt, Artificial Sequence
  Description of Artificial Sequence: Synthetic oligonucleotide
ucaaggcuccgggguucac

SEQ ID NO: 2947998 - RNA, 19 nt, Artificial Sequence
  Description of Artificial Sequence: Synthetic oligonucleotide
ccccuuuuccugaucaugu

SEQ ID NO: 2947999 - RNA, 19 nt, Artificial Sequence
  Description of Artificial Sequence: Synthetic oligonucleotide
gcuugucuacuuguugcaa

SEQ ID NO: 2948000 - RNA, 19 nt, Artificial Sequence
  Description of Artificial Sequence: Synthetic oligonucleotide
aggcuccgggguucacagu

SEQ ID NO: 2948001 - RNA, 19 nt, Artificial Sequence
  Description of Artificial Sequence: Synthetic oligonucleotide
cucaaggcuccgggguuca

SEQ ID NO: 2948002 - RNA, 19 nt, Artificial Sequence
  Description of Artificial Sequence: Synthetic oligonucleotide
ggcuccgggguucacaguu

SEQ ID NO: 2948003 - RNA, 19 nt, Artificial Sequence
  Description of Artificial Sequence: Synthetic oligonucleotide
ccaauugagaugugguguu

SEQ ID NO: 2948004 - RNA, 19 nt, Artificial Sequence
  Description of Artificial Sequence: Synthetic oligonucleotide
gguuguucuucggcuuguc

SEQ ID NO: 2948005 - RNA, 19 nt, Artificial Sequence
  Description of Artificial Sequence: Synthetic oligonucleotide
ccgggguucacaguucaca

SEQ ID NO: 2948006 - RNA, 19 nt, Artificial Sequence
  Description of Artificial Sequence: Synthetic oligonucleotide
gacgaccauccaguugggu

SEQ ID NO: 2948007 - RNA, 19 nt, Artificial Sequence
  Description of Artificial Sequence: Synthetic oligonucleotide
guucuucggcuugucuacu

SEQ ID NO: 2948008 - RNA, 19 nt, Artificial Sequence
  Description of Artificial Sequence: Synthetic oligonucleotide
ccucaaggcuccgggguuc

SEQ ID NO: 2948009 - RNA, 19 nt, Artificial Sequence
  Description of Artificial Sequence: Synthetic oligonucleotide
cagcugaaguucuggcauu

SEQ ID NO: 2948010 - RNA, 19 nt, Artificial Sequence
  Description of Artificial Sequence: Synthetic oligonucleotide
guucagggauagucucauu

SEQ ID NO: 2948011 - RNA, 19 nt, Artificial Sequence
  Description of Artificial Sequence: Synthetic oligonucleotide
cccuuuuccugaucaugua

SEQ ID NO: 2948012 - RNA, 19 nt, Artificial Sequence
  Description of Artificial Sequence: Synthetic oligonucleotide
ccuggauugugccucuuuu

SEQ ID NO: 2948013 - RNA, 19 nt, Artificial Sequence
  Description of Artificial Sequence: Synthetic oligonucleotide
gcuccgggguucacaguuc

SEQ ID NO: 2948014 - RNA, 19 nt, Artificial Sequence
  Description of Artificial Sequence: Synthetic oligonucleotide
gcauugggaaauggccccu

SEQ ID NO: 2948015 - RNA, 19 nt, Artificial Sequence
  Description of Artificial Sequence: Synthetic oligonucleotide
cauugggaaauggccccuu

SEQ ID NO: 2948016 - RNA, 19 nt, Artificial Sequence
  Description of Artificial Sequence: Synthetic oligonucleotide
ggguuguucuucggcuugu

SEQ ID NO: 2948017 - RNA, 19 nt, Artificial Sequence
  Description of Artificial Sequence: Synthetic oligonucleotide
ccucagacuuugauauuuu

SEQ ID NO: 2948018 - RNA, 19 nt, Artificial Sequence
  Description of Artificial Sequence: Synthetic oligonucleotide
gguucacaguucacaugau

SEQ ID NO: 2948019 - RNA, 19 nt, Artificial Sequence
  Description of Artificial Sequence: Synthetic oligonucleotide
cgggguucacaguucacau

SEQ ID NO: 2948020 - RNA, 19 nt, Artificial Sequence
  Description of Artificial Sequence: Synthetic oligonucleotide
ggccccuuuuccugaucau

SEQ ID NO: 2948021 - RNA, 19 nt, Artificial Sequence
  Description of Artificial Sequence: Synthetic oligonucleotide
gugccucuuuugagauccu

SEQ ID NO: 2948022 - RNA, 19 nt, Artificial Sequence
  Description of Artificial Sequence: Synthetic oligonucleotide
ccauccaguuggguagagu

SEQ ID NO: 2948023 - RNA, 19 nt, Artificial Sequence
  Description of Artificial Sequence: Synthetic oligonucleotide
auuuucugcuuuuacagcc

SEQ ID NO: 2948024 - RNA, 19 nt, Artificial Sequence
  Description of Artificial Sequence: Synthetic oligonucleotide
uuaauuucuaguaauucug

SEQ ID NO: 2948025 - RNA, 19 nt, Artificial Sequence
  Description of Artificial Sequence: Synthetic oligonucleotide
ucagcaacgagguuaaggg

SEQ ID NO: 2948026 - RNA, 19 nt, Artificial Sequence
  Description of Artificial Sequence: Synthetic oligonucleotide
auuucuaguaauucugucg

SEQ ID NO: 2948027 - RNA, 19 nt, Artificial Sequence
  Description of Artificial Sequence: Synthetic oligonucleotide
uccucuuugaucaucuucg

SEQ ID NO: 2948028 - RNA, 19 nt, Artificial Sequence
  Description of Artificial Sequence: Synthetic oligonucleotide
uuuaauuucuaguaauucu

SEQ ID NO: 2948029 - RNA, 19 nt, Artificial Sequence
  Description of Artificial Sequence: Synthetic oligonucleotide
guucauaacaacauggagg

SEQ ID NO: 2948030 - RNA, 19 nt, Artificial Sequence
  Description of Artificial Sequence: Synthetic oligonucleotide
aguaauucugucgauagac

SEQ ID NO: 2948031 - RNA, 19 nt, Artificial Sequence
  Description of Artificial Sequence: Synthetic oligonucleotide
aauuucuaguaauucuguc

SEQ ID NO: 2948032 - RNA, 19 nt, Artificial Sequence
  Description of Artificial Sequence: Synthetic oligonucleotide
guucuguucaacuugcugg

SEQ ID NO: 2948033 - RNA, 19 nt, Artificial Sequence
  Description of Artificial Sequence: Synthetic oligonucleotide
  modified_base (4)..(4): a, c, u, g, unknown or other
ucancuuuaauuucuagua

SEQ ID NO: 2948034 - RNA, 19 nt, Artificial Sequence
  Description of Artificial Sequence: Synthetic oligonucleotide
uuucuaguaauucugucga

SEQ ID NO: 2948035 - RNA, 19 nt, Artificial Sequence
  Description of Artificial Sequence: Synthetic oligonucleotide
uccuguuucagcuucauga

SEQ ID NO: 2948036 - RNA, 19 nt, Artificial Sequence
  Description of Artificial Sequence: Synthetic oligonucleotide
caggauuucagcaacgagg

SEQ ID NO: 2948037 - RNA, 19 nt, Artificial Sequence
  Description of Artificial Sequence: Synthetic oligonucleotide
aacaacauggagguucugc

SEQ ID NO: 2948038 - RNA, 19 nt, Artificial Sequence
  Description of Artificial Sequence: Synthetic oligonucleotide
uuuguuucaccacugcaag

SEQ ID NO: 2948039 - RNA, 19 nt, Artificial Sequence
  Description of Artificial Sequence: Synthetic oligonucleotide
gacaccagcugcuuuaugg

SEQ ID NO: 2948040 - RNA, 19 nt, Artificial Sequence
  Description of Artificial Sequence: Synthetic oligonucleotide
ucucguuugaaacuggaga

SEQ ID NO: 2948041 - RNA, 19 nt, Artificial Sequence
  Description of Artificial Sequence: Synthetic oligonucleotide
uguucauaacaacauggag

SEQ ID NO: 2948042 - RNA, 19 nt, Artificial Sequence
  Description of Artificial Sequence: Synthetic oligonucleotide
  modified_base (2)..(2): a, c, u, g, unknown or other
ancuuuaauuucuaguaau

SEQ ID NO: 2948043 - RNA, 19 nt, Artificial Sequence
  Description of Artificial Sequence: Synthetic oligonucleotide
uuuacagcccguuugguca

SEQ ID NO: 2948044 - RNA, 19 nt, Artificial Sequence
  Description of Artificial Sequence: Synthetic oligonucleotide
ugcacuguucauaacaaca

SEQ ID NO: 2948045 - RNA, 19 nt, Artificial Sequence
  Description of Artificial Sequence: Synthetic oligonucleotide
aacauggagguucugcaag

SEQ ID NO: 2948046 - RNA, 19 nt, Artificial Sequence
  Description of Artificial Sequence: Synthetic oligonucleotide
uuggucaucaguucgaggu

SEQ ID NO: 2948047 - RNA, 19 nt, Artificial Sequence
  Description of Artificial Sequence: Synthetic oligonucleotide
cuggagcaaacuuauaucc

SEQ ID NO: 2948048 - RNA, 19 nt, Artificial Sequence
  Description of Artificial Sequence: Synthetic oligonucleotide
aaacuuauauccuguuuca

SEQ ID NO: 2948049 - RNA, 19 nt, Artificial Sequence
  Description of Artificial Sequence: Synthetic oligonucleotide
cuaguaauucugucgauag

SEQ ID NO: 2948050 - RNA, 19 nt, Artificial Sequence
  Description of Artificial Sequence: Synthetic oligonucleotide
uuuuguuucaccacugcaa

SEQ ID NO: 2948051 - RNA, 19 nt, Artificial Sequence
  Description of Artificial Sequence: Synthetic oligonucleotide
caaacuuauauccuguuuc

SEQ ID NO: 2948052 - RNA, 19 nt, Artificial Sequence
  Description of Artificial Sequence: Synthetic oligonucleotide
acuguucauaacaacaugg

SEQ ID NO: 2948053 - RNA, 19 nt, Artificial Sequence
  Description of Artificial Sequence: Synthetic oligonucleotide
acuucaggauuucagcaac

SEQ ID NO: 2948054 - RNA, 19 nt, Artificial Sequence
  Description of Artificial Sequence: Synthetic oligonucleotide
uccaacuuucguucaagcg

SEQ ID NO: 2948055 - RNA, 19 nt, Artificial Sequence
  Description of Artificial Sequence: Synthetic oligonucleotide
ucugucgauagacuucagg

SEQ ID NO: 2948056 - RNA, 19 nt, Artificial Sequence
  Description of Artificial Sequence: Synthetic oligonucleotide
cucguuugaaacuggagag

SEQ ID NO: 2948057 - RNA, 19 nt, Artificial Sequence
  Description of Artificial Sequence: Synthetic oligonucleotide
uguuucagcuucaugacau

SEQ ID NO: 2948058 - RNA, 19 nt, Artificial Sequence
  Description of Artificial Sequence: Synthetic oligonucleotide
aauucugucgauagacuuc

SEQ ID NO: 2948059 - RNA, 19 nt, Artificial Sequence
  Description of Artificial Sequence: Synthetic oligonucleotide
ucuuugaucaucuucgcuu

SEQ ID NO: 2948060 - RNA, 19 nt, Artificial Sequence
  Description of Artificial Sequence: Synthetic oligonucleotide
cauaacaacauggagguuc

SEQ ID NO: 2948061 - RNA, 19 nt, Artificial Sequence
  Description of Artificial Sequence: Synthetic oligonucleotide
uucaccacugcaaggcugg

SEQ ID NO: 2948062 - RNA, 19 nt, Artificial Sequence
  Description of Artificial Sequence: Synthetic oligonucleotide
uguuucaccacugcaaggc

SEQ ID NO: 2948063 - RNA, 19 nt, Artificial Sequence
  Description of Artificial Sequence: Synthetic oligonucleotide
uaauuucuaguaauucugu

SEQ ID NO: 2948064 - RNA, 19 nt, Artificial Sequence
  Description of Artificial Sequence: Synthetic oligonucleotide
ugcuuuuacagcccguuug

SEQ ID NO: 2948065 - RNA, 19 nt, Artificial Sequence
  Description of Artificial Sequence: Synthetic oligonucleotide
accacugcaaggcuggcac

SEQ ID NO: 2948066 - RNA, 19 nt, Artificial Sequence
  Description of Artificial Sequence: Synthetic oligonucleotide
uucagcaacgagguuaagg

SEQ ID NO: 2948067 - RNA, 19 nt, Artificial Sequence
  Description of Artificial Sequence: Synthetic oligonucleotide
uuugaaacuggagagcugu

SEQ ID NO: 2948068 - RNA, 19 nt, Artificial Sequence
  Description of Artificial Sequence: Synthetic oligonucleotide
uagacuucaggauuucagc

SEQ ID NO: 2948069 - RNA, 19 nt, Artificial Sequence
  Description of Artificial Sequence: Synthetic oligonucleotide
ucauucucucguuugaaac

SEQ ID NO: 2948070 - RNA, 19 nt, Artificial Sequence
  Description of Artificial Sequence: Synthetic oligonucleotide
auggaagucacucuccucu

SEQ ID NO: 2948071 - RNA, 19 nt, Artificial Sequence
  Description of Artificial Sequence: Synthetic oligonucleotide
uauauccuguuucagcuuc

SEQ ID NO: 2948072 - RNA, 19 nt, Artificial Sequence
  Description of Artificial Sequence: Synthetic oligonucleotide
gauuuucugcuuuuacagc

SEQ ID NO: 2948073 - RNA, 19 nt, Artificial Sequence
  Description of Artificial Sequence: Synthetic oligonucleotide
uguucaacuugcuggacca

SEQ ID NO: 2948074 - RNA, 19 nt, Artificial Sequence
  Description of Artificial Sequence: Synthetic oligonucleotide
cuagugguucucaagaguc

SEQ ID NO: 2948075 - RNA, 19 nt, Artificial Sequence
  Description of Artificial Sequence: Synthetic oligonucleotide
aagggucucugcuccagac

SEQ ID NO: 2948076 - RNA, 19 nt, Artificial Sequence
  Description of Artificial Sequence: Synthetic oligonucleotide
cuugcuggaccacagauuc

SEQ ID NO: 2948077 - RNA, 19 nt, Artificial Sequence
  Description of Artificial Sequence: Synthetic oligonucleotide
  modified_base (4)..(4): a, c, u, g, unknown or other
aacngguggcagcuagugg

SEQ ID NO: 2948078 - RNA, 19 nt, Artificial Sequence
  Description of Artificial Sequence: Synthetic oligonucleotide
uuucugcuuuuacagcccg

SEQ ID NO: 2948079 - RNA, 19 nt, Artificial Sequence
  Description of Artificial Sequence: Synthetic oligonucleotide
  modified_base (3)..(3): a, c, u, g, unknown or other
acngguggcagcuaguggu

SEQ ID NO: 2948080 - RNA, 19 nt, Artificial Sequence
  Description of Artificial Sequence: Synthetic oligonucleotide
uauggaugcaugugcacug

SEQ ID NO: 2948081 - RNA, 19 nt, Artificial Sequence
  Description of Artificial Sequence: Synthetic oligonucleotide
uggagguucugcaaggcca

SEQ ID NO: 2948082 - RNA, 19 nt, Artificial Sequence
  Description of Artificial Sequence: Synthetic oligonucleotide
aucgguguuuuguuucacc

SEQ ID NO: 2948083 - RNA, 19 nt, Artificial Sequence
  Description of Artificial Sequence: Synthetic oligonucleotide
uucaugacaugauuuucug

SEQ ID NO: 2948084 - RNA, 19 nt, Artificial Sequence
  Description of Artificial Sequence: Synthetic oligonucleotide
uuuucugcuuuuacagccc

SEQ ID NO: 2948085 - RNA, 19 nt, Artificial Sequence
  Description of Artificial Sequence: Synthetic oligonucleotide
augugcacuguucauaaca

SEQ ID NO: 2948086 - RNA, 19 nt, Artificial Sequence
  Description of Artificial Sequence: Synthetic oligonucleotide
uguuuuguuucaccacugc

SEQ ID NO: 2948087 - RNA, 19 nt, Artificial Sequence
  Description of Artificial Sequence: Synthetic oligonucleotide
agugguucucaagagucgc

SEQ ID NO: 2948088 - RNA, 19 nt, Artificial Sequence
  Description of Artificial Sequence: Synthetic oligonucleotide
ucaggauuucagcaacgag

SEQ ID NO: 2948089 - RNA, 19 nt, Artificial Sequence
  Description of Artificial Sequence: Synthetic oligonucleotide
ucuggagcaaacuuauauc

SEQ ID NO: 2948090 - RNA, 19 nt, Artificial Sequence
  Description of Artificial Sequence: Synthetic oligonucleotide
guucugcaaggccacaucg

SEQ ID NO: 2948091 - RNA, 19 nt, Artificial Sequence
  Description of Artificial Sequence: Synthetic oligonucleotide
aaacuggagagcugugucu

SEQ ID NO: 2948092 - RNA, 19 nt, Artificial Sequence
  Description of Artificial Sequence: Synthetic oligonucleotide
cuuuaauuucuaguaauuc

SEQ ID NO: 2948093 - RNA, 19 nt, Artificial Sequence
  Description of Artificial Sequence: Synthetic oligonucleotide
gaugcaugugcacuguuca

SEQ ID NO: 2948094 - RNA, 19 nt, Artificial Sequence
  Description of Artificial Sequence: Synthetic oligonucleotide
aacuugcuggaccacagau

SEQ ID NO: 2948095 - RNA, 19 nt, Artificial Sequence
  Description of Artificial Sequence: Synthetic oligonucleotide
uucugcaaggccacaucgg

SEQ ID NO: 2948096 - RNA, 19 nt, Artificial Sequence
  Description of Artificial Sequence: Synthetic oligonucleotide
uagugguucucaagagucg

SEQ ID NO: 2948097 - RNA, 19 nt, Artificial Sequence
  Description of Artificial Sequence: Synthetic oligonucleotide
ugugucuggagcaaacuua

SEQ ID NO: 2948098 - RNA, 19 nt, Artificial Sequence
  Description of Artificial Sequence: Synthetic oligonucleotide
ugcaaggccacaucggugu

SEQ ID NO: 2948099 - RNA, 19 nt, Artificial Sequence
  Description of Artificial Sequence: Synthetic oligonucleotide
  modified_base (16)..(16): a, c, u, g, unknown or other
ucaagagucgccucancuu

SEQ ID NO: 2948100 - RNA, 19 nt, Artificial Sequence
  Description of Artificial Sequence: Synthetic oligonucleotide
agcaacgagguuaaggguc

SEQ ID NO: 2948101 - RNA, 19 nt, Artificial Sequence
  Description of Artificial Sequence: Synthetic oligonucleotide
acaacauggagguucugca

SEQ ID NO: 2948102 - RNA, 19 nt, Artificial Sequence
  Description of Artificial Sequence: Synthetic oligonucleotide
uggaccacagauuccaggu

SEQ ID NO: 2948103 - RNA, 19 nt, Artificial Sequence
  Description of Artificial Sequence: Synthetic oligonucleotide
ugugcacuguucauaacaa

SEQ ID NO: 2948104 - RNA, 19 nt, Artificial Sequence
  Description of Artificial Sequence: Synthetic oligonucleotide
agacuucaggauuucagca

SEQ ID NO: 2948105 - RNA, 19 nt, Artificial Sequence
  Description of Artificial Sequence: Synthetic oligonucleotide
gauuucagcaacgagguua

SEQ ID NO: 2948106 - RNA, 19 nt, Artificial Sequence
  Description of Artificial Sequence: Synthetic oligonucleotide
uucuguucaacuugcugga

SEQ ID NO: 2948107 - RNA, 19 nt, Artificial Sequence
  Description of Artificial Sequence: Synthetic oligonucleotide
ucugcaaggccacaucggu

SEQ ID NO: 2948108 - RNA, 19 nt, Artificial Sequence
  Description of Artificial Sequence: Synthetic oligonucleotide
auagacuucaggauuucag

SEQ ID NO: 2948109 - RNA, 19 nt, Artificial Sequence
  Description of Artificial Sequence: Synthetic oligonucleotide
uaauucugucgauagacuu

SEQ ID NO: 2948110 - RNA, 19 nt, Artificial Sequence
  Description of Artificial Sequence: Synthetic oligonucleotide
cugucgauagacuucagga

SEQ ID NO: 2948111 - RNA, 19 nt, Artificial Sequence
  Description of Artificial Sequence: Synthetic oligonucleotide
ucaugacaugauuuucugc

SEQ ID NO: 2948112 - RNA, 19 nt, Artificial Sequence
  Description of Artificial Sequence: Synthetic oligonucleotide
gaaacuggagagcuguguc

SEQ ID NO: 2948113 - RNA, 19 nt, Artificial Sequence
  Description of Artificial Sequence: Synthetic oligonucleotide
aacuuauauccuguuucag

SEQ ID NO: 2948114 - RNA, 19 nt, Artificial Sequence
  Description of Artificial Sequence: Synthetic oligonucleotide
uuauggaugcaugugcacu

SEQ ID NO: 2948115 - RNA, 19 nt, Artificial Sequence
  Description of Artificial Sequence: Synthetic oligonucleotide
uuucaccacugcaaggcug

SEQ ID NO: 2948116 - RNA, 19 nt, Artificial Sequence
  Description of Artificial Sequence: Synthetic oligonucleotide
uuuggucaucaguucgagg

SEQ ID NO: 2948117 - RNA, 19 nt, Artificial Sequence
  Description of Artificial Sequence: Synthetic oligonucleotide
uuguuucaccacugcaagg

SEQ ID NO: 2948118 - RNA, 19 nt, Artificial Sequence
  Description of Artificial Sequence: Synthetic oligonucleotide
uuuuacagcccguuugguc

SEQ ID NO: 2948119 - RNA, 19 nt, Artificial Sequence
  Description of Artificial Sequence: Synthetic oligonucleotide
uggagcaaacuuauauccu

SEQ ID NO: 2948120 - RNA, 19 nt, Artificial Sequence
  Description of Artificial Sequence: Synthetic oligonucleotide
cacagauuccaggucaugg

SEQ ID NO: 2948121 - RNA, 19 nt, Artificial Sequence
  Description of Artificial Sequence: Synthetic oligonucleotide
cuuugaucaucuucgcuuc

SEQ ID NO: 2948122 - RNA, 19 nt, Artificial Sequence
  Description of Artificial Sequence: Synthetic oligonucleotide
caugacaugauuuucugcu

SEQ ID NO: 2948123 - RNA, 19 nt, Artificial Sequence
  Description of Artificial Sequence: Synthetic oligonucleotide
caacuuucguucaagcguc

SEQ ID NO: 2948124 - RNA, 19 nt, Artificial Sequence
  Description of Artificial Sequence: Synthetic oligonucleotide
uuuauggaugcaugugcac

SEQ ID NO: 2948125 - RNA, 19 nt, Artificial Sequence
  Description of Artificial Sequence: Synthetic oligonucleotide
ucauggaagucacucuccu

SEQ ID NO: 2948126 - RNA, 19 nt, Artificial Sequence
  Description of Artificial Sequence: Synthetic oligonucleotide
agguuaagggucucugcuc

SEQ ID NO: 2948127 - RNA, 19 nt, Artificial Sequence
  Description of Artificial Sequence: Synthetic oligonucleotide
aacuggagagcugugucug

SEQ ID NO: 2948128 - RNA, 19 nt, Artificial Sequence
  Description of Artificial Sequence: Synthetic oligonucleotide
accgcaaggcuucauucuc

SEQ ID NO: 2948129 - RNA, 19 nt, Artificial Sequence
  Description of Artificial Sequence: Synthetic oligonucleotide
ucagcuucaugacaugauu

SEQ ID NO: 2948130 - RNA, 19 nt, Artificial Sequence
  Description of Artificial Sequence: Synthetic oligonucleotide
cuguucaacuugcuggacc

SEQ ID NO: 2948131 - RNA, 19 nt, Artificial Sequence
  Description of Artificial Sequence: Synthetic oligonucleotide
ugucgauagacuucaggau

SEQ ID NO: 2948132 - RNA, 19 nt, Artificial Sequence
  Description of Artificial Sequence: Synthetic oligonucleotide
ggagcaaacuuauauccug

SEQ ID NO: 2948133 - RNA, 19 nt, Artificial Sequence
  Description of Artificial Sequence: Synthetic oligonucleotide
uucgagguucuguucaacu

SEQ ID NO: 2948134 - RNA, 19 nt, Artificial Sequence
  Description of Artificial Sequence: Synthetic oligonucleotide
uucucucguuugaaacugg

SEQ ID NO: 2948135 - RNA, 19 nt, Artificial Sequence
  Description of Artificial Sequence: Synthetic oligonucleotide
cuucaggauuucagcaacg

SEQ ID NO: 2948136 - RNA, 19 nt, Artificial Sequence
  Description of Artificial Sequence: Synthetic oligonucleotide
cuuuauggaugcaugugca

SEQ ID NO: 2948137 - RNA, 19 nt, Artificial Sequence
  Description of Artificial Sequence: Synthetic oligonucleotide
acagauuccaggucaugga

SEQ ID NO: 2948138 - RNA, 19 nt, Artificial Sequence
  Description of Artificial Sequence: Synthetic oligonucleotide
gcuuuauggaugcaugugc

SEQ ID NO: 2948139 - RNA, 19 nt, Artificial Sequence
  Description of Artificial Sequence: Synthetic oligonucleotide
gaccacagauuccagguca

SEQ ID NO: 2948140 - RNA, 19 nt, Artificial Sequence
  Description of Artificial Sequence: Synthetic oligonucleotide
ucgauagacuucaggauuu

SEQ ID NO: 2948141 - RNA, 19 nt, Artificial Sequence
  Description of Artificial Sequence: Synthetic oligonucleotide
uuugaucaucuucgcuucc

SEQ ID NO: 2948142 - RNA, 19 nt, Artificial Sequence
  Description of Artificial Sequence: Synthetic oligonucleotide
auucucucguuugaaacug

SEQ ID NO: 2948143 - RNA, 19 nt, Artificial Sequence
  Description of Artificial Sequence: Synthetic oligonucleotide
ucuucgcuuccaacuuucg

SEQ ID NO: 2948144 - RNA, 19 nt, Artificial Sequence
  Description of Artificial Sequence: Synthetic oligonucleotide
uaguaauucugucgauaga

SEQ ID NO: 2948145 - RNA, 19 nt, Artificial Sequence
  Description of Artificial Sequence: Synthetic oligonucleotide
ucuaguaauucugucgaua

SEQ ID NO: 2948146 - RNA, 19 nt, Artificial Sequence
  Description of Artificial Sequence: Synthetic oligonucleotide
aggauuucagcaacgaggu

SEQ ID NO: 2948147 - RNA, 19 nt, Artificial Sequence
  Description of Artificial Sequence: Synthetic oligonucleotide
uuccaacuuucguucaagc

SEQ ID NO: 2948148 - RNA, 19 nt, Artificial Sequence
  Description of Artificial Sequence: Synthetic oligonucleotide
ugcuuuauggaugcaugug

SEQ ID NO: 2948149 - RNA, 19 nt, Artificial Sequence
  Description of Artificial Sequence: Synthetic oligonucleotide
agcuagugguucucaagag

SEQ ID NO: 2948150 - RNA, 19 nt, Artificial Sequence
  Description of Artificial Sequence: Synthetic oligonucleotide
gcuuuuacagcccguuugg

SEQ ID NO: 2948151 - RNA, 19 nt, Artificial Sequence
  Description of Artificial Sequence: Synthetic oligonucleotide
ucucucguuugaaacugga

SEQ ID NO: 2948152 - RNA, 19 nt, Artificial Sequence
  Description of Artificial Sequence: Synthetic oligonucleotide
uucauucucucguuugaaa

SEQ ID NO: 2948153 - RNA, 19 nt, Artificial Sequence
  Description of Artificial Sequence: Synthetic oligonucleotide
uuucagcuucaugacauga

SEQ ID NO: 2948154 - RNA, 19 nt, Artificial Sequence
  Description of Artificial Sequence: Synthetic oligonucleotide
uuccaggucauggaaguca

SEQ ID NO: 2948155 - RNA, 19 nt, Artificial Sequence
  Description of Artificial Sequence: Synthetic oligonucleotide
ucaucuucgcuuccaacuu

SEQ ID NO: 2948156 - RNA, 19 nt, Artificial Sequence
  Description of Artificial Sequence: Synthetic oligonucleotide
guuuuguuucaccacugca

SEQ ID NO: 2948157 - RNA, 19 nt, Artificial Sequence
  Description of Artificial Sequence: Synthetic oligonucleotide
uucagcuucaugacaugau

SEQ ID NO: 2948158 - RNA, 19 nt, Artificial Sequence
  Description of Artificial Sequence: Synthetic oligonucleotide
  modified_base (11)..(11): a, c, u, g, unknown or other
agucgccucancuuuaauu

SEQ ID NO: 2948159 - RNA, 19 nt, Artificial Sequence
  Description of Artificial Sequence: Synthetic oligonucleotide
cuggaccacagauuccagg

SEQ ID NO: 2948160 - RNA, 19 nt, Artificial Sequence
  Description of Artificial Sequence: Synthetic oligonucleotide
cacaucgguguuuuguuuc

SEQ ID NO: 2948161 - RNA, 19 nt, Artificial Sequence
  Description of Artificial Sequence: Synthetic oligonucleotide
ugaaacuggagagcugugu

SEQ ID NO: 2948162 - RNA, 19 nt, Artificial Sequence
  Description of Artificial Sequence: Synthetic oligonucleotide
uccaggucauggaagucac

SEQ ID NO: 2948163 - RNA, 19 nt, Artificial Sequence
  Description of Artificial Sequence: Synthetic oligonucleotide
cuguucauaacaacaugga

SEQ ID NO: 2948164 - RNA, 19 nt, Artificial Sequence
  Description of Artificial Sequence: Synthetic oligonucleotide
aucaguucgagguucuguu

SEQ ID NO: 2948165 - RNA, 19 nt, Artificial Sequence
  Description of Artificial Sequence: Synthetic oligonucleotide
uucaggauuucagcaacga

SEQ ID NO: 2948166 - RNA, 19 nt, Artificial Sequence
  Description of Artificial Sequence: Synthetic oligonucleotide
gagguucuguucaacuugc

SEQ ID NO: 2948167 - RNA, 19 nt, Artificial Sequence
  Description of Artificial Sequence: Synthetic oligonucleotide
  modified_base (5)..(5): a, c, u, g, unknown or other
cucancuuuaauuucuagu

SEQ ID NO: 2948168 - RNA, 19 nt, Artificial Sequence
  Description of Artificial Sequence: Synthetic oligonucleotide
ucguuugaaacuggagagc

SEQ ID NO: 2948169 - RNA, 19 nt, Artificial Sequence
  Description of Artificial Sequence: Synthetic oligonucleotide
  modified_base (5)..(5): a, c, u, g, unknown or other
gaacngguggcagcuagug

SEQ ID NO: 2948170 - RNA, 19 nt, Artificial Sequence
  Description of Artificial Sequence: Synthetic oligonucleotide
agcuucaugacaugauuuu

SEQ ID NO: 2948171 - RNA, 19 nt, Artificial Sequence
  Description of Artificial Sequence: Synthetic oligonucleotide
cucucguuugaaacuggag

SEQ ID NO: 2948172 - RNA, 19 nt, Artificial Sequence
  Description of Artificial Sequence: Synthetic oligonucleotide
ucgcuuccaacuuucguuc

SEQ ID NO: 2948173 - RNA, 19 nt, Artificial Sequence
  Description of Artificial Sequence: Synthetic oligonucleotide
aacuuucguucaagcgucc

SEQ ID NO: 2948174 - RNA, 19 nt, Artificial Sequence
  Description of Artificial Sequence: Synthetic oligonucleotide
uuaagggucucugcuccag

SEQ ID NO: 2948175 - RNA, 19 nt, Artificial Sequence
  Description of Artificial Sequence: Synthetic oligonucleotide
cacuguucauaacaacaug

SEQ ID NO: 2948176 - RNA, 19 nt, Artificial Sequence
  Description of Artificial Sequence: Synthetic oligonucleotide
gagagcugugucuggagca

SEQ ID NO: 2948177 - RNA, 19 nt, Artificial Sequence
  Description of Artificial Sequence: Synthetic oligonucleotide
uucaacuugcuggaccaca

SEQ ID NO: 2948178 - RNA, 19 nt, Artificial Sequence
  Description of Artificial Sequence: Synthetic oligonucleotide
gauuccaggucauggaagu

SEQ ID NO: 2948179 - RNA, 19 nt, Artificial Sequence
  Description of Artificial Sequence: Synthetic oligonucleotide
gacuucaggauuucagcaa

SEQ ID NO: 2948180 - RNA, 19 nt, Artificial Sequence
  Description of Artificial Sequence: Synthetic oligonucleotide
uugaaacuggagagcugug

SEQ ID NO: 2948181 - RNA, 19 nt, Artificial Sequence
  Description of Artificial Sequence: Synthetic oligonucleotide
ugaucaucuucgcuuccaa

SEQ ID NO: 2948182 - RNA, 19 nt, Artificial Sequence
  Description of Artificial Sequence: Synthetic oligonucleotide
agauuccaggucauggaag

SEQ ID NO: 2948183 - RNA, 19 nt, Artificial Sequence
  Description of Artificial Sequence: Synthetic oligonucleotide
auaacaacauggagguucu

SEQ ID NO: 2948184 - RNA, 19 nt, Artificial Sequence
  Description of Artificial Sequence: Synthetic oligonucleotide
uugaucaucuucgcuucca

SEQ ID NO: 2948185 - RNA, 19 nt, Artificial Sequence
  Description of Artificial Sequence: Synthetic oligonucleotide
aaggcuucauucucucguu

SEQ ID NO: 2948186 - RNA, 19 nt, Artificial Sequence
  Description of Artificial Sequence: Synthetic oligonucleotide
acaucgguguuuuguuuca

SEQ ID NO: 2948187 - RNA, 19 nt, Artificial Sequence
  Description of Artificial Sequence: Synthetic oligonucleotide
cuccucuuugaucaucuuc

SEQ ID NO: 2948188 - RNA, 19 nt, Artificial Sequence
  Description of Artificial Sequence: Synthetic oligonucleotide
acuggagagcugugucugg

SEQ ID NO: 2948189 - RNA, 19 nt, Artificial Sequence
  Description of Artificial Sequence: Synthetic oligonucleotide
gagguuaagggucucugcu

SEQ ID NO: 2948190 - RNA, 19 nt, Artificial Sequence
  Description of Artificial Sequence: Synthetic oligonucleotide
caggucauggaagucacuc

SEQ ID NO: 2948191 - RNA, 19 nt, Artificial Sequence
  Description of Artificial Sequence: Synthetic oligonucleotide
  modified_base (3)..(3): a, c, u, g, unknown or other
cancuuuaauuucuaguaa

SEQ ID NO: 2948192 - RNA, 19 nt, Artificial Sequence
  Description of Artificial Sequence: Synthetic oligonucleotide
gguucuguucaacuugcug

SEQ ID NO: 2948193 - RNA, 19 nt, Artificial Sequence
  Description of Artificial Sequence: Synthetic oligonucleotide
  modified_base (10)..(10): a, c, u, g, unknown or other
gucgccucancuuuaauuu

SEQ ID NO: 2948194 - RNA, 19 nt, Artificial Sequence
  Description of Artificial Sequence: Synthetic oligonucleotide
cuucaugacaugauuuucu

SEQ ID NO: 2948195 - RNA, 19 nt, Artificial Sequence
  Description of Artificial Sequence: Synthetic oligonucleotide
guucucaagagucgccuca

SEQ ID NO: 2948196 - RNA, 19 nt, Artificial Sequence
  Description of Artificial Sequence: Synthetic oligonucleotide
aucuucgcuuccaacuuuc

SEQ ID NO: 2948197 - RNA, 19 nt, Artificial Sequence
  Description of Artificial Sequence: Synthetic oligonucleotide
uuauauccuguuucagcuu

SEQ ID NO: 2948198 - RNA, 19 nt, Artificial Sequence
  Description of Artificial Sequence: Synthetic oligonucleotide
ugguucucaagagucgccu

SEQ ID NO: 2948199 - RNA, 19 nt, Artificial Sequence
  Description of Artificial Sequence: Synthetic oligonucleotide
  modified_base (7)..(7): a, c, u, g, unknown or other
gggaacngguggcagcuag

SEQ ID NO: 2948200 - RNA, 19 nt, Artificial Sequence
  Description of Artificial Sequence: Synthetic oligonucleotide
cuuccaacuuucguucaag

SEQ ID NO: 2948201 - RNA, 19 nt, Artificial Sequence
  Description of Artificial Sequence: Synthetic oligonucleotide
ucgagguucuguucaacuu

SEQ ID NO: 2948202 - RNA, 19 nt, Artificial Sequence
  Description of Artificial Sequence: Synthetic oligonucleotide
cuuucguucaagcguccuc

SEQ ID NO: 2948203 - RNA, 19 nt, Artificial Sequence
  Description of Artificial Sequence: Synthetic oligonucleotide
ucaguucgagguucuguuc

SEQ ID NO: 2948204 - RNA, 19 nt, Artificial Sequence
  Description of Artificial Sequence: Synthetic oligonucleotide
cagcuagugguucucaaga

SEQ ID NO: 2948205 - RNA, 19 nt, Artificial Sequence
  Description of Artificial Sequence: Synthetic oligonucleotide
uaagggucucugcuccaga

SEQ ID NO: 2948206 - RNA, 19 nt, Artificial Sequence
  Description of Artificial Sequence: Synthetic oligonucleotide
  modified_base (10)..(10): a, c, u, g, unknown or other
ggugggaacngguggcagc

SEQ ID NO: 2948207 - RNA, 19 nt, Artificial Sequence
  Description of Artificial Sequence: Synthetic oligonucleotide
ucugcuuuuacagcccguu

SEQ ID NO: 2948208 - RNA, 19 nt, Artificial Sequence
  Description of Artificial Sequence: Synthetic oligonucleotide
ugcaugugcacuguucaua

SEQ ID NO: 2948209 - RNA, 19 nt, Artificial Sequence
  Description of Artificial Sequence: Synthetic oligonucleotide
auuucagcaacgagguuaa

SEQ ID NO: 2948210 - RNA, 19 nt, Artificial Sequence
  Description of Artificial Sequence: Synthetic oligonucleotide
gucuggagcaaacuuauau

SEQ ID NO: 2948211 - RNA, 19 nt, Artificial Sequence
  Description of Artificial Sequence: Synthetic oligonucleotide
ggucauggaagucacucuc

SEQ ID NO: 2948212 - RNA, 19 nt, Artificial Sequence
  Description of Artificial Sequence: Synthetic oligonucleotide
agcaaacuuauauccuguu

SEQ ID NO: 2948213 - RNA, 19 nt, Artificial Sequence
  Description of Artificial Sequence: Synthetic oligonucleotide
  modified_base (18)..(18): a, c, u, g, unknown or other
ucucaagagucgccucanc

SEQ ID NO: 2948214 - RNA, 19 nt, Artificial Sequence
  Description of Artificial Sequence: Synthetic oligonucleotide
aacgagguuaagggucucu

SEQ ID NO: 2948215 - RNA, 19 nt, Artificial Sequence
  Description of Artificial Sequence: Synthetic oligonucleotide
ccagcugcuuuauggaugc

SEQ ID NO: 2948216 - RNA, 19 nt, Artificial Sequence
  Description of Artificial Sequence: Synthetic oligonucleotide
gauagacuucaggauuuca

SEQ ID NO: 2948217 - RNA, 19 nt, Artificial Sequence
  Description of Artificial Sequence: Synthetic oligonucleotide
agcccguuuggucaucagu

SEQ ID NO: 2948218 - RNA, 19 nt, Artificial Sequence
  Description of Artificial Sequence: Synthetic oligonucleotide
uucuaguaauucugucgau

SEQ ID NO: 2948219 - RNA, 19 nt, Artificial Sequence
  Description of Artificial Sequence: Synthetic oligonucleotide
  modified_base (9)..(9): a, c, u, g, unknown or other
ucgccucancuuuaauuuc

SEQ ID NO: 2948220 - RNA, 19 nt, Artificial Sequence
  Description of Artificial Sequence: Synthetic oligonucleotide
caguucgagguucuguuca

SEQ ID NO: 2948221 - RNA, 19 nt, Artificial Sequence
  Description of Artificial Sequence: Synthetic oligonucleotide
accagcugcuuuauggaug

SEQ ID NO: 2948222 - RNA, 19 nt, Artificial Sequence
  Description of Artificial Sequence: Synthetic oligonucleotide
agcugugucuggagcaaac

SEQ ID NO: 2948223 - RNA, 19 nt, Artificial Sequence
  Description of Artificial Sequence: Synthetic oligonucleotide
ggcuucauucucucguuug

SEQ ID NO: 2948224 - RNA, 19 nt, Artificial Sequence
  Description of Artificial Sequence: Synthetic oligonucleotide
gggucucugcuccagacac

SEQ ID NO: 2948225 - RNA, 19 nt, Artificial Sequence
  Description of Artificial Sequence: Synthetic oligonucleotide
cacugcaaggcuggcaccc

SEQ ID NO: 2948226 - RNA, 19 nt, Artificial Sequence
  Description of Artificial Sequence: Synthetic oligonucleotide
cauggagguucugcaaggc

SEQ ID NO: 2948227 - RNA, 19 nt, Artificial Sequence
  Description of Artificial Sequence: Synthetic oligonucleotide
gguguuuuguuucaccacu

SEQ ID NO: 2948228 - RNA, 19 nt, Artificial Sequence
  Description of Artificial Sequence: Synthetic oligonucleotide
ggagagcugugucuggagc

SEQ ID NO: 2948229 - RNA, 19 nt, Artificial Sequence
  Description of Artificial Sequence: Synthetic oligonucleotide
cauucucucguuugaaacu

SEQ ID NO: 2948230 - RNA, 19 nt, Artificial Sequence
  Description of Artificial Sequence: Synthetic oligonucleotide
guguuuuguuucaccacug

SEQ ID NO: 2948231 - RNA, 19 nt, Artificial Sequence
  Description of Artificial Sequence: Synthetic oligonucleotide
uucugcuuuuacagcccgu

SEQ ID NO: 2948232 - RNA, 19 nt, Artificial Sequence
  Description of Artificial Sequence: Synthetic oligonucleotide
acgagguuaagggucucug

SEQ ID NO: 2948233 - RNA, 19 nt, Artificial Sequence
  Description of Artificial Sequence: Synthetic oligonucleotide
aaggccacaucgguguuuu

SEQ ID NO: 2948234 - RNA, 19 nt, Artificial Sequence
  Description of Artificial Sequence: Synthetic oligonucleotide
cauggaagucacucuccuc

SEQ ID NO: 2948235 - RNA, 19 nt, Artificial Sequence
  Description of Artificial Sequence: Synthetic oligonucleotide
auuccaggucauggaaguc

SEQ ID NO: 2948236 - RNA, 19 nt, Artificial Sequence
  Description of Artificial Sequence: Synthetic oligonucleotide
gcagcuagugguucucaag

SEQ ID NO: 2948237 - RNA, 19 nt, Artificial Sequence
  Description of Artificial Sequence: Synthetic oligonucleotide
uggucaucaguucgagguu

SEQ ID NO: 2948238 - RNA, 19 nt, Artificial Sequence
  Description of Artificial Sequence: Synthetic oligonucleotide
cugcaaggccacaucggug

SEQ ID NO: 2948239 - RNA, 19 nt, Artificial Sequence
  Description of Artificial Sequence: Synthetic oligonucleotide
guuugaaacuggagagcug

SEQ ID NO: 2948240 - RNA, 19 nt, Artificial Sequence
  Description of Artificial Sequence: Synthetic oligonucleotide
caaggcuucauucucucgu

SEQ ID NO: 2948241 - RNA, 19 nt, Artificial Sequence
  Description of Artificial Sequence: Synthetic oligonucleotide
  modified_base (15)..(15): a, c, u, g, unknown or other
gagguggugggaacnggug

SEQ ID NO: 2948242 - RNA, 19 nt, Artificial Sequence
  Description of Artificial Sequence: Synthetic oligonucleotide
gucgauagacuucaggauu

SEQ ID NO: 2948243 - RNA, 19 nt, Artificial Sequence
  Description of Artificial Sequence: Synthetic oligonucleotide
aguucgagguucuguucaa

SEQ ID NO: 2948244 - RNA, 19 nt, Artificial Sequence
  Description of Artificial Sequence: Synthetic oligonucleotide
gcugcuuuauggaugcaug

SEQ ID NO: 2948245 - RNA, 19 nt, Artificial Sequence
  Description of Artificial Sequence: Synthetic oligonucleotide
  modified_base (19)..(19): a, c, u, g, unknown or other
uucucaagagucgccucan

SEQ ID NO: 2948246 - RNA, 19 nt, Artificial Sequence
  Description of Artificial Sequence: Synthetic oligonucleotide
gugcacuguucauaacaac

SEQ ID NO: 2948247 - RNA, 19 nt, Artificial Sequence
  Description of Artificial Sequence: Synthetic oligonucleotide
uucugucgauagacuucag

SEQ ID NO: 2948248 - RNA, 19 nt, Artificial Sequence
  Description of Artificial Sequence: Synthetic oligonucleotide
agggucucugcuccagaca

SEQ ID NO: 2948249 - RNA, 19 nt, Artificial Sequence
  Description of Artificial Sequence: Synthetic oligonucleotide
  modified_base (11)..(11): a, c, u, g, unknown or other
uggugggaacngguggcag

SEQ ID NO: 2948250 - RNA, 19 nt, Artificial Sequence
  Description of Artificial Sequence: Synthetic oligonucleotide
cuguuucagcuucaugaca

SEQ ID NO: 2948251 - RNA, 19 nt, Artificial Sequence
  Description of Artificial Sequence: Synthetic oligonucleotide
  modified_base (13)..(13): a, c, u, g, unknown or other
gguggugggaacngguggc

SEQ ID NO: 2948252 - RNA, 19 nt, Artificial Sequence
  Description of Artificial Sequence: Synthetic oligonucleotide
  modified_base (14)..(14): a, c, u, g, unknown or other
aagagucgccucancuuua

SEQ ID NO: 2948253 - RNA, 19 nt, Artificial Sequence
  Description of Artificial Sequence: Synthetic oligonucleotide
caugugcacuguucauaac

SEQ ID NO: 2948254 - RNA, 19 nt, Artificial Sequence
  Description of Artificial Sequence: Synthetic oligonucleotide
uuacagcccguuuggucau

SEQ ID NO: 2948255 - RNA, 19 nt, Artificial Sequence
  Description of Artificial Sequence: Synthetic oligonucleotide
agcugcuuuauggaugcau

SEQ ID NO: 2948256 - RNA, 19 nt, Artificial Sequence
  Description of Artificial Sequence: Synthetic oligonucleotide
cagauuccaggucauggaa

SEQ ID NO: 2948257 - RNA, 19 nt, Artificial Sequence
  Description of Artificial Sequence: Synthetic oligonucleotide
ucucugcuccagacaccag

SEQ ID NO: 2948258 - RNA, 19 nt, Artificial Sequence
  Description of Artificial Sequence: Synthetic oligonucleotide
  modified_base (17)..(17): a, c, u, g, unknown or other
cucaagagucgccucancu

SEQ ID NO: 2948259 - RNA, 19 nt, Artificial Sequence
  Description of Artificial Sequence: Synthetic oligonucleotide
  modified_base (6)..(6): a, c, u, g, unknown or other
ccucancuuuaauuucuag

SEQ ID NO: 2948260 - RNA, 19 nt, Artificial Sequence
  Description of Artificial Sequence: Synthetic oligonucleotide
aggcuggcacccuggcggg

SEQ ID NO: 2948261 - RNA, 19 nt, Artificial Sequence
  Description of Artificial Sequence: Synthetic oligonucleotide
ucaucaguucgagguucug

SEQ ID NO: 2948262 - RNA, 19 nt, Artificial Sequence
  Description of Artificial Sequence: Synthetic oligonucleotide
gcaaggcuucauucucucg

SEQ ID NO: 2948263 - RNA, 19 nt, Artificial Sequence
  Description of Artificial Sequence: Synthetic oligonucleotide
uccagacaccagcugcuuu

SEQ ID NO: 2948264 - RNA, 19 nt, Artificial Sequence
  Description of Artificial Sequence: Synthetic oligonucleotide
uggaagucacucuccucuu

SEQ ID NO: 2948265 - RNA, 19 nt, Artificial Sequence
  Description of Artificial Sequence: Synthetic oligonucleotide
augcaugugcacuguucau

SEQ ID NO: 2948266 - RNA, 19 nt, Artificial Sequence
  Description of Artificial Sequence: Synthetic oligonucleotide
guuaagggucucugcucca

SEQ ID NO: 2948267 - RNA, 19 nt, Artificial Sequence
  Description of Artificial Sequence: Synthetic oligonucleotide
ccaacuuucguucaagcgu

SEQ ID NO: 2948268 - RNA, 19 nt, Artificial Sequence
  Description of Artificial Sequence: Synthetic oligonucleotide
gcaugugcacuguucauaa

SEQ ID NO: 2948269 - RNA, 19 nt, Artificial Sequence
  Description of Artificial Sequence: Synthetic oligonucleotide
gcuucauucucucguuuga

SEQ ID NO: 2948270 - RNA, 19 nt, Artificial Sequence
  Description of Artificial Sequence: Synthetic oligonucleotide
ugucuggagcaaacuuaua

SEQ ID NO: 2948271 - RNA, 19 nt, Artificial Sequence
  Description of Artificial Sequence: Synthetic oligonucleotide
gugguucucaagagucgcc

SEQ ID NO: 2948272 - RNA, 19 nt, Artificial Sequence
  Description of Artificial Sequence: Synthetic oligonucleotide
guaauucugucgauagacu

SEQ ID NO: 2948273 - RNA, 19 nt, Artificial Sequence
  Description of Artificial Sequence: Synthetic oligonucleotide
gagcaaacuuauauccugu

SEQ ID NO: 2948274 - RNA, 19 nt, Artificial Sequence
  Description of Artificial Sequence: Synthetic oligonucleotide
acuuucguucaagcguccu

SEQ ID NO: 2948275 - RNA, 19 nt, Artificial Sequence
  Description of Artificial Sequence: Synthetic oligonucleotide
gaccgcaaggcuucauucu

SEQ ID NO: 2948276 - RNA, 19 nt, Artificial Sequence
  Description of Artificial Sequence: Synthetic oligonucleotide
  modified_base (17)..(17): a, c, u, g, unknown or other
cagagguggugggaacngg

SEQ ID NO: 2948277 - RNA, 19 nt, Artificial Sequence
  Description of Artificial Sequence: Synthetic oligonucleotide
caacauggagguucugcaa

SEQ ID NO: 2948278 - RNA, 19 nt, Artificial Sequence
  Description of Artificial Sequence: Synthetic oligonucleotide
gacaugauuuucugcuuuu

SEQ ID NO: 2948279 - RNA, 19 nt, Artificial Sequence
  Description of Artificial Sequence: Synthetic oligonucleotide
uauccuguuucagcuucau

SEQ ID NO: 2948280 - RNA, 19 nt, Artificial Sequence
  Description of Artificial Sequence: Synthetic oligonucleotide
cgagguucuguucaacuug

SEQ ID NO: 2948281 - RNA, 19 nt, Artificial Sequence
  Description of Artificial Sequence: Synthetic oligonucleotide
ggaccgcaaggcuucauuc

SEQ ID NO: 2948282 - RNA, 19 nt, Artificial Sequence
  Description of Artificial Sequence: Synthetic oligonucleotide
uggaugcaugugcacuguu

SEQ ID NO: 2948283 - RNA, 19 nt, Artificial Sequence
  Description of Artificial Sequence: Synthetic oligonucleotide
agagcugugucuggagcaa

SEQ ID NO: 2948284 - RNA, 19 nt, Artificial Sequence
  Description of Artificial Sequence: Synthetic oligonucleotide
auggaugcaugugcacugu

SEQ ID NO: 2948285 - RNA, 19 nt, Artificial Sequence
  Description of Artificial Sequence: Synthetic oligonucleotide
uggcgggaccgcaaggcuu

SEQ ID NO: 2948286 - RNA, 19 nt, Artificial Sequence
  Description of Artificial Sequence: Synthetic oligonucleotide
uggcagagguggugggaac

SEQ ID NO: 2948287 - RNA, 19 nt, Artificial Sequence
  Description of Artificial Sequence: Synthetic oligonucleotide
gguucugcaaggccacauc

SEQ ID NO: 2948288 - RNA, 19 nt, Artificial Sequence
  Description of Artificial Sequence: Synthetic oligonucleotide
gcuucaugacaugauuuuc

SEQ ID NO: 2948289 - RNA, 19 nt, Artificial Sequence
  Description of Artificial Sequence: Synthetic oligonucleotide
acccuggcgggaccgcaag

SEQ ID NO: 2948290 - RNA, 19 nt, Artificial Sequence
  Description of Artificial Sequence: Synthetic oligonucleotide
auauccuguuucagcuuca

SEQ ID NO: 2948291 - RNA, 19 nt, Artificial Sequence
  Description of Artificial Sequence: Synthetic oligonucleotide
ggucaucaguucgagguuc

SEQ ID NO: 2948292 - RNA, 19 nt, Artificial Sequence
  Description of Artificial Sequence: Synthetic oligonucleotide
acuugcuggaccacagauu

SEQ ID NO: 2948293 - RNA, 19 nt, Artificial Sequence
  Description of Artificial Sequence: Synthetic oligonucleotide
cugcuuuauggaugcaugu

SEQ ID NO: 2948294 - RNA, 19 nt, Artificial Sequence
  Description of Artificial Sequence: Synthetic oligonucleotide
uaacaacauggagguucug

SEQ ID NO: 2948295 - RNA, 19 nt, Artificial Sequence
  Description of Artificial Sequence: Synthetic oligonucleotide
uuucagcaacgagguuaag

SEQ ID NO: 2948296 - RNA, 19 nt, Artificial Sequence
  Description of Artificial Sequence: Synthetic oligonucleotide
uggcacccuggcgggaccg

SEQ ID NO: 2948297 - RNA, 19 nt, Artificial Sequence
  Description of Artificial Sequence: Synthetic oligonucleotide
cuucauucucucguuugaa

SEQ ID NO: 2948298 - RNA, 19 nt, Artificial Sequence
  Description of Artificial Sequence: Synthetic oligonucleotide
guuucaccacugcaaggcu

SEQ ID NO: 2948299 - RNA, 19 nt, Artificial Sequence
  Description of Artificial Sequence: Synthetic oligonucleotide
ggaugcaugugcacuguuc

SEQ ID NO: 2948300 - RNA, 19 nt, Artificial Sequence
  Description of Artificial Sequence: Synthetic oligonucleotide
aggcuucauucucucguuu

SEQ ID NO: 2948301 - RNA, 19 nt, Artificial Sequence
  Description of Artificial Sequence: Synthetic oligonucleotide
guucgagguucuguucaac

SEQ ID NO: 2948302 - RNA, 19 nt, Artificial Sequence
  Description of Artificial Sequence: Synthetic oligonucleotide
gguucucaagagucgccuc

SEQ ID NO: 2948303 - RNA, 19 nt, Artificial Sequence
  Description of Artificial Sequence: Synthetic oligonucleotide
agguucugcaaggccacau

SEQ ID NO: 2948304 - RNA, 19 nt, Artificial Sequence
  Description of Artificial Sequence: Synthetic oligonucleotide
caucgguguuuuguuucac

SEQ ID NO: 2948305 - RNA, 19 nt, Artificial Sequence
  Description of Artificial Sequence: Synthetic oligonucleotide
  modified_base (15)..(15): a, c, u, g, unknown or other
caagagucgccucancuuu

SEQ ID NO: 2948306 - RNA, 19 nt, Artificial Sequence
  Description of Artificial Sequence: Synthetic oligonucleotide
  modified_base (13)..(13): a, c, u, g, unknown or other
agagucgccucancuuuaa

SEQ ID NO: 2948307 - RNA, 19 nt, Artificial Sequence
  Description of Artificial Sequence: Synthetic oligonucleotide
  modified_base (18)..(18): a, c, u, g, unknown or other
gcagagguggugggaacng

SEQ ID NO: 2948308 - RNA, 19 nt, Artificial Sequence
  Description of Artificial Sequence: Synthetic oligonucleotide
uggcagcuagugguucuca

SEQ ID NO: 2948309 - RNA, 19 nt, Artificial Sequence
  Description of Artificial Sequence: Synthetic oligonucleotide
gcuagugguucucaagagu

SEQ ID NO: 2948310 - RNA, 19 nt, Artificial Sequence
  Description of Artificial Sequence: Synthetic oligonucleotide
ggagguucugcaaggccac

SEQ ID NO: 2948311 - RNA, 19 nt, Artificial Sequence
  Description of Artificial Sequence: Synthetic oligonucleotide
ucauaacaacauggagguu

SEQ ID NO: 2948312 - RNA, 19 nt, Artificial Sequence
  Description of Artificial Sequence: Synthetic oligonucleotide
cgagguuaagggucucugc

SEQ ID NO: 2948313 - RNA, 19 nt, Artificial Sequence
  Description of Artificial Sequence: Synthetic oligonucleotide
ggaccacagauuccagguc

SEQ ID NO: 2948314 - RNA, 19 nt, Artificial Sequence
  Description of Artificial Sequence: Synthetic oligonucleotide
cagcuucaugacaugauuu

SEQ ID NO: 2948315 - RNA, 19 nt, Artificial Sequence
  Description of Artificial Sequence: Synthetic oligonucleotide
gugucuggagcaaacuuau

SEQ ID NO: 2948316 - RNA, 19 nt, Artificial Sequence
  Description of Artificial Sequence: Synthetic oligonucleotide
guucaacuugcuggaccac

SEQ ID NO: 2948317 - RNA, 19 nt, Artificial Sequence
  Description of Artificial Sequence: Synthetic oligonucleotide
cuucgcuuccaacuuucgu

SEQ ID NO: 2948318 - RNA, 19 nt, Artificial Sequence
  Description of Artificial Sequence: Synthetic oligonucleotide
acugcaaggcuggcacccu

SEQ ID NO: 2948319 - RNA, 19 nt, Artificial Sequence
  Description of Artificial Sequence: Synthetic oligonucleotide
acagcccguuuggucauca

SEQ ID NO: 2948320 - RNA, 19 nt, Artificial Sequence
  Description of Artificial Sequence: Synthetic oligonucleotide
ucaccacugcaaggcuggc

SEQ ID NO: 2948321 - RNA, 19 nt, Artificial Sequence
  Description of Artificial Sequence: Synthetic oligonucleotide
cuggagagcugugucugga

SEQ ID NO: 2948322 - RNA, 19 nt, Artificial Sequence
  Description of Artificial Sequence: Synthetic oligonucleotide
  modified_base (9)..(9): a, c, u, g, unknown or other
gugggaacngguggcagcu

SEQ ID NO: 2948323 - RNA, 19 nt, Artificial Sequence
  Description of Artificial Sequence: Synthetic oligonucleotide
cuggcacccuggcgggacc

SEQ ID NO: 2948324 - RNA, 19 nt, Artificial Sequence
  Description of Artificial Sequence: Synthetic oligonucleotide
  modified_base (12)..(12): a, c, u, g, unknown or other
guggugggaacngguggca

SEQ ID NO: 2948325 - RNA, 19 nt, Artificial Sequence
  Description of Artificial Sequence: Synthetic oligonucleotide
gcaaacuuauauccuguuu

SEQ ID NO: 2948326 - RNA, 19 nt, Artificial Sequence
  Description of Artificial Sequence: Synthetic oligonucleotide
caucaguucgagguucugu

SEQ ID NO: 2948327 - RNA, 19 nt, Artificial Sequence
  Description of Artificial Sequence: Synthetic oligonucleotide
cagcccguuuggucaucag

SEQ ID NO: 2948328 - RNA, 19 nt, Artificial Sequence
  Description of Artificial Sequence: Synthetic oligonucleotide
ccuggcgggaccgcaaggc

SEQ ID NO: 2948329 - RNA, 19 nt, Artificial Sequence
  Description of Artificial Sequence: Synthetic oligonucleotide
agguucuguucaacuugcu

SEQ ID NO: 2948330 - RNA, 19 nt, Artificial Sequence
  Description of Artificial Sequence: Synthetic oligonucleotide
  modified_base (19)..(19): a, c, u, g, unknown or other
ggcagagguggugggaacn

SEQ ID NO: 2948331 - RNA, 19 nt, Artificial Sequence
  Description of Artificial Sequence: Synthetic oligonucleotide
cugugucuggagcaaacuu

SEQ ID NO: 2948332 - RNA, 19 nt, Artificial Sequence
  Description of Artificial Sequence: Synthetic oligonucleotide
cagcaacgagguuaagggu

SEQ ID NO: 2948333 - RNA, 19 nt, Artificial Sequence
  Description of Artificial Sequence: Synthetic oligonucleotide
gcuuccaacuuucguucaa

SEQ ID NO: 2948334 - RNA, 19 nt, Artificial Sequence
  Description of Artificial Sequence: Synthetic oligonucleotide
ccagacaccagcugcuuua

SEQ ID NO: 2948335 - RNA, 19 nt, Artificial Sequence
  Description of Artificial Sequence: Synthetic oligonucleotide
guggcagcuagugguucuc

SEQ ID NO: 2948336 - RNA, 19 nt, Artificial Sequence
  Description of Artificial Sequence: Synthetic oligonucleotide
gcacuguucauaacaacau

SEQ ID NO: 2948337 - RNA, 19 nt, Artificial Sequence
  Description of Artificial Sequence: Synthetic oligonucleotide
ggucucugcuccagacacc

SEQ ID NO: 2948338 - RNA, 19 nt, Artificial Sequence
  Description of Artificial Sequence: Synthetic oligonucleotide
ggcagcuagugguucucaa

SEQ ID NO: 2948339 - RNA, 19 nt, Artificial Sequence
  Description of Artificial Sequence: Synthetic oligonucleotide
cuuuuacagcccguuuggu

SEQ ID NO: 2948340 - RNA, 19 nt, Artificial Sequence
  Description of Artificial Sequence: Synthetic oligonucleotide
ccacugcaaggcuggcacc

SEQ ID NO: 2948341 - RNA, 19 nt, Artificial Sequence
  Description of Artificial Sequence: Synthetic oligonucleotide
gguggcagcuagugguucu

SEQ ID NO: 2948342 - RNA, 19 nt, Artificial Sequence
  Description of Artificial Sequence: Synthetic oligonucleotide
gagcugugucuggagcaaa

SEQ ID NO: 2948343 - RNA, 19 nt, Artificial Sequence
  Description of Artificial Sequence: Synthetic oligonucleotide
ggcgggaccgcaaggcuuc

SEQ ID NO: 2948344 - RNA, 19 nt, Artificial Sequence
  Description of Artificial Sequence: Synthetic oligonucleotide
aggccacaucgguguuuug

SEQ ID NO: 2948345 - RNA, 19 nt, Artificial Sequence
  Description of Artificial Sequence: Synthetic oligonucleotide
gcaacgagguuaagggucu

SEQ ID NO: 2948346 - RNA, 19 nt, Artificial Sequence
  Description of Artificial Sequence: Synthetic oligonucleotide
ggccacaucgguguuuugu

SEQ ID NO: 2948347 - RNA, 19 nt, Artificial Sequence
  Description of Artificial Sequence: Synthetic oligonucleotide
  modified_base (8)..(8): a, c, u, g, unknown or other
ugggaacngguggcagcua

SEQ ID NO: 2948348 - RNA, 19 nt, Artificial Sequence
  Description of Artificial Sequence: Synthetic oligonucleotide
caacgagguuaagggucuc

SEQ ID NO: 2948349 - RNA, 19 nt, Artificial Sequence
  Description of Artificial Sequence: Synthetic oligonucleotide
cgcaaggcuucauucucuc

SEQ ID NO: 2948350 - RNA, 19 nt, Artificial Sequence
  Description of Artificial Sequence: Synthetic oligonucleotide
uacagcccguuuggucauc

SEQ ID NO: 2948351 - RNA, 19 nt, Artificial Sequence
  Description of Artificial Sequence: Synthetic oligonucleotide
cguuugaaacuggagagcu

SEQ ID NO: 2948352 - RNA, 19 nt, Artificial Sequence
  Description of Artificial Sequence: Synthetic oligonucleotide
  modified_base (7)..(7): a, c, u, g, unknown or other
gccucancuuuaauuucua

SEQ ID NO: 2948353 - RNA, 19 nt, Artificial Sequence
  Description of Artificial Sequence: Synthetic oligonucleotide
caucuucgcuuccaacuuu

SEQ ID NO: 2948354 - RNA, 19 nt, Artificial Sequence
  Description of Artificial Sequence: Synthetic oligonucleotide
  modified_base (12)..(12): a, c, u, g, unknown or other
gagucgccucancuuuaau

SEQ ID NO: 2948355 - RNA, 19 nt, Artificial Sequence
  Description of Artificial Sequence: Synthetic oligonucleotide
gccacaucgguguuuuguu

SEQ ID NO: 2948356 - RNA, 19 nt, Artificial Sequence
  Description of Artificial Sequence: Synthetic oligonucleotide
gcuggcacccuggcgggac

SEQ ID NO: 2948357 - RNA, 19 nt, Artificial Sequence
  Description of Artificial Sequence: Synthetic oligonucleotide
gcccguuuggucaucaguu

SEQ ID NO: 2948358 - RNA, 19 nt, Artificial Sequence
  Description of Artificial Sequence: Synthetic oligonucleotide
cuggcgggaccgcaaggcu

SEQ ID NO: 2948359 - RNA, 19 nt, Artificial Sequence
  Description of Artificial Sequence: Synthetic oligonucleotide
gcugugucuggagcaaacu

SEQ ID NO: 2948360 - RNA, 19 nt, Artificial Sequence
  Description of Artificial Sequence: Synthetic oligonucleotide
  modified_base (2)..(2): a, c, u, g, unknown or other
cngguggcagcuagugguu

SEQ ID NO: 2948361 - RNA, 19 nt, Artificial Sequence
  Description of Artificial Sequence: Synthetic oligonucleotide
cugcuuuuacagcccguuu

SEQ ID NO: 2948362 - RNA, 19 nt, Artificial Sequence
  Description of Artificial Sequence: Synthetic oligonucleotide
  modified_base (8)..(8): a, c, u, g, unknown or other
cgccucancuuuaauuucu

SEQ ID NO: 2948363 - RNA, 19 nt, Artificial Sequence
  Description of Artificial Sequence: Synthetic oligonucleotide
cacccuggcgggaccgcaa

SEQ ID NO: 2948364 - RNA, 19 nt, Artificial Sequence
  Description of Artificial Sequence: Synthetic oligonucleotide
cccuggcgggaccgcaagg

SEQ ID NO: 2948365 - RNA, 19 nt, Artificial Sequence
  Description of Artificial Sequence: Synthetic oligonucleotide
gcuccagacaccagcugcu

SEQ ID NO: 2948366 - RNA, 19 nt, Artificial Sequence
  Description of Artificial Sequence: Synthetic oligonucleotide
  modified_base (6)..(6): a, c, u, g, unknown or other
ggaacngguggcagcuagu

SEQ ID NO: 2948367 - RNA, 19 nt, Artificial Sequence
  Description of Artificial Sequence: Synthetic oligonucleotide
gggaccgcaaggcuucauu

SEQ ID NO: 2948368 - RNA, 19 nt, Artificial Sequence
  Description of Artificial Sequence: Synthetic oligonucleotide
cagacaccagcugcuuuau

SEQ ID NO: 2948369 - RNA, 19 nt, Artificial Sequence
  Description of Artificial Sequence: Synthetic oligonucleotide
ggauuucagcaacgagguu

SEQ ID NO: 2948370 - RNA, 19 nt, Artificial Sequence
  Description of Artificial Sequence: Synthetic oligonucleotide
cgcuuccaacuuucguuca

SEQ ID NO: 2948371 - RNA, 19 nt, Artificial Sequence
  Description of Artificial Sequence: Synthetic oligonucleotide
ggcacccuggcgggaccgc

SEQ ID NO: 2948372 - RNA, 19 nt, Artificial Sequence
  Description of Artificial Sequence: Synthetic oligonucleotide
ccgcaaggcuucauucucu

SEQ ID NO: 2948373 - RNA, 19 nt, Artificial Sequence
  Description of Artificial Sequence: Synthetic oligonucleotide
cagcugcuuuauggaugca

SEQ ID NO: 2948374 - RNA, 19 nt, Artificial Sequence
  Description of Artificial Sequence: Synthetic oligonucleotide
ccacaucgguguuuuguuu

SEQ ID NO: 2948375 - RNA, 19 nt, Artificial Sequence
  Description of Artificial Sequence: Synthetic oligonucleotide
gcacccuggcgggaccgca

SEQ ID NO: 2948376 - RNA, 19 nt, Artificial Sequence
  Description of Artificial Sequence: Synthetic oligonucleotide
ccaggucauggaagucacu

SEQ ID NO: 2948377 - RNA, 19 nt, Artificial Sequence
  Description of Artificial Sequence: Synthetic oligonucleotide
gcaaggccacaucgguguu

SEQ ID NO: 2948378 - RNA, 19 nt, Artificial Sequence
  Description of Artificial Sequence: Synthetic oligonucleotide
ggcuggcacccuggcggga

SEQ ID NO: 2948379 - RNA, 19 nt, Artificial Sequence
  Description of Artificial Sequence: Synthetic oligonucleotide
gcgggaccgcaaggcuuca

SEQ ID NO: 2948380 - RNA, 19 nt, Artificial Sequence
  Description of Artificial Sequence: Synthetic oligonucleotide
cgggaccgcaaggcuucau

SEQ ID NO: 2948381 - RNA, 19 nt, Artificial Sequence
  Description of Artificial Sequence: Synthetic oligonucleotide
  modified_base (1)..(1): a, c, u, g, unknown or other
ncuuuaauuucuaguaauu

SEQ ID NO: 2948382 - RNA, 19 nt, Artificial Sequence
  Description of Artificial Sequence: Synthetic oligonucleotide
  modified_base (1)..(1): a, c, u, g, unknown or other
ngguggcagcuagugguuc

SEQ ID NO: 2948383 - RNA, 19 nt, Artificial Sequence
  Description of Artificial Sequence: Synthetic oligonucleotide
ugauuuaccauauugcucg

SEQ ID NO: 2948384 - RNA, 19 nt, Artificial Sequence
  Description of Artificial Sequence: Synthetic oligonucleotide
aagacaaugcgacuaagcc

SEQ ID NO: 2948385 - RNA, 19 nt, Artificial Sequence
  Description of Artificial Sequence: Synthetic oligonucleotide
cuugacuugauguugaugg

SEQ ID NO: 2948386 - RNA, 19 nt, Artificial Sequence
  Description of Artificial Sequence: Synthetic oligonucleotide
aaacugauuuaccauauug

SEQ ID NO: 2948387 - RNA, 19 nt, Artificial Sequence
  Description of Artificial Sequence: Synthetic oligonucleotide
aacugauuuaccauauugc

SEQ ID NO: 2948388 - RNA, 19 nt, Artificial Sequence
  Description of Artificial Sequence: Synthetic oligonucleotide
uacauaguaaccucgaacu

SEQ ID NO: 2948389 - RNA, 19 nt, Artificial Sequence
  Description of Artificial Sequence: Synthetic oligonucleotide
uuucugagugaauugaucc

SEQ ID NO: 2948390 - RNA, 19 nt, Artificial Sequence
  Description of Artificial Sequence: Synthetic oligonucleotide
agugaauugauccgaaguc

SEQ ID NO: 2948391 - RNA, 19 nt, Artificial Sequence
  Description of Artificial Sequence: Synthetic oligonucleotide
uccauggucagcuaaguag

SEQ ID NO: 2948392 - RNA, 19 nt, Artificial Sequence
  Description of Artificial Sequence: Synthetic oligonucleotide
aaaaugguauucuuucuga

SEQ ID NO: 2948393 - RNA, 19 nt, Artificial Sequence
  Description of Artificial Sequence: Synthetic oligonucleotide
uucuucacuagccaugucc

SEQ ID NO: 2948394 - RNA, 19 nt, Artificial Sequence
  Description of Artificial Sequence: Synthetic oligonucleotide
cuuuacagcacguggacgg

SEQ ID NO: 2948395 - RNA, 19 nt, Artificial Sequence
  Description of Artificial Sequence: Synthetic oligonucleotide
uuuucgucucuucacauca

SEQ ID NO: 2948396 - RNA, 19 nt, Artificial Sequence
  Description of Artificial Sequence: Synthetic oligonucleotide
cauuuuccagucuacauag

SEQ ID NO: 2948397 - RNA, 19 nt, Artificial Sequence
  Description of Artificial Sequence: Synthetic oligonucleotide
aacuccagaaaguagucca

SEQ ID NO: 2948398 - RNA, 19 nt, Artificial Sequence
  Description of Artificial Sequence: Synthetic oligonucleotide
ucuuuuggcaaaaugguau

SEQ ID NO: 2948399 - RNA, 19 nt, Artificial Sequence
  Description of Artificial Sequence: Synthetic oligonucleotide
aaaugguauucuuucugag

SEQ ID NO: 2948400 - RNA, 19 nt, Artificial Sequence
  Description of Artificial Sequence: Synthetic oligonucleotide
uuuaccauauugcucgcug

SEQ ID NO: 2948401 - RNA, 19 nt, Artificial Sequence
  Description of Artificial Sequence: Synthetic oligonucleotide
aaugguauucuuucugagu

SEQ ID NO: 2948402 - RNA, 19 nt, Artificial Sequence
  Description of Artificial Sequence: Synthetic oligonucleotide
uucugauucucacaggaca

SEQ ID NO: 2948403 - RNA, 19 nt, Artificial Sequence
  Description of Artificial Sequence: Synthetic oligonucleotide
agcaauuucuucacuagcc

SEQ ID NO: 2948404 - RNA, 19 nt, Artificial Sequence
  Description of Artificial Sequence: Synthetic oligonucleotide
ucugauucucacaggacag

SEQ ID NO: 2948405 - RNA, 19 nt, Artificial Sequence
  Description of Artificial Sequence: Synthetic oligonucleotide
acugauuuaccauauugcu

SEQ ID NO: 2948406 - RNA, 19 nt, Artificial Sequence
  Description of Artificial Sequence: Synthetic oligonucleotide
uuugccagaauugacuucc

SEQ ID NO: 2948407 - RNA, 19 nt, Artificial Sequence
  Description of Artificial Sequence: Synthetic oligonucleotide
uguccugaaggucuuuugg

SEQ ID NO: 2948408 - RNA, 19 nt, Artificial Sequence
  Description of Artificial Sequence: Synthetic oligonucleotide
aucugcauauucauaagcc

SEQ ID NO: 2948409 - RNA, 19 nt, Artificial Sequence
  Description of Artificial Sequence: Synthetic oligonucleotide
uggaagagcagcaauuucu

SEQ ID NO: 2948410 - RNA, 19 nt, Artificial Sequence
  Description of Artificial Sequence: Synthetic oligonucleotide
ucacaggacagcuaucccg

SEQ ID NO: 2948411 - RNA, 19 nt, Artificial Sequence
  Description of Artificial Sequence: Synthetic oligonucleotide
uucugaaacugauuuacca

SEQ ID NO: 2948412 - RNA, 19 nt, Artificial Sequence
  Description of Artificial Sequence: Synthetic oligonucleotide
uggucagcuaaguaggcgg

SEQ ID NO: 2948413 - RNA, 19 nt, Artificial Sequence
  Description of Artificial Sequence: Synthetic oligonucleotide
uccagaaaguaguccaugg

SEQ ID NO: 2948414 - RNA, 19 nt, Artificial Sequence
  Description of Artificial Sequence: Synthetic oligonucleotide
aggucuuuuggcaaaaugg

SEQ ID NO: 2948415 - RNA, 19 nt, Artificial Sequence
  Description of Artificial Sequence: Synthetic oligonucleotide
uucugagugaauugauccg

SEQ ID NO: 2948416 - RNA, 19 nt, Artificial Sequence
  Description of Artificial Sequence: Synthetic oligonucleotide
ugucauaacacaucgguuu

SEQ ID NO: 2948417 - RNA, 19 nt, Artificial Sequence
  Description of Artificial Sequence: Synthetic oligonucleotide
agagcagcaauuucuucac

SEQ ID NO: 2948418 - RNA, 19 nt, Artificial Sequence
  Description of Artificial Sequence: Synthetic oligonucleotide
ugcgacuaagccuccaacg

SEQ ID NO: 2948419 - RNA, 19 nt, Artificial Sequence
  Description of Artificial Sequence: Synthetic oligonucleotide
aauugauccgaagucucuc

SEQ ID NO: 2948420 - RNA, 19 nt, Artificial Sequence
  Description of Artificial Sequence: Synthetic oligonucleotide
acuagccauguccugaagg

SEQ ID NO: 2948421 - RNA, 19 nt, Artificial Sequence
  Description of Artificial Sequence: Synthetic oligonucleotide
ucugcauauucauaagcca

SEQ ID NO: 2948422 - RNA, 19 nt, Artificial Sequence
  Description of Artificial Sequence: Synthetic oligonucleotide
uagguucugaaacugauuu

SEQ ID NO: 2948423 - RNA, 19 nt, Artificial Sequence
  Description of Artificial Sequence: Synthetic oligonucleotide
aaggucuuuuggcaaaaug

SEQ ID NO: 2948424 - RNA, 19 nt, Artificial Sequence
  Description of Artificial Sequence: Synthetic oligonucleotide
uccgaagucucucaucugc

SEQ ID NO: 2948425 - RNA, 19 nt, Artificial Sequence
  Description of Artificial Sequence: Synthetic oligonucleotide
aucgguuucugauucucac

SEQ ID NO: 2948426 - RNA, 19 nt, Artificial Sequence
  Description of Artificial Sequence: Synthetic oligonucleotide
gacaaugcgacuaagccuc

SEQ ID NO: 2948427 - RNA, 19 nt, Artificial Sequence
  Description of Artificial Sequence: Synthetic oligonucleotide
uucacaucacgcaacauuu

SEQ ID NO: 2948428 - RNA, 19 nt, Artificial Sequence
  Description of Artificial Sequence: Synthetic oligonucleotide
aauuucuucacuagccaug

SEQ ID NO: 2948429 - RNA, 19 nt, Artificial Sequence
  Description of Artificial Sequence: Synthetic oligonucleotide
auauugcucgcugaacucc

SEQ ID NO: 2948430 - RNA, 19 nt, Artificial Sequence
  Description of Artificial Sequence: Synthetic oligonucleotide
gaugucauaacacaucggu

SEQ ID NO: 2948431 - RNA, 19 nt, Artificial Sequence
  Description of Artificial Sequence: Synthetic oligonucleotide
aaguccgcagcagcgagcc

SEQ ID NO: 2948432 - RNA, 19 nt, Artificial Sequence
  Description of Artificial Sequence: Synthetic oligonucleotide
caaaaugguauucuuucug

SEQ ID NO: 2948433 - RNA, 19 nt, Artificial Sequence
  Description of Artificial Sequence: Synthetic oligonucleotide
aagucucucaucugcauau

SEQ ID NO: 2948434 - RNA, 19 nt, Artificial Sequence
  Description of Artificial Sequence: Synthetic oligonucleotide
ucucucaucugcauauuca

SEQ ID NO: 2948435 - RNA, 19 nt, Artificial Sequence
  Description of Artificial Sequence: Synthetic oligonucleotide
cucgcugaacuccagaaag

SEQ ID NO: 2948436 - RNA, 19 nt, Artificial Sequence
  Description of Artificial Sequence: Synthetic oligonucleotide
gaaaguaguccauggucag

SEQ ID NO: 2948437 - RNA, 19 nt, Artificial Sequence
  Description of Artificial Sequence: Synthetic oligonucleotide
ucuucacuagccauguccu

SEQ ID NO: 2948438 - RNA, 19 nt, Artificial Sequence
  Description of Artificial Sequence: Synthetic oligonucleotide
uucgucucuucacaucacg

SEQ ID NO: 2948439 - RNA, 19 nt, Artificial Sequence
  Description of Artificial Sequence: Synthetic oligonucleotide
uuccagucuacauaguaac

SEQ ID NO: 2948440 - RNA, 19 nt, Artificial Sequence
  Description of Artificial Sequence: Synthetic oligonucleotide
aacggcgcuuuacagcacg

SEQ ID NO: 2948441 - RNA, 19 nt, Artificial Sequence
  Description of Artificial Sequence: Synthetic oligonucleotide
cuacauaguaaccucgaac

SEQ ID NO: 2948442 - RNA, 19 nt, Artificial Sequence
  Description of Artificial Sequence: Synthetic oligonucleotide
ucugaaacugauuuaccau

SEQ ID NO: 2948443 - RNA, 19 nt, Artificial Sequence
  Description of Artificial Sequence: Synthetic oligonucleotide
uugauguugauggagggac

SEQ ID NO: 2948444 - RNA, 19 nt, Artificial Sequence
  Description of Artificial Sequence: Synthetic oligonucleotide
acacaucgguuucugauuc

SEQ ID NO: 2948445 - RNA, 19 nt, Artificial Sequence
  Description of Artificial Sequence: Synthetic oligonucleotide
uuuccagucuacauaguaa

SEQ ID NO: 2948446 - RNA, 19 nt, Artificial Sequence
  Description of Artificial Sequence: Synthetic oligonucleotide
uuuuccagucuacauagua

SEQ ID NO: 2948447 - RNA, 19 nt, Artificial Sequence
  Description of Artificial Sequence: Synthetic oligonucleotide
uauucuuucugagugaauu

SEQ ID NO: 2948448 - RNA, 19 nt, Artificial Sequence
  Description of Artificial Sequence: Synthetic oligonucleotide
ugaaacugauuuaccauau

SEQ ID NO: 2948449 - RNA, 19 nt, Artificial Sequence
  Description of Artificial Sequence: Synthetic oligonucleotide
gacuaagccuccaacggcg

SEQ ID NO: 2948450 - RNA, 19 nt, Artificial Sequence
  Description of Artificial Sequence: Synthetic oligonucleotide
acagcuaucccguggaaga

SEQ ID NO: 2948451 - RNA, 19 nt, Artificial Sequence
  Description of Artificial Sequence: Synthetic oligonucleotide
gggaugucauaacacaucg

SEQ ID NO: 2948452 - RNA, 19 nt, Artificial Sequence
  Description of Artificial Sequence: Synthetic oligonucleotide
ucacgcaacauuuuccagu

SEQ ID NO: 2948453 - RNA, 19 nt, Artificial Sequence
  Description of Artificial Sequence: Synthetic oligonucleotide
agacaaugcgacuaagccu

SEQ ID NO: 2948454 - RNA, 19 nt, Artificial Sequence
  Description of Artificial Sequence: Synthetic oligonucleotide
caucugcauauucauaagc

SEQ ID NO: 2948455 - RNA, 19 nt, Artificial Sequence
  Description of Artificial Sequence: Synthetic oligonucleotide
uaacacaucgguuucugau

SEQ ID NO: 2948456 - RNA, 19 nt, Artificial Sequence
  Description of Artificial Sequence: Synthetic oligonucleotide
aaguaggcggaagacaaug

SEQ ID NO: 2948457 - RNA, 19 nt, Artificial Sequence
  Description of Artificial Sequence: Synthetic oligonucleotide
guaggcggaagacaaugcg

SEQ ID NO: 2948458 - RNA, 19 nt, Artificial Sequence
  Description of Artificial Sequence: Synthetic oligonucleotide
ucucacaggacagcuaucc

SEQ ID NO: 2948459 - RNA, 19 nt, Artificial Sequence
  Description of Artificial Sequence: Synthetic oligonucleotide
acaucacgcaacauuuucc

SEQ ID NO: 2948460 - RNA, 19 nt, Artificial Sequence
  Description of Artificial Sequence: Synthetic oligonucleotide
uuuggcaaaaugguauucu

SEQ ID NO: 2948461 - RNA, 19 nt, Artificial Sequence
  Description of Artificial Sequence: Synthetic oligonucleotide
cagaaaguaguccaugguc

SEQ ID NO: 2948462 - RNA, 19 nt, Artificial Sequence
  Description of Artificial Sequence: Synthetic oligonucleotide
cauaguaaccucgaacuug

SEQ ID NO: 2948463 - RNA, 19 nt, Artificial Sequence
  Description of Artificial Sequence: Synthetic oligonucleotide
aagucucuuugccagaauu

SEQ ID NO: 2948464 - RNA, 19 nt, Artificial Sequence
  Description of Artificial Sequence: Synthetic oligonucleotide
auucucacaggacagcuau

SEQ ID NO: 2948465 - RNA, 19 nt, Artificial Sequence
  Description of Artificial Sequence: Synthetic oligonucleotide
cugauuuaccauauugcuc

SEQ ID NO: 2948466 - RNA, 19 nt, Artificial Sequence
  Description of Artificial Sequence: Synthetic oligonucleotide
agaauugacuucccgggca

SEQ ID NO: 2948467 - RNA, 19 nt, Artificial Sequence
  Description of Artificial Sequence: Synthetic oligonucleotide
agaaaguaguccaugguca

SEQ ID NO: 2948468 - RNA, 19 nt, Artificial Sequence
  Description of Artificial Sequence: Synthetic oligonucleotide
uggacgggaugucauaaca

SEQ ID NO: 2948469 - RNA, 19 nt, Artificial Sequence
  Description of Artificial Sequence: Synthetic oligonucleotide
gaagacaaugcgacuaagc

SEQ ID NO: 2948470 - RNA, 19 nt, Artificial Sequence
  Description of Artificial Sequence: Synthetic oligonucleotide
ucugagugaauugauccga

SEQ ID NO: 2948471 - RNA, 19 nt, Artificial Sequence
  Description of Artificial Sequence: Synthetic oligonucleotide
aguaaccucgaacuugacu

SEQ ID NO: 2948472 - RNA, 19 nt, Artificial Sequence
  Description of Artificial Sequence: Synthetic oligonucleotide
ugacuugauguugauggag

SEQ ID NO: 2948473 - RNA, 19 nt, Artificial Sequence
  Description of Artificial Sequence: Synthetic oligonucleotide
uucuuucugagugaauuga

SEQ ID NO: 2948474 - RNA, 19 nt, Artificial Sequence
  Description of Artificial Sequence: Synthetic oligonucleotide
cucaucugcauauucauaa

SEQ ID NO: 2948475 - RNA, 19 nt, Artificial Sequence
  Description of Artificial Sequence: Synthetic oligonucleotide
gaauugacuucccgggcag

SEQ ID NO: 2948476 - RNA, 19 nt, Artificial Sequence
  Description of Artificial Sequence: Synthetic oligonucleotide
uccagucuacauaguaacc

SEQ ID NO: 2948477 - RNA, 19 nt, Artificial Sequence
  Description of Artificial Sequence: Synthetic oligonucleotide
uccugaaggucuuuuggca

SEQ ID NO: 2948478 - RNA, 19 nt, Artificial Sequence
  Description of Artificial Sequence: Synthetic oligonucleotide
acauuuuccagucuacaua

SEQ ID NO: 2948479 - RNA, 19 nt, Artificial Sequence
  Description of Artificial Sequence: Synthetic oligonucleotide
uaguccauggucagcuaag

SEQ ID NO: 2948480 - RNA, 19 nt, Artificial Sequence
  Description of Artificial Sequence: Synthetic oligonucleotide
cuaaguaggcggaagacaa

SEQ ID NO: 2948481 - RNA, 19 nt, Artificial Sequence
  Description of Artificial Sequence: Synthetic oligonucleotide
ugaguagguucugaaacug

SEQ ID NO: 2948482 - RNA, 19 nt, Artificial Sequence
  Description of Artificial Sequence: Synthetic oligonucleotide
uccaacggcgcuuuacagc

SEQ ID NO: 2948483 - RNA, 19 nt, Artificial Sequence
  Description of Artificial Sequence: Synthetic oligonucleotide
ugagugaauugauccgaag

SEQ ID NO: 2948484 - RNA, 19 nt, Artificial Sequence
  Description of Artificial Sequence: Synthetic oligonucleotide
gaaaguccgcagcagcgag

SEQ ID NO: 2948485 - RNA, 19 nt, Artificial Sequence
  Description of Artificial Sequence: Synthetic oligonucleotide
uaggcggaagacaaugcga

SEQ ID NO: 2948486 - RNA, 19 nt, Artificial Sequence
  Description of Artificial Sequence: Synthetic oligonucleotide
ggcaaaaugguauucuuuc

SEQ ID NO: 2948487 - RNA, 19 nt, Artificial Sequence
  Description of Artificial Sequence: Synthetic oligonucleotide
cuuucugagugaauugauc

SEQ ID NO: 2948488 - RNA, 19 nt, Artificial Sequence
  Description of Artificial Sequence: Synthetic oligonucleotide
ucgucucuucacaucacgc

SEQ ID NO: 2948489 - RNA, 19 nt, Artificial Sequence
  Description of Artificial Sequence: Synthetic oligonucleotide
ugaacuccagaaaguaguc

SEQ ID NO: 2948490 - RNA, 19 nt, Artificial Sequence
  Description of Artificial Sequence: Synthetic oligonucleotide
cugccugccggaaaguccg

SEQ ID NO: 2948491 - RNA, 19 nt, Artificial Sequence
  Description of Artificial Sequence: Synthetic oligonucleotide
uuucugauucucacaggac

SEQ ID NO: 2948492 - RNA, 19 nt, Artificial Sequence
  Description of Artificial Sequence: Synthetic oligonucleotide
guaaccucgaacuugacuu

SEQ ID NO: 2948493 - RNA, 19 nt, Artificial Sequence
  Description of Artificial Sequence: Synthetic oligonucleotide
aauugacuucccgggcagc

SEQ ID NO: 2948494 - RNA, 19 nt, Artificial Sequence
  Description of Artificial Sequence: Synthetic oligonucleotide
aacaaggacgccgccaugu

SEQ ID NO: 2948495 - RNA, 19 nt, Artificial Sequence
  Description of Artificial Sequence: Synthetic oligonucleotide
ugccagaauugacuucccg

SEQ ID NO: 2948496 - RNA, 19 nt, Artificial Sequence
  Description of Artificial Sequence: Synthetic oligonucleotide
gacgggaugucauaacaca

SEQ ID NO: 2948497 - RNA, 19 nt, Artificial Sequence
  Description of Artificial Sequence: Synthetic oligonucleotide
uauugcucgcugaacucca

SEQ ID NO: 2948498 - RNA, 19 nt, Artificial Sequence
  Description of Artificial Sequence: Synthetic oligonucleotide
uggagggacugccugccgg

SEQ ID NO: 2948499 - RNA, 19 nt, Artificial Sequence
  Description of Artificial Sequence: Synthetic oligonucleotide
uaucccguggaagagcagc

SEQ ID NO: 2948500 - RNA, 19 nt, Artificial Sequence
  Description of Artificial Sequence: Synthetic oligonucleotide
gcugaguagguucugaaac

SEQ ID NO: 2948501 - RNA, 19 nt, Artificial Sequence
  Description of Artificial Sequence: Synthetic oligonucleotide
ucucuucacaucacgcaac

SEQ ID NO: 2948502 - RNA, 19 nt, Artificial Sequence
  Description of Artificial Sequence: Synthetic oligonucleotide
uguugauggagggacugcc

SEQ ID NO: 2948503 - RNA, 19 nt, Artificial Sequence
  Description of Artificial Sequence: Synthetic oligonucleotide
ucuacauaguaaccucgaa

SEQ ID NO: 2948504 - RNA, 19 nt, Artificial Sequence
  Description of Artificial Sequence: Synthetic oligonucleotide
ccagaauugacuucccggg

SEQ ID NO: 2948505 - RNA, 19 nt, Artificial Sequence
  Description of Artificial Sequence: Synthetic oligonucleotide
aaugcgacuaagccuccaa

SEQ ID NO: 2948506 - RNA, 19 nt, Artificial Sequence
  Description of Artificial Sequence: Synthetic oligonucleotide
ucucuuugccagaauugac

SEQ ID NO: 2948507 - RNA, 19 nt, Artificial Sequence
  Description of Artificial Sequence: Synthetic oligonucleotide
uuaccauauugcucgcuga

SEQ ID NO: 2948508 - RNA, 19 nt, Artificial Sequence
  Description of Artificial Sequence: Synthetic oligonucleotide
gauccgaagucucucaucu

SEQ ID NO: 2948509 - RNA, 19 nt, Artificial Sequence
  Description of Artificial Sequence: Synthetic oligonucleotide
gccagaauugacuucccgg

SEQ ID NO: 2948510 - RNA, 19 nt, Artificial Sequence
  Description of Artificial Sequence: Synthetic oligonucleotide
gagcccaacaaggacgccg

SEQ ID NO: 2948511 - RNA, 19 nt, Artificial Sequence
  Description of Artificial Sequence: Synthetic oligonucleotide
agcuaaguaggcggaagac

SEQ ID NO: 2948512 - RNA, 19 nt, Artificial Sequence
  Description of Artificial Sequence: Synthetic oligonucleotide
aguaggcggaagacaaugc

SEQ ID NO: 2948513 - RNA, 19 nt, Artificial Sequence
  Description of Artificial Sequence: Synthetic oligonucleotide
aaaguccgcagcagcgagc

SEQ ID NO: 2948514 - RNA, 19 nt, Artificial Sequence
  Description of Artificial Sequence: Synthetic oligonucleotide
auaguaaccucgaacuuga

SEQ ID NO: 2948515 - RNA, 19 nt, Artificial Sequence
  Description of Artificial Sequence: Synthetic oligonucleotide
agcgagcccaacaaggacg

SEQ ID NO: 2948516 - RNA, 19 nt, Artificial Sequence
  Description of Artificial Sequence: Synthetic oligonucleotide
ucagcuaaguaggcggaag

SEQ ID NO: 2948517 - RNA, 19 nt, Artificial Sequence
  Description of Artificial Sequence: Synthetic oligonucleotide
augcgacuaagccuccaac

SEQ ID NO: 2948518 - RNA, 19 nt, Artificial Sequence
  Description of Artificial Sequence: Synthetic oligonucleotide
gguucugaaacugauuuac

SEQ ID NO: 2948519 - RNA, 19 nt, Artificial Sequence
  Description of Artificial Sequence: Synthetic oligonucleotide
gagugaauugauccgaagu

SEQ ID NO: 2948520 - RNA, 19 nt, Artificial Sequence
  Description of Artificial Sequence: Synthetic oligonucleotide
aggcggaagacaaugcgac

SEQ ID NO: 2948521 - RNA, 19 nt, Artificial Sequence
  Description of Artificial Sequence: Synthetic oligonucleotide
agcagcgagcccaacaagg

SEQ ID NO: 2948522 - RNA, 19 nt, Artificial Sequence
  Description of Artificial Sequence: Synthetic oligonucleotide
cacgcaacauuuuccaguc

SEQ ID NO: 2948523 - RNA, 19 nt, Artificial Sequence
  Description of Artificial Sequence: Synthetic oligonucleotide
ccauggucagcuaaguagg

SEQ ID NO: 2948524 - RNA, 19 nt, Artificial Sequence
  Description of Artificial Sequence: Synthetic oligonucleotide
ugauucucacaggacagcu

SEQ ID NO: 2948525 - RNA, 19 nt, Artificial Sequence
  Description of Artificial Sequence: Synthetic oligonucleotide
uuuacagcacguggacggg

SEQ ID NO: 2948526 - RNA, 19 nt, Artificial Sequence
  Description of Artificial Sequence: Synthetic oligonucleotide
cauauugcucgcugaacuc

SEQ ID NO: 2948527 - RNA, 19 nt, Artificial Sequence
  Description of Artificial Sequence: Synthetic oligonucleotide
ucgaacuugacuugauguu

SEQ ID NO: 2948528 - RNA, 19 nt, Artificial Sequence
  Description of Artificial Sequence: Synthetic oligonucleotide
auuucuucacuagccaugu

SEQ ID NO: 2948529 - RNA, 19 nt, Artificial Sequence
  Description of Artificial Sequence: Synthetic oligonucleotide
uaaccucgaacuugacuug

SEQ ID NO: 2948530 - RNA, 19 nt, Artificial Sequence
  Description of Artificial Sequence: Synthetic oligonucleotide
cagcaauuucuucacuagc

SEQ ID NO: 2948531 - RNA, 19 nt, Artificial Sequence
  Description of Artificial Sequence: Synthetic oligonucleotide
guccugaaggucuuuuggc

SEQ ID NO: 2948532 - RNA, 19 nt, Artificial Sequence
  Description of Artificial Sequence: Synthetic oligonucleotide
uaccauauugcucgcugaa

SEQ ID NO: 2948533 - RNA, 19 nt, Artificial Sequence
  Description of Artificial Sequence: Synthetic oligonucleotide
cacaucacgcaacauuuuc

SEQ ID NO: 2948534 - RNA, 19 nt, Artificial Sequence
  Description of Artificial Sequence: Synthetic oligonucleotide
agcagcaauuucuucacua

SEQ ID NO: 2948535 - RNA, 19 nt, Artificial Sequence
  Description of Artificial Sequence: Synthetic oligonucleotide
acugccugccggaaagucc

SEQ ID NO: 2948536 - RNA, 19 nt, Artificial Sequence
  Description of Artificial Sequence: Synthetic oligonucleotide
uugacuugauguugaugga

SEQ ID NO: 2948537 - RNA, 19 nt, Artificial Sequence
  Description of Artificial Sequence: Synthetic oligonucleotide
ggcgcuuuacagcacgugg

SEQ ID NO: 2948538 - RNA, 19 nt, Artificial Sequence
  Description of Artificial Sequence: Synthetic oligonucleotide
gauuuaccauauugcucgc

SEQ ID NO: 2948539 - RNA, 19 nt, Artificial Sequence
  Description of Artificial Sequence: Synthetic oligonucleotide
ugacuucccgggcagcuga

SEQ ID NO: 2948540 - RNA, 19 nt, Artificial Sequence
  Description of Artificial Sequence: Synthetic oligonucleotide
gaacuccagaaaguagucc

SEQ ID NO: 2948541 - RNA, 19 nt, Artificial Sequence
  Description of Artificial Sequence: Synthetic oligonucleotide
cagucuacauaguaaccuc

SEQ ID NO: 2948542 - RNA, 19 nt, Artificial Sequence
  Description of Artificial Sequence: Synthetic oligonucleotide
gcgacuaagccuccaacgg

SEQ ID NO: 2948543 - RNA, 19 nt, Artificial Sequence
  Description of Artificial Sequence: Synthetic oligonucleotide
ucgguuucugauucucaca

SEQ ID NO: 2948544 - RNA, 19 nt, Artificial Sequence
  Description of Artificial Sequence: Synthetic oligonucleotide
gucauaacacaucgguuuc

SEQ ID NO: 2948545 - RNA, 19 nt, Artificial Sequence
  Description of Artificial Sequence: Synthetic oligonucleotide
uggcaaaaugguauucuuu

SEQ ID NO: 2948546 - RNA, 19 nt, Artificial Sequence
  Description of Artificial Sequence: Synthetic oligonucleotide
aucacgcaacauuuuccag

SEQ ID NO: 2948547 - RNA, 19 nt, Artificial Sequence
  Description of Artificial Sequence: Synthetic oligonucleotide
gacagcuaucccguggaag

SEQ ID NO: 2948548 - RNA, 19 nt, Artificial Sequence
  Description of Artificial Sequence: Synthetic oligonucleotide
caucacgcaacauuuucca

SEQ ID NO: 2948549 - RNA, 19 nt, Artificial Sequence
  Description of Artificial Sequence: Synthetic oligonucleotide
auguugauggagggacugc

SEQ ID NO: 2948550 - RNA, 19 nt, Artificial Sequence
  Description of Artificial Sequence: Synthetic oligonucleotide
cagaauugacuucccgggc

SEQ ID NO: 2948551 - RNA, 19 nt, Artificial Sequence
  Description of Artificial Sequence: Synthetic oligonucleotide
acaucgguuucugauucuc

SEQ ID NO: 2948552 - RNA, 19 nt, Artificial Sequence
  Description of Artificial Sequence: Synthetic oligonucleotide
agcuaucccguggaagagc

SEQ ID NO: 2948553 - RNA, 19 nt, Artificial Sequence
  Description of Artificial Sequence: Synthetic oligonucleotide
cugaaacugauuuaccaua

SEQ ID NO: 2948554 - RNA, 19 nt, Artificial Sequence
  Description of Artificial Sequence: Synthetic oligonucleotide
ugauguugauggagggacu

SEQ ID NO: 2948555 - RNA, 19 nt, Artificial Sequence
  Description of Artificial Sequence: Synthetic oligonucleotide
cugaacuccagaaaguagu

SEQ ID NO: 2948556 - RNA, 19 nt, Artificial Sequence
  Description of Artificial Sequence: Synthetic oligonucleotide
aggacagcuaucccgugga

SEQ ID NO: 2948557 - RNA, 19 nt, Artificial Sequence
  Description of Artificial Sequence: Synthetic oligonucleotide
gcagcaauuucuucacuag

SEQ ID NO: 2948558 - RNA, 19 nt, Artificial Sequence
  Description of Artificial Sequence: Synthetic oligonucleotide
cauggucagcuaaguaggc

SEQ ID NO: 2948559 - RNA, 19 nt, Artificial Sequence
  Description of Artificial Sequence: Synthetic oligonucleotide
uuuuggcaaaaugguauuc

SEQ ID NO: 2948560 - RNA, 19 nt, Artificial Sequence
  Description of Artificial Sequence: Synthetic oligonucleotide
aaggacgccgccaugucgu

SEQ ID NO: 2948561 - RNA, 19 nt, Artificial Sequence
  Description of Artificial Sequence: Synthetic oligonucleotide
uuggcaaaaugguauucuu

SEQ ID NO: 2948562 - RNA, 19 nt, Artificial Sequence
  Description of Artificial Sequence: Synthetic oligonucleotide
gaacuugacuugauguuga

SEQ ID NO: 2948563 - RNA, 19 nt, Artificial Sequence
  Description of Artificial Sequence: Synthetic oligonucleotide
agucucuuugccagaauug

SEQ ID NO: 2948564 - RNA, 19 nt, Artificial Sequence
  Description of Artificial Sequence: Synthetic oligonucleotide
ucucaucugcauauucaua

SEQ ID NO: 2948565 - RNA, 19 nt, Artificial Sequence
  Description of Artificial Sequence: Synthetic oligonucleotide
ugcucgcugaacuccagaa

SEQ ID NO: 2948566 - RNA, 19 nt, Artificial Sequence
  Description of Artificial Sequence: Synthetic oligonucleotide
gauggagggacugccugcc

SEQ ID NO: 2948567 - RNA, 19 nt, Artificial Sequence
  Description of Artificial Sequence: Synthetic oligonucleotide
ugccggaaaguccgcagca

SEQ ID NO: 2948568 - RNA, 19 nt, Artificial Sequence
  Description of Artificial Sequence: Synthetic oligonucleotide
auaacacaucgguuucuga

SEQ ID NO: 2948569 - RNA, 19 nt, Artificial Sequence
  Description of Artificial Sequence: Synthetic oligonucleotide
ucgcugaacuccagaaagu

SEQ ID NO: 2948570 - RNA, 19 nt, Artificial Sequence
  Description of Artificial Sequence: Synthetic oligonucleotide
caaggacgccgccaugucg

SEQ ID NO: 2948571 - RNA, 19 nt, Artificial Sequence
  Description of Artificial Sequence: Synthetic oligonucleotide
agcccaacaaggacgccgc

SEQ ID NO: 2948572 - RNA, 19 nt, Artificial Sequence
  Description of Artificial Sequence: Synthetic oligonucleotide
caggacagcuaucccgugg

SEQ ID NO: 2948573 - RNA, 19 nt, Artificial Sequence
  Description of Artificial Sequence: Synthetic oligonucleotide
acaaggacgccgccauguc

SEQ ID NO: 2948574 - RNA, 19 nt, Artificial Sequence
  Description of Artificial Sequence: Synthetic oligonucleotide
auguccugaaggucuuuug

SEQ ID NO: 2948575 - RNA, 19 nt, Artificial Sequence
  Description of Artificial Sequence: Synthetic oligonucleotide
cucgaacuugacuugaugu

SEQ ID NO: 2948576 - RNA, 19 nt, Artificial Sequence
  Description of Artificial Sequence: Synthetic oligonucleotide
aacuugacuugauguugau

SEQ ID NO: 2948577 - RNA, 19 nt, Artificial Sequence
  Description of Artificial Sequence: Synthetic oligonucleotide
ucccgggcagcugaguagg

SEQ ID NO: 2948578 - RNA, 19 nt, Artificial Sequence
  Description of Artificial Sequence: Synthetic oligonucleotide
guucugaaacugauuuacc

SEQ ID NO: 2948579 - RNA, 19 nt, Artificial Sequence
  Description of Artificial Sequence: Synthetic oligonucleotide
acauaguaaccucgaacuu

SEQ ID NO: 2948580 - RNA, 19 nt, Artificial Sequence
  Description of Artificial Sequence: Synthetic oligonucleotide
ucauaacacaucgguuucu

SEQ ID NO: 2948581 - RNA, 19 nt, Artificial Sequence
  Description of Artificial Sequence: Synthetic oligonucleotide
uuucgucucuucacaucac

SEQ ID NO: 2948582 - RNA, 19 nt, Artificial Sequence
  Description of Artificial Sequence: Synthetic oligonucleotide
aguagguucugaaacugau

SEQ ID NO: 2948583 - RNA, 19 nt, Artificial Sequence
  Description of Artificial Sequence: Synthetic oligonucleotide
acuaagccuccaacggcgc

SEQ ID NO: 2948584 - RNA, 19 nt, Artificial Sequence
  Description of Artificial Sequence: Synthetic oligonucleotide
gaagucucucaucugcaua

SEQ ID NO: 2948585 - RNA, 19 nt, Artificial Sequence
  Description of Artificial Sequence: Synthetic oligonucleotide
gguuucugauucucacagg

SEQ ID NO: 2948586 - RNA, 19 nt, Artificial Sequence
  Description of Artificial Sequence: Synthetic oligonucleotide
aaccucgaacuugacuuga

SEQ ID NO: 2948587 - RNA, 19 nt, Artificial Sequence
  Description of Artificial Sequence: Synthetic oligonucleotide
acuugacuugauguugaug

SEQ ID NO: 2948588 - RNA, 19 nt, Artificial Sequence
  Description of Artificial Sequence: Synthetic oligonucleotide
ucacuagccauguccugaa

SEQ ID NO: 2948589 - RNA, 19 nt, Artificial Sequence
  Description of Artificial Sequence: Synthetic oligonucleotide
cucacaggacagcuauccc

SEQ ID NO: 2948590 - RNA, 19 nt, Artificial Sequence
  Description of Artificial Sequence: Synthetic oligonucleotide
uaaguaggcggaagacaau

SEQ ID NO: 2948591 - RNA, 19 nt, Artificial Sequence
  Description of Artificial Sequence: Synthetic oligonucleotide
gucucuucacaucacgcaa

SEQ ID NO: 2948592 - RNA, 19 nt, Artificial Sequence
  Description of Artificial Sequence: Synthetic oligonucleotide
cugauucucacaggacagc

SEQ ID NO: 2948593 - RNA, 19 nt, Artificial Sequence
  Description of Artificial Sequence: Synthetic oligonucleotide
cucuuugccagaauugacu

SEQ ID NO: 2948594 - RNA, 19 nt, Artificial Sequence
  Description of Artificial Sequence: Synthetic oligonucleotide
uacagcacguggacgggau

SEQ ID NO: 2948595 - RNA, 19 nt, Artificial Sequence
  Description of Artificial Sequence: Synthetic oligonucleotide
cuccaacggcgcuuuacag

SEQ ID NO: 2948596 - RNA, 19 nt, Artificial Sequence
  Description of Artificial Sequence: Synthetic oligonucleotide
auugacuucccgggcagcu

SEQ ID NO: 2948597 - RNA, 19 nt, Artificial Sequence
  Description of Artificial Sequence: Synthetic oligonucleotide
uugcucgcugaacuccaga

SEQ ID NO: 2948598 - RNA, 19 nt, Artificial Sequence
  Description of Artificial Sequence: Synthetic oligonucleotide
uugccagaauugacuuccc

SEQ ID NO: 2948599 - RNA, 19 nt, Artificial Sequence
  Description of Artificial Sequence: Synthetic oligonucleotide
cuagccauguccugaaggu

SEQ ID NO: 2948600 - RNA, 19 nt, Artificial Sequence
  Description of Artificial Sequence: Synthetic oligonucleotide
gucucucaucugcauauuc

SEQ ID NO: 2948601 - RNA, 19 nt, Artificial Sequence
  Description of Artificial Sequence: Synthetic oligonucleotide
gggacugccugccggaaag

SEQ ID NO: 2948602 - RNA, 19 nt, Artificial Sequence
  Description of Artificial Sequence: Synthetic oligonucleotide
guggaagagcagcaauuuc

SEQ ID NO: 2948603 - RNA, 19 nt, Artificial Sequence
  Description of Artificial Sequence: Synthetic oligonucleotide
ugaaggucuuuuggcaaaa

SEQ ID NO: 2948604 - RNA, 19 nt, Artificial Sequence
  Description of Artificial Sequence: Synthetic oligonucleotide
ucacaucacgcaacauuuu

SEQ ID NO: 2948605 - RNA, 19 nt, Artificial Sequence
  Description of Artificial Sequence: Synthetic oligonucleotide
cugccggaaaguccgcagc

SEQ ID NO: 2948606 - RNA, 19 nt, Artificial Sequence
  Description of Artificial Sequence: Synthetic oligonucleotide
guaguccauggucagcuaa

SEQ ID NO: 2948607 - RNA, 19 nt, Artificial Sequence
  Description of Artificial Sequence: Synthetic oligonucleotide
agguucugaaacugauuua

SEQ ID NO: 2948608 - RNA, 19 nt, Artificial Sequence
  Description of Artificial Sequence: Synthetic oligonucleotide
cucuucacaucacgcaaca

SEQ ID NO: 2948609 - RNA, 19 nt, Artificial Sequence
  Description of Artificial Sequence: Synthetic oligonucleotide
cugcauauucauaagccau

SEQ ID NO: 2948610 - RNA, 19 nt, Artificial Sequence
  Description of Artificial Sequence: Synthetic oligonucleotide
cuccagaaaguaguccaug

SEQ ID NO: 2948611 - RNA, 19 nt, Artificial Sequence
  Description of Artificial Sequence: Synthetic oligonucleotide
auuuaccauauugcucgcu

SEQ ID NO: 2948612 - RNA, 19 nt, Artificial Sequence
  Description of Artificial Sequence: Synthetic oligonucleotide
cuugauguugauggaggga

SEQ ID NO: 2948613 - RNA, 19 nt, Artificial Sequence
  Description of Artificial Sequence: Synthetic oligonucleotide
gucuacauaguaaccucga

SEQ ID NO: 2948614 - RNA, 19 nt, Artificial Sequence
  Description of Artificial Sequence: Synthetic oligonucleotide
gaguagguucugaaacuga

SEQ ID NO: 2948615 - RNA, 19 nt, Artificial Sequence
  Description of Artificial Sequence: Synthetic oligonucleotide
acaaugcgacuaagccucc

SEQ ID NO: 2948616 - RNA, 19 nt, Artificial Sequence
  Description of Artificial Sequence: Synthetic oligonucleotide
cgguuucugauucucacag

SEQ ID NO: 2948617 - RNA, 19 nt, Artificial Sequence
  Description of Artificial Sequence: Synthetic oligonucleotide
gcugaacuccagaaaguag

SEQ ID NO: 2948618 - RNA, 19 nt, Artificial Sequence
  Description of Artificial Sequence: Synthetic oligonucleotide
uuacagcacguggacggga

SEQ ID NO: 2948619 - RNA, 19 nt, Artificial Sequence
  Description of Artificial Sequence: Synthetic oligonucleotide
gcuuuacagcacguggacg

SEQ ID NO: 2948620 - RNA, 19 nt, Artificial Sequence
  Description of Artificial Sequence: Synthetic oligonucleotide
auggagggacugccugccg

SEQ ID NO: 2948621 - RNA, 19 nt, Artificial Sequence
  Description of Artificial Sequence: Synthetic oligonucleotide
ggaugucauaacacaucgg

SEQ ID NO: 2948622 - RNA, 19 nt, Artificial Sequence
  Description of Artificial Sequence: Synthetic oligonucleotide
cugaguagguucugaaacu

SEQ ID NO: 2948623 - RNA, 19 nt, Artificial Sequence
  Description of Artificial Sequence: Synthetic oligonucleotide
cuucacaucacgcaacauu

SEQ ID NO: 2948624 - RNA, 19 nt, Artificial Sequence
  Description of Artificial Sequence: Synthetic oligonucleotide
cugaaggucuuuuggcaaa

SEQ ID NO: 2948625 - RNA, 19 nt, Artificial Sequence
  Description of Artificial Sequence: Synthetic oligonucleotide
uucucacaggacagcuauc

SEQ ID NO: 2948626 - RNA, 19 nt, Artificial Sequence
  Description of Artificial Sequence: Synthetic oligonucleotide
auccgaagucucucaucug

SEQ ID NO: 2948627 - RNA, 19 nt, Artificial Sequence
  Description of Artificial Sequence: Synthetic oligonucleotide
caacauuuuccagucuaca

SEQ ID NO: 2948628 - RNA, 19 nt, Artificial Sequence
  Description of Artificial Sequence: Synthetic oligonucleotide
ccaacggcgcuuuacagca

SEQ ID NO: 2948629 - RNA, 19 nt, Artificial Sequence
  Description of Artificial Sequence: Synthetic oligonucleotide
uuucuucacuagccauguc

SEQ ID NO: 2948630 - RNA, 19 nt, Artificial Sequence
  Description of Artificial Sequence: Synthetic oligonucleotide
aguccauggucagcuaagu

SEQ ID NO: 2948631 - RNA, 19 nt, Artificial Sequence
  Description of Artificial Sequence: Synthetic oligonucleotide
uugacuucccgggcagcug

SEQ ID NO: 2948632 - RNA, 19 nt, Artificial Sequence
  Description of Artificial Sequence: Synthetic oligonucleotide
caucgguuucugauucuca

SEQ ID NO: 2948633 - RNA, 19 nt, Artificial Sequence
  Description of Artificial Sequence: Synthetic oligonucleotide
cagcgagcccaacaaggac

SEQ ID NO: 2948634 - RNA, 19 nt, Artificial Sequence
  Description of Artificial Sequence: Synthetic oligonucleotide
augucauaacacaucgguu

SEQ ID NO: 2948635 - RNA, 19 nt, Artificial Sequence
  Description of Artificial Sequence: Synthetic oligonucleotide
gguauucuuucugagugaa

SEQ ID NO: 2948636 - RNA, 19 nt, Artificial Sequence
  Description of Artificial Sequence: Synthetic oligonucleotide
uaagccuccaacggcgcuu

SEQ ID NO: 2948637 - RNA, 19 nt, Artificial Sequence
  Description of Artificial Sequence: Synthetic oligonucleotide
uaguaaccucgaacuugac

SEQ ID NO: 2948638 - RNA, 19 nt, Artificial Sequence
  Description of Artificial Sequence: Synthetic oligonucleotide
cagcuaaguaggcggaaga

SEQ ID NO: 2948639 - RNA, 19 nt, Artificial Sequence
  Description of Artificial Sequence: Synthetic oligonucleotide
caauuucuucacuagccau

SEQ ID NO: 2948640 - RNA, 19 nt, Artificial Sequence
  Description of Artificial Sequence: Synthetic oligonucleotide
acaggacagcuaucccgug

SEQ ID NO: 2948641 - RNA, 19 nt, Artificial Sequence
  Description of Artificial Sequence: Synthetic oligonucleotide
guggacgggaugucauaac

SEQ ID NO: 2948642 - RNA, 19 nt, Artificial Sequence
  Description of Artificial Sequence: Synthetic oligonucleotide
cugagugaauugauccgaa

SEQ ID NO: 2948643 - RNA, 19 nt, Artificial Sequence
  Description of Artificial Sequence: Synthetic oligonucleotide
acgggaugucauaacacau

SEQ ID NO: 2948644 - RNA, 19 nt, Artificial Sequence
  Description of Artificial Sequence: Synthetic oligonucleotide
cacaggacagcuaucccgu

SEQ ID NO: 2948645 - RNA, 19 nt, Artificial Sequence
  Description of Artificial Sequence: Synthetic oligonucleotide
gcuaaguaggcggaagaca

SEQ ID NO: 2948646 - RNA, 19 nt, Artificial Sequence
  Description of Artificial Sequence: Synthetic oligonucleotide
acagcacguggacgggaug

SEQ ID NO: 2948647 - RNA, 19 nt, Artificial Sequence
  Description of Artificial Sequence: Synthetic oligonucleotide
cggaaaguccgcagcagcg

SEQ ID NO: 2948648 - RNA, 19 nt, Artificial Sequence
  Description of Artificial Sequence: Synthetic oligonucleotide
uagccauguccugaagguc

SEQ ID NO: 2948649 - RNA, 19 nt, Artificial Sequence
  Description of Artificial Sequence: Synthetic oligonucleotide
agcacguggacgggauguc

SEQ ID NO: 2948650 - RNA, 19 nt, Artificial Sequence
  Description of Artificial Sequence: Synthetic oligonucleotide
gucuuuuggcaaaauggua

SEQ ID NO: 2948651 - RNA, 19 nt, Artificial Sequence
  Description of Artificial Sequence: Synthetic oligonucleotide
ggucuuuuggcaaaauggu

SEQ ID NO: 2948652 - RNA, 19 nt, Artificial Sequence
  Description of Artificial Sequence: Synthetic oligonucleotide
cuaucccguggaagagcag

SEQ ID NO: 2948653 - RNA, 19 nt, Artificial Sequence
  Description of Artificial Sequence: Synthetic oligonucleotide
gcaacauuuuccagucuac

SEQ ID NO: 2948654 - RNA, 19 nt, Artificial Sequence
  Description of Artificial Sequence: Synthetic oligonucleotide
ucuucacaucacgcaacau

SEQ ID NO: 2948655 - RNA, 19 nt, Artificial Sequence
  Description of Artificial Sequence: Synthetic oligonucleotide
gaaacugauuuaccauauu

SEQ ID NO: 2948656 - RNA, 19 nt, Artificial Sequence
  Description of Artificial Sequence: Synthetic oligonucleotide
cuuuuggcaaaaugguauu

SEQ ID NO: 2948657 - RNA, 19 nt, Artificial Sequence
  Description of Artificial Sequence: Synthetic oligonucleotide
cgaacuugacuugauguug

SEQ ID NO: 2948658 - RNA, 19 nt, Artificial Sequence
  Description of Artificial Sequence: Synthetic oligonucleotide
gauucucacaggacagcua

SEQ ID NO: 2948659 - RNA, 19 nt, Artificial Sequence
  Description of Artificial Sequence: Synthetic oligonucleotide
cagcuaucccguggaagag

SEQ ID NO: 2948660 - RNA, 19 nt, Artificial Sequence
  Description of Artificial Sequence: Synthetic oligonucleotide
guccgcagcagcgagccca

SEQ ID NO: 2948661 - RNA, 19 nt, Artificial Sequence
  Description of Artificial Sequence: Synthetic oligonucleotide
aguaguccauggucagcua

SEQ ID NO: 2948662 - RNA, 19 nt, Artificial Sequence
  Description of Artificial Sequence: Synthetic oligonucleotide
aggacgccgccaugucguc

SEQ ID NO: 2948663 - RNA, 19 nt, Artificial Sequence
  Description of Artificial Sequence: Synthetic oligonucleotide
auuuuccagucuacauagu

SEQ ID NO: 2948664 - RNA, 19 nt, Artificial Sequence
  Description of Artificial Sequence: Synthetic oligonucleotide
ggacgggaugucauaacac

SEQ ID NO: 2948665 - RNA, 19 nt, Artificial Sequence
  Description of Artificial Sequence: Synthetic oligonucleotide
gacugccugccggaaaguc

SEQ ID NO: 2948666 - RNA, 19 nt, Artificial Sequence
  Description of Artificial Sequence: Synthetic oligonucleotide
auugcucgcugaacuccag

SEQ ID NO: 2948667 - RNA, 19 nt, Artificial Sequence
  Description of Artificial Sequence: Synthetic oligonucleotide
acuccagaaaguaguccau

SEQ ID NO: 2948668 - RNA, 19 nt, Artificial Sequence
  Description of Artificial Sequence: Synthetic oligonucleotide
cacuagccauguccugaag

SEQ ID NO: 2948669 - RNA, 19 nt, Artificial Sequence
  Description of Artificial Sequence: Synthetic oligonucleotide
ccggaaaguccgcagcagc

SEQ ID NO: 2948670 - RNA, 19 nt, Artificial Sequence
  Description of Artificial Sequence: Synthetic oligonucleotide
uccgcagcagcgagcccaa

SEQ ID NO: 2948671 - RNA, 19 nt, Artificial Sequence
  Description of Artificial Sequence: Synthetic oligonucleotide
aucccguggaagagcagca

SEQ ID NO: 2948672 - RNA, 19 nt, Artificial Sequence
  Description of Artificial Sequence: Synthetic oligonucleotide
gcuaucccguggaagagca

SEQ ID NO: 2948673 - RNA, 19 nt, Artificial Sequence
  Description of Artificial Sequence: Synthetic oligonucleotide
cgacuaagccuccaacggc

SEQ ID NO: 2948674 - RNA, 19 nt, Artificial Sequence
  Description of Artificial Sequence: Synthetic oligonucleotide
ccucgaacuugacuugaug

SEQ ID NO: 2948675 - RNA, 19 nt, Artificial Sequence
  Description of Artificial Sequence: Synthetic oligonucleotide
caacaaggacgccgccaug

SEQ ID NO: 2948676 - RNA, 19 nt, Artificial Sequence
  Description of Artificial Sequence: Synthetic oligonucleotide
ccauauugcucgcugaacu

SEQ ID NO: 2948677 - RNA, 19 nt, Artificial Sequence
  Description of Artificial Sequence: Synthetic oligonucleotide
cagcugaguagguucugaa

SEQ ID NO: 2948678 - RNA, 19 nt, Artificial Sequence
  Description of Artificial Sequence: Synthetic oligonucleotide
aagccuccaacggcgcuuu

SEQ ID NO: 2948679 - RNA, 19 nt, Artificial Sequence
  Description of Artificial Sequence: Synthetic oligonucleotide
ggaaaguccgcagcagcga

SEQ ID NO: 2948680 - RNA, 19 nt, Artificial Sequence
  Description of Artificial Sequence: Synthetic oligonucleotide
ccugccggaaaguccgcag

SEQ ID NO: 2948681 - RNA, 19 nt, Artificial Sequence
  Description of Artificial Sequence: Synthetic oligonucleotide
guccauggucagcuaagua

SEQ ID NO: 2948682 - RNA, 19 nt, Artificial Sequence
  Description of Artificial Sequence: Synthetic oligonucleotide
agggacugccugccggaaa

SEQ ID NO: 2948683 - RNA, 19 nt, Artificial Sequence
  Description of Artificial Sequence: Synthetic oligonucleotide
ugccugccggaaaguccgc

SEQ ID NO: 2948684 - RNA, 19 nt, Artificial Sequence
  Description of Artificial Sequence: Synthetic oligonucleotide
cgggaugucauaacacauc

SEQ ID NO: 2948685 - RNA, 19 nt, Artificial Sequence
  Description of Artificial Sequence: Synthetic oligonucleotide
gacuucccgggcagcugag

SEQ ID NO: 2948686 - RNA, 19 nt, Artificial Sequence
  Description of Artificial Sequence: Synthetic oligonucleotide
acguggacgggaugucaua

SEQ ID NO: 2948687 - RNA, 19 nt, Artificial Sequence
  Description of Artificial Sequence: Synthetic oligonucleotide
ccugaaggucuuuuggcaa

SEQ ID NO: 2948688 - RNA, 19 nt, Artificial Sequence
  Description of Artificial Sequence: Synthetic oligonucleotide
cuucccgggcagcugagua

SEQ ID NO: 2948689 - RNA, 19 nt, Artificial Sequence
  Description of Artificial Sequence: Synthetic oligonucleotide
gcgagcccaacaaggacgc

SEQ ID NO: 2948690 - RNA, 19 nt, Artificial Sequence
  Description of Artificial Sequence: Synthetic oligonucleotide
ucccguggaagagcagcaa

SEQ ID NO: 2948691 - RNA, 19 nt, Artificial Sequence
  Description of Artificial Sequence: Synthetic oligonucleotide
caacggcgcuuuacagcac

SEQ ID NO: 2948692 - RNA, 19 nt, Artificial Sequence
  Description of Artificial Sequence: Synthetic oligonucleotide
gcggaagacaaugcgacua

SEQ ID NO: 2948693 - RNA, 19 nt, Artificial Sequence
  Description of Artificial Sequence: Synthetic oligonucleotide
ggagggacugccugccgga

SEQ ID NO: 2948694 - RNA, 19 nt, Artificial Sequence
  Description of Artificial Sequence: Synthetic oligonucleotide
guugauggagggacugccu

SEQ ID NO: 2948695 - RNA, 19 nt, Artificial Sequence
  Description of Artificial Sequence: Synthetic oligonucleotide
cgcuuuacagcacguggac

SEQ ID NO: 2948696 - RNA, 19 nt, Artificial Sequence
  Description of Artificial Sequence: Synthetic oligonucleotide
ccagucuacauaguaaccu

SEQ ID NO: 2948697 - RNA, 19 nt, Artificial Sequence
  Description of Artificial Sequence: Synthetic oligonucleotide
cauauucauaagccauuuu

SEQ ID NO: 2948698 - RNA, 19 nt, Artificial Sequence
  Description of Artificial Sequence: Synthetic oligonucleotide
gagcagcaauuucuucacu

SEQ ID NO: 2948699 - RNA, 19 nt, Artificial Sequence
  Description of Artificial Sequence: Synthetic oligonucleotide
ggucagcuaaguaggcgga

SEQ ID NO: 2948700 - RNA, 19 nt, Artificial Sequence
  Description of Artificial Sequence: Synthetic oligonucleotide
cgggcagcugaguagguuc

SEQ ID NO: 2948701 - RNA, 19 nt, Artificial Sequence
  Description of Artificial Sequence: Synthetic oligonucleotide
agucucucaucugcauauu

SEQ ID NO: 2948702 - RNA, 19 nt, Artificial Sequence
  Description of Artificial Sequence: Synthetic oligonucleotide
cgucucuucacaucacgca

SEQ ID NO: 2948703 - RNA, 19 nt, Artificial Sequence
  Description of Artificial Sequence: Synthetic oligonucleotide
gcgcuuuacagcacgugga

SEQ ID NO: 2948704 - RNA, 19 nt, Artificial Sequence
  Description of Artificial Sequence: Synthetic oligonucleotide
gcagcgagcccaacaagga

SEQ ID NO: 2948705 - RNA, 19 nt, Artificial Sequence
  Description of Artificial Sequence: Synthetic oligonucleotide
gucagcuaaguaggcggaa

SEQ ID NO: 2948706 - RNA, 19 nt, Artificial Sequence
  Description of Artificial Sequence: Synthetic oligonucleotide
ccuccaacggcgcuuuaca

SEQ ID NO: 2948707 - RNA, 19 nt, Artificial Sequence
  Description of Artificial Sequence: Synthetic oligonucleotide
gccggaaaguccgcagcag

SEQ ID NO: 2948708 - RNA, 19 nt, Artificial Sequence
  Description of Artificial Sequence: Synthetic oligonucleotide
guagguucugaaacugauu

SEQ ID NO: 2948709 - RNA, 19 nt, Artificial Sequence
  Description of Artificial Sequence: Synthetic oligonucleotide
ccgaagucucucaucugca

SEQ ID NO: 2948710 - RNA, 19 nt, Artificial Sequence
  Description of Artificial Sequence: Synthetic oligonucleotide
accucgaacuugacuugau

SEQ ID NO: 2948711 - RNA, 19 nt, Artificial Sequence
  Description of Artificial Sequence: Synthetic oligonucleotide
acuucccgggcagcugagu

SEQ ID NO: 2948712 - RNA, 19 nt, Artificial Sequence
  Description of Artificial Sequence: Synthetic oligonucleotide
cgcaacauuuuccagucua

SEQ ID NO: 2948713 - RNA, 19 nt, Artificial Sequence
  Description of Artificial Sequence: Synthetic oligonucleotide
gcagcugaguagguucuga

SEQ ID NO: 2948714 - RNA, 19 nt, Artificial Sequence
  Description of Artificial Sequence: Synthetic oligonucleotide
gaaggucuuuuggcaaaau

SEQ ID NO: 2948715 - RNA, 19 nt, Artificial Sequence
  Description of Artificial Sequence: Synthetic oligonucleotide
caaugcgacuaagccucca

SEQ ID NO: 2948716 - RNA, 19 nt, Artificial Sequence
  Description of Artificial Sequence: Synthetic oligonucleotide
cuaagccuccaacggcgcu

SEQ ID NO: 2948717 - RNA, 19 nt, Artificial Sequence
  Description of Artificial Sequence: Synthetic oligonucleotide
cacguggacgggaugucau

SEQ ID NO: 2948718 - RNA, 19 nt, Artificial Sequence
  Description of Artificial Sequence: Synthetic oligonucleotide
cacaucgguuucugauucu

SEQ ID NO: 2948719 - RNA, 19 nt, Artificial Sequence
  Description of Artificial Sequence: Synthetic oligonucleotide
ccagaaaguaguccauggu

SEQ ID NO: 2948720 - RNA, 19 nt, Artificial Sequence
  Description of Artificial Sequence: Synthetic oligonucleotide
cagcacguggacgggaugu

SEQ ID NO: 2948721 - RNA, 19 nt, Artificial Sequence
  Description of Artificial Sequence: Synthetic oligonucleotide
acggcgcuuuacagcacgu

SEQ ID NO: 2948722 - RNA, 19 nt, Artificial Sequence
  Description of Artificial Sequence: Synthetic oligonucleotide
gccuccaacggcgcuuuac

SEQ ID NO: 2948723 - RNA, 19 nt, Artificial Sequence
  Description of Artificial Sequence: Synthetic oligonucleotide
guauucuuucugagugaau

SEQ ID NO: 2948724 - RNA, 19 nt, Artificial Sequence
  Description of Artificial Sequence: Synthetic oligonucleotide
ggcagcugaguagguucug

SEQ ID NO: 2948725 - RNA, 19 nt, Artificial Sequence
  Description of Artificial Sequence: Synthetic oligonucleotide
gagggacugccugccggaa

SEQ ID NO: 2948726 - RNA, 19 nt, Artificial Sequence
  Description of Artificial Sequence: Synthetic oligonucleotide
cauguccugaaggucuuuu

SEQ ID NO: 2948727 - RNA, 19 nt, Artificial Sequence
  Description of Artificial Sequence: Synthetic oligonucleotide
ggcggaagacaaugcgacu

SEQ ID NO: 2948728 - RNA, 19 nt, Artificial Sequence
  Description of Artificial Sequence: Synthetic oligonucleotide
ccaacaaggacgccgccau

SEQ ID NO: 2948729 - RNA, 19 nt, Artificial Sequence
  Description of Artificial Sequence: Synthetic oligonucleotide
cccaacaaggacgccgcca

SEQ ID NO: 2948730 - RNA, 19 nt, Artificial Sequence
  Description of Artificial Sequence: Synthetic oligonucleotide
ggacagcuaucccguggaa

SEQ ID NO: 2948731 - RNA, 19 nt, Artificial Sequence
  Description of Artificial Sequence: Synthetic oligonucleotide
gcacguggacgggauguca

SEQ ID NO: 2948732 - RNA, 19 nt, Artificial Sequence
  Description of Artificial Sequence: Synthetic oligonucleotide
gcccaacaaggacgccgcc

SEQ ID NO: 2948733 - RNA, 19 nt, Artificial Sequence
  Description of Artificial Sequence: Synthetic oligonucleotide
cggaagacaaugcgacuaa

SEQ ID NO: 2948734 - RNA, 19 nt, Artificial Sequence
  Description of Artificial Sequence: Synthetic oligonucleotide
cgcagcagcgagcccaaca

SEQ ID NO: 2948735 - RNA, 19 nt, Artificial Sequence
  Description of Artificial Sequence: Synthetic oligonucleotide
cgcugaacuccagaaagua

SEQ ID NO: 2948736 - RNA, 19 nt, Artificial Sequence
  Description of Artificial Sequence: Synthetic oligonucleotide
ccguggaagagcagcaauu

SEQ ID NO: 2948737 - RNA, 19 nt, Artificial Sequence
  Description of Artificial Sequence: Synthetic oligonucleotide
gggcagcugaguagguucu

SEQ ID NO: 2948738 - RNA, 19 nt, Artificial Sequence
  Description of Artificial Sequence: Synthetic oligonucleotide
cguggacgggaugucauaa

SEQ ID NO: 2948739 - RNA, 19 nt, Artificial Sequence
  Description of Artificial Sequence: Synthetic oligonucleotide
gccugccggaaaguccgca

SEQ ID NO: 2948740 - RNA, 19 nt, Artificial Sequence
  Description of Artificial Sequence: Synthetic oligonucleotide
agccuccaacggcgcuuua

SEQ ID NO: 2948741 - RNA, 19 nt, Artificial Sequence
  Description of Artificial Sequence: Synthetic oligonucleotide
cccguggaagagcagcaau

SEQ ID NO: 2948742 - RNA, 19 nt, Artificial Sequence
  Description of Artificial Sequence: Synthetic oligonucleotide
cgaagucucucaucugcau

SEQ ID NO: 2948743 - RNA, 19 nt, Artificial Sequence
  Description of Artificial Sequence: Synthetic oligonucleotide
cggcgcuuuacagcacgug

SEQ ID NO: 2948744 - RNA, 19 nt, Artificial Sequence
  Description of Artificial Sequence: Synthetic oligonucleotide
cguggaagagcagcaauuu

SEQ ID NO: 2948745 - RNA, 19 nt, Artificial Sequence
  Description of Artificial Sequence: Synthetic oligonucleotide
ggacugccugccggaaagu

SEQ ID NO: 2948746 - RNA, 19 nt, Artificial Sequence
  Description of Artificial Sequence: Synthetic oligonucleotide
cgagcccaacaaggacgcc

SEQ ID NO: 2948747 - RNA, 19 nt, Artificial Sequence
  Description of Artificial Sequence: Synthetic oligonucleotide
gccauguccugaaggucuu

SEQ ID NO: 2948748 - RNA, 19 nt, Artificial Sequence
  Description of Artificial Sequence: Synthetic oligonucleotide
cccgggcagcugaguaggu

SEQ ID NO: 2948749 - RNA, 19 nt, Artificial Sequence
  Description of Artificial Sequence: Synthetic oligonucleotide
ccgcagcagcgagcccaac

SEQ ID NO: 2948750 - RNA, 19 nt, Artificial Sequence
  Description of Artificial Sequence: Synthetic oligonucleotide
ccgggcagcugaguagguu

SEQ ID NO: 2948751 - RNA, 19 nt, Artificial Sequence
  Description of Artificial Sequence: Synthetic oligonucleotide
ccauguccugaaggucuuu

SEQ ID NO: 2948752 - RNA, 19 nt, Artificial Sequence
  Description of Artificial Sequence: Synthetic oligonucleotide
uuauuuaucaaucugaauc

SEQ ID NO: 2948753 - RNA, 19 nt, Artificial Sequence
  Description of Artificial Sequence: Synthetic oligonucleotide
guaaaugucauauacauag

SEQ ID NO: 2948754 - RNA, 19 nt, Artificial Sequence
  Description of Artificial Sequence: Synthetic oligonucleotide
ucaaucugaauccagauca

SEQ ID NO: 2948755 - RNA, 19 nt, Artificial Sequence
  Description of Artificial Sequence: Synthetic oligonucleotide
uauaguaaaugucauauac

SEQ ID NO: 2948756 - RNA, 19 nt, Artificial Sequence
  Description of Artificial Sequence: Synthetic oligonucleotide
aaaugucauauacauaguc

SEQ ID NO: 2948757 - RNA, 19 nt, Artificial Sequence
  Description of Artificial Sequence: Synthetic oligonucleotide
agaaucuucaucuucauca

SEQ ID NO: 2948758 - RNA, 19 nt, Artificial Sequence
  Description of Artificial Sequence: Synthetic oligonucleotide
uauuuaucaaucugaaucc

SEQ ID NO: 2948759 - RNA, 19 nt, Artificial Sequence
  Description of Artificial Sequence: Synthetic oligonucleotide
ucucaauccauccuggagg

SEQ ID NO: 2948760 - RNA, 19 nt, Artificial Sequence
  Description of Artificial Sequence: Synthetic oligonucleotide
aaugucauauacauagucg

SEQ ID NO: 2948761 - RNA, 19 nt, Artificial Sequence
  Description of Artificial Sequence: Synthetic oligonucleotide
uguuguauucauuagaguc

SEQ ID NO: 2948762 - RNA, 19 nt, Artificial Sequence
  Description of Artificial Sequence: Synthetic oligonucleotide
aauuauuuucacuguuuuc

SEQ ID NO: 2948763 - RNA, 19 nt, Artificial Sequence
  Description of Artificial Sequence: Synthetic oligonucleotide
aaacuccuucuguacaucc

SEQ ID NO: 2948764 - RNA, 19 nt, Artificial Sequence
  Description of Artificial Sequence: Synthetic oligonucleotide
ucuagaaucuucaucuuca

SEQ ID NO: 2948765 - RNA, 19 nt, Artificial Sequence
  Description of Artificial Sequence: Synthetic oligonucleotide
cuucuguacauccaaaggg

SEQ ID NO: 2948766 - RNA, 19 nt, Artificial Sequence
  Description of Artificial Sequence: Synthetic oligonucleotide
uucaucuggauacucauug

SEQ ID NO: 2948767 - RNA, 19 nt, Artificial Sequence
  Description of Artificial Sequence: Synthetic oligonucleotide
uguagggcugcacagacag

SEQ ID NO: 2948768 - RNA, 19 nt, Artificial Sequence
  Description of Artificial Sequence: Synthetic oligonucleotide
auacguaucuucugguugc

SEQ ID NO: 2948769 - RNA, 19 nt, Artificial Sequence
  Description of Artificial Sequence: Synthetic oligonucleotide
gacagaauguucucaaucc

SEQ ID NO: 2948770 - RNA, 19 nt, Artificial Sequence
  Description of Artificial Sequence: Synthetic oligonucleotide
acauccaaaggguacuugc

SEQ ID NO: 2948771 - RNA, 19 nt, Artificial Sequence
  Description of Artificial Sequence: Synthetic oligonucleotide
uuuucuuuauuuuauuuau

SEQ ID NO: 2948772 - RNA, 19 nt, Artificial Sequence
  Description of Artificial Sequence: Synthetic oligonucleotide
guuaucauagccaaacucc

SEQ ID NO: 2948773 - RNA, 19 nt, Artificial Sequence
  Description of Artificial Sequence: Synthetic oligonucleotide
uaguaaaugucauauacau

SEQ ID NO: 2948774 - RNA, 19 nt, Artificial Sequence
  Description of Artificial Sequence: Synthetic oligonucleotide
uucaucuucauacguaucu

SEQ ID NO: 2948775 - RNA, 19 nt, Artificial Sequence
  Description of Artificial Sequence: Synthetic oligonucleotide
ucugaauccagaucauggg

SEQ ID NO: 2948776 - RNA, 19 nt, Artificial Sequence
  Description of Artificial Sequence: Synthetic oligonucleotide
cugaucaucauucaccagc

SEQ ID NO: 2948777 - RNA, 19 nt, Artificial Sequence
  Description of Artificial Sequence: Synthetic oligonucleotide
uuuaucaaucugaauccag

SEQ ID NO: 2948778 - RNA, 19 nt, Artificial Sequence
  Description of Artificial Sequence: Synthetic oligonucleotide
acaucaauugucugcugcc

SEQ ID NO: 2948779 - RNA, 19 nt, Artificial Sequence
  Description of Artificial Sequence: Synthetic oligonucleotide
uuaucaaucugaauccaga

SEQ ID NO: 2948780 - RNA, 19 nt, Artificial Sequence
  Description of Artificial Sequence: Synthetic oligonucleotide
agacagaauguucucaauc

SEQ ID NO: 2948781 - RNA, 19 nt, Artificial Sequence
  Description of Artificial Sequence: Synthetic oligonucleotide
ugcacagacagaauguucu

SEQ ID NO: 2948782 - RNA, 19 nt, Artificial Sequence
  Description of Artificial Sequence: Synthetic oligonucleotide
uugcugaucaucauucacc

SEQ ID NO: 2948783 - RNA, 19 nt, Artificial Sequence
  Description of Artificial Sequence: Synthetic oligonucleotide
uauucauuagagucucuag

SEQ ID NO: 2948784 - RNA, 19 nt, Artificial Sequence
  Description of Artificial Sequence: Synthetic oligonucleotide
ucaucauucaccagcuccc

SEQ ID NO: 2948785 - RNA, 19 nt, Artificial Sequence
  Description of Artificial Sequence: Synthetic oligonucleotide
cuucauacguaucuucugg

SEQ ID NO: 2948786 - RNA, 19 nt, Artificial Sequence
  Description of Artificial Sequence: Synthetic oligonucleotide
aauguucucaauccauccu

SEQ ID NO: 2948787 - RNA, 19 nt, Artificial Sequence
  Description of Artificial Sequence: Synthetic oligonucleotide
aucuccauauaguaaaugu

SEQ ID NO: 2948788 - RNA, 19 nt, Artificial Sequence
  Description of Artificial Sequence: Synthetic oligonucleotide
ucuggauacucauugcgcc

SEQ ID NO: 2948789 - RNA, 19 nt, Artificial Sequence
  Description of Artificial Sequence: Synthetic oligonucleotide
cauuagagucucuagaauc

SEQ ID NO: 2948790 - RNA, 19 nt, Artificial Sequence
  Description of Artificial Sequence: Synthetic oligonucleotide
uucauuagagucucuagaa

SEQ ID NO: 2948791 - RNA, 19 nt, Artificial Sequence
  Description of Artificial Sequence: Synthetic oligonucleotide
uguucucaauccauccugg

SEQ ID NO: 2948792 - RNA, 19 nt, Artificial Sequence
  Description of Artificial Sequence: Synthetic oligonucleotide
gaauguucucaauccaucc

SEQ ID NO: 2948793 - RNA, 19 nt, Artificial Sequence
  Description of Artificial Sequence: Synthetic oligonucleotide
uuaucauagccaaacuccu

SEQ ID NO: 2948794 - RNA, 19 nt, Artificial Sequence
  Description of Artificial Sequence: Synthetic oligonucleotide
uucuguacauccaaagggu

SEQ ID NO: 2948795 - RNA, 19 nt, Artificial Sequence
  Description of Artificial Sequence: Synthetic oligonucleotide
acuugcuccacaucaauug

SEQ ID NO: 2948796 - RNA, 19 nt, Artificial Sequence
  Description of Artificial Sequence: Synthetic oligonucleotide
auucauuagagucucuaga

SEQ ID NO: 2948797 - RNA, 19 nt, Artificial Sequence
  Description of Artificial Sequence: Synthetic oligonucleotide
ugaauccagaucauggggu

SEQ ID NO: 2948798 - RNA, 19 nt, Artificial Sequence
  Description of Artificial Sequence: Synthetic oligonucleotide
aucaaucugaauccagauc

SEQ ID NO: 2948799 - RNA, 19 nt, Artificial Sequence
  Description of Artificial Sequence: Synthetic oligonucleotide
agucucuagaaucuucauc

SEQ ID NO: 2948800 - RNA, 19 nt, Artificial Sequence
  Description of Artificial Sequence: Synthetic oligonucleotide
uucucaauccauccuggag

SEQ ID NO: 2948801 - RNA, 19 nt, Artificial Sequence
  Description of Artificial Sequence: Synthetic oligonucleotide
ucuccauauaguaaauguc

SEQ ID NO: 2948802 - RNA, 19 nt, Artificial Sequence
  Description of Artificial Sequence: Synthetic oligonucleotide
acuguuuucaucaucuuca

SEQ ID NO: 2948803 - RNA, 19 nt, Artificial Sequence
  Description of Artificial Sequence: Synthetic oligonucleotide
aucugaauccagaucaugg

SEQ ID NO: 2948804 - RNA, 19 nt, Artificial Sequence
  Description of Artificial Sequence: Synthetic oligonucleotide
ucaugggguuaucauagcc

SEQ ID NO: 2948805 - RNA, 19 nt, Artificial Sequence
  Description of Artificial Sequence: Synthetic oligonucleotide
caucuggauacucauugcg

SEQ ID NO: 2948806 - RNA, 19 nt, Artificial Sequence
  Description of Artificial Sequence: Synthetic oligonucleotide
uuuauggagguuuucuuua

SEQ ID NO: 2948807 - RNA, 19 nt, Artificial Sequence
  Description of Artificial Sequence: Synthetic oligonucleotide
cuccauauaguaaauguca

SEQ ID NO: 2948808 - RNA, 19 nt, Artificial Sequence
  Description of Artificial Sequence: Synthetic oligonucleotide
ugaucaucauucaccagcu

SEQ ID NO: 2948809 - RNA, 19 nt, Artificial Sequence
  Description of Artificial Sequence: Synthetic oligonucleotide
cugaauccagaucaugggg

SEQ ID NO: 2948810 - RNA, 19 nt, Artificial Sequence
  Description of Artificial Sequence: Synthetic oligonucleotide
cauugcgccaauuauuuuc

SEQ ID NO: 2948811 - RNA, 19 nt, Artificial Sequence
  Description of Artificial Sequence: Synthetic oligonucleotide
cuuuccuccucgcugaggc

SEQ ID NO: 2948812 - RNA, 19 nt, Artificial Sequence
  Description of Artificial Sequence: Synthetic oligonucleotide
ugcugaucaucauucacca

SEQ ID NO: 2948813 - RNA, 19 nt, Artificial Sequence
  Description of Artificial Sequence: Synthetic oligonucleotide
cucaauccauccuggaggg

SEQ ID NO: 2948814 - RNA, 19 nt, Artificial Sequence
  Description of Artificial Sequence: Synthetic oligonucleotide
auguucucaauccauccug

SEQ ID NO: 2948815 - RNA, 19 nt, Artificial Sequence
  Description of Artificial Sequence: Synthetic oligonucleotide
uccuucuguacauccaaag

SEQ ID NO: 2948816 - RNA, 19 nt, Artificial Sequence
  Description of Artificial Sequence: Synthetic oligonucleotide
ucuucaucuucauacguau

SEQ ID NO: 2948817 - RNA, 19 nt, Artificial Sequence
  Description of Artificial Sequence: Synthetic oligonucleotide
uuuuauggagguuuucuuu

SEQ ID NO: 2948818 - RNA, 19 nt, Artificial Sequence
  Description of Artificial Sequence: Synthetic oligonucleotide
cauacguaucuucugguug

SEQ ID NO: 2948819 - RNA, 19 nt, Artificial Sequence
  Description of Artificial Sequence: Synthetic oligonucleotide
cuccacaucaauugucugc

SEQ ID NO: 2948820 - RNA, 19 nt, Artificial Sequence
  Description of Artificial Sequence: Synthetic oligonucleotide
uuuauuuaucaaucugaau

SEQ ID NO: 2948821 - RNA, 19 nt, Artificial Sequence
  Description of Artificial Sequence: Synthetic oligonucleotide
ugguugcugaucaucauuc

SEQ ID NO: 2948822 - RNA, 19 nt, Artificial Sequence
  Description of Artificial Sequence: Synthetic oligonucleotide
uccauauaguaaaugucau

SEQ ID NO: 2948823 - RNA, 19 nt, Artificial Sequence
  Description of Artificial Sequence: Synthetic oligonucleotide
gcuuucuucaucuggauac

SEQ ID NO: 2948824 - RNA, 19 nt, Artificial Sequence
  Description of Artificial Sequence: Synthetic oligonucleotide
cacaucaauugucugcugc

SEQ ID NO: 2948825 - RNA, 19 nt, Artificial Sequence
  Description of Artificial Sequence: Synthetic oligonucleotide
uaaaugucauauacauagu

SEQ ID NO: 2948826 - RNA, 19 nt, Artificial Sequence
  Description of Artificial Sequence: Synthetic oligonucleotide
aucuggauacucauugcgc

SEQ ID NO: 2948827 - RNA, 19 nt, Artificial Sequence
  Description of Artificial Sequence: Synthetic oligonucleotide
auugucugcugccucuuuc

SEQ ID NO: 2948828 - RNA, 19 nt, Artificial Sequence
  Description of Artificial Sequence: Synthetic oligonucleotide
aucaauugucugcugccuc

SEQ ID NO: 2948829 - RNA, 19 nt, Artificial Sequence
  Description of Artificial Sequence: Synthetic oligonucleotide
ugcuccacaucaauugucu

SEQ ID NO: 2948830 - RNA, 19 nt, Artificial Sequence
  Description of Artificial Sequence: Synthetic oligonucleotide
agaauguucucaauccauc

SEQ ID NO: 2948831 - RNA, 19 nt, Artificial Sequence
  Description of Artificial Sequence: Synthetic oligonucleotide
ucauucaccagcucccacu

SEQ ID NO: 2948832 - RNA, 19 nt, Artificial Sequence
  Description of Artificial Sequence: Synthetic oligonucleotide
ucauuagagucucuagaau

SEQ ID NO: 2948833 - RNA, 19 nt, Artificial Sequence
  Description of Artificial Sequence: Synthetic oligonucleotide
uguacauccaaaggguacu

SEQ ID NO: 2948834 - RNA, 19 nt, Artificial Sequence
  Description of Artificial Sequence: Synthetic oligonucleotide
auuagagucucuagaaucu

SEQ ID NO: 2948835 - RNA, 19 nt, Artificial Sequence
  Description of Artificial Sequence: Synthetic oligonucleotide
uaucaaucugaauccagau

SEQ ID NO: 2948836 - RNA, 19 nt, Artificial Sequence
  Description of Artificial Sequence: Synthetic oligonucleotide
ucaauugucugcugccucu

SEQ ID NO: 2948837 - RNA, 19 nt, Artificial Sequence
  Description of Artificial Sequence: Synthetic oligonucleotide
aauccauccuggaggggcc

SEQ ID NO: 2948838 - RNA, 19 nt, Artificial Sequence
  Description of Artificial Sequence: Synthetic oligonucleotide
agccaaacuccuucuguac

SEQ ID NO: 2948839 - RNA, 19 nt, Artificial Sequence
  Description of Artificial Sequence: Synthetic oligonucleotide
uucaccagcucccacuccu

SEQ ID NO: 2948840 - RNA, 19 nt, Artificial Sequence
  Description of Artificial Sequence: Synthetic oligonucleotide
uacucauugcgccaauuau

SEQ ID NO: 2948841 - RNA, 19 nt, Artificial Sequence
  Description of Artificial Sequence: Synthetic oligonucleotide
uccacaucaauugucugcu

SEQ ID NO: 2948842 - RNA, 19 nt, Artificial Sequence
  Description of Artificial Sequence: Synthetic oligonucleotide
auaguaaaugucauauaca

SEQ ID NO: 2948843 - RNA, 19 nt, Artificial Sequence
  Description of Artificial Sequence: Synthetic oligonucleotide
aaucugaauccagaucaug

SEQ ID NO: 2948844 - RNA, 19 nt, Artificial Sequence
  Description of Artificial Sequence: Synthetic oligonucleotide
ucuucaucuggauacucau

SEQ ID NO: 2948845 - RNA, 19 nt, Artificial Sequence
  Description of Artificial Sequence: Synthetic oligonucleotide
acagaauguucucaaucca

SEQ ID NO: 2948846 - RNA, 19 nt, Artificial Sequence
  Description of Artificial Sequence: Synthetic oligonucleotide
gaggcuguuguauucauua

SEQ ID NO: 2948847 - RNA, 19 nt, Artificial Sequence
  Description of Artificial Sequence: Synthetic oligonucleotide
aucaugggguuaucauagc

SEQ ID NO: 2948848 - RNA, 19 nt, Artificial Sequence
  Description of Artificial Sequence: Synthetic oligonucleotide
ucaucuggauacucauugc

SEQ ID NO: 2948849 - RNA, 19 nt, Artificial Sequence
  Description of Artificial Sequence: Synthetic oligonucleotide
aaaggguacuugcuccaca

SEQ ID NO: 2948850 - RNA, 19 nt, Artificial Sequence
  Description of Artificial Sequence: Synthetic oligonucleotide
aaggguacuugcuccacau

SEQ ID NO: 2948851 - RNA, 19 nt, Artificial Sequence
  Description of Artificial Sequence: Synthetic oligonucleotide
uccuggaggggccaucucc

SEQ ID NO: 2948852 - RNA, 19 nt, Artificial Sequence
  Description of Artificial Sequence: Synthetic oligonucleotide
uauuuucacuguuuucauc

SEQ ID NO: 2948853 - RNA, 19 nt, Artificial Sequence
  Description of Artificial Sequence: Synthetic oligonucleotide
caauccauccuggaggggc

SEQ ID NO: 2948854 - RNA, 19 nt, Artificial Sequence
  Description of Artificial Sequence: Synthetic oligonucleotide
gcgccaauuauuuucacug

SEQ ID NO: 2948855 - RNA, 19 nt, Artificial Sequence
  Description of Artificial Sequence: Synthetic oligonucleotide
acagacagaauguucucaa

SEQ ID NO: 2948856 - RNA, 19 nt, Artificial Sequence
  Description of Artificial Sequence: Synthetic oligonucleotide
uuguauucauuagagucuc

SEQ ID NO: 2948857 - RNA, 19 nt, Artificial Sequence
  Description of Artificial Sequence: Synthetic oligonucleotide
guugcugaucaucauucac

SEQ ID NO: 2948858 - RNA, 19 nt, Artificial Sequence
  Description of Artificial Sequence: Synthetic oligonucleotide
cauauaguaaaugucauau

SEQ ID NO: 2948859 - RNA, 19 nt, Artificial Sequence
  Description of Artificial Sequence: Synthetic oligonucleotide
gguuaucauagccaaacuc

SEQ ID NO: 2948860 - RNA, 19 nt, Artificial Sequence
  Description of Artificial Sequence: Synthetic oligonucleotide
auggagguuuucuuuauuu

SEQ ID NO: 2948861 - RNA, 19 nt, Artificial Sequence
  Description of Artificial Sequence: Synthetic oligonucleotide
agaucaugggguuaucaua

SEQ ID NO: 2948862 - RNA, 19 nt, Artificial Sequence
  Description of Artificial Sequence: Synthetic oligonucleotide
ucauagccaaacuccuucu

SEQ ID NO: 2948863 - RNA, 19 nt, Artificial Sequence
  Description of Artificial Sequence: Synthetic oligonucleotide
augggguuaucauagccaa

SEQ ID NO: 2948864 - RNA, 19 nt, Artificial Sequence
  Description of Artificial Sequence: Synthetic oligonucleotide
aucauucaccagcucccac

SEQ ID NO: 2948865 - RNA, 19 nt, Artificial Sequence
  Description of Artificial Sequence: Synthetic oligonucleotide
caugggguuaucauagcca

SEQ ID NO: 2948866 - RNA, 19 nt, Artificial Sequence
  Description of Artificial Sequence: Synthetic oligonucleotide
ugcgccaauuauuuucacu

SEQ ID NO: 2948867 - RNA, 19 nt, Artificial Sequence
  Description of Artificial Sequence: Synthetic oligonucleotide
uagagucucuagaaucuuc

SEQ ID NO: 2948868 - RNA, 19 nt, Artificial Sequence
  Description of Artificial Sequence: Synthetic oligonucleotide
cucuagaaucuucaucuuc

SEQ ID NO: 2948869 - RNA, 19 nt, Artificial Sequence
  Description of Artificial Sequence: Synthetic oligonucleotide
auauaguaaaugucauaua

SEQ ID NO: 2948870 - RNA, 19 nt, Artificial Sequence
  Description of Artificial Sequence: Synthetic oligonucleotide
auuuaucaaucugaaucca

SEQ ID NO: 2948871 - RNA, 19 nt, Artificial Sequence
  Description of Artificial Sequence: Synthetic oligonucleotide
accagcucccacuccuggc

SEQ ID NO: 2948872 - RNA, 19 nt, Artificial Sequence
  Description of Artificial Sequence: Synthetic oligonucleotide
ucccacuccuggcuguagg

SEQ ID NO: 2948873 - RNA, 19 nt, Artificial Sequence
  Description of Artificial Sequence: Synthetic oligonucleotide
acugcuuucuucaucugga

SEQ ID NO: 2948874 - RNA, 19 nt, Artificial Sequence
  Description of Artificial Sequence: Synthetic oligonucleotide
uuauggagguuuucuuuau

SEQ ID NO: 2948875 - RNA, 19 nt, Artificial Sequence
  Description of Artificial Sequence: Synthetic oligonucleotide
agagucucuagaaucuuca

SEQ ID NO: 2948876 - RNA, 19 nt, Artificial Sequence
  Description of Artificial Sequence: Synthetic oligonucleotide
ccuucuguacauccaaagg

SEQ ID NO: 2948877 - RNA, 19 nt, Artificial Sequence
  Description of Artificial Sequence: Synthetic oligonucleotide
uggagguuuucuuuauuuu

SEQ ID NO: 2948878 - RNA, 19 nt, Artificial Sequence
  Description of Artificial Sequence: Synthetic oligonucleotide
guuguauucauuagagucu

SEQ ID NO: 2948879 - RNA, 19 nt, Artificial Sequence
  Description of Artificial Sequence: Synthetic oligonucleotide
uugcuccacaucaauuguc

SEQ ID NO: 2948880 - RNA, 19 nt, Artificial Sequence
  Description of Artificial Sequence: Synthetic oligonucleotide
aggcuguuguauucauuag

SEQ ID NO: 2948881 - RNA, 19 nt, Artificial Sequence
  Description of Artificial Sequence: Synthetic oligonucleotide
acuccuucuguacauccaa

SEQ ID NO: 2948882 - RNA, 19 nt, Artificial Sequence
  Description of Artificial Sequence: Synthetic oligonucleotide
auugcgccaauuauuuuca

SEQ ID NO: 2948883 - RNA, 19 nt, Artificial Sequence
  Description of Artificial Sequence: Synthetic oligonucleotide
uccucgcugaggcuguugu

SEQ ID NO: 2948884 - RNA, 19 nt, Artificial Sequence
  Description of Artificial Sequence: Synthetic oligonucleotide
uagccaaacuccuucugua

SEQ ID NO: 2948885 - RNA, 19 nt, Artificial Sequence
  Description of Artificial Sequence: Synthetic oligonucleotide
uguauucauuagagucucu

SEQ ID NO: 2948886 - RNA, 19 nt, Artificial Sequence
  Description of Artificial Sequence: Synthetic oligonucleotide
uggcuguagggcugcacag

SEQ ID NO: 2948887 - RNA, 19 nt, Artificial Sequence
  Description of Artificial Sequence: Synthetic oligonucleotide
uaucauagccaaacuccuu

SEQ ID NO: 2948888 - RNA, 19 nt, Artificial Sequence
  Description of Artificial Sequence: Synthetic oligonucleotide
uacuugcuccacaucaauu

SEQ ID NO: 2948889 - RNA, 19 nt, Artificial Sequence
  Description of Artificial Sequence: Synthetic oligonucleotide
ggguacuugcuccacauca

SEQ ID NO: 2948890 - RNA, 19 nt, Artificial Sequence
  Description of Artificial Sequence: Synthetic oligonucleotide
aggggccaucuccauauag

SEQ ID NO: 2948891 - RNA, 19 nt, Artificial Sequence
  Description of Artificial Sequence: Synthetic oligonucleotide
gggguuaucauagccaaac

SEQ ID NO: 2948892 - RNA, 19 nt, Artificial Sequence
  Description of Artificial Sequence: Synthetic oligonucleotide
uauggagguuuucuuuauu

SEQ ID NO: 2948893 - RNA, 19 nt, Artificial Sequence
  Description of Artificial Sequence: Synthetic oligonucleotide
uacauccaaaggguacuug

SEQ ID NO: 2948894 - RNA, 19 nt, Artificial Sequence
  Description of Artificial Sequence: Synthetic oligonucleotide
cuucaucuucauacguauc

SEQ ID NO: 2948895 - RNA, 19 nt, Artificial Sequence
  Description of Artificial Sequence: Synthetic oligonucleotide
gccaucuccauauaguaaa

SEQ ID NO: 2948896 - RNA, 19 nt, Artificial Sequence
  Description of Artificial Sequence: Synthetic oligonucleotide
ugucugcugccucuuuccu

SEQ ID NO: 2948897 - RNA, 19 nt, Artificial Sequence
  Description of Artificial Sequence: Synthetic oligonucleotide
caucuccauauaguaaaug

SEQ ID NO: 2948898 - RNA, 19 nt, Artificial Sequence
  Description of Artificial Sequence: Synthetic oligonucleotide
aacuccuucuguacaucca

SEQ ID NO: 2948899 - RNA, 19 nt, Artificial Sequence
  Description of Artificial Sequence: Synthetic oligonucleotide
agguuuucuuuauuuuauu

SEQ ID NO: 2948900 - RNA, 19 nt, Artificial Sequence
  Description of Artificial Sequence: Synthetic oligonucleotide
cugcacagacagaauguuc

SEQ ID NO: 2948901 - RNA, 19 nt, Artificial Sequence
  Description of Artificial Sequence: Synthetic oligonucleotide
ucuuuccuccucgcugagg

SEQ ID NO: 2948902 - RNA, 19 nt, Artificial Sequence
  Description of Artificial Sequence: Synthetic oligonucleotide
aggguacuugcuccacauc

SEQ ID NO: 2948903 - RNA, 19 nt, Artificial Sequence
  Description of Artificial Sequence: Synthetic oligonucleotide
uggauacucauugcgccaa

SEQ ID NO: 2948904 - RNA, 19 nt, Artificial Sequence
  Description of Artificial Sequence: Synthetic oligonucleotide
ucaucuucauacguaucuu

SEQ ID NO: 2948905 - RNA, 19 nt, Artificial Sequence
  Description of Artificial Sequence: Synthetic oligonucleotide
aauugucugcugccucuuu

SEQ ID NO: 2948906 - RNA, 19 nt, Artificial Sequence
  Description of Artificial Sequence: Synthetic oligonucleotide
aguaaaugucauauacaua

SEQ ID NO: 2948907 - RNA, 19 nt, Artificial Sequence
  Description of Artificial Sequence: Synthetic oligonucleotide
guauucauuagagucucua

SEQ ID NO: 2948908 - RNA, 19 nt, Artificial Sequence
  Description of Artificial Sequence: Synthetic oligonucleotide
cuucugguugcugaucauc

SEQ ID NO: 2948909 - RNA, 19 nt, Artificial Sequence
  Description of Artificial Sequence: Synthetic oligonucleotide
ggcuguuguauucauuaga

SEQ ID NO: 2948910 - RNA, 19 nt, Artificial Sequence
  Description of Artificial Sequence: Synthetic oligonucleotide
gcugccucuuuccuccucg

SEQ ID NO: 2948911 - RNA, 19 nt, Artificial Sequence
  Description of Artificial Sequence: Synthetic oligonucleotide
ucucuagaaucuucaucuu

SEQ ID NO: 2948912 - RNA, 19 nt, Artificial Sequence
  Description of Artificial Sequence: Synthetic oligonucleotide
ucaauccauccuggagggg

SEQ ID NO: 2948913 - RNA, 19 nt, Artificial Sequence
  Description of Artificial Sequence: Synthetic oligonucleotide
uuagagucucuagaaucuu

SEQ ID NO: 2948914 - RNA, 19 nt, Artificial Sequence
  Description of Artificial Sequence: Synthetic oligonucleotide
ucaccagcucccacuccug

SEQ ID NO: 2948915 - RNA, 19 nt, Artificial Sequence
  Description of Artificial Sequence: Synthetic oligonucleotide
cuggauacucauugcgcca

SEQ ID NO: 2948916 - RNA, 19 nt, Artificial Sequence
  Description of Artificial Sequence: Synthetic oligonucleotide
ugaggcuguuguauucauu

SEQ ID NO: 2948917 - RNA, 19 nt, Artificial Sequence
  Description of Artificial Sequence: Synthetic oligonucleotide
cuggcuguagggcugcaca

SEQ ID NO: 2948918 - RNA, 19 nt, Artificial Sequence
  Description of Artificial Sequence: Synthetic oligonucleotide
cucauugcgccaauuauuu

SEQ ID NO: 2948919 - RNA, 19 nt, Artificial Sequence
  Description of Artificial Sequence: Synthetic oligonucleotide
aucuucaucuucauacgua

SEQ ID NO: 2948920 - RNA, 19 nt, Artificial Sequence
  Description of Artificial Sequence: Synthetic oligonucleotide
aauccagaucaugggguua

SEQ ID NO: 2948921 - RNA, 19 nt, Artificial Sequence
  Description of Artificial Sequence: Synthetic oligonucleotide
uaucuucugguugcugauc

SEQ ID NO: 2948922 - RNA, 19 nt, Artificial Sequence
  Description of Artificial Sequence: Synthetic oligonucleotide
ucacugcuuucuucaucug

SEQ ID NO: 2948923 - RNA, 19 nt, Artificial Sequence
  Description of Artificial Sequence: Synthetic oligonucleotide
gccucuuuccuccucgcug

SEQ ID NO: 2948924 - RNA, 19 nt, Artificial Sequence
  Description of Artificial Sequence: Synthetic oligonucleotide
ugggguuaucauagccaaa

SEQ ID NO: 2948925 - RNA, 19 nt, Artificial Sequence
  Description of Artificial Sequence: Synthetic oligonucleotide
auccagaucaugggguuau

SEQ ID NO: 2948926 - RNA, 19 nt, Artificial Sequence
  Description of Artificial Sequence: Synthetic oligonucleotide
ugccucuuuccuccucgcu

SEQ ID NO: 2948927 - RNA, 19 nt, Artificial Sequence
  Description of Artificial Sequence: Synthetic oligonucleotide
gcuguagggcugcacagac

SEQ ID NO: 2948928 - RNA, 19 nt, Artificial Sequence
  Description of Artificial Sequence: Synthetic oligonucleotide
ucauugcgccaauuauuuu

SEQ ID NO: 2948929 - RNA, 19 nt, Artificial Sequence
  Description of Artificial Sequence: Synthetic oligonucleotide
ucuucugguugcugaucau

SEQ ID NO: 2948930 - RNA, 19 nt, Artificial Sequence
  Description of Artificial Sequence: Synthetic oligonucleotide
cacagacagaauguucuca

SEQ ID NO: 2948931 - RNA, 19 nt, Artificial Sequence
  Description of Artificial Sequence: Synthetic oligonucleotide
gaauccagaucaugggguu

SEQ ID NO: 2948932 - RNA, 19 nt, Artificial Sequence
  Description of Artificial Sequence: Synthetic oligonucleotide
uccuccucgcugaggcugu

SEQ ID NO: 2948933 - RNA, 19 nt, Artificial Sequence
  Description of Artificial Sequence: Synthetic oligonucleotide
uacguaucuucugguugcu

SEQ ID NO: 2948934 - RNA, 19 nt, Artificial Sequence
  Description of Artificial Sequence: Synthetic oligonucleotide
caaaggguacuugcuccac

SEQ ID NO: 2948935 - RNA, 19 nt, Artificial Sequence
  Description of Artificial Sequence: Synthetic oligonucleotide
uuuccuccucgcugaggcu

SEQ ID NO: 2948936 - RNA, 19 nt, Artificial Sequence
  Description of Artificial Sequence: Synthetic oligonucleotide
cagaauguucucaauccau

SEQ ID NO: 2948937 - RNA, 19 nt, Artificial Sequence
  Description of Artificial Sequence: Synthetic oligonucleotide
uugcgccaauuauuuucac

SEQ ID NO: 2948938 - RNA, 19 nt, Artificial Sequence
  Description of Artificial Sequence: Synthetic oligonucleotide
uggaggggccaucuccaua

SEQ ID NO: 2948939 - RNA, 19 nt, Artificial Sequence
  Description of Artificial Sequence: Synthetic oligonucleotide
cauccaaaggguacuugcu

SEQ ID NO: 2948940 - RNA, 19 nt, Artificial Sequence
  Description of Artificial Sequence: Synthetic oligonucleotide
gccaaacuccuucuguaca

SEQ ID NO: 2948941 - RNA, 19 nt, Artificial Sequence
  Description of Artificial Sequence: Synthetic oligonucleotide
cuugcuccacaucaauugu

SEQ ID NO: 2948942 - RNA, 19 nt, Artificial Sequence
  Description of Artificial Sequence: Synthetic oligonucleotide
caucuucaucuucauacgu

SEQ ID NO: 2948943 - RNA, 19 nt, Artificial Sequence
  Description of Artificial Sequence: Synthetic oligonucleotide
auccuggaggggccaucuc

SEQ ID NO: 2948944 - RNA, 19 nt, Artificial Sequence
  Description of Artificial Sequence: Synthetic oligonucleotide
gcugaucaucauucaccag

SEQ ID NO: 2948945 - RNA, 19 nt, Artificial Sequence
  Description of Artificial Sequence: Synthetic oligonucleotide
cuguuguauucauuagagu

SEQ ID NO: 2948946 - RNA, 19 nt, Artificial Sequence
  Description of Artificial Sequence: Synthetic oligonucleotide
ucgcugaggcuguuguauu

SEQ ID NO: 2948947 - RNA, 19 nt, Artificial Sequence
  Description of Artificial Sequence: Synthetic oligonucleotide
gguugcugaucaucauuca

SEQ ID NO: 2948948 - RNA, 19 nt, Artificial Sequence
  Description of Artificial Sequence: Synthetic oligonucleotide
cagaucaugggguuaucau

SEQ ID NO: 2948949 - RNA, 19 nt, Artificial Sequence
  Description of Artificial Sequence: Synthetic oligonucleotide
agcucccacuccuggcugu

SEQ ID NO: 2948950 - RNA, 19 nt, Artificial Sequence
  Description of Artificial Sequence: Synthetic oligonucleotide
guaucuucugguugcugau

SEQ ID NO: 2948951 - RNA, 19 nt, Artificial Sequence
  Description of Artificial Sequence: Synthetic oligonucleotide
cguaucuucugguugcuga

SEQ ID NO: 2948952 - RNA, 19 nt, Artificial Sequence
  Description of Artificial Sequence: Synthetic oligonucleotide
cucuuuccuccucgcugag

SEQ ID NO: 2948953 - RNA, 19 nt, Artificial Sequence
  Description of Artificial Sequence: Synthetic oligonucleotide
gcuccacaucaauugucug

SEQ ID NO: 2948954 - RNA, 19 nt, Artificial Sequence
  Description of Artificial Sequence: Synthetic oligonucleotide
acguaucuucugguugcug

SEQ ID NO: 2948955 - RNA, 19 nt, Artificial Sequence
  Description of Artificial Sequence: Synthetic oligonucleotide
gagucucuagaaucuucau

SEQ ID NO: 2948956 - RNA, 19 nt, Artificial Sequence
  Description of Artificial Sequence: Synthetic oligonucleotide
gggccaucuccauauagua

SEQ ID NO: 2948957 - RNA, 19 nt, Artificial Sequence
  Description of Artificial Sequence: Synthetic oligonucleotide
cuccuucuguacauccaaa

SEQ ID NO: 2948958 - RNA, 19 nt, Artificial Sequence
  Description of Artificial Sequence: Synthetic oligonucleotide
guacuugcuccacaucaau

SEQ ID NO: 2948959 - RNA, 19 nt, Artificial Sequence
  Description of Artificial Sequence: Synthetic oligonucleotide
ggaggggccaucuccauau

SEQ ID NO: 2948960 - RNA, 19 nt, Artificial Sequence
  Description of Artificial Sequence: Synthetic oligonucleotide
gcacagacagaauguucuc

SEQ ID NO: 2948961 - RNA, 19 nt, Artificial Sequence
  Description of Artificial Sequence: Synthetic oligonucleotide
caucauucaccagcuccca

SEQ ID NO: 2948962 - RNA, 19 nt, Artificial Sequence
  Description of Artificial Sequence: Synthetic oligonucleotide
ccauauaguaaaugucaua

SEQ ID NO: 2948963 - RNA, 19 nt, Artificial Sequence
  Description of Artificial Sequence: Synthetic oligonucleotide
cuguagggcugcacagaca

SEQ ID NO: 2948964 - RNA, 19 nt, Artificial Sequence
  Description of Artificial Sequence: Synthetic oligonucleotide
ccucuuuccuccucgcuga

SEQ ID NO: 2948965 - RNA, 19 nt, Artificial Sequence
  Description of Artificial Sequence: Synthetic oligonucleotide
cagcucccacuccuggcug

SEQ ID NO: 2948966 - RNA, 19 nt, Artificial Sequence
  Description of Artificial Sequence: Synthetic oligonucleotide
cacuccuggcuguagggcu

SEQ ID NO: 2948967 - RNA, 19 nt, Artificial Sequence
  Description of Artificial Sequence: Synthetic oligonucleotide
gguacuugcuccacaucaa

SEQ ID NO: 2948968 - RNA, 19 nt, Artificial Sequence
  Description of Artificial Sequence: Synthetic oligonucleotide
gcugaggcuguuguauuca

SEQ ID NO: 2948969 - RNA, 19 nt, Artificial Sequence
  Description of Artificial Sequence: Synthetic oligonucleotide
ccaaaggguacuugcucca

SEQ ID NO: 2948970 - RNA, 19 nt, Artificial Sequence
  Description of Artificial Sequence: Synthetic oligonucleotide
cuuucuucaucuggauacu

SEQ ID NO: 2948971 - RNA, 19 nt, Artificial Sequence
  Description of Artificial Sequence: Synthetic oligonucleotide
caucaauugucugcugccu

SEQ ID NO: 2948972 - RNA, 19 nt, Artificial Sequence
  Description of Artificial Sequence: Synthetic oligonucleotide
caaucugaauccagaucau

SEQ ID NO: 2948973 - RNA, 19 nt, Artificial Sequence
  Description of Artificial Sequence: Synthetic oligonucleotide
uccagaucaugggguuauc

SEQ ID NO: 2948974 - RNA, 19 nt, Artificial Sequence
  Description of Artificial Sequence: Synthetic oligonucleotide
cugguugcugaucaucauu

SEQ ID NO: 2948975 - RNA, 19 nt, Artificial Sequence
  Description of Artificial Sequence: Synthetic oligonucleotide
ccaauuauuuucacuguuu

SEQ ID NO: 2948976 - RNA, 19 nt, Artificial Sequence
  Description of Artificial Sequence: Synthetic oligonucleotide
gccaauuauuuucacuguu

SEQ ID NO: 2948977 - RNA, 19 nt, Artificial Sequence
  Description of Artificial Sequence: Synthetic oligonucleotide
gauacucauugcgccaauu

SEQ ID NO: 2948978 - RNA, 19 nt, Artificial Sequence
  Description of Artificial Sequence: Synthetic oligonucleotide
cucgcugaggcuguuguau

SEQ ID NO: 2948979 - RNA, 19 nt, Artificial Sequence
  Description of Artificial Sequence: Synthetic oligonucleotide
cuucaucuggauacucauu

SEQ ID NO: 2948980 - RNA, 19 nt, Artificial Sequence
  Description of Artificial Sequence: Synthetic oligonucleotide
ccuggaggggccaucucca

SEQ ID NO: 2948981 - RNA, 19 nt, Artificial Sequence
  Description of Artificial Sequence: Synthetic oligonucleotide
ggguuaucauagccaaacu

SEQ ID NO: 2948982 - RNA, 19 nt, Artificial Sequence
  Description of Artificial Sequence: Synthetic oligonucleotide
cagacagaauguucucaau

SEQ ID NO: 2948983 - RNA, 19 nt, Artificial Sequence
  Description of Artificial Sequence: Synthetic oligonucleotide
ggccaucuccauauaguaa

SEQ ID NO: 2948984 - RNA, 19 nt, Artificial Sequence
  Description of Artificial Sequence: Synthetic oligonucleotide
ccacuccuggcuguagggc

SEQ ID NO: 2948985 - RNA, 19 nt, Artificial Sequence
  Description of Artificial Sequence: Synthetic oligonucleotide
cucccacuccuggcuguag

SEQ ID NO: 2948986 - RNA, 19 nt, Artificial Sequence
  Description of Artificial Sequence: Synthetic oligonucleotide
ccagaucaugggguuauca

SEQ ID NO: 2948987 - RNA, 19 nt, Artificial Sequence
  Description of Artificial Sequence: Synthetic oligonucleotide
ggggccaucuccauauagu

SEQ ID NO: 2948988 - RNA, 19 nt, Artificial Sequence
  Description of Artificial Sequence: Synthetic oligonucleotide
ccacaucaauugucugcug

SEQ ID NO: 2948989 - RNA, 19 nt, Artificial Sequence
  Description of Artificial Sequence: Synthetic oligonucleotide
ggcuguagggcugcacaga

SEQ ID NO: 2948990 - RNA, 19 nt, Artificial Sequence
  Description of Artificial Sequence: Synthetic oligonucleotide
cugcuuucuucaucuggau

SEQ ID NO: 2948991 - RNA, 19 nt, Artificial Sequence
  Description of Artificial Sequence: Synthetic oligonucleotide
agggcugcacagacagaau

SEQ ID NO: 2948992 - RNA, 19 nt, Artificial Sequence
  Description of Artificial Sequence: Synthetic oligonucleotide
cuccucgcugaggcuguug

SEQ ID NO: 2948993 - RNA, 19 nt, Artificial Sequence
  Description of Artificial Sequence: Synthetic oligonucleotide
ccaaacuccuucuguacau

SEQ ID NO: 2948994 - RNA, 19 nt, Artificial Sequence
  Description of Artificial Sequence: Synthetic oligonucleotide
cugaggcuguuguauucau

SEQ ID NO: 2948995 - RNA, 19 nt, Artificial Sequence
  Description of Artificial Sequence: Synthetic oligonucleotide
guagggcugcacagacaga

SEQ ID NO: 2948996 - RNA, 19 nt, Artificial Sequence
  Description of Artificial Sequence: Synthetic oligonucleotide
cgcugaggcuguuguauuc

SEQ ID NO: 2948997 - RNA, 19 nt, Artificial Sequence
  Description of Artificial Sequence: Synthetic oligonucleotide
cauccuggaggggccaucu

SEQ ID NO: 2948998 - RNA, 19 nt, Artificial Sequence
  Description of Artificial Sequence: Synthetic oligonucleotide
gaggggccaucuccauaua

SEQ ID NO: 2948999 - RNA, 19 nt, Artificial Sequence
  Description of Artificial Sequence: Synthetic oligonucleotide
guacauccaaaggguacuu

SEQ ID NO: 2949000 - RNA, 19 nt, Artificial Sequence
  Description of Artificial Sequence: Synthetic oligonucleotide
uccuggcuguagggcugca

SEQ ID NO: 2949001 - RNA, 19 nt, Artificial Sequence
  Description of Artificial Sequence: Synthetic oligonucleotide
gcugcacagacagaauguu

SEQ ID NO: 2949002 - RNA, 19 nt, Artificial Sequence
  Description of Artificial Sequence: Synthetic oligonucleotide
ccagcucccacuccuggcu

SEQ ID NO: 2949003 - RNA, 19 nt, Artificial Sequence
  Description of Artificial Sequence: Synthetic oligonucleotide
ccaucuccauauaguaaau

SEQ ID NO: 2949004 - RNA, 19 nt, Artificial Sequence
  Description of Artificial Sequence: Synthetic oligonucleotide
ccuggcuguagggcugcac

SEQ ID NO: 2949005 - RNA, 19 nt, Artificial Sequence
  Description of Artificial Sequence: Synthetic oligonucleotide
caauugucugcugccucuu

SEQ ID NO: 2949006 - RNA, 19 nt, Artificial Sequence
  Description of Artificial Sequence: Synthetic oligonucleotide
ggauacucauugcgccaau

SEQ ID NO: 2949007 - RNA, 19 nt, Artificial Sequence
  Description of Artificial Sequence: Synthetic oligonucleotide
cuggaggggccaucuccau

SEQ ID NO: 2949008 - RNA, 19 nt, Artificial Sequence
  Description of Artificial Sequence: Synthetic oligonucleotide
cgccaauuauuuucacugu

SEQ ID NO: 2949009 - RNA, 19 nt, Artificial Sequence
  Description of Artificial Sequence: Synthetic oligonucleotide
ccauccuggaggggccauc

SEQ ID NO: 2949010 - RNA, 19 nt, Artificial Sequence
  Description of Artificial Sequence: Synthetic oligonucleotide
ccucgcugaggcuguugua

SEQ ID NO: 2949011 - RNA, 19 nt, Artificial Sequence
  Description of Artificial Sequence: Synthetic oligonucleotide
gcucccacuccuggcugua

SEQ ID NO: 2949012 - RNA, 19 nt, Artificial Sequence
  Description of Artificial Sequence: Synthetic oligonucleotide
ccuccucgcugaggcuguu

SEQ ID NO: 2949013 - RNA, 19 nt, Artificial Sequence
  Description of Artificial Sequence: Synthetic oligonucleotide
aaguccgugagcuugacgc

SEQ ID NO: 2949014 - RNA, 19 nt, Artificial Sequence
  Description of Artificial Sequence: Synthetic oligonucleotide
ucgaugaacucgaagacgu

SEQ ID NO: 2949015 - RNA, 19 nt, Artificial Sequence
  Description of Artificial Sequence: Synthetic oligonucleotide
ugcgagaagagcucgcgcg

SEQ ID NO: 2949016 - RNA, 19 nt, Artificial Sequence
  Description of Artificial Sequence: Synthetic oligonucleotide
augacguagagcacgacgc

SEQ ID NO: 2949017 - RNA, 19 nt, Artificial Sequence
  Description of Artificial Sequence: Synthetic oligonucleotide
aagacgugcacgaugugcg

SEQ ID NO: 2949018 - RNA, 19 nt, Artificial Sequence
  Description of Artificial Sequence: Synthetic oligonucleotide
aacucgaagacgugcacga

SEQ ID NO: 2949019 - RNA, 19 nt, Artificial Sequence
  Description of Artificial Sequence: Synthetic oligonucleotide
uacucuuggggucguaggg

SEQ ID NO: 2949020 - RNA, 19 nt, Artificial Sequence
  Description of Artificial Sequence: Synthetic oligonucleotide
uccggugacgcguaggcgg

SEQ ID NO: 2949021 - RNA, 19 nt, Artificial Sequence
  Description of Artificial Sequence: Synthetic oligonucleotide
caugacguagagcacgacg

SEQ ID NO: 2949022 - RNA, 19 nt, Artificial Sequence
  Description of Artificial Sequence: Synthetic oligonucleotide
auguacagcuucccguugc

SEQ ID NO: 2949023 - RNA, 19 nt, Artificial Sequence
  Description of Artificial Sequence: Synthetic oligonucleotide
acagcuucccguugcacac

SEQ ID NO: 2949024 - RNA, 19 nt, Artificial Sequence
  Description of Artificial Sequence: Synthetic oligonucleotide
ucgaagacgugcacgaugu

SEQ ID NO: 2949025 - RNA, 19 nt, Artificial Sequence
  Description of Artificial Sequence: Synthetic oligonucleotide
uagagcacgacgcccaggc

SEQ ID NO: 2949026 - RNA, 19 nt, Artificial Sequence
  Description of Artificial Sequence: Synthetic oligonucleotide
uaggggagugcccagggag

SEQ ID NO: 2949027 - RNA, 19 nt, Artificial Sequence
  Description of Artificial Sequence: Synthetic oligonucleotide
gaugaacucgaagacgugc

SEQ ID NO: 2949028 - RNA, 19 nt, Artificial Sequence
  Description of Artificial Sequence: Synthetic oligonucleotide
cuucccguugcacaccucg

SEQ ID NO: 2949029 - RNA, 19 nt, Artificial Sequence
  Description of Artificial Sequence: Synthetic oligonucleotide
gaagacgugcacgaugugc

SEQ ID NO: 2949030 - RNA, 19 nt, Artificial Sequence
  Description of Artificial Sequence: Synthetic oligonucleotide
gucgcggugcaccaggugg

SEQ ID NO: 2949031 - RNA, 19 nt, Artificial Sequence
  Description of Artificial Sequence: Synthetic oligonucleotide
cucagcagcacguucucgc

SEQ ID NO: 2949032 - RNA, 19 nt, Artificial Sequence
  Description of Artificial Sequence: Synthetic oligonucleotide
uacagcuucccguugcaca

SEQ ID NO: 2949033 - RNA, 19 nt, Artificial Sequence
  Description of Artificial Sequence: Synthetic oligonucleotide
aucacgauguacagcuucc

SEQ ID NO: 2949034 - RNA, 19 nt, Artificial Sequence
  Description of Artificial Sequence: Synthetic oligonucleotide
gaacucgaagacgugcacg

SEQ ID NO: 2949035 - RNA, 19 nt, Artificial Sequence
  Description of Artificial Sequence: Synthetic oligonucleotide
cuugacgcggcgcucgucg

SEQ ID NO: 2949036 - RNA, 19 nt, Artificial Sequence
  Description of Artificial Sequence: Synthetic oligonucleotide
gugguggucgugcagguag

SEQ ID NO: 2949037 - RNA, 19 nt, Artificial Sequence
  Description of Artificial Sequence: Synthetic oligonucleotide
acguucucgcacuugaggu

SEQ ID NO: 2949038 - RNA, 19 nt, Artificial Sequence
  Description of Artificial Sequence: Synthetic oligonucleotide
acgauguacagcuucccgu

SEQ ID NO: 2949039 - RNA, 19 nt, Artificial Sequence
  Description of Artificial Sequence: Synthetic oligonucleotide
guagccgugcgccuggcgg

SEQ ID NO: 2949040 - RNA, 19 nt, Artificial Sequence
  Description of Artificial Sequence: Synthetic oligonucleotide
guucucgcacuugaggucg

SEQ ID NO: 2949041 - RNA, 19 nt, Artificial Sequence
  Description of Artificial Sequence: Synthetic oligonucleotide
cucgaugaacucgaagacg

SEQ ID NO: 2949042 - RNA, 19 nt, Artificial Sequence
  Description of Artificial Sequence: Synthetic oligonucleotide
acacgucguacucuugggg

SEQ ID NO: 2949043 - RNA, 19 nt, Artificial Sequence
  Description of Artificial Sequence: Synthetic oligonucleotide
ucugcgagaagagcucgcg

SEQ ID NO: 2949044 - RNA, 19 nt, Artificial Sequence
  Description of Artificial Sequence: Synthetic oligonucleotide
uggucgugcagguagcgca

SEQ ID NO: 2949045 - RNA, 19 nt, Artificial Sequence
  Description of Artificial Sequence: Synthetic oligonucleotide
cacguucucgcacuugagg

SEQ ID NO: 2949046 - RNA, 19 nt, Artificial Sequence
  Description of Artificial Sequence: Synthetic oligonucleotide
uagguggugcucagguccg

SEQ ID NO: 2949047 - RNA, 19 nt, Artificial Sequence
  Description of Artificial Sequence: Synthetic oligonucleotide
ggauggagagcucucgagg

SEQ ID NO: 2949048 - RNA, 19 nt, Artificial Sequence
  Description of Artificial Sequence: Synthetic oligonucleotide
guacucuuggggucguagg

SEQ ID NO: 2949049 - RNA, 19 nt, Artificial Sequence
  Description of Artificial Sequence: Synthetic oligonucleotide
aggauggagagcucucgag

SEQ ID NO: 2949050 - RNA, 19 nt, Artificial Sequence
  Description of Artificial Sequence: Synthetic oligonucleotide
ugacguagagcacgacgcc

SEQ ID NO: 2949051 - RNA, 19 nt, Artificial Sequence
  Description of Artificial Sequence: Synthetic oligonucleotide
gaucugcgagaagagcucg

SEQ ID NO: 2949052 - RNA, 19 nt, Artificial Sequence
  Description of Artificial Sequence: Synthetic oligonucleotide
cacgauguacagcuucccg

SEQ ID NO: 2949053 - RNA, 19 nt, Artificial Sequence
  Description of Artificial Sequence: Synthetic oligonucleotide
cuugaggucgcggugcacc

SEQ ID NO: 2949054 - RNA, 19 nt, Artificial Sequence
  Description of Artificial Sequence: Synthetic oligonucleotide
agcacguucucgcacuuga

SEQ ID NO: 2949055 - RNA, 19 nt, Artificial Sequence
  Description of Artificial Sequence: Synthetic oligonucleotide
uguacagcuucccguugca

SEQ ID NO: 2949056 - RNA, 19 nt, Artificial Sequence
  Description of Artificial Sequence: Synthetic oligonucleotide
ugaacucgaagacgugcac

SEQ ID NO: 2949057 - RNA, 19 nt, Artificial Sequence
  Description of Artificial Sequence: Synthetic oligonucleotide
caucacgauguacagcuuc

SEQ ID NO: 2949058 - RNA, 19 nt, Artificial Sequence
  Description of Artificial Sequence: Synthetic oligonucleotide
aguccgugagcuugacgcg

SEQ ID NO: 2949059 - RNA, 19 nt, Artificial Sequence
  Description of Artificial Sequence: Synthetic oligonucleotide
acgucguacucuugggguc

SEQ ID NO: 2949060 - RNA, 19 nt, Artificial Sequence
  Description of Artificial Sequence: Synthetic oligonucleotide
gaaguccgugagcuugacg

SEQ ID NO: 2949061 - RNA, 19 nt, Artificial Sequence
  Description of Artificial Sequence: Synthetic oligonucleotide
gaggucgcggugcaccagg

SEQ ID NO: 2949062 - RNA, 19 nt, Artificial Sequence
  Description of Artificial Sequence: Synthetic oligonucleotide
cucgaagacgugcacgaug

SEQ ID NO: 2949063 - RNA, 19 nt, Artificial Sequence
  Description of Artificial Sequence: Synthetic oligonucleotide
acgcguaggcggccgagcc

SEQ ID NO: 2949064 - RNA, 19 nt, Artificial Sequence
  Description of Artificial Sequence: Synthetic oligonucleotide
agcacgacgcccaggcucc

SEQ ID NO: 2949065 - RNA, 19 nt, Artificial Sequence
  Description of Artificial Sequence: Synthetic oligonucleotide
cacacgucguacucuuggg

SEQ ID NO: 2949066 - RNA, 19 nt, Artificial Sequence
  Description of Artificial Sequence: Synthetic oligonucleotide
acucuuggggucguagggg

SEQ ID NO: 2949067 - RNA, 19 nt, Artificial Sequence
  Description of Artificial Sequence: Synthetic oligonucleotide
ugcccagggaggcaccucc

SEQ ID NO: 2949068 - RNA, 19 nt, Artificial Sequence
  Description of Artificial Sequence: Synthetic oligonucleotide
ugcagguagcgcacggcgc

SEQ ID NO: 2949069 - RNA, 19 nt, Artificial Sequence
  Description of Artificial Sequence: Synthetic oligonucleotide
gagcacgacgcccaggcuc

SEQ ID NO: 2949070 - RNA, 19 nt, Artificial Sequence
  Description of Artificial Sequence: Synthetic oligonucleotide
gacguagagcacgacgccc

SEQ ID NO: 2949071 - RNA, 19 nt, Artificial Sequence
  Description of Artificial Sequence: Synthetic oligonucleotide
ucagcagcacguucucgca

SEQ ID NO: 2949072 - RNA, 19 nt, Artificial Sequence
  Description of Artificial Sequence: Synthetic oligonucleotide
ucgugcagguagcgcacgg

SEQ ID NO: 2949073 - RNA, 19 nt, Artificial Sequence
  Description of Artificial Sequence: Synthetic oligonucleotide
agcagcacguucucgcacu

SEQ ID NO: 2949074 - RNA, 19 nt, Artificial Sequence
  Description of Artificial Sequence: Synthetic oligonucleotide
gacgugcacgaugugcggg

SEQ ID NO: 2949075 - RNA, 19 nt, Artificial Sequence
  Description of Artificial Sequence: Synthetic oligonucleotide
agacgugcacgaugugcgg

SEQ ID NO: 2949076 - RNA, 19 nt, Artificial Sequence
  Description of Artificial Sequence: Synthetic oligonucleotide
cacaccucgaugaacucga

SEQ ID NO: 2949077 - RNA, 19 nt, Artificial Sequence
  Description of Artificial Sequence: Synthetic oligonucleotide
caggugguggucgugcagg

SEQ ID NO: 2949078 - RNA, 19 nt, Artificial Sequence
  Description of Artificial Sequence: Synthetic oligonucleotide
augugcgggugccgcacgc

SEQ ID NO: 2949079 - RNA, 19 nt, Artificial Sequence
  Description of Artificial Sequence: Synthetic oligonucleotide
augaacucgaagacgugca

SEQ ID NO: 2949080 - RNA, 19 nt, Artificial Sequence
  Description of Artificial Sequence: Synthetic oligonucleotide
ugcacgaugugcgggugcc

SEQ ID NO: 2949081 - RNA, 19 nt, Artificial Sequence
  Description of Artificial Sequence: Synthetic oligonucleotide
ucgcacuugaggucgcggu

SEQ ID NO: 2949082 - RNA, 19 nt, Artificial Sequence
  Description of Artificial Sequence: Synthetic oligonucleotide
uccgugagcuugacgcggc

SEQ ID NO: 2949083 - RNA, 19 nt, Artificial Sequence
  Description of Artificial Sequence: Synthetic oligonucleotide
aagagcucgcgcgccugcg

SEQ ID NO: 2949084 - RNA, 19 nt, Artificial Sequence
  Description of Artificial Sequence: Synthetic oligonucleotide
gagcuugacgcggcgcucg

SEQ ID NO: 2949085 - RNA, 19 nt, Artificial Sequence
  Description of Artificial Sequence: Synthetic oligonucleotide
cacggccugcagcaggucg

SEQ ID NO: 2949086 - RNA, 19 nt, Artificial Sequence
  Description of Artificial Sequence: Synthetic oligonucleotide
uugaggucgcggugcacca

SEQ ID NO: 2949087 - RNA, 19 nt, Artificial Sequence
  Description of Artificial Sequence: Synthetic oligonucleotide
ucacgauguacagcuuccc

SEQ ID NO: 2949088 - RNA, 19 nt, Artificial Sequence
  Description of Artificial Sequence: Synthetic oligonucleotide
ugacgcggcgcucgucggg

SEQ ID NO: 2949089 - RNA, 19 nt, Artificial Sequence
  Description of Artificial Sequence: Synthetic oligonucleotide
ugcgaccccgggaugcgcc

SEQ ID NO: 2949090 - RNA, 19 nt, Artificial Sequence
  Description of Artificial Sequence: Synthetic oligonucleotide
gaagagcucgcgcgccugc

SEQ ID NO: 2949091 - RNA, 19 nt, Artificial Sequence
  Description of Artificial Sequence: Synthetic oligonucleotide
ugguggucgugcagguagc

SEQ ID NO: 2949092 - RNA, 19 nt, Artificial Sequence
  Description of Artificial Sequence: Synthetic oligonucleotide
gucggggcucagcagcacg

SEQ ID NO: 2949093 - RNA, 19 nt, Artificial Sequence
  Description of Artificial Sequence: Synthetic oligonucleotide
aucugcgagaagagcucgc

SEQ ID NO: 2949094 - RNA, 19 nt, Artificial Sequence
  Description of Artificial Sequence: Synthetic oligonucleotide
ucggggcucagcagcacgu

SEQ ID NO: 2949095 - RNA, 19 nt, Artificial Sequence
  Description of Artificial Sequence: Synthetic oligonucleotide
uugacgcggcgcucgucgg

SEQ ID NO: 2949096 - RNA, 19 nt, Artificial Sequence
  Description of Artificial Sequence: Synthetic oligonucleotide
ucguaggggagugcccagg

SEQ ID NO: 2949097 - RNA, 19 nt, Artificial Sequence
  Description of Artificial Sequence: Synthetic oligonucleotide
ugcgccuggcggccgaagc

SEQ ID NO: 2949098 - RNA, 19 nt, Artificial Sequence
  Description of Artificial Sequence: Synthetic oligonucleotide
uucccguugcacaccucga

SEQ ID NO: 2949099 - RNA, 19 nt, Artificial Sequence
  Description of Artificial Sequence: Synthetic oligonucleotide
ucagguccggguagccgug

SEQ ID NO: 2949100 - RNA, 19 nt, Artificial Sequence
  Description of Artificial Sequence: Synthetic oligonucleotide
agcucgcgcgccugcgacc

SEQ ID NO: 2949101 - RNA, 19 nt, Artificial Sequence
  Description of Artificial Sequence: Synthetic oligonucleotide
guccgugagcuugacgcgg

SEQ ID NO: 2949102 - RNA, 19 nt, Artificial Sequence
  Description of Artificial Sequence: Synthetic oligonucleotide
caccucgaugaacucgaag

SEQ ID NO: 2949103 - RNA, 19 nt, Artificial Sequence
  Description of Artificial Sequence: Synthetic oligonucleotide
agggaggcaccuccgguga

SEQ ID NO: 2949104 - RNA, 19 nt, Artificial Sequence
  Description of Artificial Sequence: Synthetic oligonucleotide
ccacacgucguacucuugg

SEQ ID NO: 2949105 - RNA, 19 nt, Artificial Sequence
  Description of Artificial Sequence: Synthetic oligonucleotide
acgugcacgaugugcgggu

SEQ ID NO: 2949106 - RNA, 19 nt, Artificial Sequence
  Description of Artificial Sequence: Synthetic oligonucleotide
cugcgagaagagcucgcgc

SEQ ID NO: 2949107 - RNA, 19 nt, Artificial Sequence
  Description of Artificial Sequence: Synthetic oligonucleotide
guggccgccgccuccauca

SEQ ID NO: 2949108 - RNA, 19 nt, Artificial Sequence
  Description of Artificial Sequence: Synthetic oligonucleotide
ucccguugcacaccucgau

SEQ ID NO: 2949109 - RNA, 19 nt, Artificial Sequence
  Description of Artificial Sequence: Synthetic oligonucleotide
agcuucccguugcacaccu

SEQ ID NO: 2949110 - RNA, 19 nt, Artificial Sequence
  Description of Artificial Sequence: Synthetic oligonucleotide
uagccgugcgccuggcggc

SEQ ID NO: 2949111 - RNA, 19 nt, Artificial Sequence
  Description of Artificial Sequence: Synthetic oligonucleotide
guugcacaccucgaugaac

SEQ ID NO: 2949112 - RNA, 19 nt, Artificial Sequence
  Description of Artificial Sequence: Synthetic oligonucleotide
ucgcggugcaccagguggu

SEQ ID NO: 2949113 - RNA, 19 nt, Artificial Sequence
  Description of Artificial Sequence: Synthetic oligonucleotide
gaugcgcccguugcgcugc

SEQ ID NO: 2949114 - RNA, 19 nt, Artificial Sequence
  Description of Artificial Sequence: Synthetic oligonucleotide
cacgaugugcgggugccgc

SEQ ID NO: 2949115 - RNA, 19 nt, Artificial Sequence
  Description of Artificial Sequence: Synthetic oligonucleotide
ucgucggggcucagcagca

SEQ ID NO: 2949116 - RNA, 19 nt, Artificial Sequence
  Description of Artificial Sequence: Synthetic oligonucleotide
aggggagugcccagggagg

SEQ ID NO: 2949117 - RNA, 19 nt, Artificial Sequence
  Description of Artificial Sequence: Synthetic oligonucleotide
gacgcggcgcucgucgggg

SEQ ID NO: 2949118 - RNA, 19 nt, Artificial Sequence
  Description of Artificial Sequence: Synthetic oligonucleotide
cucuuggggucguagggga

SEQ ID NO: 2949119 - RNA, 19 nt, Artificial Sequence
  Description of Artificial Sequence: Synthetic oligonucleotide
uccacacgucguacucuug

SEQ ID NO: 2949120 - RNA, 19 nt, Artificial Sequence
  Description of Artificial Sequence: Synthetic oligonucleotide
ugcaccaggugguggucgu

SEQ ID NO: 2949121 - RNA, 19 nt, Artificial Sequence
  Description of Artificial Sequence: Synthetic oligonucleotide
gcagguagcgcacggcgcc

SEQ ID NO: 2949122 - RNA, 19 nt, Artificial Sequence
  Description of Artificial Sequence: Synthetic oligonucleotide
gugcgggugccgcacgccg

SEQ ID NO: 2949123 - RNA, 19 nt, Artificial Sequence
  Description of Artificial Sequence: Synthetic oligonucleotide
ccucgaugaacucgaagac

SEQ ID NO: 2949124 - RNA, 19 nt, Artificial Sequence
  Description of Artificial Sequence: Synthetic oligonucleotide
gcacaccucgaugaacucg

SEQ ID NO: 2949125 - RNA, 19 nt, Artificial Sequence
  Description of Artificial Sequence: Synthetic oligonucleotide
ucucgcacuugaggucgcg

SEQ ID NO: 2949126 - RNA, 19 nt, Artificial Sequence
  Description of Artificial Sequence: Synthetic oligonucleotide
uucucgcacuugaggucgc

SEQ ID NO: 2949127 - RNA, 19 nt, Artificial Sequence
  Description of Artificial Sequence: Synthetic oligonucleotide
gccuccaucacgauguaca

SEQ ID NO: 2949128 - RNA, 19 nt, Artificial Sequence
  Description of Artificial Sequence: Synthetic oligonucleotide
uuggggucguaggggagug

SEQ ID NO: 2949129 - RNA, 19 nt, Artificial Sequence
  Description of Artificial Sequence: Synthetic oligonucleotide
agguccggguagccgugcg

SEQ ID NO: 2949130 - RNA, 19 nt, Artificial Sequence
  Description of Artificial Sequence: Synthetic oligonucleotide
gaggcaccuccggugacgc

SEQ ID NO: 2949131 - RNA, 19 nt, Artificial Sequence
  Description of Artificial Sequence: Synthetic oligonucleotide
ugcacaccucgaugaacuc

SEQ ID NO: 2949132 - RNA, 19 nt, Artificial Sequence
  Description of Artificial Sequence: Synthetic oligonucleotide
acguagagcacgacgccca

SEQ ID NO: 2949133 - RNA, 19 nt, Artificial Sequence
  Description of Artificial Sequence: Synthetic oligonucleotide
caccaggugguggucgugc

SEQ ID NO: 2949134 - RNA, 19 nt, Artificial Sequence
  Description of Artificial Sequence: Synthetic oligonucleotide
uaggcggccgagccgcagu

SEQ ID NO: 2949135 - RNA, 19 nt, Artificial Sequence
  Description of Artificial Sequence: Synthetic oligonucleotide
ugcgggugccgcacgccgc

SEQ ID NO: 2949136 - RNA, 19 nt, Artificial Sequence
  Description of Artificial Sequence: Synthetic oligonucleotide
cucgcacuugaggucgcgg

SEQ ID NO: 2949137 - RNA, 19 nt, Artificial Sequence
  Description of Artificial Sequence: Synthetic oligonucleotide
gcaggauggagagcucucg

SEQ ID NO: 2949138 - RNA, 19 nt, Artificial Sequence
  Description of Artificial Sequence: Synthetic oligonucleotide
guagagcacgacgcccagg

SEQ ID NO: 2949139 - RNA, 19 nt, Artificial Sequence
  Description of Artificial Sequence: Synthetic oligonucleotide
gugcaccaggugguggucg

SEQ ID NO: 2949140 - RNA, 19 nt, Artificial Sequence
  Description of Artificial Sequence: Synthetic oligonucleotide
uggcggccgaagccgaagu

SEQ ID NO: 2949141 - RNA, 19 nt, Artificial Sequence
  Description of Artificial Sequence: Synthetic oligonucleotide
gagcucgcgcgccugcgac

SEQ ID NO: 2949142 - RNA, 19 nt, Artificial Sequence
  Description of Artificial Sequence: Synthetic oligonucleotide
gucguaggggagugcccag

SEQ ID NO: 2949143 - RNA, 19 nt, Artificial Sequence
  Description of Artificial Sequence: Synthetic oligonucleotide
cacgucguacucuuggggu

SEQ ID NO: 2949144 - RNA, 19 nt, Artificial Sequence
  Description of Artificial Sequence: Synthetic oligonucleotide
accaugacguagagcacga

SEQ ID NO: 2949145 - RNA, 19 nt, Artificial Sequence
  Description of Artificial Sequence: Synthetic oligonucleotide
gccgagccgcaguaggugg

SEQ ID NO: 2949146 - RNA, 19 nt, Artificial Sequence
  Description of Artificial Sequence: Synthetic oligonucleotide
acgacgcccaggcuccaca

SEQ ID NO: 2949147 - RNA, 19 nt, Artificial Sequence
  Description of Artificial Sequence: Synthetic oligonucleotide
agaagagcucgcgcgccug

SEQ ID NO: 2949148 - RNA, 19 nt, Artificial Sequence
  Description of Artificial Sequence: Synthetic oligonucleotide
agccgcaguagguggugcu

SEQ ID NO: 2949149 - RNA, 19 nt, Artificial Sequence
  Description of Artificial Sequence: Synthetic oligonucleotide
accaggugguggucgugca

SEQ ID NO: 2949150 - RNA, 19 nt, Artificial Sequence
  Description of Artificial Sequence: Synthetic oligonucleotide
aggcuccacacgucguacu

SEQ ID NO: 2949151 - RNA, 19 nt, Artificial Sequence
  Description of Artificial Sequence: Synthetic oligonucleotide
agcaggucgguggccgccg

SEQ ID NO: 2949152 - RNA, 19 nt, Artificial Sequence
  Description of Artificial Sequence: Synthetic oligonucleotide
ugccgcacgccgcgcagga

SEQ ID NO: 2949153 - RNA, 19 nt, Artificial Sequence
  Description of Artificial Sequence: Synthetic oligonucleotide
ugugcgggugccgcacgcc

SEQ ID NO: 2949154 - RNA, 19 nt, Artificial Sequence
  Description of Artificial Sequence: Synthetic oligonucleotide
gugcacgaugugcgggugc

SEQ ID NO: 2949155 - RNA, 19 nt, Artificial Sequence
  Description of Artificial Sequence: Synthetic oligonucleotide
ugaggucgcggugcaccag

SEQ ID NO: 2949156 - RNA, 19 nt, Artificial Sequence
  Description of Artificial Sequence: Synthetic oligonucleotide
gcgagaagagcucgcgcgc

SEQ ID NO: 2949157 - RNA, 19 nt, Artificial Sequence
  Description of Artificial Sequence: Synthetic oligonucleotide
cagcagcacguucucgcac

SEQ ID NO: 2949158 - RNA, 19 nt, Artificial Sequence
  Description of Artificial Sequence: Synthetic oligonucleotide
ugacgcguaggcggccgag

SEQ ID NO: 2949159 - RNA, 19 nt, Artificial Sequence
  Description of Artificial Sequence: Synthetic oligonucleotide
cucagguccggguagccgu

SEQ ID NO: 2949160 - RNA, 19 nt, Artificial Sequence
  Description of Artificial Sequence: Synthetic oligonucleotide
caggauggagagcucucga

SEQ ID NO: 2949161 - RNA, 19 nt, Artificial Sequence
  Description of Artificial Sequence: Synthetic oligonucleotide
caguagguggugcucaggu

SEQ ID NO: 2949162 - RNA, 19 nt, Artificial Sequence
  Description of Artificial Sequence: Synthetic oligonucleotide
gugagcuugacgcggcgcu

SEQ ID NO: 2949163 - RNA, 19 nt, Artificial Sequence
  Description of Artificial Sequence: Synthetic oligonucleotide
acgaugugcgggugccgca

SEQ ID NO: 2949164 - RNA, 19 nt, Artificial Sequence
  Description of Artificial Sequence: Synthetic oligonucleotide
agagcucgcgcgccugcga

SEQ ID NO: 2949165 - RNA, 19 nt, Artificial Sequence
  Description of Artificial Sequence: Synthetic oligonucleotide
gacgcguaggcggccgagc

SEQ ID NO: 2949166 - RNA, 19 nt, Artificial Sequence
  Description of Artificial Sequence: Synthetic oligonucleotide
ggaggcaccuccggugacg

SEQ ID NO: 2949167 - RNA, 19 nt, Artificial Sequence
  Description of Artificial Sequence: Synthetic oligonucleotide
ccuccggugacgcguaggc

SEQ ID NO: 2949168 - RNA, 19 nt, Artificial Sequence
  Description of Artificial Sequence: Synthetic oligonucleotide
agagcacgacgcccaggcu

SEQ ID NO: 2949169 - RNA, 19 nt, Artificial Sequence
  Description of Artificial Sequence: Synthetic oligonucleotide
accuccggugacgcguagg

SEQ ID NO: 2949170 - RNA, 19 nt, Artificial Sequence
  Description of Artificial Sequence: Synthetic oligonucleotide
gucgugcagguagcgcacg

SEQ ID NO: 2949171 - RNA, 19 nt, Artificial Sequence
  Description of Artificial Sequence: Synthetic oligonucleotide
ugcucagguccggguagcc

SEQ ID NO: 2949172 - RNA, 19 nt, Artificial Sequence
  Description of Artificial Sequence: Synthetic oligonucleotide
agccgugcgccuggcggcc

SEQ ID NO: 2949173 - RNA, 19 nt, Artificial Sequence
  Description of Artificial Sequence: Synthetic oligonucleotide
gcacuugaggucgcggugc

SEQ ID NO: 2949174 - RNA, 19 nt, Artificial Sequence
  Description of Artificial Sequence: Synthetic oligonucleotide
gguggucgugcagguagcg

SEQ ID NO: 2949175 - RNA, 19 nt, Artificial Sequence
  Description of Artificial Sequence: Synthetic oligonucleotide
guggucgugcagguagcgc

SEQ ID NO: 2949176 - RNA, 19 nt, Artificial Sequence
  Description of Artificial Sequence: Synthetic oligonucleotide
ggggucguaggggagugcc

SEQ ID NO: 2949177 - RNA, 19 nt, Artificial Sequence
  Description of Artificial Sequence: Synthetic oligonucleotide
cuccggugacgcguaggcg

SEQ ID NO: 2949178 - RNA, 19 nt, Artificial Sequence
  Description of Artificial Sequence: Synthetic oligonucleotide
ugagcuugacgcggcgcuc

SEQ ID NO: 2949179 - RNA, 19 nt, Artificial Sequence
  Description of Artificial Sequence: Synthetic oligonucleotide
guaggggagugcccaggga

SEQ ID NO: 2949180 - RNA, 19 nt, Artificial Sequence
  Description of Artificial Sequence: Synthetic oligonucleotide
agguagcgcacggcgcccg

SEQ ID NO: 2949181 - RNA, 19 nt, Artificial Sequence
  Description of Artificial Sequence: Synthetic oligonucleotide
cacggcgcccgcgaucugc

SEQ ID NO: 2949182 - RNA, 19 nt, Artificial Sequence
  Description of Artificial Sequence: Synthetic oligonucleotide
caggcuccacacgucguac

SEQ ID NO: 2949183 - RNA, 19 nt, Artificial Sequence
  Description of Artificial Sequence: Synthetic oligonucleotide
ggugacgcguaggcggccg

SEQ ID NO: 2949184 - RNA, 19 nt, Artificial Sequence
  Description of Artificial Sequence: Synthetic oligonucleotide
uccggguagccgugcgccu

SEQ ID NO: 2949185 - RNA, 19 nt, Artificial Sequence
  Description of Artificial Sequence: Synthetic oligonucleotide
gcggccgaagccgaagucc

SEQ ID NO: 2949186 - RNA, 19 nt, Artificial Sequence
  Description of Artificial Sequence: Synthetic oligonucleotide
ggucguaggggagugccca

SEQ ID NO: 2949187 - RNA, 19 nt, Artificial Sequence
  Description of Artificial Sequence: Synthetic oligonucleotide
gguggugcucagguccggg

SEQ ID NO: 2949188 - RNA, 19 nt, Artificial Sequence
  Description of Artificial Sequence: Synthetic oligonucleotide
guacagcuucccguugcac

SEQ ID NO: 2949189 - RNA, 19 nt, Artificial Sequence
  Description of Artificial Sequence: Synthetic oligonucleotide
ccguugcacaccucgauga

SEQ ID NO: 2949190 - RNA, 19 nt, Artificial Sequence
  Description of Artificial Sequence: Synthetic oligonucleotide
gcgcccguugcgcugcacg

SEQ ID NO: 2949191 - RNA, 19 nt, Artificial Sequence
  Description of Artificial Sequence: Synthetic oligonucleotide
gagccgcaguagguggugc

SEQ ID NO: 2949192 - RNA, 19 nt, Artificial Sequence
  Description of Artificial Sequence: Synthetic oligonucleotide
cacgccgcgcaggauggag

SEQ ID NO: 2949193 - RNA, 19 nt, Artificial Sequence
  Description of Artificial Sequence: Synthetic oligonucleotide
guagcgcacggcgcccgcg

SEQ ID NO: 2949194 - RNA, 19 nt, Artificial Sequence
  Description of Artificial Sequence: Synthetic oligonucleotide
acgcggcgcucgucggggc

SEQ ID NO: 2949195 - RNA, 19 nt, Artificial Sequence
  Description of Artificial Sequence: Synthetic oligonucleotide
ggcuccacacgucguacuc

SEQ ID NO: 2949196 - RNA, 19 nt, Artificial Sequence
  Description of Artificial Sequence: Synthetic oligonucleotide
ggcgcccgcgaucugcgag

SEQ ID NO: 2949197 - RNA, 19 nt, Artificial Sequence
  Description of Artificial Sequence: Synthetic oligonucleotide
gguagccgugcgccuggcg

SEQ ID NO: 2949198 - RNA, 19 nt, Artificial Sequence
  Description of Artificial Sequence: Synthetic oligonucleotide
aggcaccuccggugacgcg

SEQ ID NO: 2949199 - RNA, 19 nt, Artificial Sequence
  Description of Artificial Sequence: Synthetic oligonucleotide
cccgcgaucugcgagaaga

SEQ ID NO: 2949200 - RNA, 19 nt, Artificial Sequence
  Description of Artificial Sequence: Synthetic oligonucleotide
gcgaucugcgagaagagcu

SEQ ID NO: 2949201 - RNA, 19 nt, Artificial Sequence
  Description of Artificial Sequence: Synthetic oligonucleotide
cuggcggccgaagccgaag

SEQ ID NO: 2949202 - RNA, 19 nt, Artificial Sequence
  Description of Artificial Sequence: Synthetic oligonucleotide
cccguugcacaccucgaug

SEQ ID NO: 2949203 - RNA, 19 nt, Artificial Sequence
  Description of Artificial Sequence: Synthetic oligonucleotide
agcuugacgcggcgcucgu

SEQ ID NO: 2949204 - RNA, 19 nt, Artificial Sequence
  Description of Artificial Sequence: Synthetic oligonucleotide
cccguugcgcugcacggcc

SEQ ID NO: 2949205 - RNA, 19 nt, Artificial Sequence
  Description of Artificial Sequence: Synthetic oligonucleotide
gcucagguccggguagccg

SEQ ID NO: 2949206 - RNA, 19 nt, Artificial Sequence
  Description of Artificial Sequence: Synthetic oligonucleotide
cguaggggagugcccaggg

SEQ ID NO: 2949207 - RNA, 19 nt, Artificial Sequence
  Description of Artificial Sequence: Synthetic oligonucleotide
aggucgguggccgccgccu

SEQ ID NO: 2949208 - RNA, 19 nt, Artificial Sequence
  Description of Artificial Sequence: Synthetic oligonucleotide
acggcgcccgcgaucugcg

SEQ ID NO: 2949209 - RNA, 19 nt, Artificial Sequence
  Description of Artificial Sequence: Synthetic oligonucleotide
gcaguagguggugcucagg

SEQ ID NO: 2949210 - RNA, 19 nt, Artificial Sequence
  Description of Artificial Sequence: Synthetic oligonucleotide
agguggugcucagguccgg

SEQ ID NO: 2949211 - RNA, 19 nt, Artificial Sequence
  Description of Artificial Sequence: Synthetic oligonucleotide
ggaugcgcccguugcgcug

SEQ ID NO: 2949212 - RNA, 19 nt, Artificial Sequence
  Description of Artificial Sequence: Synthetic oligonucleotide
cgaucugcgagaagagcuc

SEQ ID NO: 2949213 - RNA, 19 nt, Artificial Sequence
  Description of Artificial Sequence: Synthetic oligonucleotide
cggccgaagccgaaguccg

SEQ ID NO: 2949214 - RNA, 19 nt, Artificial Sequence
  Description of Artificial Sequence: Synthetic oligonucleotide
cagguagcgcacggcgccc

SEQ ID NO: 2949215 - RNA, 19 nt, Artificial Sequence
  Description of Artificial Sequence: Synthetic oligonucleotide
gcguaggcggccgagccgc

SEQ ID NO: 2949216 - RNA, 19 nt, Artificial Sequence
  Description of Artificial Sequence: Synthetic oligonucleotide
cacuugaggucgcggugca

SEQ ID NO: 2949217 - RNA, 19 nt, Artificial Sequence
  Description of Artificial Sequence: Synthetic oligonucleotide
cagcuucccguugcacacc

SEQ ID NO: 2949218 - RNA, 19 nt, Artificial Sequence
  Description of Artificial Sequence: Synthetic oligonucleotide
cagcaggucgguggccgcc

SEQ ID NO: 2949219 - RNA, 19 nt, Artificial Sequence
  Description of Artificial Sequence: Synthetic oligonucleotide
gcucagcagcacguucucg

SEQ ID NO: 2949220 - RNA, 19 nt, Artificial Sequence
  Description of Artificial Sequence: Synthetic oligonucleotide
guugcgcugcacggccugc

SEQ ID NO: 2949221 - RNA, 19 nt, Artificial Sequence
  Description of Artificial Sequence: Synthetic oligonucleotide
cccgggaugcgcccguugc

SEQ ID NO: 2949222 - RNA, 19 nt, Artificial Sequence
  Description of Artificial Sequence: Synthetic oligonucleotide
gguccggguagccgugcgc

SEQ ID NO: 2949223 - RNA, 19 nt, Artificial Sequence
  Description of Artificial Sequence: Synthetic oligonucleotide
gccgaagccgaaguccgug

SEQ ID NO: 2949224 - RNA, 19 nt, Artificial Sequence
  Description of Artificial Sequence: Synthetic oligonucleotide
uggggucguaggggagugc

SEQ ID NO: 2949225 - RNA, 19 nt, Artificial Sequence
  Description of Artificial Sequence: Synthetic oligonucleotide
acucgaagacgugcacgau

SEQ ID NO: 2949226 - RNA, 19 nt, Artificial Sequence
  Description of Artificial Sequence: Synthetic oligonucleotide
ggggagugcccagggaggc

SEQ ID NO: 2949227 - RNA, 19 nt, Artificial Sequence
  Description of Artificial Sequence: Synthetic oligonucleotide
ggugccgcacgccgcgcag

SEQ ID NO: 2949228 - RNA, 19 nt, Artificial Sequence
  Description of Artificial Sequence: Synthetic oligonucleotide
gcgggugccgcacgccgcg

SEQ ID NO: 2949229 - RNA, 19 nt, Artificial Sequence
  Description of Artificial Sequence: Synthetic oligonucleotide
caggucgguggccgccgcc

SEQ ID NO: 2949230 - RNA, 19 nt, Artificial Sequence
  Description of Artificial Sequence: Synthetic oligonucleotide
cgucguacucuuggggucg

SEQ ID NO: 2949231 - RNA, 19 nt, Artificial Sequence
  Description of Artificial Sequence: Synthetic oligonucleotide
gccgccuccaucacgaugu

SEQ ID NO: 2949232 - RNA, 19 nt, Artificial Sequence
  Description of Artificial Sequence: Synthetic oligonucleotide
gagugcccagggaggcacc

SEQ ID NO: 2949233 - RNA, 19 nt, Artificial Sequence
  Description of Artificial Sequence: Synthetic oligonucleotide
ccggugacgcguaggcggc

SEQ ID NO: 2949234 - RNA, 19 nt, Artificial Sequence
  Description of Artificial Sequence: Synthetic oligonucleotide
cguacucuuggggucguag

SEQ ID NO: 2949235 - RNA, 19 nt, Artificial Sequence
  Description of Artificial Sequence: Synthetic oligonucleotide
guaggcggccgagccgcag

SEQ ID NO: 2949236 - RNA, 19 nt, Artificial Sequence
  Description of Artificial Sequence: Synthetic oligonucleotide
ggucgugcagguagcgcac

SEQ ID NO: 2949237 - RNA, 19 nt, Artificial Sequence
  Description of Artificial Sequence: Synthetic oligonucleotide
ggcucagcagcacguucuc

SEQ ID NO: 2949238 - RNA, 19 nt, Artificial Sequence
  Description of Artificial Sequence: Synthetic oligonucleotide
ccgcgaucugcgagaagag

SEQ ID NO: 2949239 - RNA, 19 nt, Artificial Sequence
  Description of Artificial Sequence: Synthetic oligonucleotide
gcgccuggcggccgaagcc

SEQ ID NO: 2949240 - RNA, 19 nt, Artificial Sequence
  Description of Artificial Sequence: Synthetic oligonucleotide
ggccgagccgcaguaggug

SEQ ID NO: 2949241 - RNA, 19 nt, Artificial Sequence
  Description of Artificial Sequence: Synthetic oligonucleotide
ccaggugguggucgugcag

SEQ ID NO: 2949242 - RNA, 19 nt, Artificial Sequence
  Description of Artificial Sequence: Synthetic oligonucleotide
cuuggggucguaggggagu

SEQ ID NO: 2949243 - RNA, 19 nt, Artificial Sequence
  Description of Artificial Sequence: Synthetic oligonucleotide
gugccgcacgccgcgcagg

SEQ ID NO: 2949244 - RNA, 19 nt, Artificial Sequence
  Description of Artificial Sequence: Synthetic oligonucleotide
ggucgcggugcaccaggug

SEQ ID NO: 2949245 - RNA, 19 nt, Artificial Sequence
  Description of Artificial Sequence: Synthetic oligonucleotide
cagcacguucucgcacuug

SEQ ID NO: 2949246 - RNA, 19 nt, Artificial Sequence
  Description of Artificial Sequence: Synthetic oligonucleotide
ccgggaugcgcccguugcg

SEQ ID NO: 2949247 - RNA, 19 nt, Artificial Sequence
  Description of Artificial Sequence: Synthetic oligonucleotide
ccgcacgccgcgcaggaug

SEQ ID NO: 2949248 - RNA, 19 nt, Artificial Sequence
  Description of Artificial Sequence: Synthetic oligonucleotide
gcacguucucgcacuugag

SEQ ID NO: 2949249 - RNA, 19 nt, Artificial Sequence
  Description of Artificial Sequence: Synthetic oligonucleotide
gcucgcgcgccugcgaccc

SEQ ID NO: 2949250 - RNA, 19 nt, Artificial Sequence
  Description of Artificial Sequence: Synthetic oligonucleotide
guggugcucagguccgggu

SEQ ID NO: 2949251 - RNA, 19 nt, Artificial Sequence
  Description of Artificial Sequence: Synthetic oligonucleotide
cgaugaacucgaagacgug

SEQ ID NO: 2949252 - RNA, 19 nt, Artificial Sequence
  Description of Artificial Sequence: Synthetic oligonucleotide
cuccacacgucguacucuu

SEQ ID NO: 2949253 - RNA, 19 nt, Artificial Sequence
  Description of Artificial Sequence: Synthetic oligonucleotide
uggccgccgccuccaucac

SEQ ID NO: 2949254 - RNA, 19 nt, Artificial Sequence
  Description of Artificial Sequence: Synthetic oligonucleotide
gguagcgcacggcgcccgc

SEQ ID NO: 2949255 - RNA, 19 nt, Artificial Sequence
  Description of Artificial Sequence: Synthetic oligonucleotide
gcggugcaccagguggugg

SEQ ID NO: 2949256 - RNA, 19 nt, Artificial Sequence
  Description of Artificial Sequence: Synthetic oligonucleotide
acgccgcgcaggauggaga

SEQ ID NO: 2949257 - RNA, 19 nt, Artificial Sequence
  Description of Artificial Sequence: Synthetic oligonucleotide
cgcacuugaggucgcggug

SEQ ID NO: 2949258 - RNA, 19 nt, Artificial Sequence
  Description of Artificial Sequence: Synthetic oligonucleotide
cgagaagagcucgcgcgcc

SEQ ID NO: 2949259 - RNA, 19 nt, Artificial Sequence
  Description of Artificial Sequence: Synthetic oligonucleotide
cugcgaccccgggaugcgc

SEQ ID NO: 2949260 - RNA, 19 nt, Artificial Sequence
  Description of Artificial Sequence: Synthetic oligonucleotide
cgcccguugcgcugcacgg

SEQ ID NO: 2949261 - RNA, 19 nt, Artificial Sequence
  Description of Artificial Sequence: Synthetic oligonucleotide
aggcggccgagccgcagua

SEQ ID NO: 2949262 - RNA, 19 nt, Artificial Sequence
  Description of Artificial Sequence: Synthetic oligonucleotide
gugacgcguaggcggccga

SEQ ID NO: 2949263 - RNA, 19 nt, Artificial Sequence
  Description of Artificial Sequence: Synthetic oligonucleotide
agcgcacggcgcccgcgau

SEQ ID NO: 2949264 - RNA, 19 nt, Artificial Sequence
  Description of Artificial Sequence: Synthetic oligonucleotide
ggcaccuccggugacgcgu

SEQ ID NO: 2949265 - RNA, 19 nt, Artificial Sequence
  Description of Artificial Sequence: Synthetic oligonucleotide
caccuccggugacgcguag

SEQ ID NO: 2949266 - RNA, 19 nt, Artificial Sequence
  Description of Artificial Sequence: Synthetic oligonucleotide
ggcggccgaagccgaaguc

SEQ ID NO: 2949267 - RNA, 19 nt, Artificial Sequence
  Description of Artificial Sequence: Synthetic oligonucleotide
cgcgaucugcgagaagagc

SEQ ID NO: 2949268 - RNA, 19 nt, Artificial Sequence
  Description of Artificial Sequence: Synthetic oligonucleotide
gcacgaugugcgggugccg

SEQ ID NO: 2949269 - RNA, 19 nt, Artificial Sequence
  Description of Artificial Sequence: Synthetic oligonucleotide
cgccgcgcaggauggagag

SEQ ID NO: 2949270 - RNA, 19 nt, Artificial Sequence
  Description of Artificial Sequence: Synthetic oligonucleotide
cguagagcacgacgcccag

SEQ ID NO: 2949271 - RNA, 19 nt, Artificial Sequence
  Description of Artificial Sequence: Synthetic oligonucleotide
aggucgcggugcaccaggu

SEQ ID NO: 2949272 - RNA, 19 nt, Artificial Sequence
  Description of Artificial Sequence: Synthetic oligonucleotide
cgcaguagguggugcucag

SEQ ID NO: 2949273 - RNA, 19 nt, Artificial Sequence
  Description of Artificial Sequence: Synthetic oligonucleotide
ccgugagcuugacgcggcg

SEQ ID NO: 2949274 - RNA, 19 nt, Artificial Sequence
  Description of Artificial Sequence: Synthetic oligonucleotide
gggcucagcagcacguucu

SEQ ID NO: 2949275 - RNA, 19 nt, Artificial Sequence
  Description of Artificial Sequence: Synthetic oligonucleotide
ccgaaguccgugagcuuga

SEQ ID NO: 2949276 - RNA, 19 nt, Artificial Sequence
  Description of Artificial Sequence: Synthetic oligonucleotide
cacgacgcccaggcuccac

SEQ ID NO: 2949277 - RNA, 19 nt, Artificial Sequence
  Description of Artificial Sequence: Synthetic oligonucleotide
gcgaccccgggaugcgccc

SEQ ID NO: 2949278 - RNA, 19 nt, Artificial Sequence
  Description of Artificial Sequence: Synthetic oligonucleotide
ccgaagccgaaguccguga

SEQ ID NO: 2949279 - RNA, 19 nt, Artificial Sequence
  Description of Artificial Sequence: Synthetic oligonucleotide
gggaggcaccuccggugac

SEQ ID NO: 2949280 - RNA, 19 nt, Artificial Sequence
  Description of Artificial Sequence: Synthetic oligonucleotide
ggugcaccagguggugguc

SEQ ID NO: 2949281 - RNA, 19 nt, Artificial Sequence
  Description of Artificial Sequence: Synthetic oligonucleotide
cgugagcuugacgcggcgc

SEQ ID NO: 2949282 - RNA, 19 nt, Artificial Sequence
  Description of Artificial Sequence: Synthetic oligonucleotide
cgggaugcgcccguugcgc

SEQ ID NO: 2949283 - RNA, 19 nt, Artificial Sequence
  Description of Artificial Sequence: Synthetic oligonucleotide
ucguacucuuggggucgua

SEQ ID NO: 2949284 - RNA, 19 nt, Artificial Sequence
  Description of Artificial Sequence: Synthetic oligonucleotide
cgugcagguagcgcacggc

SEQ ID NO: 2949285 - RNA, 19 nt, Artificial Sequence
  Description of Artificial Sequence: Synthetic oligonucleotide
gcccagggaggcaccuccg

SEQ ID NO: 2949286 - RNA, 19 nt, Artificial Sequence
  Description of Artificial Sequence: Synthetic oligonucleotide
acaccucgaugaacucgaa

SEQ ID NO: 2949287 - RNA, 19 nt, Artificial Sequence
  Description of Artificial Sequence: Synthetic oligonucleotide
gcgcccgcgaucugcgaga

SEQ ID NO: 2949288 - RNA, 19 nt, Artificial Sequence
  Description of Artificial Sequence: Synthetic oligonucleotide
gccgcaguagguggugcuc

SEQ ID NO: 2949289 - RNA, 19 nt, Artificial Sequence
  Description of Artificial Sequence: Synthetic oligonucleotide
cgccuggcggccgaagccg

SEQ ID NO: 2949290 - RNA, 19 nt, Artificial Sequence
  Description of Artificial Sequence: Synthetic oligonucleotide
cucgcgcgccugcgacccc

SEQ ID NO: 2949291 - RNA, 19 nt, Artificial Sequence
  Description of Artificial Sequence: Synthetic oligonucleotide
gcccguugcgcugcacggc

SEQ ID NO: 2949292 - RNA, 19 nt, Artificial Sequence
  Description of Artificial Sequence: Synthetic oligonucleotide
gugcgccuggcggccgaag

SEQ ID NO: 2949293 - RNA, 19 nt, Artificial Sequence
  Description of Artificial Sequence: Synthetic oligonucleotide
gcaggucgguggccgccgc

SEQ ID NO: 2949294 - RNA, 19 nt, Artificial Sequence
  Description of Artificial Sequence: Synthetic oligonucleotide
cggguagccgugcgccugg

SEQ ID NO: 2949295 - RNA, 19 nt, Artificial Sequence
  Description of Artificial Sequence: Synthetic oligonucleotide
cguugcgcugcacggccug

SEQ ID NO: 2949296 - RNA, 19 nt, Artificial Sequence
  Description of Artificial Sequence: Synthetic oligonucleotide
gaccccgggaugcgcccgu

SEQ ID NO: 2949297 - RNA, 19 nt, Artificial Sequence
  Description of Artificial Sequence: Synthetic oligonucleotide
cgaugugcgggugccgcac

SEQ ID NO: 2949298 - RNA, 19 nt, Artificial Sequence
  Description of Artificial Sequence: Synthetic oligonucleotide
ugcgcccguugcgcugcac

SEQ ID NO: 2949299 - RNA, 19 nt, Artificial Sequence
  Description of Artificial Sequence: Synthetic oligonucleotide
ggucgguggccgccgccuc

SEQ ID NO: 2949300 - RNA, 19 nt, Artificial Sequence
  Description of Artificial Sequence: Synthetic oligonucleotide
gggaugcgcccguugcgcu

SEQ ID NO: 2949301 - RNA, 19 nt, Artificial Sequence
  Description of Artificial Sequence: Synthetic oligonucleotide
gugcccagggaggcaccuc

SEQ ID NO: 2949302 - RNA, 19 nt, Artificial Sequence
  Description of Artificial Sequence: Synthetic oligonucleotide
ccaggcuccacacgucgua

SEQ ID NO: 2949303 - RNA, 19 nt, Artificial Sequence
  Description of Artificial Sequence: Synthetic oligonucleotide
ccaugacguagagcacgac

SEQ ID NO: 2949304 - RNA, 19 nt, Artificial Sequence
  Description of Artificial Sequence: Synthetic oligonucleotide
cgaagacgugcacgaugug

SEQ ID NO: 2949305 - RNA, 19 nt, Artificial Sequence
  Description of Artificial Sequence: Synthetic oligonucleotide
gggugccgcacgccgcgca

SEQ ID NO: 2949306 - RNA, 19 nt, Artificial Sequence
  Description of Artificial Sequence: Synthetic oligonucleotide
ccggguagccgugcgccug

SEQ ID NO: 2949307 - RNA, 19 nt, Artificial Sequence
  Description of Artificial Sequence: Synthetic oligonucleotide
ccgcgcaggauggagagcu

SEQ ID NO: 2949308 - RNA, 19 nt, Artificial Sequence
  Description of Artificial Sequence: Synthetic oligonucleotide
gcuccacacgucguacucu

SEQ ID NO: 2949309 - RNA, 19 nt, Artificial Sequence
  Description of Artificial Sequence: Synthetic oligonucleotide
ccgcaguagguggugcuca

SEQ ID NO: 2949310 - RNA, 19 nt, Artificial Sequence
  Description of Artificial Sequence: Synthetic oligonucleotide
gggagugcccagggaggca

SEQ ID NO: 2949311 - RNA, 19 nt, Artificial Sequence
  Description of Artificial Sequence: Synthetic oligonucleotide
gucguacucuuggggucgu

SEQ ID NO: 2949312 - RNA, 19 nt, Artificial Sequence
  Description of Artificial Sequence: Synthetic oligonucleotide
gcgcaggauggagagcucu

SEQ ID NO: 2949313 - RNA, 19 nt, Artificial Sequence
  Description of Artificial Sequence: Synthetic oligonucleotide
cguugcacaccucgaugaa

SEQ ID NO: 2949314 - RNA, 19 nt, Artificial Sequence
  Description of Artificial Sequence: Synthetic oligonucleotide
cgccgccuccaucacgaug

SEQ ID NO: 2949315 - RNA, 19 nt, Artificial Sequence
  Description of Artificial Sequence: Synthetic oligonucleotide
gccgcgcaggauggagagc

SEQ ID NO: 2949316 - RNA, 19 nt, Artificial Sequence
  Description of Artificial Sequence: Synthetic oligonucleotide
cgagccgcaguagguggug

SEQ ID NO: 2949317 - RNA, 19 nt, Artificial Sequence
  Description of Artificial Sequence: Synthetic oligonucleotide
gcccgcgaucugcgagaag

SEQ ID NO: 2949318 - RNA, 19 nt, Artificial Sequence
  Description of Artificial Sequence: Synthetic oligonucleotide
cgugcacgaugugcgggug

SEQ ID NO: 2949319 - RNA, 19 nt, Artificial Sequence
  Description of Artificial Sequence: Synthetic oligonucleotide
gcgcacggcgcccgcgauc

SEQ ID NO: 2949320 - RNA, 19 nt, Artificial Sequence
  Description of Artificial Sequence: Synthetic oligonucleotide
ggguagccgugcgccuggc

SEQ ID NO: 2949321 - RNA, 19 nt, Artificial Sequence
  Description of Artificial Sequence: Synthetic oligonucleotide
cgaaguccgugagcuugac

SEQ ID NO: 2949322 - RNA, 19 nt, Artificial Sequence
  Description of Artificial Sequence: Synthetic oligonucleotide
ggccugcagcaggucggug

SEQ ID NO: 2949323 - RNA, 19 nt, Artificial Sequence
  Description of Artificial Sequence: Synthetic oligonucleotide
gcuugacgcggcgcucguc

SEQ ID NO: 2949324 - RNA, 19 nt, Artificial Sequence
  Description of Artificial Sequence: Synthetic oligonucleotide
gcgcgccugcgaccccggg

SEQ ID NO: 2949325 - RNA, 19 nt, Artificial Sequence
  Description of Artificial Sequence: Synthetic oligonucleotide
ccccgggaugcgcccguug

SEQ ID NO: 2949326 - RNA, 19 nt, Artificial Sequence
  Description of Artificial Sequence: Synthetic oligonucleotide
gccgugcgccuggcggccg

SEQ ID NO: 2949327 - RNA, 19 nt, Artificial Sequence
  Description of Artificial Sequence: Synthetic oligonucleotide
gcagcacguucucgcacuu

SEQ ID NO: 2949328 - RNA, 19 nt, Artificial Sequence
  Description of Artificial Sequence: Synthetic oligonucleotide
gcggcgcucgucggggcuc

SEQ ID NO: 2949329 - RNA, 19 nt, Artificial Sequence
  Description of Artificial Sequence: Synthetic oligonucleotide
cgaccccgggaugcgcccg

SEQ ID NO: 2949330 - RNA, 19 nt, Artificial Sequence
  Description of Artificial Sequence: Synthetic oligonucleotide
cgccuccaucacgauguac

SEQ ID NO: 2949331 - RNA, 19 nt, Artificial Sequence
  Description of Artificial Sequence: Synthetic oligonucleotide
gcuucccguugcacaccuc

SEQ ID NO: 2949332 - RNA, 19 nt, Artificial Sequence
  Description of Artificial Sequence: Synthetic oligonucleotide
cggugcaccaggugguggu

SEQ ID NO: 2949333 - RNA, 19 nt, Artificial Sequence
  Description of Artificial Sequence: Synthetic oligonucleotide
cgcgcaggauggagagcuc

SEQ ID NO: 2949334 - RNA, 19 nt, Artificial Sequence
  Description of Artificial Sequence: Synthetic oligonucleotide
gccuggcggccgaagccga

SEQ ID NO: 2949335 - RNA, 19 nt, Artificial Sequence
  Description of Artificial Sequence: Synthetic oligonucleotide
gcaccuccggugacgcgua

SEQ ID NO: 2949336 - RNA, 19 nt, Artificial Sequence
  Description of Artificial Sequence: Synthetic oligonucleotide
ccgagccgcaguagguggu

SEQ ID NO: 2949337 - RNA, 19 nt, Artificial Sequence
  Description of Artificial Sequence: Synthetic oligonucleotide
cgcggugcaccagguggug

SEQ ID NO: 2949338 - RNA, 19 nt, Artificial Sequence
  Description of Artificial Sequence: Synthetic oligonucleotide
accccgggaugcgcccguu

SEQ ID NO: 2949339 - RNA, 19 nt, Artificial Sequence
  Description of Artificial Sequence: Synthetic oligonucleotide
cgcgcgccugcgaccccgg

SEQ ID NO: 2949340 - RNA, 19 nt, Artificial Sequence
  Description of Artificial Sequence: Synthetic oligonucleotide
cgcgccugcgaccccggga

SEQ ID NO: 2949341 - RNA, 19 nt, Artificial Sequence
  Description of Artificial Sequence: Synthetic oligonucleotide
ccuggcggccgaagccgaa

SEQ ID NO: 2949342 - RNA, 19 nt, Artificial Sequence
  Description of Artificial Sequence: Synthetic oligonucleotide
gcacggcgcccgcgaucug

SEQ ID NO: 2949343 - RNA, 19 nt, Artificial Sequence
  Description of Artificial Sequence: Synthetic oligonucleotide
ggccgaagccgaaguccgu

SEQ ID NO: 2949344 - RNA, 19 nt, Artificial Sequence
  Description of Artificial Sequence: Synthetic oligonucleotide
cggugacgcguaggcggcc

SEQ ID NO: 2949345 - RNA, 19 nt, Artificial Sequence
  Description of Artificial Sequence: Synthetic oligonucleotide
cgucggggcucagcagcac

SEQ ID NO: 2949346 - RNA, 19 nt, Artificial Sequence
  Description of Artificial Sequence: Synthetic oligonucleotide
ccaucacgauguacagcuu

SEQ ID NO: 2949347 - RNA, 19 nt, Artificial Sequence
  Description of Artificial Sequence: Synthetic oligonucleotide
cgcacggcgcccgcgaucu

SEQ ID NO: 2949348 - RNA, 19 nt, Artificial Sequence
  Description of Artificial Sequence: Synthetic oligonucleotide
gcacgccgcgcaggaugga

SEQ ID NO: 2949349 - RNA, 19 nt, Artificial Sequence
  Description of Artificial Sequence: Synthetic oligonucleotide
gcacgacgcccaggcucca

SEQ ID NO: 2949350 - RNA, 19 nt, Artificial Sequence
  Description of Artificial Sequence: Synthetic oligonucleotide
ccguugcgcugcacggccu

SEQ ID NO: 2949351 - RNA, 19 nt, Artificial Sequence
  Description of Artificial Sequence: Synthetic oligonucleotide
ccgugcgccuggcggccga

SEQ ID NO: 2949352 - RNA, 19 nt, Artificial Sequence
  Description of Artificial Sequence: Synthetic oligonucleotide
cguaggcggccgagccgca

SEQ ID NO: 2949353 - RNA, 19 nt, Artificial Sequence
  Description of Artificial Sequence: Synthetic oligonucleotide
cgggugccgcacgccgcgc

SEQ ID NO: 2949354 - RNA, 19 nt, Artificial Sequence
  Description of Artificial Sequence: Synthetic oligonucleotide
ccgccuccaucacgaugua

SEQ ID NO: 2949355 - RNA, 19 nt, Artificial Sequence
  Description of Artificial Sequence: Synthetic oligonucleotide
cgcccgcgaucugcgagaa

SEQ ID NO: 2949356 - RNA, 19 nt, Artificial Sequence
  Description of Artificial Sequence: Synthetic oligonucleotide
cgcggcgcucgucggggcu

SEQ ID NO: 2949357 - RNA, 19 nt, Artificial Sequence
  Description of Artificial Sequence: Synthetic oligonucleotide
cggcgcucgucggggcuca

SEQ ID NO: 2949358 - RNA, 19 nt, Artificial Sequence
  Description of Artificial Sequence: Synthetic oligonucleotide
cggcgcccgcgaucugcga

SEQ ID NO: 2949359 - RNA, 19 nt, Artificial Sequence
  Description of Artificial Sequence: Synthetic oligonucleotide
gccgcacgccgcgcaggau

SEQ ID NO: 2949360 - RNA, 19 nt, Artificial Sequence
  Description of Artificial Sequence: Synthetic oligonucleotide
cggccugcagcaggucggu

SEQ ID NO: 2949361 - RNA, 19 nt, Artificial Sequence
  Description of Artificial Sequence: Synthetic oligonucleotide
cgugcgccuggcggccgaa

SEQ ID NO: 2949362 - RNA, 19 nt, Artificial Sequence
  Description of Artificial Sequence: Synthetic oligonucleotide
ccgccgccuccaucacgau

SEQ ID NO: 2949363 - RNA, 19 nt, Artificial Sequence
  Description of Artificial Sequence: Synthetic oligonucleotide
cggggcucagcagcacguu

SEQ ID NO: 2949364 - RNA, 19 nt, Artificial Sequence
  Description of Artificial Sequence: Synthetic oligonucleotide
aaugcuaucaggcucuugg

SEQ ID NO: 2949365 - RNA, 19 nt, Artificial Sequence
  Description of Artificial Sequence: Synthetic oligonucleotide
aaaagcauggccuuauggg

SEQ ID NO: 2949366 - RNA, 19 nt, Artificial Sequence
  Description of Artificial Sequence: Synthetic oligonucleotide
uuggaauccacacagauac

SEQ ID NO: 2949367 - RNA, 19 nt, Artificial Sequence
  Description of Artificial Sequence: Synthetic oligonucleotide
gauuuaauuagccggaggc

SEQ ID NO: 2949368 - RNA, 19 nt, Artificial Sequence
  Description of Artificial Sequence: Synthetic oligonucleotide
aggagauuuaauuagccgg

SEQ ID NO: 2949369 - RNA, 19 nt, Artificial Sequence
  Description of Artificial Sequence: Synthetic oligonucleotide
cucugaaggaccaaaaugc

SEQ ID NO: 2949370 - RNA, 19 nt, Artificial Sequence
  Description of Artificial Sequence: Synthetic oligonucleotide
ucauaccaaaccaugcucg

SEQ ID NO: 2949371 - RNA, 19 nt, Artificial Sequence
  Description of Artificial Sequence: Synthetic oligonucleotide
aauucuuccagaguauagg

SEQ ID NO: 2949372 - RNA, 19 nt, Artificial Sequence
  Description of Artificial Sequence: Synthetic oligonucleotide
gaagcugugcaugagaagg

SEQ ID NO: 2949373 - RNA, 19 nt, Artificial Sequence
  Description of Artificial Sequence: Synthetic oligonucleotide
aacacuccgaaccuuguuc

SEQ ID NO: 2949374 - RNA, 19 nt, Artificial Sequence
  Description of Artificial Sequence: Synthetic oligonucleotide
ugaggcacgaaaagcaugg

SEQ ID NO: 2949375 - RNA, 19 nt, Artificial Sequence
  Description of Artificial Sequence: Synthetic oligonucleotide
uucucuuaaucucugcagg

SEQ ID NO: 2949376 - RNA, 19 nt, Artificial Sequence
  Description of Artificial Sequence: Synthetic oligonucleotide
auucuuccagaguauaggc

SEQ ID NO: 2949377 - RNA, 19 nt, Artificial Sequence
  Description of Artificial Sequence: Synthetic oligonucleotide
aauccacacagauacagga

SEQ ID NO: 2949378 - RNA, 19 nt, Artificial Sequence
  Description of Artificial Sequence: Synthetic oligonucleotide
cagaguauaggcuucgucc

SEQ ID NO: 2949379 - RNA, 19 nt, Artificial Sequence
  Description of Artificial Sequence: Synthetic oligonucleotide
ugaaggaccaaaaugcuau

SEQ ID NO: 2949380 - RNA, 19 nt, Artificial Sequence
  Description of Artificial Sequence: Synthetic oligonucleotide
gaaaagcauggccuuaugg

SEQ ID NO: 2949381 - RNA, 19 nt, Artificial Sequence
  Description of Artificial Sequence: Synthetic oligonucleotide
cauguagucagagugaagc

SEQ ID NO: 2949382 - RNA, 19 nt, Artificial Sequence
  Description of Artificial Sequence: Synthetic oligonucleotide
uguugaaauucuuccagag

SEQ ID NO: 2949383 - RNA, 19 nt, Artificial Sequence
  Description of Artificial Sequence: Synthetic oligonucleotide
aaagcauggccuuauggga

SEQ ID NO: 2949384 - RNA, 19 nt, Artificial Sequence
  Description of Artificial Sequence: Synthetic oligonucleotide
uagguguugaaauucuucc

SEQ ID NO: 2949385 - RNA, 19 nt, Artificial Sequence
  Description of Artificial Sequence: Synthetic oligonucleotide
uuuaauuagccggaggcgc

SEQ ID NO: 2949386 - RNA, 19 nt, Artificial Sequence
  Description of Artificial Sequence: Synthetic oligonucleotide
ucaguuuagggauuaggug

SEQ ID NO: 2949387 - RNA, 19 nt, Artificial Sequence
  Description of Artificial Sequence: Synthetic oligonucleotide
gaugguaacugcuucccag

SEQ ID NO: 2949388 - RNA, 19 nt, Artificial Sequence
  Description of Artificial Sequence: Synthetic oligonucleotide
ucagcugcugaacacuccg

SEQ ID NO: 2949389 - RNA, 19 nt, Artificial Sequence
  Description of Artificial Sequence: Synthetic oligonucleotide
ucuaugaaagccucugaug

SEQ ID NO: 2949390 - RNA, 19 nt, Artificial Sequence
  Description of Artificial Sequence: Synthetic oligonucleotide
auucucuuaaucucugcag

SEQ ID NO: 2949391 - RNA, 19 nt, Artificial Sequence
  Description of Artificial Sequence: Synthetic oligonucleotide
aaucugcauucucuuaauc

SEQ ID NO: 2949392 - RNA, 19 nt, Artificial Sequence
  Description of Artificial Sequence: Synthetic oligonucleotide
agauuuaauuagccggagg

SEQ ID NO: 2949393 - RNA, 19 nt, Artificial Sequence
  Description of Artificial Sequence: Synthetic oligonucleotide
ucugcauucucuuaaucuc

SEQ ID NO: 2949394 - RNA, 19 nt, Artificial Sequence
  Description of Artificial Sequence: Synthetic oligonucleotide
agaugcugcauguagucag

SEQ ID NO: 2949395 - RNA, 19 nt, Artificial Sequence
  Description of Artificial Sequence: Synthetic oligonucleotide
guaacugcuucccagagca

SEQ ID NO: 2949396 - RNA, 19 nt, Artificial Sequence
  Description of Artificial Sequence: Synthetic oligonucleotide
ucuuaaucucugcaggaga

SEQ ID NO: 2949397 - RNA, 19 nt, Artificial Sequence
  Description of Artificial Sequence: Synthetic oligonucleotide
uuucaguuuagggauuagg

SEQ ID NO: 2949398 - RNA, 19 nt, Artificial Sequence
  Description of Artificial Sequence: Synthetic oligonucleotide
uuagguguugaaauucuuc

SEQ ID NO: 2949399 - RNA, 19 nt, Artificial Sequence
  Description of Artificial Sequence: Synthetic oligonucleotide
auuuaauuagccggaggcg

SEQ ID NO: 2949400 - RNA, 19 nt, Artificial Sequence
  Description of Artificial Sequence: Synthetic oligonucleotide
cauccagucauaccaaacc

SEQ ID NO: 2949401 - RNA, 19 nt, Artificial Sequence
  Description of Artificial Sequence: Synthetic oligonucleotide
aucugcauucucuuaaucu

SEQ ID NO: 2949402 - RNA, 19 nt, Artificial Sequence
  Description of Artificial Sequence: Synthetic oligonucleotide
aaaccaugcucgucucagc

SEQ ID NO: 2949403 - RNA, 19 nt, Artificial Sequence
  Description of Artificial Sequence: Synthetic oligonucleotide
ucugcaggagauuuaauua

SEQ ID NO: 2949404 - RNA, 19 nt, Artificial Sequence
  Description of Artificial Sequence: Synthetic oligonucleotide
uaccaaaccaugcucgucu

SEQ ID NO: 2949405 - RNA, 19 nt, Artificial Sequence
  Description of Artificial Sequence: Synthetic oligonucleotide
caggagauuuaauuagccg

SEQ ID NO: 2949406 - RNA, 19 nt, Artificial Sequence
  Description of Artificial Sequence: Synthetic oligonucleotide
cuccauccgagccagaccg

SEQ ID NO: 2949407 - RNA, 19 nt, Artificial Sequence
  Description of Artificial Sequence: Synthetic oligonucleotide
agucagaugcugcauguag

SEQ ID NO: 2949408 - RNA, 19 nt, Artificial Sequence
  Description of Artificial Sequence: Synthetic oligonucleotide
cugcugaacacuccgaacc

SEQ ID NO: 2949409 - RNA, 19 nt, Artificial Sequence
  Description of Artificial Sequence: Synthetic oligonucleotide
ugcaggagauuuaauuagc

SEQ ID NO: 2949410 - RNA, 19 nt, Artificial Sequence
  Description of Artificial Sequence: Synthetic oligonucleotide
aggaccaucccacaguucu

SEQ ID NO: 2949411 - RNA, 19 nt, Artificial Sequence
  Description of Artificial Sequence: Synthetic oligonucleotide
uccaguuagggcuauugcu

SEQ ID NO: 2949412 - RNA, 19 nt, Artificial Sequence
  Description of Artificial Sequence: Synthetic oligonucleotide
ucuuggaauccacacagau

SEQ ID NO: 2949413 - RNA, 19 nt, Artificial Sequence
  Description of Artificial Sequence: Synthetic oligonucleotide
aggaccaaaaugcuaucag

SEQ ID NO: 2949414 - RNA, 19 nt, Artificial Sequence
  Description of Artificial Sequence: Synthetic oligonucleotide
agggauuagguguugaaau

SEQ ID NO: 2949415 - RNA, 19 nt, Artificial Sequence
  Description of Artificial Sequence: Synthetic oligonucleotide
cugcaggagauuuaauuag

SEQ ID NO: 2949416 - RNA, 19 nt, Artificial Sequence
  Description of Artificial Sequence: Synthetic oligonucleotide
ucuuccagaguauaggcuu

SEQ ID NO: 2949417 - RNA, 19 nt, Artificial Sequence
  Description of Artificial Sequence: Synthetic oligonucleotide
agucauaccaaaccaugcu

SEQ ID NO: 2949418 - RNA, 19 nt, Artificial Sequence
  Description of Artificial Sequence: Synthetic oligonucleotide
augagaaggcuucauccag

SEQ ID NO: 2949419 - RNA, 19 nt, Artificial Sequence
  Description of Artificial Sequence: Synthetic oligonucleotide
agaguauaggcuucgucca

SEQ ID NO: 2949420 - RNA, 19 nt, Artificial Sequence
  Description of Artificial Sequence: Synthetic oligonucleotide
uguagucagagugaagcug

SEQ ID NO: 2949421 - RNA, 19 nt, Artificial Sequence
  Description of Artificial Sequence: Synthetic oligonucleotide
gguguugaaauucuuccag

SEQ ID NO: 2949422 - RNA, 19 nt, Artificial Sequence
  Description of Artificial Sequence: Synthetic oligonucleotide
uuucccagcaaucugcauu

SEQ ID NO: 2949423 - RNA, 19 nt, Artificial Sequence
  Description of Artificial Sequence: Synthetic oligonucleotide
agggcuauugcuccauccg

SEQ ID NO: 2949424 - RNA, 19 nt, Artificial Sequence
  Description of Artificial Sequence: Synthetic oligonucleotide
gcugcauguagucagagug

SEQ ID NO: 2949425 - RNA, 19 nt, Artificial Sequence
  Description of Artificial Sequence: Synthetic oligonucleotide
uuaugggaugguaacugcu

SEQ ID NO: 2949426 - RNA, 19 nt, Artificial Sequence
  Description of Artificial Sequence: Synthetic oligonucleotide
aaccaugcucgucucagcu

SEQ ID NO: 2949427 - RNA, 19 nt, Artificial Sequence
  Description of Artificial Sequence: Synthetic oligonucleotide
uguaucagcugcugaacac

SEQ ID NO: 2949428 - RNA, 19 nt, Artificial Sequence
  Description of Artificial Sequence: Synthetic oligonucleotide
auaggcuucguccacucca

SEQ ID NO: 2949429 - RNA, 19 nt, Artificial Sequence
  Description of Artificial Sequence: Synthetic oligonucleotide
ucucuuaaucucugcagga

SEQ ID NO: 2949430 - RNA, 19 nt, Artificial Sequence
  Description of Artificial Sequence: Synthetic oligonucleotide
cuuaugggaugguaacugc

SEQ ID NO: 2949431 - RNA, 19 nt, Artificial Sequence
  Description of Artificial Sequence: Synthetic oligonucleotide
uauugcuccauccgagcca

SEQ ID NO: 2949432 - RNA, 19 nt, Artificial Sequence
  Description of Artificial Sequence: Synthetic oligonucleotide
uuaauuagccggaggcgcu

SEQ ID NO: 2949433 - RNA, 19 nt, Artificial Sequence
  Description of Artificial Sequence: Synthetic oligonucleotide
accaaaaugcuaucaggcu

SEQ ID NO: 2949434 - RNA, 19 nt, Artificial Sequence
  Description of Artificial Sequence: Synthetic oligonucleotide
ugaaauucuuccagaguau

SEQ ID NO: 2949435 - RNA, 19 nt, Artificial Sequence
  Description of Artificial Sequence: Synthetic oligonucleotide
aggcucuuggaauccacac

SEQ ID NO: 2949436 - RNA, 19 nt, Artificial Sequence
  Description of Artificial Sequence: Synthetic oligonucleotide
uggcuuuggcuucagucag

SEQ ID NO: 2949437 - RNA, 19 nt, Artificial Sequence
  Description of Artificial Sequence: Synthetic oligonucleotide
gaauccacacagauacagg

SEQ ID NO: 2949438 - RNA, 19 nt, Artificial Sequence
  Description of Artificial Sequence: Synthetic oligonucleotide
ugcauucucuuaaucucug

SEQ ID NO: 2949439 - RNA, 19 nt, Artificial Sequence
  Description of Artificial Sequence: Synthetic oligonucleotide
caucccacaguucucgacc

SEQ ID NO: 2949440 - RNA, 19 nt, Artificial Sequence
  Description of Artificial Sequence: Synthetic oligonucleotide
augggaugguaacugcuuc

SEQ ID NO: 2949441 - RNA, 19 nt, Artificial Sequence
  Description of Artificial Sequence: Synthetic oligonucleotide
aagcugugcaugagaaggc

SEQ ID NO: 2949442 - RNA, 19 nt, Artificial Sequence
  Description of Artificial Sequence: Synthetic oligonucleotide
ggaccaaaaugcuaucagg

SEQ ID NO: 2949443 - RNA, 19 nt, Artificial Sequence
  Description of Artificial Sequence: Synthetic oligonucleotide
cagucauaccaaaccaugc

SEQ ID NO: 2949444 - RNA, 19 nt, Artificial Sequence
  Description of Artificial Sequence: Synthetic oligonucleotide
agagcagcucugaaggacc

SEQ ID NO: 2949445 - RNA, 19 nt, Artificial Sequence
  Description of Artificial Sequence: Synthetic oligonucleotide
gcuucauccagucauacca

SEQ ID NO: 2949446 - RNA, 19 nt, Artificial Sequence
  Description of Artificial Sequence: Synthetic oligonucleotide
ucagaugcugcauguaguc

SEQ ID NO: 2949447 - RNA, 19 nt, Artificial Sequence
  Description of Artificial Sequence: Synthetic oligonucleotide
uucuuccagaguauaggcu

SEQ ID NO: 2949448 - RNA, 19 nt, Artificial Sequence
  Description of Artificial Sequence: Synthetic oligonucleotide
gcucuuggaauccacacag

SEQ ID NO: 2949449 - RNA, 19 nt, Artificial Sequence
  Description of Artificial Sequence: Synthetic oligonucleotide
ucauccagucauaccaaac

SEQ ID NO: 2949450 - RNA, 19 nt, Artificial Sequence
  Description of Artificial Sequence: Synthetic oligonucleotide
gcaugagaaggcuucaucc

SEQ ID NO: 2949451 - RNA, 19 nt, Artificial Sequence
  Description of Artificial Sequence: Synthetic oligonucleotide
auccagucauaccaaacca

SEQ ID NO: 2949452 - RNA, 19 nt, Artificial Sequence
  Description of Artificial Sequence: Synthetic oligonucleotide
cuauugcuccauccgagcc

SEQ ID NO: 2949453 - RNA, 19 nt, Artificial Sequence
  Description of Artificial Sequence: Synthetic oligonucleotide
ucucugaggcacgaaaagc

SEQ ID NO: 2949454 - RNA, 19 nt, Artificial Sequence
  Description of Artificial Sequence: Synthetic oligonucleotide
cuaucaggcucuuggaauc

SEQ ID NO: 2949455 - RNA, 19 nt, Artificial Sequence
  Description of Artificial Sequence: Synthetic oligonucleotide
cuaugaaagccucugaugu

SEQ ID NO: 2949456 - RNA, 19 nt, Artificial Sequence
  Description of Artificial Sequence: Synthetic oligonucleotide
ucgaccaggaucucucuga

SEQ ID NO: 2949457 - RNA, 19 nt, Artificial Sequence
  Description of Artificial Sequence: Synthetic oligonucleotide
ucagucagaugcugcaugu

SEQ ID NO: 2949458 - RNA, 19 nt, Artificial Sequence
  Description of Artificial Sequence: Synthetic oligonucleotide
agugaagcugugcaugaga

SEQ ID NO: 2949459 - RNA, 19 nt, Artificial Sequence
  Description of Artificial Sequence: Synthetic oligonucleotide
ugagaaggcuucauccagu

SEQ ID NO: 2949460 - RNA, 19 nt, Artificial Sequence
  Description of Artificial Sequence: Synthetic oligonucleotide
ugguaacugcuucccagag

SEQ ID NO: 2949461 - RNA, 19 nt, Artificial Sequence
  Description of Artificial Sequence: Synthetic oligonucleotide
ugaagcugugcaugagaag

SEQ ID NO: 2949462 - RNA, 19 nt, Artificial Sequence
  Description of Artificial Sequence: Synthetic oligonucleotide
ucguccacuccaguuaggg

SEQ ID NO: 2949463 - RNA, 19 nt, Artificial Sequence
  Description of Artificial Sequence: Synthetic oligonucleotide
caguuagggcuauugcucc

SEQ ID NO: 2949464 - RNA, 19 nt, Artificial Sequence
  Description of Artificial Sequence: Synthetic oligonucleotide
gucagagugaagcugugca

SEQ ID NO: 2949465 - RNA, 19 nt, Artificial Sequence
  Description of Artificial Sequence: Synthetic oligonucleotide
ucucuaugaaagccucuga

SEQ ID NO: 2949466 - RNA, 19 nt, Artificial Sequence
  Description of Artificial Sequence: Synthetic oligonucleotide
gaaggcuucauccagucau

SEQ ID NO: 2949467 - RNA, 19 nt, Artificial Sequence
  Description of Artificial Sequence: Synthetic oligonucleotide
ugaugucaguuucccagca

SEQ ID NO: 2949468 - RNA, 19 nt, Artificial Sequence
  Description of Artificial Sequence: Synthetic oligonucleotide
aaggaccaaaaugcuauca

SEQ ID NO: 2949469 - RNA, 19 nt, Artificial Sequence
  Description of Artificial Sequence: Synthetic oligonucleotide
ugaaagccucugaugucag

SEQ ID NO: 2949470 - RNA, 19 nt, Artificial Sequence
  Description of Artificial Sequence: Synthetic oligonucleotide
uucccagcaaucugcauuc

SEQ ID NO: 2949471 - RNA, 19 nt, Artificial Sequence
  Description of Artificial Sequence: Synthetic oligonucleotide
ugcaugagaaggcuucauc

SEQ ID NO: 2949472 - RNA, 19 nt, Artificial Sequence
  Description of Artificial Sequence: Synthetic oligonucleotide
ugggaugguaacugcuucc

SEQ ID NO: 2949473 - RNA, 19 nt, Artificial Sequence
  Description of Artificial Sequence: Synthetic oligonucleotide
aaagccucugaugucaguu

SEQ ID NO: 2949474 - RNA, 19 nt, Artificial Sequence
  Description of Artificial Sequence: Synthetic oligonucleotide
augaaagccucugauguca

SEQ ID NO: 2949475 - RNA, 19 nt, Artificial Sequence
  Description of Artificial Sequence: Synthetic oligonucleotide
agccucugaugucaguuuc

SEQ ID NO: 2949476 - RNA, 19 nt, Artificial Sequence
  Description of Artificial Sequence: Synthetic oligonucleotide
uucucgaccaggaucucuc

SEQ ID NO: 2949477 - RNA, 19 nt, Artificial Sequence
  Description of Artificial Sequence: Synthetic oligonucleotide
cucugaggcacgaaaagca

SEQ ID NO: 2949478 - RNA, 19 nt, Artificial Sequence
  Description of Artificial Sequence: Synthetic oligonucleotide
uccagucauaccaaaccau

SEQ ID NO: 2949479 - RNA, 19 nt, Artificial Sequence
  Description of Artificial Sequence: Synthetic oligonucleotide
uaugggaugguaacugcuu

SEQ ID NO: 2949480 - RNA, 19 nt, Artificial Sequence
  Description of Artificial Sequence: Synthetic oligonucleotide
ucccagagcagcucugaag

SEQ ID NO: 2949481 - RNA, 19 nt, Artificial Sequence
  Description of Artificial Sequence: Synthetic oligonucleotide
gaccaucccacaguucucg

SEQ ID NO: 2949482 - RNA, 19 nt, Artificial Sequence
  Description of Artificial Sequence: Synthetic oligonucleotide
ggaauccacacagauacag

SEQ ID NO: 2949483 - RNA, 19 nt, Artificial Sequence
  Description of Artificial Sequence: Synthetic oligonucleotide
cugaacacuccgaaccuug

SEQ ID NO: 2949484 - RNA, 19 nt, Artificial Sequence
  Description of Artificial Sequence: Synthetic oligonucleotide
cugaugucaguuucccagc

SEQ ID NO: 2949485 - RNA, 19 nt, Artificial Sequence
  Description of Artificial Sequence: Synthetic oligonucleotide
gucauaccaaaccaugcuc

SEQ ID NO: 2949486 - RNA, 19 nt, Artificial Sequence
  Description of Artificial Sequence: Synthetic oligonucleotide
agagugaagcugugcauga

SEQ ID NO: 2949487 - RNA, 19 nt, Artificial Sequence
  Description of Artificial Sequence: Synthetic oligonucleotide
agguguugaaauucuucca

SEQ ID NO: 2949488 - RNA, 19 nt, Artificial Sequence
  Description of Artificial Sequence: Synthetic oligonucleotide
gagauuuaauuagccggag

SEQ ID NO: 2949489 - RNA, 19 nt, Artificial Sequence
  Description of Artificial Sequence: Synthetic oligonucleotide
uagggcuauugcuccaucc

SEQ ID NO: 2949490 - RNA, 19 nt, Artificial Sequence
  Description of Artificial Sequence: Synthetic oligonucleotide
uaggcuucguccacuccag

SEQ ID NO: 2949491 - RNA, 19 nt, Artificial Sequence
  Description of Artificial Sequence: Synthetic oligonucleotide
ucugaggcacgaaaagcau

SEQ ID NO: 2949492 - RNA, 19 nt, Artificial Sequence
  Description of Artificial Sequence: Synthetic oligonucleotide
caguuuagggauuaggugu

SEQ ID NO: 2949493 - RNA, 19 nt, Artificial Sequence
  Description of Artificial Sequence: Synthetic oligonucleotide
caaaccaugcucgucucag

SEQ ID NO: 2949494 - RNA, 19 nt, Artificial Sequence
  Description of Artificial Sequence: Synthetic oligonucleotide
agaccgaggaccaucccac

SEQ ID NO: 2949495 - RNA, 19 nt, Artificial Sequence
  Description of Artificial Sequence: Synthetic oligonucleotide
cucucugaggcacgaaaag

SEQ ID NO: 2949496 - RNA, 19 nt, Artificial Sequence
  Description of Artificial Sequence: Synthetic oligonucleotide
uuagggauuagguguugaa

SEQ ID NO: 2949497 - RNA, 19 nt, Artificial Sequence
  Description of Artificial Sequence: Synthetic oligonucleotide
ugcugaacacuccgaaccu

SEQ ID NO: 2949498 - RNA, 19 nt, Artificial Sequence
  Description of Artificial Sequence: Synthetic oligonucleotide
ugcuaucaggcucuuggaa

SEQ ID NO: 2949499 - RNA, 19 nt, Artificial Sequence
  Description of Artificial Sequence: Synthetic oligonucleotide
gaggcgcuguaucagcugc

SEQ ID NO: 2949500 - RNA, 19 nt, Artificial Sequence
  Description of Artificial Sequence: Synthetic oligonucleotide
cugugcaugagaaggcuuc

SEQ ID NO: 2949501 - RNA, 19 nt, Artificial Sequence
  Description of Artificial Sequence: Synthetic oligonucleotide
agucagagugaagcugugc

SEQ ID NO: 2949502 - RNA, 19 nt, Artificial Sequence
  Description of Artificial Sequence: Synthetic oligonucleotide
uuguucuugcuccuggcuu

SEQ ID NO: 2949503 - RNA, 19 nt, Artificial Sequence
  Description of Artificial Sequence: Synthetic oligonucleotide
uaucagcugcugaacacuc

SEQ ID NO: 2949504 - RNA, 19 nt, Artificial Sequence
  Description of Artificial Sequence: Synthetic oligonucleotide
uuggcuucagucagaugcu

SEQ ID NO: 2949505 - RNA, 19 nt, Artificial Sequence
  Description of Artificial Sequence: Synthetic oligonucleotide
acacuccgaaccuuguucu

SEQ ID NO: 2949506 - RNA, 19 nt, Artificial Sequence
  Description of Artificial Sequence: Synthetic oligonucleotide
uaaucucugcaggagauuu

SEQ ID NO: 2949507 - RNA, 19 nt, Artificial Sequence
  Description of Artificial Sequence: Synthetic oligonucleotide
ugucaguuucccagcaauc

SEQ ID NO: 2949508 - RNA, 19 nt, Artificial Sequence
  Description of Artificial Sequence: Synthetic oligonucleotide
cauucucuuaaucucugca

SEQ ID NO: 2949509 - RNA, 19 nt, Artificial Sequence
  Description of Artificial Sequence: Synthetic oligonucleotide
auguagucagagugaagcu

SEQ ID NO: 2949510 - RNA, 19 nt, Artificial Sequence
  Description of Artificial Sequence: Synthetic oligonucleotide
ucuugcuccuggcuuuggc

SEQ ID NO: 2949511 - RNA, 19 nt, Artificial Sequence
  Description of Artificial Sequence: Synthetic oligonucleotide
uuuagggauuagguguuga

SEQ ID NO: 2949512 - RNA, 19 nt, Artificial Sequence
  Description of Artificial Sequence: Synthetic oligonucleotide
cuucguccacuccaguuag

SEQ ID NO: 2949513 - RNA, 19 nt, Artificial Sequence
  Description of Artificial Sequence: Synthetic oligonucleotide
augguaacugcuucccaga

SEQ ID NO: 2949514 - RNA, 19 nt, Artificial Sequence
  Description of Artificial Sequence: Synthetic oligonucleotide
uggucucuaugaaagccuc

SEQ ID NO: 2949515 - RNA, 19 nt, Artificial Sequence
  Description of Artificial Sequence: Synthetic oligonucleotide
caugagaaggcuucaucca

SEQ ID NO: 2949516 - RNA, 19 nt, Artificial Sequence
  Description of Artificial Sequence: Synthetic oligonucleotide
cucuuaaucucugcaggag

SEQ ID NO: 2949517 - RNA, 19 nt, Artificial Sequence
  Description of Artificial Sequence: Synthetic oligonucleotide
auugcuccauccgagccag

SEQ ID NO: 2949518 - RNA, 19 nt, Artificial Sequence
  Description of Artificial Sequence: Synthetic oligonucleotide
uauaggcuucguccacucc

SEQ ID NO: 2949519 - RNA, 19 nt, Artificial Sequence
  Description of Artificial Sequence: Synthetic oligonucleotide
cuggcuuuggcuucaguca

SEQ ID NO: 2949520 - RNA, 19 nt, Artificial Sequence
  Description of Artificial Sequence: Synthetic oligonucleotide
auccgagccagaccgagga

SEQ ID NO: 2949521 - RNA, 19 nt, Artificial Sequence
  Description of Artificial Sequence: Synthetic oligonucleotide
uggccuuaugggaugguaa

SEQ ID NO: 2949522 - RNA, 19 nt, Artificial Sequence
  Description of Artificial Sequence: Synthetic oligonucleotide
gucucuaugaaagccucug

SEQ ID NO: 2949523 - RNA, 19 nt, Artificial Sequence
  Description of Artificial Sequence: Synthetic oligonucleotide
ugaacacuccgaaccuugu

SEQ ID NO: 2949524 - RNA, 19 nt, Artificial Sequence
  Description of Artificial Sequence: Synthetic oligonucleotide
cuccgaaccuuguucuugc

SEQ ID NO: 2949525 - RNA, 19 nt, Artificial Sequence
  Description of Artificial Sequence: Synthetic oligonucleotide
uuccagaguauaggcuucg

SEQ ID NO: 2949526 - RNA, 19 nt, Artificial Sequence
  Description of Artificial Sequence: Synthetic oligonucleotide
ucagagugaagcugugcau

SEQ ID NO: 2949527 - RNA, 19 nt, Artificial Sequence
  Description of Artificial Sequence: Synthetic oligonucleotide
cugaggcacgaaaagcaug

SEQ ID NO: 2949528 - RNA, 19 nt, Artificial Sequence
  Description of Artificial Sequence: Synthetic oligonucleotide
ugcauguagucagagugaa

SEQ ID NO: 2949529 - RNA, 19 nt, Artificial Sequence
  Description of Artificial Sequence: Synthetic oligonucleotide
gagaaggcuucauccaguc

SEQ ID NO: 2949530 - RNA, 19 nt, Artificial Sequence
  Description of Artificial Sequence: Synthetic oligonucleotide
uguucuugcuccuggcuuu

SEQ ID NO: 2949531 - RNA, 19 nt, Artificial Sequence
  Description of Artificial Sequence: Synthetic oligonucleotide
uagggauuagguguugaaa

SEQ ID NO: 2949532 - RNA, 19 nt, Artificial Sequence
  Description of Artificial Sequence: Synthetic oligonucleotide
caaaaugcuaucaggcucu

SEQ ID NO: 2949533 - RNA, 19 nt, Artificial Sequence
  Description of Artificial Sequence: Synthetic oligonucleotide
accaaaccaugcucgucuc

SEQ ID NO: 2949534 - RNA, 19 nt, Artificial Sequence
  Description of Artificial Sequence: Synthetic oligonucleotide
cagagugaagcugugcaug

SEQ ID NO: 2949535 - RNA, 19 nt, Artificial Sequence
  Description of Artificial Sequence: Synthetic oligonucleotide
cuccaguuagggcuauugc

SEQ ID NO: 2949536 - RNA, 19 nt, Artificial Sequence
  Description of Artificial Sequence: Synthetic oligonucleotide
aucucucugaggcacgaaa

SEQ ID NO: 2949537 - RNA, 19 nt, Artificial Sequence
  Description of Artificial Sequence: Synthetic oligonucleotide
cgaaccuuguucuugcucc

SEQ ID NO: 2949538 - RNA, 19 nt, Artificial Sequence
  Description of Artificial Sequence: Synthetic oligonucleotide
uucauccagucauaccaaa

SEQ ID NO: 2949539 - RNA, 19 nt, Artificial Sequence
  Description of Artificial Sequence: Synthetic oligonucleotide
ccaaaaugcuaucaggcuc

SEQ ID NO: 2949540 - RNA, 19 nt, Artificial Sequence
  Description of Artificial Sequence: Synthetic oligonucleotide
auaccaaaccaugcucguc

SEQ ID NO: 2949541 - RNA, 19 nt, Artificial Sequence
  Description of Artificial Sequence: Synthetic oligonucleotide
guccacuccaguuagggcu

SEQ ID NO: 2949542 - RNA, 19 nt, Artificial Sequence
  Description of Artificial Sequence: Synthetic oligonucleotide
agcauggccuuaugggaug

SEQ ID NO: 2949543 - RNA, 19 nt, Artificial Sequence
  Description of Artificial Sequence: Synthetic oligonucleotide
accgaggaccaucccacag

SEQ ID NO: 2949544 - RNA, 19 nt, Artificial Sequence
  Description of Artificial Sequence: Synthetic oligonucleotide
agcucugaaggaccaaaau

SEQ ID NO: 2949545 - RNA, 19 nt, Artificial Sequence
  Description of Artificial Sequence: Synthetic oligonucleotide
gaccaggaucucucugagg

SEQ ID NO: 2949546 - RNA, 19 nt, Artificial Sequence
  Description of Artificial Sequence: Synthetic oligonucleotide
uaucaggcucuuggaaucc

SEQ ID NO: 2949547 - RNA, 19 nt, Artificial Sequence
  Description of Artificial Sequence: Synthetic oligonucleotide
cuuccagaguauaggcuuc

SEQ ID NO: 2949548 - RNA, 19 nt, Artificial Sequence
  Description of Artificial Sequence: Synthetic oligonucleotide
gaaggaccaaaaugcuauc

SEQ ID NO: 2949549 - RNA, 19 nt, Artificial Sequence
  Description of Artificial Sequence: Synthetic oligonucleotide
gaguauaggcuucguccac

SEQ ID NO: 2949550 - RNA, 19 nt, Artificial Sequence
  Description of Artificial Sequence: Synthetic oligonucleotide
acuccaguuagggcuauug

SEQ ID NO: 2949551 - RNA, 19 nt, Artificial Sequence
  Description of Artificial Sequence: Synthetic oligonucleotide
ucaggcucuuggaauccac

SEQ ID NO: 2949552 - RNA, 19 nt, Artificial Sequence
  Description of Artificial Sequence: Synthetic oligonucleotide
uucguccacuccaguuagg

SEQ ID NO: 2949553 - RNA, 19 nt, Artificial Sequence
  Description of Artificial Sequence: Synthetic oligonucleotide
aucagcugcugaacacucc

SEQ ID NO: 2949554 - RNA, 19 nt, Artificial Sequence
  Description of Artificial Sequence: Synthetic oligonucleotide
aagccucugaugucaguuu

SEQ ID NO: 2949555 - RNA, 19 nt, Artificial Sequence
  Description of Artificial Sequence: Synthetic oligonucleotide
aagcauggccuuaugggau

SEQ ID NO: 2949556 - RNA, 19 nt, Artificial Sequence
  Description of Artificial Sequence: Synthetic oligonucleotide
ccagucauaccaaaccaug

SEQ ID NO: 2949557 - RNA, 19 nt, Artificial Sequence
  Description of Artificial Sequence: Synthetic oligonucleotide
ugcucgucucagcuuucag

SEQ ID NO: 2949558 - RNA, 19 nt, Artificial Sequence
  Description of Artificial Sequence: Synthetic oligonucleotide
aguauaggcuucguccacu

SEQ ID NO: 2949559 - RNA, 19 nt, Artificial Sequence
  Description of Artificial Sequence: Synthetic oligonucleotide
ccaguuagggcuauugcuc

SEQ ID NO: 2949560 - RNA, 19 nt, Artificial Sequence
  Description of Artificial Sequence: Synthetic oligonucleotide
ugugcaugagaaggcuuca

SEQ ID NO: 2949561 - RNA, 19 nt, Artificial Sequence
  Description of Artificial Sequence: Synthetic oligonucleotide
gauuagguguugaaauucu

SEQ ID NO: 2949562 - RNA, 19 nt, Artificial Sequence
  Description of Artificial Sequence: Synthetic oligonucleotide
uagucagagugaagcugug

SEQ ID NO: 2949563 - RNA, 19 nt, Artificial Sequence
  Description of Artificial Sequence: Synthetic oligonucleotide
uggaauccacacagauaca

SEQ ID NO: 2949564 - RNA, 19 nt, Artificial Sequence
  Description of Artificial Sequence: Synthetic oligonucleotide
ggauuagguguugaaauuc

SEQ ID NO: 2949565 - RNA, 19 nt, Artificial Sequence
  Description of Artificial Sequence: Synthetic oligonucleotide
uaauuagccggaggcgcug

SEQ ID NO: 2949566 - RNA, 19 nt, Artificial Sequence
  Description of Artificial Sequence: Synthetic oligonucleotide
ugcugcauguagucagagu

SEQ ID NO: 2949567 - RNA, 19 nt, Artificial Sequence
  Description of Artificial Sequence: Synthetic oligonucleotide
ggagauuuaauuagccgga

SEQ ID NO: 2949568 - RNA, 19 nt, Artificial Sequence
  Description of Artificial Sequence: Synthetic oligonucleotide
acuccgaaccuuguucuug

SEQ ID NO: 2949569 - RNA, 19 nt, Artificial Sequence
  Description of Artificial Sequence: Synthetic oligonucleotide
cuuggaauccacacagaua

SEQ ID NO: 2949570 - RNA, 19 nt, Artificial Sequence
  Description of Artificial Sequence: Synthetic oligonucleotide
aggcuucauccagucauac

SEQ ID NO: 2949571 - RNA, 19 nt, Artificial Sequence
  Description of Artificial Sequence: Synthetic oligonucleotide
aguuagggcuauugcucca

SEQ ID NO: 2949572 - RNA, 19 nt, Artificial Sequence
  Description of Artificial Sequence: Synthetic oligonucleotide
agcugcugaacacuccgaa

SEQ ID NO: 2949573 - RNA, 19 nt, Artificial Sequence
  Description of Artificial Sequence: Synthetic oligonucleotide
uaacugcuucccagagcag

SEQ ID NO: 2949574 - RNA, 19 nt, Artificial Sequence
  Description of Artificial Sequence: Synthetic oligonucleotide
augcuaucaggcucuugga

SEQ ID NO: 2949575 - RNA, 19 nt, Artificial Sequence
  Description of Artificial Sequence: Synthetic oligonucleotide
aucccacaguucucgacca

SEQ ID NO: 2949576 - RNA, 19 nt, Artificial Sequence
  Description of Artificial Sequence: Synthetic oligonucleotide
uccacuccaguuagggcua

SEQ ID NO: 2949577 - RNA, 19 nt, Artificial Sequence
  Description of Artificial Sequence: Synthetic oligonucleotide
agaaggcuucauccaguca

SEQ ID NO: 2949578 - RNA, 19 nt, Artificial Sequence
  Description of Artificial Sequence: Synthetic oligonucleotide
gguaacugcuucccagagc

SEQ ID NO: 2949579 - RNA, 19 nt, Artificial Sequence
  Description of Artificial Sequence: Synthetic oligonucleotide
gcaaucugcauucucuuaa

SEQ ID NO: 2949580 - RNA, 19 nt, Artificial Sequence
  Description of Artificial Sequence: Synthetic oligonucleotide
aaaugcuaucaggcucuug

SEQ ID NO: 2949581 - RNA, 19 nt, Artificial Sequence
  Description of Artificial Sequence: Synthetic oligonucleotide
cuuaaucucugcaggagau

SEQ ID NO: 2949582 - RNA, 19 nt, Artificial Sequence
  Description of Artificial Sequence: Synthetic oligonucleotide
aucucugcaggagauuuaa

SEQ ID NO: 2949583 - RNA, 19 nt, Artificial Sequence
  Description of Artificial Sequence: Synthetic oligonucleotide
gcaggagauuuaauuagcc

SEQ ID NO: 2949584 - RNA, 19 nt, Artificial Sequence
  Description of Artificial Sequence: Synthetic oligonucleotide
cauccgagccagaccgagg

SEQ ID NO: 2949585 - RNA, 19 nt, Artificial Sequence
  Description of Artificial Sequence: Synthetic oligonucleotide
cuguaucagcugcugaaca

SEQ ID NO: 2949586 - RNA, 19 nt, Artificial Sequence
  Description of Artificial Sequence: Synthetic oligonucleotide
ugcuccauccgagccagac

SEQ ID NO: 2949587 - RNA, 19 nt, Artificial Sequence
  Description of Artificial Sequence: Synthetic oligonucleotide
guauaggcuucguccacuc

SEQ ID NO: 2949588 - RNA, 19 nt, Artificial Sequence
  Description of Artificial Sequence: Synthetic oligonucleotide
cugcauguagucagaguga

SEQ ID NO: 2949589 - RNA, 19 nt, Artificial Sequence
  Description of Artificial Sequence: Synthetic oligonucleotide
ccuggcuuuggcuucaguc

SEQ ID NO: 2949590 - RNA, 19 nt, Artificial Sequence
  Description of Artificial Sequence: Synthetic oligonucleotide
gcuauugcuccauccgagc

SEQ ID NO: 2949591 - RNA, 19 nt, Artificial Sequence
  Description of Artificial Sequence: Synthetic oligonucleotide
aauuagccggaggcgcugu

SEQ ID NO: 2949592 - RNA, 19 nt, Artificial Sequence
  Description of Artificial Sequence: Synthetic oligonucleotide
uuagggcuauugcuccauc

SEQ ID NO: 2949593 - RNA, 19 nt, Artificial Sequence
  Description of Artificial Sequence: Synthetic oligonucleotide
aaccuuguucuugcuccug

SEQ ID NO: 2949594 - RNA, 19 nt, Artificial Sequence
  Description of Artificial Sequence: Synthetic oligonucleotide
guagucagagugaagcugu

SEQ ID NO: 2949595 - RNA, 19 nt, Artificial Sequence
  Description of Artificial Sequence: Synthetic oligonucleotide
agccagaccgaggaccauc

SEQ ID NO: 2949596 - RNA, 19 nt, Artificial Sequence
  Description of Artificial Sequence: Synthetic oligonucleotide
gagugaagcugugcaugag

SEQ ID NO: 2949597 - RNA, 19 nt, Artificial Sequence
  Description of Artificial Sequence: Synthetic oligonucleotide
aguuuagggauuagguguu

SEQ ID NO: 2949598 - RNA, 19 nt, Artificial Sequence
  Description of Artificial Sequence: Synthetic oligonucleotide
ucccacaguucucgaccag

SEQ ID NO: 2949599 - RNA, 19 nt, Artificial Sequence
  Description of Artificial Sequence: Synthetic oligonucleotide
ggccuuaugggaugguaac

SEQ ID NO: 2949600 - RNA, 19 nt, Artificial Sequence
  Description of Artificial Sequence: Synthetic oligonucleotide
cagcuuucaguuuagggau

SEQ ID NO: 2949601 - RNA, 19 nt, Artificial Sequence
  Description of Artificial Sequence: Synthetic oligonucleotide
cugaaggaccaaaaugcua

SEQ ID NO: 2949602 - RNA, 19 nt, Artificial Sequence
  Description of Artificial Sequence: Synthetic oligonucleotide
ccuuaugggaugguaacug

SEQ ID NO: 2949603 - RNA, 19 nt, Artificial Sequence
  Description of Artificial Sequence: Synthetic oligonucleotide
uuaaucucugcaggagauu

SEQ ID NO: 2949604 - RNA, 19 nt, Artificial Sequence
  Description of Artificial Sequence: Synthetic oligonucleotide
gugaagcugugcaugagaa

SEQ ID NO: 2949605 - RNA, 19 nt, Artificial Sequence
  Description of Artificial Sequence: Synthetic oligonucleotide
uagccggaggcgcuguauc

SEQ ID NO: 2949606 - RNA, 19 nt, Artificial Sequence
  Description of Artificial Sequence: Synthetic oligonucleotide
gaugcugcauguagucaga

SEQ ID NO: 2949607 - RNA, 19 nt, Artificial Sequence
  Description of Artificial Sequence: Synthetic oligonucleotide
gcuucagucagaugcugca

SEQ ID NO: 2949608 - RNA, 19 nt, Artificial Sequence
  Description of Artificial Sequence: Synthetic oligonucleotide
ucucgaccaggaucucucu

SEQ ID NO: 2949609 - RNA, 19 nt, Artificial Sequence
  Description of Artificial Sequence: Synthetic oligonucleotide
agcugugcaugagaaggcu

SEQ ID NO: 2949610 - RNA, 19 nt, Artificial Sequence
  Description of Artificial Sequence: Synthetic oligonucleotide
cagaccgaggaccauccca

SEQ ID NO: 2949611 - RNA, 19 nt, Artificial Sequence
  Description of Artificial Sequence: Synthetic oligonucleotide
ggcuauugcuccauccgag

SEQ ID NO: 2949612 - RNA, 19 nt, Artificial Sequence
  Description of Artificial Sequence: Synthetic oligonucleotide
acgaaaagcauggccuuau

SEQ ID NO: 2949613 - RNA, 19 nt, Artificial Sequence
  Description of Artificial Sequence: Synthetic oligonucleotide
cucgaccaggaucucucug

SEQ ID NO: 2949614 - RNA, 19 nt, Artificial Sequence
  Description of Artificial Sequence: Synthetic oligonucleotide
ucucugcaggagauuuaau

SEQ ID NO: 2949615 - RNA, 19 nt, Artificial Sequence
  Description of Artificial Sequence: Synthetic oligonucleotide
ggcuucauccagucauacc

SEQ ID NO: 2949616 - RNA, 19 nt, Artificial Sequence
  Description of Artificial Sequence: Synthetic oligonucleotide
gucaguuucccagcaaucu

SEQ ID NO: 2949617 - RNA, 19 nt, Artificial Sequence
  Description of Artificial Sequence: Synthetic oligonucleotide
gggaugguaacugcuuccc

SEQ ID NO: 2949618 - RNA, 19 nt, Artificial Sequence
  Description of Artificial Sequence: Synthetic oligonucleotide
guuuagggauuagguguug

SEQ ID NO: 2949619 - RNA, 19 nt, Artificial Sequence
  Description of Artificial Sequence: Synthetic oligonucleotide
gcauucucuuaaucucugc

SEQ ID NO: 2949620 - RNA, 19 nt, Artificial Sequence
  Description of Artificial Sequence: Synthetic oligonucleotide
uggcuucagucagaugcug

SEQ ID NO: 2949621 - RNA, 19 nt, Artificial Sequence
  Description of Artificial Sequence: Synthetic oligonucleotide
augcugcauguagucagag

SEQ ID NO: 2949622 - RNA, 19 nt, Artificial Sequence
  Description of Artificial Sequence: Synthetic oligonucleotide
agccggaggcgcuguauca

SEQ ID NO: 2949623 - RNA, 19 nt, Artificial Sequence
  Description of Artificial Sequence: Synthetic oligonucleotide
cucgucucagcuuucaguu

SEQ ID NO: 2949624 - RNA, 19 nt, Artificial Sequence
  Description of Artificial Sequence: Synthetic oligonucleotide
ggcacgaaaagcauggccu

SEQ ID NO: 2949625 - RNA, 19 nt, Artificial Sequence
  Description of Artificial Sequence: Synthetic oligonucleotide
auuagguguugaaauucuu

SEQ ID NO: 2949626 - RNA, 19 nt, Artificial Sequence
  Description of Artificial Sequence: Synthetic oligonucleotide
aaucucugcaggagauuua

SEQ ID NO: 2949627 - RNA, 19 nt, Artificial Sequence
  Description of Artificial Sequence: Synthetic oligonucleotide
cugcauucucuuaaucucu

SEQ ID NO: 2949628 - RNA, 19 nt, Artificial Sequence
  Description of Artificial Sequence: Synthetic oligonucleotide
aaaaugcuaucaggcucuu

SEQ ID NO: 2949629 - RNA, 19 nt, Artificial Sequence
  Description of Artificial Sequence: Synthetic oligonucleotide
gucucagcuuucaguuuag

SEQ ID NO: 2949630 - RNA, 19 nt, Artificial Sequence
  Description of Artificial Sequence: Synthetic oligonucleotide
uccauccgagccagaccga

SEQ ID NO: 2949631 - RNA, 19 nt, Artificial Sequence
  Description of Artificial Sequence: Synthetic oligonucleotide
gcugcugaacacuccgaac

SEQ ID NO: 2949632 - RNA, 19 nt, Artificial Sequence
  Description of Artificial Sequence: Synthetic oligonucleotide
aaggcuucauccagucaua

SEQ ID NO: 2949633 - RNA, 19 nt, Artificial Sequence
  Description of Artificial Sequence: Synthetic oligonucleotide
gaggcacgaaaagcauggc

SEQ ID NO: 2949634 - RNA, 19 nt, Artificial Sequence
  Description of Artificial Sequence: Synthetic oligonucleotide
guaucagcugcugaacacu

SEQ ID NO: 2949635 - RNA, 19 nt, Artificial Sequence
  Description of Artificial Sequence: Synthetic oligonucleotide
ggcucuuggaauccacaca

SEQ ID NO: 2949636 - RNA, 19 nt, Artificial Sequence
  Description of Artificial Sequence: Synthetic oligonucleotide
cauaccaaaccaugcucgu

SEQ ID NO: 2949637 - RNA, 19 nt, Artificial Sequence
  Description of Artificial Sequence: Synthetic oligonucleotide
auccacacagauacaggaa

SEQ ID NO: 2949638 - RNA, 19 nt, Artificial Sequence
  Description of Artificial Sequence: Synthetic oligonucleotide
uuagccggaggcgcuguau

SEQ ID NO: 2949639 - RNA, 19 nt, Artificial Sequence
  Description of Artificial Sequence: Synthetic oligonucleotide
caggcucuuggaauccaca

SEQ ID NO: 2949640 - RNA, 19 nt, Artificial Sequence
  Description of Artificial Sequence: Synthetic oligonucleotide
ucgucucagcuuucaguuu

SEQ ID NO: 2949641 - RNA, 19 nt, Artificial Sequence
  Description of Artificial Sequence: Synthetic oligonucleotide
accaugcucgucucagcuu

SEQ ID NO: 2949642 - RNA, 19 nt, Artificial Sequence
  Description of Artificial Sequence: Synthetic oligonucleotide
cuugcuccuggcuuuggcu

SEQ ID NO: 2949643 - RNA, 19 nt, Artificial Sequence
  Description of Artificial Sequence: Synthetic oligonucleotide
uccagaguauaggcuucgu

SEQ ID NO: 2949644 - RNA, 19 nt, Artificial Sequence
  Description of Artificial Sequence: Synthetic oligonucleotide
accaucccacaguucucga

SEQ ID NO: 2949645 - RNA, 19 nt, Artificial Sequence
  Description of Artificial Sequence: Synthetic oligonucleotide
gaaccuuguucuugcuccu

SEQ ID NO: 2949646 - RNA, 19 nt, Artificial Sequence
  Description of Artificial Sequence: Synthetic oligonucleotide
cucugaugucaguuuccca

SEQ ID NO: 2949647 - RNA, 19 nt, Artificial Sequence
  Description of Artificial Sequence: Synthetic oligonucleotide
cucuuggaauccacacaga

SEQ ID NO: 2949648 - RNA, 19 nt, Artificial Sequence
  Description of Artificial Sequence: Synthetic oligonucleotide
gcuguaucagcugcugaac

SEQ ID NO: 2949649 - RNA, 19 nt, Artificial Sequence
  Description of Artificial Sequence: Synthetic oligonucleotide
aguucucgaccaggaucuc

SEQ ID NO: 2949650 - RNA, 19 nt, Artificial Sequence
  Description of Artificial Sequence: Synthetic oligonucleotide
gcuucguccacuccaguua

SEQ ID NO: 2949651 - RNA, 19 nt, Artificial Sequence
  Description of Artificial Sequence: Synthetic oligonucleotide
ggcuucagucagaugcugc

SEQ ID NO: 2949652 - RNA, 19 nt, Artificial Sequence
  Description of Artificial Sequence: Synthetic oligonucleotide
gggcuauugcuccauccga

SEQ ID NO: 2949653 - RNA, 19 nt, Artificial Sequence
  Description of Artificial Sequence: Synthetic oligonucleotide
ggaggcgcuguaucagcug

SEQ ID NO: 2949654 - RNA, 19 nt, Artificial Sequence
  Description of Artificial Sequence: Synthetic oligonucleotide
aucaggcucuuggaaucca

SEQ ID NO: 2949655 - RNA, 19 nt, Artificial Sequence
  Description of Artificial Sequence: Synthetic oligonucleotide
gucagaugcugcauguagu

SEQ ID NO: 2949656 - RNA, 19 nt, Artificial Sequence
  Description of Artificial Sequence: Synthetic oligonucleotide
caugcucgucucagcuuuc

SEQ ID NO: 2949657 - RNA, 19 nt, Artificial Sequence
  Description of Artificial Sequence: Synthetic oligonucleotide
ccagaguauaggcuucguc

SEQ ID NO: 2949658 - RNA, 19 nt, Artificial Sequence
  Description of Artificial Sequence: Synthetic oligonucleotide
cccacaguucucgaccagg

SEQ ID NO: 2949659 - RNA, 19 nt, Artificial Sequence
  Description of Artificial Sequence: Synthetic oligonucleotide
gcuccauccgagccagacc

SEQ ID NO: 2949660 - RNA, 19 nt, Artificial Sequence
  Description of Artificial Sequence: Synthetic oligonucleotide
auggccuuaugggauggua

SEQ ID NO: 2949661 - RNA, 19 nt, Artificial Sequence
  Description of Artificial Sequence: Synthetic oligonucleotide
gagcagcucugaaggacca

SEQ ID NO: 2949662 - RNA, 19 nt, Artificial Sequence
  Description of Artificial Sequence: Synthetic oligonucleotide
cagaugcugcauguaguca

SEQ ID NO: 2949663 - RNA, 19 nt, Artificial Sequence
  Description of Artificial Sequence: Synthetic oligonucleotide
gaaagccucugaugucagu

SEQ ID NO: 2949664 - RNA, 19 nt, Artificial Sequence
  Description of Artificial Sequence: Synthetic oligonucleotide
ccagcaaucugcauucucu

SEQ ID NO: 2949665 - RNA, 19 nt, Artificial Sequence
  Description of Artificial Sequence: Synthetic oligonucleotide
ccgagccagaccgaggacc

SEQ ID NO: 2949666 - RNA, 19 nt, Artificial Sequence
  Description of Artificial Sequence: Synthetic oligonucleotide
cagcucugaaggaccaaaa

SEQ ID NO: 2949667 - RNA, 19 nt, Artificial Sequence
  Description of Artificial Sequence: Synthetic oligonucleotide
ggaugguaacugcuuccca

SEQ ID NO: 2949668 - RNA, 19 nt, Artificial Sequence
  Description of Artificial Sequence: Synthetic oligonucleotide
gaccgaggaccaucccaca

SEQ ID NO: 2949669 - RNA, 19 nt, Artificial Sequence
  Description of Artificial Sequence: Synthetic oligonucleotide
augcucgucucagcuuuca

SEQ ID NO: 2949670 - RNA, 19 nt, Artificial Sequence
  Description of Artificial Sequence: Synthetic oligonucleotide
gcauggccuuaugggaugg

SEQ ID NO: 2949671 - RNA, 19 nt, Artificial Sequence
  Description of Artificial Sequence: Synthetic oligonucleotide
gaacacuccgaaccuuguu

SEQ ID NO: 2949672 - RNA, 19 nt, Artificial Sequence
  Description of Artificial Sequence: Synthetic oligonucleotide
ccaucccacaguucucgac

SEQ ID NO: 2949673 - RNA, 19 nt, Artificial Sequence
  Description of Artificial Sequence: Synthetic oligonucleotide
gccagaccgaggaccaucc

SEQ ID NO: 2949674 - RNA, 19 nt, Artificial Sequence
  Description of Artificial Sequence: Synthetic oligonucleotide
auuagccggaggcgcugua

SEQ ID NO: 2949675 - RNA, 19 nt, Artificial Sequence
  Description of Artificial Sequence: Synthetic oligonucleotide
gcauguagucagagugaag

SEQ ID NO: 2949676 - RNA, 19 nt, Artificial Sequence
  Description of Artificial Sequence: Synthetic oligonucleotide
gccucugaugucaguuucc

SEQ ID NO: 2949677 - RNA, 19 nt, Artificial Sequence
  Description of Artificial Sequence: Synthetic oligonucleotide
gggauuagguguugaaauu

SEQ ID NO: 2949678 - RNA, 19 nt, Artificial Sequence
  Description of Artificial Sequence: Synthetic oligonucleotide
aggcuucguccacuccagu

SEQ ID NO: 2949679 - RNA, 19 nt, Artificial Sequence
  Description of Artificial Sequence: Synthetic oligonucleotide
ggcgcuguaucagcugcug

SEQ ID NO: 2949680 - RNA, 19 nt, Artificial Sequence
  Description of Artificial Sequence: Synthetic oligonucleotide
cagcugcugaacacuccga

SEQ ID NO: 2949681 - RNA, 19 nt, Artificial Sequence
  Description of Artificial Sequence: Synthetic oligonucleotide
gaggaccaucccacaguuc

SEQ ID NO: 2949682 - RNA, 19 nt, Artificial Sequence
  Description of Artificial Sequence: Synthetic oligonucleotide
gcucgucucagcuuucagu

SEQ ID NO: 2949683 - RNA, 19 nt, Artificial Sequence
  Description of Artificial Sequence: Synthetic oligonucleotide
ccggaggcgcuguaucagc

SEQ ID NO: 2949684 - RNA, 19 nt, Artificial Sequence
  Description of Artificial Sequence: Synthetic oligonucleotide
ucccagcaaucugcauucu

SEQ ID NO: 2949685 - RNA, 19 nt, Artificial Sequence
  Description of Artificial Sequence: Synthetic oligonucleotide
ccauccgagccagaccgag

SEQ ID NO: 2949686 - RNA, 19 nt, Artificial Sequence
  Description of Artificial Sequence: Synthetic oligonucleotide
cguccacuccaguuagggc

SEQ ID NO: 2949687 - RNA, 19 nt, Artificial Sequence
  Description of Artificial Sequence: Synthetic oligonucleotide
gaucucucugaggcacgaa

SEQ ID NO: 2949688 - RNA, 19 nt, Artificial Sequence
  Description of Artificial Sequence: Synthetic oligonucleotide
gccggaggcgcuguaucag

SEQ ID NO: 2949689 - RNA, 19 nt, Artificial Sequence
  Description of Artificial Sequence: Synthetic oligonucleotide
cccagcaaucugcauucuc

SEQ ID NO: 2949690 - RNA, 19 nt, Artificial Sequence
  Description of Artificial Sequence: Synthetic oligonucleotide
gcagcucugaaggaccaaa

SEQ ID NO: 2949691 - RNA, 19 nt, Artificial Sequence
  Description of Artificial Sequence: Synthetic oligonucleotide
gcuuucaguuuagggauua

SEQ ID NO: 2949692 - RNA, 19 nt, Artificial Sequence
  Description of Artificial Sequence: Synthetic oligonucleotide
guuagggcuauugcuccau

SEQ ID NO: 2949693 - RNA, 19 nt, Artificial Sequence
  Description of Artificial Sequence: Synthetic oligonucleotide
cgaccaggaucucucugag

SEQ ID NO: 2949694 - RNA, 19 nt, Artificial Sequence
  Description of Artificial Sequence: Synthetic oligonucleotide
guucucgaccaggaucucu

SEQ ID NO: 2949695 - RNA, 19 nt, Artificial Sequence
  Description of Artificial Sequence: Synthetic oligonucleotide
cagcaaucugcauucucuu

SEQ ID NO: 2949696 - RNA, 19 nt, Artificial Sequence
  Description of Artificial Sequence: Synthetic oligonucleotide
cacgaaaagcauggccuua

SEQ ID NO: 2949697 - RNA, 19 nt, Artificial Sequence
  Description of Artificial Sequence: Synthetic oligonucleotide
agcagcucugaaggaccaa

SEQ ID NO: 2949698 - RNA, 19 nt, Artificial Sequence
  Description of Artificial Sequence: Synthetic oligonucleotide
cgaaaagcauggccuuaug

SEQ ID NO: 2949699 - RNA, 19 nt, Artificial Sequence
  Description of Artificial Sequence: Synthetic oligonucleotide
aggcgcuguaucagcugcu

SEQ ID NO: 2949700 - RNA, 19 nt, Artificial Sequence
  Description of Artificial Sequence: Synthetic oligonucleotide
cgcuguaucagcugcugaa

SEQ ID NO: 2949701 - RNA, 19 nt, Artificial Sequence
  Description of Artificial Sequence: Synthetic oligonucleotide
guuucccagcaaucugcau

SEQ ID NO: 2949702 - RNA, 19 nt, Artificial Sequence
  Description of Artificial Sequence: Synthetic oligonucleotide
cgucucagcuuucaguuua

SEQ ID NO: 2949703 - RNA, 19 nt, Artificial Sequence
  Description of Artificial Sequence: Synthetic oligonucleotide
cuucagucagaugcugcau

SEQ ID NO: 2949704 - RNA, 19 nt, Artificial Sequence
  Description of Artificial Sequence: Synthetic oligonucleotide
ggaccaucccacaguucuc

SEQ ID NO: 2949705 - RNA, 19 nt, Artificial Sequence
  Description of Artificial Sequence: Synthetic oligonucleotide
gcgcuguaucagcugcuga

SEQ ID NO: 2949706 - RNA, 19 nt, Artificial Sequence
  Description of Artificial Sequence: Synthetic oligonucleotide
ccaaaccaugcucgucuca

SEQ ID NO: 2949707 - RNA, 19 nt, Artificial Sequence
  Description of Artificial Sequence: Synthetic oligonucleotide
gcacgaaaagcauggccuu

SEQ ID NO: 2949708 - RNA, 19 nt, Artificial Sequence
  Description of Artificial Sequence: Synthetic oligonucleotide
ggcuucguccacuccaguu

SEQ ID NO: 2949709 - RNA, 19 nt, Artificial Sequence
  Description of Artificial Sequence: Synthetic oligonucleotide
cacaguucucgaccaggau

SEQ ID NO: 2949710 - RNA, 19 nt, Artificial Sequence
  Description of Artificial Sequence: Synthetic oligonucleotide
cgagccagaccgaggacca

SEQ ID NO: 2949711 - RNA, 19 nt, Artificial Sequence
  Description of Artificial Sequence: Synthetic oligonucleotide
cagucagaugcugcaugua

SEQ ID NO: 2949712 - RNA, 19 nt, Artificial Sequence
  Description of Artificial Sequence: Synthetic oligonucleotide
ggcuuuggcuucagucaga

SEQ ID NO: 2949713 - RNA, 19 nt, Artificial Sequence
  Description of Artificial Sequence: Synthetic oligonucleotide
cuccuggcuuuggcuucag

SEQ ID NO: 2949714 - RNA, 19 nt, Artificial Sequence
  Description of Artificial Sequence: Synthetic oligonucleotide
gccuuaugggaugguaacu

SEQ ID NO: 2949715 - RNA, 19 nt, Artificial Sequence
  Description of Artificial Sequence: Synthetic oligonucleotide
ccaugcucgucucagcuuu

SEQ ID NO: 2949716 - RNA, 19 nt, Artificial Sequence
  Description of Artificial Sequence: Synthetic oligonucleotide
gugcaugagaaggcuucau

SEQ ID NO: 2949717 - RNA, 19 nt, Artificial Sequence
  Description of Artificial Sequence: Synthetic oligonucleotide
gcuccuggcuuuggcuuca

SEQ ID NO: 2949718 - RNA, 19 nt, Artificial Sequence
  Description of Artificial Sequence: Synthetic oligonucleotide
cacuccgaaccuuguucuu

SEQ ID NO: 2949719 - RNA, 19 nt, Artificial Sequence
  Description of Artificial Sequence: Synthetic oligonucleotide
ccgaggaccaucccacagu

SEQ ID NO: 2949720 - RNA, 19 nt, Artificial Sequence
  Description of Artificial Sequence: Synthetic oligonucleotide
gcugaacacuccgaaccuu

SEQ ID NO: 2949721 - RNA, 19 nt, Artificial Sequence
  Description of Artificial Sequence: Synthetic oligonucleotide
gcugugcaugagaaggcuu

SEQ ID NO: 2949722 - RNA, 19 nt, Artificial Sequence
  Description of Artificial Sequence: Synthetic oligonucleotide
gagccagaccgaggaccau

SEQ ID NO: 2949723 - RNA, 19 nt, Artificial Sequence
  Description of Artificial Sequence: Synthetic oligonucleotide
cgaggaccaucccacaguu

SEQ ID NO: 2949724 - RNA, 19 nt, Artificial Sequence
  Description of Artificial Sequence: Synthetic oligonucleotide
cacuccaguuagggcuauu

SEQ ID NO: 2949725 - RNA, 19 nt, Artificial Sequence
  Description of Artificial Sequence: Synthetic oligonucleotide
ccacuccaguuagggcuau

SEQ ID NO: 2949726 - RNA, 19 nt, Artificial Sequence
  Description of Artificial Sequence: Synthetic oligonucleotide
auuagcauagcccagguag

SEQ ID NO: 2949727 - RNA, 19 nt, Artificial Sequence
  Description of Artificial Sequence: Synthetic oligonucleotide
aauagugaagccugggaug

SEQ ID NO: 2949728 - RNA, 19 nt, Artificial Sequence
  Description of Artificial Sequence: Synthetic oligonucleotide
uuugcggacagucaggggc

SEQ ID NO: 2949729 - RNA, 19 nt, Artificial Sequence
  Description of Artificial Sequence: Synthetic oligonucleotide
uuugucuauggcaucagcc

SEQ ID NO: 2949730 - RNA, 19 nt, Artificial Sequence
  Description of Artificial Sequence: Synthetic oligonucleotide
gaaggugucuaccacagcc

SEQ ID NO: 2949731 - RNA, 19 nt, Artificial Sequence
  Description of Artificial Sequence: Synthetic oligonucleotide
agacgguuaauagugaagc

SEQ ID NO: 2949732 - RNA, 19 nt, Artificial Sequence
  Description of Artificial Sequence: Synthetic oligonucleotide
acuucauuagcauagccca

SEQ ID NO: 2949733 - RNA, 19 nt, Artificial Sequence
  Description of Artificial Sequence: Synthetic oligonucleotide
ucuacugaccugucaaugg

SEQ ID NO: 2949734 - RNA, 19 nt, Artificial Sequence
  Description of Artificial Sequence: Synthetic oligonucleotide
uccauuugcggacagucag

SEQ ID NO: 2949735 - RNA, 19 nt, Artificial Sequence
  Description of Artificial Sequence: Synthetic oligonucleotide
uuaauagugaagccuggga

SEQ ID NO: 2949736 - RNA, 19 nt, Artificial Sequence
  Description of Artificial Sequence: Synthetic oligonucleotide
aaugggguggacgaugacg

SEQ ID NO: 2949737 - RNA, 19 nt, Artificial Sequence
  Description of Artificial Sequence: Synthetic oligonucleotide
uuuacgaaggcuggaaucc

SEQ ID NO: 2949738 - RNA, 19 nt, Artificial Sequence
  Description of Artificial Sequence: Synthetic oligonucleotide
uaguacgcaggccauagag

SEQ ID NO: 2949739 - RNA, 19 nt, Artificial Sequence
  Description of Artificial Sequence: Synthetic oligonucleotide
ggaggcagcacacagacgg

SEQ ID NO: 2949740 - RNA, 19 nt, Artificial Sequence
  Description of Artificial Sequence: Synthetic oligonucleotide
guacgcaggccauagaggg

SEQ ID NO: 2949741 - RNA, 19 nt, Artificial Sequence
  Description of Artificial Sequence: Synthetic oligonucleotide
uaauagugaagccugggau

SEQ ID NO: 2949742 - RNA, 19 nt, Artificial Sequence
  Description of Artificial Sequence: Synthetic oligonucleotide
cacuucauuagcauagccc

SEQ ID NO: 2949743 - RNA, 19 nt, Artificial Sequence
  Description of Artificial Sequence: Synthetic oligonucleotide
uggacgaugacggggaugg

SEQ ID NO: 2949744 - RNA, 19 nt, Artificial Sequence
  Description of Artificial Sequence: Synthetic oligonucleotide
ugucuauggcaucagccag

SEQ ID NO: 2949745 - RNA, 19 nt, Artificial Sequence
  Description of Artificial Sequence: Synthetic oligonucleotide
guagaggucgcacucggcg

SEQ ID NO: 2949746 - RNA, 19 nt, Artificial Sequence
  Description of Artificial Sequence: Synthetic oligonucleotide
aagucuacugaccugucaa

SEQ ID NO: 2949747 - RNA, 19 nt, Artificial Sequence
  Description of Artificial Sequence: Synthetic oligonucleotide
ucuaccacagccagggcca

SEQ ID NO: 2949748 - RNA, 19 nt, Artificial Sequence
  Description of Artificial Sequence: Synthetic oligonucleotide
uucauuagcauagcccagg

SEQ ID NO: 2949749 - RNA, 19 nt, Artificial Sequence
  Description of Artificial Sequence: Synthetic oligonucleotide
ugaccugucaauggggugg

SEQ ID NO: 2949750 - RNA, 19 nt, Artificial Sequence
  Description of Artificial Sequence: Synthetic oligonucleotide
acagucaggggccagcggg

SEQ ID NO: 2949751 - RNA, 19 nt, Artificial Sequence
  Description of Artificial Sequence: Synthetic oligonucleotide
uugucuauggcaucagcca

SEQ ID NO: 2949752 - RNA, 19 nt, Artificial Sequence
  Description of Artificial Sequence: Synthetic oligonucleotide
auagugaagccugggaugg

SEQ ID NO: 2949753 - RNA, 19 nt, Artificial Sequence
  Description of Artificial Sequence: Synthetic oligonucleotide
uuagcauagcccagguagc

SEQ ID NO: 2949754 - RNA, 19 nt, Artificial Sequence
  Description of Artificial Sequence: Synthetic oligonucleotide
uacugaccugucaaugggg

SEQ ID NO: 2949755 - RNA, 19 nt, Artificial Sequence
  Description of Artificial Sequence: Synthetic oligonucleotide
gugucuaccacagccaggg

SEQ ID NO: 2949756 - RNA, 19 nt, Artificial Sequence
  Description of Artificial Sequence: Synthetic oligonucleotide
uucuucagggcuuggcucc

SEQ ID NO: 2949757 - RNA, 19 nt, Artificial Sequence
  Description of Artificial Sequence: Synthetic oligonucleotide
agcucagccacaccacagc

SEQ ID NO: 2949758 - RNA, 19 nt, Artificial Sequence
  Description of Artificial Sequence: Synthetic oligonucleotide
acacagacgguuaauagug

SEQ ID NO: 2949759 - RNA, 19 nt, Artificial Sequence
  Description of Artificial Sequence: Synthetic oligonucleotide
cuacugaccugucaauggg

SEQ ID NO: 2949760 - RNA, 19 nt, Artificial Sequence
  Description of Artificial Sequence: Synthetic oligonucleotide
gaaggcuggaauccaggag

SEQ ID NO: 2949761 - RNA, 19 nt, Artificial Sequence
  Description of Artificial Sequence: Synthetic oligonucleotide
agaggucgcacucggcgcc

SEQ ID NO: 2949762 - RNA, 19 nt, Artificial Sequence
  Description of Artificial Sequence: Synthetic oligonucleotide
guuaauagugaagccuggg

SEQ ID NO: 2949763 - RNA, 19 nt, Artificial Sequence
  Description of Artificial Sequence: Synthetic oligonucleotide
cacgccauagcucagccac

SEQ ID NO: 2949764 - RNA, 19 nt, Artificial Sequence
  Description of Artificial Sequence: Synthetic oligonucleotide
agcuguaggcaccaaggag

SEQ ID NO: 2949765 - RNA, 19 nt, Artificial Sequence
  Description of Artificial Sequence: Synthetic oligonucleotide
cuugccuuugucuauggca

SEQ ID NO: 2949766 - RNA, 19 nt, Artificial Sequence
  Description of Artificial Sequence: Synthetic oligonucleotide
gacgguuaauagugaagcc

SEQ ID NO: 2949767 - RNA, 19 nt, Artificial Sequence
  Description of Artificial Sequence: Synthetic oligonucleotide
ucaaugggguggacgauga

SEQ ID NO: 2949768 - RNA, 19 nt, Artificial Sequence
  Description of Artificial Sequence: Synthetic oligonucleotide
cagccagccacguaggagc

SEQ ID NO: 2949769 - RNA, 19 nt, Artificial Sequence
  Description of Artificial Sequence: Synthetic oligonucleotide
guuuacgaaggcuggaauc

SEQ ID NO: 2949770 - RNA, 19 nt, Artificial Sequence
  Description of Artificial Sequence: Synthetic oligonucleotide
agcucgacacgccauagcu

SEQ ID NO: 2949771 - RNA, 19 nt, Artificial Sequence
  Description of Artificial Sequence: Synthetic oligonucleotide
cuguaggcaccaaggagcg

SEQ ID NO: 2949772 - RNA, 19 nt, Artificial Sequence
  Description of Artificial Sequence: Synthetic oligonucleotide
augggguggacgaugacgg

SEQ ID NO: 2949773 - RNA, 19 nt, Artificial Sequence
  Description of Artificial Sequence: Synthetic oligonucleotide
gucuaccacagccagggcc

SEQ ID NO: 2949774 - RNA, 19 nt, Artificial Sequence
  Description of Artificial Sequence: Synthetic oligonucleotide
acacgaaggugucuaccac

SEQ ID NO: 2949775 - RNA, 19 nt, Artificial Sequence
  Description of Artificial Sequence: Synthetic oligonucleotide
acgguuaauagugaagccu

SEQ ID NO: 2949776 - RNA, 19 nt, Artificial Sequence
  Description of Artificial Sequence: Synthetic oligonucleotide
cagacgguuaauagugaag

SEQ ID NO: 2949777 - RNA, 19 nt, Artificial Sequence
  Description of Artificial Sequence: Synthetic oligonucleotide
acguaggagcucgacacgc

SEQ ID NO: 2949778 - RNA, 19 nt, Artificial Sequence
  Description of Artificial Sequence: Synthetic oligonucleotide
agagacugccacacgaagg

SEQ ID NO: 2949779 - RNA, 19 nt, Artificial Sequence
  Description of Artificial Sequence: Synthetic oligonucleotide
uacgaaggcuggaauccag

SEQ ID NO: 2949780 - RNA, 19 nt, Artificial Sequence
  Description of Artificial Sequence: Synthetic oligonucleotide
cauuugcggacagucaggg

SEQ ID NO: 2949781 - RNA, 19 nt, Artificial Sequence
  Description of Artificial Sequence: Synthetic oligonucleotide
ucauuagcauagcccaggu

SEQ ID NO: 2949782 - RNA, 19 nt, Artificial Sequence
  Description of Artificial Sequence: Synthetic oligonucleotide
gcaucagccagccacguag

SEQ ID NO: 2949783 - RNA, 19 nt, Artificial Sequence
  Description of Artificial Sequence: Synthetic oligonucleotide
cauaguacgcaggccauag

SEQ ID NO: 2949784 - RNA, 19 nt, Artificial Sequence
  Description of Artificial Sequence: Synthetic oligonucleotide
aauccaggaggaagucuac

SEQ ID NO: 2949785 - RNA, 19 nt, Artificial Sequence
  Description of Artificial Sequence: Synthetic oligonucleotide
uagcauagcccagguagcg

SEQ ID NO: 2949786 - RNA, 19 nt, Artificial Sequence
  Description of Artificial Sequence: Synthetic oligonucleotide
cucgacacgccauagcuca

SEQ ID NO: 2949787 - RNA, 19 nt, Artificial Sequence
  Description of Artificial Sequence: Synthetic oligonucleotide
aggugucuaccacagccag

SEQ ID NO: 2949788 - RNA, 19 nt, Artificial Sequence
  Description of Artificial Sequence: Synthetic oligonucleotide
cuucauuagcauagcccag

SEQ ID NO: 2949789 - RNA, 19 nt, Artificial Sequence
  Description of Artificial Sequence: Synthetic oligonucleotide
aagccugggauggcuacgg

SEQ ID NO: 2949790 - RNA, 19 nt, Artificial Sequence
  Description of Artificial Sequence: Synthetic oligonucleotide
aggaagucuacugaccugu

SEQ ID NO: 2949791 - RNA, 19 nt, Artificial Sequence
  Description of Artificial Sequence: Synthetic oligonucleotide
aguacgcaggccauagagg

SEQ ID NO: 2949792 - RNA, 19 nt, Artificial Sequence
  Description of Artificial Sequence: Synthetic oligonucleotide
ggucauaguacgcaggcca

SEQ ID NO: 2949793 - RNA, 19 nt, Artificial Sequence
  Description of Artificial Sequence: Synthetic oligonucleotide
cuuugucuauggcaucagc

SEQ ID NO: 2949794 - RNA, 19 nt, Artificial Sequence
  Description of Artificial Sequence: Synthetic oligonucleotide
gcuguaggcaccaaggagc

SEQ ID NO: 2949795 - RNA, 19 nt, Artificial Sequence
  Description of Artificial Sequence: Synthetic oligonucleotide
uugcggacagucaggggcc

SEQ ID NO: 2949796 - RNA, 19 nt, Artificial Sequence
  Description of Artificial Sequence: Synthetic oligonucleotide
agcagcccaaguguggugg

SEQ ID NO: 2949797 - RNA, 19 nt, Artificial Sequence
  Description of Artificial Sequence: Synthetic oligonucleotide
cauagagggaggcagcaca

SEQ ID NO: 2949798 - RNA, 19 nt, Artificial Sequence
  Description of Artificial Sequence: Synthetic oligonucleotide
cauagcucagccacaccac

SEQ ID NO: 2949799 - RNA, 19 nt, Artificial Sequence
  Description of Artificial Sequence: Synthetic oligonucleotide
uucuugccuuugucuaugg

SEQ ID NO: 2949800 - RNA, 19 nt, Artificial Sequence
  Description of Artificial Sequence: Synthetic oligonucleotide
gacgaugacggggauggcc

SEQ ID NO: 2949801 - RNA, 19 nt, Artificial Sequence
  Description of Artificial Sequence: Synthetic oligonucleotide
uagaggucgcacucggcgc

SEQ ID NO: 2949802 - RNA, 19 nt, Artificial Sequence
  Description of Artificial Sequence: Synthetic oligonucleotide
uccucuccugccuucuugc

SEQ ID NO: 2949803 - RNA, 19 nt, Artificial Sequence
  Description of Artificial Sequence: Synthetic oligonucleotide
ucuugccuuugucuauggc

SEQ ID NO: 2949804 - RNA, 19 nt, Artificial Sequence
  Description of Artificial Sequence: Synthetic oligonucleotide
aguuuacgaaggcuggaau

SEQ ID NO: 2949805 - RNA, 19 nt, Artificial Sequence
  Description of Artificial Sequence: Synthetic oligonucleotide
auagagggaggcagcacac

SEQ ID NO: 2949806 - RNA, 19 nt, Artificial Sequence
  Description of Artificial Sequence: Synthetic oligonucleotide
ucagccagccacguaggag

SEQ ID NO: 2949807 - RNA, 19 nt, Artificial Sequence
  Description of Artificial Sequence: Synthetic oligonucleotide
auagcucagccacaccaca

SEQ ID NO: 2949808 - RNA, 19 nt, Artificial Sequence
  Description of Artificial Sequence: Synthetic oligonucleotide
gaggaagucuacugaccug

SEQ ID NO: 2949809 - RNA, 19 nt, Artificial Sequence
  Description of Artificial Sequence: Synthetic oligonucleotide
aggagcggaaagccucccc

SEQ ID NO: 2949810 - RNA, 19 nt, Artificial Sequence
  Description of Artificial Sequence: Synthetic oligonucleotide
gcugcggccuucuucaggg

SEQ ID NO: 2949811 - RNA, 19 nt, Artificial Sequence
  Description of Artificial Sequence: Synthetic oligonucleotide
agcauagcccagguagcgc

SEQ ID NO: 2949812 - RNA, 19 nt, Artificial Sequence
  Description of Artificial Sequence: Synthetic oligonucleotide
acagacgguuaauagugaa

SEQ ID NO: 2949813 - RNA, 19 nt, Artificial Sequence
  Description of Artificial Sequence: Synthetic oligonucleotide
gacggggauggccagcagc

SEQ ID NO: 2949814 - RNA, 19 nt, Artificial Sequence
  Description of Artificial Sequence: Synthetic oligonucleotide
gacacgccauagcucagcc

SEQ ID NO: 2949815 - RNA, 19 nt, Artificial Sequence
  Description of Artificial Sequence: Synthetic oligonucleotide
ccugggauggcuacggagg

SEQ ID NO: 2949816 - RNA, 19 nt, Artificial Sequence
  Description of Artificial Sequence: Synthetic oligonucleotide
cugucaaugggguggacga

SEQ ID NO: 2949817 - RNA, 19 nt, Artificial Sequence
  Description of Artificial Sequence: Synthetic oligonucleotide
ugcugcggccuucuucagg

SEQ ID NO: 2949818 - RNA, 19 nt, Artificial Sequence
  Description of Artificial Sequence: Synthetic oligonucleotide
gaagucuacugaccuguca

SEQ ID NO: 2949819 - RNA, 19 nt, Artificial Sequence
  Description of Artificial Sequence: Synthetic oligonucleotide
auuugcggacagucagggg

SEQ ID NO: 2949820 - RNA, 19 nt, Artificial Sequence
  Description of Artificial Sequence: Synthetic oligonucleotide
caaggagcggaaagccucc

SEQ ID NO: 2949821 - RNA, 19 nt, Artificial Sequence
  Description of Artificial Sequence: Synthetic oligonucleotide
aggccagagacugccacac

SEQ ID NO: 2949822 - RNA, 19 nt, Artificial Sequence
  Description of Artificial Sequence: Synthetic oligonucleotide
agguagcgcacccaugugu

SEQ ID NO: 2949823 - RNA, 19 nt, Artificial Sequence
  Description of Artificial Sequence: Synthetic oligonucleotide
gagacugccacacgaaggu

SEQ ID NO: 2949824 - RNA, 19 nt, Artificial Sequence
  Description of Artificial Sequence: Synthetic oligonucleotide
aaggagcggaaagccuccc

SEQ ID NO: 2949825 - RNA, 19 nt, Artificial Sequence
  Description of Artificial Sequence: Synthetic oligonucleotide
gaauccaggaggaagucua

SEQ ID NO: 2949826 - RNA, 19 nt, Artificial Sequence
  Description of Artificial Sequence: Synthetic oligonucleotide
ugaagccugggauggcuac

SEQ ID NO: 2949827 - RNA, 19 nt, Artificial Sequence
  Description of Artificial Sequence: Synthetic oligonucleotide
aaggugucuaccacagcca

SEQ ID NO: 2949828 - RNA, 19 nt, Artificial Sequence
  Description of Artificial Sequence: Synthetic oligonucleotide
uggugguccauuugcggac

SEQ ID NO: 2949829 - RNA, 19 nt, Artificial Sequence
  Description of Artificial Sequence: Synthetic oligonucleotide
cuacggaggccagagacug

SEQ ID NO: 2949830 - RNA, 19 nt, Artificial Sequence
  Description of Artificial Sequence: Synthetic oligonucleotide
acgaaggugucuaccacag

SEQ ID NO: 2949831 - RNA, 19 nt, Artificial Sequence
  Description of Artificial Sequence: Synthetic oligonucleotide
cagagacugccacacgaag

SEQ ID NO: 2949832 - RNA, 19 nt, Artificial Sequence
  Description of Artificial Sequence: Synthetic oligonucleotide
acgcaggccauagagggag

SEQ ID NO: 2949833 - RNA, 19 nt, Artificial Sequence
  Description of Artificial Sequence: Synthetic oligonucleotide
caucagccagccacguagg

SEQ ID NO: 2949834 - RNA, 19 nt, Artificial Sequence
  Description of Artificial Sequence: Synthetic oligonucleotide
auggcuacggaggccagag

SEQ ID NO: 2949835 - RNA, 19 nt, Artificial Sequence
  Description of Artificial Sequence: Synthetic oligonucleotide
guaggcaccaaggagcgga

SEQ ID NO: 2949836 - RNA, 19 nt, Artificial Sequence
  Description of Artificial Sequence: Synthetic oligonucleotide
ggcaccaaggagcggaaag

SEQ ID NO: 2949837 - RNA, 19 nt, Artificial Sequence
  Description of Artificial Sequence: Synthetic oligonucleotide
cacacgaaggugucuacca

SEQ ID NO: 2949838 - RNA, 19 nt, Artificial Sequence
  Description of Artificial Sequence: Synthetic oligonucleotide
agcccaagugugguggugg

SEQ ID NO: 2949839 - RNA, 19 nt, Artificial Sequence
  Description of Artificial Sequence: Synthetic oligonucleotide
gcacacagacgguuaauag

SEQ ID NO: 2949840 - RNA, 19 nt, Artificial Sequence
  Description of Artificial Sequence: Synthetic oligonucleotide
cacagcuguaggcaccaag

SEQ ID NO: 2949841 - RNA, 19 nt, Artificial Sequence
  Description of Artificial Sequence: Synthetic oligonucleotide
gucuacugaccugucaaug

SEQ ID NO: 2949842 - RNA, 19 nt, Artificial Sequence
  Description of Artificial Sequence: Synthetic oligonucleotide
gaagccugggauggcuacg

SEQ ID NO: 2949843 - RNA, 19 nt, Artificial Sequence
  Description of Artificial Sequence: Synthetic oligonucleotide
auagcccagguagcgcacc

SEQ ID NO: 2949844 - RNA, 19 nt, Artificial Sequence
  Description of Artificial Sequence: Synthetic oligonucleotide
caccaaggagcggaaagcc

SEQ ID NO: 2949845 - RNA, 19 nt, Artificial Sequence
  Description of Artificial Sequence: Synthetic oligonucleotide
agccacaccacagcuguag

SEQ ID NO: 2949846 - RNA, 19 nt, Artificial Sequence
  Description of Artificial Sequence: Synthetic oligonucleotide
gcuggaauccaggaggaag

SEQ ID NO: 2949847 - RNA, 19 nt, Artificial Sequence
  Description of Artificial Sequence: Synthetic oligonucleotide
ugcggccuucuucagggcu

SEQ ID NO: 2949848 - RNA, 19 nt, Artificial Sequence
  Description of Artificial Sequence: Synthetic oligonucleotide
cugggauggcuacggaggc

SEQ ID NO: 2949849 - RNA, 19 nt, Artificial Sequence
  Description of Artificial Sequence: Synthetic oligonucleotide
guggugguccauuugcgga

SEQ ID NO: 2949850 - RNA, 19 nt, Artificial Sequence
  Description of Artificial Sequence: Synthetic oligonucleotide
ccacguaggagcucgacac

SEQ ID NO: 2949851 - RNA, 19 nt, Artificial Sequence
  Description of Artificial Sequence: Synthetic oligonucleotide
agggccacucuggugcugc

SEQ ID NO: 2949852 - RNA, 19 nt, Artificial Sequence
  Description of Artificial Sequence: Synthetic oligonucleotide
ggugcugcggccuucuuca

SEQ ID NO: 2949853 - RNA, 19 nt, Artificial Sequence
  Description of Artificial Sequence: Synthetic oligonucleotide
ggcuacggaggccagagac

SEQ ID NO: 2949854 - RNA, 19 nt, Artificial Sequence
  Description of Artificial Sequence: Synthetic oligonucleotide
accacagccagggccacuc

SEQ ID NO: 2949855 - RNA, 19 nt, Artificial Sequence
  Description of Artificial Sequence: Synthetic oligonucleotide
ccccacuucauuagcauag

SEQ ID NO: 2949856 - RNA, 19 nt, Artificial Sequence
  Description of Artificial Sequence: Synthetic oligonucleotide
gucaaugggguggacgaug

SEQ ID NO: 2949857 - RNA, 19 nt, Artificial Sequence
  Description of Artificial Sequence: Synthetic oligonucleotide
cagggcuuggcuccucucc

SEQ ID NO: 2949858 - RNA, 19 nt, Artificial Sequence
  Description of Artificial Sequence: Synthetic oligonucleotide
uuacgaaggcuggaaucca

SEQ ID NO: 2949859 - RNA, 19 nt, Artificial Sequence
  Description of Artificial Sequence: Synthetic oligonucleotide
gacagucaggggccagcgg

SEQ ID NO: 2949860 - RNA, 19 nt, Artificial Sequence
  Description of Artificial Sequence: Synthetic oligonucleotide
gguuaauagugaagccugg

SEQ ID NO: 2949861 - RNA, 19 nt, Artificial Sequence
  Description of Artificial Sequence: Synthetic oligonucleotide
gccagcgggucauaguacg

SEQ ID NO: 2949862 - RNA, 19 nt, Artificial Sequence
  Description of Artificial Sequence: Synthetic oligonucleotide
agucuacugaccugucaau

SEQ ID NO: 2949863 - RNA, 19 nt, Artificial Sequence
  Description of Artificial Sequence: Synthetic oligonucleotide
cacguaggagcucgacacg

SEQ ID NO: 2949864 - RNA, 19 nt, Artificial Sequence
  Description of Artificial Sequence: Synthetic oligonucleotide
caugugucccgguagaggu

SEQ ID NO: 2949865 - RNA, 19 nt, Artificial Sequence
  Description of Artificial Sequence: Synthetic oligonucleotide
cuucuugccuuugucuaug

SEQ ID NO: 2949866 - RNA, 19 nt, Artificial Sequence
  Description of Artificial Sequence: Synthetic oligonucleotide
auggcaucagccagccacg

SEQ ID NO: 2949867 - RNA, 19 nt, Artificial Sequence
  Description of Artificial Sequence: Synthetic oligonucleotide
uacgcaggccauagaggga

SEQ ID NO: 2949868 - RNA, 19 nt, Artificial Sequence
  Description of Artificial Sequence: Synthetic oligonucleotide
ccaaguguggugguggucc

SEQ ID NO: 2949869 - RNA, 19 nt, Artificial Sequence
  Description of Artificial Sequence: Synthetic oligonucleotide
acgaaggcuggaauccagg

SEQ ID NO: 2949870 - RNA, 19 nt, Artificial Sequence
  Description of Artificial Sequence: Synthetic oligonucleotide
uagcgcacccauguguccc

SEQ ID NO: 2949871 - RNA, 19 nt, Artificial Sequence
  Description of Artificial Sequence: Synthetic oligonucleotide
gucuauggcaucagccagc

SEQ ID NO: 2949872 - RNA, 19 nt, Artificial Sequence
  Description of Artificial Sequence: Synthetic oligonucleotide
acugaccugucaauggggu

SEQ ID NO: 2949873 - RNA, 19 nt, Artificial Sequence
  Description of Artificial Sequence: Synthetic oligonucleotide
cacgaaggugucuaccaca

SEQ ID NO: 2949874 - RNA, 19 nt, Artificial Sequence
  Description of Artificial Sequence: Synthetic oligonucleotide
agcgcacccaugugucccg

SEQ ID NO: 2949875 - RNA, 19 nt, Artificial Sequence
  Description of Artificial Sequence: Synthetic oligonucleotide
uucagggcuuggcuccucu

SEQ ID NO: 2949876 - RNA, 19 nt, Artificial Sequence
  Description of Artificial Sequence: Synthetic oligonucleotide
acgaugacggggauggcca

SEQ ID NO: 2949877 - RNA, 19 nt, Artificial Sequence
  Description of Artificial Sequence: Synthetic oligonucleotide
uggugcugcggccuucuuc

SEQ ID NO: 2949878 - RNA, 19 nt, Artificial Sequence
  Description of Artificial Sequence: Synthetic oligonucleotide
cacacagacgguuaauagu

SEQ ID NO: 2949879 - RNA, 19 nt, Artificial Sequence
  Description of Artificial Sequence: Synthetic oligonucleotide
caccacagcuguaggcacc

SEQ ID NO: 2949880 - RNA, 19 nt, Artificial Sequence
  Description of Artificial Sequence: Synthetic oligonucleotide
cacccaugugucccgguag

SEQ ID NO: 2949881 - RNA, 19 nt, Artificial Sequence
  Description of Artificial Sequence: Synthetic oligonucleotide
gagcucgacacgccauagc

SEQ ID NO: 2949882 - RNA, 19 nt, Artificial Sequence
  Description of Artificial Sequence: Synthetic oligonucleotide
ugggguggacgaugacggg

SEQ ID NO: 2949883 - RNA, 19 nt, Artificial Sequence
  Description of Artificial Sequence: Synthetic oligonucleotide
cugaccugucaauggggug

SEQ ID NO: 2949884 - RNA, 19 nt, Artificial Sequence
  Description of Artificial Sequence: Synthetic oligonucleotide
agggcuuggcuccucuccu

SEQ ID NO: 2949885 - RNA, 19 nt, Artificial Sequence
  Description of Artificial Sequence: Synthetic oligonucleotide
cgguuaauagugaagccug

SEQ ID NO: 2949886 - RNA, 19 nt, Artificial Sequence
  Description of Artificial Sequence: Synthetic oligonucleotide
guaggagcucgacacgcca

SEQ ID NO: 2949887 - RNA, 19 nt, Artificial Sequence
  Description of Artificial Sequence: Synthetic oligonucleotide
ccaaggagcggaaagccuc

SEQ ID NO: 2949888 - RNA, 19 nt, Artificial Sequence
  Description of Artificial Sequence: Synthetic oligonucleotide
uagcccagguagcgcaccc

SEQ ID NO: 2949889 - RNA, 19 nt, Artificial Sequence
  Description of Artificial Sequence: Synthetic oligonucleotide
auaguacgcaggccauaga

SEQ ID NO: 2949890 - RNA, 19 nt, Artificial Sequence
  Description of Artificial Sequence: Synthetic oligonucleotide
uaggagcucgacacgccau

SEQ ID NO: 2949891 - RNA, 19 nt, Artificial Sequence
  Description of Artificial Sequence: Synthetic oligonucleotide
acccaugugucccgguaga

SEQ ID NO: 2949892 - RNA, 19 nt, Artificial Sequence
  Description of Artificial Sequence: Synthetic oligonucleotide
guagcgcacccaugugucc

SEQ ID NO: 2949893 - RNA, 19 nt, Artificial Sequence
  Description of Artificial Sequence: Synthetic oligonucleotide
ucgacacgccauagcucag

SEQ ID NO: 2949894 - RNA, 19 nt, Artificial Sequence
  Description of Artificial Sequence: Synthetic oligonucleotide
gaggccagagacugccaca

SEQ ID NO: 2949895 - RNA, 19 nt, Artificial Sequence
  Description of Artificial Sequence: Synthetic oligonucleotide
ccauuugcggacagucagg

SEQ ID NO: 2949896 - RNA, 19 nt, Artificial Sequence
  Description of Artificial Sequence: Synthetic oligonucleotide
uguaggcaccaaggagcgg

SEQ ID NO: 2949897 - RNA, 19 nt, Artificial Sequence
  Description of Artificial Sequence: Synthetic oligonucleotide
ugccacacgaaggugucua

SEQ ID NO: 2949898 - RNA, 19 nt, Artificial Sequence
  Description of Artificial Sequence: Synthetic oligonucleotide
cauagcccagguagcgcac

SEQ ID NO: 2949899 - RNA, 19 nt, Artificial Sequence
  Description of Artificial Sequence: Synthetic oligonucleotide
gaugacggggauggccagc

SEQ ID NO: 2949900 - RNA, 19 nt, Artificial Sequence
  Description of Artificial Sequence: Synthetic oligonucleotide
ugucuaccacagccagggc

SEQ ID NO: 2949901 - RNA, 19 nt, Artificial Sequence
  Description of Artificial Sequence: Synthetic oligonucleotide
agcacacagacgguuaaua

SEQ ID NO: 2949902 - RNA, 19 nt, Artificial Sequence
  Description of Artificial Sequence: Synthetic oligonucleotide
ucccgguagaggucgcacu

SEQ ID NO: 2949903 - RNA, 19 nt, Artificial Sequence
  Description of Artificial Sequence: Synthetic oligonucleotide
gguccauuugcggacaguc

SEQ ID NO: 2949904 - RNA, 19 nt, Artificial Sequence
  Description of Artificial Sequence: Synthetic oligonucleotide
uacggaggccagagacugc

SEQ ID NO: 2949905 - RNA, 19 nt, Artificial Sequence
  Description of Artificial Sequence: Synthetic oligonucleotide
ggaggaagucuacugaccu

SEQ ID NO: 2949906 - RNA, 19 nt, Artificial Sequence
  Description of Artificial Sequence: Synthetic oligonucleotide
ccauagcucagccacacca

SEQ ID NO: 2949907 - RNA, 19 nt, Artificial Sequence
  Description of Artificial Sequence: Synthetic oligonucleotide
ccugucaaugggguggacg

SEQ ID NO: 2949908 - RNA, 19 nt, Artificial Sequence
  Description of Artificial Sequence: Synthetic oligonucleotide
gggguggacgaugacgggg

SEQ ID NO: 2949909 - RNA, 19 nt, Artificial Sequence
  Description of Artificial Sequence: Synthetic oligonucleotide
augacggggauggccagca

SEQ ID NO: 2949910 - RNA, 19 nt, Artificial Sequence
  Description of Artificial Sequence: Synthetic oligonucleotide
aucagccagccacguagga

SEQ ID NO: 2949911 - RNA, 19 nt, Artificial Sequence
  Description of Artificial Sequence: Synthetic oligonucleotide
gccagagacugccacacga

SEQ ID NO: 2949912 - RNA, 19 nt, Artificial Sequence
  Description of Artificial Sequence: Synthetic oligonucleotide
cacagacgguuaauaguga

SEQ ID NO: 2949913 - RNA, 19 nt, Artificial Sequence
  Description of Artificial Sequence: Synthetic oligonucleotide
ccagccacguaggagcucg

SEQ ID NO: 2949914 - RNA, 19 nt, Artificial Sequence
  Description of Artificial Sequence: Synthetic oligonucleotide
ucauaguacgcaggccaua

SEQ ID NO: 2949915 - RNA, 19 nt, Artificial Sequence
  Description of Artificial Sequence: Synthetic oligonucleotide
ugggauggcuacggaggcc

SEQ ID NO: 2949916 - RNA, 19 nt, Artificial Sequence
  Description of Artificial Sequence: Synthetic oligonucleotide
uaggcaccaaggagcggaa

SEQ ID NO: 2949917 - RNA, 19 nt, Artificial Sequence
  Description of Artificial Sequence: Synthetic oligonucleotide
gacugccacacgaaggugu

SEQ ID NO: 2949918 - RNA, 19 nt, Artificial Sequence
  Description of Artificial Sequence: Synthetic oligonucleotide
accacagcuguaggcacca

SEQ ID NO: 2949919 - RNA, 19 nt, Artificial Sequence
  Description of Artificial Sequence: Synthetic oligonucleotide
cugccuucuugccuuuguc

SEQ ID NO: 2949920 - RNA, 19 nt, Artificial Sequence
  Description of Artificial Sequence: Synthetic oligonucleotide
ugccuuugucuauggcauc

SEQ ID NO: 2949921 - RNA, 19 nt, Artificial Sequence
  Description of Artificial Sequence: Synthetic oligonucleotide
agccacguaggagcucgac

SEQ ID NO: 2949922 - RNA, 19 nt, Artificial Sequence
  Description of Artificial Sequence: Synthetic oligonucleotide
ccacuucauuagcauagcc

SEQ ID NO: 2949923 - RNA, 19 nt, Artificial Sequence
  Description of Artificial Sequence: Synthetic oligonucleotide
uuggcuccucuccugccuu

SEQ ID NO: 2949924 - RNA, 19 nt, Artificial Sequence
  Description of Artificial Sequence: Synthetic oligonucleotide
gccugggauggcuacggag

SEQ ID NO: 2949925 - RNA, 19 nt, Artificial Sequence
  Description of Artificial Sequence: Synthetic oligonucleotide
gccacucuggugcugcggc

SEQ ID NO: 2949926 - RNA, 19 nt, Artificial Sequence
  Description of Artificial Sequence: Synthetic oligonucleotide
accaaggagcggaaagccu

SEQ ID NO: 2949927 - RNA, 19 nt, Artificial Sequence
  Description of Artificial Sequence: Synthetic oligonucleotide
acacgccauagcucagcca

SEQ ID NO: 2949928 - RNA, 19 nt, Artificial Sequence
  Description of Artificial Sequence: Synthetic oligonucleotide
aggagcucgacacgccaua

SEQ ID NO: 2949929 - RNA, 19 nt, Artificial Sequence
  Description of Artificial Sequence: Synthetic oligonucleotide
agucaggggccagcggguc

SEQ ID NO: 2949930 - RNA, 19 nt, Artificial Sequence
  Description of Artificial Sequence: Synthetic oligonucleotide
auccaggaggaagucuacu

SEQ ID NO: 2949931 - RNA, 19 nt, Artificial Sequence
  Description of Artificial Sequence: Synthetic oligonucleotide
ggugucuaccacagccagg

SEQ ID NO: 2949932 - RNA, 19 nt, Artificial Sequence
  Description of Artificial Sequence: Synthetic oligonucleotide
ggaggccagagacugccac

SEQ ID NO: 2949933 - RNA, 19 nt, Artificial Sequence
  Description of Artificial Sequence: Synthetic oligonucleotide
ccacaccacagcuguaggc

SEQ ID NO: 2949934 - RNA, 19 nt, Artificial Sequence
  Description of Artificial Sequence: Synthetic oligonucleotide
ugacggggauggccagcag

SEQ ID NO: 2949935 - RNA, 19 nt, Artificial Sequence
  Description of Artificial Sequence: Synthetic oligonucleotide
gccacaccacagcuguagg

SEQ ID NO: 2949936 - RNA, 19 nt, Artificial Sequence
  Description of Artificial Sequence: Synthetic oligonucleotide
gguagcgcacccauguguc

SEQ ID NO: 2949937 - RNA, 19 nt, Artificial Sequence
  Description of Artificial Sequence: Synthetic oligonucleotide
augugucccgguagagguc

SEQ ID NO: 2949938 - RNA, 19 nt, Artificial Sequence
  Description of Artificial Sequence: Synthetic oligonucleotide
ggacagucaggggccagcg

SEQ ID NO: 2949939 - RNA, 19 nt, Artificial Sequence
  Description of Artificial Sequence: Synthetic oligonucleotide
gugguccauuugcggacag

SEQ ID NO: 2949940 - RNA, 19 nt, Artificial Sequence
  Description of Artificial Sequence: Synthetic oligonucleotide
uagugaagccugggauggc

SEQ ID NO: 2949941 - RNA, 19 nt, Artificial Sequence
  Description of Artificial Sequence: Synthetic oligonucleotide
cagguagcgcacccaugug

SEQ ID NO: 2949942 - RNA, 19 nt, Artificial Sequence
  Description of Artificial Sequence: Synthetic oligonucleotide
ugucaaugggguggacgau

SEQ ID NO: 2949943 - RNA, 19 nt, Artificial Sequence
  Description of Artificial Sequence: Synthetic oligonucleotide
agacugccacacgaaggug

SEQ ID NO: 2949944 - RNA, 19 nt, Artificial Sequence
  Description of Artificial Sequence: Synthetic oligonucleotide
ccaugugucccgguagagg

SEQ ID NO: 2949945 - RNA, 19 nt, Artificial Sequence
  Description of Artificial Sequence: Synthetic oligonucleotide
ucagggcuuggcuccucuc

SEQ ID NO: 2949946 - RNA, 19 nt, Artificial Sequence
  Description of Artificial Sequence: Synthetic oligonucleotide
ggcuuggcuccucuccugc

SEQ ID NO: 2949947 - RNA, 19 nt, Artificial Sequence
  Description of Artificial Sequence: Synthetic oligonucleotide
caguuuacgaaggcuggaa

SEQ ID NO: 2949948 - RNA, 19 nt, Artificial Sequence
  Description of Artificial Sequence: Synthetic oligonucleotide
agugugguggugguccauu

SEQ ID NO: 2949949 - RNA, 19 nt, Artificial Sequence
  Description of Artificial Sequence: Synthetic oligonucleotide
gauggcuacggaggccaga

SEQ ID NO: 2949950 - RNA, 19 nt, Artificial Sequence
  Description of Artificial Sequence: Synthetic oligonucleotide
guggacgaugacggggaug

SEQ ID NO: 2949951 - RNA, 19 nt, Artificial Sequence
  Description of Artificial Sequence: Synthetic oligonucleotide
aggcuggaauccaggagga

SEQ ID NO: 2949952 - RNA, 19 nt, Artificial Sequence
  Description of Artificial Sequence: Synthetic oligonucleotide
uggcuacggaggccagaga

SEQ ID NO: 2949953 - RNA, 19 nt, Artificial Sequence
  Description of Artificial Sequence: Synthetic oligonucleotide
guccauuugcggacaguca

SEQ ID NO: 2949954 - RNA, 19 nt, Artificial Sequence
  Description of Artificial Sequence: Synthetic oligonucleotide
gggauggcuacggaggcca

SEQ ID NO: 2949955 - RNA, 19 nt, Artificial Sequence
  Description of Artificial Sequence: Synthetic oligonucleotide
caaugggguggacgaugac

SEQ ID NO: 2949956 - RNA, 19 nt, Artificial Sequence
  Description of Artificial Sequence: Synthetic oligonucleotide
ugguccauuugcggacagu

SEQ ID NO: 2949957 - RNA, 19 nt, Artificial Sequence
  Description of Artificial Sequence: Synthetic oligonucleotide
caaguguggugguggucca

SEQ ID NO: 2949958 - RNA, 19 nt, Artificial Sequence
  Description of Artificial Sequence: Synthetic oligonucleotide
gaccugucaauggggugga

SEQ ID NO: 2949959 - RNA, 19 nt, Artificial Sequence
  Description of Artificial Sequence: Synthetic oligonucleotide
ggagcucgacacgccauag

SEQ ID NO: 2949960 - RNA, 19 nt, Artificial Sequence
  Description of Artificial Sequence: Synthetic oligonucleotide
ugucccgguagaggucgca

SEQ ID NO: 2949961 - RNA, 19 nt, Artificial Sequence
  Description of Artificial Sequence: Synthetic oligonucleotide
aagugugguggugguccau

SEQ ID NO: 2949962 - RNA, 19 nt, Artificial Sequence
  Description of Artificial Sequence: Synthetic oligonucleotide
gccuuugucuauggcauca

SEQ ID NO: 2949963 - RNA, 19 nt, Artificial Sequence
  Description of Artificial Sequence: Synthetic oligonucleotide
gccacguaggagcucgaca

SEQ ID NO: 2949964 - RNA, 19 nt, Artificial Sequence
  Description of Artificial Sequence: Synthetic oligonucleotide
cauuagcauagcccaggua

SEQ ID NO: 2949965 - RNA, 19 nt, Artificial Sequence
  Description of Artificial Sequence: Synthetic oligonucleotide
cagcagcccaaguguggug

SEQ ID NO: 2949966 - RNA, 19 nt, Artificial Sequence
  Description of Artificial Sequence: Synthetic oligonucleotide
ggggauggccagcagccca

SEQ ID NO: 2949967 - RNA, 19 nt, Artificial Sequence
  Description of Artificial Sequence: Synthetic oligonucleotide
gcgggucauaguacgcagg

SEQ ID NO: 2949968 - RNA, 19 nt, Artificial Sequence
  Description of Artificial Sequence: Synthetic oligonucleotide
ccagcgggucauaguacgc

SEQ ID NO: 2949969 - RNA, 19 nt, Artificial Sequence
  Description of Artificial Sequence: Synthetic oligonucleotide
gggccagcgggucauagua

SEQ ID NO: 2949970 - RNA, 19 nt, Artificial Sequence
  Description of Artificial Sequence: Synthetic oligonucleotide
gggucauaguacgcaggcc

SEQ ID NO: 2949971 - RNA, 19 nt, Artificial Sequence
  Description of Artificial Sequence: Synthetic oligonucleotide
aggggccagcgggucauag

SEQ ID NO: 2949972 - RNA, 19 nt, Artificial Sequence
  Description of Artificial Sequence: Synthetic oligonucleotide
ccacacgaaggugucuacc

SEQ ID NO: 2949973 - RNA, 19 nt, Artificial Sequence
  Description of Artificial Sequence: Synthetic oligonucleotide
ugcggacagucaggggcca

SEQ ID NO: 2949974 - RNA, 19 nt, Artificial Sequence
  Description of Artificial Sequence: Synthetic oligonucleotide
gucccgguagaggucgcac

SEQ ID NO: 2949975 - RNA, 19 nt, Artificial Sequence
  Description of Artificial Sequence: Synthetic oligonucleotide
aggcagcacacagacgguu

SEQ ID NO: 2949976 - RNA, 19 nt, Artificial Sequence
  Description of Artificial Sequence: Synthetic oligonucleotide
ggccagagacugccacacg

SEQ ID NO: 2949977 - RNA, 19 nt, Artificial Sequence
  Description of Artificial Sequence: Synthetic oligonucleotide
cuuggcuccucuccugccu

SEQ ID NO: 2949978 - RNA, 19 nt, Artificial Sequence
  Description of Artificial Sequence: Synthetic oligonucleotide
cugcggccuucuucagggc

SEQ ID NO: 2949979 - RNA, 19 nt, Artificial Sequence
  Description of Artificial Sequence: Synthetic oligonucleotide
gucaggggccagcggguca

SEQ ID NO: 2949980 - RNA, 19 nt, Artificial Sequence
  Description of Artificial Sequence: Synthetic oligonucleotide
agccugggauggcuacgga

SEQ ID NO: 2949981 - RNA, 19 nt, Artificial Sequence
  Description of Artificial Sequence: Synthetic oligonucleotide
accugucaaugggguggac

SEQ ID NO: 2949982 - RNA, 19 nt, Artificial Sequence
  Description of Artificial Sequence: Synthetic oligonucleotide
ggccauagagggaggcagc

SEQ ID NO: 2949983 - RNA, 19 nt, Artificial Sequence
  Description of Artificial Sequence: Synthetic oligonucleotide
uccugccuucuugccuuug

SEQ ID NO: 2949984 - RNA, 19 nt, Artificial Sequence
  Description of Artificial Sequence: Synthetic oligonucleotide
gcagcacacagacgguuaa

SEQ ID NO: 2949985 - RNA, 19 nt, Artificial Sequence
  Description of Artificial Sequence: Synthetic oligonucleotide
cguaggagcucgacacgcc

SEQ ID NO: 2949986 - RNA, 19 nt, Artificial Sequence
  Description of Artificial Sequence: Synthetic oligonucleotide
cccacuucauuagcauagc

SEQ ID NO: 2949987 - RNA, 19 nt, Artificial Sequence
  Description of Artificial Sequence: Synthetic oligonucleotide
ggguggacgaugacgggga

SEQ ID NO: 2949988 - RNA, 19 nt, Artificial Sequence
  Description of Artificial Sequence: Synthetic oligonucleotide
cccgguagaggucgcacuc

SEQ ID NO: 2949989 - RNA, 19 nt, Artificial Sequence
  Description of Artificial Sequence: Synthetic oligonucleotide
gcaggccauagagggaggc

SEQ ID NO: 2949990 - RNA, 19 nt, Artificial Sequence
  Description of Artificial Sequence: Synthetic oligonucleotide
acucuggugcugcggccuu

SEQ ID NO: 2949991 - RNA, 19 nt, Artificial Sequence
  Description of Artificial Sequence: Synthetic oligonucleotide
caggccauagagggaggca

SEQ ID NO: 2949992 - RNA, 19 nt, Artificial Sequence
  Description of Artificial Sequence: Synthetic oligonucleotide
ccuuugucuauggcaucag

SEQ ID NO: 2949993 - RNA, 19 nt, Artificial Sequence
  Description of Artificial Sequence: Synthetic oligonucleotide
ccucuccugccuucuugcc

SEQ ID NO: 2949994 - RNA, 19 nt, Artificial Sequence
  Description of Artificial Sequence: Synthetic oligonucleotide
gugcugcggccuucuucag

SEQ ID NO: 2949995 - RNA, 19 nt, Artificial Sequence
  Description of Artificial Sequence: Synthetic oligonucleotide
gccauagcucagccacacc

SEQ ID NO: 2949996 - RNA, 19 nt, Artificial Sequence
  Description of Artificial Sequence: Synthetic oligonucleotide
gggcuuggcuccucuccug

SEQ ID NO: 2949997 - RNA, 19 nt, Artificial Sequence
  Description of Artificial Sequence: Synthetic oligonucleotide
agccagccacguaggagcu

SEQ ID NO: 2949998 - RNA, 19 nt, Artificial Sequence
  Description of Artificial Sequence: Synthetic oligonucleotide
cagcccaagugugguggug

SEQ ID NO: 2949999 - RNA, 19 nt, Artificial Sequence
  Description of Artificial Sequence: Synthetic oligonucleotide
gccauagagggaggcagca

SEQ ID NO: 2950000 - RNA, 19 nt, Artificial Sequence
  Description of Artificial Sequence: Synthetic oligonucleotide
ccagguagcgcacccaugu

SEQ ID NO: 2950001 - RNA, 19 nt, Artificial Sequence
  Description of Artificial Sequence: Synthetic oligonucleotide
ccgguagaggucgcacucg

SEQ ID NO: 2950002 - RNA, 19 nt, Artificial Sequence
  Description of Artificial Sequence: Synthetic oligonucleotide
gucauaguacgcaggccau

SEQ ID NO: 2950003 - RNA, 19 nt, Artificial Sequence
  Description of Artificial Sequence: Synthetic oligonucleotide
cuaccacagccagggccac

SEQ ID NO: 2950004 - RNA, 19 nt, Artificial Sequence
  Description of Artificial Sequence: Synthetic oligonucleotide
gccacacgaaggugucuac

SEQ ID NO: 2950005 - RNA, 19 nt, Artificial Sequence
  Description of Artificial Sequence: Synthetic oligonucleotide
gggaggcagcacacagacg

SEQ ID NO: 2950006 - RNA, 19 nt, Artificial Sequence
  Description of Artificial Sequence: Synthetic oligonucleotide
ggccacucuggugcugcgg

SEQ ID NO: 2950007 - RNA, 19 nt, Artificial Sequence
  Description of Artificial Sequence: Synthetic oligonucleotide
ggugguccauuugcggaca

SEQ ID NO: 2950008 - RNA, 19 nt, Artificial Sequence
  Description of Artificial Sequence: Synthetic oligonucleotide
ccacucuggugcugcggcc

SEQ ID NO: 2950009 - RNA, 19 nt, Artificial Sequence
  Description of Artificial Sequence: Synthetic oligonucleotide
agcccagguagcgcaccca

SEQ ID NO: 2950010 - RNA, 19 nt, Artificial Sequence
  Description of Artificial Sequence: Synthetic oligonucleotide
ccagagacugccacacgaa

SEQ ID NO: 2950011 - RNA, 19 nt, Artificial Sequence
  Description of Artificial Sequence: Synthetic oligonucleotide
ggaagucuacugaccuguc

SEQ ID NO: 2950012 - RNA, 19 nt, Artificial Sequence
  Description of Artificial Sequence: Synthetic oligonucleotide
gugaagccugggauggcua

SEQ ID NO: 2950013 - RNA, 19 nt, Artificial Sequence
  Description of Artificial Sequence: Synthetic oligonucleotide
acgccauagcucagccaca

SEQ ID NO: 2950014 - RNA, 19 nt, Artificial Sequence
  Description of Artificial Sequence: Synthetic oligonucleotide
ccuucuucagggcuuggcu

SEQ ID NO: 2950015 - RNA, 19 nt, Artificial Sequence
  Description of Artificial Sequence: Synthetic oligonucleotide
gcucagccacaccacagcu

SEQ ID NO: 2950016 - RNA, 19 nt, Artificial Sequence
  Description of Artificial Sequence: Synthetic oligonucleotide
gcucgacacgccauagcuc

SEQ ID NO: 2950017 - RNA, 19 nt, Artificial Sequence
  Description of Artificial Sequence: Synthetic oligonucleotide
ccauagagggaggcagcac

SEQ ID NO: 2950018 - RNA, 19 nt, Artificial Sequence
  Description of Artificial Sequence: Synthetic oligonucleotide
gaggcagcacacagacggu

SEQ ID NO: 2950019 - RNA, 19 nt, Artificial Sequence
  Description of Artificial Sequence: Synthetic oligonucleotide
cuauggcaucagccagcca

SEQ ID NO: 2950020 - RNA, 19 nt, Artificial Sequence
  Description of Artificial Sequence: Synthetic oligonucleotide
cccaugugucccgguagag

SEQ ID NO: 2950021 - RNA, 19 nt, Artificial Sequence
  Description of Artificial Sequence: Synthetic oligonucleotide
cagucaggggccagcgggu

SEQ ID NO: 2950022 - RNA, 19 nt, Artificial Sequence
  Description of Artificial Sequence: Synthetic oligonucleotide
cccagguagcgcacccaug

SEQ ID NO: 2950023 - RNA, 19 nt, Artificial Sequence
  Description of Artificial Sequence: Synthetic oligonucleotide
ggcagcacacagacgguua

SEQ ID NO: 2950024 - RNA, 19 nt, Artificial Sequence
  Description of Artificial Sequence: Synthetic oligonucleotide
gcacccaugugucccggua

SEQ ID NO: 2950025 - RNA, 19 nt, Artificial Sequence
  Description of Artificial Sequence: Synthetic oligonucleotide
ggccagcgggucauaguac

SEQ ID NO: 2950026 - RNA, 19 nt, Artificial Sequence
  Description of Artificial Sequence: Synthetic oligonucleotide
cgaaggugucuaccacagc

SEQ ID NO: 2950027 - RNA, 19 nt, Artificial Sequence
  Description of Artificial Sequence: Synthetic oligonucleotide
ggauggcuacggaggccag

SEQ ID NO: 2950028 - RNA, 19 nt, Artificial Sequence
  Description of Artificial Sequence: Synthetic oligonucleotide
cucuggugcugcggccuuc

SEQ ID NO: 2950029 - RNA, 19 nt, Artificial Sequence
  Description of Artificial Sequence: Synthetic oligonucleotide
cacucuggugcugcggccu

SEQ ID NO: 2950030 - RNA, 19 nt, Artificial Sequence
  Description of Artificial Sequence: Synthetic oligonucleotide
aggcaccaaggagcggaaa

SEQ ID NO: 2950031 - RNA, 19 nt, Artificial Sequence
  Description of Artificial Sequence: Synthetic oligonucleotide
gugugguggugguccauuu

SEQ ID NO: 2950032 - RNA, 19 nt, Artificial Sequence
  Description of Artificial Sequence: Synthetic oligonucleotide
gcuacggaggccagagacu

SEQ ID NO: 2950033 - RNA, 19 nt, Artificial Sequence
  Description of Artificial Sequence: Synthetic oligonucleotide
cgacacgccauagcucagc

SEQ ID NO: 2950034 - RNA, 19 nt, Artificial Sequence
  Description of Artificial Sequence: Synthetic oligonucleotide
cgaugacggggauggccag

SEQ ID NO: 2950035 - RNA, 19 nt, Artificial Sequence
  Description of Artificial Sequence: Synthetic oligonucleotide
cgccauagcucagccacac

SEQ ID NO: 2950036 - RNA, 19 nt, Artificial Sequence
  Description of Artificial Sequence: Synthetic oligonucleotide
cagggccacucuggugcug

SEQ ID NO: 2950037 - RNA, 19 nt, Artificial Sequence
  Description of Artificial Sequence: Synthetic oligonucleotide
ggcaucagccagccacgua

SEQ ID NO: 2950038 - RNA, 19 nt, Artificial Sequence
  Description of Artificial Sequence: Synthetic oligonucleotide
cggacagucaggggccagc

SEQ ID NO: 2950039 - RNA, 19 nt, Artificial Sequence
  Description of Artificial Sequence: Synthetic oligonucleotide
cgcaggccauagagggagg

SEQ ID NO: 2950040 - RNA, 19 nt, Artificial Sequence
  Description of Artificial Sequence: Synthetic oligonucleotide
ccuucuugccuuugucuau

SEQ ID NO: 2950041 - RNA, 19 nt, Artificial Sequence
  Description of Artificial Sequence: Synthetic oligonucleotide
cagccagggccacucuggu

SEQ ID NO: 2950042 - RNA, 19 nt, Artificial Sequence
  Description of Artificial Sequence: Synthetic oligonucleotide
ggacgaugacggggauggc

SEQ ID NO: 2950043 - RNA, 19 nt, Artificial Sequence
  Description of Artificial Sequence: Synthetic oligonucleotide
cagccacguaggagcucga

SEQ ID NO: 2950044 - RNA, 19 nt, Artificial Sequence
  Description of Artificial Sequence: Synthetic oligonucleotide
gcgcacccaugugucccgg

SEQ ID NO: 2950045 - RNA, 19 nt, Artificial Sequence
  Description of Artificial Sequence: Synthetic oligonucleotide
cccaagugugguggugguc

SEQ ID NO: 2950046 - RNA, 19 nt, Artificial Sequence
  Description of Artificial Sequence: Synthetic oligonucleotide
gcggacagucaggggccag

SEQ ID NO: 2950047 - RNA, 19 nt, Artificial Sequence
  Description of Artificial Sequence: Synthetic oligonucleotide
ggggccagcgggucauagu

SEQ ID NO: 2950048 - RNA, 19 nt, Artificial Sequence
  Description of Artificial Sequence: Synthetic oligonucleotide
ggcuggaauccaggaggaa

SEQ ID NO: 2950049 - RNA, 19 nt, Artificial Sequence
  Description of Artificial Sequence: Synthetic oligonucleotide
gcccagguagcgcacccau

SEQ ID NO: 2950050 - RNA, 19 nt, Artificial Sequence
  Description of Artificial Sequence: Synthetic oligonucleotide
gcccaaguguggugguggu

SEQ ID NO: 2950051 - RNA, 19 nt, Artificial Sequence
  Description of Artificial Sequence: Synthetic oligonucleotide
ccugccuucuugccuuugu

SEQ ID NO: 2950052 - RNA, 19 nt, Artificial Sequence
  Description of Artificial Sequence: Synthetic oligonucleotide
cagccacaccacagcugua

SEQ ID NO: 2950053 - RNA, 19 nt, Artificial Sequence
  Description of Artificial Sequence: Synthetic oligonucleotide
ccagcagcccaaguguggu

SEQ ID NO: 2950054 - RNA, 19 nt, Artificial Sequence
  Description of Artificial Sequence: Synthetic oligonucleotide
cagcacacagacgguuaau

SEQ ID NO: 2950055 - RNA, 19 nt, Artificial Sequence
  Description of Artificial Sequence: Synthetic oligonucleotide
gguggacgaugacggggau

SEQ ID NO: 2950056 - RNA, 19 nt, Artificial Sequence
  Description of Artificial Sequence: Synthetic oligonucleotide
cggggauggccagcagccc

SEQ ID NO: 2950057 - RNA, 19 nt, Artificial Sequence
  Description of Artificial Sequence: Synthetic oligonucleotide
gcggccuucuucagggcuu

SEQ ID NO: 2950058 - RNA, 19 nt, Artificial Sequence
  Description of Artificial Sequence: Synthetic oligonucleotide
cuccugccuucuugccuuu

SEQ ID NO: 2950059 - RNA, 19 nt, Artificial Sequence
  Description of Artificial Sequence: Synthetic oligonucleotide
cuggugcugcggccuucuu

SEQ ID NO: 2950060 - RNA, 19 nt, Artificial Sequence
  Description of Artificial Sequence: Synthetic oligonucleotide
ccacagccagggccacucu

SEQ ID NO: 2950061 - RNA, 19 nt, Artificial Sequence
  Description of Artificial Sequence: Synthetic oligonucleotide
cgcacccaugugucccggu

SEQ ID NO: 2950062 - RNA, 19 nt, Artificial Sequence
  Description of Artificial Sequence: Synthetic oligonucleotide
agggucgucaaauagaucc

SEQ ID NO: 2950063 - RNA, 19 nt, Artificial Sequence
  Description of Artificial Sequence: Synthetic oligonucleotide
aauagauccacucggcagg

SEQ ID NO: 2950064 - RNA, 19 nt, Artificial Sequence
  Description of Artificial Sequence: Synthetic oligonucleotide
guagcuugaacccugaucc

SEQ ID NO: 2950065 - RNA, 19 nt, Artificial Sequence
  Description of Artificial Sequence: Synthetic oligonucleotide
acaguucucauacacaccg

SEQ ID NO: 2950066 - RNA, 19 nt, Artificial Sequence
  Description of Artificial Sequence: Synthetic oligonucleotide
aaauagauccacucggcag

SEQ ID NO: 2950067 - RNA, 19 nt, Artificial Sequence
  Description of Artificial Sequence: Synthetic oligonucleotide
uggguauugacauagcaag

SEQ ID NO: 2950068 - RNA, 19 nt, Artificial Sequence
  Description of Artificial Sequence: Synthetic oligonucleotide
caucaaugcagcaucaccg

SEQ ID NO: 2950069 - RNA, 19 nt, Artificial Sequence
  Description of Artificial Sequence: Synthetic oligonucleotide
gucaaauagauccacucgg

SEQ ID NO: 2950070 - RNA, 19 nt, Artificial Sequence
  Description of Artificial Sequence: Synthetic oligonucleotide
ugaaaugccaccugcaggu

SEQ ID NO: 2950071 - RNA, 19 nt, Artificial Sequence
  Description of Artificial Sequence: Synthetic oligonucleotide
uuggucuguagcuugaacc

SEQ ID NO: 2950072 - RNA, 19 nt, Artificial Sequence
  Description of Artificial Sequence: Synthetic oligonucleotide
ucucacaccgaauagggca

SEQ ID NO: 2950073 - RNA, 19 nt, Artificial Sequence
  Description of Artificial Sequence: Synthetic oligonucleotide
uaccuauugacccacgcug

SEQ ID NO: 2950074 - RNA, 19 nt, Artificial Sequence
  Description of Artificial Sequence: Synthetic oligonucleotide
cucucuacucugaagagcc

SEQ ID NO: 2950075 - RNA, 19 nt, Artificial Sequence
  Description of Artificial Sequence: Synthetic oligonucleotide
aaguagcacagcuucucac

SEQ ID NO: 2950076 - RNA, 19 nt, Artificial Sequence
  Description of Artificial Sequence: Synthetic oligonucleotide
ucaucaaugcagcaucacc

SEQ ID NO: 2950077 - RNA, 19 nt, Artificial Sequence
  Description of Artificial Sequence: Synthetic oligonucleotide
agcacagcuucucacaccg

SEQ ID NO: 2950078 - RNA, 19 nt, Artificial Sequence
  Description of Artificial Sequence: Synthetic oligonucleotide
aguucucauacacaccgcg

SEQ ID NO: 2950079 - RNA, 19 nt, Artificial Sequence
  Description of Artificial Sequence: Synthetic oligonucleotide
ucaaauagauccacucggc

SEQ ID NO: 2950080 - RNA, 19 nt, Artificial Sequence
  Description of Artificial Sequence: Synthetic oligonucleotide
ucugaaaugccaccugcag

SEQ ID NO: 2950081 - RNA, 19 nt, Artificial Sequence
  Description of Artificial Sequence: Synthetic oligonucleotide
cuucucacaccgaauaggg

SEQ ID NO: 2950082 - RNA, 19 nt, Artificial Sequence
  Description of Artificial Sequence: Synthetic oligonucleotide
auaggcaugaucucugucu

SEQ ID NO: 2950083 - RNA, 19 nt, Artificial Sequence
  Description of Artificial Sequence: Synthetic oligonucleotide
uggggaauaccuauugacc

SEQ ID NO: 2950084 - RNA, 19 nt, Artificial Sequence
  Description of Artificial Sequence: Synthetic oligonucleotide
aauaggcaugaucucuguc

SEQ ID NO: 2950085 - RNA, 19 nt, Artificial Sequence
  Description of Artificial Sequence: Synthetic oligonucleotide
caugcuucaucaaugcagc

SEQ ID NO: 2950086 - RNA, 19 nt, Artificial Sequence
  Description of Artificial Sequence: Synthetic oligonucleotide
aaaugccaccugcaggugg

SEQ ID NO: 2950087 - RNA, 19 nt, Artificial Sequence
  Description of Artificial Sequence: Synthetic oligonucleotide
ucuacucugaagagccugg

SEQ ID NO: 2950088 - RNA, 19 nt, Artificial Sequence
  Description of Artificial Sequence: Synthetic oligonucleotide
uucucauacacaccgcggc

SEQ ID NO: 2950089 - RNA, 19 nt, Artificial Sequence
  Description of Artificial Sequence: Synthetic oligonucleotide
aacccugauccucacaucu

SEQ ID NO: 2950090 - RNA, 19 nt, Artificial Sequence
  Description of Artificial Sequence: Synthetic oligonucleotide
uguaauaggcaugaucucu

SEQ ID NO: 2950091 - RNA, 19 nt, Artificial Sequence
  Description of Artificial Sequence: Synthetic oligonucleotide
uauugacauagcaaggguc

SEQ ID NO: 2950092 - RNA, 19 nt, Artificial Sequence
  Description of Artificial Sequence: Synthetic oligonucleotide
ucccguacaguucucauac

SEQ ID NO: 2950093 - RNA, 19 nt, Artificial Sequence
  Description of Artificial Sequence: Synthetic oligonucleotide
  modified_base (18)..(18): a, c, u, g, unknown or other
ucagaugugccuuccacnc

SEQ ID NO: 2950094 - RNA, 19 nt, Artificial Sequence
  Description of Artificial Sequence: Synthetic oligonucleotide
aggccauuuggucuguagc

SEQ ID NO: 2950095 - RNA, 19 nt, Artificial Sequence
  Description of Artificial Sequence: Synthetic oligonucleotide
guacaguucucauacacac

SEQ ID NO: 2950096 - RNA, 19 nt, Artificial Sequence
  Description of Artificial Sequence: Synthetic oligonucleotide
ugauccucacaucugaaau

SEQ ID NO: 2950097 - RNA, 19 nt, Artificial Sequence
  Description of Artificial Sequence: Synthetic oligonucleotide
auugcguuguaauaggcau

SEQ ID NO: 2950098 - RNA, 19 nt, Artificial Sequence
  Description of Artificial Sequence: Synthetic oligonucleotide
uggucuguagcuugaaccc

SEQ ID NO: 2950099 - RNA, 19 nt, Artificial Sequence
  Description of Artificial Sequence: Synthetic oligonucleotide
guuguaauaggcaugaucu

SEQ ID NO: 2950100 - RNA, 19 nt, Artificial Sequence
  Description of Artificial Sequence: Synthetic oligonucleotide
agggcaguaggccauuugg

SEQ ID NO: 2950101 - RNA, 19 nt, Artificial Sequence
  Description of Artificial Sequence: Synthetic oligonucleotide
uauugacccacgcuguccc

SEQ ID NO: 2950102 - RNA, 19 nt, Artificial Sequence
  Description of Artificial Sequence: Synthetic oligonucleotide
aaugccaccugcagguggc

SEQ ID NO: 2950103 - RNA, 19 nt, Artificial Sequence
  Description of Artificial Sequence: Synthetic oligonucleotide
ugaacccugauccucacau

SEQ ID NO: 2950104 - RNA, 19 nt, Artificial Sequence
  Description of Artificial Sequence: Synthetic oligonucleotide
uucacgggcaaguagcaca

SEQ ID NO: 2950105 - RNA, 19 nt, Artificial Sequence
  Description of Artificial Sequence: Synthetic oligonucleotide
aggcaugcuucaucaaugc

SEQ ID NO: 2950106 - RNA, 19 nt, Artificial Sequence
  Description of Artificial Sequence: Synthetic oligonucleotide
  modified_base (16)..(16): a, c, u, g, unknown or other
agaugugccuuccacncgu

SEQ ID NO: 2950107 - RNA, 19 nt, Artificial Sequence
  Description of Artificial Sequence: Synthetic oligonucleotide
  modified_base (13)..(13): a, c, u, g, unknown or other
ugugccuuccacncguacc

SEQ ID NO: 2950108 - RNA, 19 nt, Artificial Sequence
  Description of Artificial Sequence: Synthetic oligonucleotide
aaugcagcaucaccgugca

SEQ ID NO: 2950109 - RNA, 19 nt, Artificial Sequence
  Description of Artificial Sequence: Synthetic oligonucleotide
gguauugacauagcaaggg

SEQ ID NO: 2950110 - RNA, 19 nt, Artificial Sequence
  Description of Artificial Sequence: Synthetic oligonucleotide
gauccucacaucugaaaug

SEQ ID NO: 2950111 - RNA, 19 nt, Artificial Sequence
  Description of Artificial Sequence: Synthetic oligonucleotide
agcaagggucgucaaauag

SEQ ID NO: 2950112 - RNA, 19 nt, Artificial Sequence
  Description of Artificial Sequence: Synthetic oligonucleotide
cugaaaugccaccugcagg

SEQ ID NO: 2950113 - RNA, 19 nt, Artificial Sequence
  Description of Artificial Sequence: Synthetic oligonucleotide
ucucugguggggaauaccu

SEQ ID NO: 2950114 - RNA, 19 nt, Artificial Sequence
  Description of Artificial Sequence: Synthetic oligonucleotide
ucuucacuuucccaagugu

SEQ ID NO: 2950115 - RNA, 19 nt, Artificial Sequence
  Description of Artificial Sequence: Synthetic oligonucleotide
  modified_base (19)..(19): a, c, u, g, unknown or other
uucagaugugccuuccacn

SEQ ID NO: 2950116 - RNA, 19 nt, Artificial Sequence
  Description of Artificial Sequence: Synthetic oligonucleotide
uggcauugcguuguaauag

SEQ ID NO: 2950117 - RNA, 19 nt, Artificial Sequence
  Description of Artificial Sequence: Synthetic oligonucleotide
cucacaucugaaaugccac

SEQ ID NO: 2950118 - RNA, 19 nt, Artificial Sequence
  Description of Artificial Sequence: Synthetic oligonucleotide
uucacuuucccaaguguuc

SEQ ID NO: 2950119 - RNA, 19 nt, Artificial Sequence
  Description of Artificial Sequence: Synthetic oligonucleotide
ucgucaaauagauccacuc

SEQ ID NO: 2950120 - RNA, 19 nt, Artificial Sequence
  Description of Artificial Sequence: Synthetic oligonucleotide
agagccuggguauugacau

SEQ ID NO: 2950121 - RNA, 19 nt, Artificial Sequence
  Description of Artificial Sequence: Synthetic oligonucleotide
aguagcacagcuucucaca

SEQ ID NO: 2950122 - RNA, 19 nt, Artificial Sequence
  Description of Artificial Sequence: Synthetic oligonucleotide
gaguucacgggcaaguagc

SEQ ID NO: 2950123 - RNA, 19 nt, Artificial Sequence
  Description of Artificial Sequence: Synthetic oligonucleotide
ggggaauaccuauugaccc

SEQ ID NO: 2950124 - RNA, 19 nt, Artificial Sequence
  Description of Artificial Sequence: Synthetic oligonucleotide
agaguucacgggcaaguag

SEQ ID NO: 2950125 - RNA, 19 nt, Artificial Sequence
  Description of Artificial Sequence: Synthetic oligonucleotide
caccgaauagggcaguagg

SEQ ID NO: 2950126 - RNA, 19 nt, Artificial Sequence
  Description of Artificial Sequence: Synthetic oligonucleotide
uaccucuucacuuucccaa

SEQ ID NO: 2950127 - RNA, 19 nt, Artificial Sequence
  Description of Artificial Sequence: Synthetic oligonucleotide
caucugaaaugccaccugc

SEQ ID NO: 2950128 - RNA, 19 nt, Artificial Sequence
  Description of Artificial Sequence: Synthetic oligonucleotide
ugcguuguaauaggcauga

SEQ ID NO: 2950129 - RNA, 19 nt, Artificial Sequence
  Description of Artificial Sequence: Synthetic oligonucleotide
guggggaauaccuauugac

SEQ ID NO: 2950130 - RNA, 19 nt, Artificial Sequence
  Description of Artificial Sequence: Synthetic oligonucleotide
ucacgggcaaguagcacag

SEQ ID NO: 2950131 - RNA, 19 nt, Artificial Sequence
  Description of Artificial Sequence: Synthetic oligonucleotide
uuagaguucacgggcaagu

SEQ ID NO: 2950132 - RNA, 19 nt, Artificial Sequence
  Description of Artificial Sequence: Synthetic oligonucleotide
ugcagcaucaccgugcauc

SEQ ID NO: 2950133 - RNA, 19 nt, Artificial Sequence
  Description of Artificial Sequence: Synthetic oligonucleotide
  modified_base (7)..(7): a, c, u, g, unknown or other
uuccacncguaccucuuca

SEQ ID NO: 2950134 - RNA, 19 nt, Artificial Sequence
  Description of Artificial Sequence: Synthetic oligonucleotide
uacaguucucauacacacc

SEQ ID NO: 2950135 - RNA, 19 nt, Artificial Sequence
  Description of Artificial Sequence: Synthetic oligonucleotide
ggcacuuagaguucacggg

SEQ ID NO: 2950136 - RNA, 19 nt, Artificial Sequence
  Description of Artificial Sequence: Synthetic oligonucleotide
accgaauagggcaguaggc

SEQ ID NO: 2950137 - RNA, 19 nt, Artificial Sequence
  Description of Artificial Sequence: Synthetic oligonucleotide
ugguggggaauaccuauug

SEQ ID NO: 2950138 - RNA, 19 nt, Artificial Sequence
  Description of Artificial Sequence: Synthetic oligonucleotide
ucugguggggaauaccuau

SEQ ID NO: 2950139 - RNA, 19 nt, Artificial Sequence
  Description of Artificial Sequence: Synthetic oligonucleotide
auaccuauugacccacgcu

SEQ ID NO: 2950140 - RNA, 19 nt, Artificial Sequence
  Description of Artificial Sequence: Synthetic oligonucleotide
ucucauacacaccgcggca

SEQ ID NO: 2950141 - RNA, 19 nt, Artificial Sequence
  Description of Artificial Sequence: Synthetic oligonucleotide
cacaccgcggcacuuagag

SEQ ID NO: 2950142 - RNA, 19 nt, Artificial Sequence
  Description of Artificial Sequence: Synthetic oligonucleotide
acucugaagagccugggua

SEQ ID NO: 2950143 - RNA, 19 nt, Artificial Sequence
  Description of Artificial Sequence: Synthetic oligonucleotide
uuuggucuguagcuugaac

SEQ ID NO: 2950144 - RNA, 19 nt, Artificial Sequence
  Description of Artificial Sequence: Synthetic oligonucleotide
aucaaugcagcaucaccgu

SEQ ID NO: 2950145 - RNA, 19 nt, Artificial Sequence
  Description of Artificial Sequence: Synthetic oligonucleotide
guaauaggcaugaucucug

SEQ ID NO: 2950146 - RNA, 19 nt, Artificial Sequence
  Description of Artificial Sequence: Synthetic oligonucleotide
ucucucuacucugaagagc

SEQ ID NO: 2950147 - RNA, 19 nt, Artificial Sequence
  Description of Artificial Sequence: Synthetic oligonucleotide
uugcguuguaauaggcaug

SEQ ID NO: 2950148 - RNA, 19 nt, Artificial Sequence
  Description of Artificial Sequence: Synthetic oligonucleotide
caggcaugcuucaucaaug

SEQ ID NO: 2950149 - RNA, 19 nt, Artificial Sequence
  Description of Artificial Sequence: Synthetic oligonucleotide
ucacuuucccaaguguuca

SEQ ID NO: 2950150 - RNA, 19 nt, Artificial Sequence
  Description of Artificial Sequence: Synthetic oligonucleotide
auagcaagggucgucaaau

SEQ ID NO: 2950151 - RNA, 19 nt, Artificial Sequence
  Description of Artificial Sequence: Synthetic oligonucleotide
cucacaccgaauagggcag

SEQ ID NO: 2950152 - RNA, 19 nt, Artificial Sequence
  Description of Artificial Sequence: Synthetic oligonucleotide
  modified_base (14)..(14): a, c, u, g, unknown or other
augugccuuccacncguac

SEQ ID NO: 2950153 - RNA, 19 nt, Artificial Sequence
  Description of Artificial Sequence: Synthetic oligonucleotide
auagauccacucggcaggc

SEQ ID NO: 2950154 - RNA, 19 nt, Artificial Sequence
  Description of Artificial Sequence: Synthetic oligonucleotide
ucucucucucucuacucug

SEQ ID NO: 2950155 - RNA, 19 nt, Artificial Sequence
  Description of Artificial Sequence: Synthetic oligonucleotide
acaucugaaaugccaccug

SEQ ID NO: 2950156 - RNA, 19 nt, Artificial Sequence
  Description of Artificial Sequence: Synthetic oligonucleotide
agcaucaccgugcaucccu

SEQ ID NO: 2950157 - RNA, 19 nt, Artificial Sequence
  Description of Artificial Sequence: Synthetic oligonucleotide
cuucagaugugccuuccac

SEQ ID NO: 2950158 - RNA, 19 nt, Artificial Sequence
  Description of Artificial Sequence: Synthetic oligonucleotide
agcuucucacaccgaauag

SEQ ID NO: 2950159 - RNA, 19 nt, Artificial Sequence
  Description of Artificial Sequence: Synthetic oligonucleotide
gaucucugucuucagaugu

SEQ ID NO: 2950160 - RNA, 19 nt, Artificial Sequence
  Description of Artificial Sequence: Synthetic oligonucleotide
gugcaucccucucuggugg

SEQ ID NO: 2950161 - RNA, 19 nt, Artificial Sequence
  Description of Artificial Sequence: Synthetic oligonucleotide
gcaugcuucaucaaugcag

SEQ ID NO: 2950162 - RNA, 19 nt, Artificial Sequence
  Description of Artificial Sequence: Synthetic oligonucleotide
uucucacaccgaauagggc

SEQ ID NO: 2950163 - RNA, 19 nt, Artificial Sequence
  Description of Artificial Sequence: Synthetic oligonucleotide
ggcauugcguuguaauagg

SEQ ID NO: 2950164 - RNA, 19 nt, Artificial Sequence
  Description of Artificial Sequence: Synthetic oligonucleotide
uaggccauuuggucuguag

SEQ ID NO: 2950165 - RNA, 19 nt, Artificial Sequence
  Description of Artificial Sequence: Synthetic oligonucleotide
uuguaauaggcaugaucuc

SEQ ID NO: 2950166 - RNA, 19 nt, Artificial Sequence
  Description of Artificial Sequence: Synthetic oligonucleotide
uaauaggcaugaucucugu

SEQ ID NO: 2950167 - RNA, 19 nt, Artificial Sequence
  Description of Artificial Sequence: Synthetic oligonucleotide
ucucugucuucagaugugc

SEQ ID NO: 2950168 - RNA, 19 nt, Artificial Sequence
  Description of Artificial Sequence: Synthetic oligonucleotide
gcacuuagaguucacgggc

SEQ ID NO: 2950169 - RNA, 19 nt, Artificial Sequence
  Description of Artificial Sequence: Synthetic oligonucleotide
guucucauacacaccgcgg

SEQ ID NO: 2950170 - RNA, 19 nt, Artificial Sequence
  Description of Artificial Sequence: Synthetic oligonucleotide
cucucucuacucugaagag

SEQ ID NO: 2950171 - RNA, 19 nt, Artificial Sequence
  Description of Artificial Sequence: Synthetic oligonucleotide
agccuggguauugacauag

SEQ ID NO: 2950172 - RNA, 19 nt, Artificial Sequence
  Description of Artificial Sequence: Synthetic oligonucleotide
uacacaccgcggcacuuag

SEQ ID NO: 2950173 - RNA, 19 nt, Artificial Sequence
  Description of Artificial Sequence: Synthetic oligonucleotide
agcuugaacccugauccuc

SEQ ID NO: 2950174 - RNA, 19 nt, Artificial Sequence
  Description of Artificial Sequence: Synthetic oligonucleotide
ucauacacaccgcggcacu

SEQ ID NO: 2950175 - RNA, 19 nt, Artificial Sequence
  Description of Artificial Sequence: Synthetic oligonucleotide
gacauagcaagggucguca

SEQ ID NO: 2950176 - RNA, 19 nt, Artificial Sequence
  Description of Artificial Sequence: Synthetic oligonucleotide
accucuucacuuucccaag

SEQ ID NO: 2950177 - RNA, 19 nt, Artificial Sequence
  Description of Artificial Sequence: Synthetic oligonucleotide
guagcacagcuucucacac

SEQ ID NO: 2950178 - RNA, 19 nt, Artificial Sequence
  Description of Artificial Sequence: Synthetic oligonucleotide
cagguggcaguuuccgugg

SEQ ID NO: 2950179 - RNA, 19 nt, Artificial Sequence
  Description of Artificial Sequence: Synthetic oligonucleotide
acgggcaaguagcacagcu

SEQ ID NO: 2950180 - RNA, 19 nt, Artificial Sequence
  Description of Artificial Sequence: Synthetic oligonucleotide
cauugcguuguaauaggca

SEQ ID NO: 2950181 - RNA, 19 nt, Artificial Sequence
  Description of Artificial Sequence: Synthetic oligonucleotide
aucaccgugcaucccucuc

SEQ ID NO: 2950182 - RNA, 19 nt, Artificial Sequence
  Description of Artificial Sequence: Synthetic oligonucleotide
ucucuccuccuccuccucc

SEQ ID NO: 2950183 - RNA, 19 nt, Artificial Sequence
  Description of Artificial Sequence: Synthetic oligonucleotide
caguaggccauuuggucug

SEQ ID NO: 2950184 - RNA, 19 nt, Artificial Sequence
  Description of Artificial Sequence: Synthetic oligonucleotide
ucuucagaugugccuucca

SEQ ID NO: 2950185 - RNA, 19 nt, Artificial Sequence
  Description of Artificial Sequence: Synthetic oligonucleotide
uaggcaugaucucugucuu

SEQ ID NO: 2950186 - RNA, 19 nt, Artificial Sequence
  Description of Artificial Sequence: Synthetic oligonucleotide
ucaccgugcaucccucucu

SEQ ID NO: 2950187 - RNA, 19 nt, Artificial Sequence
  Description of Artificial Sequence: Synthetic oligonucleotide
cuggguauugacauagcaa

SEQ ID NO: 2950188 - RNA, 19 nt, Artificial Sequence
  Description of Artificial Sequence: Synthetic oligonucleotide
cuauugacccacgcugucc

SEQ ID NO: 2950189 - RNA, 19 nt, Artificial Sequence
  Description of Artificial Sequence: Synthetic oligonucleotide
uacucugaagagccugggu

SEQ ID NO: 2950190 - RNA, 19 nt, Artificial Sequence
  Description of Artificial Sequence: Synthetic oligonucleotide
caaauagauccacucggca

SEQ ID NO: 2950191 - RNA, 19 nt, Artificial Sequence
  Description of Artificial Sequence: Synthetic oligonucleotide
ugcuucaucaaugcagcau

SEQ ID NO: 2950192 - RNA, 19 nt, Artificial Sequence
  Description of Artificial Sequence: Synthetic oligonucleotide
uuuccguggcauugcguug

SEQ ID NO: 2950193 - RNA, 19 nt, Artificial Sequence
  Description of Artificial Sequence: Synthetic oligonucleotide
cucuucacuuucccaagug

SEQ ID NO: 2950194 - RNA, 19 nt, Artificial Sequence
  Description of Artificial Sequence: Synthetic oligonucleotide
aagagccuggguauugaca

SEQ ID NO: 2950195 - RNA, 19 nt, Artificial Sequence
  Description of Artificial Sequence: Synthetic oligonucleotide
cucuccuccuccucucucc

SEQ ID NO: 2950196 - RNA, 19 nt, Artificial Sequence
  Description of Artificial Sequence: Synthetic oligonucleotide
gaagagccuggguauugac

SEQ ID NO: 2950197 - RNA, 19 nt, Artificial Sequence
  Description of Artificial Sequence: Synthetic oligonucleotide
gcuucucacaccgaauagg

SEQ ID NO: 2950198 - RNA, 19 nt, Artificial Sequence
  Description of Artificial Sequence: Synthetic oligonucleotide
agauccacucggcaggcau

SEQ ID NO: 2950199 - RNA, 19 nt, Artificial Sequence
  Description of Artificial Sequence: Synthetic oligonucleotide
gaauaccuauugacccacg

SEQ ID NO: 2950200 - RNA, 19 nt, Artificial Sequence
  Description of Artificial Sequence: Synthetic oligonucleotide
uagcacagcuucucacacc

SEQ ID NO: 2950201 - RNA, 19 nt, Artificial Sequence
  Description of Artificial Sequence: Synthetic oligonucleotide
ucucucucucucucuacuc

SEQ ID NO: 2950202 - RNA, 19 nt, Artificial Sequence
  Description of Artificial Sequence: Synthetic oligonucleotide
uccucucucucucucucuc

SEQ ID NO: 2950203 - RNA, 19 nt, Artificial Sequence
  Description of Artificial Sequence: Synthetic oligonucleotide
auugacccacgcugucccg

SEQ ID NO: 2950204 - RNA, 19 nt, Artificial Sequence
  Description of Artificial Sequence: Synthetic oligonucleotide
ugaagagccuggguauuga

SEQ ID NO: 2950205 - RNA, 19 nt, Artificial Sequence
  Description of Artificial Sequence: Synthetic oligonucleotide
cucuacucugaagagccug

SEQ ID NO: 2950206 - RNA, 19 nt, Artificial Sequence
  Description of Artificial Sequence: Synthetic oligonucleotide
  modified_base (17)..(17): a, c, u, g, unknown or other
cagaugugccuuccacncg

SEQ ID NO: 2950207 - RNA, 19 nt, Artificial Sequence
  Description of Artificial Sequence: Synthetic oligonucleotide
cacucggcaggcaugcuuc

SEQ ID NO: 2950208 - RNA, 19 nt, Artificial Sequence
  Description of Artificial Sequence: Synthetic oligonucleotide
cgucaaauagauccacucg

SEQ ID NO: 2950209 - RNA, 19 nt, Artificial Sequence
  Description of Artificial Sequence: Synthetic oligonucleotide
  modified_base (6)..(6): a, c, u, g, unknown or other
uccacncguaccucuucac

SEQ ID NO: 2950210 - RNA, 19 nt, Artificial Sequence
  Description of Artificial Sequence: Synthetic oligonucleotide
ucucucucucuacucugaa

SEQ ID NO: 2950211 - RNA, 19 nt, Artificial Sequence
  Description of Artificial Sequence: Synthetic oligonucleotide
uccuccuccucucucucuc

SEQ ID NO: 2950212 - RNA, 19 nt, Artificial Sequence
  Description of Artificial Sequence: Synthetic oligonucleotide
  modified_base (3)..(3): a, c, u, g, unknown or other
acncguaccucuucacuuu

SEQ ID NO: 2950213 - RNA, 19 nt, Artificial Sequence
  Description of Artificial Sequence: Synthetic oligonucleotide
ucggcaggcaugcuucauc

SEQ ID NO: 2950214 - RNA, 19 nt, Artificial Sequence
  Description of Artificial Sequence: Synthetic oligonucleotide
uugaacccugauccucaca

SEQ ID NO: 2950215 - RNA, 19 nt, Artificial Sequence
  Description of Artificial Sequence: Synthetic oligonucleotide
aggcaugaucucugucuuc

SEQ ID NO: 2950216 - RNA, 19 nt, Artificial Sequence
  Description of Artificial Sequence: Synthetic oligonucleotide
acuuagaguucacgggcaa

SEQ ID NO: 2950217 - RNA, 19 nt, Artificial Sequence
  Description of Artificial Sequence: Synthetic oligonucleotide
gcagguggcaguuuccgug

SEQ ID NO: 2950218 - RNA, 19 nt, Artificial Sequence
  Description of Artificial Sequence: Synthetic oligonucleotide
ugcaucccucucugguggg

SEQ ID NO: 2950219 - RNA, 19 nt, Artificial Sequence
  Description of Artificial Sequence: Synthetic oligonucleotide
aagggucgucaaauagauc

SEQ ID NO: 2950220 - RNA, 19 nt, Artificial Sequence
  Description of Artificial Sequence: Synthetic oligonucleotide
agguggcaguuuccguggc

SEQ ID NO: 2950221 - RNA, 19 nt, Artificial Sequence
  Description of Artificial Sequence: Synthetic oligonucleotide
caugaucucugucuucaga

SEQ ID NO: 2950222 - RNA, 19 nt, Artificial Sequence
  Description of Artificial Sequence: Synthetic oligonucleotide
cucauacacaccgcggcac

SEQ ID NO: 2950223 - RNA, 19 nt, Artificial Sequence
  Description of Artificial Sequence: Synthetic oligonucleotide
ggguauugacauagcaagg

SEQ ID NO: 2950224 - RNA, 19 nt, Artificial Sequence
  Description of Artificial Sequence: Synthetic oligonucleotide
guauugacauagcaagggu

SEQ ID NO: 2950225 - RNA, 19 nt, Artificial Sequence
  Description of Artificial Sequence: Synthetic oligonucleotide
caguucucauacacaccgc

SEQ ID NO: 2950226 - RNA, 19 nt, Artificial Sequence
  Description of Artificial Sequence: Synthetic oligonucleotide
gggcaaguagcacagcuuc

SEQ ID NO: 2950227 - RNA, 19 nt, Artificial Sequence
  Description of Artificial Sequence: Synthetic oligonucleotide
ucucucucucucucucucu

SEQ ID NO: 2950228 - RNA, 19 nt, Artificial Sequence
  Description of Artificial Sequence: Synthetic oligonucleotide
ucucucucucucucucuac

SEQ ID NO: 2950229 - RNA, 19 nt, Artificial Sequence
  Description of Artificial Sequence: Synthetic oligonucleotide
ucucuacucugaagagccu

SEQ ID NO: 2950230 - RNA, 19 nt, Artificial Sequence
  Description of Artificial Sequence: Synthetic oligonucleotide
cuacucugaagagccuggg

SEQ ID NO: 2950231 - RNA, 19 nt, Artificial Sequence
  Description of Artificial Sequence: Synthetic oligonucleotide
uuccguggcauugcguugu

SEQ ID NO: 2950232 - RNA, 19 nt, Artificial Sequence
  Description of Artificial Sequence: Synthetic oligonucleotide
uugacauagcaagggucgu

SEQ ID NO: 2950233 - RNA, 19 nt, Artificial Sequence
  Description of Artificial Sequence: Synthetic oligonucleotide
ugucuucagaugugccuuc

SEQ ID NO: 2950234 - RNA, 19 nt, Artificial Sequence
  Description of Artificial Sequence: Synthetic oligonucleotide
ggcaguaggccauuugguc

SEQ ID NO: 2950235 - RNA, 19 nt, Artificial Sequence
  Description of Artificial Sequence: Synthetic oligonucleotide
gucuguagcuugaacccug

SEQ ID NO: 2950236 - RNA, 19 nt, Artificial Sequence
  Description of Artificial Sequence: Synthetic oligonucleotide
cuugaacccugauccucac

SEQ ID NO: 2950237 - RNA, 19 nt, Artificial Sequence
  Description of Artificial Sequence: Synthetic oligonucleotide
gcagcaucaccgugcaucc

SEQ ID NO: 2950238 - RNA, 19 nt, Artificial Sequence
  Description of Artificial Sequence: Synthetic oligonucleotide
cucucucucucucucucuc

SEQ ID NO: 2950239 - RNA, 19 nt, Artificial Sequence
  Description of Artificial Sequence: Synthetic oligonucleotide
cacuuagaguucacgggca

SEQ ID NO: 2950240 - RNA, 19 nt, Artificial Sequence
  Description of Artificial Sequence: Synthetic oligonucleotide
acaccgaauagggcaguag

SEQ ID NO: 2950241 - RNA, 19 nt, Artificial Sequence
  Description of Artificial Sequence: Synthetic oligonucleotide
uagcuugaacccugauccu

SEQ ID NO: 2950242 - RNA, 19 nt, Artificial Sequence
  Description of Artificial Sequence: Synthetic oligonucleotide
cauuuggucuguagcuuga

SEQ ID NO: 2950243 - RNA, 19 nt, Artificial Sequence
  Description of Artificial Sequence: Synthetic oligonucleotide
ugacauagcaagggucguc

SEQ ID NO: 2950244 - RNA, 19 nt, Artificial Sequence
  Description of Artificial Sequence: Synthetic oligonucleotide
ugucccguacaguucucau

SEQ ID NO: 2950245 - RNA, 19 nt, Artificial Sequence
  Description of Artificial Sequence: Synthetic oligonucleotide
aucugaaaugccaccugca

SEQ ID NO: 2950246 - RNA, 19 nt, Artificial Sequence
  Description of Artificial Sequence: Synthetic oligonucleotide
caaguagcacagcuucuca

SEQ ID NO: 2950247 - RNA, 19 nt, Artificial Sequence
  Description of Artificial Sequence: Synthetic oligonucleotide
gggaauaccuauugaccca

SEQ ID NO: 2950248 - RNA, 19 nt, Artificial Sequence
  Description of Artificial Sequence: Synthetic oligonucleotide
guuuccguggcauugcguu

SEQ ID NO: 2950249 - RNA, 19 nt, Artificial Sequence
  Description of Artificial Sequence: Synthetic oligonucleotide
gauccacucggcaggcaug

SEQ ID NO: 2950250 - RNA, 19 nt, Artificial Sequence
  Description of Artificial Sequence: Synthetic oligonucleotide
ggaauaccuauugacccac

SEQ ID NO: 2950251 - RNA, 19 nt, Artificial Sequence
  Description of Artificial Sequence: Synthetic oligonucleotide
caagggucgucaaauagau

SEQ ID NO: 2950252 - RNA, 19 nt, Artificial Sequence
  Description of Artificial Sequence: Synthetic oligonucleotide
gaacccugauccucacauc

SEQ ID NO: 2950253 - RNA, 19 nt, Artificial Sequence
  Description of Artificial Sequence: Synthetic oligonucleotide
guaccucuucacuuuccca

SEQ ID NO: 2950254 - RNA, 19 nt, Artificial Sequence
  Description of Artificial Sequence: Synthetic oligonucleotide
ccgaauagggcaguaggcc

SEQ ID NO: 2950255 - RNA, 19 nt, Artificial Sequence
  Description of Artificial Sequence: Synthetic oligonucleotide
cugauccucacaucugaaa

SEQ ID NO: 2950256 - RNA, 19 nt, Artificial Sequence
  Description of Artificial Sequence: Synthetic oligonucleotide
uccuccucucucucucucu

SEQ ID NO: 2950257 - RNA, 19 nt, Artificial Sequence
  Description of Artificial Sequence: Synthetic oligonucleotide
ccguacaguucucauacac

SEQ ID NO: 2950258 - RNA, 19 nt, Artificial Sequence
  Description of Artificial Sequence: Synthetic oligonucleotide
gaaaugccaccugcaggug

SEQ ID NO: 2950259 - RNA, 19 nt, Artificial Sequence
  Description of Artificial Sequence: Synthetic oligonucleotide
cguuguaauaggcaugauc

SEQ ID NO: 2950260 - RNA, 19 nt, Artificial Sequence
  Description of Artificial Sequence: Synthetic oligonucleotide
cugaagagccuggguauug

SEQ ID NO: 2950261 - RNA, 19 nt, Artificial Sequence
  Description of Artificial Sequence: Synthetic oligonucleotide
guggcauugcguuguaaua

SEQ ID NO: 2950262 - RNA, 19 nt, Artificial Sequence
  Description of Artificial Sequence: Synthetic oligonucleotide
cucucugguggggaauacc

SEQ ID NO: 2950263 - RNA, 19 nt, Artificial Sequence
  Description of Artificial Sequence: Synthetic oligonucleotide
cacagcuucucacaccgaa

SEQ ID NO: 2950264 - RNA, 19 nt, Artificial Sequence
  Description of Artificial Sequence: Synthetic oligonucleotide
ggcaugaucucugucuuca

SEQ ID NO: 2950265 - RNA, 19 nt, Artificial Sequence
  Description of Artificial Sequence: Synthetic oligonucleotide
augcuucaucaaugcagca

SEQ ID NO: 2950266 - RNA, 19 nt, Artificial Sequence
  Description of Artificial Sequence: Synthetic oligonucleotide
accuauugacccacgcugu

SEQ ID NO: 2950267 - RNA, 19 nt, Artificial Sequence
  Description of Artificial Sequence: Synthetic oligonucleotide
aauagggcaguaggccauu

SEQ ID NO: 2950268 - RNA, 19 nt, Artificial Sequence
  Description of Artificial Sequence: Synthetic oligonucleotide
  modified_base (12)..(12): a, c, u, g, unknown or other
gugccuuccacncguaccu

SEQ ID NO: 2950269 - RNA, 19 nt, Artificial Sequence
  Description of Artificial Sequence: Synthetic oligonucleotide
  modified_base (2)..(2): a, c, u, g, unknown or other
cncguaccucuucacuuuc

SEQ ID NO: 2950270 - RNA, 19 nt, Artificial Sequence
  Description of Artificial Sequence: Synthetic oligonucleotide
ggcaguuuccguggcauug

SEQ ID NO: 2950271 - RNA, 19 nt, Artificial Sequence
  Description of Artificial Sequence: Synthetic oligonucleotide
aguucacgggcaaguagca

SEQ ID NO: 2950272 - RNA, 19 nt, Artificial Sequence
  Description of Artificial Sequence: Synthetic oligonucleotide
ccucacaucugaaaugcca

SEQ ID NO: 2950273 - RNA, 19 nt, Artificial Sequence
  Description of Artificial Sequence: Synthetic oligonucleotide
cauagcaagggucgucaaa

SEQ ID NO: 2950274 - RNA, 19 nt, Artificial Sequence
  Description of Artificial Sequence: Synthetic oligonucleotide
cggcacuuagaguucacgg

SEQ ID NO: 2950275 - RNA, 19 nt, Artificial Sequence
  Description of Artificial Sequence: Synthetic oligonucleotide
accgugcaucccucucugg

SEQ ID NO: 2950276 - RNA, 19 nt, Artificial Sequence
  Description of Artificial Sequence: Synthetic oligonucleotide
uagcaagggucgucaaaua

SEQ ID NO: 2950277 - RNA, 19 nt, Artificial Sequence
  Description of Artificial Sequence: Synthetic oligonucleotide
ucugaagagccuggguauu

SEQ ID NO: 2950278 - RNA, 19 nt, Artificial Sequence
  Description of Artificial Sequence: Synthetic oligonucleotide
  modified_base (8)..(8): a, c, u, g, unknown or other
cuuccacncguaccucuuc

SEQ ID NO: 2950279 - RNA, 19 nt, Artificial Sequence
  Description of Artificial Sequence: Synthetic oligonucleotide
uugacccacgcugucccgu

SEQ ID NO: 2950280 - RNA, 19 nt, Artificial Sequence
  Description of Artificial Sequence: Synthetic oligonucleotide
cucucucucucuacucuga

SEQ ID NO: 2950281 - RNA, 19 nt, Artificial Sequence
  Description of Artificial Sequence: Synthetic oligonucleotide
cuucacuuucccaaguguu

SEQ ID NO: 2950282 - RNA, 19 nt, Artificial Sequence
  Description of Artificial Sequence: Synthetic oligonucleotide
uagaguucacgggcaagua

SEQ ID NO: 2950283 - RNA, 19 nt, Artificial Sequence
  Description of Artificial Sequence: Synthetic oligonucleotide
gcaagggucgucaaauaga

SEQ ID NO: 2950284 - RNA, 19 nt, Artificial Sequence
  Description of Artificial Sequence: Synthetic oligonucleotide
gucuucagaugugccuucc

SEQ ID NO: 2950285 - RNA, 19 nt, Artificial Sequence
  Description of Artificial Sequence: Synthetic oligonucleotide
cagcuucucacaccgaaua

SEQ ID NO: 2950286 - RNA, 19 nt, Artificial Sequence
  Description of Artificial Sequence: Synthetic oligonucleotide
uccuccuccuccuccucuc

SEQ ID NO: 2950287 - RNA, 19 nt, Artificial Sequence
  Description of Artificial Sequence: Synthetic oligonucleotide
acauagcaagggucgucaa

SEQ ID NO: 2950288 - RNA, 19 nt, Artificial Sequence
  Description of Artificial Sequence: Synthetic oligonucleotide
caccgugcaucccucucug

SEQ ID NO: 2950289 - RNA, 19 nt, Artificial Sequence
  Description of Artificial Sequence: Synthetic oligonucleotide
gguggggaauaccuauuga

SEQ ID NO: 2950290 - RNA, 19 nt, Artificial Sequence
  Description of Artificial Sequence: Synthetic oligonucleotide
gcaguaggccauuuggucu

SEQ ID NO: 2950291 - RNA, 19 nt, Artificial Sequence
  Description of Artificial Sequence: Synthetic oligonucleotide
  modified_base (4)..(4): a, c, u, g, unknown or other
cacncguaccucuucacuu

SEQ ID NO: 2950292 - RNA, 19 nt, Artificial Sequence
  Description of Artificial Sequence: Synthetic oligonucleotide
gcaaguagcacagcuucuc

SEQ ID NO: 2950293 - RNA, 19 nt, Artificial Sequence
  Description of Artificial Sequence: Synthetic oligonucleotide
caccgcggcacuuagaguu

SEQ ID NO: 2950294 - RNA, 19 nt, Artificial Sequence
  Description of Artificial Sequence: Synthetic oligonucleotide
ggccauuuggucuguagcu

SEQ ID NO: 2950295 - RNA, 19 nt, Artificial Sequence
  Description of Artificial Sequence: Synthetic oligonucleotide
ggucgucaaauagauccac

SEQ ID NO: 2950296 - RNA, 19 nt, Artificial Sequence
  Description of Artificial Sequence: Synthetic oligonucleotide
gcauugcguuguaauaggc

SEQ ID NO: 2950297 - RNA, 19 nt, Artificial Sequence
  Description of Artificial Sequence: Synthetic oligonucleotide
cguaccucuucacuuuccc

SEQ ID NO: 2950298 - RNA, 19 nt, Artificial Sequence
  Description of Artificial Sequence: Synthetic oligonucleotide
acccacgcugucccguaca

SEQ ID NO: 2950299 - RNA, 19 nt, Artificial Sequence
  Description of Artificial Sequence: Synthetic oligonucleotide
acaccgcggcacuuagagu

SEQ ID NO: 2950300 - RNA, 19 nt, Artificial Sequence
  Description of Artificial Sequence: Synthetic oligonucleotide
auuuggucuguagcuugaa

SEQ ID NO: 2950301 - RNA, 19 nt, Artificial Sequence
  Description of Artificial Sequence: Synthetic oligonucleotide
cacgcugucccguacaguu

SEQ ID NO: 2950302 - RNA, 19 nt, Artificial Sequence
  Description of Artificial Sequence: Synthetic oligonucleotide
gaauagggcaguaggccau

SEQ ID NO: 2950303 - RNA, 19 nt, Artificial Sequence
  Description of Artificial Sequence: Synthetic oligonucleotide
acucggcaggcaugcuuca

SEQ ID NO: 2950304 - RNA, 19 nt, Artificial Sequence
  Description of Artificial Sequence: Synthetic oligonucleotide
ccuggguauugacauagca

SEQ ID NO: 2950305 - RNA, 19 nt, Artificial Sequence
  Description of Artificial Sequence: Synthetic oligonucleotide
acagcuucucacaccgaau

SEQ ID NO: 2950306 - RNA, 19 nt, Artificial Sequence
  Description of Artificial Sequence: Synthetic oligonucleotide
guucacgggcaaguagcac

SEQ ID NO: 2950307 - RNA, 19 nt, Artificial Sequence
  Description of Artificial Sequence: Synthetic oligonucleotide
aguuuccguggcauugcgu

SEQ ID NO: 2950308 - RNA, 19 nt, Artificial Sequence
  Description of Artificial Sequence: Synthetic oligonucleotide
accgcggcacuuagaguuc

SEQ ID NO: 2950309 - RNA, 19 nt, Artificial Sequence
  Description of Artificial Sequence: Synthetic oligonucleotide
ucacaccgaauagggcagu

SEQ ID NO: 2950310 - RNA, 19 nt, Artificial Sequence
  Description of Artificial Sequence: Synthetic oligonucleotide
gcaugaucucugucuucag

SEQ ID NO: 2950311 - RNA, 19 nt, Artificial Sequence
  Description of Artificial Sequence: Synthetic oligonucleotide
cucucucucucucuacucu

SEQ ID NO: 2950312 - RNA, 19 nt, Artificial Sequence
  Description of Artificial Sequence: Synthetic oligonucleotide
ggcaugcuucaucaaugca

SEQ ID NO: 2950313 - RNA, 19 nt, Artificial Sequence
  Description of Artificial Sequence: Synthetic oligonucleotide
ucuccuccuccuccuccuc

SEQ ID NO: 2950314 - RNA, 19 nt, Artificial Sequence
  Description of Artificial Sequence: Synthetic oligonucleotide
acccugauccucacaucug

SEQ ID NO: 2950315 - RNA, 19 nt, Artificial Sequence
  Description of Artificial Sequence: Synthetic oligonucleotide
gcggcacuuagaguucacg

SEQ ID NO: 2950316 - RNA, 19 nt, Artificial Sequence
  Description of Artificial Sequence: Synthetic oligonucleotide
gucccguacaguucucaua

SEQ ID NO: 2950317 - RNA, 19 nt, Artificial Sequence
  Description of Artificial Sequence: Synthetic oligonucleotide
acgcugucccguacaguuc

SEQ ID NO: 2950318 - RNA, 19 nt, Artificial Sequence
  Description of Artificial Sequence: Synthetic oligonucleotide
ugacccacgcugucccgua

SEQ ID NO: 2950319 - RNA, 19 nt, Artificial Sequence
  Description of Artificial Sequence: Synthetic oligonucleotide
cuccuccucucucucucuc

SEQ ID NO: 2950320 - RNA, 19 nt, Artificial Sequence
  Description of Artificial Sequence: Synthetic oligonucleotide
cucucucucucucucucua

SEQ ID NO: 2950321 - RNA, 19 nt, Artificial Sequence
  Description of Artificial Sequence: Synthetic oligonucleotide
auacacaccgcggcacuua

SEQ ID NO: 2950322 - RNA, 19 nt, Artificial Sequence
  Description of Artificial Sequence: Synthetic oligonucleotide
aucccucucugguggggaa

SEQ ID NO: 2950323 - RNA, 19 nt, Artificial Sequence
  Description of Artificial Sequence: Synthetic oligonucleotide
cucucucucucucucuacu

SEQ ID NO: 2950324 - RNA, 19 nt, Artificial Sequence
  Description of Artificial Sequence: Synthetic oligonucleotide
uagauccacucggcaggca

SEQ ID NO: 2950325 - RNA, 19 nt, Artificial Sequence
  Description of Artificial Sequence: Synthetic oligonucleotide
cgaauagggcaguaggcca

SEQ ID NO: 2950326 - RNA, 19 nt, Artificial Sequence
  Description of Artificial Sequence: Synthetic oligonucleotide
ccuauugacccacgcuguc

SEQ ID NO: 2950327 - RNA, 19 nt, Artificial Sequence
  Description of Artificial Sequence: Synthetic oligonucleotide
gacccacgcugucccguac

SEQ ID NO: 2950328 - RNA, 19 nt, Artificial Sequence
  Description of Artificial Sequence: Synthetic oligonucleotide
uggcaguuuccguggcauu

SEQ ID NO: 2950329 - RNA, 19 nt, Artificial Sequence
  Description of Artificial Sequence: Synthetic oligonucleotide
gucgucaaauagauccacu

SEQ ID NO: 2950330 - RNA, 19 nt, Artificial Sequence
  Description of Artificial Sequence: Synthetic oligonucleotide
cucugguggggaauaccua

SEQ ID NO: 2950331 - RNA, 19 nt, Artificial Sequence
  Description of Artificial Sequence: Synthetic oligonucleotide
cgugcaucccucucuggug

SEQ ID NO: 2950332 - RNA, 19 nt, Artificial Sequence
  Description of Artificial Sequence: Synthetic oligonucleotide
cuccuccuccuccucucuc

SEQ ID NO: 2950333 - RNA, 19 nt, Artificial Sequence
  Description of Artificial Sequence: Synthetic oligonucleotide
gcaggcaugcuucaucaau

SEQ ID NO: 2950334 - RNA, 19 nt, Artificial Sequence
  Description of Artificial Sequence: Synthetic oligonucleotide
  modified_base (11)..(11): a, c, u, g, unknown or other
ugccuuccacncguaccuc

SEQ ID NO: 2950335 - RNA, 19 nt, Artificial Sequence
  Description of Artificial Sequence: Synthetic oligonucleotide
uccguggcauugcguugua

SEQ ID NO: 2950336 - RNA, 19 nt, Artificial Sequence
  Description of Artificial Sequence: Synthetic oligonucleotide
gagccuggguauugacaua

SEQ ID NO: 2950337 - RNA, 19 nt, Artificial Sequence
  Description of Artificial Sequence: Synthetic oligonucleotide
gguggcaguuuccguggca

SEQ ID NO: 2950338 - RNA, 19 nt, Artificial Sequence
  Description of Artificial Sequence: Synthetic oligonucleotide
cucucuccuccuccuccuc

SEQ ID NO: 2950339 - RNA, 19 nt, Artificial Sequence
  Description of Artificial Sequence: Synthetic oligonucleotide
cccugauccucacaucuga

SEQ ID NO: 2950340 - RNA, 19 nt, Artificial Sequence
  Description of Artificial Sequence: Synthetic oligonucleotide
cuccucucuccuccuccuc

SEQ ID NO: 2950341 - RNA, 19 nt, Artificial Sequence
  Description of Artificial Sequence: Synthetic oligonucleotide
ucccucucugguggggaau

SEQ ID NO: 2950342 - RNA, 19 nt, Artificial Sequence
  Description of Artificial Sequence: Synthetic oligonucleotide
caucccucucuggugggga

SEQ ID NO: 2950343 - RNA, 19 nt, Artificial Sequence
  Description of Artificial Sequence: Synthetic oligonucleotide
cugucuucagaugugccuu

SEQ ID NO: 2950344 - RNA, 19 nt, Artificial Sequence
  Description of Artificial Sequence: Synthetic oligonucleotide
cuccuccuccucucuccuc

SEQ ID NO: 2950345 - RNA, 19 nt, Artificial Sequence
  Description of Artificial Sequence: Synthetic oligonucleotide
cugucccguacaguucuca

SEQ ID NO: 2950346 - RNA, 19 nt, Artificial Sequence
  Description of Artificial Sequence: Synthetic oligonucleotide
ccuccucucucucucucuc

SEQ ID NO: 2950347 - RNA, 19 nt, Artificial Sequence
  Description of Artificial Sequence: Synthetic oligonucleotide
gcaucccucucuggugggg

SEQ ID NO: 2950348 - RNA, 19 nt, Artificial Sequence
  Description of Artificial Sequence: Synthetic oligonucleotide
guggcaguuuccguggcau

SEQ ID NO: 2950349 - RNA, 19 nt, Artificial Sequence
  Description of Artificial Sequence: Synthetic oligonucleotide
cagcaucaccgugcauccc

SEQ ID NO: 2950350 - RNA, 19 nt, Artificial Sequence
  Description of Artificial Sequence: Synthetic oligonucleotide
  modified_base (10)..(10): a, c, u, g, unknown or other
gccuuccacncguaccucu

SEQ ID NO: 2950351 - RNA, 19 nt, Artificial Sequence
  Description of Artificial Sequence: Synthetic oligonucleotide
cuccuccucucuccuccuc

SEQ ID NO: 2950352 - RNA, 19 nt, Artificial Sequence
  Description of Artificial Sequence: Synthetic oligonucleotide
cccacgcugucccguacag

SEQ ID NO: 2950353 - RNA, 19 nt, Artificial Sequence
  Description of Artificial Sequence: Synthetic oligonucleotide
auagggcaguaggccauuu

SEQ ID NO: 2950354 - RNA, 19 nt, Artificial Sequence
  Description of Artificial Sequence: Synthetic oligonucleotide
cucuccuccuccuccuccu

SEQ ID NO: 2950355 - RNA, 19 nt, Artificial Sequence
  Description of Artificial Sequence: Synthetic oligonucleotide
  modified_base (15)..(15): a, c, u, g, unknown or other
gaugugccuuccacncgua

SEQ ID NO: 2950356 - RNA, 19 nt, Artificial Sequence
  Description of Artificial Sequence: Synthetic oligonucleotide
cacgggcaaguagcacagc

SEQ ID NO: 2950357 - RNA, 19 nt, Artificial Sequence
  Description of Artificial Sequence: Synthetic oligonucleotide
uccacucggcaggcaugcu

SEQ ID NO: 2950358 - RNA, 19 nt, Artificial Sequence
  Description of Artificial Sequence: Synthetic oligonucleotide
ccugauccucacaucugaa

SEQ ID NO: 2950359 - RNA, 19 nt, Artificial Sequence
  Description of Artificial Sequence: Synthetic oligonucleotide
ggucuguagcuugaacccu

SEQ ID NO: 2950360 - RNA, 19 nt, Artificial Sequence
  Description of Artificial Sequence: Synthetic oligonucleotide
cugguggggaauaccuauu

SEQ ID NO: 2950361 - RNA, 19 nt, Artificial Sequence
  Description of Artificial Sequence: Synthetic oligonucleotide
augcagcaucaccgugcau

SEQ ID NO: 2950362 - RNA, 19 nt, Artificial Sequence
  Description of Artificial Sequence: Synthetic oligonucleotide
acacaccgcggcacuuaga

SEQ ID NO: 2950363 - RNA, 19 nt, Artificial Sequence
  Description of Artificial Sequence: Synthetic oligonucleotide
cuccucucucucucucucu

SEQ ID NO: 2950364 - RNA, 19 nt, Artificial Sequence
  Description of Artificial Sequence: Synthetic oligonucleotide
cggcaggcaugcuucauca

SEQ ID NO: 2950365 - RNA, 19 nt, Artificial Sequence
  Description of Artificial Sequence: Synthetic oligonucleotide
augccaccugcagguggca

SEQ ID NO: 2950366 - RNA, 19 nt, Artificial Sequence
  Description of Artificial Sequence: Synthetic oligonucleotide
caucaccgugcaucccucu

SEQ ID NO: 2950367 - RNA, 19 nt, Artificial Sequence
  Description of Artificial Sequence: Synthetic oligonucleotide
gccuggguauugacauagc

SEQ ID NO: 2950368 - RNA, 19 nt, Artificial Sequence
  Description of Artificial Sequence: Synthetic oligonucleotide
cacaccgaauagggcagua

SEQ ID NO: 2950369 - RNA, 19 nt, Artificial Sequence
  Description of Artificial Sequence: Synthetic oligonucleotide
ggcaggcaugcuucaucaa

SEQ ID NO: 2950370 - RNA, 19 nt, Artificial Sequence
  Description of Artificial Sequence: Synthetic oligonucleotide
gcaucaccgugcaucccuc

SEQ ID NO: 2950371 - RNA, 19 nt, Artificial Sequence
  Description of Artificial Sequence: Synthetic oligonucleotide
ggcaaguagcacagcuucu

SEQ ID NO: 2950372 - RNA, 19 nt, Artificial Sequence
  Description of Artificial Sequence: Synthetic oligonucleotide
gggcaguaggccauuuggu

SEQ ID NO: 2950373 - RNA, 19 nt, Artificial Sequence
  Description of Artificial Sequence: Synthetic oligonucleotide
cguggcauugcguuguaau

SEQ ID NO: 2950374 - RNA, 19 nt, Artificial Sequence
  Description of Artificial Sequence: Synthetic oligonucleotide
cuccuccuccuccuccucu

SEQ ID NO: 2950375 - RNA, 19 nt, Artificial Sequence
  Description of Artificial Sequence: Synthetic oligonucleotide
ccuccuccuccucucucuc

SEQ ID NO: 2950376 - RNA, 19 nt, Artificial Sequence
  Description of Artificial Sequence: Synthetic oligonucleotide
  modified_base (5)..(5): a, c, u, g, unknown or other
ccacncguaccucuucacu

SEQ ID NO: 2950377 - RNA, 19 nt, Artificial Sequence
  Description of Artificial Sequence: Synthetic oligonucleotide
gccaccugcagguggcagu

SEQ ID NO: 2950378 - RNA, 19 nt, Artificial Sequence
  Description of Artificial Sequence: Synthetic oligonucleotide
cuccuccuccucucucucu

SEQ ID NO: 2950379 - RNA, 19 nt, Artificial Sequence
  Description of Artificial Sequence: Synthetic oligonucleotide
ccucucugguggggaauac

SEQ ID NO: 2950380 - RNA, 19 nt, Artificial Sequence
  Description of Artificial Sequence: Synthetic oligonucleotide
gccauuuggucuguagcuu

SEQ ID NO: 2950381 - RNA, 19 nt, Artificial Sequence
  Description of Artificial Sequence: Synthetic oligonucleotide
cuguagcuugaacccugau

SEQ ID NO: 2950382 - RNA, 19 nt, Artificial Sequence
  Description of Artificial Sequence: Synthetic oligonucleotide
ccgugcaucccucucuggu

SEQ ID NO: 2950383 - RNA, 19 nt, Artificial Sequence
  Description of Artificial Sequence: Synthetic oligonucleotide
cccguacaguucucauaca

SEQ ID NO: 2950384 - RNA, 19 nt, Artificial Sequence
  Description of Artificial Sequence: Synthetic oligonucleotide
cauacacaccgcggcacuu

SEQ ID NO: 2950385 - RNA, 19 nt, Artificial Sequence
  Description of Artificial Sequence: Synthetic oligonucleotide
guaggccauuuggucugua

SEQ ID NO: 2950386 - RNA, 19 nt, Artificial Sequence
  Description of Artificial Sequence: Synthetic oligonucleotide
cgcugucccguacaguucu

SEQ ID NO: 2950387 - RNA, 19 nt, Artificial Sequence
  Description of Artificial Sequence: Synthetic oligonucleotide
gcugucccguacaguucuc

SEQ ID NO: 2950388 - RNA, 19 nt, Artificial Sequence
  Description of Artificial Sequence: Synthetic oligonucleotide
ccucucucucucucucucu

SEQ ID NO: 2950389 - RNA, 19 nt, Artificial Sequence
  Description of Artificial Sequence: Synthetic oligonucleotide
  modified_base (9)..(9): a, c, u, g, unknown or other
ccuuccacncguaccucuu

SEQ ID NO: 2950390 - RNA, 19 nt, Artificial Sequence
  Description of Artificial Sequence: Synthetic oligonucleotide
cgcggcacuuagaguucac

SEQ ID NO: 2950391 - RNA, 19 nt, Artificial Sequence
  Description of Artificial Sequence: Synthetic oligonucleotide
gcacagcuucucacaccga

SEQ ID NO: 2950392 - RNA, 19 nt, Artificial Sequence
  Description of Artificial Sequence: Synthetic oligonucleotide
cucggcaggcaugcuucau

SEQ ID NO: 2950393 - RNA, 19 nt, Artificial Sequence
  Description of Artificial Sequence: Synthetic oligonucleotide
cccucucugguggggaaua

SEQ ID NO: 2950394 - RNA, 19 nt, Artificial Sequence
  Description of Artificial Sequence: Synthetic oligonucleotide
ccacucggcaggcaugcuu

SEQ ID NO: 2950395 - RNA, 19 nt, Artificial Sequence
  Description of Artificial Sequence: Synthetic oligonucleotide
ccgcggcacuuagaguuca

SEQ ID NO: 2950396 - RNA, 19 nt, Artificial Sequence
  Description of Artificial Sequence: Synthetic oligonucleotide
ccuccuccucucucucucu

SEQ ID NO: 2950397 - RNA, 19 nt, Artificial Sequence
  Description of Artificial Sequence: Synthetic oligonucleotide
ccuccuccuccuccucucu

SEQ ID NO: 2950398 - RNA, 19 nt, Artificial Sequence
  Description of Artificial Sequence: Synthetic oligonucleotide
ccaccugcagguggcaguu

SEQ ID NO: 2950399 - RNA, 19 nt, Artificial Sequence
  Description of Artificial Sequence: Synthetic oligonucleotide
gcguuguaauaggcaugau

SEQ ID NO: 2950400 - RNA, 19 nt, Artificial Sequence
  Description of Artificial Sequence: Synthetic oligonucleotide
ccguggcauugcguuguaa

SEQ ID NO: 2950401 - RNA, 19 nt, Artificial Sequence
  Description of Artificial Sequence: Synthetic oligonucleotide
ccacgcugucccguacagu

SEQ ID NO: 2950402 - RNA, 19 nt, Artificial Sequence
  Description of Artificial Sequence: Synthetic oligonucleotide
caccugcagguggcaguuu

SEQ ID NO: 2950403 - RNA, 19 nt, Artificial Sequence
  Description of Artificial Sequence: Synthetic oligonucleotide
  modified_base (1)..(1): a, c, u, g, unknown or other
ncguaccucuucacuuucc

SEQ ID NO: 2950404 - RNA, 19 nt, Artificial Sequence
  Description of Artificial Sequence: Synthetic oligonucleotide
uuucacaugaagaauagag

SEQ ID NO: 2950405 - RNA, 19 nt, Artificial Sequence
  Description of Artificial Sequence: Synthetic oligonucleotide
uuuaaaagaguccugcugc

SEQ ID NO: 2950406 - RNA, 19 nt, Artificial Sequence
  Description of Artificial Sequence: Synthetic oligonucleotide
aauaaguugauuuuggcuu

SEQ ID NO: 2950407 - RNA, 19 nt, Artificial Sequence
  Description of Artificial Sequence: Synthetic oligonucleotide
uguucugcagcuaagaugu

SEQ ID NO: 2950408 - RNA, 19 nt, Artificial Sequence
  Description of Artificial Sequence: Synthetic oligonucleotide
ugaagaauagaguucuugg

SEQ ID NO: 2950409 - RNA, 19 nt, Artificial Sequence
  Description of Artificial Sequence: Synthetic oligonucleotide
aagaauagaguucuuggca

SEQ ID NO: 2950410 - RNA, 19 nt, Artificial Sequence
  Description of Artificial Sequence: Synthetic oligonucleotide
aagauuuguggacuucggc

SEQ ID NO: 2950411 - RNA, 19 nt, Artificial Sequence
  Description of Artificial Sequence: Synthetic oligonucleotide
aauggcuuuagccaagcug

SEQ ID NO: 2950412 - RNA, 19 nt, Artificial Sequence
  Description of Artificial Sequence: Synthetic oligonucleotide
ucaaaugucacggagcucc

SEQ ID NO: 2950413 - RNA, 19 nt, Artificial Sequence
  Description of Artificial Sequence: Synthetic oligonucleotide
agugcagucuuccagcagc

SEQ ID NO: 2950414 - RNA, 19 nt, Artificial Sequence
  Description of Artificial Sequence: Synthetic oligonucleotide
uaaccucugauuuaaaaga

SEQ ID NO: 2950415 - RNA, 19 nt, Artificial Sequence
  Description of Artificial Sequence: Synthetic oligonucleotide
agaagugcagucuuccagc

SEQ ID NO: 2950416 - RNA, 19 nt, Artificial Sequence
  Description of Artificial Sequence: Synthetic oligonucleotide
ucugauuuaaaagaguccu

SEQ ID NO: 2950417 - RNA, 19 nt, Artificial Sequence
  Description of Artificial Sequence: Synthetic oligonucleotide
aaaagaguccugcugccuc

SEQ ID NO: 2950418 - RNA, 19 nt, Artificial Sequence
  Description of Artificial Sequence: Synthetic oligonucleotide
uuugcucuguucuacuucg

SEQ ID NO: 2950419 - RNA, 19 nt, Artificial Sequence
  Description of Artificial Sequence: Synthetic oligonucleotide
aaugucacggagcuccuuc

SEQ ID NO: 2950420 - RNA, 19 nt, Artificial Sequence
  Description of Artificial Sequence: Synthetic oligonucleotide
guaaccucugauuuaaaag

SEQ ID NO: 2950421 - RNA, 19 nt, Artificial Sequence
  Description of Artificial Sequence: Synthetic oligonucleotide
agaauagaguucuuggcag

SEQ ID NO: 2950422 - RNA, 19 nt, Artificial Sequence
  Description of Artificial Sequence: Synthetic oligonucleotide
auuuaaaagaguccugcug

SEQ ID NO: 2950423 - RNA, 19 nt, Artificial Sequence
  Description of Artificial Sequence: Synthetic oligonucleotide
uuuggcuucggccucaaug

SEQ ID NO: 2950424 - RNA, 19 nt, Artificial Sequence
  Description of Artificial Sequence: Synthetic oligonucleotide
gaagaauagaguucuuggc

SEQ ID NO: 2950425 - RNA, 19 nt, Artificial Sequence
  Description of Artificial Sequence: Synthetic oligonucleotide
uuggcuucggccucaaugg

SEQ ID NO: 2950426 - RNA, 19 nt, Artificial Sequence
  Description of Artificial Sequence: Synthetic oligonucleotide
ugauuuaaaagaguccugc

SEQ ID NO: 2950427 - RNA, 19 nt, Artificial Sequence
  Description of Artificial Sequence: Synthetic oligonucleotide
guugauuuuggcuucggcc

SEQ ID NO: 2950428 - RNA, 19 nt, Artificial Sequence
  Description of Artificial Sequence: Synthetic oligonucleotide
ucuacuucguccucaaaug

SEQ ID NO: 2950429 - RNA, 19 nt, Artificial Sequence
  Description of Artificial Sequence: Synthetic oligonucleotide
auaaguugauuuuggcuuc

SEQ ID NO: 2950430 - RNA, 19 nt, Artificial Sequence
  Description of Artificial Sequence: Synthetic oligonucleotide
uucacaugaagaauagagu

SEQ ID NO: 2950431 - RNA, 19 nt, Artificial Sequence
  Description of Artificial Sequence: Synthetic oligonucleotide
ucacaugaagaauagaguu

SEQ ID NO: 2950432 - RNA, 19 nt, Artificial Sequence
  Description of Artificial Sequence: Synthetic oligonucleotide
auggcuuuagccaagcugg

SEQ ID NO: 2950433 - RNA, 19 nt, Artificial Sequence
  Description of Artificial Sequence: Synthetic oligonucleotide
ucuuccagcagcaucacau

SEQ ID NO: 2950434 - RNA, 19 nt, Artificial Sequence
  Description of Artificial Sequence: Synthetic oligonucleotide
aaagaguccugcugccucg

SEQ ID NO: 2950435 - RNA, 19 nt, Artificial Sequence
  Description of Artificial Sequence: Synthetic oligonucleotide
ucugcagcuaagauguccc

SEQ ID NO: 2950436 - RNA, 19 nt, Artificial Sequence
  Description of Artificial Sequence: Synthetic oligonucleotide
agauuuguggacuucggcu

SEQ ID NO: 2950437 - RNA, 19 nt, Artificial Sequence
  Description of Artificial Sequence: Synthetic oligonucleotide
aaagcuagccccugggaca

SEQ ID NO: 2950438 - RNA, 19 nt, Artificial Sequence
  Description of Artificial Sequence: Synthetic oligonucleotide
uucggcuuucacaugaaga

SEQ ID NO: 2950439 - RNA, 19 nt, Artificial Sequence
  Description of Artificial Sequence: Synthetic oligonucleotide
aguugauuuuggcuucggc

SEQ ID NO: 2950440 - RNA, 19 nt, Artificial Sequence
  Description of Artificial Sequence: Synthetic oligonucleotide
aaugcucugcagugguaac

SEQ ID NO: 2950441 - RNA, 19 nt, Artificial Sequence
  Description of Artificial Sequence: Synthetic oligonucleotide
agugcugcugcuauguccc

SEQ ID NO: 2950442 - RNA, 19 nt, Artificial Sequence
  Description of Artificial Sequence: Synthetic oligonucleotide
ucguccucaaaugucacgg

SEQ ID NO: 2950443 - RNA, 19 nt, Artificial Sequence
  Description of Artificial Sequence: Synthetic oligonucleotide
ugcguaacuguccaaagau

SEQ ID NO: 2950444 - RNA, 19 nt, Artificial Sequence
  Description of Artificial Sequence: Synthetic oligonucleotide
uuaaaagaguccugcugcc

SEQ ID NO: 2950445 - RNA, 19 nt, Artificial Sequence
  Description of Artificial Sequence: Synthetic oligonucleotide
uggacuucggcuuucacau

SEQ ID NO: 2950446 - RNA, 19 nt, Artificial Sequence
  Description of Artificial Sequence: Synthetic oligonucleotide
acaugaagaauagaguucu

SEQ ID NO: 2950447 - RNA, 19 nt, Artificial Sequence
  Description of Artificial Sequence: Synthetic oligonucleotide
uguccaaagauuuguggac

SEQ ID NO: 2950448 - RNA, 19 nt, Artificial Sequence
  Description of Artificial Sequence: Synthetic oligonucleotide
aucagaagugcagucuucc

SEQ ID NO: 2950449 - RNA, 19 nt, Artificial Sequence
  Description of Artificial Sequence: Synthetic oligonucleotide
cucugauuuaaaagagucc

SEQ ID NO: 2950450 - RNA, 19 nt, Artificial Sequence
  Description of Artificial Sequence: Synthetic oligonucleotide
ucggcuuucacaugaagaa

SEQ ID NO: 2950451 - RNA, 19 nt, Artificial Sequence
  Description of Artificial Sequence: Synthetic oligonucleotide
uccucaaaugucacggagc

SEQ ID NO: 2950452 - RNA, 19 nt, Artificial Sequence
  Description of Artificial Sequence: Synthetic oligonucleotide
caaagauuuguggacuucg

SEQ ID NO: 2950453 - RNA, 19 nt, Artificial Sequence
  Description of Artificial Sequence: Synthetic oligonucleotide
aaagauuuguggacuucgg

SEQ ID NO: 2950454 - RNA, 19 nt, Artificial Sequence
  Description of Artificial Sequence: Synthetic oligonucleotide
aaccucugauuuaaaagag

SEQ ID NO: 2950455 - RNA, 19 nt, Artificial Sequence
  Description of Artificial Sequence: Synthetic oligonucleotide
gaauaaguugauuuuggcu

SEQ ID NO: 2950456 - RNA, 19 nt, Artificial Sequence
  Description of Artificial Sequence: Synthetic oligonucleotide
agcuaagauguccccuucc

SEQ ID NO: 2950457 - RNA, 19 nt, Artificial Sequence
  Description of Artificial Sequence: Synthetic oligonucleotide
aguagcugaagccgguguc

SEQ ID NO: 2950458 - RNA, 19 nt, Artificial Sequence
  Description of Artificial Sequence: Synthetic oligonucleotide
ugagcaagaccccuggcaa

SEQ ID NO: 2950459 - RNA, 19 nt, Artificial Sequence
  Description of Artificial Sequence: Synthetic oligonucleotide
uccucaaugcucugcagug

SEQ ID NO: 2950460 - RNA, 19 nt, Artificial Sequence
  Description of Artificial Sequence: Synthetic oligonucleotide
gaauagaguucuuggcagc

SEQ ID NO: 2950461 - RNA, 19 nt, Artificial Sequence
  Description of Artificial Sequence: Synthetic oligonucleotide
ugggaguagcugaagccgg

SEQ ID NO: 2950462 - RNA, 19 nt, Artificial Sequence
  Description of Artificial Sequence: Synthetic oligonucleotide
aagccgguguccccagugc

SEQ ID NO: 2950463 - RNA, 19 nt, Artificial Sequence
  Description of Artificial Sequence: Synthetic oligonucleotide
uccuccccgaauaaguuga

SEQ ID NO: 2950464 - RNA, 19 nt, Artificial Sequence
  Description of Artificial Sequence: Synthetic oligonucleotide
cacaugaagaauagaguuc

SEQ ID NO: 2950465 - RNA, 19 nt, Artificial Sequence
  Description of Artificial Sequence: Synthetic oligonucleotide
cuguucugcagcuaagaug

SEQ ID NO: 2950466 - RNA, 19 nt, Artificial Sequence
  Description of Artificial Sequence: Synthetic oligonucleotide
aaagccuccuccccgaaua

SEQ ID NO: 2950467 - RNA, 19 nt, Artificial Sequence
  Description of Artificial Sequence: Synthetic oligonucleotide
uuggcagccucuuugcucu

SEQ ID NO: 2950468 - RNA, 19 nt, Artificial Sequence
  Description of Artificial Sequence: Synthetic oligonucleotide
gaauccugggaguagcuga

SEQ ID NO: 2950469 - RNA, 19 nt, Artificial Sequence
  Description of Artificial Sequence: Synthetic oligonucleotide
guugucaucagaagugcag

SEQ ID NO: 2950470 - RNA, 19 nt, Artificial Sequence
  Description of Artificial Sequence: Synthetic oligonucleotide
ucugcagugguaaccucug

SEQ ID NO: 2950471 - RNA, 19 nt, Artificial Sequence
  Description of Artificial Sequence: Synthetic oligonucleotide
uucguccucaaaugucacg

SEQ ID NO: 2950472 - RNA, 19 nt, Artificial Sequence
  Description of Artificial Sequence: Synthetic oligonucleotide
uccccgaauaaguugauuu

SEQ ID NO: 2950473 - RNA, 19 nt, Artificial Sequence
  Description of Artificial Sequence: Synthetic oligonucleotide
ucacauccgucccugaauc

SEQ ID NO: 2950474 - RNA, 19 nt, Artificial Sequence
  Description of Artificial Sequence: Synthetic oligonucleotide
gcugcuaugucccagggac

SEQ ID NO: 2950475 - RNA, 19 nt, Artificial Sequence
  Description of Artificial Sequence: Synthetic oligonucleotide
cuuuagccaagcuggcugc

SEQ ID NO: 2950476 - RNA, 19 nt, Artificial Sequence
  Description of Artificial Sequence: Synthetic oligonucleotide
caaagcuagccccugggac

SEQ ID NO: 2950477 - RNA, 19 nt, Artificial Sequence
  Description of Artificial Sequence: Synthetic oligonucleotide
cagaagugcagucuuccag

SEQ ID NO: 2950478 - RNA, 19 nt, Artificial Sequence
  Description of Artificial Sequence: Synthetic oligonucleotide
uaaguugauuuuggcuucg

SEQ ID NO: 2950479 - RNA, 19 nt, Artificial Sequence
  Description of Artificial Sequence: Synthetic oligonucleotide
gauguccccuuccucaaug

SEQ ID NO: 2950480 - RNA, 19 nt, Artificial Sequence
  Description of Artificial Sequence: Synthetic oligonucleotide
cugauuuaaaagaguccug

SEQ ID NO: 2950481 - RNA, 19 nt, Artificial Sequence
  Description of Artificial Sequence: Synthetic oligonucleotide
uccccuuccucaaugcucu

SEQ ID NO: 2950482 - RNA, 19 nt, Artificial Sequence
  Description of Artificial Sequence: Synthetic oligonucleotide
ucaucagaagugcagucuu

SEQ ID NO: 2950483 - RNA, 19 nt, Artificial Sequence
  Description of Artificial Sequence: Synthetic oligonucleotide
cugggaguagcugaagccg

SEQ ID NO: 2950484 - RNA, 19 nt, Artificial Sequence
  Description of Artificial Sequence: Synthetic oligonucleotide
gacuucggcuuucacauga

SEQ ID NO: 2950485 - RNA, 19 nt, Artificial Sequence
  Description of Artificial Sequence: Synthetic oligonucleotide
ucuguucugcagcuaagau

SEQ ID NO: 2950486 - RNA, 19 nt, Artificial Sequence
  Description of Artificial Sequence: Synthetic oligonucleotide
uacuucguccucaaauguc

SEQ ID NO: 2950487 - RNA, 19 nt, Artificial Sequence
  Description of Artificial Sequence: Synthetic oligonucleotide
cuguccaaagauuugugga

SEQ ID NO: 2950488 - RNA, 19 nt, Artificial Sequence
  Description of Artificial Sequence: Synthetic oligonucleotide
uucugcagcuaagaugucc

SEQ ID NO: 2950489 - RNA, 19 nt, Artificial Sequence
  Description of Artificial Sequence: Synthetic oligonucleotide
guccucaaaugucacggag

SEQ ID NO: 2950490 - RNA, 19 nt, Artificial Sequence
  Description of Artificial Sequence: Synthetic oligonucleotide
aggguugucaucagaagug

SEQ ID NO: 2950491 - RNA, 19 nt, Artificial Sequence
  Description of Artificial Sequence: Synthetic oligonucleotide
ugcagugguaaccucugau

SEQ ID NO: 2950492 - RNA, 19 nt, Artificial Sequence
  Description of Artificial Sequence: Synthetic oligonucleotide
cagugcugcugcuaugucc

SEQ ID NO: 2950493 - RNA, 19 nt, Artificial Sequence
  Description of Artificial Sequence: Synthetic oligonucleotide
ucucuguucugcagcuaag

SEQ ID NO: 2950494 - RNA, 19 nt, Artificial Sequence
  Description of Artificial Sequence: Synthetic oligonucleotide
gauuuaaaagaguccugcu

SEQ ID NO: 2950495 - RNA, 19 nt, Artificial Sequence
  Description of Artificial Sequence: Synthetic oligonucleotide
ccgaauaaguugauuuugg

SEQ ID NO: 2950496 - RNA, 19 nt, Artificial Sequence
  Description of Artificial Sequence: Synthetic oligonucleotide
cagucuuccagcagcauca

SEQ ID NO: 2950497 - RNA, 19 nt, Artificial Sequence
  Description of Artificial Sequence: Synthetic oligonucleotide
ccucugauuuaaaagaguc

SEQ ID NO: 2950498 - RNA, 19 nt, Artificial Sequence
  Description of Artificial Sequence: Synthetic oligonucleotide
aagauguccccuuccucaa

SEQ ID NO: 2950499 - RNA, 19 nt, Artificial Sequence
  Description of Artificial Sequence: Synthetic oligonucleotide
ucagaagugcagucuucca

SEQ ID NO: 2950500 - RNA, 19 nt, Artificial Sequence
  Description of Artificial Sequence: Synthetic oligonucleotide
aagcuggcugcguaacugu

SEQ ID NO: 2950501 - RNA, 19 nt, Artificial Sequence
  Description of Artificial Sequence: Synthetic oligonucleotide
ugucaucagaagugcaguc

SEQ ID NO: 2950502 - RNA, 19 nt, Artificial Sequence
  Description of Artificial Sequence: Synthetic oligonucleotide
aaguugauuuuggcuucgg

SEQ ID NO: 2950503 - RNA, 19 nt, Artificial Sequence
  Description of Artificial Sequence: Synthetic oligonucleotide
guaacuguccaaagauuug

SEQ ID NO: 2950504 - RNA, 19 nt, Artificial Sequence
  Description of Artificial Sequence: Synthetic oligonucleotide
aucucuguucugcagcuaa

SEQ ID NO: 2950505 - RNA, 19 nt, Artificial Sequence
  Description of Artificial Sequence: Synthetic oligonucleotide
acuucguccucaaauguca

SEQ ID NO: 2950506 - RNA, 19 nt, Artificial Sequence
  Description of Artificial Sequence: Synthetic oligonucleotide
gcuuuagccaagcuggcug

SEQ ID NO: 2950507 - RNA, 19 nt, Artificial Sequence
  Description of Artificial Sequence: Synthetic oligonucleotide
ugauuuuggcuucggccuc

SEQ ID NO: 2950508 - RNA, 19 nt, Artificial Sequence
  Description of Artificial Sequence: Synthetic oligonucleotide
cugugagcaagaccccugg

SEQ ID NO: 2950509 - RNA, 19 nt, Artificial Sequence
  Description of Artificial Sequence: Synthetic oligonucleotide
caagaccccuggcaaagcc

SEQ ID NO: 2950510 - RNA, 19 nt, Artificial Sequence
  Description of Artificial Sequence: Synthetic oligonucleotide
aagcuagccccugggacag

SEQ ID NO: 2950511 - RNA, 19 nt, Artificial Sequence
  Description of Artificial Sequence: Synthetic oligonucleotide
uuuagccaagcuggcugcg

SEQ ID NO: 2950512 - RNA, 19 nt, Artificial Sequence
  Description of Artificial Sequence: Synthetic oligonucleotide
gaagccgguguccccagug

SEQ ID NO: 2950513 - RNA, 19 nt, Artificial Sequence
  Description of Artificial Sequence: Synthetic oligonucleotide
gaggguugucaucagaagu

SEQ ID NO: 2950514 - RNA, 19 nt, Artificial Sequence
  Description of Artificial Sequence: Synthetic oligonucleotide
ugaauccugggaguagcug

SEQ ID NO: 2950515 - RNA, 19 nt, Artificial Sequence
  Description of Artificial Sequence: Synthetic oligonucleotide
uguucuacuucguccucaa

SEQ ID NO: 2950516 - RNA, 19 nt, Artificial Sequence
  Description of Artificial Sequence: Synthetic oligonucleotide
gaagugcagucuuccagca

SEQ ID NO: 2950517 - RNA, 19 nt, Artificial Sequence
  Description of Artificial Sequence: Synthetic oligonucleotide
ugcucuguucuacuucguc

SEQ ID NO: 2950518 - RNA, 19 nt, Artificial Sequence
  Description of Artificial Sequence: Synthetic oligonucleotide
ggccucaauggcuuuagcc

SEQ ID NO: 2950519 - RNA, 19 nt, Artificial Sequence
  Description of Artificial Sequence: Synthetic oligonucleotide
ugugagcaagaccccuggc

SEQ ID NO: 2950520 - RNA, 19 nt, Artificial Sequence
  Description of Artificial Sequence: Synthetic oligonucleotide
uaaaagaguccugcugccu

SEQ ID NO: 2950521 - RNA, 19 nt, Artificial Sequence
  Description of Artificial Sequence: Synthetic oligonucleotide
agcaagaccccuggcaaag

SEQ ID NO: 2950522 - RNA, 19 nt, Artificial Sequence
  Description of Artificial Sequence: Synthetic oligonucleotide
aucacauccgucccugaau

SEQ ID NO: 2950523 - RNA, 19 nt, Artificial Sequence
  Description of Artificial Sequence: Synthetic oligonucleotide
gugagcaagaccccuggca

SEQ ID NO: 2950524 - RNA, 19 nt, Artificial Sequence
  Description of Artificial Sequence: Synthetic oligonucleotide
agugguaaccucugauuua

SEQ ID NO: 2950525 - RNA, 19 nt, Artificial Sequence
  Description of Artificial Sequence: Synthetic oligonucleotide
ugcucugcagugguaaccu

SEQ ID NO: 2950526 - RNA, 19 nt, Artificial Sequence
  Description of Artificial Sequence: Synthetic oligonucleotide
gucacggagcuccuucucc

SEQ ID NO: 2950527 - RNA, 19 nt, Artificial Sequence
  Description of Artificial Sequence: Synthetic oligonucleotide
ucacggagcuccuucuccu

SEQ ID NO: 2950528 - RNA, 19 nt, Artificial Sequence
  Description of Artificial Sequence: Synthetic oligonucleotide
gccucaauggcuuuagcca

SEQ ID NO: 2950529 - RNA, 19 nt, Artificial Sequence
  Description of Artificial Sequence: Synthetic oligonucleotide
agcugaagccggugucccc

SEQ ID NO: 2950530 - RNA, 19 nt, Artificial Sequence
  Description of Artificial Sequence: Synthetic oligonucleotide
uccaaagauuuguggacuu

SEQ ID NO: 2950531 - RNA, 19 nt, Artificial Sequence
  Description of Artificial Sequence: Synthetic oligonucleotide
ugggugggcacgugcagug

SEQ ID NO: 2950532 - RNA, 19 nt, Artificial Sequence
  Description of Artificial Sequence: Synthetic oligonucleotide
gauuuguggacuucggcuu

SEQ ID NO: 2950533 - RNA, 19 nt, Artificial Sequence
  Description of Artificial Sequence: Synthetic oligonucleotide
uguccccuuccucaaugcu

SEQ ID NO: 2950534 - RNA, 19 nt, Artificial Sequence
  Description of Artificial Sequence: Synthetic oligonucleotide
cuggcaaagccuccucccc

SEQ ID NO: 2950535 - RNA, 19 nt, Artificial Sequence
  Description of Artificial Sequence: Synthetic oligonucleotide
ugcagcuaagauguccccu

SEQ ID NO: 2950536 - RNA, 19 nt, Artificial Sequence
  Description of Artificial Sequence: Synthetic oligonucleotide
caagcuggcugcguaacug

SEQ ID NO: 2950537 - RNA, 19 nt, Artificial Sequence
  Description of Artificial Sequence: Synthetic oligonucleotide
ucuuugcucuguucuacuu

SEQ ID NO: 2950538 - RNA, 19 nt, Artificial Sequence
  Description of Artificial Sequence: Synthetic oligonucleotide
gguaaccucugauuuaaaa

SEQ ID NO: 2950539 - RNA, 19 nt, Artificial Sequence
  Description of Artificial Sequence: Synthetic oligonucleotide
uggcuuuagccaagcuggc

SEQ ID NO: 2950540 - RNA, 19 nt, Artificial Sequence
  Description of Artificial Sequence: Synthetic oligonucleotide
cuucggcuuucacaugaag

SEQ ID NO: 2950541 - RNA, 19 nt, Artificial Sequence
  Description of Artificial Sequence: Synthetic oligonucleotide
agaccccuggcaaagccuc

SEQ ID NO: 2950542 - RNA, 19 nt, Artificial Sequence
  Description of Artificial Sequence: Synthetic oligonucleotide
ugcugcuaugucccaggga

SEQ ID NO: 2950543 - RNA, 19 nt, Artificial Sequence
  Description of Artificial Sequence: Synthetic oligonucleotide
aguccgugcugugagcaag

SEQ ID NO: 2950544 - RNA, 19 nt, Artificial Sequence
  Description of Artificial Sequence: Synthetic oligonucleotide
ucuguucuacuucguccuc

SEQ ID NO: 2950545 - RNA, 19 nt, Artificial Sequence
  Description of Artificial Sequence: Synthetic oligonucleotide
cuucguccucaaaugucac

SEQ ID NO: 2950546 - RNA, 19 nt, Artificial Sequence
  Description of Artificial Sequence: Synthetic oligonucleotide
ggaggguugucaucagaag

SEQ ID NO: 2950547 - RNA, 19 nt, Artificial Sequence
  Description of Artificial Sequence: Synthetic oligonucleotide
cuccuccccgaauaaguug

SEQ ID NO: 2950548 - RNA, 19 nt, Artificial Sequence
  Description of Artificial Sequence: Synthetic oligonucleotide
acauccgucccugaauccu

SEQ ID NO: 2950549 - RNA, 19 nt, Artificial Sequence
  Description of Artificial Sequence: Synthetic oligonucleotide
cuuccucaaugcucugcag

SEQ ID NO: 2950550 - RNA, 19 nt, Artificial Sequence
  Description of Artificial Sequence: Synthetic oligonucleotide
ccugggaguagcugaagcc

SEQ ID NO: 2950551 - RNA, 19 nt, Artificial Sequence
  Description of Artificial Sequence: Synthetic oligonucleotide
gcuuucacaugaagaauag

SEQ ID NO: 2950552 - RNA, 19 nt, Artificial Sequence
  Description of Artificial Sequence: Synthetic oligonucleotide
aauccugggaguagcugaa

SEQ ID NO: 2950553 - RNA, 19 nt, Artificial Sequence
  Description of Artificial Sequence: Synthetic oligonucleotide
auuuguggacuucggcuuu

SEQ ID NO: 2950554 - RNA, 19 nt, Artificial Sequence
  Description of Artificial Sequence: Synthetic oligonucleotide
aagaccccuggcaaagccu

SEQ ID NO: 2950555 - RNA, 19 nt, Artificial Sequence
  Description of Artificial Sequence: Synthetic oligonucleotide
ggacaguccgugcugugag

SEQ ID NO: 2950556 - RNA, 19 nt, Artificial Sequence
  Description of Artificial Sequence: Synthetic oligonucleotide
uggcuucggccucaauggc

SEQ ID NO: 2950557 - RNA, 19 nt, Artificial Sequence
  Description of Artificial Sequence: Synthetic oligonucleotide
cgaauaaguugauuuuggc

SEQ ID NO: 2950558 - RNA, 19 nt, Artificial Sequence
  Description of Artificial Sequence: Synthetic oligonucleotide
cauccgucccugaauccug

SEQ ID NO: 2950559 - RNA, 19 nt, Artificial Sequence
  Description of Artificial Sequence: Synthetic oligonucleotide
cacauccgucccugaaucc

SEQ ID NO: 2950560 - RNA, 19 nt, Artificial Sequence
  Description of Artificial Sequence: Synthetic oligonucleotide
gacaguccgugcugugagc

SEQ ID NO: 2950561 - RNA, 19 nt, Artificial Sequence
  Description of Artificial Sequence: Synthetic oligonucleotide
augucacggagcuccuucu

SEQ ID NO: 2950562 - RNA, 19 nt, Artificial Sequence
  Description of Artificial Sequence: Synthetic oligonucleotide
uguggacuucggcuuucac

SEQ ID NO: 2950563 - RNA, 19 nt, Artificial Sequence
  Description of Artificial Sequence: Synthetic oligonucleotide
gugguaaccucugauuuaa

SEQ ID NO: 2950564 - RNA, 19 nt, Artificial Sequence
  Description of Artificial Sequence: Synthetic oligonucleotide
accucugauuuaaaagagu

SEQ ID NO: 2950565 - RNA, 19 nt, Artificial Sequence
  Description of Artificial Sequence: Synthetic oligonucleotide
uagcugaagccgguguccc

SEQ ID NO: 2950566 - RNA, 19 nt, Artificial Sequence
  Description of Artificial Sequence: Synthetic oligonucleotide
ucggccucaauggcuuuag

SEQ ID NO: 2950567 - RNA, 19 nt, Artificial Sequence
  Description of Artificial Sequence: Synthetic oligonucleotide
ugucacggagcuccuucuc

SEQ ID NO: 2950568 - RNA, 19 nt, Artificial Sequence
  Description of Artificial Sequence: Synthetic oligonucleotide
ugggcacgugcaguguggg

SEQ ID NO: 2950569 - RNA, 19 nt, Artificial Sequence
  Description of Artificial Sequence: Synthetic oligonucleotide
uccccagugcugcugcuau

SEQ ID NO: 2950570 - RNA, 19 nt, Artificial Sequence
  Description of Artificial Sequence: Synthetic oligonucleotide
ucaaugcucugcaguggua

SEQ ID NO: 2950571 - RNA, 19 nt, Artificial Sequence
  Description of Artificial Sequence: Synthetic oligonucleotide
uccgucccugaauccuggg

SEQ ID NO: 2950572 - RNA, 19 nt, Artificial Sequence
  Description of Artificial Sequence: Synthetic oligonucleotide
cugcagcuaagaugucccc

SEQ ID NO: 2950573 - RNA, 19 nt, Artificial Sequence
  Description of Artificial Sequence: Synthetic oligonucleotide
gcugcguaacuguccaaag

SEQ ID NO: 2950574 - RNA, 19 nt, Artificial Sequence
  Description of Artificial Sequence: Synthetic oligonucleotide
auagaguucuuggcagccu

SEQ ID NO: 2950575 - RNA, 19 nt, Artificial Sequence
  Description of Artificial Sequence: Synthetic oligonucleotide
uagccaagcuggcugcgua

SEQ ID NO: 2950576 - RNA, 19 nt, Artificial Sequence
  Description of Artificial Sequence: Synthetic oligonucleotide
cugcugcuaugucccaggg

SEQ ID NO: 2950577 - RNA, 19 nt, Artificial Sequence
  Description of Artificial Sequence: Synthetic oligonucleotide
gcagcaucacauccguccc

SEQ ID NO: 2950578 - RNA, 19 nt, Artificial Sequence
  Description of Artificial Sequence: Synthetic oligonucleotide
cuggcugcguaacugucca

SEQ ID NO: 2950579 - RNA, 19 nt, Artificial Sequence
  Description of Artificial Sequence: Synthetic oligonucleotide
aagccuccuccccgaauaa

SEQ ID NO: 2950580 - RNA, 19 nt, Artificial Sequence
  Description of Artificial Sequence: Synthetic oligonucleotide
uccugcugccucgacgccc

SEQ ID NO: 2950581 - RNA, 19 nt, Artificial Sequence
  Description of Artificial Sequence: Synthetic oligonucleotide
gauuuuggcuucggccuca

SEQ ID NO: 2950582 - RNA, 19 nt, Artificial Sequence
  Description of Artificial Sequence: Synthetic oligonucleotide
ccuggcaaagccuccuccc

SEQ ID NO: 2950583 - RNA, 19 nt, Artificial Sequence
  Description of Artificial Sequence: Synthetic oligonucleotide
uuagccaagcuggcugcgu

SEQ ID NO: 2950584 - RNA, 19 nt, Artificial Sequence
  Description of Artificial Sequence: Synthetic oligonucleotide
uuuguggacuucggcuuuc

SEQ ID NO: 2950585 - RNA, 19 nt, Artificial Sequence
  Description of Artificial Sequence: Synthetic oligonucleotide
uugcucuguucuacuucgu

SEQ ID NO: 2950586 - RNA, 19 nt, Artificial Sequence
  Description of Artificial Sequence: Synthetic oligonucleotide
gugggcacgugcagugugg

SEQ ID NO: 2950587 - RNA, 19 nt, Artificial Sequence
  Description of Artificial Sequence: Synthetic oligonucleotide
cuagccccugggacagucc

SEQ ID NO: 2950588 - RNA, 19 nt, Artificial Sequence
  Description of Artificial Sequence: Synthetic oligonucleotide
ggguugucaucagaagugc

SEQ ID NO: 2950589 - RNA, 19 nt, Artificial Sequence
  Description of Artificial Sequence: Synthetic oligonucleotide
cuuucacaugaagaauaga

SEQ ID NO: 2950590 - RNA, 19 nt, Artificial Sequence
  Description of Artificial Sequence: Synthetic oligonucleotide
cccgaauaaguugauuuug

SEQ ID NO: 2950591 - RNA, 19 nt, Artificial Sequence
  Description of Artificial Sequence: Synthetic oligonucleotide
gcagucuuccagcagcauc

SEQ ID NO: 2950592 - RNA, 19 nt, Artificial Sequence
  Description of Artificial Sequence: Synthetic oligonucleotide
caaugcucugcagugguaa

SEQ ID NO: 2950593 - RNA, 19 nt, Artificial Sequence
  Description of Artificial Sequence: Synthetic oligonucleotide
ugguaaccucugauuuaaa

SEQ ID NO: 2950594 - RNA, 19 nt, Artificial Sequence
  Description of Artificial Sequence: Synthetic oligonucleotide
agccgguguccccagugcu

SEQ ID NO: 2950595 - RNA, 19 nt, Artificial Sequence
  Description of Artificial Sequence: Synthetic oligonucleotide
aguucuuggcagccucuuu

SEQ ID NO: 2950596 - RNA, 19 nt, Artificial Sequence
  Description of Artificial Sequence: Synthetic oligonucleotide
gaguagcugaagccggugu

SEQ ID NO: 2950597 - RNA, 19 nt, Artificial Sequence
  Description of Artificial Sequence: Synthetic oligonucleotide
ccugaauccugggaguagc

SEQ ID NO: 2950598 - RNA, 19 nt, Artificial Sequence
  Description of Artificial Sequence: Synthetic oligonucleotide
cuccugggugggcacgugc

SEQ ID NO: 2950599 - RNA, 19 nt, Artificial Sequence
  Description of Artificial Sequence: Synthetic oligonucleotide
cgucccugaauccugggag

SEQ ID NO: 2950600 - RNA, 19 nt, Artificial Sequence
  Description of Artificial Sequence: Synthetic oligonucleotide
gagcaagaccccuggcaaa

SEQ ID NO: 2950601 - RNA, 19 nt, Artificial Sequence
  Description of Artificial Sequence: Synthetic oligonucleotide
cccaaagcuagccccuggg

SEQ ID NO: 2950602 - RNA, 19 nt, Artificial Sequence
  Description of Artificial Sequence: Synthetic oligonucleotide
ugggacaguccgugcugug

SEQ ID NO: 2950603 - RNA, 19 nt, Artificial Sequence
  Description of Artificial Sequence: Synthetic oligonucleotide
guccccuuccucaaugcuc

SEQ ID NO: 2950604 - RNA, 19 nt, Artificial Sequence
  Description of Artificial Sequence: Synthetic oligonucleotide
cucuguucugcagcuaaga

SEQ ID NO: 2950605 - RNA, 19 nt, Artificial Sequence
  Description of Artificial Sequence: Synthetic oligonucleotide
gucaucagaagugcagucu

SEQ ID NO: 2950606 - RNA, 19 nt, Artificial Sequence
  Description of Artificial Sequence: Synthetic oligonucleotide
agcuggcugcguaacuguc

SEQ ID NO: 2950607 - RNA, 19 nt, Artificial Sequence
  Description of Artificial Sequence: Synthetic oligonucleotide
cucugcagugguaaccucu

SEQ ID NO: 2950608 - RNA, 19 nt, Artificial Sequence
  Description of Artificial Sequence: Synthetic oligonucleotide
cuacuucguccucaaaugu

SEQ ID NO: 2950609 - RNA, 19 nt, Artificial Sequence
  Description of Artificial Sequence: Synthetic oligonucleotide
auccgucccugaauccugg

SEQ ID NO: 2950610 - RNA, 19 nt, Artificial Sequence
  Description of Artificial Sequence: Synthetic oligonucleotide
ggugggcacgugcagugug

SEQ ID NO: 2950611 - RNA, 19 nt, Artificial Sequence
  Description of Artificial Sequence: Synthetic oligonucleotide
cucaaugcucugcaguggu

SEQ ID NO: 2950612 - RNA, 19 nt, Artificial Sequence
  Description of Artificial Sequence: Synthetic oligonucleotide
aaaugucacggagcuccuu

SEQ ID NO: 2950613 - RNA, 19 nt, Artificial Sequence
  Description of Artificial Sequence: Synthetic oligonucleotide
agaguucuuggcagccucu

SEQ ID NO: 2950614 - RNA, 19 nt, Artificial Sequence
  Description of Artificial Sequence: Synthetic oligonucleotide
cugaagccgguguccccag

SEQ ID NO: 2950615 - RNA, 19 nt, Artificial Sequence
  Description of Artificial Sequence: Synthetic oligonucleotide
guccaaagauuuguggacu

SEQ ID NO: 2950616 - RNA, 19 nt, Artificial Sequence
  Description of Artificial Sequence: Synthetic oligonucleotide
uuguggacuucggcuuuca

SEQ ID NO: 2950617 - RNA, 19 nt, Artificial Sequence
  Description of Artificial Sequence: Synthetic oligonucleotide
cagcuaagauguccccuuc

SEQ ID NO: 2950618 - RNA, 19 nt, Artificial Sequence
  Description of Artificial Sequence: Synthetic oligonucleotide
ucccugaauccugggagua

SEQ ID NO: 2950619 - RNA, 19 nt, Artificial Sequence
  Description of Artificial Sequence: Synthetic oligonucleotide
caucacauccgucccugaa

SEQ ID NO: 2950620 - RNA, 19 nt, Artificial Sequence
  Description of Artificial Sequence: Synthetic oligonucleotide
agccaagcuggcugcguaa

SEQ ID NO: 2950621 - RNA, 19 nt, Artificial Sequence
  Description of Artificial Sequence: Synthetic oligonucleotide
ugaagccgguguccccagu

SEQ ID NO: 2950622 - RNA, 19 nt, Artificial Sequence
  Description of Artificial Sequence: Synthetic oligonucleotide
agauguccccuuccucaau

SEQ ID NO: 2950623 - RNA, 19 nt, Artificial Sequence
  Description of Artificial Sequence: Synthetic oligonucleotide
cuguucuacuucguccuca

SEQ ID NO: 2950624 - RNA, 19 nt, Artificial Sequence
  Description of Artificial Sequence: Synthetic oligonucleotide
cagugguaaccucugauuu

SEQ ID NO: 2950625 - RNA, 19 nt, Artificial Sequence
  Description of Artificial Sequence: Synthetic oligonucleotide
agccuccuccccgaauaag

SEQ ID NO: 2950626 - RNA, 19 nt, Artificial Sequence
  Description of Artificial Sequence: Synthetic oligonucleotide
gcuaagauguccccuuccu

SEQ ID NO: 2950627 - RNA, 19 nt, Artificial Sequence
  Description of Artificial Sequence: Synthetic oligonucleotide
cucaaaugucacggagcuc

SEQ ID NO: 2950628 - RNA, 19 nt, Artificial Sequence
  Description of Artificial Sequence: Synthetic oligonucleotide
gggaggguugucaucagaa

SEQ ID NO: 2950629 - RNA, 19 nt, Artificial Sequence
  Description of Artificial Sequence: Synthetic oligonucleotide
ccugcugccucgacgcccc

SEQ ID NO: 2950630 - RNA, 19 nt, Artificial Sequence
  Description of Artificial Sequence: Synthetic oligonucleotide
uccgugcugugagcaagac

SEQ ID NO: 2950631 - RNA, 19 nt, Artificial Sequence
  Description of Artificial Sequence: Synthetic oligonucleotide
ccucaaugcucugcagugg

SEQ ID NO: 2950632 - RNA, 19 nt, Artificial Sequence
  Description of Artificial Sequence: Synthetic oligonucleotide
cagccucuuugcucuguuc

SEQ ID NO: 2950633 - RNA, 19 nt, Artificial Sequence
  Description of Artificial Sequence: Synthetic oligonucleotide
uuuuggcuucggccucaau

SEQ ID NO: 2950634 - RNA, 19 nt, Artificial Sequence
  Description of Artificial Sequence: Synthetic oligonucleotide
gcuggcugcguaacugucc

SEQ ID NO: 2950635 - RNA, 19 nt, Artificial Sequence
  Description of Artificial Sequence: Synthetic oligonucleotide
uucggccucaauggcuuua

SEQ ID NO: 2950636 - RNA, 19 nt, Artificial Sequence
  Description of Artificial Sequence: Synthetic oligonucleotide
ccuuccucaaugcucugca

SEQ ID NO: 2950637 - RNA, 19 nt, Artificial Sequence
  Description of Artificial Sequence: Synthetic oligonucleotide
ggcaaagccuccuccccga

SEQ ID NO: 2950638 - RNA, 19 nt, Artificial Sequence
  Description of Artificial Sequence: Synthetic oligonucleotide
gcugugagcaagaccccug

SEQ ID NO: 2950639 - RNA, 19 nt, Artificial Sequence
  Description of Artificial Sequence: Synthetic oligonucleotide
ccucuuugcucuguucuac

SEQ ID NO: 2950640 - RNA, 19 nt, Artificial Sequence
  Description of Artificial Sequence: Synthetic oligonucleotide
gucuuccagcagcaucaca

SEQ ID NO: 2950641 - RNA, 19 nt, Artificial Sequence
  Description of Artificial Sequence: Synthetic oligonucleotide
uguccccagugcugcugcu

SEQ ID NO: 2950642 - RNA, 19 nt, Artificial Sequence
  Description of Artificial Sequence: Synthetic oligonucleotide
ggaguagcugaagccggug

SEQ ID NO: 2950643 - RNA, 19 nt, Artificial Sequence
  Description of Artificial Sequence: Synthetic oligonucleotide
ccucaaaugucacggagcu

SEQ ID NO: 2950644 - RNA, 19 nt, Artificial Sequence
  Description of Artificial Sequence: Synthetic oligonucleotide
gucccugaauccugggagu

SEQ ID NO: 2950645 - RNA, 19 nt, Artificial Sequence
  Description of Artificial Sequence: Synthetic oligonucleotide
gaccccuggcaaagccucc

SEQ ID NO: 2950646 - RNA, 19 nt, Artificial Sequence
  Description of Artificial Sequence: Synthetic oligonucleotide
cucuuugcucuguucuacu

SEQ ID NO: 2950647 - RNA, 19 nt, Artificial Sequence
  Description of Artificial Sequence: Synthetic oligonucleotide
gugcugugagcaagacccc

SEQ ID NO: 2950648 - RNA, 19 nt, Artificial Sequence
  Description of Artificial Sequence: Synthetic oligonucleotide
gugcagucuuccagcagca

SEQ ID NO: 2950649 - RNA, 19 nt, Artificial Sequence
  Description of Artificial Sequence: Synthetic oligonucleotide
gggcacgugcagugugggg

SEQ ID NO: 2950650 - RNA, 19 nt, Artificial Sequence
  Description of Artificial Sequence: Synthetic oligonucleotide
ugcagucuuccagcagcau

SEQ ID NO: 2950651 - RNA, 19 nt, Artificial Sequence
  Description of Artificial Sequence: Synthetic oligonucleotide
gcugaagccggugucccca

SEQ ID NO: 2950652 - RNA, 19 nt, Artificial Sequence
  Description of Artificial Sequence: Synthetic oligonucleotide
ccaaagauuuguggacuuc

SEQ ID NO: 2950653 - RNA, 19 nt, Artificial Sequence
  Description of Artificial Sequence: Synthetic oligonucleotide
cccuggcaaagccuccucc

SEQ ID NO: 2950654 - RNA, 19 nt, Artificial Sequence
  Description of Artificial Sequence: Synthetic oligonucleotide
ccugggacaguccgugcug

SEQ ID NO: 2950655 - RNA, 19 nt, Artificial Sequence
  Description of Artificial Sequence: Synthetic oligonucleotide
accccuggcaaagccuccu

SEQ ID NO: 2950656 - RNA, 19 nt, Artificial Sequence
  Description of Artificial Sequence: Synthetic oligonucleotide
cugaauccugggaguagcu

SEQ ID NO: 2950657 - RNA, 19 nt, Artificial Sequence
  Description of Artificial Sequence: Synthetic oligonucleotide
ggcugcguaacuguccaaa

SEQ ID NO: 2950658 - RNA, 19 nt, Artificial Sequence
  Description of Artificial Sequence: Synthetic oligonucleotide
ggacuucggcuuucacaug

SEQ ID NO: 2950659 - RNA, 19 nt, Artificial Sequence
  Description of Artificial Sequence: Synthetic oligonucleotide
guucuacuucguccucaaa

SEQ ID NO: 2950660 - RNA, 19 nt, Artificial Sequence
  Description of Artificial Sequence: Synthetic oligonucleotide
ccgugcugugagcaagacc

SEQ ID NO: 2950661 - RNA, 19 nt, Artificial Sequence
  Description of Artificial Sequence: Synthetic oligonucleotide
cguaacuguccaaagauuu

SEQ ID NO: 2950662 - RNA, 19 nt, Artificial Sequence
  Description of Artificial Sequence: Synthetic oligonucleotide
acuucggcuuucacaugaa

SEQ ID NO: 2950663 - RNA, 19 nt, Artificial Sequence
  Description of Artificial Sequence: Synthetic oligonucleotide
gcagugguaaccucugauu

SEQ ID NO: 2950664 - RNA, 19 nt, Artificial Sequence
  Description of Artificial Sequence: Synthetic oligonucleotide
gguguccccagugcugcug

SEQ ID NO: 2950665 - RNA, 19 nt, Artificial Sequence
  Description of Artificial Sequence: Synthetic oligonucleotide
uggcagccucuuugcucug

SEQ ID NO: 2950666 - RNA, 19 nt, Artificial Sequence
  Description of Artificial Sequence: Synthetic oligonucleotide
uggcugcguaacuguccaa

SEQ ID NO: 2950667 - RNA, 19 nt, Artificial Sequence
  Description of Artificial Sequence: Synthetic oligonucleotide
cugcagugguaaccucuga

SEQ ID NO: 2950668 - RNA, 19 nt, Artificial Sequence
  Description of Artificial Sequence: Synthetic oligonucleotide
ggggaggguugucaucaga

SEQ ID NO: 2950669 - RNA, 19 nt, Artificial Sequence
  Description of Artificial Sequence: Synthetic oligonucleotide
gggacaguccgugcuguga

SEQ ID NO: 2950670 - RNA, 19 nt, Artificial Sequence
  Description of Artificial Sequence: Synthetic oligonucleotide
ccgguguccccagugcugc

SEQ ID NO: 2950671 - RNA, 19 nt, Artificial Sequence
  Description of Artificial Sequence: Synthetic oligonucleotide
guccgugcugugagcaaga

SEQ ID NO: 2950672 - RNA, 19 nt, Artificial Sequence
  Description of Artificial Sequence: Synthetic oligonucleotide
gcagcuaagauguccccuu

SEQ ID NO: 2950673 - RNA, 19 nt, Artificial Sequence
  Description of Artificial Sequence: Synthetic oligonucleotide
ccccaaagcuagccccugg

SEQ ID NO: 2950674 - RNA, 19 nt, Artificial Sequence
  Description of Artificial Sequence: Synthetic oligonucleotide
ccaaagcuagccccuggga

SEQ ID NO: 2950675 - RNA, 19 nt, Artificial Sequence
  Description of Artificial Sequence: Synthetic oligonucleotide
cuccuucuccugggugggc

SEQ ID NO: 2950676 - RNA, 19 nt, Artificial Sequence
  Description of Artificial Sequence: Synthetic oligonucleotide
gccccugggacaguccgug

SEQ ID NO: 2950677 - RNA, 19 nt, Artificial Sequence
  Description of Artificial Sequence: Synthetic oligonucleotide
gccaagcuggcugcguaac

SEQ ID NO: 2950678 - RNA, 19 nt, Artificial Sequence
  Description of Artificial Sequence: Synthetic oligonucleotide
cccugaauccugggaguag

SEQ ID NO: 2950679 - RNA, 19 nt, Artificial Sequence
  Description of Artificial Sequence: Synthetic oligonucleotide
caguccgugcugugagcaa

SEQ ID NO: 2950680 - RNA, 19 nt, Artificial Sequence
  Description of Artificial Sequence: Synthetic oligonucleotide
gaguucuuggcagccucuu

SEQ ID NO: 2950681 - RNA, 19 nt, Artificial Sequence
  Description of Artificial Sequence: Synthetic oligonucleotide
gccgguguccccagugcug

SEQ ID NO: 2950682 - RNA, 19 nt, Artificial Sequence
  Description of Artificial Sequence: Synthetic oligonucleotide
gcucugcagugguaaccuc

SEQ ID NO: 2950683 - RNA, 19 nt, Artificial Sequence
  Description of Artificial Sequence: Synthetic oligonucleotide
gccuccuccccgaauaagu

SEQ ID NO: 2950684 - RNA, 19 nt, Artificial Sequence
  Description of Artificial Sequence: Synthetic oligonucleotide
agccccugggacaguccgu

SEQ ID NO: 2950685 - RNA, 19 nt, Artificial Sequence
  Description of Artificial Sequence: Synthetic oligonucleotide
gcaucacauccgucccuga

SEQ ID NO: 2950686 - RNA, 19 nt, Artificial Sequence
  Description of Artificial Sequence: Synthetic oligonucleotide
ccagugcugcugcuauguc

SEQ ID NO: 2950687 - RNA, 19 nt, Artificial Sequence
  Description of Artificial Sequence: Synthetic oligonucleotide
caaagccuccuccccgaau

SEQ ID NO: 2950688 - RNA, 19 nt, Artificial Sequence
  Description of Artificial Sequence: Synthetic oligonucleotide
ggcuucggccucaauggcu

SEQ ID NO: 2950689 - RNA, 19 nt, Artificial Sequence
  Description of Artificial Sequence: Synthetic oligonucleotide
cugggacaguccgugcugu

SEQ ID NO: 2950690 - RNA, 19 nt, Artificial Sequence
  Description of Artificial Sequence: Synthetic oligonucleotide
cugggugggcacgugcagu

SEQ ID NO: 2950691 - RNA, 19 nt, Artificial Sequence
  Description of Artificial Sequence: Synthetic oligonucleotide
ggcuuuagccaagcuggcu

SEQ ID NO: 2950692 - RNA, 19 nt, Artificial Sequence
  Description of Artificial Sequence: Synthetic oligonucleotide
caucucuguucugcagcua

SEQ ID NO: 2950693 - RNA, 19 nt, Artificial Sequence
  Description of Artificial Sequence: Synthetic oligonucleotide
ccgucccugaauccuggga

SEQ ID NO: 2950694 - RNA, 19 nt, Artificial Sequence
  Description of Artificial Sequence: Synthetic oligonucleotide
guccccagugcugcugcua

SEQ ID NO: 2950695 - RNA, 19 nt, Artificial Sequence
  Description of Artificial Sequence: Synthetic oligonucleotide
gcuucggccucaauggcuu

SEQ ID NO: 2950696 - RNA, 19 nt, Artificial Sequence
  Description of Artificial Sequence: Synthetic oligonucleotide
ccccgaauaaguugauuuu

SEQ ID NO: 2950697 - RNA, 19 nt, Artificial Sequence
  Description of Artificial Sequence: Synthetic oligonucleotide
gcaaagccuccuccccgaa

SEQ ID NO: 2950698 - RNA, 19 nt, Artificial Sequence
  Description of Artificial Sequence: Synthetic oligonucleotide
ccccugggacaguccgugc

SEQ ID NO: 2950699 - RNA, 19 nt, Artificial Sequence
  Description of Artificial Sequence: Synthetic oligonucleotide
cguccucaaaugucacgga

SEQ ID NO: 2950700 - RNA, 19 nt, Artificial Sequence
  Description of Artificial Sequence: Synthetic oligonucleotide
ccccagugcugcugcuaug

SEQ ID NO: 2950701 - RNA, 19 nt, Artificial Sequence
  Description of Artificial Sequence: Synthetic oligonucleotide
gcguaacuguccaaagauu

SEQ ID NO: 2950702 - RNA, 19 nt, Artificial Sequence
  Description of Artificial Sequence: Synthetic oligonucleotide
gggaguagcugaagccggu

SEQ ID NO: 2950703 - RNA, 19 nt, Artificial Sequence
  Description of Artificial Sequence: Synthetic oligonucleotide
agcuagccccugggacagu

SEQ ID NO: 2950704 - RNA, 19 nt, Artificial Sequence
  Description of Artificial Sequence: Synthetic oligonucleotide
ccccuggcaaagccuccuc

SEQ ID NO: 2950705 - RNA, 19 nt, Artificial Sequence
  Description of Artificial Sequence: Synthetic oligonucleotide
cccugggacaguccgugcu

SEQ ID NO: 2950706 - RNA, 19 nt, Artificial Sequence
  Description of Artificial Sequence: Synthetic oligonucleotide
cggccucaauggcuuuagc

SEQ ID NO: 2950707 - RNA, 19 nt, Artificial Sequence
  Description of Artificial Sequence: Synthetic oligonucleotide
cuccccgaauaaguugauu

SEQ ID NO: 2950708 - RNA, 19 nt, Artificial Sequence
  Description of Artificial Sequence: Synthetic oligonucleotide
ccaagcuggcugcguaacu

SEQ ID NO: 2950709 - RNA, 19 nt, Artificial Sequence
  Description of Artificial Sequence: Synthetic oligonucleotide
cuucggccucaauggcuuu

SEQ ID NO: 2950710 - RNA, 19 nt, Artificial Sequence
  Description of Artificial Sequence: Synthetic oligonucleotide
ggcagccucuuugcucugu

SEQ ID NO: 2950711 - RNA, 19 nt, Artificial Sequence
  Description of Artificial Sequence: Synthetic oligonucleotide
cggcuuucacaugaagaau

SEQ ID NO: 2950712 - RNA, 19 nt, Artificial Sequence
  Description of Artificial Sequence: Synthetic oligonucleotide
ccuccccgaauaaguugau

SEQ ID NO: 2950713 - RNA, 19 nt, Artificial Sequence
  Description of Artificial Sequence: Synthetic oligonucleotide
cgguguccccagugcugcu

SEQ ID NO: 2950714 - RNA, 19 nt, Artificial Sequence
  Description of Artificial Sequence: Synthetic oligonucleotide
auucaaguaauguugacac

SEQ ID NO: 2950715 - RNA, 19 nt, Artificial Sequence
  Description of Artificial Sequence: Synthetic oligonucleotide
aaccuaacaaguuaagcac

SEQ ID NO: 2950716 - RNA, 19 nt, Artificial Sequence
  Description of Artificial Sequence: Synthetic oligonucleotide
aaaccuaacaaguuaagca

SEQ ID NO: 2950717 - RNA, 19 nt, Artificial Sequence
  Description of Artificial Sequence: Synthetic oligonucleotide
aacuauacaucacugugcg

SEQ ID NO: 2950718 - RNA, 19 nt, Artificial Sequence
  Description of Artificial Sequence: Synthetic oligonucleotide
auuuaauugccucucuucc

SEQ ID NO: 2950719 - RNA, 19 nt, Artificial Sequence
  Description of Artificial Sequence: Synthetic oligonucleotide
uguaaagugaacuauacau

SEQ ID NO: 2950720 - RNA, 19 nt, Artificial Sequence
  Description of Artificial Sequence: Synthetic oligonucleotide
aaacauuccuuauggaugg

SEQ ID NO: 2950721 - RNA, 19 nt, Artificial Sequence
  Description of Artificial Sequence: Synthetic oligonucleotide
ugugcgucaaucaagauga

SEQ ID NO: 2950722 - RNA, 19 nt, Artificial Sequence
  Description of Artificial Sequence: Synthetic oligonucleotide
gaaaauuucauucaaguaa

SEQ ID NO: 2950723 - RNA, 19 nt, Artificial Sequence
  Description of Artificial Sequence: Synthetic oligonucleotide
uuugacaaaugacaguggg

SEQ ID NO: 2950724 - RNA, 19 nt, Artificial Sequence
  Description of Artificial Sequence: Synthetic oligonucleotide
aagcaaacauuccuuaugg

SEQ ID NO: 2950725 - RNA, 19 nt, Artificial Sequence
  Description of Artificial Sequence: Synthetic oligonucleotide
aaaaccuaacaaguuaagc

SEQ ID NO: 2950726 - RNA, 19 nt, Artificial Sequence
  Description of Artificial Sequence: Synthetic oligonucleotide
ucugcuuuccauuugaucu

SEQ ID NO: 2950727 - RNA, 19 nt, Artificial Sequence
  Description of Artificial Sequence: Synthetic oligonucleotide
ugaacuauacaucacugug

SEQ ID NO: 2950728 - RNA, 19 nt, Artificial Sequence
  Description of Artificial Sequence: Synthetic oligonucleotide
uaaagugaacuauacauca

SEQ ID NO: 2950729 - RNA, 19 nt, Artificial Sequence
  Description of Artificial Sequence: Synthetic oligonucleotide
aaccuauuccuagagaagc

SEQ ID NO: 2950730 - RNA, 19 nt, Artificial Sequence
  Description of Artificial Sequence: Synthetic oligonucleotide
ucuguagucaaccuauucc

SEQ ID NO: 2950731 - RNA, 19 nt, Artificial Sequence
  Description of Artificial Sequence: Synthetic oligonucleotide
caagaugaaaauuucauuc

SEQ ID NO: 2950732 - RNA, 19 nt, Artificial Sequence
  Description of Artificial Sequence: Synthetic oligonucleotide
ucaaguauggcucuguagu

SEQ ID NO: 2950733 - RNA, 19 nt, Artificial Sequence
  Description of Artificial Sequence: Synthetic oligonucleotide
aaagcaaacauuccuuaug

SEQ ID NO: 2950734 - RNA, 19 nt, Artificial Sequence
  Description of Artificial Sequence: Synthetic oligonucleotide
aagcaaauugcugaucugc

SEQ ID NO: 2950735 - RNA, 19 nt, Artificial Sequence
  Description of Artificial Sequence: Synthetic oligonucleotide
uuuccauuugaucugggag

SEQ ID NO: 2950736 - RNA, 19 nt, Artificial Sequence
  Description of Artificial Sequence: Synthetic oligonucleotide
ucaaucaagaugaaaauuu

SEQ ID NO: 2950737 - RNA, 19 nt, Artificial Sequence
  Description of Artificial Sequence: Synthetic oligonucleotide
aagaugaaaauuucauuca

SEQ ID NO: 2950738 - RNA, 19 nt, Artificial Sequence
  Description of Artificial Sequence: Synthetic oligonucleotide
aguaauguugacaccaugc

SEQ ID NO: 2950739 - RNA, 19 nt, Artificial Sequence
  Description of Artificial Sequence: Synthetic oligonucleotide
uugggugucauuuaauugc

SEQ ID NO: 2950740 - RNA, 19 nt, Artificial Sequence
  Description of Artificial Sequence: Synthetic oligonucleotide
acauguaaagcaaacauuc

SEQ ID NO: 2950741 - RNA, 19 nt, Artificial Sequence
  Description of Artificial Sequence: Synthetic oligonucleotide
ugcagaagcacuuucaagu

SEQ ID NO: 2950742 - RNA, 19 nt, Artificial Sequence
  Description of Artificial Sequence: Synthetic oligonucleotide
augaaaauuucauucaagu

SEQ ID NO: 2950743 - RNA, 19 nt, Artificial Sequence
  Description of Artificial Sequence: Synthetic oligonucleotide
uagagaagcaaauugcuga

SEQ ID NO: 2950744 - RNA, 19 nt, Artificial Sequence
  Description of Artificial Sequence: Synthetic oligonucleotide
aaccccaucuucucaaaac

SEQ ID NO: 2950745 - RNA, 19 nt, Artificial Sequence
  Description of Artificial Sequence: Synthetic oligonucleotide
uuaagcacuaccuuguaaa

SEQ ID NO: 2950746 - RNA, 19 nt, Artificial Sequence
  Description of Artificial Sequence: Synthetic oligonucleotide
ucaaguaauguugacacca

SEQ ID NO: 2950747 - RNA, 19 nt, Artificial Sequence
  Description of Artificial Sequence: Synthetic oligonucleotide
aauguugacaccaugcaga

SEQ ID NO: 2950748 - RNA, 19 nt, Artificial Sequence
  Description of Artificial Sequence: Synthetic oligonucleotide
caaacauuccuuauggaug

SEQ ID NO: 2950749 - RNA, 19 nt, Artificial Sequence
  Description of Artificial Sequence: Synthetic oligonucleotide
aagugaacuauacaucacu

SEQ ID NO: 2950750 - RNA, 19 nt, Artificial Sequence
  Description of Artificial Sequence: Synthetic oligonucleotide
aguuugacaaaugacagug

SEQ ID NO: 2950751 - RNA, 19 nt, Artificial Sequence
  Description of Artificial Sequence: Synthetic oligonucleotide
ugacaaaugacagugggug

SEQ ID NO: 2950752 - RNA, 19 nt, Artificial Sequence
  Description of Artificial Sequence: Synthetic oligonucleotide
agcacuuucaaguauggcu

SEQ ID NO: 2950753 - RNA, 19 nt, Artificial Sequence
  Description of Artificial Sequence: Synthetic oligonucleotide
ucaaccuauuccuagagaa

SEQ ID NO: 2950754 - RNA, 19 nt, Artificial Sequence
  Description of Artificial Sequence: Synthetic oligonucleotide
ugacauguaaagcaaacau

SEQ ID NO: 2950755 - RNA, 19 nt, Artificial Sequence
  Description of Artificial Sequence: Synthetic oligonucleotide
uccuagagaagcaaauugc

SEQ ID NO: 2950756 - RNA, 19 nt, Artificial Sequence
  Description of Artificial Sequence: Synthetic oligonucleotide
uuccuagagaagcaaauug

SEQ ID NO: 2950757 - RNA, 19 nt, Artificial Sequence
  Description of Artificial Sequence: Synthetic oligonucleotide
uaacaaguuaagcacuacc

SEQ ID NO: 2950758 - RNA, 19 nt, Artificial Sequence
  Description of Artificial Sequence: Synthetic oligonucleotide
uguuuggccaagcaguuug

SEQ ID NO: 2950759 - RNA, 19 nt, Artificial Sequence
  Description of Artificial Sequence: Synthetic oligonucleotide
agcacuaccuuguaaagug

SEQ ID NO: 2950760 - RNA, 19 nt, Artificial Sequence
  Description of Artificial Sequence: Synthetic oligonucleotide
aaauugcugaucugcuuuc

SEQ ID NO: 2950761 - RNA, 19 nt, Artificial Sequence
  Description of Artificial Sequence: Synthetic oligonucleotide
aaaauuucauucaaguaau

SEQ ID NO: 2950762 - RNA, 19 nt, Artificial Sequence
  Description of Artificial Sequence: Synthetic oligonucleotide
caaguuaagcacuaccuug

SEQ ID NO: 2950763 - RNA, 19 nt, Artificial Sequence
  Description of Artificial Sequence: Synthetic oligonucleotide
caaaaccacacuuuccugc

SEQ ID NO: 2950764 - RNA, 19 nt, Artificial Sequence
  Description of Artificial Sequence: Synthetic oligonucleotide
uucauucaaguaauguuga

SEQ ID NO: 2950765 - RNA, 19 nt, Artificial Sequence
  Description of Artificial Sequence: Synthetic oligonucleotide
auguaaagcaaacauuccu

SEQ ID NO: 2950766 - RNA, 19 nt, Artificial Sequence
  Description of Artificial Sequence: Synthetic oligonucleotide
auuucauucaaguaauguu

SEQ ID NO: 2950767 - RNA, 19 nt, Artificial Sequence
  Description of Artificial Sequence: Synthetic oligonucleotide
cuuguaaagugaacuauac

SEQ ID NO: 2950768 - RNA, 19 nt, Artificial Sequence
  Description of Artificial Sequence: Synthetic oligonucleotide
uguaaagcaaacauuccuu

SEQ ID NO: 2950769 - RNA, 19 nt, Artificial Sequence
  Description of Artificial Sequence: Synthetic oligonucleotide
uuugggugucauuuaauug

SEQ ID NO: 2950770 - RNA, 19 nt, Artificial Sequence
  Description of Artificial Sequence: Synthetic oligonucleotide
aaaaccacacuuuccugcu

SEQ ID NO: 2950771 - RNA, 19 nt, Artificial Sequence
  Description of Artificial Sequence: Synthetic oligonucleotide
uccuguuuggccaagcagu

SEQ ID NO: 2950772 - RNA, 19 nt, Artificial Sequence
  Description of Artificial Sequence: Synthetic oligonucleotide
ugaaaauuucauucaagua

SEQ ID NO: 2950773 - RNA, 19 nt, Artificial Sequence
  Description of Artificial Sequence: Synthetic oligonucleotide
ucuucucaaaaccacacuu

SEQ ID NO: 2950774 - RNA, 19 nt, Artificial Sequence
  Description of Artificial Sequence: Synthetic oligonucleotide
cauuccuuauggauggccg

SEQ ID NO: 2950775 - RNA, 19 nt, Artificial Sequence
  Description of Artificial Sequence: Synthetic oligonucleotide
cuauacaucacugugcguc

SEQ ID NO: 2950776 - RNA, 19 nt, Artificial Sequence
  Description of Artificial Sequence: Synthetic oligonucleotide
aaagugaacuauacaucac

SEQ ID NO: 2950777 - RNA, 19 nt, Artificial Sequence
  Description of Artificial Sequence: Synthetic oligonucleotide
uuuuguuugugugugugug

SEQ ID NO: 2950778 - RNA, 19 nt, Artificial Sequence
  Description of Artificial Sequence: Synthetic oligonucleotide
acaaaugacagugggugac

SEQ ID NO: 2950779 - RNA, 19 nt, Artificial Sequence
  Description of Artificial Sequence: Synthetic oligonucleotide
uuaauugccucucuuccuc

SEQ ID NO: 2950780 - RNA, 19 nt, Artificial Sequence
  Description of Artificial Sequence: Synthetic oligonucleotide
uggccaagcaguuugacaa

SEQ ID NO: 2950781 - RNA, 19 nt, Artificial Sequence
  Description of Artificial Sequence: Synthetic oligonucleotide
ucucaaaaccacacuuucc

SEQ ID NO: 2950782 - RNA, 19 nt, Artificial Sequence
  Description of Artificial Sequence: Synthetic oligonucleotide
aauugcugaucugcuuucc

SEQ ID NO: 2950783 - RNA, 19 nt, Artificial Sequence
  Description of Artificial Sequence: Synthetic oligonucleotide
aagcaguuugacaaaugac

SEQ ID NO: 2950784 - RNA, 19 nt, Artificial Sequence
  Description of Artificial Sequence: Synthetic oligonucleotide
uuguaaagugaacuauaca

SEQ ID NO: 2950785 - RNA, 19 nt, Artificial Sequence
  Description of Artificial Sequence: Synthetic oligonucleotide
uucucaaaaccacacuuuc

SEQ ID NO: 2950786 - RNA, 19 nt, Artificial Sequence
  Description of Artificial Sequence: Synthetic oligonucleotide
guagucaaccuauuccuag

SEQ ID NO: 2950787 - RNA, 19 nt, Artificial Sequence
  Description of Artificial Sequence: Synthetic oligonucleotide
cauguaaagcaaacauucc

SEQ ID NO: 2950788 - RNA, 19 nt, Artificial Sequence
  Description of Artificial Sequence: Synthetic oligonucleotide
aaucaagaugaaaauuuca

SEQ ID NO: 2950789 - RNA, 19 nt, Artificial Sequence
  Description of Artificial Sequence: Synthetic oligonucleotide
uucaaguauggcucuguag

SEQ ID NO: 2950790 - RNA, 19 nt, Artificial Sequence
  Description of Artificial Sequence: Synthetic oligonucleotide
uaagcacuaccuuguaaag

SEQ ID NO: 2950791 - RNA, 19 nt, Artificial Sequence
  Description of Artificial Sequence: Synthetic oligonucleotide
agcaguuugacaaaugaca

SEQ ID NO: 2950792 - RNA, 19 nt, Artificial Sequence
  Description of Artificial Sequence: Synthetic oligonucleotide
ugaucugcuuuccauuuga

SEQ ID NO: 2950793 - RNA, 19 nt, Artificial Sequence
  Description of Artificial Sequence: Synthetic oligonucleotide
uuuaauugccucucuuccu

SEQ ID NO: 2950794 - RNA, 19 nt, Artificial Sequence
  Description of Artificial Sequence: Synthetic oligonucleotide
gaacuauacaucacugugc

SEQ ID NO: 2950795 - RNA, 19 nt, Artificial Sequence
  Description of Artificial Sequence: Synthetic oligonucleotide
uauuccuagagaagcaaau

SEQ ID NO: 2950796 - RNA, 19 nt, Artificial Sequence
  Description of Artificial Sequence: Synthetic oligonucleotide
aaguaauguugacaccaug

SEQ ID NO: 2950797 - RNA, 19 nt, Artificial Sequence
  Description of Artificial Sequence: Synthetic oligonucleotide
cuagagaagcaaauugcug

SEQ ID NO: 2950798 - RNA, 19 nt, Artificial Sequence
  Description of Artificial Sequence: Synthetic oligonucleotide
uuccucuacaaccccaucu

SEQ ID NO: 2950799 - RNA, 19 nt, Artificial Sequence
  Description of Artificial Sequence: Synthetic oligonucleotide
ucacugugcgucaaucaag

SEQ ID NO: 2950800 - RNA, 19 nt, Artificial Sequence
  Description of Artificial Sequence: Synthetic oligonucleotide
cucucuuccucuacaaccc

SEQ ID NO: 2950801 - RNA, 19 nt, Artificial Sequence
  Description of Artificial Sequence: Synthetic oligonucleotide
agugggugacauguaaagc

SEQ ID NO: 2950802 - RNA, 19 nt, Artificial Sequence
  Description of Artificial Sequence: Synthetic oligonucleotide
caaucaagaugaaaauuuc

SEQ ID NO: 2950803 - RNA, 19 nt, Artificial Sequence
  Description of Artificial Sequence: Synthetic oligonucleotide
auuccuuauggauggccgg

SEQ ID NO: 2950804 - RNA, 19 nt, Artificial Sequence
  Description of Artificial Sequence: Synthetic oligonucleotide
uuuugggugucauuuaauu

SEQ ID NO: 2950805 - RNA, 19 nt, Artificial Sequence
  Description of Artificial Sequence: Synthetic oligonucleotide
ugggugucauuuaauugcc

SEQ ID NO: 2950806 - RNA, 19 nt, Artificial Sequence
  Description of Artificial Sequence: Synthetic oligonucleotide
agaugaaaauuucauucaa

SEQ ID NO: 2950807 - RNA, 19 nt, Artificial Sequence
  Description of Artificial Sequence: Synthetic oligonucleotide
uugacaaaugacagugggu

SEQ ID NO: 2950808 - RNA, 19 nt, Artificial Sequence
  Description of Artificial Sequence: Synthetic oligonucleotide
aucugcuuuccauuugauc

SEQ ID NO: 2950809 - RNA, 19 nt, Artificial Sequence
  Description of Artificial Sequence: Synthetic oligonucleotide
aaguuaagcacuaccuugu

SEQ ID NO: 2950810 - RNA, 19 nt, Artificial Sequence
  Description of Artificial Sequence: Synthetic oligonucleotide
gugggugacauguaaagca

SEQ ID NO: 2950811 - RNA, 19 nt, Artificial Sequence
  Description of Artificial Sequence: Synthetic oligonucleotide
caucuucucaaaaccacac

SEQ ID NO: 2950812 - RNA, 19 nt, Artificial Sequence
  Description of Artificial Sequence: Synthetic oligonucleotide
uauggcucuguagucaacc

SEQ ID NO: 2950813 - RNA, 19 nt, Artificial Sequence
  Description of Artificial Sequence: Synthetic oligonucleotide
aagcacuuucaaguauggc

SEQ ID NO: 2950814 - RNA, 19 nt, Artificial Sequence
  Description of Artificial Sequence: Synthetic oligonucleotide
uauacaucacugugcguca

SEQ ID NO: 2950815 - RNA, 19 nt, Artificial Sequence
  Description of Artificial Sequence: Synthetic oligonucleotide
agucaaccuauuccuagag

SEQ ID NO: 2950816 - RNA, 19 nt, Artificial Sequence
  Description of Artificial Sequence: Synthetic oligonucleotide
acauuccuuauggauggcc

SEQ ID NO: 2950817 - RNA, 19 nt, Artificial Sequence
  Description of Artificial Sequence: Synthetic oligonucleotide
cugugcgucaaucaagaug

SEQ ID NO: 2950818 - RNA, 19 nt, Artificial Sequence
  Description of Artificial Sequence: Synthetic oligonucleotide
guaauguugacaccaugca

SEQ ID NO: 2950819 - RNA, 19 nt, Artificial Sequence
  Description of Artificial Sequence: Synthetic oligonucleotide
gaagcacuuucaaguaugg

SEQ ID NO: 2950820 - RNA, 19 nt, Artificial Sequence
  Description of Artificial Sequence: Synthetic oligonucleotide
guaaagugaacuauacauc

SEQ ID NO: 2950821 - RNA, 19 nt, Artificial Sequence
  Description of Artificial Sequence: Synthetic oligonucleotide
uucaaguaauguugacacc

SEQ ID NO: 2950822 - RNA, 19 nt, Artificial Sequence
  Description of Artificial Sequence: Synthetic oligonucleotide
uaaagcaaacauuccuuau

SEQ ID NO: 2950823 - RNA, 19 nt, Artificial Sequence
  Description of Artificial Sequence: Synthetic oligonucleotide
aucaagaugaaaauuucau

SEQ ID NO: 2950824 - RNA, 19 nt, Artificial Sequence
  Description of Artificial Sequence: Synthetic oligonucleotide
ucuacaaccccaucuucuc

SEQ ID NO: 2950825 - RNA, 19 nt, Artificial Sequence
  Description of Artificial Sequence: Synthetic oligonucleotide
cagugggugacauguaaag

SEQ ID NO: 2950826 - RNA, 19 nt, Artificial Sequence
  Description of Artificial Sequence: Synthetic oligonucleotide
auugccucucuuccucuac

SEQ ID NO: 2950827 - RNA, 19 nt, Artificial Sequence
  Description of Artificial Sequence: Synthetic oligonucleotide
aaguauggcucuguaguca

SEQ ID NO: 2950828 - RNA, 19 nt, Artificial Sequence
  Description of Artificial Sequence: Synthetic oligonucleotide
uuguuugugugugugugug

SEQ ID NO: 2950829 - RNA, 19 nt, Artificial Sequence
  Description of Artificial Sequence: Synthetic oligonucleotide
aaaccacacuuuccugcuc

SEQ ID NO: 2950830 - RNA, 19 nt, Artificial Sequence
  Description of Artificial Sequence: Synthetic oligonucleotide
agaagcacuuucaaguaug

SEQ ID NO: 2950831 - RNA, 19 nt, Artificial Sequence
  Description of Artificial Sequence: Synthetic oligonucleotide
caaccuauuccuagagaag

SEQ ID NO: 2950832 - RNA, 19 nt, Artificial Sequence
  Description of Artificial Sequence: Synthetic oligonucleotide
uuugaucugggagagguuu

SEQ ID NO: 2950833 - RNA, 19 nt, Artificial Sequence
  Description of Artificial Sequence: Synthetic oligonucleotide
caagcaguuugacaaauga

SEQ ID NO: 2950834 - RNA, 19 nt, Artificial Sequence
  Description of Artificial Sequence: Synthetic oligonucleotide
uuuguuugugugugugugu

SEQ ID NO: 2950835 - RNA, 19 nt, Artificial Sequence
  Description of Artificial Sequence: Synthetic oligonucleotide
agugaacuauacaucacug

SEQ ID NO: 2950836 - RNA, 19 nt, Artificial Sequence
  Description of Artificial Sequence: Synthetic oligonucleotide
ucauuuaauugccucucuu

SEQ ID NO: 2950837 - RNA, 19 nt, Artificial Sequence
  Description of Artificial Sequence: Synthetic oligonucleotide
acaaguuaagcacuaccuu

SEQ ID NO: 2950838 - RNA, 19 nt, Artificial Sequence
  Description of Artificial Sequence: Synthetic oligonucleotide
ugggugacauguaaagcaa

SEQ ID NO: 2950839 - RNA, 19 nt, Artificial Sequence
  Description of Artificial Sequence: Synthetic oligonucleotide
agagaagcaaauugcugau

SEQ ID NO: 2950840 - RNA, 19 nt, Artificial Sequence
  Description of Artificial Sequence: Synthetic oligonucleotide
cuuuccugcuccuguuugg

SEQ ID NO: 2950841 - RNA, 19 nt, Artificial Sequence
  Description of Artificial Sequence: Synthetic oligonucleotide
uagucaaccuauuccuaga

SEQ ID NO: 2950842 - RNA, 19 nt, Artificial Sequence
  Description of Artificial Sequence: Synthetic oligonucleotide
ugucauuuaauugccucuc

SEQ ID NO: 2950843 - RNA, 19 nt, Artificial Sequence
  Description of Artificial Sequence: Synthetic oligonucleotide
acuaccuuguaaagugaac

SEQ ID NO: 2950844 - RNA, 19 nt, Artificial Sequence
  Description of Artificial Sequence: Synthetic oligonucleotide
ugcuuuccauuugaucugg

SEQ ID NO: 2950845 - RNA, 19 nt, Artificial Sequence
  Description of Artificial Sequence: Synthetic oligonucleotide
acuuuccugcuccuguuug

SEQ ID NO: 2950846 - RNA, 19 nt, Artificial Sequence
  Description of Artificial Sequence: Synthetic oligonucleotide
aacauuccuuauggauggc

SEQ ID NO: 2950847 - RNA, 19 nt, Artificial Sequence
  Description of Artificial Sequence: Synthetic oligonucleotide
uuggccaagcaguuugaca

SEQ ID NO: 2950848 - RNA, 19 nt, Artificial Sequence
  Description of Artificial Sequence: Synthetic oligonucleotide
aagcacuaccuuguaaagu

SEQ ID NO: 2950849 - RNA, 19 nt, Artificial Sequence
  Description of Artificial Sequence: Synthetic oligonucleotide
uacaaccccaucuucucaa

SEQ ID NO: 2950850 - RNA, 19 nt, Artificial Sequence
  Description of Artificial Sequence: Synthetic oligonucleotide
guuugugugugugugugug

SEQ ID NO: 2950851 - RNA, 19 nt, Artificial Sequence
  Description of Artificial Sequence: Synthetic oligonucleotide
uugugugugugugugugug

SEQ ID NO: 2950852 - RNA, 19 nt, Artificial Sequence
  Description of Artificial Sequence: Synthetic oligonucleotide
cauucaaguaauguugaca

SEQ ID NO: 2950853 - RNA, 19 nt, Artificial Sequence
  Description of Artificial Sequence: Synthetic oligonucleotide
uguagucaaccuauuccua

SEQ ID NO: 2950854 - RNA, 19 nt, Artificial Sequence
  Description of Artificial Sequence: Synthetic oligonucleotide
ccucucuuccucuacaacc

SEQ ID NO: 2950855 - RNA, 19 nt, Artificial Sequence
  Description of Artificial Sequence: Synthetic oligonucleotide
guuugacaaaugacagugg

SEQ ID NO: 2950856 - RNA, 19 nt, Artificial Sequence
  Description of Artificial Sequence: Synthetic oligonucleotide
gcaguuugacaaaugacag

SEQ ID NO: 2950857 - RNA, 19 nt, Artificial Sequence
  Description of Artificial Sequence: Synthetic oligonucleotide
uccucuacaaccccaucuu

SEQ ID NO: 2950858 - RNA, 19 nt, Artificial Sequence
  Description of Artificial Sequence: Synthetic oligonucleotide
aucuucucaaaaccacacu

SEQ ID NO: 2950859 - RNA, 19 nt, Artificial Sequence
  Description of Artificial Sequence: Synthetic oligonucleotide
guaaagcaaacauuccuua

SEQ ID NO: 2950860 - RNA, 19 nt, Artificial Sequence
  Description of Artificial Sequence: Synthetic oligonucleotide
acaucacugugcgucaauc

SEQ ID NO: 2950861 - RNA, 19 nt, Artificial Sequence
  Description of Artificial Sequence: Synthetic oligonucleotide
gacaaaugacaguggguga

SEQ ID NO: 2950862 - RNA, 19 nt, Artificial Sequence
  Description of Artificial Sequence: Synthetic oligonucleotide
uuucaaguauggcucugua

SEQ ID NO: 2950863 - RNA, 19 nt, Artificial Sequence
  Description of Artificial Sequence: Synthetic oligonucleotide
aguauggcucuguagucaa

SEQ ID NO: 2950864 - RNA, 19 nt, Artificial Sequence
  Description of Artificial Sequence: Synthetic oligonucleotide
caaguauggcucuguaguc

SEQ ID NO: 2950865 - RNA, 19 nt, Artificial Sequence
  Description of Artificial Sequence: Synthetic oligonucleotide
ucucuuccucuacaacccc

SEQ ID NO: 2950866 - RNA, 19 nt, Artificial Sequence
  Description of Artificial Sequence: Synthetic oligonucleotide
auugcugaucugcuuucca

SEQ ID NO: 2950867 - RNA, 19 nt, Artificial Sequence
  Description of Artificial Sequence: Synthetic oligonucleotide
cugcuuuccauuugaucug

SEQ ID NO: 2950868 - RNA, 19 nt, Artificial Sequence
  Description of Artificial Sequence: Synthetic oligonucleotide
ggugucauuuaauugccuc

SEQ ID NO: 2950869 - RNA, 19 nt, Artificial Sequence
  Description of Artificial Sequence: Synthetic oligonucleotide
cuccuguuuggccaagcag

SEQ ID NO: 2950870 - RNA, 19 nt, Artificial Sequence
  Description of Artificial Sequence: Synthetic oligonucleotide
agcaaacauuccuuaugga

SEQ ID NO: 2950871 - RNA, 19 nt, Artificial Sequence
  Description of Artificial Sequence: Synthetic oligonucleotide
uuugugugugugugugugu

SEQ ID NO: 2950872 - RNA, 19 nt, Artificial Sequence
  Description of Artificial Sequence: Synthetic oligonucleotide
uuuccugcuccuguuuggc

SEQ ID NO: 2950873 - RNA, 19 nt, Artificial Sequence
  Description of Artificial Sequence: Synthetic oligonucleotide
uuccuuauggauggccggc

SEQ ID NO: 2950874 - RNA, 19 nt, Artificial Sequence
  Description of Artificial Sequence: Synthetic oligonucleotide
auguugacaccaugcagaa

SEQ ID NO: 2950875 - RNA, 19 nt, Artificial Sequence
  Description of Artificial Sequence: Synthetic oligonucleotide
aaaugacagugggugacau

SEQ ID NO: 2950876 - RNA, 19 nt, Artificial Sequence
  Description of Artificial Sequence: Synthetic oligonucleotide
gacagugggugacauguaa

SEQ ID NO: 2950877 - RNA, 19 nt, Artificial Sequence
  Description of Artificial Sequence: Synthetic oligonucleotide
uaauugccucucuuccucu

SEQ ID NO: 2950878 - RNA, 19 nt, Artificial Sequence
  Description of Artificial Sequence: Synthetic oligonucleotide
uugcugaucugcuuuccau

SEQ ID NO: 2950879 - RNA, 19 nt, Artificial Sequence
  Description of Artificial Sequence: Synthetic oligonucleotide
uguguguguguguguaaaa

SEQ ID NO: 2950880 - RNA, 19 nt, Artificial Sequence
  Description of Artificial Sequence: Synthetic oligonucleotide
cucuguagucaaccuauuc

SEQ ID NO: 2950881 - RNA, 19 nt, Artificial Sequence
  Description of Artificial Sequence: Synthetic oligonucleotide
uguuugugugugugugugu

SEQ ID NO: 2950882 - RNA, 19 nt, Artificial Sequence
  Description of Artificial Sequence: Synthetic oligonucleotide
uugccucucuuccucuaca

SEQ ID NO: 2950883 - RNA, 19 nt, Artificial Sequence
  Description of Artificial Sequence: Synthetic oligonucleotide
cuguagucaaccuauuccu

SEQ ID NO: 2950884 - RNA, 19 nt, Artificial Sequence
  Description of Artificial Sequence: Synthetic oligonucleotide
cacugugcgucaaucaaga

SEQ ID NO: 2950885 - RNA, 19 nt, Artificial Sequence
  Description of Artificial Sequence: Synthetic oligonucleotide
uggauggccggcucaauuu

SEQ ID NO: 2950886 - RNA, 19 nt, Artificial Sequence
  Description of Artificial Sequence: Synthetic oligonucleotide
accuuguaaagugaacuau

SEQ ID NO: 2950887 - RNA, 19 nt, Artificial Sequence
  Description of Artificial Sequence: Synthetic oligonucleotide
cuaacaaguuaagcacuac

SEQ ID NO: 2950888 - RNA, 19 nt, Artificial Sequence
  Description of Artificial Sequence: Synthetic oligonucleotide
accuaacaaguuaagcacu

SEQ ID NO: 2950889 - RNA, 19 nt, Artificial Sequence
  Description of Artificial Sequence: Synthetic oligonucleotide
guuaagcacuaccuuguaa

SEQ ID NO: 2950890 - RNA, 19 nt, Artificial Sequence
  Description of Artificial Sequence: Synthetic oligonucleotide
ugcugaucugcuuuccauu

SEQ ID NO: 2950891 - RNA, 19 nt, Artificial Sequence
  Description of Artificial Sequence: Synthetic oligonucleotide
aauugccucucuuccucua

SEQ ID NO: 2950892 - RNA, 19 nt, Artificial Sequence
  Description of Artificial Sequence: Synthetic oligonucleotide
agcaaauugcugaucugcu

SEQ ID NO: 2950893 - RNA, 19 nt, Artificial Sequence
  Description of Artificial Sequence: Synthetic oligonucleotide
gcgucaaucaagaugaaaa

SEQ ID NO: 2950894 - RNA, 19 nt, Artificial Sequence
  Description of Artificial Sequence: Synthetic oligonucleotide
ugugugugugugugugugu

SEQ ID NO: 2950895 - RNA, 19 nt, Artificial Sequence
  Description of Artificial Sequence: Synthetic oligonucleotide
gugacauguaaagcaaaca

SEQ ID NO: 2950896 - RNA, 19 nt, Artificial Sequence
  Description of Artificial Sequence: Synthetic oligonucleotide
ggugacauguaaagcaaac

SEQ ID NO: 2950897 - RNA, 19 nt, Artificial Sequence
  Description of Artificial Sequence: Synthetic oligonucleotide
auggcucuguagucaaccu

SEQ ID NO: 2950898 - RNA, 19 nt, Artificial Sequence
  Description of Artificial Sequence: Synthetic oligonucleotide
auuccuagagaagcaaauu

SEQ ID NO: 2950899 - RNA, 19 nt, Artificial Sequence
  Description of Artificial Sequence: Synthetic oligonucleotide
acuauacaucacugugcgu

SEQ ID NO: 2950900 - RNA, 19 nt, Artificial Sequence
  Description of Artificial Sequence: Synthetic oligonucleotide
cuaccuuguaaagugaacu

SEQ ID NO: 2950901 - RNA, 19 nt, Artificial Sequence
  Description of Artificial Sequence: Synthetic oligonucleotide
gugugugugugugugugug

SEQ ID NO: 2950902 - RNA, 19 nt, Artificial Sequence
  Description of Artificial Sequence: Synthetic oligonucleotide
gacaccaugcagaagcacu

SEQ ID NO: 2950903 - RNA, 19 nt, Artificial Sequence
  Description of Artificial Sequence: Synthetic oligonucleotide
cauuugaucugggagaggu

SEQ ID NO: 2950904 - RNA, 19 nt, Artificial Sequence
  Description of Artificial Sequence: Synthetic oligonucleotide
uuauggauggccggcucaa

SEQ ID NO: 2950905 - RNA, 19 nt, Artificial Sequence
  Description of Artificial Sequence: Synthetic oligonucleotide
gcacuuucaaguauggcuc

SEQ ID NO: 2950906 - RNA, 19 nt, Artificial Sequence
  Description of Artificial Sequence: Synthetic oligonucleotide
ugcgucaaucaagaugaaa

SEQ ID NO: 2950907 - RNA, 19 nt, Artificial Sequence
  Description of Artificial Sequence: Synthetic oligonucleotide
caugcagaagcacuuucaa

SEQ ID NO: 2950908 - RNA, 19 nt, Artificial Sequence
  Description of Artificial Sequence: Synthetic oligonucleotide
uguguguguguguguguaa

SEQ ID NO: 2950909 - RNA, 19 nt, Artificial Sequence
  Description of Artificial Sequence: Synthetic oligonucleotide
gugucauuuaauugccucu

SEQ ID NO: 2950910 - RNA, 19 nt, Artificial Sequence
  Description of Artificial Sequence: Synthetic oligonucleotide
uugaucugggagagguuuu

SEQ ID NO: 2950911 - RNA, 19 nt, Artificial Sequence
  Description of Artificial Sequence: Synthetic oligonucleotide
gucaaccuauuccuagaga

SEQ ID NO: 2950912 - RNA, 19 nt, Artificial Sequence
  Description of Artificial Sequence: Synthetic oligonucleotide
gugaacuauacaucacugu

SEQ ID NO: 2950913 - RNA, 19 nt, Artificial Sequence
  Description of Artificial Sequence: Synthetic oligonucleotide
uuccugcuccuguuuggcc

SEQ ID NO: 2950914 - RNA, 19 nt, Artificial Sequence
  Description of Artificial Sequence: Synthetic oligonucleotide
uggcucuguagucaaccua

SEQ ID NO: 2950915 - RNA, 19 nt, Artificial Sequence
  Description of Artificial Sequence: Synthetic oligonucleotide
caucacugugcgucaauca

SEQ ID NO: 2950916 - RNA, 19 nt, Artificial Sequence
  Description of Artificial Sequence: Synthetic oligonucleotide
uuuggccaagcaguuugac

SEQ ID NO: 2950917 - RNA, 19 nt, Artificial Sequence
  Description of Artificial Sequence: Synthetic oligonucleotide
cuuauggauggccggcuca

SEQ ID NO: 2950918 - RNA, 19 nt, Artificial Sequence
  Description of Artificial Sequence: Synthetic oligonucleotide
uguugacaccaugcagaag

SEQ ID NO: 2950919 - RNA, 19 nt, Artificial Sequence
  Description of Artificial Sequence: Synthetic oligonucleotide
uacaucacugugcgucaau

SEQ ID NO: 2950920 - RNA, 19 nt, Artificial Sequence
  Description of Artificial Sequence: Synthetic oligonucleotide
gacauguaaagcaaacauu

SEQ ID NO: 2950921 - RNA, 19 nt, Artificial Sequence
  Description of Artificial Sequence: Synthetic oligonucleotide
aguuaagcacuaccuugua

SEQ ID NO: 2950922 - RNA, 19 nt, Artificial Sequence
  Description of Artificial Sequence: Synthetic oligonucleotide
cccaucuucucaaaaccac

SEQ ID NO: 2950923 - RNA, 19 nt, Artificial Sequence
  Description of Artificial Sequence: Synthetic oligonucleotide
gcaaacauuccuuauggau

SEQ ID NO: 2950924 - RNA, 19 nt, Artificial Sequence
  Description of Artificial Sequence: Synthetic oligonucleotide
acuuucaaguauggcucug

SEQ ID NO: 2950925 - RNA, 19 nt, Artificial Sequence
  Description of Artificial Sequence: Synthetic oligonucleotide
caaauugcugaucugcuuu

SEQ ID NO: 2950926 - RNA, 19 nt, Artificial Sequence
  Description of Artificial Sequence: Synthetic oligonucleotide
ugccucucuuccucuacaa

SEQ ID NO: 2950927 - RNA, 19 nt, Artificial Sequence
  Description of Artificial Sequence: Synthetic oligonucleotide
auggauggccggcucaauu

SEQ ID NO: 2950928 - RNA, 19 nt, Artificial Sequence
  Description of Artificial Sequence: Synthetic oligonucleotide
gagaagcaaauugcugauc

SEQ ID NO: 2950929 - RNA, 19 nt, Artificial Sequence
  Description of Artificial Sequence: Synthetic oligonucleotide
cacuaccuuguaaagugaa

SEQ ID NO: 2950930 - RNA, 19 nt, Artificial Sequence
  Description of Artificial Sequence: Synthetic oligonucleotide
accuauuccuagagaagca

SEQ ID NO: 2950931 - RNA, 19 nt, Artificial Sequence
  Description of Artificial Sequence: Synthetic oligonucleotide
uccuuauggauggccggcu

SEQ ID NO: 2950932 - RNA, 19 nt, Artificial Sequence
  Description of Artificial Sequence: Synthetic oligonucleotide
ugacaccaugcagaagcac

SEQ ID NO: 2950933 - RNA, 19 nt, Artificial Sequence
  Description of Artificial Sequence: Synthetic oligonucleotide
cuacaaccccaucuucuca

SEQ ID NO: 2950934 - RNA, 19 nt, Artificial Sequence
  Description of Artificial Sequence: Synthetic oligonucleotide
acacuuuccugcuccuguu

SEQ ID NO: 2950935 - RNA, 19 nt, Artificial Sequence
  Description of Artificial Sequence: Synthetic oligonucleotide
acaaccccaucuucucaaa

SEQ ID NO: 2950936 - RNA, 19 nt, Artificial Sequence
  Description of Artificial Sequence: Synthetic oligonucleotide
gucaaucaagaugaaaauu

SEQ ID NO: 2950937 - RNA, 19 nt, Artificial Sequence
  Description of Artificial Sequence: Synthetic oligonucleotide
cuucucaaaaccacacuuu

SEQ ID NO: 2950938 - RNA, 19 nt, Artificial Sequence
  Description of Artificial Sequence: Synthetic oligonucleotide
acagugggugacauguaaa

SEQ ID NO: 2950939 - RNA, 19 nt, Artificial Sequence
  Description of Artificial Sequence: Synthetic oligonucleotide
ugacagugggugacaugua

SEQ ID NO: 2950940 - RNA, 19 nt, Artificial Sequence
  Description of Artificial Sequence: Synthetic oligonucleotide
caaaugacagugggugaca

SEQ ID NO: 2950941 - RNA, 19 nt, Artificial Sequence
  Description of Artificial Sequence: Synthetic oligonucleotide
acugugcgucaaucaagau

SEQ ID NO: 2950942 - RNA, 19 nt, Artificial Sequence
  Description of Artificial Sequence: Synthetic oligonucleotide
caguuugacaaaugacagu

SEQ ID NO: 2950943 - RNA, 19 nt, Artificial Sequence
  Description of Artificial Sequence: Synthetic oligonucleotide
guguguguguguguguaaa

SEQ ID NO: 2950944 - RNA, 19 nt, Artificial Sequence
  Description of Artificial Sequence: Synthetic oligonucleotide
ccaagcaguuugacaaaug

SEQ ID NO: 2950945 - RNA, 19 nt, Artificial Sequence
  Description of Artificial Sequence: Synthetic oligonucleotide
acaccaugcagaagcacuu

SEQ ID NO: 2950946 - RNA, 19 nt, Artificial Sequence
  Description of Artificial Sequence: Synthetic oligonucleotide
cacacuuuccugcuccugu

SEQ ID NO: 2950947 - RNA, 19 nt, Artificial Sequence
  Description of Artificial Sequence: Synthetic oligonucleotide
cuuccucuacaaccccauc

SEQ ID NO: 2950948 - RNA, 19 nt, Artificial Sequence
  Description of Artificial Sequence: Synthetic oligonucleotide
ccuuguaaagugaacuaua

SEQ ID NO: 2950949 - RNA, 19 nt, Artificial Sequence
  Description of Artificial Sequence: Synthetic oligonucleotide
gcagaagcacuuucaagua

SEQ ID NO: 2950950 - RNA, 19 nt, Artificial Sequence
  Description of Artificial Sequence: Synthetic oligonucleotide
ugcuccuguuuggccaagc

SEQ ID NO: 2950951 - RNA, 19 nt, Artificial Sequence
  Description of Artificial Sequence: Synthetic oligonucleotide
ccuagagaagcaaauugcu

SEQ ID NO: 2950952 - RNA, 19 nt, Artificial Sequence
  Description of Artificial Sequence: Synthetic oligonucleotide
caaguaauguugacaccau

SEQ ID NO: 2950953 - RNA, 19 nt, Artificial Sequence
  Description of Artificial Sequence: Synthetic oligonucleotide
ccuaacaaguuaagcacua

SEQ ID NO: 2950954 - RNA, 19 nt, Artificial Sequence
  Description of Artificial Sequence: Synthetic oligonucleotide
ccaugcagaagcacuuuca

SEQ ID NO: 2950955 - RNA, 19 nt, Artificial Sequence
  Description of Artificial Sequence: Synthetic oligonucleotide
gugugugugugugugugua

SEQ ID NO: 2950956 - RNA, 19 nt, Artificial Sequence
  Description of Artificial Sequence: Synthetic oligonucleotide
guuuggccaagcaguuuga

SEQ ID NO: 2950957 - RNA, 19 nt, Artificial Sequence
  Description of Artificial Sequence: Synthetic oligonucleotide
auacaucacugugcgucaa

SEQ ID NO: 2950958 - RNA, 19 nt, Artificial Sequence
  Description of Artificial Sequence: Synthetic oligonucleotide
cacuuucaaguauggcucu

SEQ ID NO: 2950959 - RNA, 19 nt, Artificial Sequence
  Description of Artificial Sequence: Synthetic oligonucleotide
cuuucaaguauggcucugu

SEQ ID NO: 2950960 - RNA, 19 nt, Artificial Sequence
  Description of Artificial Sequence: Synthetic oligonucleotide
uauggauggccggcucaau

SEQ ID NO: 2950961 - RNA, 19 nt, Artificial Sequence
  Description of Artificial Sequence: Synthetic oligonucleotide
auuugaucugggagagguu

SEQ ID NO: 2950962 - RNA, 19 nt, Artificial Sequence
  Description of Artificial Sequence: Synthetic oligonucleotide
caaccccaucuucucaaaa

SEQ ID NO: 2950963 - RNA, 19 nt, Artificial Sequence
  Description of Artificial Sequence: Synthetic oligonucleotide
gcuuuccauuugaucuggg

SEQ ID NO: 2950964 - RNA, 19 nt, Artificial Sequence
  Description of Artificial Sequence: Synthetic oligonucleotide
cagaagcacuuucaaguau

SEQ ID NO: 2950965 - RNA, 19 nt, Artificial Sequence
  Description of Artificial Sequence: Synthetic oligonucleotide
guauggcucuguagucaac

SEQ ID NO: 2950966 - RNA, 19 nt, Artificial Sequence
  Description of Artificial Sequence: Synthetic oligonucleotide
ccccaucuucucaaaacca

SEQ ID NO: 2950967 - RNA, 19 nt, Artificial Sequence
  Description of Artificial Sequence: Synthetic oligonucleotide
gcuccuguuuggccaagca

SEQ ID NO: 2950968 - RNA, 19 nt, Artificial Sequence
  Description of Artificial Sequence: Synthetic oligonucleotide
gccucucuuccucuacaac

SEQ ID NO: 2950969 - RNA, 19 nt, Artificial Sequence
  Description of Artificial Sequence: Synthetic oligonucleotide
ggcucuguagucaaccuau

SEQ ID NO: 2950970 - RNA, 19 nt, Artificial Sequence
  Description of Artificial Sequence: Synthetic oligonucleotide
ccucuacaaccccaucuuc

SEQ ID NO: 2950971 - RNA, 19 nt, Artificial Sequence
  Description of Artificial Sequence: Synthetic oligonucleotide
gcugaucugcuuuccauuu

SEQ ID NO: 2950972 - RNA, 19 nt, Artificial Sequence
  Description of Artificial Sequence: Synthetic oligonucleotide
ccuuauggauggccggcuc

SEQ ID NO: 2950973 - RNA, 19 nt, Artificial Sequence
  Description of Artificial Sequence: Synthetic oligonucleotide
gaucugcuuuccauuugau

SEQ ID NO: 2950974 - RNA, 19 nt, Artificial Sequence
  Description of Artificial Sequence: Synthetic oligonucleotide
gcacuaccuuguaaaguga

SEQ ID NO: 2950975 - RNA, 19 nt, Artificial Sequence
  Description of Artificial Sequence: Synthetic oligonucleotide
gcaaauugcugaucugcuu

SEQ ID NO: 2950976 - RNA, 19 nt, Artificial Sequence
  Description of Artificial Sequence: Synthetic oligonucleotide
ggccaagcaguuugacaaa

SEQ ID NO: 2950977 - RNA, 19 nt, Artificial Sequence
  Description of Artificial Sequence: Synthetic oligonucleotide
gggugacauguaaagcaaa

SEQ ID NO: 2950978 - RNA, 19 nt, Artificial Sequence
  Description of Artificial Sequence: Synthetic oligonucleotide
cgucaaucaagaugaaaau

SEQ ID NO: 2950979 - RNA, 19 nt, Artificial Sequence
  Description of Artificial Sequence: Synthetic oligonucleotide
cugcuccuguuuggccaag

SEQ ID NO: 2950980 - RNA, 19 nt, Artificial Sequence
  Description of Artificial Sequence: Synthetic oligonucleotide
ggauggccggcucaauuuu

SEQ ID NO: 2950981 - RNA, 19 nt, Artificial Sequence
  Description of Artificial Sequence: Synthetic oligonucleotide
cacuuuccugcuccuguuu

SEQ ID NO: 2950982 - RNA, 19 nt, Artificial Sequence
  Description of Artificial Sequence: Synthetic oligonucleotide
gccaagcaguuugacaaau

SEQ ID NO: 2950983 - RNA, 19 nt, Artificial Sequence
  Description of Artificial Sequence: Synthetic oligonucleotide
ccuguuuggccaagcaguu

SEQ ID NO: 2950984 - RNA, 19 nt, Artificial Sequence
  Description of Artificial Sequence: Synthetic oligonucleotide
gugcgucaaucaagaugaa

SEQ ID NO: 2950985 - RNA, 19 nt, Artificial Sequence
  Description of Artificial Sequence: Synthetic oligonucleotide
gggugucauuuaauugccu

SEQ ID NO: 2950986 - RNA, 19 nt, Artificial Sequence
  Description of Artificial Sequence: Synthetic oligonucleotide
cuguuuggccaagcaguuu

SEQ ID NO: 2950987 - RNA, 19 nt, Artificial Sequence
  Description of Artificial Sequence: Synthetic oligonucleotide
gcucuguagucaaccuauu

SEQ ID NO: 2950988 - RNA, 19 nt, Artificial Sequence
  Description of Artificial Sequence: Synthetic oligonucleotide
aauaauuuauuauuuagcu

SEQ ID NO: 2950989 - RNA, 19 nt, Artificial Sequence
  Description of Artificial Sequence: Synthetic oligonucleotide
aaugcugagacacagcagg

SEQ ID NO: 2950990 - RNA, 19 nt, Artificial Sequence
  Description of Artificial Sequence: Synthetic oligonucleotide
uaauuuauuauuuagcugu

SEQ ID NO: 2950991 - RNA, 19 nt, Artificial Sequence
  Description of Artificial Sequence: Synthetic oligonucleotide
uuagcugugguuaagauga

SEQ ID NO: 2950992 - RNA, 19 nt, Artificial Sequence
  Description of Artificial Sequence: Synthetic oligonucleotide
ucacaauguauuuaaaugg

SEQ ID NO: 2950993 - RNA, 19 nt, Artificial Sequence
  Description of Artificial Sequence: Synthetic oligonucleotide
aacagaaaugcugagacac

SEQ ID NO: 2950994 - RNA, 19 nt, Artificial Sequence
  Description of Artificial Sequence: Synthetic oligonucleotide
ucaucaacaacaaaugcag

SEQ ID NO: 2950995 - RNA, 19 nt, Artificial Sequence
  Description of Artificial Sequence: Synthetic oligonucleotide
aauuuuaaauaauuuauua

SEQ ID NO: 2950996 - RNA, 19 nt, Artificial Sequence
  Description of Artificial Sequence: Synthetic oligonucleotide
ugcaugaucacacagguca

SEQ ID NO: 2950997 - RNA, 19 nt, Artificial Sequence
  Description of Artificial Sequence: Synthetic oligonucleotide
ugcucuacaacauuugugg

SEQ ID NO: 2950998 - RNA, 19 nt, Artificial Sequence
  Description of Artificial Sequence: Synthetic oligonucleotide
uuaagaugaacagaaaugc

SEQ ID NO: 2950999 - RNA, 19 nt, Artificial Sequence
  Description of Artificial Sequence: Synthetic oligonucleotide
ugaacagaaaugcugagac

SEQ ID NO: 2951000 - RNA, 19 nt, Artificial Sequence
  Description of Artificial Sequence: Synthetic oligonucleotide
uucaucaacaacaaaugca

SEQ ID NO: 2951001 - RNA, 19 nt, Artificial Sequence
  Description of Artificial Sequence: Synthetic oligonucleotide
aauguugcucacuucauca

SEQ ID NO: 2951002 - RNA, 19 nt, Artificial Sequence
  Description of Artificial Sequence: Synthetic oligonucleotide
aucaacaacaaaugcaguc

SEQ ID NO: 2951003 - RNA, 19 nt, Artificial Sequence
  Description of Artificial Sequence: Synthetic oligonucleotide
uuuauuauuuagcuguggu

SEQ ID NO: 2951004 - RNA, 19 nt, Artificial Sequence
  Description of Artificial Sequence: Synthetic oligonucleotide
caguauguaacccagcucc

SEQ ID NO: 2951005 - RNA, 19 nt, Artificial Sequence
  Description of Artificial Sequence: Synthetic oligonucleotide
uacaauguugcucacuuca

SEQ ID NO: 2951006 - RNA, 19 nt, Artificial Sequence
  Description of Artificial Sequence: Synthetic oligonucleotide
gucacaauguauuuaaaug

SEQ ID NO: 2951007 - RNA, 19 nt, Artificial Sequence
  Description of Artificial Sequence: Synthetic oligonucleotide
gauggcacuuucuauagcc

SEQ ID NO: 2951008 - RNA, 19 nt, Artificial Sequence
  Description of Artificial Sequence: Synthetic oligonucleotide
auuuaaaugguuuccccag

SEQ ID NO: 2951009 - RNA, 19 nt, Artificial Sequence
  Description of Artificial Sequence: Synthetic oligonucleotide
auaauuuauuauuuagcug

SEQ ID NO: 2951010 - RNA, 19 nt, Artificial Sequence
  Description of Artificial Sequence: Synthetic oligonucleotide
ucuacaacauuuguggucc

SEQ ID NO: 2951011 - RNA, 19 nt, Artificial Sequence
  Description of Artificial Sequence: Synthetic oligonucleotide
cugacgaugcaguacaugg

SEQ ID NO: 2951012 - RNA, 19 nt, Artificial Sequence
  Description of Artificial Sequence: Synthetic oligonucleotide
uccuuuacaauguugcuca

SEQ ID NO: 2951013 - RNA, 19 nt, Artificial Sequence
  Description of Artificial Sequence: Synthetic oligonucleotide
gaucacacaggucacaaug

SEQ ID NO: 2951014 - RNA, 19 nt, Artificial Sequence
  Description of Artificial Sequence: Synthetic oligonucleotide
uauuuaaaugguuucccca

SEQ ID NO: 2951015 - RNA, 19 nt, Artificial Sequence
  Description of Artificial Sequence: Synthetic oligonucleotide
gacacagcaggcuacaggc

SEQ ID NO: 2951016 - RNA, 19 nt, Artificial Sequence
  Description of Artificial Sequence: Synthetic oligonucleotide
aagaugaacagaaaugcug

SEQ ID NO: 2951017 - RNA, 19 nt, Artificial Sequence
  Description of Artificial Sequence: Synthetic oligonucleotide
aaugcagucuccucagcag

SEQ ID NO: 2951018 - RNA, 19 nt, Artificial Sequence
  Description of Artificial Sequence: Synthetic oligonucleotide
guuaagaugaacagaaaug

SEQ ID NO: 2951019 - RNA, 19 nt, Artificial Sequence
  Description of Artificial Sequence: Synthetic oligonucleotide
auguauuuaaaugguuucc

SEQ ID NO: 2951020 - RNA, 19 nt, Artificial Sequence
  Description of Artificial Sequence: Synthetic oligonucleotide
uauuauuuagcugugguua

SEQ ID NO: 2951021 - RNA, 19 nt, Artificial Sequence
  Description of Artificial Sequence: Synthetic oligonucleotide
uuuacaauguugcucacuu

SEQ ID NO: 2951022 - RNA, 19 nt, Artificial Sequence
  Description of Artificial Sequence: Synthetic oligonucleotide
  modified_base (6)..(6): a, c, u, g, unknown or other
aaaggnacugacgaugcag

SEQ ID NO: 2951023 - RNA, 19 nt, Artificial Sequence
  Description of Artificial Sequence: Synthetic oligonucleotide
uucugcaugaucacacagg

SEQ ID NO: 2951024 - RNA, 19 nt, Artificial Sequence
  Description of Artificial Sequence: Synthetic oligonucleotide
  modified_base (11)..(11): a, c, u, g, unknown or other
aguccaaaggnacugacga

SEQ ID NO: 2951025 - RNA, 19 nt, Artificial Sequence
  Description of Artificial Sequence: Synthetic oligonucleotide
uguauuuaaaugguuuccc

SEQ ID NO: 2951026 - RNA, 19 nt, Artificial Sequence
  Description of Artificial Sequence: Synthetic oligonucleotide
auugacuuugcugugcugg

SEQ ID NO: 2951027 - RNA, 19 nt, Artificial Sequence
  Description of Artificial Sequence: Synthetic oligonucleotide
gaaaugcugagacacagca

SEQ ID NO: 2951028 - RNA, 19 nt, Artificial Sequence
  Description of Artificial Sequence: Synthetic oligonucleotide
ucuauagccuccuuuacaa

SEQ ID NO: 2951029 - RNA, 19 nt, Artificial Sequence
  Description of Artificial Sequence: Synthetic oligonucleotide
uuuagcugugguuaagaug

SEQ ID NO: 2951030 - RNA, 19 nt, Artificial Sequence
  Description of Artificial Sequence: Synthetic oligonucleotide
  modified_base (19)..(19): a, c, u, g, unknown or other
agauggacaguccaaaggn

SEQ ID NO: 2951031 - RNA, 19 nt, Artificial Sequence
  Description of Artificial Sequence: Synthetic oligonucleotide
uggcgaggaggucagaugg

SEQ ID NO: 2951032 - RNA, 19 nt, Artificial Sequence
  Description of Artificial Sequence: Synthetic oligonucleotide
ucugcaugaucacacaggu

SEQ ID NO: 2951033 - RNA, 19 nt, Artificial Sequence
  Description of Artificial Sequence: Synthetic oligonucleotide
auuugugguccacugauug

SEQ ID NO: 2951034 - RNA, 19 nt, Artificial Sequence
  Description of Artificial Sequence: Synthetic oligonucleotide
uaggcauugccgccgaugg

SEQ ID NO: 2951035 - RNA, 19 nt, Artificial Sequence
  Description of Artificial Sequence: Synthetic oligonucleotide
aaaugcagucuccucagca

SEQ ID NO: 2951036 - RNA, 19 nt, Artificial Sequence
  Description of Artificial Sequence: Synthetic oligonucleotide
aacaacaaaugcagucucc

SEQ ID NO: 2951037 - RNA, 19 nt, Artificial Sequence
  Description of Artificial Sequence: Synthetic oligonucleotide
gaggaggucagauggacag

SEQ ID NO: 2951038 - RNA, 19 nt, Artificial Sequence
  Description of Artificial Sequence: Synthetic oligonucleotide
ugaguuggcucaaagucug

SEQ ID NO: 2951039 - RNA, 19 nt, Artificial Sequence
  Description of Artificial Sequence: Synthetic oligonucleotide
uuuaaaugguuuccccagc

SEQ ID NO: 2951040 - RNA, 19 nt, Artificial Sequence
  Description of Artificial Sequence: Synthetic oligonucleotide
ucaacaacaaaugcagucu

SEQ ID NO: 2951041 - RNA, 19 nt, Artificial Sequence
  Description of Artificial Sequence: Synthetic oligonucleotide
cuucaucaacaacaaaugc

SEQ ID NO: 2951042 - RNA, 19 nt, Artificial Sequence
  Description of Artificial Sequence: Synthetic oligonucleotide
uggucuuguucucccaucg

SEQ ID NO: 2951043 - RNA, 19 nt, Artificial Sequence
  Description of Artificial Sequence: Synthetic oligonucleotide
guauuuaaaugguuucccc

SEQ ID NO: 2951044 - RNA, 19 nt, Artificial Sequence
  Description of Artificial Sequence: Synthetic oligonucleotide
ucaaagucugcucuacaac

SEQ ID NO: 2951045 - RNA, 19 nt, Artificial Sequence
  Description of Artificial Sequence: Synthetic oligonucleotide
ucucccaucggacugugca

SEQ ID NO: 2951046 - RNA, 19 nt, Artificial Sequence
  Description of Artificial Sequence: Synthetic oligonucleotide
auguaacccagcuccauuc

SEQ ID NO: 2951047 - RNA, 19 nt, Artificial Sequence
  Description of Artificial Sequence: Synthetic oligonucleotide
  modified_base (9)..(9): a, c, u, g, unknown or other
uccaaaggnacugacgaug

SEQ ID NO: 2951048 - RNA, 19 nt, Artificial Sequence
  Description of Artificial Sequence: Synthetic oligonucleotide
guagagcugucccagaagc

SEQ ID NO: 2951049 - RNA, 19 nt, Artificial Sequence
  Description of Artificial Sequence: Synthetic oligonucleotide
ugucccagaagcaggaacu

SEQ ID NO: 2951050 - RNA, 19 nt, Artificial Sequence
  Description of Artificial Sequence: Synthetic oligonucleotide
acaaaugcagucuccucag

SEQ ID NO: 2951051 - RNA, 19 nt, Artificial Sequence
  Description of Artificial Sequence: Synthetic oligonucleotide
ugugcugguaggcauugcc

SEQ ID NO: 2951052 - RNA, 19 nt, Artificial Sequence
  Description of Artificial Sequence: Synthetic oligonucleotide
  modified_base (2)..(2): a, c, u, g, unknown or other
gnacugacgaugcaguaca

SEQ ID NO: 2951053 - RNA, 19 nt, Artificial Sequence
  Description of Artificial Sequence: Synthetic oligonucleotide
aacucgcaguauguaaccc

SEQ ID NO: 2951054 - RNA, 19 nt, Artificial Sequence
  Description of Artificial Sequence: Synthetic oligonucleotide
aauuuauuauuuagcugug

SEQ ID NO: 2951055 - RNA, 19 nt, Artificial Sequence
  Description of Artificial Sequence: Synthetic oligonucleotide
  modified_base (16)..(16): a, c, u, g, unknown or other
uggacaguccaaaggnacu

SEQ ID NO: 2951056 - RNA, 19 nt, Artificial Sequence
  Description of Artificial Sequence: Synthetic oligonucleotide
uuggcucaaagucugcucu

SEQ ID NO: 2951057 - RNA, 19 nt, Artificial Sequence
  Description of Artificial Sequence: Synthetic oligonucleotide
gacuuugcugugcugguag

SEQ ID NO: 2951058 - RNA, 19 nt, Artificial Sequence
  Description of Artificial Sequence: Synthetic oligonucleotide
gaugaacagaaaugcugag

SEQ ID NO: 2951059 - RNA, 19 nt, Artificial Sequence
  Description of Artificial Sequence: Synthetic oligonucleotide
cagauggacaguccaaagg

SEQ ID NO: 2951060 - RNA, 19 nt, Artificial Sequence
  Description of Artificial Sequence: Synthetic oligonucleotide
auuuauuauuuagcugugg

SEQ ID NO: 2951061 - RNA, 19 nt, Artificial Sequence
  Description of Artificial Sequence: Synthetic oligonucleotide
agaagcaggaacucgcagu

SEQ ID NO: 2951062 - RNA, 19 nt, Artificial Sequence
  Description of Artificial Sequence: Synthetic oligonucleotide
ugugguuaagaugaacaga

SEQ ID NO: 2951063 - RNA, 19 nt, Artificial Sequence
  Description of Artificial Sequence: Synthetic oligonucleotide
uuauuauuuagcugugguu

SEQ ID NO: 2951064 - RNA, 19 nt, Artificial Sequence
  Description of Artificial Sequence: Synthetic oligonucleotide
aacauuugugguccacuga

SEQ ID NO: 2951065 - RNA, 19 nt, Artificial Sequence
  Description of Artificial Sequence: Synthetic oligonucleotide
ucuuguucucccaucggac

SEQ ID NO: 2951066 - RNA, 19 nt, Artificial Sequence
  Description of Artificial Sequence: Synthetic oligonucleotide
cugugguuaagaugaacag

SEQ ID NO: 2951067 - RNA, 19 nt, Artificial Sequence
  Description of Artificial Sequence: Synthetic oligonucleotide
ucugcucuacaacauuugu

SEQ ID NO: 2951068 - RNA, 19 nt, Artificial Sequence
  Description of Artificial Sequence: Synthetic oligonucleotide
agacacagcaggcuacagg

SEQ ID NO: 2951069 - RNA, 19 nt, Artificial Sequence
  Description of Artificial Sequence: Synthetic oligonucleotide
ucagauggacaguccaaag

SEQ ID NO: 2951070 - RNA, 19 nt, Artificial Sequence
  Description of Artificial Sequence: Synthetic oligonucleotide
acauuugugguccacugau

SEQ ID NO: 2951071 - RNA, 19 nt, Artificial Sequence
  Description of Artificial Sequence: Synthetic oligonucleotide
ggugaguuggcucaaaguc

SEQ ID NO: 2951072 - RNA, 19 nt, Artificial Sequence
  Description of Artificial Sequence: Synthetic oligonucleotide
uguugcucacuucaucaac

SEQ ID NO: 2951073 - RNA, 19 nt, Artificial Sequence
  Description of Artificial Sequence: Synthetic oligonucleotide
caaagucugcucuacaaca

SEQ ID NO: 2951074 - RNA, 19 nt, Artificial Sequence
  Description of Artificial Sequence: Synthetic oligonucleotide
gaacucgcaguauguaacc

SEQ ID NO: 2951075 - RNA, 19 nt, Artificial Sequence
  Description of Artificial Sequence: Synthetic oligonucleotide
agaugaacagaaaugcuga

SEQ ID NO: 2951076 - RNA, 19 nt, Artificial Sequence
  Description of Artificial Sequence: Synthetic oligonucleotide
ugauugacuuugcugugcu

SEQ ID NO: 2951077 - RNA, 19 nt, Artificial Sequence
  Description of Artificial Sequence: Synthetic oligonucleotide
uauuuagcugugguuaaga

SEQ ID NO: 2951078 - RNA, 19 nt, Artificial Sequence
  Description of Artificial Sequence: Synthetic oligonucleotide
gacgaugcaguacaugguc

SEQ ID NO: 2951079 - RNA, 19 nt, Artificial Sequence
  Description of Artificial Sequence: Synthetic oligonucleotide
  modified_base (17)..(17): a, c, u, g, unknown or other
auggacaguccaaaggnac

SEQ ID NO: 2951080 - RNA, 19 nt, Artificial Sequence
  Description of Artificial Sequence: Synthetic oligonucleotide
uuguucucccaucggacug

SEQ ID NO: 2951081 - RNA, 19 nt, Artificial Sequence
  Description of Artificial Sequence: Synthetic oligonucleotide
auuauuuagcugugguuaa

SEQ ID NO: 2951082 - RNA, 19 nt, Artificial Sequence
  Description of Artificial Sequence: Synthetic oligonucleotide
uuggugaguuggcucaaag

SEQ ID NO: 2951083 - RNA, 19 nt, Artificial Sequence
  Description of Artificial Sequence: Synthetic oligonucleotide
uacauggucuuguucuccc

SEQ ID NO: 2951084 - RNA, 19 nt, Artificial Sequence
  Description of Artificial Sequence: Synthetic oligonucleotide
cucuacaacauuugugguc

SEQ ID NO: 2951085 - RNA, 19 nt, Artificial Sequence
  Description of Artificial Sequence: Synthetic oligonucleotide
ugcugguaggcauugccgc

SEQ ID NO: 2951086 - RNA, 19 nt, Artificial Sequence
  Description of Artificial Sequence: Synthetic oligonucleotide
cucgcaguauguaacccag

SEQ ID NO: 2951087 - RNA, 19 nt, Artificial Sequence
  Description of Artificial Sequence: Synthetic oligonucleotide
agcaggaacucgcaguaug

SEQ ID NO: 2951088 - RNA, 19 nt, Artificial Sequence
  Description of Artificial Sequence: Synthetic oligonucleotide
  modified_base (12)..(12): a, c, u, g, unknown or other
caguccaaaggnacugacg

SEQ ID NO: 2951089 - RNA, 19 nt, Artificial Sequence
  Description of Artificial Sequence: Synthetic oligonucleotide
agcuccauucuucugcaug

SEQ ID NO: 2951090 - RNA, 19 nt, Artificial Sequence
  Description of Artificial Sequence: Synthetic oligonucleotide
gugguuaagaugaacagaa

SEQ ID NO: 2951091 - RNA, 19 nt, Artificial Sequence
  Description of Artificial Sequence: Synthetic oligonucleotide
  modified_base (5)..(5): a, c, u, g, unknown or other
aaggnacugacgaugcagu

SEQ ID NO: 2951092 - RNA, 19 nt, Artificial Sequence
  Description of Artificial Sequence: Synthetic oligonucleotide
uccucagcagccuggaagu

SEQ ID NO: 2951093 - RNA, 19 nt, Artificial Sequence
  Description of Artificial Sequence: Synthetic oligonucleotide
uuugugguccacugauuga

SEQ ID NO: 2951094 - RNA, 19 nt, Artificial Sequence
  Description of Artificial Sequence: Synthetic oligonucleotide
agagcugucccagaagcag

SEQ ID NO: 2951095 - RNA, 19 nt, Artificial Sequence
  Description of Artificial Sequence: Synthetic oligonucleotide
uuauuuagcugugguuaag

SEQ ID NO: 2951096 - RNA, 19 nt, Artificial Sequence
  Description of Artificial Sequence: Synthetic oligonucleotide
cacuucaucaacaacaaau

SEQ ID NO: 2951097 - RNA, 19 nt, Artificial Sequence
  Description of Artificial Sequence: Synthetic oligonucleotide
aaaugcugagacacagcag

SEQ ID NO: 2951098 - RNA, 19 nt, Artificial Sequence
  Description of Artificial Sequence: Synthetic oligonucleotide
caacauuugugguccacug

SEQ ID NO: 2951099 - RNA, 19 nt, Artificial Sequence
  Description of Artificial Sequence: Synthetic oligonucleotide
caucggacugugcagcucc

SEQ ID NO: 2951100 - RNA, 19 nt, Artificial Sequence
  Description of Artificial Sequence: Synthetic oligonucleotide
gacugugcagcucccgucc

SEQ ID NO: 2951101 - RNA, 19 nt, Artificial Sequence
  Description of Artificial Sequence: Synthetic oligonucleotide
uguaacccagcuccauucu

SEQ ID NO: 2951102 - RNA, 19 nt, Artificial Sequence
  Description of Artificial Sequence: Synthetic oligonucleotide
agcuuggugaguuggcuca

SEQ ID NO: 2951103 - RNA, 19 nt, Artificial Sequence
  Description of Artificial Sequence: Synthetic oligonucleotide
cugcucuacaacauuugug

SEQ ID NO: 2951104 - RNA, 19 nt, Artificial Sequence
  Description of Artificial Sequence: Synthetic oligonucleotide
acaacaaaugcagucuccu

SEQ ID NO: 2951105 - RNA, 19 nt, Artificial Sequence
  Description of Artificial Sequence: Synthetic oligonucleotide
uaacccagcuccauucuuc

SEQ ID NO: 2951106 - RNA, 19 nt, Artificial Sequence
  Description of Artificial Sequence: Synthetic oligonucleotide
aacccagcuccauucuucu

SEQ ID NO: 2951107 - RNA, 19 nt, Artificial Sequence
  Description of Artificial Sequence: Synthetic oligonucleotide
uugugguccacugauugac

SEQ ID NO: 2951108 - RNA, 19 nt, Artificial Sequence
  Description of Artificial Sequence: Synthetic oligonucleotide
acugauugacuuugcugug

SEQ ID NO: 2951109 - RNA, 19 nt, Artificial Sequence
  Description of Artificial Sequence: Synthetic oligonucleotide
uccacugauugacuuugcu

SEQ ID NO: 2951110 - RNA, 19 nt, Artificial Sequence
  Description of Artificial Sequence: Synthetic oligonucleotide
auuuagcugugguuaagau

SEQ ID NO: 2951111 - RNA, 19 nt, Artificial Sequence
  Description of Artificial Sequence: Synthetic oligonucleotide
uauguaacccagcuccauu

SEQ ID NO: 2951112 - RNA, 19 nt, Artificial Sequence
  Description of Artificial Sequence: Synthetic oligonucleotide
cacugauugacuuugcugu

SEQ ID NO: 2951113 - RNA, 19 nt, Artificial Sequence
  Description of Artificial Sequence: Synthetic oligonucleotide
uuugcugugcugguaggca

SEQ ID NO: 2951114 - RNA, 19 nt, Artificial Sequence
  Description of Artificial Sequence: Synthetic oligonucleotide
ucuucugcaugaucacaca

SEQ ID NO: 2951115 - RNA, 19 nt, Artificial Sequence
  Description of Artificial Sequence: Synthetic oligonucleotide
ugacgaugcaguacauggu

SEQ ID NO: 2951116 - RNA, 19 nt, Artificial Sequence
  Description of Artificial Sequence: Synthetic oligonucleotide
auggucuuguucucccauc

SEQ ID NO: 2951117 - RNA, 19 nt, Artificial Sequence
  Description of Artificial Sequence: Synthetic oligonucleotide
uggugaguuggcucaaagu

SEQ ID NO: 2951118 - RNA, 19 nt, Artificial Sequence
  Description of Artificial Sequence: Synthetic oligonucleotide
acucgcaguauguaaccca

SEQ ID NO: 2951119 - RNA, 19 nt, Artificial Sequence
  Description of Artificial Sequence: Synthetic oligonucleotide
aggucagauggacagucca

SEQ ID NO: 2951120 - RNA, 19 nt, Artificial Sequence
  Description of Artificial Sequence: Synthetic oligonucleotide
caggcuacaggcuggcgag

SEQ ID NO: 2951121 - RNA, 19 nt, Artificial Sequence
  Description of Artificial Sequence: Synthetic oligonucleotide
gaagcaggaacucgcagua

SEQ ID NO: 2951122 - RNA, 19 nt, Artificial Sequence
  Description of Artificial Sequence: Synthetic oligonucleotide
aaagucugcucuacaacau

SEQ ID NO: 2951123 - RNA, 19 nt, Artificial Sequence
  Description of Artificial Sequence: Synthetic oligonucleotide
caacaacaaaugcagucuc

SEQ ID NO: 2951124 - RNA, 19 nt, Artificial Sequence
  Description of Artificial Sequence: Synthetic oligonucleotide
gcucacuucaucaacaaca

SEQ ID NO: 2951125 - RNA, 19 nt, Artificial Sequence
  Description of Artificial Sequence: Synthetic oligonucleotide
agccuggaagucuuccauc

SEQ ID NO: 2951126 - RNA, 19 nt, Artificial Sequence
  Description of Artificial Sequence: Synthetic oligonucleotide
augaacagaaaugcugaga

SEQ ID NO: 2951127 - RNA, 19 nt, Artificial Sequence
  Description of Artificial Sequence: Synthetic oligonucleotide
  modified_base (13)..(13): a, c, u, g, unknown or other
acaguccaaaggnacugac

SEQ ID NO: 2951128 - RNA, 19 nt, Artificial Sequence
  Description of Artificial Sequence: Synthetic oligonucleotide
ucacacaggucacaaugua

SEQ ID NO: 2951129 - RNA, 19 nt, Artificial Sequence
  Description of Artificial Sequence: Synthetic oligonucleotide
aggaacucgcaguauguaa

SEQ ID NO: 2951130 - RNA, 19 nt, Artificial Sequence
  Description of Artificial Sequence: Synthetic oligonucleotide
cacagcaggcuacaggcug

SEQ ID NO: 2951131 - RNA, 19 nt, Artificial Sequence
  Description of Artificial Sequence: Synthetic oligonucleotide
aagucugcucuacaacauu

SEQ ID NO: 2951132 - RNA, 19 nt, Artificial Sequence
  Description of Artificial Sequence: Synthetic oligonucleotide
gaacagaaaugcugagaca

SEQ ID NO: 2951133 - RNA, 19 nt, Artificial Sequence
  Description of Artificial Sequence: Synthetic oligonucleotide
agcagccuggaagucuucc

SEQ ID NO: 2951134 - RNA, 19 nt, Artificial Sequence
  Description of Artificial Sequence: Synthetic oligonucleotide
uagagcugucccagaagca

SEQ ID NO: 2951135 - RNA, 19 nt, Artificial Sequence
  Description of Artificial Sequence: Synthetic oligonucleotide
caguacauggucuuguucu

SEQ ID NO: 2951136 - RNA, 19 nt, Artificial Sequence
  Description of Artificial Sequence: Synthetic oligonucleotide
ucccagaagcaggaacucg

SEQ ID NO: 2951137 - RNA, 19 nt, Artificial Sequence
  Description of Artificial Sequence: Synthetic oligonucleotide
cacaauguauuuaaauggu

SEQ ID NO: 2951138 - RNA, 19 nt, Artificial Sequence
  Description of Artificial Sequence: Synthetic oligonucleotide
uugacuuugcugugcuggu

SEQ ID NO: 2951139 - RNA, 19 nt, Artificial Sequence
  Description of Artificial Sequence: Synthetic oligonucleotide
cuccuuuacaauguugcuc

SEQ ID NO: 2951140 - RNA, 19 nt, Artificial Sequence
  Description of Artificial Sequence: Synthetic oligonucleotide
uaaaugguuuccccagcuu

SEQ ID NO: 2951141 - RNA, 19 nt, Artificial Sequence
  Description of Artificial Sequence: Synthetic oligonucleotide
caggucacaauguauuuaa

SEQ ID NO: 2951142 - RNA, 19 nt, Artificial Sequence
  Description of Artificial Sequence: Synthetic oligonucleotide
ugcucacuucaucaacaac

SEQ ID NO: 2951143 - RNA, 19 nt, Artificial Sequence
  Description of Artificial Sequence: Synthetic oligonucleotide
auagccuccuuuacaaugu

SEQ ID NO: 2951144 - RNA, 19 nt, Artificial Sequence
  Description of Artificial Sequence: Synthetic oligonucleotide
caauguugcucacuucauc

SEQ ID NO: 2951145 - RNA, 19 nt, Artificial Sequence
  Description of Artificial Sequence: Synthetic oligonucleotide
uccauucuucugcaugauc

SEQ ID NO: 2951146 - RNA, 19 nt, Artificial Sequence
  Description of Artificial Sequence: Synthetic oligonucleotide
acaacauuugugguccacu

SEQ ID NO: 2951147 - RNA, 19 nt, Artificial Sequence
  Description of Artificial Sequence: Synthetic oligonucleotide
cugauugacuuugcugugc

SEQ ID NO: 2951148 - RNA, 19 nt, Artificial Sequence
  Description of Artificial Sequence: Synthetic oligonucleotide
  modified_base (8)..(8): a, c, u, g, unknown or other
ccaaaggnacugacgaugc

SEQ ID NO: 2951149 - RNA, 19 nt, Artificial Sequence
  Description of Artificial Sequence: Synthetic oligonucleotide
cucaaagucugcucuacaa

SEQ ID NO: 2951150 - RNA, 19 nt, Artificial Sequence
  Description of Artificial Sequence: Synthetic oligonucleotide
guuuccccagcuuggugag

SEQ ID NO: 2951151 - RNA, 19 nt, Artificial Sequence
  Description of Artificial Sequence: Synthetic oligonucleotide
ugugguccacugauugacu

SEQ ID NO: 2951152 - RNA, 19 nt, Artificial Sequence
  Description of Artificial Sequence: Synthetic oligonucleotide
uacaggcuggcgaggaggu

SEQ ID NO: 2951153 - RNA, 19 nt, Artificial Sequence
  Description of Artificial Sequence: Synthetic oligonucleotide
ugguuaagaugaacagaaa

SEQ ID NO: 2951154 - RNA, 19 nt, Artificial Sequence
  Description of Artificial Sequence: Synthetic oligonucleotide
ccauucuucugcaugauca

SEQ ID NO: 2951155 - RNA, 19 nt, Artificial Sequence
  Description of Artificial Sequence: Synthetic oligonucleotide
cugagacacagcaggcuac

SEQ ID NO: 2951156 - RNA, 19 nt, Artificial Sequence
  Description of Artificial Sequence: Synthetic oligonucleotide
ucagcagccuggaagucuu

SEQ ID NO: 2951157 - RNA, 19 nt, Artificial Sequence
  Description of Artificial Sequence: Synthetic oligonucleotide
cucacuucaucaacaacaa

SEQ ID NO: 2951158 - RNA, 19 nt, Artificial Sequence
  Description of Artificial Sequence: Synthetic oligonucleotide
caauguauuuaaaugguuu

SEQ ID NO: 2951159 - RNA, 19 nt, Artificial Sequence
  Description of Artificial Sequence: Synthetic oligonucleotide
gauugacuuugcugugcug

SEQ ID NO: 2951160 - RNA, 19 nt, Artificial Sequence
  Description of Artificial Sequence: Synthetic oligonucleotide
agcugugguuaagaugaac

SEQ ID NO: 2951161 - RNA, 19 nt, Artificial Sequence
  Description of Artificial Sequence: Synthetic oligonucleotide
gguuaagaugaacagaaau

SEQ ID NO: 2951162 - RNA, 19 nt, Artificial Sequence
  Description of Artificial Sequence: Synthetic oligonucleotide
uuacaauguugcucacuuc

SEQ ID NO: 2951163 - RNA, 19 nt, Artificial Sequence
  Description of Artificial Sequence: Synthetic oligonucleotide
cugucccagaagcaggaac

SEQ ID NO: 2951164 - RNA, 19 nt, Artificial Sequence
  Description of Artificial Sequence: Synthetic oligonucleotide
augcugagacacagcaggc

SEQ ID NO: 2951165 - RNA, 19 nt, Artificial Sequence
  Description of Artificial Sequence: Synthetic oligonucleotide
ugagacacagcaggcuaca

SEQ ID NO: 2951166 - RNA, 19 nt, Artificial Sequence
  Description of Artificial Sequence: Synthetic oligonucleotide
guuggcucaaagucugcuc

SEQ ID NO: 2951167 - RNA, 19 nt, Artificial Sequence
  Description of Artificial Sequence: Synthetic oligonucleotide
gugcugguaggcauugccg

SEQ ID NO: 2951168 - RNA, 19 nt, Artificial Sequence
  Description of Artificial Sequence: Synthetic oligonucleotide
gccuccuuuacaauguugc

SEQ ID NO: 2951169 - RNA, 19 nt, Artificial Sequence
  Description of Artificial Sequence: Synthetic oligonucleotide
cuuugcugugcugguaggc

SEQ ID NO: 2951170 - RNA, 19 nt, Artificial Sequence
  Description of Artificial Sequence: Synthetic oligonucleotide
  modified_base (14)..(14): a, c, u, g, unknown or other
gacaguccaaaggnacuga

SEQ ID NO: 2951171 - RNA, 19 nt, Artificial Sequence
  Description of Artificial Sequence: Synthetic oligonucleotide
gcugugguuaagaugaaca

SEQ ID NO: 2951172 - RNA, 19 nt, Artificial Sequence
  Description of Artificial Sequence: Synthetic oligonucleotide
ucacuucaucaacaacaaa

SEQ ID NO: 2951173 - RNA, 19 nt, Artificial Sequence
  Description of Artificial Sequence: Synthetic oligonucleotide
cagaagcaggaacucgcag

SEQ ID NO: 2951174 - RNA, 19 nt, Artificial Sequence
  Description of Artificial Sequence: Synthetic oligonucleotide
ugcagcucccguccguaga

SEQ ID NO: 2951175 - RNA, 19 nt, Artificial Sequence
  Description of Artificial Sequence: Synthetic oligonucleotide
acugugcagcucccguccg

SEQ ID NO: 2951176 - RNA, 19 nt, Artificial Sequence
  Description of Artificial Sequence: Synthetic oligonucleotide
acacaggucacaauguauu

SEQ ID NO: 2951177 - RNA, 19 nt, Artificial Sequence
  Description of Artificial Sequence: Synthetic oligonucleotide
ucccaucggacugugcagc

SEQ ID NO: 2951178 - RNA, 19 nt, Artificial Sequence
  Description of Artificial Sequence: Synthetic oligonucleotide
aggcauugccgccgauggc

SEQ ID NO: 2951179 - RNA, 19 nt, Artificial Sequence
  Description of Artificial Sequence: Synthetic oligonucleotide
ggaacucgcaguauguaac

SEQ ID NO: 2951180 - RNA, 19 nt, Artificial Sequence
  Description of Artificial Sequence: Synthetic oligonucleotide
cugguaggcauugccgccg

SEQ ID NO: 2951181 - RNA, 19 nt, Artificial Sequence
  Description of Artificial Sequence: Synthetic oligonucleotide
acaauguauuuaaaugguu

SEQ ID NO: 2951182 - RNA, 19 nt, Artificial Sequence
  Description of Artificial Sequence: Synthetic oligonucleotide
acugacgaugcaguacaug

SEQ ID NO: 2951183 - RNA, 19 nt, Artificial Sequence
  Description of Artificial Sequence: Synthetic oligonucleotide
auguugcucacuucaucaa

SEQ ID NO: 2951184 - RNA, 19 nt, Artificial Sequence
  Description of Artificial Sequence: Synthetic oligonucleotide
aucacacaggucacaaugu

SEQ ID NO: 2951185 - RNA, 19 nt, Artificial Sequence
  Description of Artificial Sequence: Synthetic oligonucleotide
aguuggcucaaagucugcu

SEQ ID NO: 2951186 - RNA, 19 nt, Artificial Sequence
  Description of Artificial Sequence: Synthetic oligonucleotide
ucgcaguauguaacccagc

SEQ ID NO: 2951187 - RNA, 19 nt, Artificial Sequence
  Description of Artificial Sequence: Synthetic oligonucleotide
uacaacauuugugguccac

SEQ ID NO: 2951188 - RNA, 19 nt, Artificial Sequence
  Description of Artificial Sequence: Synthetic oligonucleotide
cucccaucggacugugcag

SEQ ID NO: 2951189 - RNA, 19 nt, Artificial Sequence
  Description of Artificial Sequence: Synthetic oligonucleotide
ugcugagacacagcaggcu

SEQ ID NO: 2951190 - RNA, 19 nt, Artificial Sequence
  Description of Artificial Sequence: Synthetic oligonucleotide
guacauggucuuguucucc

SEQ ID NO: 2951191 - RNA, 19 nt, Artificial Sequence
  Description of Artificial Sequence: Synthetic oligonucleotide
  modified_base (18)..(18): a, c, u, g, unknown or other
gauggacaguccaaaggna

SEQ ID NO: 2951192 - RNA, 19 nt, Artificial Sequence
  Description of Artificial Sequence: Synthetic oligonucleotide
augaucacacaggucacaa

SEQ ID NO: 2951193 - RNA, 19 nt, Artificial Sequence
  Description of Artificial Sequence: Synthetic oligonucleotide
cccagcuccauucuucugc

SEQ ID NO: 2951194 - RNA, 19 nt, Artificial Sequence
  Description of Artificial Sequence: Synthetic oligonucleotide
ccacugauugacuuugcug

SEQ ID NO: 2951195 - RNA, 19 nt, Artificial Sequence
  Description of Artificial Sequence: Synthetic oligonucleotide
cuggcgaggaggucagaug

SEQ ID NO: 2951196 - RNA, 19 nt, Artificial Sequence
  Description of Artificial Sequence: Synthetic oligonucleotide
uguucucccaucggacugu

SEQ ID NO: 2951197 - RNA, 19 nt, Artificial Sequence
  Description of Artificial Sequence: Synthetic oligonucleotide
ugaucacacaggucacaau

SEQ ID NO: 2951198 - RNA, 19 nt, Artificial Sequence
  Description of Artificial Sequence: Synthetic oligonucleotide
  modified_base (3)..(3): a, c, u, g, unknown or other
ggnacugacgaugcaguac

SEQ ID NO: 2951199 - RNA, 19 nt, Artificial Sequence
  Description of Artificial Sequence: Synthetic oligonucleotide
guaggcauugccgccgaug

SEQ ID NO: 2951200 - RNA, 19 nt, Artificial Sequence
  Description of Artificial Sequence: Synthetic oligonucleotide
gguccacugauugacuuug

SEQ ID NO: 2951201 - RNA, 19 nt, Artificial Sequence
  Description of Artificial Sequence: Synthetic oligonucleotide
agcucccguccguagagcu

SEQ ID NO: 2951202 - RNA, 19 nt, Artificial Sequence
  Description of Artificial Sequence: Synthetic oligonucleotide
guccguagagcugucccag

SEQ ID NO: 2951203 - RNA, 19 nt, Artificial Sequence
  Description of Artificial Sequence: Synthetic oligonucleotide
ggcacuuucuauagccucc

SEQ ID NO: 2951204 - RNA, 19 nt, Artificial Sequence
  Description of Artificial Sequence: Synthetic oligonucleotide
gucugcucuacaacauuug

SEQ ID NO: 2951205 - RNA, 19 nt, Artificial Sequence
  Description of Artificial Sequence: Synthetic oligonucleotide
ugcaguacauggucuuguu

SEQ ID NO: 2951206 - RNA, 19 nt, Artificial Sequence
  Description of Artificial Sequence: Synthetic oligonucleotide
augcaguacauggucuugu

SEQ ID NO: 2951207 - RNA, 19 nt, Artificial Sequence
  Description of Artificial Sequence: Synthetic oligonucleotide
  modified_base (4)..(4): a, c, u, g, unknown or other
aggnacugacgaugcagua

SEQ ID NO: 2951208 - RNA, 19 nt, Artificial Sequence
  Description of Artificial Sequence: Synthetic oligonucleotide
acauggucuuguucuccca

SEQ ID NO: 2951209 - RNA, 19 nt, Artificial Sequence
  Description of Artificial Sequence: Synthetic oligonucleotide
agucuccucagcagccugg

SEQ ID NO: 2951210 - RNA, 19 nt, Artificial Sequence
  Description of Artificial Sequence: Synthetic oligonucleotide
acaggucacaauguauuua

SEQ ID NO: 2951211 - RNA, 19 nt, Artificial Sequence
  Description of Artificial Sequence: Synthetic oligonucleotide
aguauguaacccagcucca

SEQ ID NO: 2951212 - RNA, 19 nt, Artificial Sequence
  Description of Artificial Sequence: Synthetic oligonucleotide
acagaaaugcugagacaca

SEQ ID NO: 2951213 - RNA, 19 nt, Artificial Sequence
  Description of Artificial Sequence: Synthetic oligonucleotide
gaggucagauggacagucc

SEQ ID NO: 2951214 - RNA, 19 nt, Artificial Sequence
  Description of Artificial Sequence: Synthetic oligonucleotide
cagcuuggugaguuggcuc

SEQ ID NO: 2951215 - RNA, 19 nt, Artificial Sequence
  Description of Artificial Sequence: Synthetic oligonucleotide
ggucacaauguauuuaaau

SEQ ID NO: 2951216 - RNA, 19 nt, Artificial Sequence
  Description of Artificial Sequence: Synthetic oligonucleotide
  modified_base (7)..(7): a, c, u, g, unknown or other
caaaggnacugacgaugca

SEQ ID NO: 2951217 - RNA, 19 nt, Artificial Sequence
  Description of Artificial Sequence: Synthetic oligonucleotide
agucugcucuacaacauuu

SEQ ID NO: 2951218 - RNA, 19 nt, Artificial Sequence
  Description of Artificial Sequence: Synthetic oligonucleotide
ugguccacugauugacuuu

SEQ ID NO: 2951219 - RNA, 19 nt, Artificial Sequence
  Description of Artificial Sequence: Synthetic oligonucleotide
  modified_base (15)..(15): a, c, u, g, unknown or other
ggacaguccaaaggnacug

SEQ ID NO: 2951220 - RNA, 19 nt, Artificial Sequence
  Description of Artificial Sequence: Synthetic oligonucleotide
acgaugcaguacauggucu

SEQ ID NO: 2951221 - RNA, 19 nt, Artificial Sequence
  Description of Artificial Sequence: Synthetic oligonucleotide
ccgauggcacuuucuauag

SEQ ID NO: 2951222 - RNA, 19 nt, Artificial Sequence
  Description of Artificial Sequence: Synthetic oligonucleotide
ugguaggcauugccgccga

SEQ ID NO: 2951223 - RNA, 19 nt, Artificial Sequence
  Description of Artificial Sequence: Synthetic oligonucleotide
ucggacugugcagcucccg

SEQ ID NO: 2951224 - RNA, 19 nt, Artificial Sequence
  Description of Artificial Sequence: Synthetic oligonucleotide
gagacacagcaggcuacag

SEQ ID NO: 2951225 - RNA, 19 nt, Artificial Sequence
  Description of Artificial Sequence: Synthetic oligonucleotide
gucagauggacaguccaaa

SEQ ID NO: 2951226 - RNA, 19 nt, Artificial Sequence
  Description of Artificial Sequence: Synthetic oligonucleotide
cuuguucucccaucggacu

SEQ ID NO: 2951227 - RNA, 19 nt, Artificial Sequence
  Description of Artificial Sequence: Synthetic oligonucleotide
uccguagagcugucccaga

SEQ ID NO: 2951228 - RNA, 19 nt, Artificial Sequence
  Description of Artificial Sequence: Synthetic oligonucleotide
acaauguugcucacuucau

SEQ ID NO: 2951229 - RNA, 19 nt, Artificial Sequence
  Description of Artificial Sequence: Synthetic oligonucleotide
cugcaugaucacacagguc

SEQ ID NO: 2951230 - RNA, 19 nt, Artificial Sequence
  Description of Artificial Sequence: Synthetic oligonucleotide
gugaguuggcucaaagucu

SEQ ID NO: 2951231 - RNA, 19 nt, Artificial Sequence
  Description of Artificial Sequence: Synthetic oligonucleotide
gcugguaggcauugccgcc

SEQ ID NO: 2951232 - RNA, 19 nt, Artificial Sequence
  Description of Artificial Sequence: Synthetic oligonucleotide
uuccccagcuuggugaguu

SEQ ID NO: 2951233 - RNA, 19 nt, Artificial Sequence
  Description of Artificial Sequence: Synthetic oligonucleotide
ggcauugccgccgauggca

SEQ ID NO: 2951234 - RNA, 19 nt, Artificial Sequence
  Description of Artificial Sequence: Synthetic oligonucleotide
uggcucaaagucugcucua

SEQ ID NO: 2951235 - RNA, 19 nt, Artificial Sequence
  Description of Artificial Sequence: Synthetic oligonucleotide
gcaggcuacaggcuggcga

SEQ ID NO: 2951236 - RNA, 19 nt, Artificial Sequence
  Description of Artificial Sequence: Synthetic oligonucleotide
aucggacugugcagcuccc

SEQ ID NO: 2951237 - RNA, 19 nt, Artificial Sequence
  Description of Artificial Sequence: Synthetic oligonucleotide
gcagcucccguccguagag

SEQ ID NO: 2951238 - RNA, 19 nt, Artificial Sequence
  Description of Artificial Sequence: Synthetic oligonucleotide
uucucccaucggacugugc

SEQ ID NO: 2951239 - RNA, 19 nt, Artificial Sequence
  Description of Artificial Sequence: Synthetic oligonucleotide
caugaucacacaggucaca

SEQ ID NO: 2951240 - RNA, 19 nt, Artificial Sequence
  Description of Artificial Sequence: Synthetic oligonucleotide
ugugcagcucccguccgua

SEQ ID NO: 2951241 - RNA, 19 nt, Artificial Sequence
  Description of Artificial Sequence: Synthetic oligonucleotide
gaguuggcucaaagucugc

SEQ ID NO: 2951242 - RNA, 19 nt, Artificial Sequence
  Description of Artificial Sequence: Synthetic oligonucleotide
agcugucccagaagcagga

SEQ ID NO: 2951243 - RNA, 19 nt, Artificial Sequence
  Description of Artificial Sequence: Synthetic oligonucleotide
agccuccuuuacaauguug

SEQ ID NO: 2951244 - RNA, 19 nt, Artificial Sequence
  Description of Artificial Sequence: Synthetic oligonucleotide
augguuuccccagcuuggu

SEQ ID NO: 2951245 - RNA, 19 nt, Artificial Sequence
  Description of Artificial Sequence: Synthetic oligonucleotide
auugccgccgauggcacuu

SEQ ID NO: 2951246 - RNA, 19 nt, Artificial Sequence
  Description of Artificial Sequence: Synthetic oligonucleotide
caggcuggcgaggagguca

SEQ ID NO: 2951247 - RNA, 19 nt, Artificial Sequence
  Description of Artificial Sequence: Synthetic oligonucleotide
gccgauggcacuuucuaua

SEQ ID NO: 2951248 - RNA, 19 nt, Artificial Sequence
  Description of Artificial Sequence: Synthetic oligonucleotide
caucaacaacaaaugcagu

SEQ ID NO: 2951249 - RNA, 19 nt, Artificial Sequence
  Description of Artificial Sequence: Synthetic oligonucleotide
gcugagacacagcaggcua

SEQ ID NO: 2951250 - RNA, 19 nt, Artificial Sequence
  Description of Artificial Sequence: Synthetic oligonucleotide
aagcaggaacucgcaguau

SEQ ID NO: 2951251 - RNA, 19 nt, Artificial Sequence
  Description of Artificial Sequence: Synthetic oligonucleotide
uagcugugguuaagaugaa

SEQ ID NO: 2951252 - RNA, 19 nt, Artificial Sequence
  Description of Artificial Sequence: Synthetic oligonucleotide
uccccagcuuggugaguug

SEQ ID NO: 2951253 - RNA, 19 nt, Artificial Sequence
  Description of Artificial Sequence: Synthetic oligonucleotide
  modified_base (10)..(10): a, c, u, g, unknown or other
guccaaaggnacugacgau

SEQ ID NO: 2951254 - RNA, 19 nt, Artificial Sequence
  Description of Artificial Sequence: Synthetic oligonucleotide
acccagcuccauucuucug

SEQ ID NO: 2951255 - RNA, 19 nt, Artificial Sequence
  Description of Artificial Sequence: Synthetic oligonucleotide
cacacaggucacaauguau

SEQ ID NO: 2951256 - RNA, 19 nt, Artificial Sequence
  Description of Artificial Sequence: Synthetic oligonucleotide
ccguccguagagcuguccc

SEQ ID NO: 2951257 - RNA, 19 nt, Artificial Sequence
  Description of Artificial Sequence: Synthetic oligonucleotide
cuuuacaauguugcucacu

SEQ ID NO: 2951258 - RNA, 19 nt, Artificial Sequence
  Description of Artificial Sequence: Synthetic oligonucleotide
cuggaagucuuccaucuuu

SEQ ID NO: 2951259 - RNA, 19 nt, Artificial Sequence
  Description of Artificial Sequence: Synthetic oligonucleotide
gugcagcucccguccguag

SEQ ID NO: 2951260 - RNA, 19 nt, Artificial Sequence
  Description of Artificial Sequence: Synthetic oligonucleotide
aggaggucagauggacagu

SEQ ID NO: 2951261 - RNA, 19 nt, Artificial Sequence
  Description of Artificial Sequence: Synthetic oligonucleotide
ggcucaaagucugcucuac

SEQ ID NO: 2951262 - RNA, 19 nt, Artificial Sequence
  Description of Artificial Sequence: Synthetic oligonucleotide
agcaggcuacaggcuggcg

SEQ ID NO: 2951263 - RNA, 19 nt, Artificial Sequence
  Description of Artificial Sequence: Synthetic oligonucleotide
ggacugugcagcucccguc

SEQ ID NO: 2951264 - RNA, 19 nt, Artificial Sequence
  Description of Artificial Sequence: Synthetic oligonucleotide
gucccagaagcaggaacuc

SEQ ID NO: 2951265 - RNA, 19 nt, Artificial Sequence
  Description of Artificial Sequence: Synthetic oligonucleotide
cuacaacauuuguggucca

SEQ ID NO: 2951266 - RNA, 19 nt, Artificial Sequence
  Description of Artificial Sequence: Synthetic oligonucleotide
gcuacaggcuggcgaggag

SEQ ID NO: 2951267 - RNA, 19 nt, Artificial Sequence
  Description of Artificial Sequence: Synthetic oligonucleotide
aggcuacaggcuggcgagg

SEQ ID NO: 2951268 - RNA, 19 nt, Artificial Sequence
  Description of Artificial Sequence: Synthetic oligonucleotide
guccacugauugacuuugc

SEQ ID NO: 2951269 - RNA, 19 nt, Artificial Sequence
  Description of Artificial Sequence: Synthetic oligonucleotide
cguagagcugucccagaag

SEQ ID NO: 2951270 - RNA, 19 nt, Artificial Sequence
  Description of Artificial Sequence: Synthetic oligonucleotide
gcucaaagucugcucuaca

SEQ ID NO: 2951271 - RNA, 19 nt, Artificial Sequence
  Description of Artificial Sequence: Synthetic oligonucleotide
guucucccaucggacugug

SEQ ID NO: 2951272 - RNA, 19 nt, Artificial Sequence
  Description of Artificial Sequence: Synthetic oligonucleotide
aggucacaauguauuuaaa

SEQ ID NO: 2951273 - RNA, 19 nt, Artificial Sequence
  Description of Artificial Sequence: Synthetic oligonucleotide
cccagcuuggugaguuggc

SEQ ID NO: 2951274 - RNA, 19 nt, Artificial Sequence
  Description of Artificial Sequence: Synthetic oligonucleotide
gcaugaucacacaggucac

SEQ ID NO: 2951275 - RNA, 19 nt, Artificial Sequence
  Description of Artificial Sequence: Synthetic oligonucleotide
gcugugcugguaggcauug

SEQ ID NO: 2951276 - RNA, 19 nt, Artificial Sequence
  Description of Artificial Sequence: Synthetic oligonucleotide
cagcaggcuacaggcuggc

SEQ ID NO: 2951277 - RNA, 19 nt, Artificial Sequence
  Description of Artificial Sequence: Synthetic oligonucleotide
uuuccccagcuuggugagu

SEQ ID NO: 2951278 - RNA, 19 nt, Artificial Sequence
  Description of Artificial Sequence: Synthetic oligonucleotide
cauggucuuguucucccau

SEQ ID NO: 2951279 - RNA, 19 nt, Artificial Sequence
  Description of Artificial Sequence: Synthetic oligonucleotide
gcgaggaggucagauggac

SEQ ID NO: 2951280 - RNA, 19 nt, Artificial Sequence
  Description of Artificial Sequence: Synthetic oligonucleotide
aggcuggcgaggaggucag

SEQ ID NO: 2951281 - RNA, 19 nt, Artificial Sequence
  Description of Artificial Sequence: Synthetic oligonucleotide
ccuuuacaauguugcucac

SEQ ID NO: 2951282 - RNA, 19 nt, Artificial Sequence
  Description of Artificial Sequence: Synthetic oligonucleotide
cacaggucacaauguauuu

SEQ ID NO: 2951283 - RNA, 19 nt, Artificial Sequence
  Description of Artificial Sequence: Synthetic oligonucleotide
cugugcugguaggcauugc

SEQ ID NO: 2951284 - RNA, 19 nt, Artificial Sequence
  Description of Artificial Sequence: Synthetic oligonucleotide
ccagaagcaggaacucgca

SEQ ID NO: 2951285 - RNA, 19 nt, Artificial Sequence
  Description of Artificial Sequence: Synthetic oligonucleotide
guaacccagcuccauucuu

SEQ ID NO: 2951286 - RNA, 19 nt, Artificial Sequence
  Description of Artificial Sequence: Synthetic oligonucleotide
ggucagauggacaguccaa

SEQ ID NO: 2951287 - RNA, 19 nt, Artificial Sequence
  Description of Artificial Sequence: Synthetic oligonucleotide
gucuccucagcagccugga

SEQ ID NO: 2951288 - RNA, 19 nt, Artificial Sequence
  Description of Artificial Sequence: Synthetic oligonucleotide
gcucuacaacauuuguggu

SEQ ID NO: 2951289 - RNA, 19 nt, Artificial Sequence
  Description of Artificial Sequence: Synthetic oligonucleotide
guauguaacccagcuccau

SEQ ID NO: 2951290 - RNA, 19 nt, Artificial Sequence
  Description of Artificial Sequence: Synthetic oligonucleotide
ccccagcuuggugaguugg

SEQ ID NO: 2951291 - RNA, 19 nt, Artificial Sequence
  Description of Artificial Sequence: Synthetic oligonucleotide
ccagcuccauucuucugca

SEQ ID NO: 2951292 - RNA, 19 nt, Artificial Sequence
  Description of Artificial Sequence: Synthetic oligonucleotide
cucagcagccuggaagucu

SEQ ID NO: 2951293 - RNA, 19 nt, Artificial Sequence
  Description of Artificial Sequence: Synthetic oligonucleotide
cagcucccguccguagagc

SEQ ID NO: 2951294 - RNA, 19 nt, Artificial Sequence
  Description of Artificial Sequence: Synthetic oligonucleotide
cauuugugguccacugauu

SEQ ID NO: 2951295 - RNA, 19 nt, Artificial Sequence
  Description of Artificial Sequence: Synthetic oligonucleotide
caggaacucgcaguaugua

SEQ ID NO: 2951296 - RNA, 19 nt, Artificial Sequence
  Description of Artificial Sequence: Synthetic oligonucleotide
ugccgccgauggcacuuuc

SEQ ID NO: 2951297 - RNA, 19 nt, Artificial Sequence
  Description of Artificial Sequence: Synthetic oligonucleotide
cgauggcacuuucuauagc

SEQ ID NO: 2951298 - RNA, 19 nt, Artificial Sequence
  Description of Artificial Sequence: Synthetic oligonucleotide
cagccuggaagucuuccau

SEQ ID NO: 2951299 - RNA, 19 nt, Artificial Sequence
  Description of Artificial Sequence: Synthetic oligonucleotide
ggcuacaggcuggcgagga

SEQ ID NO: 2951300 - RNA, 19 nt, Artificial Sequence
  Description of Artificial Sequence: Synthetic oligonucleotide
cuuggugaguuggcucaaa

SEQ ID NO: 2951301 - RNA, 19 nt, Artificial Sequence
  Description of Artificial Sequence: Synthetic oligonucleotide
cagcagccuggaagucuuc

SEQ ID NO: 2951302 - RNA, 19 nt, Artificial Sequence
  Description of Artificial Sequence: Synthetic oligonucleotide
gcaggaacucgcaguaugu

SEQ ID NO: 2951303 - RNA, 19 nt, Artificial Sequence
  Description of Artificial Sequence: Synthetic oligonucleotide
gcauugccgccgauggcac

SEQ ID NO: 2951304 - RNA, 19 nt, Artificial Sequence
  Description of Artificial Sequence: Synthetic oligonucleotide
ucccguccguagagcuguc

SEQ ID NO: 2951305 - RNA, 19 nt, Artificial Sequence
  Description of Artificial Sequence: Synthetic oligonucleotide
ggcgaggaggucagaugga

SEQ ID NO: 2951306 - RNA, 19 nt, Artificial Sequence
  Description of Artificial Sequence: Synthetic oligonucleotide
cgaggaggucagauggaca

SEQ ID NO: 2951307 - RNA, 19 nt, Artificial Sequence
  Description of Artificial Sequence: Synthetic oligonucleotide
ccguagagcugucccagaa

SEQ ID NO: 2951308 - RNA, 19 nt, Artificial Sequence
  Description of Artificial Sequence: Synthetic oligonucleotide
uugccgccgauggcacuuu

SEQ ID NO: 2951309 - RNA, 19 nt, Artificial Sequence
  Description of Artificial Sequence: Synthetic oligonucleotide
cauugccgccgauggcacu

SEQ ID NO: 2951310 - RNA, 19 nt, Artificial Sequence
  Description of Artificial Sequence: Synthetic oligonucleotide
cugugcagcucccguccgu

SEQ ID NO: 2951311 - RNA, 19 nt, Artificial Sequence
  Description of Artificial Sequence: Synthetic oligonucleotide
ccgccgauggcacuuucua

SEQ ID NO: 2951312 - RNA, 19 nt, Artificial Sequence
  Description of Artificial Sequence: Synthetic oligonucleotide
ccaucggacugugcagcuc

SEQ ID NO: 2951313 - RNA, 19 nt, Artificial Sequence
  Description of Artificial Sequence: Synthetic oligonucleotide
gcuggcgaggaggucagau

SEQ ID NO: 2951314 - RNA, 19 nt, Artificial Sequence
  Description of Artificial Sequence: Synthetic oligonucleotide
cuccauucuucugcaugau

SEQ ID NO: 2951315 - RNA, 19 nt, Artificial Sequence
  Description of Artificial Sequence: Synthetic oligonucleotide
gcuuggugaguuggcucaa

SEQ ID NO: 2951316 - RNA, 19 nt, Artificial Sequence
  Description of Artificial Sequence: Synthetic oligonucleotide
cccguccguagagcugucc

SEQ ID NO: 2951317 - RNA, 19 nt, Artificial Sequence
  Description of Artificial Sequence: Synthetic oligonucleotide
ccagcuuggugaguuggcu

SEQ ID NO: 2951318 - RNA, 19 nt, Artificial Sequence
  Description of Artificial Sequence: Synthetic oligonucleotide
gcugucccagaagcaggaa

SEQ ID NO: 2951319 - RNA, 19 nt, Artificial Sequence
  Description of Artificial Sequence: Synthetic oligonucleotide
cgaugcaguacauggucuu

SEQ ID NO: 2951320 - RNA, 19 nt, Artificial Sequence
  Description of Artificial Sequence: Synthetic oligonucleotide
cagcuccauucuucugcau

SEQ ID NO: 2951321 - RNA, 19 nt, Artificial Sequence
  Description of Artificial Sequence: Synthetic oligonucleotide
cccaucggacugugcagcu

SEQ ID NO: 2951322 - RNA, 19 nt, Artificial Sequence
  Description of Artificial Sequence: Synthetic oligonucleotide
gccgccgauggcacuuucu

SEQ ID NO: 2951323 - RNA, 19 nt, Artificial Sequence
  Description of Artificial Sequence: Synthetic oligonucleotide
gguaggcauugccgccgau

SEQ ID NO: 2951324 - RNA, 19 nt, Artificial Sequence
  Description of Artificial Sequence: Synthetic oligonucleotide
cggacugugcagcucccgu

SEQ ID NO: 2951325 - RNA, 19 nt, Artificial Sequence
  Description of Artificial Sequence: Synthetic oligonucleotide
ccuggaagucuuccaucuu

SEQ ID NO: 2951326 - RNA, 19 nt, Artificial Sequence
  Description of Artificial Sequence: Synthetic oligonucleotide
cgccgauggcacuuucuau

SEQ ID NO: 2951327 - RNA, 19 nt, Artificial Sequence
  Description of Artificial Sequence: Synthetic oligonucleotide
ggcuggcgaggaggucaga

SEQ ID NO: 2951328 - RNA, 19 nt, Artificial Sequence
  Description of Artificial Sequence: Synthetic oligonucleotide
  modified_base (1)..(1): a, c, u, g, unknown or other
nacugacgaugcaguacau

SEQ ID NO: 2951329 - RNA, 19 nt, Artificial Sequence
  Description of Artificial Sequence: Synthetic oligonucleotide
cacaauaccauccagguac

SEQ ID NO: 2951330 - RNA, 19 nt, Artificial Sequence
  Description of Artificial Sequence: Synthetic oligonucleotide
aauuguucacaccacgcag

SEQ ID NO: 2951331 - RNA, 19 nt, Artificial Sequence
  Description of Artificial Sequence: Synthetic oligonucleotide
aacagcacacuaugcaggc

SEQ ID NO: 2951332 - RNA, 19 nt, Artificial Sequence
  Description of Artificial Sequence: Synthetic oligonucleotide
aauaccauccagguacacc

SEQ ID NO: 2951333 - RNA, 19 nt, Artificial Sequence
  Description of Artificial Sequence: Synthetic oligonucleotide
ucauccugcacauacugcg

SEQ ID NO: 2951334 - RNA, 19 nt, Artificial Sequence
  Description of Artificial Sequence: Synthetic oligonucleotide
ugcugaagcagccuggccg

SEQ ID NO: 2951335 - RNA, 19 nt, Artificial Sequence
  Description of Artificial Sequence: Synthetic oligonucleotide
ucgugaauuguucacacca

SEQ ID NO: 2951336 - RNA, 19 nt, Artificial Sequence
  Description of Artificial Sequence: Synthetic oligonucleotide
gaaacagcacacuaugcag

SEQ ID NO: 2951337 - RNA, 19 nt, Artificial Sequence
  Description of Artificial Sequence: Synthetic oligonucleotide
uucgaaacagcacacuaug

SEQ ID NO: 2951338 - RNA, 19 nt, Artificial Sequence
  Description of Artificial Sequence: Synthetic oligonucleotide
guucacaccacgcagguag

SEQ ID NO: 2951339 - RNA, 19 nt, Artificial Sequence
  Description of Artificial Sequence: Synthetic oligonucleotide
ugaaugguguaguacagca

SEQ ID NO: 2951340 - RNA, 19 nt, Artificial Sequence
  Description of Artificial Sequence: Synthetic oligonucleotide
uugcuuucgaaacagcaca

SEQ ID NO: 2951341 - RNA, 19 nt, Artificial Sequence
  Description of Artificial Sequence: Synthetic oligonucleotide
auaccauccagguacaccu

SEQ ID NO: 2951342 - RNA, 19 nt, Artificial Sequence
  Description of Artificial Sequence: Synthetic oligonucleotide
acucccaucguacagccuc

SEQ ID NO: 2951343 - RNA, 19 nt, Artificial Sequence
  Description of Artificial Sequence: Synthetic oligonucleotide
aaugguugcuuucgaaaca

SEQ ID NO: 2951344 - RNA, 19 nt, Artificial Sequence
  Description of Artificial Sequence: Synthetic oligonucleotide
aguacagcagggcugcacg

SEQ ID NO: 2951345 - RNA, 19 nt, Artificial Sequence
  Description of Artificial Sequence: Synthetic oligonucleotide
aaacagcacacuaugcagg

SEQ ID NO: 2951346 - RNA, 19 nt, Artificial Sequence
  Description of Artificial Sequence: Synthetic oligonucleotide
uggugaaugguguaguaca

SEQ ID NO: 2951347 - RNA, 19 nt, Artificial Sequence
  Description of Artificial Sequence: Synthetic oligonucleotide
gaaugguugcuuucgaaac

SEQ ID NO: 2951348 - RNA, 19 nt, Artificial Sequence
  Description of Artificial Sequence: Synthetic oligonucleotide
ucuguccucucuuugcccg

SEQ ID NO: 2951349 - RNA, 19 nt, Artificial Sequence
  Description of Artificial Sequence: Synthetic oligonucleotide
agccucauccugcacauac

SEQ ID NO: 2951350 - RNA, 19 nt, Artificial Sequence
  Description of Artificial Sequence: Synthetic oligonucleotide
cacauacugcgccagaucc

SEQ ID NO: 2951351 - RNA, 19 nt, Artificial Sequence
  Description of Artificial Sequence: Synthetic oligonucleotide
aguacucccaucguacagc

SEQ ID NO: 2951352 - RNA, 19 nt, Artificial Sequence
  Description of Artificial Sequence: Synthetic oligonucleotide
ucuuugcugaagcagccug

SEQ ID NO: 2951353 - RNA, 19 nt, Artificial Sequence
  Description of Artificial Sequence: Synthetic oligonucleotide
ugcccuccaaccaauacug

SEQ ID NO: 2951354 - RNA, 19 nt, Artificial Sequence
  Description of Artificial Sequence: Synthetic oligonucleotide
uggcggaaggacaugugcg

SEQ ID NO: 2951355 - RNA, 19 nt, Artificial Sequence
  Description of Artificial Sequence: Synthetic oligonucleotide
gugaauuguucacaccacg

SEQ ID NO: 2951356 - RNA, 19 nt, Artificial Sequence
  Description of Artificial Sequence: Synthetic oligonucleotide
gugagugccuaucucaugc

SEQ ID NO: 2951357 - RNA, 19 nt, Artificial Sequence
  Description of Artificial Sequence: Synthetic oligonucleotide
uguaguacagcagggcugc

SEQ ID NO: 2951358 - RNA, 19 nt, Artificial Sequence
  Description of Artificial Sequence: Synthetic oligonucleotide
uacagccucauccugcaca

SEQ ID NO: 2951359 - RNA, 19 nt, Artificial Sequence
  Description of Artificial Sequence: Synthetic oligonucleotide
uuugcccggacacaguacu

SEQ ID NO: 2951360 - RNA, 19 nt, Artificial Sequence
  Description of Artificial Sequence: Synthetic oligonucleotide
uuucgaaacagcacacuau

SEQ ID NO: 2951361 - RNA, 19 nt, Artificial Sequence
  Description of Artificial Sequence: Synthetic oligonucleotide
uacaccuggucuuugcuga

SEQ ID NO: 2951362 - RNA, 19 nt, Artificial Sequence
  Description of Artificial Sequence: Synthetic oligonucleotide
gaauuguucacaccacgca

SEQ ID NO: 2951363 - RNA, 19 nt, Artificial Sequence
  Description of Artificial Sequence: Synthetic oligonucleotide
cauacugcaaucugccuuc

SEQ ID NO: 2951364 - RNA, 19 nt, Artificial Sequence
  Description of Artificial Sequence: Synthetic oligonucleotide
augcaggcuggccaggccc

SEQ ID NO: 2951365 - RNA, 19 nt, Artificial Sequence
  Description of Artificial Sequence: Synthetic oligonucleotide
ucagcagugggaaaucgau

SEQ ID NO: 2951366 - RNA, 19 nt, Artificial Sequence
  Description of Artificial Sequence: Synthetic oligonucleotide
acugcaaucugccuucagu

SEQ ID NO: 2951367 - RNA, 19 nt, Artificial Sequence
  Description of Artificial Sequence: Synthetic oligonucleotide
acaggaaugguugcuuucg

SEQ ID NO: 2951368 - RNA, 19 nt, Artificial Sequence
  Description of Artificial Sequence: Synthetic oligonucleotide
ugucuguccucucuuugcc

SEQ ID NO: 2951369 - RNA, 19 nt, Artificial Sequence
  Description of Artificial Sequence: Synthetic oligonucleotide
ggacacaguacucccaucg

SEQ ID NO: 2951370 - RNA, 19 nt, Artificial Sequence
  Description of Artificial Sequence: Synthetic oligonucleotide
auuguucacaccacgcagg

SEQ ID NO: 2951371 - RNA, 19 nt, Artificial Sequence
  Description of Artificial Sequence: Synthetic oligonucleotide
cacaguacucccaucguac

SEQ ID NO: 2951372 - RNA, 19 nt, Artificial Sequence
  Description of Artificial Sequence: Synthetic oligonucleotide
ucgaaacagcacacuaugc

SEQ ID NO: 2951373 - RNA, 19 nt, Artificial Sequence
  Description of Artificial Sequence: Synthetic oligonucleotide
cugcaaucugccuucagug

SEQ ID NO: 2951374 - RNA, 19 nt, Artificial Sequence
  Description of Artificial Sequence: Synthetic oligonucleotide
ucugccuucagugcugugc

SEQ ID NO: 2951375 - RNA, 19 nt, Artificial Sequence
  Description of Artificial Sequence: Synthetic oligonucleotide
cuuugcugaagcagccugg

SEQ ID NO: 2951376 - RNA, 19 nt, Artificial Sequence
  Description of Artificial Sequence: Synthetic oligonucleotide
aagcccauacugcaaucug

SEQ ID NO: 2951377 - RNA, 19 nt, Artificial Sequence
  Description of Artificial Sequence: Synthetic oligonucleotide
ugucgugaauuguucacac

SEQ ID NO: 2951378 - RNA, 19 nt, Artificial Sequence
  Description of Artificial Sequence: Synthetic oligonucleotide
ugcaaucugccuucagugc

SEQ ID NO: 2951379 - RNA, 19 nt, Artificial Sequence
  Description of Artificial Sequence: Synthetic oligonucleotide
guagugagugccuaucuca

SEQ ID NO: 2951380 - RNA, 19 nt, Artificial Sequence
  Description of Artificial Sequence: Synthetic oligonucleotide
cacgccacaggaaugguug

SEQ ID NO: 2951381 - RNA, 19 nt, Artificial Sequence
  Description of Artificial Sequence: Synthetic oligonucleotide
gagugccuaucucaugccg

SEQ ID NO: 2951382 - RNA, 19 nt, Artificial Sequence
  Description of Artificial Sequence: Synthetic oligonucleotide
ucugucuguccucucuuug

SEQ ID NO: 2951383 - RNA, 19 nt, Artificial Sequence
  Description of Artificial Sequence: Synthetic oligonucleotide
uccucagugggguuggcug

SEQ ID NO: 2951384 - RNA, 19 nt, Artificial Sequence
  Description of Artificial Sequence: Synthetic oligonucleotide
aaucgauggucugacggug

SEQ ID NO: 2951385 - RNA, 19 nt, Artificial Sequence
  Description of Artificial Sequence: Synthetic oligonucleotide
ucguacagccucauccugc

SEQ ID NO: 2951386 - RNA, 19 nt, Artificial Sequence
  Description of Artificial Sequence: Synthetic oligonucleotide
uagugaggucagcaguggg

SEQ ID NO: 2951387 - RNA, 19 nt, Artificial Sequence
  Description of Artificial Sequence: Synthetic oligonucleotide
agguacaccuggucuuugc

SEQ ID NO: 2951388 - RNA, 19 nt, Artificial Sequence
  Description of Artificial Sequence: Synthetic oligonucleotide
ugugccacggcugucguga

SEQ ID NO: 2951389 - RNA, 19 nt, Artificial Sequence
  Description of Artificial Sequence: Synthetic oligonucleotide
ucucuuugcccggacacag

SEQ ID NO: 2951390 - RNA, 19 nt, Artificial Sequence
  Description of Artificial Sequence: Synthetic oligonucleotide
ccaucguacagccucaucc

SEQ ID NO: 2951391 - RNA, 19 nt, Artificial Sequence
  Description of Artificial Sequence: Synthetic oligonucleotide
acacuaugcaggcuggcca

SEQ ID NO: 2951392 - RNA, 19 nt, Artificial Sequence
  Description of Artificial Sequence: Synthetic oligonucleotide
augguugcuuucgaaacag

SEQ ID NO: 2951393 - RNA, 19 nt, Artificial Sequence
  Description of Artificial Sequence: Synthetic oligonucleotide
gauggucugacggugccgc

SEQ ID NO: 2951394 - RNA, 19 nt, Artificial Sequence
  Description of Artificial Sequence: Synthetic oligonucleotide
auccuggaagagcuggcgg

SEQ ID NO: 2951395 - RNA, 19 nt, Artificial Sequence
  Description of Artificial Sequence: Synthetic oligonucleotide
cuggccgaagcccauacug

SEQ ID NO: 2951396 - RNA, 19 nt, Artificial Sequence
  Description of Artificial Sequence: Synthetic oligonucleotide
agcccauacugcaaucugc

SEQ ID NO: 2951397 - RNA, 19 nt, Artificial Sequence
  Description of Artificial Sequence: Synthetic oligonucleotide
ugcuuucgaaacagcacac

SEQ ID NO: 2951398 - RNA, 19 nt, Artificial Sequence
  Description of Artificial Sequence: Synthetic oligonucleotide
ugcgccagauccuggaaga

SEQ ID NO: 2951399 - RNA, 19 nt, Artificial Sequence
  Description of Artificial Sequence: Synthetic oligonucleotide
acaccacgcagguagugag

SEQ ID NO: 2951400 - RNA, 19 nt, Artificial Sequence
  Description of Artificial Sequence: Synthetic oligonucleotide
cugucuguccucucuuugc

SEQ ID NO: 2951401 - RNA, 19 nt, Artificial Sequence
  Description of Artificial Sequence: Synthetic oligonucleotide
ugcgcagccuggugaaugg

SEQ ID NO: 2951402 - RNA, 19 nt, Artificial Sequence
  Description of Artificial Sequence: Synthetic oligonucleotide
aggacaugugcgcagccug

SEQ ID NO: 2951403 - RNA, 19 nt, Artificial Sequence
  Description of Artificial Sequence: Synthetic oligonucleotide
augcccuccaaccaauacu

SEQ ID NO: 2951404 - RNA, 19 nt, Artificial Sequence
  Description of Artificial Sequence: Synthetic oligonucleotide
ucuuugcccggacacagua

SEQ ID NO: 2951405 - RNA, 19 nt, Artificial Sequence
  Description of Artificial Sequence: Synthetic oligonucleotide
uuugcugaagcagccuggc

SEQ ID NO: 2951406 - RNA, 19 nt, Artificial Sequence
  Description of Artificial Sequence: Synthetic oligonucleotide
guugcuuucgaaacagcac

SEQ ID NO: 2951407 - RNA, 19 nt, Artificial Sequence
  Description of Artificial Sequence: Synthetic oligonucleotide
uccuggaagagcuggcgga

SEQ ID NO: 2951408 - RNA, 19 nt, Artificial Sequence
  Description of Artificial Sequence: Synthetic oligonucleotide
aucucaugccgcagcaugc

SEQ ID NO: 2951409 - RNA, 19 nt, Artificial Sequence
  Description of Artificial Sequence: Synthetic oligonucleotide
cuggcggaaggacaugugc

SEQ ID NO: 2951410 - RNA, 19 nt, Artificial Sequence
  Description of Artificial Sequence: Synthetic oligonucleotide
ugccuagugaggucagcag

SEQ ID NO: 2951411 - RNA, 19 nt, Artificial Sequence
  Description of Artificial Sequence: Synthetic oligonucleotide
cagauccuggaagagcugg

SEQ ID NO: 2951412 - RNA, 19 nt, Artificial Sequence
  Description of Artificial Sequence: Synthetic oligonucleotide
uggccgaagcccauacugc

SEQ ID NO: 2951413 - RNA, 19 nt, Artificial Sequence
  Description of Artificial Sequence: Synthetic oligonucleotide
cagcacacuaugcaggcug

SEQ ID NO: 2951414 - RNA, 19 nt, Artificial Sequence
  Description of Artificial Sequence: Synthetic oligonucleotide
ugacggugccgcaggaugc

SEQ ID NO: 2951415 - RNA, 19 nt, Artificial Sequence
  Description of Artificial Sequence: Synthetic oligonucleotide
agugggaaaucgauggucu

SEQ ID NO: 2951416 - RNA, 19 nt, Artificial Sequence
  Description of Artificial Sequence: Synthetic oligonucleotide
ucaugccgcagcaugcccu

SEQ ID NO: 2951417 - RNA, 19 nt, Artificial Sequence
  Description of Artificial Sequence: Synthetic oligonucleotide
agugcugugccacggcugu

SEQ ID NO: 2951418 - RNA, 19 nt, Artificial Sequence
  Description of Artificial Sequence: Synthetic oligonucleotide
agggcugcacgccacagga

SEQ ID NO: 2951419 - RNA, 19 nt, Artificial Sequence
  Description of Artificial Sequence: Synthetic oligonucleotide
ucgauggucugacggugcc

SEQ ID NO: 2951420 - RNA, 19 nt, Artificial Sequence
  Description of Artificial Sequence: Synthetic oligonucleotide
ugggaaaucgauggucuga

SEQ ID NO: 2951421 - RNA, 19 nt, Artificial Sequence
  Description of Artificial Sequence: Synthetic oligonucleotide
ucagugcugugccacggcu

SEQ ID NO: 2951422 - RNA, 19 nt, Artificial Sequence
  Description of Artificial Sequence: Synthetic oligonucleotide
uagugagugccuaucucau

SEQ ID NO: 2951423 - RNA, 19 nt, Artificial Sequence
  Description of Artificial Sequence: Synthetic oligonucleotide
ugcugugccacggcugucg

SEQ ID NO: 2951424 - RNA, 19 nt, Artificial Sequence
  Description of Artificial Sequence: Synthetic oligonucleotide
cuggucuuugcugaagcag

SEQ ID NO: 2951425 - RNA, 19 nt, Artificial Sequence
  Description of Artificial Sequence: Synthetic oligonucleotide
ugagugccuaucucaugcc

SEQ ID NO: 2951426 - RNA, 19 nt, Artificial Sequence
  Description of Artificial Sequence: Synthetic oligonucleotide
cugccuucagugcugugcc

SEQ ID NO: 2951427 - RNA, 19 nt, Artificial Sequence
  Description of Artificial Sequence: Synthetic oligonucleotide
gaagcagccuggccgggag

SEQ ID NO: 2951428 - RNA, 19 nt, Artificial Sequence
  Description of Artificial Sequence: Synthetic oligonucleotide
guacucccaucguacagcc

SEQ ID NO: 2951429 - RNA, 19 nt, Artificial Sequence
  Description of Artificial Sequence: Synthetic oligonucleotide
guacaccuggucuuugcug

SEQ ID NO: 2951430 - RNA, 19 nt, Artificial Sequence
  Description of Artificial Sequence: Synthetic oligonucleotide
cacgcagguagugagugcc

SEQ ID NO: 2951431 - RNA, 19 nt, Artificial Sequence
  Description of Artificial Sequence: Synthetic oligonucleotide
cauccugcacauacugcgc

SEQ ID NO: 2951432 - RNA, 19 nt, Artificial Sequence
  Description of Artificial Sequence: Synthetic oligonucleotide
agaccuugccuagugaggu

SEQ ID NO: 2951433 - RNA, 19 nt, Artificial Sequence
  Description of Artificial Sequence: Synthetic oligonucleotide
cauacugcgccagauccug

SEQ ID NO: 2951434 - RNA, 19 nt, Artificial Sequence
  Description of Artificial Sequence: Synthetic oligonucleotide
ugguguaguacagcagggc

SEQ ID NO: 2951435 - RNA, 19 nt, Artificial Sequence
  Description of Artificial Sequence: Synthetic oligonucleotide
cugacggugccgcaggaug

SEQ ID NO: 2951436 - RNA, 19 nt, Artificial Sequence
  Description of Artificial Sequence: Synthetic oligonucleotide
acgccacaggaaugguugc

SEQ ID NO: 2951437 - RNA, 19 nt, Artificial Sequence
  Description of Artificial Sequence: Synthetic oligonucleotide
acaguacucccaucguaca

SEQ ID NO: 2951438 - RNA, 19 nt, Artificial Sequence
  Description of Artificial Sequence: Synthetic oligonucleotide
uugccuagugaggucagca

SEQ ID NO: 2951439 - RNA, 19 nt, Artificial Sequence
  Description of Artificial Sequence: Synthetic oligonucleotide
uucagugcugugccacggc

SEQ ID NO: 2951440 - RNA, 19 nt, Artificial Sequence
  Description of Artificial Sequence: Synthetic oligonucleotide
uaugcaggcuggccaggcc

SEQ ID NO: 2951441 - RNA, 19 nt, Artificial Sequence
  Description of Artificial Sequence: Synthetic oligonucleotide
agugagugccuaucucaug

SEQ ID NO: 2951442 - RNA, 19 nt, Artificial Sequence
  Description of Artificial Sequence: Synthetic oligonucleotide
cuagugaggucagcagugg

SEQ ID NO: 2951443 - RNA, 19 nt, Artificial Sequence
  Description of Artificial Sequence: Synthetic oligonucleotide
aucguacagccucauccug

SEQ ID NO: 2951444 - RNA, 19 nt, Artificial Sequence
  Description of Artificial Sequence: Synthetic oligonucleotide
caaucugccuucagugcug

SEQ ID NO: 2951445 - RNA, 19 nt, Artificial Sequence
  Description of Artificial Sequence: Synthetic oligonucleotide
agguagugagugccuaucu

SEQ ID NO: 2951446 - RNA, 19 nt, Artificial Sequence
  Description of Artificial Sequence: Synthetic oligonucleotide
uccagguacaccuggucuu

SEQ ID NO: 2951447 - RNA, 19 nt, Artificial Sequence
  Description of Artificial Sequence: Synthetic oligonucleotide
aucgauggucugacggugc

SEQ ID NO: 2951448 - RNA, 19 nt, Artificial Sequence
  Description of Artificial Sequence: Synthetic oligonucleotide
augguguaguacagcaggg

SEQ ID NO: 2951449 - RNA, 19 nt, Artificial Sequence
  Description of Artificial Sequence: Synthetic oligonucleotide
cuuucgaaacagcacacua

SEQ ID NO: 2951450 - RNA, 19 nt, Artificial Sequence
  Description of Artificial Sequence: Synthetic oligonucleotide
gcugaagcagccuggccgg

SEQ ID NO: 2951451 - RNA, 19 nt, Artificial Sequence
  Description of Artificial Sequence: Synthetic oligonucleotide
gaaggacaugugcgcagcc

SEQ ID NO: 2951452 - RNA, 19 nt, Artificial Sequence
  Description of Artificial Sequence: Synthetic oligonucleotide
aaggacaugugcgcagccu

SEQ ID NO: 2951453 - RNA, 19 nt, Artificial Sequence
  Description of Artificial Sequence: Synthetic oligonucleotide
caguacucccaucguacag

SEQ ID NO: 2951454 - RNA, 19 nt, Artificial Sequence
  Description of Artificial Sequence: Synthetic oligonucleotide
gucgugaauuguucacacc

SEQ ID NO: 2951455 - RNA, 19 nt, Artificial Sequence
  Description of Artificial Sequence: Synthetic oligonucleotide
cuggugaaugguguaguac

SEQ ID NO: 2951456 - RNA, 19 nt, Artificial Sequence
  Description of Artificial Sequence: Synthetic oligonucleotide
guguaguacagcagggcug

SEQ ID NO: 2951457 - RNA, 19 nt, Artificial Sequence
  Description of Artificial Sequence: Synthetic oligonucleotide
ggaaugguugcuuucgaaa

SEQ ID NO: 2951458 - RNA, 19 nt, Artificial Sequence
  Description of Artificial Sequence: Synthetic oligonucleotide
ugguugcuuucgaaacagc

SEQ ID NO: 2951459 - RNA, 19 nt, Artificial Sequence
  Description of Artificial Sequence: Synthetic oligonucleotide
uacugcgccagauccugga

SEQ ID NO: 2951460 - RNA, 19 nt, Artificial Sequence
  Description of Artificial Sequence: Synthetic oligonucleotide
cugcacgccacaggaaugg

SEQ ID NO: 2951461 - RNA, 19 nt, Artificial Sequence
  Description of Artificial Sequence: Synthetic oligonucleotide
gcaggaugcgcacaauacc

SEQ ID NO: 2951462 - RNA, 19 nt, Artificial Sequence
  Description of Artificial Sequence: Synthetic oligonucleotide
caugcccuccaaccaauac

SEQ ID NO: 2951463 - RNA, 19 nt, Artificial Sequence
  Description of Artificial Sequence: Synthetic oligonucleotide
aggaaugguugcuuucgaa

SEQ ID NO: 2951464 - RNA, 19 nt, Artificial Sequence
  Description of Artificial Sequence: Synthetic oligonucleotide
ugcccggacacaguacucc

SEQ ID NO: 2951465 - RNA, 19 nt, Artificial Sequence
  Description of Artificial Sequence: Synthetic oligonucleotide
uacugcaaucugccuucag

SEQ ID NO: 2951466 - RNA, 19 nt, Artificial Sequence
  Description of Artificial Sequence: Synthetic oligonucleotide
gugaaugguguaguacagc

SEQ ID NO: 2951467 - RNA, 19 nt, Artificial Sequence
  Description of Artificial Sequence: Synthetic oligonucleotide
agugaggucagcaguggga

SEQ ID NO: 2951468 - RNA, 19 nt, Artificial Sequence
  Description of Artificial Sequence: Synthetic oligonucleotide
aagcagccuggccgggagg

SEQ ID NO: 2951469 - RNA, 19 nt, Artificial Sequence
  Description of Artificial Sequence: Synthetic oligonucleotide
uccucucuuugcccggaca

SEQ ID NO: 2951470 - RNA, 19 nt, Artificial Sequence
  Description of Artificial Sequence: Synthetic oligonucleotide
accacgcagguagugagug

SEQ ID NO: 2951471 - RNA, 19 nt, Artificial Sequence
  Description of Artificial Sequence: Synthetic oligonucleotide
cuucagugcugugccacgg

SEQ ID NO: 2951472 - RNA, 19 nt, Artificial Sequence
  Description of Artificial Sequence: Synthetic oligonucleotide
cacaggaaugguugcuuuc

SEQ ID NO: 2951473 - RNA, 19 nt, Artificial Sequence
  Description of Artificial Sequence: Synthetic oligonucleotide
uacagcagggcugcacgcc

SEQ ID NO: 2951474 - RNA, 19 nt, Artificial Sequence
  Description of Artificial Sequence: Synthetic oligonucleotide
acacaguacucccaucgua

SEQ ID NO: 2951475 - RNA, 19 nt, Artificial Sequence
  Description of Artificial Sequence: Synthetic oligonucleotide
ccuagugaggucagcagug

SEQ ID NO: 2951476 - RNA, 19 nt, Artificial Sequence
  Description of Artificial Sequence: Synthetic oligonucleotide
cagcagugggaaaucgaug

SEQ ID NO: 2951477 - RNA, 19 nt, Artificial Sequence
  Description of Artificial Sequence: Synthetic oligonucleotide
ggugaaugguguaguacag

SEQ ID NO: 2951478 - RNA, 19 nt, Artificial Sequence
  Description of Artificial Sequence: Synthetic oligonucleotide
caugugcgcagccugguga

SEQ ID NO: 2951479 - RNA, 19 nt, Artificial Sequence
  Description of Artificial Sequence: Synthetic oligonucleotide
uaccauccagguacaccug

SEQ ID NO: 2951480 - RNA, 19 nt, Artificial Sequence
  Description of Artificial Sequence: Synthetic oligonucleotide
ggaaaucgauggucugacg

SEQ ID NO: 2951481 - RNA, 19 nt, Artificial Sequence
  Description of Artificial Sequence: Synthetic oligonucleotide
uucacaccacgcagguagu

SEQ ID NO: 2951482 - RNA, 19 nt, Artificial Sequence
  Description of Artificial Sequence: Synthetic oligonucleotide
cuuugcccggacacaguac

SEQ ID NO: 2951483 - RNA, 19 nt, Artificial Sequence
  Description of Artificial Sequence: Synthetic oligonucleotide
aaucugccuucagugcugu

SEQ ID NO: 2951484 - RNA, 19 nt, Artificial Sequence
  Description of Artificial Sequence: Synthetic oligonucleotide
agugggguuggcuggccga

SEQ ID NO: 2951485 - RNA, 19 nt, Artificial Sequence
  Description of Artificial Sequence: Synthetic oligonucleotide
agcacacuaugcaggcugg

SEQ ID NO: 2951486 - RNA, 19 nt, Artificial Sequence
  Description of Artificial Sequence: Synthetic oligonucleotide
cugcgccagauccuggaag

SEQ ID NO: 2951487 - RNA, 19 nt, Artificial Sequence
  Description of Artificial Sequence: Synthetic oligonucleotide
gugggaaaucgauggucug

SEQ ID NO: 2951488 - RNA, 19 nt, Artificial Sequence
  Description of Artificial Sequence: Synthetic oligonucleotide
ugcacauacugcgccagau

SEQ ID NO: 2951489 - RNA, 19 nt, Artificial Sequence
  Description of Artificial Sequence: Synthetic oligonucleotide
uggucugacggugccgcag

SEQ ID NO: 2951490 - RNA, 19 nt, Artificial Sequence
  Description of Artificial Sequence: Synthetic oligonucleotide
gguugcuuucgaaacagca

SEQ ID NO: 2951491 - RNA, 19 nt, Artificial Sequence
  Description of Artificial Sequence: Synthetic oligonucleotide
gacggugccgcaggaugcg

SEQ ID NO: 2951492 - RNA, 19 nt, Artificial Sequence
  Description of Artificial Sequence: Synthetic oligonucleotide
ggcggaaggacaugugcgc

SEQ ID NO: 2951493 - RNA, 19 nt, Artificial Sequence
  Description of Artificial Sequence: Synthetic oligonucleotide
gcugucgugaauuguucac

SEQ ID NO: 2951494 - RNA, 19 nt, Artificial Sequence
  Description of Artificial Sequence: Synthetic oligonucleotide
agccuggugaaugguguag

SEQ ID NO: 2951495 - RNA, 19 nt, Artificial Sequence
  Description of Artificial Sequence: Synthetic oligonucleotide
guacagcagggcugcacgc

SEQ ID NO: 2951496 - RNA, 19 nt, Artificial Sequence
  Description of Artificial Sequence: Synthetic oligonucleotide
gguagugagugccuaucuc

SEQ ID NO: 2951497 - RNA, 19 nt, Artificial Sequence
  Description of Artificial Sequence: Synthetic oligonucleotide
cucaugccgcagcaugccc

SEQ ID NO: 2951498 - RNA, 19 nt, Artificial Sequence
  Description of Artificial Sequence: Synthetic oligonucleotide
cuguccucucuuugcccgg

SEQ ID NO: 2951499 - RNA, 19 nt, Artificial Sequence
  Description of Artificial Sequence: Synthetic oligonucleotide
gcgcacaauaccauccagg

SEQ ID NO: 2951500 - RNA, 19 nt, Artificial Sequence
  Description of Artificial Sequence: Synthetic oligonucleotide
agguaucugucuguccucu

SEQ ID NO: 2951501 - RNA, 19 nt, Artificial Sequence
  Description of Artificial Sequence: Synthetic oligonucleotide
aggucagcagugggaaauc

SEQ ID NO: 2951502 - RNA, 19 nt, Artificial Sequence
  Description of Artificial Sequence: Synthetic oligonucleotide
ggucugacggugccgcagg

SEQ ID NO: 2951503 - RNA, 19 nt, Artificial Sequence
  Description of Artificial Sequence: Synthetic oligonucleotide
guaucugucuguccucucu

SEQ ID NO: 2951504 - RNA, 19 nt, Artificial Sequence
  Description of Artificial Sequence: Synthetic oligonucleotide
cuaugcaggcuggccaggc

SEQ ID NO: 2951505 - RNA, 19 nt, Artificial Sequence
  Description of Artificial Sequence: Synthetic oligonucleotide
ugccgcaggaugcgcacaa

SEQ ID NO: 2951506 - RNA, 19 nt, Artificial Sequence
  Description of Artificial Sequence: Synthetic oligonucleotide
gguguaguacagcagggcu

SEQ ID NO: 2951507 - RNA, 19 nt, Artificial Sequence
  Description of Artificial Sequence: Synthetic oligonucleotide
cagugcugugccacggcug

SEQ ID NO: 2951508 - RNA, 19 nt, Artificial Sequence
  Description of Artificial Sequence: Synthetic oligonucleotide
ucacaccacgcagguagug

SEQ ID NO: 2951509 - RNA, 19 nt, Artificial Sequence
  Description of Artificial Sequence: Synthetic oligonucleotide
gggaaaucgauggucugac

SEQ ID NO: 2951510 - RNA, 19 nt, Artificial Sequence
  Description of Artificial Sequence: Synthetic oligonucleotide
acaauaccauccagguaca

SEQ ID NO: 2951511 - RNA, 19 nt, Artificial Sequence
  Description of Artificial Sequence: Synthetic oligonucleotide
caugccgcagcaugcccuc

SEQ ID NO: 2951512 - RNA, 19 nt, Artificial Sequence
  Description of Artificial Sequence: Synthetic oligonucleotide
augugcgcagccuggugaa

SEQ ID NO: 2951513 - RNA, 19 nt, Artificial Sequence
  Description of Artificial Sequence: Synthetic oligonucleotide
ugaggucagcagugggaaa

SEQ ID NO: 2951514 - RNA, 19 nt, Artificial Sequence
  Description of Artificial Sequence: Synthetic oligonucleotide
cagggcugcacgccacagg

SEQ ID NO: 2951515 - RNA, 19 nt, Artificial Sequence
  Description of Artificial Sequence: Synthetic oligonucleotide
ggucagcagugggaaaucg

SEQ ID NO: 2951516 - RNA, 19 nt, Artificial Sequence
  Description of Artificial Sequence: Synthetic oligonucleotide
gaagcccauacugcaaucu

SEQ ID NO: 2951517 - RNA, 19 nt, Artificial Sequence
  Description of Artificial Sequence: Synthetic oligonucleotide
cugucgugaauuguucaca

SEQ ID NO: 2951518 - RNA, 19 nt, Artificial Sequence
  Description of Artificial Sequence: Synthetic oligonucleotide
cagguagugagugccuauc

SEQ ID NO: 2951519 - RNA, 19 nt, Artificial Sequence
  Description of Artificial Sequence: Synthetic oligonucleotide
ggucuuugcugaagcagcc

SEQ ID NO: 2951520 - RNA, 19 nt, Artificial Sequence
  Description of Artificial Sequence: Synthetic oligonucleotide
cgaaacagcacacuaugca

SEQ ID NO: 2951521 - RNA, 19 nt, Artificial Sequence
  Description of Artificial Sequence: Synthetic oligonucleotide
caucguacagccucauccu

SEQ ID NO: 2951522 - RNA, 19 nt, Artificial Sequence
  Description of Artificial Sequence: Synthetic oligonucleotide
cagugggguuggcuggccg

SEQ ID NO: 2951523 - RNA, 19 nt, Artificial Sequence
  Description of Artificial Sequence: Synthetic oligonucleotide
aucugucuguccucucuuu

SEQ ID NO: 2951524 - RNA, 19 nt, Artificial Sequence
  Description of Artificial Sequence: Synthetic oligonucleotide
ugaagcagccuggccggga

SEQ ID NO: 2951525 - RNA, 19 nt, Artificial Sequence
  Description of Artificial Sequence: Synthetic oligonucleotide
gcccauacugcaaucugcc

SEQ ID NO: 2951526 - RNA, 19 nt, Artificial Sequence
  Description of Artificial Sequence: Synthetic oligonucleotide
ggaaggacaugugcgcagc

SEQ ID NO: 2951527 - RNA, 19 nt, Artificial Sequence
  Description of Artificial Sequence: Synthetic oligonucleotide
cuugccuagugaggucagc

SEQ ID NO: 2951528 - RNA, 19 nt, Artificial Sequence
  Description of Artificial Sequence: Synthetic oligonucleotide
uggccgggagguaucuguc

SEQ ID NO: 2951529 - RNA, 19 nt, Artificial Sequence
  Description of Artificial Sequence: Synthetic oligonucleotide
acauacugcgccagauccu

SEQ ID NO: 2951530 - RNA, 19 nt, Artificial Sequence
  Description of Artificial Sequence: Synthetic oligonucleotide
ccucagugggguuggcugg

SEQ ID NO: 2951531 - RNA, 19 nt, Artificial Sequence
  Description of Artificial Sequence: Synthetic oligonucleotide
agcuggcggaaggacaugu

SEQ ID NO: 2951532 - RNA, 19 nt, Artificial Sequence
  Description of Artificial Sequence: Synthetic oligonucleotide
ccucucuuugcccggacac

SEQ ID NO: 2951533 - RNA, 19 nt, Artificial Sequence
  Description of Artificial Sequence: Synthetic oligonucleotide
cucagugggguuggcuggc

SEQ ID NO: 2951534 - RNA, 19 nt, Artificial Sequence
  Description of Artificial Sequence: Synthetic oligonucleotide
uugcccggacacaguacuc

SEQ ID NO: 2951535 - RNA, 19 nt, Artificial Sequence
  Description of Artificial Sequence: Synthetic oligonucleotide
ggacaugugcgcagccugg

SEQ ID NO: 2951536 - RNA, 19 nt, Artificial Sequence
  Description of Artificial Sequence: Synthetic oligonucleotide
gaggucagcagugggaaau

SEQ ID NO: 2951537 - RNA, 19 nt, Artificial Sequence
  Description of Artificial Sequence: Synthetic oligonucleotide
gaccuugccuagugagguc

SEQ ID NO: 2951538 - RNA, 19 nt, Artificial Sequence
  Description of Artificial Sequence: Synthetic oligonucleotide
caggcccuccucagugggg

SEQ ID NO: 2951539 - RNA, 19 nt, Artificial Sequence
  Description of Artificial Sequence: Synthetic oligonucleotide
uacucccaucguacagccu

SEQ ID NO: 2951540 - RNA, 19 nt, Artificial Sequence
  Description of Artificial Sequence: Synthetic oligonucleotide
gguuggcuggccgaagccc

SEQ ID NO: 2951541 - RNA, 19 nt, Artificial Sequence
  Description of Artificial Sequence: Synthetic oligonucleotide
gugcgcagccuggugaaug

SEQ ID NO: 2951542 - RNA, 19 nt, Artificial Sequence
  Description of Artificial Sequence: Synthetic oligonucleotide
gucagcagugggaaaucga

SEQ ID NO: 2951543 - RNA, 19 nt, Artificial Sequence
  Description of Artificial Sequence: Synthetic oligonucleotide
uguccucucuuugcccgga

SEQ ID NO: 2951544 - RNA, 19 nt, Artificial Sequence
  Description of Artificial Sequence: Synthetic oligonucleotide
gcaaucugccuucagugcu

SEQ ID NO: 2951545 - RNA, 19 nt, Artificial Sequence
  Description of Artificial Sequence: Synthetic oligonucleotide
acugcgccagauccuggaa

SEQ ID NO: 2951546 - RNA, 19 nt, Artificial Sequence
  Description of Artificial Sequence: Synthetic oligonucleotide
acggcugucgugaauuguu

SEQ ID NO: 2951547 - RNA, 19 nt, Artificial Sequence
  Description of Artificial Sequence: Synthetic oligonucleotide
ccuucagugcugugccacg

SEQ ID NO: 2951548 - RNA, 19 nt, Artificial Sequence
  Description of Artificial Sequence: Synthetic oligonucleotide
gcagcaugcccuccaacca

SEQ ID NO: 2951549 - RNA, 19 nt, Artificial Sequence
  Description of Artificial Sequence: Synthetic oligonucleotide
cgugaauuguucacaccac

SEQ ID NO: 2951550 - RNA, 19 nt, Artificial Sequence
  Description of Artificial Sequence: Synthetic oligonucleotide
ggcugucgugaauuguuca

SEQ ID NO: 2951551 - RNA, 19 nt, Artificial Sequence
  Description of Artificial Sequence: Synthetic oligonucleotide
auacugcgccagauccugg

SEQ ID NO: 2951552 - RNA, 19 nt, Artificial Sequence
  Description of Artificial Sequence: Synthetic oligonucleotide
cgcaggaugcgcacaauac

SEQ ID NO: 2951553 - RNA, 19 nt, Artificial Sequence
  Description of Artificial Sequence: Synthetic oligonucleotide
caauaccauccagguacac

SEQ ID NO: 2951554 - RNA, 19 nt, Artificial Sequence
  Description of Artificial Sequence: Synthetic oligonucleotide
acggugccgcaggaugcgc

SEQ ID NO: 2951555 - RNA, 19 nt, Artificial Sequence
  Description of Artificial Sequence: Synthetic oligonucleotide
gccgggagguaucugucug

SEQ ID NO: 2951556 - RNA, 19 nt, Artificial Sequence
  Description of Artificial Sequence: Synthetic oligonucleotide
agcagggcugcacgccaca

SEQ ID NO: 2951557 - RNA, 19 nt, Artificial Sequence
  Description of Artificial Sequence: Synthetic oligonucleotide
ucugacggugccgcaggau

SEQ ID NO: 2951558 - RNA, 19 nt, Artificial Sequence
  Description of Artificial Sequence: Synthetic oligonucleotide
ggccgaagcccauacugca

SEQ ID NO: 2951559 - RNA, 19 nt, Artificial Sequence
  Description of Artificial Sequence: Synthetic oligonucleotide
cacaccacgcagguaguga

SEQ ID NO: 2951560 - RNA, 19 nt, Artificial Sequence
  Description of Artificial Sequence: Synthetic oligonucleotide
uuggcuggccgaagcccau

SEQ ID NO: 2951561 - RNA, 19 nt, Artificial Sequence
  Description of Artificial Sequence: Synthetic oligonucleotide
aggaugcgcacaauaccau

SEQ ID NO: 2951562 - RNA, 19 nt, Artificial Sequence
  Description of Artificial Sequence: Synthetic oligonucleotide
aggcccuccucaguggggu

SEQ ID NO: 2951563 - RNA, 19 nt, Artificial Sequence
  Description of Artificial Sequence: Synthetic oligonucleotide
acaccuggucuuugcugaa

SEQ ID NO: 2951564 - RNA, 19 nt, Artificial Sequence
  Description of Artificial Sequence: Synthetic oligonucleotide
caccuggucuuugcugaag

SEQ ID NO: 2951565 - RNA, 19 nt, Artificial Sequence
  Description of Artificial Sequence: Synthetic oligonucleotide
ggguuggcuggccgaagcc

SEQ ID NO: 2951566 - RNA, 19 nt, Artificial Sequence
  Description of Artificial Sequence: Synthetic oligonucleotide
uguucacaccacgcaggua

SEQ ID NO: 2951567 - RNA, 19 nt, Artificial Sequence
  Description of Artificial Sequence: Synthetic oligonucleotide
gcacauacugcgccagauc

SEQ ID NO: 2951568 - RNA, 19 nt, Artificial Sequence
  Description of Artificial Sequence: Synthetic oligonucleotide
ggugccgcaggaugcgcac

SEQ ID NO: 2951569 - RNA, 19 nt, Artificial Sequence
  Description of Artificial Sequence: Synthetic oligonucleotide
cagcaugcccuccaaccaa

SEQ ID NO: 2951570 - RNA, 19 nt, Artificial Sequence
  Description of Artificial Sequence: Synthetic oligonucleotide
ugcacgccacaggaauggu

SEQ ID NO: 2951571 - RNA, 19 nt, Artificial Sequence
  Description of Artificial Sequence: Synthetic oligonucleotide
auacugcaaucugccuuca

SEQ ID NO: 2951572 - RNA, 19 nt, Artificial Sequence
  Description of Artificial Sequence: Synthetic oligonucleotide
ccaggcccuccucaguggg

SEQ ID NO: 2951573 - RNA, 19 nt, Artificial Sequence
  Description of Artificial Sequence: Synthetic oligonucleotide
agcaugcccuccaaccaau

SEQ ID NO: 2951574 - RNA, 19 nt, Artificial Sequence
  Description of Artificial Sequence: Synthetic oligonucleotide
cuggccgggagguaucugu

SEQ ID NO: 2951575 - RNA, 19 nt, Artificial Sequence
  Description of Artificial Sequence: Synthetic oligonucleotide
gccaggcccuccucagugg

SEQ ID NO: 2951576 - RNA, 19 nt, Artificial Sequence
  Description of Artificial Sequence: Synthetic oligonucleotide
cucucuuugcccggacaca

SEQ ID NO: 2951577 - RNA, 19 nt, Artificial Sequence
  Description of Artificial Sequence: Synthetic oligonucleotide
cugaagcagccuggccggg

SEQ ID NO: 2951578 - RNA, 19 nt, Artificial Sequence
  Description of Artificial Sequence: Synthetic oligonucleotide
gcccggacacaguacuccc

SEQ ID NO: 2951579 - RNA, 19 nt, Artificial Sequence
  Description of Artificial Sequence: Synthetic oligonucleotide
cagcagggcugcacgccac

SEQ ID NO: 2951580 - RNA, 19 nt, Artificial Sequence
  Description of Artificial Sequence: Synthetic oligonucleotide
gguacaccuggucuuugcu

SEQ ID NO: 2951581 - RNA, 19 nt, Artificial Sequence
  Description of Artificial Sequence: Synthetic oligonucleotide
aucugccuucagugcugug

SEQ ID NO: 2951582 - RNA, 19 nt, Artificial Sequence
  Description of Artificial Sequence: Synthetic oligonucleotide
guacagccucauccugcac

SEQ ID NO: 2951583 - RNA, 19 nt, Artificial Sequence
  Description of Artificial Sequence: Synthetic oligonucleotide
cugugccacggcugucgug

SEQ ID NO: 2951584 - RNA, 19 nt, Artificial Sequence
  Description of Artificial Sequence: Synthetic oligonucleotide
gguaucugucuguccucuc

SEQ ID NO: 2951585 - RNA, 19 nt, Artificial Sequence
  Description of Artificial Sequence: Synthetic oligonucleotide
gccuucagugcugugccac

SEQ ID NO: 2951586 - RNA, 19 nt, Artificial Sequence
  Description of Artificial Sequence: Synthetic oligonucleotide
aggcuggccaggcccuccu

SEQ ID NO: 2951587 - RNA, 19 nt, Artificial Sequence
  Description of Artificial Sequence: Synthetic oligonucleotide
ugccacggcugucgugaau

SEQ ID NO: 2951588 - RNA, 19 nt, Artificial Sequence
  Description of Artificial Sequence: Synthetic oligonucleotide
gccuagugaggucagcagu

SEQ ID NO: 2951589 - RNA, 19 nt, Artificial Sequence
  Description of Artificial Sequence: Synthetic oligonucleotide
gcugcacgccacaggaaug

SEQ ID NO: 2951590 - RNA, 19 nt, Artificial Sequence
  Description of Artificial Sequence: Synthetic oligonucleotide
ggcuggccgaagcccauac

SEQ ID NO: 2951591 - RNA, 19 nt, Artificial Sequence
  Description of Artificial Sequence: Synthetic oligonucleotide
cggaaggacaugugcgcag

SEQ ID NO: 2951592 - RNA, 19 nt, Artificial Sequence
  Description of Artificial Sequence: Synthetic oligonucleotide
gagcuggcggaaggacaug

SEQ ID NO: 2951593 - RNA, 19 nt, Artificial Sequence
  Description of Artificial Sequence: Synthetic oligonucleotide
gacaugugcgcagccuggu

SEQ ID NO: 2951594 - RNA, 19 nt, Artificial Sequence
  Description of Artificial Sequence: Synthetic oligonucleotide
agccuggccgggagguauc

SEQ ID NO: 2951595 - RNA, 19 nt, Artificial Sequence
  Description of Artificial Sequence: Synthetic oligonucleotide
guccucucuuugcccggac

SEQ ID NO: 2951596 - RNA, 19 nt, Artificial Sequence
  Description of Artificial Sequence: Synthetic oligonucleotide
ccagauccuggaagagcug

SEQ ID NO: 2951597 - RNA, 19 nt, Artificial Sequence
  Description of Artificial Sequence: Synthetic oligonucleotide
gcacaauaccauccaggua

SEQ ID NO: 2951598 - RNA, 19 nt, Artificial Sequence
  Description of Artificial Sequence: Synthetic oligonucleotide
ugugcgcagccuggugaau

SEQ ID NO: 2951599 - RNA, 19 nt, Artificial Sequence
  Description of Artificial Sequence: Synthetic oligonucleotide
gucugacggugccgcagga

SEQ ID NO: 2951600 - RNA, 19 nt, Artificial Sequence
  Description of Artificial Sequence: Synthetic oligonucleotide
ccacgcagguagugagugc

SEQ ID NO: 2951601 - RNA, 19 nt, Artificial Sequence
  Description of Artificial Sequence: Synthetic oligonucleotide
gcuggccaggcccuccuca

SEQ ID NO: 2951602 - RNA, 19 nt, Artificial Sequence
  Description of Artificial Sequence: Synthetic oligonucleotide
cgcacaauaccauccaggu

SEQ ID NO: 2951603 - RNA, 19 nt, Artificial Sequence
  Description of Artificial Sequence: Synthetic oligonucleotide
acgcagguagugagugccu

SEQ ID NO: 2951604 - RNA, 19 nt, Artificial Sequence
  Description of Artificial Sequence: Synthetic oligonucleotide
gcccuccaaccaauacugg

SEQ ID NO: 2951605 - RNA, 19 nt, Artificial Sequence
  Description of Artificial Sequence: Synthetic oligonucleotide
gucuuugcugaagcagccu

SEQ ID NO: 2951606 - RNA, 19 nt, Artificial Sequence
  Description of Artificial Sequence: Synthetic oligonucleotide
cguacagccucauccugca

SEQ ID NO: 2951607 - RNA, 19 nt, Artificial Sequence
  Description of Artificial Sequence: Synthetic oligonucleotide
cgcagccuggugaauggug

SEQ ID NO: 2951608 - RNA, 19 nt, Artificial Sequence
  Description of Artificial Sequence: Synthetic oligonucleotide
ccauacugcaaucugccuu

SEQ ID NO: 2951609 - RNA, 19 nt, Artificial Sequence
  Description of Artificial Sequence: Synthetic oligonucleotide
gcggaaggacaugugcgca

SEQ ID NO: 2951610 - RNA, 19 nt, Artificial Sequence
  Description of Artificial Sequence: Synthetic oligonucleotide
cagccuggugaauggugua

SEQ ID NO: 2951611 - RNA, 19 nt, Artificial Sequence
  Description of Artificial Sequence: Synthetic oligonucleotide
gcuggcggaaggacaugug

SEQ ID NO: 2951612 - RNA, 19 nt, Artificial Sequence
  Description of Artificial Sequence: Synthetic oligonucleotide
gcacacuaugcaggcuggc

SEQ ID NO: 2951613 - RNA, 19 nt, Artificial Sequence
  Description of Artificial Sequence: Synthetic oligonucleotide
gcagccuggugaauggugu

SEQ ID NO: 2951614 - RNA, 19 nt, Artificial Sequence
  Description of Artificial Sequence: Synthetic oligonucleotide
ccacggcugucgugaauug

SEQ ID NO: 2951615 - RNA, 19 nt, Artificial Sequence
  Description of Artificial Sequence: Synthetic oligonucleotide
gcagggcugcacgccacag

SEQ ID NO: 2951616 - RNA, 19 nt, Artificial Sequence
  Description of Artificial Sequence: Synthetic oligonucleotide
cgaagcccauacugcaauc

SEQ ID NO: 2951617 - RNA, 19 nt, Artificial Sequence
  Description of Artificial Sequence: Synthetic oligonucleotide
gcuuucgaaacagcacacu

SEQ ID NO: 2951618 - RNA, 19 nt, Artificial Sequence
  Description of Artificial Sequence: Synthetic oligonucleotide
gugggguuggcuggccgaa

SEQ ID NO: 2951619 - RNA, 19 nt, Artificial Sequence
  Description of Artificial Sequence: Synthetic oligonucleotide
cucuuugcccggacacagu

SEQ ID NO: 2951620 - RNA, 19 nt, Artificial Sequence
  Description of Artificial Sequence: Synthetic oligonucleotide
gcgccagauccuggaagag

SEQ ID NO: 2951621 - RNA, 19 nt, Artificial Sequence
  Description of Artificial Sequence: Synthetic oligonucleotide
guaguacagcagggcugca

SEQ ID NO: 2951622 - RNA, 19 nt, Artificial Sequence
  Description of Artificial Sequence: Synthetic oligonucleotide
ccuggugaaugguguagua

SEQ ID NO: 2951623 - RNA, 19 nt, Artificial Sequence
  Description of Artificial Sequence: Synthetic oligonucleotide
gcccuccucagugggguug

SEQ ID NO: 2951624 - RNA, 19 nt, Artificial Sequence
  Description of Artificial Sequence: Synthetic oligonucleotide
caccacgcagguagugagu

SEQ ID NO: 2951625 - RNA, 19 nt, Artificial Sequence
  Description of Artificial Sequence: Synthetic oligonucleotide
uggcuggccgaagcccaua

SEQ ID NO: 2951626 - RNA, 19 nt, Artificial Sequence
  Description of Artificial Sequence: Synthetic oligonucleotide
cggcugucgugaauuguuc

SEQ ID NO: 2951627 - RNA, 19 nt, Artificial Sequence
  Description of Artificial Sequence: Synthetic oligonucleotide
cgauggucugacggugccg

SEQ ID NO: 2951628 - RNA, 19 nt, Artificial Sequence
  Description of Artificial Sequence: Synthetic oligonucleotide
gcagguagugagugccuau

SEQ ID NO: 2951629 - RNA, 19 nt, Artificial Sequence
  Description of Artificial Sequence: Synthetic oligonucleotide
cccggacacaguacuccca

SEQ ID NO: 2951630 - RNA, 19 nt, Artificial Sequence
  Description of Artificial Sequence: Synthetic oligonucleotide
gugccgcaggaugcgcaca

SEQ ID NO: 2951631 - RNA, 19 nt, Artificial Sequence
  Description of Artificial Sequence: Synthetic oligonucleotide
cacggcugucgugaauugu

SEQ ID NO: 2951632 - RNA, 19 nt, Artificial Sequence
  Description of Artificial Sequence: Synthetic oligonucleotide
gccgaagcccauacugcaa

SEQ ID NO: 2951633 - RNA, 19 nt, Artificial Sequence
  Description of Artificial Sequence: Synthetic oligonucleotide
gccacggcugucgugaauu

SEQ ID NO: 2951634 - RNA, 19 nt, Artificial Sequence
  Description of Artificial Sequence: Synthetic oligonucleotide
gccuggugaaugguguagu

SEQ ID NO: 2951635 - RNA, 19 nt, Artificial Sequence
  Description of Artificial Sequence: Synthetic oligonucleotide
gugccacggcugucgugaa

SEQ ID NO: 2951636 - RNA, 19 nt, Artificial Sequence
  Description of Artificial Sequence: Synthetic oligonucleotide
ccgcaggaugcgcacaaua

SEQ ID NO: 2951637 - RNA, 19 nt, Artificial Sequence
  Description of Artificial Sequence: Synthetic oligonucleotide
ccgaagcccauacugcaau

SEQ ID NO: 2951638 - RNA, 19 nt, Artificial Sequence
  Description of Artificial Sequence: Synthetic oligonucleotide
gugcugugccacggcuguc

SEQ ID NO: 2951639 - RNA, 19 nt, Artificial Sequence
  Description of Artificial Sequence: Synthetic oligonucleotide
cggacacaguacucccauc

SEQ ID NO: 2951640 - RNA, 19 nt, Artificial Sequence
  Description of Artificial Sequence: Synthetic oligonucleotide
cccauacugcaaucugccu

SEQ ID NO: 2951641 - RNA, 19 nt, Artificial Sequence
  Description of Artificial Sequence: Synthetic oligonucleotide
gccgcagcaugcccuccaa

SEQ ID NO: 2951642 - RNA, 19 nt, Artificial Sequence
  Description of Artificial Sequence: Synthetic oligonucleotide
gccacaggaaugguugcuu

SEQ ID NO: 2951643 - RNA, 19 nt, Artificial Sequence
  Description of Artificial Sequence: Synthetic oligonucleotide
ccggacacaguacucccau

SEQ ID NO: 2951644 - RNA, 19 nt, Artificial Sequence
  Description of Artificial Sequence: Synthetic oligonucleotide
gcuggccgaagcccauacu

SEQ ID NO: 2951645 - RNA, 19 nt, Artificial Sequence
  Description of Artificial Sequence: Synthetic oligonucleotide
cagccuggccgggagguau

SEQ ID NO: 2951646 - RNA, 19 nt, Artificial Sequence
  Description of Artificial Sequence: Synthetic oligonucleotide
gcugugccacggcugucgu

SEQ ID NO: 2951647 - RNA, 19 nt, Artificial Sequence
  Description of Artificial Sequence: Synthetic oligonucleotide
ccacaggaaugguugcuuu

SEQ ID NO: 2951648 - RNA, 19 nt, Artificial Sequence
  Description of Artificial Sequence: Synthetic oligonucleotide
ccgggagguaucugucugu

SEQ ID NO: 2951649 - RNA, 19 nt, Artificial Sequence
  Description of Artificial Sequence: Synthetic oligonucleotide
ccuggccgggagguaucug

SEQ ID NO: 2951650 - RNA, 19 nt, Artificial Sequence
  Description of Artificial Sequence: Synthetic oligonucleotide
gcaugcccuccaaccaaua

SEQ ID NO: 2951651 - RNA, 19 nt, Artificial Sequence
  Description of Artificial Sequence: Synthetic oligonucleotide
cggugccgcaggaugcgca

SEQ ID NO: 2951652 - RNA, 19 nt, Artificial Sequence
  Description of Artificial Sequence: Synthetic oligonucleotide
ccuccucagugggguuggc

SEQ ID NO: 2951653 - RNA, 19 nt, Artificial Sequence
  Description of Artificial Sequence: Synthetic oligonucleotide
gggcugcacgccacaggaa

SEQ ID NO: 2951654 - RNA, 19 nt, Artificial Sequence
  Description of Artificial Sequence: Synthetic oligonucleotide
gcacgccacaggaaugguu

SEQ ID NO: 2951655 - RNA, 19 nt, Artificial Sequence
  Description of Artificial Sequence: Synthetic oligonucleotide
cagccucauccugcacaua

SEQ ID NO: 2951656 - RNA, 19 nt, Artificial Sequence
  Description of Artificial Sequence: Synthetic oligonucleotide
ccagguacaccuggucuuu

SEQ ID NO: 2951657 - RNA, 19 nt, Artificial Sequence
  Description of Artificial Sequence: Synthetic oligonucleotide
cgcagguagugagugccua

SEQ ID NO: 2951658 - RNA, 19 nt, Artificial Sequence
  Description of Artificial Sequence: Synthetic oligonucleotide
gccuggccgggagguaucu

SEQ ID NO: 2951659 - RNA, 19 nt, Artificial Sequence
  Description of Artificial Sequence: Synthetic oligonucleotide
gcgcagccuggugaauggu

SEQ ID NO: 2951660 - RNA, 19 nt, Artificial Sequence
  Description of Artificial Sequence: Synthetic oligonucleotide
cgccacaggaaugguugcu

SEQ ID NO: 2951661 - RNA, 19 nt, Artificial Sequence
  Description of Artificial Sequence: Synthetic oligonucleotide
ggcccuccucagugggguu

SEQ ID NO: 2951662 - RNA, 19 nt, Artificial Sequence
  Description of Artificial Sequence: Synthetic oligonucleotide
gccgcaggaugcgcacaau

SEQ ID NO: 2951663 - RNA, 19 nt, Artificial Sequence
  Description of Artificial Sequence: Synthetic oligonucleotide
aauauaacaacauaaaauu

SEQ ID NO: 2951664 - RNA, 19 nt, Artificial Sequence
  Description of Artificial Sequence: Synthetic oligonucleotide
uauaacaacauaaaauuga

SEQ ID NO: 2951665 - RNA, 19 nt, Artificial Sequence
  Description of Artificial Sequence: Synthetic oligonucleotide
acauaaaauugauugaugg

SEQ ID NO: 2951666 - RNA, 19 nt, Artificial Sequence
  Description of Artificial Sequence: Synthetic oligonucleotide
aauuccaccucccuguccc

SEQ ID NO: 2951667 - RNA, 19 nt, Artificial Sequence
  Description of Artificial Sequence: Synthetic oligonucleotide
uuuaauugugaaaauaagu

SEQ ID NO: 2951668 - RNA, 19 nt, Artificial Sequence
  Description of Artificial Sequence: Synthetic oligonucleotide
agaacagccaauguuaggc

SEQ ID NO: 2951669 - RNA, 19 nt, Artificial Sequence
  Description of Artificial Sequence: Synthetic oligonucleotide
ugaaaauaaguuuauugac

SEQ ID NO: 2951670 - RNA, 19 nt, Artificial Sequence
  Description of Artificial Sequence: Synthetic oligonucleotide
caucaagucaagaacagcc

SEQ ID NO: 2951671 - RNA, 19 nt, Artificial Sequence
  Description of Artificial Sequence: Synthetic oligonucleotide
auaaaauugauugauggcu

SEQ ID NO: 2951672 - RNA, 19 nt, Artificial Sequence
  Description of Artificial Sequence: Synthetic oligonucleotide
aguuuauugacaucuuguc

SEQ ID NO: 2951673 - RNA, 19 nt, Artificial Sequence
  Description of Artificial Sequence: Synthetic oligonucleotide
ucuauauucugauuggccu

SEQ ID NO: 2951674 - RNA, 19 nt, Artificial Sequence
  Description of Artificial Sequence: Synthetic oligonucleotide
ucucaucaagucaagaaca

SEQ ID NO: 2951675 - RNA, 19 nt, Artificial Sequence
  Description of Artificial Sequence: Synthetic oligonucleotide
gugaaaauaaguuuauuga

SEQ ID NO: 2951676 - RNA, 19 nt, Artificial Sequence
  Description of Artificial Sequence: Synthetic oligonucleotide
cauaaaauugauugauggc

SEQ ID NO: 2951677 - RNA, 19 nt, Artificial Sequence
  Description of Artificial Sequence: Synthetic oligonucleotide
ucaagaacagccaauguua

SEQ ID NO: 2951678 - RNA, 19 nt, Artificial Sequence
  Description of Artificial Sequence: Synthetic oligonucleotide
aauugugaaaauaaguuua

SEQ ID NO: 2951679 - RNA, 19 nt, Artificial Sequence
  Description of Artificial Sequence: Synthetic oligonucleotide
aggucgaagagccaggagg

SEQ ID NO: 2951680 - RNA, 19 nt, Artificial Sequence
  Description of Artificial Sequence: Synthetic oligonucleotide
aguggggaggcccacacgc

SEQ ID NO: 2951681 - RNA, 19 nt, Artificial Sequence
  Description of Artificial Sequence: Synthetic oligonucleotide
cuugucagcacugaggagg

SEQ ID NO: 2951682 - RNA, 19 nt, Artificial Sequence
  Description of Artificial Sequence: Synthetic oligonucleotide
uucucaucaagucaagaac

SEQ ID NO: 2951683 - RNA, 19 nt, Artificial Sequence
  Description of Artificial Sequence: Synthetic oligonucleotide
uucugauuggccuagcaca

SEQ ID NO: 2951684 - RNA, 19 nt, Artificial Sequence
  Description of Artificial Sequence: Synthetic oligonucleotide
acaaguugggguuacagga

SEQ ID NO: 2951685 - RNA, 19 nt, Artificial Sequence
  Description of Artificial Sequence: Synthetic oligonucleotide
uucuauauucugauuggcc

SEQ ID NO: 2951686 - RNA, 19 nt, Artificial Sequence
  Description of Artificial Sequence: Synthetic oligonucleotide
uaaguuuauugacaucuug

SEQ ID NO: 2951687 - RNA, 19 nt, Artificial Sequence
  Description of Artificial Sequence: Synthetic oligonucleotide
aaagaggucgaagagccag

SEQ ID NO: 2951688 - RNA, 19 nt, Artificial Sequence
  Description of Artificial Sequence: Synthetic oligonucleotide
agacaugccacgcagccac

SEQ ID NO: 2951689 - RNA, 19 nt, Artificial Sequence
  Description of Artificial Sequence: Synthetic oligonucleotide
gaaaauaaguuuauugaca

SEQ ID NO: 2951690 - RNA, 19 nt, Artificial Sequence
  Description of Artificial Sequence: Synthetic oligonucleotide
accacuguaccagagaacg

SEQ ID NO: 2951691 - RNA, 19 nt, Artificial Sequence
  Description of Artificial Sequence: Synthetic oligonucleotide
auucugauuggccuagcac

SEQ ID NO: 2951692 - RNA, 19 nt, Artificial Sequence
  Description of Artificial Sequence: Synthetic oligonucleotide
aaauugauugauggcuuac

SEQ ID NO: 2951693 - RNA, 19 nt, Artificial Sequence
  Description of Artificial Sequence: Synthetic oligonucleotide
aaguugggguuacaggagg

SEQ ID NO: 2951694 - RNA, 19 nt, Artificial Sequence
  Description of Artificial Sequence: Synthetic oligonucleotide
uacaaguugggguuacagg

SEQ ID NO: 2951695 - RNA, 19 nt, Artificial Sequence
  Description of Artificial Sequence: Synthetic oligonucleotide
auugacaucuugucagcac

SEQ ID NO: 2951696 - RNA, 19 nt, Artificial Sequence
  Description of Artificial Sequence: Synthetic oligonucleotide
auguuaggcaaagaggucg

SEQ ID NO: 2951697 - RNA, 19 nt, Artificial Sequence
  Description of Artificial Sequence: Synthetic oligonucleotide
acaacauaaaauugauuga

SEQ ID NO: 2951698 - RNA, 19 nt, Artificial Sequence
  Description of Artificial Sequence: Synthetic oligonucleotide
auugauggcuuacaaguug

SEQ ID NO: 2951699 - RNA, 19 nt, Artificial Sequence
  Description of Artificial Sequence: Synthetic oligonucleotide
gaggcagucaggcagacac

SEQ ID NO: 2951700 - RNA, 19 nt, Artificial Sequence
  Description of Artificial Sequence: Synthetic oligonucleotide
uaauugugaaaauaaguuu

SEQ ID NO: 2951701 - RNA, 19 nt, Artificial Sequence
  Description of Artificial Sequence: Synthetic oligonucleotide
uaggcaaagaggucgaaga

SEQ ID NO: 2951702 - RNA, 19 nt, Artificial Sequence
  Description of Artificial Sequence: Synthetic oligonucleotide
aagaacagccaauguuagg

SEQ ID NO: 2951703 - RNA, 19 nt, Artificial Sequence
  Description of Artificial Sequence: Synthetic oligonucleotide
auuggccuagcacacuccc

SEQ ID NO: 2951704 - RNA, 19 nt, Artificial Sequence
  Description of Artificial Sequence: Synthetic oligonucleotide
ucugccuucuauauucuga

SEQ ID NO: 2951705 - RNA, 19 nt, Artificial Sequence
  Description of Artificial Sequence: Synthetic oligonucleotide
aaguuuauugacaucuugu

SEQ ID NO: 2951706 - RNA, 19 nt, Artificial Sequence
  Description of Artificial Sequence: Synthetic oligonucleotide
caucuugucagcacugagg

SEQ ID NO: 2951707 - RNA, 19 nt, Artificial Sequence
  Description of Artificial Sequence: Synthetic oligonucleotide
auggcuuacaaguuggggu

SEQ ID NO: 2951708 - RNA, 19 nt, Artificial Sequence
  Description of Artificial Sequence: Synthetic oligonucleotide
agaggacccacccuacacc

SEQ ID NO: 2951709 - RNA, 19 nt, Artificial Sequence
  Description of Artificial Sequence: Synthetic oligonucleotide
cagagaacggggcugaggg

SEQ ID NO: 2951710 - RNA, 19 nt, Artificial Sequence
  Description of Artificial Sequence: Synthetic oligonucleotide
aacauaaaauugauugaug

SEQ ID NO: 2951711 - RNA, 19 nt, Artificial Sequence
  Description of Artificial Sequence: Synthetic oligonucleotide
aagucaagaacagccaaug

SEQ ID NO: 2951712 - RNA, 19 nt, Artificial Sequence
  Description of Artificial Sequence: Synthetic oligonucleotide
aucuugucagcacugagga

SEQ ID NO: 2951713 - RNA, 19 nt, Artificial Sequence
  Description of Artificial Sequence: Synthetic oligonucleotide
uaaaauugauugauggcuu

SEQ ID NO: 2951714 - RNA, 19 nt, Artificial Sequence
  Description of Artificial Sequence: Synthetic oligonucleotide
uugacaucuugucagcacu

SEQ ID NO: 2951715 - RNA, 19 nt, Artificial Sequence
  Description of Artificial Sequence: Synthetic oligonucleotide
auauaacaacauaaaauug

SEQ ID NO: 2951716 - RNA, 19 nt, Artificial Sequence
  Description of Artificial Sequence: Synthetic oligonucleotide
uauauucugauuggccuag

SEQ ID NO: 2951717 - RNA, 19 nt, Artificial Sequence
  Description of Artificial Sequence: Synthetic oligonucleotide
uguagcuucucaucaaguc

SEQ ID NO: 2951718 - RNA, 19 nt, Artificial Sequence
  Description of Artificial Sequence: Synthetic oligonucleotide
uccucugccuucuauauuc

SEQ ID NO: 2951719 - RNA, 19 nt, Artificial Sequence
  Description of Artificial Sequence: Synthetic oligonucleotide
aggcagacaccacuguacc

SEQ ID NO: 2951720 - RNA, 19 nt, Artificial Sequence
  Description of Artificial Sequence: Synthetic oligonucleotide
aauguuaggcaaagagguc

SEQ ID NO: 2951721 - RNA, 19 nt, Artificial Sequence
  Description of Artificial Sequence: Synthetic oligonucleotide
ucaagucaagaacagccaa

SEQ ID NO: 2951722 - RNA, 19 nt, Artificial Sequence
  Description of Artificial Sequence: Synthetic oligonucleotide
cucccugucccuaaagucc

SEQ ID NO: 2951723 - RNA, 19 nt, Artificial Sequence
  Description of Artificial Sequence: Synthetic oligonucleotide
aaaauugauugauggcuua

SEQ ID NO: 2951724 - RNA, 19 nt, Artificial Sequence
  Description of Artificial Sequence: Synthetic oligonucleotide
acugaggaggaaaaguggg

SEQ ID NO: 2951725 - RNA, 19 nt, Artificial Sequence
  Description of Artificial Sequence: Synthetic oligonucleotide
ucugauuggccuagcacac

SEQ ID NO: 2951726 - RNA, 19 nt, Artificial Sequence
  Description of Artificial Sequence: Synthetic oligonucleotide
gccaauguuaggcaaagag

SEQ ID NO: 2951727 - RNA, 19 nt, Artificial Sequence
  Description of Artificial Sequence: Synthetic oligonucleotide
gauggcuuacaaguugggg

SEQ ID NO: 2951728 - RNA, 19 nt, Artificial Sequence
  Description of Artificial Sequence: Synthetic oligonucleotide
cucaucaagucaagaacag

SEQ ID NO: 2951729 - RNA, 19 nt, Artificial Sequence
  Description of Artificial Sequence: Synthetic oligonucleotide
uuacaaguugggguuacag

SEQ ID NO: 2951730 - RNA, 19 nt, Artificial Sequence
  Description of Artificial Sequence: Synthetic oligonucleotide
caauguuaggcaaagaggu

SEQ ID NO: 2951731 - RNA, 19 nt, Artificial Sequence
  Description of Artificial Sequence: Synthetic oligonucleotide
ccaauguuaggcaaagagg

SEQ ID NO: 2951732 - RNA, 19 nt, Artificial Sequence
  Description of Artificial Sequence: Synthetic oligonucleotide
caaggggcaauauaacaac

SEQ ID NO: 2951733 - RNA, 19 nt, Artificial Sequence
  Description of Artificial Sequence: Synthetic oligonucleotide
aauugauugauggcuuaca

SEQ ID NO: 2951734 - RNA, 19 nt, Artificial Sequence
  Description of Artificial Sequence: Synthetic oligonucleotide
ugucccuaaaguccucugc

SEQ ID NO: 2951735 - RNA, 19 nt, Artificial Sequence
  Description of Artificial Sequence: Synthetic oligonucleotide
caagaacagccaauguuag

SEQ ID NO: 2951736 - RNA, 19 nt, Artificial Sequence
  Description of Artificial Sequence: Synthetic oligonucleotide
auugauugauggcuuacaa

SEQ ID NO: 2951737 - RNA, 19 nt, Artificial Sequence
  Description of Artificial Sequence: Synthetic oligonucleotide
uauucugauuggccuagca

SEQ ID NO: 2951738 - RNA, 19 nt, Artificial Sequence
  Description of Artificial Sequence: Synthetic oligonucleotide
cugaggaggaaaagugggg

SEQ ID NO: 2951739 - RNA, 19 nt, Artificial Sequence
  Description of Artificial Sequence: Synthetic oligonucleotide
uguuaggcaaagaggucga

SEQ ID NO: 2951740 - RNA, 19 nt, Artificial Sequence
  Description of Artificial Sequence: Synthetic oligonucleotide
uuacaggaggcagucaggc

SEQ ID NO: 2951741 - RNA, 19 nt, Artificial Sequence
  Description of Artificial Sequence: Synthetic oligonucleotide
uuaggcaaagaggucgaag

SEQ ID NO: 2951742 - RNA, 19 nt, Artificial Sequence
  Description of Artificial Sequence: Synthetic oligonucleotide
ugauggcuuacaaguuggg

SEQ ID NO: 2951743 - RNA, 19 nt, Artificial Sequence
  Description of Artificial Sequence: Synthetic oligonucleotide
gguuacaggaggcagucag

SEQ ID NO: 2951744 - RNA, 19 nt, Artificial Sequence
  Description of Artificial Sequence: Synthetic oligonucleotide
agcucuggaggucagacau

SEQ ID NO: 2951745 - RNA, 19 nt, Artificial Sequence
  Description of Artificial Sequence: Synthetic oligonucleotide
auaacaacauaaaauugau

SEQ ID NO: 2951746 - RNA, 19 nt, Artificial Sequence
  Description of Artificial Sequence: Synthetic oligonucleotide
gccuucuauauucugauug

SEQ ID NO: 2951747 - RNA, 19 nt, Artificial Sequence
  Description of Artificial Sequence: Synthetic oligonucleotide
aacagccaauguuaggcaa

SEQ ID NO: 2951748 - RNA, 19 nt, Artificial Sequence
  Description of Artificial Sequence: Synthetic oligonucleotide
uggaggucagacaugccac

SEQ ID NO: 2951749 - RNA, 19 nt, Artificial Sequence
  Description of Artificial Sequence: Synthetic oligonucleotide
guagcuucucaucaaguca

SEQ ID NO: 2951750 - RNA, 19 nt, Artificial Sequence
  Description of Artificial Sequence: Synthetic oligonucleotide
ugacaucuugucagcacug

SEQ ID NO: 2951751 - RNA, 19 nt, Artificial Sequence
  Description of Artificial Sequence: Synthetic oligonucleotide
ugauuggccuagcacacuc

SEQ ID NO: 2951752 - RNA, 19 nt, Artificial Sequence
  Description of Artificial Sequence: Synthetic oligonucleotide
ucagcacugaggaggaaaa

SEQ ID NO: 2951753 - RNA, 19 nt, Artificial Sequence
  Description of Artificial Sequence: Synthetic oligonucleotide
caaguugggguuacaggag

SEQ ID NO: 2951754 - RNA, 19 nt, Artificial Sequence
  Description of Artificial Sequence: Synthetic oligonucleotide
ucaucaagucaagaacagc

SEQ ID NO: 2951755 - RNA, 19 nt, Artificial Sequence
  Description of Artificial Sequence: Synthetic oligonucleotide
cuucucaucaagucaagaa

SEQ ID NO: 2951756 - RNA, 19 nt, Artificial Sequence
  Description of Artificial Sequence: Synthetic oligonucleotide
aggcaaagaggucgaagag

SEQ ID NO: 2951757 - RNA, 19 nt, Artificial Sequence
  Description of Artificial Sequence: Synthetic oligonucleotide
cuucuauauucugauuggc

SEQ ID NO: 2951758 - RNA, 19 nt, Artificial Sequence
  Description of Artificial Sequence: Synthetic oligonucleotide
acaucuugucagcacugag

SEQ ID NO: 2951759 - RNA, 19 nt, Artificial Sequence
  Description of Artificial Sequence: Synthetic oligonucleotide
gcaaagaggucgaagagcc

SEQ ID NO: 2951760 - RNA, 19 nt, Artificial Sequence
  Description of Artificial Sequence: Synthetic oligonucleotide
aaaguccucugccuucuau

SEQ ID NO: 2951761 - RNA, 19 nt, Artificial Sequence
  Description of Artificial Sequence: Synthetic oligonucleotide
gagaacggggcugagggug

SEQ ID NO: 2951762 - RNA, 19 nt, Artificial Sequence
  Description of Artificial Sequence: Synthetic oligonucleotide
ccuucuauauucugauugg

SEQ ID NO: 2951763 - RNA, 19 nt, Artificial Sequence
  Description of Artificial Sequence: Synthetic oligonucleotide
acaccacuguaccagagaa

SEQ ID NO: 2951764 - RNA, 19 nt, Artificial Sequence
  Description of Artificial Sequence: Synthetic oligonucleotide
agaauuccaccucccuguc

SEQ ID NO: 2951765 - RNA, 19 nt, Artificial Sequence
  Description of Artificial Sequence: Synthetic oligonucleotide
uggggaggcccacacgcgg

SEQ ID NO: 2951766 - RNA, 19 nt, Artificial Sequence
  Description of Artificial Sequence: Synthetic oligonucleotide
caggcagacaccacuguac

SEQ ID NO: 2951767 - RNA, 19 nt, Artificial Sequence
  Description of Artificial Sequence: Synthetic oligonucleotide
uugucagcacugaggagga

SEQ ID NO: 2951768 - RNA, 19 nt, Artificial Sequence
  Description of Artificial Sequence: Synthetic oligonucleotide
cucuggaggucagacaugc

SEQ ID NO: 2951769 - RNA, 19 nt, Artificial Sequence
  Description of Artificial Sequence: Synthetic oligonucleotide
uggccuagcacacucccaa

SEQ ID NO: 2951770 - RNA, 19 nt, Artificial Sequence
  Description of Artificial Sequence: Synthetic oligonucleotide
cucccaacccuucugcagc

SEQ ID NO: 2951771 - RNA, 19 nt, Artificial Sequence
  Description of Artificial Sequence: Synthetic oligonucleotide
acaaggggcaauauaacaa

SEQ ID NO: 2951772 - RNA, 19 nt, Artificial Sequence
  Description of Artificial Sequence: Synthetic oligonucleotide
aaguccucugccuucuaua

SEQ ID NO: 2951773 - RNA, 19 nt, Artificial Sequence
  Description of Artificial Sequence: Synthetic oligonucleotide
agcacugaggaggaaaagu

SEQ ID NO: 2951774 - RNA, 19 nt, Artificial Sequence
  Description of Artificial Sequence: Synthetic oligonucleotide
gcaauauaacaacauaaaa

SEQ ID NO: 2951775 - RNA, 19 nt, Artificial Sequence
  Description of Artificial Sequence: Synthetic oligonucleotide
aagaggucgaagagccagg

SEQ ID NO: 2951776 - RNA, 19 nt, Artificial Sequence
  Description of Artificial Sequence: Synthetic oligonucleotide
cacaaggggcaauauaaca

SEQ ID NO: 2951777 - RNA, 19 nt, Artificial Sequence
  Description of Artificial Sequence: Synthetic oligonucleotide
uggcuuacaaguugggguu

SEQ ID NO: 2951778 - RNA, 19 nt, Artificial Sequence
  Description of Artificial Sequence: Synthetic oligonucleotide
uugggguuacaggaggcag

SEQ ID NO: 2951779 - RNA, 19 nt, Artificial Sequence
  Description of Artificial Sequence: Synthetic oligonucleotide
aguugggguuacaggaggc

SEQ ID NO: 2951780 - RNA, 19 nt, Artificial Sequence
  Description of Artificial Sequence: Synthetic oligonucleotide
agucaagaacagccaaugu

SEQ ID NO: 2951781 - RNA, 19 nt, Artificial Sequence
  Description of Artificial Sequence: Synthetic oligonucleotide
aagagccaggagguucccc

SEQ ID NO: 2951782 - RNA, 19 nt, Artificial Sequence
  Description of Artificial Sequence: Synthetic oligonucleotide
auugugaaaauaaguuuau

SEQ ID NO: 2951783 - RNA, 19 nt, Artificial Sequence
  Description of Artificial Sequence: Synthetic oligonucleotide
agccacgggaggcagagga

SEQ ID NO: 2951784 - RNA, 19 nt, Artificial Sequence
  Description of Artificial Sequence: Synthetic oligonucleotide
ucccugucccuaaaguccu

SEQ ID NO: 2951785 - RNA, 19 nt, Artificial Sequence
  Description of Artificial Sequence: Synthetic oligonucleotide
gguguagcuucucaucaag

SEQ ID NO: 2951786 - RNA, 19 nt, Artificial Sequence
  Description of Artificial Sequence: Synthetic oligonucleotide
aaggggcaauauaacaaca

SEQ ID NO: 2951787 - RNA, 19 nt, Artificial Sequence
  Description of Artificial Sequence: Synthetic oligonucleotide
ugccacgcagccacgggag

SEQ ID NO: 2951788 - RNA, 19 nt, Artificial Sequence
  Description of Artificial Sequence: Synthetic oligonucleotide
gaacagccaauguuaggca

SEQ ID NO: 2951789 - RNA, 19 nt, Artificial Sequence
  Description of Artificial Sequence: Synthetic oligonucleotide
ucuugucagcacugaggag

SEQ ID NO: 2951790 - RNA, 19 nt, Artificial Sequence
  Description of Artificial Sequence: Synthetic oligonucleotide
cuggaggucagacaugcca

SEQ ID NO: 2951791 - RNA, 19 nt, Artificial Sequence
  Description of Artificial Sequence: Synthetic oligonucleotide
guuacaggaggcagucagg

SEQ ID NO: 2951792 - RNA, 19 nt, Artificial Sequence
  Description of Artificial Sequence: Synthetic oligonucleotide
ugggguuacaggaggcagu

SEQ ID NO: 2951793 - RNA, 19 nt, Artificial Sequence
  Description of Artificial Sequence: Synthetic oligonucleotide
ucaggcagacaccacugua

SEQ ID NO: 2951794 - RNA, 19 nt, Artificial Sequence
  Description of Artificial Sequence: Synthetic oligonucleotide
aguccucugccuucuauau

SEQ ID NO: 2951795 - RNA, 19 nt, Artificial Sequence
  Description of Artificial Sequence: Synthetic oligonucleotide
gaauuccaccucccugucc

SEQ ID NO: 2951796 - RNA, 19 nt, Artificial Sequence
  Description of Artificial Sequence: Synthetic oligonucleotide
ucccuaaaguccucugccu

SEQ ID NO: 2951797 - RNA, 19 nt, Artificial Sequence
  Description of Artificial Sequence: Synthetic oligonucleotide
ggucagacaugccacgcag

SEQ ID NO: 2951798 - RNA, 19 nt, Artificial Sequence
  Description of Artificial Sequence: Synthetic oligonucleotide
aucaagucaagaacagcca

SEQ ID NO: 2951799 - RNA, 19 nt, Artificial Sequence
  Description of Artificial Sequence: Synthetic oligonucleotide
cagccagaauuccaccucc

SEQ ID NO: 2951800 - RNA, 19 nt, Artificial Sequence
  Description of Artificial Sequence: Synthetic oligonucleotide
acccuacaccuccccagcc

SEQ ID NO: 2951801 - RNA, 19 nt, Artificial Sequence
  Description of Artificial Sequence: Synthetic oligonucleotide
aacccuucugcagcuccgg

SEQ ID NO: 2951802 - RNA, 19 nt, Artificial Sequence
  Description of Artificial Sequence: Synthetic oligonucleotide
ucgaagagccaggagguuc

SEQ ID NO: 2951803 - RNA, 19 nt, Artificial Sequence
  Description of Artificial Sequence: Synthetic oligonucleotide
gacaccacuguaccagaga

SEQ ID NO: 2951804 - RNA, 19 nt, Artificial Sequence
  Description of Artificial Sequence: Synthetic oligonucleotide
auauucugauuggccuagc

SEQ ID NO: 2951805 - RNA, 19 nt, Artificial Sequence
  Description of Artificial Sequence: Synthetic oligonucleotide
uucugcagcuccgggcugg

SEQ ID NO: 2951806 - RNA, 19 nt, Artificial Sequence
  Description of Artificial Sequence: Synthetic oligonucleotide
ggggcgugagcucuggagg

SEQ ID NO: 2951807 - RNA, 19 nt, Artificial Sequence
  Description of Artificial Sequence: Synthetic oligonucleotide
caacccuucugcagcuccg

SEQ ID NO: 2951808 - RNA, 19 nt, Artificial Sequence
  Description of Artificial Sequence: Synthetic oligonucleotide
cuauauucugauuggccua

SEQ ID NO: 2951809 - RNA, 19 nt, Artificial Sequence
  Description of Artificial Sequence: Synthetic oligonucleotide
cagaggacccacccuacac

SEQ ID NO: 2951810 - RNA, 19 nt, Artificial Sequence
  Description of Artificial Sequence: Synthetic oligonucleotide
gucaagaacagccaauguu

SEQ ID NO: 2951811 - RNA, 19 nt, Artificial Sequence
  Description of Artificial Sequence: Synthetic oligonucleotide
ggcaauauaacaacauaaa

SEQ ID NO: 2951812 - RNA, 19 nt, Artificial Sequence
  Description of Artificial Sequence: Synthetic oligonucleotide
aacggggcugagggugucc

SEQ ID NO: 2951813 - RNA, 19 nt, Artificial Sequence
  Description of Artificial Sequence: Synthetic oligonucleotide
ggcaaagaggucgaagagc

SEQ ID NO: 2951814 - RNA, 19 nt, Artificial Sequence
  Description of Artificial Sequence: Synthetic oligonucleotide
ggaggucagacaugccacg

SEQ ID NO: 2951815 - RNA, 19 nt, Artificial Sequence
  Description of Artificial Sequence: Synthetic oligonucleotide
gaggucgaagagccaggag

SEQ ID NO: 2951816 - RNA, 19 nt, Artificial Sequence
  Description of Artificial Sequence: Synthetic oligonucleotide
cagaauuccaccucccugu

SEQ ID NO: 2951817 - RNA, 19 nt, Artificial Sequence
  Description of Artificial Sequence: Synthetic oligonucleotide
gaggucagacaugccacgc

SEQ ID NO: 2951818 - RNA, 19 nt, Artificial Sequence
  Description of Artificial Sequence: Synthetic oligonucleotide
uuggccuagcacacuccca

SEQ ID NO: 2951819 - RNA, 19 nt, Artificial Sequence
  Description of Artificial Sequence: Synthetic oligonucleotide
gggcaauauaacaacauaa

SEQ ID NO: 2951820 - RNA, 19 nt, Artificial Sequence
  Description of Artificial Sequence: Synthetic oligonucleotide
caacauaaaauugauugau

SEQ ID NO: 2951821 - RNA, 19 nt, Artificial Sequence
  Description of Artificial Sequence: Synthetic oligonucleotide
ucuggaggucagacaugcc

SEQ ID NO: 2951822 - RNA, 19 nt, Artificial Sequence
  Description of Artificial Sequence: Synthetic oligonucleotide
gauuggccuagcacacucc

SEQ ID NO: 2951823 - RNA, 19 nt, Artificial Sequence
  Description of Artificial Sequence: Synthetic oligonucleotide
gcacugaggaggaaaagug

SEQ ID NO: 2951824 - RNA, 19 nt, Artificial Sequence
  Description of Artificial Sequence: Synthetic oligonucleotide
caugccacgcagccacggg

SEQ ID NO: 2951825 - RNA, 19 nt, Artificial Sequence
  Description of Artificial Sequence: Synthetic oligonucleotide
aggucagacaugccacgca

SEQ ID NO: 2951826 - RNA, 19 nt, Artificial Sequence
  Description of Artificial Sequence: Synthetic oligonucleotide
ggacccacccuacaccucc

SEQ ID NO: 2951827 - RNA, 19 nt, Artificial Sequence
  Description of Artificial Sequence: Synthetic oligonucleotide
agucaggcagacaccacug

SEQ ID NO: 2951828 - RNA, 19 nt, Artificial Sequence
  Description of Artificial Sequence: Synthetic oligonucleotide
agccagaauuccaccuccc

SEQ ID NO: 2951829 - RNA, 19 nt, Artificial Sequence
  Description of Artificial Sequence: Synthetic oligonucleotide
ccuagcacacucccaaccc

SEQ ID NO: 2951830 - RNA, 19 nt, Artificial Sequence
  Description of Artificial Sequence: Synthetic oligonucleotide
cacacucccaacccuucug

SEQ ID NO: 2951831 - RNA, 19 nt, Artificial Sequence
  Description of Artificial Sequence: Synthetic oligonucleotide
uagcacacucccaacccuu

SEQ ID NO: 2951832 - RNA, 19 nt, Artificial Sequence
  Description of Artificial Sequence: Synthetic oligonucleotide
aggcagaggacccacccua

SEQ ID NO: 2951833 - RNA, 19 nt, Artificial Sequence
  Description of Artificial Sequence: Synthetic oligonucleotide
acccacccuacaccucccc

SEQ ID NO: 2951834 - RNA, 19 nt, Artificial Sequence
  Description of Artificial Sequence: Synthetic oligonucleotide
cagccaauguuaggcaaag

SEQ ID NO: 2951835 - RNA, 19 nt, Artificial Sequence
  Description of Artificial Sequence: Synthetic oligonucleotide
ggaggcagaggacccaccc

SEQ ID NO: 2951836 - RNA, 19 nt, Artificial Sequence
  Description of Artificial Sequence: Synthetic oligonucleotide
augccacgcagccacggga

SEQ ID NO: 2951837 - RNA, 19 nt, Artificial Sequence
  Description of Artificial Sequence: Synthetic oligonucleotide
cccacaaggggcaauauaa

SEQ ID NO: 2951838 - RNA, 19 nt, Artificial Sequence
  Description of Artificial Sequence: Synthetic oligonucleotide
cacccuacaccuccccagc

SEQ ID NO: 2951839 - RNA, 19 nt, Artificial Sequence
  Description of Artificial Sequence: Synthetic oligonucleotide
caccacuguaccagagaac

SEQ ID NO: 2951840 - RNA, 19 nt, Artificial Sequence
  Description of Artificial Sequence: Synthetic oligonucleotide
cucugccuucuauauucug

SEQ ID NO: 2951841 - RNA, 19 nt, Artificial Sequence
  Description of Artificial Sequence: Synthetic oligonucleotide
gacaucuugucagcacuga

SEQ ID NO: 2951842 - RNA, 19 nt, Artificial Sequence
  Description of Artificial Sequence: Synthetic oligonucleotide
uacaccuccccagccagaa

SEQ ID NO: 2951843 - RNA, 19 nt, Artificial Sequence
  Description of Artificial Sequence: Synthetic oligonucleotide
acaugccacgcagccacgg

SEQ ID NO: 2951844 - RNA, 19 nt, Artificial Sequence
  Description of Artificial Sequence: Synthetic oligonucleotide
aggggcaauauaacaacau

SEQ ID NO: 2951845 - RNA, 19 nt, Artificial Sequence
  Description of Artificial Sequence: Synthetic oligonucleotide
cucccgccccacaaggggc

SEQ ID NO: 2951846 - RNA, 19 nt, Artificial Sequence
  Description of Artificial Sequence: Synthetic oligonucleotide
auaaguuuauugacaucuu

SEQ ID NO: 2951847 - RNA, 19 nt, Artificial Sequence
  Description of Artificial Sequence: Synthetic oligonucleotide
gaggacccacccuacaccu

SEQ ID NO: 2951848 - RNA, 19 nt, Artificial Sequence
  Description of Artificial Sequence: Synthetic oligonucleotide
agagaacggggcugagggu

SEQ ID NO: 2951849 - RNA, 19 nt, Artificial Sequence
  Description of Artificial Sequence: Synthetic oligonucleotide
ccagaauuccaccucccug

SEQ ID NO: 2951850 - RNA, 19 nt, Artificial Sequence
  Description of Artificial Sequence: Synthetic oligonucleotide
agaggucgaagagccagga

SEQ ID NO: 2951851 - RNA, 19 nt, Artificial Sequence
  Description of Artificial Sequence: Synthetic oligonucleotide
ucccaacccuucugcagcu

SEQ ID NO: 2951852 - RNA, 19 nt, Artificial Sequence
  Description of Artificial Sequence: Synthetic oligonucleotide
gccuagcacacucccaacc

SEQ ID NO: 2951853 - RNA, 19 nt, Artificial Sequence
  Description of Artificial Sequence: Synthetic oligonucleotide
aggcagucaggcagacacc

SEQ ID NO: 2951854 - RNA, 19 nt, Artificial Sequence
  Description of Artificial Sequence: Synthetic oligonucleotide
agcacacucccaacccuuc

SEQ ID NO: 2951855 - RNA, 19 nt, Artificial Sequence
  Description of Artificial Sequence: Synthetic oligonucleotide
ccuaaaguccucugccuuc

SEQ ID NO: 2951856 - RNA, 19 nt, Artificial Sequence
  Description of Artificial Sequence: Synthetic oligonucleotide
gagcucuggaggucagaca

SEQ ID NO: 2951857 - RNA, 19 nt, Artificial Sequence
  Description of Artificial Sequence: Synthetic oligonucleotide
acagccaauguuaggcaaa

SEQ ID NO: 2951858 - RNA, 19 nt, Artificial Sequence
  Description of Artificial Sequence: Synthetic oligonucleotide
gucagcacugaggaggaaa

SEQ ID NO: 2951859 - RNA, 19 nt, Artificial Sequence
  Description of Artificial Sequence: Synthetic oligonucleotide
ucccgccccacaaggggca

SEQ ID NO: 2951860 - RNA, 19 nt, Artificial Sequence
  Description of Artificial Sequence: Synthetic oligonucleotide
cgaagagccaggagguucc

SEQ ID NO: 2951861 - RNA, 19 nt, Artificial Sequence
  Description of Artificial Sequence: Synthetic oligonucleotide
ggggcaauauaacaacaua

SEQ ID NO: 2951862 - RNA, 19 nt, Artificial Sequence
  Description of Artificial Sequence: Synthetic oligonucleotide
gcgguguagcuucucauca

SEQ ID NO: 2951863 - RNA, 19 nt, Artificial Sequence
  Description of Artificial Sequence: Synthetic oligonucleotide
accuccccagccagaauuc

SEQ ID NO: 2951864 - RNA, 19 nt, Artificial Sequence
  Description of Artificial Sequence: Synthetic oligonucleotide
gucagacaugccacgcagc

SEQ ID NO: 2951865 - RNA, 19 nt, Artificial Sequence
  Description of Artificial Sequence: Synthetic oligonucleotide
guugggguuacaggaggca

SEQ ID NO: 2951866 - RNA, 19 nt, Artificial Sequence
  Description of Artificial Sequence: Synthetic oligonucleotide
ugccuucuauauucugauu

SEQ ID NO: 2951867 - RNA, 19 nt, Artificial Sequence
  Description of Artificial Sequence: Synthetic oligonucleotide
caagucaagaacagccaau

SEQ ID NO: 2951868 - RNA, 19 nt, Artificial Sequence
  Description of Artificial Sequence: Synthetic oligonucleotide
ccacaaggggcaauauaac

SEQ ID NO: 2951869 - RNA, 19 nt, Artificial Sequence
  Description of Artificial Sequence: Synthetic oligonucleotide
ccuacaccuccccagccag

SEQ ID NO: 2951870 - RNA, 19 nt, Artificial Sequence
  Description of Artificial Sequence: Synthetic oligonucleotide
gacaugccacgcagccacg

SEQ ID NO: 2951871 - RNA, 19 nt, Artificial Sequence
  Description of Artificial Sequence: Synthetic oligonucleotide
aggaggcagucaggcagac

SEQ ID NO: 2951872 - RNA, 19 nt, Artificial Sequence
  Description of Artificial Sequence: Synthetic oligonucleotide
ccaacccuucugcagcucc

SEQ ID NO: 2951873 - RNA, 19 nt, Artificial Sequence
  Description of Artificial Sequence: Synthetic oligonucleotide
uaaaguccucugccuucua

SEQ ID NO: 2951874 - RNA, 19 nt, Artificial Sequence
  Description of Artificial Sequence: Synthetic oligonucleotide
gauugauggcuuacaaguu

SEQ ID NO: 2951875 - RNA, 19 nt, Artificial Sequence
  Description of Artificial Sequence: Synthetic oligonucleotide
ccucccugucccuaaaguc

SEQ ID NO: 2951876 - RNA, 19 nt, Artificial Sequence
  Description of Artificial Sequence: Synthetic oligonucleotide
gaagagccaggagguuccc

SEQ ID NO: 2951877 - RNA, 19 nt, Artificial Sequence
  Description of Artificial Sequence: Synthetic oligonucleotide
caaagaggucgaagagcca

SEQ ID NO: 2951878 - RNA, 19 nt, Artificial Sequence
  Description of Artificial Sequence: Synthetic oligonucleotide
ccacccuacaccuccccag

SEQ ID NO: 2951879 - RNA, 19 nt, Artificial Sequence
  Description of Artificial Sequence: Synthetic oligonucleotide
guggggaggcccacacgcg

SEQ ID NO: 2951880 - RNA, 19 nt, Artificial Sequence
  Description of Artificial Sequence: Synthetic oligonucleotide
ggcagucaggcagacacca

SEQ ID NO: 2951881 - RNA, 19 nt, Artificial Sequence
  Description of Artificial Sequence: Synthetic oligonucleotide
cagcacugaggaggaaaag

SEQ ID NO: 2951882 - RNA, 19 nt, Artificial Sequence
  Description of Artificial Sequence: Synthetic oligonucleotide
ggaguggggaggcccacac

SEQ ID NO: 2951883 - RNA, 19 nt, Artificial Sequence
  Description of Artificial Sequence: Synthetic oligonucleotide
cugccuucuauauucugau

SEQ ID NO: 2951884 - RNA, 19 nt, Artificial Sequence
  Description of Artificial Sequence: Synthetic oligonucleotide
ccacuguaccagagaacgg

SEQ ID NO: 2951885 - RNA, 19 nt, Artificial Sequence
  Description of Artificial Sequence: Synthetic oligonucleotide
ccacacgcgguguagcuuc

SEQ ID NO: 2951886 - RNA, 19 nt, Artificial Sequence
  Description of Artificial Sequence: Synthetic oligonucleotide
cuccccagccagaauucca

SEQ ID NO: 2951887 - RNA, 19 nt, Artificial Sequence
  Description of Artificial Sequence: Synthetic oligonucleotide
caggaggcagucaggcaga

SEQ ID NO: 2951888 - RNA, 19 nt, Artificial Sequence
  Description of Artificial Sequence: Synthetic oligonucleotide
cagucaggcagacaccacu

SEQ ID NO: 2951889 - RNA, 19 nt, Artificial Sequence
  Description of Artificial Sequence: Synthetic oligonucleotide
ggcugagggugucccaccc

SEQ ID NO: 2951890 - RNA, 19 nt, Artificial Sequence
  Description of Artificial Sequence: Synthetic oligonucleotide
ccucccgccccacaagggg

SEQ ID NO: 2951891 - RNA, 19 nt, Artificial Sequence
  Description of Artificial Sequence: Synthetic oligonucleotide
cacgcgguguagcuucuca

SEQ ID NO: 2951892 - RNA, 19 nt, Artificial Sequence
  Description of Artificial Sequence: Synthetic oligonucleotide
gcagccacgggaggcagag

SEQ ID NO: 2951893 - RNA, 19 nt, Artificial Sequence
  Description of Artificial Sequence: Synthetic oligonucleotide
agaacggggcugagggugu

SEQ ID NO: 2951894 - RNA, 19 nt, Artificial Sequence
  Description of Artificial Sequence: Synthetic oligonucleotide
ccagccagaauuccaccuc

SEQ ID NO: 2951895 - RNA, 19 nt, Artificial Sequence
  Description of Artificial Sequence: Synthetic oligonucleotide
cuaaaguccucugccuucu

SEQ ID NO: 2951896 - RNA, 19 nt, Artificial Sequence
  Description of Artificial Sequence: Synthetic oligonucleotide
cuuacaaguugggguuaca

SEQ ID NO: 2951897 - RNA, 19 nt, Artificial Sequence
  Description of Artificial Sequence: Synthetic oligonucleotide
gaggcagaggacccacccu

SEQ ID NO: 2951898 - RNA, 19 nt, Artificial Sequence
  Description of Artificial Sequence: Synthetic oligonucleotide
gggguuacaggaggcaguc

SEQ ID NO: 2951899 - RNA, 19 nt, Artificial Sequence
  Description of Artificial Sequence: Synthetic oligonucleotide
ccacgggaggcagaggacc

SEQ ID NO: 2951900 - RNA, 19 nt, Artificial Sequence
  Description of Artificial Sequence: Synthetic oligonucleotide
ggcagacaccacuguacca

SEQ ID NO: 2951901 - RNA, 19 nt, Artificial Sequence
  Description of Artificial Sequence: Synthetic oligonucleotide
agccaauguuaggcaaaga

SEQ ID NO: 2951902 - RNA, 19 nt, Artificial Sequence
  Description of Artificial Sequence: Synthetic oligonucleotide
gcuuacaaguugggguuac

SEQ ID NO: 2951903 - RNA, 19 nt, Artificial Sequence
  Description of Artificial Sequence: Synthetic oligonucleotide
aggacccacccuacaccuc

SEQ ID NO: 2951904 - RNA, 19 nt, Artificial Sequence
  Description of Artificial Sequence: Synthetic oligonucleotide
ccagagaacggggcugagg

SEQ ID NO: 2951905 - RNA, 19 nt, Artificial Sequence
  Description of Artificial Sequence: Synthetic oligonucleotide
ggucgaagagccaggaggu

SEQ ID NO: 2951906 - RNA, 19 nt, Artificial Sequence
  Description of Artificial Sequence: Synthetic oligonucleotide
aggcccacacgcgguguag

SEQ ID NO: 2951907 - RNA, 19 nt, Artificial Sequence
  Description of Artificial Sequence: Synthetic oligonucleotide
gacccacccuacaccuccc

SEQ ID NO: 2951908 - RNA, 19 nt, Artificial Sequence
  Description of Artificial Sequence: Synthetic oligonucleotide
gcuucucaucaagucaaga

SEQ ID NO: 2951909 - RNA, 19 nt, Artificial Sequence
  Description of Artificial Sequence: Synthetic oligonucleotide
guguagcuucucaucaagu

SEQ ID NO: 2951910 - RNA, 19 nt, Artificial Sequence
  Description of Artificial Sequence: Synthetic oligonucleotide
acacgcgguguagcuucuc

SEQ ID NO: 2951911 - RNA, 19 nt, Artificial Sequence
  Description of Artificial Sequence: Synthetic oligonucleotide
gucaggcagacaccacugu

SEQ ID NO: 2951912 - RNA, 19 nt, Artificial Sequence
  Description of Artificial Sequence: Synthetic oligonucleotide
guuaggcaaagaggucgaa

SEQ ID NO: 2951913 - RNA, 19 nt, Artificial Sequence
  Description of Artificial Sequence: Synthetic oligonucleotide
cuacaccuccccagccaga

SEQ ID NO: 2951914 - RNA, 19 nt, Artificial Sequence
  Description of Artificial Sequence: Synthetic oligonucleotide
uuccaccucccugucccua

SEQ ID NO: 2951915 - RNA, 19 nt, Artificial Sequence
  Description of Artificial Sequence: Synthetic oligonucleotide
cagacaugccacgcagcca

SEQ ID NO: 2951916 - RNA, 19 nt, Artificial Sequence
  Description of Artificial Sequence: Synthetic oligonucleotide
gccacgcagccacgggagg

SEQ ID NO: 2951917 - RNA, 19 nt, Artificial Sequence
  Description of Artificial Sequence: Synthetic oligonucleotide
caccuccccagccagaauu

SEQ ID NO: 2951918 - RNA, 19 nt, Artificial Sequence
  Description of Artificial Sequence: Synthetic oligonucleotide
gaggcccacacgcggugua

SEQ ID NO: 2951919 - RNA, 19 nt, Artificial Sequence
  Description of Artificial Sequence: Synthetic oligonucleotide
gggaggcccacacgcggug

SEQ ID NO: 2951920 - RNA, 19 nt, Artificial Sequence
  Description of Artificial Sequence: Synthetic oligonucleotide
acaccuccccagccagaau

SEQ ID NO: 2951921 - RNA, 19 nt, Artificial Sequence
  Description of Artificial Sequence: Synthetic oligonucleotide
ccccucccgccccacaagg

SEQ ID NO: 2951922 - RNA, 19 nt, Artificial Sequence
  Description of Artificial Sequence: Synthetic oligonucleotide
ggccuagcacacucccaac

SEQ ID NO: 2951923 - RNA, 19 nt, Artificial Sequence
  Description of Artificial Sequence: Synthetic oligonucleotide
acgcagccacgggaggcag

SEQ ID NO: 2951924 - RNA, 19 nt, Artificial Sequence
  Description of Artificial Sequence: Synthetic oligonucleotide
gcagaggacccacccuaca

SEQ ID NO: 2951925 - RNA, 19 nt, Artificial Sequence
  Description of Artificial Sequence: Synthetic oligonucleotide
ugucagcacugaggaggaa

SEQ ID NO: 2951926 - RNA, 19 nt, Artificial Sequence
  Description of Artificial Sequence: Synthetic oligonucleotide
cacgcagccacgggaggca

SEQ ID NO: 2951927 - RNA, 19 nt, Artificial Sequence
  Description of Artificial Sequence: Synthetic oligonucleotide
cgcgguguagcuucucauc

SEQ ID NO: 2951928 - RNA, 19 nt, Artificial Sequence
  Description of Artificial Sequence: Synthetic oligonucleotide
ggcagaggacccacccuac

SEQ ID NO: 2951929 - RNA, 19 nt, Artificial Sequence
  Description of Artificial Sequence: Synthetic oligonucleotide
gaacggggcugaggguguc

SEQ ID NO: 2951930 - RNA, 19 nt, Artificial Sequence
  Description of Artificial Sequence: Synthetic oligonucleotide
ccacgcagccacgggaggc

SEQ ID NO: 2951931 - RNA, 19 nt, Artificial Sequence
  Description of Artificial Sequence: Synthetic oligonucleotide
cccucccgccccacaaggg

SEQ ID NO: 2951932 - RNA, 19 nt, Artificial Sequence
  Description of Artificial Sequence: Synthetic oligonucleotide
gcucuggaggucagacaug

SEQ ID NO: 2951933 - RNA, 19 nt, Artificial Sequence
  Description of Artificial Sequence: Synthetic oligonucleotide
gccagaauuccaccucccu

SEQ ID NO: 2951934 - RNA, 19 nt, Artificial Sequence
  Description of Artificial Sequence: Synthetic oligonucleotide
ccuccccagccagaauucc

SEQ ID NO: 2951935 - RNA, 19 nt, Artificial Sequence
  Description of Artificial Sequence: Synthetic oligonucleotide
gggcgugagcucuggaggu

SEQ ID NO: 2951936 - RNA, 19 nt, Artificial Sequence
  Description of Artificial Sequence: Synthetic oligonucleotide
ggcccacacgcgguguagc

SEQ ID NO: 2951937 - RNA, 19 nt, Artificial Sequence
  Description of Artificial Sequence: Synthetic oligonucleotide
gcgugagcucuggagguca

SEQ ID NO: 2951938 - RNA, 19 nt, Artificial Sequence
  Description of Artificial Sequence: Synthetic oligonucleotide
cagccacgggaggcagagg

SEQ ID NO: 2951939 - RNA, 19 nt, Artificial Sequence
  Description of Artificial Sequence: Synthetic oligonucleotide
cccuacaccuccccagcca

SEQ ID NO: 2951940 - RNA, 19 nt, Artificial Sequence
  Description of Artificial Sequence: Synthetic oligonucleotide
gggaggcagaggacccacc

SEQ ID NO: 2951941 - RNA, 19 nt, Artificial Sequence
  Description of Artificial Sequence: Synthetic oligonucleotide
gcagucaggcagacaccac

SEQ ID NO: 2951942 - RNA, 19 nt, Artificial Sequence
  Description of Artificial Sequence: Synthetic oligonucleotide
cugauuggccuagcacacu

SEQ ID NO: 2951943 - RNA, 19 nt, Artificial Sequence
  Description of Artificial Sequence: Synthetic oligonucleotide
ggcgugagcucuggagguc

SEQ ID NO: 2951944 - RNA, 19 nt, Artificial Sequence
  Description of Artificial Sequence: Synthetic oligonucleotide
ggcuuacaaguugggguua

SEQ ID NO: 2951945 - RNA, 19 nt, Artificial Sequence
  Description of Artificial Sequence: Synthetic oligonucleotide
gccacgggaggcagaggac

SEQ ID NO: 2951946 - RNA, 19 nt, Artificial Sequence
  Description of Artificial Sequence: Synthetic oligonucleotide
ggguuacaggaggcaguca

SEQ ID NO: 2951947 - RNA, 19 nt, Artificial Sequence
  Description of Artificial Sequence: Synthetic oligonucleotide
ggaggcagucaggcagaca

SEQ ID NO: 2951948 - RNA, 19 nt, Artificial Sequence
  Description of Artificial Sequence: Synthetic oligonucleotide
cccacccuacaccucccca

SEQ ID NO: 2951949 - RNA, 19 nt, Artificial Sequence
  Description of Artificial Sequence: Synthetic oligonucleotide
cacacgcgguguagcuucu

SEQ ID NO: 2951950 - RNA, 19 nt, Artificial Sequence
  Description of Artificial Sequence: Synthetic oligonucleotide
gggaguggggaggcccaca

SEQ ID NO: 2951951 - RNA, 19 nt, Artificial Sequence
  Description of Artificial Sequence: Synthetic oligonucleotide
gcccacacgcgguguagcu

SEQ ID NO: 2951952 - RNA, 19 nt, Artificial Sequence
  Description of Artificial Sequence: Synthetic oligonucleotide
cccuaaaguccucugccuu

SEQ ID NO: 2951953 - RNA, 19 nt, Artificial Sequence
  Description of Artificial Sequence: Synthetic oligonucleotide
gucgaagagccaggagguu

SEQ ID NO: 2951954 - RNA, 19 nt, Artificial Sequence
  Description of Artificial Sequence: Synthetic oligonucleotide
cccugucccuaaaguccuc

SEQ ID NO: 2951955 - RNA, 19 nt, Artificial Sequence
  Description of Artificial Sequence: Synthetic oligonucleotide
cgguguagcuucucaucaa

SEQ ID NO: 2951956 - RNA, 19 nt, Artificial Sequence
  Description of Artificial Sequence: Synthetic oligonucleotide
ggggaguggggaggcccac

SEQ ID NO: 2951957 - RNA, 19 nt, Artificial Sequence
  Description of Artificial Sequence: Synthetic oligonucleotide
ccucugccuucuauauucu

SEQ ID NO: 2951958 - RNA, 19 nt, Artificial Sequence
  Description of Artificial Sequence: Synthetic oligonucleotide
cgggaggcagaggacccac

SEQ ID NO: 2951959 - RNA, 19 nt, Artificial Sequence
  Description of Artificial Sequence: Synthetic oligonucleotide
ccugucccuaaaguccucu

SEQ ID NO: 2951960 - RNA, 19 nt, Artificial Sequence
  Description of Artificial Sequence: Synthetic oligonucleotide
ggggaggcccacacgcggu

SEQ ID NO: 2951961 - RNA, 19 nt, Artificial Sequence
  Description of Artificial Sequence: Synthetic oligonucleotide
cccaacccuucugcagcuc

SEQ ID NO: 2951962 - RNA, 19 nt, Artificial Sequence
  Description of Artificial Sequence: Synthetic oligonucleotide
ggaggcccacacgcggugu

SEQ ID NO: 2951963 - RNA, 19 nt, Artificial Sequence
  Description of Artificial Sequence: Synthetic oligonucleotide
cggggcugaggguguccca

SEQ ID NO: 2951964 - RNA, 19 nt, Artificial Sequence
  Description of Artificial Sequence: Synthetic oligonucleotide
cgccccacaaggggcaaua

SEQ ID NO: 2951965 - RNA, 19 nt, Artificial Sequence
  Description of Artificial Sequence: Synthetic oligonucleotide
cccacacgcgguguagcuu

SEQ ID NO: 2951966 - RNA, 19 nt, Artificial Sequence
  Description of Artificial Sequence: Synthetic oligonucleotide
cccgccccacaaggggcaa

SEQ ID NO: 2951967 - RNA, 19 nt, Artificial Sequence
  Description of Artificial Sequence: Synthetic oligonucleotide
ccgccccacaaggggcaau

SEQ ID NO: 2951968 - RNA, 19 nt, Artificial Sequence
  Description of Artificial Sequence: Synthetic oligonucleotide
auaaaguuccuucagugcc

SEQ ID NO: 2951969 - RNA, 19 nt, Artificial Sequence
  Description of Artificial Sequence: Synthetic oligonucleotide
uguuguaggagacauaaag

SEQ ID NO: 2951970 - RNA, 19 nt, Artificial Sequence
  Description of Artificial Sequence: Synthetic oligonucleotide
uccuucagugccaagaagg

SEQ ID NO: 2951971 - RNA, 19 nt, Artificial Sequence
  Description of Artificial Sequence: Synthetic oligonucleotide
agagaagugacccaggucu

SEQ ID NO: 2951972 - RNA, 19 nt, Artificial Sequence
  Description of Artificial Sequence: Synthetic oligonucleotide
ucugagauauuguuguagg

SEQ ID NO: 2951973 - RNA, 19 nt, Artificial Sequence
  Description of Artificial Sequence: Synthetic oligonucleotide
uuggaggucaucuaccugg

SEQ ID NO: 2951974 - RNA, 19 nt, Artificial Sequence
  Description of Artificial Sequence: Synthetic oligonucleotide
uucagugccaagaaggagc

SEQ ID NO: 2951975 - RNA, 19 nt, Artificial Sequence
  Description of Artificial Sequence: Synthetic oligonucleotide
ucugagggagcccagacag

SEQ ID NO: 2951976 - RNA, 19 nt, Artificial Sequence
  Description of Artificial Sequence: Synthetic oligonucleotide
uucagcuucaguuggauca

SEQ ID NO: 2951977 - RNA, 19 nt, Artificial Sequence
  Description of Artificial Sequence: Synthetic oligonucleotide
aaugccauccaagucaguc

SEQ ID NO: 2951978 - RNA, 19 nt, Artificial Sequence
  Description of Artificial Sequence: Synthetic oligonucleotide
acagcugugguucagcuuc

SEQ ID NO: 2951979 - RNA, 19 nt, Artificial Sequence
  Description of Artificial Sequence: Synthetic oligonucleotide
guuggaucagguuagggag

SEQ ID NO: 2951980 - RNA, 19 nt, Artificial Sequence
  Description of Artificial Sequence: Synthetic oligonucleotide
ugagauauuguuguaggag

SEQ ID NO: 2951981 - RNA, 19 nt, Artificial Sequence
  Description of Artificial Sequence: Synthetic oligonucleotide
agucagucaggccacagcg

SEQ ID NO: 2951982 - RNA, 19 nt, Artificial Sequence
  Description of Artificial Sequence: Synthetic oligonucleotide
acauaaaguuccuucagug

SEQ ID NO: 2951983 - RNA, 19 nt, Artificial Sequence
  Description of Artificial Sequence: Synthetic oligonucleotide
uucaguuggaucagguuag

SEQ ID NO: 2951984 - RNA, 19 nt, Artificial Sequence
  Description of Artificial Sequence: Synthetic oligonucleotide
aagucagucaggccacagc

SEQ ID NO: 2951985 - RNA, 19 nt, Artificial Sequence
  Description of Artificial Sequence: Synthetic oligonucleotide
aucuaccugggucagggcc

SEQ ID NO: 2951986 - RNA, 19 nt, Artificial Sequence
  Description of Artificial Sequence: Synthetic oligonucleotide
guaggagacauaaaguucc

SEQ ID NO: 2951987 - RNA, 19 nt, Artificial Sequence
  Description of Artificial Sequence: Synthetic oligonucleotide
cauaaaguuccuucagugc

SEQ ID NO: 2951988 - RNA, 19 nt, Artificial Sequence
  Description of Artificial Sequence: Synthetic oligonucleotide
uguaggagacauaaaguuc

SEQ ID NO: 2951989 - RNA, 19 nt, Artificial Sequence
  Description of Artificial Sequence: Synthetic oligonucleotide
auccaagucagucaggcca

SEQ ID NO: 2951990 - RNA, 19 nt, Artificial Sequence
  Description of Artificial Sequence: Synthetic oligonucleotide
accagauuccccuccagcg

SEQ ID NO: 2951991 - RNA, 19 nt, Artificial Sequence
  Description of Artificial Sequence: Synthetic oligonucleotide
gagauauuguuguaggaga

SEQ ID NO: 2951992 - RNA, 19 nt, Artificial Sequence
  Description of Artificial Sequence: Synthetic oligonucleotide
uuguaggagacauaaaguu

SEQ ID NO: 2951993 - RNA, 19 nt, Artificial Sequence
  Description of Artificial Sequence: Synthetic oligonucleotide
ucagucaggccacagcgag

SEQ ID NO: 2951994 - RNA, 19 nt, Artificial Sequence
  Description of Artificial Sequence: Synthetic oligonucleotide
aguuggaucagguuaggga

SEQ ID NO: 2951995 - RNA, 19 nt, Artificial Sequence
  Description of Artificial Sequence: Synthetic oligonucleotide
ucaucuaccugggucaggg

SEQ ID NO: 2951996 - RNA, 19 nt, Artificial Sequence
  Description of Artificial Sequence: Synthetic oligonucleotide
aggucugagauauuguugu

SEQ ID NO: 2951997 - RNA, 19 nt, Artificial Sequence
  Description of Artificial Sequence: Synthetic oligonucleotide
agcguggccaaccuugggc

SEQ ID NO: 2951998 - RNA, 19 nt, Artificial Sequence
  Description of Artificial Sequence: Synthetic oligonucleotide
cuucaagcacaccagauuc

SEQ ID NO: 2951999 - RNA, 19 nt, Artificial Sequence
  Description of Artificial Sequence: Synthetic oligonucleotide
ugcuccagcaggcacagug

SEQ ID NO: 2952000 - RNA, 19 nt, Artificial Sequence
  Description of Artificial Sequence: Synthetic oligonucleotide
aagcacaccagauuccccu

SEQ ID NO: 2952001 - RNA, 19 nt, Artificial Sequence
  Description of Artificial Sequence: Synthetic oligonucleotide
aucguugcccucgaggucc

SEQ ID NO: 2952002 - RNA, 19 nt, Artificial Sequence
  Description of Artificial Sequence: Synthetic oligonucleotide
auuguuguaggagacauaa

SEQ ID NO: 2952003 - RNA, 19 nt, Artificial Sequence
  Description of Artificial Sequence: Synthetic oligonucleotide
acuccgaaguuccccaggc

SEQ ID NO: 2952004 - RNA, 19 nt, Artificial Sequence
  Description of Artificial Sequence: Synthetic oligonucleotide
ugccauccaagucagucag

SEQ ID NO: 2952005 - RNA, 19 nt, Artificial Sequence
  Description of Artificial Sequence: Synthetic oligonucleotide
gaaggagccaaugccaucc

SEQ ID NO: 2952006 - RNA, 19 nt, Artificial Sequence
  Description of Artificial Sequence: Synthetic oligonucleotide
uccgaaguuccccaggcug

SEQ ID NO: 2952007 - RNA, 19 nt, Artificial Sequence
  Description of Artificial Sequence: Synthetic oligonucleotide
uuggaucagguuagggagg

SEQ ID NO: 2952008 - RNA, 19 nt, Artificial Sequence
  Description of Artificial Sequence: Synthetic oligonucleotide
uaaaguuccuucagugcca

SEQ ID NO: 2952009 - RNA, 19 nt, Artificial Sequence
  Description of Artificial Sequence: Synthetic oligonucleotide
ucagugccaagaaggagcc

SEQ ID NO: 2952010 - RNA, 19 nt, Artificial Sequence
  Description of Artificial Sequence: Synthetic oligonucleotide
agauauuguuguaggagac

SEQ ID NO: 2952011 - RNA, 19 nt, Artificial Sequence
  Description of Artificial Sequence: Synthetic oligonucleotide
caaccuugggcacagcugc

SEQ ID NO: 2952012 - RNA, 19 nt, Artificial Sequence
  Description of Artificial Sequence: Synthetic oligonucleotide
gaucagguuagggaggugc

SEQ ID NO: 2952013 - RNA, 19 nt, Artificial Sequence
  Description of Artificial Sequence: Synthetic oligonucleotide
uucaagcacaccagauucc

SEQ ID NO: 2952014 - RNA, 19 nt, Artificial Sequence
  Description of Artificial Sequence: Synthetic oligonucleotide
acaucguugcccucgaggu

SEQ ID NO: 2952015 - RNA, 19 nt, Artificial Sequence
  Description of Artificial Sequence: Synthetic oligonucleotide
guuagggaggugcacuccg

SEQ ID NO: 2952016 - RNA, 19 nt, Artificial Sequence
  Description of Artificial Sequence: Synthetic oligonucleotide
gaggucaucuaccuggguc

SEQ ID NO: 2952017 - RNA, 19 nt, Artificial Sequence
  Description of Artificial Sequence: Synthetic oligonucleotide
cacaucguugcccucgagg

SEQ ID NO: 2952018 - RNA, 19 nt, Artificial Sequence
  Description of Artificial Sequence: Synthetic oligonucleotide
aggucaucuaccuggguca

SEQ ID NO: 2952019 - RNA, 19 nt, Artificial Sequence
  Description of Artificial Sequence: Synthetic oligonucleotide
ggagacauaaaguuccuuc

SEQ ID NO: 2952020 - RNA, 19 nt, Artificial Sequence
  Description of Artificial Sequence: Synthetic oligonucleotide
ucuaccugggucagggccu

SEQ ID NO: 2952021 - RNA, 19 nt, Artificial Sequence
  Description of Artificial Sequence: Synthetic oligonucleotide
auauuguuguaggagacau

SEQ ID NO: 2952022 - RNA, 19 nt, Artificial Sequence
  Description of Artificial Sequence: Synthetic oligonucleotide
aaguuccccaggcuguucu

SEQ ID NO: 2952023 - RNA, 19 nt, Artificial Sequence
  Description of Artificial Sequence: Synthetic oligonucleotide
uggaggucaucuaccuggg

SEQ ID NO: 2952024 - RNA, 19 nt, Artificial Sequence
  Description of Artificial Sequence: Synthetic oligonucleotide
aguuggaggucaucuaccu

SEQ ID NO: 2952025 - RNA, 19 nt, Artificial Sequence
  Description of Artificial Sequence: Synthetic oligonucleotide
acccucaccaguuggaggu

SEQ ID NO: 2952026 - RNA, 19 nt, Artificial Sequence
  Description of Artificial Sequence: Synthetic oligonucleotide
aguuccuucagugccaaga

SEQ ID NO: 2952027 - RNA, 19 nt, Artificial Sequence
  Description of Artificial Sequence: Synthetic oligonucleotide
agggucuggcuucaagcac

SEQ ID NO: 2952028 - RNA, 19 nt, Artificial Sequence
  Description of Artificial Sequence: Synthetic oligonucleotide
caagaaggagccaaugcca

SEQ ID NO: 2952029 - RNA, 19 nt, Artificial Sequence
  Description of Artificial Sequence: Synthetic oligonucleotide
ugcagguaccgcaucugcc

SEQ ID NO: 2952030 - RNA, 19 nt, Artificial Sequence
  Description of Artificial Sequence: Synthetic oligonucleotide
ccaagaaggagccaaugcc

SEQ ID NO: 2952031 - RNA, 19 nt, Artificial Sequence
  Description of Artificial Sequence: Synthetic oligonucleotide
gucugagauauuguuguag

SEQ ID NO: 2952032 - RNA, 19 nt, Artificial Sequence
  Description of Artificial Sequence: Synthetic oligonucleotide
ucaggccacagcgagcuag

SEQ ID NO: 2952033 - RNA, 19 nt, Artificial Sequence
  Description of Artificial Sequence: Synthetic oligonucleotide
caggucugagauauuguug

SEQ ID NO: 2952034 - RNA, 19 nt, Artificial Sequence
  Description of Artificial Sequence: Synthetic oligonucleotide
cuucaguuggaucagguua

SEQ ID NO: 2952035 - RNA, 19 nt, Artificial Sequence
  Description of Artificial Sequence: Synthetic oligonucleotide
aggugcacuccgaaguucc

SEQ ID NO: 2952036 - RNA, 19 nt, Artificial Sequence
  Description of Artificial Sequence: Synthetic oligonucleotide
agguuagggaggugcacuc

SEQ ID NO: 2952037 - RNA, 19 nt, Artificial Sequence
  Description of Artificial Sequence: Synthetic oligonucleotide
uguucuuacgcguguccac

SEQ ID NO: 2952038 - RNA, 19 nt, Artificial Sequence
  Description of Artificial Sequence: Synthetic oligonucleotide
cuuacgcguguccacacac

SEQ ID NO: 2952039 - RNA, 19 nt, Artificial Sequence
  Description of Artificial Sequence: Synthetic oligonucleotide
uccaagucagucaggccac

SEQ ID NO: 2952040 - RNA, 19 nt, Artificial Sequence
  Description of Artificial Sequence: Synthetic oligonucleotide
agaaggagccaaugccauc

SEQ ID NO: 2952041 - RNA, 19 nt, Artificial Sequence
  Description of Artificial Sequence: Synthetic oligonucleotide
agccaaugccauccaaguc

SEQ ID NO: 2952042 - RNA, 19 nt, Artificial Sequence
  Description of Artificial Sequence: Synthetic oligonucleotide
cuagccacagcaccugcag

SEQ ID NO: 2952043 - RNA, 19 nt, Artificial Sequence
  Description of Artificial Sequence: Synthetic oligonucleotide
ugagggagcccagacagcu

SEQ ID NO: 2952044 - RNA, 19 nt, Artificial Sequence
  Description of Artificial Sequence: Synthetic oligonucleotide
uggcccagagaagugaccc

SEQ ID NO: 2952045 - RNA, 19 nt, Artificial Sequence
  Description of Artificial Sequence: Synthetic oligonucleotide
gauauuguuguaggagaca

SEQ ID NO: 2952046 - RNA, 19 nt, Artificial Sequence
  Description of Artificial Sequence: Synthetic oligonucleotide
gccaaugccauccaaguca

SEQ ID NO: 2952047 - RNA, 19 nt, Artificial Sequence
  Description of Artificial Sequence: Synthetic oligonucleotide
agugacccaggucucugag

SEQ ID NO: 2952048 - RNA, 19 nt, Artificial Sequence
  Description of Artificial Sequence: Synthetic oligonucleotide
agccacagcaccugcaggu

SEQ ID NO: 2952049 - RNA, 19 nt, Artificial Sequence
  Description of Artificial Sequence: Synthetic oligonucleotide
ucagcuucaguuggaucag

SEQ ID NO: 2952050 - RNA, 19 nt, Artificial Sequence
  Description of Artificial Sequence: Synthetic oligonucleotide
uccuccacaucguugcccu

SEQ ID NO: 2952051 - RNA, 19 nt, Artificial Sequence
  Description of Artificial Sequence: Synthetic oligonucleotide
acagcgagcuagccacagc

SEQ ID NO: 2952052 - RNA, 19 nt, Artificial Sequence
  Description of Artificial Sequence: Synthetic oligonucleotide
agugccaagaaggagccaa

SEQ ID NO: 2952053 - RNA, 19 nt, Artificial Sequence
  Description of Artificial Sequence: Synthetic oligonucleotide
ucgagguccagcaccucca

SEQ ID NO: 2952054 - RNA, 19 nt, Artificial Sequence
  Description of Artificial Sequence: Synthetic oligonucleotide
agcuagccacagcaccugc

SEQ ID NO: 2952055 - RNA, 19 nt, Artificial Sequence
  Description of Artificial Sequence: Synthetic oligonucleotide
uacgcguguccacacacau

SEQ ID NO: 2952056 - RNA, 19 nt, Artificial Sequence
  Description of Artificial Sequence: Synthetic oligonucleotide
agucaggccacagcgagcu

SEQ ID NO: 2952057 - RNA, 19 nt, Artificial Sequence
  Description of Artificial Sequence: Synthetic oligonucleotide
ucuuacgcguguccacaca

SEQ ID NO: 2952058 - RNA, 19 nt, Artificial Sequence
  Description of Artificial Sequence: Synthetic oligonucleotide
cucgagguccagcaccucc

SEQ ID NO: 2952059 - RNA, 19 nt, Artificial Sequence
  Description of Artificial Sequence: Synthetic oligonucleotide
uugcccucgagguccagca

SEQ ID NO: 2952060 - RNA, 19 nt, Artificial Sequence
  Description of Artificial Sequence: Synthetic oligonucleotide
uaccgcaucugccccaggu

SEQ ID NO: 2952061 - RNA, 19 nt, Artificial Sequence
  Description of Artificial Sequence: Synthetic oligonucleotide
uauuguuguaggagacaua

SEQ ID NO: 2952062 - RNA, 19 nt, Artificial Sequence
  Description of Artificial Sequence: Synthetic oligonucleotide
uuacgcguguccacacaca

SEQ ID NO: 2952063 - RNA, 19 nt, Artificial Sequence
  Description of Artificial Sequence: Synthetic oligonucleotide
aagugacccaggucucuga

SEQ ID NO: 2952064 - RNA, 19 nt, Artificial Sequence
  Description of Artificial Sequence: Synthetic oligonucleotide
uggcuucaagcacaccaga

SEQ ID NO: 2952065 - RNA, 19 nt, Artificial Sequence
  Description of Artificial Sequence: Synthetic oligonucleotide
accgcaucugccccagguc

SEQ ID NO: 2952066 - RNA, 19 nt, Artificial Sequence
  Description of Artificial Sequence: Synthetic oligonucleotide
cuccagcaggcacaguggg

SEQ ID NO: 2952067 - RNA, 19 nt, Artificial Sequence
  Description of Artificial Sequence: Synthetic oligonucleotide
cacagcaccugcagguggc

SEQ ID NO: 2952068 - RNA, 19 nt, Artificial Sequence
  Description of Artificial Sequence: Synthetic oligonucleotide
gccacagcgagcuagccac

SEQ ID NO: 2952069 - RNA, 19 nt, Artificial Sequence
  Description of Artificial Sequence: Synthetic oligonucleotide
cuccacaucguugcccucg

SEQ ID NO: 2952070 - RNA, 19 nt, Artificial Sequence
  Description of Artificial Sequence: Synthetic oligonucleotide
cagauuccccuccagcgug

SEQ ID NO: 2952071 - RNA, 19 nt, Artificial Sequence
  Description of Artificial Sequence: Synthetic oligonucleotide
acccaggucucugagggag

SEQ ID NO: 2952072 - RNA, 19 nt, Artificial Sequence
  Description of Artificial Sequence: Synthetic oligonucleotide
cauccaagucagucaggcc

SEQ ID NO: 2952073 - RNA, 19 nt, Artificial Sequence
  Description of Artificial Sequence: Synthetic oligonucleotide
aaaguuccuucagugccaa

SEQ ID NO: 2952074 - RNA, 19 nt, Artificial Sequence
  Description of Artificial Sequence: Synthetic oligonucleotide
cuucagugccaagaaggag

SEQ ID NO: 2952075 - RNA, 19 nt, Artificial Sequence
  Description of Artificial Sequence: Synthetic oligonucleotide
caccagauuccccuccagc

SEQ ID NO: 2952076 - RNA, 19 nt, Artificial Sequence
  Description of Artificial Sequence: Synthetic oligonucleotide
agggaggugcacuccgaag

SEQ ID NO: 2952077 - RNA, 19 nt, Artificial Sequence
  Description of Artificial Sequence: Synthetic oligonucleotide
uccagcacccucaccaguu

SEQ ID NO: 2952078 - RNA, 19 nt, Artificial Sequence
  Description of Artificial Sequence: Synthetic oligonucleotide
ugggcacagcugcagguac

SEQ ID NO: 2952079 - RNA, 19 nt, Artificial Sequence
  Description of Artificial Sequence: Synthetic oligonucleotide
ugcagguggcccagagaag

SEQ ID NO: 2952080 - RNA, 19 nt, Artificial Sequence
  Description of Artificial Sequence: Synthetic oligonucleotide
gcagguaccgcaucugccc

SEQ ID NO: 2952081 - RNA, 19 nt, Artificial Sequence
  Description of Artificial Sequence: Synthetic oligonucleotide
cugagauauuguuguagga

SEQ ID NO: 2952082 - RNA, 19 nt, Artificial Sequence
  Description of Artificial Sequence: Synthetic oligonucleotide
caagcacaccagauucccc

SEQ ID NO: 2952083 - RNA, 19 nt, Artificial Sequence
  Description of Artificial Sequence: Synthetic oligonucleotide
gccaagaaggagccaaugc

SEQ ID NO: 2952084 - RNA, 19 nt, Artificial Sequence
  Description of Artificial Sequence: Synthetic oligonucleotide
uggaucagguuagggaggu

SEQ ID NO: 2952085 - RNA, 19 nt, Artificial Sequence
  Description of Artificial Sequence: Synthetic oligonucleotide
guuguaggagacauaaagu

SEQ ID NO: 2952086 - RNA, 19 nt, Artificial Sequence
  Description of Artificial Sequence: Synthetic oligonucleotide
gugacccaggucucugagg

SEQ ID NO: 2952087 - RNA, 19 nt, Artificial Sequence
  Description of Artificial Sequence: Synthetic oligonucleotide
guuggaggucaucuaccug

SEQ ID NO: 2952088 - RNA, 19 nt, Artificial Sequence
  Description of Artificial Sequence: Synthetic oligonucleotide
gaagugacccaggucucug

SEQ ID NO: 2952089 - RNA, 19 nt, Artificial Sequence
  Description of Artificial Sequence: Synthetic oligonucleotide
uuguuguaggagacauaaa

SEQ ID NO: 2952090 - RNA, 19 nt, Artificial Sequence
  Description of Artificial Sequence: Synthetic oligonucleotide
cacccucaccaguuggagg

SEQ ID NO: 2952091 - RNA, 19 nt, Artificial Sequence
  Description of Artificial Sequence: Synthetic oligonucleotide
caggcuguucuuacgcgug

SEQ ID NO: 2952092 - RNA, 19 nt, Artificial Sequence
  Description of Artificial Sequence: Synthetic oligonucleotide
uccccaggcuguucuuacg

SEQ ID NO: 2952093 - RNA, 19 nt, Artificial Sequence
  Description of Artificial Sequence: Synthetic oligonucleotide
aaggagccaaugccaucca

SEQ ID NO: 2952094 - RNA, 19 nt, Artificial Sequence
  Description of Artificial Sequence: Synthetic oligonucleotide
accagggucuggcuucaag

SEQ ID NO: 2952095 - RNA, 19 nt, Artificial Sequence
  Description of Artificial Sequence: Synthetic oligonucleotide
uucuuacgcguguccacac

SEQ ID NO: 2952096 - RNA, 19 nt, Artificial Sequence
  Description of Artificial Sequence: Synthetic oligonucleotide
cugcagguaccgcaucugc

SEQ ID NO: 2952097 - RNA, 19 nt, Artificial Sequence
  Description of Artificial Sequence: Synthetic oligonucleotide
auuccccuccagcgugagc

SEQ ID NO: 2952098 - RNA, 19 nt, Artificial Sequence
  Description of Artificial Sequence: Synthetic oligonucleotide
gagccaaugccauccaagu

SEQ ID NO: 2952099 - RNA, 19 nt, Artificial Sequence
  Description of Artificial Sequence: Synthetic oligonucleotide
guuggaaggaccagggucu

SEQ ID NO: 2952100 - RNA, 19 nt, Artificial Sequence
  Description of Artificial Sequence: Synthetic oligonucleotide
ugccaagaaggagccaaug

SEQ ID NO: 2952101 - RNA, 19 nt, Artificial Sequence
  Description of Artificial Sequence: Synthetic oligonucleotide
cacuccgaaguuccccagg

SEQ ID NO: 2952102 - RNA, 19 nt, Artificial Sequence
  Description of Artificial Sequence: Synthetic oligonucleotide
uccacaucguugcccucga

SEQ ID NO: 2952103 - RNA, 19 nt, Artificial Sequence
  Description of Artificial Sequence: Synthetic oligonucleotide
ccagggucuggcuucaagc

SEQ ID NO: 2952104 - RNA, 19 nt, Artificial Sequence
  Description of Artificial Sequence: Synthetic oligonucleotide
aaguuccuucagugccaag

SEQ ID NO: 2952105 - RNA, 19 nt, Artificial Sequence
  Description of Artificial Sequence: Synthetic oligonucleotide
cagcgagcuagccacagca

SEQ ID NO: 2952106 - RNA, 19 nt, Artificial Sequence
  Description of Artificial Sequence: Synthetic oligonucleotide
aggcacagugggcucaggu

SEQ ID NO: 2952107 - RNA, 19 nt, Artificial Sequence
  Description of Artificial Sequence: Synthetic oligonucleotide
cagguccuccacaucguug

SEQ ID NO: 2952108 - RNA, 19 nt, Artificial Sequence
  Description of Artificial Sequence: Synthetic oligonucleotide
caguuggaucagguuaggg

SEQ ID NO: 2952109 - RNA, 19 nt, Artificial Sequence
  Description of Artificial Sequence: Synthetic oligonucleotide
cagguaccgcaucugcccc

SEQ ID NO: 2952110 - RNA, 19 nt, Artificial Sequence
  Description of Artificial Sequence: Synthetic oligonucleotide
cagagaagugacccagguc

SEQ ID NO: 2952111 - RNA, 19 nt, Artificial Sequence
  Description of Artificial Sequence: Synthetic oligonucleotide
ucagguuagggaggugcac

SEQ ID NO: 2952112 - RNA, 19 nt, Artificial Sequence
  Description of Artificial Sequence: Synthetic oligonucleotide
cagggucuggcuucaagca

SEQ ID NO: 2952113 - RNA, 19 nt, Artificial Sequence
  Description of Artificial Sequence: Synthetic oligonucleotide
acaccagauuccccuccag

SEQ ID NO: 2952114 - RNA, 19 nt, Artificial Sequence
  Description of Artificial Sequence: Synthetic oligonucleotide
ccaaugccauccaagucag

SEQ ID NO: 2952115 - RNA, 19 nt, Artificial Sequence
  Description of Artificial Sequence: Synthetic oligonucleotide
ccauccaagucagucaggc

SEQ ID NO: 2952116 - RNA, 19 nt, Artificial Sequence
  Description of Artificial Sequence: Synthetic oligonucleotide
ccaguuggaggucaucuac

SEQ ID NO: 2952117 - RNA, 19 nt, Artificial Sequence
  Description of Artificial Sequence: Synthetic oligonucleotide
ggaaggaccagggucuggc

SEQ ID NO: 2952118 - RNA, 19 nt, Artificial Sequence
  Description of Artificial Sequence: Synthetic oligonucleotide
cugugguucagcuucaguu

SEQ ID NO: 2952119 - RNA, 19 nt, Artificial Sequence
  Description of Artificial Sequence: Synthetic oligonucleotide
guucuuacgcguguccaca

SEQ ID NO: 2952120 - RNA, 19 nt, Artificial Sequence
  Description of Artificial Sequence: Synthetic oligonucleotide
aggucucugagggagccca

SEQ ID NO: 2952121 - RNA, 19 nt, Artificial Sequence
  Description of Artificial Sequence: Synthetic oligonucleotide
cagcacccucaccaguugg

SEQ ID NO: 2952122 - RNA, 19 nt, Artificial Sequence
  Description of Artificial Sequence: Synthetic oligonucleotide
guucagcuucaguuggauc

SEQ ID NO: 2952123 - RNA, 19 nt, Artificial Sequence
  Description of Artificial Sequence: Synthetic oligonucleotide
accugcagguggcccagag

SEQ ID NO: 2952124 - RNA, 19 nt, Artificial Sequence
  Description of Artificial Sequence: Synthetic oligonucleotide
gagcguggccaaccuuggg

SEQ ID NO: 2952125 - RNA, 19 nt, Artificial Sequence
  Description of Artificial Sequence: Synthetic oligonucleotide
agaagugacccaggucucu

SEQ ID NO: 2952126 - RNA, 19 nt, Artificial Sequence
  Description of Artificial Sequence: Synthetic oligonucleotide
gcgagcuagccacagcacc

SEQ ID NO: 2952127 - RNA, 19 nt, Artificial Sequence
  Description of Artificial Sequence: Synthetic oligonucleotide
cacagugggcucaggucug

SEQ ID NO: 2952128 - RNA, 19 nt, Artificial Sequence
  Description of Artificial Sequence: Synthetic oligonucleotide
caggccacagcgagcuagc

SEQ ID NO: 2952129 - RNA, 19 nt, Artificial Sequence
  Description of Artificial Sequence: Synthetic oligonucleotide
gcuguucuuacgcgugucc

SEQ ID NO: 2952130 - RNA, 19 nt, Artificial Sequence
  Description of Artificial Sequence: Synthetic oligonucleotide
agcgagcuagccacagcac

SEQ ID NO: 2952131 - RNA, 19 nt, Artificial Sequence
  Description of Artificial Sequence: Synthetic oligonucleotide
cugagggagcccagacagc

SEQ ID NO: 2952132 - RNA, 19 nt, Artificial Sequence
  Description of Artificial Sequence: Synthetic oligonucleotide
cagacagcugugguucagc

SEQ ID NO: 2952133 - RNA, 19 nt, Artificial Sequence
  Description of Artificial Sequence: Synthetic oligonucleotide
accaguuggaggucaucua

SEQ ID NO: 2952134 - RNA, 19 nt, Artificial Sequence
  Description of Artificial Sequence: Synthetic oligonucleotide
caagucagucaggccacag

SEQ ID NO: 2952135 - RNA, 19 nt, Artificial Sequence
  Description of Artificial Sequence: Synthetic oligonucleotide
cagucaggccacagcgagc

SEQ ID NO: 2952136 - RNA, 19 nt, Artificial Sequence
  Description of Artificial Sequence: Synthetic oligonucleotide
uggccaaccuugggcacag

SEQ ID NO: 2952137 - RNA, 19 nt, Artificial Sequence
  Description of Artificial Sequence: Synthetic oligonucleotide
ugccccagguccuccacau

SEQ ID NO: 2952138 - RNA, 19 nt, Artificial Sequence
  Description of Artificial Sequence: Synthetic oligonucleotide
uuggaaggaccagggucug

SEQ ID NO: 2952139 - RNA, 19 nt, Artificial Sequence
  Description of Artificial Sequence: Synthetic oligonucleotide
gagcuagccacagcaccug

SEQ ID NO: 2952140 - RNA, 19 nt, Artificial Sequence
  Description of Artificial Sequence: Synthetic oligonucleotide
agcuucaguuggaucaggu

SEQ ID NO: 2952141 - RNA, 19 nt, Artificial Sequence
  Description of Artificial Sequence: Synthetic oligonucleotide
aucagguuagggaggugca

SEQ ID NO: 2952142 - RNA, 19 nt, Artificial Sequence
  Description of Artificial Sequence: Synthetic oligonucleotide
gagaagugacccaggucuc

SEQ ID NO: 2952143 - RNA, 19 nt, Artificial Sequence
  Description of Artificial Sequence: Synthetic oligonucleotide
ccaaccuugggcacagcug

SEQ ID NO: 2952144 - RNA, 19 nt, Artificial Sequence
  Description of Artificial Sequence: Synthetic oligonucleotide
cguguccacacacaucucc

SEQ ID NO: 2952145 - RNA, 19 nt, Artificial Sequence
  Description of Artificial Sequence: Synthetic oligonucleotide
caucuaccugggucagggc

SEQ ID NO: 2952146 - RNA, 19 nt, Artificial Sequence
  Description of Artificial Sequence: Synthetic oligonucleotide
aggcuguucuuacgcgugu

SEQ ID NO: 2952147 - RNA, 19 nt, Artificial Sequence
  Description of Artificial Sequence: Synthetic oligonucleotide
gugggcucaggucugagau

SEQ ID NO: 2952148 - RNA, 19 nt, Artificial Sequence
  Description of Artificial Sequence: Synthetic oligonucleotide
accuugggcacagcugcag

SEQ ID NO: 2952149 - RNA, 19 nt, Artificial Sequence
  Description of Artificial Sequence: Synthetic oligonucleotide
gugcacuccgaaguucccc

SEQ ID NO: 2952150 - RNA, 19 nt, Artificial Sequence
  Description of Artificial Sequence: Synthetic oligonucleotide
ggcacagugggcucagguc

SEQ ID NO: 2952151 - RNA, 19 nt, Artificial Sequence
  Description of Artificial Sequence: Synthetic oligonucleotide
caucguugcccucgagguc

SEQ ID NO: 2952152 - RNA, 19 nt, Artificial Sequence
  Description of Artificial Sequence: Synthetic oligonucleotide
cuguucuuacgcgugucca

SEQ ID NO: 2952153 - RNA, 19 nt, Artificial Sequence
  Description of Artificial Sequence: Synthetic oligonucleotide
agcccagacagcugugguu

SEQ ID NO: 2952154 - RNA, 19 nt, Artificial Sequence
  Description of Artificial Sequence: Synthetic oligonucleotide
cacagcgagcuagccacag

SEQ ID NO: 2952155 - RNA, 19 nt, Artificial Sequence
  Description of Artificial Sequence: Synthetic oligonucleotide
cagguggcccagagaagug

SEQ ID NO: 2952156 - RNA, 19 nt, Artificial Sequence
  Description of Artificial Sequence: Synthetic oligonucleotide
gaggugcacuccgaaguuc

SEQ ID NO: 2952157 - RNA, 19 nt, Artificial Sequence
  Description of Artificial Sequence: Synthetic oligonucleotide
aggccacagcgagcuagcc

SEQ ID NO: 2952158 - RNA, 19 nt, Artificial Sequence
  Description of Artificial Sequence: Synthetic oligonucleotide
gucaucuaccugggucagg

SEQ ID NO: 2952159 - RNA, 19 nt, Artificial Sequence
  Description of Artificial Sequence: Synthetic oligonucleotide
agguggcccagagaaguga

SEQ ID NO: 2952160 - RNA, 19 nt, Artificial Sequence
  Description of Artificial Sequence: Synthetic oligonucleotide
guugcccucgagguccagc

SEQ ID NO: 2952161 - RNA, 19 nt, Artificial Sequence
  Description of Artificial Sequence: Synthetic oligonucleotide
ccgcaucugccccaggucc

SEQ ID NO: 2952162 - RNA, 19 nt, Artificial Sequence
  Description of Artificial Sequence: Synthetic oligonucleotide
cucugagggagcccagaca

SEQ ID NO: 2952163 - RNA, 19 nt, Artificial Sequence
  Description of Artificial Sequence: Synthetic oligonucleotide
agguaccgcaucugcccca

SEQ ID NO: 2952164 - RNA, 19 nt, Artificial Sequence
  Description of Artificial Sequence: Synthetic oligonucleotide
gcccucgagguccagcacc

SEQ ID NO: 2952165 - RNA, 19 nt, Artificial Sequence
  Description of Artificial Sequence: Synthetic oligonucleotide
gcuccagcaggcacagugg

SEQ ID NO: 2952166 - RNA, 19 nt, Artificial Sequence
  Description of Artificial Sequence: Synthetic oligonucleotide
gggaggugcacuccgaagu

SEQ ID NO: 2952167 - RNA, 19 nt, Artificial Sequence
  Description of Artificial Sequence: Synthetic oligonucleotide
ugggcucaggucugagaua

SEQ ID NO: 2952168 - RNA, 19 nt, Artificial Sequence
  Description of Artificial Sequence: Synthetic oligonucleotide
agcacccucaccaguugga

SEQ ID NO: 2952169 - RNA, 19 nt, Artificial Sequence
  Description of Artificial Sequence: Synthetic oligonucleotide
gcacagugggcucaggucu

SEQ ID NO: 2952170 - RNA, 19 nt, Artificial Sequence
  Description of Artificial Sequence: Synthetic oligonucleotide
aaccuugggcacagcugca

SEQ ID NO: 2952171 - RNA, 19 nt, Artificial Sequence
  Description of Artificial Sequence: Synthetic oligonucleotide
cccaggcuguucuuacgcg

SEQ ID NO: 2952172 - RNA, 19 nt, Artificial Sequence
  Description of Artificial Sequence: Synthetic oligonucleotide
ccuucagugccaagaagga

SEQ ID NO: 2952173 - RNA, 19 nt, Artificial Sequence
  Description of Artificial Sequence: Synthetic oligonucleotide
cagcuucaguuggaucagg

SEQ ID NO: 2952174 - RNA, 19 nt, Artificial Sequence
  Description of Artificial Sequence: Synthetic oligonucleotide
agcaggcacagugggcuca

SEQ ID NO: 2952175 - RNA, 19 nt, Artificial Sequence
  Description of Artificial Sequence: Synthetic oligonucleotide
ccccaggcuguucuuacgc

SEQ ID NO: 2952176 - RNA, 19 nt, Artificial Sequence
  Description of Artificial Sequence: Synthetic oligonucleotide
ugcccucgagguccagcac

SEQ ID NO: 2952177 - RNA, 19 nt, Artificial Sequence
  Description of Artificial Sequence: Synthetic oligonucleotide
ccuugggcacagcugcagg

SEQ ID NO: 2952178 - RNA, 19 nt, Artificial Sequence
  Description of Artificial Sequence: Synthetic oligonucleotide
cuugggcacagcugcaggu

SEQ ID NO: 2952179 - RNA, 19 nt, Artificial Sequence
  Description of Artificial Sequence: Synthetic oligonucleotide
gguuagggaggugcacucc

SEQ ID NO: 2952180 - RNA, 19 nt, Artificial Sequence
  Description of Artificial Sequence: Synthetic oligonucleotide
aucugccccagguccucca

SEQ ID NO: 2952181 - RNA, 19 nt, Artificial Sequence
  Description of Artificial Sequence: Synthetic oligonucleotide
acgcguguccacacacauc

SEQ ID NO: 2952182 - RNA, 19 nt, Artificial Sequence
  Description of Artificial Sequence: Synthetic oligonucleotide
ccacagcaccugcaggugg

SEQ ID NO: 2952183 - RNA, 19 nt, Artificial Sequence
  Description of Artificial Sequence: Synthetic oligonucleotide
ucaccaguuggaggucauc

SEQ ID NO: 2952184 - RNA, 19 nt, Artificial Sequence
  Description of Artificial Sequence: Synthetic oligonucleotide
aggagacauaaaguuccuu

SEQ ID NO: 2952185 - RNA, 19 nt, Artificial Sequence
  Description of Artificial Sequence: Synthetic oligonucleotide
gcguggccaaccuugggca

SEQ ID NO: 2952186 - RNA, 19 nt, Artificial Sequence
  Description of Artificial Sequence: Synthetic oligonucleotide
gagggagcccagacagcug

SEQ ID NO: 2952187 - RNA, 19 nt, Artificial Sequence
  Description of Artificial Sequence: Synthetic oligonucleotide
ggucaucuaccugggucag

SEQ ID NO: 2952188 - RNA, 19 nt, Artificial Sequence
  Description of Artificial Sequence: Synthetic oligonucleotide
gcccagacagcugugguuc

SEQ ID NO: 2952189 - RNA, 19 nt, Artificial Sequence
  Description of Artificial Sequence: Synthetic oligonucleotide
gguaccgcaucugccccag

SEQ ID NO: 2952190 - RNA, 19 nt, Artificial Sequence
  Description of Artificial Sequence: Synthetic oligonucleotide
gucagucaggccacagcga

SEQ ID NO: 2952191 - RNA, 19 nt, Artificial Sequence
  Description of Artificial Sequence: Synthetic oligonucleotide
gaaggaccagggucuggcu

SEQ ID NO: 2952192 - RNA, 19 nt, Artificial Sequence
  Description of Artificial Sequence: Synthetic oligonucleotide
gacccaggucucugaggga

SEQ ID NO: 2952193 - RNA, 19 nt, Artificial Sequence
  Description of Artificial Sequence: Synthetic oligonucleotide
cuaccugggucagggccug

SEQ ID NO: 2952194 - RNA, 19 nt, Artificial Sequence
  Description of Artificial Sequence: Synthetic oligonucleotide
gcugcuccagcaggcacag

SEQ ID NO: 2952195 - RNA, 19 nt, Artificial Sequence
  Description of Artificial Sequence: Synthetic oligonucleotide
caccaguuggaggucaucu

SEQ ID NO: 2952196 - RNA, 19 nt, Artificial Sequence
  Description of Artificial Sequence: Synthetic oligonucleotide
uccccuccagcgugagcgu

SEQ ID NO: 2952197 - RNA, 19 nt, Artificial Sequence
  Description of Artificial Sequence: Synthetic oligonucleotide
agauuccccuccagcguga

SEQ ID NO: 2952198 - RNA, 19 nt, Artificial Sequence
  Description of Artificial Sequence: Synthetic oligonucleotide
gcacccucaccaguuggag

SEQ ID NO: 2952199 - RNA, 19 nt, Artificial Sequence
  Description of Artificial Sequence: Synthetic oligonucleotide
guggccaaccuugggcaca

SEQ ID NO: 2952200 - RNA, 19 nt, Artificial Sequence
  Description of Artificial Sequence: Synthetic oligonucleotide
cagcaccugcagguggccc

SEQ ID NO: 2952201 - RNA, 19 nt, Artificial Sequence
  Description of Artificial Sequence: Synthetic oligonucleotide
caucugccccagguccucc

SEQ ID NO: 2952202 - RNA, 19 nt, Artificial Sequence
  Description of Artificial Sequence: Synthetic oligonucleotide
ccaggucucugagggagcc

SEQ ID NO: 2952203 - RNA, 19 nt, Artificial Sequence
  Description of Artificial Sequence: Synthetic oligonucleotide
gcuucaagcacaccagauu

SEQ ID NO: 2952204 - RNA, 19 nt, Artificial Sequence
  Description of Artificial Sequence: Synthetic oligonucleotide
gguccuccacaucguugcc

SEQ ID NO: 2952205 - RNA, 19 nt, Artificial Sequence
  Description of Artificial Sequence: Synthetic oligonucleotide
ggccacagcgagcuagcca

SEQ ID NO: 2952206 - RNA, 19 nt, Artificial Sequence
  Description of Artificial Sequence: Synthetic oligonucleotide
caggucucugagggagccc

SEQ ID NO: 2952207 - RNA, 19 nt, Artificial Sequence
  Description of Artificial Sequence: Synthetic oligonucleotide
acagugggcucaggucuga

SEQ ID NO: 2952208 - RNA, 19 nt, Artificial Sequence
  Description of Artificial Sequence: Synthetic oligonucleotide
cagcaggcacagugggcuc

SEQ ID NO: 2952209 - RNA, 19 nt, Artificial Sequence
  Description of Artificial Sequence: Synthetic oligonucleotide
gcugcagguaccgcaucug

SEQ ID NO: 2952210 - RNA, 19 nt, Artificial Sequence
  Description of Artificial Sequence: Synthetic oligonucleotide
cagguuagggaggugcacu

SEQ ID NO: 2952211 - RNA, 19 nt, Artificial Sequence
  Description of Artificial Sequence: Synthetic oligonucleotide
guaccgcaucugccccagg

SEQ ID NO: 2952212 - RNA, 19 nt, Artificial Sequence
  Description of Artificial Sequence: Synthetic oligonucleotide
gcagguggcccagagaagu

SEQ ID NO: 2952213 - RNA, 19 nt, Artificial Sequence
  Description of Artificial Sequence: Synthetic oligonucleotide
ggugcacuccgaaguuccc

SEQ ID NO: 2952214 - RNA, 19 nt, Artificial Sequence
  Description of Artificial Sequence: Synthetic oligonucleotide
cgcguguccacacacaucu

SEQ ID NO: 2952215 - RNA, 19 nt, Artificial Sequence
  Description of Artificial Sequence: Synthetic oligonucleotide
ggucugagauauuguugua

SEQ ID NO: 2952216 - RNA, 19 nt, Artificial Sequence
  Description of Artificial Sequence: Synthetic oligonucleotide
gccauccaagucagucagg

SEQ ID NO: 2952217 - RNA, 19 nt, Artificial Sequence
  Description of Artificial Sequence: Synthetic oligonucleotide
cagcugugguucagcuuca

SEQ ID NO: 2952218 - RNA, 19 nt, Artificial Sequence
  Description of Artificial Sequence: Synthetic oligonucleotide
cagugggcucaggucugag

SEQ ID NO: 2952219 - RNA, 19 nt, Artificial Sequence
  Description of Artificial Sequence: Synthetic oligonucleotide
gccaaccuugggcacagcu

SEQ ID NO: 2952220 - RNA, 19 nt, Artificial Sequence
  Description of Artificial Sequence: Synthetic oligonucleotide
cagcugcagguaccgcauc

SEQ ID NO: 2952221 - RNA, 19 nt, Artificial Sequence
  Description of Artificial Sequence: Synthetic oligonucleotide
guuccccaggcuguucuua

SEQ ID NO: 2952222 - RNA, 19 nt, Artificial Sequence
  Description of Artificial Sequence: Synthetic oligonucleotide
gccacagcaccugcaggug

SEQ ID NO: 2952223 - RNA, 19 nt, Artificial Sequence
  Description of Artificial Sequence: Synthetic oligonucleotide
ccagcacccucaccaguug

SEQ ID NO: 2952224 - RNA, 19 nt, Artificial Sequence
  Description of Artificial Sequence: Synthetic oligonucleotide
gcuagccacagcaccugca

SEQ ID NO: 2952225 - RNA, 19 nt, Artificial Sequence
  Description of Artificial Sequence: Synthetic oligonucleotide
cuccagcgugagcguggcc

SEQ ID NO: 2952226 - RNA, 19 nt, Artificial Sequence
  Description of Artificial Sequence: Synthetic oligonucleotide
ggcuguucuuacgcguguc

SEQ ID NO: 2952227 - RNA, 19 nt, Artificial Sequence
  Description of Artificial Sequence: Synthetic oligonucleotide
caggcacagugggcucagg

SEQ ID NO: 2952228 - RNA, 19 nt, Artificial Sequence
  Description of Artificial Sequence: Synthetic oligonucleotide
ccagagaagugacccaggu

SEQ ID NO: 2952229 - RNA, 19 nt, Artificial Sequence
  Description of Artificial Sequence: Synthetic oligonucleotide
ggaucagguuagggaggug

SEQ ID NO: 2952230 - RNA, 19 nt, Artificial Sequence
  Description of Artificial Sequence: Synthetic oligonucleotide
ggaggugcacuccgaaguu

SEQ ID NO: 2952231 - RNA, 19 nt, Artificial Sequence
  Description of Artificial Sequence: Synthetic oligonucleotide
ggcuucaagcacaccagau

SEQ ID NO: 2952232 - RNA, 19 nt, Artificial Sequence
  Description of Artificial Sequence: Synthetic oligonucleotide
gguucagcuucaguuggau

SEQ ID NO: 2952233 - RNA, 19 nt, Artificial Sequence
  Description of Artificial Sequence: Synthetic oligonucleotide
cuccgaaguuccccaggcu

SEQ ID NO: 2952234 - RNA, 19 nt, Artificial Sequence
  Description of Artificial Sequence: Synthetic oligonucleotide
uaccugggucagggccugc

SEQ ID NO: 2952235 - RNA, 19 nt, Artificial Sequence
  Description of Artificial Sequence: Synthetic oligonucleotide
ccuccagcgugagcguggc

SEQ ID NO: 2952236 - RNA, 19 nt, Artificial Sequence
  Description of Artificial Sequence: Synthetic oligonucleotide
cagcgugagcguggccaac

SEQ ID NO: 2952237 - RNA, 19 nt, Artificial Sequence
  Description of Artificial Sequence: Synthetic oligonucleotide
ccaggcuguucuuacgcgu

SEQ ID NO: 2952238 - RNA, 19 nt, Artificial Sequence
  Description of Artificial Sequence: Synthetic oligonucleotide
cucaccaguuggaggucau

SEQ ID NO: 2952239 - RNA, 19 nt, Artificial Sequence
  Description of Artificial Sequence: Synthetic oligonucleotide
ccagauuccccuccagcgu

SEQ ID NO: 2952240 - RNA, 19 nt, Artificial Sequence
  Description of Artificial Sequence: Synthetic oligonucleotide
cguggccaaccuugggcac

SEQ ID NO: 2952241 - RNA, 19 nt, Artificial Sequence
  Description of Artificial Sequence: Synthetic oligonucleotide
cgagcuagccacagcaccu

SEQ ID NO: 2952242 - RNA, 19 nt, Artificial Sequence
  Description of Artificial Sequence: Synthetic oligonucleotide
cacacaucuccagcacccu

SEQ ID NO: 2952243 - RNA, 19 nt, Artificial Sequence
  Description of Artificial Sequence: Synthetic oligonucleotide
ccugcagguggcccagaga

SEQ ID NO: 2952244 - RNA, 19 nt, Artificial Sequence
  Description of Artificial Sequence: Synthetic oligonucleotide
gggagcccagacagcugug

SEQ ID NO: 2952245 - RNA, 19 nt, Artificial Sequence
  Description of Artificial Sequence: Synthetic oligonucleotide
ggaccagggucuggcuuca

SEQ ID NO: 2952246 - RNA, 19 nt, Artificial Sequence
  Description of Artificial Sequence: Synthetic oligonucleotide
gcaucugccccagguccuc

SEQ ID NO: 2952247 - RNA, 19 nt, Artificial Sequence
  Description of Artificial Sequence: Synthetic oligonucleotide
ccacaucguugcccucgag

SEQ ID NO: 2952248 - RNA, 19 nt, Artificial Sequence
  Description of Artificial Sequence: Synthetic oligonucleotide
caaugccauccaagucagu

SEQ ID NO: 2952249 - RNA, 19 nt, Artificial Sequence
  Description of Artificial Sequence: Synthetic oligonucleotide
gugccaagaaggagccaau

SEQ ID NO: 2952250 - RNA, 19 nt, Artificial Sequence
  Description of Artificial Sequence: Synthetic oligonucleotide
ccucaccaguuggagguca

SEQ ID NO: 2952251 - RNA, 19 nt, Artificial Sequence
  Description of Artificial Sequence: Synthetic oligonucleotide
ggaggucaucuaccugggu

SEQ ID NO: 2952252 - RNA, 19 nt, Artificial Sequence
  Description of Artificial Sequence: Synthetic oligonucleotide
cagugccaagaaggagcca

SEQ ID NO: 2952253 - RNA, 19 nt, Artificial Sequence
  Description of Artificial Sequence: Synthetic oligonucleotide
ccagcgugagcguggccaa

SEQ ID NO: 2952254 - RNA, 19 nt, Artificial Sequence
  Description of Artificial Sequence: Synthetic oligonucleotide
cccagacagcugugguuca

SEQ ID NO: 2952255 - RNA, 19 nt, Artificial Sequence
  Description of Artificial Sequence: Synthetic oligonucleotide
gucaggccacagcgagcua

SEQ ID NO: 2952256 - RNA, 19 nt, Artificial Sequence
  Description of Artificial Sequence: Synthetic oligonucleotide
cccucgagguccagcaccu

SEQ ID NO: 2952257 - RNA, 19 nt, Artificial Sequence
  Description of Artificial Sequence: Synthetic oligonucleotide
ccacagcgagcuagccaca

SEQ ID NO: 2952258 - RNA, 19 nt, Artificial Sequence
  Description of Artificial Sequence: Synthetic oligonucleotide
gccccagguccuccacauc

SEQ ID NO: 2952259 - RNA, 19 nt, Artificial Sequence
  Description of Artificial Sequence: Synthetic oligonucleotide
gaccagggucuggcuucaa

SEQ ID NO: 2952260 - RNA, 19 nt, Artificial Sequence
  Description of Artificial Sequence: Synthetic oligonucleotide
ccccuccagcgugagcgug

SEQ ID NO: 2952261 - RNA, 19 nt, Artificial Sequence
  Description of Artificial Sequence: Synthetic oligonucleotide
cccucaccaguuggagguc

SEQ ID NO: 2952262 - RNA, 19 nt, Artificial Sequence
  Description of Artificial Sequence: Synthetic oligonucleotide
ccaagucagucaggccaca

SEQ ID NO: 2952263 - RNA, 19 nt, Artificial Sequence
  Description of Artificial Sequence: Synthetic oligonucleotide
gcguguccacacacaucuc

SEQ ID NO: 2952264 - RNA, 19 nt, Artificial Sequence
  Description of Artificial Sequence: Synthetic oligonucleotide
cccagguccuccacaucgu

SEQ ID NO: 2952265 - RNA, 19 nt, Artificial Sequence
  Description of Artificial Sequence: Synthetic oligonucleotide
ggccaaccuugggcacagc

SEQ ID NO: 2952266 - RNA, 19 nt, Artificial Sequence
  Description of Artificial Sequence: Synthetic oligonucleotide
ccucgagguccagcaccuc

SEQ ID NO: 2952267 - RNA, 19 nt, Artificial Sequence
  Description of Artificial Sequence: Synthetic oligonucleotide
cguugcccucgagguccag

SEQ ID NO: 2952268 - RNA, 19 nt, Artificial Sequence
  Description of Artificial Sequence: Synthetic oligonucleotide
ggcucaggucugagauauu

SEQ ID NO: 2952269 - RNA, 19 nt, Artificial Sequence
  Description of Artificial Sequence: Synthetic oligonucleotide
cugcuccagcaggcacagu

SEQ ID NO: 2952270 - RNA, 19 nt, Artificial Sequence
  Description of Artificial Sequence: Synthetic oligonucleotide
aauagcacaugacaucucc

SEQ ID NO: 2952271 - RNA, 19 nt, Artificial Sequence
  Description of Artificial Sequence: Synthetic oligonucleotide
aggaauauagaacuucucc

SEQ ID NO: 2952272 - RNA, 19 nt, Artificial Sequence
  Description of Artificial Sequence: Synthetic oligonucleotide
acuuuaaagaugccaaucc

SEQ ID NO: 2952273 - RNA, 19 nt, Artificial Sequence
  Description of Artificial Sequence: Synthetic oligonucleotide
gaagguauaauacucucgg

SEQ ID NO: 2952274 - RNA, 19 nt, Artificial Sequence
  Description of Artificial Sequence: Synthetic oligonucleotide
aaagcaacccacaugaagg

SEQ ID NO: 2952275 - RNA, 19 nt, Artificial Sequence
  Description of Artificial Sequence: Synthetic oligonucleotide
uuuaaagaugccaauccag

SEQ ID NO: 2952276 - RNA, 19 nt, Artificial Sequence
  Description of Artificial Sequence: Synthetic oligonucleotide
agauaguaggcuuugaacu

SEQ ID NO: 2952277 - RNA, 19 nt, Artificial Sequence
  Description of Artificial Sequence: Synthetic oligonucleotide
auauagaacuucuccacac

SEQ ID NO: 2952278 - RNA, 19 nt, Artificial Sequence
  Description of Artificial Sequence: Synthetic oligonucleotide
agagaaacugcaauguucc

SEQ ID NO: 2952279 - RNA, 19 nt, Artificial Sequence
  Description of Artificial Sequence: Synthetic oligonucleotide
ugaagguauaauacucucg

SEQ ID NO: 2952280 - RNA, 19 nt, Artificial Sequence
  Description of Artificial Sequence: Synthetic oligonucleotide
augcucaucauccuugggc

SEQ ID NO: 2952281 - RNA, 19 nt, Artificial Sequence
  Description of Artificial Sequence: Synthetic oligonucleotide
agugguaacaaccacuaug

SEQ ID NO: 2952282 - RNA, 19 nt, Artificial Sequence
  Description of Artificial Sequence: Synthetic oligonucleotide
aauauagaacuucuccaca

SEQ ID NO: 2952283 - RNA, 19 nt, Artificial Sequence
  Description of Artificial Sequence: Synthetic oligonucleotide
cugguaaugcucaucaucc

SEQ ID NO: 2952284 - RNA, 19 nt, Artificial Sequence
  Description of Artificial Sequence: Synthetic oligonucleotide
acugcaauguuccagcaag

SEQ ID NO: 2952285 - RNA, 19 nt, Artificial Sequence
  Description of Artificial Sequence: Synthetic oligonucleotide
uuaaacaccaccugagaga

SEQ ID NO: 2952286 - RNA, 19 nt, Artificial Sequence
  Description of Artificial Sequence: Synthetic oligonucleotide
gaaacugcaauguuccagc

SEQ ID NO: 2952287 - RNA, 19 nt, Artificial Sequence
  Description of Artificial Sequence: Synthetic oligonucleotide
cugguuuucccguagaagc

SEQ ID NO: 2952288 - RNA, 19 nt, Artificial Sequence
  Description of Artificial Sequence: Synthetic oligonucleotide
gaauauagaacuucuccac

SEQ ID NO: 2952289 - RNA, 19 nt, Artificial Sequence
  Description of Artificial Sequence: Synthetic oligonucleotide
uuaaagaugccaauccagu

SEQ ID NO: 2952290 - RNA, 19 nt, Artificial Sequence
  Description of Artificial Sequence: Synthetic oligonucleotide
acugguaaugcucaucauc

SEQ ID NO: 2952291 - RNA, 19 nt, Artificial Sequence
  Description of Artificial Sequence: Synthetic oligonucleotide
guuaaacaccaccugagag

SEQ ID NO: 2952292 - RNA, 19 nt, Artificial Sequence
  Description of Artificial Sequence: Synthetic oligonucleotide
gauaguaggcuuugaacug

SEQ ID NO: 2952293 - RNA, 19 nt, Artificial Sequence
  Description of Artificial Sequence: Synthetic oligonucleotide
ucccuuagugguaacaacc

SEQ ID NO: 2952294 - RNA, 19 nt, Artificial Sequence
  Description of Artificial Sequence: Synthetic oligonucleotide
uuugaacuggacuuccugc

SEQ ID NO: 2952295 - RNA, 19 nt, Artificial Sequence
  Description of Artificial Sequence: Synthetic oligonucleotide
aagguauaauacucucggg

SEQ ID NO: 2952296 - RNA, 19 nt, Artificial Sequence
  Description of Artificial Sequence: Synthetic oligonucleotide
uccuugggcagauaguagg

SEQ ID NO: 2952297 - RNA, 19 nt, Artificial Sequence
  Description of Artificial Sequence: Synthetic oligonucleotide
uguaauagcacaugacauc

SEQ ID NO: 2952298 - RNA, 19 nt, Artificial Sequence
  Description of Artificial Sequence: Synthetic oligonucleotide
uccaccuuucccuuagugg

SEQ ID NO: 2952299 - RNA, 19 nt, Artificial Sequence
  Description of Artificial Sequence: Synthetic oligonucleotide
augaagguauaauacucuc

SEQ ID NO: 2952300 - RNA, 19 nt, Artificial Sequence
  Description of Artificial Sequence: Synthetic oligonucleotide
agcacaugacaucuccucc

SEQ ID NO: 2952301 - RNA, 19 nt, Artificial Sequence
  Description of Artificial Sequence: Synthetic oligonucleotide
uuguuuaggucacugggca

SEQ ID NO: 2952302 - RNA, 19 nt, Artificial Sequence
  Description of Artificial Sequence: Synthetic oligonucleotide
gguaacaaccacuaugucc

SEQ ID NO: 2952303 - RNA, 19 nt, Artificial Sequence
  Description of Artificial Sequence: Synthetic oligonucleotide
uucuggacggaacuggaag

SEQ ID NO: 2952304 - RNA, 19 nt, Artificial Sequence
  Description of Artificial Sequence: Synthetic oligonucleotide
agguauaauacucucgggu

SEQ ID NO: 2952305 - RNA, 19 nt, Artificial Sequence
  Description of Artificial Sequence: Synthetic oligonucleotide
cacacuguuaaacaccacc

SEQ ID NO: 2952306 - RNA, 19 nt, Artificial Sequence
  Description of Artificial Sequence: Synthetic oligonucleotide
aagguguaauagcacauga

SEQ ID NO: 2952307 - RNA, 19 nt, Artificial Sequence
  Description of Artificial Sequence: Synthetic oligonucleotide
auuguguugcucuaucucu

SEQ ID NO: 2952308 - RNA, 19 nt, Artificial Sequence
  Description of Artificial Sequence: Synthetic oligonucleotide
ucuggacggaacuggaagg

SEQ ID NO: 2952309 - RNA, 19 nt, Artificial Sequence
  Description of Artificial Sequence: Synthetic oligonucleotide
acuguuaaacaccaccuga

SEQ ID NO: 2952310 - RNA, 19 nt, Artificial Sequence
  Description of Artificial Sequence: Synthetic oligonucleotide
auagcagaacugguaaugc

SEQ ID NO: 2952311 - RNA, 19 nt, Artificial Sequence
  Description of Artificial Sequence: Synthetic oligonucleotide
uuagugguaacaaccacua

SEQ ID NO: 2952312 - RNA, 19 nt, Artificial Sequence
  Description of Artificial Sequence: Synthetic oligonucleotide
acaugaagguauaauacuc

SEQ ID NO: 2952313 - RNA, 19 nt, Artificial Sequence
  Description of Artificial Sequence: Synthetic oligonucleotide
ugcucuaucucuuccaccu

SEQ ID NO: 2952314 - RNA, 19 nt, Artificial Sequence
  Description of Artificial Sequence: Synthetic oligonucleotide
cuuguuuaggucacugggc

SEQ ID NO: 2952315 - RNA, 19 nt, Artificial Sequence
  Description of Artificial Sequence: Synthetic oligonucleotide
aagcuccuuauuguguugc

SEQ ID NO: 2952316 - RNA, 19 nt, Artificial Sequence
  Description of Artificial Sequence: Synthetic oligonucleotide
aucucuuccaccuuucccu

SEQ ID NO: 2952317 - RNA, 19 nt, Artificial Sequence
  Description of Artificial Sequence: Synthetic oligonucleotide
gaacugguaaugcucauca

SEQ ID NO: 2952318 - RNA, 19 nt, Artificial Sequence
  Description of Artificial Sequence: Synthetic oligonucleotide
uccacacuguuaaacacca

SEQ ID NO: 2952319 - RNA, 19 nt, Artificial Sequence
  Description of Artificial Sequence: Synthetic oligonucleotide
uauuguguugcucuaucuc

SEQ ID NO: 2952320 - RNA, 19 nt, Artificial Sequence
  Description of Artificial Sequence: Synthetic oligonucleotide
auagaacuucuccacacug

SEQ ID NO: 2952321 - RNA, 19 nt, Artificial Sequence
  Description of Artificial Sequence: Synthetic oligonucleotide
caaagcaacccacaugaag

SEQ ID NO: 2952322 - RNA, 19 nt, Artificial Sequence
  Description of Artificial Sequence: Synthetic oligonucleotide
aauacucucggguugucuu

SEQ ID NO: 2952323 - RNA, 19 nt, Artificial Sequence
  Description of Artificial Sequence: Synthetic oligonucleotide
uguuaaacaccaccugaga

SEQ ID NO: 2952324 - RNA, 19 nt, Artificial Sequence
  Description of Artificial Sequence: Synthetic oligonucleotide
aacaaccacuauguccucc

SEQ ID NO: 2952325 - RNA, 19 nt, Artificial Sequence
  Description of Artificial Sequence: Synthetic oligonucleotide
ucaguuucuggacggaacu

SEQ ID NO: 2952326 - RNA, 19 nt, Artificial Sequence
  Description of Artificial Sequence: Synthetic oligonucleotide
uccuccaggaauauagaac

SEQ ID NO: 2952327 - RNA, 19 nt, Artificial Sequence
  Description of Artificial Sequence: Synthetic oligonucleotide
cuguuaaacaccaccugag

SEQ ID NO: 2952328 - RNA, 19 nt, Artificial Sequence
  Description of Artificial Sequence: Synthetic oligonucleotide
caccccacuuuaaagaugc

SEQ ID NO: 2952329 - RNA, 19 nt, Artificial Sequence
  Description of Artificial Sequence: Synthetic oligonucleotide
uaggcuuugaacuggacuu

SEQ ID NO: 2952330 - RNA, 19 nt, Artificial Sequence
  Description of Artificial Sequence: Synthetic oligonucleotide
uugggugaagguguaauag

SEQ ID NO: 2952331 - RNA, 19 nt, Artificial Sequence
  Description of Artificial Sequence: Synthetic oligonucleotide
uaucucuuccaccuuuccc

SEQ ID NO: 2952332 - RNA, 19 nt, Artificial Sequence
  Description of Artificial Sequence: Synthetic oligonucleotide
uaaugcucaucauccuugg

SEQ ID NO: 2952333 - RNA, 19 nt, Artificial Sequence
  Description of Artificial Sequence: Synthetic oligonucleotide
guauaauacucucggguug

SEQ ID NO: 2952334 - RNA, 19 nt, Artificial Sequence
  Description of Artificial Sequence: Synthetic oligonucleotide
uauagaacuucuccacacu

SEQ ID NO: 2952335 - RNA, 19 nt, Artificial Sequence
  Description of Artificial Sequence: Synthetic oligonucleotide
ugccaauccaguccuugcg

SEQ ID NO: 2952336 - RNA, 19 nt, Artificial Sequence
  Description of Artificial Sequence: Synthetic oligonucleotide
cagauaguaggcuuugaac

SEQ ID NO: 2952337 - RNA, 19 nt, Artificial Sequence
  Description of Artificial Sequence: Synthetic oligonucleotide
uucuccacacuguuaaaca

SEQ ID NO: 2952338 - RNA, 19 nt, Artificial Sequence
  Description of Artificial Sequence: Synthetic oligonucleotide
uaggucacugggcaaagca

SEQ ID NO: 2952339 - RNA, 19 nt, Artificial Sequence
  Description of Artificial Sequence: Synthetic oligonucleotide
aaugcucaucauccuuggg

SEQ ID NO: 2952340 - RNA, 19 nt, Artificial Sequence
  Description of Artificial Sequence: Synthetic oligonucleotide
ucuuccaccuuucccuuag

SEQ ID NO: 2952341 - RNA, 19 nt, Artificial Sequence
  Description of Artificial Sequence: Synthetic oligonucleotide
agaaacugcaauguuccag

SEQ ID NO: 2952342 - RNA, 19 nt, Artificial Sequence
  Description of Artificial Sequence: Synthetic oligonucleotide
aguccuugcgacgagggac

SEQ ID NO: 2952343 - RNA, 19 nt, Artificial Sequence
  Description of Artificial Sequence: Synthetic oligonucleotide
auccacauagcagaacugg

SEQ ID NO: 2952344 - RNA, 19 nt, Artificial Sequence
  Description of Artificial Sequence: Synthetic oligonucleotide
acgagggacgaacuguugg

SEQ ID NO: 2952345 - RNA, 19 nt, Artificial Sequence
  Description of Artificial Sequence: Synthetic oligonucleotide
accacuauguccuccucag

SEQ ID NO: 2952346 - RNA, 19 nt, Artificial Sequence
  Description of Artificial Sequence: Synthetic oligonucleotide
gguguaauagcacaugaca

SEQ ID NO: 2952347 - RNA, 19 nt, Artificial Sequence
  Description of Artificial Sequence: Synthetic oligonucleotide
guagaagcuccuuauugug

SEQ ID NO: 2952348 - RNA, 19 nt, Artificial Sequence
  Description of Artificial Sequence: Synthetic oligonucleotide
uaaacaccaccugagagaa

SEQ ID NO: 2952349 - RNA, 19 nt, Artificial Sequence
  Description of Artificial Sequence: Synthetic oligonucleotide
ggcaaagcaacccacauga

SEQ ID NO: 2952350 - RNA, 19 nt, Artificial Sequence
  Description of Artificial Sequence: Synthetic oligonucleotide
uuccaccccacuuuaaaga

SEQ ID NO: 2952351 - RNA, 19 nt, Artificial Sequence
  Description of Artificial Sequence: Synthetic oligonucleotide
uccuuguuuaggucacugg

SEQ ID NO: 2952352 - RNA, 19 nt, Artificial Sequence
  Description of Artificial Sequence: Synthetic oligonucleotide
uaaagaugccaauccaguc

SEQ ID NO: 2952353 - RNA, 19 nt, Artificial Sequence
  Description of Artificial Sequence: Synthetic oligonucleotide
acuuccugcugcuugguug

SEQ ID NO: 2952354 - RNA, 19 nt, Artificial Sequence
  Description of Artificial Sequence: Synthetic oligonucleotide
ggaauauagaacuucucca

SEQ ID NO: 2952355 - RNA, 19 nt, Artificial Sequence
  Description of Artificial Sequence: Synthetic oligonucleotide
aguuucuggacggaacugg

SEQ ID NO: 2952356 - RNA, 19 nt, Artificial Sequence
  Description of Artificial Sequence: Synthetic oligonucleotide
auaguaggcuuugaacugg

SEQ ID NO: 2952357 - RNA, 19 nt, Artificial Sequence
  Description of Artificial Sequence: Synthetic oligonucleotide
guaacaaccacuauguccu

SEQ ID NO: 2952358 - RNA, 19 nt, Artificial Sequence
  Description of Artificial Sequence: Synthetic oligonucleotide
uuauuguguugcucuaucu

SEQ ID NO: 2952359 - RNA, 19 nt, Artificial Sequence
  Description of Artificial Sequence: Synthetic oligonucleotide
augccaauccaguccuugc

SEQ ID NO: 2952360 - RNA, 19 nt, Artificial Sequence
  Description of Artificial Sequence: Synthetic oligonucleotide
uugaacuggacuuccugcu

SEQ ID NO: 2952361 - RNA, 19 nt, Artificial Sequence
  Description of Artificial Sequence: Synthetic oligonucleotide
uauaauacucucggguugu

SEQ ID NO: 2952362 - RNA, 19 nt, Artificial Sequence
  Description of Artificial Sequence: Synthetic oligonucleotide
ugaagguguaauagcacau

SEQ ID NO: 2952363 - RNA, 19 nt, Artificial Sequence
  Description of Artificial Sequence: Synthetic oligonucleotide
cuccacacuguuaaacacc

SEQ ID NO: 2952364 - RNA, 19 nt, Artificial Sequence
  Description of Artificial Sequence: Synthetic oligonucleotide
aacuguugggugaaggugu

SEQ ID NO: 2952365 - RNA, 19 nt, Artificial Sequence
  Description of Artificial Sequence: Synthetic oligonucleotide
agcagaacugguaaugcuc

SEQ ID NO: 2952366 - RNA, 19 nt, Artificial Sequence
  Description of Artificial Sequence: Synthetic oligonucleotide
aagcaacccacaugaaggu

SEQ ID NO: 2952367 - RNA, 19 nt, Artificial Sequence
  Description of Artificial Sequence: Synthetic oligonucleotide
uagaacuucuccacacugu

SEQ ID NO: 2952368 - RNA, 19 nt, Artificial Sequence
  Description of Artificial Sequence: Synthetic oligonucleotide
uggacuuccugcugcuugg

SEQ ID NO: 2952369 - RNA, 19 nt, Artificial Sequence
  Description of Artificial Sequence: Synthetic oligonucleotide
aaggggauacuugcucccc

SEQ ID NO: 2952370 - RNA, 19 nt, Artificial Sequence
  Description of Artificial Sequence: Synthetic oligonucleotide
gagagaaacugcaauguuc

SEQ ID NO: 2952371 - RNA, 19 nt, Artificial Sequence
  Description of Artificial Sequence: Synthetic oligonucleotide
gaacuggacuuccugcugc

SEQ ID NO: 2952372 - RNA, 19 nt, Artificial Sequence
  Description of Artificial Sequence: Synthetic oligonucleotide
aaccacuauguccuccuca

SEQ ID NO: 2952373 - RNA, 19 nt, Artificial Sequence
  Description of Artificial Sequence: Synthetic oligonucleotide
ucuccacacuguuaaacac

SEQ ID NO: 2952374 - RNA, 19 nt, Artificial Sequence
  Description of Artificial Sequence: Synthetic oligonucleotide
aauccaguccuugcgacga

SEQ ID NO: 2952375 - RNA, 19 nt, Artificial Sequence
  Description of Artificial Sequence: Synthetic oligonucleotide
uagaagcuccuuauugugu

SEQ ID NO: 2952376 - RNA, 19 nt, Artificial Sequence
  Description of Artificial Sequence: Synthetic oligonucleotide
caugacaucuccuccagga

SEQ ID NO: 2952377 - RNA, 19 nt, Artificial Sequence
  Description of Artificial Sequence: Synthetic oligonucleotide
guaaugcucaucauccuug

SEQ ID NO: 2952378 - RNA, 19 nt, Artificial Sequence
  Description of Artificial Sequence: Synthetic oligonucleotide
gugaagguguaauagcaca

SEQ ID NO: 2952379 - RNA, 19 nt, Artificial Sequence
  Description of Artificial Sequence: Synthetic oligonucleotide
cuuauuguguugcucuauc

SEQ ID NO: 2952380 - RNA, 19 nt, Artificial Sequence
  Description of Artificial Sequence: Synthetic oligonucleotide
uguugcucuaucucuucca

SEQ ID NO: 2952381 - RNA, 19 nt, Artificial Sequence
  Description of Artificial Sequence: Synthetic oligonucleotide
ugguugauuccuuguuuag

SEQ ID NO: 2952382 - RNA, 19 nt, Artificial Sequence
  Description of Artificial Sequence: Synthetic oligonucleotide
ucuuccaccccacuuuaaa

SEQ ID NO: 2952383 - RNA, 19 nt, Artificial Sequence
  Description of Artificial Sequence: Synthetic oligonucleotide
cuuugaacuggacuuccug

SEQ ID NO: 2952384 - RNA, 19 nt, Artificial Sequence
  Description of Artificial Sequence: Synthetic oligonucleotide
gaacuguugggugaaggug

SEQ ID NO: 2952385 - RNA, 19 nt, Artificial Sequence
  Description of Artificial Sequence: Synthetic oligonucleotide
ugacaucuccuccaggaau

SEQ ID NO: 2952386 - RNA, 19 nt, Artificial Sequence
  Description of Artificial Sequence: Synthetic oligonucleotide
gaaggggauacuugcuccc

SEQ ID NO: 2952387 - RNA, 19 nt, Artificial Sequence
  Description of Artificial Sequence: Synthetic oligonucleotide
uccacauagcagaacuggu

SEQ ID NO: 2952388 - RNA, 19 nt, Artificial Sequence
  Description of Artificial Sequence: Synthetic oligonucleotide
cuuuaaagaugccaaucca

SEQ ID NO: 2952389 - RNA, 19 nt, Artificial Sequence
  Description of Artificial Sequence: Synthetic oligonucleotide
cuuccaccccacuuuaaag

SEQ ID NO: 2952390 - RNA, 19 nt, Artificial Sequence
  Description of Artificial Sequence: Synthetic oligonucleotide
gaagguguaauagcacaug

SEQ ID NO: 2952391 - RNA, 19 nt, Artificial Sequence
  Description of Artificial Sequence: Synthetic oligonucleotide
uugguugauuccuuguuua

SEQ ID NO: 2952392 - RNA, 19 nt, Artificial Sequence
  Description of Artificial Sequence: Synthetic oligonucleotide
aaacugcaauguuccagca

SEQ ID NO: 2952393 - RNA, 19 nt, Artificial Sequence
  Description of Artificial Sequence: Synthetic oligonucleotide
cucggguugucuuccaccc

SEQ ID NO: 2952394 - RNA, 19 nt, Artificial Sequence
  Description of Artificial Sequence: Synthetic oligonucleotide
ccuuguuuaggucacuggg

SEQ ID NO: 2952395 - RNA, 19 nt, Artificial Sequence
  Description of Artificial Sequence: Synthetic oligonucleotide
uggaaggggauacuugcuc

SEQ ID NO: 2952396 - RNA, 19 nt, Artificial Sequence
  Description of Artificial Sequence: Synthetic oligonucleotide
uccaggaauauagaacuuc

SEQ ID NO: 2952397 - RNA, 19 nt, Artificial Sequence
  Description of Artificial Sequence: Synthetic oligonucleotide
auacucucggguugucuuc

SEQ ID NO: 2952398 - RNA, 19 nt, Artificial Sequence
  Description of Artificial Sequence: Synthetic oligonucleotide
ucucggguugucuuccacc

SEQ ID NO: 2952399 - RNA, 19 nt, Artificial Sequence
  Description of Artificial Sequence: Synthetic oligonucleotide
acaaccacuauguccuccu

SEQ ID NO: 2952400 - RNA, 19 nt, Artificial Sequence
  Description of Artificial Sequence: Synthetic oligonucleotide
guugauuccuuguuuaggu

SEQ ID NO: 2952401 - RNA, 19 nt, Artificial Sequence
  Description of Artificial Sequence: Synthetic oligonucleotide
agaacugguaaugcucauc

SEQ ID NO: 2952402 - RNA, 19 nt, Artificial Sequence
  Description of Artificial Sequence: Synthetic oligonucleotide
agguguaauagcacaugac

SEQ ID NO: 2952403 - RNA, 19 nt, Artificial Sequence
  Description of Artificial Sequence: Synthetic oligonucleotide
uuccaccuuucccuuagug

SEQ ID NO: 2952404 - RNA, 19 nt, Artificial Sequence
  Description of Artificial Sequence: Synthetic oligonucleotide
ugagagaaacugcaauguu

SEQ ID NO: 2952405 - RNA, 19 nt, Artificial Sequence
  Description of Artificial Sequence: Synthetic oligonucleotide
ucuaucucuuccaccuuuc

SEQ ID NO: 2952406 - RNA, 19 nt, Artificial Sequence
  Description of Artificial Sequence: Synthetic oligonucleotide
cucaguuucuggacggaac

SEQ ID NO: 2952407 - RNA, 19 nt, Artificial Sequence
  Description of Artificial Sequence: Synthetic oligonucleotide
agaagcuccuuauuguguu

SEQ ID NO: 2952408 - RNA, 19 nt, Artificial Sequence
  Description of Artificial Sequence: Synthetic oligonucleotide
caauccaguccuugcgacg

SEQ ID NO: 2952409 - RNA, 19 nt, Artificial Sequence
  Description of Artificial Sequence: Synthetic oligonucleotide
uuucccuuagugguaacaa

SEQ ID NO: 2952410 - RNA, 19 nt, Artificial Sequence
  Description of Artificial Sequence: Synthetic oligonucleotide
ccacaugaagguauaauac

SEQ ID NO: 2952411 - RNA, 19 nt, Artificial Sequence
  Description of Artificial Sequence: Synthetic oligonucleotide
cuccucaguuucuggacgg

SEQ ID NO: 2952412 - RNA, 19 nt, Artificial Sequence
  Description of Artificial Sequence: Synthetic oligonucleotide
aacuggaaggggauacuug

SEQ ID NO: 2952413 - RNA, 19 nt, Artificial Sequence
  Description of Artificial Sequence: Synthetic oligonucleotide
cacuuuaaagaugccaauc

SEQ ID NO: 2952414 - RNA, 19 nt, Artificial Sequence
  Description of Artificial Sequence: Synthetic oligonucleotide
acacuguuaaacaccaccu

SEQ ID NO: 2952415 - RNA, 19 nt, Artificial Sequence
  Description of Artificial Sequence: Synthetic oligonucleotide
gaugccaauccaguccuug

SEQ ID NO: 2952416 - RNA, 19 nt, Artificial Sequence
  Description of Artificial Sequence: Synthetic oligonucleotide
gauuccuuguuuaggucac

SEQ ID NO: 2952417 - RNA, 19 nt, Artificial Sequence
  Description of Artificial Sequence: Synthetic oligonucleotide
uuuaggucacugggcaaag

SEQ ID NO: 2952418 - RNA, 19 nt, Artificial Sequence
  Description of Artificial Sequence: Synthetic oligonucleotide
cuugcgacgagggacgaac

SEQ ID NO: 2952419 - RNA, 19 nt, Artificial Sequence
  Description of Artificial Sequence: Synthetic oligonucleotide
auacuugcuccccggacca

SEQ ID NO: 2952420 - RNA, 19 nt, Artificial Sequence
  Description of Artificial Sequence: Synthetic oligonucleotide
guugcucuaucucuuccac

SEQ ID NO: 2952421 - RNA, 19 nt, Artificial Sequence
  Description of Artificial Sequence: Synthetic oligonucleotide
guaauagcacaugacaucu

SEQ ID NO: 2952422 - RNA, 19 nt, Artificial Sequence
  Description of Artificial Sequence: Synthetic oligonucleotide
ugcuccccggaccacacca

SEQ ID NO: 2952423 - RNA, 19 nt, Artificial Sequence
  Description of Artificial Sequence: Synthetic oligonucleotide
cuuagugguaacaaccacu

SEQ ID NO: 2952424 - RNA, 19 nt, Artificial Sequence
  Description of Artificial Sequence: Synthetic oligonucleotide
uagcagaacugguaaugcu

SEQ ID NO: 2952425 - RNA, 19 nt, Artificial Sequence
  Description of Artificial Sequence: Synthetic oligonucleotide
ucuccuccaggaauauaga

SEQ ID NO: 2952426 - RNA, 19 nt, Artificial Sequence
  Description of Artificial Sequence: Synthetic oligonucleotide
uguccuccucaguuucugg

SEQ ID NO: 2952427 - RNA, 19 nt, Artificial Sequence
  Description of Artificial Sequence: Synthetic oligonucleotide
uccaccccacuuuaaagau

SEQ ID NO: 2952428 - RNA, 19 nt, Artificial Sequence
  Description of Artificial Sequence: Synthetic oligonucleotide
uucccuuagugguaacaac

SEQ ID NO: 2952429 - RNA, 19 nt, Artificial Sequence
  Description of Artificial Sequence: Synthetic oligonucleotide
gaagcuccuuauuguguug

SEQ ID NO: 2952430 - RNA, 19 nt, Artificial Sequence
  Description of Artificial Sequence: Synthetic oligonucleotide
ggaaggggauacuugcucc

SEQ ID NO: 2952431 - RNA, 19 nt, Artificial Sequence
  Description of Artificial Sequence: Synthetic oligonucleotide
uugauuccuuguuuagguc

SEQ ID NO: 2952432 - RNA, 19 nt, Artificial Sequence
  Description of Artificial Sequence: Synthetic oligonucleotide
gguugauuccuuguuuagg

SEQ ID NO: 2952433 - RNA, 19 nt, Artificial Sequence
  Description of Artificial Sequence: Synthetic oligonucleotide
accuugauccacauagcag

SEQ ID NO: 2952434 - RNA, 19 nt, Artificial Sequence
  Description of Artificial Sequence: Synthetic oligonucleotide
cacuguuaaacaccaccug

SEQ ID NO: 2952435 - RNA, 19 nt, Artificial Sequence
  Description of Artificial Sequence: Synthetic oligonucleotide
acgaacuguugggugaagg

SEQ ID NO: 2952436 - RNA, 19 nt, Artificial Sequence
  Description of Artificial Sequence: Synthetic oligonucleotide
aacuggacuuccugcugcu

SEQ ID NO: 2952437 - RNA, 19 nt, Artificial Sequence
  Description of Artificial Sequence: Synthetic oligonucleotide
aggggauacuugcuccccg

SEQ ID NO: 2952438 - RNA, 19 nt, Artificial Sequence
  Description of Artificial Sequence: Synthetic oligonucleotide
cuauguccuccucaguuuc

SEQ ID NO: 2952439 - RNA, 19 nt, Artificial Sequence
  Description of Artificial Sequence: Synthetic oligonucleotide
uugcucuaucucuuccacc

SEQ ID NO: 2952440 - RNA, 19 nt, Artificial Sequence
  Description of Artificial Sequence: Synthetic oligonucleotide
cacauagcagaacugguaa

SEQ ID NO: 2952441 - RNA, 19 nt, Artificial Sequence
  Description of Artificial Sequence: Synthetic oligonucleotide
uguugggugaagguguaau

SEQ ID NO: 2952442 - RNA, 19 nt, Artificial Sequence
  Description of Artificial Sequence: Synthetic oligonucleotide
ugggcaaagcaacccacau

SEQ ID NO: 2952443 - RNA, 19 nt, Artificial Sequence
  Description of Artificial Sequence: Synthetic oligonucleotide
acuauguccuccucaguuu

SEQ ID NO: 2952444 - RNA, 19 nt, Artificial Sequence
  Description of Artificial Sequence: Synthetic oligonucleotide
acaugacaucuccuccagg

SEQ ID NO: 2952445 - RNA, 19 nt, Artificial Sequence
  Description of Artificial Sequence: Synthetic oligonucleotide
acugggcaaagcaacccac

SEQ ID NO: 2952446 - RNA, 19 nt, Artificial Sequence
  Description of Artificial Sequence: Synthetic oligonucleotide
agggacgaacuguugggug

SEQ ID NO: 2952447 - RNA, 19 nt, Artificial Sequence
  Description of Artificial Sequence: Synthetic oligonucleotide
ugcgacgagggacgaacug

SEQ ID NO: 2952448 - RNA, 19 nt, Artificial Sequence
  Description of Artificial Sequence: Synthetic oligonucleotide
ccugagagaaacugcaaug

SEQ ID NO: 2952449 - RNA, 19 nt, Artificial Sequence
  Description of Artificial Sequence: Synthetic oligonucleotide
uaguaggcuuugaacugga

SEQ ID NO: 2952450 - RNA, 19 nt, Artificial Sequence
  Description of Artificial Sequence: Synthetic oligonucleotide
uuccuuguuuaggucacug

SEQ ID NO: 2952451 - RNA, 19 nt, Artificial Sequence
  Description of Artificial Sequence: Synthetic oligonucleotide
cuaucucuuccaccuuucc

SEQ ID NO: 2952452 - RNA, 19 nt, Artificial Sequence
  Description of Artificial Sequence: Synthetic oligonucleotide
ucacugggcaaagcaaccc

SEQ ID NO: 2952453 - RNA, 19 nt, Artificial Sequence
  Description of Artificial Sequence: Synthetic oligonucleotide
uccuccucaguuucuggac

SEQ ID NO: 2952454 - RNA, 19 nt, Artificial Sequence
  Description of Artificial Sequence: Synthetic oligonucleotide
uggacggaacuggaagggg

SEQ ID NO: 2952455 - RNA, 19 nt, Artificial Sequence
  Description of Artificial Sequence: Synthetic oligonucleotide
cuggacuuccugcugcuug

SEQ ID NO: 2952456 - RNA, 19 nt, Artificial Sequence
  Description of Artificial Sequence: Synthetic oligonucleotide
cuggacggaacuggaaggg

SEQ ID NO: 2952457 - RNA, 19 nt, Artificial Sequence
  Description of Artificial Sequence: Synthetic oligonucleotide
uguguugcucuaucucuuc

SEQ ID NO: 2952458 - RNA, 19 nt, Artificial Sequence
  Description of Artificial Sequence: Synthetic oligonucleotide
uuguguugcucuaucucuu

SEQ ID NO: 2952459 - RNA, 19 nt, Artificial Sequence
  Description of Artificial Sequence: Synthetic oligonucleotide
cacaugacaucuccuccag

SEQ ID NO: 2952460 - RNA, 19 nt, Artificial Sequence
  Description of Artificial Sequence: Synthetic oligonucleotide
uuucuggacggaacuggaa

SEQ ID NO: 2952461 - RNA, 19 nt, Artificial Sequence
  Description of Artificial Sequence: Synthetic oligonucleotide
caggaauauagaacuucuc

SEQ ID NO: 2952462 - RNA, 19 nt, Artificial Sequence
  Description of Artificial Sequence: Synthetic oligonucleotide
ccuugauccacauagcaga

SEQ ID NO: 2952463 - RNA, 19 nt, Artificial Sequence
  Description of Artificial Sequence: Synthetic oligonucleotide
ugcugcuugguugauuccu

SEQ ID NO: 2952464 - RNA, 19 nt, Artificial Sequence
  Description of Artificial Sequence: Synthetic oligonucleotide
uaauagcacaugacaucuc

SEQ ID NO: 2952465 - RNA, 19 nt, Artificial Sequence
  Description of Artificial Sequence: Synthetic oligonucleotide
caugaagguauaauacucu

SEQ ID NO: 2952466 - RNA, 19 nt, Artificial Sequence
  Description of Artificial Sequence: Synthetic oligonucleotide
gauccacauagcagaacug

SEQ ID NO: 2952467 - RNA, 19 nt, Artificial Sequence
  Description of Artificial Sequence: Synthetic oligonucleotide
uguuuaggucacugggcaa

SEQ ID NO: 2952468 - RNA, 19 nt, Artificial Sequence
  Description of Artificial Sequence: Synthetic oligonucleotide
cacaugaagguauaauacu

SEQ ID NO: 2952469 - RNA, 19 nt, Artificial Sequence
  Description of Artificial Sequence: Synthetic oligonucleotide
ugguaaugcucaucauccu

SEQ ID NO: 2952470 - RNA, 19 nt, Artificial Sequence
  Description of Artificial Sequence: Synthetic oligonucleotide
gugguaacaaccacuaugu

SEQ ID NO: 2952471 - RNA, 19 nt, Artificial Sequence
  Description of Artificial Sequence: Synthetic oligonucleotide
aacugguaaugcucaucau

SEQ ID NO: 2952472 - RNA, 19 nt, Artificial Sequence
  Description of Artificial Sequence: Synthetic oligonucleotide
acauagcagaacugguaau

SEQ ID NO: 2952473 - RNA, 19 nt, Artificial Sequence
  Description of Artificial Sequence: Synthetic oligonucleotide
ugucuuccaccccacuuua

SEQ ID NO: 2952474 - RNA, 19 nt, Artificial Sequence
  Description of Artificial Sequence: Synthetic oligonucleotide
guguugcucuaucucuucc

SEQ ID NO: 2952475 - RNA, 19 nt, Artificial Sequence
  Description of Artificial Sequence: Synthetic oligonucleotide
uucccguagaagcuccuua

SEQ ID NO: 2952476 - RNA, 19 nt, Artificial Sequence
  Description of Artificial Sequence: Synthetic oligonucleotide
uaauacucucggguugucu

SEQ ID NO: 2952477 - RNA, 19 nt, Artificial Sequence
  Description of Artificial Sequence: Synthetic oligonucleotide
guaggcuuugaacuggacu

SEQ ID NO: 2952478 - RNA, 19 nt, Artificial Sequence
  Description of Artificial Sequence: Synthetic oligonucleotide
ucccguagaagcuccuuau

SEQ ID NO: 2952479 - RNA, 19 nt, Artificial Sequence
  Description of Artificial Sequence: Synthetic oligonucleotide
uccugguuuucccguagaa

SEQ ID NO: 2952480 - RNA, 19 nt, Artificial Sequence
  Description of Artificial Sequence: Synthetic oligonucleotide
uccaguccuugcgacgagg

SEQ ID NO: 2952481 - RNA, 19 nt, Artificial Sequence
  Description of Artificial Sequence: Synthetic oligonucleotide
guccuugcgacgagggacg

SEQ ID NO: 2952482 - RNA, 19 nt, Artificial Sequence
  Description of Artificial Sequence: Synthetic oligonucleotide
uacucucggguugucuucc

SEQ ID NO: 2952483 - RNA, 19 nt, Artificial Sequence
  Description of Artificial Sequence: Synthetic oligonucleotide
ugguaacaaccacuauguc

SEQ ID NO: 2952484 - RNA, 19 nt, Artificial Sequence
  Description of Artificial Sequence: Synthetic oligonucleotide
aggcuuugaacuggacuuc

SEQ ID NO: 2952485 - RNA, 19 nt, Artificial Sequence
  Description of Artificial Sequence: Synthetic oligonucleotide
caccuugauccacauagca

SEQ ID NO: 2952486 - RNA, 19 nt, Artificial Sequence
  Description of Artificial Sequence: Synthetic oligonucleotide
cuccuuauuguguugcucu

SEQ ID NO: 2952487 - RNA, 19 nt, Artificial Sequence
  Description of Artificial Sequence: Synthetic oligonucleotide
augacaucuccuccaggaa

SEQ ID NO: 2952488 - RNA, 19 nt, Artificial Sequence
  Description of Artificial Sequence: Synthetic oligonucleotide
uuuucccguagaagcuccu

SEQ ID NO: 2952489 - RNA, 19 nt, Artificial Sequence
  Description of Artificial Sequence: Synthetic oligonucleotide
gucacugggcaaagcaacc

SEQ ID NO: 2952490 - RNA, 19 nt, Artificial Sequence
  Description of Artificial Sequence: Synthetic oligonucleotide
auaauacucucggguuguc

SEQ ID NO: 2952491 - RNA, 19 nt, Artificial Sequence
  Description of Artificial Sequence: Synthetic oligonucleotide
caccaccugagagaaacug

SEQ ID NO: 2952492 - RNA, 19 nt, Artificial Sequence
  Description of Artificial Sequence: Synthetic oligonucleotide
gagaaacugcaauguucca

SEQ ID NO: 2952493 - RNA, 19 nt, Artificial Sequence
  Description of Artificial Sequence: Synthetic oligonucleotide
guuuaggucacugggcaaa

SEQ ID NO: 2952494 - RNA, 19 nt, Artificial Sequence
  Description of Artificial Sequence: Synthetic oligonucleotide
uccuuauuguguugcucua

SEQ ID NO: 2952495 - RNA, 19 nt, Artificial Sequence
  Description of Artificial Sequence: Synthetic oligonucleotide
uuaggucacugggcaaagc

SEQ ID NO: 2952496 - RNA, 19 nt, Artificial Sequence
  Description of Artificial Sequence: Synthetic oligonucleotide
uugauccacauagcagaac

SEQ ID NO: 2952497 - RNA, 19 nt, Artificial Sequence
  Description of Artificial Sequence: Synthetic oligonucleotide
gacaucuccuccaggaaua

SEQ ID NO: 2952498 - RNA, 19 nt, Artificial Sequence
  Description of Artificial Sequence: Synthetic oligonucleotide
ucggguugucuuccacccc

SEQ ID NO: 2952499 - RNA, 19 nt, Artificial Sequence
  Description of Artificial Sequence: Synthetic oligonucleotide
cuugauccacauagcagaa

SEQ ID NO: 2952500 - RNA, 19 nt, Artificial Sequence
  Description of Artificial Sequence: Synthetic oligonucleotide
ccguagaagcuccuuauug

SEQ ID NO: 2952501 - RNA, 19 nt, Artificial Sequence
  Description of Artificial Sequence: Synthetic oligonucleotide
aguaggcuuugaacuggac

SEQ ID NO: 2952502 - RNA, 19 nt, Artificial Sequence
  Description of Artificial Sequence: Synthetic oligonucleotide
ggggauacuugcuccccgg

SEQ ID NO: 2952503 - RNA, 19 nt, Artificial Sequence
  Description of Artificial Sequence: Synthetic oligonucleotide
gguauaauacucucggguu

SEQ ID NO: 2952504 - RNA, 19 nt, Artificial Sequence
  Description of Artificial Sequence: Synthetic oligonucleotide
guguaauagcacaugacau

SEQ ID NO: 2952505 - RNA, 19 nt, Artificial Sequence
  Description of Artificial Sequence: Synthetic oligonucleotide
auagcacaugacaucuccu

SEQ ID NO: 2952506 - RNA, 19 nt, Artificial Sequence
  Description of Artificial Sequence: Synthetic oligonucleotide
cuugcuccccggaccacac

SEQ ID NO: 2952507 - RNA, 19 nt, Artificial Sequence
  Description of Artificial Sequence: Synthetic oligonucleotide
cacaccaccuugauccaca

SEQ ID NO: 2952508 - RNA, 19 nt, Artificial Sequence
  Description of Artificial Sequence: Synthetic oligonucleotide
uagugguaacaaccacuau

SEQ ID NO: 2952509 - RNA, 19 nt, Artificial Sequence
  Description of Artificial Sequence: Synthetic oligonucleotide
guugggugaagguguaaua

SEQ ID NO: 2952510 - RNA, 19 nt, Artificial Sequence
  Description of Artificial Sequence: Synthetic oligonucleotide
gggugaagguguaauagca

SEQ ID NO: 2952511 - RNA, 19 nt, Artificial Sequence
  Description of Artificial Sequence: Synthetic oligonucleotide
cccacuuuaaagaugccaa

SEQ ID NO: 2952512 - RNA, 19 nt, Artificial Sequence
  Description of Artificial Sequence: Synthetic oligonucleotide
guccuccucaguuucugga

SEQ ID NO: 2952513 - RNA, 19 nt, Artificial Sequence
  Description of Artificial Sequence: Synthetic oligonucleotide
cauccuugggcagauagua

SEQ ID NO: 2952514 - RNA, 19 nt, Artificial Sequence
  Description of Artificial Sequence: Synthetic oligonucleotide
ggucacugggcaaagcaac

SEQ ID NO: 2952515 - RNA, 19 nt, Artificial Sequence
  Description of Artificial Sequence: Synthetic oligonucleotide
uugcgacgagggacgaacu

SEQ ID NO: 2952516 - RNA, 19 nt, Artificial Sequence
  Description of Artificial Sequence: Synthetic oligonucleotide
ucaucauccuugggcagau

SEQ ID NO: 2952517 - RNA, 19 nt, Artificial Sequence
  Description of Artificial Sequence: Synthetic oligonucleotide
uccccggaccacaccaccu

SEQ ID NO: 2952518 - RNA, 19 nt, Artificial Sequence
  Description of Artificial Sequence: Synthetic oligonucleotide
ggugaagguguaauagcac

SEQ ID NO: 2952519 - RNA, 19 nt, Artificial Sequence
  Description of Artificial Sequence: Synthetic oligonucleotide
ccuccaggaauauagaacu

SEQ ID NO: 2952520 - RNA, 19 nt, Artificial Sequence
  Description of Artificial Sequence: Synthetic oligonucleotide
auguccuccucaguuucug

SEQ ID NO: 2952521 - RNA, 19 nt, Artificial Sequence
  Description of Artificial Sequence: Synthetic oligonucleotide
auccuugggcagauaguag

SEQ ID NO: 2952522 - RNA, 19 nt, Artificial Sequence
  Description of Artificial Sequence: Synthetic oligonucleotide
cugagagaaacugcaaugu

SEQ ID NO: 2952523 - RNA, 19 nt, Artificial Sequence
  Description of Artificial Sequence: Synthetic oligonucleotide
acccacaugaagguauaau

SEQ ID NO: 2952524 - RNA, 19 nt, Artificial Sequence
  Description of Artificial Sequence: Synthetic oligonucleotide
cuccuccaggaauauagaa

SEQ ID NO: 2952525 - RNA, 19 nt, Artificial Sequence
  Description of Artificial Sequence: Synthetic oligonucleotide
ggauacuugcuccccggac

SEQ ID NO: 2952526 - RNA, 19 nt, Artificial Sequence
  Description of Artificial Sequence: Synthetic oligonucleotide
gggacgaacuguuggguga

SEQ ID NO: 2952527 - RNA, 19 nt, Artificial Sequence
  Description of Artificial Sequence: Synthetic oligonucleotide
gggcaaagcaacccacaug

SEQ ID NO: 2952528 - RNA, 19 nt, Artificial Sequence
  Description of Artificial Sequence: Synthetic oligonucleotide
gcagauaguaggcuuugaa

SEQ ID NO: 2952529 - RNA, 19 nt, Artificial Sequence
  Description of Artificial Sequence: Synthetic oligonucleotide
guuucuggacggaacugga

SEQ ID NO: 2952530 - RNA, 19 nt, Artificial Sequence
  Description of Artificial Sequence: Synthetic oligonucleotide
gcacaugacaucuccucca

SEQ ID NO: 2952531 - RNA, 19 nt, Artificial Sequence
  Description of Artificial Sequence: Synthetic oligonucleotide
ccaguccuugcgacgaggg

SEQ ID NO: 2952532 - RNA, 19 nt, Artificial Sequence
  Description of Artificial Sequence: Synthetic oligonucleotide
cuuucccuuagugguaaca

SEQ ID NO: 2952533 - RNA, 19 nt, Artificial Sequence
  Description of Artificial Sequence: Synthetic oligonucleotide
caguuucuggacggaacug

SEQ ID NO: 2952534 - RNA, 19 nt, Artificial Sequence
  Description of Artificial Sequence: Synthetic oligonucleotide
cugggcaaagcaacccaca

SEQ ID NO: 2952535 - RNA, 19 nt, Artificial Sequence
  Description of Artificial Sequence: Synthetic oligonucleotide
gcagaacugguaaugcuca

SEQ ID NO: 2952536 - RNA, 19 nt, Artificial Sequence
  Description of Artificial Sequence: Synthetic oligonucleotide
cgagggacgaacuguuggg

SEQ ID NO: 2952537 - RNA, 19 nt, Artificial Sequence
  Description of Artificial Sequence: Synthetic oligonucleotide
ccaauccaguccuugcgac

SEQ ID NO: 2952538 - RNA, 19 nt, Artificial Sequence
  Description of Artificial Sequence: Synthetic oligonucleotide
uaacaaccacuauguccuc

SEQ ID NO: 2952539 - RNA, 19 nt, Artificial Sequence
  Description of Artificial Sequence: Synthetic oligonucleotide
cugcugcuugguugauucc

SEQ ID NO: 2952540 - RNA, 19 nt, Artificial Sequence
  Description of Artificial Sequence: Synthetic oligonucleotide
cuccccggaccacaccacc

SEQ ID NO: 2952541 - RNA, 19 nt, Artificial Sequence
  Description of Artificial Sequence: Synthetic oligonucleotide
cccacaugaagguauaaua

SEQ ID NO: 2952542 - RNA, 19 nt, Artificial Sequence
  Description of Artificial Sequence: Synthetic oligonucleotide
gacgagggacgaacuguug

SEQ ID NO: 2952543 - RNA, 19 nt, Artificial Sequence
  Description of Artificial Sequence: Synthetic oligonucleotide
cucaucauccuugggcaga

SEQ ID NO: 2952544 - RNA, 19 nt, Artificial Sequence
  Description of Artificial Sequence: Synthetic oligonucleotide
ccaccugagagaaacugca

SEQ ID NO: 2952545 - RNA, 19 nt, Artificial Sequence
  Description of Artificial Sequence: Synthetic oligonucleotide
ccuuagugguaacaaccac

SEQ ID NO: 2952546 - RNA, 19 nt, Artificial Sequence
  Description of Artificial Sequence: Synthetic oligonucleotide
ccugguuuucccguagaag

SEQ ID NO: 2952547 - RNA, 19 nt, Artificial Sequence
  Description of Artificial Sequence: Synthetic oligonucleotide
aacccacaugaagguauaa

SEQ ID NO: 2952548 - RNA, 19 nt, Artificial Sequence
  Description of Artificial Sequence: Synthetic oligonucleotide
ggcuuugaacuggacuucc

SEQ ID NO: 2952549 - RNA, 19 nt, Artificial Sequence
  Description of Artificial Sequence: Synthetic oligonucleotide
auccaguccuugcgacgag

SEQ ID NO: 2952550 - RNA, 19 nt, Artificial Sequence
  Description of Artificial Sequence: Synthetic oligonucleotide
uccucaguuucuggacgga

SEQ ID NO: 2952551 - RNA, 19 nt, Artificial Sequence
  Description of Artificial Sequence: Synthetic oligonucleotide
acuugcuccccggaccaca

SEQ ID NO: 2952552 - RNA, 19 nt, Artificial Sequence
  Description of Artificial Sequence: Synthetic oligonucleotide
cacuauguccuccucaguu

SEQ ID NO: 2952553 - RNA, 19 nt, Artificial Sequence
  Description of Artificial Sequence: Synthetic oligonucleotide
accuuucccuuagugguaa

SEQ ID NO: 2952554 - RNA, 19 nt, Artificial Sequence
  Description of Artificial Sequence: Synthetic oligonucleotide
cucucggguugucuuccac

SEQ ID NO: 2952555 - RNA, 19 nt, Artificial Sequence
  Description of Artificial Sequence: Synthetic oligonucleotide
gacgaacuguugggugaag

SEQ ID NO: 2952556 - RNA, 19 nt, Artificial Sequence
  Description of Artificial Sequence: Synthetic oligonucleotide
cuugguugauuccuuguuu

SEQ ID NO: 2952557 - RNA, 19 nt, Artificial Sequence
  Description of Artificial Sequence: Synthetic oligonucleotide
uugcuccccggaccacacc

SEQ ID NO: 2952558 - RNA, 19 nt, Artificial Sequence
  Description of Artificial Sequence: Synthetic oligonucleotide
cccuuagugguaacaacca

SEQ ID NO: 2952559 - RNA, 19 nt, Artificial Sequence
  Description of Artificial Sequence: Synthetic oligonucleotide
uuucccguagaagcuccuu

SEQ ID NO: 2952560 - RNA, 19 nt, Artificial Sequence
  Description of Artificial Sequence: Synthetic oligonucleotide
acaccaccuugauccacau

SEQ ID NO: 2952561 - RNA, 19 nt, Artificial Sequence
  Description of Artificial Sequence: Synthetic oligonucleotide
accccacuuuaaagaugcc

SEQ ID NO: 2952562 - RNA, 19 nt, Artificial Sequence
  Description of Artificial Sequence: Synthetic oligonucleotide
gccaauccaguccuugcga

SEQ ID NO: 2952563 - RNA, 19 nt, Artificial Sequence
  Description of Artificial Sequence: Synthetic oligonucleotide
auuccuuguuuaggucacu

SEQ ID NO: 2952564 - RNA, 19 nt, Artificial Sequence
  Description of Artificial Sequence: Synthetic oligonucleotide
gcuccugguuuucccguag

SEQ ID NO: 2952565 - RNA, 19 nt, Artificial Sequence
  Description of Artificial Sequence: Synthetic oligonucleotide
ccaggaauauagaacuucu

SEQ ID NO: 2952566 - RNA, 19 nt, Artificial Sequence
  Description of Artificial Sequence: Synthetic oligonucleotide
ccaccuuucccuuaguggu

SEQ ID NO: 2952567 - RNA, 19 nt, Artificial Sequence
  Description of Artificial Sequence: Synthetic oligonucleotide
caaccacuauguccuccuc

SEQ ID NO: 2952568 - RNA, 19 nt, Artificial Sequence
  Description of Artificial Sequence: Synthetic oligonucleotide
ggacggaacuggaagggga

SEQ ID NO: 2952569 - RNA, 19 nt, Artificial Sequence
  Description of Artificial Sequence: Synthetic oligonucleotide
agcaacccacaugaaggua

SEQ ID NO: 2952570 - RNA, 19 nt, Artificial Sequence
  Description of Artificial Sequence: Synthetic oligonucleotide
gaacuggaaggggauacuu

SEQ ID NO: 2952571 - RNA, 19 nt, Artificial Sequence
  Description of Artificial Sequence: Synthetic oligonucleotide
caacccacaugaagguaua

SEQ ID NO: 2952572 - RNA, 19 nt, Artificial Sequence
  Description of Artificial Sequence: Synthetic oligonucleotide
caccugagagaaacugcaa

SEQ ID NO: 2952573 - RNA, 19 nt, Artificial Sequence
  Description of Artificial Sequence: Synthetic oligonucleotide
gagggacgaacuguugggu

SEQ ID NO: 2952574 - RNA, 19 nt, Artificial Sequence
  Description of Artificial Sequence: Synthetic oligonucleotide
cuggaaggggauacuugcu

SEQ ID NO: 2952575 - RNA, 19 nt, Artificial Sequence
  Description of Artificial Sequence: Synthetic oligonucleotide
ccaccccacuuuaaagaug

SEQ ID NO: 2952576 - RNA, 19 nt, Artificial Sequence
  Description of Artificial Sequence: Synthetic oligonucleotide
cucuaucucuuccaccuuu

SEQ ID NO: 2952577 - RNA, 19 nt, Artificial Sequence
  Description of Artificial Sequence: Synthetic oligonucleotide
gacggaacuggaaggggau

SEQ ID NO: 2952578 - RNA, 19 nt, Artificial Sequence
  Description of Artificial Sequence: Synthetic oligonucleotide
ccacauagcagaacuggua

SEQ ID NO: 2952579 - RNA, 19 nt, Artificial Sequence
  Description of Artificial Sequence: Synthetic oligonucleotide
ggaccacaccaccuugauc

SEQ ID NO: 2952580 - RNA, 19 nt, Artificial Sequence
  Description of Artificial Sequence: Synthetic oligonucleotide
gggcagauaguaggcuuug

SEQ ID NO: 2952581 - RNA, 19 nt, Artificial Sequence
  Description of Artificial Sequence: Synthetic oligonucleotide
cuccugguuuucccguaga

SEQ ID NO: 2952582 - RNA, 19 nt, Artificial Sequence
  Description of Artificial Sequence: Synthetic oligonucleotide
uccuugcgacgagggacga

SEQ ID NO: 2952583 - RNA, 19 nt, Artificial Sequence
  Description of Artificial Sequence: Synthetic oligonucleotide
cuugggcagauaguaggcu

SEQ ID NO: 2952584 - RNA, 19 nt, Artificial Sequence
  Description of Artificial Sequence: Synthetic oligonucleotide
caccuuucccuuaguggua

SEQ ID NO: 2952585 - RNA, 19 nt, Artificial Sequence
  Description of Artificial Sequence: Synthetic oligonucleotide
acaccaccugagagaaacu

SEQ ID NO: 2952586 - RNA, 19 nt, Artificial Sequence
  Description of Artificial Sequence: Synthetic oligonucleotide
gggauacuugcuccccgga

SEQ ID NO: 2952587 - RNA, 19 nt, Artificial Sequence
  Description of Artificial Sequence: Synthetic oligonucleotide
caguccuugcgacgaggga

SEQ ID NO: 2952588 - RNA, 19 nt, Artificial Sequence
  Description of Artificial Sequence: Synthetic oligonucleotide
gcuccuuauuguguugcuc

SEQ ID NO: 2952589 - RNA, 19 nt, Artificial Sequence
  Description of Artificial Sequence: Synthetic oligonucleotide
cguagaagcuccuuauugu

SEQ ID NO: 2952590 - RNA, 19 nt, Artificial Sequence
  Description of Artificial Sequence: Synthetic oligonucleotide
gcaacccacaugaagguau

SEQ ID NO: 2952591 - RNA, 19 nt, Artificial Sequence
  Description of Artificial Sequence: Synthetic oligonucleotide
uacuugcuccccggaccac

SEQ ID NO: 2952592 - RNA, 19 nt, Artificial Sequence
  Description of Artificial Sequence: Synthetic oligonucleotide
cggaacuggaaggggauac

SEQ ID NO: 2952593 - RNA, 19 nt, Artificial Sequence
  Description of Artificial Sequence: Synthetic oligonucleotide
uccugcugcuugguugauu

SEQ ID NO: 2952594 - RNA, 19 nt, Artificial Sequence
  Description of Artificial Sequence: Synthetic oligonucleotide
ccccacuuuaaagaugcca

SEQ ID NO: 2952595 - RNA, 19 nt, Artificial Sequence
  Description of Artificial Sequence: Synthetic oligonucleotide
acuggacuuccugcugcuu

SEQ ID NO: 2952596 - RNA, 19 nt, Artificial Sequence
  Description of Artificial Sequence: Synthetic oligonucleotide
ggacgaacuguugggugaa

SEQ ID NO: 2952597 - RNA, 19 nt, Artificial Sequence
  Description of Artificial Sequence: Synthetic oligonucleotide
ggcagauaguaggcuuuga

SEQ ID NO: 2952598 - RNA, 19 nt, Artificial Sequence
  Description of Artificial Sequence: Synthetic oligonucleotide
cggguugucuuccacccca

SEQ ID NO: 2952599 - RNA, 19 nt, Artificial Sequence
  Description of Artificial Sequence: Synthetic oligonucleotide
cccggaccacaccaccuug

SEQ ID NO: 2952600 - RNA, 19 nt, Artificial Sequence
  Description of Artificial Sequence: Synthetic oligonucleotide
gcgacgagggacgaacugu

SEQ ID NO: 2952601 - RNA, 19 nt, Artificial Sequence
  Description of Artificial Sequence: Synthetic oligonucleotide
ccuuucccuuagugguaac

SEQ ID NO: 2952602 - RNA, 19 nt, Artificial Sequence
  Description of Artificial Sequence: Synthetic oligonucleotide
uuccugcugcuugguugau

SEQ ID NO: 2952603 - RNA, 19 nt, Artificial Sequence
  Description of Artificial Sequence: Synthetic oligonucleotide
ggaacuggaaggggauacu

SEQ ID NO: 2952604 - RNA, 19 nt, Artificial Sequence
  Description of Artificial Sequence: Synthetic oligonucleotide
cgaacuguugggugaaggu

SEQ ID NO: 2952605 - RNA, 19 nt, Artificial Sequence
  Description of Artificial Sequence: Synthetic oligonucleotide
ggguugucuuccaccccac

SEQ ID NO: 2952606 - RNA, 19 nt, Artificial Sequence
  Description of Artificial Sequence: Synthetic oligonucleotide
ccacuuuaaagaugccaau

SEQ ID NO: 2952607 - RNA, 19 nt, Artificial Sequence
  Description of Artificial Sequence: Synthetic oligonucleotide
ccggaccacaccaccuuga

SEQ ID NO: 2952608 - RNA, 19 nt, Artificial Sequence
  Description of Artificial Sequence: Synthetic oligonucleotide
gguugucuuccaccccacu

SEQ ID NO: 2952609 - RNA, 19 nt, Artificial Sequence
  Description of Artificial Sequence: Synthetic oligonucleotide
cuguugggugaagguguaa

SEQ ID NO: 2952610 - RNA, 19 nt, Artificial Sequence
  Description of Artificial Sequence: Synthetic oligonucleotide
caucuccuccaggaauaua

SEQ ID NO: 2952611 - RNA, 19 nt, Artificial Sequence
  Description of Artificial Sequence: Synthetic oligonucleotide
gcaaagcaacccacaugaa

SEQ ID NO: 2952612 - RNA, 19 nt, Artificial Sequence
  Description of Artificial Sequence: Synthetic oligonucleotide
caccaccuugauccacaua

SEQ ID NO: 2952613 - RNA, 19 nt, Artificial Sequence
  Description of Artificial Sequence: Synthetic oligonucleotide
cuuccaccuuucccuuagu

SEQ ID NO: 2952614 - RNA, 19 nt, Artificial Sequence
  Description of Artificial Sequence: Synthetic oligonucleotide
gcuccccggaccacaccac

SEQ ID NO: 2952615 - RNA, 19 nt, Artificial Sequence
  Description of Artificial Sequence: Synthetic oligonucleotide
gcugcuugguugauuccuu

SEQ ID NO: 2952616 - RNA, 19 nt, Artificial Sequence
  Description of Artificial Sequence: Synthetic oligonucleotide
caucauccuugggcagaua

SEQ ID NO: 2952617 - RNA, 19 nt, Artificial Sequence
  Description of Artificial Sequence: Synthetic oligonucleotide
gcucuaucucuuccaccuu

SEQ ID NO: 2952618 - RNA, 19 nt, Artificial Sequence
  Description of Artificial Sequence: Synthetic oligonucleotide
ggacuuccugcugcuuggu

SEQ ID NO: 2952619 - RNA, 19 nt, Artificial Sequence
  Description of Artificial Sequence: Synthetic oligonucleotide
cccguagaagcuccuuauu

SEQ ID NO: 2952620 - RNA, 19 nt, Artificial Sequence
  Description of Artificial Sequence: Synthetic oligonucleotide
cgacgagggacgaacuguu

SEQ ID NO: 2952621 - RNA, 19 nt, Artificial Sequence
  Description of Artificial Sequence: Synthetic oligonucleotide
ccuugcgacgagggacgaa

SEQ ID NO: 2952622 - RNA, 19 nt, Artificial Sequence
  Description of Artificial Sequence: Synthetic oligonucleotide
cggaccacaccaccuugau

SEQ ID NO: 2952623 - RNA, 19 nt, Artificial Sequence
  Description of Artificial Sequence: Synthetic oligonucleotide
ccccggaccacaccaccuu

SEQ ID NO: 2952624 - RNA, 19 nt, Artificial Sequence
  Description of Artificial Sequence: Synthetic oligonucleotide
auauuaagaauauaguuag

SEQ ID NO: 2952625 - RNA, 19 nt, Artificial Sequence
  Description of Artificial Sequence: Synthetic oligonucleotide
aauauaguuagccauguca

SEQ ID NO: 2952626 - RNA, 19 nt, Artificial Sequence
  Description of Artificial Sequence: Synthetic oligonucleotide
auuaagaauauaguuagcc

SEQ ID NO: 2952627 - RNA, 19 nt, Artificial Sequence
  Description of Artificial Sequence: Synthetic oligonucleotide
acaauaacaagucuucccc

SEQ ID NO: 2952628 - RNA, 19 nt, Artificial Sequence
  Description of Artificial Sequence: Synthetic oligonucleotide
aagaaugggauauauuauc

SEQ ID NO: 2952629 - RNA, 19 nt, Artificial Sequence
  Description of Artificial Sequence: Synthetic oligonucleotide
uuaagaaugggauauauua

SEQ ID NO: 2952630 - RNA, 19 nt, Artificial Sequence
  Description of Artificial Sequence: Synthetic oligonucleotide
aucaauacacuucugacag

SEQ ID NO: 2952631 - RNA, 19 nt, Artificial Sequence
  Description of Artificial Sequence: Synthetic oligonucleotide
auacacuucugacagaaac

SEQ ID NO: 2952632 - RNA, 19 nt, Artificial Sequence
  Description of Artificial Sequence: Synthetic oligonucleotide
aaugggauauauuaucaga

SEQ ID NO: 2952633 - RNA, 19 nt, Artificial Sequence
  Description of Artificial Sequence: Synthetic oligonucleotide
gaugaggucagcucggccg

SEQ ID NO: 2952634 - RNA, 19 nt, Artificial Sequence
  Description of Artificial Sequence: Synthetic oligonucleotide
gauauauuaucagaguagc

SEQ ID NO: 2952635 - RNA, 19 nt, Artificial Sequence
  Description of Artificial Sequence: Synthetic oligonucleotide
ucuguaguucacaauaaca

SEQ ID NO: 2952636 - RNA, 19 nt, Artificial Sequence
  Description of Artificial Sequence: Synthetic oligonucleotide
uuaagaauauaguuagcca

SEQ ID NO: 2952637 - RNA, 19 nt, Artificial Sequence
  Description of Artificial Sequence: Synthetic oligonucleotide
uauauuaucagaguagcaa

SEQ ID NO: 2952638 - RNA, 19 nt, Artificial Sequence
  Description of Artificial Sequence: Synthetic oligonucleotide
uguaguucacaauaacaag

SEQ ID NO: 2952639 - RNA, 19 nt, Artificial Sequence
  Description of Artificial Sequence: Synthetic oligonucleotide
aauggggcaguuccugugc

SEQ ID NO: 2952640 - RNA, 19 nt, Artificial Sequence
  Description of Artificial Sequence: Synthetic oligonucleotide
ucuguaggcgacaaauggg

SEQ ID NO: 2952641 - RNA, 19 nt, Artificial Sequence
  Description of Artificial Sequence: Synthetic oligonucleotide
aaacugauguuccugugug

SEQ ID NO: 2952642 - RNA, 19 nt, Artificial Sequence
  Description of Artificial Sequence: Synthetic oligonucleotide
uuauuuaagaaugggauau

SEQ ID NO: 2952643 - RNA, 19 nt, Artificial Sequence
  Description of Artificial Sequence: Synthetic oligonucleotide
aucuguaggcgacaaaugg

SEQ ID NO: 2952644 - RNA, 19 nt, Artificial Sequence
  Description of Artificial Sequence: Synthetic oligonucleotide
uuaucaauacacuucugac

SEQ ID NO: 2952645 - RNA, 19 nt, Artificial Sequence
  Description of Artificial Sequence: Synthetic oligonucleotide
aaaacugauguuccugugu

SEQ ID NO: 2952646 - RNA, 19 nt, Artificial Sequence
  Description of Artificial Sequence: Synthetic oligonucleotide
aacaagucuuccccuaguc

SEQ ID NO: 2952647 - RNA, 19 nt, Artificial Sequence
  Description of Artificial Sequence: Synthetic oligonucleotide
aauaagagggugggaaaac

SEQ ID NO: 2952648 - RNA, 19 nt, Artificial Sequence
  Description of Artificial Sequence: Synthetic oligonucleotide
uucacaauaacaagucuuc

SEQ ID NO: 2952649 - RNA, 19 nt, Artificial Sequence
  Description of Artificial Sequence: Synthetic oligonucleotide
agauacaacacuccuccuc

SEQ ID NO: 2952650 - RNA, 19 nt, Artificial Sequence
  Description of Artificial Sequence: Synthetic oligonucleotide
uccucuaugaccacagugu

SEQ ID NO: 2952651 - RNA, 19 nt, Artificial Sequence
  Description of Artificial Sequence: Synthetic oligonucleotide
uuuauuuaagaaugggaua

SEQ ID NO: 2952652 - RNA, 19 nt, Artificial Sequence
  Description of Artificial Sequence: Synthetic oligonucleotide
cacaauaacaagucuuccc

SEQ ID NO: 2952653 - RNA, 19 nt, Artificial Sequence
  Description of Artificial Sequence: Synthetic oligonucleotide
ucugacaccacccaugauu

SEQ ID NO: 2952654 - RNA, 19 nt, Artificial Sequence
  Description of Artificial Sequence: Synthetic oligonucleotide
aaaauaagagggugggaaa

SEQ ID NO: 2952655 - RNA, 19 nt, Artificial Sequence
  Description of Artificial Sequence: Synthetic oligonucleotide
gaaugggauauauuaucag

SEQ ID NO: 2952656 - RNA, 19 nt, Artificial Sequence
  Description of Artificial Sequence: Synthetic oligonucleotide
ucaucggccauauuaagaa

SEQ ID NO: 2952657 - RNA, 19 nt, Artificial Sequence
  Description of Artificial Sequence: Synthetic oligonucleotide
cuguaggcgacaaaugggg

SEQ ID NO: 2952658 - RNA, 19 nt, Artificial Sequence
  Description of Artificial Sequence: Synthetic oligonucleotide
aagacaugggaguuuauuu

SEQ ID NO: 2952659 - RNA, 19 nt, Artificial Sequence
  Description of Artificial Sequence: Synthetic oligonucleotide
ucugacagaaacugugagc

SEQ ID NO: 2952660 - RNA, 19 nt, Artificial Sequence
  Description of Artificial Sequence: Synthetic oligonucleotide
gaaacugugagcacagggc

SEQ ID NO: 2952661 - RNA, 19 nt, Artificial Sequence
  Description of Artificial Sequence: Synthetic oligonucleotide
gauacaacacuccuccuca

SEQ ID NO: 2952662 - RNA, 19 nt, Artificial Sequence
  Description of Artificial Sequence: Synthetic oligonucleotide
cuagucauggccugugagg

SEQ ID NO: 2952663 - RNA, 19 nt, Artificial Sequence
  Description of Artificial Sequence: Synthetic oligonucleotide
ucaucagucagcugcuucc

SEQ ID NO: 2952664 - RNA, 19 nt, Artificial Sequence
  Description of Artificial Sequence: Synthetic oligonucleotide
aucuguaguucacaauaac

SEQ ID NO: 2952665 - RNA, 19 nt, Artificial Sequence
  Description of Artificial Sequence: Synthetic oligonucleotide
ucuuccucuaugaccacag

SEQ ID NO: 2952666 - RNA, 19 nt, Artificial Sequence
  Description of Artificial Sequence: Synthetic oligonucleotide
uaguucacaauaacaaguc

SEQ ID NO: 2952667 - RNA, 19 nt, Artificial Sequence
  Description of Artificial Sequence: Synthetic oligonucleotide
uucugacagaaacugugag

SEQ ID NO: 2952668 - RNA, 19 nt, Artificial Sequence
  Description of Artificial Sequence: Synthetic oligonucleotide
uauuaucagaguagcaaaa

SEQ ID NO: 2952669 - RNA, 19 nt, Artificial Sequence
  Description of Artificial Sequence: Synthetic oligonucleotide
auauuaucagaguagcaaa

SEQ ID NO: 2952670 - RNA, 19 nt, Artificial Sequence
  Description of Artificial Sequence: Synthetic oligonucleotide
uauuaagaauauaguuagc

SEQ ID NO: 2952671 - RNA, 19 nt, Artificial Sequence
  Description of Artificial Sequence: Synthetic oligonucleotide
ucuaugaccacaguguauc

SEQ ID NO: 2952672 - RNA, 19 nt, Artificial Sequence
  Description of Artificial Sequence: Synthetic oligonucleotide
cuacucuuccucuaugacc

SEQ ID NO: 2952673 - RNA, 19 nt, Artificial Sequence
  Description of Artificial Sequence: Synthetic oligonucleotide
gauucauucgcuccaguca

SEQ ID NO: 2952674 - RNA, 19 nt, Artificial Sequence
  Description of Artificial Sequence: Synthetic oligonucleotide
uuagccaugucaucuucag

SEQ ID NO: 2952675 - RNA, 19 nt, Artificial Sequence
  Description of Artificial Sequence: Synthetic oligonucleotide
uuccucuaugaccacagug

SEQ ID NO: 2952676 - RNA, 19 nt, Artificial Sequence
  Description of Artificial Sequence: Synthetic oligonucleotide
ugggaguuuauuuaagaau

SEQ ID NO: 2952677 - RNA, 19 nt, Artificial Sequence
  Description of Artificial Sequence: Synthetic oligonucleotide
uacacuucugacagaaacu

SEQ ID NO: 2952678 - RNA, 19 nt, Artificial Sequence
  Description of Artificial Sequence: Synthetic oligonucleotide
uaagagggugggaaaacug

SEQ ID NO: 2952679 - RNA, 19 nt, Artificial Sequence
  Description of Artificial Sequence: Synthetic oligonucleotide
agugggugcaucugacacc

SEQ ID NO: 2952680 - RNA, 19 nt, Artificial Sequence
  Description of Artificial Sequence: Synthetic oligonucleotide
augggauauauuaucagag

SEQ ID NO: 2952681 - RNA, 19 nt, Artificial Sequence
  Description of Artificial Sequence: Synthetic oligonucleotide
auaguuagccaugucaucu

SEQ ID NO: 2952682 - RNA, 19 nt, Artificial Sequence
  Description of Artificial Sequence: Synthetic oligonucleotide
gcagauacaacacuccucc

SEQ ID NO: 2952683 - RNA, 19 nt, Artificial Sequence
  Description of Artificial Sequence: Synthetic oligonucleotide
caugcagauacaacacucc

SEQ ID NO: 2952684 - RNA, 19 nt, Artificial Sequence
  Description of Artificial Sequence: Synthetic oligonucleotide
aguuuauuuaagaauggga

SEQ ID NO: 2952685 - RNA, 19 nt, Artificial Sequence
  Description of Artificial Sequence: Synthetic oligonucleotide
ggccauauuaagaauauag

SEQ ID NO: 2952686 - RNA, 19 nt, Artificial Sequence
  Description of Artificial Sequence: Synthetic oligonucleotide
guaucuguaguucacaaua

SEQ ID NO: 2952687 - RNA, 19 nt, Artificial Sequence
  Description of Artificial Sequence: Synthetic oligonucleotide
acaacacuccuccucauca

SEQ ID NO: 2952688 - RNA, 19 nt, Artificial Sequence
  Description of Artificial Sequence: Synthetic oligonucleotide
uccauuuaucaauacacuu

SEQ ID NO: 2952689 - RNA, 19 nt, Artificial Sequence
  Description of Artificial Sequence: Synthetic oligonucleotide
agggugggaaaacugaugu

SEQ ID NO: 2952690 - RNA, 19 nt, Artificial Sequence
  Description of Artificial Sequence: Synthetic oligonucleotide
aaauggggcaguuccugug

SEQ ID NO: 2952691 - RNA, 19 nt, Artificial Sequence
  Description of Artificial Sequence: Synthetic oligonucleotide
ucuuccccuagucauggcc

SEQ ID NO: 2952692 - RNA, 19 nt, Artificial Sequence
  Description of Artificial Sequence: Synthetic oligonucleotide
auaacaagucuuccccuag

SEQ ID NO: 2952693 - RNA, 19 nt, Artificial Sequence
  Description of Artificial Sequence: Synthetic oligonucleotide
ugccucaucggccauauua

SEQ ID NO: 2952694 - RNA, 19 nt, Artificial Sequence
  Description of Artificial Sequence: Synthetic oligonucleotide
gggaguuuauuuaagaaug

SEQ ID NO: 2952695 - RNA, 19 nt, Artificial Sequence
  Description of Artificial Sequence: Synthetic oligonucleotide
uuuaagaaugggauauauu

SEQ ID NO: 2952696 - RNA, 19 nt, Artificial Sequence
  Description of Artificial Sequence: Synthetic oligonucleotide
acauggaagacaugggagu

SEQ ID NO: 2952697 - RNA, 19 nt, Artificial Sequence
  Description of Artificial Sequence: Synthetic oligonucleotide
ucaucuguaggcgacaaau

SEQ ID NO: 2952698 - RNA, 19 nt, Artificial Sequence
  Description of Artificial Sequence: Synthetic oligonucleotide
aaauaagagggugggaaaa

SEQ ID NO: 2952699 - RNA, 19 nt, Artificial Sequence
  Description of Artificial Sequence: Synthetic oligonucleotide
ggauauauuaucagaguag

SEQ ID NO: 2952700 - RNA, 19 nt, Artificial Sequence
  Description of Artificial Sequence: Synthetic oligonucleotide
cuguaguucacaauaacaa

SEQ ID NO: 2952701 - RNA, 19 nt, Artificial Sequence
  Description of Artificial Sequence: Synthetic oligonucleotide
augaccacaguguaucugu

SEQ ID NO: 2952702 - RNA, 19 nt, Artificial Sequence
  Description of Artificial Sequence: Synthetic oligonucleotide
auucgcuccagucaucugu

SEQ ID NO: 2952703 - RNA, 19 nt, Artificial Sequence
  Description of Artificial Sequence: Synthetic oligonucleotide
ugggauauauuaucagagu

SEQ ID NO: 2952704 - RNA, 19 nt, Artificial Sequence
  Description of Artificial Sequence: Synthetic oligonucleotide
ucuacucuuccucuaugac

SEQ ID NO: 2952705 - RNA, 19 nt, Artificial Sequence
  Description of Artificial Sequence: Synthetic oligonucleotide
cugacagaaacugugagca

SEQ ID NO: 2952706 - RNA, 19 nt, Artificial Sequence
  Description of Artificial Sequence: Synthetic oligonucleotide
acuucugacagaaacugug

SEQ ID NO: 2952707 - RNA, 19 nt, Artificial Sequence
  Description of Artificial Sequence: Synthetic oligonucleotide
gaaaacugauguuccugug

SEQ ID NO: 2952708 - RNA, 19 nt, Artificial Sequence
  Description of Artificial Sequence: Synthetic oligonucleotide
ucagucagcugcuuccacc

SEQ ID NO: 2952709 - RNA, 19 nt, Artificial Sequence
  Description of Artificial Sequence: Synthetic oligonucleotide
uaucuguaguucacaauaa

SEQ ID NO: 2952710 - RNA, 19 nt, Artificial Sequence
  Description of Artificial Sequence: Synthetic oligonucleotide
ugauguuccugugugugcc

SEQ ID NO: 2952711 - RNA, 19 nt, Artificial Sequence
  Description of Artificial Sequence: Synthetic oligonucleotide
auucauucgcuccagucau

SEQ ID NO: 2952712 - RNA, 19 nt, Artificial Sequence
  Description of Artificial Sequence: Synthetic oligonucleotide
uagucauggccugugaggc

SEQ ID NO: 2952713 - RNA, 19 nt, Artificial Sequence
  Description of Artificial Sequence: Synthetic oligonucleotide
acacuucugacagaaacug

SEQ ID NO: 2952714 - RNA, 19 nt, Artificial Sequence
  Description of Artificial Sequence: Synthetic oligonucleotide
ugauucauucgcuccaguc

SEQ ID NO: 2952715 - RNA, 19 nt, Artificial Sequence
  Description of Artificial Sequence: Synthetic oligonucleotide
aguuagccaugucaucuuc

SEQ ID NO: 2952716 - RNA, 19 nt, Artificial Sequence
  Description of Artificial Sequence: Synthetic oligonucleotide
ugagcacagggcaggauga

SEQ ID NO: 2952717 - RNA, 19 nt, Artificial Sequence
  Description of Artificial Sequence: Synthetic oligonucleotide
uccugugccgaucacucca

SEQ ID NO: 2952718 - RNA, 19 nt, Artificial Sequence
  Description of Artificial Sequence: Synthetic oligonucleotide
acaguguaucuguaguuca

SEQ ID NO: 2952719 - RNA, 19 nt, Artificial Sequence
  Description of Artificial Sequence: Synthetic oligonucleotide
agaaugggauauauuauca

SEQ ID NO: 2952720 - RNA, 19 nt, Artificial Sequence
  Description of Artificial Sequence: Synthetic oligonucleotide
aacacuccuccucaucagu

SEQ ID NO: 2952721 - RNA, 19 nt, Artificial Sequence
  Description of Artificial Sequence: Synthetic oligonucleotide
augggaguuuauuuaagaa

SEQ ID NO: 2952722 - RNA, 19 nt, Artificial Sequence
  Description of Artificial Sequence: Synthetic oligonucleotide
uguaggcgacaaauggggc

SEQ ID NO: 2952723 - RNA, 19 nt, Artificial Sequence
  Description of Artificial Sequence: Synthetic oligonucleotide
ugcagauacaacacuccuc

SEQ ID NO: 2952724 - RNA, 19 nt, Artificial Sequence
  Description of Artificial Sequence: Synthetic oligonucleotide
uccaugcagauacaacacu

SEQ ID NO: 2952725 - RNA, 19 nt, Artificial Sequence
  Description of Artificial Sequence: Synthetic oligonucleotide
auauaguuagccaugucau

SEQ ID NO: 2952726 - RNA, 19 nt, Artificial Sequence
  Description of Artificial Sequence: Synthetic oligonucleotide
cugacaccacccaugauuc

SEQ ID NO: 2952727 - RNA, 19 nt, Artificial Sequence
  Description of Artificial Sequence: Synthetic oligonucleotide
gcaggaugaggucagcucg

SEQ ID NO: 2952728 - RNA, 19 nt, Artificial Sequence
  Description of Artificial Sequence: Synthetic oligonucleotide
uauaguuagccaugucauc

SEQ ID NO: 2952729 - RNA, 19 nt, Artificial Sequence
  Description of Artificial Sequence: Synthetic oligonucleotide
ucacaauaacaagucuucc

SEQ ID NO: 2952730 - RNA, 19 nt, Artificial Sequence
  Description of Artificial Sequence: Synthetic oligonucleotide
auuuaagaaugggauauau

SEQ ID NO: 2952731 - RNA, 19 nt, Artificial Sequence
  Description of Artificial Sequence: Synthetic oligonucleotide
agaauauaguuagccaugu

SEQ ID NO: 2952732 - RNA, 19 nt, Artificial Sequence
  Description of Artificial Sequence: Synthetic oligonucleotide
acugauguuccugugugug

SEQ ID NO: 2952733 - RNA, 19 nt, Artificial Sequence
  Description of Artificial Sequence: Synthetic oligonucleotide
gacaugggaguuuauuuaa

SEQ ID NO: 2952734 - RNA, 19 nt, Artificial Sequence
  Description of Artificial Sequence: Synthetic oligonucleotide
cauuuaucaauacacuucu

SEQ ID NO: 2952735 - RNA, 19 nt, Artificial Sequence
  Description of Artificial Sequence: Synthetic oligonucleotide
agacaugggaguuuauuua

SEQ ID NO: 2952736 - RNA, 19 nt, Artificial Sequence
  Description of Artificial Sequence: Synthetic oligonucleotide
uguaucuguaguucacaau

SEQ ID NO: 2952737 - RNA, 19 nt, Artificial Sequence
  Description of Artificial Sequence: Synthetic oligonucleotide
uaggcgacaaauggggcag

SEQ ID NO: 2952738 - RNA, 19 nt, Artificial Sequence
  Description of Artificial Sequence: Synthetic oligonucleotide
uggccugugaggcuggccu

SEQ ID NO: 2952739 - RNA, 19 nt, Artificial Sequence
  Description of Artificial Sequence: Synthetic oligonucleotide
agcugcuuccacccugccc

SEQ ID NO: 2952740 - RNA, 19 nt, Artificial Sequence
  Description of Artificial Sequence: Synthetic oligonucleotide
ucggccauauuaagaauau

SEQ ID NO: 2952741 - RNA, 19 nt, Artificial Sequence
  Description of Artificial Sequence: Synthetic oligonucleotide
acccaugauucauucgcuc

SEQ ID NO: 2952742 - RNA, 19 nt, Artificial Sequence
  Description of Artificial Sequence: Synthetic oligonucleotide
cagucagcugcuuccaccc

SEQ ID NO: 2952743 - RNA, 19 nt, Artificial Sequence
  Description of Artificial Sequence: Synthetic oligonucleotide
acugugagcacagggcagg

SEQ ID NO: 2952744 - RNA, 19 nt, Artificial Sequence
  Description of Artificial Sequence: Synthetic oligonucleotide
augcagauacaacacuccu

SEQ ID NO: 2952745 - RNA, 19 nt, Artificial Sequence
  Description of Artificial Sequence: Synthetic oligonucleotide
gaucacuccauuuaucaau

SEQ ID NO: 2952746 - RNA, 19 nt, Artificial Sequence
  Description of Artificial Sequence: Synthetic oligonucleotide
aacugauguuccugugugu

SEQ ID NO: 2952747 - RNA, 19 nt, Artificial Sequence
  Description of Artificial Sequence: Synthetic oligonucleotide
gaccacaguguaucuguag

SEQ ID NO: 2952748 - RNA, 19 nt, Artificial Sequence
  Description of Artificial Sequence: Synthetic oligonucleotide
uaugaccacaguguaucug

SEQ ID NO: 2952749 - RNA, 19 nt, Artificial Sequence
  Description of Artificial Sequence: Synthetic oligonucleotide
uucagugggugcaucugac

SEQ ID NO: 2952750 - RNA, 19 nt, Artificial Sequence
  Description of Artificial Sequence: Synthetic oligonucleotide
ggaguuuauuuaagaaugg

SEQ ID NO: 2952751 - RNA, 19 nt, Artificial Sequence
  Description of Artificial Sequence: Synthetic oligonucleotide
ucagcugcuuccacccugc

SEQ ID NO: 2952752 - RNA, 19 nt, Artificial Sequence
  Description of Artificial Sequence: Synthetic oligonucleotide
uaacaagucuuccccuagu

SEQ ID NO: 2952753 - RNA, 19 nt, Artificial Sequence
  Description of Artificial Sequence: Synthetic oligonucleotide
auggggcaguuccugugcc

SEQ ID NO: 2952754 - RNA, 19 nt, Artificial Sequence
  Description of Artificial Sequence: Synthetic oligonucleotide
guaguucacaauaacaagu

SEQ ID NO: 2952755 - RNA, 19 nt, Artificial Sequence
  Description of Artificial Sequence: Synthetic oligonucleotide
caugggaguuuauuuaaga

SEQ ID NO: 2952756 - RNA, 19 nt, Artificial Sequence
  Description of Artificial Sequence: Synthetic oligonucleotide
agucuuccccuagucaugg

SEQ ID NO: 2952757 - RNA, 19 nt, Artificial Sequence
  Description of Artificial Sequence: Synthetic oligonucleotide
agcucggccguccaugcag

SEQ ID NO: 2952758 - RNA, 19 nt, Artificial Sequence
  Description of Artificial Sequence: Synthetic oligonucleotide
ugugugugccacacauccc

SEQ ID NO: 2952759 - RNA, 19 nt, Artificial Sequence
  Description of Artificial Sequence: Synthetic oligonucleotide
gcuccagucaucuguaggc

SEQ ID NO: 2952760 - RNA, 19 nt, Artificial Sequence
  Description of Artificial Sequence: Synthetic oligonucleotide
ugugaggcuggccugccuc

SEQ ID NO: 2952761 - RNA, 19 nt, Artificial Sequence
  Description of Artificial Sequence: Synthetic oligonucleotide
cugauguuccugugugugc

SEQ ID NO: 2952762 - RNA, 19 nt, Artificial Sequence
  Description of Artificial Sequence: Synthetic oligonucleotide
caucuguaggcgacaaaug

SEQ ID NO: 2952763 - RNA, 19 nt, Artificial Sequence
  Description of Artificial Sequence: Synthetic oligonucleotide
acaaauggggcaguuccug

SEQ ID NO: 2952764 - RNA, 19 nt, Artificial Sequence
  Description of Artificial Sequence: Synthetic oligonucleotide
ucauucgcuccagucaucu

SEQ ID NO: 2952765 - RNA, 19 nt, Artificial Sequence
  Description of Artificial Sequence: Synthetic oligonucleotide
auaagagggugggaaaacu

SEQ ID NO: 2952766 - RNA, 19 nt, Artificial Sequence
  Description of Artificial Sequence: Synthetic oligonucleotide
gugggaaaacugauguucc

SEQ ID NO: 2952767 - RNA, 19 nt, Artificial Sequence
  Description of Artificial Sequence: Synthetic oligonucleotide
ggugggaaaacugauguuc

SEQ ID NO: 2952768 - RNA, 19 nt, Artificial Sequence
  Description of Artificial Sequence: Synthetic oligonucleotide
guaggcgacaaauggggca

SEQ ID NO: 2952769 - RNA, 19 nt, Artificial Sequence
  Description of Artificial Sequence: Synthetic oligonucleotide
ccacccaugauucauucgc

SEQ ID NO: 2952770 - RNA, 19 nt, Artificial Sequence
  Description of Artificial Sequence: Synthetic oligonucleotide
gaauauaguuagccauguc

SEQ ID NO: 2952771 - RNA, 19 nt, Artificial Sequence
  Description of Artificial Sequence: Synthetic oligonucleotide
ugccacacaucccucuacu

SEQ ID NO: 2952772 - RNA, 19 nt, Artificial Sequence
  Description of Artificial Sequence: Synthetic oligonucleotide
accacccaugauucauucg

SEQ ID NO: 2952773 - RNA, 19 nt, Artificial Sequence
  Description of Artificial Sequence: Synthetic oligonucleotide
ugucaucuucagugggugc

SEQ ID NO: 2952774 - RNA, 19 nt, Artificial Sequence
  Description of Artificial Sequence: Synthetic oligonucleotide
aucagucagcugcuuccac

SEQ ID NO: 2952775 - RNA, 19 nt, Artificial Sequence
  Description of Artificial Sequence: Synthetic oligonucleotide
uccagucaucuguaggcga

SEQ ID NO: 2952776 - RNA, 19 nt, Artificial Sequence
  Description of Artificial Sequence: Synthetic oligonucleotide
auauauuaucagaguagca

SEQ ID NO: 2952777 - RNA, 19 nt, Artificial Sequence
  Description of Artificial Sequence: Synthetic oligonucleotide
caggaugaggucagcucgg

SEQ ID NO: 2952778 - RNA, 19 nt, Artificial Sequence
  Description of Artificial Sequence: Synthetic oligonucleotide
uacaacacuccuccucauc

SEQ ID NO: 2952779 - RNA, 19 nt, Artificial Sequence
  Description of Artificial Sequence: Synthetic oligonucleotide
ucaauacacuucugacaga

SEQ ID NO: 2952780 - RNA, 19 nt, Artificial Sequence
  Description of Artificial Sequence: Synthetic oligonucleotide
ugggaaaacugauguuccu

SEQ ID NO: 2952781 - RNA, 19 nt, Artificial Sequence
  Description of Artificial Sequence: Synthetic oligonucleotide
cucaucggccauauuaaga

SEQ ID NO: 2952782 - RNA, 19 nt, Artificial Sequence
  Description of Artificial Sequence: Synthetic oligonucleotide
cacaguguaucuguaguuc

SEQ ID NO: 2952783 - RNA, 19 nt, Artificial Sequence
  Description of Artificial Sequence: Synthetic oligonucleotide
gggauauauuaucagagua

SEQ ID NO: 2952784 - RNA, 19 nt, Artificial Sequence
  Description of Artificial Sequence: Synthetic oligonucleotide
caguguaucuguaguucac

SEQ ID NO: 2952785 - RNA, 19 nt, Artificial Sequence
  Description of Artificial Sequence: Synthetic oligonucleotide
aucuucagugggugcaucu

SEQ ID NO: 2952786 - RNA, 19 nt, Artificial Sequence
  Description of Artificial Sequence: Synthetic oligonucleotide
aguguaucuguaguucaca

SEQ ID NO: 2952787 - RNA, 19 nt, Artificial Sequence
  Description of Artificial Sequence: Synthetic oligonucleotide
ucuucagugggugcaucug

SEQ ID NO: 2952788 - RNA, 19 nt, Artificial Sequence
  Description of Artificial Sequence: Synthetic oligonucleotide
cuucugacagaaacuguga

SEQ ID NO: 2952789 - RNA, 19 nt, Artificial Sequence
  Description of Artificial Sequence: Synthetic oligonucleotide
caucccucuacucuuccuc

SEQ ID NO: 2952790 - RNA, 19 nt, Artificial Sequence
  Description of Artificial Sequence: Synthetic oligonucleotide
ugcaucugacaccacccau

SEQ ID NO: 2952791 - RNA, 19 nt, Artificial Sequence
  Description of Artificial Sequence: Synthetic oligonucleotide
caauacacuucugacagaa

SEQ ID NO: 2952792 - RNA, 19 nt, Artificial Sequence
  Description of Artificial Sequence: Synthetic oligonucleotide
cacuccauuuaucaauaca

SEQ ID NO: 2952793 - RNA, 19 nt, Artificial Sequence
  Description of Artificial Sequence: Synthetic oligonucleotide
uauuuaagaaugggauaua

SEQ ID NO: 2952794 - RNA, 19 nt, Artificial Sequence
  Description of Artificial Sequence: Synthetic oligonucleotide
aagucuuccccuagucaug

SEQ ID NO: 2952795 - RNA, 19 nt, Artificial Sequence
  Description of Artificial Sequence: Synthetic oligonucleotide
ucagcucggccguccaugc

SEQ ID NO: 2952796 - RNA, 19 nt, Artificial Sequence
  Description of Artificial Sequence: Synthetic oligonucleotide
caacacuccuccucaucag

SEQ ID NO: 2952797 - RNA, 19 nt, Artificial Sequence
  Description of Artificial Sequence: Synthetic oligonucleotide
gccaugucaucuucagugg

SEQ ID NO: 2952798 - RNA, 19 nt, Artificial Sequence
  Description of Artificial Sequence: Synthetic oligonucleotide
caugauucauucgcuccag

SEQ ID NO: 2952799 - RNA, 19 nt, Artificial Sequence
  Description of Artificial Sequence: Synthetic oligonucleotide
ugccgaucacuccauuuau

SEQ ID NO: 2952800 - RNA, 19 nt, Artificial Sequence
  Description of Artificial Sequence: Synthetic oligonucleotide
cucuacucuuccucuauga

SEQ ID NO: 2952801 - RNA, 19 nt, Artificial Sequence
  Description of Artificial Sequence: Synthetic oligonucleotide
ucauggccugugaggcugg

SEQ ID NO: 2952802 - RNA, 19 nt, Artificial Sequence
  Description of Artificial Sequence: Synthetic oligonucleotide
uggggcaguuccugugccg

SEQ ID NO: 2952803 - RNA, 19 nt, Artificial Sequence
  Description of Artificial Sequence: Synthetic oligonucleotide
cuggccugccucaucggcc

SEQ ID NO: 2952804 - RNA, 19 nt, Artificial Sequence
  Description of Artificial Sequence: Synthetic oligonucleotide
uggaagacaugggaguuua

SEQ ID NO: 2952805 - RNA, 19 nt, Artificial Sequence
  Description of Artificial Sequence: Synthetic oligonucleotide
cuccagucaucuguaggcg

SEQ ID NO: 2952806 - RNA, 19 nt, Artificial Sequence
  Description of Artificial Sequence: Synthetic oligonucleotide
ugcccaucccacagacuag

SEQ ID NO: 2952807 - RNA, 19 nt, Artificial Sequence
  Description of Artificial Sequence: Synthetic oligonucleotide
gagggugggaaaacugaug

SEQ ID NO: 2952808 - RNA, 19 nt, Artificial Sequence
  Description of Artificial Sequence: Synthetic oligonucleotide
ugugccgaucacuccauuu

SEQ ID NO: 2952809 - RNA, 19 nt, Artificial Sequence
  Description of Artificial Sequence: Synthetic oligonucleotide
aucccucuacucuuccucu

SEQ ID NO: 2952810 - RNA, 19 nt, Artificial Sequence
  Description of Artificial Sequence: Synthetic oligonucleotide
cgacaaauggggcaguucc

SEQ ID NO: 2952811 - RNA, 19 nt, Artificial Sequence
  Description of Artificial Sequence: Synthetic oligonucleotide
ugacagaaacugugagcac

SEQ ID NO: 2952812 - RNA, 19 nt, Artificial Sequence
  Description of Artificial Sequence: Synthetic oligonucleotide
acaugggaguuuauuuaag

SEQ ID NO: 2952813 - RNA, 19 nt, Artificial Sequence
  Description of Artificial Sequence: Synthetic oligonucleotide
augaggucagcucggccgu

SEQ ID NO: 2952814 - RNA, 19 nt, Artificial Sequence
  Description of Artificial Sequence: Synthetic oligonucleotide
uucgcuccagucaucugua

SEQ ID NO: 2952815 - RNA, 19 nt, Artificial Sequence
  Description of Artificial Sequence: Synthetic oligonucleotide
ucacuccauuuaucaauac

SEQ ID NO: 2952816 - RNA, 19 nt, Artificial Sequence
  Description of Artificial Sequence: Synthetic oligonucleotide
cccaugauucauucgcucc

SEQ ID NO: 2952817 - RNA, 19 nt, Artificial Sequence
  Description of Artificial Sequence: Synthetic oligonucleotide
gucauggccugugaggcug

SEQ ID NO: 2952818 - RNA, 19 nt, Artificial Sequence
  Description of Artificial Sequence: Synthetic oligonucleotide
ugugccacacaucccucua

SEQ ID NO: 2952819 - RNA, 19 nt, Artificial Sequence
  Description of Artificial Sequence: Synthetic oligonucleotide
gucagcugcuuccacccug

SEQ ID NO: 2952820 - RNA, 19 nt, Artificial Sequence
  Description of Artificial Sequence: Synthetic oligonucleotide
gucaucuucagugggugca

SEQ ID NO: 2952821 - RNA, 19 nt, Artificial Sequence
  Description of Artificial Sequence: Synthetic oligonucleotide
auguuccugugugugccac

SEQ ID NO: 2952822 - RNA, 19 nt, Artificial Sequence
  Description of Artificial Sequence: Synthetic oligonucleotide
uagccaugucaucuucagu

SEQ ID NO: 2952823 - RNA, 19 nt, Artificial Sequence
  Description of Artificial Sequence: Synthetic oligonucleotide
guuccugugccgaucacuc

SEQ ID NO: 2952824 - RNA, 19 nt, Artificial Sequence
  Description of Artificial Sequence: Synthetic oligonucleotide
ggugcaucugacaccaccc

SEQ ID NO: 2952825 - RNA, 19 nt, Artificial Sequence
  Description of Artificial Sequence: Synthetic oligonucleotide
ccaugcagauacaacacuc

SEQ ID NO: 2952826 - RNA, 19 nt, Artificial Sequence
  Description of Artificial Sequence: Synthetic oligonucleotide
guguaucuguaguucacaa

SEQ ID NO: 2952827 - RNA, 19 nt, Artificial Sequence
  Description of Artificial Sequence: Synthetic oligonucleotide
aguuccugugccgaucacu

SEQ ID NO: 2952828 - RNA, 19 nt, Artificial Sequence
  Description of Artificial Sequence: Synthetic oligonucleotide
aucggccauauuaagaaua

SEQ ID NO: 2952829 - RNA, 19 nt, Artificial Sequence
  Description of Artificial Sequence: Synthetic oligonucleotide
caucugacaccacccauga

SEQ ID NO: 2952830 - RNA, 19 nt, Artificial Sequence
  Description of Artificial Sequence: Synthetic oligonucleotide
uuccccuagucauggccug

SEQ ID NO: 2952831 - RNA, 19 nt, Artificial Sequence
  Description of Artificial Sequence: Synthetic oligonucleotide
acagggcaggaugagguca

SEQ ID NO: 2952832 - RNA, 19 nt, Artificial Sequence
  Description of Artificial Sequence: Synthetic oligonucleotide
uggccugccucaucggcca

SEQ ID NO: 2952833 - RNA, 19 nt, Artificial Sequence
  Description of Artificial Sequence: Synthetic oligonucleotide
uaguuagccaugucaucuu

SEQ ID NO: 2952834 - RNA, 19 nt, Artificial Sequence
  Description of Artificial Sequence: Synthetic oligonucleotide
uccacccugcccaucccac

SEQ ID NO: 2952835 - RNA, 19 nt, Artificial Sequence
  Description of Artificial Sequence: Synthetic oligonucleotide
uuccacccugcccauccca

SEQ ID NO: 2952836 - RNA, 19 nt, Artificial Sequence
  Description of Artificial Sequence: Synthetic oligonucleotide
cugcccaucccacagacua

SEQ ID NO: 2952837 - RNA, 19 nt, Artificial Sequence
  Description of Artificial Sequence: Synthetic oligonucleotide
gggaaaacugauguuccug

SEQ ID NO: 2952838 - RNA, 19 nt, Artificial Sequence
  Description of Artificial Sequence: Synthetic oligonucleotide
caagucuuccccuagucau

SEQ ID NO: 2952839 - RNA, 19 nt, Artificial Sequence
  Description of Artificial Sequence: Synthetic oligonucleotide
gggugcaucugacaccacc

SEQ ID NO: 2952840 - RNA, 19 nt, Artificial Sequence
  Description of Artificial Sequence: Synthetic oligonucleotide
guucacaauaacaagucuu

SEQ ID NO: 2952841 - RNA, 19 nt, Artificial Sequence
  Description of Artificial Sequence: Synthetic oligonucleotide
uguuccugugugugccaca

SEQ ID NO: 2952842 - RNA, 19 nt, Artificial Sequence
  Description of Artificial Sequence: Synthetic oligonucleotide
acucuuccucuaugaccac

SEQ ID NO: 2952843 - RNA, 19 nt, Artificial Sequence
  Description of Artificial Sequence: Synthetic oligonucleotide
ugugugccacacaucccuc

SEQ ID NO: 2952844 - RNA, 19 nt, Artificial Sequence
  Description of Artificial Sequence: Synthetic oligonucleotide
augauucauucgcuccagu

SEQ ID NO: 2952845 - RNA, 19 nt, Artificial Sequence
  Description of Artificial Sequence: Synthetic oligonucleotide
uuccugugccgaucacucc

SEQ ID NO: 2952846 - RNA, 19 nt, Artificial Sequence
  Description of Artificial Sequence: Synthetic oligonucleotide
ggaaaacugauguuccugu

SEQ ID NO: 2952847 - RNA, 19 nt, Artificial Sequence
  Description of Artificial Sequence: Synthetic oligonucleotide
aauacacuucugacagaaa

SEQ ID NO: 2952848 - RNA, 19 nt, Artificial Sequence
  Description of Artificial Sequence: Synthetic oligonucleotide
aucacuccauuuaucaaua

SEQ ID NO: 2952849 - RNA, 19 nt, Artificial Sequence
  Description of Artificial Sequence: Synthetic oligonucleotide
gauguuccugugugugcca

SEQ ID NO: 2952850 - RNA, 19 nt, Artificial Sequence
  Description of Artificial Sequence: Synthetic oligonucleotide
cuucagugggugcaucuga

SEQ ID NO: 2952851 - RNA, 19 nt, Artificial Sequence
  Description of Artificial Sequence: Synthetic oligonucleotide
cuccauuuaucaauacacu

SEQ ID NO: 2952852 - RNA, 19 nt, Artificial Sequence
  Description of Artificial Sequence: Synthetic oligonucleotide
uucauucgcuccagucauc

SEQ ID NO: 2952853 - RNA, 19 nt, Artificial Sequence
  Description of Artificial Sequence: Synthetic oligonucleotide
cacccugcccaucccacag

SEQ ID NO: 2952854 - RNA, 19 nt, Artificial Sequence
  Description of Artificial Sequence: Synthetic oligonucleotide
acaucccucuacucuuccu

SEQ ID NO: 2952855 - RNA, 19 nt, Artificial Sequence
  Description of Artificial Sequence: Synthetic oligonucleotide
ccaugucaucuucaguggg

SEQ ID NO: 2952856 - RNA, 19 nt, Artificial Sequence
  Description of Artificial Sequence: Synthetic oligonucleotide
caccacccaugauucauuc

SEQ ID NO: 2952857 - RNA, 19 nt, Artificial Sequence
  Description of Artificial Sequence: Synthetic oligonucleotide
gcuuccacccugcccaucc

SEQ ID NO: 2952858 - RNA, 19 nt, Artificial Sequence
  Description of Artificial Sequence: Synthetic oligonucleotide
ugaccacaguguaucugua

SEQ ID NO: 2952859 - RNA, 19 nt, Artificial Sequence
  Description of Artificial Sequence: Synthetic oligonucleotide
guuagccaugucaucuuca

SEQ ID NO: 2952860 - RNA, 19 nt, Artificial Sequence
  Description of Artificial Sequence: Synthetic oligonucleotide
agucauggccugugaggcu

SEQ ID NO: 2952861 - RNA, 19 nt, Artificial Sequence
  Description of Artificial Sequence: Synthetic oligonucleotide
ccauauuaagaauauaguu

SEQ ID NO: 2952862 - RNA, 19 nt, Artificial Sequence
  Description of Artificial Sequence: Synthetic oligonucleotide
ccgaucacuccauuuauca

SEQ ID NO: 2952863 - RNA, 19 nt, Artificial Sequence
  Description of Artificial Sequence: Synthetic oligonucleotide
ugacaccacccaugauuca

SEQ ID NO: 2952864 - RNA, 19 nt, Artificial Sequence
  Description of Artificial Sequence: Synthetic oligonucleotide
cguccaugcagauacaaca

SEQ ID NO: 2952865 - RNA, 19 nt, Artificial Sequence
  Description of Artificial Sequence: Synthetic oligonucleotide
gugccgaucacuccauuua

SEQ ID NO: 2952866 - RNA, 19 nt, Artificial Sequence
  Description of Artificial Sequence: Synthetic oligonucleotide
acacaucccucuacucuuc

SEQ ID NO: 2952867 - RNA, 19 nt, Artificial Sequence
  Description of Artificial Sequence: Synthetic oligonucleotide
ccuagucauggccugugag

SEQ ID NO: 2952868 - RNA, 19 nt, Artificial Sequence
  Description of Artificial Sequence: Synthetic oligonucleotide
gucagcucggccguccaug

SEQ ID NO: 2952869 - RNA, 19 nt, Artificial Sequence
  Description of Artificial Sequence: Synthetic oligonucleotide
caugucaucuucagugggu

SEQ ID NO: 2952870 - RNA, 19 nt, Artificial Sequence
  Description of Artificial Sequence: Synthetic oligonucleotide
auacaacacuccuccucau

SEQ ID NO: 2952871 - RNA, 19 nt, Artificial Sequence
  Description of Artificial Sequence: Synthetic oligonucleotide
ucgcuccagucaucuguag

SEQ ID NO: 2952872 - RNA, 19 nt, Artificial Sequence
  Description of Artificial Sequence: Synthetic oligonucleotide
agagggugggaaaacugau

SEQ ID NO: 2952873 - RNA, 19 nt, Artificial Sequence
  Description of Artificial Sequence: Synthetic oligonucleotide
gcaucugacaccacccaug

SEQ ID NO: 2952874 - RNA, 19 nt, Artificial Sequence
  Description of Artificial Sequence: Synthetic oligonucleotide
ucaucuucagugggugcau

SEQ ID NO: 2952875 - RNA, 19 nt, Artificial Sequence
  Description of Artificial Sequence: Synthetic oligonucleotide
ccagucaucuguaggcgac

SEQ ID NO: 2952876 - RNA, 19 nt, Artificial Sequence
  Description of Artificial Sequence: Synthetic oligonucleotide
cacagggcaggaugagguc

SEQ ID NO: 2952877 - RNA, 19 nt, Artificial Sequence
  Description of Artificial Sequence: Synthetic oligonucleotide
gugcaucugacaccaccca

SEQ ID NO: 2952878 - RNA, 19 nt, Artificial Sequence
  Description of Artificial Sequence: Synthetic oligonucleotide
cauucgcuccagucaucug

SEQ ID NO: 2952879 - RNA, 19 nt, Artificial Sequence
  Description of Artificial Sequence: Synthetic oligonucleotide
gagcacagggcaggaugag

SEQ ID NO: 2952880 - RNA, 19 nt, Artificial Sequence
  Description of Artificial Sequence: Synthetic oligonucleotide
cuuccccuagucauggccu

SEQ ID NO: 2952881 - RNA, 19 nt, Artificial Sequence
  Description of Artificial Sequence: Synthetic oligonucleotide
gccauauuaagaauauagu

SEQ ID NO: 2952882 - RNA, 19 nt, Artificial Sequence
  Description of Artificial Sequence: Synthetic oligonucleotide
gugccacacaucccucuac

SEQ ID NO: 2952883 - RNA, 19 nt, Artificial Sequence
  Description of Artificial Sequence: Synthetic oligonucleotide
agucagcugcuuccacccu

SEQ ID NO: 2952884 - RNA, 19 nt, Artificial Sequence
  Description of Artificial Sequence: Synthetic oligonucleotide
gacaccacccaugauucau

SEQ ID NO: 2952885 - RNA, 19 nt, Artificial Sequence
  Description of Artificial Sequence: Synthetic oligonucleotide
cuuccacccugcccauccc

SEQ ID NO: 2952886 - RNA, 19 nt, Artificial Sequence
  Description of Artificial Sequence: Synthetic oligonucleotide
ccucaucggccauauuaag

SEQ ID NO: 2952887 - RNA, 19 nt, Artificial Sequence
  Description of Artificial Sequence: Synthetic oligonucleotide
ucccucuacucuuccucua

SEQ ID NO: 2952888 - RNA, 19 nt, Artificial Sequence
  Description of Artificial Sequence: Synthetic oligonucleotide
auggaagacaugggaguuu

SEQ ID NO: 2952889 - RNA, 19 nt, Artificial Sequence
  Description of Artificial Sequence: Synthetic oligonucleotide
cggccguccaugcagauac

SEQ ID NO: 2952890 - RNA, 19 nt, Artificial Sequence
  Description of Artificial Sequence: Synthetic oligonucleotide
ccaugauucauucgcucca

SEQ ID NO: 2952891 - RNA, 19 nt, Artificial Sequence
  Description of Artificial Sequence: Synthetic oligonucleotide
gacaaauggggcaguuccu

SEQ ID NO: 2952892 - RNA, 19 nt, Artificial Sequence
  Description of Artificial Sequence: Synthetic oligonucleotide
gcaguuccugugccgauca

SEQ ID NO: 2952893 - RNA, 19 nt, Artificial Sequence
  Description of Artificial Sequence: Synthetic oligonucleotide
ugugagcacagggcaggau

SEQ ID NO: 2952894 - RNA, 19 nt, Artificial Sequence
  Description of Artificial Sequence: Synthetic oligonucleotide
caaauggggcaguuccugu

SEQ ID NO: 2952895 - RNA, 19 nt, Artificial Sequence
  Description of Artificial Sequence: Synthetic oligonucleotide
caucagucagcugcuucca

SEQ ID NO: 2952896 - RNA, 19 nt, Artificial Sequence
  Description of Artificial Sequence: Synthetic oligonucleotide
gucuuccccuagucauggc

SEQ ID NO: 2952897 - RNA, 19 nt, Artificial Sequence
  Description of Artificial Sequence: Synthetic oligonucleotide
cucuuccucuaugaccaca

SEQ ID NO: 2952898 - RNA, 19 nt, Artificial Sequence
  Description of Artificial Sequence: Synthetic oligonucleotide
aucugacaccacccaugau

SEQ ID NO: 2952899 - RNA, 19 nt, Artificial Sequence
  Description of Artificial Sequence: Synthetic oligonucleotide
aggucagcucggccgucca

SEQ ID NO: 2952900 - RNA, 19 nt, Artificial Sequence
  Description of Artificial Sequence: Synthetic oligonucleotide
caucuucagugggugcauc

SEQ ID NO: 2952901 - RNA, 19 nt, Artificial Sequence
  Description of Artificial Sequence: Synthetic oligonucleotide
cgcuccagucaucuguagg

SEQ ID NO: 2952902 - RNA, 19 nt, Artificial Sequence
  Description of Artificial Sequence: Synthetic oligonucleotide
cuaugaccacaguguaucu

SEQ ID NO: 2952903 - RNA, 19 nt, Artificial Sequence
  Description of Artificial Sequence: Synthetic oligonucleotide
cacuucugacagaaacugu

SEQ ID NO: 2952904 - RNA, 19 nt, Artificial Sequence
  Description of Artificial Sequence: Synthetic oligonucleotide
cucuaugaccacaguguau

SEQ ID NO: 2952905 - RNA, 19 nt, Artificial Sequence
  Description of Artificial Sequence: Synthetic oligonucleotide
gucaucuguaggcgacaaa

SEQ ID NO: 2952906 - RNA, 19 nt, Artificial Sequence
  Description of Artificial Sequence: Synthetic oligonucleotide
uccccuagucauggccugu

SEQ ID NO: 2952907 - RNA, 19 nt, Artificial Sequence
  Description of Artificial Sequence: Synthetic oligonucleotide
gaggcuggccugccucauc

SEQ ID NO: 2952908 - RNA, 19 nt, Artificial Sequence
  Description of Artificial Sequence: Synthetic oligonucleotide
gcccaucccacagacuagc

SEQ ID NO: 2952909 - RNA, 19 nt, Artificial Sequence
  Description of Artificial Sequence: Synthetic oligonucleotide
acccugcccaucccacaga

SEQ ID NO: 2952910 - RNA, 19 nt, Artificial Sequence
  Description of Artificial Sequence: Synthetic oligonucleotide
ccucuacucuuccucuaug

SEQ ID NO: 2952911 - RNA, 19 nt, Artificial Sequence
  Description of Artificial Sequence: Synthetic oligonucleotide
cacccaugauucauucgcu

SEQ ID NO: 2952912 - RNA, 19 nt, Artificial Sequence
  Description of Artificial Sequence: Synthetic oligonucleotide
gccacacaucccucuacuc

SEQ ID NO: 2952913 - RNA, 19 nt, Artificial Sequence
  Description of Artificial Sequence: Synthetic oligonucleotide
gugugccacacaucccucu

SEQ ID NO: 2952914 - RNA, 19 nt, Artificial Sequence
  Description of Artificial Sequence: Synthetic oligonucleotide
ucggccguccaugcagaua

SEQ ID NO: 2952915 - RNA, 19 nt, Artificial Sequence
  Description of Artificial Sequence: Synthetic oligonucleotide
cauggaagacaugggaguu

SEQ ID NO: 2952916 - RNA, 19 nt, Artificial Sequence
  Description of Artificial Sequence: Synthetic oligonucleotide
cccaucccacagacuagcc

SEQ ID NO: 2952917 - RNA, 19 nt, Artificial Sequence
  Description of Artificial Sequence: Synthetic oligonucleotide
caguuccugugccgaucac

SEQ ID NO: 2952918 - RNA, 19 nt, Artificial Sequence
  Description of Artificial Sequence: Synthetic oligonucleotide
ccugugugugccacacauc

SEQ ID NO: 2952919 - RNA, 19 nt, Artificial Sequence
  Description of Artificial Sequence: Synthetic oligonucleotide
cauggccugugaggcuggc

SEQ ID NO: 2952920 - RNA, 19 nt, Artificial Sequence
  Description of Artificial Sequence: Synthetic oligonucleotide
cagucaucuguaggcgaca

SEQ ID NO: 2952921 - RNA, 19 nt, Artificial Sequence
  Description of Artificial Sequence: Synthetic oligonucleotide
ugggugcaucugacaccac

SEQ ID NO: 2952922 - RNA, 19 nt, Artificial Sequence
  Description of Artificial Sequence: Synthetic oligonucleotide
ggccugugaggcuggccug

SEQ ID NO: 2952923 - RNA, 19 nt, Artificial Sequence
  Description of Artificial Sequence: Synthetic oligonucleotide
cagcugcuuccacccugcc

SEQ ID NO: 2952924 - RNA, 19 nt, Artificial Sequence
  Description of Artificial Sequence: Synthetic oligonucleotide
cccugcccaucccacagac

SEQ ID NO: 2952925 - RNA, 19 nt, Artificial Sequence
  Description of Artificial Sequence: Synthetic oligonucleotide
caucggccauauuaagaau

SEQ ID NO: 2952926 - RNA, 19 nt, Artificial Sequence
  Description of Artificial Sequence: Synthetic oligonucleotide
ggggcaguuccugugccga

SEQ ID NO: 2952927 - RNA, 19 nt, Artificial Sequence
  Description of Artificial Sequence: Synthetic oligonucleotide
gcacagggcaggaugaggu

SEQ ID NO: 2952928 - RNA, 19 nt, Artificial Sequence
  Description of Artificial Sequence: Synthetic oligonucleotide
ccucuaugaccacagugua

SEQ ID NO: 2952929 - RNA, 19 nt, Artificial Sequence
  Description of Artificial Sequence: Synthetic oligonucleotide
ugaggucagcucggccguc

SEQ ID NO: 2952930 - RNA, 19 nt, Artificial Sequence
  Description of Artificial Sequence: Synthetic oligonucleotide
cagauacaacacuccuccu

SEQ ID NO: 2952931 - RNA, 19 nt, Artificial Sequence
  Description of Artificial Sequence: Synthetic oligonucleotide
ggcaguuccugugccgauc

SEQ ID NO: 2952932 - RNA, 19 nt, Artificial Sequence
  Description of Artificial Sequence: Synthetic oligonucleotide
gccgaucacuccauuuauc

SEQ ID NO: 2952933 - RNA, 19 nt, Artificial Sequence
  Description of Artificial Sequence: Synthetic oligonucleotide
gcgacaaauggggcaguuc

SEQ ID NO: 2952934 - RNA, 19 nt, Artificial Sequence
  Description of Artificial Sequence: Synthetic oligonucleotide
gccugugaggcuggccugc

SEQ ID NO: 2952935 - RNA, 19 nt, Artificial Sequence
  Description of Artificial Sequence: Synthetic oligonucleotide
cugugagcacagggcagga

SEQ ID NO: 2952936 - RNA, 19 nt, Artificial Sequence
  Description of Artificial Sequence: Synthetic oligonucleotide
cuuccucuaugaccacagu

SEQ ID NO: 2952937 - RNA, 19 nt, Artificial Sequence
  Description of Artificial Sequence: Synthetic oligonucleotide
aggcgacaaauggggcagu

SEQ ID NO: 2952938 - RNA, 19 nt, Artificial Sequence
  Description of Artificial Sequence: Synthetic oligonucleotide
ugcuuccacccugcccauc

SEQ ID NO: 2952939 - RNA, 19 nt, Artificial Sequence
  Description of Artificial Sequence: Synthetic oligonucleotide
cgaucacuccauuuaucaa

SEQ ID NO: 2952940 - RNA, 19 nt, Artificial Sequence
  Description of Artificial Sequence: Synthetic oligonucleotide
gccguccaugcagauacaa

SEQ ID NO: 2952941 - RNA, 19 nt, Artificial Sequence
  Description of Artificial Sequence: Synthetic oligonucleotide
ccugugaggcuggccugcc

SEQ ID NO: 2952942 - RNA, 19 nt, Artificial Sequence
  Description of Artificial Sequence: Synthetic oligonucleotide
ccccuagucauggccugug

SEQ ID NO: 2952943 - RNA, 19 nt, Artificial Sequence
  Description of Artificial Sequence: Synthetic oligonucleotide
ccaucccacagacuagccu

SEQ ID NO: 2952944 - RNA, 19 nt, Artificial Sequence
  Description of Artificial Sequence: Synthetic oligonucleotide
cagcucggccguccaugca

SEQ ID NO: 2952945 - RNA, 19 nt, Artificial Sequence
  Description of Artificial Sequence: Synthetic oligonucleotide
gggugggaaaacugauguu

SEQ ID NO: 2952946 - RNA, 19 nt, Artificial Sequence
  Description of Artificial Sequence: Synthetic oligonucleotide
ccacaguguaucuguaguu

SEQ ID NO: 2952947 - RNA, 19 nt, Artificial Sequence
  Description of Artificial Sequence: Synthetic oligonucleotide
gcucggccguccaugcaga

SEQ ID NO: 2952948 - RNA, 19 nt, Artificial Sequence
  Description of Artificial Sequence: Synthetic oligonucleotide
cccuagucauggccuguga

SEQ ID NO: 2952949 - RNA, 19 nt, Artificial Sequence
  Description of Artificial Sequence: Synthetic oligonucleotide
gggcaggaugaggucagcu

SEQ ID NO: 2952950 - RNA, 19 nt, Artificial Sequence
  Description of Artificial Sequence: Synthetic oligonucleotide
cugugaggcuggccugccu

SEQ ID NO: 2952951 - RNA, 19 nt, Artificial Sequence
  Description of Artificial Sequence: Synthetic oligonucleotide
cccucuacucuuccucuau

SEQ ID NO: 2952952 - RNA, 19 nt, Artificial Sequence
  Description of Artificial Sequence: Synthetic oligonucleotide
cucggccguccaugcagau

SEQ ID NO: 2952953 - RNA, 19 nt, Artificial Sequence
  Description of Artificial Sequence: Synthetic oligonucleotide
cugcuuccacccugcccau

SEQ ID NO: 2952954 - RNA, 19 nt, Artificial Sequence
  Description of Artificial Sequence: Synthetic oligonucleotide
ggaagacaugggaguuuau

SEQ ID NO: 2952955 - RNA, 19 nt, Artificial Sequence
  Description of Artificial Sequence: Synthetic oligonucleotide
ccugugccgaucacuccau

SEQ ID NO: 2952956 - RNA, 19 nt, Artificial Sequence
  Description of Artificial Sequence: Synthetic oligonucleotide
ggucagcucggccguccau

SEQ ID NO: 2952957 - RNA, 19 nt, Artificial Sequence
  Description of Artificial Sequence: Synthetic oligonucleotide
ggcgacaaauggggcaguu

SEQ ID NO: 2952958 - RNA, 19 nt, Artificial Sequence
  Description of Artificial Sequence: Synthetic oligonucleotide
cugugccgaucacuccauu

SEQ ID NO: 2952959 - RNA, 19 nt, Artificial Sequence
  Description of Artificial Sequence: Synthetic oligonucleotide
ggccguccaugcagauaca

SEQ ID NO: 2952960 - RNA, 19 nt, Artificial Sequence
  Description of Artificial Sequence: Synthetic oligonucleotide
gggcaguuccugugccgau

SEQ ID NO: 2952961 - RNA, 19 nt, Artificial Sequence
  Description of Artificial Sequence: Synthetic oligonucleotide
ccugccucaucggccauau

SEQ ID NO: 2952962 - RNA, 19 nt, Artificial Sequence
  Description of Artificial Sequence: Synthetic oligonucleotide
ccugcccaucccacagacu

SEQ ID NO: 2952963 - RNA, 19 nt, Artificial Sequence
  Description of Artificial Sequence: Synthetic oligonucleotide
gccugccucaucggccaua

SEQ ID NO: 2952964 - RNA, 19 nt, Artificial Sequence
  Description of Artificial Sequence: Synthetic oligonucleotide
cggccauauuaagaauaua

SEQ ID NO: 2952965 - RNA, 19 nt, Artificial Sequence
  Description of Artificial Sequence: Synthetic oligonucleotide
cugccucaucggccauauu

SEQ ID NO: 2952966 - RNA, 19 nt, Artificial Sequence
  Description of Artificial Sequence: Synthetic oligonucleotide
ggccugccucaucggccau

SEQ ID NO: 2952967 - RNA, 19 nt, Artificial Sequence
  Description of Artificial Sequence: Synthetic oligonucleotide
aagaauguuaucuagcgcu

SEQ ID NO: 2952968 - RNA, 19 nt, Artificial Sequence
  Description of Artificial Sequence: Synthetic oligonucleotide
ucuucuuacaauuuguaga

SEQ ID NO: 2952969 - RNA, 19 nt, Artificial Sequence
  Description of Artificial Sequence: Synthetic oligonucleotide
cagaaggugauuaugaagc

SEQ ID NO: 2952970 - RNA, 19 nt, Artificial Sequence
  Description of Artificial Sequence: Synthetic oligonucleotide
aaucugcacauccacugcc

SEQ ID NO: 2952971 - RNA, 19 nt, Artificial Sequence
  Description of Artificial Sequence: Synthetic oligonucleotide
uuuguagaguuucuaaagc

SEQ ID NO: 2952972 - RNA, 19 nt, Artificial Sequence
  Description of Artificial Sequence: Synthetic oligonucleotide
auuuguagaguuucuaaag

SEQ ID NO: 2952973 - RNA, 19 nt, Artificial Sequence
  Description of Artificial Sequence: Synthetic oligonucleotide
cuucuuacaauuuguagag

SEQ ID NO: 2952974 - RNA, 19 nt, Artificial Sequence
  Description of Artificial Sequence: Synthetic oligonucleotide
ucuagcgcugagcagaagg

SEQ ID NO: 2952975 - RNA, 19 nt, Artificial Sequence
  Description of Artificial Sequence: Synthetic oligonucleotide
gauuaugaagcccugggug

SEQ ID NO: 2952976 - RNA, 19 nt, Artificial Sequence
  Description of Artificial Sequence: Synthetic oligonucleotide
ugguacaccacaaacuucc

SEQ ID NO: 2952977 - RNA, 19 nt, Artificial Sequence
  Description of Artificial Sequence: Synthetic oligonucleotide
uccguuguuuucauuaggg

SEQ ID NO: 2952978 - RNA, 19 nt, Artificial Sequence
  Description of Artificial Sequence: Synthetic oligonucleotide
uguuaucuagcgcugagca

SEQ ID NO: 2952979 - RNA, 19 nt, Artificial Sequence
  Description of Artificial Sequence: Synthetic oligonucleotide
aauuuguagaguuucuaaa

SEQ ID NO: 2952980 - RNA, 19 nt, Artificial Sequence
  Description of Artificial Sequence: Synthetic oligonucleotide
uuuagauaucccaacuucu

SEQ ID NO: 2952981 - RNA, 19 nt, Artificial Sequence
  Description of Artificial Sequence: Synthetic oligonucleotide
uuuuccaacaccugguaca

SEQ ID NO: 2952982 - RNA, 19 nt, Artificial Sequence
  Description of Artificial Sequence: Synthetic oligonucleotide
aauguuaucuagcgcugag

SEQ ID NO: 2952983 - RNA, 19 nt, Artificial Sequence
  Description of Artificial Sequence: Synthetic oligonucleotide
aacacucuggaaucugcac

SEQ ID NO: 2952984 - RNA, 19 nt, Artificial Sequence
  Description of Artificial Sequence: Synthetic oligonucleotide
agugcgguguacuucuugc

SEQ ID NO: 2952985 - RNA, 19 nt, Artificial Sequence
  Description of Artificial Sequence: Synthetic oligonucleotide
cucaagaaguuccagugcg

SEQ ID NO: 2952986 - RNA, 19 nt, Artificial Sequence
  Description of Artificial Sequence: Synthetic oligonucleotide
agaaggugauuaugaagcc

SEQ ID NO: 2952987 - RNA, 19 nt, Artificial Sequence
  Description of Artificial Sequence: Synthetic oligonucleotide
uaaacacugcuucaccugc

SEQ ID NO: 2952988 - RNA, 19 nt, Artificial Sequence
  Description of Artificial Sequence: Synthetic oligonucleotide
aguuucuaaagcuuccucu

SEQ ID NO: 2952989 - RNA, 19 nt, Artificial Sequence
  Description of Artificial Sequence: Synthetic oligonucleotide
uuaucuagcgcugagcaga

SEQ ID NO: 2952990 - RNA, 19 nt, Artificial Sequence
  Description of Artificial Sequence: Synthetic oligonucleotide
ucuugccugccacagaugc

SEQ ID NO: 2952991 - RNA, 19 nt, Artificial Sequence
  Description of Artificial Sequence: Synthetic oligonucleotide
aaagcuuccucuuuagaua

SEQ ID NO: 2952992 - RNA, 19 nt, Artificial Sequence
  Description of Artificial Sequence: Synthetic oligonucleotide
uucauuagggguauuccac

SEQ ID NO: 2952993 - RNA, 19 nt, Artificial Sequence
  Description of Artificial Sequence: Synthetic oligonucleotide
ugcucaagaaguuccagug

SEQ ID NO: 2952994 - RNA, 19 nt, Artificial Sequence
  Description of Artificial Sequence: Synthetic oligonucleotide
accagcuucacucgcaccg

SEQ ID NO: 2952995 - RNA, 19 nt, Artificial Sequence
  Description of Artificial Sequence: Synthetic oligonucleotide
gugauuaugaagcccuggg

SEQ ID NO: 2952996 - RNA, 19 nt, Artificial Sequence
  Description of Artificial Sequence: Synthetic oligonucleotide
ucuuacaauuuguagaguu

SEQ ID NO: 2952997 - RNA, 19 nt, Artificial Sequence
  Description of Artificial Sequence: Synthetic oligonucleotide
cuuuagauaucccaacuuc

SEQ ID NO: 2952998 - RNA, 19 nt, Artificial Sequence
  Description of Artificial Sequence: Synthetic oligonucleotide
uuucauuagggguauucca

SEQ ID NO: 2952999 - RNA, 19 nt, Artificial Sequence
  Description of Artificial Sequence: Synthetic oligonucleotide
auuagggguauuccacccc

SEQ ID NO: 2953000 - RNA, 19 nt, Artificial Sequence
  Description of Artificial Sequence: Synthetic oligonucleotide
gauaucccaacuucuuugc

SEQ ID NO: 2953001 - RNA, 19 nt, Artificial Sequence
  Description of Artificial Sequence: Synthetic oligonucleotide
auuaugaagcccugggugu

SEQ ID NO: 2953002 - RNA, 19 nt, Artificial Sequence
  Description of Artificial Sequence: Synthetic oligonucleotide
ucuaaagcuuccucuuuag

SEQ ID NO: 2953003 - RNA, 19 nt, Artificial Sequence
  Description of Artificial Sequence: Synthetic oligonucleotide
aacuucuuugcugagcuca

SEQ ID NO: 2953004 - RNA, 19 nt, Artificial Sequence
  Description of Artificial Sequence: Synthetic oligonucleotide
ucaagaaguuccagugcgg

SEQ ID NO: 2953005 - RNA, 19 nt, Artificial Sequence
  Description of Artificial Sequence: Synthetic oligonucleotide
uguacuucuugccugccac

SEQ ID NO: 2953006 - RNA, 19 nt, Artificial Sequence
  Description of Artificial Sequence: Synthetic oligonucleotide
uuuucauuagggguauucc

SEQ ID NO: 2953007 - RNA, 19 nt, Artificial Sequence
  Description of Artificial Sequence: Synthetic oligonucleotide
uauuccaccccaagaaugu

SEQ ID NO: 2953008 - RNA, 19 nt, Artificial Sequence
  Description of Artificial Sequence: Synthetic oligonucleotide
acaaacuuccguuguuuuc

SEQ ID NO: 2953009 - RNA, 19 nt, Artificial Sequence
  Description of Artificial Sequence: Synthetic oligonucleotide
aaggugauuaugaagcccu

SEQ ID NO: 2953010 - RNA, 19 nt, Artificial Sequence
  Description of Artificial Sequence: Synthetic oligonucleotide
uaucccaacuucuuugcug

SEQ ID NO: 2953011 - RNA, 19 nt, Artificial Sequence
  Description of Artificial Sequence: Synthetic oligonucleotide
cucuucuuacaauuuguag

SEQ ID NO: 2953012 - RNA, 19 nt, Artificial Sequence
  Description of Artificial Sequence: Synthetic oligonucleotide
uuacaauuuguagaguuuc

SEQ ID NO: 2953013 - RNA, 19 nt, Artificial Sequence
  Description of Artificial Sequence: Synthetic oligonucleotide
ucauuagggguauuccacc

SEQ ID NO: 2953014 - RNA, 19 nt, Artificial Sequence
  Description of Artificial Sequence: Synthetic oligonucleotide
ucuggaaacccgcagccac

SEQ ID NO: 2953015 - RNA, 19 nt, Artificial Sequence
  Description of Artificial Sequence: Synthetic oligonucleotide
aaacucacuagcucccgcu

SEQ ID NO: 2953016 - RNA, 19 nt, Artificial Sequence
  Description of Artificial Sequence: Synthetic oligonucleotide
uccucuuuagauaucccaa

SEQ ID NO: 2953017 - RNA, 19 nt, Artificial Sequence
  Description of Artificial Sequence: Synthetic oligonucleotide
uuccguuguuuucauuagg

SEQ ID NO: 2953018 - RNA, 19 nt, Artificial Sequence
  Description of Artificial Sequence: Synthetic oligonucleotide
aacugcauacauaacugug

SEQ ID NO: 2953019 - RNA, 19 nt, Artificial Sequence
  Description of Artificial Sequence: Synthetic oligonucleotide
ugauuaugaagcccugggu

SEQ ID NO: 2953020 - RNA, 19 nt, Artificial Sequence
  Description of Artificial Sequence: Synthetic oligonucleotide
ccaagaauguuaucuagcg

SEQ ID NO: 2953021 - RNA, 19 nt, Artificial Sequence
  Description of Artificial Sequence: Synthetic oligonucleotide
ucuuuagauaucccaacuu

SEQ ID NO: 2953022 - RNA, 19 nt, Artificial Sequence
  Description of Artificial Sequence: Synthetic oligonucleotide
uuagauaucccaacuucuu

SEQ ID NO: 2953023 - RNA, 19 nt, Artificial Sequence
  Description of Artificial Sequence: Synthetic oligonucleotide
uuagggguauuccacccca

SEQ ID NO: 2953024 - RNA, 19 nt, Artificial Sequence
  Description of Artificial Sequence: Synthetic oligonucleotide
uugucugugagacucucuc

SEQ ID NO: 2953025 - RNA, 19 nt, Artificial Sequence
  Description of Artificial Sequence: Synthetic oligonucleotide
acuuccguuguuuucauua

SEQ ID NO: 2953026 - RNA, 19 nt, Artificial Sequence
  Description of Artificial Sequence: Synthetic oligonucleotide
uacaauuuguagaguuucu

SEQ ID NO: 2953027 - RNA, 19 nt, Artificial Sequence
  Description of Artificial Sequence: Synthetic oligonucleotide
uacaccacaaacuuccguu

SEQ ID NO: 2953028 - RNA, 19 nt, Artificial Sequence
  Description of Artificial Sequence: Synthetic oligonucleotide
ucuggaaucugcacaucca

SEQ ID NO: 2953029 - RNA, 19 nt, Artificial Sequence
  Description of Artificial Sequence: Synthetic oligonucleotide
acucacuagcucccgcugc

SEQ ID NO: 2953030 - RNA, 19 nt, Artificial Sequence
  Description of Artificial Sequence: Synthetic oligonucleotide
uucacucgcaccgugggag

SEQ ID NO: 2953031 - RNA, 19 nt, Artificial Sequence
  Description of Artificial Sequence: Synthetic oligonucleotide
aagaaguuccagugcggug

SEQ ID NO: 2953032 - RNA, 19 nt, Artificial Sequence
  Description of Artificial Sequence: Synthetic oligonucleotide
caagaauguuaucuagcgc

SEQ ID NO: 2953033 - RNA, 19 nt, Artificial Sequence
  Description of Artificial Sequence: Synthetic oligonucleotide
caaacacucuggaaucugc

SEQ ID NO: 2953034 - RNA, 19 nt, Artificial Sequence
  Description of Artificial Sequence: Synthetic oligonucleotide
uuugcugagcucagagggc

SEQ ID NO: 2953035 - RNA, 19 nt, Artificial Sequence
  Description of Artificial Sequence: Synthetic oligonucleotide
cauuagggguauuccaccc

SEQ ID NO: 2953036 - RNA, 19 nt, Artificial Sequence
  Description of Artificial Sequence: Synthetic oligonucleotide
ugcacauccacugccaacu

SEQ ID NO: 2953037 - RNA, 19 nt, Artificial Sequence
  Description of Artificial Sequence: Synthetic oligonucleotide
agaaguuccagugcggugu

SEQ ID NO: 2953038 - RNA, 19 nt, Artificial Sequence
  Description of Artificial Sequence: Synthetic oligonucleotide
cucuggaaucugcacaucc

SEQ ID NO: 2953039 - RNA, 19 nt, Artificial Sequence
  Description of Artificial Sequence: Synthetic oligonucleotide
gaaggugauuaugaagccc

SEQ ID NO: 2953040 - RNA, 19 nt, Artificial Sequence
  Description of Artificial Sequence: Synthetic oligonucleotide
aucccaacuucuuugcuga

SEQ ID NO: 2953041 - RNA, 19 nt, Artificial Sequence
  Description of Artificial Sequence: Synthetic oligonucleotide
gaaacccgcagccaccagc

SEQ ID NO: 2953042 - RNA, 19 nt, Artificial Sequence
  Description of Artificial Sequence: Synthetic oligonucleotide
cuggguuugucugugagac

SEQ ID NO: 2953043 - RNA, 19 nt, Artificial Sequence
  Description of Artificial Sequence: Synthetic oligonucleotide
auguuaucuagcgcugagc

SEQ ID NO: 2953044 - RNA, 19 nt, Artificial Sequence
  Description of Artificial Sequence: Synthetic oligonucleotide
acacucuggaaucugcaca

SEQ ID NO: 2953045 - RNA, 19 nt, Artificial Sequence
  Description of Artificial Sequence: Synthetic oligonucleotide
ugagcagaaggugauuaug

SEQ ID NO: 2953046 - RNA, 19 nt, Artificial Sequence
  Description of Artificial Sequence: Synthetic oligonucleotide
cuccugcucaagaaguucc

SEQ ID NO: 2953047 - RNA, 19 nt, Artificial Sequence
  Description of Artificial Sequence: Synthetic oligonucleotide
ugagacucucucuucuuac

SEQ ID NO: 2953048 - RNA, 19 nt, Artificial Sequence
  Description of Artificial Sequence: Synthetic oligonucleotide
uccagugcgguguacuucu

SEQ ID NO: 2953049 - RNA, 19 nt, Artificial Sequence
  Description of Artificial Sequence: Synthetic oligonucleotide
aacucacuagcucccgcug

SEQ ID NO: 2953050 - RNA, 19 nt, Artificial Sequence
  Description of Artificial Sequence: Synthetic oligonucleotide
ucucuucuuacaauuugua

SEQ ID NO: 2953051 - RNA, 19 nt, Artificial Sequence
  Description of Artificial Sequence: Synthetic oligonucleotide
acagcgggaaacucacuag

SEQ ID NO: 2953052 - RNA, 19 nt, Artificial Sequence
  Description of Artificial Sequence: Synthetic oligonucleotide
ugcgguguacuucuugccu

SEQ ID NO: 2953053 - RNA, 19 nt, Artificial Sequence
  Description of Artificial Sequence: Synthetic oligonucleotide
agcacaucuggguuugucu

SEQ ID NO: 2953054 - RNA, 19 nt, Artificial Sequence
  Description of Artificial Sequence: Synthetic oligonucleotide
guauuccaccccaagaaug

SEQ ID NO: 2953055 - RNA, 19 nt, Artificial Sequence
  Description of Artificial Sequence: Synthetic oligonucleotide
cuuccguuguuuucauuag

SEQ ID NO: 2953056 - RNA, 19 nt, Artificial Sequence
  Description of Artificial Sequence: Synthetic oligonucleotide
uggaaucugcacauccacu

SEQ ID NO: 2953057 - RNA, 19 nt, Artificial Sequence
  Description of Artificial Sequence: Synthetic oligonucleotide
guuaucuagcgcugagcag

SEQ ID NO: 2953058 - RNA, 19 nt, Artificial Sequence
  Description of Artificial Sequence: Synthetic oligonucleotide
aucuggguuugucugugag

SEQ ID NO: 2953059 - RNA, 19 nt, Artificial Sequence
  Description of Artificial Sequence: Synthetic oligonucleotide
gaaacucacuagcucccgc

SEQ ID NO: 2953060 - RNA, 19 nt, Artificial Sequence
  Description of Artificial Sequence: Synthetic oligonucleotide
cuccaaacacucuggaauc

SEQ ID NO: 2953061 - RNA, 19 nt, Artificial Sequence
  Description of Artificial Sequence: Synthetic oligonucleotide
ucggccgucuggaaacccg

SEQ ID NO: 2953062 - RNA, 19 nt, Artificial Sequence
  Description of Artificial Sequence: Synthetic oligonucleotide
guuguuuucauuaggggua

SEQ ID NO: 2953063 - RNA, 19 nt, Artificial Sequence
  Description of Artificial Sequence: Synthetic oligonucleotide
acaccacaaacuuccguug

SEQ ID NO: 2953064 - RNA, 19 nt, Artificial Sequence
  Description of Artificial Sequence: Synthetic oligonucleotide
acugcauacauaacugugu

SEQ ID NO: 2953065 - RNA, 19 nt, Artificial Sequence
  Description of Artificial Sequence: Synthetic oligonucleotide
caauuuguagaguuucuaa

SEQ ID NO: 2953066 - RNA, 19 nt, Artificial Sequence
  Description of Artificial Sequence: Synthetic oligonucleotide
acucucucuucuuacaauu

SEQ ID NO: 2953067 - RNA, 19 nt, Artificial Sequence
  Description of Artificial Sequence: Synthetic oligonucleotide
uacuucuugccugccacag

SEQ ID NO: 2953068 - RNA, 19 nt, Artificial Sequence
  Description of Artificial Sequence: Synthetic oligonucleotide
uccaccccaagaauguuau

SEQ ID NO: 2953069 - RNA, 19 nt, Artificial Sequence
  Description of Artificial Sequence: Synthetic oligonucleotide
ucuggguuugucugugaga

SEQ ID NO: 2953070 - RNA, 19 nt, Artificial Sequence
  Description of Artificial Sequence: Synthetic oligonucleotide
cacuccuccaaacacucug

SEQ ID NO: 2953071 - RNA, 19 nt, Artificial Sequence
  Description of Artificial Sequence: Synthetic oligonucleotide
cuggaaucugcacauccac

SEQ ID NO: 2953072 - RNA, 19 nt, Artificial Sequence
  Description of Artificial Sequence: Synthetic oligonucleotide
cugccaacugcauacauaa

SEQ ID NO: 2953073 - RNA, 19 nt, Artificial Sequence
  Description of Artificial Sequence: Synthetic oligonucleotide
caccgugggagacagcggg

SEQ ID NO: 2953074 - RNA, 19 nt, Artificial Sequence
  Description of Artificial Sequence: Synthetic oligonucleotide
caaacuuccguuguuuuca

SEQ ID NO: 2953075 - RNA, 19 nt, Artificial Sequence
  Description of Artificial Sequence: Synthetic oligonucleotide
uuuccaacaccugguacac

SEQ ID NO: 2953076 - RNA, 19 nt, Artificial Sequence
  Description of Artificial Sequence: Synthetic oligonucleotide
ccaacugcauacauaacug

SEQ ID NO: 2953077 - RNA, 19 nt, Artificial Sequence
  Description of Artificial Sequence: Synthetic oligonucleotide
uuugucugugagacucucu

SEQ ID NO: 2953078 - RNA, 19 nt, Artificial Sequence
  Description of Artificial Sequence: Synthetic oligonucleotide
gaguuucuaaagcuuccuc

SEQ ID NO: 2953079 - RNA, 19 nt, Artificial Sequence
  Description of Artificial Sequence: Synthetic oligonucleotide
aaacacucuggaaucugca

SEQ ID NO: 2953080 - RNA, 19 nt, Artificial Sequence
  Description of Artificial Sequence: Synthetic oligonucleotide
uuaugaagcccugggugug

SEQ ID NO: 2953081 - RNA, 19 nt, Artificial Sequence
  Description of Artificial Sequence: Synthetic oligonucleotide
guuuucauuagggguauuc

SEQ ID NO: 2953082 - RNA, 19 nt, Artificial Sequence
  Description of Artificial Sequence: Synthetic oligonucleotide
uugccugccacagaugcac

SEQ ID NO: 2953083 - RNA, 19 nt, Artificial Sequence
  Description of Artificial Sequence: Synthetic oligonucleotide
gagcagaaggugauuauga

SEQ ID NO: 2953084 - RNA, 19 nt, Artificial Sequence
  Description of Artificial Sequence: Synthetic oligonucleotide
ugccacuccuccaaacacu

SEQ ID NO: 2953085 - RNA, 19 nt, Artificial Sequence
  Description of Artificial Sequence: Synthetic oligonucleotide
gaagcccugggugugcucc

SEQ ID NO: 2953086 - RNA, 19 nt, Artificial Sequence
  Description of Artificial Sequence: Synthetic oligonucleotide
uccucggccgucuggaaac

SEQ ID NO: 2953087 - RNA, 19 nt, Artificial Sequence
  Description of Artificial Sequence: Synthetic oligonucleotide
caccugguacaccacaaac

SEQ ID NO: 2953088 - RNA, 19 nt, Artificial Sequence
  Description of Artificial Sequence: Synthetic oligonucleotide
acccgcagccaccagcuuc

SEQ ID NO: 2953089 - RNA, 19 nt, Artificial Sequence
  Description of Artificial Sequence: Synthetic oligonucleotide
cagcgggaaacucacuagc

SEQ ID NO: 2953090 - RNA, 19 nt, Artificial Sequence
  Description of Artificial Sequence: Synthetic oligonucleotide
gagacagcgggaaacucac

SEQ ID NO: 2953091 - RNA, 19 nt, Artificial Sequence
  Description of Artificial Sequence: Synthetic oligonucleotide
agaauguuaucuagcgcug

SEQ ID NO: 2953092 - RNA, 19 nt, Artificial Sequence
  Description of Artificial Sequence: Synthetic oligonucleotide
agcagaaggugauuaugaa

SEQ ID NO: 2953093 - RNA, 19 nt, Artificial Sequence
  Description of Artificial Sequence: Synthetic oligonucleotide
ugucugugagacucucucu

SEQ ID NO: 2953094 - RNA, 19 nt, Artificial Sequence
  Description of Artificial Sequence: Synthetic oligonucleotide
ucugugagacucucucuuc

SEQ ID NO: 2953095 - RNA, 19 nt, Artificial Sequence
  Description of Artificial Sequence: Synthetic oligonucleotide
cuuccucuuuagauauccc

SEQ ID NO: 2953096 - RNA, 19 nt, Artificial Sequence
  Description of Artificial Sequence: Synthetic oligonucleotide
aaacccgcagccaccagcu

SEQ ID NO: 2953097 - RNA, 19 nt, Artificial Sequence
  Description of Artificial Sequence: Synthetic oligonucleotide
gacagcgggaaacucacua

SEQ ID NO: 2953098 - RNA, 19 nt, Artificial Sequence
  Description of Artificial Sequence: Synthetic oligonucleotide
acacugcuucaccugccac

SEQ ID NO: 2953099 - RNA, 19 nt, Artificial Sequence
  Description of Artificial Sequence: Synthetic oligonucleotide
acauccacugccaacugca

SEQ ID NO: 2953100 - RNA, 19 nt, Artificial Sequence
  Description of Artificial Sequence: Synthetic oligonucleotide
agacucucucuucuuacaa

SEQ ID NO: 2953101 - RNA, 19 nt, Artificial Sequence
  Description of Artificial Sequence: Synthetic oligonucleotide
aaacuuccguuguuuucau

SEQ ID NO: 2953102 - RNA, 19 nt, Artificial Sequence
  Description of Artificial Sequence: Synthetic oligonucleotide
uccugcucaagaaguucca

SEQ ID NO: 2953103 - RNA, 19 nt, Artificial Sequence
  Description of Artificial Sequence: Synthetic oligonucleotide
agggguauuccaccccaag

SEQ ID NO: 2953104 - RNA, 19 nt, Artificial Sequence
  Description of Artificial Sequence: Synthetic oligonucleotide
gagacucucucuucuuaca

SEQ ID NO: 2953105 - RNA, 19 nt, Artificial Sequence
  Description of Artificial Sequence: Synthetic oligonucleotide
auaucccaacuucuuugcu

SEQ ID NO: 2953106 - RNA, 19 nt, Artificial Sequence
  Description of Artificial Sequence: Synthetic oligonucleotide
cccaagaauguuaucuagc

SEQ ID NO: 2953107 - RNA, 19 nt, Artificial Sequence
  Description of Artificial Sequence: Synthetic oligonucleotide
agaguuucuaaagcuuccu

SEQ ID NO: 2953108 - RNA, 19 nt, Artificial Sequence
  Description of Artificial Sequence: Synthetic oligonucleotide
agccaccagcuucacucgc

SEQ ID NO: 2953109 - RNA, 19 nt, Artificial Sequence
  Description of Artificial Sequence: Synthetic oligonucleotide
ucugcacauccacugccaa

SEQ ID NO: 2953110 - RNA, 19 nt, Artificial Sequence
  Description of Artificial Sequence: Synthetic oligonucleotide
cuggaaacccgcagccacc

SEQ ID NO: 2953111 - RNA, 19 nt, Artificial Sequence
  Description of Artificial Sequence: Synthetic oligonucleotide
accugccacuccuccaaac

SEQ ID NO: 2953112 - RNA, 19 nt, Artificial Sequence
  Description of Artificial Sequence: Synthetic oligonucleotide
uugcugagcucagagggcu

SEQ ID NO: 2953113 - RNA, 19 nt, Artificial Sequence
  Description of Artificial Sequence: Synthetic oligonucleotide
uuccaccccaagaauguua

SEQ ID NO: 2953114 - RNA, 19 nt, Artificial Sequence
  Description of Artificial Sequence: Synthetic oligonucleotide
uaucuagcgcugagcagaa

SEQ ID NO: 2953115 - RNA, 19 nt, Artificial Sequence
  Description of Artificial Sequence: Synthetic oligonucleotide
acaauuuguagaguuucua

SEQ ID NO: 2953116 - RNA, 19 nt, Artificial Sequence
  Description of Artificial Sequence: Synthetic oligonucleotide
ggugauuaugaagcccugg

SEQ ID NO: 2953117 - RNA, 19 nt, Artificial Sequence
  Description of Artificial Sequence: Synthetic oligonucleotide
cacauccacugccaacugc

SEQ ID NO: 2953118 - RNA, 19 nt, Artificial Sequence
  Description of Artificial Sequence: Synthetic oligonucleotide
acuccuccaaacacucugg

SEQ ID NO: 2953119 - RNA, 19 nt, Artificial Sequence
  Description of Artificial Sequence: Synthetic oligonucleotide
uccuccaaacacucuggaa

SEQ ID NO: 2953120 - RNA, 19 nt, Artificial Sequence
  Description of Artificial Sequence: Synthetic oligonucleotide
ugcauacauaacuguguuu

SEQ ID NO: 2953121 - RNA, 19 nt, Artificial Sequence
  Description of Artificial Sequence: Synthetic oligonucleotide
uccaaacacucuggaaucu

SEQ ID NO: 2953122 - RNA, 19 nt, Artificial Sequence
  Description of Artificial Sequence: Synthetic oligonucleotide
accugguacaccacaaacu

SEQ ID NO: 2953123 - RNA, 19 nt, Artificial Sequence
  Description of Artificial Sequence: Synthetic oligonucleotide
gcuuccucuuuagauaucc

SEQ ID NO: 2953124 - RNA, 19 nt, Artificial Sequence
  Description of Artificial Sequence: Synthetic oligonucleotide
cugccacuccuccaaacac

SEQ ID NO: 2953125 - RNA, 19 nt, Artificial Sequence
  Description of Artificial Sequence: Synthetic oligonucleotide
gagcucagagggcuucacc

SEQ ID NO: 2953126 - RNA, 19 nt, Artificial Sequence
  Description of Artificial Sequence: Synthetic oligonucleotide
cugguacaccacaaacuuc

SEQ ID NO: 2953127 - RNA, 19 nt, Artificial Sequence
  Description of Artificial Sequence: Synthetic oligonucleotide
uaugaagcccugggugugc

SEQ ID NO: 2953128 - RNA, 19 nt, Artificial Sequence
  Description of Artificial Sequence: Synthetic oligonucleotide
gaauguuaucuagcgcuga

SEQ ID NO: 2953129 - RNA, 19 nt, Artificial Sequence
  Description of Artificial Sequence: Synthetic oligonucleotide
uuguuuucauuagggguau

SEQ ID NO: 2953130 - RNA, 19 nt, Artificial Sequence
  Description of Artificial Sequence: Synthetic oligonucleotide
aacaccugguacaccacaa

SEQ ID NO: 2953131 - RNA, 19 nt, Artificial Sequence
  Description of Artificial Sequence: Synthetic oligonucleotide
uucuuacaauuuguagagu

SEQ ID NO: 2953132 - RNA, 19 nt, Artificial Sequence
  Description of Artificial Sequence: Synthetic oligonucleotide
aguuccagugcgguguacu

SEQ ID NO: 2953133 - RNA, 19 nt, Artificial Sequence
  Description of Artificial Sequence: Synthetic oligonucleotide
ggguauuccaccccaagaa

SEQ ID NO: 2953134 - RNA, 19 nt, Artificial Sequence
  Description of Artificial Sequence: Synthetic oligonucleotide
acagaugcaccagcacauc

SEQ ID NO: 2953135 - RNA, 19 nt, Artificial Sequence
  Description of Artificial Sequence: Synthetic oligonucleotide
gacguccucggccgucugg

SEQ ID NO: 2953136 - RNA, 19 nt, Artificial Sequence
  Description of Artificial Sequence: Synthetic oligonucleotide
uucuugccugccacagaug

SEQ ID NO: 2953137 - RNA, 19 nt, Artificial Sequence
  Description of Artificial Sequence: Synthetic oligonucleotide
ggguuugucugugagacuc

SEQ ID NO: 2953138 - RNA, 19 nt, Artificial Sequence
  Description of Artificial Sequence: Synthetic oligonucleotide
acaucuggguuugucugug

SEQ ID NO: 2953139 - RNA, 19 nt, Artificial Sequence
  Description of Artificial Sequence: Synthetic oligonucleotide
cuaaagcuuccucuuuaga

SEQ ID NO: 2953140 - RNA, 19 nt, Artificial Sequence
  Description of Artificial Sequence: Synthetic oligonucleotide
gcuucacucgcaccguggg

SEQ ID NO: 2953141 - RNA, 19 nt, Artificial Sequence
  Description of Artificial Sequence: Synthetic oligonucleotide
accccaagaauguuaucua

SEQ ID NO: 2953142 - RNA, 19 nt, Artificial Sequence
  Description of Artificial Sequence: Synthetic oligonucleotide
cgggaaacucacuagcucc

SEQ ID NO: 2953143 - RNA, 19 nt, Artificial Sequence
  Description of Artificial Sequence: Synthetic oligonucleotide
ccguuguuuucauuagggg

SEQ ID NO: 2953144 - RNA, 19 nt, Artificial Sequence
  Description of Artificial Sequence: Synthetic oligonucleotide
uggaaacccgcagccacca

SEQ ID NO: 2953145 - RNA, 19 nt, Artificial Sequence
  Description of Artificial Sequence: Synthetic oligonucleotide
cugggugugcuccugcuca

SEQ ID NO: 2953146 - RNA, 19 nt, Artificial Sequence
  Description of Artificial Sequence: Synthetic oligonucleotide
gcucaagaaguuccagugc

SEQ ID NO: 2953147 - RNA, 19 nt, Artificial Sequence
  Description of Artificial Sequence: Synthetic oligonucleotide
gccaacugcauacauaacu

SEQ ID NO: 2953148 - RNA, 19 nt, Artificial Sequence
  Description of Artificial Sequence: Synthetic oligonucleotide
agcgcugagcagaagguga

SEQ ID NO: 2953149 - RNA, 19 nt, Artificial Sequence
  Description of Artificial Sequence: Synthetic oligonucleotide
aaguuccagugcgguguac

SEQ ID NO: 2953150 - RNA, 19 nt, Artificial Sequence
  Description of Artificial Sequence: Synthetic oligonucleotide
gugggagacagcgggaaac

SEQ ID NO: 2953151 - RNA, 19 nt, Artificial Sequence
  Description of Artificial Sequence: Synthetic oligonucleotide
acuucuuugcugagcucag

SEQ ID NO: 2953152 - RNA, 19 nt, Artificial Sequence
  Description of Artificial Sequence: Synthetic oligonucleotide
cagccaccagcuucacucg

SEQ ID NO: 2953153 - RNA, 19 nt, Artificial Sequence
  Description of Artificial Sequence: Synthetic oligonucleotide
uagcgcugagcagaaggug

SEQ ID NO: 2953154 - RNA, 19 nt, Artificial Sequence
  Description of Artificial Sequence: Synthetic oligonucleotide
ccucuuuagauaucccaac

SEQ ID NO: 2953155 - RNA, 19 nt, Artificial Sequence
  Description of Artificial Sequence: Synthetic oligonucleotide
ugggagacagcgggaaacu

SEQ ID NO: 2953156 - RNA, 19 nt, Artificial Sequence
  Description of Artificial Sequence: Synthetic oligonucleotide
cugcacauccacugccaac

SEQ ID NO: 2953157 - RNA, 19 nt, Artificial Sequence
  Description of Artificial Sequence: Synthetic oligonucleotide
cucucuucuuacaauuugu

SEQ ID NO: 2953158 - RNA, 19 nt, Artificial Sequence
  Description of Artificial Sequence: Synthetic oligonucleotide
gugcgguguacuucuugcc

SEQ ID NO: 2953159 - RNA, 19 nt, Artificial Sequence
  Description of Artificial Sequence: Synthetic oligonucleotide
cuuacaauuuguagaguuu

SEQ ID NO: 2953160 - RNA, 19 nt, Artificial Sequence
  Description of Artificial Sequence: Synthetic oligonucleotide
acuucuugccugccacaga

SEQ ID NO: 2953161 - RNA, 19 nt, Artificial Sequence
  Description of Artificial Sequence: Synthetic oligonucleotide
cucuuuagauaucccaacu

SEQ ID NO: 2953162 - RNA, 19 nt, Artificial Sequence
  Description of Artificial Sequence: Synthetic oligonucleotide
ugccaacugcauacauaac

SEQ ID NO: 2953163 - RNA, 19 nt, Artificial Sequence
  Description of Artificial Sequence: Synthetic oligonucleotide
ugcuccugcucaagaaguu

SEQ ID NO: 2953164 - RNA, 19 nt, Artificial Sequence
  Description of Artificial Sequence: Synthetic oligonucleotide
ucccaacuucuuugcugag

SEQ ID NO: 2953165 - RNA, 19 nt, Artificial Sequence
  Description of Artificial Sequence: Synthetic oligonucleotide
ucacucgcaccgugggaga

SEQ ID NO: 2953166 - RNA, 19 nt, Artificial Sequence
  Description of Artificial Sequence: Synthetic oligonucleotide
ccccaagaauguuaucuag

SEQ ID NO: 2953167 - RNA, 19 nt, Artificial Sequence
  Description of Artificial Sequence: Synthetic oligonucleotide
ggaaacucacuagcucccg

SEQ ID NO: 2953168 - RNA, 19 nt, Artificial Sequence
  Description of Artificial Sequence: Synthetic oligonucleotide
agcgggaaacucacuagcu

SEQ ID NO: 2953169 - RNA, 19 nt, Artificial Sequence
  Description of Artificial Sequence: Synthetic oligonucleotide
acaccugguacaccacaaa

SEQ ID NO: 2953170 - RNA, 19 nt, Artificial Sequence
  Description of Artificial Sequence: Synthetic oligonucleotide
aacuuccguuguuuucauu

SEQ ID NO: 2953171 - RNA, 19 nt, Artificial Sequence
  Description of Artificial Sequence: Synthetic oligonucleotide
cucgcaccgugggagacag

SEQ ID NO: 2953172 - RNA, 19 nt, Artificial Sequence
  Description of Artificial Sequence: Synthetic oligonucleotide
gggaaacucacuagcuccc

SEQ ID NO: 2953173 - RNA, 19 nt, Artificial Sequence
  Description of Artificial Sequence: Synthetic oligonucleotide
ugccugccacagaugcacc

SEQ ID NO: 2953174 - RNA, 19 nt, Artificial Sequence
  Description of Artificial Sequence: Synthetic oligonucleotide
uuccagugcgguguacuuc

SEQ ID NO: 2953175 - RNA, 19 nt, Artificial Sequence
  Description of Artificial Sequence: Synthetic oligonucleotide
cccaggacguccucggccg

SEQ ID NO: 2953176 - RNA, 19 nt, Artificial Sequence
  Description of Artificial Sequence: Synthetic oligonucleotide
cucacuagcucccgcugca

SEQ ID NO: 2953177 - RNA, 19 nt, Artificial Sequence
  Description of Artificial Sequence: Synthetic oligonucleotide
gcgguguacuucuugccug

SEQ ID NO: 2953178 - RNA, 19 nt, Artificial Sequence
  Description of Artificial Sequence: Synthetic oligonucleotide
caacaccugguacaccaca

SEQ ID NO: 2953179 - RNA, 19 nt, Artificial Sequence
  Description of Artificial Sequence: Synthetic oligonucleotide
cuucuugccugccacagau

SEQ ID NO: 2953180 - RNA, 19 nt, Artificial Sequence
  Description of Artificial Sequence: Synthetic oligonucleotide
acucuggaaucugcacauc

SEQ ID NO: 2953181 - RNA, 19 nt, Artificial Sequence
  Description of Artificial Sequence: Synthetic oligonucleotide
guuugucugugagacucuc

SEQ ID NO: 2953182 - RNA, 19 nt, Artificial Sequence
  Description of Artificial Sequence: Synthetic oligonucleotide
gcauacauaacuguguuuu

SEQ ID NO: 2953183 - RNA, 19 nt, Artificial Sequence
  Description of Artificial Sequence: Synthetic oligonucleotide
gggguauuccaccccaaga

SEQ ID NO: 2953184 - RNA, 19 nt, Artificial Sequence
  Description of Artificial Sequence: Synthetic oligonucleotide
auccacugccaacugcaua

SEQ ID NO: 2953185 - RNA, 19 nt, Artificial Sequence
  Description of Artificial Sequence: Synthetic oligonucleotide
aagcccugggugugcuccu

SEQ ID NO: 2953186 - RNA, 19 nt, Artificial Sequence
  Description of Artificial Sequence: Synthetic oligonucleotide
guacuucuugccugccaca

SEQ ID NO: 2953187 - RNA, 19 nt, Artificial Sequence
  Description of Artificial Sequence: Synthetic oligonucleotide
acugccaacugcauacaua

SEQ ID NO: 2953188 - RNA, 19 nt, Artificial Sequence
  Description of Artificial Sequence: Synthetic oligonucleotide
cagugcgguguacuucuug

SEQ ID NO: 2953189 - RNA, 19 nt, Artificial Sequence
  Description of Artificial Sequence: Synthetic oligonucleotide
uagggguauuccaccccaa

SEQ ID NO: 2953190 - RNA, 19 nt, Artificial Sequence
  Description of Artificial Sequence: Synthetic oligonucleotide
gugagacucucucuucuua

SEQ ID NO: 2953191 - RNA, 19 nt, Artificial Sequence
  Description of Artificial Sequence: Synthetic oligonucleotide
ggagacagcgggaaacuca

SEQ ID NO: 2953192 - RNA, 19 nt, Artificial Sequence
  Description of Artificial Sequence: Synthetic oligonucleotide
gacucucucuucuuacaau

SEQ ID NO: 2953193 - RNA, 19 nt, Artificial Sequence
  Description of Artificial Sequence: Synthetic oligonucleotide
cacagaugcaccagcacau

SEQ ID NO: 2953194 - RNA, 19 nt, Artificial Sequence
  Description of Artificial Sequence: Synthetic oligonucleotide
aucugcacauccacugcca

SEQ ID NO: 2953195 - RNA, 19 nt, Artificial Sequence
  Description of Artificial Sequence: Synthetic oligonucleotide
caacugcauacauaacugu

SEQ ID NO: 2953196 - RNA, 19 nt, Artificial Sequence
  Description of Artificial Sequence: Synthetic oligonucleotide
caccagcuucacucgcacc

SEQ ID NO: 2953197 - RNA, 19 nt, Artificial Sequence
  Description of Artificial Sequence: Synthetic oligonucleotide
caacuucuuugcugagcuc

SEQ ID NO: 2953198 - RNA, 19 nt, Artificial Sequence
  Description of Artificial Sequence: Synthetic oligonucleotide
gugugcuccugcucaagaa

SEQ ID NO: 2953199 - RNA, 19 nt, Artificial Sequence
  Description of Artificial Sequence: Synthetic oligonucleotide
ugagcucagagggcuucac

SEQ ID NO: 2953200 - RNA, 19 nt, Artificial Sequence
  Description of Artificial Sequence: Synthetic oligonucleotide
cuagcgcugagcagaaggu

SEQ ID NO: 2953201 - RNA, 19 nt, Artificial Sequence
  Description of Artificial Sequence: Synthetic oligonucleotide
gucugugagacucucucuu

SEQ ID NO: 2953202 - RNA, 19 nt, Artificial Sequence
  Description of Artificial Sequence: Synthetic oligonucleotide
cuugccugccacagaugca

SEQ ID NO: 2953203 - RNA, 19 nt, Artificial Sequence
  Description of Artificial Sequence: Synthetic oligonucleotide
gaaguuccagugcggugua

SEQ ID NO: 2953204 - RNA, 19 nt, Artificial Sequence
  Description of Artificial Sequence: Synthetic oligonucleotide
uuccaacaccugguacacc

SEQ ID NO: 2953205 - RNA, 19 nt, Artificial Sequence
  Description of Artificial Sequence: Synthetic oligonucleotide
cugcucaagaaguuccagu

SEQ ID NO: 2953206 - RNA, 19 nt, Artificial Sequence
  Description of Artificial Sequence: Synthetic oligonucleotide
guacaccacaaacuuccgu

SEQ ID NO: 2953207 - RNA, 19 nt, Artificial Sequence
  Description of Artificial Sequence: Synthetic oligonucleotide
cacucuggaaucugcacau

SEQ ID NO: 2953208 - RNA, 19 nt, Artificial Sequence
  Description of Artificial Sequence: Synthetic oligonucleotide
aggugauuaugaagcccug

SEQ ID NO: 2953209 - RNA, 19 nt, Artificial Sequence
  Description of Artificial Sequence: Synthetic oligonucleotide
ccgucuggaaacccgcagc

SEQ ID NO: 2953210 - RNA, 19 nt, Artificial Sequence
  Description of Artificial Sequence: Synthetic oligonucleotide
ggugugcuccugcucaaga

SEQ ID NO: 2953211 - RNA, 19 nt, Artificial Sequence
  Description of Artificial Sequence: Synthetic oligonucleotide
gcgggaaacucacuagcuc

SEQ ID NO: 2953212 - RNA, 19 nt, Artificial Sequence
  Description of Artificial Sequence: Synthetic oligonucleotide
cgucuggaaacccgcagcc

SEQ ID NO: 2953213 - RNA, 19 nt, Artificial Sequence
  Description of Artificial Sequence: Synthetic oligonucleotide
ugggugugcuccugcucaa

SEQ ID NO: 2953214 - RNA, 19 nt, Artificial Sequence
  Description of Artificial Sequence: Synthetic oligonucleotide
cuccuccaaacacucugga

SEQ ID NO: 2953215 - RNA, 19 nt, Artificial Sequence
  Description of Artificial Sequence: Synthetic oligonucleotide
gccgucuggaaacccgcag

SEQ ID NO: 2953216 - RNA, 19 nt, Artificial Sequence
  Description of Artificial Sequence: Synthetic oligonucleotide
acguccucggccgucugga

SEQ ID NO: 2953217 - RNA, 19 nt, Artificial Sequence
  Description of Artificial Sequence: Synthetic oligonucleotide
caagaaguuccagugcggu

SEQ ID NO: 2953218 - RNA, 19 nt, Artificial Sequence
  Description of Artificial Sequence: Synthetic oligonucleotide
cugugagacucucucuucu

SEQ ID NO: 2953219 - RNA, 19 nt, Artificial Sequence
  Description of Artificial Sequence: Synthetic oligonucleotide
ccuccaaacacucuggaau

SEQ ID NO: 2953220 - RNA, 19 nt, Artificial Sequence
  Description of Artificial Sequence: Synthetic oligonucleotide
cagcuucacucgcaccgug

SEQ ID NO: 2953221 - RNA, 19 nt, Artificial Sequence
  Description of Artificial Sequence: Synthetic oligonucleotide
cacugcuucaccugccacu

SEQ ID NO: 2953222 - RNA, 19 nt, Artificial Sequence
  Description of Artificial Sequence: Synthetic oligonucleotide
cguuguuuucauuaggggu

SEQ ID NO: 2953223 - RNA, 19 nt, Artificial Sequence
  Description of Artificial Sequence: Synthetic oligonucleotide
cuucacucgcaccguggga

SEQ ID NO: 2953224 - RNA, 19 nt, Artificial Sequence
  Description of Artificial Sequence: Synthetic oligonucleotide
cugcauacauaacuguguu

SEQ ID NO: 2953225 - RNA, 19 nt, Artificial Sequence
  Description of Artificial Sequence: Synthetic oligonucleotide
gguauuccaccccaagaau

SEQ ID NO: 2953226 - RNA, 19 nt, Artificial Sequence
  Description of Artificial Sequence: Synthetic oligonucleotide
augaagcccugggugugcu

SEQ ID NO: 2953227 - RNA, 19 nt, Artificial Sequence
  Description of Artificial Sequence: Synthetic oligonucleotide
cagcacaucuggguuuguc

SEQ ID NO: 2953228 - RNA, 19 nt, Artificial Sequence
  Description of Artificial Sequence: Synthetic oligonucleotide
ugaagcccugggugugcuc

SEQ ID NO: 2953229 - RNA, 19 nt, Artificial Sequence
  Description of Artificial Sequence: Synthetic oligonucleotide
cccaacuucuuugcugagc

SEQ ID NO: 2953230 - RNA, 19 nt, Artificial Sequence
  Description of Artificial Sequence: Synthetic oligonucleotide
ccaaacacucuggaaucug

SEQ ID NO: 2953231 - RNA, 19 nt, Artificial Sequence
  Description of Artificial Sequence: Synthetic oligonucleotide
cagaugcaccagcacaucu

SEQ ID NO: 2953232 - RNA, 19 nt, Artificial Sequence
  Description of Artificial Sequence: Synthetic oligonucleotide
gcugagcagaaggugauua

SEQ ID NO: 2953233 - RNA, 19 nt, Artificial Sequence
  Description of Artificial Sequence: Synthetic oligonucleotide
auuccaccccaagaauguu

SEQ ID NO: 2953234 - RNA, 19 nt, Artificial Sequence
  Description of Artificial Sequence: Synthetic oligonucleotide
aggacguccucggccgucu

SEQ ID NO: 2953235 - RNA, 19 nt, Artificial Sequence
  Description of Artificial Sequence: Synthetic oligonucleotide
gugcuccugcucaagaagu

SEQ ID NO: 2953236 - RNA, 19 nt, Artificial Sequence
  Description of Artificial Sequence: Synthetic oligonucleotide
ccugcucaagaaguuccag

SEQ ID NO: 2953237 - RNA, 19 nt, Artificial Sequence
  Description of Artificial Sequence: Synthetic oligonucleotide
cacaaacuuccguuguuuu

SEQ ID NO: 2953238 - RNA, 19 nt, Artificial Sequence
  Description of Artificial Sequence: Synthetic oligonucleotide
gucuggaaacccgcagcca

SEQ ID NO: 2953239 - RNA, 19 nt, Artificial Sequence
  Description of Artificial Sequence: Synthetic oligonucleotide
guccucggccgucuggaaa

SEQ ID NO: 2953240 - RNA, 19 nt, Artificial Sequence
  Description of Artificial Sequence: Synthetic oligonucleotide
ucacuagcucccgcugcau

SEQ ID NO: 2953241 - RNA, 19 nt, Artificial Sequence
  Description of Artificial Sequence: Synthetic oligonucleotide
cucggccgucuggaaaccc

SEQ ID NO: 2953242 - RNA, 19 nt, Artificial Sequence
  Description of Artificial Sequence: Synthetic oligonucleotide
caucuggguuugucuguga

SEQ ID NO: 2953243 - RNA, 19 nt, Artificial Sequence
  Description of Artificial Sequence: Synthetic oligonucleotide
caccacaaacuuccguugu

SEQ ID NO: 2953244 - RNA, 19 nt, Artificial Sequence
  Description of Artificial Sequence: Synthetic oligonucleotide
acucgcaccgugggagaca

SEQ ID NO: 2953245 - RNA, 19 nt, Artificial Sequence
  Description of Artificial Sequence: Synthetic oligonucleotide
uguuuucauuagggguauu

SEQ ID NO: 2953246 - RNA, 19 nt, Artificial Sequence
  Description of Artificial Sequence: Synthetic oligonucleotide
ccugccacuccuccaaaca

SEQ ID NO: 2953247 - RNA, 19 nt, Artificial Sequence
  Description of Artificial Sequence: Synthetic oligonucleotide
gccacuccuccaaacacuc

SEQ ID NO: 2953248 - RNA, 19 nt, Artificial Sequence
  Description of Artificial Sequence: Synthetic oligonucleotide
ccugccacagaugcaccag

SEQ ID NO: 2953249 - RNA, 19 nt, Artificial Sequence
  Description of Artificial Sequence: Synthetic oligonucleotide
cugagcagaaggugauuau

SEQ ID NO: 2953250 - RNA, 19 nt, Artificial Sequence
  Description of Artificial Sequence: Synthetic oligonucleotide
gguguacuucuugccugcc

SEQ ID NO: 2953251 - RNA, 19 nt, Artificial Sequence
  Description of Artificial Sequence: Synthetic oligonucleotide
cgguguacuucuugccugc

SEQ ID NO: 2953252 - RNA, 19 nt, Artificial Sequence
  Description of Artificial Sequence: Synthetic oligonucleotide
aucuagcgcugagcagaag

SEQ ID NO: 2953253 - RNA, 19 nt, Artificial Sequence
  Description of Artificial Sequence: Synthetic oligonucleotide
cacucgcaccgugggagac

SEQ ID NO: 2953254 - RNA, 19 nt, Artificial Sequence
  Description of Artificial Sequence: Synthetic oligonucleotide
cucucucuucuuacaauuu

SEQ ID NO: 2953255 - RNA, 19 nt, Artificial Sequence
  Description of Artificial Sequence: Synthetic oligonucleotide
gcacauccacugccaacug

SEQ ID NO: 2953256 - RNA, 19 nt, Artificial Sequence
  Description of Artificial Sequence: Synthetic oligonucleotide
ccaacaccugguacaccac

SEQ ID NO: 2953257 - RNA, 19 nt, Artificial Sequence
  Description of Artificial Sequence: Synthetic oligonucleotide
gcuccugcucaagaaguuc

SEQ ID NO: 2953258 - RNA, 19 nt, Artificial Sequence
  Description of Artificial Sequence: Synthetic oligonucleotide
ggaaacccgcagccaccag

SEQ ID NO: 2953259 - RNA, 19 nt, Artificial Sequence
  Description of Artificial Sequence: Synthetic oligonucleotide
aacccgcagccaccagcuu

SEQ ID NO: 2953260 - RNA, 19 nt, Artificial Sequence
  Description of Artificial Sequence: Synthetic oligonucleotide
ccaccagcuucacucgcac

SEQ ID NO: 2953261 - RNA, 19 nt, Artificial Sequence
  Description of Artificial Sequence: Synthetic oligonucleotide
guuccagugcgguguacuu

SEQ ID NO: 2953262 - RNA, 19 nt, Artificial Sequence
  Description of Artificial Sequence: Synthetic oligonucleotide
gcugagcucagagggcuuc

SEQ ID NO: 2953263 - RNA, 19 nt, Artificial Sequence
  Description of Artificial Sequence: Synthetic oligonucleotide
gccugccacagaugcacca

SEQ ID NO: 2953264 - RNA, 19 nt, Artificial Sequence
  Description of Artificial Sequence: Synthetic oligonucleotide
accgugggagacagcggga

SEQ ID NO: 2953265 - RNA, 19 nt, Artificial Sequence
  Description of Artificial Sequence: Synthetic oligonucleotide
agacagcgggaaacucacu

SEQ ID NO: 2953266 - RNA, 19 nt, Artificial Sequence
  Description of Artificial Sequence: Synthetic oligonucleotide
cugagcucagagggcuuca

SEQ ID NO: 2953267 - RNA, 19 nt, Artificial Sequence
  Description of Artificial Sequence: Synthetic oligonucleotide
cccgcagccaccagcuuca

SEQ ID NO: 2953268 - RNA, 19 nt, Artificial Sequence
  Description of Artificial Sequence: Synthetic oligonucleotide
gcaccgugggagacagcgg

SEQ ID NO: 2953269 - RNA, 19 nt, Artificial Sequence
  Description of Artificial Sequence: Synthetic oligonucleotide
ucgcaccgugggagacagc

SEQ ID NO: 2953270 - RNA, 19 nt, Artificial Sequence
  Description of Artificial Sequence: Synthetic oligonucleotide
gggagacagcgggaaacuc

SEQ ID NO: 2953271 - RNA, 19 nt, Artificial Sequence
  Description of Artificial Sequence: Synthetic oligonucleotide
agcccugggugugcuccug

SEQ ID NO: 2953272 - RNA, 19 nt, Artificial Sequence
  Description of Artificial Sequence: Synthetic oligonucleotide
gggugugcuccugcucaag

SEQ ID NO: 2953273 - RNA, 19 nt, Artificial Sequence
  Description of Artificial Sequence: Synthetic oligonucleotide
ccugggugugcuccugcuc

SEQ ID NO: 2953274 - RNA, 19 nt, Artificial Sequence
  Description of Artificial Sequence: Synthetic oligonucleotide
caccagcacaucuggguuu

SEQ ID NO: 2953275 - RNA, 19 nt, Artificial Sequence
  Description of Artificial Sequence: Synthetic oligonucleotide
cauccacugccaacugcau

SEQ ID NO: 2953276 - RNA, 19 nt, Artificial Sequence
  Description of Artificial Sequence: Synthetic oligonucleotide
cggccgucuggaaacccgc

SEQ ID NO: 2953277 - RNA, 19 nt, Artificial Sequence
  Description of Artificial Sequence: Synthetic oligonucleotide
gccaccagcuucacucgca

SEQ ID NO: 2953278 - RNA, 19 nt, Artificial Sequence
  Description of Artificial Sequence: Synthetic oligonucleotide
gcaccagcacaucuggguu

SEQ ID NO: 2953279 - RNA, 19 nt, Artificial Sequence
  Description of Artificial Sequence: Synthetic oligonucleotide
gcccugggugugcuccugc

SEQ ID NO: 2953280 - RNA, 19 nt, Artificial Sequence
  Description of Artificial Sequence: Synthetic oligonucleotide
cacugccaacugcauacau

SEQ ID NO: 2953281 - RNA, 19 nt, Artificial Sequence
  Description of Artificial Sequence: Synthetic oligonucleotide
gguuugucugugagacucu

SEQ ID NO: 2953282 - RNA, 19 nt, Artificial Sequence
  Description of Artificial Sequence: Synthetic oligonucleotide
gcuucaccugccacuccuc

SEQ ID NO: 2953283 - RNA, 19 nt, Artificial Sequence
  Description of Artificial Sequence: Synthetic oligonucleotide
ccaccccaagaauguuauc

SEQ ID NO: 2953284 - RNA, 19 nt, Artificial Sequence
  Description of Artificial Sequence: Synthetic oligonucleotide
ggacguccucggccgucug

SEQ ID NO: 2953285 - RNA, 19 nt, Artificial Sequence
  Description of Artificial Sequence: Synthetic oligonucleotide
caccugccacuccuccaaa

SEQ ID NO: 2953286 - RNA, 19 nt, Artificial Sequence
  Description of Artificial Sequence: Synthetic oligonucleotide
cuagcucccgcugcauuuu

SEQ ID NO: 2953287 - RNA, 19 nt, Artificial Sequence
  Description of Artificial Sequence: Synthetic oligonucleotide
cacuagcucccgcugcauu

SEQ ID NO: 2953288 - RNA, 19 nt, Artificial Sequence
  Description of Artificial Sequence: Synthetic oligonucleotide
ccucggccgucuggaaacc

SEQ ID NO: 2953289 - RNA, 19 nt, Artificial Sequence
  Description of Artificial Sequence: Synthetic oligonucleotide
ggccgucuggaaacccgca

SEQ ID NO: 2953290 - RNA, 19 nt, Artificial Sequence
  Description of Artificial Sequence: Synthetic oligonucleotide
ccacaaacuuccguuguuu

SEQ ID NO: 2953291 - RNA, 19 nt, Artificial Sequence
  Description of Artificial Sequence: Synthetic oligonucleotide
ccacugccaacugcauaca

SEQ ID NO: 2953292 - RNA, 19 nt, Artificial Sequence
  Description of Artificial Sequence: Synthetic oligonucleotide
ccgugggagacagcgggaa

SEQ ID NO: 2953293 - RNA, 19 nt, Artificial Sequence
  Description of Artificial Sequence: Synthetic oligonucleotide
gcgcugagcagaaggugau

SEQ ID NO: 2953294 - RNA, 19 nt, Artificial Sequence
  Description of Artificial Sequence: Synthetic oligonucleotide
cgugggagacagcgggaaa

SEQ ID NO: 2953295 - RNA, 19 nt, Artificial Sequence
  Description of Artificial Sequence: Synthetic oligonucleotide
ccacuccuccaaacacucu

SEQ ID NO: 2953296 - RNA, 19 nt, Artificial Sequence
  Description of Artificial Sequence: Synthetic oligonucleotide
ccagcuucacucgcaccgu

SEQ ID NO: 2953297 - RNA, 19 nt, Artificial Sequence
  Description of Artificial Sequence: Synthetic oligonucleotide
ccgcagccaccagcuucac

SEQ ID NO: 2953298 - RNA, 19 nt, Artificial Sequence
  Description of Artificial Sequence: Synthetic oligonucleotide
cguccucggccgucuggaa

SEQ ID NO: 2953299 - RNA, 19 nt, Artificial Sequence
  Description of Artificial Sequence: Synthetic oligonucleotide
ccagugcgguguacuucuu

SEQ ID NO: 2953300 - RNA, 19 nt, Artificial Sequence
  Description of Artificial Sequence: Synthetic oligonucleotide
cgcagccaccagcuucacu

SEQ ID NO: 2953301 - RNA, 19 nt, Artificial Sequence
  Description of Artificial Sequence: Synthetic oligonucleotide
cgcugagcagaaggugauu

SEQ ID NO: 2953302 - RNA, 19 nt, Artificial Sequence
  Description of Artificial Sequence: Synthetic oligonucleotide
acugaaaggagccugaggg

SEQ ID NO: 2953303 - RNA, 19 nt, Artificial Sequence
  Description of Artificial Sequence: Synthetic oligonucleotide
aauuccuucuugcuugucc

SEQ ID NO: 2953304 - RNA, 19 nt, Artificial Sequence
  Description of Artificial Sequence: Synthetic oligonucleotide
gaugauguuccccagagug

SEQ ID NO: 2953305 - RNA, 19 nt, Artificial Sequence
  Description of Artificial Sequence: Synthetic oligonucleotide
uuagcugcuacucaauucc

SEQ ID NO: 2953306 - RNA, 19 nt, Artificial Sequence
  Description of Artificial Sequence: Synthetic oligonucleotide
aauggugauuuucuucucg

SEQ ID NO: 2953307 - RNA, 19 nt, Artificial Sequence
  Description of Artificial Sequence: Synthetic oligonucleotide
uuaauggugauuuucuucu

SEQ ID NO: 2953308 - RNA, 19 nt, Artificial Sequence
  Description of Artificial Sequence: Synthetic oligonucleotide
aacagcugggauuugauga

SEQ ID NO: 2953309 - RNA, 19 nt, Artificial Sequence
  Description of Artificial Sequence: Synthetic oligonucleotide
uuuguguccuuguuaaugg

SEQ ID NO: 2953310 - RNA, 19 nt, Artificial Sequence
  Description of Artificial Sequence: Synthetic oligonucleotide
ugggauuugaugauguucc

SEQ ID NO: 2953311 - RNA, 19 nt, Artificial Sequence
  Description of Artificial Sequence: Synthetic oligonucleotide
agcaagaacgacucgaagg

SEQ ID NO: 2953312 - RNA, 19 nt, Artificial Sequence
  Description of Artificial Sequence: Synthetic oligonucleotide
uuuguagccagcaaacagc

SEQ ID NO: 2953313 - RNA, 19 nt, Artificial Sequence
  Description of Artificial Sequence: Synthetic oligonucleotide
ucugugauggcauugguga

SEQ ID NO: 2953314 - RNA, 19 nt, Artificial Sequence
  Description of Artificial Sequence: Synthetic oligonucleotide
uaagcaaugcuccuuuuag

SEQ ID NO: 2953315 - RNA, 19 nt, Artificial Sequence
  Description of Artificial Sequence: Synthetic oligonucleotide
ugaacaggcaagcauuggg

SEQ ID NO: 2953316 - RNA, 19 nt, Artificial Sequence
  Description of Artificial Sequence: Synthetic oligonucleotide
acgaaugaugaucuugugc

SEQ ID NO: 2953317 - RNA, 19 nt, Artificial Sequence
  Description of Artificial Sequence: Synthetic oligonucleotide
aagcaaugcuccuuuuagc

SEQ ID NO: 2953318 - RNA, 19 nt, Artificial Sequence
  Description of Artificial Sequence: Synthetic oligonucleotide
ugaucuugugcuccaaggg

SEQ ID NO: 2953319 - RNA, 19 nt, Artificial Sequence
  Description of Artificial Sequence: Synthetic oligonucleotide
gaucuugugcuccaagggg

SEQ ID NO: 2953320 - RNA, 19 nt, Artificial Sequence
  Description of Artificial Sequence: Synthetic oligonucleotide
uugaugauguuccccagag

SEQ ID NO: 2953321 - RNA, 19 nt, Artificial Sequence
  Description of Artificial Sequence: Synthetic oligonucleotide
ucuuuguugauggugaaca

SEQ ID NO: 2953322 - RNA, 19 nt, Artificial Sequence
  Description of Artificial Sequence: Synthetic oligonucleotide
auggugauuuucuucucgc

SEQ ID NO: 2953323 - RNA, 19 nt, Artificial Sequence
  Description of Artificial Sequence: Synthetic oligonucleotide
uuguuaauggugauuuucu

SEQ ID NO: 2953324 - RNA, 19 nt, Artificial Sequence
  Description of Artificial Sequence: Synthetic oligonucleotide
guagccagcaaacagcacc

SEQ ID NO: 2953325 - RNA, 19 nt, Artificial Sequence
  Description of Artificial Sequence: Synthetic oligonucleotide
gauuugaugauguucccca

SEQ ID NO: 2953326 - RNA, 19 nt, Artificial Sequence
  Description of Artificial Sequence: Synthetic oligonucleotide
agagagagcucacugauga

SEQ ID NO: 2953327 - RNA, 19 nt, Artificial Sequence
  Description of Artificial Sequence: Synthetic oligonucleotide
uugauggugaacaggcaag

SEQ ID NO: 2953328 - RNA, 19 nt, Artificial Sequence
  Description of Artificial Sequence: Synthetic oligonucleotide
augaucuugugcuccaagg

SEQ ID NO: 2953329 - RNA, 19 nt, Artificial Sequence
  Description of Artificial Sequence: Synthetic oligonucleotide
caaugcuccuuuuagcugc

SEQ ID NO: 2953330 - RNA, 19 nt, Artificial Sequence
  Description of Artificial Sequence: Synthetic oligonucleotide
aggacuguagucuggagug

SEQ ID NO: 2953331 - RNA, 19 nt, Artificial Sequence
  Description of Artificial Sequence: Synthetic oligonucleotide
aagaacgacucgaaggccg

SEQ ID NO: 2953332 - RNA, 19 nt, Artificial Sequence
  Description of Artificial Sequence: Synthetic oligonucleotide
uuucuucucgcccucgaag

SEQ ID NO: 2953333 - RNA, 19 nt, Artificial Sequence
  Description of Artificial Sequence: Synthetic oligonucleotide
ucgaagagcaagaacgacu

SEQ ID NO: 2953334 - RNA, 19 nt, Artificial Sequence
  Description of Artificial Sequence: Synthetic oligonucleotide
cuuuguagccagcaaacag

SEQ ID NO: 2953335 - RNA, 19 nt, Artificial Sequence
  Description of Artificial Sequence: Synthetic oligonucleotide
agccauuaagcaaugcucc

SEQ ID NO: 2953336 - RNA, 19 nt, Artificial Sequence
  Description of Artificial Sequence: Synthetic oligonucleotide
cugaugaggucugugaugg

SEQ ID NO: 2953337 - RNA, 19 nt, Artificial Sequence
  Description of Artificial Sequence: Synthetic oligonucleotide
agcaaugcuccuuuuagcu

SEQ ID NO: 2953338 - RNA, 19 nt, Artificial Sequence
  Description of Artificial Sequence: Synthetic oligonucleotide
aguguggucuucuuuguug

SEQ ID NO: 2953339 - RNA, 19 nt, Artificial Sequence
  Description of Artificial Sequence: Synthetic oligonucleotide
uguguccuuguuaauggug

SEQ ID NO: 2953340 - RNA, 19 nt, Artificial Sequence
  Description of Artificial Sequence: Synthetic oligonucleotide
cccucgaagagcaagaacg

SEQ ID NO: 2953341 - RNA, 19 nt, Artificial Sequence
  Description of Artificial Sequence: Synthetic oligonucleotide
aacaggcaagcauugggca

SEQ ID NO: 2953342 - RNA, 19 nt, Artificial Sequence
  Description of Artificial Sequence: Synthetic oligonucleotide
guuaauggugauuuucuuc

SEQ ID NO: 2953343 - RNA, 19 nt, Artificial Sequence
  Description of Artificial Sequence: Synthetic oligonucleotide
aagagcaagaacgacucga

SEQ ID NO: 2953344 - RNA, 19 nt, Artificial Sequence
  Description of Artificial Sequence: Synthetic oligonucleotide
uuguagccagcaaacagca

SEQ ID NO: 2953345 - RNA, 19 nt, Artificial Sequence
  Description of Artificial Sequence: Synthetic oligonucleotide
aaacagcaccugugggucc

SEQ ID NO: 2953346 - RNA, 19 nt, Artificial Sequence
  Description of Artificial Sequence: Synthetic oligonucleotide
agagagcucacugaugagg

SEQ ID NO: 2953347 - RNA, 19 nt, Artificial Sequence
  Description of Artificial Sequence: Synthetic oligonucleotide
ggagcguucauccuagagg

SEQ ID NO: 2953348 - RNA, 19 nt, Artificial Sequence
  Description of Artificial Sequence: Synthetic oligonucleotide
uuuagcugcuacucaauuc

SEQ ID NO: 2953349 - RNA, 19 nt, Artificial Sequence
  Description of Artificial Sequence: Synthetic oligonucleotide
ugaaaggagccugagggug

SEQ ID NO: 2953350 - RNA, 19 nt, Artificial Sequence
  Description of Artificial Sequence: Synthetic oligonucleotide
uugauggccacccggaauc

SEQ ID NO: 2953351 - RNA, 19 nt, Artificial Sequence
  Description of Artificial Sequence: Synthetic oligonucleotide
uuugaugauguuccccaga

SEQ ID NO: 2953352 - RNA, 19 nt, Artificial Sequence
  Description of Artificial Sequence: Synthetic oligonucleotide
cuacucaauuccuucuugc

SEQ ID NO: 2953353 - RNA, 19 nt, Artificial Sequence
  Description of Artificial Sequence: Synthetic oligonucleotide
gaaucguuccuccagcaga

SEQ ID NO: 2953354 - RNA, 19 nt, Artificial Sequence
  Description of Artificial Sequence: Synthetic oligonucleotide
acaggcaagcauugggcac

SEQ ID NO: 2953355 - RNA, 19 nt, Artificial Sequence
  Description of Artificial Sequence: Synthetic oligonucleotide
cagaguguggucuucuuug

SEQ ID NO: 2953356 - RNA, 19 nt, Artificial Sequence
  Description of Artificial Sequence: Synthetic oligonucleotide
cuuguuaauggugauuuuc

SEQ ID NO: 2953357 - RNA, 19 nt, Artificial Sequence
  Description of Artificial Sequence: Synthetic oligonucleotide
cuuuguguccuuguuaaug

SEQ ID NO: 2953358 - RNA, 19 nt, Artificial Sequence
  Description of Artificial Sequence: Synthetic oligonucleotide
gaugaucuugugcuccaag

SEQ ID NO: 2953359 - RNA, 19 nt, Artificial Sequence
  Description of Artificial Sequence: Synthetic oligonucleotide
agcaaacagcaccuguggg

SEQ ID NO: 2953360 - RNA, 19 nt, Artificial Sequence
  Description of Artificial Sequence: Synthetic oligonucleotide
ucuggaguggucugcacac

SEQ ID NO: 2953361 - RNA, 19 nt, Artificial Sequence
  Description of Artificial Sequence: Synthetic oligonucleotide
ucguuccuccagcagagag

SEQ ID NO: 2953362 - RNA, 19 nt, Artificial Sequence
  Description of Artificial Sequence: Synthetic oligonucleotide
aaucguuccuccagcagag

SEQ ID NO: 2953363 - RNA, 19 nt, Artificial Sequence
  Description of Artificial Sequence: Synthetic oligonucleotide
ugauguuccccagagugug

SEQ ID NO: 2953364 - RNA, 19 nt, Artificial Sequence
  Description of Artificial Sequence: Synthetic oligonucleotide
uuaagcaaugcuccuuuua

SEQ ID NO: 2953365 - RNA, 19 nt, Artificial Sequence
  Description of Artificial Sequence: Synthetic oligonucleotide
auuggugaaggccuccuga

SEQ ID NO: 2953366 - RNA, 19 nt, Artificial Sequence
  Description of Artificial Sequence: Synthetic oligonucleotide
gcaagaacgacucgaaggc

SEQ ID NO: 2953367 - RNA, 19 nt, Artificial Sequence
  Description of Artificial Sequence: Synthetic oligonucleotide
uucuucucgcccucgaaga

SEQ ID NO: 2953368 - RNA, 19 nt, Artificial Sequence
  Description of Artificial Sequence: Synthetic oligonucleotide
cagccauuaagcaaugcuc

SEQ ID NO: 2953369 - RNA, 19 nt, Artificial Sequence
  Description of Artificial Sequence: Synthetic oligonucleotide
ugugauggcauuggugaag

SEQ ID NO: 2953370 - RNA, 19 nt, Artificial Sequence
  Description of Artificial Sequence: Synthetic oligonucleotide
acugaugaggucugugaug

SEQ ID NO: 2953371 - RNA, 19 nt, Artificial Sequence
  Description of Artificial Sequence: Synthetic oligonucleotide
uuggugaaggccuccugag

SEQ ID NO: 2953372 - RNA, 19 nt, Artificial Sequence
  Description of Artificial Sequence: Synthetic oligonucleotide
gaacaggcaagcauugggc

SEQ ID NO: 2953373 - RNA, 19 nt, Artificial Sequence
  Description of Artificial Sequence: Synthetic oligonucleotide
accuuuguguccuuguuaa

SEQ ID NO: 2953374 - RNA, 19 nt, Artificial Sequence
  Description of Artificial Sequence: Synthetic oligonucleotide
uggguccuucaacagcugg

SEQ ID NO: 2953375 - RNA, 19 nt, Artificial Sequence
  Description of Artificial Sequence: Synthetic oligonucleotide
uacucaauuccuucuugcu

SEQ ID NO: 2953376 - RNA, 19 nt, Artificial Sequence
  Description of Artificial Sequence: Synthetic oligonucleotide
uccuuguuaauggugauuu

SEQ ID NO: 2953377 - RNA, 19 nt, Artificial Sequence
  Description of Artificial Sequence: Synthetic oligonucleotide
ggugauuuucuucucgccc

SEQ ID NO: 2953378 - RNA, 19 nt, Artificial Sequence
  Description of Artificial Sequence: Synthetic oligonucleotide
uggugaacaggcaagcauu

SEQ ID NO: 2953379 - RNA, 19 nt, Artificial Sequence
  Description of Artificial Sequence: Synthetic oligonucleotide
uuuuagcugcuacucaauu

SEQ ID NO: 2953380 - RNA, 19 nt, Artificial Sequence
  Description of Artificial Sequence: Synthetic oligonucleotide
uucucgcccucgaagagca

SEQ ID NO: 2953381 - RNA, 19 nt, Artificial Sequence
  Description of Artificial Sequence: Synthetic oligonucleotide
ugugcaccagccuuccagc

SEQ ID NO: 2953382 - RNA, 19 nt, Artificial Sequence
  Description of Artificial Sequence: Synthetic oligonucleotide
uccuuuuagcugcuacuca

SEQ ID NO: 2953383 - RNA, 19 nt, Artificial Sequence
  Description of Artificial Sequence: Synthetic oligonucleotide
gacuuuguagccagcaaac

SEQ ID NO: 2953384 - RNA, 19 nt, Artificial Sequence
  Description of Artificial Sequence: Synthetic oligonucleotide
uggugaaggccuccugagg

SEQ ID NO: 2953385 - RNA, 19 nt, Artificial Sequence
  Description of Artificial Sequence: Synthetic oligonucleotide
caagcauugggcaccuuug

SEQ ID NO: 2953386 - RNA, 19 nt, Artificial Sequence
  Description of Artificial Sequence: Synthetic oligonucleotide
cuuuguugauggugaacag

SEQ ID NO: 2953387 - RNA, 19 nt, Artificial Sequence
  Description of Artificial Sequence: Synthetic oligonucleotide
gaagagcaagaacgacucg

SEQ ID NO: 2953388 - RNA, 19 nt, Artificial Sequence
  Description of Artificial Sequence: Synthetic oligonucleotide
ucuucucgcccucgaagag

SEQ ID NO: 2953389 - RNA, 19 nt, Artificial Sequence
  Description of Artificial Sequence: Synthetic oligonucleotide
cagccuuccagccauuaag

SEQ ID NO: 2953390 - RNA, 19 nt, Artificial Sequence
  Description of Artificial Sequence: Synthetic oligonucleotide
acucgaaggccggaggagc

SEQ ID NO: 2953391 - RNA, 19 nt, Artificial Sequence
  Description of Artificial Sequence: Synthetic oligonucleotide
uugcuuguccuugauggcc

SEQ ID NO: 2953392 - RNA, 19 nt, Artificial Sequence
  Description of Artificial Sequence: Synthetic oligonucleotide
ucuugugcuccaaggggug

SEQ ID NO: 2953393 - RNA, 19 nt, Artificial Sequence
  Description of Artificial Sequence: Synthetic oligonucleotide
cagcaaacagcaccugugg

SEQ ID NO: 2953394 - RNA, 19 nt, Artificial Sequence
  Description of Artificial Sequence: Synthetic oligonucleotide
uguagucuggaguggucug

SEQ ID NO: 2953395 - RNA, 19 nt, Artificial Sequence
  Description of Artificial Sequence: Synthetic oligonucleotide
agccuuccagccauuaagc

SEQ ID NO: 2953396 - RNA, 19 nt, Artificial Sequence
  Description of Artificial Sequence: Synthetic oligonucleotide
ugcuuguccuugauggcca

SEQ ID NO: 2953397 - RNA, 19 nt, Artificial Sequence
  Description of Artificial Sequence: Synthetic oligonucleotide
aagcauugggcaccuuugu

SEQ ID NO: 2953398 - RNA, 19 nt, Artificial Sequence
  Description of Artificial Sequence: Synthetic oligonucleotide
auggugaacaggcaagcau

SEQ ID NO: 2953399 - RNA, 19 nt, Artificial Sequence
  Description of Artificial Sequence: Synthetic oligonucleotide
guugauggugaacaggcaa

SEQ ID NO: 2953400 - RNA, 19 nt, Artificial Sequence
  Description of Artificial Sequence: Synthetic oligonucleotide
ugauggugaacaggcaagc

SEQ ID NO: 2953401 - RNA, 19 nt, Artificial Sequence
  Description of Artificial Sequence: Synthetic oligonucleotide
uggugauuuucuucucgcc

SEQ ID NO: 2953402 - RNA, 19 nt, Artificial Sequence
  Description of Artificial Sequence: Synthetic oligonucleotide
gugugcaccagccuuccag

SEQ ID NO: 2953403 - RNA, 19 nt, Artificial Sequence
  Description of Artificial Sequence: Synthetic oligonucleotide
uuguccuugauggccaccc

SEQ ID NO: 2953404 - RNA, 19 nt, Artificial Sequence
  Description of Artificial Sequence: Synthetic oligonucleotide
uguugauggugaacaggca

SEQ ID NO: 2953405 - RNA, 19 nt, Artificial Sequence
  Description of Artificial Sequence: Synthetic oligonucleotide
gagcguucauccuagaggu

SEQ ID NO: 2953406 - RNA, 19 nt, Artificial Sequence
  Description of Artificial Sequence: Synthetic oligonucleotide
gugauggcauuggugaagg

SEQ ID NO: 2953407 - RNA, 19 nt, Artificial Sequence
  Description of Artificial Sequence: Synthetic oligonucleotide
uggaguggucugcacacga

SEQ ID NO: 2953408 - RNA, 19 nt, Artificial Sequence
  Description of Artificial Sequence: Synthetic oligonucleotide
accuguggguccuucaaca

SEQ ID NO: 2953409 - RNA, 19 nt, Artificial Sequence
  Description of Artificial Sequence: Synthetic oligonucleotide
agcagagagagcucacuga

SEQ ID NO: 2953410 - RNA, 19 nt, Artificial Sequence
  Description of Artificial Sequence: Synthetic oligonucleotide
uguuaauggugauuuucuu

SEQ ID NO: 2953411 - RNA, 19 nt, Artificial Sequence
  Description of Artificial Sequence: Synthetic oligonucleotide
ucaacagcugggauuugau

SEQ ID NO: 2953412 - RNA, 19 nt, Artificial Sequence
  Description of Artificial Sequence: Synthetic oligonucleotide
aggagcguucauccuagag

SEQ ID NO: 2953413 - RNA, 19 nt, Artificial Sequence
  Description of Artificial Sequence: Synthetic oligonucleotide
cauugggcaccuuuguguc

SEQ ID NO: 2953414 - RNA, 19 nt, Artificial Sequence
  Description of Artificial Sequence: Synthetic oligonucleotide
gagcaagaacgacucgaag

SEQ ID NO: 2953415 - RNA, 19 nt, Artificial Sequence
  Description of Artificial Sequence: Synthetic oligonucleotide
cacacgaaugaugaucuug

SEQ ID NO: 2953416 - RNA, 19 nt, Artificial Sequence
  Description of Artificial Sequence: Synthetic oligonucleotide
acacgaaugaugaucuugu

SEQ ID NO: 2953417 - RNA, 19 nt, Artificial Sequence
  Description of Artificial Sequence: Synthetic oligonucleotide
uccuucaacagcugggauu

SEQ ID NO: 2953418 - RNA, 19 nt, Artificial Sequence
  Description of Artificial Sequence: Synthetic oligonucleotide
gaaugaugaucuugugcuc

SEQ ID NO: 2953419 - RNA, 19 nt, Artificial Sequence
  Description of Artificial Sequence: Synthetic oligonucleotide
agcauugggcaccuuugug

SEQ ID NO: 2953420 - RNA, 19 nt, Artificial Sequence
  Description of Artificial Sequence: Synthetic oligonucleotide
ugagggugugugcaccagc

SEQ ID NO: 2953421 - RNA, 19 nt, Artificial Sequence
  Description of Artificial Sequence: Synthetic oligonucleotide
uucaacagcugggauuuga

SEQ ID NO: 2953422 - RNA, 19 nt, Artificial Sequence
  Description of Artificial Sequence: Synthetic oligonucleotide
aacgacucgaaggccggag

SEQ ID NO: 2953423 - RNA, 19 nt, Artificial Sequence
  Description of Artificial Sequence: Synthetic oligonucleotide
gauuuucuucucgcccucg

SEQ ID NO: 2953424 - RNA, 19 nt, Artificial Sequence
  Description of Artificial Sequence: Synthetic oligonucleotide
gucuucuuuguugauggug

SEQ ID NO: 2953425 - RNA, 19 nt, Artificial Sequence
  Description of Artificial Sequence: Synthetic oligonucleotide
caaacagcaccuguggguc

SEQ ID NO: 2953426 - RNA, 19 nt, Artificial Sequence
  Description of Artificial Sequence: Synthetic oligonucleotide
guccuugauggccacccgg

SEQ ID NO: 2953427 - RNA, 19 nt, Artificial Sequence
  Description of Artificial Sequence: Synthetic oligonucleotide
uuuucuucucgcccucgaa

SEQ ID NO: 2953428 - RNA, 19 nt, Artificial Sequence
  Description of Artificial Sequence: Synthetic oligonucleotide
uccugaggacuguagucug

SEQ ID NO: 2953429 - RNA, 19 nt, Artificial Sequence
  Description of Artificial Sequence: Synthetic oligonucleotide
uguccuugauggccacccg

SEQ ID NO: 2953430 - RNA, 19 nt, Artificial Sequence
  Description of Artificial Sequence: Synthetic oligonucleotide
cucgaaggccggaggagcg

SEQ ID NO: 2953431 - RNA, 19 nt, Artificial Sequence
  Description of Artificial Sequence: Synthetic oligonucleotide
cauccuagaggugcgcucc

SEQ ID NO: 2953432 - RNA, 19 nt, Artificial Sequence
  Description of Artificial Sequence: Synthetic oligonucleotide
cugggauuugaugauguuc

SEQ ID NO: 2953433 - RNA, 19 nt, Artificial Sequence
  Description of Artificial Sequence: Synthetic oligonucleotide
ucaauuccuucuugcuugu

SEQ ID NO: 2953434 - RNA, 19 nt, Artificial Sequence
  Description of Artificial Sequence: Synthetic oligonucleotide
aggucugugauggcauugg

SEQ ID NO: 2953435 - RNA, 19 nt, Artificial Sequence
  Description of Artificial Sequence: Synthetic oligonucleotide
acgacucgaaggccggagg

SEQ ID NO: 2953436 - RNA, 19 nt, Artificial Sequence
  Description of Artificial Sequence: Synthetic oligonucleotide
cuguggguccuucaacagc

SEQ ID NO: 2953437 - RNA, 19 nt, Artificial Sequence
  Description of Artificial Sequence: Synthetic oligonucleotide
ugaugauguuccccagagu

SEQ ID NO: 2953438 - RNA, 19 nt, Artificial Sequence
  Description of Artificial Sequence: Synthetic oligonucleotide
gagggugugugcaccagcc

SEQ ID NO: 2953439 - RNA, 19 nt, Artificial Sequence
  Description of Artificial Sequence: Synthetic oligonucleotide
augaugaucuugugcucca

SEQ ID NO: 2953440 - RNA, 19 nt, Artificial Sequence
  Description of Artificial Sequence: Synthetic oligonucleotide
cugcacacgaaugaugauc

SEQ ID NO: 2953441 - RNA, 19 nt, Artificial Sequence
  Description of Artificial Sequence: Synthetic oligonucleotide
agaguguggucuucuuugu

SEQ ID NO: 2953442 - RNA, 19 nt, Artificial Sequence
  Description of Artificial Sequence: Synthetic oligonucleotide
gucugcacacgaaugauga

SEQ ID NO: 2953443 - RNA, 19 nt, Artificial Sequence
  Description of Artificial Sequence: Synthetic oligonucleotide
auuuucuucucgcccucga

SEQ ID NO: 2953444 - RNA, 19 nt, Artificial Sequence
  Description of Artificial Sequence: Synthetic oligonucleotide
acagcugggauuugaugau

SEQ ID NO: 2953445 - RNA, 19 nt, Artificial Sequence
  Description of Artificial Sequence: Synthetic oligonucleotide
uccuucuugcuuguccuug

SEQ ID NO: 2953446 - RNA, 19 nt, Artificial Sequence
  Description of Artificial Sequence: Synthetic oligonucleotide
ugaggacuguagucuggag

SEQ ID NO: 2953447 - RNA, 19 nt, Artificial Sequence
  Description of Artificial Sequence: Synthetic oligonucleotide
caacagcugggauuugaug

SEQ ID NO: 2953448 - RNA, 19 nt, Artificial Sequence
  Description of Artificial Sequence: Synthetic oligonucleotide
ugcuacucaauuccuucuu

SEQ ID NO: 2953449 - RNA, 19 nt, Artificial Sequence
  Description of Artificial Sequence: Synthetic oligonucleotide
uugugcuccaagggguggg

SEQ ID NO: 2953450 - RNA, 19 nt, Artificial Sequence
  Description of Artificial Sequence: Synthetic oligonucleotide
uucuuuguugauggugaac

SEQ ID NO: 2953451 - RNA, 19 nt, Artificial Sequence
  Description of Artificial Sequence: Synthetic oligonucleotide
uuguguccuuguuaauggu

SEQ ID NO: 2953452 - RNA, 19 nt, Artificial Sequence
  Description of Artificial Sequence: Synthetic oligonucleotide
caggcaagcauugggcacc

SEQ ID NO: 2953453 - RNA, 19 nt, Artificial Sequence
  Description of Artificial Sequence: Synthetic oligonucleotide
aguggucugcacacgaaug

SEQ ID NO: 2953454 - RNA, 19 nt, Artificial Sequence
  Description of Artificial Sequence: Synthetic oligonucleotide
ucauccuagaggugcgcuc

SEQ ID NO: 2953455 - RNA, 19 nt, Artificial Sequence
  Description of Artificial Sequence: Synthetic oligonucleotide
aucuugugcuccaaggggu

SEQ ID NO: 2953456 - RNA, 19 nt, Artificial Sequence
  Description of Artificial Sequence: Synthetic oligonucleotide
gauguuccccagagugugg

SEQ ID NO: 2953457 - RNA, 19 nt, Artificial Sequence
  Description of Artificial Sequence: Synthetic oligonucleotide
guggucugcacacgaauga

SEQ ID NO: 2953458 - RNA, 19 nt, Artificial Sequence
  Description of Artificial Sequence: Synthetic oligonucleotide
gaggacuguagucuggagu

SEQ ID NO: 2953459 - RNA, 19 nt, Artificial Sequence
  Description of Artificial Sequence: Synthetic oligonucleotide
cuccuuuuagcugcuacuc

SEQ ID NO: 2953460 - RNA, 19 nt, Artificial Sequence
  Description of Artificial Sequence: Synthetic oligonucleotide
cuuccagccauuaagcaau

SEQ ID NO: 2953461 - RNA, 19 nt, Artificial Sequence
  Description of Artificial Sequence: Synthetic oligonucleotide
guguggucuucuuuguuga

SEQ ID NO: 2953462 - RNA, 19 nt, Artificial Sequence
  Description of Artificial Sequence: Synthetic oligonucleotide
agucuggaguggucugcac

SEQ ID NO: 2953463 - RNA, 19 nt, Artificial Sequence
  Description of Artificial Sequence: Synthetic oligonucleotide
agaacgacucgaaggccgg

SEQ ID NO: 2953464 - RNA, 19 nt, Artificial Sequence
  Description of Artificial Sequence: Synthetic oligonucleotide
aacagcaccuguggguccu

SEQ ID NO: 2953465 - RNA, 19 nt, Artificial Sequence
  Description of Artificial Sequence: Synthetic oligonucleotide
ucgcccucgaagagcaaga

SEQ ID NO: 2953466 - RNA, 19 nt, Artificial Sequence
  Description of Artificial Sequence: Synthetic oligonucleotide
ugcgcuccggcucccagac

SEQ ID NO: 2953467 - RNA, 19 nt, Artificial Sequence
  Description of Artificial Sequence: Synthetic oligonucleotide
caagaacgacucgaaggcc

SEQ ID NO: 2953468 - RNA, 19 nt, Artificial Sequence
  Description of Artificial Sequence: Synthetic oligonucleotide
ugugcuccaaggggugggg

SEQ ID NO: 2953469 - RNA, 19 nt, Artificial Sequence
  Description of Artificial Sequence: Synthetic oligonucleotide
acuuuguagccagcaaaca

SEQ ID NO: 2953470 - RNA, 19 nt, Artificial Sequence
  Description of Artificial Sequence: Synthetic oligonucleotide
uucauccuagaggugcgcu

SEQ ID NO: 2953471 - RNA, 19 nt, Artificial Sequence
  Description of Artificial Sequence: Synthetic oligonucleotide
ugauggccacccggaaucg

SEQ ID NO: 2953472 - RNA, 19 nt, Artificial Sequence
  Description of Artificial Sequence: Synthetic oligonucleotide
uagcugcuacucaauuccu

SEQ ID NO: 2953473 - RNA, 19 nt, Artificial Sequence
  Description of Artificial Sequence: Synthetic oligonucleotide
gugaacaggcaagcauugg

SEQ ID NO: 2953474 - RNA, 19 nt, Artificial Sequence
  Description of Artificial Sequence: Synthetic oligonucleotide
gacucgaaggccggaggag

SEQ ID NO: 2953475 - RNA, 19 nt, Artificial Sequence
  Description of Artificial Sequence: Synthetic oligonucleotide
ggauuugaugauguucccc

SEQ ID NO: 2953476 - RNA, 19 nt, Artificial Sequence
  Description of Artificial Sequence: Synthetic oligonucleotide
uguagccagcaaacagcac

SEQ ID NO: 2953477 - RNA, 19 nt, Artificial Sequence
  Description of Artificial Sequence: Synthetic oligonucleotide
ugaaggccuccugaggacu

SEQ ID NO: 2953478 - RNA, 19 nt, Artificial Sequence
  Description of Artificial Sequence: Synthetic oligonucleotide
cacgaaugaugaucuugug

SEQ ID NO: 2953479 - RNA, 19 nt, Artificial Sequence
  Description of Artificial Sequence: Synthetic oligonucleotide
uguccuuguuaauggugau

SEQ ID NO: 2953480 - RNA, 19 nt, Artificial Sequence
  Description of Artificial Sequence: Synthetic oligonucleotide
gcuacucaauuccuucuug

SEQ ID NO: 2953481 - RNA, 19 nt, Artificial Sequence
  Description of Artificial Sequence: Synthetic oligonucleotide
cagagagagcucacugaug

SEQ ID NO: 2953482 - RNA, 19 nt, Artificial Sequence
  Description of Artificial Sequence: Synthetic oligonucleotide
cuucucgcccucgaagagc

SEQ ID NO: 2953483 - RNA, 19 nt, Artificial Sequence
  Description of Artificial Sequence: Synthetic oligonucleotide
agccugagggugugugcac

SEQ ID NO: 2953484 - RNA, 19 nt, Artificial Sequence
  Description of Artificial Sequence: Synthetic oligonucleotide
gauggugaacaggcaagca

SEQ ID NO: 2953485 - RNA, 19 nt, Artificial Sequence
  Description of Artificial Sequence: Synthetic oligonucleotide
uuccagccauuaagcaaug

SEQ ID NO: 2953486 - RNA, 19 nt, Artificial Sequence
  Description of Artificial Sequence: Synthetic oligonucleotide
gcugcuacucaauuccuuc

SEQ ID NO: 2953487 - RNA, 19 nt, Artificial Sequence
  Description of Artificial Sequence: Synthetic oligonucleotide
ccagcaaacagcaccugug

SEQ ID NO: 2953488 - RNA, 19 nt, Artificial Sequence
  Description of Artificial Sequence: Synthetic oligonucleotide
auuaagcaaugcuccuuuu

SEQ ID NO: 2953489 - RNA, 19 nt, Artificial Sequence
  Description of Artificial Sequence: Synthetic oligonucleotide
cuugugcuccaaggggugg

SEQ ID NO: 2953490 - RNA, 19 nt, Artificial Sequence
  Description of Artificial Sequence: Synthetic oligonucleotide
gcaaugcuccuuuuagcug

SEQ ID NO: 2953491 - RNA, 19 nt, Artificial Sequence
  Description of Artificial Sequence: Synthetic oligonucleotide
gaggucugugauggcauug

SEQ ID NO: 2953492 - RNA, 19 nt, Artificial Sequence
  Description of Artificial Sequence: Synthetic oligonucleotide
ggacuuuguagccagcaaa

SEQ ID NO: 2953493 - RNA, 19 nt, Artificial Sequence
  Description of Artificial Sequence: Synthetic oligonucleotide
guagucuggaguggucugc

SEQ ID NO: 2953494 - RNA, 19 nt, Artificial Sequence
  Description of Artificial Sequence: Synthetic oligonucleotide
cucgaagagcaagaacgac

SEQ ID NO: 2953495 - RNA, 19 nt, Artificial Sequence
  Description of Artificial Sequence: Synthetic oligonucleotide
auccuagaggugcgcuccg

SEQ ID NO: 2953496 - RNA, 19 nt, Artificial Sequence
  Description of Artificial Sequence: Synthetic oligonucleotide
gcguucauccuagaggugc

SEQ ID NO: 2953497 - RNA, 19 nt, Artificial Sequence
  Description of Artificial Sequence: Synthetic oligonucleotide
gucuggaguggucugcaca

SEQ ID NO: 2953498 - RNA, 19 nt, Artificial Sequence
  Description of Artificial Sequence: Synthetic oligonucleotide
acuguagucuggagugguc

SEQ ID NO: 2953499 - RNA, 19 nt, Artificial Sequence
  Description of Artificial Sequence: Synthetic oligonucleotide
cgaagagcaagaacgacuc

SEQ ID NO: 2953500 - RNA, 19 nt, Artificial Sequence
  Description of Artificial Sequence: Synthetic oligonucleotide
ucugcacacgaaugaugau

SEQ ID NO: 2953501 - RNA, 19 nt, Artificial Sequence
  Description of Artificial Sequence: Synthetic oligonucleotide
uagucuggaguggucugca

SEQ ID NO: 2953502 - RNA, 19 nt, Artificial Sequence
  Description of Artificial Sequence: Synthetic oligonucleotide
cacccggaaucguuccucc

SEQ ID NO: 2953503 - RNA, 19 nt, Artificial Sequence
  Description of Artificial Sequence: Synthetic oligonucleotide
cucgcccucgaagagcaag

SEQ ID NO: 2953504 - RNA, 19 nt, Artificial Sequence
  Description of Artificial Sequence: Synthetic oligonucleotide
gccggaggagcguucaucc

SEQ ID NO: 2953505 - RNA, 19 nt, Artificial Sequence
  Description of Artificial Sequence: Synthetic oligonucleotide
aaugcuccuuuuagcugcu

SEQ ID NO: 2953506 - RNA, 19 nt, Artificial Sequence
  Description of Artificial Sequence: Synthetic oligonucleotide
cucacugaugaggucugug

SEQ ID NO: 2953507 - RNA, 19 nt, Artificial Sequence
  Description of Artificial Sequence: Synthetic oligonucleotide
agagcaagaacgacucgaa

SEQ ID NO: 2953508 - RNA, 19 nt, Artificial Sequence
  Description of Artificial Sequence: Synthetic oligonucleotide
ugaugaggucugugauggc

SEQ ID NO: 2953509 - RNA, 19 nt, Artificial Sequence
  Description of Artificial Sequence: Synthetic oligonucleotide
agcugggauuugaugaugu

SEQ ID NO: 2953510 - RNA, 19 nt, Artificial Sequence
  Description of Artificial Sequence: Synthetic oligonucleotide
cgaaugaugaucuugugcu

SEQ ID NO: 2953511 - RNA, 19 nt, Artificial Sequence
  Description of Artificial Sequence: Synthetic oligonucleotide
uccuagaggugcgcuccgg

SEQ ID NO: 2953512 - RNA, 19 nt, Artificial Sequence
  Description of Artificial Sequence: Synthetic oligonucleotide
ggugaacaggcaagcauug

SEQ ID NO: 2953513 - RNA, 19 nt, Artificial Sequence
  Description of Artificial Sequence: Synthetic oligonucleotide
uguggucuucuuuguugau

SEQ ID NO: 2953514 - RNA, 19 nt, Artificial Sequence
  Description of Artificial Sequence: Synthetic oligonucleotide
gggauuugaugauguuccc

SEQ ID NO: 2953515 - RNA, 19 nt, Artificial Sequence
  Description of Artificial Sequence: Synthetic oligonucleotide
uggucugcacacgaaugau

SEQ ID NO: 2953516 - RNA, 19 nt, Artificial Sequence
  Description of Artificial Sequence: Synthetic oligonucleotide
ggaggagcguucauccuag

SEQ ID NO: 2953517 - RNA, 19 nt, Artificial Sequence
  Description of Artificial Sequence: Synthetic oligonucleotide
aaggccggaggagcguuca

SEQ ID NO: 2953518 - RNA, 19 nt, Artificial Sequence
  Description of Artificial Sequence: Synthetic oligonucleotide
uggccacccggaaucguuc

SEQ ID NO: 2953519 - RNA, 19 nt, Artificial Sequence
  Description of Artificial Sequence: Synthetic oligonucleotide
uccagccauuaagcaaugc

SEQ ID NO: 2953520 - RNA, 19 nt, Artificial Sequence
  Description of Artificial Sequence: Synthetic oligonucleotide
auguuccccagaguguggu

SEQ ID NO: 2953521 - RNA, 19 nt, Artificial Sequence
  Description of Artificial Sequence: Synthetic oligonucleotide
ugaggucugugauggcauu

SEQ ID NO: 2953522 - RNA, 19 nt, Artificial Sequence
  Description of Artificial Sequence: Synthetic oligonucleotide
aggagccugagggugugug

SEQ ID NO: 2953523 - RNA, 19 nt, Artificial Sequence
  Description of Artificial Sequence: Synthetic oligonucleotide
caccuguggguccuucaac

SEQ ID NO: 2953524 - RNA, 19 nt, Artificial Sequence
  Description of Artificial Sequence: Synthetic oligonucleotide
cauuaagcaaugcuccuuu

SEQ ID NO: 2953525 - RNA, 19 nt, Artificial Sequence
  Description of Artificial Sequence: Synthetic oligonucleotide
ugugugcaccagccuucca

SEQ ID NO: 2953526 - RNA, 19 nt, Artificial Sequence
  Description of Artificial Sequence: Synthetic oligonucleotide
gcaaacagcaccugugggu

SEQ ID NO: 2953527 - RNA, 19 nt, Artificial Sequence
  Description of Artificial Sequence: Synthetic oligonucleotide
ccugaggacuguagucugg

SEQ ID NO: 2953528 - RNA, 19 nt, Artificial Sequence
  Description of Artificial Sequence: Synthetic oligonucleotide
agggugugugcaccagccu

SEQ ID NO: 2953529 - RNA, 19 nt, Artificial Sequence
  Description of Artificial Sequence: Synthetic oligonucleotide
cuggaguggucugcacacg

SEQ ID NO: 2953530 - RNA, 19 nt, Artificial Sequence
  Description of Artificial Sequence: Synthetic oligonucleotide
gcauugggcaccuuugugu

SEQ ID NO: 2953531 - RNA, 19 nt, Artificial Sequence
  Description of Artificial Sequence: Synthetic oligonucleotide
uguuccccagagugugguc

SEQ ID NO: 2953532 - RNA, 19 nt, Artificial Sequence
  Description of Artificial Sequence: Synthetic oligonucleotide
cuucuuuguugauggugaa

SEQ ID NO: 2953533 - RNA, 19 nt, Artificial Sequence
  Description of Artificial Sequence: Synthetic oligonucleotide
ccuuuuagcugcuacucaa

SEQ ID NO: 2953534 - RNA, 19 nt, Artificial Sequence
  Description of Artificial Sequence: Synthetic oligonucleotide
ggucugcacacgaaugaug

SEQ ID NO: 2953535 - RNA, 19 nt, Artificial Sequence
  Description of Artificial Sequence: Synthetic oligonucleotide
guucauccuagaggugcgc

SEQ ID NO: 2953536 - RNA, 19 nt, Artificial Sequence
  Description of Artificial Sequence: Synthetic oligonucleotide
ugaugaucuugugcuccaa

SEQ ID NO: 2953537 - RNA, 19 nt, Artificial Sequence
  Description of Artificial Sequence: Synthetic oligonucleotide
gaguggucugcacacgaau

SEQ ID NO: 2953538 - RNA, 19 nt, Artificial Sequence
  Description of Artificial Sequence: Synthetic oligonucleotide
cguucauccuagaggugcg

SEQ ID NO: 2953539 - RNA, 19 nt, Artificial Sequence
  Description of Artificial Sequence: Synthetic oligonucleotide
ggagccugagggugugugc

SEQ ID NO: 2953540 - RNA, 19 nt, Artificial Sequence
  Description of Artificial Sequence: Synthetic oligonucleotide
ggacuguagucuggagugg

SEQ ID NO: 2953541 - RNA, 19 nt, Artificial Sequence
  Description of Artificial Sequence: Synthetic oligonucleotide
aaggccuccugaggacugu

SEQ ID NO: 2953542 - RNA, 19 nt, Artificial Sequence
  Description of Artificial Sequence: Synthetic oligonucleotide
cugaggacuguagucugga

SEQ ID NO: 2953543 - RNA, 19 nt, Artificial Sequence
  Description of Artificial Sequence: Synthetic oligonucleotide
uuccccagaguguggucuu

SEQ ID NO: 2953544 - RNA, 19 nt, Artificial Sequence
  Description of Artificial Sequence: Synthetic oligonucleotide
gugugugcaccagccuucc

SEQ ID NO: 2953545 - RNA, 19 nt, Artificial Sequence
  Description of Artificial Sequence: Synthetic oligonucleotide
cugaaaggagccugagggu

SEQ ID NO: 2953546 - RNA, 19 nt, Artificial Sequence
  Description of Artificial Sequence: Synthetic oligonucleotide
gacuguagucuggaguggu

SEQ ID NO: 2953547 - RNA, 19 nt, Artificial Sequence
  Description of Artificial Sequence: Synthetic oligonucleotide
caccuuuguguccuuguua

SEQ ID NO: 2953548 - RNA, 19 nt, Artificial Sequence
  Description of Artificial Sequence: Synthetic oligonucleotide
ccuuccagccauuaagcaa

SEQ ID NO: 2953549 - RNA, 19 nt, Artificial Sequence
  Description of Artificial Sequence: Synthetic oligonucleotide
cagcugggauuugaugaug

SEQ ID NO: 2953550 - RNA, 19 nt, Artificial Sequence
  Description of Artificial Sequence: Synthetic oligonucleotide
cugcuacucaauuccuucu

SEQ ID NO: 2953551 - RNA, 19 nt, Artificial Sequence
  Description of Artificial Sequence: Synthetic oligonucleotide
cugugauggcauuggugaa

SEQ ID NO: 2953552 - RNA, 19 nt, Artificial Sequence
  Description of Artificial Sequence: Synthetic oligonucleotide
ccuagaggugcgcuccggc

SEQ ID NO: 2953553 - RNA, 19 nt, Artificial Sequence
  Description of Artificial Sequence: Synthetic oligonucleotide
ucgaaggccggaggagcgu

SEQ ID NO: 2953554 - RNA, 19 nt, Artificial Sequence
  Description of Artificial Sequence: Synthetic oligonucleotide
acccggaaucguuccucca

SEQ ID NO: 2953555 - RNA, 19 nt, Artificial Sequence
  Description of Artificial Sequence: Synthetic oligonucleotide
ggugugugcaccagccuuc

SEQ ID NO: 2953556 - RNA, 19 nt, Artificial Sequence
  Description of Artificial Sequence: Synthetic oligonucleotide
cuagaggugcgcuccggcu

SEQ ID NO: 2953557 - RNA, 19 nt, Artificial Sequence
  Description of Artificial Sequence: Synthetic oligonucleotide
gcagagagagcucacugau

SEQ ID NO: 2953558 - RNA, 19 nt, Artificial Sequence
  Description of Artificial Sequence: Synthetic oligonucleotide
gccuuccagccauuaagca

SEQ ID NO: 2953559 - RNA, 19 nt, Artificial Sequence
  Description of Artificial Sequence: Synthetic oligonucleotide
cuugauggccacccggaau

SEQ ID NO: 2953560 - RNA, 19 nt, Artificial Sequence
  Description of Artificial Sequence: Synthetic oligonucleotide
cacugaugaggucugugau

SEQ ID NO: 2953561 - RNA, 19 nt, Artificial Sequence
  Description of Artificial Sequence: Synthetic oligonucleotide
cuguagucuggaguggucu

SEQ ID NO: 2953562 - RNA, 19 nt, Artificial Sequence
  Description of Artificial Sequence: Synthetic oligonucleotide
ccagccauuaagcaaugcu

SEQ ID NO: 2953563 - RNA, 19 nt, Artificial Sequence
  Description of Artificial Sequence: Synthetic oligonucleotide
ggggacuuuguagccagca

SEQ ID NO: 2953564 - RNA, 19 nt, Artificial Sequence
  Description of Artificial Sequence: Synthetic oligonucleotide
ggccacccggaaucguucc

SEQ ID NO: 2953565 - RNA, 19 nt, Artificial Sequence
  Description of Artificial Sequence: Synthetic oligonucleotide
aaggagccugagggugugu

SEQ ID NO: 2953566 - RNA, 19 nt, Artificial Sequence
  Description of Artificial Sequence: Synthetic oligonucleotide
agcguucauccuagaggug

SEQ ID NO: 2953567 - RNA, 19 nt, Artificial Sequence
  Description of Artificial Sequence: Synthetic oligonucleotide
gcccucgaagagcaagaac

SEQ ID NO: 2953568 - RNA, 19 nt, Artificial Sequence
  Description of Artificial Sequence: Synthetic oligonucleotide
gaggagcguucauccuaga

SEQ ID NO: 2953569 - RNA, 19 nt, Artificial Sequence
  Description of Artificial Sequence: Synthetic oligonucleotide
caauuccuucuugcuuguc

SEQ ID NO: 2953570 - RNA, 19 nt, Artificial Sequence
  Description of Artificial Sequence: Synthetic oligonucleotide
auggccacccggaaucguu

SEQ ID NO: 2953571 - RNA, 19 nt, Artificial Sequence
  Description of Artificial Sequence: Synthetic oligonucleotide
agccagcaaacagcaccug

SEQ ID NO: 2953572 - RNA, 19 nt, Artificial Sequence
  Description of Artificial Sequence: Synthetic oligonucleotide
gaaggccggaggagcguuc

SEQ ID NO: 2953573 - RNA, 19 nt, Artificial Sequence
  Description of Artificial Sequence: Synthetic oligonucleotide
gaacgacucgaaggccgga

SEQ ID NO: 2953574 - RNA, 19 nt, Artificial Sequence
  Description of Artificial Sequence: Synthetic oligonucleotide
ggugcgcuccggcucccag

SEQ ID NO: 2953575 - RNA, 19 nt, Artificial Sequence
  Description of Artificial Sequence: Synthetic oligonucleotide
aggcaagcauugggcaccu

SEQ ID NO: 2953576 - RNA, 19 nt, Artificial Sequence
  Description of Artificial Sequence: Synthetic oligonucleotide
gaguguggucuucuuuguu

SEQ ID NO: 2953577 - RNA, 19 nt, Artificial Sequence
  Description of Artificial Sequence: Synthetic oligonucleotide
gccauuaagcaaugcuccu

SEQ ID NO: 2953578 - RNA, 19 nt, Artificial Sequence
  Description of Artificial Sequence: Synthetic oligonucleotide
cuucaacagcugggauuug

SEQ ID NO: 2953579 - RNA, 19 nt, Artificial Sequence
  Description of Artificial Sequence: Synthetic oligonucleotide
aucguuccuccagcagaga

SEQ ID NO: 2953580 - RNA, 19 nt, Artificial Sequence
  Description of Artificial Sequence: Synthetic oligonucleotide
gcaagcauugggcaccuuu

SEQ ID NO: 2953581 - RNA, 19 nt, Artificial Sequence
  Description of Artificial Sequence: Synthetic oligonucleotide
gugcgcuccggcucccaga

SEQ ID NO: 2953582 - RNA, 19 nt, Artificial Sequence
  Description of Artificial Sequence: Synthetic oligonucleotide
uccccagaguguggucuuc

SEQ ID NO: 2953583 - RNA, 19 nt, Artificial Sequence
  Description of Artificial Sequence: Synthetic oligonucleotide
gcuuguccuugauggccac

SEQ ID NO: 2953584 - RNA, 19 nt, Artificial Sequence
  Description of Artificial Sequence: Synthetic oligonucleotide
ucucgcccucgaagagcaa

SEQ ID NO: 2953585 - RNA, 19 nt, Artificial Sequence
  Description of Artificial Sequence: Synthetic oligonucleotide
ggcaccuuuguguccuugu

SEQ ID NO: 2953586 - RNA, 19 nt, Artificial Sequence
  Description of Artificial Sequence: Synthetic oligonucleotide
gccagcaaacagcaccugu

SEQ ID NO: 2953587 - RNA, 19 nt, Artificial Sequence
  Description of Artificial Sequence: Synthetic oligonucleotide
cguuccuccagcagagaga

SEQ ID NO: 2953588 - RNA, 19 nt, Artificial Sequence
  Description of Artificial Sequence: Synthetic oligonucleotide
ggccuccugaggacuguag

SEQ ID NO: 2953589 - RNA, 19 nt, Artificial Sequence
  Description of Artificial Sequence: Synthetic oligonucleotide
accagccuuccagccauua

SEQ ID NO: 2953590 - RNA, 19 nt, Artificial Sequence
  Description of Artificial Sequence: Synthetic oligonucleotide
gggugugugcaccagccuu

SEQ ID NO: 2953591 - RNA, 19 nt, Artificial Sequence
  Description of Artificial Sequence: Synthetic oligonucleotide
ccuucaacagcugggauuu

SEQ ID NO: 2953592 - RNA, 19 nt, Artificial Sequence
  Description of Artificial Sequence: Synthetic oligonucleotide
gauggccacccggaaucgu

SEQ ID NO: 2953593 - RNA, 19 nt, Artificial Sequence
  Description of Artificial Sequence: Synthetic oligonucleotide
cuucuugcuuguccuugau

SEQ ID NO: 2953594 - RNA, 19 nt, Artificial Sequence
  Description of Artificial Sequence: Synthetic oligonucleotide
ccugagggugugugcacca

SEQ ID NO: 2953595 - RNA, 19 nt, Artificial Sequence
  Description of Artificial Sequence: Synthetic oligonucleotide
guccuuguuaauggugauu

SEQ ID NO: 2953596 - RNA, 19 nt, Artificial Sequence
  Description of Artificial Sequence: Synthetic oligonucleotide
ggaguggucugcacacgaa

SEQ ID NO: 2953597 - RNA, 19 nt, Artificial Sequence
  Description of Artificial Sequence: Synthetic oligonucleotide
ggccggaggagcguucauc

SEQ ID NO: 2953598 - RNA, 19 nt, Artificial Sequence
  Description of Artificial Sequence: Synthetic oligonucleotide
gcaccagccuuccagccau

SEQ ID NO: 2953599 - RNA, 19 nt, Artificial Sequence
  Description of Artificial Sequence: Synthetic oligonucleotide
gaggugcgcuccggcuccc

SEQ ID NO: 2953600 - RNA, 19 nt, Artificial Sequence
  Description of Artificial Sequence: Synthetic oligonucleotide
aggccggaggagcguucau

SEQ ID NO: 2953601 - RNA, 19 nt, Artificial Sequence
  Description of Artificial Sequence: Synthetic oligonucleotide
ccacccggaaucguuccuc

SEQ ID NO: 2953602 - RNA, 19 nt, Artificial Sequence
  Description of Artificial Sequence: Synthetic oligonucleotide
cagcaccuguggguccuuc

SEQ ID NO: 2953603 - RNA, 19 nt, Artificial Sequence
  Description of Artificial Sequence: Synthetic oligonucleotide
cgacucgaaggccggagga

SEQ ID NO: 2953604 - RNA, 19 nt, Artificial Sequence
  Description of Artificial Sequence: Synthetic oligonucleotide
aggccuccugaggacugua

SEQ ID NO: 2953605 - RNA, 19 nt, Artificial Sequence
  Description of Artificial Sequence: Synthetic oligonucleotide
gcaccuuuguguccuuguu

SEQ ID NO: 2953606 - RNA, 19 nt, Artificial Sequence
  Description of Artificial Sequence: Synthetic oligonucleotide
gcugggauuugaugauguu

SEQ ID NO: 2953607 - RNA, 19 nt, Artificial Sequence
  Description of Artificial Sequence: Synthetic oligonucleotide
ccagccuuccagccauuaa

SEQ ID NO: 2953608 - RNA, 19 nt, Artificial Sequence
  Description of Artificial Sequence: Synthetic oligonucleotide
cggaggagcguucauccua

SEQ ID NO: 2953609 - RNA, 19 nt, Artificial Sequence
  Description of Artificial Sequence: Synthetic oligonucleotide
augcuccuuuuagcugcua

SEQ ID NO: 2953610 - RNA, 19 nt, Artificial Sequence
  Description of Artificial Sequence: Synthetic oligonucleotide
aggugcgcuccggcuccca

SEQ ID NO: 2953611 - RNA, 19 nt, Artificial Sequence
  Description of Artificial Sequence: Synthetic oligonucleotide
acagcaccuguggguccuu

SEQ ID NO: 2953612 - RNA, 19 nt, Artificial Sequence
  Description of Artificial Sequence: Synthetic oligonucleotide
ccauuaagcaaugcuccuu

SEQ ID NO: 2953613 - RNA, 19 nt, Artificial Sequence
  Description of Artificial Sequence: Synthetic oligonucleotide
ccagaguguggucuucuuu

SEQ ID NO: 2953614 - RNA, 19 nt, Artificial Sequence
  Description of Artificial Sequence: Synthetic oligonucleotide
ccuuguuaauggugauuuu

SEQ ID NO: 2953615 - RNA, 19 nt, Artificial Sequence
  Description of Artificial Sequence: Synthetic oligonucleotide
gccacccggaaucguuccu

SEQ ID NO: 2953616 - RNA, 19 nt, Artificial Sequence
  Description of Artificial Sequence: Synthetic oligonucleotide
ccuuuguguccuuguuaau

SEQ ID NO: 2953617 - RNA, 19 nt, Artificial Sequence
  Description of Artificial Sequence: Synthetic oligonucleotide
gcacacgaaugaugaucuu

SEQ ID NO: 2953618 - RNA, 19 nt, Artificial Sequence
  Description of Artificial Sequence: Synthetic oligonucleotide
gcucacugaugaggucugu

SEQ ID NO: 2953619 - RNA, 19 nt, Artificial Sequence
  Description of Artificial Sequence: Synthetic oligonucleotide
ccggaggagcguucauccu

SEQ ID NO: 2953620 - RNA, 19 nt, Artificial Sequence
  Description of Artificial Sequence: Synthetic oligonucleotide
cccagaguguggucuucuu

SEQ ID NO: 2953621 - RNA, 19 nt, Artificial Sequence
  Description of Artificial Sequence: Synthetic oligonucleotide
ccccagaguguggucuucu

SEQ ID NO: 2953622 - RNA, 19 nt, Artificial Sequence
  Description of Artificial Sequence: Synthetic oligonucleotide
cgcccucgaagagcaagaa

SEQ ID NO: 2953623 - RNA, 19 nt, Artificial Sequence
  Description of Artificial Sequence: Synthetic oligonucleotide
caccagccuuccagccauu

SEQ ID NO: 2953624 - RNA, 19 nt, Artificial Sequence
  Description of Artificial Sequence: Synthetic oligonucleotide
cgaaggccggaggagcguu

SEQ ID NO: 2953625 - RNA, 19 nt, Artificial Sequence
  Description of Artificial Sequence: Synthetic oligonucleotide
ggcaagcauugggcaccuu

SEQ ID NO: 2953626 - RNA, 19 nt, Artificial Sequence
  Description of Artificial Sequence: Synthetic oligonucleotide
aauugagaaaaguuucccc

SEQ ID NO: 2953627 - RNA, 19 nt, Artificial Sequence
  Description of Artificial Sequence: Synthetic oligonucleotide
ugaguauuaauucuccugc

SEQ ID NO: 2953628 - RNA, 19 nt, Artificial Sequence
  Description of Artificial Sequence: Synthetic oligonucleotide
auguuuucuauccugaguc

SEQ ID NO: 2953629 - RNA, 19 nt, Artificial Sequence
  Description of Artificial Sequence: Synthetic oligonucleotide
aaaggcuccaauuaauuga

SEQ ID NO: 2953630 - RNA, 19 nt, Artificial Sequence
  Description of Artificial Sequence: Synthetic oligonucleotide
auuaauugagaaaaguuuc

SEQ ID NO: 2953631 - RNA, 19 nt, Artificial Sequence
  Description of Artificial Sequence: Synthetic oligonucleotide
uuaauugagaaaaguuucc

SEQ ID NO: 2953632 - RNA, 19 nt, Artificial Sequence
  Description of Artificial Sequence: Synthetic oligonucleotide
uauugaucuuguuuuaugc

SEQ ID NO: 2953633 - RNA, 19 nt, Artificial Sequence
  Description of Artificial Sequence: Synthetic oligonucleotide
aaaaguuuccccuggugug

SEQ ID NO: 2953634 - RNA, 19 nt, Artificial Sequence
  Description of Artificial Sequence: Synthetic oligonucleotide
gauuccggaacugauagcg

SEQ ID NO: 2953635 - RNA, 19 nt, Artificial Sequence
  Description of Artificial Sequence: Synthetic oligonucleotide
uaaggaacggucuggaaag

SEQ ID NO: 2953636 - RNA, 19 nt, Artificial Sequence
  Description of Artificial Sequence: Synthetic oligonucleotide
aauuaauugagaaaaguuu

SEQ ID NO: 2953637 - RNA, 19 nt, Artificial Sequence
  Description of Artificial Sequence: Synthetic oligonucleotide
agaguuuauucuuuucugg

SEQ ID NO: 2953638 - RNA, 19 nt, Artificial Sequence
  Description of Artificial Sequence: Synthetic oligonucleotide
aguuuauucuuuucuggcg

SEQ ID NO: 2953639 - RNA, 19 nt, Artificial Sequence
  Description of Artificial Sequence: Synthetic oligonucleotide
uuuucuguaggcauuccgc

SEQ ID NO: 2953640 - RNA, 19 nt, Artificial Sequence
  Description of Artificial Sequence: Synthetic oligonucleotide
auugagaaaaguuuccccu

SEQ ID NO: 2953641 - RNA, 19 nt, Artificial Sequence
  Description of Artificial Sequence: Synthetic oligonucleotide
uaauucuccugccuuauug

SEQ ID NO: 2953642 - RNA, 19 nt, Artificial Sequence
  Description of Artificial Sequence: Synthetic oligonucleotide
agaaguuuauugcagccag

SEQ ID NO: 2953643 - RNA, 19 nt, Artificial Sequence
  Description of Artificial Sequence: Synthetic oligonucleotide
ugagaaaaguuuccccugg

SEQ ID NO: 2953644 - RNA, 19 nt, Artificial Sequence
  Description of Artificial Sequence: Synthetic oligonucleotide
auagucacccuccugcucg

SEQ ID NO: 2953645 - RNA, 19 nt, Artificial Sequence
  Description of Artificial Sequence: Synthetic oligonucleotide
uaauacaugagguggacaa

SEQ ID NO: 2953646 - RNA, 19 nt, Artificial Sequence
  Description of Artificial Sequence: Synthetic oligonucleotide
uuagaaguuuauugcagcc

SEQ ID NO: 2953647 - RNA, 19 nt, Artificial Sequence
  Description of Artificial Sequence: Synthetic oligonucleotide
cuuagaaguuuauugcagc

SEQ ID NO: 2953648 - RNA, 19 nt, Artificial Sequence
  Description of Artificial Sequence: Synthetic oligonucleotide
uuugguuggcuccuugggg

SEQ ID NO: 2953649 - RNA, 19 nt, Artificial Sequence
  Description of Artificial Sequence: Synthetic oligonucleotide
aaucaugucucgaauuuuc

SEQ ID NO: 2953650 - RNA, 19 nt, Artificial Sequence
  Description of Artificial Sequence: Synthetic oligonucleotide
uaggcauuccgccagauuc

SEQ ID NO: 2953651 - RNA, 19 nt, Artificial Sequence
  Description of Artificial Sequence: Synthetic oligonucleotide
gaguuuauucuuuucuggc

SEQ ID NO: 2953652 - RNA, 19 nt, Artificial Sequence
  Description of Artificial Sequence: Synthetic oligonucleotide
auucuuuucuggcgcagcc

SEQ ID NO: 2953653 - RNA, 19 nt, Artificial Sequence
  Description of Artificial Sequence: Synthetic oligonucleotide
guuuauucuuuucuggcgc

SEQ ID NO: 2953654 - RNA, 19 nt, Artificial Sequence
  Description of Artificial Sequence: Synthetic oligonucleotide
uuauugaucuuguuuuaug

SEQ ID NO: 2953655 - RNA, 19 nt, Artificial Sequence
  Description of Artificial Sequence: Synthetic oligonucleotide
ucuccugccuuauugaucu

SEQ ID NO: 2953656 - RNA, 19 nt, Artificial Sequence
  Description of Artificial Sequence: Synthetic oligonucleotide
uauccugagucucuggagc

SEQ ID NO: 2953657 - RNA, 19 nt, Artificial Sequence
  Description of Artificial Sequence: Synthetic oligonucleotide
auuuucuguaggcauuccg

SEQ ID NO: 2953658 - RNA, 19 nt, Artificial Sequence
  Description of Artificial Sequence: Synthetic oligonucleotide
gaaaggcuccaauuaauug

SEQ ID NO: 2953659 - RNA, 19 nt, Artificial Sequence
  Description of Artificial Sequence: Synthetic oligonucleotide
uuuauugcagccaguaaua

SEQ ID NO: 2953660 - RNA, 19 nt, Artificial Sequence
  Description of Artificial Sequence: Synthetic oligonucleotide
uccaauuaauugagaaaag

SEQ ID NO: 2953661 - RNA, 19 nt, Artificial Sequence
  Description of Artificial Sequence: Synthetic oligonucleotide
uguggggugacuucagucc

SEQ ID NO: 2953662 - RNA, 19 nt, Artificial Sequence
  Description of Artificial Sequence: Synthetic oligonucleotide
uucauguuuucuauccuga

SEQ ID NO: 2953663 - RNA, 19 nt, Artificial Sequence
  Description of Artificial Sequence: Synthetic oligonucleotide
ucuguaggcauuccgccag

SEQ ID NO: 2953664 - RNA, 19 nt, Artificial Sequence
  Description of Artificial Sequence: Synthetic oligonucleotide
uaauugagaaaaguuuccc

SEQ ID NO: 2953665 - RNA, 19 nt, Artificial Sequence
  Description of Artificial Sequence: Synthetic oligonucleotide
ugagguggacaacugagga

SEQ ID NO: 2953666 - RNA, 19 nt, Artificial Sequence
  Description of Artificial Sequence: Synthetic oligonucleotide
caugagguggacaacugag

SEQ ID NO: 2953667 - RNA, 19 nt, Artificial Sequence
  Description of Artificial Sequence: Synthetic oligonucleotide
aauacaugagguggacaac

SEQ ID NO: 2953668 - RNA, 19 nt, Artificial Sequence
  Description of Artificial Sequence: Synthetic oligonucleotide
aaaguuuccccuggugugg

SEQ ID NO: 2953669 - RNA, 19 nt, Artificial Sequence
  Description of Artificial Sequence: Synthetic oligonucleotide
ucuggaaaggcuccaauua

SEQ ID NO: 2953670 - RNA, 19 nt, Artificial Sequence
  Description of Artificial Sequence: Synthetic oligonucleotide
auagcgacugcucucggag

SEQ ID NO: 2953671 - RNA, 19 nt, Artificial Sequence
  Description of Artificial Sequence: Synthetic oligonucleotide
agguggacaacugaggagg

SEQ ID NO: 2953672 - RNA, 19 nt, Artificial Sequence
  Description of Artificial Sequence: Synthetic oligonucleotide
gugaguauuaauucuccug

SEQ ID NO: 2953673 - RNA, 19 nt, Artificial Sequence
  Description of Artificial Sequence: Synthetic oligonucleotide
ucuauccugagucucugga

SEQ ID NO: 2953674 - RNA, 19 nt, Artificial Sequence
  Description of Artificial Sequence: Synthetic oligonucleotide
uuucuguaggcauuccgcc

SEQ ID NO: 2953675 - RNA, 19 nt, Artificial Sequence
  Description of Artificial Sequence: Synthetic oligonucleotide
agaccuguagccuucccuc

SEQ ID NO: 2953676 - RNA, 19 nt, Artificial Sequence
  Description of Artificial Sequence: Synthetic oligonucleotide
aguauuaauucuccugccu

SEQ ID NO: 2953677 - RNA, 19 nt, Artificial Sequence
  Description of Artificial Sequence: Synthetic oligonucleotide
gugacuucaguccauaguc

SEQ ID NO: 2953678 - RNA, 19 nt, Artificial Sequence
  Description of Artificial Sequence: Synthetic oligonucleotide
aacugauagcgacugcucu

SEQ ID NO: 2953679 - RNA, 19 nt, Artificial Sequence
  Description of Artificial Sequence: Synthetic oligonucleotide
ucucgaauuuucuguaggc

SEQ ID NO: 2953680 - RNA, 19 nt, Artificial Sequence
  Description of Artificial Sequence: Synthetic oligonucleotide
uuuucuauccugagucucu

SEQ ID NO: 2953681 - RNA, 19 nt, Artificial Sequence
  Description of Artificial Sequence: Synthetic oligonucleotide
cagauuccggaacugauag

SEQ ID NO: 2953682 - RNA, 19 nt, Artificial Sequence
  Description of Artificial Sequence: Synthetic oligonucleotide
cagccaguaauacaugagg

SEQ ID NO: 2953683 - RNA, 19 nt, Artificial Sequence
  Description of Artificial Sequence: Synthetic oligonucleotide
guagccuucccuccuaagg

SEQ ID NO: 2953684 - RNA, 19 nt, Artificial Sequence
  Description of Artificial Sequence: Synthetic oligonucleotide
uugagaaaaguuuccccug

SEQ ID NO: 2953685 - RNA, 19 nt, Artificial Sequence
  Description of Artificial Sequence: Synthetic oligonucleotide
acugauagcgacugcucuc

SEQ ID NO: 2953686 - RNA, 19 nt, Artificial Sequence
  Description of Artificial Sequence: Synthetic oligonucleotide
ucuuugguuggcuccuugg

SEQ ID NO: 2953687 - RNA, 19 nt, Artificial Sequence
  Description of Artificial Sequence: Synthetic oligonucleotide
ucgucuuuauggaagaguu

SEQ ID NO: 2953688 - RNA, 19 nt, Artificial Sequence
  Description of Artificial Sequence: Synthetic oligonucleotide
aaggcuccaauuaauugag

SEQ ID NO: 2953689 - RNA, 19 nt, Artificial Sequence
  Description of Artificial Sequence: Synthetic oligonucleotide
cuucaguccauagucaccc

SEQ ID NO: 2953690 - RNA, 19 nt, Artificial Sequence
  Description of Artificial Sequence: Synthetic oligonucleotide
ucgaauuuucuguaggcau

SEQ ID NO: 2953691 - RNA, 19 nt, Artificial Sequence
  Description of Artificial Sequence: Synthetic oligonucleotide
aguaauacaugagguggac

SEQ ID NO: 2953692 - RNA, 19 nt, Artificial Sequence
  Description of Artificial Sequence: Synthetic oligonucleotide
auugcagccaguaauacau

SEQ ID NO: 2953693 - RNA, 19 nt, Artificial Sequence
  Description of Artificial Sequence: Synthetic oligonucleotide
uuuauucuuuucuggcgca

SEQ ID NO: 2953694 - RNA, 19 nt, Artificial Sequence
  Description of Artificial Sequence: Synthetic oligonucleotide
ucggaggugaguauuaauu

SEQ ID NO: 2953695 - RNA, 19 nt, Artificial Sequence
  Description of Artificial Sequence: Synthetic oligonucleotide
aagaccuguagccuucccu

SEQ ID NO: 2953696 - RNA, 19 nt, Artificial Sequence
  Description of Artificial Sequence: Synthetic oligonucleotide
gucucgaauuuucuguagg

SEQ ID NO: 2953697 - RNA, 19 nt, Artificial Sequence
  Description of Artificial Sequence: Synthetic oligonucleotide
ucaugucucgaauuuucug

SEQ ID NO: 2953698 - RNA, 19 nt, Artificial Sequence
  Description of Artificial Sequence: Synthetic oligonucleotide
gaguauuaauucuccugcc

SEQ ID NO: 2953699 - RNA, 19 nt, Artificial Sequence
  Description of Artificial Sequence: Synthetic oligonucleotide
ucauguuuucuauccugag

SEQ ID NO: 2953700 - RNA, 19 nt, Artificial Sequence
  Description of Artificial Sequence: Synthetic oligonucleotide
agaaaaguuuccccuggug

SEQ ID NO: 2953701 - RNA, 19 nt, Artificial Sequence
  Description of Artificial Sequence: Synthetic oligonucleotide
ucugcagaguugcaugaca

SEQ ID NO: 2953702 - RNA, 19 nt, Artificial Sequence
  Description of Artificial Sequence: Synthetic oligonucleotide
uauugcagccaguaauaca

SEQ ID NO: 2953703 - RNA, 19 nt, Artificial Sequence
  Description of Artificial Sequence: Synthetic oligonucleotide
gacaccccagucuuugccg

SEQ ID NO: 2953704 - RNA, 19 nt, Artificial Sequence
  Description of Artificial Sequence: Synthetic oligonucleotide
cuccugcucgucuuuaugg

SEQ ID NO: 2953705 - RNA, 19 nt, Artificial Sequence
  Description of Artificial Sequence: Synthetic oligonucleotide
gaaaaguuuccccuggugu

SEQ ID NO: 2953706 - RNA, 19 nt, Artificial Sequence
  Description of Artificial Sequence: Synthetic oligonucleotide
aacggucuggaaaggcucc

SEQ ID NO: 2953707 - RNA, 19 nt, Artificial Sequence
  Description of Artificial Sequence: Synthetic oligonucleotide
uugguuggcuccuugggga

SEQ ID NO: 2953708 - RNA, 19 nt, Artificial Sequence
  Description of Artificial Sequence: Synthetic oligonucleotide
uugcaugacaccccagucu

SEQ ID NO: 2953709 - RNA, 19 nt, Artificial Sequence
  Description of Artificial Sequence: Synthetic oligonucleotide
uauuaauucuccugccuua

SEQ ID NO: 2953710 - RNA, 19 nt, Artificial Sequence
  Description of Artificial Sequence: Synthetic oligonucleotide
uagccuucccuccuaagga

SEQ ID NO: 2953711 - RNA, 19 nt, Artificial Sequence
  Description of Artificial Sequence: Synthetic oligonucleotide
cuuugguuggcuccuuggg

SEQ ID NO: 2953712 - RNA, 19 nt, Artificial Sequence
  Description of Artificial Sequence: Synthetic oligonucleotide
ucuuuucuggcgcagccuc

SEQ ID NO: 2953713 - RNA, 19 nt, Artificial Sequence
  Description of Artificial Sequence: Synthetic oligonucleotide
ugccuuauugaucuuguuu

SEQ ID NO: 2953714 - RNA, 19 nt, Artificial Sequence
  Description of Artificial Sequence: Synthetic oligonucleotide
aggugaguauuaauucucc

SEQ ID NO: 2953715 - RNA, 19 nt, Artificial Sequence
  Description of Artificial Sequence: Synthetic oligonucleotide
cuccaauuaauugagaaaa

SEQ ID NO: 2953716 - RNA, 19 nt, Artificial Sequence
  Description of Artificial Sequence: Synthetic oligonucleotide
gacuucaguccauagucac

SEQ ID NO: 2953717 - RNA, 19 nt, Artificial Sequence
  Description of Artificial Sequence: Synthetic oligonucleotide
aguugcaugacaccccagu

SEQ ID NO: 2953718 - RNA, 19 nt, Artificial Sequence
  Description of Artificial Sequence: Synthetic oligonucleotide
ccaguaauacaugaggugg

SEQ ID NO: 2953719 - RNA, 19 nt, Artificial Sequence
  Description of Artificial Sequence: Synthetic oligonucleotide
agauuccggaacugauagc

SEQ ID NO: 2953720 - RNA, 19 nt, Artificial Sequence
  Description of Artificial Sequence: Synthetic oligonucleotide
ugggcgucuucuuugguug

SEQ ID NO: 2953721 - RNA, 19 nt, Artificial Sequence
  Description of Artificial Sequence: Synthetic oligonucleotide
ugcagccaguaauacauga

SEQ ID NO: 2953722 - RNA, 19 nt, Artificial Sequence
  Description of Artificial Sequence: Synthetic oligonucleotide
ugucucgaauuuucuguag

SEQ ID NO: 2953723 - RNA, 19 nt, Artificial Sequence
  Description of Artificial Sequence: Synthetic oligonucleotide
ugacuucaguccauaguca

SEQ ID NO: 2953724 - RNA, 19 nt, Artificial Sequence
  Description of Artificial Sequence: Synthetic oligonucleotide
uguuuucuauccugagucu

SEQ ID NO: 2953725 - RNA, 19 nt, Artificial Sequence
  Description of Artificial Sequence: Synthetic oligonucleotide
uagaaguuuauugcagcca

SEQ ID NO: 2953726 - RNA, 19 nt, Artificial Sequence
  Description of Artificial Sequence: Synthetic oligonucleotide
uggacaacugaggaggcug

SEQ ID NO: 2953727 - RNA, 19 nt, Artificial Sequence
  Description of Artificial Sequence: Synthetic oligonucleotide
aaguuuauugcagccagua

SEQ ID NO: 2953728 - RNA, 19 nt, Artificial Sequence
  Description of Artificial Sequence: Synthetic oligonucleotide
aacugaggaggcugccccg

SEQ ID NO: 2953729 - RNA, 19 nt, Artificial Sequence
  Description of Artificial Sequence: Synthetic oligonucleotide
gagguggacaacugaggag

SEQ ID NO: 2953730 - RNA, 19 nt, Artificial Sequence
  Description of Artificial Sequence: Synthetic oligonucleotide
uacaugagguggacaacug

SEQ ID NO: 2953731 - RNA, 19 nt, Artificial Sequence
  Description of Artificial Sequence: Synthetic oligonucleotide
caguccauagucacccucc

SEQ ID NO: 2953732 - RNA, 19 nt, Artificial Sequence
  Description of Artificial Sequence: Synthetic oligonucleotide
aaguuuccccugguguggc

SEQ ID NO: 2953733 - RNA, 19 nt, Artificial Sequence
  Description of Artificial Sequence: Synthetic oligonucleotide
ugacaccccagucuuugcc

SEQ ID NO: 2953734 - RNA, 19 nt, Artificial Sequence
  Description of Artificial Sequence: Synthetic oligonucleotide
ugcaugacaccccagucuu

SEQ ID NO: 2953735 - RNA, 19 nt, Artificial Sequence
  Description of Artificial Sequence: Synthetic oligonucleotide
guuuauugcagccaguaau

SEQ ID NO: 2953736 - RNA, 19 nt, Artificial Sequence
  Description of Artificial Sequence: Synthetic oligonucleotide
uggaaaggcuccaauuaau

SEQ ID NO: 2953737 - RNA, 19 nt, Artificial Sequence
  Description of Artificial Sequence: Synthetic oligonucleotide
auacaugagguggacaacu

SEQ ID NO: 2953738 - RNA, 19 nt, Artificial Sequence
  Description of Artificial Sequence: Synthetic oligonucleotide
uuugccggcaguguggggu

SEQ ID NO: 2953739 - RNA, 19 nt, Artificial Sequence
  Description of Artificial Sequence: Synthetic oligonucleotide
acuucaguccauagucacc

SEQ ID NO: 2953740 - RNA, 19 nt, Artificial Sequence
  Description of Artificial Sequence: Synthetic oligonucleotide
cuauccugagucucuggag

SEQ ID NO: 2953741 - RNA, 19 nt, Artificial Sequence
  Description of Artificial Sequence: Synthetic oligonucleotide
cugcucgucuuuauggaag

SEQ ID NO: 2953742 - RNA, 19 nt, Artificial Sequence
  Description of Artificial Sequence: Synthetic oligonucleotide
uuccggaacugauagcgac

SEQ ID NO: 2953743 - RNA, 19 nt, Artificial Sequence
  Description of Artificial Sequence: Synthetic oligonucleotide
cugauagcgacugcucucg

SEQ ID NO: 2953744 - RNA, 19 nt, Artificial Sequence
  Description of Artificial Sequence: Synthetic oligonucleotide
acaacugaggaggcugccc

SEQ ID NO: 2953745 - RNA, 19 nt, Artificial Sequence
  Description of Artificial Sequence: Synthetic oligonucleotide
cuaaggaacggucuggaaa

SEQ ID NO: 2953746 - RNA, 19 nt, Artificial Sequence
  Description of Artificial Sequence: Synthetic oligonucleotide
agaguugcaugacacccca

SEQ ID NO: 2953747 - RNA, 19 nt, Artificial Sequence
  Description of Artificial Sequence: Synthetic oligonucleotide
ucuggcgcagccucucccg

SEQ ID NO: 2953748 - RNA, 19 nt, Artificial Sequence
  Description of Artificial Sequence: Synthetic oligonucleotide
cucucugcagaguugcaug

SEQ ID NO: 2953749 - RNA, 19 nt, Artificial Sequence
  Description of Artificial Sequence: Synthetic oligonucleotide
ugcagaguugcaugacacc

SEQ ID NO: 2953750 - RNA, 19 nt, Artificial Sequence
  Description of Artificial Sequence: Synthetic oligonucleotide
gaauuuucuguaggcauuc

SEQ ID NO: 2953751 - RNA, 19 nt, Artificial Sequence
  Description of Artificial Sequence: Synthetic oligonucleotide
caacugaggaggcugcccc

SEQ ID NO: 2953752 - RNA, 19 nt, Artificial Sequence
  Description of Artificial Sequence: Synthetic oligonucleotide
uucuguaggcauuccgcca

SEQ ID NO: 2953753 - RNA, 19 nt, Artificial Sequence
  Description of Artificial Sequence: Synthetic oligonucleotide
uucuauccugagucucugg

SEQ ID NO: 2953754 - RNA, 19 nt, Artificial Sequence
  Description of Artificial Sequence: Synthetic oligonucleotide
cugcagaguugcaugacac

SEQ ID NO: 2953755 - RNA, 19 nt, Artificial Sequence
  Description of Artificial Sequence: Synthetic oligonucleotide
agucuuugccggcagugug

SEQ ID NO: 2953756 - RNA, 19 nt, Artificial Sequence
  Description of Artificial Sequence: Synthetic oligonucleotide
ucuuugccggcaguguggg

SEQ ID NO: 2953757 - RNA, 19 nt, Artificial Sequence
  Description of Artificial Sequence: Synthetic oligonucleotide
uuauucuuuucuggcgcag

SEQ ID NO: 2953758 - RNA, 19 nt, Artificial Sequence
  Description of Artificial Sequence: Synthetic oligonucleotide
aggaacggucuggaaaggc

SEQ ID NO: 2953759 - RNA, 19 nt, Artificial Sequence
  Description of Artificial Sequence: Synthetic oligonucleotide
uauucuuuucuggcgcagc

SEQ ID NO: 2953760 - RNA, 19 nt, Artificial Sequence
  Description of Artificial Sequence: Synthetic oligonucleotide
uuauugcagccaguaauac

SEQ ID NO: 2953761 - RNA, 19 nt, Artificial Sequence
  Description of Artificial Sequence: Synthetic oligonucleotide
cagaguugcaugacacccc

SEQ ID NO: 2953762 - RNA, 19 nt, Artificial Sequence
  Description of Artificial Sequence: Synthetic oligonucleotide
caauuaauugagaaaaguu

SEQ ID NO: 2953763 - RNA, 19 nt, Artificial Sequence
  Description of Artificial Sequence: Synthetic oligonucleotide
ugccccgaagaccuguagc

SEQ ID NO: 2953764 - RNA, 19 nt, Artificial Sequence
  Description of Artificial Sequence: Synthetic oligonucleotide
gucuuuauggaagaguuua

SEQ ID NO: 2953765 - RNA, 19 nt, Artificial Sequence
  Description of Artificial Sequence: Synthetic oligonucleotide
augacaccccagucuuugc

SEQ ID NO: 2953766 - RNA, 19 nt, Artificial Sequence
  Description of Artificial Sequence: Synthetic oligonucleotide
uucuccugccuuauugauc

SEQ ID NO: 2953767 - RNA, 19 nt, Artificial Sequence
  Description of Artificial Sequence: Synthetic oligonucleotide
ucaguccauagucacccuc

SEQ ID NO: 2953768 - RNA, 19 nt, Artificial Sequence
  Description of Artificial Sequence: Synthetic oligonucleotide
cgauucauguuuucuaucc

SEQ ID NO: 2953769 - RNA, 19 nt, Artificial Sequence
  Description of Artificial Sequence: Synthetic oligonucleotide
acaugagguggacaacuga

SEQ ID NO: 2953770 - RNA, 19 nt, Artificial Sequence
  Description of Artificial Sequence: Synthetic oligonucleotide
acaccccagucuuugccgg

SEQ ID NO: 2953771 - RNA, 19 nt, Artificial Sequence
  Description of Artificial Sequence: Synthetic oligonucleotide
ucuucuuugguuggcuccu

SEQ ID NO: 2953772 - RNA, 19 nt, Artificial Sequence
  Description of Artificial Sequence: Synthetic oligonucleotide
uuucuauccugagucucug

SEQ ID NO: 2953773 - RNA, 19 nt, Artificial Sequence
  Description of Artificial Sequence: Synthetic oligonucleotide
augagguggacaacugagg

SEQ ID NO: 2953774 - RNA, 19 nt, Artificial Sequence
  Description of Artificial Sequence: Synthetic oligonucleotide
uccugcucgucuuuaugga

SEQ ID NO: 2953775 - RNA, 19 nt, Artificial Sequence
  Description of Artificial Sequence: Synthetic oligonucleotide
caugucucgaauuuucugu

SEQ ID NO: 2953776 - RNA, 19 nt, Artificial Sequence
  Description of Artificial Sequence: Synthetic oligonucleotide
uucuuugguuggcuccuug

SEQ ID NO: 2953777 - RNA, 19 nt, Artificial Sequence
  Description of Artificial Sequence: Synthetic oligonucleotide
aaggaacggucuggaaagg

SEQ ID NO: 2953778 - RNA, 19 nt, Artificial Sequence
  Description of Artificial Sequence: Synthetic oligonucleotide
aggcauuccgccagauucc

SEQ ID NO: 2953779 - RNA, 19 nt, Artificial Sequence
  Description of Artificial Sequence: Synthetic oligonucleotide
ugauagcgacugcucucgg

SEQ ID NO: 2953780 - RNA, 19 nt, Artificial Sequence
  Description of Artificial Sequence: Synthetic oligonucleotide
agccucucccgauucaugu

SEQ ID NO: 2953781 - RNA, 19 nt, Artificial Sequence
  Description of Artificial Sequence: Synthetic oligonucleotide
ucccgauucauguuuucua

SEQ ID NO: 2953782 - RNA, 19 nt, Artificial Sequence
  Description of Artificial Sequence: Synthetic oligonucleotide
agucucuggagcugggcgu

SEQ ID NO: 2953783 - RNA, 19 nt, Artificial Sequence
  Description of Artificial Sequence: Synthetic oligonucleotide
uguagccuucccuccuaag

SEQ ID NO: 2953784 - RNA, 19 nt, Artificial Sequence
  Description of Artificial Sequence: Synthetic oligonucleotide
cauuccgccagauuccgga

SEQ ID NO: 2953785 - RNA, 19 nt, Artificial Sequence
  Description of Artificial Sequence: Synthetic oligonucleotide
gccaguaauacaugaggug

SEQ ID NO: 2953786 - RNA, 19 nt, Artificial Sequence
  Description of Artificial Sequence: Synthetic oligonucleotide
agccaguaauacaugaggu

SEQ ID NO: 2953787 - RNA, 19 nt, Artificial Sequence
  Description of Artificial Sequence: Synthetic oligonucleotide
agcugggcgucuucuuugg

SEQ ID NO: 2953788 - RNA, 19 nt, Artificial Sequence
  Description of Artificial Sequence: Synthetic oligonucleotide
ugaggaggcugccccgaag

SEQ ID NO: 2953789 - RNA, 19 nt, Artificial Sequence
  Description of Artificial Sequence: Synthetic oligonucleotide
guugcaugacaccccaguc

SEQ ID NO: 2953790 - RNA, 19 nt, Artificial Sequence
  Description of Artificial Sequence: Synthetic oligonucleotide
gcagaguugcaugacaccc

SEQ ID NO: 2953791 - RNA, 19 nt, Artificial Sequence
  Description of Artificial Sequence: Synthetic oligonucleotide
uagcgacugcucucggagg

SEQ ID NO: 2953792 - RNA, 19 nt, Artificial Sequence
  Description of Artificial Sequence: Synthetic oligonucleotide
auucuccugccuuauugau

SEQ ID NO: 2953793 - RNA, 19 nt, Artificial Sequence
  Description of Artificial Sequence: Synthetic oligonucleotide
guuuucuauccugagucuc

SEQ ID NO: 2953794 - RNA, 19 nt, Artificial Sequence
  Description of Artificial Sequence: Synthetic oligonucleotide
uccugccuuauugaucuug

SEQ ID NO: 2953795 - RNA, 19 nt, Artificial Sequence
  Description of Artificial Sequence: Synthetic oligonucleotide
auuaauucuccugccuuau

SEQ ID NO: 2953796 - RNA, 19 nt, Artificial Sequence
  Description of Artificial Sequence: Synthetic oligonucleotide
agcgacugcucucggaggu

SEQ ID NO: 2953797 - RNA, 19 nt, Artificial Sequence
  Description of Artificial Sequence: Synthetic oligonucleotide
gucuuugccggcagugugg

SEQ ID NO: 2953798 - RNA, 19 nt, Artificial Sequence
  Description of Artificial Sequence: Synthetic oligonucleotide
uucuggcgcagccucuccc

SEQ ID NO: 2953799 - RNA, 19 nt, Artificial Sequence
  Description of Artificial Sequence: Synthetic oligonucleotide
gauucauguuuucuauccu

SEQ ID NO: 2953800 - RNA, 19 nt, Artificial Sequence
  Description of Artificial Sequence: Synthetic oligonucleotide
auccugagucucuggagcu

SEQ ID NO: 2953801 - RNA, 19 nt, Artificial Sequence
  Description of Artificial Sequence: Synthetic oligonucleotide
gaccuguagccuucccucc

SEQ ID NO: 2953802 - RNA, 19 nt, Artificial Sequence
  Description of Artificial Sequence: Synthetic oligonucleotide
caguaauacaugaggugga

SEQ ID NO: 2953803 - RNA, 19 nt, Artificial Sequence
  Description of Artificial Sequence: Synthetic oligonucleotide
augucucgaauuuucugua

SEQ ID NO: 2953804 - RNA, 19 nt, Artificial Sequence
  Description of Artificial Sequence: Synthetic oligonucleotide
aggaggcugccccgaagac

SEQ ID NO: 2953805 - RNA, 19 nt, Artificial Sequence
  Description of Artificial Sequence: Synthetic oligonucleotide
gaggaggcugccccgaaga

SEQ ID NO: 2953806 - RNA, 19 nt, Artificial Sequence
  Description of Artificial Sequence: Synthetic oligonucleotide
gauagcgacugcucucgga

SEQ ID NO: 2953807 - RNA, 19 nt, Artificial Sequence
  Description of Artificial Sequence: Synthetic oligonucleotide
uccuaaggaacggucugga

SEQ ID NO: 2953808 - RNA, 19 nt, Artificial Sequence
  Description of Artificial Sequence: Synthetic oligonucleotide
uugcagccaguaauacaug

SEQ ID NO: 2953809 - RNA, 19 nt, Artificial Sequence
  Description of Artificial Sequence: Synthetic oligonucleotide
cuccuaaggaacggucugg

SEQ ID NO: 2953810 - RNA, 19 nt, Artificial Sequence
  Description of Artificial Sequence: Synthetic oligonucleotide
uuaauucuccugccuuauu

SEQ ID NO: 2953811 - RNA, 19 nt, Artificial Sequence
  Description of Artificial Sequence: Synthetic oligonucleotide
ggcuccaauuaauugagaa

SEQ ID NO: 2953812 - RNA, 19 nt, Artificial Sequence
  Description of Artificial Sequence: Synthetic oligonucleotide
gaacugauagcgacugcuc

SEQ ID NO: 2953813 - RNA, 19 nt, Artificial Sequence
  Description of Artificial Sequence: Synthetic oligonucleotide
uuucuggcgcagccucucc

SEQ ID NO: 2953814 - RNA, 19 nt, Artificial Sequence
  Description of Artificial Sequence: Synthetic oligonucleotide
guggcagcucucugcagag

SEQ ID NO: 2953815 - RNA, 19 nt, Artificial Sequence
  Description of Artificial Sequence: Synthetic oligonucleotide
aguccauagucacccuccu

SEQ ID NO: 2953816 - RNA, 19 nt, Artificial Sequence
  Description of Artificial Sequence: Synthetic oligonucleotide
ucccuccuaaggaacgguc

SEQ ID NO: 2953817 - RNA, 19 nt, Artificial Sequence
  Description of Artificial Sequence: Synthetic oligonucleotide
guauuaauucuccugccuu

SEQ ID NO: 2953818 - RNA, 19 nt, Artificial Sequence
  Description of Artificial Sequence: Synthetic oligonucleotide
cagcucucugcagaguugc

SEQ ID NO: 2953819 - RNA, 19 nt, Artificial Sequence
  Description of Artificial Sequence: Synthetic oligonucleotide
cuucccuccuaaggaacgg

SEQ ID NO: 2953820 - RNA, 19 nt, Artificial Sequence
  Description of Artificial Sequence: Synthetic oligonucleotide
gaagaccuguagccuuccc

SEQ ID NO: 2953821 - RNA, 19 nt, Artificial Sequence
  Description of Artificial Sequence: Synthetic oligonucleotide
cucgaauuuucuguaggca

SEQ ID NO: 2953822 - RNA, 19 nt, Artificial Sequence
  Description of Artificial Sequence: Synthetic oligonucleotide
uucuuuucuggcgcagccu

SEQ ID NO: 2953823 - RNA, 19 nt, Artificial Sequence
  Description of Artificial Sequence: Synthetic oligonucleotide
cuggaaaggcuccaauuaa

SEQ ID NO: 2953824 - RNA, 19 nt, Artificial Sequence
  Description of Artificial Sequence: Synthetic oligonucleotide
aucaugucucgaauuuucu

SEQ ID NO: 2953825 - RNA, 19 nt, Artificial Sequence
  Description of Artificial Sequence: Synthetic oligonucleotide
ugagucucuggagcugggc

SEQ ID NO: 2953826 - RNA, 19 nt, Artificial Sequence
  Description of Artificial Sequence: Synthetic oligonucleotide
gccccgaagaccuguagcc

SEQ ID NO: 2953827 - RNA, 19 nt, Artificial Sequence
  Description of Artificial Sequence: Synthetic oligonucleotide
uuuucuggcgcagccucuc

SEQ ID NO: 2953828 - RNA, 19 nt, Artificial Sequence
  Description of Artificial Sequence: Synthetic oligonucleotide
cauagucacccuccugcuc

SEQ ID NO: 2953829 - RNA, 19 nt, Artificial Sequence
  Description of Artificial Sequence: Synthetic oligonucleotide
cauguuuucuauccugagu

SEQ ID NO: 2953830 - RNA, 19 nt, Artificial Sequence
  Description of Artificial Sequence: Synthetic oligonucleotide
gcuccaauuaauugagaaa

SEQ ID NO: 2953831 - RNA, 19 nt, Artificial Sequence
  Description of Artificial Sequence: Synthetic oligonucleotide
gacaacugaggaggcugcc

SEQ ID NO: 2953832 - RNA, 19 nt, Artificial Sequence
  Description of Artificial Sequence: Synthetic oligonucleotide
ccuucccuccuaaggaacg

SEQ ID NO: 2953833 - RNA, 19 nt, Artificial Sequence
  Description of Artificial Sequence: Synthetic oligonucleotide
ggaggugaguauuaauucu

SEQ ID NO: 2953834 - RNA, 19 nt, Artificial Sequence
  Description of Artificial Sequence: Synthetic oligonucleotide
accuguagccuucccuccu

SEQ ID NO: 2953835 - RNA, 19 nt, Artificial Sequence
  Description of Artificial Sequence: Synthetic oligonucleotide
gaggcugccccgaagaccu

SEQ ID NO: 2953836 - RNA, 19 nt, Artificial Sequence
  Description of Artificial Sequence: Synthetic oligonucleotide
agccuucccuccuaaggaa

SEQ ID NO: 2953837 - RNA, 19 nt, Artificial Sequence
  Description of Artificial Sequence: Synthetic oligonucleotide
cugagucucuggagcuggg

SEQ ID NO: 2953838 - RNA, 19 nt, Artificial Sequence
  Description of Artificial Sequence: Synthetic oligonucleotide
uucaguccauagucacccu

SEQ ID NO: 2953839 - RNA, 19 nt, Artificial Sequence
  Description of Artificial Sequence: Synthetic oligonucleotide
uugccggcaguguggggug

SEQ ID NO: 2953840 - RNA, 19 nt, Artificial Sequence
  Description of Artificial Sequence: Synthetic oligonucleotide
gccuuauugaucuuguuuu

SEQ ID NO: 2953841 - RNA, 19 nt, Artificial Sequence
  Description of Artificial Sequence: Synthetic oligonucleotide
gagaaaaguuuccccuggu

SEQ ID NO: 2953842 - RNA, 19 nt, Artificial Sequence
  Description of Artificial Sequence: Synthetic oligonucleotide
gcagccaguaauacaugag

SEQ ID NO: 2953843 - RNA, 19 nt, Artificial Sequence
  Description of Artificial Sequence: Synthetic oligonucleotide
ucucccgauucauguuuuc

SEQ ID NO: 2953844 - RNA, 19 nt, Artificial Sequence
  Description of Artificial Sequence: Synthetic oligonucleotide
guccauagucacccuccug

SEQ ID NO: 2953845 - RNA, 19 nt, Artificial Sequence
  Description of Artificial Sequence: Synthetic oligonucleotide
caguguggggugacuucag

SEQ ID NO: 2953846 - RNA, 19 nt, Artificial Sequence
  Description of Artificial Sequence: Synthetic oligonucleotide
ucucggaggugaguauuaa

SEQ ID NO: 2953847 - RNA, 19 nt, Artificial Sequence
  Description of Artificial Sequence: Synthetic oligonucleotide
auuccgccagauuccggaa

SEQ ID NO: 2953848 - RNA, 19 nt, Artificial Sequence
  Description of Artificial Sequence: Synthetic oligonucleotide
ggcauuccgccagauuccg

SEQ ID NO: 2953849 - RNA, 19 nt, Artificial Sequence
  Description of Artificial Sequence: Synthetic oligonucleotide
ggugacuucaguccauagu

SEQ ID NO: 2953850 - RNA, 19 nt, Artificial Sequence
  Description of Artificial Sequence: Synthetic oligonucleotide
uucccuccuaaggaacggu

SEQ ID NO: 2953851 - RNA, 19 nt, Artificial Sequence
  Description of Artificial Sequence: Synthetic oligonucleotide
uggggugacuucaguccau

SEQ ID NO: 2953852 - RNA, 19 nt, Artificial Sequence
  Description of Artificial Sequence: Synthetic oligonucleotide
ggaacugauagcgacugcu

SEQ ID NO: 2953853 - RNA, 19 nt, Artificial Sequence
  Description of Artificial Sequence: Synthetic oligonucleotide
ucacccuccugcucgucuu

SEQ ID NO: 2953854 - RNA, 19 nt, Artificial Sequence
  Description of Artificial Sequence: Synthetic oligonucleotide
cggaggugaguauuaauuc

SEQ ID NO: 2953855 - RNA, 19 nt, Artificial Sequence
  Description of Artificial Sequence: Synthetic oligonucleotide
ugcucucggaggugaguau

SEQ ID NO: 2953856 - RNA, 19 nt, Artificial Sequence
  Description of Artificial Sequence: Synthetic oligonucleotide
cuuugccggcagugugggg

SEQ ID NO: 2953857 - RNA, 19 nt, Artificial Sequence
  Description of Artificial Sequence: Synthetic oligonucleotide
cucugcagaguugcaugac

SEQ ID NO: 2953858 - RNA, 19 nt, Artificial Sequence
  Description of Artificial Sequence: Synthetic oligonucleotide
uggcuccuuggggaccugg

SEQ ID NO: 2953859 - RNA, 19 nt, Artificial Sequence
  Description of Artificial Sequence: Synthetic oligonucleotide
auuccggaacugauagcga

SEQ ID NO: 2953860 - RNA, 19 nt, Artificial Sequence
  Description of Artificial Sequence: Synthetic oligonucleotide
ccuccuaaggaacggucug

SEQ ID NO: 2953861 - RNA, 19 nt, Artificial Sequence
  Description of Artificial Sequence: Synthetic oligonucleotide
uguaggcauuccgccagau

SEQ ID NO: 2953862 - RNA, 19 nt, Artificial Sequence
  Description of Artificial Sequence: Synthetic oligonucleotide
ccugagucucuggagcugg

SEQ ID NO: 2953863 - RNA, 19 nt, Artificial Sequence
  Description of Artificial Sequence: Synthetic oligonucleotide
uagucacccuccugcucgu

SEQ ID NO: 2953864 - RNA, 19 nt, Artificial Sequence
  Description of Artificial Sequence: Synthetic oligonucleotide
ggugaguauuaauucuccu

SEQ ID NO: 2953865 - RNA, 19 nt, Artificial Sequence
  Description of Artificial Sequence: Synthetic oligonucleotide
cagccucucccgauucaug

SEQ ID NO: 2953866 - RNA, 19 nt, Artificial Sequence
  Description of Artificial Sequence: Synthetic oligonucleotide
acugaggaggcugccccga

SEQ ID NO: 2953867 - RNA, 19 nt, Artificial Sequence
  Description of Artificial Sequence: Synthetic oligonucleotide
gggugacuucaguccauag

SEQ ID NO: 2953868 - RNA, 19 nt, Artificial Sequence
  Description of Artificial Sequence: Synthetic oligonucleotide
aguuuccccugguguggca

SEQ ID NO: 2953869 - RNA, 19 nt, Artificial Sequence
  Description of Artificial Sequence: Synthetic oligonucleotide
gaguugcaugacaccccag

SEQ ID NO: 2953870 - RNA, 19 nt, Artificial Sequence
  Description of Artificial Sequence: Synthetic oligonucleotide
gcaaucaugucucgaauuu

SEQ ID NO: 2953871 - RNA, 19 nt, Artificial Sequence
  Description of Artificial Sequence: Synthetic oligonucleotide
ggaggcugccccgaagacc

SEQ ID NO: 2953872 - RNA, 19 nt, Artificial Sequence
  Description of Artificial Sequence: Synthetic oligonucleotide
acugcucucggaggugagu

SEQ ID NO: 2953873 - RNA, 19 nt, Artificial Sequence
  Description of Artificial Sequence: Synthetic oligonucleotide
ggccucugcaaucaugucu

SEQ ID NO: 2953874 - RNA, 19 nt, Artificial Sequence
  Description of Artificial Sequence: Synthetic oligonucleotide
gaaguuuauugcagccagu

SEQ ID NO: 2953875 - RNA, 19 nt, Artificial Sequence
  Description of Artificial Sequence: Synthetic oligonucleotide
ggacaacugaggaggcugc

SEQ ID NO: 2953876 - RNA, 19 nt, Artificial Sequence
  Description of Artificial Sequence: Synthetic oligonucleotide
gggcgucuucuuugguugg

SEQ ID NO: 2953877 - RNA, 19 nt, Artificial Sequence
  Description of Artificial Sequence: Synthetic oligonucleotide
caccccagucuuugccggc

SEQ ID NO: 2953878 - RNA, 19 nt, Artificial Sequence
  Description of Artificial Sequence: Synthetic oligonucleotide
ccgauucauguuuucuauc

SEQ ID NO: 2953879 - RNA, 19 nt, Artificial Sequence
  Description of Artificial Sequence: Synthetic oligonucleotide
gacugcucucggaggugag

SEQ ID NO: 2953880 - RNA, 19 nt, Artificial Sequence
  Description of Artificial Sequence: Synthetic oligonucleotide
cucgucuuuauggaagagu

SEQ ID NO: 2953881 - RNA, 19 nt, Artificial Sequence
  Description of Artificial Sequence: Synthetic oligonucleotide
cugccccgaagaccuguag

SEQ ID NO: 2953882 - RNA, 19 nt, Artificial Sequence
  Description of Artificial Sequence: Synthetic oligonucleotide
uggccucugcaaucauguc

SEQ ID NO: 2953883 - RNA, 19 nt, Artificial Sequence
  Description of Artificial Sequence: Synthetic oligonucleotide
cucucggaggugaguauua

SEQ ID NO: 2953884 - RNA, 19 nt, Artificial Sequence
  Description of Artificial Sequence: Synthetic oligonucleotide
uggagcugggcgucuucuu

SEQ ID NO: 2953885 - RNA, 19 nt, Artificial Sequence
  Description of Artificial Sequence: Synthetic oligonucleotide
ggcaguguggggugacuuc

SEQ ID NO: 2953886 - RNA, 19 nt, Artificial Sequence
  Description of Artificial Sequence: Synthetic oligonucleotide
accuggcuggccucugcaa

SEQ ID NO: 2953887 - RNA, 19 nt, Artificial Sequence
  Description of Artificial Sequence: Synthetic oligonucleotide
cucugcaaucaugucucga

SEQ ID NO: 2953888 - RNA, 19 nt, Artificial Sequence
  Description of Artificial Sequence: Synthetic oligonucleotide
gucucuggagcugggcguc

SEQ ID NO: 2953889 - RNA, 19 nt, Artificial Sequence
  Description of Artificial Sequence: Synthetic oligonucleotide
gcaguguggggugacuuca

SEQ ID NO: 2953890 - RNA, 19 nt, Artificial Sequence
  Description of Artificial Sequence: Synthetic oligonucleotide
acggucuggaaaggcucca

SEQ ID NO: 2953891 - RNA, 19 nt, Artificial Sequence
  Description of Artificial Sequence: Synthetic oligonucleotide
accccagucuuugccggca

SEQ ID NO: 2953892 - RNA, 19 nt, Artificial Sequence
  Description of Artificial Sequence: Synthetic oligonucleotide
ucucuggagcugggcgucu

SEQ ID NO: 2953893 - RNA, 19 nt, Artificial Sequence
  Description of Artificial Sequence: Synthetic oligonucleotide
ggaacggucuggaaaggcu

SEQ ID NO: 2953894 - RNA, 19 nt, Artificial Sequence
  Description of Artificial Sequence: Synthetic oligonucleotide
ccgaagaccuguagccuuc

SEQ ID NO: 2953895 - RNA, 19 nt, Artificial Sequence
  Description of Artificial Sequence: Synthetic oligonucleotide
ccucugcaaucaugucucg

SEQ ID NO: 2953896 - RNA, 19 nt, Artificial Sequence
  Description of Artificial Sequence: Synthetic oligonucleotide
ccuuauugaucuuguuuua

SEQ ID NO: 2953897 - RNA, 19 nt, Artificial Sequence
  Description of Artificial Sequence: Synthetic oligonucleotide
cuuuucuggcgcagccucu

SEQ ID NO: 2953898 - RNA, 19 nt, Artificial Sequence
  Description of Artificial Sequence: Synthetic oligonucleotide
gcucgucuuuauggaagag

SEQ ID NO: 2953899 - RNA, 19 nt, Artificial Sequence
  Description of Artificial Sequence: Synthetic oligonucleotide
ccuccugcucgucuuuaug

SEQ ID NO: 2953900 - RNA, 19 nt, Artificial Sequence
  Description of Artificial Sequence: Synthetic oligonucleotide
cugcucucggaggugagua

SEQ ID NO: 2953901 - RNA, 19 nt, Artificial Sequence
  Description of Artificial Sequence: Synthetic oligonucleotide
gucacccuccugcucgucu

SEQ ID NO: 2953902 - RNA, 19 nt, Artificial Sequence
  Description of Artificial Sequence: Synthetic oligonucleotide
uggcgcagccucucccgau

SEQ ID NO: 2953903 - RNA, 19 nt, Artificial Sequence
  Description of Artificial Sequence: Synthetic oligonucleotide
cugcaaucaugucucgaau

SEQ ID NO: 2953904 - RNA, 19 nt, Artificial Sequence
  Description of Artificial Sequence: Synthetic oligonucleotide
aggcuccaauuaauugaga

SEQ ID NO: 2953905 - RNA, 19 nt, Artificial Sequence
  Description of Artificial Sequence: Synthetic oligonucleotide
gcagcucucugcagaguug

SEQ ID NO: 2953906 - RNA, 19 nt, Artificial Sequence
  Description of Artificial Sequence: Synthetic oligonucleotide
gguuggcuccuuggggacc

SEQ ID NO: 2953907 - RNA, 19 nt, Artificial Sequence
  Description of Artificial Sequence: Synthetic oligonucleotide
ccagauuccggaacugaua

SEQ ID NO: 2953908 - RNA, 19 nt, Artificial Sequence
  Description of Artificial Sequence: Synthetic oligonucleotide
uggcagcucucugcagagu

SEQ ID NO: 2953909 - RNA, 19 nt, Artificial Sequence
  Description of Artificial Sequence: Synthetic oligonucleotide
cuguaggcauuccgccaga

SEQ ID NO: 2953910 - RNA, 19 nt, Artificial Sequence
  Description of Artificial Sequence: Synthetic oligonucleotide
guuggcuccuuggggaccu

SEQ ID NO: 2953911 - RNA, 19 nt, Artificial Sequence
  Description of Artificial Sequence: Synthetic oligonucleotide
ggaccuggcuggccucugc

SEQ ID NO: 2953912 - RNA, 19 nt, Artificial Sequence
  Description of Artificial Sequence: Synthetic oligonucleotide
cucggaggugaguauuaau

SEQ ID NO: 2953913 - RNA, 19 nt, Artificial Sequence
  Description of Artificial Sequence: Synthetic oligonucleotide
cugggcgucuucuuugguu

SEQ ID NO: 2953914 - RNA, 19 nt, Artificial Sequence
  Description of Artificial Sequence: Synthetic oligonucleotide
cucccgauucauguuuucu

SEQ ID NO: 2953915 - RNA, 19 nt, Artificial Sequence
  Description of Artificial Sequence: Synthetic oligonucleotide
cuguagccuucccuccuaa

SEQ ID NO: 2953916 - RNA, 19 nt, Artificial Sequence
  Description of Artificial Sequence: Synthetic oligonucleotide
ggcuccuuggggaccuggc

SEQ ID NO: 2953917 - RNA, 19 nt, Artificial Sequence
  Description of Artificial Sequence: Synthetic oligonucleotide
gccuucccuccuaaggaac

SEQ ID NO: 2953918 - RNA, 19 nt, Artificial Sequence
  Description of Artificial Sequence: Synthetic oligonucleotide
caaucaugucucgaauuuu

SEQ ID NO: 2953919 - RNA, 19 nt, Artificial Sequence
  Description of Artificial Sequence: Synthetic oligonucleotide
gcauuccgccagauuccgg

SEQ ID NO: 2953920 - RNA, 19 nt, Artificial Sequence
  Description of Artificial Sequence: Synthetic oligonucleotide
guaggcauuccgccagauu

SEQ ID NO: 2953921 - RNA, 19 nt, Artificial Sequence
  Description of Artificial Sequence: Synthetic oligonucleotide
ccugcucgucuuuauggaa

SEQ ID NO: 2953922 - RNA, 19 nt, Artificial Sequence
  Description of Artificial Sequence: Synthetic oligonucleotide
ccugccuuauugaucuugu

SEQ ID NO: 2953923 - RNA, 19 nt, Artificial Sequence
  Description of Artificial Sequence: Synthetic oligonucleotide
cuggcgcagccucucccga

SEQ ID NO: 2953924 - RNA, 19 nt, Artificial Sequence
  Description of Artificial Sequence: Synthetic oligonucleotide
cccgauucauguuuucuau

SEQ ID NO: 2953925 - RNA, 19 nt, Artificial Sequence
  Description of Artificial Sequence: Synthetic oligonucleotide
ccuaaggaacggucuggaa

SEQ ID NO: 2953926 - RNA, 19 nt, Artificial Sequence
  Description of Artificial Sequence: Synthetic oligonucleotide
cucucccgauucauguuuu

SEQ ID NO: 2953927 - RNA, 19 nt, Artificial Sequence
  Description of Artificial Sequence: Synthetic oligonucleotide
ggagcugggcgucuucuuu

SEQ ID NO: 2953928 - RNA, 19 nt, Artificial Sequence
  Description of Artificial Sequence: Synthetic oligonucleotide
cagucuuugccggcagugu

SEQ ID NO: 2953929 - RNA, 19 nt, Artificial Sequence
  Description of Artificial Sequence: Synthetic oligonucleotide
cugaggaggcugccccgaa

SEQ ID NO: 2953930 - RNA, 19 nt, Artificial Sequence
  Description of Artificial Sequence: Synthetic oligonucleotide
cccuccuaaggaacggucu

SEQ ID NO: 2953931 - RNA, 19 nt, Artificial Sequence
  Description of Artificial Sequence: Synthetic oligonucleotide
cggaacugauagcgacugc

SEQ ID NO: 2953932 - RNA, 19 nt, Artificial Sequence
  Description of Artificial Sequence: Synthetic oligonucleotide
gcgacugcucucggaggug

SEQ ID NO: 2953933 - RNA, 19 nt, Artificial Sequence
  Description of Artificial Sequence: Synthetic oligonucleotide
cgaauuuucuguaggcauu

SEQ ID NO: 2953934 - RNA, 19 nt, Artificial Sequence
  Description of Artificial Sequence: Synthetic oligonucleotide
cgaagaccuguagccuucc

SEQ ID NO: 2953935 - RNA, 19 nt, Artificial Sequence
  Description of Artificial Sequence: Synthetic oligonucleotide
acccuccugcucgucuuua

SEQ ID NO: 2953936 - RNA, 19 nt, Artificial Sequence
  Description of Artificial Sequence: Synthetic oligonucleotide
ccccagucuuugccggcag

SEQ ID NO: 2953937 - RNA, 19 nt, Artificial Sequence
  Description of Artificial Sequence: Synthetic oligonucleotide
cugccuuauugaucuuguu

SEQ ID NO: 2953938 - RNA, 19 nt, Artificial Sequence
  Description of Artificial Sequence: Synthetic oligonucleotide
gccagauuccggaacugau

SEQ ID NO: 2953939 - RNA, 19 nt, Artificial Sequence
  Description of Artificial Sequence: Synthetic oligonucleotide
ggggugacuucaguccaua

SEQ ID NO: 2953940 - RNA, 19 nt, Artificial Sequence
  Description of Artificial Sequence: Synthetic oligonucleotide
gcucucugcagaguugcau

SEQ ID NO: 2953941 - RNA, 19 nt, Artificial Sequence
  Description of Artificial Sequence: Synthetic oligonucleotide
ccucucccgauucauguuu

SEQ ID NO: 2953942 - RNA, 19 nt, Artificial Sequence
  Description of Artificial Sequence: Synthetic oligonucleotide
ccuguagccuucccuccua

SEQ ID NO: 2953943 - RNA, 19 nt, Artificial Sequence
  Description of Artificial Sequence: Synthetic oligonucleotide
gggaccuggcuggccucug

SEQ ID NO: 2953944 - RNA, 19 nt, Artificial Sequence
  Description of Artificial Sequence: Synthetic oligonucleotide
ccugguguggcagcucucu

SEQ ID NO: 2953945 - RNA, 19 nt, Artificial Sequence
  Description of Artificial Sequence: Synthetic oligonucleotide
cccgaagaccuguagccuu

SEQ ID NO: 2953946 - RNA, 19 nt, Artificial Sequence
  Description of Artificial Sequence: Synthetic oligonucleotide
gcucucggaggugaguauu

SEQ ID NO: 2953947 - RNA, 19 nt, Artificial Sequence
  Description of Artificial Sequence: Synthetic oligonucleotide
ccuggcuggccucugcaau

SEQ ID NO: 2953948 - RNA, 19 nt, Artificial Sequence
  Description of Artificial Sequence: Synthetic oligonucleotide
gcagccucucccgauucau

SEQ ID NO: 2953949 - RNA, 19 nt, Artificial Sequence
  Description of Artificial Sequence: Synthetic oligonucleotide
aggcugccccgaagaccug

SEQ ID NO: 2953950 - RNA, 19 nt, Artificial Sequence
  Description of Artificial Sequence: Synthetic oligonucleotide
gccggcaguguggggugac

SEQ ID NO: 2953951 - RNA, 19 nt, Artificial Sequence
  Description of Artificial Sequence: Synthetic oligonucleotide
cgacugcucucggagguga

SEQ ID NO: 2953952 - RNA, 19 nt, Artificial Sequence
  Description of Artificial Sequence: Synthetic oligonucleotide
gcugggcgucuucuuuggu

SEQ ID NO: 2953953 - RNA, 19 nt, Artificial Sequence
  Description of Artificial Sequence: Synthetic oligonucleotide
gccucucccgauucauguu

SEQ ID NO: 2953954 - RNA, 19 nt, Artificial Sequence
  Description of Artificial Sequence: Synthetic oligonucleotide
cgccagauuccggaacuga

SEQ ID NO: 2953955 - RNA, 19 nt, Artificial Sequence
  Description of Artificial Sequence: Synthetic oligonucleotide
ggcugccccgaagaccugu

SEQ ID NO: 2953956 - RNA, 19 nt, Artificial Sequence
  Description of Artificial Sequence: Synthetic oligonucleotide
gcugccccgaagaccugua

SEQ ID NO: 2953957 - RNA, 19 nt, Artificial Sequence
  Description of Artificial Sequence: Synthetic oligonucleotide
cacccuccugcucgucuuu

SEQ ID NO: 2953958 - RNA, 19 nt, Artificial Sequence
  Description of Artificial Sequence: Synthetic oligonucleotide
ggggaccuggcuggccucu

SEQ ID NO: 2953959 - RNA, 19 nt, Artificial Sequence
  Description of Artificial Sequence: Synthetic oligonucleotide
ccccgaagaccuguagccu

SEQ ID NO: 2953960 - RNA, 19 nt, Artificial Sequence
  Description of Artificial Sequence: Synthetic oligonucleotide
cucuggagcugggcgucuu

SEQ ID NO: 2953961 - RNA, 19 nt, Artificial Sequence
  Description of Artificial Sequence: Synthetic oligonucleotide
cuccugccuuauugaucuu

SEQ ID NO: 2953962 - RNA, 19 nt, Artificial Sequence
  Description of Artificial Sequence: Synthetic oligonucleotide
cccagucuuugccggcagu

SEQ ID NO: 2953963 - RNA, 19 nt, Artificial Sequence
  Description of Artificial Sequence: Synthetic oligonucleotide
ggcuggccucugcaaucau

SEQ ID NO: 2953964 - RNA, 19 nt, Artificial Sequence
  Description of Artificial Sequence: Synthetic oligonucleotide
cccuccugcucgucuuuau

SEQ ID NO: 2953965 - RNA, 19 nt, Artificial Sequence
  Description of Artificial Sequence: Synthetic oligonucleotide
ccggcaguguggggugacu

SEQ ID NO: 2953966 - RNA, 19 nt, Artificial Sequence
  Description of Artificial Sequence: Synthetic oligonucleotide
cggcaguguggggugacuu

SEQ ID NO: 2953967 - RNA, 19 nt, Artificial Sequence
  Description of Artificial Sequence: Synthetic oligonucleotide
ucugagaugaauuucuggg

SEQ ID NO: 2953968 - RNA, 19 nt, Artificial Sequence
  Description of Artificial Sequence: Synthetic oligonucleotide
aaaggacaaauacaucugg

SEQ ID NO: 2953969 - RNA, 19 nt, Artificial Sequence
  Description of Artificial Sequence: Synthetic oligonucleotide
uguguaauccuccagcugc

SEQ ID NO: 2953970 - RNA, 19 nt, Artificial Sequence
  Description of Artificial Sequence: Synthetic oligonucleotide
aaucguagguguguaaucc

SEQ ID NO: 2953971 - RNA, 19 nt, Artificial Sequence
  Description of Artificial Sequence: Synthetic oligonucleotide
aaauacaucuggguuaggg

SEQ ID NO: 2953972 - RNA, 19 nt, Artificial Sequence
  Description of Artificial Sequence: Synthetic oligonucleotide
ucagguaauaaccagucac

SEQ ID NO: 2953973 - RNA, 19 nt, Artificial Sequence
  Description of Artificial Sequence: Synthetic oligonucleotide
aauaucugagaugaauuuc

SEQ ID NO: 2953974 - RNA, 19 nt, Artificial Sequence
  Description of Artificial Sequence: Synthetic oligonucleotide
uuaugcgugggucugaagc

SEQ ID NO: 2953975 - RNA, 19 nt, Artificial Sequence
  Description of Artificial Sequence: Synthetic oligonucleotide
uacauugauaccauauuca

SEQ ID NO: 2953976 - RNA, 19 nt, Artificial Sequence
  Description of Artificial Sequence: Synthetic oligonucleotide
auaccauauucacugaggg

SEQ ID NO: 2953977 - RNA, 19 nt, Artificial Sequence
  Description of Artificial Sequence: Synthetic oligonucleotide
caagaaguccaccagaggc

SEQ ID NO: 2953978 - RNA, 19 nt, Artificial Sequence
  Description of Artificial Sequence: Synthetic oligonucleotide
augguuaggguguacuugc

SEQ ID NO: 2953979 - RNA, 19 nt, Artificial Sequence
  Description of Artificial Sequence: Synthetic oligonucleotide
ugaauuucugggcagcaag

SEQ ID NO: 2953980 - RNA, 19 nt, Artificial Sequence
  Description of Artificial Sequence: Synthetic oligonucleotide
aauaaccagucacugcauc

SEQ ID NO: 2953981 - RNA, 19 nt, Artificial Sequence
  Description of Artificial Sequence: Synthetic oligonucleotide
aagcuucaaagccagcacg

SEQ ID NO: 2953982 - RNA, 19 nt, Artificial Sequence
  Description of Artificial Sequence: Synthetic oligonucleotide
ugagaugaauuucugggca

SEQ ID NO: 2953983 - RNA, 19 nt, Artificial Sequence
  Description of Artificial Sequence: Synthetic oligonucleotide
aauacaucuggguuagggu

SEQ ID NO: 2953984 - RNA, 19 nt, Artificial Sequence
  Description of Artificial Sequence: Synthetic oligonucleotide
agguguguaauccuccagc

SEQ ID NO: 2953985 - RNA, 19 nt, Artificial Sequence
  Description of Artificial Sequence: Synthetic oligonucleotide
guaauaaccagucacugca

SEQ ID NO: 2953986 - RNA, 19 nt, Artificial Sequence
  Description of Artificial Sequence: Synthetic oligonucleotide
uuucugggcagcaagugag

SEQ ID NO: 2953987 - RNA, 19 nt, Artificial Sequence
  Description of Artificial Sequence: Synthetic oligonucleotide
ucugaagcuucaaagccag

SEQ ID NO: 2953988 - RNA, 19 nt, Artificial Sequence
  Description of Artificial Sequence: Synthetic oligonucleotide
uucacuucuccguuggccg

SEQ ID NO: 2953989 - RNA, 19 nt, Artificial Sequence
  Description of Artificial Sequence: Synthetic oligonucleotide
cacgguucagguaauaacc

SEQ ID NO: 2953990 - RNA, 19 nt, Artificial Sequence
  Description of Artificial Sequence: Synthetic oligonucleotide
uucuucuacauugauacca

SEQ ID NO: 2953991 - RNA, 19 nt, Artificial Sequence
  Description of Artificial Sequence: Synthetic oligonucleotide
agucacugcaucuggaauc

SEQ ID NO: 2953992 - RNA, 19 nt, Artificial Sequence
  Description of Artificial Sequence: Synthetic oligonucleotide
gauaccauauucacugagg

SEQ ID NO: 2953993 - RNA, 19 nt, Artificial Sequence
  Description of Artificial Sequence: Synthetic oligonucleotide
uuugcagugcuguagggca

SEQ ID NO: 2953994 - RNA, 19 nt, Artificial Sequence
  Description of Artificial Sequence: Synthetic oligonucleotide
agaugagccgaauuaugcg

SEQ ID NO: 2953995 - RNA, 19 nt, Artificial Sequence
  Description of Artificial Sequence: Synthetic oligonucleotide
gcuucuucuacauugauac

SEQ ID NO: 2953996 - RNA, 19 nt, Artificial Sequence
  Description of Artificial Sequence: Synthetic oligonucleotide
accauauucacugagggca

SEQ ID NO: 2953997 - RNA, 19 nt, Artificial Sequence
  Description of Artificial Sequence: Synthetic oligonucleotide
aaguccuccaugguuaggg

SEQ ID NO: 2953998 - RNA, 19 nt, Artificial Sequence
  Description of Artificial Sequence: Synthetic oligonucleotide
ugggucugaagcuucaaag

SEQ ID NO: 2953999 - RNA, 19 nt, Artificial Sequence
  Description of Artificial Sequence: Synthetic oligonucleotide
ugauaccauauucacugag

SEQ ID NO: 2954000 - RNA, 19 nt, Artificial Sequence
  Description of Artificial Sequence: Synthetic oligonucleotide
ugcggcuucuucuacauug

SEQ ID NO: 2954001 - RNA, 19 nt, Artificial Sequence
  Description of Artificial Sequence: Synthetic oligonucleotide
uaggguugggcucagguga

SEQ ID NO: 2954002 - RNA, 19 nt, Artificial Sequence
  Description of Artificial Sequence: Synthetic oligonucleotide
uucuacauugauaccauau

SEQ ID NO: 2954003 - RNA, 19 nt, Artificial Sequence
  Description of Artificial Sequence: Synthetic oligonucleotide
uucaaagccagcacgguuc

SEQ ID NO: 2954004 - RNA, 19 nt, Artificial Sequence
  Description of Artificial Sequence: Synthetic oligonucleotide
aagaaguccaccagaggcg

SEQ ID NO: 2954005 - RNA, 19 nt, Artificial Sequence
  Description of Artificial Sequence: Synthetic oligonucleotide
ugcuguagggcaucguugg

SEQ ID NO: 2954006 - RNA, 19 nt, Artificial Sequence
  Description of Artificial Sequence: Synthetic oligonucleotide
ugcaucaagaaguccacca

SEQ ID NO: 2954007 - RNA, 19 nt, Artificial Sequence
  Description of Artificial Sequence: Synthetic oligonucleotide
cauuuugcagugcuguagg

SEQ ID NO: 2954008 - RNA, 19 nt, Artificial Sequence
  Description of Artificial Sequence: Synthetic oligonucleotide
aaggacaaauacaucuggg

SEQ ID NO: 2954009 - RNA, 19 nt, Artificial Sequence
  Description of Artificial Sequence: Synthetic oligonucleotide
ucaagaaguccaccagagg

SEQ ID NO: 2954010 - RNA, 19 nt, Artificial Sequence
  Description of Artificial Sequence: Synthetic oligonucleotide
cuacauugauaccauauuc

SEQ ID NO: 2954011 - RNA, 19 nt, Artificial Sequence
  Description of Artificial Sequence: Synthetic oligonucleotide
ugagaugagccgaauuaug

SEQ ID NO: 2954012 - RNA, 19 nt, Artificial Sequence
  Description of Artificial Sequence: Synthetic oligonucleotide
ugaagcuucaaagccagca

SEQ ID NO: 2954013 - RNA, 19 nt, Artificial Sequence
  Description of Artificial Sequence: Synthetic oligonucleotide
aaguccaccagaggcgugc

SEQ ID NO: 2954014 - RNA, 19 nt, Artificial Sequence
  Description of Artificial Sequence: Synthetic oligonucleotide
ucuacauugauaccauauu

SEQ ID NO: 2954015 - RNA, 19 nt, Artificial Sequence
  Description of Artificial Sequence: Synthetic oligonucleotide
aaguagugcggcuucuucu

SEQ ID NO: 2954016 - RNA, 19 nt, Artificial Sequence
  Description of Artificial Sequence: Synthetic oligonucleotide
aaccagucacugcaucugg

SEQ ID NO: 2954017 - RNA, 19 nt, Artificial Sequence
  Description of Artificial Sequence: Synthetic oligonucleotide
cugagaugaauuucugggc

SEQ ID NO: 2954018 - RNA, 19 nt, Artificial Sequence
  Description of Artificial Sequence: Synthetic oligonucleotide
gaaaggacaaauacaucug

SEQ ID NO: 2954019 - RNA, 19 nt, Artificial Sequence
  Description of Artificial Sequence: Synthetic oligonucleotide
ucauuuugcagugcuguag

SEQ ID NO: 2954020 - RNA, 19 nt, Artificial Sequence
  Description of Artificial Sequence: Synthetic oligonucleotide
acaaauacaucuggguuag

SEQ ID NO: 2954021 - RNA, 19 nt, Artificial Sequence
  Description of Artificial Sequence: Synthetic oligonucleotide
agugagaugagccgaauua

SEQ ID NO: 2954022 - RNA, 19 nt, Artificial Sequence
  Description of Artificial Sequence: Synthetic oligonucleotide
gacaaauacaucuggguua

SEQ ID NO: 2954023 - RNA, 19 nt, Artificial Sequence
  Description of Artificial Sequence: Synthetic oligonucleotide
aggacaaauacaucugggu

SEQ ID NO: 2954024 - RNA, 19 nt, Artificial Sequence
  Description of Artificial Sequence: Synthetic oligonucleotide
gagaugagccgaauuaugc

SEQ ID NO: 2954025 - RNA, 19 nt, Artificial Sequence
  Description of Artificial Sequence: Synthetic oligonucleotide
uacaucuggguuaggguug

SEQ ID NO: 2954026 - RNA, 19 nt, Artificial Sequence
  Description of Artificial Sequence: Synthetic oligonucleotide
uccgggagcugccagaggc

SEQ ID NO: 2954027 - RNA, 19 nt, Artificial Sequence
  Description of Artificial Sequence: Synthetic oligonucleotide
uguacccuucauuuugcag

SEQ ID NO: 2954028 - RNA, 19 nt, Artificial Sequence
  Description of Artificial Sequence: Synthetic oligonucleotide
ucuggguuaggguugggcu

SEQ ID NO: 2954029 - RNA, 19 nt, Artificial Sequence
  Description of Artificial Sequence: Synthetic oligonucleotide
gagaugaauuucugggcag

SEQ ID NO: 2954030 - RNA, 19 nt, Artificial Sequence
  Description of Artificial Sequence: Synthetic oligonucleotide
agaugaauuucugggcagc

SEQ ID NO: 2954031 - RNA, 19 nt, Artificial Sequence
  Description of Artificial Sequence: Synthetic oligonucleotide
ugcaucuggaaucguaggu

SEQ ID NO: 2954032 - RNA, 19 nt, Artificial Sequence
  Description of Artificial Sequence: Synthetic oligonucleotide
aauuucugggcagcaagug

SEQ ID NO: 2954033 - RNA, 19 nt, Artificial Sequence
  Description of Artificial Sequence: Synthetic oligonucleotide
auaaccagucacugcaucu

SEQ ID NO: 2954034 - RNA, 19 nt, Artificial Sequence
  Description of Artificial Sequence: Synthetic oligonucleotide
auaucugagaugaauuucu

SEQ ID NO: 2954035 - RNA, 19 nt, Artificial Sequence
  Description of Artificial Sequence: Synthetic oligonucleotide
uguacuugcgguccuugcu

SEQ ID NO: 2954036 - RNA, 19 nt, Artificial Sequence
  Description of Artificial Sequence: Synthetic oligonucleotide
ggaaaggacaaauacaucu

SEQ ID NO: 2954037 - RNA, 19 nt, Artificial Sequence
  Description of Artificial Sequence: Synthetic oligonucleotide
uaucugagaugaauuucug

SEQ ID NO: 2954038 - RNA, 19 nt, Artificial Sequence
  Description of Artificial Sequence: Synthetic oligonucleotide
gaagcuucaaagccagcac

SEQ ID NO: 2954039 - RNA, 19 nt, Artificial Sequence
  Description of Artificial Sequence: Synthetic oligonucleotide
gcucaggugaaguagugcg

SEQ ID NO: 2954040 - RNA, 19 nt, Artificial Sequence
  Description of Artificial Sequence: Synthetic oligonucleotide
uccaccagaggcgugcugg

SEQ ID NO: 2954041 - RNA, 19 nt, Artificial Sequence
  Description of Artificial Sequence: Synthetic oligonucleotide
ucuucuacauugauaccau

SEQ ID NO: 2954042 - RNA, 19 nt, Artificial Sequence
  Description of Artificial Sequence: Synthetic oligonucleotide
uuaggguugggcucaggug

SEQ ID NO: 2954043 - RNA, 19 nt, Artificial Sequence
  Description of Artificial Sequence: Synthetic oligonucleotide
auacaucuggguuaggguu

SEQ ID NO: 2954044 - RNA, 19 nt, Artificial Sequence
  Description of Artificial Sequence: Synthetic oligonucleotide
guuggcaauaucugagaug

SEQ ID NO: 2954045 - RNA, 19 nt, Artificial Sequence
  Description of Artificial Sequence: Synthetic oligonucleotide
agggaaaggacaaauacau

SEQ ID NO: 2954046 - RNA, 19 nt, Artificial Sequence
  Description of Artificial Sequence: Synthetic oligonucleotide
auuuugcagugcuguaggg

SEQ ID NO: 2954047 - RNA, 19 nt, Artificial Sequence
  Description of Artificial Sequence: Synthetic oligonucleotide
ugagccgaauuaugcgugg

SEQ ID NO: 2954048 - RNA, 19 nt, Artificial Sequence
  Description of Artificial Sequence: Synthetic oligonucleotide
ggucugaagcuucaaagcc

SEQ ID NO: 2954049 - RNA, 19 nt, Artificial Sequence
  Description of Artificial Sequence: Synthetic oligonucleotide
uaugcgugggucugaagcu

SEQ ID NO: 2954050 - RNA, 19 nt, Artificial Sequence
  Description of Artificial Sequence: Synthetic oligonucleotide
uaccauauucacugagggc

SEQ ID NO: 2954051 - RNA, 19 nt, Artificial Sequence
  Description of Artificial Sequence: Synthetic oligonucleotide
ucaggugaaguagugcggc

SEQ ID NO: 2954052 - RNA, 19 nt, Artificial Sequence
  Description of Artificial Sequence: Synthetic oligonucleotide
aucaagaaguccaccagag

SEQ ID NO: 2954053 - RNA, 19 nt, Artificial Sequence
  Description of Artificial Sequence: Synthetic oligonucleotide
uucagguaauaaccaguca

SEQ ID NO: 2954054 - RNA, 19 nt, Artificial Sequence
  Description of Artificial Sequence: Synthetic oligonucleotide
auuucugggcagcaaguga

SEQ ID NO: 2954055 - RNA, 19 nt, Artificial Sequence
  Description of Artificial Sequence: Synthetic oligonucleotide
uacccuucauuuugcagug

SEQ ID NO: 2954056 - RNA, 19 nt, Artificial Sequence
  Description of Artificial Sequence: Synthetic oligonucleotide
gguaauaaccagucacugc

SEQ ID NO: 2954057 - RNA, 19 nt, Artificial Sequence
  Description of Artificial Sequence: Synthetic oligonucleotide
uuuugccugucaugugggg

SEQ ID NO: 2954058 - RNA, 19 nt, Artificial Sequence
  Description of Artificial Sequence: Synthetic oligonucleotide
aucguuggcaauaucugag

SEQ ID NO: 2954059 - RNA, 19 nt, Artificial Sequence
  Description of Artificial Sequence: Synthetic oligonucleotide
cucaggugaaguagugcgg

SEQ ID NO: 2954060 - RNA, 19 nt, Artificial Sequence
  Description of Artificial Sequence: Synthetic oligonucleotide
gucacugcaucuggaaucg

SEQ ID NO: 2954061 - RNA, 19 nt, Artificial Sequence
  Description of Artificial Sequence: Synthetic oligonucleotide
cagcaagugagaugagccg

SEQ ID NO: 2954062 - RNA, 19 nt, Artificial Sequence
  Description of Artificial Sequence: Synthetic oligonucleotide
uugggcucaggugaaguag

SEQ ID NO: 2954063 - RNA, 19 nt, Artificial Sequence
  Description of Artificial Sequence: Synthetic oligonucleotide
uacaggcuucacuucuccg

SEQ ID NO: 2954064 - RNA, 19 nt, Artificial Sequence
  Description of Artificial Sequence: Synthetic oligonucleotide
uucacugagggcagggguc

SEQ ID NO: 2954065 - RNA, 19 nt, Artificial Sequence
  Description of Artificial Sequence: Synthetic oligonucleotide
gaaucguagguguguaauc

SEQ ID NO: 2954066 - RNA, 19 nt, Artificial Sequence
  Description of Artificial Sequence: Synthetic oligonucleotide
ucaaagccagcacgguuca

SEQ ID NO: 2954067 - RNA, 19 nt, Artificial Sequence
  Description of Artificial Sequence: Synthetic oligonucleotide
uagguguguaauccuccag

SEQ ID NO: 2954068 - RNA, 19 nt, Artificial Sequence
  Description of Artificial Sequence: Synthetic oligonucleotide
agcugccagaggcuguacc

SEQ ID NO: 2954069 - RNA, 19 nt, Artificial Sequence
  Description of Artificial Sequence: Synthetic oligonucleotide
uguagggcaucguuggcaa

SEQ ID NO: 2954070 - RNA, 19 nt, Artificial Sequence
  Description of Artificial Sequence: Synthetic oligonucleotide
cuugcucuugcuccgggag

SEQ ID NO: 2954071 - RNA, 19 nt, Artificial Sequence
  Description of Artificial Sequence: Synthetic oligonucleotide
uauucacugagggcagggg

SEQ ID NO: 2954072 - RNA, 19 nt, Artificial Sequence
  Description of Artificial Sequence: Synthetic oligonucleotide
ucaaguccuccaugguuag

SEQ ID NO: 2954073 - RNA, 19 nt, Artificial Sequence
  Description of Artificial Sequence: Synthetic oligonucleotide
auauucacugagggcaggg

SEQ ID NO: 2954074 - RNA, 19 nt, Artificial Sequence
  Description of Artificial Sequence: Synthetic oligonucleotide
acugcaucuggaaucguag

SEQ ID NO: 2954075 - RNA, 19 nt, Artificial Sequence
  Description of Artificial Sequence: Synthetic oligonucleotide
ucuccguuggccgcgcucg

SEQ ID NO: 2954076 - RNA, 19 nt, Artificial Sequence
  Description of Artificial Sequence: Synthetic oligonucleotide
agcuucaaagccagcacgg

SEQ ID NO: 2954077 - RNA, 19 nt, Artificial Sequence
  Description of Artificial Sequence: Synthetic oligonucleotide
gagggaaaggacaaauaca

SEQ ID NO: 2954078 - RNA, 19 nt, Artificial Sequence
  Description of Artificial Sequence: Synthetic oligonucleotide
uaaccagucacugcaucug

SEQ ID NO: 2954079 - RNA, 19 nt, Artificial Sequence
  Description of Artificial Sequence: Synthetic oligonucleotide
cuucacuucuccguuggcc

SEQ ID NO: 2954080 - RNA, 19 nt, Artificial Sequence
  Description of Artificial Sequence: Synthetic oligonucleotide
ucuggaaucguaggugugu

SEQ ID NO: 2954081 - RNA, 19 nt, Artificial Sequence
  Description of Artificial Sequence: Synthetic oligonucleotide
ugguuaggguguacuugcg

SEQ ID NO: 2954082 - RNA, 19 nt, Artificial Sequence
  Description of Artificial Sequence: Synthetic oligonucleotide
agguaauaaccagucacug

SEQ ID NO: 2954083 - RNA, 19 nt, Artificial Sequence
  Description of Artificial Sequence: Synthetic oligonucleotide
gaugagccgaauuaugcgu

SEQ ID NO: 2954084 - RNA, 19 nt, Artificial Sequence
  Description of Artificial Sequence: Synthetic oligonucleotide
aucuggguuaggguugggc

SEQ ID NO: 2954085 - RNA, 19 nt, Artificial Sequence
  Description of Artificial Sequence: Synthetic oligonucleotide
guacccuucauuuugcagu

SEQ ID NO: 2954086 - RNA, 19 nt, Artificial Sequence
  Description of Artificial Sequence: Synthetic oligonucleotide
ucguuggcaauaucugaga

SEQ ID NO: 2954087 - RNA, 19 nt, Artificial Sequence
  Description of Artificial Sequence: Synthetic oligonucleotide
ggggucaaguccuccaugg

SEQ ID NO: 2954088 - RNA, 19 nt, Artificial Sequence
  Description of Artificial Sequence: Synthetic oligonucleotide
cugcaucuggaaucguagg

SEQ ID NO: 2954089 - RNA, 19 nt, Artificial Sequence
  Description of Artificial Sequence: Synthetic oligonucleotide
caugguuaggguguacuug

SEQ ID NO: 2954090 - RNA, 19 nt, Artificial Sequence
  Description of Artificial Sequence: Synthetic oligonucleotide
gaaguagugcggcuucuuc

SEQ ID NO: 2954091 - RNA, 19 nt, Artificial Sequence
  Description of Artificial Sequence: Synthetic oligonucleotide
ucguagguguguaauccuc

SEQ ID NO: 2954092 - RNA, 19 nt, Artificial Sequence
  Description of Artificial Sequence: Synthetic oligonucleotide
aagugagaugagccgaauu

SEQ ID NO: 2954093 - RNA, 19 nt, Artificial Sequence
  Description of Artificial Sequence: Synthetic oligonucleotide
guucagguaauaaccaguc

SEQ ID NO: 2954094 - RNA, 19 nt, Artificial Sequence
  Description of Artificial Sequence: Synthetic oligonucleotide
uuaggguguacuugcgguc

SEQ ID NO: 2954095 - RNA, 19 nt, Artificial Sequence
  Description of Artificial Sequence: Synthetic oligonucleotide
acacuacaggcuucacuuc

SEQ ID NO: 2954096 - RNA, 19 nt, Artificial Sequence
  Description of Artificial Sequence: Synthetic oligonucleotide
uaauaaccagucacugcau

SEQ ID NO: 2954097 - RNA, 19 nt, Artificial Sequence
  Description of Artificial Sequence: Synthetic oligonucleotide
uaggguguacuugcggucc

SEQ ID NO: 2954098 - RNA, 19 nt, Artificial Sequence
  Description of Artificial Sequence: Synthetic oligonucleotide
uugauaccauauucacuga

SEQ ID NO: 2954099 - RNA, 19 nt, Artificial Sequence
  Description of Artificial Sequence: Synthetic oligonucleotide
agugcuguagggcaucguu

SEQ ID NO: 2954100 - RNA, 19 nt, Artificial Sequence
  Description of Artificial Sequence: Synthetic oligonucleotide
ugcuggacacuacaggcuu

SEQ ID NO: 2954101 - RNA, 19 nt, Artificial Sequence
  Description of Artificial Sequence: Synthetic oligonucleotide
ugggcucaggugaaguagu

SEQ ID NO: 2954102 - RNA, 19 nt, Artificial Sequence
  Description of Artificial Sequence: Synthetic oligonucleotide
cuacaggcuucacuucucc

SEQ ID NO: 2954103 - RNA, 19 nt, Artificial Sequence
  Description of Artificial Sequence: Synthetic oligonucleotide
agcaagugagaugagccga

SEQ ID NO: 2954104 - RNA, 19 nt, Artificial Sequence
  Description of Artificial Sequence: Synthetic oligonucleotide
ggcuguacccuucauuuug

SEQ ID NO: 2954105 - RNA, 19 nt, Artificial Sequence
  Description of Artificial Sequence: Synthetic oligonucleotide
aucguagguguguaauccu

SEQ ID NO: 2954106 - RNA, 19 nt, Artificial Sequence
  Description of Artificial Sequence: Synthetic oligonucleotide
aauuaugcgugggucugaa

SEQ ID NO: 2954107 - RNA, 19 nt, Artificial Sequence
  Description of Artificial Sequence: Synthetic oligonucleotide
uugcucuugcuccgggagc

SEQ ID NO: 2954108 - RNA, 19 nt, Artificial Sequence
  Description of Artificial Sequence: Synthetic oligonucleotide
aguagugcggcuucuucua

SEQ ID NO: 2954109 - RNA, 19 nt, Artificial Sequence
  Description of Artificial Sequence: Synthetic oligonucleotide
gcagcaagugagaugagcc

SEQ ID NO: 2954110 - RNA, 19 nt, Artificial Sequence
  Description of Artificial Sequence: Synthetic oligonucleotide
caucaagaaguccaccaga

SEQ ID NO: 2954111 - RNA, 19 nt, Artificial Sequence
  Description of Artificial Sequence: Synthetic oligonucleotide
uucauuuugcagugcugua

SEQ ID NO: 2954112 - RNA, 19 nt, Artificial Sequence
  Description of Artificial Sequence: Synthetic oligonucleotide
gcaucaagaaguccaccag

SEQ ID NO: 2954113 - RNA, 19 nt, Artificial Sequence
  Description of Artificial Sequence: Synthetic oligonucleotide
guacuugcgguccuugcuc

SEQ ID NO: 2954114 - RNA, 19 nt, Artificial Sequence
  Description of Artificial Sequence: Synthetic oligonucleotide
guuaggguguacuugcggu

SEQ ID NO: 2954115 - RNA, 19 nt, Artificial Sequence
  Description of Artificial Sequence: Synthetic oligonucleotide
gaggcuguacccuucauuu

SEQ ID NO: 2954116 - RNA, 19 nt, Artificial Sequence
  Description of Artificial Sequence: Synthetic oligonucleotide
uggguuaggguugggcuca

SEQ ID NO: 2954117 - RNA, 19 nt, Artificial Sequence
  Description of Artificial Sequence: Synthetic oligonucleotide
caucguuggcaauaucuga

SEQ ID NO: 2954118 - RNA, 19 nt, Artificial Sequence
  Description of Artificial Sequence: Synthetic oligonucleotide
ucacuucuccguuggccgc

SEQ ID NO: 2954119 - RNA, 19 nt, Artificial Sequence
  Description of Artificial Sequence: Synthetic oligonucleotide
uacuugcgguccuugcucu

SEQ ID NO: 2954120 - RNA, 19 nt, Artificial Sequence
  Description of Artificial Sequence: Synthetic oligonucleotide
ucuugcuccgggagcugcc

SEQ ID NO: 2954121 - RNA, 19 nt, Artificial Sequence
  Description of Artificial Sequence: Synthetic oligonucleotide
cuggguuaggguugggcuc

SEQ ID NO: 2954122 - RNA, 19 nt, Artificial Sequence
  Description of Artificial Sequence: Synthetic oligonucleotide
uucugggcagcaagugaga

SEQ ID NO: 2954123 - RNA, 19 nt, Artificial Sequence
  Description of Artificial Sequence: Synthetic oligonucleotide
guguguaauccuccagcug

SEQ ID NO: 2954124 - RNA, 19 nt, Artificial Sequence
  Description of Artificial Sequence: Synthetic oligonucleotide
acaucuggguuaggguugg

SEQ ID NO: 2954125 - RNA, 19 nt, Artificial Sequence
  Description of Artificial Sequence: Synthetic oligonucleotide
agugcggcuucuucuacau

SEQ ID NO: 2954126 - RNA, 19 nt, Artificial Sequence
  Description of Artificial Sequence: Synthetic oligonucleotide
agaaguccaccagaggcgu

SEQ ID NO: 2954127 - RNA, 19 nt, Artificial Sequence
  Description of Artificial Sequence: Synthetic oligonucleotide
auuaugcgugggucugaag

SEQ ID NO: 2954128 - RNA, 19 nt, Artificial Sequence
  Description of Artificial Sequence: Synthetic oligonucleotide
ggcuucacuucuccguugg

SEQ ID NO: 2954129 - RNA, 19 nt, Artificial Sequence
  Description of Artificial Sequence: Synthetic oligonucleotide
guagguguguaauccucca

SEQ ID NO: 2954130 - RNA, 19 nt, Artificial Sequence
  Description of Artificial Sequence: Synthetic oligonucleotide
uagugcggcuucuucuaca

SEQ ID NO: 2954131 - RNA, 19 nt, Artificial Sequence
  Description of Artificial Sequence: Synthetic oligonucleotide
cauauucacugagggcagg

SEQ ID NO: 2954132 - RNA, 19 nt, Artificial Sequence
  Description of Artificial Sequence: Synthetic oligonucleotide
agaggcuguacccuucauu

SEQ ID NO: 2954133 - RNA, 19 nt, Artificial Sequence
  Description of Artificial Sequence: Synthetic oligonucleotide
acuacaggcuucacuucuc

SEQ ID NO: 2954134 - RNA, 19 nt, Artificial Sequence
  Description of Artificial Sequence: Synthetic oligonucleotide
augagccgaauuaugcgug

SEQ ID NO: 2954135 - RNA, 19 nt, Artificial Sequence
  Description of Artificial Sequence: Synthetic oligonucleotide
guccuccaugguuagggug

SEQ ID NO: 2954136 - RNA, 19 nt, Artificial Sequence
  Description of Artificial Sequence: Synthetic oligonucleotide
agccgaauuaugcgugggu

SEQ ID NO: 2954137 - RNA, 19 nt, Artificial Sequence
  Description of Artificial Sequence: Synthetic oligonucleotide
guaauccuccagcugcauc

SEQ ID NO: 2954138 - RNA, 19 nt, Artificial Sequence
  Description of Artificial Sequence: Synthetic oligonucleotide
gacgagagggaaaggacaa

SEQ ID NO: 2954139 - RNA, 19 nt, Artificial Sequence
  Description of Artificial Sequence: Synthetic oligonucleotide
gagccgaauuaugcguggg

SEQ ID NO: 2954140 - RNA, 19 nt, Artificial Sequence
  Description of Artificial Sequence: Synthetic oligonucleotide
cuccagcugcaucaagaag

SEQ ID NO: 2954141 - RNA, 19 nt, Artificial Sequence
  Description of Artificial Sequence: Synthetic oligonucleotide
gcugccagaggcuguaccc

SEQ ID NO: 2954142 - RNA, 19 nt, Artificial Sequence
  Description of Artificial Sequence: Synthetic oligonucleotide
cagguaauaaccagucacu

SEQ ID NO: 2954143 - RNA, 19 nt, Artificial Sequence
  Description of Artificial Sequence: Synthetic oligonucleotide
guuaggguugggcucaggu

SEQ ID NO: 2954144 - RNA, 19 nt, Artificial Sequence
  Description of Artificial Sequence: Synthetic oligonucleotide
acgguucagguaauaacca

SEQ ID NO: 2954145 - RNA, 19 nt, Artificial Sequence
  Description of Artificial Sequence: Synthetic oligonucleotide
gucaaguccuccaugguua

SEQ ID NO: 2954146 - RNA, 19 nt, Artificial Sequence
  Description of Artificial Sequence: Synthetic oligonucleotide
aggggucaaguccuccaug

SEQ ID NO: 2954147 - RNA, 19 nt, Artificial Sequence
  Description of Artificial Sequence: Synthetic oligonucleotide
gguccuugcucuugcuccg

SEQ ID NO: 2954148 - RNA, 19 nt, Artificial Sequence
  Description of Artificial Sequence: Synthetic oligonucleotide
guguacuugcgguccuugc

SEQ ID NO: 2954149 - RNA, 19 nt, Artificial Sequence
  Description of Artificial Sequence: Synthetic oligonucleotide
uagggcaucguuggcaaua

SEQ ID NO: 2954150 - RNA, 19 nt, Artificial Sequence
  Description of Artificial Sequence: Synthetic oligonucleotide
cuucauuuugcagugcugu

SEQ ID NO: 2954151 - RNA, 19 nt, Artificial Sequence
  Description of Artificial Sequence: Synthetic oligonucleotide
uggaaucguagguguguaa

SEQ ID NO: 2954152 - RNA, 19 nt, Artificial Sequence
  Description of Artificial Sequence: Synthetic oligonucleotide
ugcgugggucugaagcuuc

SEQ ID NO: 2954153 - RNA, 19 nt, Artificial Sequence
  Description of Artificial Sequence: Synthetic oligonucleotide
gcacgguucagguaauaac

SEQ ID NO: 2954154 - RNA, 19 nt, Artificial Sequence
  Description of Artificial Sequence: Synthetic oligonucleotide
gcaucuggaaucguaggug

SEQ ID NO: 2954155 - RNA, 19 nt, Artificial Sequence
  Description of Artificial Sequence: Synthetic oligonucleotide
gccagcacgguucagguaa

SEQ ID NO: 2954156 - RNA, 19 nt, Artificial Sequence
  Description of Artificial Sequence: Synthetic oligonucleotide
aguccuccaugguuagggu

SEQ ID NO: 2954157 - RNA, 19 nt, Artificial Sequence
  Description of Artificial Sequence: Synthetic oligonucleotide
gcgugcuggacacuacagg

SEQ ID NO: 2954158 - RNA, 19 nt, Artificial Sequence
  Description of Artificial Sequence: Synthetic oligonucleotide
ucugggcagcaagugagau

SEQ ID NO: 2954159 - RNA, 19 nt, Artificial Sequence
  Description of Artificial Sequence: Synthetic oligonucleotide
agggcaggggucaaguccu

SEQ ID NO: 2954160 - RNA, 19 nt, Artificial Sequence
  Description of Artificial Sequence: Synthetic oligonucleotide
gugcuguagggcaucguug

SEQ ID NO: 2954161 - RNA, 19 nt, Artificial Sequence
  Description of Artificial Sequence: Synthetic oligonucleotide
gcaucguuggcaauaucug

SEQ ID NO: 2954162 - RNA, 19 nt, Artificial Sequence
  Description of Artificial Sequence: Synthetic oligonucleotide
ggugaaguagugcggcuuc

SEQ ID NO: 2954163 - RNA, 19 nt, Artificial Sequence
  Description of Artificial Sequence: Synthetic oligonucleotide
aggcgugcuggacacuaca

SEQ ID NO: 2954164 - RNA, 19 nt, Artificial Sequence
  Description of Artificial Sequence: Synthetic oligonucleotide
guuggccgcgcucggcagg

SEQ ID NO: 2954165 - RNA, 19 nt, Artificial Sequence
  Description of Artificial Sequence: Synthetic oligonucleotide
gaauuucugggcagcaagu

SEQ ID NO: 2954166 - RNA, 19 nt, Artificial Sequence
  Description of Artificial Sequence: Synthetic oligonucleotide
uuggccgcgcucggcaggg

SEQ ID NO: 2954167 - RNA, 19 nt, Artificial Sequence
  Description of Artificial Sequence: Synthetic oligonucleotide
caucuggaaucguaggugu

SEQ ID NO: 2954168 - RNA, 19 nt, Artificial Sequence
  Description of Artificial Sequence: Synthetic oligonucleotide
ccauauucacugagggcag

SEQ ID NO: 2954169 - RNA, 19 nt, Artificial Sequence
  Description of Artificial Sequence: Synthetic oligonucleotide
cugaagcuucaaagccagc

SEQ ID NO: 2954170 - RNA, 19 nt, Artificial Sequence
  Description of Artificial Sequence: Synthetic oligonucleotide
aggcuucacuucuccguug

SEQ ID NO: 2954171 - RNA, 19 nt, Artificial Sequence
  Description of Artificial Sequence: Synthetic oligonucleotide
cugcaucaagaaguccacc

SEQ ID NO: 2954172 - RNA, 19 nt, Artificial Sequence
  Description of Artificial Sequence: Synthetic oligonucleotide
uucuccguuggccgcgcuc

SEQ ID NO: 2954173 - RNA, 19 nt, Artificial Sequence
  Description of Artificial Sequence: Synthetic oligonucleotide
agcacgguucagguaauaa

SEQ ID NO: 2954174 - RNA, 19 nt, Artificial Sequence
  Description of Artificial Sequence: Synthetic oligonucleotide
gaauuaugcgugggucuga

SEQ ID NO: 2954175 - RNA, 19 nt, Artificial Sequence
  Description of Artificial Sequence: Synthetic oligonucleotide
ugcuccgggagcugccaga

SEQ ID NO: 2954176 - RNA, 19 nt, Artificial Sequence
  Description of Artificial Sequence: Synthetic oligonucleotide
guagugcggcuucuucuac

SEQ ID NO: 2954177 - RNA, 19 nt, Artificial Sequence
  Description of Artificial Sequence: Synthetic oligonucleotide
cuugcgguccuugcucuug

SEQ ID NO: 2954178 - RNA, 19 nt, Artificial Sequence
  Description of Artificial Sequence: Synthetic oligonucleotide
ggcagcaagugagaugagc

SEQ ID NO: 2954179 - RNA, 19 nt, Artificial Sequence
  Description of Artificial Sequence: Synthetic oligonucleotide
augaauuucugggcagcaa

SEQ ID NO: 2954180 - RNA, 19 nt, Artificial Sequence
  Description of Artificial Sequence: Synthetic oligonucleotide
cguagguguguaauccucc

SEQ ID NO: 2954181 - RNA, 19 nt, Artificial Sequence
  Description of Artificial Sequence: Synthetic oligonucleotide
aauccuccagcugcaucaa

SEQ ID NO: 2954182 - RNA, 19 nt, Artificial Sequence
  Description of Artificial Sequence: Synthetic oligonucleotide
acccuucauuuugcagugc

SEQ ID NO: 2954183 - RNA, 19 nt, Artificial Sequence
  Description of Artificial Sequence: Synthetic oligonucleotide
acuucuccguuggccgcgc

SEQ ID NO: 2954184 - RNA, 19 nt, Artificial Sequence
  Description of Artificial Sequence: Synthetic oligonucleotide
ggacaaauacaucuggguu

SEQ ID NO: 2954185 - RNA, 19 nt, Artificial Sequence
  Description of Artificial Sequence: Synthetic oligonucleotide
ugagggcaggggucaaguc

SEQ ID NO: 2954186 - RNA, 19 nt, Artificial Sequence
  Description of Artificial Sequence: Synthetic oligonucleotide
cacuucuccguuggccgcg

SEQ ID NO: 2954187 - RNA, 19 nt, Artificial Sequence
  Description of Artificial Sequence: Synthetic oligonucleotide
ggcaucguuggcaauaucu

SEQ ID NO: 2954188 - RNA, 19 nt, Artificial Sequence
  Description of Artificial Sequence: Synthetic oligonucleotide
cuguagggcaucguuggca

SEQ ID NO: 2954189 - RNA, 19 nt, Artificial Sequence
  Description of Artificial Sequence: Synthetic oligonucleotide
ggacgagagggaaaggaca

SEQ ID NO: 2954190 - RNA, 19 nt, Artificial Sequence
  Description of Artificial Sequence: Synthetic oligonucleotide
gguguguaauccuccagcu

SEQ ID NO: 2954191 - RNA, 19 nt, Artificial Sequence
  Description of Artificial Sequence: Synthetic oligonucleotide
ugaaguagugcggcuucuu

SEQ ID NO: 2954192 - RNA, 19 nt, Artificial Sequence
  Description of Artificial Sequence: Synthetic oligonucleotide
auccuccagcugcaucaag

SEQ ID NO: 2954193 - RNA, 19 nt, Artificial Sequence
  Description of Artificial Sequence: Synthetic oligonucleotide
cucuugcuccgggagcugc

SEQ ID NO: 2954194 - RNA, 19 nt, Artificial Sequence
  Description of Artificial Sequence: Synthetic oligonucleotide
aucuggaaucguaggugug

SEQ ID NO: 2954195 - RNA, 19 nt, Artificial Sequence
  Description of Artificial Sequence: Synthetic oligonucleotide
uguaauccuccagcugcau

SEQ ID NO: 2954196 - RNA, 19 nt, Artificial Sequence
  Description of Artificial Sequence: Synthetic oligonucleotide
guugggcucaggugaagua

SEQ ID NO: 2954197 - RNA, 19 nt, Artificial Sequence
  Description of Artificial Sequence: Synthetic oligonucleotide
gugggucugaagcuucaaa

SEQ ID NO: 2954198 - RNA, 19 nt, Artificial Sequence
  Description of Artificial Sequence: Synthetic oligonucleotide
caaguccuccaugguuagg

SEQ ID NO: 2954199 - RNA, 19 nt, Artificial Sequence
  Description of Artificial Sequence: Synthetic oligonucleotide
cacuacaggcuucacuucu

SEQ ID NO: 2954200 - RNA, 19 nt, Artificial Sequence
  Description of Artificial Sequence: Synthetic oligonucleotide
aggguguacuugcgguccu

SEQ ID NO: 2954201 - RNA, 19 nt, Artificial Sequence
  Description of Artificial Sequence: Synthetic oligonucleotide
ccagcugcaucaagaaguc

SEQ ID NO: 2954202 - RNA, 19 nt, Artificial Sequence
  Description of Artificial Sequence: Synthetic oligonucleotide
agaggcgugcuggacacua

SEQ ID NO: 2954203 - RNA, 19 nt, Artificial Sequence
  Description of Artificial Sequence: Synthetic oligonucleotide
ccuucauuuugcagugcug

SEQ ID NO: 2954204 - RNA, 19 nt, Artificial Sequence
  Description of Artificial Sequence: Synthetic oligonucleotide
cacugcaucuggaaucgua

SEQ ID NO: 2954205 - RNA, 19 nt, Artificial Sequence
  Description of Artificial Sequence: Synthetic oligonucleotide
caaauacaucuggguuagg

SEQ ID NO: 2954206 - RNA, 19 nt, Artificial Sequence
  Description of Artificial Sequence: Synthetic oligonucleotide
acugagggcaggggucaag

SEQ ID NO: 2954207 - RNA, 19 nt, Artificial Sequence
  Description of Artificial Sequence: Synthetic oligonucleotide
aggugaaguagugcggcuu

SEQ ID NO: 2954208 - RNA, 19 nt, Artificial Sequence
  Description of Artificial Sequence: Synthetic oligonucleotide
gggacgagagggaaaggac

SEQ ID NO: 2954209 - RNA, 19 nt, Artificial Sequence
  Description of Artificial Sequence: Synthetic oligonucleotide
gcuguacccuucauuuugc

SEQ ID NO: 2954210 - RNA, 19 nt, Artificial Sequence
  Description of Artificial Sequence: Synthetic oligonucleotide
ugccagaggcuguacccuu

SEQ ID NO: 2954211 - RNA, 19 nt, Artificial Sequence
  Description of Artificial Sequence: Synthetic oligonucleotide
gguucagguaauaaccagu

SEQ ID NO: 2954212 - RNA, 19 nt, Artificial Sequence
  Description of Artificial Sequence: Synthetic oligonucleotide
ggcaauaucugagaugaau

SEQ ID NO: 2954213 - RNA, 19 nt, Artificial Sequence
  Description of Artificial Sequence: Synthetic oligonucleotide
cuggacacuacaggcuuca

SEQ ID NO: 2954214 - RNA, 19 nt, Artificial Sequence
  Description of Artificial Sequence: Synthetic oligonucleotide
ccagaggcgugcuggacac

SEQ ID NO: 2954215 - RNA, 19 nt, Artificial Sequence
  Description of Artificial Sequence: Synthetic oligonucleotide
cuguacccuucauuuugca

SEQ ID NO: 2954216 - RNA, 19 nt, Artificial Sequence
  Description of Artificial Sequence: Synthetic oligonucleotide
gccgaauuaugcguggguc

SEQ ID NO: 2954217 - RNA, 19 nt, Artificial Sequence
  Description of Artificial Sequence: Synthetic oligonucleotide
aggcuguacccuucauuuu

SEQ ID NO: 2954218 - RNA, 19 nt, Artificial Sequence
  Description of Artificial Sequence: Synthetic oligonucleotide
gaaguccaccagaggcgug

SEQ ID NO: 2954219 - RNA, 19 nt, Artificial Sequence
  Description of Artificial Sequence: Synthetic oligonucleotide
gcugcaucaagaaguccac

SEQ ID NO: 2954220 - RNA, 19 nt, Artificial Sequence
  Description of Artificial Sequence: Synthetic oligonucleotide
ggggacgagagggaaagga

SEQ ID NO: 2954221 - RNA, 19 nt, Artificial Sequence
  Description of Artificial Sequence: Synthetic oligonucleotide
ggcucaggugaaguagugc

SEQ ID NO: 2954222 - RNA, 19 nt, Artificial Sequence
  Description of Artificial Sequence: Synthetic oligonucleotide
cuucuacauugauaccaua

SEQ ID NO: 2954223 - RNA, 19 nt, Artificial Sequence
  Description of Artificial Sequence: Synthetic oligonucleotide
accagucacugcaucugga

SEQ ID NO: 2954224 - RNA, 19 nt, Artificial Sequence
  Description of Artificial Sequence: Synthetic oligonucleotide
gugagaugagccgaauuau

SEQ ID NO: 2954225 - RNA, 19 nt, Artificial Sequence
  Description of Artificial Sequence: Synthetic oligonucleotide
gguguacuugcgguccuug

SEQ ID NO: 2954226 - RNA, 19 nt, Artificial Sequence
  Description of Artificial Sequence: Synthetic oligonucleotide
gcaauaucugagaugaauu

SEQ ID NO: 2954227 - RNA, 19 nt, Artificial Sequence
  Description of Artificial Sequence: Synthetic oligonucleotide
cgguucagguaauaaccag

SEQ ID NO: 2954228 - RNA, 19 nt, Artificial Sequence
  Description of Artificial Sequence: Synthetic oligonucleotide
agggcaucguuggcaauau

SEQ ID NO: 2954229 - RNA, 19 nt, Artificial Sequence
  Description of Artificial Sequence: Synthetic oligonucleotide
cagcugcaucaagaagucc

SEQ ID NO: 2954230 - RNA, 19 nt, Artificial Sequence
  Description of Artificial Sequence: Synthetic oligonucleotide
ggcgugcuggacacuacag

SEQ ID NO: 2954231 - RNA, 19 nt, Artificial Sequence
  Description of Artificial Sequence: Synthetic oligonucleotide
gggaaaggacaaauacauc

SEQ ID NO: 2954232 - RNA, 19 nt, Artificial Sequence
  Description of Artificial Sequence: Synthetic oligonucleotide
cgaauuaugcgugggucug

SEQ ID NO: 2954233 - RNA, 19 nt, Artificial Sequence
  Description of Artificial Sequence: Synthetic oligonucleotide
gcuguagggcaucguuggc

SEQ ID NO: 2954234 - RNA, 19 nt, Artificial Sequence
  Description of Artificial Sequence: Synthetic oligonucleotide
ggaaucguagguguguaau

SEQ ID NO: 2954235 - RNA, 19 nt, Artificial Sequence
  Description of Artificial Sequence: Synthetic oligonucleotide
gcaggggucaaguccucca

SEQ ID NO: 2954236 - RNA, 19 nt, Artificial Sequence
  Description of Artificial Sequence: Synthetic oligonucleotide
uccguuggccgcgcucggc

SEQ ID NO: 2954237 - RNA, 19 nt, Artificial Sequence
  Description of Artificial Sequence: Synthetic oligonucleotide
ggacacuacaggcuucacu

SEQ ID NO: 2954238 - RNA, 19 nt, Artificial Sequence
  Description of Artificial Sequence: Synthetic oligonucleotide
cuucaaagccagcacgguu

SEQ ID NO: 2954239 - RNA, 19 nt, Artificial Sequence
  Description of Artificial Sequence: Synthetic oligonucleotide
uggacacuacaggcuucac

SEQ ID NO: 2954240 - RNA, 19 nt, Artificial Sequence
  Description of Artificial Sequence: Synthetic oligonucleotide
acgagagggaaaggacaaa

SEQ ID NO: 2954241 - RNA, 19 nt, Artificial Sequence
  Description of Artificial Sequence: Synthetic oligonucleotide
ggucaaguccuccaugguu

SEQ ID NO: 2954242 - RNA, 19 nt, Artificial Sequence
  Description of Artificial Sequence: Synthetic oligonucleotide
cuccgggagcugccagagg

SEQ ID NO: 2954243 - RNA, 19 nt, Artificial Sequence
  Description of Artificial Sequence: Synthetic oligonucleotide
cuccguuggccgcgcucgg

SEQ ID NO: 2954244 - RNA, 19 nt, Artificial Sequence
  Description of Artificial Sequence: Synthetic oligonucleotide
gcagugcuguagggcaucg

SEQ ID NO: 2954245 - RNA, 19 nt, Artificial Sequence
  Description of Artificial Sequence: Synthetic oligonucleotide
ggcuucuucuacauugaua

SEQ ID NO: 2954246 - RNA, 19 nt, Artificial Sequence
  Description of Artificial Sequence: Synthetic oligonucleotide
augcgugggucugaagcuu

SEQ ID NO: 2954247 - RNA, 19 nt, Artificial Sequence
  Description of Artificial Sequence: Synthetic oligonucleotide
caaagccagcacgguucag

SEQ ID NO: 2954248 - RNA, 19 nt, Artificial Sequence
  Description of Artificial Sequence: Synthetic oligonucleotide
gcuucacuucuccguuggc

SEQ ID NO: 2954249 - RNA, 19 nt, Artificial Sequence
  Description of Artificial Sequence: Synthetic oligonucleotide
acuugcgguccuugcucuu

SEQ ID NO: 2954250 - RNA, 19 nt, Artificial Sequence
  Description of Artificial Sequence: Synthetic oligonucleotide
cuggaaucguaggugugua

SEQ ID NO: 2954251 - RNA, 19 nt, Artificial Sequence
  Description of Artificial Sequence: Synthetic oligonucleotide
gaggcgugcuggacacuac

SEQ ID NO: 2954252 - RNA, 19 nt, Artificial Sequence
  Description of Artificial Sequence: Synthetic oligonucleotide
ucacugcaucuggaaucgu

SEQ ID NO: 2954253 - RNA, 19 nt, Artificial Sequence
  Description of Artificial Sequence: Synthetic oligonucleotide
aguccaccagaggcgugcu

SEQ ID NO: 2954254 - RNA, 19 nt, Artificial Sequence
  Description of Artificial Sequence: Synthetic oligonucleotide
gcuccgggagcugccagag

SEQ ID NO: 2954255 - RNA, 19 nt, Artificial Sequence
  Description of Artificial Sequence: Synthetic oligonucleotide
agccagcacgguucaggua

SEQ ID NO: 2954256 - RNA, 19 nt, Artificial Sequence
  Description of Artificial Sequence: Synthetic oligonucleotide
cagucacugcaucuggaau

SEQ ID NO: 2954257 - RNA, 19 nt, Artificial Sequence
  Description of Artificial Sequence: Synthetic oligonucleotide
gugcuggacacuacaggcu

SEQ ID NO: 2954258 - RNA, 19 nt, Artificial Sequence
  Description of Artificial Sequence: Synthetic oligonucleotide
ccagucacugcaucuggaa

SEQ ID NO: 2954259 - RNA, 19 nt, Artificial Sequence
  Description of Artificial Sequence: Synthetic oligonucleotide
caccagaggcgugcuggac

SEQ ID NO: 2954260 - RNA, 19 nt, Artificial Sequence
  Description of Artificial Sequence: Synthetic oligonucleotide
caucuggguuaggguuggg

SEQ ID NO: 2954261 - RNA, 19 nt, Artificial Sequence
  Description of Artificial Sequence: Synthetic oligonucleotide
aggguugggcucaggugaa

SEQ ID NO: 2954262 - RNA, 19 nt, Artificial Sequence
  Description of Artificial Sequence: Synthetic oligonucleotide
ccuccagcugcaucaagaa

SEQ ID NO: 2954263 - RNA, 19 nt, Artificial Sequence
  Description of Artificial Sequence: Synthetic oligonucleotide
cuccaugguuaggguguac

SEQ ID NO: 2954264 - RNA, 19 nt, Artificial Sequence
  Description of Artificial Sequence: Synthetic oligonucleotide
gcaagugagaugagccgaa

SEQ ID NO: 2954265 - RNA, 19 nt, Artificial Sequence
  Description of Artificial Sequence: Synthetic oligonucleotide
gggcucaggugaaguagug

SEQ ID NO: 2954266 - RNA, 19 nt, Artificial Sequence
  Description of Artificial Sequence: Synthetic oligonucleotide
ccgaauuaugcgugggucu

SEQ ID NO: 2954267 - RNA, 19 nt, Artificial Sequence
  Description of Artificial Sequence: Synthetic oligonucleotide
ggcaggggucaaguccucc

SEQ ID NO: 2954268 - RNA, 19 nt, Artificial Sequence
  Description of Artificial Sequence: Synthetic oligonucleotide
gguuaggguugggcucagg

SEQ ID NO: 2954269 - RNA, 19 nt, Artificial Sequence
  Description of Artificial Sequence: Synthetic oligonucleotide
caggugaaguagugcggcu

SEQ ID NO: 2954270 - RNA, 19 nt, Artificial Sequence
  Description of Artificial Sequence: Synthetic oligonucleotide
gagcugccagaggcuguac

SEQ ID NO: 2954271 - RNA, 19 nt, Artificial Sequence
  Description of Artificial Sequence: Synthetic oligonucleotide
gcggcuucuucuacauuga

SEQ ID NO: 2954272 - RNA, 19 nt, Artificial Sequence
  Description of Artificial Sequence: Synthetic oligonucleotide
cccuucauuuugcagugcu

SEQ ID NO: 2954273 - RNA, 19 nt, Artificial Sequence
  Description of Artificial Sequence: Synthetic oligonucleotide
gguugggcucaggugaagu

SEQ ID NO: 2954274 - RNA, 19 nt, Artificial Sequence
  Description of Artificial Sequence: Synthetic oligonucleotide
gcuggacacuacaggcuuc

SEQ ID NO: 2954275 - RNA, 19 nt, Artificial Sequence
  Description of Artificial Sequence: Synthetic oligonucleotide
cugccagaggcuguacccu

SEQ ID NO: 2954276 - RNA, 19 nt, Artificial Sequence
  Description of Artificial Sequence: Synthetic oligonucleotide
ccagaggcuguacccuuca

SEQ ID NO: 2954277 - RNA, 19 nt, Artificial Sequence
  Description of Artificial Sequence: Synthetic oligonucleotide
ggagcugccagaggcugua

SEQ ID NO: 2954278 - RNA, 19 nt, Artificial Sequence
  Description of Artificial Sequence: Synthetic oligonucleotide
ccuugcucuugcuccggga

SEQ ID NO: 2954279 - RNA, 19 nt, Artificial Sequence
  Description of Artificial Sequence: Synthetic oligonucleotide
caggggucaaguccuccau

SEQ ID NO: 2954280 - RNA, 19 nt, Artificial Sequence
  Description of Artificial Sequence: Synthetic oligonucleotide
gggucaaguccuccauggu

SEQ ID NO: 2954281 - RNA, 19 nt, Artificial Sequence
  Description of Artificial Sequence: Synthetic oligonucleotide
gcuucaaagccagcacggu

SEQ ID NO: 2954282 - RNA, 19 nt, Artificial Sequence
  Description of Artificial Sequence: Synthetic oligonucleotide
caagugagaugagccgaau

SEQ ID NO: 2954283 - RNA, 19 nt, Artificial Sequence
  Description of Artificial Sequence: Synthetic oligonucleotide
guagggcaucguuggcaau

SEQ ID NO: 2954284 - RNA, 19 nt, Artificial Sequence
  Description of Artificial Sequence: Synthetic oligonucleotide
gccagaggcuguacccuuc

SEQ ID NO: 2954285 - RNA, 19 nt, Artificial Sequence
  Description of Artificial Sequence: Synthetic oligonucleotide
gggcaucguuggcaauauc

SEQ ID NO: 2954286 - RNA, 19 nt, Artificial Sequence
  Description of Artificial Sequence: Synthetic oligonucleotide
cguuggccgcgcucggcag

SEQ ID NO: 2954287 - RNA, 19 nt, Artificial Sequence
  Description of Artificial Sequence: Synthetic oligonucleotide
ccguuggccgcgcucggca

SEQ ID NO: 2954288 - RNA, 19 nt, Artificial Sequence
  Description of Artificial Sequence: Synthetic oligonucleotide
ccaccagaggcgugcugga

SEQ ID NO: 2954289 - RNA, 19 nt, Artificial Sequence
  Description of Artificial Sequence: Synthetic oligonucleotide
gcucuugcuccgggagcug

SEQ ID NO: 2954290 - RNA, 19 nt, Artificial Sequence
  Description of Artificial Sequence: Synthetic oligonucleotide
gggcagcaagugagaugag

SEQ ID NO: 2954291 - RNA, 19 nt, Artificial Sequence
  Description of Artificial Sequence: Synthetic oligonucleotide
ccaugguuaggguguacuu

SEQ ID NO: 2954292 - RNA, 19 nt, Artificial Sequence
  Description of Artificial Sequence: Synthetic oligonucleotide
cguuggcaauaucugagau

SEQ ID NO: 2954293 - RNA, 19 nt, Artificial Sequence
  Description of Artificial Sequence: Synthetic oligonucleotide
gcgugggucugaagcuuca

SEQ ID NO: 2954294 - RNA, 19 nt, Artificial Sequence
  Description of Artificial Sequence: Synthetic oligonucleotide
cgagagggaaaggacaaau

SEQ ID NO: 2954295 - RNA, 19 nt, Artificial Sequence
  Description of Artificial Sequence: Synthetic oligonucleotide
cagaggcuguacccuucau

SEQ ID NO: 2954296 - RNA, 19 nt, Artificial Sequence
  Description of Artificial Sequence: Synthetic oligonucleotide
cagcacgguucagguaaua

SEQ ID NO: 2954297 - RNA, 19 nt, Artificial Sequence
  Description of Artificial Sequence: Synthetic oligonucleotide
gugcggcuucuucuacauu

SEQ ID NO: 2954298 - RNA, 19 nt, Artificial Sequence
  Description of Artificial Sequence: Synthetic oligonucleotide
cagugcuguagggcaucgu

SEQ ID NO: 2954299 - RNA, 19 nt, Artificial Sequence
  Description of Artificial Sequence: Synthetic oligonucleotide
cuucuccguuggccgcgcu

SEQ ID NO: 2954300 - RNA, 19 nt, Artificial Sequence
  Description of Artificial Sequence: Synthetic oligonucleotide
gggagcugccagaggcugu

SEQ ID NO: 2954301 - RNA, 19 nt, Artificial Sequence
  Description of Artificial Sequence: Synthetic oligonucleotide
ccgggagcugccagaggcu

SEQ ID NO: 2954302 - RNA, 19 nt, Artificial Sequence
  Description of Artificial Sequence: Synthetic oligonucleotide
ccagcacgguucagguaau

SEQ ID NO: 2954303 - RNA, 19 nt, Artificial Sequence
  Description of Artificial Sequence: Synthetic oligonucleotide
cagaggcgugcuggacacu

SEQ ID NO: 2954304 - RNA, 19 nt, Artificial Sequence
  Description of Artificial Sequence: Synthetic oligonucleotide
cgugggucugaagcuucaa

SEQ ID NO: 2954305 - RNA, 19 nt, Artificial Sequence
  Description of Artificial Sequence: Synthetic oligonucleotide
ggguguacuugcgguccuu

SEQ ID NO: 2954306 - RNA, 19 nt, Artificial Sequence
  Description of Artificial Sequence: Synthetic oligonucleotide
cggcuucuucuacauugau

SEQ ID NO: 2954307 - RNA, 19 nt, Artificial Sequence
  Description of Artificial Sequence: Synthetic oligonucleotide
auuaguuuuauuaauaugc

SEQ ID NO: 2954308 - RNA, 19 nt, Artificial Sequence
  Description of Artificial Sequence: Synthetic oligonucleotide
auauuguuuaacuugauac

SEQ ID NO: 2954309 - RNA, 19 nt, Artificial Sequence
  Description of Artificial Sequence: Synthetic oligonucleotide
uuuauuaauaugcauagga

SEQ ID NO: 2954310 - RNA, 19 nt, Artificial Sequence
  Description of Artificial Sequence: Synthetic oligonucleotide
gauacacucaucuugauag

SEQ ID NO: 2954311 - RNA, 19 nt, Artificial Sequence
  Description of Artificial Sequence: Synthetic oligonucleotide
ugaauuugggcucugggcg

SEQ ID NO: 2954312 - RNA, 19 nt, Artificial Sequence
  Description of Artificial Sequence: Synthetic oligonucleotide
gaaauuaaccuccaguggc

SEQ ID NO: 2954313 - RNA, 19 nt, Artificial Sequence
  Description of Artificial Sequence: Synthetic oligonucleotide
ucuacaacaagcucaaggc

SEQ ID NO: 2954314 - RNA, 19 nt, Artificial Sequence
  Description of Artificial Sequence: Synthetic oligonucleotide
uacaacaagcucaaggcgg

SEQ ID NO: 2954315 - RNA, 19 nt, Artificial Sequence
  Description of Artificial Sequence: Synthetic oligonucleotide
aauauugguggucaggcca

SEQ ID NO: 2954316 - RNA, 19 nt, Artificial Sequence
  Description of Artificial Sequence: Synthetic oligonucleotide
uuuguaucagcugaugucg

SEQ ID NO: 2954317 - RNA, 19 nt, Artificial Sequence
  Description of Artificial Sequence: Synthetic oligonucleotide
uguacuucucuucauuagg

SEQ ID NO: 2954318 - RNA, 19 nt, Artificial Sequence
  Description of Artificial Sequence: Synthetic oligonucleotide
aucuacaacaagcucaagg

SEQ ID NO: 2954319 - RNA, 19 nt, Artificial Sequence
  Description of Artificial Sequence: Synthetic oligonucleotide
uuuggcgaaauuaaccucc

SEQ ID NO: 2954320 - RNA, 19 nt, Artificial Sequence
  Description of Artificial Sequence: Synthetic oligonucleotide
uuuaacuugauacacucau

SEQ ID NO: 2954321 - RNA, 19 nt, Artificial Sequence
  Description of Artificial Sequence: Synthetic oligonucleotide
ucuugauagacccugcuca

SEQ ID NO: 2954322 - RNA, 19 nt, Artificial Sequence
  Description of Artificial Sequence: Synthetic oligonucleotide
auuaauaugcauaggaaag

SEQ ID NO: 2954323 - RNA, 19 nt, Artificial Sequence
  Description of Artificial Sequence: Synthetic oligonucleotide
aauuccagggcuuuggcga

SEQ ID NO: 2954324 - RNA, 19 nt, Artificial Sequence
  Description of Artificial Sequence: Synthetic oligonucleotide
ugcauaggaaaguauauug

SEQ ID NO: 2954325 - RNA, 19 nt, Artificial Sequence
  Description of Artificial Sequence: Synthetic oligonucleotide
auuguuuaacuugauacac

SEQ ID NO: 2954326 - RNA, 19 nt, Artificial Sequence
  Description of Artificial Sequence: Synthetic oligonucleotide
uuaguuuuauuaauaugca

SEQ ID NO: 2954327 - RNA, 19 nt, Artificial Sequence
  Description of Artificial Sequence: Synthetic oligonucleotide
aggccaaacugauugaggc

SEQ ID NO: 2954328 - RNA, 19 nt, Artificial Sequence
  Description of Artificial Sequence: Synthetic oligonucleotide
  modified_base (16)..(16): a, c, u, g, unknown or other
uguccauugcacauangcc

SEQ ID NO: 2954329 - RNA, 19 nt, Artificial Sequence
  Description of Artificial Sequence: Synthetic oligonucleotide
acuugauacacucaucuug

SEQ ID NO: 2954330 - RNA, 19 nt, Artificial Sequence
  Description of Artificial Sequence: Synthetic oligonucleotide
uauuguuuaacuugauaca

SEQ ID NO: 2954331 - RNA, 19 nt, Artificial Sequence
  Description of Artificial Sequence: Synthetic oligonucleotide
uugaacaccccucaauucc

SEQ ID NO: 2954332 - RNA, 19 nt, Artificial Sequence
  Description of Artificial Sequence: Synthetic oligonucleotide
gauccagcaucauagacug

SEQ ID NO: 2954333 - RNA, 19 nt, Artificial Sequence
  Description of Artificial Sequence: Synthetic oligonucleotide
uuggcagucacuuuaugcc

SEQ ID NO: 2954334 - RNA, 19 nt, Artificial Sequence
  Description of Artificial Sequence: Synthetic oligonucleotide
  modified_base (2)..(2): a, c, u, g, unknown or other
angccugggauccagcauc

SEQ ID NO: 2954335 - RNA, 19 nt, Artificial Sequence
  Description of Artificial Sequence: Synthetic oligonucleotide
uuuggugagccucagagau

SEQ ID NO: 2954336 - RNA, 19 nt, Artificial Sequence
  Description of Artificial Sequence: Synthetic oligonucleotide
aaaguauauuguuuaacuu

SEQ ID NO: 2954337 - RNA, 19 nt, Artificial Sequence
  Description of Artificial Sequence: Synthetic oligonucleotide
ucuucauuagguagcuggg

SEQ ID NO: 2954338 - RNA, 19 nt, Artificial Sequence
  Description of Artificial Sequence: Synthetic oligonucleotide
ugggaaaccgccaacaaaa

SEQ ID NO: 2954339 - RNA, 19 nt, Artificial Sequence
  Description of Artificial Sequence: Synthetic oligonucleotide
uguuuaacuugauacacuc

SEQ ID NO: 2954340 - RNA, 19 nt, Artificial Sequence
  Description of Artificial Sequence: Synthetic oligonucleotide
ucagagaucggaugcaacc

SEQ ID NO: 2954341 - RNA, 19 nt, Artificial Sequence
  Description of Artificial Sequence: Synthetic oligonucleotide
  modified_base (17)..(17): a, c, u, g, unknown or other
cuguccauugcacauangc

SEQ ID NO: 2954342 - RNA, 19 nt, Artificial Sequence
  Description of Artificial Sequence: Synthetic oligonucleotide
  modified_base (14)..(14): a, c, u, g, unknown or other
uccauugcacauangccug

SEQ ID NO: 2954343 - RNA, 19 nt, Artificial Sequence
  Description of Artificial Sequence: Synthetic oligonucleotide
gaaaguauauuguuuaacu

SEQ ID NO: 2954344 - RNA, 19 nt, Artificial Sequence
  Description of Artificial Sequence: Synthetic oligonucleotide
cugggauccagcaucauag

SEQ ID NO: 2954345 - RNA, 19 nt, Artificial Sequence
  Description of Artificial Sequence: Synthetic oligonucleotide
aacaagggucguuuguauc

SEQ ID NO: 2954346 - RNA, 19 nt, Artificial Sequence
  Description of Artificial Sequence: Synthetic oligonucleotide
uucauuagguagcugggca

SEQ ID NO: 2954347 - RNA, 19 nt, Artificial Sequence
  Description of Artificial Sequence: Synthetic oligonucleotide
cacucaucuugauagaccc

SEQ ID NO: 2954348 - RNA, 19 nt, Artificial Sequence
  Description of Artificial Sequence: Synthetic oligonucleotide
ugauagacccugcucaggc

SEQ ID NO: 2954349 - RNA, 19 nt, Artificial Sequence
  Description of Artificial Sequence: Synthetic oligonucleotide
uaugccacuguccauugca

SEQ ID NO: 2954350 - RNA, 19 nt, Artificial Sequence
  Description of Artificial Sequence: Synthetic oligonucleotide
cuuggcagucacuuuaugc

SEQ ID NO: 2954351 - RNA, 19 nt, Artificial Sequence
  Description of Artificial Sequence: Synthetic oligonucleotide
  modified_base (10)..(10): a, c, u, g, unknown or other
uugcacauangccugggau

SEQ ID NO: 2954352 - RNA, 19 nt, Artificial Sequence
  Description of Artificial Sequence: Synthetic oligonucleotide
uauauuguuuaacuugaua

SEQ ID NO: 2954353 - RNA, 19 nt, Artificial Sequence
  Description of Artificial Sequence: Synthetic oligonucleotide
cauuaguuuuauuaauaug

SEQ ID NO: 2954354 - RNA, 19 nt, Artificial Sequence
  Description of Artificial Sequence: Synthetic oligonucleotide
uaucagcugaugucgaugc

SEQ ID NO: 2954355 - RNA, 19 nt, Artificial Sequence
  Description of Artificial Sequence: Synthetic oligonucleotide
cugauugaggccaucuggg

SEQ ID NO: 2954356 - RNA, 19 nt, Artificial Sequence
  Description of Artificial Sequence: Synthetic oligonucleotide
uaggaaaguauauuguuua

SEQ ID NO: 2954357 - RNA, 19 nt, Artificial Sequence
  Description of Artificial Sequence: Synthetic oligonucleotide
uggugagccucagagaucg

SEQ ID NO: 2954358 - RNA, 19 nt, Artificial Sequence
  Description of Artificial Sequence: Synthetic oligonucleotide
uaugcauaggaaaguauau

SEQ ID NO: 2954359 - RNA, 19 nt, Artificial Sequence
  Description of Artificial Sequence: Synthetic oligonucleotide
agccucagagaucggaugc

SEQ ID NO: 2954360 - RNA, 19 nt, Artificial Sequence
  Description of Artificial Sequence: Synthetic oligonucleotide
cuucucuucauuagguagc

SEQ ID NO: 2954361 - RNA, 19 nt, Artificial Sequence
  Description of Artificial Sequence: Synthetic oligonucleotide
acauuaguuuuauuaauau

SEQ ID NO: 2954362 - RNA, 19 nt, Artificial Sequence
  Description of Artificial Sequence: Synthetic oligonucleotide
uuaauaugcauaggaaagu

SEQ ID NO: 2954363 - RNA, 19 nt, Artificial Sequence
  Description of Artificial Sequence: Synthetic oligonucleotide
cugaauuugggcucugggc

SEQ ID NO: 2954364 - RNA, 19 nt, Artificial Sequence
  Description of Artificial Sequence: Synthetic oligonucleotide
aguauauuguuuaacuuga

SEQ ID NO: 2954365 - RNA, 19 nt, Artificial Sequence
  Description of Artificial Sequence: Synthetic oligonucleotide
auagacugcagugaaucgg

SEQ ID NO: 2954366 - RNA, 19 nt, Artificial Sequence
  Description of Artificial Sequence: Synthetic oligonucleotide
aguuuuauuaauaugcaua

SEQ ID NO: 2954367 - RNA, 19 nt, Artificial Sequence
  Description of Artificial Sequence: Synthetic oligonucleotide
ucgaugcugaauuugggcu

SEQ ID NO: 2954368 - RNA, 19 nt, Artificial Sequence
  Description of Artificial Sequence: Synthetic oligonucleotide
ucacuuuaugccacugucc

SEQ ID NO: 2954369 - RNA, 19 nt, Artificial Sequence
  Description of Artificial Sequence: Synthetic oligonucleotide
uuguacuucucuucauuag

SEQ ID NO: 2954370 - RNA, 19 nt, Artificial Sequence
  Description of Artificial Sequence: Synthetic oligonucleotide
guucccaucuacaacaagc

SEQ ID NO: 2954371 - RNA, 19 nt, Artificial Sequence
  Description of Artificial Sequence: Synthetic oligonucleotide
acaagggucguuuguauca

SEQ ID NO: 2954372 - RNA, 19 nt, Artificial Sequence
  Description of Artificial Sequence: Synthetic oligonucleotide
cuacaacaagcucaaggcg

SEQ ID NO: 2954373 - RNA, 19 nt, Artificial Sequence
  Description of Artificial Sequence: Synthetic oligonucleotide
aucuugauagacccugcuc

SEQ ID NO: 2954374 - RNA, 19 nt, Artificial Sequence
  Description of Artificial Sequence: Synthetic oligonucleotide
ucauagacugcagugaauc

SEQ ID NO: 2954375 - RNA, 19 nt, Artificial Sequence
  Description of Artificial Sequence: Synthetic oligonucleotide
uuguuuaacuugauacacu

SEQ ID NO: 2954376 - RNA, 19 nt, Artificial Sequence
  Description of Artificial Sequence: Synthetic oligonucleotide
cugggcacgauacagguug

SEQ ID NO: 2954377 - RNA, 19 nt, Artificial Sequence
  Description of Artificial Sequence: Synthetic oligonucleotide
uccagcaucauagacugca

SEQ ID NO: 2954378 - RNA, 19 nt, Artificial Sequence
  Description of Artificial Sequence: Synthetic oligonucleotide
guuuguaucagcugauguc

SEQ ID NO: 2954379 - RNA, 19 nt, Artificial Sequence
  Description of Artificial Sequence: Synthetic oligonucleotide
ugucgaugcugaauuuggg

SEQ ID NO: 2954380 - RNA, 19 nt, Artificial Sequence
  Description of Artificial Sequence: Synthetic oligonucleotide
uucccaucuacaacaagcu

SEQ ID NO: 2954381 - RNA, 19 nt, Artificial Sequence
  Description of Artificial Sequence: Synthetic oligonucleotide
acaccccucaauuccaggg

SEQ ID NO: 2954382 - RNA, 19 nt, Artificial Sequence
  Description of Artificial Sequence: Synthetic oligonucleotide
ugguggucaggccaaacug

SEQ ID NO: 2954383 - RNA, 19 nt, Artificial Sequence
  Description of Artificial Sequence: Synthetic oligonucleotide
cacgauacagguugaacac

SEQ ID NO: 2954384 - RNA, 19 nt, Artificial Sequence
  Description of Artificial Sequence: Synthetic oligonucleotide
gcgaaauuaaccuccagug

SEQ ID NO: 2954385 - RNA, 19 nt, Artificial Sequence
  Description of Artificial Sequence: Synthetic oligonucleotide
ucggaugcaaccucggaac

SEQ ID NO: 2954386 - RNA, 19 nt, Artificial Sequence
  Description of Artificial Sequence: Synthetic oligonucleotide
ucggaaccgaauauuggug

SEQ ID NO: 2954387 - RNA, 19 nt, Artificial Sequence
  Description of Artificial Sequence: Synthetic oligonucleotide
aagggucguuuguaucagc

SEQ ID NO: 2954388 - RNA, 19 nt, Artificial Sequence
  Description of Artificial Sequence: Synthetic oligonucleotide
cauagacugcagugaaucg

SEQ ID NO: 2954389 - RNA, 19 nt, Artificial Sequence
  Description of Artificial Sequence: Synthetic oligonucleotide
ggucaggccaaacugauug

SEQ ID NO: 2954390 - RNA, 19 nt, Artificial Sequence
  Description of Artificial Sequence: Synthetic oligonucleotide
gaggccaucugggaaaccg

SEQ ID NO: 2954391 - RNA, 19 nt, Artificial Sequence
  Description of Artificial Sequence: Synthetic oligonucleotide
ugaucuucuuggcagucac

SEQ ID NO: 2954392 - RNA, 19 nt, Artificial Sequence
  Description of Artificial Sequence: Synthetic oligonucleotide
uuaacuugauacacucauc

SEQ ID NO: 2954393 - RNA, 19 nt, Artificial Sequence
  Description of Artificial Sequence: Synthetic oligonucleotide
agagaucggaugcaaccuc

SEQ ID NO: 2954394 - RNA, 19 nt, Artificial Sequence
  Description of Artificial Sequence: Synthetic oligonucleotide
uaguuuuauuaauaugcau

SEQ ID NO: 2954395 - RNA, 19 nt, Artificial Sequence
  Description of Artificial Sequence: Synthetic oligonucleotide
ugaacaccccucaauucca

SEQ ID NO: 2954396 - RNA, 19 nt, Artificial Sequence
  Description of Artificial Sequence: Synthetic oligonucleotide
acacucaucuugauagacc

SEQ ID NO: 2954397 - RNA, 19 nt, Artificial Sequence
  Description of Artificial Sequence: Synthetic oligonucleotide
aaaacaagggucguuugua

SEQ ID NO: 2954398 - RNA, 19 nt, Artificial Sequence
  Description of Artificial Sequence: Synthetic oligonucleotide
gaauauugguggucaggcc

SEQ ID NO: 2954399 - RNA, 19 nt, Artificial Sequence
  Description of Artificial Sequence: Synthetic oligonucleotide
aaacaagggucguuuguau

SEQ ID NO: 2954400 - RNA, 19 nt, Artificial Sequence
  Description of Artificial Sequence: Synthetic oligonucleotide
aacaccccucaauuccagg

SEQ ID NO: 2954401 - RNA, 19 nt, Artificial Sequence
  Description of Artificial Sequence: Synthetic oligonucleotide
cuugauagacccugcucag

SEQ ID NO: 2954402 - RNA, 19 nt, Artificial Sequence
  Description of Artificial Sequence: Synthetic oligonucleotide
  modified_base (9)..(9): a, c, u, g, unknown or other
ugcacauangccugggauc

SEQ ID NO: 2954403 - RNA, 19 nt, Artificial Sequence
  Description of Artificial Sequence: Synthetic oligonucleotide
gucgaugcugaauuugggc

SEQ ID NO: 2954404 - RNA, 19 nt, Artificial Sequence
  Description of Artificial Sequence: Synthetic oligonucleotide
gaugucgaugcugaauuug

SEQ ID NO: 2954405 - RNA, 19 nt, Artificial Sequence
  Description of Artificial Sequence: Synthetic oligonucleotide
caauuccagggcuuuggcg

SEQ ID NO: 2954406 - RNA, 19 nt, Artificial Sequence
  Description of Artificial Sequence: Synthetic oligonucleotide
uuaaccuccaguggcuugc

SEQ ID NO: 2954407 - RNA, 19 nt, Artificial Sequence
  Description of Artificial Sequence: Synthetic oligonucleotide
ugauacacucaucuugaua

SEQ ID NO: 2954408 - RNA, 19 nt, Artificial Sequence
  Description of Artificial Sequence: Synthetic oligonucleotide
aaccgaauauuggugguca

SEQ ID NO: 2954409 - RNA, 19 nt, Artificial Sequence
  Description of Artificial Sequence: Synthetic oligonucleotide
uaauaugcauaggaaagua

SEQ ID NO: 2954410 - RNA, 19 nt, Artificial Sequence
  Description of Artificial Sequence: Synthetic oligonucleotide
ucauuagguagcugggcac

SEQ ID NO: 2954411 - RNA, 19 nt, Artificial Sequence
  Description of Artificial Sequence: Synthetic oligonucleotide
uuuaugccacuguccauug

SEQ ID NO: 2954412 - RNA, 19 nt, Artificial Sequence
  Description of Artificial Sequence: Synthetic oligonucleotide
aauaugcauaggaaaguau

SEQ ID NO: 2954413 - RNA, 19 nt, Artificial Sequence
  Description of Artificial Sequence: Synthetic oligonucleotide
uugguggucaggccaaacu

SEQ ID NO: 2954414 - RNA, 19 nt, Artificial Sequence
  Description of Artificial Sequence: Synthetic oligonucleotide
ugggcguccaccugguucc

SEQ ID NO: 2954415 - RNA, 19 nt, Artificial Sequence
  Description of Artificial Sequence: Synthetic oligonucleotide
acgauacagguugaacacc

SEQ ID NO: 2954416 - RNA, 19 nt, Artificial Sequence
  Description of Artificial Sequence: Synthetic oligonucleotide
  modified_base (4)..(4): a, c, u, g, unknown or other
auangccugggauccagca

SEQ ID NO: 2954417 - RNA, 19 nt, Artificial Sequence
  Description of Artificial Sequence: Synthetic oligonucleotide
cucaucuugauagacccug

SEQ ID NO: 2954418 - RNA, 19 nt, Artificial Sequence
  Description of Artificial Sequence: Synthetic oligonucleotide
gagaucggaugcaaccucg

SEQ ID NO: 2954419 - RNA, 19 nt, Artificial Sequence
  Description of Artificial Sequence: Synthetic oligonucleotide
gucacuuuaugccacuguc

SEQ ID NO: 2954420 - RNA, 19 nt, Artificial Sequence
  Description of Artificial Sequence: Synthetic oligonucleotide
uacagguugaacaccccuc

SEQ ID NO: 2954421 - RNA, 19 nt, Artificial Sequence
  Description of Artificial Sequence: Synthetic oligonucleotide
uagcugggcacgauacagg

SEQ ID NO: 2954422 - RNA, 19 nt, Artificial Sequence
  Description of Artificial Sequence: Synthetic oligonucleotide
cuugccugugccuuuggug

SEQ ID NO: 2954423 - RNA, 19 nt, Artificial Sequence
  Description of Artificial Sequence: Synthetic oligonucleotide
ucaucuugauagacccugc

SEQ ID NO: 2954424 - RNA, 19 nt, Artificial Sequence
  Description of Artificial Sequence: Synthetic oligonucleotide
augucgaugcugaauuugg

SEQ ID NO: 2954425 - RNA, 19 nt, Artificial Sequence
  Description of Artificial Sequence: Synthetic oligonucleotide
auacagguugaacaccccu

SEQ ID NO: 2954426 - RNA, 19 nt, Artificial Sequence
  Description of Artificial Sequence: Synthetic oligonucleotide
acagguugaacaccccuca

SEQ ID NO: 2954427 - RNA, 19 nt, Artificial Sequence
  Description of Artificial Sequence: Synthetic oligonucleotide
ucaggccaaacugauugag

SEQ ID NO: 2954428 - RNA, 19 nt, Artificial Sequence
  Description of Artificial Sequence: Synthetic oligonucleotide
aacuugauacacucaucuu

SEQ ID NO: 2954429 - RNA, 19 nt, Artificial Sequence
  Description of Artificial Sequence: Synthetic oligonucleotide
cauuagguagcugggcacg

SEQ ID NO: 2954430 - RNA, 19 nt, Artificial Sequence
  Description of Artificial Sequence: Synthetic oligonucleotide
guagcugggcacgauacag

SEQ ID NO: 2954431 - RNA, 19 nt, Artificial Sequence
  Description of Artificial Sequence: Synthetic oligonucleotide
auaugcauaggaaaguaua

SEQ ID NO: 2954432 - RNA, 19 nt, Artificial Sequence
  Description of Artificial Sequence: Synthetic oligonucleotide
caggccaaacugauugagg

SEQ ID NO: 2954433 - RNA, 19 nt, Artificial Sequence
  Description of Artificial Sequence: Synthetic oligonucleotide
cacuuuaugccacugucca

SEQ ID NO: 2954434 - RNA, 19 nt, Artificial Sequence
  Description of Artificial Sequence: Synthetic oligonucleotide
uacacucaucuugauagac

SEQ ID NO: 2954435 - RNA, 19 nt, Artificial Sequence
  Description of Artificial Sequence: Synthetic oligonucleotide
aauuugggcucugggcguc

SEQ ID NO: 2954436 - RNA, 19 nt, Artificial Sequence
  Description of Artificial Sequence: Synthetic oligonucleotide
cuuuggcgaaauuaaccuc

SEQ ID NO: 2954437 - RNA, 19 nt, Artificial Sequence
  Description of Artificial Sequence: Synthetic oligonucleotide
uggcagucacuuuaugcca

SEQ ID NO: 2954438 - RNA, 19 nt, Artificial Sequence
  Description of Artificial Sequence: Synthetic oligonucleotide
auuaaccuccaguggcuug

SEQ ID NO: 2954439 - RNA, 19 nt, Artificial Sequence
  Description of Artificial Sequence: Synthetic oligonucleotide
cacauuaguuuuauuaaua

SEQ ID NO: 2954440 - RNA, 19 nt, Artificial Sequence
  Description of Artificial Sequence: Synthetic oligonucleotide
uugauagacccugcucagg

SEQ ID NO: 2954441 - RNA, 19 nt, Artificial Sequence
  Description of Artificial Sequence: Synthetic oligonucleotide
aucggaugcaaccucggaa

SEQ ID NO: 2954442 - RNA, 19 nt, Artificial Sequence
  Description of Artificial Sequence: Synthetic oligonucleotide
gauugaggccaucugggaa

SEQ ID NO: 2954443 - RNA, 19 nt, Artificial Sequence
  Description of Artificial Sequence: Synthetic oligonucleotide
uuguaucagcugaugucga

SEQ ID NO: 2954444 - RNA, 19 nt, Artificial Sequence
  Description of Artificial Sequence: Synthetic oligonucleotide
ugugccuuuggugagccuc

SEQ ID NO: 2954445 - RNA, 19 nt, Artificial Sequence
  Description of Artificial Sequence: Synthetic oligonucleotide
aggaaaguauauuguuuaa

SEQ ID NO: 2954446 - RNA, 19 nt, Artificial Sequence
  Description of Artificial Sequence: Synthetic oligonucleotide
ugagccucagagaucggau

SEQ ID NO: 2954447 - RNA, 19 nt, Artificial Sequence
  Description of Artificial Sequence: Synthetic oligonucleotide
guugaacaccccucaauuc

SEQ ID NO: 2954448 - RNA, 19 nt, Artificial Sequence
  Description of Artificial Sequence: Synthetic oligonucleotide
uuggcgaaauuaaccucca

SEQ ID NO: 2954449 - RNA, 19 nt, Artificial Sequence
  Description of Artificial Sequence: Synthetic oligonucleotide
ucugggaaaccgccaacaa

SEQ ID NO: 2954450 - RNA, 19 nt, Artificial Sequence
  Description of Artificial Sequence: Synthetic oligonucleotide
auaggaaaguauauuguuu

SEQ ID NO: 2954451 - RNA, 19 nt, Artificial Sequence
  Description of Artificial Sequence: Synthetic oligonucleotide
cuucauuagguagcugggc

SEQ ID NO: 2954452 - RNA, 19 nt, Artificial Sequence
  Description of Artificial Sequence: Synthetic oligonucleotide
gcugaauuugggcucuggg

SEQ ID NO: 2954453 - RNA, 19 nt, Artificial Sequence
  Description of Artificial Sequence: Synthetic oligonucleotide
agucacuuuaugccacugu

SEQ ID NO: 2954454 - RNA, 19 nt, Artificial Sequence
  Description of Artificial Sequence: Synthetic oligonucleotide
  modified_base (15)..(15): a, c, u, g, unknown or other
guccauugcacauangccu

SEQ ID NO: 2954455 - RNA, 19 nt, Artificial Sequence
  Description of Artificial Sequence: Synthetic oligonucleotide
ggucguuuguaucagcuga

SEQ ID NO: 2954456 - RNA, 19 nt, Artificial Sequence
  Description of Artificial Sequence: Synthetic oligonucleotide
agguagcugggcacgauac

SEQ ID NO: 2954457 - RNA, 19 nt, Artificial Sequence
  Description of Artificial Sequence: Synthetic oligonucleotide
gcacgauacagguugaaca

SEQ ID NO: 2954458 - RNA, 19 nt, Artificial Sequence
  Description of Artificial Sequence: Synthetic oligonucleotide
acccugcucaggcuuguac

SEQ ID NO: 2954459 - RNA, 19 nt, Artificial Sequence
  Description of Artificial Sequence: Synthetic oligonucleotide
agcugggcacgauacaggu

SEQ ID NO: 2954460 - RNA, 19 nt, Artificial Sequence
  Description of Artificial Sequence: Synthetic oligonucleotide
ucuuggcagucacuuuaug

SEQ ID NO: 2954461 - RNA, 19 nt, Artificial Sequence
  Description of Artificial Sequence: Synthetic oligonucleotide
uucucuucauuagguagcu

SEQ ID NO: 2954462 - RNA, 19 nt, Artificial Sequence
  Description of Artificial Sequence: Synthetic oligonucleotide
ggaaaguauauuguuuaac

SEQ ID NO: 2954463 - RNA, 19 nt, Artificial Sequence
  Description of Artificial Sequence: Synthetic oligonucleotide
  modified_base (5)..(5): a, c, u, g, unknown or other
cauangccugggauccagc

SEQ ID NO: 2954464 - RNA, 19 nt, Artificial Sequence
  Description of Artificial Sequence: Synthetic oligonucleotide
gagccucagagaucggaug

SEQ ID NO: 2954465 - RNA, 19 nt, Artificial Sequence
  Description of Artificial Sequence: Synthetic oligonucleotide
  modified_base (3)..(3): a, c, u, g, unknown or other
uangccugggauccagcau

SEQ ID NO: 2954466 - RNA, 19 nt, Artificial Sequence
  Description of Artificial Sequence: Synthetic oligonucleotide
guaucagcugaugucgaug

SEQ ID NO: 2954467 - RNA, 19 nt, Artificial Sequence
  Description of Artificial Sequence: Synthetic oligonucleotide
uacuucucuucauuaggua

SEQ ID NO: 2954468 - RNA, 19 nt, Artificial Sequence
  Description of Artificial Sequence: Synthetic oligonucleotide
auagacccugcucaggcuu

SEQ ID NO: 2954469 - RNA, 19 nt, Artificial Sequence
  Description of Artificial Sequence: Synthetic oligonucleotide
cuuguacuucucuucauua

SEQ ID NO: 2954470 - RNA, 19 nt, Artificial Sequence
  Description of Artificial Sequence: Synthetic oligonucleotide
uguaucagcugaugucgau

SEQ ID NO: 2954471 - RNA, 19 nt, Artificial Sequence
  Description of Artificial Sequence: Synthetic oligonucleotide
auacacucaucuugauaga

SEQ ID NO: 2954472 - RNA, 19 nt, Artificial Sequence
  Description of Artificial Sequence: Synthetic oligonucleotide
gaugcaaccucggaaccga

SEQ ID NO: 2954473 - RNA, 19 nt, Artificial Sequence
  Description of Artificial Sequence: Synthetic oligonucleotide
  modified_base (11)..(11): a, c, u, g, unknown or other
auugcacauangccuggga

SEQ ID NO: 2954474 - RNA, 19 nt, Artificial Sequence
  Description of Artificial Sequence: Synthetic oligonucleotide
ggcuuuggcgaaauuaacc

SEQ ID NO: 2954475 - RNA, 19 nt, Artificial Sequence
  Description of Artificial Sequence: Synthetic oligonucleotide
agguugaacaccccucaau

SEQ ID NO: 2954476 - RNA, 19 nt, Artificial Sequence
  Description of Artificial Sequence: Synthetic oligonucleotide
cccaucuacaacaagcuca

SEQ ID NO: 2954477 - RNA, 19 nt, Artificial Sequence
  Description of Artificial Sequence: Synthetic oligonucleotide
ucccaucuacaacaagcuc

SEQ ID NO: 2954478 - RNA, 19 nt, Artificial Sequence
  Description of Artificial Sequence: Synthetic oligonucleotide
gauacagguugaacacccc

SEQ ID NO: 2954479 - RNA, 19 nt, Artificial Sequence
  Description of Artificial Sequence: Synthetic oligonucleotide
cgaaauuaaccuccagugg

SEQ ID NO: 2954480 - RNA, 19 nt, Artificial Sequence
  Description of Artificial Sequence: Synthetic oligonucleotide
uucuuggcagucacuuuau

SEQ ID NO: 2954481 - RNA, 19 nt, Artificial Sequence
  Description of Artificial Sequence: Synthetic oligonucleotide
  modified_base (6)..(6): a, c, u, g, unknown or other
acauangccugggauccag

SEQ ID NO: 2954482 - RNA, 19 nt, Artificial Sequence
  Description of Artificial Sequence: Synthetic oligonucleotide
cucagagaucggaugcaac

SEQ ID NO: 2954483 - RNA, 19 nt, Artificial Sequence
  Description of Artificial Sequence: Synthetic oligonucleotide
aauuaaccuccaguggcuu

SEQ ID NO: 2954484 - RNA, 19 nt, Artificial Sequence
  Description of Artificial Sequence: Synthetic oligonucleotide
  modified_base (8)..(8): a, c, u, g, unknown or other
gcacauangccugggaucc

SEQ ID NO: 2954485 - RNA, 19 nt, Artificial Sequence
  Description of Artificial Sequence: Synthetic oligonucleotide
uccaguggcuugccugugc

SEQ ID NO: 2954486 - RNA, 19 nt, Artificial Sequence
  Description of Artificial Sequence: Synthetic oligonucleotide
  modified_base (12)..(12): a, c, u, g, unknown or other
cauugcacauangccuggg

SEQ ID NO: 2954487 - RNA, 19 nt, Artificial Sequence
  Description of Artificial Sequence: Synthetic oligonucleotide
uugaucuucuuggcaguca

SEQ ID NO: 2954488 - RNA, 19 nt, Artificial Sequence
  Description of Artificial Sequence: Synthetic oligonucleotide
cuucuuggcagucacuuua

SEQ ID NO: 2954489 - RNA, 19 nt, Artificial Sequence
  Description of Artificial Sequence: Synthetic oligonucleotide
ugccacuguccauugcaca

SEQ ID NO: 2954490 - RNA, 19 nt, Artificial Sequence
  Description of Artificial Sequence: Synthetic oligonucleotide
uggcgaaauuaaccuccag

SEQ ID NO: 2954491 - RNA, 19 nt, Artificial Sequence
  Description of Artificial Sequence: Synthetic oligonucleotide
ucguuuguaucagcugaug

SEQ ID NO: 2954492 - RNA, 19 nt, Artificial Sequence
  Description of Artificial Sequence: Synthetic oligonucleotide
auugguggucaggccaaac

SEQ ID NO: 2954493 - RNA, 19 nt, Artificial Sequence
  Description of Artificial Sequence: Synthetic oligonucleotide
accgaauauugguggucag

SEQ ID NO: 2954494 - RNA, 19 nt, Artificial Sequence
  Description of Artificial Sequence: Synthetic oligonucleotide
aacaagcucaaggcgguuu

SEQ ID NO: 2954495 - RNA, 19 nt, Artificial Sequence
  Description of Artificial Sequence: Synthetic oligonucleotide
cauaggaaaguauauuguu

SEQ ID NO: 2954496 - RNA, 19 nt, Artificial Sequence
  Description of Artificial Sequence: Synthetic oligonucleotide
caucauagacugcagugaa

SEQ ID NO: 2954497 - RNA, 19 nt, Artificial Sequence
  Description of Artificial Sequence: Synthetic oligonucleotide
caccccucaauuccagggc

SEQ ID NO: 2954498 - RNA, 19 nt, Artificial Sequence
  Description of Artificial Sequence: Synthetic oligonucleotide
accucggaaccgaauauug

SEQ ID NO: 2954499 - RNA, 19 nt, Artificial Sequence
  Description of Artificial Sequence: Synthetic oligonucleotide
acaacaagcucaaggcggu

SEQ ID NO: 2954500 - RNA, 19 nt, Artificial Sequence
  Description of Artificial Sequence: Synthetic oligonucleotide
aucugggaaaccgccaaca

SEQ ID NO: 2954501 - RNA, 19 nt, Artificial Sequence
  Description of Artificial Sequence: Synthetic oligonucleotide
cgauacagguugaacaccc

SEQ ID NO: 2954502 - RNA, 19 nt, Artificial Sequence
  Description of Artificial Sequence: Synthetic oligonucleotide
acaagcucaaggcgguuuu

SEQ ID NO: 2954503 - RNA, 19 nt, Artificial Sequence
  Description of Artificial Sequence: Synthetic oligonucleotide
ugggauccagcaucauaga

SEQ ID NO: 2954504 - RNA, 19 nt, Artificial Sequence
  Description of Artificial Sequence: Synthetic oligonucleotide
accugguucccaucuacaa

SEQ ID NO: 2954505 - RNA, 19 nt, Artificial Sequence
  Description of Artificial Sequence: Synthetic oligonucleotide
uagguagcugggcacgaua

SEQ ID NO: 2954506 - RNA, 19 nt, Artificial Sequence
  Description of Artificial Sequence: Synthetic oligonucleotide
accccucaauuccagggcu

SEQ ID NO: 2954507 - RNA, 19 nt, Artificial Sequence
  Description of Artificial Sequence: Synthetic oligonucleotide
agggcuuuggcgaaauuaa

SEQ ID NO: 2954508 - RNA, 19 nt, Artificial Sequence
  Description of Artificial Sequence: Synthetic oligonucleotide
gaaccgaauauuggugguc

SEQ ID NO: 2954509 - RNA, 19 nt, Artificial Sequence
  Description of Artificial Sequence: Synthetic oligonucleotide
cugggcguccaccugguuc

SEQ ID NO: 2954510 - RNA, 19 nt, Artificial Sequence
  Description of Artificial Sequence: Synthetic oligonucleotide
guuuaacuugauacacuca

SEQ ID NO: 2954511 - RNA, 19 nt, Artificial Sequence
  Description of Artificial Sequence: Synthetic oligonucleotide
gcuuuggcgaaauuaaccu

SEQ ID NO: 2954512 - RNA, 19 nt, Artificial Sequence
  Description of Artificial Sequence: Synthetic oligonucleotide
cuuuggugagccucagaga

SEQ ID NO: 2954513 - RNA, 19 nt, Artificial Sequence
  Description of Artificial Sequence: Synthetic oligonucleotide
cgaauauugguggucaggc

SEQ ID NO: 2954514 - RNA, 19 nt, Artificial Sequence
  Description of Artificial Sequence: Synthetic oligonucleotide
uugauacacucaucuugau

SEQ ID NO: 2954515 - RNA, 19 nt, Artificial Sequence
  Description of Artificial Sequence: Synthetic oligonucleotide
aggccaucugggaaaccgc

SEQ ID NO: 2954516 - RNA, 19 nt, Artificial Sequence
  Description of Artificial Sequence: Synthetic oligonucleotide
cucggaaccgaauauuggu

SEQ ID NO: 2954517 - RNA, 19 nt, Artificial Sequence
  Description of Artificial Sequence: Synthetic oligonucleotide
gaucggaugcaaccucgga

SEQ ID NO: 2954518 - RNA, 19 nt, Artificial Sequence
  Description of Artificial Sequence: Synthetic oligonucleotide
ugccugugccuuuggugag

SEQ ID NO: 2954519 - RNA, 19 nt, Artificial Sequence
  Description of Artificial Sequence: Synthetic oligonucleotide
augcauaggaaaguauauu

SEQ ID NO: 2954520 - RNA, 19 nt, Artificial Sequence
  Description of Artificial Sequence: Synthetic oligonucleotide
uuggugagccucagagauc

SEQ ID NO: 2954521 - RNA, 19 nt, Artificial Sequence
  Description of Artificial Sequence: Synthetic oligonucleotide
acuuuaugccacuguccau

SEQ ID NO: 2954522 - RNA, 19 nt, Artificial Sequence
  Description of Artificial Sequence: Synthetic oligonucleotide
agggucguuuguaucagcu

SEQ ID NO: 2954523 - RNA, 19 nt, Artificial Sequence
  Description of Artificial Sequence: Synthetic oligonucleotide
caagggucguuuguaucag

SEQ ID NO: 2954524 - RNA, 19 nt, Artificial Sequence
  Description of Artificial Sequence: Synthetic oligonucleotide
aaccucggaaccgaauauu

SEQ ID NO: 2954525 - RNA, 19 nt, Artificial Sequence
  Description of Artificial Sequence: Synthetic oligonucleotide
agaucggaugcaaccucgg

SEQ ID NO: 2954526 - RNA, 19 nt, Artificial Sequence
  Description of Artificial Sequence: Synthetic oligonucleotide
augccacuguccauugcac

SEQ ID NO: 2954527 - RNA, 19 nt, Artificial Sequence
  Description of Artificial Sequence: Synthetic oligonucleotide
gaacaccccucaauuccag

SEQ ID NO: 2954528 - RNA, 19 nt, Artificial Sequence
  Description of Artificial Sequence: Synthetic oligonucleotide
cggaaccgaauauuggugg

SEQ ID NO: 2954529 - RNA, 19 nt, Artificial Sequence
  Description of Artificial Sequence: Synthetic oligonucleotide
ugcaaccucggaaccgaau

SEQ ID NO: 2954530 - RNA, 19 nt, Artificial Sequence
  Description of Artificial Sequence: Synthetic oligonucleotide
cagcugaugucgaugcuga

SEQ ID NO: 2954531 - RNA, 19 nt, Artificial Sequence
  Description of Artificial Sequence: Synthetic oligonucleotide
ugguucccaucuacaacaa

SEQ ID NO: 2954532 - RNA, 19 nt, Artificial Sequence
  Description of Artificial Sequence: Synthetic oligonucleotide
ggaugcaaccucggaaccg

SEQ ID NO: 2954533 - RNA, 19 nt, Artificial Sequence
  Description of Artificial Sequence: Synthetic oligonucleotide
ggccaaacugauugaggcc

SEQ ID NO: 2954534 - RNA, 19 nt, Artificial Sequence
  Description of Artificial Sequence: Synthetic oligonucleotide
gaauuugggcucugggcgu

SEQ ID NO: 2954535 - RNA, 19 nt, Artificial Sequence
  Description of Artificial Sequence: Synthetic oligonucleotide
ugaugucgaugcugaauuu

SEQ ID NO: 2954536 - RNA, 19 nt, Artificial Sequence
  Description of Artificial Sequence: Synthetic oligonucleotide
gccaaacugauugaggcca

SEQ ID NO: 2954537 - RNA, 19 nt, Artificial Sequence
  Description of Artificial Sequence: Synthetic oligonucleotide
ggcgaaauuaaccuccagu

SEQ ID NO: 2954538 - RNA, 19 nt, Artificial Sequence
  Description of Artificial Sequence: Synthetic oligonucleotide
ccucggaaccgaauauugg

SEQ ID NO: 2954539 - RNA, 19 nt, Artificial Sequence
  Description of Artificial Sequence: Synthetic oligonucleotide
auuugggcucugggcgucc

SEQ ID NO: 2954540 - RNA, 19 nt, Artificial Sequence
  Description of Artificial Sequence: Synthetic oligonucleotide
gggauccagcaucauagac

SEQ ID NO: 2954541 - RNA, 19 nt, Artificial Sequence
  Description of Artificial Sequence: Synthetic oligonucleotide
gcucugggcguccaccugg

SEQ ID NO: 2954542 - RNA, 19 nt, Artificial Sequence
  Description of Artificial Sequence: Synthetic oligonucleotide
cugaugucgaugcugaauu

SEQ ID NO: 2954543 - RNA, 19 nt, Artificial Sequence
  Description of Artificial Sequence: Synthetic oligonucleotide
auuccagggcuuuggcgaa

SEQ ID NO: 2954544 - RNA, 19 nt, Artificial Sequence
  Description of Artificial Sequence: Synthetic oligonucleotide
auuagguagcugggcacga

SEQ ID NO: 2954545 - RNA, 19 nt, Artificial Sequence
  Description of Artificial Sequence: Synthetic oligonucleotide
auauugguggucaggccaa

SEQ ID NO: 2954546 - RNA, 19 nt, Artificial Sequence
  Description of Artificial Sequence: Synthetic oligonucleotide
aucagcugaugucgaugcu

SEQ ID NO: 2954547 - RNA, 19 nt, Artificial Sequence
  Description of Artificial Sequence: Synthetic oligonucleotide
ugggcacgauacagguuga

SEQ ID NO: 2954548 - RNA, 19 nt, Artificial Sequence
  Description of Artificial Sequence: Synthetic oligonucleotide
caucugggaaaccgccaac

SEQ ID NO: 2954549 - RNA, 19 nt, Artificial Sequence
  Description of Artificial Sequence: Synthetic oligonucleotide
uugaggccaucugggaaac

SEQ ID NO: 2954550 - RNA, 19 nt, Artificial Sequence
  Description of Artificial Sequence: Synthetic oligonucleotide
ugggcucugggcguccacc

SEQ ID NO: 2954551 - RNA, 19 nt, Artificial Sequence
  Description of Artificial Sequence: Synthetic oligonucleotide
  modified_base (13)..(13): a, c, u, g, unknown or other
ccauugcacauangccugg

SEQ ID NO: 2954552 - RNA, 19 nt, Artificial Sequence
  Description of Artificial Sequence: Synthetic oligonucleotide
aaccuccaguggcuugccu

SEQ ID NO: 2954553 - RNA, 19 nt, Artificial Sequence
  Description of Artificial Sequence: Synthetic oligonucleotide
guacuucucuucauuaggu

SEQ ID NO: 2954554 - RNA, 19 nt, Artificial Sequence
  Description of Artificial Sequence: Synthetic oligonucleotide
aguggcuugccugugccuu

SEQ ID NO: 2954555 - RNA, 19 nt, Artificial Sequence
  Description of Artificial Sequence: Synthetic oligonucleotide
ucucuucauuagguagcug

SEQ ID NO: 2954556 - RNA, 19 nt, Artificial Sequence
  Description of Artificial Sequence: Synthetic oligonucleotide
cugggaaaccgccaacaaa

SEQ ID NO: 2954557 - RNA, 19 nt, Artificial Sequence
  Description of Artificial Sequence: Synthetic oligonucleotide
gucaggccaaacugauuga

SEQ ID NO: 2954558 - RNA, 19 nt, Artificial Sequence
  Description of Artificial Sequence: Synthetic oligonucleotide
gauagacccugcucaggcu

SEQ ID NO: 2954559 - RNA, 19 nt, Artificial Sequence
  Description of Artificial Sequence: Synthetic oligonucleotide
gguucccaucuacaacaag

SEQ ID NO: 2954560 - RNA, 19 nt, Artificial Sequence
  Description of Artificial Sequence: Synthetic oligonucleotide
gcaucauagacugcaguga

SEQ ID NO: 2954561 - RNA, 19 nt, Artificial Sequence
  Description of Artificial Sequence: Synthetic oligonucleotide
gggucguuuguaucagcug

SEQ ID NO: 2954562 - RNA, 19 nt, Artificial Sequence
  Description of Artificial Sequence: Synthetic oligonucleotide
ccgaauauugguggucagg

SEQ ID NO: 2954563 - RNA, 19 nt, Artificial Sequence
  Description of Artificial Sequence: Synthetic oligonucleotide
ggauccagcaucauagacu

SEQ ID NO: 2954564 - RNA, 19 nt, Artificial Sequence
  Description of Artificial Sequence: Synthetic oligonucleotide
  modified_base (19)..(19): a, c, u, g, unknown or other
cacuguccauugcacauan

SEQ ID NO: 2954565 - RNA, 19 nt, Artificial Sequence
  Description of Artificial Sequence: Synthetic oligonucleotide
gcaaccucggaaccgaaua

SEQ ID NO: 2954566 - RNA, 19 nt, Artificial Sequence
  Description of Artificial Sequence: Synthetic oligonucleotide
cuuuaugccacuguccauu

SEQ ID NO: 2954567 - RNA, 19 nt, Artificial Sequence
  Description of Artificial Sequence: Synthetic oligonucleotide
gguugaacaccccucaauu

SEQ ID NO: 2954568 - RNA, 19 nt, Artificial Sequence
  Description of Artificial Sequence: Synthetic oligonucleotide
gugagccucagagaucgga

SEQ ID NO: 2954569 - RNA, 19 nt, Artificial Sequence
  Description of Artificial Sequence: Synthetic oligonucleotide
uccaccugguucccaucua

SEQ ID NO: 2954570 - RNA, 19 nt, Artificial Sequence
  Description of Artificial Sequence: Synthetic oligonucleotide
uaaccuccaguggcuugcc

SEQ ID NO: 2954571 - RNA, 19 nt, Artificial Sequence
  Description of Artificial Sequence: Synthetic oligonucleotide
uggucaggccaaacugauu

SEQ ID NO: 2954572 - RNA, 19 nt, Artificial Sequence
  Description of Artificial Sequence: Synthetic oligonucleotide
uuagguagcugggcacgau

SEQ ID NO: 2954573 - RNA, 19 nt, Artificial Sequence
  Description of Artificial Sequence: Synthetic oligonucleotide
aucauagacugcagugaau

SEQ ID NO: 2954574 - RNA, 19 nt, Artificial Sequence
  Description of Artificial Sequence: Synthetic oligonucleotide
gguggucaggccaaacuga

SEQ ID NO: 2954575 - RNA, 19 nt, Artificial Sequence
  Description of Artificial Sequence: Synthetic oligonucleotide
cagggcuuuggcgaaauua

SEQ ID NO: 2954576 - RNA, 19 nt, Artificial Sequence
  Description of Artificial Sequence: Synthetic oligonucleotide
ggcacgauacagguugaac

SEQ ID NO: 2954577 - RNA, 19 nt, Artificial Sequence
  Description of Artificial Sequence: Synthetic oligonucleotide
ccaucuacaacaagcucaa

SEQ ID NO: 2954578 - RNA, 19 nt, Artificial Sequence
  Description of Artificial Sequence: Synthetic oligonucleotide
acucaucuugauagacccu

SEQ ID NO: 2954579 - RNA, 19 nt, Artificial Sequence
  Description of Artificial Sequence: Synthetic oligonucleotide
ccagcaucauagacugcag

SEQ ID NO: 2954580 - RNA, 19 nt, Artificial Sequence
  Description of Artificial Sequence: Synthetic oligonucleotide
cagucacuuuaugccacug

SEQ ID NO: 2954581 - RNA, 19 nt, Artificial Sequence
  Description of Artificial Sequence: Synthetic oligonucleotide
caaacugauugaggccauc

SEQ ID NO: 2954582 - RNA, 19 nt, Artificial Sequence
  Description of Artificial Sequence: Synthetic oligonucleotide
uggcuugccugugccuuug

SEQ ID NO: 2954583 - RNA, 19 nt, Artificial Sequence
  Description of Artificial Sequence: Synthetic oligonucleotide
caccugguucccaucuaca

SEQ ID NO: 2954584 - RNA, 19 nt, Artificial Sequence
  Description of Artificial Sequence: Synthetic oligonucleotide
ggcagucacuuuaugccac

SEQ ID NO: 2954585 - RNA, 19 nt, Artificial Sequence
  Description of Artificial Sequence: Synthetic oligonucleotide
ccaguggcuugccugugcc

SEQ ID NO: 2954586 - RNA, 19 nt, Artificial Sequence
  Description of Artificial Sequence: Synthetic oligonucleotide
ggccaucugggaaaccgcc

SEQ ID NO: 2954587 - RNA, 19 nt, Artificial Sequence
  Description of Artificial Sequence: Synthetic oligonucleotide
uuugggcucugggcgucca

SEQ ID NO: 2954588 - RNA, 19 nt, Artificial Sequence
  Description of Artificial Sequence: Synthetic oligonucleotide
uauugguggucaggccaaa

SEQ ID NO: 2954589 - RNA, 19 nt, Artificial Sequence
  Description of Artificial Sequence: Synthetic oligonucleotide
caucuugauagacccugcu

SEQ ID NO: 2954590 - RNA, 19 nt, Artificial Sequence
  Description of Artificial Sequence: Synthetic oligonucleotide
gguagcugggcacgauaca

SEQ ID NO: 2954591 - RNA, 19 nt, Artificial Sequence
  Description of Artificial Sequence: Synthetic oligonucleotide
caucuacaacaagcucaag

SEQ ID NO: 2954592 - RNA, 19 nt, Artificial Sequence
  Description of Artificial Sequence: Synthetic oligonucleotide
  modified_base (18)..(18): a, c, u, g, unknown or other
acuguccauugcacauang

SEQ ID NO: 2954593 - RNA, 19 nt, Artificial Sequence
  Description of Artificial Sequence: Synthetic oligonucleotide
uugggcucugggcguccac

SEQ ID NO: 2954594 - RNA, 19 nt, Artificial Sequence
  Description of Artificial Sequence: Synthetic oligonucleotide
uccagggcuuuggcgaaau

SEQ ID NO: 2954595 - RNA, 19 nt, Artificial Sequence
  Description of Artificial Sequence: Synthetic oligonucleotide
ggaaccgaauauugguggu

SEQ ID NO: 2954596 - RNA, 19 nt, Artificial Sequence
  Description of Artificial Sequence: Synthetic oligonucleotide
ugaggccaucugggaaacc

SEQ ID NO: 2954597 - RNA, 19 nt, Artificial Sequence
  Description of Artificial Sequence: Synthetic oligonucleotide
ccaccugguucccaucuac

SEQ ID NO: 2954598 - RNA, 19 nt, Artificial Sequence
  Description of Artificial Sequence: Synthetic oligonucleotide
cagagaucggaugcaaccu

SEQ ID NO: 2954599 - RNA, 19 nt, Artificial Sequence
  Description of Artificial Sequence: Synthetic oligonucleotide
agcugaugucgaugcugaa

SEQ ID NO: 2954600 - RNA, 19 nt, Artificial Sequence
  Description of Artificial Sequence: Synthetic oligonucleotide
guccaccugguucccaucu

SEQ ID NO: 2954601 - RNA, 19 nt, Artificial Sequence
  Description of Artificial Sequence: Synthetic oligonucleotide
guauauuguuuaacuugau

SEQ ID NO: 2954602 - RNA, 19 nt, Artificial Sequence
  Description of Artificial Sequence: Synthetic oligonucleotide
cagcaucauagacugcagu

SEQ ID NO: 2954603 - RNA, 19 nt, Artificial Sequence
  Description of Artificial Sequence: Synthetic oligonucleotide
gggcuuuggcgaaauuaac

SEQ ID NO: 2954604 - RNA, 19 nt, Artificial Sequence
  Description of Artificial Sequence: Synthetic oligonucleotide
cucaggcuuguacuucucu

SEQ ID NO: 2954605 - RNA, 19 nt, Artificial Sequence
  Description of Artificial Sequence: Synthetic oligonucleotide
ccugugccuuuggugagcc

SEQ ID NO: 2954606 - RNA, 19 nt, Artificial Sequence
  Description of Artificial Sequence: Synthetic oligonucleotide
cagguugaacaccccucaa

SEQ ID NO: 2954607 - RNA, 19 nt, Artificial Sequence
  Description of Artificial Sequence: Synthetic oligonucleotide
caaccucggaaccgaauau

SEQ ID NO: 2954608 - RNA, 19 nt, Artificial Sequence
  Description of Artificial Sequence: Synthetic oligonucleotide
  modified_base (7)..(7): a, c, u, g, unknown or other
cacauangccugggaucca

SEQ ID NO: 2954609 - RNA, 19 nt, Artificial Sequence
  Description of Artificial Sequence: Synthetic oligonucleotide
gccacuguccauugcacau

SEQ ID NO: 2954610 - RNA, 19 nt, Artificial Sequence
  Description of Artificial Sequence: Synthetic oligonucleotide
agacccugcucaggcuugu

SEQ ID NO: 2954611 - RNA, 19 nt, Artificial Sequence
  Description of Artificial Sequence: Synthetic oligonucleotide
ggcuugccugugccuuugg

SEQ ID NO: 2954612 - RNA, 19 nt, Artificial Sequence
  Description of Artificial Sequence: Synthetic oligonucleotide
uuccagggcuuuggcgaaa

SEQ ID NO: 2954613 - RNA, 19 nt, Artificial Sequence
  Description of Artificial Sequence: Synthetic oligonucleotide
ccaucugggaaaccgccaa

SEQ ID NO: 2954614 - RNA, 19 nt, Artificial Sequence
  Description of Artificial Sequence: Synthetic oligonucleotide
ucugggcguccaccugguu

SEQ ID NO: 2954615 - RNA, 19 nt, Artificial Sequence
  Description of Artificial Sequence: Synthetic oligonucleotide
gucguuuguaucagcugau

SEQ ID NO: 2954616 - RNA, 19 nt, Artificial Sequence
  Description of Artificial Sequence: Synthetic oligonucleotide
guggucaggccaaacugau

SEQ ID NO: 2954617 - RNA, 19 nt, Artificial Sequence
  Description of Artificial Sequence: Synthetic oligonucleotide
augcugaauuugggcucug

SEQ ID NO: 2954618 - RNA, 19 nt, Artificial Sequence
  Description of Artificial Sequence: Synthetic oligonucleotide
gcugaugucgaugcugaau

SEQ ID NO: 2954619 - RNA, 19 nt, Artificial Sequence
  Description of Artificial Sequence: Synthetic oligonucleotide
cguuuguaucagcugaugu

SEQ ID NO: 2954620 - RNA, 19 nt, Artificial Sequence
  Description of Artificial Sequence: Synthetic oligonucleotide
ccugggauccagcaucaua

SEQ ID NO: 2954621 - RNA, 19 nt, Artificial Sequence
  Description of Artificial Sequence: Synthetic oligonucleotide
gccaucugggaaaccgcca

SEQ ID NO: 2954622 - RNA, 19 nt, Artificial Sequence
  Description of Artificial Sequence: Synthetic oligonucleotide
ccucaauuccagggcuuug

SEQ ID NO: 2954623 - RNA, 19 nt, Artificial Sequence
  Description of Artificial Sequence: Synthetic oligonucleotide
gcagucacuuuaugccacu

SEQ ID NO: 2954624 - RNA, 19 nt, Artificial Sequence
  Description of Artificial Sequence: Synthetic oligonucleotide
gccugugccuuuggugagc

SEQ ID NO: 2954625 - RNA, 19 nt, Artificial Sequence
  Description of Artificial Sequence: Synthetic oligonucleotide
ggugagccucagagaucgg

SEQ ID NO: 2954626 - RNA, 19 nt, Artificial Sequence
  Description of Artificial Sequence: Synthetic oligonucleotide
augcaaccucggaaccgaa

SEQ ID NO: 2954627 - RNA, 19 nt, Artificial Sequence
  Description of Artificial Sequence: Synthetic oligonucleotide
ggcuuguacuucucuucau

SEQ ID NO: 2954628 - RNA, 19 nt, Artificial Sequence
  Description of Artificial Sequence: Synthetic oligonucleotide
cucugggcguccaccuggu

SEQ ID NO: 2954629 - RNA, 19 nt, Artificial Sequence
  Description of Artificial Sequence: Synthetic oligonucleotide
ccuccaguggcuugccugu

SEQ ID NO: 2954630 - RNA, 19 nt, Artificial Sequence
  Description of Artificial Sequence: Synthetic oligonucleotide
caguggcuugccugugccu

SEQ ID NO: 2954631 - RNA, 19 nt, Artificial Sequence
  Description of Artificial Sequence: Synthetic oligonucleotide
gcuugccugugccuuuggu

SEQ ID NO: 2954632 - RNA, 19 nt, Artificial Sequence
  Description of Artificial Sequence: Synthetic oligonucleotide
guggcuugccugugccuuu

SEQ ID NO: 2954633 - RNA, 19 nt, Artificial Sequence
  Description of Artificial Sequence: Synthetic oligonucleotide
ccucagagaucggaugcaa

SEQ ID NO: 2954634 - RNA, 19 nt, Artificial Sequence
  Description of Artificial Sequence: Synthetic oligonucleotide
gcucaggcuuguacuucuc

SEQ ID NO: 2954635 - RNA, 19 nt, Artificial Sequence
  Description of Artificial Sequence: Synthetic oligonucleotide
gacccugcucaggcuugua

SEQ ID NO: 2954636 - RNA, 19 nt, Artificial Sequence
  Description of Artificial Sequence: Synthetic oligonucleotide
gggcacgauacagguugaa

SEQ ID NO: 2954637 - RNA, 19 nt, Artificial Sequence
  Description of Artificial Sequence: Synthetic oligonucleotide
ccaaacugauugaggccau

SEQ ID NO: 2954638 - RNA, 19 nt, Artificial Sequence
  Description of Artificial Sequence: Synthetic oligonucleotide
gcguccaccugguucccau

SEQ ID NO: 2954639 - RNA, 19 nt, Artificial Sequence
  Description of Artificial Sequence: Synthetic oligonucleotide
cguccaccugguucccauc

SEQ ID NO: 2954640 - RNA, 19 nt, Artificial Sequence
  Description of Artificial Sequence: Synthetic oligonucleotide
ccacuguccauugcacaua

SEQ ID NO: 2954641 - RNA, 19 nt, Artificial Sequence
  Description of Artificial Sequence: Synthetic oligonucleotide
cugugccuuuggugagccu

SEQ ID NO: 2954642 - RNA, 19 nt, Artificial Sequence
  Description of Artificial Sequence: Synthetic oligonucleotide
gggcguccaccugguuccc

SEQ ID NO: 2954643 - RNA, 19 nt, Artificial Sequence
  Description of Artificial Sequence: Synthetic oligonucleotide
ggcguccaccugguuccca

SEQ ID NO: 2954644 - RNA, 19 nt, Artificial Sequence
  Description of Artificial Sequence: Synthetic oligonucleotide
caacaagcucaaggcgguu

SEQ ID NO: 2954645 - RNA, 19 nt, Artificial Sequence
  Description of Artificial Sequence: Synthetic oligonucleotide
gcugggcacgauacagguu

SEQ ID NO: 2954646 - RNA, 19 nt, Artificial Sequence
  Description of Artificial Sequence: Synthetic oligonucleotide
cccucaauuccagggcuuu

SEQ ID NO: 2954647 - RNA, 19 nt, Artificial Sequence
  Description of Artificial Sequence: Synthetic oligonucleotide
ccccucaauuccagggcuu

SEQ ID NO: 2954648 - RNA, 19 nt, Artificial Sequence
  Description of Artificial Sequence: Synthetic oligonucleotide
ccagggcuuuggcgaaauu

SEQ ID NO: 2954649 - RNA, 19 nt, Artificial Sequence
  Description of Artificial Sequence: Synthetic oligonucleotide
gccugggauccagcaucau

SEQ ID NO: 2954650 - RNA, 19 nt, Artificial Sequence
  Description of Artificial Sequence: Synthetic oligonucleotide
  modified_base (1)..(1): a, c, u, g, unknown or other
ngccugggauccagcauca

SEQ ID NO: 2954651 - RNA, 19 nt, Artificial Sequence
  Description of Artificial Sequence: Synthetic oligonucleotide
uguuaaacauauauuuucg

SEQ ID NO: 2954652 - RNA, 19 nt, Artificial Sequence
  Description of Artificial Sequence: Synthetic oligonucleotide
uuuuauuuugggacgaggg

SEQ ID NO: 2954653 - RNA, 19 nt, Artificial Sequence
  Description of Artificial Sequence: Synthetic oligonucleotide
uuuauuuugggacgagggg

SEQ ID NO: 2954654 - RNA, 19 nt, Artificial Sequence
  Description of Artificial Sequence: Synthetic oligonucleotide
ucuugagugaugcugagug

SEQ ID NO: 2954655 - RNA, 19 nt, Artificial Sequence
  Description of Artificial Sequence: Synthetic oligonucleotide
uuguuaaacauauauuuuc

SEQ ID NO: 2954656 - RNA, 19 nt, Artificial Sequence
  Description of Artificial Sequence: Synthetic oligonucleotide
agugaggugaccuuucggg

SEQ ID NO: 2954657 - RNA, 19 nt, Artificial Sequence
  Description of Artificial Sequence: Synthetic oligonucleotide
uuggccuugagccucagag

SEQ ID NO: 2954658 - RNA, 19 nt, Artificial Sequence
  Description of Artificial Sequence: Synthetic oligonucleotide
uauuuugggacgaggggcg

SEQ ID NO: 2954659 - RNA, 19 nt, Artificial Sequence
  Description of Artificial Sequence: Synthetic oligonucleotide
uaaacauauauuuucguuu

SEQ ID NO: 2954660 - RNA, 19 nt, Artificial Sequence
  Description of Artificial Sequence: Synthetic oligonucleotide
ugcuccuuggccuugagcc

SEQ ID NO: 2954661 - RNA, 19 nt, Artificial Sequence
  Description of Artificial Sequence: Synthetic oligonucleotide
aaacauauauuuucguuuu

SEQ ID NO: 2954662 - RNA, 19 nt, Artificial Sequence
  Description of Artificial Sequence: Synthetic oligonucleotide
uuauuuugggacgaggggc

SEQ ID NO: 2954663 - RNA, 19 nt, Artificial Sequence
  Description of Artificial Sequence: Synthetic oligonucleotide
uuaaacauauauuuucguu

SEQ ID NO: 2954664 - RNA, 19 nt, Artificial Sequence
  Description of Artificial Sequence: Synthetic oligonucleotide
auuuggucuugagugaugc

SEQ ID NO: 2954665 - RNA, 19 nt, Artificial Sequence
  Description of Artificial Sequence: Synthetic oligonucleotide
gucugugccaucuugggag

SEQ ID NO: 2954666 - RNA, 19 nt, Artificial Sequence
  Description of Artificial Sequence: Synthetic oligonucleotide
uugagugaugcugagugag

SEQ ID NO: 2954667 - RNA, 19 nt, Artificial Sequence
  Description of Artificial Sequence: Synthetic oligonucleotide
ucagcguccaggcugcugc

SEQ ID NO: 2954668 - RNA, 19 nt, Artificial Sequence
  Description of Artificial Sequence: Synthetic oligonucleotide
cuugucagcguccaggcug

SEQ ID NO: 2954669 - RNA, 19 nt, Artificial Sequence
  Description of Artificial Sequence: Synthetic oligonucleotide
ucugcagcggcaguggccg

SEQ ID NO: 2954670 - RNA, 19 nt, Artificial Sequence
  Description of Artificial Sequence: Synthetic oligonucleotide
uuuagcgccagaagcugcc

SEQ ID NO: 2954671 - RNA, 19 nt, Artificial Sequence
  Description of Artificial Sequence: Synthetic oligonucleotide
ugagugaugcugagugagg

SEQ ID NO: 2954672 - RNA, 19 nt, Artificial Sequence
  Description of Artificial Sequence: Synthetic oligonucleotide
uuggucuugagugaugcug

SEQ ID NO: 2954673 - RNA, 19 nt, Artificial Sequence
  Description of Artificial Sequence: Synthetic oligonucleotide
uggagggcagccuuuagca

SEQ ID NO: 2954674 - RNA, 19 nt, Artificial Sequence
  Description of Artificial Sequence: Synthetic oligonucleotide
agagcagcuaugcuggaug

SEQ ID NO: 2954675 - RNA, 19 nt, Artificial Sequence
  Description of Artificial Sequence: Synthetic oligonucleotide
ugagugaggugaccuuucg

SEQ ID NO: 2954676 - RNA, 19 nt, Artificial Sequence
  Description of Artificial Sequence: Synthetic oligonucleotide
ucuguuuccauuuggucuu

SEQ ID NO: 2954677 - RNA, 19 nt, Artificial Sequence
  Description of Artificial Sequence: Synthetic oligonucleotide
agaagcugccuugucagcg

SEQ ID NO: 2954678 - RNA, 19 nt, Artificial Sequence
  Description of Artificial Sequence: Synthetic oligonucleotide
cagccuuuagcacaccucc

SEQ ID NO: 2954679 - RNA, 19 nt, Artificial Sequence
  Description of Artificial Sequence: Synthetic oligonucleotide
cuuuagcacaccuccuugc

SEQ ID NO: 2954680 - RNA, 19 nt, Artificial Sequence
  Description of Artificial Sequence: Synthetic oligonucleotide
caucuugggagugugcugg

SEQ ID NO: 2954681 - RNA, 19 nt, Artificial Sequence
  Description of Artificial Sequence: Synthetic oligonucleotide
gaggugaccuuucgggacg

SEQ ID NO: 2954682 - RNA, 19 nt, Artificial Sequence
  Description of Artificial Sequence: Synthetic oligonucleotide
cuugggagugugcuggucc

SEQ ID NO: 2954683 - RNA, 19 nt, Artificial Sequence
  Description of Artificial Sequence: Synthetic oligonucleotide
uuucgggacgcgcccaagg

SEQ ID NO: 2954684 - RNA, 19 nt, Artificial Sequence
  Description of Artificial Sequence: Synthetic oligonucleotide
ugaccuuucgggacgcgcc

SEQ ID NO: 2954685 - RNA, 19 nt, Artificial Sequence
  Description of Artificial Sequence: Synthetic oligonucleotide
uucgggacgcgcccaaggg

SEQ ID NO: 2954686 - RNA, 19 nt, Artificial Sequence
  Description of Artificial Sequence: Synthetic oligonucleotide
ugagccucagagcagcuau

SEQ ID NO: 2954687 - RNA, 19 nt, Artificial Sequence
  Description of Artificial Sequence: Synthetic oligonucleotide
aggauguugagcugcguga

SEQ ID NO: 2954688 - RNA, 19 nt, Artificial Sequence
  Description of Artificial Sequence: Synthetic oligonucleotide
ugcgcgucugucugcagcg

SEQ ID NO: 2954689 - RNA, 19 nt, Artificial Sequence
  Description of Artificial Sequence: Synthetic oligonucleotide
augcgcgucugucugcagc

SEQ ID NO: 2954690 - RNA, 19 nt, Artificial Sequence
  Description of Artificial Sequence: Synthetic oligonucleotide
caggcugcugcgaaggcgg

SEQ ID NO: 2954691 - RNA, 19 nt, Artificial Sequence
  Description of Artificial Sequence: Synthetic oligonucleotide
aggggugcgaaaguggagg

SEQ ID NO: 2954692 - RNA, 19 nt, Artificial Sequence
  Description of Artificial Sequence: Synthetic oligonucleotide
ugaggugaccuuucgggac

SEQ ID NO: 2954693 - RNA, 19 nt, Artificial Sequence
  Description of Artificial Sequence: Synthetic oligonucleotide
uccucuguuuccauuuggu

SEQ ID NO: 2954694 - RNA, 19 nt, Artificial Sequence
  Description of Artificial Sequence: Synthetic oligonucleotide
gagugaggugaccuuucgg

SEQ ID NO: 2954695 - RNA, 19 nt, Artificial Sequence
  Description of Artificial Sequence: Synthetic oligonucleotide
uggacagccagcggaagag

SEQ ID NO: 2954696 - RNA, 19 nt, Artificial Sequence
  Description of Artificial Sequence: Synthetic oligonucleotide
aggggcgaggggcaggggc

SEQ ID NO: 2954697 - RNA, 19 nt, Artificial Sequence
  Description of Artificial Sequence: Synthetic oligonucleotide
ugucugugccaucuuggga

SEQ ID NO: 2954698 - RNA, 19 nt, Artificial Sequence
  Description of Artificial Sequence: Synthetic oligonucleotide
uugucagcguccaggcugc

SEQ ID NO: 2954699 - RNA, 19 nt, Artificial Sequence
  Description of Artificial Sequence: Synthetic oligonucleotide
agccucagagcagcuaugc

SEQ ID NO: 2954700 - RNA, 19 nt, Artificial Sequence
  Description of Artificial Sequence: Synthetic oligonucleotide
aaggcggcugugcucuguc

SEQ ID NO: 2954701 - RNA, 19 nt, Artificial Sequence
  Description of Artificial Sequence: Synthetic oligonucleotide
ucggccagcgcucccgagg

SEQ ID NO: 2954702 - RNA, 19 nt, Artificial Sequence
  Description of Artificial Sequence: Synthetic oligonucleotide
ugccacgucccuuuagcgc

SEQ ID NO: 2954703 - RNA, 19 nt, Artificial Sequence
  Description of Artificial Sequence: Synthetic oligonucleotide
guuuccauuuggucuugag

SEQ ID NO: 2954704 - RNA, 19 nt, Artificial Sequence
  Description of Artificial Sequence: Synthetic oligonucleotide
gagggcagccuuuagcaca

SEQ ID NO: 2954705 - RNA, 19 nt, Artificial Sequence
  Description of Artificial Sequence: Synthetic oligonucleotide
uuugggacgaggggcgagg

SEQ ID NO: 2954706 - RNA, 19 nt, Artificial Sequence
  Description of Artificial Sequence: Synthetic oligonucleotide
ucgggacgcgcccaagggg

SEQ ID NO: 2954707 - RNA, 19 nt, Artificial Sequence
  Description of Artificial Sequence: Synthetic oligonucleotide
agcugcgugagcugcgcgg

SEQ ID NO: 2954708 - RNA, 19 nt, Artificial Sequence
  Description of Artificial Sequence: Synthetic oligonucleotide
agugaugcugagugaggug

SEQ ID NO: 2954709 - RNA, 19 nt, Artificial Sequence
  Description of Artificial Sequence: Synthetic oligonucleotide
guuaaacauauauuuucgu

SEQ ID NO: 2954710 - RNA, 19 nt, Artificial Sequence
  Description of Artificial Sequence: Synthetic oligonucleotide
ucugucugcagcggcagug

SEQ ID NO: 2954711 - RNA, 19 nt, Artificial Sequence
  Description of Artificial Sequence: Synthetic oligonucleotide
gauguugagcugcgugagc

SEQ ID NO: 2954712 - RNA, 19 nt, Artificial Sequence
  Description of Artificial Sequence: Synthetic oligonucleotide
caggauguugagcugcgug

SEQ ID NO: 2954713 - RNA, 19 nt, Artificial Sequence
  Description of Artificial Sequence: Synthetic oligonucleotide
gagcagcuaugcuggaugc

SEQ ID NO: 2954714 - RNA, 19 nt, Artificial Sequence
  Description of Artificial Sequence: Synthetic oligonucleotide
auguugagcugcgugagcu

SEQ ID NO: 2954715 - RNA, 19 nt, Artificial Sequence
  Description of Artificial Sequence: Synthetic oligonucleotide
guccucuguuuccauuugg

SEQ ID NO: 2954716 - RNA, 19 nt, Artificial Sequence
  Description of Artificial Sequence: Synthetic oligonucleotide
ugcucugucugugccaucu

SEQ ID NO: 2954717 - RNA, 19 nt, Artificial Sequence
  Description of Artificial Sequence: Synthetic oligonucleotide
uggccuugagccucagagc

SEQ ID NO: 2954718 - RNA, 19 nt, Artificial Sequence
  Description of Artificial Sequence: Synthetic oligonucleotide
ugagcugcgcggcaugcuc

SEQ ID NO: 2954719 - RNA, 19 nt, Artificial Sequence
  Description of Artificial Sequence: Synthetic oligonucleotide
agcgccagaagcugccuug

SEQ ID NO: 2954720 - RNA, 19 nt, Artificial Sequence
  Description of Artificial Sequence: Synthetic oligonucleotide
cagcuaugcuggaugcgcg

SEQ ID NO: 2954721 - RNA, 19 nt, Artificial Sequence
  Description of Artificial Sequence: Synthetic oligonucleotide
guggagggcagccuuuagc

SEQ ID NO: 2954722 - RNA, 19 nt, Artificial Sequence
  Description of Artificial Sequence: Synthetic oligonucleotide
uguugagcugcgugagcug

SEQ ID NO: 2954723 - RNA, 19 nt, Artificial Sequence
  Description of Artificial Sequence: Synthetic oligonucleotide
agcggcaguggccgggucg

SEQ ID NO: 2954724 - RNA, 19 nt, Artificial Sequence
  Description of Artificial Sequence: Synthetic oligonucleotide
cuggaugcgcgucugucug

SEQ ID NO: 2954725 - RNA, 19 nt, Artificial Sequence
  Description of Artificial Sequence: Synthetic oligonucleotide
ccagaagcugccuugucag

SEQ ID NO: 2954726 - RNA, 19 nt, Artificial Sequence
  Description of Artificial Sequence: Synthetic oligonucleotide
uuuggucuugagugaugcu

SEQ ID NO: 2954727 - RNA, 19 nt, Artificial Sequence
  Description of Artificial Sequence: Synthetic oligonucleotide
gugccacgucccuuuagcg

SEQ ID NO: 2954728 - RNA, 19 nt, Artificial Sequence
  Description of Artificial Sequence: Synthetic oligonucleotide
ugguccucuguuuccauuu

SEQ ID NO: 2954729 - RNA, 19 nt, Artificial Sequence
  Description of Artificial Sequence: Synthetic oligonucleotide
ugcgcggcaugcuccuugg

SEQ ID NO: 2954730 - RNA, 19 nt, Artificial Sequence
  Description of Artificial Sequence: Synthetic oligonucleotide
cauuuggucuugagugaug

SEQ ID NO: 2954731 - RNA, 19 nt, Artificial Sequence
  Description of Artificial Sequence: Synthetic oligonucleotide
uugggagugugcugguccu

SEQ ID NO: 2954732 - RNA, 19 nt, Artificial Sequence
  Description of Artificial Sequence: Synthetic oligonucleotide
caaggggugcgaaagugga

SEQ ID NO: 2954733 - RNA, 19 nt, Artificial Sequence
  Description of Artificial Sequence: Synthetic oligonucleotide
ggugccacgucccuuuagc

SEQ ID NO: 2954734 - RNA, 19 nt, Artificial Sequence
  Description of Artificial Sequence: Synthetic oligonucleotide
gaugcugagugaggugacc

SEQ ID NO: 2954735 - RNA, 19 nt, Artificial Sequence
  Description of Artificial Sequence: Synthetic oligonucleotide
gccacgucccuuuagcgcc

SEQ ID NO: 2954736 - RNA, 19 nt, Artificial Sequence
  Description of Artificial Sequence: Synthetic oligonucleotide
cagccagcggaagaggugc

SEQ ID NO: 2954737 - RNA, 19 nt, Artificial Sequence
  Description of Artificial Sequence: Synthetic oligonucleotide
cucugucugugccaucuug

SEQ ID NO: 2954738 - RNA, 19 nt, Artificial Sequence
  Description of Artificial Sequence: Synthetic oligonucleotide
uaugcuggaugcgcgucug

SEQ ID NO: 2954739 - RNA, 19 nt, Artificial Sequence
  Description of Artificial Sequence: Synthetic oligonucleotide
ucugugccaucuugggagu

SEQ ID NO: 2954740 - RNA, 19 nt, Artificial Sequence
  Description of Artificial Sequence: Synthetic oligonucleotide
ggccuugagccucagagca

SEQ ID NO: 2954741 - RNA, 19 nt, Artificial Sequence
  Description of Artificial Sequence: Synthetic oligonucleotide
ugugcucugucugugccau

SEQ ID NO: 2954742 - RNA, 19 nt, Artificial Sequence
  Description of Artificial Sequence: Synthetic oligonucleotide
gaccuuucgggacgcgccc

SEQ ID NO: 2954743 - RNA, 19 nt, Artificial Sequence
  Description of Artificial Sequence: Synthetic oligonucleotide
uuuugggacgaggggcgag

SEQ ID NO: 2954744 - RNA, 19 nt, Artificial Sequence
  Description of Artificial Sequence: Synthetic oligonucleotide
agggcagccuuuagcacac

SEQ ID NO: 2954745 - RNA, 19 nt, Artificial Sequence
  Description of Artificial Sequence: Synthetic oligonucleotide
agaggugccacgucccuuu

SEQ ID NO: 2954746 - RNA, 19 nt, Artificial Sequence
  Description of Artificial Sequence: Synthetic oligonucleotide
cagguggacagccagcgga

SEQ ID NO: 2954747 - RNA, 19 nt, Artificial Sequence
  Description of Artificial Sequence: Synthetic oligonucleotide
ugggacgaggggcgagggg

SEQ ID NO: 2954748 - RNA, 19 nt, Artificial Sequence
  Description of Artificial Sequence: Synthetic oligonucleotide
gugaggugaccuuucggga

SEQ ID NO: 2954749 - RNA, 19 nt, Artificial Sequence
  Description of Artificial Sequence: Synthetic oligonucleotide
cugagugaggugaccuuuc

SEQ ID NO: 2954750 - RNA, 19 nt, Artificial Sequence
  Description of Artificial Sequence: Synthetic oligonucleotide
aaggggugcgaaaguggag

SEQ ID NO: 2954751 - RNA, 19 nt, Artificial Sequence
  Description of Artificial Sequence: Synthetic oligonucleotide
ugugccaucuugggagugu

SEQ ID NO: 2954752 - RNA, 19 nt, Artificial Sequence
  Description of Artificial Sequence: Synthetic oligonucleotide
ccaaggggugcgaaagugg

SEQ ID NO: 2954753 - RNA, 19 nt, Artificial Sequence
  Description of Artificial Sequence: Synthetic oligonucleotide
aguggagggcagccuuuag

SEQ ID NO: 2954754 - RNA, 19 nt, Artificial Sequence
  Description of Artificial Sequence: Synthetic oligonucleotide
agcuaugcuggaugcgcgu

SEQ ID NO: 2954755 - RNA, 19 nt, Artificial Sequence
  Description of Artificial Sequence: Synthetic oligonucleotide
agcagcuaugcuggaugcg

SEQ ID NO: 2954756 - RNA, 19 nt, Artificial Sequence
  Description of Artificial Sequence: Synthetic oligonucleotide
ugcgaaaguggagggcagc

SEQ ID NO: 2954757 - RNA, 19 nt, Artificial Sequence
  Description of Artificial Sequence: Synthetic oligonucleotide
cuugagugaugcugaguga

SEQ ID NO: 2954758 - RNA, 19 nt, Artificial Sequence
  Description of Artificial Sequence: Synthetic oligonucleotide
cagaagcugccuugucagc

SEQ ID NO: 2954759 - RNA, 19 nt, Artificial Sequence
  Description of Artificial Sequence: Synthetic oligonucleotide
augcugagugaggugaccu

SEQ ID NO: 2954760 - RNA, 19 nt, Artificial Sequence
  Description of Artificial Sequence: Synthetic oligonucleotide
cagcggaagaggugccacg

SEQ ID NO: 2954761 - RNA, 19 nt, Artificial Sequence
  Description of Artificial Sequence: Synthetic oligonucleotide
ggcagguggacagccagcg

SEQ ID NO: 2954762 - RNA, 19 nt, Artificial Sequence
  Description of Artificial Sequence: Synthetic oligonucleotide
ugccaucuugggagugugc

SEQ ID NO: 2954763 - RNA, 19 nt, Artificial Sequence
  Description of Artificial Sequence: Synthetic oligonucleotide
ggauguugagcugcgugag

SEQ ID NO: 2954764 - RNA, 19 nt, Artificial Sequence
  Description of Artificial Sequence: Synthetic oligonucleotide
uugcccgugcuggugcccg

SEQ ID NO: 2954765 - RNA, 19 nt, Artificial Sequence
  Description of Artificial Sequence: Synthetic oligonucleotide
gcagcuaugcuggaugcgc

SEQ ID NO: 2954766 - RNA, 19 nt, Artificial Sequence
  Description of Artificial Sequence: Synthetic oligonucleotide
agugugcugguccucuguu

SEQ ID NO: 2954767 - RNA, 19 nt, Artificial Sequence
  Description of Artificial Sequence: Synthetic oligonucleotide
ugagcugcgugagcugcgc

SEQ ID NO: 2954768 - RNA, 19 nt, Artificial Sequence
  Description of Artificial Sequence: Synthetic oligonucleotide
cugucugcagcggcagugg

SEQ ID NO: 2954769 - RNA, 19 nt, Artificial Sequence
  Description of Artificial Sequence: Synthetic oligonucleotide
cacaccuccuugcccgugc

SEQ ID NO: 2954770 - RNA, 19 nt, Artificial Sequence
  Description of Artificial Sequence: Synthetic oligonucleotide
uugggacgaggggcgaggg

SEQ ID NO: 2954771 - RNA, 19 nt, Artificial Sequence
  Description of Artificial Sequence: Synthetic oligonucleotide
ugcugguccucuguuucca

SEQ ID NO: 2954772 - RNA, 19 nt, Artificial Sequence
  Description of Artificial Sequence: Synthetic oligonucleotide
ggcaggggcagguggacag

SEQ ID NO: 2954773 - RNA, 19 nt, Artificial Sequence
  Description of Artificial Sequence: Synthetic oligonucleotide
ggugcgaaaguggagggca

SEQ ID NO: 2954774 - RNA, 19 nt, Artificial Sequence
  Description of Artificial Sequence: Synthetic oligonucleotide
uggaugcgcgucugucugc

SEQ ID NO: 2954775 - RNA, 19 nt, Artificial Sequence
  Description of Artificial Sequence: Synthetic oligonucleotide
ugcagcggcaguggccggg

SEQ ID NO: 2954776 - RNA, 19 nt, Artificial Sequence
  Description of Artificial Sequence: Synthetic oligonucleotide
ggggugcgaaaguggaggg

SEQ ID NO: 2954777 - RNA, 19 nt, Artificial Sequence
  Description of Artificial Sequence: Synthetic oligonucleotide
agcggaagaggugccacgu

SEQ ID NO: 2954778 - RNA, 19 nt, Artificial Sequence
  Description of Artificial Sequence: Synthetic oligonucleotide
gagcugcgugagcugcgcg

SEQ ID NO: 2954779 - RNA, 19 nt, Artificial Sequence
  Description of Artificial Sequence: Synthetic oligonucleotide
ugcgaaggcggcugugcuc

SEQ ID NO: 2954780 - RNA, 19 nt, Artificial Sequence
  Description of Artificial Sequence: Synthetic oligonucleotide
gugcugguccucuguuucc

SEQ ID NO: 2954781 - RNA, 19 nt, Artificial Sequence
  Description of Artificial Sequence: Synthetic oligonucleotide
ucagagcagcuaugcugga

SEQ ID NO: 2954782 - RNA, 19 nt, Artificial Sequence
  Description of Artificial Sequence: Synthetic oligonucleotide
gagugaugcugagugaggu

SEQ ID NO: 2954783 - RNA, 19 nt, Artificial Sequence
  Description of Artificial Sequence: Synthetic oligonucleotide
aaaguggagggcagccuuu

SEQ ID NO: 2954784 - RNA, 19 nt, Artificial Sequence
  Description of Artificial Sequence: Synthetic oligonucleotide
gugaccuuucgggacgcgc

SEQ ID NO: 2954785 - RNA, 19 nt, Artificial Sequence
  Description of Artificial Sequence: Synthetic oligonucleotide
ggucuugagugaugcugag

SEQ ID NO: 2954786 - RNA, 19 nt, Artificial Sequence
  Description of Artificial Sequence: Synthetic oligonucleotide
gggacgaggggcgaggggc

SEQ ID NO: 2954787 - RNA, 19 nt, Artificial Sequence
  Description of Artificial Sequence: Synthetic oligonucleotide
ugcccggcaggauguugag

SEQ ID NO: 2954788 - RNA, 19 nt, Artificial Sequence
  Description of Artificial Sequence: Synthetic oligonucleotide
guggacagccagcggaaga

SEQ ID NO: 2954789 - RNA, 19 nt, Artificial Sequence
  Description of Artificial Sequence: Synthetic oligonucleotide
gcuggugcccggcaggaug

SEQ ID NO: 2954790 - RNA, 19 nt, Artificial Sequence
  Description of Artificial Sequence: Synthetic oligonucleotide
aggugccacgucccuuuag

SEQ ID NO: 2954791 - RNA, 19 nt, Artificial Sequence
  Description of Artificial Sequence: Synthetic oligonucleotide
ccuuuagcacaccuccuug

SEQ ID NO: 2954792 - RNA, 19 nt, Artificial Sequence
  Description of Artificial Sequence: Synthetic oligonucleotide
ugcugagugaggugaccuu

SEQ ID NO: 2954793 - RNA, 19 nt, Artificial Sequence
  Description of Artificial Sequence: Synthetic oligonucleotide
ggaagaggugccacguccc

SEQ ID NO: 2954794 - RNA, 19 nt, Artificial Sequence
  Description of Artificial Sequence: Synthetic oligonucleotide
ugcuggaugcgcgucuguc

SEQ ID NO: 2954795 - RNA, 19 nt, Artificial Sequence
  Description of Artificial Sequence: Synthetic oligonucleotide
uguuuccauuuggucuuga

SEQ ID NO: 2954796 - RNA, 19 nt, Artificial Sequence
  Description of Artificial Sequence: Synthetic oligonucleotide
gaagcugccuugucagcgu

SEQ ID NO: 2954797 - RNA, 19 nt, Artificial Sequence
  Description of Artificial Sequence: Synthetic oligonucleotide
acagccagcggaagaggug

SEQ ID NO: 2954798 - RNA, 19 nt, Artificial Sequence
  Description of Artificial Sequence: Synthetic oligonucleotide
gccagaagcugccuuguca

SEQ ID NO: 2954799 - RNA, 19 nt, Artificial Sequence
  Description of Artificial Sequence: Synthetic oligonucleotide
gaugcgcgucugucugcag

SEQ ID NO: 2954800 - RNA, 19 nt, Artificial Sequence
  Description of Artificial Sequence: Synthetic oligonucleotide
gagcugcgcggcaugcucc

SEQ ID NO: 2954801 - RNA, 19 nt, Artificial Sequence
  Description of Artificial Sequence: Synthetic oligonucleotide
ccuugagccucagagcagc

SEQ ID NO: 2954802 - RNA, 19 nt, Artificial Sequence
  Description of Artificial Sequence: Synthetic oligonucleotide
aucuugggagugugcuggu

SEQ ID NO: 2954803 - RNA, 19 nt, Artificial Sequence
  Description of Artificial Sequence: Synthetic oligonucleotide
uuagcgccagaagcugccu

SEQ ID NO: 2954804 - RNA, 19 nt, Artificial Sequence
  Description of Artificial Sequence: Synthetic oligonucleotide
gacgcgcccaaggggugcg

SEQ ID NO: 2954805 - RNA, 19 nt, Artificial Sequence
  Description of Artificial Sequence: Synthetic oligonucleotide
aaguggagggcagccuuua

SEQ ID NO: 2954806 - RNA, 19 nt, Artificial Sequence
  Description of Artificial Sequence: Synthetic oligonucleotide
aagaggugccacgucccuu

SEQ ID NO: 2954807 - RNA, 19 nt, Artificial Sequence
  Description of Artificial Sequence: Synthetic oligonucleotide
ccucuguuuccauuugguc

SEQ ID NO: 2954808 - RNA, 19 nt, Artificial Sequence
  Description of Artificial Sequence: Synthetic oligonucleotide
cggaagaggugccacgucc

SEQ ID NO: 2954809 - RNA, 19 nt, Artificial Sequence
  Description of Artificial Sequence: Synthetic oligonucleotide
ggcggcugugcucugucug

SEQ ID NO: 2954810 - RNA, 19 nt, Artificial Sequence
  Description of Artificial Sequence: Synthetic oligonucleotide
gguccucuguuuccauuug

SEQ ID NO: 2954811 - RNA, 19 nt, Artificial Sequence
  Description of Artificial Sequence: Synthetic oligonucleotide
gaagaggugccacgucccu

SEQ ID NO: 2954812 - RNA, 19 nt, Artificial Sequence
  Description of Artificial Sequence: Synthetic oligonucleotide
cugcgcggcaugcuccuug

SEQ ID NO: 2954813 - RNA, 19 nt, Artificial Sequence
  Description of Artificial Sequence: Synthetic oligonucleotide
ggcaggauguugagcugcg

SEQ ID NO: 2954814 - RNA, 19 nt, Artificial Sequence
  Description of Artificial Sequence: Synthetic oligonucleotide
auuuugggacgaggggcga

SEQ ID NO: 2954815 - RNA, 19 nt, Artificial Sequence
  Description of Artificial Sequence: Synthetic oligonucleotide
agcugcgcggcaugcuccu

SEQ ID NO: 2954816 - RNA, 19 nt, Artificial Sequence
  Description of Artificial Sequence: Synthetic oligonucleotide
ucuugggagugugcugguc

SEQ ID NO: 2954817 - RNA, 19 nt, Artificial Sequence
  Description of Artificial Sequence: Synthetic oligonucleotide
gagccucagagcagcuaug

SEQ ID NO: 2954818 - RNA, 19 nt, Artificial Sequence
  Description of Artificial Sequence: Synthetic oligonucleotide
agccagcggaagaggugcc

SEQ ID NO: 2954819 - RNA, 19 nt, Artificial Sequence
  Description of Artificial Sequence: Synthetic oligonucleotide
gugcgaaaguggagggcag

SEQ ID NO: 2954820 - RNA, 19 nt, Artificial Sequence
  Description of Artificial Sequence: Synthetic oligonucleotide
gcgaaaguggagggcagcc

SEQ ID NO: 2954821 - RNA, 19 nt, Artificial Sequence
  Description of Artificial Sequence: Synthetic oligonucleotide
cagcguccaggcugcugcg

SEQ ID NO: 2954822 - RNA, 19 nt, Artificial Sequence
  Description of Artificial Sequence: Synthetic oligonucleotide
uugagccucagagcagcua

SEQ ID NO: 2954823 - RNA, 19 nt, Artificial Sequence
  Description of Artificial Sequence: Synthetic oligonucleotide
uagcgccagaagcugccuu

SEQ ID NO: 2954824 - RNA, 19 nt, Artificial Sequence
  Description of Artificial Sequence: Synthetic oligonucleotide
acaccuccuugcccgugcu

SEQ ID NO: 2954825 - RNA, 19 nt, Artificial Sequence
  Description of Artificial Sequence: Synthetic oligonucleotide
ggagggcagccuuuagcac

SEQ ID NO: 2954826 - RNA, 19 nt, Artificial Sequence
  Description of Artificial Sequence: Synthetic oligonucleotide
cugugcucugucugugcca

SEQ ID NO: 2954827 - RNA, 19 nt, Artificial Sequence
  Description of Artificial Sequence: Synthetic oligonucleotide
gacagccagcggaagaggu

SEQ ID NO: 2954828 - RNA, 19 nt, Artificial Sequence
  Description of Artificial Sequence: Synthetic oligonucleotide
agcacaccuccuugcccgu

SEQ ID NO: 2954829 - RNA, 19 nt, Artificial Sequence
  Description of Artificial Sequence: Synthetic oligonucleotide
ccuuuagcgccagaagcug

SEQ ID NO: 2954830 - RNA, 19 nt, Artificial Sequence
  Description of Artificial Sequence: Synthetic oligonucleotide
gagugugcugguccucugu

SEQ ID NO: 2954831 - RNA, 19 nt, Artificial Sequence
  Description of Artificial Sequence: Synthetic oligonucleotide
ggacagccagcggaagagg

SEQ ID NO: 2954832 - RNA, 19 nt, Artificial Sequence
  Description of Artificial Sequence: Synthetic oligonucleotide
ccaucuugggagugugcug

SEQ ID NO: 2954833 - RNA, 19 nt, Artificial Sequence
  Description of Artificial Sequence: Synthetic oligonucleotide
gacgaggggcgaggggcag

SEQ ID NO: 2954834 - RNA, 19 nt, Artificial Sequence
  Description of Artificial Sequence: Synthetic oligonucleotide
ugcccgugcuggugcccgg

SEQ ID NO: 2954835 - RNA, 19 nt, Artificial Sequence
  Description of Artificial Sequence: Synthetic oligonucleotide
aguggccgggucggccagc

SEQ ID NO: 2954836 - RNA, 19 nt, Artificial Sequence
  Description of Artificial Sequence: Synthetic oligonucleotide
ggcugugcucugucugugc

SEQ ID NO: 2954837 - RNA, 19 nt, Artificial Sequence
  Description of Artificial Sequence: Synthetic oligonucleotide
ugcgugagcugcgcggcau

SEQ ID NO: 2954838 - RNA, 19 nt, Artificial Sequence
  Description of Artificial Sequence: Synthetic oligonucleotide
gcagguggacagccagcgg

SEQ ID NO: 2954839 - RNA, 19 nt, Artificial Sequence
  Description of Artificial Sequence: Synthetic oligonucleotide
cuuucgggacgcgcccaag

SEQ ID NO: 2954840 - RNA, 19 nt, Artificial Sequence
  Description of Artificial Sequence: Synthetic oligonucleotide
gugcccggcaggauguuga

SEQ ID NO: 2954841 - RNA, 19 nt, Artificial Sequence
  Description of Artificial Sequence: Synthetic oligonucleotide
cuguuuccauuuggucuug

SEQ ID NO: 2954842 - RNA, 19 nt, Artificial Sequence
  Description of Artificial Sequence: Synthetic oligonucleotide
gcugcgaaggcggcugugc

SEQ ID NO: 2954843 - RNA, 19 nt, Artificial Sequence
  Description of Artificial Sequence: Synthetic oligonucleotide
ugcugcgaaggcggcugug

SEQ ID NO: 2954844 - RNA, 19 nt, Artificial Sequence
  Description of Artificial Sequence: Synthetic oligonucleotide
ccaggcugcugcgaaggcg

SEQ ID NO: 2954845 - RNA, 19 nt, Artificial Sequence
  Description of Artificial Sequence: Synthetic oligonucleotide
guggccgggucggccagcg

SEQ ID NO: 2954846 - RNA, 19 nt, Artificial Sequence
  Description of Artificial Sequence: Synthetic oligonucleotide
cuugcccgugcuggugccc

SEQ ID NO: 2954847 - RNA, 19 nt, Artificial Sequence
  Description of Artificial Sequence: Synthetic oligonucleotide
cuaugcuggaugcgcgucu

SEQ ID NO: 2954848 - RNA, 19 nt, Artificial Sequence
  Description of Artificial Sequence: Synthetic oligonucleotide
agguggacagccagcggaa

SEQ ID NO: 2954849 - RNA, 19 nt, Artificial Sequence
  Description of Artificial Sequence: Synthetic oligonucleotide
cgcggcaugcuccuuggcc

SEQ ID NO: 2954850 - RNA, 19 nt, Artificial Sequence
  Description of Artificial Sequence: Synthetic oligonucleotide
cccaaggggugcgaaagug

SEQ ID NO: 2954851 - RNA, 19 nt, Artificial Sequence
  Description of Artificial Sequence: Synthetic oligonucleotide
aggcggcugugcucugucu

SEQ ID NO: 2954852 - RNA, 19 nt, Artificial Sequence
  Description of Artificial Sequence: Synthetic oligonucleotide
gcagccuuuagcacaccuc

SEQ ID NO: 2954853 - RNA, 19 nt, Artificial Sequence
  Description of Artificial Sequence: Synthetic oligonucleotide
gucagcguccaggcugcug

SEQ ID NO: 2954854 - RNA, 19 nt, Artificial Sequence
  Description of Artificial Sequence: Synthetic oligonucleotide
gcugcgugagcugcgcggc

SEQ ID NO: 2954855 - RNA, 19 nt, Artificial Sequence
  Description of Artificial Sequence: Synthetic oligonucleotide
cccggcaggauguugagcu

SEQ ID NO: 2954856 - RNA, 19 nt, Artificial Sequence
  Description of Artificial Sequence: Synthetic oligonucleotide
cugugccaucuugggagug

SEQ ID NO: 2954857 - RNA, 19 nt, Artificial Sequence
  Description of Artificial Sequence: Synthetic oligonucleotide
gguggacagccagcggaag

SEQ ID NO: 2954858 - RNA, 19 nt, Artificial Sequence
  Description of Artificial Sequence: Synthetic oligonucleotide
gcggcaguggccgggucgg

SEQ ID NO: 2954859 - RNA, 19 nt, Artificial Sequence
  Description of Artificial Sequence: Synthetic oligonucleotide
ugggagugugcugguccuc

SEQ ID NO: 2954860 - RNA, 19 nt, Artificial Sequence
  Description of Artificial Sequence: Synthetic oligonucleotide
accuuucgggacgcgccca

SEQ ID NO: 2954861 - RNA, 19 nt, Artificial Sequence
  Description of Artificial Sequence: Synthetic oligonucleotide
cgugcuggugcccggcagg

SEQ ID NO: 2954862 - RNA, 19 nt, Artificial Sequence
  Description of Artificial Sequence: Synthetic oligonucleotide
cugccuugucagcguccag

SEQ ID NO: 2954863 - RNA, 19 nt, Artificial Sequence
  Description of Artificial Sequence: Synthetic oligonucleotide
gggucggccagcgcucccg

SEQ ID NO: 2954864 - RNA, 19 nt, Artificial Sequence
  Description of Artificial Sequence: Synthetic oligonucleotide
gggugcgaaaguggagggc

SEQ ID NO: 2954865 - RNA, 19 nt, Artificial Sequence
  Description of Artificial Sequence: Synthetic oligonucleotide
caguggccgggucggccag

SEQ ID NO: 2954866 - RNA, 19 nt, Artificial Sequence
  Description of Artificial Sequence: Synthetic oligonucleotide
gcggcaugcuccuuggccu

SEQ ID NO: 2954867 - RNA, 19 nt, Artificial Sequence
  Description of Artificial Sequence: Synthetic oligonucleotide
gucggccagcgcucccgag

SEQ ID NO: 2954868 - RNA, 19 nt, Artificial Sequence
  Description of Artificial Sequence: Synthetic oligonucleotide
cccuuuagcgccagaagcu

SEQ ID NO: 2954869 - RNA, 19 nt, Artificial Sequence
  Description of Artificial Sequence: Synthetic oligonucleotide
gcaguggccgggucggcca

SEQ ID NO: 2954870 - RNA, 19 nt, Artificial Sequence
  Description of Artificial Sequence: Synthetic oligonucleotide
caccuccuugcccgugcug

SEQ ID NO: 2954871 - RNA, 19 nt, Artificial Sequence
  Description of Artificial Sequence: Synthetic oligonucleotide
gcuaugcuggaugcgcguc

SEQ ID NO: 2954872 - RNA, 19 nt, Artificial Sequence
  Description of Artificial Sequence: Synthetic oligonucleotide
cuuggccuugagccucaga

SEQ ID NO: 2954873 - RNA, 19 nt, Artificial Sequence
  Description of Artificial Sequence: Synthetic oligonucleotide
ggaugcgcgucugucugca

SEQ ID NO: 2954874 - RNA, 19 nt, Artificial Sequence
  Description of Artificial Sequence: Synthetic oligonucleotide
gccaucuugggagugugcu

SEQ ID NO: 2954875 - RNA, 19 nt, Artificial Sequence
  Description of Artificial Sequence: Synthetic oligonucleotide
gcuggaugcgcgucugucu

SEQ ID NO: 2954876 - RNA, 19 nt, Artificial Sequence
  Description of Artificial Sequence: Synthetic oligonucleotide
gccuugagccucagagcag

SEQ ID NO: 2954877 - RNA, 19 nt, Artificial Sequence
  Description of Artificial Sequence: Synthetic oligonucleotide
agcguccaggcugcugcga

SEQ ID NO: 2954878 - RNA, 19 nt, Artificial Sequence
  Description of Artificial Sequence: Synthetic oligonucleotide
gucuugagugaugcugagu

SEQ ID NO: 2954879 - RNA, 19 nt, Artificial Sequence
  Description of Artificial Sequence: Synthetic oligonucleotide
ccagcggaagaggugccac

SEQ ID NO: 2954880 - RNA, 19 nt, Artificial Sequence
  Description of Artificial Sequence: Synthetic oligonucleotide
ggcaguggccgggucggcc

SEQ ID NO: 2954881 - RNA, 19 nt, Artificial Sequence
  Description of Artificial Sequence: Synthetic oligonucleotide
ggugaccuuucgggacgcg

SEQ ID NO: 2954882 - RNA, 19 nt, Artificial Sequence
  Description of Artificial Sequence: Synthetic oligonucleotide
ggcagccuuuagcacaccu

SEQ ID NO: 2954883 - RNA, 19 nt, Artificial Sequence
  Description of Artificial Sequence: Synthetic oligonucleotide
cuugagccucagagcagcu

SEQ ID NO: 2954884 - RNA, 19 nt, Artificial Sequence
  Description of Artificial Sequence: Synthetic oligonucleotide
ccuugcccgugcuggugcc

SEQ ID NO: 2954885 - RNA, 19 nt, Artificial Sequence
  Description of Artificial Sequence: Synthetic oligonucleotide
gaggggcgaggggcagggg

SEQ ID NO: 2954886 - RNA, 19 nt, Artificial Sequence
  Description of Artificial Sequence: Synthetic oligonucleotide
gugcuggugcccggcagga

SEQ ID NO: 2954887 - RNA, 19 nt, Artificial Sequence
  Description of Artificial Sequence: Synthetic oligonucleotide
cggcaggauguugagcugc

SEQ ID NO: 2954888 - RNA, 19 nt, Artificial Sequence
  Description of Artificial Sequence: Synthetic oligonucleotide
cacgucccuuuagcgccag

SEQ ID NO: 2954889 - RNA, 19 nt, Artificial Sequence
  Description of Artificial Sequence: Synthetic oligonucleotide
ggugcccggcaggauguug

SEQ ID NO: 2954890 - RNA, 19 nt, Artificial Sequence
  Description of Artificial Sequence: Synthetic oligonucleotide
uggccgggucggccagcgc

SEQ ID NO: 2954891 - RNA, 19 nt, Artificial Sequence
  Description of Artificial Sequence: Synthetic oligonucleotide
gaggugccacgucccuuua

SEQ ID NO: 2954892 - RNA, 19 nt, Artificial Sequence
  Description of Artificial Sequence: Synthetic oligonucleotide
gcgaaggcggcugugcucu

SEQ ID NO: 2954893 - RNA, 19 nt, Artificial Sequence
  Description of Artificial Sequence: Synthetic oligonucleotide
aggggcagguggacagcca

SEQ ID NO: 2954894 - RNA, 19 nt, Artificial Sequence
  Description of Artificial Sequence: Synthetic oligonucleotide
acgucccuuuagcgccaga

SEQ ID NO: 2954895 - RNA, 19 nt, Artificial Sequence
  Description of Artificial Sequence: Synthetic oligonucleotide
gccuuuagcacaccuccuu

SEQ ID NO: 2954896 - RNA, 19 nt, Artificial Sequence
  Description of Artificial Sequence: Synthetic oligonucleotide
cugcgaaggcggcugugcu

SEQ ID NO: 2954897 - RNA, 19 nt, Artificial Sequence
  Description of Artificial Sequence: Synthetic oligonucleotide
ggacgcgcccaaggggugc

SEQ ID NO: 2954898 - RNA, 19 nt, Artificial Sequence
  Description of Artificial Sequence: Synthetic oligonucleotide
gcgugagcugcgcggcaug

SEQ ID NO: 2954899 - RNA, 19 nt, Artificial Sequence
  Description of Artificial Sequence: Synthetic oligonucleotide
gcggaagaggugccacguc

SEQ ID NO: 2954900 - RNA, 19 nt, Artificial Sequence
  Description of Artificial Sequence: Synthetic oligonucleotide
ccggcaggauguugagcug

SEQ ID NO: 2954901 - RNA, 19 nt, Artificial Sequence
  Description of Artificial Sequence: Synthetic oligonucleotide
ggccgggucggccagcgcu

SEQ ID NO: 2954902 - RNA, 19 nt, Artificial Sequence
  Description of Artificial Sequence: Synthetic oligonucleotide
ugcuggugcccggcaggau

SEQ ID NO: 2954903 - RNA, 19 nt, Artificial Sequence
  Description of Artificial Sequence: Synthetic oligonucleotide
ggcaugcuccuuggccuug

SEQ ID NO: 2954904 - RNA, 19 nt, Artificial Sequence
  Description of Artificial Sequence: Synthetic oligonucleotide
cgcgucugucugcagcggc

SEQ ID NO: 2954905 - RNA, 19 nt, Artificial Sequence
  Description of Artificial Sequence: Synthetic oligonucleotide
ggggcgaggggcaggggca

SEQ ID NO: 2954906 - RNA, 19 nt, Artificial Sequence
  Description of Artificial Sequence: Synthetic oligonucleotide
gcgucugucugcagcggca

SEQ ID NO: 2954907 - RNA, 19 nt, Artificial Sequence
  Description of Artificial Sequence: Synthetic oligonucleotide
cugguccucuguuuccauu

SEQ ID NO: 2954908 - RNA, 19 nt, Artificial Sequence
  Description of Artificial Sequence: Synthetic oligonucleotide
cguccaggcugcugcgaag

SEQ ID NO: 2954909 - RNA, 19 nt, Artificial Sequence
  Description of Artificial Sequence: Synthetic oligonucleotide
gugcucugucugugccauc

SEQ ID NO: 2954910 - RNA, 19 nt, Artificial Sequence
  Description of Artificial Sequence: Synthetic oligonucleotide
cugcgugagcugcgcggca

SEQ ID NO: 2954911 - RNA, 19 nt, Artificial Sequence
  Description of Artificial Sequence: Synthetic oligonucleotide
gucugucugcagcggcagu

SEQ ID NO: 2954912 - RNA, 19 nt, Artificial Sequence
  Description of Artificial Sequence: Synthetic oligonucleotide
ccgugcuggugcccggcag

SEQ ID NO: 2954913 - RNA, 19 nt, Artificial Sequence
  Description of Artificial Sequence: Synthetic oligonucleotide
cgaggggcgaggggcaggg

SEQ ID NO: 2954914 - RNA, 19 nt, Artificial Sequence
  Description of Artificial Sequence: Synthetic oligonucleotide
gcugagugaggugaccuuu

SEQ ID NO: 2954915 - RNA, 19 nt, Artificial Sequence
  Description of Artificial Sequence: Synthetic oligonucleotide
ggacgaggggcgaggggca

SEQ ID NO: 2954916 - RNA, 19 nt, Artificial Sequence
  Description of Artificial Sequence: Synthetic oligonucleotide
gcgcgucugucugcagcgg

SEQ ID NO: 2954917 - RNA, 19 nt, Artificial Sequence
  Description of Artificial Sequence: Synthetic oligonucleotide
gggcgaggggcaggggcag

SEQ ID NO: 2954918 - RNA, 19 nt, Artificial Sequence
  Description of Artificial Sequence: Synthetic oligonucleotide
cgugagcugcgcggcaugc

SEQ ID NO: 2954919 - RNA, 19 nt, Artificial Sequence
  Description of Artificial Sequence: Synthetic oligonucleotide
gcggcugugcucugucugu

SEQ ID NO: 2954920 - RNA, 19 nt, Artificial Sequence
  Description of Artificial Sequence: Synthetic oligonucleotide
ggggcaggggcagguggac

SEQ ID NO: 2954921 - RNA, 19 nt, Artificial Sequence
  Description of Artificial Sequence: Synthetic oligonucleotide
gggacgcgcccaaggggug

SEQ ID NO: 2954922 - RNA, 19 nt, Artificial Sequence
  Description of Artificial Sequence: Synthetic oligonucleotide
ggucggccagcgcucccga

SEQ ID NO: 2954923 - RNA, 19 nt, Artificial Sequence
  Description of Artificial Sequence: Synthetic oligonucleotide
cagagcagcuaugcuggau

SEQ ID NO: 2954924 - RNA, 19 nt, Artificial Sequence
  Description of Artificial Sequence: Synthetic oligonucleotide
gcccggcaggauguugagc

SEQ ID NO: 2954925 - RNA, 19 nt, Artificial Sequence
  Description of Artificial Sequence: Synthetic oligonucleotide
gccagcggaagaggugcca

SEQ ID NO: 2954926 - RNA, 19 nt, Artificial Sequence
  Description of Artificial Sequence: Synthetic oligonucleotide
gugagcugcgcggcaugcu

SEQ ID NO: 2954927 - RNA, 19 nt, Artificial Sequence
  Description of Artificial Sequence: Synthetic oligonucleotide
gcacaccuccuugcccgug

SEQ ID NO: 2954928 - RNA, 19 nt, Artificial Sequence
  Description of Artificial Sequence: Synthetic oligonucleotide
ccauuuggucuugagugau

SEQ ID NO: 2954929 - RNA, 19 nt, Artificial Sequence
  Description of Artificial Sequence: Synthetic oligonucleotide
cagcggcaguggccggguc

SEQ ID NO: 2954930 - RNA, 19 nt, Artificial Sequence
  Description of Artificial Sequence: Synthetic oligonucleotide
uggugcccggcaggauguu

SEQ ID NO: 2954931 - RNA, 19 nt, Artificial Sequence
  Description of Artificial Sequence: Synthetic oligonucleotide
gggcaggggcagguggaca

SEQ ID NO: 2954932 - RNA, 19 nt, Artificial Sequence
  Description of Artificial Sequence: Synthetic oligonucleotide
ccacgucccuuuagcgcca

SEQ ID NO: 2954933 - RNA, 19 nt, Artificial Sequence
  Description of Artificial Sequence: Synthetic oligonucleotide
gcgcggcaugcuccuuggc

SEQ ID NO: 2954934 - RNA, 19 nt, Artificial Sequence
  Description of Artificial Sequence: Synthetic oligonucleotide
gcgcccaaggggugcgaaa

SEQ ID NO: 2954935 - RNA, 19 nt, Artificial Sequence
  Description of Artificial Sequence: Synthetic oligonucleotide
ccuuucgggacgcgcccaa

SEQ ID NO: 2954936 - RNA, 19 nt, Artificial Sequence
  Description of Artificial Sequence: Synthetic oligonucleotide
gccgggucggccagcgcuc

SEQ ID NO: 2954937 - RNA, 19 nt, Artificial Sequence
  Description of Artificial Sequence: Synthetic oligonucleotide
gcugguccucuguuuccau

SEQ ID NO: 2954938 - RNA, 19 nt, Artificial Sequence
  Description of Artificial Sequence: Synthetic oligonucleotide
cgggacgcgcccaaggggu

SEQ ID NO: 2954939 - RNA, 19 nt, Artificial Sequence
  Description of Artificial Sequence: Synthetic oligonucleotide
acgcgcccaaggggugcga

SEQ ID NO: 2954940 - RNA, 19 nt, Artificial Sequence
  Description of Artificial Sequence: Synthetic oligonucleotide
cugcugcgaaggcggcugu

SEQ ID NO: 2954941 - RNA, 19 nt, Artificial Sequence
  Description of Artificial Sequence: Synthetic oligonucleotide
ccgggucggccagcgcucc

SEQ ID NO: 2954942 - RNA, 19 nt, Artificial Sequence
  Description of Artificial Sequence: Synthetic oligonucleotide
cggcugugcucugucugug

SEQ ID NO: 2954943 - RNA, 19 nt, Artificial Sequence
  Description of Artificial Sequence: Synthetic oligonucleotide
gggcagccuuuagcacacc

SEQ ID NO: 2954944 - RNA, 19 nt, Artificial Sequence
  Description of Artificial Sequence: Synthetic oligonucleotide
cgccagaagcugccuuguc

SEQ ID NO: 2954945 - RNA, 19 nt, Artificial Sequence
  Description of Artificial Sequence: Synthetic oligonucleotide
gcaggauguugagcugcgu

SEQ ID NO: 2954946 - RNA, 19 nt, Artificial Sequence
  Description of Artificial Sequence: Synthetic oligonucleotide
gcgccagaagcugccuugu

SEQ ID NO: 2954947 - RNA, 19 nt, Artificial Sequence
  Description of Artificial Sequence: Synthetic oligonucleotide
cgaaaguggagggcagccu

SEQ ID NO: 2954948 - RNA, 19 nt, Artificial Sequence
  Description of Artificial Sequence: Synthetic oligonucleotide
cccgugcuggugcccggca

SEQ ID NO: 2954949 - RNA, 19 nt, Artificial Sequence
  Description of Artificial Sequence: Synthetic oligonucleotide
ccuccuugcccgugcuggu

SEQ ID NO: 2954950 - RNA, 19 nt, Artificial Sequence
  Description of Artificial Sequence: Synthetic oligonucleotide
gcucugucugugccaucuu

SEQ ID NO: 2954951 - RNA, 19 nt, Artificial Sequence
  Description of Artificial Sequence: Synthetic oligonucleotide
gcagcggcaguggccgggu

SEQ ID NO: 2954952 - RNA, 19 nt, Artificial Sequence
  Description of Artificial Sequence: Synthetic oligonucleotide
cgggucggccagcgcuccc

SEQ ID NO: 2954953 - RNA, 19 nt, Artificial Sequence
  Description of Artificial Sequence: Synthetic oligonucleotide
cggcaguggccgggucggc

SEQ ID NO: 2954954 - RNA, 19 nt, Artificial Sequence
  Description of Artificial Sequence: Synthetic oligonucleotide
cggcaugcuccuuggccuu

SEQ ID NO: 2954955 - RNA, 19 nt, Artificial Sequence
  Description of Artificial Sequence: Synthetic oligonucleotide
cgcgcccaaggggugcgaa

SEQ ID NO: 2954956 - RNA, 19 nt, Artificial Sequence
  Description of Artificial Sequence: Synthetic oligonucleotide
gcugcgcggcaugcuccuu

SEQ ID NO: 2954957 - RNA, 19 nt, Artificial Sequence
  Description of Artificial Sequence: Synthetic oligonucleotide
caaauaagcaguuugaaug

SEQ ID NO: 2954958 - RNA, 19 nt, Artificial Sequence
  Description of Artificial Sequence: Synthetic oligonucleotide
aaugagaagucccucacag

SEQ ID NO: 2954959 - RNA, 19 nt, Artificial Sequence
  Description of Artificial Sequence: Synthetic oligonucleotide
aagaagagugcccagguuc

SEQ ID NO: 2954960 - RNA, 19 nt, Artificial Sequence
  Description of Artificial Sequence: Synthetic oligonucleotide
aaugcggcgacaguaaggc

SEQ ID NO: 2954961 - RNA, 19 nt, Artificial Sequence
  Description of Artificial Sequence: Synthetic oligonucleotide
ugagcaaauaagcaguuug

SEQ ID NO: 2954962 - RNA, 19 nt, Artificial Sequence
  Description of Artificial Sequence: Synthetic oligonucleotide
aaauaagcaguuugaauga

SEQ ID NO: 2954963 - RNA, 19 nt, Artificial Sequence
  Description of Artificial Sequence: Synthetic oligonucleotide
agaagucccucacagaugg

SEQ ID NO: 2954964 - RNA, 19 nt, Artificial Sequence
  Description of Artificial Sequence: Synthetic oligonucleotide
acuuuucugacccucugcc

SEQ ID NO: 2954965 - RNA, 19 nt, Artificial Sequence
  Description of Artificial Sequence: Synthetic oligonucleotide
ugauacagaaaugagaagu

SEQ ID NO: 2954966 - RNA, 19 nt, Artificial Sequence
  Description of Artificial Sequence: Synthetic oligonucleotide
ugaaugauacagaaaugag

SEQ ID NO: 2954967 - RNA, 19 nt, Artificial Sequence
  Description of Artificial Sequence: Synthetic oligonucleotide
uaagcaguuugaaugauac

SEQ ID NO: 2954968 - RNA, 19 nt, Artificial Sequence
  Description of Artificial Sequence: Synthetic oligonucleotide
uugaaugauacagaaauga

SEQ ID NO: 2954969 - RNA, 19 nt, Artificial Sequence
  Description of Artificial Sequence: Synthetic oligonucleotide
agcaguuugaaugauacag

SEQ ID NO: 2954970 - RNA, 19 nt, Artificial Sequence
  Description of Artificial Sequence: Synthetic oligonucleotide
uuccaaugagcaaauaagc

SEQ ID NO: 2954971 - RNA, 19 nt, Artificial Sequence
  Description of Artificial Sequence: Synthetic oligonucleotide
ucugaggugccugugaugg

SEQ ID NO: 2954972 - RNA, 19 nt, Artificial Sequence
  Description of Artificial Sequence: Synthetic oligonucleotide
ugacagacuuuucugaccc

SEQ ID NO: 2954973 - RNA, 19 nt, Artificial Sequence
  Description of Artificial Sequence: Synthetic oligonucleotide
aacacgagaaguccaagga

SEQ ID NO: 2954974 - RNA, 19 nt, Artificial Sequence
  Description of Artificial Sequence: Synthetic oligonucleotide
agagucauuugccagcagg

SEQ ID NO: 2954975 - RNA, 19 nt, Artificial Sequence
  Description of Artificial Sequence: Synthetic oligonucleotide
uccaaugagcaaauaagca

SEQ ID NO: 2954976 - RNA, 19 nt, Artificial Sequence
  Description of Artificial Sequence: Synthetic oligonucleotide
ugagaagucccucacagau

SEQ ID NO: 2954977 - RNA, 19 nt, Artificial Sequence
  Description of Artificial Sequence: Synthetic oligonucleotide
uuugaaugauacagaaaug

SEQ ID NO: 2954978 - RNA, 19 nt, Artificial Sequence
  Description of Artificial Sequence: Synthetic oligonucleotide
auauacugugcucugaggu

SEQ ID NO: 2954979 - RNA, 19 nt, Artificial Sequence
  Description of Artificial Sequence: Synthetic oligonucleotide
agugacagacuuuucugac

SEQ ID NO: 2954980 - RNA, 19 nt, Artificial Sequence
  Description of Artificial Sequence: Synthetic oligonucleotide
guuugaaugauacagaaau

SEQ ID NO: 2954981 - RNA, 19 nt, Artificial Sequence
  Description of Artificial Sequence: Synthetic oligonucleotide
auacagaaaugagaagucc

SEQ ID NO: 2954982 - RNA, 19 nt, Artificial Sequence
  Description of Artificial Sequence: Synthetic oligonucleotide
aaguccaaggaaugcggcg

SEQ ID NO: 2954983 - RNA, 19 nt, Artificial Sequence
  Description of Artificial Sequence: Synthetic oligonucleotide
guuccaaugagcaaauaag

SEQ ID NO: 2954984 - RNA, 19 nt, Artificial Sequence
  Description of Artificial Sequence: Synthetic oligonucleotide
aauccagccccacacuguc

SEQ ID NO: 2954985 - RNA, 19 nt, Artificial Sequence
  Description of Artificial Sequence: Synthetic oligonucleotide
gaacacgagaaguccaagg

SEQ ID NO: 2954986 - RNA, 19 nt, Artificial Sequence
  Description of Artificial Sequence: Synthetic oligonucleotide
auagugacagacuuuucug

SEQ ID NO: 2954987 - RNA, 19 nt, Artificial Sequence
  Description of Artificial Sequence: Synthetic oligonucleotide
gauauacugugcucugagg

SEQ ID NO: 2954988 - RNA, 19 nt, Artificial Sequence
  Description of Artificial Sequence: Synthetic oligonucleotide
agcgcuugcaauccagccc

SEQ ID NO: 2954989 - RNA, 19 nt, Artificial Sequence
  Description of Artificial Sequence: Synthetic oligonucleotide
caggaugaaggcaaugggg

SEQ ID NO: 2954990 - RNA, 19 nt, Artificial Sequence
  Description of Artificial Sequence: Synthetic oligonucleotide
uccauguccuugcuaaucc

SEQ ID NO: 2954991 - RNA, 19 nt, Artificial Sequence
  Description of Artificial Sequence: Synthetic oligonucleotide
ugcggcgacaguaaggccc

SEQ ID NO: 2954992 - RNA, 19 nt, Artificial Sequence
  Description of Artificial Sequence: Synthetic oligonucleotide
acaggaucgggguagcagg

SEQ ID NO: 2954993 - RNA, 19 nt, Artificial Sequence
  Description of Artificial Sequence: Synthetic oligonucleotide
auacugugcucugaggugc

SEQ ID NO: 2954994 - RNA, 19 nt, Artificial Sequence
  Description of Artificial Sequence: Synthetic oligonucleotide
aagucccucacagauggcg

SEQ ID NO: 2954995 - RNA, 19 nt, Artificial Sequence
  Description of Artificial Sequence: Synthetic oligonucleotide
gagaaguccaaggaaugcg

SEQ ID NO: 2954996 - RNA, 19 nt, Artificial Sequence
  Description of Artificial Sequence: Synthetic oligonucleotide
agaaaugagaagucccuca

SEQ ID NO: 2954997 - RNA, 19 nt, Artificial Sequence
  Description of Artificial Sequence: Synthetic oligonucleotide
cacacuguccuccaugucc

SEQ ID NO: 2954998 - RNA, 19 nt, Artificial Sequence
  Description of Artificial Sequence: Synthetic oligonucleotide
gaaaugagaagucccucac

SEQ ID NO: 2954999 - RNA, 19 nt, Artificial Sequence
  Description of Artificial Sequence: Synthetic oligonucleotide
aaaugagaagucccucaca

SEQ ID NO: 2955000 - RNA, 19 nt, Artificial Sequence
  Description of Artificial Sequence: Synthetic oligonucleotide
gauagugacagacuuuucu

SEQ ID NO: 2955001 - RNA, 19 nt, Artificial Sequence
  Description of Artificial Sequence: Synthetic oligonucleotide
agaagagugcccagguucc

SEQ ID NO: 2955002 - RNA, 19 nt, Artificial Sequence
  Description of Artificial Sequence: Synthetic oligonucleotide
ugaggaacacgagaagucc

SEQ ID NO: 2955003 - RNA, 19 nt, Artificial Sequence
  Description of Artificial Sequence: Synthetic oligonucleotide
ccaaugagcaaauaagcag

SEQ ID NO: 2955004 - RNA, 19 nt, Artificial Sequence
  Description of Artificial Sequence: Synthetic oligonucleotide
gauacagaaaugagaaguc

SEQ ID NO: 2955005 - RNA, 19 nt, Artificial Sequence
  Description of Artificial Sequence: Synthetic oligonucleotide
acaggguuucagcuccucc

SEQ ID NO: 2955006 - RNA, 19 nt, Artificial Sequence
  Description of Artificial Sequence: Synthetic oligonucleotide
ucacagauggcgccacagg

SEQ ID NO: 2955007 - RNA, 19 nt, Artificial Sequence
  Description of Artificial Sequence: Synthetic oligonucleotide
uccuccauguccuugcuaa

SEQ ID NO: 2955008 - RNA, 19 nt, Artificial Sequence
  Description of Artificial Sequence: Synthetic oligonucleotide
cacagauggcgccacaggg

SEQ ID NO: 2955009 - RNA, 19 nt, Artificial Sequence
  Description of Artificial Sequence: Synthetic oligonucleotide
uugcaauccagccccacac

SEQ ID NO: 2955010 - RNA, 19 nt, Artificial Sequence
  Description of Artificial Sequence: Synthetic oligonucleotide
augauacagaaaugagaag

SEQ ID NO: 2955011 - RNA, 19 nt, Artificial Sequence
  Description of Artificial Sequence: Synthetic oligonucleotide
guugucauccugaacuucc

SEQ ID NO: 2955012 - RNA, 19 nt, Artificial Sequence
  Description of Artificial Sequence: Synthetic oligonucleotide
uccucccuccacaggaucg

SEQ ID NO: 2955013 - RNA, 19 nt, Artificial Sequence
  Description of Artificial Sequence: Synthetic oligonucleotide
auccugaacuuccucugcg

SEQ ID NO: 2955014 - RNA, 19 nt, Artificial Sequence
  Description of Artificial Sequence: Synthetic oligonucleotide
agaaguccaaggaaugcgg

SEQ ID NO: 2955015 - RNA, 19 nt, Artificial Sequence
  Description of Artificial Sequence: Synthetic oligonucleotide
ucugccaucuuuacuccgu

SEQ ID NO: 2955016 - RNA, 19 nt, Artificial Sequence
  Description of Artificial Sequence: Synthetic oligonucleotide
cuugcggaagaagagugcc

SEQ ID NO: 2955017 - RNA, 19 nt, Artificial Sequence
  Description of Artificial Sequence: Synthetic oligonucleotide
aguaaggcccagauagcgc

SEQ ID NO: 2955018 - RNA, 19 nt, Artificial Sequence
  Description of Artificial Sequence: Synthetic oligonucleotide
ucauuugccagcagggguu

SEQ ID NO: 2955019 - RNA, 19 nt, Artificial Sequence
  Description of Artificial Sequence: Synthetic oligonucleotide
caggguuucagcuccuccc

SEQ ID NO: 2955020 - RNA, 19 nt, Artificial Sequence
  Description of Artificial Sequence: Synthetic oligonucleotide
uccagugggagccuggaua

SEQ ID NO: 2955021 - RNA, 19 nt, Artificial Sequence
  Description of Artificial Sequence: Synthetic oligonucleotide
uccuugcuaauccuggcaa

SEQ ID NO: 2955022 - RNA, 19 nt, Artificial Sequence
  Description of Artificial Sequence: Synthetic oligonucleotide
uccugggauauacugugcu

SEQ ID NO: 2955023 - RNA, 19 nt, Artificial Sequence
  Description of Artificial Sequence: Synthetic oligonucleotide
gacuuuucugacccucugc

SEQ ID NO: 2955024 - RNA, 19 nt, Artificial Sequence
  Description of Artificial Sequence: Synthetic oligonucleotide
agccuggauagugacagac

SEQ ID NO: 2955025 - RNA, 19 nt, Artificial Sequence
  Description of Artificial Sequence: Synthetic oligonucleotide
acuccguggagauuugugu

SEQ ID NO: 2955026 - RNA, 19 nt, Artificial Sequence
  Description of Artificial Sequence: Synthetic oligonucleotide
uggauagugacagacuuuu

SEQ ID NO: 2955027 - RNA, 19 nt, Artificial Sequence
  Description of Artificial Sequence: Synthetic oligonucleotide
gaaugcggcgacaguaagg

SEQ ID NO: 2955028 - RNA, 19 nt, Artificial Sequence
  Description of Artificial Sequence: Synthetic oligonucleotide
caguaaggcccagauagcg

SEQ ID NO: 2955029 - RNA, 19 nt, Artificial Sequence
  Description of Artificial Sequence: Synthetic oligonucleotide
acagacuuuucugacccuc

SEQ ID NO: 2955030 - RNA, 19 nt, Artificial Sequence
  Description of Artificial Sequence: Synthetic oligonucleotide
auguccuccugggauauac

SEQ ID NO: 2955031 - RNA, 19 nt, Artificial Sequence
  Description of Artificial Sequence: Synthetic oligonucleotide
ggauauacugugcucugag

SEQ ID NO: 2955032 - RNA, 19 nt, Artificial Sequence
  Description of Artificial Sequence: Synthetic oligonucleotide
aaggaaugcggcgacagua

SEQ ID NO: 2955033 - RNA, 19 nt, Artificial Sequence
  Description of Artificial Sequence: Synthetic oligonucleotide
gauagcgcuugcaauccag

SEQ ID NO: 2955034 - RNA, 19 nt, Artificial Sequence
  Description of Artificial Sequence: Synthetic oligonucleotide
aagcaguuugaaugauaca

SEQ ID NO: 2955035 - RNA, 19 nt, Artificial Sequence
  Description of Artificial Sequence: Synthetic oligonucleotide
cauguccuugcuaauccug

SEQ ID NO: 2955036 - RNA, 19 nt, Artificial Sequence
  Description of Artificial Sequence: Synthetic oligonucleotide
caaugagcaaauaagcagu

SEQ ID NO: 2955037 - RNA, 19 nt, Artificial Sequence
  Description of Artificial Sequence: Synthetic oligonucleotide
gugacagacuuuucugacc

SEQ ID NO: 2955038 - RNA, 19 nt, Artificial Sequence
  Description of Artificial Sequence: Synthetic oligonucleotide
aauaagcaguuugaaugau

SEQ ID NO: 2955039 - RNA, 19 nt, Artificial Sequence
  Description of Artificial Sequence: Synthetic oligonucleotide
acuuccucugcgccugugg

SEQ ID NO: 2955040 - RNA, 19 nt, Artificial Sequence
  Description of Artificial Sequence: Synthetic oligonucleotide
uccuccugggauauacugu

SEQ ID NO: 2955041 - RNA, 19 nt, Artificial Sequence
  Description of Artificial Sequence: Synthetic oligonucleotide
ugcggaagaagagugccca

SEQ ID NO: 2955042 - RNA, 19 nt, Artificial Sequence
  Description of Artificial Sequence: Synthetic oligonucleotide
aucuuuacuccguggagau

SEQ ID NO: 2955043 - RNA, 19 nt, Artificial Sequence
  Description of Artificial Sequence: Synthetic oligonucleotide
uccguggagauuugugucu

SEQ ID NO: 2955044 - RNA, 19 nt, Artificial Sequence
  Description of Artificial Sequence: Synthetic oligonucleotide
agucauuugccagcagggg

SEQ ID NO: 2955045 - RNA, 19 nt, Artificial Sequence
  Description of Artificial Sequence: Synthetic oligonucleotide
auagcgcuugcaauccagc

SEQ ID NO: 2955046 - RNA, 19 nt, Artificial Sequence
  Description of Artificial Sequence: Synthetic oligonucleotide
uggagauuugugucuuucu

SEQ ID NO: 2955047 - RNA, 19 nt, Artificial Sequence
  Description of Artificial Sequence: Synthetic oligonucleotide
agcuccucccuccacagga

SEQ ID NO: 2955048 - RNA, 19 nt, Artificial Sequence
  Description of Artificial Sequence: Synthetic oligonucleotide
ugggauauacugugcucug

SEQ ID NO: 2955049 - RNA, 19 nt, Artificial Sequence
  Description of Artificial Sequence: Synthetic oligonucleotide
ggagccuggauagugacag

SEQ ID NO: 2955050 - RNA, 19 nt, Artificial Sequence
  Description of Artificial Sequence: Synthetic oligonucleotide
ucagcuccucccuccacag

SEQ ID NO: 2955051 - RNA, 19 nt, Artificial Sequence
  Description of Artificial Sequence: Synthetic oligonucleotide
cuugcuaauccuggcaaug

SEQ ID NO: 2955052 - RNA, 19 nt, Artificial Sequence
  Description of Artificial Sequence: Synthetic oligonucleotide
ugccaucuuuacuccgugg

SEQ ID NO: 2955053 - RNA, 19 nt, Artificial Sequence
  Description of Artificial Sequence: Synthetic oligonucleotide
uccugaacuuccucugcgc

SEQ ID NO: 2955054 - RNA, 19 nt, Artificial Sequence
  Description of Artificial Sequence: Synthetic oligonucleotide
uagcgcuugcaauccagcc

SEQ ID NO: 2955055 - RNA, 19 nt, Artificial Sequence
  Description of Artificial Sequence: Synthetic oligonucleotide
caguuugaaugauacagaa

SEQ ID NO: 2955056 - RNA, 19 nt, Artificial Sequence
  Description of Artificial Sequence: Synthetic oligonucleotide
gaaguccaaggaaugcggc

SEQ ID NO: 2955057 - RNA, 19 nt, Artificial Sequence
  Description of Artificial Sequence: Synthetic oligonucleotide
agucccucacagauggcgc

SEQ ID NO: 2955058 - RNA, 19 nt, Artificial Sequence
  Description of Artificial Sequence: Synthetic oligonucleotide
gagcaaauaagcaguuuga

SEQ ID NO: 2955059 - RNA, 19 nt, Artificial Sequence
  Description of Artificial Sequence: Synthetic oligonucleotide
uugcggaagaagagugccc

SEQ ID NO: 2955060 - RNA, 19 nt, Artificial Sequence
  Description of Artificial Sequence: Synthetic oligonucleotide
ugcuaauccuggcaauguc

SEQ ID NO: 2955061 - RNA, 19 nt, Artificial Sequence
  Description of Artificial Sequence: Synthetic oligonucleotide
uuuacuccguggagauuug

SEQ ID NO: 2955062 - RNA, 19 nt, Artificial Sequence
  Description of Artificial Sequence: Synthetic oligonucleotide
aaugagcaaauaagcaguu

SEQ ID NO: 2955063 - RNA, 19 nt, Artificial Sequence
  Description of Artificial Sequence: Synthetic oligonucleotide
ugcccagguuccaaugagc

SEQ ID NO: 2955064 - RNA, 19 nt, Artificial Sequence
  Description of Artificial Sequence: Synthetic oligonucleotide
agacuuuucugacccucug

SEQ ID NO: 2955065 - RNA, 19 nt, Artificial Sequence
  Description of Artificial Sequence: Synthetic oligonucleotide
acacgagaaguccaaggaa

SEQ ID NO: 2955066 - RNA, 19 nt, Artificial Sequence
  Description of Artificial Sequence: Synthetic oligonucleotide
aguugucauccugaacuuc

SEQ ID NO: 2955067 - RNA, 19 nt, Artificial Sequence
  Description of Artificial Sequence: Synthetic oligonucleotide
gguuccaaugagcaaauaa

SEQ ID NO: 2955068 - RNA, 19 nt, Artificial Sequence
  Description of Artificial Sequence: Synthetic oligonucleotide
guccuccugggauauacug

SEQ ID NO: 2955069 - RNA, 19 nt, Artificial Sequence
  Description of Artificial Sequence: Synthetic oligonucleotide
cagauagcgcuugcaaucc

SEQ ID NO: 2955070 - RNA, 19 nt, Artificial Sequence
  Description of Artificial Sequence: Synthetic oligonucleotide
agugcccagguuccaauga

SEQ ID NO: 2955071 - RNA, 19 nt, Artificial Sequence
  Description of Artificial Sequence: Synthetic oligonucleotide
aguccaaggaaugcggcga

SEQ ID NO: 2955072 - RNA, 19 nt, Artificial Sequence
  Description of Artificial Sequence: Synthetic oligonucleotide
ugcucugaggugccuguga

SEQ ID NO: 2955073 - RNA, 19 nt, Artificial Sequence
  Description of Artificial Sequence: Synthetic oligonucleotide
ugugcucugaggugccugu

SEQ ID NO: 2955074 - RNA, 19 nt, Artificial Sequence
  Description of Artificial Sequence: Synthetic oligonucleotide
cauccugaacuuccucugc

SEQ ID NO: 2955075 - RNA, 19 nt, Artificial Sequence
  Description of Artificial Sequence: Synthetic oligonucleotide
ggagauuugugucuuucuc

SEQ ID NO: 2955076 - RNA, 19 nt, Artificial Sequence
  Description of Artificial Sequence: Synthetic oligonucleotide
cuccguggagauuuguguc

SEQ ID NO: 2955077 - RNA, 19 nt, Artificial Sequence
  Description of Artificial Sequence: Synthetic oligonucleotide
ugcaauccagccccacacu

SEQ ID NO: 2955078 - RNA, 19 nt, Artificial Sequence
  Description of Artificial Sequence: Synthetic oligonucleotide
ggcagagucauuugccagc

SEQ ID NO: 2955079 - RNA, 19 nt, Artificial Sequence
  Description of Artificial Sequence: Synthetic oligonucleotide
cgggguagcaggaugaagg

SEQ ID NO: 2955080 - RNA, 19 nt, Artificial Sequence
  Description of Artificial Sequence: Synthetic oligonucleotide
uugcuaauccuggcaaugu

SEQ ID NO: 2955081 - RNA, 19 nt, Artificial Sequence
  Description of Artificial Sequence: Synthetic oligonucleotide
aggguuucagcuccucccu

SEQ ID NO: 2955082 - RNA, 19 nt, Artificial Sequence
  Description of Artificial Sequence: Synthetic oligonucleotide
ugugguggucucuccccag

SEQ ID NO: 2955083 - RNA, 19 nt, Artificial Sequence
  Description of Artificial Sequence: Synthetic oligonucleotide
cucugccaucuuuacuccg

SEQ ID NO: 2955084 - RNA, 19 nt, Artificial Sequence
  Description of Artificial Sequence: Synthetic oligonucleotide
augagaagucccucacaga

SEQ ID NO: 2955085 - RNA, 19 nt, Artificial Sequence
  Description of Artificial Sequence: Synthetic oligonucleotide
gcuaauccuggcaaugucc

SEQ ID NO: 2955086 - RNA, 19 nt, Artificial Sequence
  Description of Artificial Sequence: Synthetic oligonucleotide
cucuccccaguugucaucc

SEQ ID NO: 2955087 - RNA, 19 nt, Artificial Sequence
  Description of Artificial Sequence: Synthetic oligonucleotide
ccagauagcgcuugcaauc

SEQ ID NO: 2955088 - RNA, 19 nt, Artificial Sequence
  Description of Artificial Sequence: Synthetic oligonucleotide
agcagggguucuccagugg

SEQ ID NO: 2955089 - RNA, 19 nt, Artificial Sequence
  Description of Artificial Sequence: Synthetic oligonucleotide
cccucugccaucuuuacuc

SEQ ID NO: 2955090 - RNA, 19 nt, Artificial Sequence
  Description of Artificial Sequence: Synthetic oligonucleotide
guaaggcccagauagcgcu

SEQ ID NO: 2955091 - RNA, 19 nt, Artificial Sequence
  Description of Artificial Sequence: Synthetic oligonucleotide
gagaagucccucacagaug

SEQ ID NO: 2955092 - RNA, 19 nt, Artificial Sequence
  Description of Artificial Sequence: Synthetic oligonucleotide
uacugugcucugaggugcc

SEQ ID NO: 2955093 - RNA, 19 nt, Artificial Sequence
  Description of Artificial Sequence: Synthetic oligonucleotide
gguuucagcuccucccucc

SEQ ID NO: 2955094 - RNA, 19 nt, Artificial Sequence
  Description of Artificial Sequence: Synthetic oligonucleotide
gugaggaacacgagaaguc

SEQ ID NO: 2955095 - RNA, 19 nt, Artificial Sequence
  Description of Artificial Sequence: Synthetic oligonucleotide
cacaggaucgggguagcag

SEQ ID NO: 2955096 - RNA, 19 nt, Artificial Sequence
  Description of Artificial Sequence: Synthetic oligonucleotide
gcagggguucuccaguggg

SEQ ID NO: 2955097 - RNA, 19 nt, Artificial Sequence
  Description of Artificial Sequence: Synthetic oligonucleotide
gccacaggguuucagcucc

SEQ ID NO: 2955098 - RNA, 19 nt, Artificial Sequence
  Description of Artificial Sequence: Synthetic oligonucleotide
caucuuuacuccguggaga

SEQ ID NO: 2955099 - RNA, 19 nt, Artificial Sequence
  Description of Artificial Sequence: Synthetic oligonucleotide
gagugcccagguuccaaug

SEQ ID NO: 2955100 - RNA, 19 nt, Artificial Sequence
  Description of Artificial Sequence: Synthetic oligonucleotide
gcgcuugcaauccagcccc

SEQ ID NO: 2955101 - RNA, 19 nt, Artificial Sequence
  Description of Artificial Sequence: Synthetic oligonucleotide
gugcccagguuccaaugag

SEQ ID NO: 2955102 - RNA, 19 nt, Artificial Sequence
  Description of Artificial Sequence: Synthetic oligonucleotide
acgagaaguccaaggaaug

SEQ ID NO: 2955103 - RNA, 19 nt, Artificial Sequence
  Description of Artificial Sequence: Synthetic oligonucleotide
ccaguugucauccugaacu

SEQ ID NO: 2955104 - RNA, 19 nt, Artificial Sequence
  Description of Artificial Sequence: Synthetic oligonucleotide
aguuugaaugauacagaaa

SEQ ID NO: 2955105 - RNA, 19 nt, Artificial Sequence
  Description of Artificial Sequence: Synthetic oligonucleotide
cuaauccuggcaauguccu

SEQ ID NO: 2955106 - RNA, 19 nt, Artificial Sequence
  Description of Artificial Sequence: Synthetic oligonucleotide
cucacagauggcgccacag

SEQ ID NO: 2955107 - RNA, 19 nt, Artificial Sequence
  Description of Artificial Sequence: Synthetic oligonucleotide
aaggcccagauagcgcuug

SEQ ID NO: 2955108 - RNA, 19 nt, Artificial Sequence
  Description of Artificial Sequence: Synthetic oligonucleotide
agggguucuccagugggag

SEQ ID NO: 2955109 - RNA, 19 nt, Artificial Sequence
  Description of Artificial Sequence: Synthetic oligonucleotide
augcggcgacaguaaggcc

SEQ ID NO: 2955110 - RNA, 19 nt, Artificial Sequence
  Description of Artificial Sequence: Synthetic oligonucleotide
cuccacaggaucgggguag

SEQ ID NO: 2955111 - RNA, 19 nt, Artificial Sequence
  Description of Artificial Sequence: Synthetic oligonucleotide
gaucgggguagcaggauga

SEQ ID NO: 2955112 - RNA, 19 nt, Artificial Sequence
  Description of Artificial Sequence: Synthetic oligonucleotide
gaggaacacgagaagucca

SEQ ID NO: 2955113 - RNA, 19 nt, Artificial Sequence
  Description of Artificial Sequence: Synthetic oligonucleotide
gauggcgccacaggguuuc

SEQ ID NO: 2955114 - RNA, 19 nt, Artificial Sequence
  Description of Artificial Sequence: Synthetic oligonucleotide
uguccuccugggauauacu

SEQ ID NO: 2955115 - RNA, 19 nt, Artificial Sequence
  Description of Artificial Sequence: Synthetic oligonucleotide
cuuuucugacccucugcca

SEQ ID NO: 2955116 - RNA, 19 nt, Artificial Sequence
  Description of Artificial Sequence: Synthetic oligonucleotide
ccagugggagccuggauag

SEQ ID NO: 2955117 - RNA, 19 nt, Artificial Sequence
  Description of Artificial Sequence: Synthetic oligonucleotide
ccuccugggauauacugug

SEQ ID NO: 2955118 - RNA, 19 nt, Artificial Sequence
  Description of Artificial Sequence: Synthetic oligonucleotide
gcaauccagccccacacug

SEQ ID NO: 2955119 - RNA, 19 nt, Artificial Sequence
  Description of Artificial Sequence: Synthetic oligonucleotide
gucccucacagauggcgcc

SEQ ID NO: 2955120 - RNA, 19 nt, Artificial Sequence
  Description of Artificial Sequence: Synthetic oligonucleotide
cuccugggauauacugugc

SEQ ID NO: 2955121 - RNA, 19 nt, Artificial Sequence
  Description of Artificial Sequence: Synthetic oligonucleotide
cuugcaauccagccccaca

SEQ ID NO: 2955122 - RNA, 19 nt, Artificial Sequence
  Description of Artificial Sequence: Synthetic oligonucleotide
guccuugcuaauccuggca

SEQ ID NO: 2955123 - RNA, 19 nt, Artificial Sequence
  Description of Artificial Sequence: Synthetic oligonucleotide
uuucagcuccucccuccac

SEQ ID NO: 2955124 - RNA, 19 nt, Artificial Sequence
  Description of Artificial Sequence: Synthetic oligonucleotide
aggcccagauagcgcuugc

SEQ ID NO: 2955125 - RNA, 19 nt, Artificial Sequence
  Description of Artificial Sequence: Synthetic oligonucleotide
gggguagcaggaugaaggc

SEQ ID NO: 2955126 - RNA, 19 nt, Artificial Sequence
  Description of Artificial Sequence: Synthetic oligonucleotide
cacgagaaguccaaggaau

SEQ ID NO: 2955127 - RNA, 19 nt, Artificial Sequence
  Description of Artificial Sequence: Synthetic oligonucleotide
ggaaugcggcgacaguaag

SEQ ID NO: 2955128 - RNA, 19 nt, Artificial Sequence
  Description of Artificial Sequence: Synthetic oligonucleotide
agagugcccagguuccaau

SEQ ID NO: 2955129 - RNA, 19 nt, Artificial Sequence
  Description of Artificial Sequence: Synthetic oligonucleotide
agauagcgcuugcaaucca

SEQ ID NO: 2955130 - RNA, 19 nt, Artificial Sequence
  Description of Artificial Sequence: Synthetic oligonucleotide
ucgggguagcaggaugaag

SEQ ID NO: 2955131 - RNA, 19 nt, Artificial Sequence
  Description of Artificial Sequence: Synthetic oligonucleotide
auaagcaguuugaaugaua

SEQ ID NO: 2955132 - RNA, 19 nt, Artificial Sequence
  Description of Artificial Sequence: Synthetic oligonucleotide
gccaucuuuacuccgugga

SEQ ID NO: 2955133 - RNA, 19 nt, Artificial Sequence
  Description of Artificial Sequence: Synthetic oligonucleotide
acagauggcgccacagggu

SEQ ID NO: 2955134 - RNA, 19 nt, Artificial Sequence
  Description of Artificial Sequence: Synthetic oligonucleotide
ggguucuccagugggagcc

SEQ ID NO: 2955135 - RNA, 19 nt, Artificial Sequence
  Description of Artificial Sequence: Synthetic oligonucleotide
cuccauguccuugcuaauc

SEQ ID NO: 2955136 - RNA, 19 nt, Artificial Sequence
  Description of Artificial Sequence: Synthetic oligonucleotide
ccugaacuuccucugcgcc

SEQ ID NO: 2955137 - RNA, 19 nt, Artificial Sequence
  Description of Artificial Sequence: Synthetic oligonucleotide
uucugacccucugccaucu

SEQ ID NO: 2955138 - RNA, 19 nt, Artificial Sequence
  Description of Artificial Sequence: Synthetic oligonucleotide
guggagauuugugucuuuc

SEQ ID NO: 2955139 - RNA, 19 nt, Artificial Sequence
  Description of Artificial Sequence: Synthetic oligonucleotide
gggcagagucauuugccag

SEQ ID NO: 2955140 - RNA, 19 nt, Artificial Sequence
  Description of Artificial Sequence: Synthetic oligonucleotide
uugccagcagggguucucc

SEQ ID NO: 2955141 - RNA, 19 nt, Artificial Sequence
  Description of Artificial Sequence: Synthetic oligonucleotide
cucugaggugccugugaug

SEQ ID NO: 2955142 - RNA, 19 nt, Artificial Sequence
  Description of Artificial Sequence: Synthetic oligonucleotide
aagagugcccagguuccaa

SEQ ID NO: 2955143 - RNA, 19 nt, Artificial Sequence
  Description of Artificial Sequence: Synthetic oligonucleotide
cuuuacuccguggagauuu

SEQ ID NO: 2955144 - RNA, 19 nt, Artificial Sequence
  Description of Artificial Sequence: Synthetic oligonucleotide
ggaucgggguagcaggaug

SEQ ID NO: 2955145 - RNA, 19 nt, Artificial Sequence
  Description of Artificial Sequence: Synthetic oligonucleotide
auccuggcaauguccuccu

SEQ ID NO: 2955146 - RNA, 19 nt, Artificial Sequence
  Description of Artificial Sequence: Synthetic oligonucleotide
uuugccagcagggguucuc

SEQ ID NO: 2955147 - RNA, 19 nt, Artificial Sequence
  Description of Artificial Sequence: Synthetic oligonucleotide
gcugugguggucucucccc

SEQ ID NO: 2955148 - RNA, 19 nt, Artificial Sequence
  Description of Artificial Sequence: Synthetic oligonucleotide
ucuccagugggagccugga

SEQ ID NO: 2955149 - RNA, 19 nt, Artificial Sequence
  Description of Artificial Sequence: Synthetic oligonucleotide
cugccaucuuuacuccgug

SEQ ID NO: 2955150 - RNA, 19 nt, Artificial Sequence
  Description of Artificial Sequence: Synthetic oligonucleotide
ccaucuuuacuccguggag

SEQ ID NO: 2955151 - RNA, 19 nt, Artificial Sequence
  Description of Artificial Sequence: Synthetic oligonucleotide
acccucugccaucuuuacu

SEQ ID NO: 2955152 - RNA, 19 nt, Artificial Sequence
  Description of Artificial Sequence: Synthetic oligonucleotide
ugugauggcuguggugguc

SEQ ID NO: 2955153 - RNA, 19 nt, Artificial Sequence
  Description of Artificial Sequence: Synthetic oligonucleotide
ucucuccccaguugucauc

SEQ ID NO: 2955154 - RNA, 19 nt, Artificial Sequence
  Description of Artificial Sequence: Synthetic oligonucleotide
ggcgccacaggguuucagc

SEQ ID NO: 2955155 - RNA, 19 nt, Artificial Sequence
  Description of Artificial Sequence: Synthetic oligonucleotide
gggugaggaacacgagaag

SEQ ID NO: 2955156 - RNA, 19 nt, Artificial Sequence
  Description of Artificial Sequence: Synthetic oligonucleotide
gguggucucuccccaguug

SEQ ID NO: 2955157 - RNA, 19 nt, Artificial Sequence
  Description of Artificial Sequence: Synthetic oligonucleotide
cugggauauacugugcucu

SEQ ID NO: 2955158 - RNA, 19 nt, Artificial Sequence
  Description of Artificial Sequence: Synthetic oligonucleotide
aggaacacgagaaguccaa

SEQ ID NO: 2955159 - RNA, 19 nt, Artificial Sequence
  Description of Artificial Sequence: Synthetic oligonucleotide
guccaaggaaugcggcgac

SEQ ID NO: 2955160 - RNA, 19 nt, Artificial Sequence
  Description of Artificial Sequence: Synthetic oligonucleotide
cagcagggguucuccagug

SEQ ID NO: 2955161 - RNA, 19 nt, Artificial Sequence
  Description of Artificial Sequence: Synthetic oligonucleotide
uuacuccguggagauuugu

SEQ ID NO: 2955162 - RNA, 19 nt, Artificial Sequence
  Description of Artificial Sequence: Synthetic oligonucleotide
uccaaggaaugcggcgaca

SEQ ID NO: 2955163 - RNA, 19 nt, Artificial Sequence
  Description of Artificial Sequence: Synthetic oligonucleotide
ggaacacgagaaguccaag

SEQ ID NO: 2955164 - RNA, 19 nt, Artificial Sequence
  Description of Artificial Sequence: Synthetic oligonucleotide
uccacaggaucgggguagc

SEQ ID NO: 2955165 - RNA, 19 nt, Artificial Sequence
  Description of Artificial Sequence: Synthetic oligonucleotide
aggaaugcggcgacaguaa

SEQ ID NO: 2955166 - RNA, 19 nt, Artificial Sequence
  Description of Artificial Sequence: Synthetic oligonucleotide
aacuuccucugcgccugug

SEQ ID NO: 2955167 - RNA, 19 nt, Artificial Sequence
  Description of Artificial Sequence: Synthetic oligonucleotide
uaaggcccagauagcgcuu

SEQ ID NO: 2955168 - RNA, 19 nt, Artificial Sequence
  Description of Artificial Sequence: Synthetic oligonucleotide
augagcaaauaagcaguuu

SEQ ID NO: 2955169 - RNA, 19 nt, Artificial Sequence
  Description of Artificial Sequence: Synthetic oligonucleotide
ucccucacagauggcgcca

SEQ ID NO: 2955170 - RNA, 19 nt, Artificial Sequence
  Description of Artificial Sequence: Synthetic oligonucleotide
ccaaggaaugcggcgacag

SEQ ID NO: 2955171 - RNA, 19 nt, Artificial Sequence
  Description of Artificial Sequence: Synthetic oligonucleotide
ggugaggaacacgagaagu

SEQ ID NO: 2955172 - RNA, 19 nt, Artificial Sequence
  Description of Artificial Sequence: Synthetic oligonucleotide
ggggcagagucauuugcca

SEQ ID NO: 2955173 - RNA, 19 nt, Artificial Sequence
  Description of Artificial Sequence: Synthetic oligonucleotide
ggcaauguccuccugggau

SEQ ID NO: 2955174 - RNA, 19 nt, Artificial Sequence
  Description of Artificial Sequence: Synthetic oligonucleotide
ugguggucucuccccaguu

SEQ ID NO: 2955175 - RNA, 19 nt, Artificial Sequence
  Description of Artificial Sequence: Synthetic oligonucleotide
ggaagaagagugcccaggu

SEQ ID NO: 2955176 - RNA, 19 nt, Artificial Sequence
  Description of Artificial Sequence: Synthetic oligonucleotide
ggcugugguggucucuccc

SEQ ID NO: 2955177 - RNA, 19 nt, Artificial Sequence
  Description of Artificial Sequence: Synthetic oligonucleotide
ggggugaggaacacgagaa

SEQ ID NO: 2955178 - RNA, 19 nt, Artificial Sequence
  Description of Artificial Sequence: Synthetic oligonucleotide
cauuugccagcagggguuc

SEQ ID NO: 2955179 - RNA, 19 nt, Artificial Sequence
  Description of Artificial Sequence: Synthetic oligonucleotide
uggcugugguggucucucc

SEQ ID NO: 2955180 - RNA, 19 nt, Artificial Sequence
  Description of Artificial Sequence: Synthetic oligonucleotide
ccagguuccaaugagcaaa

SEQ ID NO: 2955181 - RNA, 19 nt, Artificial Sequence
  Description of Artificial Sequence: Synthetic oligonucleotide
ccugggauauacugugcuc

SEQ ID NO: 2955182 - RNA, 19 nt, Artificial Sequence
  Description of Artificial Sequence: Synthetic oligonucleotide
ccucugccaucuuuacucc

SEQ ID NO: 2955183 - RNA, 19 nt, Artificial Sequence
  Description of Artificial Sequence: Synthetic oligonucleotide
gaagaagagugcccagguu

SEQ ID NO: 2955184 - RNA, 19 nt, Artificial Sequence
  Description of Artificial Sequence: Synthetic oligonucleotide
gaagagugcccagguucca

SEQ ID NO: 2955185 - RNA, 19 nt, Artificial Sequence
  Description of Artificial Sequence: Synthetic oligonucleotide
gaagucccucacagauggc

SEQ ID NO: 2955186 - RNA, 19 nt, Artificial Sequence
  Description of Artificial Sequence: Synthetic oligonucleotide
cugugcucugaggugccug

SEQ ID NO: 2955187 - RNA, 19 nt, Artificial Sequence
  Description of Artificial Sequence: Synthetic oligonucleotide
ugauggcugugguggucuc

SEQ ID NO: 2955188 - RNA, 19 nt, Artificial Sequence
  Description of Artificial Sequence: Synthetic oligonucleotide
cagagucauuugccagcag

SEQ ID NO: 2955189 - RNA, 19 nt, Artificial Sequence
  Description of Artificial Sequence: Synthetic oligonucleotide
cgagaaguccaaggaaugc

SEQ ID NO: 2955190 - RNA, 19 nt, Artificial Sequence
  Description of Artificial Sequence: Synthetic oligonucleotide
ucuuuacuccguggagauu

SEQ ID NO: 2955191 - RNA, 19 nt, Artificial Sequence
  Description of Artificial Sequence: Synthetic oligonucleotide
agccccacacuguccucca

SEQ ID NO: 2955192 - RNA, 19 nt, Artificial Sequence
  Description of Artificial Sequence: Synthetic oligonucleotide
cugugguggucucucccca

SEQ ID NO: 2955193 - RNA, 19 nt, Artificial Sequence
  Description of Artificial Sequence: Synthetic oligonucleotide
gcaauguccuccugggaua

SEQ ID NO: 2955194 - RNA, 19 nt, Artificial Sequence
  Description of Artificial Sequence: Synthetic oligonucleotide
cagcuccucccuccacagg

SEQ ID NO: 2955195 - RNA, 19 nt, Artificial Sequence
  Description of Artificial Sequence: Synthetic oligonucleotide
caauccagccccacacugu

SEQ ID NO: 2955196 - RNA, 19 nt, Artificial Sequence
  Description of Artificial Sequence: Synthetic oligonucleotide
cucccuccacaggaucggg

SEQ ID NO: 2955197 - RNA, 19 nt, Artificial Sequence
  Description of Artificial Sequence: Synthetic oligonucleotide
gggguucuccagugggagc

SEQ ID NO: 2955198 - RNA, 19 nt, Artificial Sequence
  Description of Artificial Sequence: Synthetic oligonucleotide
cagacuuuucugacccucu

SEQ ID NO: 2955199 - RNA, 19 nt, Artificial Sequence
  Description of Artificial Sequence: Synthetic oligonucleotide
gacagacuuuucugacccu

SEQ ID NO: 2955200 - RNA, 19 nt, Artificial Sequence
  Description of Artificial Sequence: Synthetic oligonucleotide
guucuccagugggagccug

SEQ ID NO: 2955201 - RNA, 19 nt, Artificial Sequence
  Description of Artificial Sequence: Synthetic oligonucleotide
gcagagucauuugccagca

SEQ ID NO: 2955202 - RNA, 19 nt, Artificial Sequence
  Description of Artificial Sequence: Synthetic oligonucleotide
gcggaagaagagugcccag

SEQ ID NO: 2955203 - RNA, 19 nt, Artificial Sequence
  Description of Artificial Sequence: Synthetic oligonucleotide
cggaagaagagugcccagg

SEQ ID NO: 2955204 - RNA, 19 nt, Artificial Sequence
  Description of Artificial Sequence: Synthetic oligonucleotide
uggcgccacaggguuucag

SEQ ID NO: 2955205 - RNA, 19 nt, Artificial Sequence
  Description of Artificial Sequence: Synthetic oligonucleotide
gcccagguuccaaugagca

SEQ ID NO: 2955206 - RNA, 19 nt, Artificial Sequence
  Description of Artificial Sequence: Synthetic oligonucleotide
gccugugauggcuguggug

SEQ ID NO: 2955207 - RNA, 19 nt, Artificial Sequence
  Description of Artificial Sequence: Synthetic oligonucleotide
gugauggcugugguggucu

SEQ ID NO: 2955208 - RNA, 19 nt, Artificial Sequence
  Description of Artificial Sequence: Synthetic oligonucleotide
aauguccuccugggauaua

SEQ ID NO: 2955209 - RNA, 19 nt, Artificial Sequence
  Description of Artificial Sequence: Synthetic oligonucleotide
gcccagauagcgcuugcaa

SEQ ID NO: 2955210 - RNA, 19 nt, Artificial Sequence
  Description of Artificial Sequence: Synthetic oligonucleotide
gggauauacugugcucuga

SEQ ID NO: 2955211 - RNA, 19 nt, Artificial Sequence
  Description of Artificial Sequence: Synthetic oligonucleotide
auuugccagcagggguucu

SEQ ID NO: 2955212 - RNA, 19 nt, Artificial Sequence
  Description of Artificial Sequence: Synthetic oligonucleotide
aucgggguagcaggaugaa

SEQ ID NO: 2955213 - RNA, 19 nt, Artificial Sequence
  Description of Artificial Sequence: Synthetic oligonucleotide
cuggauagugacagacuuu

SEQ ID NO: 2955214 - RNA, 19 nt, Artificial Sequence
  Description of Artificial Sequence: Synthetic oligonucleotide
acugugcucugaggugccu

SEQ ID NO: 2955215 - RNA, 19 nt, Artificial Sequence
  Description of Artificial Sequence: Synthetic oligonucleotide
aggaucgggguagcaggau

SEQ ID NO: 2955216 - RNA, 19 nt, Artificial Sequence
  Description of Artificial Sequence: Synthetic oligonucleotide
cagauggcgccacaggguu

SEQ ID NO: 2955217 - RNA, 19 nt, Artificial Sequence
  Description of Artificial Sequence: Synthetic oligonucleotide
cccaguugucauccugaac

SEQ ID NO: 2955218 - RNA, 19 nt, Artificial Sequence
  Description of Artificial Sequence: Synthetic oligonucleotide
cacaggguuucagcuccuc

SEQ ID NO: 2955219 - RNA, 19 nt, Artificial Sequence
  Description of Artificial Sequence: Synthetic oligonucleotide
ggguagcaggaugaaggca

SEQ ID NO: 2955220 - RNA, 19 nt, Artificial Sequence
  Description of Artificial Sequence: Synthetic oligonucleotide
ccccacacuguccuccaug

SEQ ID NO: 2955221 - RNA, 19 nt, Artificial Sequence
  Description of Artificial Sequence: Synthetic oligonucleotide
ccucccuccacaggaucgg

SEQ ID NO: 2955222 - RNA, 19 nt, Artificial Sequence
  Description of Artificial Sequence: Synthetic oligonucleotide
gcgacaguaaggcccagau

SEQ ID NO: 2955223 - RNA, 19 nt, Artificial Sequence
  Description of Artificial Sequence: Synthetic oligonucleotide
ccuggauagugacagacuu

SEQ ID NO: 2955224 - RNA, 19 nt, Artificial Sequence
  Description of Artificial Sequence: Synthetic oligonucleotide
ggauagugacagacuuuuc

SEQ ID NO: 2955225 - RNA, 19 nt, Artificial Sequence
  Description of Artificial Sequence: Synthetic oligonucleotide
ucugacccucugccaucuu

SEQ ID NO: 2955226 - RNA, 19 nt, Artificial Sequence
  Description of Artificial Sequence: Synthetic oligonucleotide
gauggcugugguggucucu

SEQ ID NO: 2955227 - RNA, 19 nt, Artificial Sequence
  Description of Artificial Sequence: Synthetic oligonucleotide
gugcucugaggugccugug

SEQ ID NO: 2955228 - RNA, 19 nt, Artificial Sequence
  Description of Artificial Sequence: Synthetic oligonucleotide
caguugucauccugaacuu

SEQ ID NO: 2955229 - RNA, 19 nt, Artificial Sequence
  Description of Artificial Sequence: Synthetic oligonucleotide
ggguuucagcuccucccuc

SEQ ID NO: 2955230 - RNA, 19 nt, Artificial Sequence
  Description of Artificial Sequence: Synthetic oligonucleotide
gugguggucucuccccagu

SEQ ID NO: 2955231 - RNA, 19 nt, Artificial Sequence
  Description of Artificial Sequence: Synthetic oligonucleotide
gucucuccccaguugucau

SEQ ID NO: 2955232 - RNA, 19 nt, Artificial Sequence
  Description of Artificial Sequence: Synthetic oligonucleotide
caaggaaugcggcgacagu

SEQ ID NO: 2955233 - RNA, 19 nt, Artificial Sequence
  Description of Artificial Sequence: Synthetic oligonucleotide
agguuccaaugagcaaaua

SEQ ID NO: 2955234 - RNA, 19 nt, Artificial Sequence
  Description of Artificial Sequence: Synthetic oligonucleotide
guagcaggaugaaggcaau

SEQ ID NO: 2955235 - RNA, 19 nt, Artificial Sequence
  Description of Artificial Sequence: Synthetic oligonucleotide
gcgccacaggguuucagcu

SEQ ID NO: 2955236 - RNA, 19 nt, Artificial Sequence
  Description of Artificial Sequence: Synthetic oligonucleotide
gcuugcaauccagccccac

SEQ ID NO: 2955237 - RNA, 19 nt, Artificial Sequence
  Description of Artificial Sequence: Synthetic oligonucleotide
agauggcgccacaggguuu

SEQ ID NO: 2955238 - RNA, 19 nt, Artificial Sequence
  Description of Artificial Sequence: Synthetic oligonucleotide
gcucugaggugccugugau

SEQ ID NO: 2955239 - RNA, 19 nt, Artificial Sequence
  Description of Artificial Sequence: Synthetic oligonucleotide
gggagccuggauagugaca

SEQ ID NO: 2955240 - RNA, 19 nt, Artificial Sequence
  Description of Artificial Sequence: Synthetic oligonucleotide
gcggcgacaguaaggccca

SEQ ID NO: 2955241 - RNA, 19 nt, Artificial Sequence
  Description of Artificial Sequence: Synthetic oligonucleotide
ggcgacaguaaggcccaga

SEQ ID NO: 2955242 - RNA, 19 nt, Artificial Sequence
  Description of Artificial Sequence: Synthetic oligonucleotide
cgccacaggguuucagcuc

SEQ ID NO: 2955243 - RNA, 19 nt, Artificial Sequence
  Description of Artificial Sequence: Synthetic oligonucleotide
cccagguuccaaugagcaa

SEQ ID NO: 2955244 - RNA, 19 nt, Artificial Sequence
  Description of Artificial Sequence: Synthetic oligonucleotide
ggcccagauagcgcuugca

SEQ ID NO: 2955245 - RNA, 19 nt, Artificial Sequence
  Description of Artificial Sequence: Synthetic oligonucleotide
cccuccacaggaucggggu

SEQ ID NO: 2955246 - RNA, 19 nt, Artificial Sequence
  Description of Artificial Sequence: Synthetic oligonucleotide
ccauguccuugcuaauccu

SEQ ID NO: 2955247 - RNA, 19 nt, Artificial Sequence
  Description of Artificial Sequence: Synthetic oligonucleotide
gccuggauagugacagacu

SEQ ID NO: 2955248 - RNA, 19 nt, Artificial Sequence
  Description of Artificial Sequence: Synthetic oligonucleotide
auggcgccacaggguuuca

SEQ ID NO: 2955249 - RNA, 19 nt, Artificial Sequence
  Description of Artificial Sequence: Synthetic oligonucleotide
ccuugcuaauccuggcaau

SEQ ID NO: 2955250 - RNA, 19 nt, Artificial Sequence
  Description of Artificial Sequence: Synthetic oligonucleotide
cuccagugggagccuggau

SEQ ID NO: 2955251 - RNA, 19 nt, Artificial Sequence
  Description of Artificial Sequence: Synthetic oligonucleotide
ccuccacaggaucggggua

SEQ ID NO: 2955252 - RNA, 19 nt, Artificial Sequence
  Description of Artificial Sequence: Synthetic oligonucleotide
ccucacagauggcgccaca

SEQ ID NO: 2955253 - RNA, 19 nt, Artificial Sequence
  Description of Artificial Sequence: Synthetic oligonucleotide
gguucuccagugggagccu

SEQ ID NO: 2955254 - RNA, 19 nt, Artificial Sequence
  Description of Artificial Sequence: Synthetic oligonucleotide
cgacaguaaggcccagaua

SEQ ID NO: 2955255 - RNA, 19 nt, Artificial Sequence
  Description of Artificial Sequence: Synthetic oligonucleotide
cagugggagccuggauagu

SEQ ID NO: 2955256 - RNA, 19 nt, Artificial Sequence
  Description of Artificial Sequence: Synthetic oligonucleotide
ccacaggaucgggguagca

SEQ ID NO: 2955257 - RNA, 19 nt, Artificial Sequence
  Description of Artificial Sequence: Synthetic oligonucleotide
gcuccucccuccacaggau

SEQ ID NO: 2955258 - RNA, 19 nt, Artificial Sequence
  Description of Artificial Sequence: Synthetic oligonucleotide
cgcuugcaauccagcccca

SEQ ID NO: 2955259 - RNA, 19 nt, Artificial Sequence
  Description of Artificial Sequence: Synthetic oligonucleotide
ccacaggguuucagcuccu

SEQ ID NO: 2955260 - RNA, 19 nt, Artificial Sequence
  Description of Artificial Sequence: Synthetic oligonucleotide
ccguggagauuugugucuu

SEQ ID NO: 2955261 - RNA, 19 nt, Artificial Sequence
  Description of Artificial Sequence: Synthetic oligonucleotide
gccccacacuguccuccau

SEQ ID NO: 2955262 - RNA, 19 nt, Artificial Sequence
  Description of Artificial Sequence: Synthetic oligonucleotide
cggcgacaguaaggcccag

SEQ ID NO: 2955263 - RNA, 19 nt, Artificial Sequence
  Description of Artificial Sequence: Synthetic oligonucleotide
uucgaauaaacuuagaccc

SEQ ID NO: 2955264 - RNA, 19 nt, Artificial Sequence
  Description of Artificial Sequence: Synthetic oligonucleotide
auuuauuguagacacaaac

SEQ ID NO: 2955265 - RNA, 19 nt, Artificial Sequence
  Description of Artificial Sequence: Synthetic oligonucleotide
aaauccauguuauuuauug

SEQ ID NO: 2955266 - RNA, 19 nt, Artificial Sequence
  Description of Artificial Sequence: Synthetic oligonucleotide
ugaagaaagagaaaggucu

SEQ ID NO: 2955267 - RNA, 19 nt, Artificial Sequence
  Description of Artificial Sequence: Synthetic oligonucleotide
aaagagaaaggucuguguc

SEQ ID NO: 2955268 - RNA, 19 nt, Artificial Sequence
  Description of Artificial Sequence: Synthetic oligonucleotide
uuucgaauaaacuuagacc

SEQ ID NO: 2955269 - RNA, 19 nt, Artificial Sequence
  Description of Artificial Sequence: Synthetic oligonucleotide
uguaaccucaauaugagac

SEQ ID NO: 2955270 - RNA, 19 nt, Artificial Sequence
  Description of Artificial Sequence: Synthetic oligonucleotide
uguuauuuauuguagacac

SEQ ID NO: 2955271 - RNA, 19 nt, Artificial Sequence
  Description of Artificial Sequence: Synthetic oligonucleotide
uuuauuguagacacaaaca

SEQ ID NO: 2955272 - RNA, 19 nt, Artificial Sequence
  Description of Artificial Sequence: Synthetic oligonucleotide
uuauacauggaauagccca

SEQ ID NO: 2955273 - RNA, 19 nt, Artificial Sequence
  Description of Artificial Sequence: Synthetic oligonucleotide
uuuucgaauaaacuuagac

SEQ ID NO: 2955274 - RNA, 19 nt, Artificial Sequence
  Description of Artificial Sequence: Synthetic oligonucleotide
aaacauguaaccucaauau

SEQ ID NO: 2955275 - RNA, 19 nt, Artificial Sequence
  Description of Artificial Sequence: Synthetic oligonucleotide
cagaauuccuuauacaugg

SEQ ID NO: 2955276 - RNA, 19 nt, Artificial Sequence
  Description of Artificial Sequence: Synthetic oligonucleotide
uuucaguuuguauagcccg

SEQ ID NO: 2955277 - RNA, 19 nt, Artificial Sequence
  Description of Artificial Sequence: Synthetic oligonucleotide
aagagaaaggucugugucg

SEQ ID NO: 2955278 - RNA, 19 nt, Artificial Sequence
  Description of Artificial Sequence: Synthetic oligonucleotide
aaacuuagaccccugaccu

SEQ ID NO: 2955279 - RNA, 19 nt, Artificial Sequence
  Description of Artificial Sequence: Synthetic oligonucleotide
uaaacuuagaccccugacc

SEQ ID NO: 2955280 - RNA, 19 nt, Artificial Sequence
  Description of Artificial Sequence: Synthetic oligonucleotide
uuauuguagacacaaacau

SEQ ID NO: 2955281 - RNA, 19 nt, Artificial Sequence
  Description of Artificial Sequence: Synthetic oligonucleotide
auauggaucaggugaaugg

SEQ ID NO: 2955282 - RNA, 19 nt, Artificial Sequence
  Description of Artificial Sequence: Synthetic oligonucleotide
agaaaguaagccaauauuc

SEQ ID NO: 2955283 - RNA, 19 nt, Artificial Sequence
  Description of Artificial Sequence: Synthetic oligonucleotide
uaugagacgucuaacuaag

SEQ ID NO: 2955284 - RNA, 19 nt, Artificial Sequence
  Description of Artificial Sequence: Synthetic oligonucleotide
uaacuaagcaagcacuucc

SEQ ID NO: 2955285 - RNA, 19 nt, Artificial Sequence
  Description of Artificial Sequence: Synthetic oligonucleotide
uaagccaauauucaauacu

SEQ ID NO: 2955286 - RNA, 19 nt, Artificial Sequence
  Description of Artificial Sequence: Synthetic oligonucleotide
aauggggacaaaugguguc

SEQ ID NO: 2955287 - RNA, 19 nt, Artificial Sequence
  Description of Artificial Sequence: Synthetic oligonucleotide
uccauguuauuuauuguag

SEQ ID NO: 2955288 - RNA, 19 nt, Artificial Sequence
  Description of Artificial Sequence: Synthetic oligonucleotide
uuauuuauuguagacacaa

SEQ ID NO: 2955289 - RNA, 19 nt, Artificial Sequence
  Description of Artificial Sequence: Synthetic oligonucleotide
uaugaagaaagagaaaggu

SEQ ID NO: 2955290 - RNA, 19 nt, Artificial Sequence
  Description of Artificial Sequence: Synthetic oligonucleotide
auaaacuuagaccccugac

SEQ ID NO: 2955291 - RNA, 19 nt, Artificial Sequence
  Description of Artificial Sequence: Synthetic oligonucleotide
ucuucuaaggcuuaggcuu

SEQ ID NO: 2955292 - RNA, 19 nt, Artificial Sequence
  Description of Artificial Sequence: Synthetic oligonucleotide
aagaaaguaagccaauauu

SEQ ID NO: 2955293 - RNA, 19 nt, Artificial Sequence
  Description of Artificial Sequence: Synthetic oligonucleotide
uauuguagacacaaacaug

SEQ ID NO: 2955294 - RNA, 19 nt, Artificial Sequence
  Description of Artificial Sequence: Synthetic oligonucleotide
auuguagacacaaacaugu

SEQ ID NO: 2955295 - RNA, 19 nt, Artificial Sequence
  Description of Artificial Sequence: Synthetic oligonucleotide
uuuucaguuuguauagccc

SEQ ID NO: 2955296 - RNA, 19 nt, Artificial Sequence
  Description of Artificial Sequence: Synthetic oligonucleotide
cuucaucauaugaagaaag

SEQ ID NO: 2955297 - RNA, 19 nt, Artificial Sequence
  Description of Artificial Sequence: Synthetic oligonucleotide
aacauguaaccucaauaug

SEQ ID NO: 2955298 - RNA, 19 nt, Artificial Sequence
  Description of Artificial Sequence: Synthetic oligonucleotide
uaaggcuuaggcuuggccc

SEQ ID NO: 2955299 - RNA, 19 nt, Artificial Sequence
  Description of Artificial Sequence: Synthetic oligonucleotide
ucaucauaugaagaaagag

SEQ ID NO: 2955300 - RNA, 19 nt, Artificial Sequence
  Description of Artificial Sequence: Synthetic oligonucleotide
aauccagcuggcaagaaag

SEQ ID NO: 2955301 - RNA, 19 nt, Artificial Sequence
  Description of Artificial Sequence: Synthetic oligonucleotide
aauaugagacgucuaacua

SEQ ID NO: 2955302 - RNA, 19 nt, Artificial Sequence
  Description of Artificial Sequence: Synthetic oligonucleotide
uuaggcuuggcccagaauu

SEQ ID NO: 2955303 - RNA, 19 nt, Artificial Sequence
  Description of Artificial Sequence: Synthetic oligonucleotide
aacccugccaugccaaugg

SEQ ID NO: 2955304 - RNA, 19 nt, Artificial Sequence
  Description of Artificial Sequence: Synthetic oligonucleotide
uggaauagcccauaccaag

SEQ ID NO: 2955305 - RNA, 19 nt, Artificial Sequence
  Description of Artificial Sequence: Synthetic oligonucleotide
ugagacgucuaacuaagca

SEQ ID NO: 2955306 - RNA, 19 nt, Artificial Sequence
  Description of Artificial Sequence: Synthetic oligonucleotide
ucuaaauccauguuauuua

SEQ ID NO: 2955307 - RNA, 19 nt, Artificial Sequence
  Description of Artificial Sequence: Synthetic oligonucleotide
cauguuauuuauuguagac

SEQ ID NO: 2955308 - RNA, 19 nt, Artificial Sequence
  Description of Artificial Sequence: Synthetic oligonucleotide
guaaccucaauaugagacg

SEQ ID NO: 2955309 - RNA, 19 nt, Artificial Sequence
  Description of Artificial Sequence: Synthetic oligonucleotide
aauacuguguuguugucua

SEQ ID NO: 2955310 - RNA, 19 nt, Artificial Sequence
  Description of Artificial Sequence: Synthetic oligonucleotide
guuuguauagcccguacgc

SEQ ID NO: 2955311 - RNA, 19 nt, Artificial Sequence
  Description of Artificial Sequence: Synthetic oligonucleotide
gaccacaaagcccugggcg

SEQ ID NO: 2955312 - RNA, 19 nt, Artificial Sequence
  Description of Artificial Sequence: Synthetic oligonucleotide
aauggugucuccuuaguuu

SEQ ID NO: 2955313 - RNA, 19 nt, Artificial Sequence
  Description of Artificial Sequence: Synthetic oligonucleotide
aauaaacuuagaccccuga

SEQ ID NO: 2955314 - RNA, 19 nt, Artificial Sequence
  Description of Artificial Sequence: Synthetic oligonucleotide
uguagacacaaacauguaa

SEQ ID NO: 2955315 - RNA, 19 nt, Artificial Sequence
  Description of Artificial Sequence: Synthetic oligonucleotide
ugaccuucaucauaugaag

SEQ ID NO: 2955316 - RNA, 19 nt, Artificial Sequence
  Description of Artificial Sequence: Synthetic oligonucleotide
gacaucuucguauuucccc

SEQ ID NO: 2955317 - RNA, 19 nt, Artificial Sequence
  Description of Artificial Sequence: Synthetic oligonucleotide
aagccaauauucaauacug

SEQ ID NO: 2955318 - RNA, 19 nt, Artificial Sequence
  Description of Artificial Sequence: Synthetic oligonucleotide
acgcauauggaucagguga

SEQ ID NO: 2955319 - RNA, 19 nt, Artificial Sequence
  Description of Artificial Sequence: Synthetic oligonucleotide
aacuaagcaagcacuuccc

SEQ ID NO: 2955320 - RNA, 19 nt, Artificial Sequence
  Description of Artificial Sequence: Synthetic oligonucleotide
cauggaauagcccauacca

SEQ ID NO: 2955321 - RNA, 19 nt, Artificial Sequence
  Description of Artificial Sequence: Synthetic oligonucleotide
ugaauggacaucuucguau

SEQ ID NO: 2955322 - RNA, 19 nt, Artificial Sequence
  Description of Artificial Sequence: Synthetic oligonucleotide
aguuuguauagcccguacg

SEQ ID NO: 2955323 - RNA, 19 nt, Artificial Sequence
  Description of Artificial Sequence: Synthetic oligonucleotide
uugucuaaauccauguuau

SEQ ID NO: 2955324 - RNA, 19 nt, Artificial Sequence
  Description of Artificial Sequence: Synthetic oligonucleotide
gaaaggucugugucggucg

SEQ ID NO: 2955325 - RNA, 19 nt, Artificial Sequence
  Description of Artificial Sequence: Synthetic oligonucleotide
aagagucagggcuccgacc

SEQ ID NO: 2955326 - RNA, 19 nt, Artificial Sequence
  Description of Artificial Sequence: Synthetic oligonucleotide
caucauaugaagaaagaga

SEQ ID NO: 2955327 - RNA, 19 nt, Artificial Sequence
  Description of Artificial Sequence: Synthetic oligonucleotide
cauguaaccucaauaugag

SEQ ID NO: 2955328 - RNA, 19 nt, Artificial Sequence
  Description of Artificial Sequence: Synthetic oligonucleotide
uucaucauaugaagaaaga

SEQ ID NO: 2955329 - RNA, 19 nt, Artificial Sequence
  Description of Artificial Sequence: Synthetic oligonucleotide
acauggaauagcccauacc

SEQ ID NO: 2955330 - RNA, 19 nt, Artificial Sequence
  Description of Artificial Sequence: Synthetic oligonucleotide
aauccauguuauuuauugu

SEQ ID NO: 2955331 - RNA, 19 nt, Artificial Sequence
  Description of Artificial Sequence: Synthetic oligonucleotide
aagcaagcacuucccagac

SEQ ID NO: 2955332 - RNA, 19 nt, Artificial Sequence
  Description of Artificial Sequence: Synthetic oligonucleotide
auauucaauacuguguugu

SEQ ID NO: 2955333 - RNA, 19 nt, Artificial Sequence
  Description of Artificial Sequence: Synthetic oligonucleotide
uagacacaaacauguaacc

SEQ ID NO: 2955334 - RNA, 19 nt, Artificial Sequence
  Description of Artificial Sequence: Synthetic oligonucleotide
aucauaugaagaaagagaa

SEQ ID NO: 2955335 - RNA, 19 nt, Artificial Sequence
  Description of Artificial Sequence: Synthetic oligonucleotide
auagcccauaccaagaguc

SEQ ID NO: 2955336 - RNA, 19 nt, Artificial Sequence
  Description of Artificial Sequence: Synthetic oligonucleotide
guagacacaaacauguaac

SEQ ID NO: 2955337 - RNA, 19 nt, Artificial Sequence
  Description of Artificial Sequence: Synthetic oligonucleotide
ucugugucggucgacauug

SEQ ID NO: 2955338 - RNA, 19 nt, Artificial Sequence
  Description of Artificial Sequence: Synthetic oligonucleotide
acauguaaccucaauauga

SEQ ID NO: 2955339 - RNA, 19 nt, Artificial Sequence
  Description of Artificial Sequence: Synthetic oligonucleotide
ucgacauugugauuucuug

SEQ ID NO: 2955340 - RNA, 19 nt, Artificial Sequence
  Description of Artificial Sequence: Synthetic oligonucleotide
gaauagcccauaccaagag

SEQ ID NO: 2955341 - RNA, 19 nt, Artificial Sequence
  Description of Artificial Sequence: Synthetic oligonucleotide
ucgaauaaacuuagacccc

SEQ ID NO: 2955342 - RNA, 19 nt, Artificial Sequence
  Description of Artificial Sequence: Synthetic oligonucleotide
aauuccuuauacauggaau

SEQ ID NO: 2955343 - RNA, 19 nt, Artificial Sequence
  Description of Artificial Sequence: Synthetic oligonucleotide
cuuauacauggaauagccc

SEQ ID NO: 2955344 - RNA, 19 nt, Artificial Sequence
  Description of Artificial Sequence: Synthetic oligonucleotide
gaaaguaagccaauauuca

SEQ ID NO: 2955345 - RNA, 19 nt, Artificial Sequence
  Description of Artificial Sequence: Synthetic oligonucleotide
uuguugucuaaauccaugu

SEQ ID NO: 2955346 - RNA, 19 nt, Artificial Sequence
  Description of Artificial Sequence: Synthetic oligonucleotide
agagaaaggucugugucgg

SEQ ID NO: 2955347 - RNA, 19 nt, Artificial Sequence
  Description of Artificial Sequence: Synthetic oligonucleotide
agaccaaggcagcagcucg

SEQ ID NO: 2955348 - RNA, 19 nt, Artificial Sequence
  Description of Artificial Sequence: Synthetic oligonucleotide
auuccuuauacauggaaua

SEQ ID NO: 2955349 - RNA, 19 nt, Artificial Sequence
  Description of Artificial Sequence: Synthetic oligonucleotide
augaagaaagagaaagguc

SEQ ID NO: 2955350 - RNA, 19 nt, Artificial Sequence
  Description of Artificial Sequence: Synthetic oligonucleotide
auaugagacgucuaacuaa

SEQ ID NO: 2955351 - RNA, 19 nt, Artificial Sequence
  Description of Artificial Sequence: Synthetic oligonucleotide
aauagcccauaccaagagu

SEQ ID NO: 2955352 - RNA, 19 nt, Artificial Sequence
  Description of Artificial Sequence: Synthetic oligonucleotide
aaggcuuaggcuuggccca

SEQ ID NO: 2955353 - RNA, 19 nt, Artificial Sequence
  Description of Artificial Sequence: Synthetic oligonucleotide
aguaagccaauauucaaua

SEQ ID NO: 2955354 - RNA, 19 nt, Artificial Sequence
  Description of Artificial Sequence: Synthetic oligonucleotide
ccuuauacauggaauagcc

SEQ ID NO: 2955355 - RNA, 19 nt, Artificial Sequence
  Description of Artificial Sequence: Synthetic oligonucleotide
uggacaucuucguauuucc

SEQ ID NO: 2955356 - RNA, 19 nt, Artificial Sequence
  Description of Artificial Sequence: Synthetic oligonucleotide
acaaauggugucuccuuag

SEQ ID NO: 2955357 - RNA, 19 nt, Artificial Sequence
  Description of Artificial Sequence: Synthetic oligonucleotide
agcagcucgucuucuaagg

SEQ ID NO: 2955358 - RNA, 19 nt, Artificial Sequence
  Description of Artificial Sequence: Synthetic oligonucleotide
uuccuuauacauggaauag

SEQ ID NO: 2955359 - RNA, 19 nt, Artificial Sequence
  Description of Artificial Sequence: Synthetic oligonucleotide
uggaucaggugaauggaca

SEQ ID NO: 2955360 - RNA, 19 nt, Artificial Sequence
  Description of Artificial Sequence: Synthetic oligonucleotide
aggugaauggacaucuucg

SEQ ID NO: 2955361 - RNA, 19 nt, Artificial Sequence
  Description of Artificial Sequence: Synthetic oligonucleotide
uauacauggaauagcccau

SEQ ID NO: 2955362 - RNA, 19 nt, Artificial Sequence
  Description of Artificial Sequence: Synthetic oligonucleotide
agaccccugaccuucauca

SEQ ID NO: 2955363 - RNA, 19 nt, Artificial Sequence
  Description of Artificial Sequence: Synthetic oligonucleotide
ucuaacuaagcaagcacuu

SEQ ID NO: 2955364 - RNA, 19 nt, Artificial Sequence
  Description of Artificial Sequence: Synthetic oligonucleotide
aaggcagcagcucgucuuc

SEQ ID NO: 2955365 - RNA, 19 nt, Artificial Sequence
  Description of Artificial Sequence: Synthetic oligonucleotide
gacauugugauuucuugaa

SEQ ID NO: 2955366 - RNA, 19 nt, Artificial Sequence
  Description of Artificial Sequence: Synthetic oligonucleotide
agagucagggcuccgacca

SEQ ID NO: 2955367 - RNA, 19 nt, Artificial Sequence
  Description of Artificial Sequence: Synthetic oligonucleotide
accuucaucauaugaagaa

SEQ ID NO: 2955368 - RNA, 19 nt, Artificial Sequence
  Description of Artificial Sequence: Synthetic oligonucleotide
caacgauugccgcaaaccc

SEQ ID NO: 2955369 - RNA, 19 nt, Artificial Sequence
  Description of Artificial Sequence: Synthetic oligonucleotide
acauugugauuucuugaag

SEQ ID NO: 2955370 - RNA, 19 nt, Artificial Sequence
  Description of Artificial Sequence: Synthetic oligonucleotide
acuuagaccccugaccuuc

SEQ ID NO: 2955371 - RNA, 19 nt, Artificial Sequence
  Description of Artificial Sequence: Synthetic oligonucleotide
agacgucuaacuaagcaag

SEQ ID NO: 2955372 - RNA, 19 nt, Artificial Sequence
  Description of Artificial Sequence: Synthetic oligonucleotide
aaauccagcuggcaagaaa

SEQ ID NO: 2955373 - RNA, 19 nt, Artificial Sequence
  Description of Artificial Sequence: Synthetic oligonucleotide
auccauguuauuuauugua

SEQ ID NO: 2955374 - RNA, 19 nt, Artificial Sequence
  Description of Artificial Sequence: Synthetic oligonucleotide
uguauagcccguacgcaac

SEQ ID NO: 2955375 - RNA, 19 nt, Artificial Sequence
  Description of Artificial Sequence: Synthetic oligonucleotide
acaucuucguauuuccccu

SEQ ID NO: 2955376 - RNA, 19 nt, Artificial Sequence
  Description of Artificial Sequence: Synthetic oligonucleotide
guugucuaaauccauguua

SEQ ID NO: 2955377 - RNA, 19 nt, Artificial Sequence
  Description of Artificial Sequence: Synthetic oligonucleotide
ucauaugaagaaagagaaa

SEQ ID NO: 2955378 - RNA, 19 nt, Artificial Sequence
  Description of Artificial Sequence: Synthetic oligonucleotide
gaagaaagagaaaggucug

SEQ ID NO: 2955379 - RNA, 19 nt, Artificial Sequence
  Description of Artificial Sequence: Synthetic oligonucleotide
cauaccaagagucagggcu

SEQ ID NO: 2955380 - RNA, 19 nt, Artificial Sequence
  Description of Artificial Sequence: Synthetic oligonucleotide
uccuuauacauggaauagc

SEQ ID NO: 2955381 - RNA, 19 nt, Artificial Sequence
  Description of Artificial Sequence: Synthetic oligonucleotide
uauggaucaggugaaugga

SEQ ID NO: 2955382 - RNA, 19 nt, Artificial Sequence
  Description of Artificial Sequence: Synthetic oligonucleotide
gagacgucuaacuaagcaa

SEQ ID NO: 2955383 - RNA, 19 nt, Artificial Sequence
  Description of Artificial Sequence: Synthetic oligonucleotide
aaguaagccaauauucaau

SEQ ID NO: 2955384 - RNA, 19 nt, Artificial Sequence
  Description of Artificial Sequence: Synthetic oligonucleotide
uuguauagcccguacgcaa

SEQ ID NO: 2955385 - RNA, 19 nt, Artificial Sequence
  Description of Artificial Sequence: Synthetic oligonucleotide
uucguauuuccccuguuuu

SEQ ID NO: 2955386 - RNA, 19 nt, Artificial Sequence
  Description of Artificial Sequence: Synthetic oligonucleotide
aaauggugucuccuuaguu

SEQ ID NO: 2955387 - RNA, 19 nt, Artificial Sequence
  Description of Artificial Sequence: Synthetic oligonucleotide
ucaauaugagacgucuaac

SEQ ID NO: 2955388 - RNA, 19 nt, Artificial Sequence
  Description of Artificial Sequence: Synthetic oligonucleotide
ugucggucgacauugugau

SEQ ID NO: 2955389 - RNA, 19 nt, Artificial Sequence
  Description of Artificial Sequence: Synthetic oligonucleotide
agaaagagaaaggucugug

SEQ ID NO: 2955390 - RNA, 19 nt, Artificial Sequence
  Description of Artificial Sequence: Synthetic oligonucleotide
uauuuauuguagacacaaa

SEQ ID NO: 2955391 - RNA, 19 nt, Artificial Sequence
  Description of Artificial Sequence: Synthetic oligonucleotide
uuuguauagcccguacgca

SEQ ID NO: 2955392 - RNA, 19 nt, Artificial Sequence
  Description of Artificial Sequence: Synthetic oligonucleotide
aagaaagagaaaggucugu

SEQ ID NO: 2955393 - RNA, 19 nt, Artificial Sequence
  Description of Artificial Sequence: Synthetic oligonucleotide
auggacaucuucguauuuc

SEQ ID NO: 2955394 - RNA, 19 nt, Artificial Sequence
  Description of Artificial Sequence: Synthetic oligonucleotide
uaaccucaauaugagacgu

SEQ ID NO: 2955395 - RNA, 19 nt, Artificial Sequence
  Description of Artificial Sequence: Synthetic oligonucleotide
uucaguuuguauagcccgu

SEQ ID NO: 2955396 - RNA, 19 nt, Artificial Sequence
  Description of Artificial Sequence: Synthetic oligonucleotide
gaauuccuuauacauggaa

SEQ ID NO: 2955397 - RNA, 19 nt, Artificial Sequence
  Description of Artificial Sequence: Synthetic oligonucleotide
aucaggugaauggacaucu

SEQ ID NO: 2955398 - RNA, 19 nt, Artificial Sequence
  Description of Artificial Sequence: Synthetic oligonucleotide
gccaauauucaauacugug

SEQ ID NO: 2955399 - RNA, 19 nt, Artificial Sequence
  Description of Artificial Sequence: Synthetic oligonucleotide
guuguugucuaaauccaug

SEQ ID NO: 2955400 - RNA, 19 nt, Artificial Sequence
  Description of Artificial Sequence: Synthetic oligonucleotide
acuucccagaccaaggcag

SEQ ID NO: 2955401 - RNA, 19 nt, Artificial Sequence
  Description of Artificial Sequence: Synthetic oligonucleotide
cuggcaagaaaguaagcca

SEQ ID NO: 2955402 - RNA, 19 nt, Artificial Sequence
  Description of Artificial Sequence: Synthetic oligonucleotide
uacauggaauagcccauac

SEQ ID NO: 2955403 - RNA, 19 nt, Artificial Sequence
  Description of Artificial Sequence: Synthetic oligonucleotide
uguuguugucuaaauccau

SEQ ID NO: 2955404 - RNA, 19 nt, Artificial Sequence
  Description of Artificial Sequence: Synthetic oligonucleotide
cagggcuccgaccacaaag

SEQ ID NO: 2955405 - RNA, 19 nt, Artificial Sequence
  Description of Artificial Sequence: Synthetic oligonucleotide
cuaaggcuuaggcuuggcc

SEQ ID NO: 2955406 - RNA, 19 nt, Artificial Sequence
  Description of Artificial Sequence: Synthetic oligonucleotide
aagcacuucccagaccaag

SEQ ID NO: 2955407 - RNA, 19 nt, Artificial Sequence
  Description of Artificial Sequence: Synthetic oligonucleotide
agacacaaacauguaaccu

SEQ ID NO: 2955408 - RNA, 19 nt, Artificial Sequence
  Description of Artificial Sequence: Synthetic oligonucleotide
auugccgcaaacccugcca

SEQ ID NO: 2955409 - RNA, 19 nt, Artificial Sequence
  Description of Artificial Sequence: Synthetic oligonucleotide
guauagcccguacgcaacg

SEQ ID NO: 2955410 - RNA, 19 nt, Artificial Sequence
  Description of Artificial Sequence: Synthetic oligonucleotide
guaagccaauauucaauac

SEQ ID NO: 2955411 - RNA, 19 nt, Artificial Sequence
  Description of Artificial Sequence: Synthetic oligonucleotide
ucggucgacauugugauuu

SEQ ID NO: 2955412 - RNA, 19 nt, Artificial Sequence
  Description of Artificial Sequence: Synthetic oligonucleotide
cuucuaaggcuuaggcuug

SEQ ID NO: 2955413 - RNA, 19 nt, Artificial Sequence
  Description of Artificial Sequence: Synthetic oligonucleotide
cugaccuucaucauaugaa

SEQ ID NO: 2955414 - RNA, 19 nt, Artificial Sequence
  Description of Artificial Sequence: Synthetic oligonucleotide
acaaacauguaaccucaau

SEQ ID NO: 2955415 - RNA, 19 nt, Artificial Sequence
  Description of Artificial Sequence: Synthetic oligonucleotide
aaaggucugugucggucga

SEQ ID NO: 2955416 - RNA, 19 nt, Artificial Sequence
  Description of Artificial Sequence: Synthetic oligonucleotide
acuaagcaagcacuuccca

SEQ ID NO: 2955417 - RNA, 19 nt, Artificial Sequence
  Description of Artificial Sequence: Synthetic oligonucleotide
aacgauugccgcaaacccu

SEQ ID NO: 2955418 - RNA, 19 nt, Artificial Sequence
  Description of Artificial Sequence: Synthetic oligonucleotide
uguugucuaaauccauguu

SEQ ID NO: 2955419 - RNA, 19 nt, Artificial Sequence
  Description of Artificial Sequence: Synthetic oligonucleotide
cucaauaugagacgucuaa

SEQ ID NO: 2955420 - RNA, 19 nt, Artificial Sequence
  Description of Artificial Sequence: Synthetic oligonucleotide
agcaagcacuucccagacc

SEQ ID NO: 2955421 - RNA, 19 nt, Artificial Sequence
  Description of Artificial Sequence: Synthetic oligonucleotide
agggcuccgaccacaaagc

SEQ ID NO: 2955422 - RNA, 19 nt, Artificial Sequence
  Description of Artificial Sequence: Synthetic oligonucleotide
accucaauaugagacgucu

SEQ ID NO: 2955423 - RNA, 19 nt, Artificial Sequence
  Description of Artificial Sequence: Synthetic oligonucleotide
gcuggcaagaaaguaagcc

SEQ ID NO: 2955424 - RNA, 19 nt, Artificial Sequence
  Description of Artificial Sequence: Synthetic oligonucleotide
gaaagagaaaggucugugu

SEQ ID NO: 2955425 - RNA, 19 nt, Artificial Sequence
  Description of Artificial Sequence: Synthetic oligonucleotide
uaaauccauguuauuuauu

SEQ ID NO: 2955426 - RNA, 19 nt, Artificial Sequence
  Description of Artificial Sequence: Synthetic oligonucleotide
ugugucggucgacauugug

SEQ ID NO: 2955427 - RNA, 19 nt, Artificial Sequence
  Description of Artificial Sequence: Synthetic oligonucleotide
auaccaagagucagggcuc

SEQ ID NO: 2955428 - RNA, 19 nt, Artificial Sequence
  Description of Artificial Sequence: Synthetic oligonucleotide
cauauggaucaggugaaug

SEQ ID NO: 2955429 - RNA, 19 nt, Artificial Sequence
  Description of Artificial Sequence: Synthetic oligonucleotide
uauucaauacuguguuguu

SEQ ID NO: 2955430 - RNA, 19 nt, Artificial Sequence
  Description of Artificial Sequence: Synthetic oligonucleotide
uaggcuuggcccagaauuc

SEQ ID NO: 2955431 - RNA, 19 nt, Artificial Sequence
  Description of Artificial Sequence: Synthetic oligonucleotide
acuguguuguugucuaaau

SEQ ID NO: 2955432 - RNA, 19 nt, Artificial Sequence
  Description of Artificial Sequence: Synthetic oligonucleotide
caauaugagacgucuaacu

SEQ ID NO: 2955433 - RNA, 19 nt, Artificial Sequence
  Description of Artificial Sequence: Synthetic oligonucleotide
auggaucaggugaauggac

SEQ ID NO: 2955434 - RNA, 19 nt, Artificial Sequence
  Description of Artificial Sequence: Synthetic oligonucleotide
uagcccauaccaagaguca

SEQ ID NO: 2955435 - RNA, 19 nt, Artificial Sequence
  Description of Artificial Sequence: Synthetic oligonucleotide
gcaagcacuucccagacca

SEQ ID NO: 2955436 - RNA, 19 nt, Artificial Sequence
  Description of Artificial Sequence: Synthetic oligonucleotide
aauggacaucuucguauuu

SEQ ID NO: 2955437 - RNA, 19 nt, Artificial Sequence
  Description of Artificial Sequence: Synthetic oligonucleotide
auggugucuccuuaguuuu

SEQ ID NO: 2955438 - RNA, 19 nt, Artificial Sequence
  Description of Artificial Sequence: Synthetic oligonucleotide
agcacuucccagaccaagg

SEQ ID NO: 2955439 - RNA, 19 nt, Artificial Sequence
  Description of Artificial Sequence: Synthetic oligonucleotide
gaauaaacuuagaccccug

SEQ ID NO: 2955440 - RNA, 19 nt, Artificial Sequence
  Description of Artificial Sequence: Synthetic oligonucleotide
auguaaccucaauaugaga

SEQ ID NO: 2955441 - RNA, 19 nt, Artificial Sequence
  Description of Artificial Sequence: Synthetic oligonucleotide
cuguguuguugucuaaauc

SEQ ID NO: 2955442 - RNA, 19 nt, Artificial Sequence
  Description of Artificial Sequence: Synthetic oligonucleotide
aaccucaauaugagacguc

SEQ ID NO: 2955443 - RNA, 19 nt, Artificial Sequence
  Description of Artificial Sequence: Synthetic oligonucleotide
ccaauggggacaaauggug

SEQ ID NO: 2955444 - RNA, 19 nt, Artificial Sequence
  Description of Artificial Sequence: Synthetic oligonucleotide
ucgucuucuaaggcuuagg

SEQ ID NO: 2955445 - RNA, 19 nt, Artificial Sequence
  Description of Artificial Sequence: Synthetic oligonucleotide
cuaacuaagcaagcacuuc

SEQ ID NO: 2955446 - RNA, 19 nt, Artificial Sequence
  Description of Artificial Sequence: Synthetic oligonucleotide
aaacccugccaugccaaug

SEQ ID NO: 2955447 - RNA, 19 nt, Artificial Sequence
  Description of Artificial Sequence: Synthetic oligonucleotide
gacgucuaacuaagcaagc

SEQ ID NO: 2955448 - RNA, 19 nt, Artificial Sequence
  Description of Artificial Sequence: Synthetic oligonucleotide
acgauugccgcaaacccug

SEQ ID NO: 2955449 - RNA, 19 nt, Artificial Sequence
  Description of Artificial Sequence: Synthetic oligonucleotide
caauauucaauacuguguu

SEQ ID NO: 2955450 - RNA, 19 nt, Artificial Sequence
  Description of Artificial Sequence: Synthetic oligonucleotide
caggugaauggacaucuuc

SEQ ID NO: 2955451 - RNA, 19 nt, Artificial Sequence
  Description of Artificial Sequence: Synthetic oligonucleotide
ucaauacuguguuguuguc

SEQ ID NO: 2955452 - RNA, 19 nt, Artificial Sequence
  Description of Artificial Sequence: Synthetic oligonucleotide
cuucccagaccaaggcagc

SEQ ID NO: 2955453 - RNA, 19 nt, Artificial Sequence
  Description of Artificial Sequence: Synthetic oligonucleotide
ggcggccacacgcauaugg

SEQ ID NO: 2955454 - RNA, 19 nt, Artificial Sequence
  Description of Artificial Sequence: Synthetic oligonucleotide
ccagaauuccuuauacaug

SEQ ID NO: 2955455 - RNA, 19 nt, Artificial Sequence
  Description of Artificial Sequence: Synthetic oligonucleotide
gacaaauggugucuccuua

SEQ ID NO: 2955456 - RNA, 19 nt, Artificial Sequence
  Description of Artificial Sequence: Synthetic oligonucleotide
uacgcaacgauugccgcaa

SEQ ID NO: 2955457 - RNA, 19 nt, Artificial Sequence
  Description of Artificial Sequence: Synthetic oligonucleotide
gauugccgcaaacccugcc

SEQ ID NO: 2955458 - RNA, 19 nt, Artificial Sequence
  Description of Artificial Sequence: Synthetic oligonucleotide
uucuaaggcuuaggcuugg

SEQ ID NO: 2955459 - RNA, 19 nt, Artificial Sequence
  Description of Artificial Sequence: Synthetic oligonucleotide
ugccaugccaauggggaca

SEQ ID NO: 2955460 - RNA, 19 nt, Artificial Sequence
  Description of Artificial Sequence: Synthetic oligonucleotide
uuguagacacaaacaugua

SEQ ID NO: 2955461 - RNA, 19 nt, Artificial Sequence
  Description of Artificial Sequence: Synthetic oligonucleotide
ugggcggccacacgcauau

SEQ ID NO: 2955462 - RNA, 19 nt, Artificial Sequence
  Description of Artificial Sequence: Synthetic oligonucleotide
uacuguguuguugucuaaa

SEQ ID NO: 2955463 - RNA, 19 nt, Artificial Sequence
  Description of Artificial Sequence: Synthetic oligonucleotide
acgucuaacuaagcaagca

SEQ ID NO: 2955464 - RNA, 19 nt, Artificial Sequence
  Description of Artificial Sequence: Synthetic oligonucleotide
caagagucagggcuccgac

SEQ ID NO: 2955465 - RNA, 19 nt, Artificial Sequence
  Description of Artificial Sequence: Synthetic oligonucleotide
aucuucguauuuccccugu

SEQ ID NO: 2955466 - RNA, 19 nt, Artificial Sequence
  Description of Artificial Sequence: Synthetic oligonucleotide
gcaacgauugccgcaaacc

SEQ ID NO: 2955467 - RNA, 19 nt, Artificial Sequence
  Description of Artificial Sequence: Synthetic oligonucleotide
cacgcauauggaucaggug

SEQ ID NO: 2955468 - RNA, 19 nt, Artificial Sequence
  Description of Artificial Sequence: Synthetic oligonucleotide
agcccauaccaagagucag

SEQ ID NO: 2955469 - RNA, 19 nt, Artificial Sequence
  Description of Artificial Sequence: Synthetic oligonucleotide
aacuuagaccccugaccuu

SEQ ID NO: 2955470 - RNA, 19 nt, Artificial Sequence
  Description of Artificial Sequence: Synthetic oligonucleotide
augagacgucuaacuaagc

SEQ ID NO: 2955471 - RNA, 19 nt, Artificial Sequence
  Description of Artificial Sequence: Synthetic oligonucleotide
aaggucugugucggucgac

SEQ ID NO: 2955472 - RNA, 19 nt, Artificial Sequence
  Description of Artificial Sequence: Synthetic oligonucleotide
gaccuucaucauaugaaga

SEQ ID NO: 2955473 - RNA, 19 nt, Artificial Sequence
  Description of Artificial Sequence: Synthetic oligonucleotide
augccaauggggacaaaug

SEQ ID NO: 2955474 - RNA, 19 nt, Artificial Sequence
  Description of Artificial Sequence: Synthetic oligonucleotide
caguuuguauagcccguac

SEQ ID NO: 2955475 - RNA, 19 nt, Artificial Sequence
  Description of Artificial Sequence: Synthetic oligonucleotide
auggggacaaauggugucu

SEQ ID NO: 2955476 - RNA, 19 nt, Artificial Sequence
  Description of Artificial Sequence: Synthetic oligonucleotide
agcccguacgcaacgauug

SEQ ID NO: 2955477 - RNA, 19 nt, Artificial Sequence
  Description of Artificial Sequence: Synthetic oligonucleotide
agcuggcaagaaaguaagc

SEQ ID NO: 2955478 - RNA, 19 nt, Artificial Sequence
  Description of Artificial Sequence: Synthetic oligonucleotide
acacgcauauggaucaggu

SEQ ID NO: 2955479 - RNA, 19 nt, Artificial Sequence
  Description of Artificial Sequence: Synthetic oligonucleotide
cuaaauccauguuauuuau

SEQ ID NO: 2955480 - RNA, 19 nt, Artificial Sequence
  Description of Artificial Sequence: Synthetic oligonucleotide
uugccgcaaacccugccau

SEQ ID NO: 2955481 - RNA, 19 nt, Artificial Sequence
  Description of Artificial Sequence: Synthetic oligonucleotide
ugucuaaauccauguuauu

SEQ ID NO: 2955482 - RNA, 19 nt, Artificial Sequence
  Description of Artificial Sequence: Synthetic oligonucleotide
uccgaccacaaagcccugg

SEQ ID NO: 2955483 - RNA, 19 nt, Artificial Sequence
  Description of Artificial Sequence: Synthetic oligonucleotide
gucuaacuaagcaagcacu

SEQ ID NO: 2955484 - RNA, 19 nt, Artificial Sequence
  Description of Artificial Sequence: Synthetic oligonucleotide
gaucaggugaauggacauc

SEQ ID NO: 2955485 - RNA, 19 nt, Artificial Sequence
  Description of Artificial Sequence: Synthetic oligonucleotide
caucuucguauuuccccug

SEQ ID NO: 2955486 - RNA, 19 nt, Artificial Sequence
  Description of Artificial Sequence: Synthetic oligonucleotide
cagcagcucgucuucuaag

SEQ ID NO: 2955487 - RNA, 19 nt, Artificial Sequence
  Description of Artificial Sequence: Synthetic oligonucleotide
gucuaaauccauguuauuu

SEQ ID NO: 2955488 - RNA, 19 nt, Artificial Sequence
  Description of Artificial Sequence: Synthetic oligonucleotide
ucccagaccaaggcagcag

SEQ ID NO: 2955489 - RNA, 19 nt, Artificial Sequence
  Description of Artificial Sequence: Synthetic oligonucleotide
uccagcuggcaagaaagua

SEQ ID NO: 2955490 - RNA, 19 nt, Artificial Sequence
  Description of Artificial Sequence: Synthetic oligonucleotide
gucuucuaaggcuuaggcu

SEQ ID NO: 2955491 - RNA, 19 nt, Artificial Sequence
  Description of Artificial Sequence: Synthetic oligonucleotide
caagaaaguaagccaauau

SEQ ID NO: 2955492 - RNA, 19 nt, Artificial Sequence
  Description of Artificial Sequence: Synthetic oligonucleotide
ccguacgcaacgauugccg

SEQ ID NO: 2955493 - RNA, 19 nt, Artificial Sequence
  Description of Artificial Sequence: Synthetic oligonucleotide
cacacgcauauggaucagg

SEQ ID NO: 2955494 - RNA, 19 nt, Artificial Sequence
  Description of Artificial Sequence: Synthetic oligonucleotide
uauagcccguacgcaacga

SEQ ID NO: 2955495 - RNA, 19 nt, Artificial Sequence
  Description of Artificial Sequence: Synthetic oligonucleotide
gugucggucgacauuguga

SEQ ID NO: 2955496 - RNA, 19 nt, Artificial Sequence
  Description of Artificial Sequence: Synthetic oligonucleotide
uaccaagagucagggcucc

SEQ ID NO: 2955497 - RNA, 19 nt, Artificial Sequence
  Description of Artificial Sequence: Synthetic oligonucleotide
ccaauauucaauacugugu

SEQ ID NO: 2955498 - RNA, 19 nt, Artificial Sequence
  Description of Artificial Sequence: Synthetic oligonucleotide
ucaguuuguauagcccgua

SEQ ID NO: 2955499 - RNA, 19 nt, Artificial Sequence
  Description of Artificial Sequence: Synthetic oligonucleotide
uagaccccugaccuucauc

SEQ ID NO: 2955500 - RNA, 19 nt, Artificial Sequence
  Description of Artificial Sequence: Synthetic oligonucleotide
guacgcaacgauugccgca

SEQ ID NO: 2955501 - RNA, 19 nt, Artificial Sequence
  Description of Artificial Sequence: Synthetic oligonucleotide
uagcccguacgcaacgauu

SEQ ID NO: 2955502 - RNA, 19 nt, Artificial Sequence
  Description of Artificial Sequence: Synthetic oligonucleotide
gaauggacaucuucguauu

SEQ ID NO: 2955503 - RNA, 19 nt, Artificial Sequence
  Description of Artificial Sequence: Synthetic oligonucleotide
ucuucguauuuccccuguu

SEQ ID NO: 2955504 - RNA, 19 nt, Artificial Sequence
  Description of Artificial Sequence: Synthetic oligonucleotide
auagcccguacgcaacgau

SEQ ID NO: 2955505 - RNA, 19 nt, Artificial Sequence
  Description of Artificial Sequence: Synthetic oligonucleotide
ucuaaggcuuaggcuuggc

SEQ ID NO: 2955506 - RNA, 19 nt, Artificial Sequence
  Description of Artificial Sequence: Synthetic oligonucleotide
cccauaccaagagucaggg

SEQ ID NO: 2955507 - RNA, 19 nt, Artificial Sequence
  Description of Artificial Sequence: Synthetic oligonucleotide
agccaauauucaauacugu

SEQ ID NO: 2955508 - RNA, 19 nt, Artificial Sequence
  Description of Artificial Sequence: Synthetic oligonucleotide
gugaauggacaucuucgua

SEQ ID NO: 2955509 - RNA, 19 nt, Artificial Sequence
  Description of Artificial Sequence: Synthetic oligonucleotide
ggaauagcccauaccaaga

SEQ ID NO: 2955510 - RNA, 19 nt, Artificial Sequence
  Description of Artificial Sequence: Synthetic oligonucleotide
auggaauagcccauaccaa

SEQ ID NO: 2955511 - RNA, 19 nt, Artificial Sequence
  Description of Artificial Sequence: Synthetic oligonucleotide
acccugccaugccaauggg

SEQ ID NO: 2955512 - RNA, 19 nt, Artificial Sequence
  Description of Artificial Sequence: Synthetic oligonucleotide
accaaggcagcagcucguc

SEQ ID NO: 2955513 - RNA, 19 nt, Artificial Sequence
  Description of Artificial Sequence: Synthetic oligonucleotide
cgucuucuaaggcuuaggc

SEQ ID NO: 2955514 - RNA, 19 nt, Artificial Sequence
  Description of Artificial Sequence: Synthetic oligonucleotide
gccacacgcauauggauca

SEQ ID NO: 2955515 - RNA, 19 nt, Artificial Sequence
  Description of Artificial Sequence: Synthetic oligonucleotide
cugccaugccaauggggac

SEQ ID NO: 2955516 - RNA, 19 nt, Artificial Sequence
  Description of Artificial Sequence: Synthetic oligonucleotide
ccugccaugccaaugggga

SEQ ID NO: 2955517 - RNA, 19 nt, Artificial Sequence
  Description of Artificial Sequence: Synthetic oligonucleotide
gcacuucccagaccaaggc

SEQ ID NO: 2955518 - RNA, 19 nt, Artificial Sequence
  Description of Artificial Sequence: Synthetic oligonucleotide
cgucuaacuaagcaagcac

SEQ ID NO: 2955519 - RNA, 19 nt, Artificial Sequence
  Description of Artificial Sequence: Synthetic oligonucleotide
ugccgcaaacccugccaug

SEQ ID NO: 2955520 - RNA, 19 nt, Artificial Sequence
  Description of Artificial Sequence: Synthetic oligonucleotide
uucccagaccaaggcagca

SEQ ID NO: 2955521 - RNA, 19 nt, Artificial Sequence
  Description of Artificial Sequence: Synthetic oligonucleotide
gcagcucgucuucuaaggc

SEQ ID NO: 2955522 - RNA, 19 nt, Artificial Sequence
  Description of Artificial Sequence: Synthetic oligonucleotide
cucgucuucuaaggcuuag

SEQ ID NO: 2955523 - RNA, 19 nt, Artificial Sequence
  Description of Artificial Sequence: Synthetic oligonucleotide
ccauguuauuuauuguaga

SEQ ID NO: 2955524 - RNA, 19 nt, Artificial Sequence
  Description of Artificial Sequence: Synthetic oligonucleotide
ucaggugaauggacaucuu

SEQ ID NO: 2955525 - RNA, 19 nt, Artificial Sequence
  Description of Artificial Sequence: Synthetic oligonucleotide
aggucugugucggucgaca

SEQ ID NO: 2955526 - RNA, 19 nt, Artificial Sequence
  Description of Artificial Sequence: Synthetic oligonucleotide
agaauuccuuauacaugga

SEQ ID NO: 2955527 - RNA, 19 nt, Artificial Sequence
  Description of Artificial Sequence: Synthetic oligonucleotide
ggugaauggacaucuucgu

SEQ ID NO: 2955528 - RNA, 19 nt, Artificial Sequence
  Description of Artificial Sequence: Synthetic oligonucleotide
auacuguguuguugucuaa

SEQ ID NO: 2955529 - RNA, 19 nt, Artificial Sequence
  Description of Artificial Sequence: Synthetic oligonucleotide
uuagaccccugaccuucau

SEQ ID NO: 2955530 - RNA, 19 nt, Artificial Sequence
  Description of Artificial Sequence: Synthetic oligonucleotide
uggggacaaauggugucuc

SEQ ID NO: 2955531 - RNA, 19 nt, Artificial Sequence
  Description of Artificial Sequence: Synthetic oligonucleotide
agcucgucuucuaaggcuu

SEQ ID NO: 2955532 - RNA, 19 nt, Artificial Sequence
  Description of Artificial Sequence: Synthetic oligonucleotide
cagaccaaggcagcagcuc

SEQ ID NO: 2955533 - RNA, 19 nt, Artificial Sequence
  Description of Artificial Sequence: Synthetic oligonucleotide
auacauggaauagcccaua

SEQ ID NO: 2955534 - RNA, 19 nt, Artificial Sequence
  Description of Artificial Sequence: Synthetic oligonucleotide
cacuucccagaccaaggca

SEQ ID NO: 2955535 - RNA, 19 nt, Artificial Sequence
  Description of Artificial Sequence: Synthetic oligonucleotide
agucagggcuccgaccaca

SEQ ID NO: 2955536 - RNA, 19 nt, Artificial Sequence
  Description of Artificial Sequence: Synthetic oligonucleotide
ccagcuggcaagaaaguaa

SEQ ID NO: 2955537 - RNA, 19 nt, Artificial Sequence
  Description of Artificial Sequence: Synthetic oligonucleotide
gcccauaccaagagucagg

SEQ ID NO: 2955538 - RNA, 19 nt, Artificial Sequence
  Description of Artificial Sequence: Synthetic oligonucleotide
ccgaccacaaagcccuggg

SEQ ID NO: 2955539 - RNA, 19 nt, Artificial Sequence
  Description of Artificial Sequence: Synthetic oligonucleotide
gccgcaaacccugccaugc

SEQ ID NO: 2955540 - RNA, 19 nt, Artificial Sequence
  Description of Artificial Sequence: Synthetic oligonucleotide
ggggacaaauggugucucc

SEQ ID NO: 2955541 - RNA, 19 nt, Artificial Sequence
  Description of Artificial Sequence: Synthetic oligonucleotide
ccugaccuucaucauauga

SEQ ID NO: 2955542 - RNA, 19 nt, Artificial Sequence
  Description of Artificial Sequence: Synthetic oligonucleotide
cuuagaccccugaccuuca

SEQ ID NO: 2955543 - RNA, 19 nt, Artificial Sequence
  Description of Artificial Sequence: Synthetic oligonucleotide
ggacaucuucguauuuccc

SEQ ID NO: 2955544 - RNA, 19 nt, Artificial Sequence
  Description of Artificial Sequence: Synthetic oligonucleotide
cccagaccaaggcagcagc

SEQ ID NO: 2955545 - RNA, 19 nt, Artificial Sequence
  Description of Artificial Sequence: Synthetic oligonucleotide
ggcuccgaccacaaagccc

SEQ ID NO: 2955546 - RNA, 19 nt, Artificial Sequence
  Description of Artificial Sequence: Synthetic oligonucleotide
caaauggugucuccuuagu

SEQ ID NO: 2955547 - RNA, 19 nt, Artificial Sequence
  Description of Artificial Sequence: Synthetic oligonucleotide
accaagagucagggcuccg

SEQ ID NO: 2955548 - RNA, 19 nt, Artificial Sequence
  Description of Artificial Sequence: Synthetic oligonucleotide
gagucagggcuccgaccac

SEQ ID NO: 2955549 - RNA, 19 nt, Artificial Sequence
  Description of Artificial Sequence: Synthetic oligonucleotide
cacaaagcccugggcggcc

SEQ ID NO: 2955550 - RNA, 19 nt, Artificial Sequence
  Description of Artificial Sequence: Synthetic oligonucleotide
ucagggcuccgaccacaaa

SEQ ID NO: 2955551 - RNA, 19 nt, Artificial Sequence
  Description of Artificial Sequence: Synthetic oligonucleotide
cagcucgucuucuaaggcu

SEQ ID NO: 2955552 - RNA, 19 nt, Artificial Sequence
  Description of Artificial Sequence: Synthetic oligonucleotide
gcuccgaccacaaagcccu

SEQ ID NO: 2955553 - RNA, 19 nt, Artificial Sequence
  Description of Artificial Sequence: Synthetic oligonucleotide
cccugccaugccaaugggg

SEQ ID NO: 2955554 - RNA, 19 nt, Artificial Sequence
  Description of Artificial Sequence: Synthetic oligonucleotide
ggccacacgcauauggauc

SEQ ID NO: 2955555 - RNA, 19 nt, Artificial Sequence
  Description of Artificial Sequence: Synthetic oligonucleotide
cacaaacauguaaccucaa

SEQ ID NO: 2955556 - RNA, 19 nt, Artificial Sequence
  Description of Artificial Sequence: Synthetic oligonucleotide
caugccaauggggacaaau

SEQ ID NO: 2955557 - RNA, 19 nt, Artificial Sequence
  Description of Artificial Sequence: Synthetic oligonucleotide
cguacgcaacgauugccgc

SEQ ID NO: 2955558 - RNA, 19 nt, Artificial Sequence
  Description of Artificial Sequence: Synthetic oligonucleotide
agcccugggcggccacacg

SEQ ID NO: 2955559 - RNA, 19 nt, Artificial Sequence
  Description of Artificial Sequence: Synthetic oligonucleotide
gggcuccgaccacaaagcc

SEQ ID NO: 2955560 - RNA, 19 nt, Artificial Sequence
  Description of Artificial Sequence: Synthetic oligonucleotide
ccauaccaagagucagggc

SEQ ID NO: 2955561 - RNA, 19 nt, Artificial Sequence
  Description of Artificial Sequence: Synthetic oligonucleotide
cuucguauuuccccuguuu

SEQ ID NO: 2955562 - RNA, 19 nt, Artificial Sequence
  Description of Artificial Sequence: Synthetic oligonucleotide
caaggcagcagcucgucuu

SEQ ID NO: 2955563 - RNA, 19 nt, Artificial Sequence
  Description of Artificial Sequence: Synthetic oligonucleotide
aggcuuaggcuuggcccag

SEQ ID NO: 2955564 - RNA, 19 nt, Artificial Sequence
  Description of Artificial Sequence: Synthetic oligonucleotide
gcccugggcggccacacgc

SEQ ID NO: 2955565 - RNA, 19 nt, Artificial Sequence
  Description of Artificial Sequence: Synthetic oligonucleotide
gcaagaaaguaagccaaua

SEQ ID NO: 2955566 - RNA, 19 nt, Artificial Sequence
  Description of Artificial Sequence: Synthetic oligonucleotide
ggaucaggugaauggacau

SEQ ID NO: 2955567 - RNA, 19 nt, Artificial Sequence
  Description of Artificial Sequence: Synthetic oligonucleotide
cgacauugugauuucuuga

SEQ ID NO: 2955568 - RNA, 19 nt, Artificial Sequence
  Description of Artificial Sequence: Synthetic oligonucleotide
cccguacgcaacgauugcc

SEQ ID NO: 2955569 - RNA, 19 nt, Artificial Sequence
  Description of Artificial Sequence: Synthetic oligonucleotide
ccuucaucauaugaagaaa

SEQ ID NO: 2955570 - RNA, 19 nt, Artificial Sequence
  Description of Artificial Sequence: Synthetic oligonucleotide
gagaaaggucugugucggu

SEQ ID NO: 2955571 - RNA, 19 nt, Artificial Sequence
  Description of Artificial Sequence: Synthetic oligonucleotide
acaaagcccugggcggcca

SEQ ID NO: 2955572 - RNA, 19 nt, Artificial Sequence
  Description of Artificial Sequence: Synthetic oligonucleotide
caaagcccugggcggccac

SEQ ID NO: 2955573 - RNA, 19 nt, Artificial Sequence
  Description of Artificial Sequence: Synthetic oligonucleotide
gcagcagcucgucuucuaa

SEQ ID NO: 2955574 - RNA, 19 nt, Artificial Sequence
  Description of Artificial Sequence: Synthetic oligonucleotide
gcccguacgcaacgauugc

SEQ ID NO: 2955575 - RNA, 19 nt, Artificial Sequence
  Description of Artificial Sequence: Synthetic oligonucleotide
caagcacuucccagaccaa

SEQ ID NO: 2955576 - RNA, 19 nt, Artificial Sequence
  Description of Artificial Sequence: Synthetic oligonucleotide
gccaauggggacaaauggu

SEQ ID NO: 2955577 - RNA, 19 nt, Artificial Sequence
  Description of Artificial Sequence: Synthetic oligonucleotide
gggacaaauggugucuccu

SEQ ID NO: 2955578 - RNA, 19 nt, Artificial Sequence
  Description of Artificial Sequence: Synthetic oligonucleotide
gucgacauugugauuucuu

SEQ ID NO: 2955579 - RNA, 19 nt, Artificial Sequence
  Description of Artificial Sequence: Synthetic oligonucleotide
gcaaacccugccaugccaa

SEQ ID NO: 2955580 - RNA, 19 nt, Artificial Sequence
  Description of Artificial Sequence: Synthetic oligonucleotide
gaccaaggcagcagcucgu

SEQ ID NO: 2955581 - RNA, 19 nt, Artificial Sequence
  Description of Artificial Sequence: Synthetic oligonucleotide
cgcauauggaucaggugaa

SEQ ID NO: 2955582 - RNA, 19 nt, Artificial Sequence
  Description of Artificial Sequence: Synthetic oligonucleotide
cuccgaccacaaagcccug

SEQ ID NO: 2955583 - RNA, 19 nt, Artificial Sequence
  Description of Artificial Sequence: Synthetic oligonucleotide
gucugugucggucgacauu

SEQ ID NO: 2955584 - RNA, 19 nt, Artificial Sequence
  Description of Artificial Sequence: Synthetic oligonucleotide
ccgcaaacccugccaugcc

SEQ ID NO: 2955585 - RNA, 19 nt, Artificial Sequence
  Description of Artificial Sequence: Synthetic oligonucleotide
gaccccugaccuucaucau

SEQ ID NO: 2955586 - RNA, 19 nt, Artificial Sequence
  Description of Artificial Sequence: Synthetic oligonucleotide
cuuaggcuuggcccagaau

SEQ ID NO: 2955587 - RNA, 19 nt, Artificial Sequence
  Description of Artificial Sequence: Synthetic oligonucleotide
gcuuaggcuuggcccagaa

SEQ ID NO: 2955588 - RNA, 19 nt, Artificial Sequence
  Description of Artificial Sequence: Synthetic oligonucleotide
gucagggcuccgaccacaa

SEQ ID NO: 2955589 - RNA, 19 nt, Artificial Sequence
  Description of Artificial Sequence: Synthetic oligonucleotide
acgcaacgauugccgcaaa

SEQ ID NO: 2955590 - RNA, 19 nt, Artificial Sequence
  Description of Artificial Sequence: Synthetic oligonucleotide
cgaauaaacuuagaccccu

SEQ ID NO: 2955591 - RNA, 19 nt, Artificial Sequence
  Description of Artificial Sequence: Synthetic oligonucleotide
cgcaacgauugccgcaaac

SEQ ID NO: 2955592 - RNA, 19 nt, Artificial Sequence
  Description of Artificial Sequence: Synthetic oligonucleotide
gcggccacacgcauaugga

SEQ ID NO: 2955593 - RNA, 19 nt, Artificial Sequence
  Description of Artificial Sequence: Synthetic oligonucleotide
ccucaauaugagacgucua

SEQ ID NO: 2955594 - RNA, 19 nt, Artificial Sequence
  Description of Artificial Sequence: Synthetic oligonucleotide
caaacccugccaugccaau

SEQ ID NO: 2955595 - RNA, 19 nt, Artificial Sequence
  Description of Artificial Sequence: Synthetic oligonucleotide
ggcaagaaaguaagccaau

SEQ ID NO: 2955596 - RNA, 19 nt, Artificial Sequence
  Description of Artificial Sequence: Synthetic oligonucleotide
ccaagagucagggcuccga

SEQ ID NO: 2955597 - RNA, 19 nt, Artificial Sequence
  Description of Artificial Sequence: Synthetic oligonucleotide
ccccugaccuucaucauau

SEQ ID NO: 2955598 - RNA, 19 nt, Artificial Sequence
  Description of Artificial Sequence: Synthetic oligonucleotide
cgauugccgcaaacccugc

SEQ ID NO: 2955599 - RNA, 19 nt, Artificial Sequence
  Description of Artificial Sequence: Synthetic oligonucleotide
cugggcggccacacgcaua

SEQ ID NO: 2955600 - RNA, 19 nt, Artificial Sequence
  Description of Artificial Sequence: Synthetic oligonucleotide
ggcagcagcucgucuucua

SEQ ID NO: 2955601 - RNA, 19 nt, Artificial Sequence
  Description of Artificial Sequence: Synthetic oligonucleotide
cgcaaacccugccaugcca

SEQ ID NO: 2955602 - RNA, 19 nt, Artificial Sequence
  Description of Artificial Sequence: Synthetic oligonucleotide
ggucugugucggucgacau

SEQ ID NO: 2955603 - RNA, 19 nt, Artificial Sequence
  Description of Artificial Sequence: Synthetic oligonucleotide
gccaugccaauggggacaa

SEQ ID NO: 2955604 - RNA, 19 nt, Artificial Sequence
  Description of Artificial Sequence: Synthetic oligonucleotide
cccugaccuucaucauaug

SEQ ID NO: 2955605 - RNA, 19 nt, Artificial Sequence
  Description of Artificial Sequence: Synthetic oligonucleotide
ccacacgcauauggaucag

SEQ ID NO: 2955606 - RNA, 19 nt, Artificial Sequence
  Description of Artificial Sequence: Synthetic oligonucleotide
cggucgacauugugauuuc

SEQ ID NO: 2955607 - RNA, 19 nt, Artificial Sequence
  Description of Artificial Sequence: Synthetic oligonucleotide
ggucgacauugugauuucu

SEQ ID NO: 2955608 - RNA, 19 nt, Artificial Sequence
  Description of Artificial Sequence: Synthetic oligonucleotide
ccagaccaaggcagcagcu

SEQ ID NO: 2955609 - RNA, 19 nt, Artificial Sequence
  Description of Artificial Sequence: Synthetic oligonucleotide
cugugucggucgacauugu

SEQ ID NO: 2955610 - RNA, 19 nt, Artificial Sequence
  Description of Artificial Sequence: Synthetic oligonucleotide
ggcuuggcccagaauuccu

SEQ ID NO: 2955611 - RNA, 19 nt, Artificial Sequence
  Description of Artificial Sequence: Synthetic oligonucleotide
gucggucgacauugugauu

SEQ ID NO: 2955612 - RNA, 19 nt, Artificial Sequence
  Description of Artificial Sequence: Synthetic oligonucleotide
gcauauggaucaggugaau

SEQ ID NO: 2955613 - RNA, 19 nt, Artificial Sequence
  Description of Artificial Sequence: Synthetic oligonucleotide
cccugggcggccacacgca

SEQ ID NO: 2955614 - RNA, 19 nt, Artificial Sequence
  Description of Artificial Sequence: Synthetic oligonucleotide
ggcuuaggcuuggcccaga

SEQ ID NO: 2955615 - RNA, 19 nt, Artificial Sequence
  Description of Artificial Sequence: Synthetic oligonucleotide
gcucgucuucuaaggcuua

SEQ ID NO: 2955616 - RNA, 19 nt, Artificial Sequence
  Description of Artificial Sequence: Synthetic oligonucleotide
gcuuggcccagaauuccuu

SEQ ID NO: 2955617 - RNA, 19 nt, Artificial Sequence
  Description of Artificial Sequence: Synthetic oligonucleotide
ccaaggcagcagcucgucu

SEQ ID NO: 2955618 - RNA, 19 nt, Artificial Sequence
  Description of Artificial Sequence: Synthetic oligonucleotide
cggccacacgcauauggau

SEQ ID NO: 2955619 - RNA, 19 nt, Artificial Sequence
  Description of Artificial Sequence: Synthetic oligonucleotide
gggcggccacacgcauaug

SEQ ID NO: 2955620 - RNA, 19 nt, Artificial Sequence
  Description of Artificial Sequence: Synthetic oligonucleotide
ccugggcggccacacgcau

SEQ ID NO: 2955621 - RNA, 19 nt, Artificial Sequence
  Description of Artificial Sequence: Synthetic oligonucleotide
aaagcuuuaggacacuggg

SEQ ID NO: 2955622 - RNA, 19 nt, Artificial Sequence
  Description of Artificial Sequence: Synthetic oligonucleotide
agaaaguuucuuuacacuc

SEQ ID NO: 2955623 - RNA, 19 nt, Artificial Sequence
  Description of Artificial Sequence: Synthetic oligonucleotide
uuucuuuacacucacgaca

SEQ ID NO: 2955624 - RNA, 19 nt, Artificial Sequence
  Description of Artificial Sequence: Synthetic oligonucleotide
aaaguuucuuuacacucac

SEQ ID NO: 2955625 - RNA, 19 nt, Artificial Sequence
  Description of Artificial Sequence: Synthetic oligonucleotide
uaguaaagccacaagaggc

SEQ ID NO: 2955626 - RNA, 19 nt, Artificial Sequence
  Description of Artificial Sequence: Synthetic oligonucleotide
ucaggaaagcuuuaggaca

SEQ ID NO: 2955627 - RNA, 19 nt, Artificial Sequence
  Description of Artificial Sequence: Synthetic oligonucleotide
aguuucuuuacacucacga

SEQ ID NO: 2955628 - RNA, 19 nt, Artificial Sequence
  Description of Artificial Sequence: Synthetic oligonucleotide
uuuacacucacgacacacg

SEQ ID NO: 2955629 - RNA, 19 nt, Artificial Sequence
  Description of Artificial Sequence: Synthetic oligonucleotide
acacucacgacacacgaac

SEQ ID NO: 2955630 - RNA, 19 nt, Artificial Sequence
  Description of Artificial Sequence: Synthetic oligonucleotide
uucauguuugcgcagguca

SEQ ID NO: 2955631 - RNA, 19 nt, Artificial Sequence
  Description of Artificial Sequence: Synthetic oligonucleotide
cuaguaaagccacaagagg

SEQ ID NO: 2955632 - RNA, 19 nt, Artificial Sequence
  Description of Artificial Sequence: Synthetic oligonucleotide
uucuuuacacucacgacac

SEQ ID NO: 2955633 - RNA, 19 nt, Artificial Sequence
  Description of Artificial Sequence: Synthetic oligonucleotide
uacaacuugccacugugug

SEQ ID NO: 2955634 - RNA, 19 nt, Artificial Sequence
  Description of Artificial Sequence: Synthetic oligonucleotide
aagcucuuaccacacuggg

SEQ ID NO: 2955635 - RNA, 19 nt, Artificial Sequence
  Description of Artificial Sequence: Synthetic oligonucleotide
ucaguguggagaaaguuuc

SEQ ID NO: 2955636 - RNA, 19 nt, Artificial Sequence
  Description of Artificial Sequence: Synthetic oligonucleotide
agcuuuaggacacugggga

SEQ ID NO: 2955637 - RNA, 19 nt, Artificial Sequence
  Description of Artificial Sequence: Synthetic oligonucleotide
aagcugacccuucuucugg

SEQ ID NO: 2955638 - RNA, 19 nt, Artificial Sequence
  Description of Artificial Sequence: Synthetic oligonucleotide
aacgucaguguggagaaag

SEQ ID NO: 2955639 - RNA, 19 nt, Artificial Sequence
  Description of Artificial Sequence: Synthetic oligonucleotide
acucaggaaagcuuuagga

SEQ ID NO: 2955640 - RNA, 19 nt, Artificial Sequence
  Description of Artificial Sequence: Synthetic oligonucleotide
gucacuagcacucaggaaa

SEQ ID NO: 2955641 - RNA, 19 nt, Artificial Sequence
  Description of Artificial Sequence: Synthetic oligonucleotide
aguaccaggagcuucucca

SEQ ID NO: 2955642 - RNA, 19 nt, Artificial Sequence
  Description of Artificial Sequence: Synthetic oligonucleotide
uuacacucacgacacacga

SEQ ID NO: 2955643 - RNA, 19 nt, Artificial Sequence
  Description of Artificial Sequence: Synthetic oligonucleotide
uggcauuccuaguaaagcc

SEQ ID NO: 2955644 - RNA, 19 nt, Artificial Sequence
  Description of Artificial Sequence: Synthetic oligonucleotide
uccuagaguaccaggagcu

SEQ ID NO: 2955645 - RNA, 19 nt, Artificial Sequence
  Description of Artificial Sequence: Synthetic oligonucleotide
cucaggaaagcuuuaggac

SEQ ID NO: 2955646 - RNA, 19 nt, Artificial Sequence
  Description of Artificial Sequence: Synthetic oligonucleotide
acaacuugccacugugugg

SEQ ID NO: 2955647 - RNA, 19 nt, Artificial Sequence
  Description of Artificial Sequence: Synthetic oligonucleotide
uggagaaaguuucuuuaca

SEQ ID NO: 2955648 - RNA, 19 nt, Artificial Sequence
  Description of Artificial Sequence: Synthetic oligonucleotide
aguaggggcguacugagcu

SEQ ID NO: 2955649 - RNA, 19 nt, Artificial Sequence
  Description of Artificial Sequence: Synthetic oligonucleotide
agucaugccuacaacuugc

SEQ ID NO: 2955650 - RNA, 19 nt, Artificial Sequence
  Description of Artificial Sequence: Synthetic oligonucleotide
uguggagaaaguuucuuua

SEQ ID NO: 2955651 - RNA, 19 nt, Artificial Sequence
  Description of Artificial Sequence: Synthetic oligonucleotide
ucuucuggcauuccuagua

SEQ ID NO: 2955652 - RNA, 19 nt, Artificial Sequence
  Description of Artificial Sequence: Synthetic oligonucleotide
ucacuagcacucaggaaag

SEQ ID NO: 2955653 - RNA, 19 nt, Artificial Sequence
  Description of Artificial Sequence: Synthetic oligonucleotide
gaaagcuuuaggacacugg

SEQ ID NO: 2955654 - RNA, 19 nt, Artificial Sequence
  Description of Artificial Sequence: Synthetic oligonucleotide
ucuccuagaguaccaggag

SEQ ID NO: 2955655 - RNA, 19 nt, Artificial Sequence
  Description of Artificial Sequence: Synthetic oligonucleotide
ucugagaagcucuuaccac

SEQ ID NO: 2955656 - RNA, 19 nt, Artificial Sequence
  Description of Artificial Sequence: Synthetic oligonucleotide
ugcggcuauguuuacgaag

SEQ ID NO: 2955657 - RNA, 19 nt, Artificial Sequence
  Description of Artificial Sequence: Synthetic oligonucleotide
cucaucagccuccucaccc

SEQ ID NO: 2955658 - RNA, 19 nt, Artificial Sequence
  Description of Artificial Sequence: Synthetic oligonucleotide
accaggagcuucuccaacg

SEQ ID NO: 2955659 - RNA, 19 nt, Artificial Sequence
  Description of Artificial Sequence: Synthetic oligonucleotide
uccacagucaugccuacaa

SEQ ID NO: 2955660 - RNA, 19 nt, Artificial Sequence
  Description of Artificial Sequence: Synthetic oligonucleotide
uuuacgaagcccagcccug

SEQ ID NO: 2955661 - RNA, 19 nt, Artificial Sequence
  Description of Artificial Sequence: Synthetic oligonucleotide
ugucugagaagcucuuacc

SEQ ID NO: 2955662 - RNA, 19 nt, Artificial Sequence
  Description of Artificial Sequence: Synthetic oligonucleotide
ccuaguaaagccacaagag

SEQ ID NO: 2955663 - RNA, 19 nt, Artificial Sequence
  Description of Artificial Sequence: Synthetic oligonucleotide
uagaguaccaggagcuucu

SEQ ID NO: 2955664 - RNA, 19 nt, Artificial Sequence
  Description of Artificial Sequence: Synthetic oligonucleotide
acgacacacgaacuguggg

SEQ ID NO: 2955665 - RNA, 19 nt, Artificial Sequence
  Description of Artificial Sequence: Synthetic oligonucleotide
cuuuacacucacgacacac

SEQ ID NO: 2955666 - RNA, 19 nt, Artificial Sequence
  Description of Artificial Sequence: Synthetic oligonucleotide
gcucuuaccacacugggug

SEQ ID NO: 2955667 - RNA, 19 nt, Artificial Sequence
  Description of Artificial Sequence: Synthetic oligonucleotide
caacuugccacuguguggc

SEQ ID NO: 2955668 - RNA, 19 nt, Artificial Sequence
  Description of Artificial Sequence: Synthetic oligonucleotide
uuuaggacacuggggacag

SEQ ID NO: 2955669 - RNA, 19 nt, Artificial Sequence
  Description of Artificial Sequence: Synthetic oligonucleotide
gaaaguuucuuuacacuca

SEQ ID NO: 2955670 - RNA, 19 nt, Artificial Sequence
  Description of Artificial Sequence: Synthetic oligonucleotide
uuccuaguaaagccacaag

SEQ ID NO: 2955671 - RNA, 19 nt, Artificial Sequence
  Description of Artificial Sequence: Synthetic oligonucleotide
aagcuuuaggacacugggg

SEQ ID NO: 2955672 - RNA, 19 nt, Artificial Sequence
  Description of Artificial Sequence: Synthetic oligonucleotide
ucaagcugacccuucuucu

SEQ ID NO: 2955673 - RNA, 19 nt, Artificial Sequence
  Description of Artificial Sequence: Synthetic oligonucleotide
uucuccaacgccaccuggc

SEQ ID NO: 2955674 - RNA, 19 nt, Artificial Sequence
  Description of Artificial Sequence: Synthetic oligonucleotide
caggaaagcuuuaggacac

SEQ ID NO: 2955675 - RNA, 19 nt, Artificial Sequence
  Description of Artificial Sequence: Synthetic oligonucleotide
ggagaaaguuucuuuacac

SEQ ID NO: 2955676 - RNA, 19 nt, Artificial Sequence
  Description of Artificial Sequence: Synthetic oligonucleotide
guuucuuuacacucacgac

SEQ ID NO: 2955677 - RNA, 19 nt, Artificial Sequence
  Description of Artificial Sequence: Synthetic oligonucleotide
agccacaagaggcucuagg

SEQ ID NO: 2955678 - RNA, 19 nt, Artificial Sequence
  Description of Artificial Sequence: Synthetic oligonucleotide
uuugcgcaggucacuagca

SEQ ID NO: 2955679 - RNA, 19 nt, Artificial Sequence
  Description of Artificial Sequence: Synthetic oligonucleotide
uguuuacgaagcccagccc

SEQ ID NO: 2955680 - RNA, 19 nt, Artificial Sequence
  Description of Artificial Sequence: Synthetic oligonucleotide
acucacgacacacgaacug

SEQ ID NO: 2955681 - RNA, 19 nt, Artificial Sequence
  Description of Artificial Sequence: Synthetic oligonucleotide
uauguuuacgaagcccagc

SEQ ID NO: 2955682 - RNA, 19 nt, Artificial Sequence
  Description of Artificial Sequence: Synthetic oligonucleotide
ggugcguucauguuugcgc

SEQ ID NO: 2955683 - RNA, 19 nt, Artificial Sequence
  Description of Artificial Sequence: Synthetic oligonucleotide
agcaacgucaguguggaga

SEQ ID NO: 2955684 - RNA, 19 nt, Artificial Sequence
  Description of Artificial Sequence: Synthetic oligonucleotide
aaagggccggagcucuggg

SEQ ID NO: 2955685 - RNA, 19 nt, Artificial Sequence
  Description of Artificial Sequence: Synthetic oligonucleotide
ucacgacacacgaacugug

SEQ ID NO: 2955686 - RNA, 19 nt, Artificial Sequence
  Description of Artificial Sequence: Synthetic oligonucleotide
gucugagaagcucuuacca

SEQ ID NO: 2955687 - RNA, 19 nt, Artificial Sequence
  Description of Artificial Sequence: Synthetic oligonucleotide
cuccuagaguaccaggagc

SEQ ID NO: 2955688 - RNA, 19 nt, Artificial Sequence
  Description of Artificial Sequence: Synthetic oligonucleotide
uccaacgccaccuggcacu

SEQ ID NO: 2955689 - RNA, 19 nt, Artificial Sequence
  Description of Artificial Sequence: Synthetic oligonucleotide
uaaagccacaagaggcucu

SEQ ID NO: 2955690 - RNA, 19 nt, Artificial Sequence
  Description of Artificial Sequence: Synthetic oligonucleotide
guuugcgcaggucacuagc

SEQ ID NO: 2955691 - RNA, 19 nt, Artificial Sequence
  Description of Artificial Sequence: Synthetic oligonucleotide
aguaaagccacaagaggcu

SEQ ID NO: 2955692 - RNA, 19 nt, Artificial Sequence
  Description of Artificial Sequence: Synthetic oligonucleotide
cacucaggaaagcuuuagg

SEQ ID NO: 2955693 - RNA, 19 nt, Artificial Sequence
  Description of Artificial Sequence: Synthetic oligonucleotide
uaccacacugggugcaggg

SEQ ID NO: 2955694 - RNA, 19 nt, Artificial Sequence
  Description of Artificial Sequence: Synthetic oligonucleotide
aggucacuagcacucagga

SEQ ID NO: 2955695 - RNA, 19 nt, Artificial Sequence
  Description of Artificial Sequence: Synthetic oligonucleotide
agcugacccuucuucuggc

SEQ ID NO: 2955696 - RNA, 19 nt, Artificial Sequence
  Description of Artificial Sequence: Synthetic oligonucleotide
ugggugcagggaaagggcc

SEQ ID NO: 2955697 - RNA, 19 nt, Artificial Sequence
  Description of Artificial Sequence: Synthetic oligonucleotide
cuauguuuacgaagcccag

SEQ ID NO: 2955698 - RNA, 19 nt, Artificial Sequence
  Description of Artificial Sequence: Synthetic oligonucleotide
cugucugagaagcucuuac

SEQ ID NO: 2955699 - RNA, 19 nt, Artificial Sequence
  Description of Artificial Sequence: Synthetic oligonucleotide
aggcucuagggguaugggg

SEQ ID NO: 2955700 - RNA, 19 nt, Artificial Sequence
  Description of Artificial Sequence: Synthetic oligonucleotide
ugcuccacagucaugccua

SEQ ID NO: 2955701 - RNA, 19 nt, Artificial Sequence
  Description of Artificial Sequence: Synthetic oligonucleotide
cuggcacuccacaugcucc

SEQ ID NO: 2955702 - RNA, 19 nt, Artificial Sequence
  Description of Artificial Sequence: Synthetic oligonucleotide
ggagcucugggugugagcg

SEQ ID NO: 2955703 - RNA, 19 nt, Artificial Sequence
  Description of Artificial Sequence: Synthetic oligonucleotide
aacgccaccuggcacucca

SEQ ID NO: 2955704 - RNA, 19 nt, Artificial Sequence
  Description of Artificial Sequence: Synthetic oligonucleotide
caucuccuagaguaccagg

SEQ ID NO: 2955705 - RNA, 19 nt, Artificial Sequence
  Description of Artificial Sequence: Synthetic oligonucleotide
gccacaagaggcucuaggg

SEQ ID NO: 2955706 - RNA, 19 nt, Artificial Sequence
  Description of Artificial Sequence: Synthetic oligonucleotide
caggucacuagcacucagg

SEQ ID NO: 2955707 - RNA, 19 nt, Artificial Sequence
  Description of Artificial Sequence: Synthetic oligonucleotide
cacgacacacgaacugugg

SEQ ID NO: 2955708 - RNA, 19 nt, Artificial Sequence
  Description of Artificial Sequence: Synthetic oligonucleotide
ucaucagccuccucacccc

SEQ ID NO: 2955709 - RNA, 19 nt, Artificial Sequence
  Description of Artificial Sequence: Synthetic oligonucleotide
uucucaucagccuccucac

SEQ ID NO: 2955710 - RNA, 19 nt, Artificial Sequence
  Description of Artificial Sequence: Synthetic oligonucleotide
gagaaaguuucuuuacacu

SEQ ID NO: 2955711 - RNA, 19 nt, Artificial Sequence
  Description of Artificial Sequence: Synthetic oligonucleotide
ugcguagcaacgucagugu

SEQ ID NO: 2955712 - RNA, 19 nt, Artificial Sequence
  Description of Artificial Sequence: Synthetic oligonucleotide
ugcaucuccuagaguacca

SEQ ID NO: 2955713 - RNA, 19 nt, Artificial Sequence
  Description of Artificial Sequence: Synthetic oligonucleotide
ucuccaacgccaccuggca

SEQ ID NO: 2955714 - RNA, 19 nt, Artificial Sequence
  Description of Artificial Sequence: Synthetic oligonucleotide
uagcacucaggaaagcuuu

SEQ ID NO: 2955715 - RNA, 19 nt, Artificial Sequence
  Description of Artificial Sequence: Synthetic oligonucleotide
ugugggugcggcuauguuu

SEQ ID NO: 2955716 - RNA, 19 nt, Artificial Sequence
  Description of Artificial Sequence: Synthetic oligonucleotide
cugggugcagggaaagggc

SEQ ID NO: 2955717 - RNA, 19 nt, Artificial Sequence
  Description of Artificial Sequence: Synthetic oligonucleotide
cugcguagcaacgucagug

SEQ ID NO: 2955718 - RNA, 19 nt, Artificial Sequence
  Description of Artificial Sequence: Synthetic oligonucleotide
aaguuucuuuacacucacg

SEQ ID NO: 2955719 - RNA, 19 nt, Artificial Sequence
  Description of Artificial Sequence: Synthetic oligonucleotide
acuagcacucaggaaagcu

SEQ ID NO: 2955720 - RNA, 19 nt, Artificial Sequence
  Description of Artificial Sequence: Synthetic oligonucleotide
ugggugugagcgcucgugc

SEQ ID NO: 2955721 - RNA, 19 nt, Artificial Sequence
  Description of Artificial Sequence: Synthetic oligonucleotide
ucaugccuacaacuugcca

SEQ ID NO: 2955722 - RNA, 19 nt, Artificial Sequence
  Description of Artificial Sequence: Synthetic oligonucleotide
ugcgcaggucacuagcacu

SEQ ID NO: 2955723 - RNA, 19 nt, Artificial Sequence
  Description of Artificial Sequence: Synthetic oligonucleotide
caagcugacccuucuucug

SEQ ID NO: 2955724 - RNA, 19 nt, Artificial Sequence
  Description of Artificial Sequence: Synthetic oligonucleotide
guuuacgaagcccagcccu

SEQ ID NO: 2955725 - RNA, 19 nt, Artificial Sequence
  Description of Artificial Sequence: Synthetic oligonucleotide
uguuugcgcaggucacuag

SEQ ID NO: 2955726 - RNA, 19 nt, Artificial Sequence
  Description of Artificial Sequence: Synthetic oligonucleotide
agaggcucuagggguaugg

SEQ ID NO: 2955727 - RNA, 19 nt, Artificial Sequence
  Description of Artificial Sequence: Synthetic oligonucleotide
auuccuaguaaagccacaa

SEQ ID NO: 2955728 - RNA, 19 nt, Artificial Sequence
  Description of Artificial Sequence: Synthetic oligonucleotide
gaaagggccggagcucugg

SEQ ID NO: 2955729 - RNA, 19 nt, Artificial Sequence
  Description of Artificial Sequence: Synthetic oligonucleotide
aucuccuagaguaccagga

SEQ ID NO: 2955730 - RNA, 19 nt, Artificial Sequence
  Description of Artificial Sequence: Synthetic oligonucleotide
ucuuaccacacugggugca

SEQ ID NO: 2955731 - RNA, 19 nt, Artificial Sequence
  Description of Artificial Sequence: Synthetic oligonucleotide
ucgugccugcguagcaacg

SEQ ID NO: 2955732 - RNA, 19 nt, Artificial Sequence
  Description of Artificial Sequence: Synthetic oligonucleotide
acuggggacaggaguaggg

SEQ ID NO: 2955733 - RNA, 19 nt, Artificial Sequence
  Description of Artificial Sequence: Synthetic oligonucleotide
cagucaugccuacaacuug

SEQ ID NO: 2955734 - RNA, 19 nt, Artificial Sequence
  Description of Artificial Sequence: Synthetic oligonucleotide
agggccggagcucugggug

SEQ ID NO: 2955735 - RNA, 19 nt, Artificial Sequence
  Description of Artificial Sequence: Synthetic oligonucleotide
gcuauguuuacgaagccca

SEQ ID NO: 2955736 - RNA, 19 nt, Artificial Sequence
  Description of Artificial Sequence: Synthetic oligonucleotide
ggaguaggggcguacugag

SEQ ID NO: 2955737 - RNA, 19 nt, Artificial Sequence
  Description of Artificial Sequence: Synthetic oligonucleotide
guagcaacgucagugugga

SEQ ID NO: 2955738 - RNA, 19 nt, Artificial Sequence
  Description of Artificial Sequence: Synthetic oligonucleotide
ucuuuacacucacgacaca

SEQ ID NO: 2955739 - RNA, 19 nt, Artificial Sequence
  Description of Artificial Sequence: Synthetic oligonucleotide
uacacucacgacacacgaa

SEQ ID NO: 2955740 - RNA, 19 nt, Artificial Sequence
  Description of Artificial Sequence: Synthetic oligonucleotide
cucuuaccacacugggugc

SEQ ID NO: 2955741 - RNA, 19 nt, Artificial Sequence
  Description of Artificial Sequence: Synthetic oligonucleotide
cuugccacuguguggccac

SEQ ID NO: 2955742 - RNA, 19 nt, Artificial Sequence
  Description of Artificial Sequence: Synthetic oligonucleotide
cuagaguaccaggagcuuc

SEQ ID NO: 2955743 - RNA, 19 nt, Artificial Sequence
  Description of Artificial Sequence: Synthetic oligonucleotide
gaguaccaggagcuucucc

SEQ ID NO: 2955744 - RNA, 19 nt, Artificial Sequence
  Description of Artificial Sequence: Synthetic oligonucleotide
cuucuccaacgccaccugg

SEQ ID NO: 2955745 - RNA, 19 nt, Artificial Sequence
  Description of Artificial Sequence: Synthetic oligonucleotide
ugcguucauguuugcgcag

SEQ ID NO: 2955746 - RNA, 19 nt, Artificial Sequence
  Description of Artificial Sequence: Synthetic oligonucleotide
agggugggugcguucaugu

SEQ ID NO: 2955747 - RNA, 19 nt, Artificial Sequence
  Description of Artificial Sequence: Synthetic oligonucleotide
ugccugcguagcaacguca

SEQ ID NO: 2955748 - RNA, 19 nt, Artificial Sequence
  Description of Artificial Sequence: Synthetic oligonucleotide
gcggcuauguuuacgaagc

SEQ ID NO: 2955749 - RNA, 19 nt, Artificial Sequence
  Description of Artificial Sequence: Synthetic oligonucleotide
cuuuaggacacuggggaca

SEQ ID NO: 2955750 - RNA, 19 nt, Artificial Sequence
  Description of Artificial Sequence: Synthetic oligonucleotide
aggagcuucuccaacgcca

SEQ ID NO: 2955751 - RNA, 19 nt, Artificial Sequence
  Description of Artificial Sequence: Synthetic oligonucleotide
aagcccagcccugucugag

SEQ ID NO: 2955752 - RNA, 19 nt, Artificial Sequence
  Description of Artificial Sequence: Synthetic oligonucleotide
cuggggacaggaguagggg

SEQ ID NO: 2955753 - RNA, 19 nt, Artificial Sequence
  Description of Artificial Sequence: Synthetic oligonucleotide
uugcgcaggucacuagcac

SEQ ID NO: 2955754 - RNA, 19 nt, Artificial Sequence
  Description of Artificial Sequence: Synthetic oligonucleotide
uuaccacacugggugcagg

SEQ ID NO: 2955755 - RNA, 19 nt, Artificial Sequence
  Description of Artificial Sequence: Synthetic oligonucleotide
ggugcggcuauguuuacga

SEQ ID NO: 2955756 - RNA, 19 nt, Artificial Sequence
  Description of Artificial Sequence: Synthetic oligonucleotide
uaccaggagcuucuccaac

SEQ ID NO: 2955757 - RNA, 19 nt, Artificial Sequence
  Description of Artificial Sequence: Synthetic oligonucleotide
aaagccacaagaggcucua

SEQ ID NO: 2955758 - RNA, 19 nt, Artificial Sequence
  Description of Artificial Sequence: Synthetic oligonucleotide
agcccugucugagaagcuc

SEQ ID NO: 2955759 - RNA, 19 nt, Artificial Sequence
  Description of Artificial Sequence: Synthetic oligonucleotide
agcuucuccaacgccaccu

SEQ ID NO: 2955760 - RNA, 19 nt, Artificial Sequence
  Description of Artificial Sequence: Synthetic oligonucleotide
gugggugcguucauguuug

SEQ ID NO: 2955761 - RNA, 19 nt, Artificial Sequence
  Description of Artificial Sequence: Synthetic oligonucleotide
ccacaagaggcucuagggg

SEQ ID NO: 2955762 - RNA, 19 nt, Artificial Sequence
  Description of Artificial Sequence: Synthetic oligonucleotide
gugcguucauguuugcgca

SEQ ID NO: 2955763 - RNA, 19 nt, Artificial Sequence
  Description of Artificial Sequence: Synthetic oligonucleotide
gaggcucuagggguauggg

SEQ ID NO: 2955764 - RNA, 19 nt, Artificial Sequence
  Description of Artificial Sequence: Synthetic oligonucleotide
aggaguaggggcguacuga

SEQ ID NO: 2955765 - RNA, 19 nt, Artificial Sequence
  Description of Artificial Sequence: Synthetic oligonucleotide
cugcaucuccuagaguacc

SEQ ID NO: 2955766 - RNA, 19 nt, Artificial Sequence
  Description of Artificial Sequence: Synthetic oligonucleotide
cacaagaggcucuaggggu

SEQ ID NO: 2955767 - RNA, 19 nt, Artificial Sequence
  Description of Artificial Sequence: Synthetic oligonucleotide
uucuucuggcauuccuagu

SEQ ID NO: 2955768 - RNA, 19 nt, Artificial Sequence
  Description of Artificial Sequence: Synthetic oligonucleotide
ccuacaacuugccacugug

SEQ ID NO: 2955769 - RNA, 19 nt, Artificial Sequence
  Description of Artificial Sequence: Synthetic oligonucleotide
aaggggcacagggugggug

SEQ ID NO: 2955770 - RNA, 19 nt, Artificial Sequence
  Description of Artificial Sequence: Synthetic oligonucleotide
cguagcaacgucagugugg

SEQ ID NO: 2955771 - RNA, 19 nt, Artificial Sequence
  Description of Artificial Sequence: Synthetic oligonucleotide
acagucaugccuacaacuu

SEQ ID NO: 2955772 - RNA, 19 nt, Artificial Sequence
  Description of Artificial Sequence: Synthetic oligonucleotide
ggggacaggaguaggggcg

SEQ ID NO: 2955773 - RNA, 19 nt, Artificial Sequence
  Description of Artificial Sequence: Synthetic oligonucleotide
cacagucaugccuacaacu

SEQ ID NO: 2955774 - RNA, 19 nt, Artificial Sequence
  Description of Artificial Sequence: Synthetic oligonucleotide
ggcuauguuuacgaagccc

SEQ ID NO: 2955775 - RNA, 19 nt, Artificial Sequence
  Description of Artificial Sequence: Synthetic oligonucleotide
gggcguacugagcuguggg

SEQ ID NO: 2955776 - RNA, 19 nt, Artificial Sequence
  Description of Artificial Sequence: Synthetic oligonucleotide
gacacuggggacaggagua

SEQ ID NO: 2955777 - RNA, 19 nt, Artificial Sequence
  Description of Artificial Sequence: Synthetic oligonucleotide
acgaagcccagcccugucu

SEQ ID NO: 2955778 - RNA, 19 nt, Artificial Sequence
  Description of Artificial Sequence: Synthetic oligonucleotide
guaaagccacaagaggcuc

SEQ ID NO: 2955779 - RNA, 19 nt, Artificial Sequence
  Description of Artificial Sequence: Synthetic oligonucleotide
aagggccggagcucugggu

SEQ ID NO: 2955780 - RNA, 19 nt, Artificial Sequence
  Description of Artificial Sequence: Synthetic oligonucleotide
aguguggagaaaguuucuu

SEQ ID NO: 2955781 - RNA, 19 nt, Artificial Sequence
  Description of Artificial Sequence: Synthetic oligonucleotide
agggaaagggccggagcuc

SEQ ID NO: 2955782 - RNA, 19 nt, Artificial Sequence
  Description of Artificial Sequence: Synthetic oligonucleotide
guacugagcugugggugcg

SEQ ID NO: 2955783 - RNA, 19 nt, Artificial Sequence
  Description of Artificial Sequence: Synthetic oligonucleotide
caggagcuucuccaacgcc

SEQ ID NO: 2955784 - RNA, 19 nt, Artificial Sequence
  Description of Artificial Sequence: Synthetic oligonucleotide
ugacccuucuucuggcauu

SEQ ID NO: 2955785 - RNA, 19 nt, Artificial Sequence
  Description of Artificial Sequence: Synthetic oligonucleotide
cucgugccugcguagcaac

SEQ ID NO: 2955786 - RNA, 19 nt, Artificial Sequence
  Description of Artificial Sequence: Synthetic oligonucleotide
ugcagggaaagggccggag

SEQ ID NO: 2955787 - RNA, 19 nt, Artificial Sequence
  Description of Artificial Sequence: Synthetic oligonucleotide
uaggggcguacugagcugu

SEQ ID NO: 2955788 - RNA, 19 nt, Artificial Sequence
  Description of Artificial Sequence: Synthetic oligonucleotide
agcucugggugugagcgcu

SEQ ID NO: 2955789 - RNA, 19 nt, Artificial Sequence
  Description of Artificial Sequence: Synthetic oligonucleotide
guaggggcguacugagcug

SEQ ID NO: 2955790 - RNA, 19 nt, Artificial Sequence
  Description of Artificial Sequence: Synthetic oligonucleotide
agcgcucgugccugcguag

SEQ ID NO: 2955791 - RNA, 19 nt, Artificial Sequence
  Description of Artificial Sequence: Synthetic oligonucleotide
ggaaagcuuuaggacacug

SEQ ID NO: 2955792 - RNA, 19 nt, Artificial Sequence
  Description of Artificial Sequence: Synthetic oligonucleotide
cgacacacgaacugugggg

SEQ ID NO: 2955793 - RNA, 19 nt, Artificial Sequence
  Description of Artificial Sequence: Synthetic oligonucleotide
cauuccuaguaaagccaca

SEQ ID NO: 2955794 - RNA, 19 nt, Artificial Sequence
  Description of Artificial Sequence: Synthetic oligonucleotide
uuacgaagcccagcccugu

SEQ ID NO: 2955795 - RNA, 19 nt, Artificial Sequence
  Description of Artificial Sequence: Synthetic oligonucleotide
ggugcagggaaagggccgg

SEQ ID NO: 2955796 - RNA, 19 nt, Artificial Sequence
  Description of Artificial Sequence: Synthetic oligonucleotide
acacuggggacaggaguag

SEQ ID NO: 2955797 - RNA, 19 nt, Artificial Sequence
  Description of Artificial Sequence: Synthetic oligonucleotide
cucugggugugagcgcucg

SEQ ID NO: 2955798 - RNA, 19 nt, Artificial Sequence
  Description of Artificial Sequence: Synthetic oligonucleotide
caggaguaggggcguacug

SEQ ID NO: 2955799 - RNA, 19 nt, Artificial Sequence
  Description of Artificial Sequence: Synthetic oligonucleotide
ugagcgcucgugccugcgu

SEQ ID NO: 2955800 - RNA, 19 nt, Artificial Sequence
  Description of Artificial Sequence: Synthetic oligonucleotide
gucaugccuacaacuugcc

SEQ ID NO: 2955801 - RNA, 19 nt, Artificial Sequence
  Description of Artificial Sequence: Synthetic oligonucleotide
uacugagcugugggugcgg

SEQ ID NO: 2955802 - RNA, 19 nt, Artificial Sequence
  Description of Artificial Sequence: Synthetic oligonucleotide
ggcauuccuaguaaagcca

SEQ ID NO: 2955803 - RNA, 19 nt, Artificial Sequence
  Description of Artificial Sequence: Synthetic oligonucleotide
cuucuggcauuccuaguaa

SEQ ID NO: 2955804 - RNA, 19 nt, Artificial Sequence
  Description of Artificial Sequence: Synthetic oligonucleotide
gacccuucuucuggcauuc

SEQ ID NO: 2955805 - RNA, 19 nt, Artificial Sequence
  Description of Artificial Sequence: Synthetic oligonucleotide
agaguaccaggagcuucuc

SEQ ID NO: 2955806 - RNA, 19 nt, Artificial Sequence
  Description of Artificial Sequence: Synthetic oligonucleotide
cugggugugagcgcucgug

SEQ ID NO: 2955807 - RNA, 19 nt, Artificial Sequence
  Description of Artificial Sequence: Synthetic oligonucleotide
agcucuuaccacacugggu

SEQ ID NO: 2955808 - RNA, 19 nt, Artificial Sequence
  Description of Artificial Sequence: Synthetic oligonucleotide
uacgaagcccagcccuguc

SEQ ID NO: 2955809 - RNA, 19 nt, Artificial Sequence
  Description of Artificial Sequence: Synthetic oligonucleotide
gcaacgucaguguggagaa

SEQ ID NO: 2955810 - RNA, 19 nt, Artificial Sequence
  Description of Artificial Sequence: Synthetic oligonucleotide
gacaggaguaggggcguac

SEQ ID NO: 2955811 - RNA, 19 nt, Artificial Sequence
  Description of Artificial Sequence: Synthetic oligonucleotide
gcauuccuaguaaagccac

SEQ ID NO: 2955812 - RNA, 19 nt, Artificial Sequence
  Description of Artificial Sequence: Synthetic oligonucleotide
acaggaguaggggcguacu

SEQ ID NO: 2955813 - RNA, 19 nt, Artificial Sequence
  Description of Artificial Sequence: Synthetic oligonucleotide
gcuuuaggacacuggggac

SEQ ID NO: 2955814 - RNA, 19 nt, Artificial Sequence
  Description of Artificial Sequence: Synthetic oligonucleotide
ugugagcgcucgugccugc

SEQ ID NO: 2955815 - RNA, 19 nt, Artificial Sequence
  Description of Artificial Sequence: Synthetic oligonucleotide
gagcuucuccaacgccacc

SEQ ID NO: 2955816 - RNA, 19 nt, Artificial Sequence
  Description of Artificial Sequence: Synthetic oligonucleotide
gugggugcggcuauguuua

SEQ ID NO: 2955817 - RNA, 19 nt, Artificial Sequence
  Description of Artificial Sequence: Synthetic oligonucleotide
cacuggggacaggaguagg

SEQ ID NO: 2955818 - RNA, 19 nt, Artificial Sequence
  Description of Artificial Sequence: Synthetic oligonucleotide
gaguaggggcguacugagc

SEQ ID NO: 2955819 - RNA, 19 nt, Artificial Sequence
  Description of Artificial Sequence: Synthetic oligonucleotide
cuccaacgccaccuggcac

SEQ ID NO: 2955820 - RNA, 19 nt, Artificial Sequence
  Description of Artificial Sequence: Synthetic oligonucleotide
uuaggacacuggggacagg

SEQ ID NO: 2955821 - RNA, 19 nt, Artificial Sequence
  Description of Artificial Sequence: Synthetic oligonucleotide
aagaggcucuagggguaug

SEQ ID NO: 2955822 - RNA, 19 nt, Artificial Sequence
  Description of Artificial Sequence: Synthetic oligonucleotide
ucugggugugagcgcucgu

SEQ ID NO: 2955823 - RNA, 19 nt, Artificial Sequence
  Description of Artificial Sequence: Synthetic oligonucleotide
gaagcccagcccugucuga

SEQ ID NO: 2955824 - RNA, 19 nt, Artificial Sequence
  Description of Artificial Sequence: Synthetic oligonucleotide
guaccaggagcuucuccaa

SEQ ID NO: 2955825 - RNA, 19 nt, Artificial Sequence
  Description of Artificial Sequence: Synthetic oligonucleotide
cuagcacucaggaaagcuu

SEQ ID NO: 2955826 - RNA, 19 nt, Artificial Sequence
  Description of Artificial Sequence: Synthetic oligonucleotide
auguuugcgcaggucacua

SEQ ID NO: 2955827 - RNA, 19 nt, Artificial Sequence
  Description of Artificial Sequence: Synthetic oligonucleotide
guucauguuugcgcagguc

SEQ ID NO: 2955828 - RNA, 19 nt, Artificial Sequence
  Description of Artificial Sequence: Synthetic oligonucleotide
gugugagcgcucgugccug

SEQ ID NO: 2955829 - RNA, 19 nt, Artificial Sequence
  Description of Artificial Sequence: Synthetic oligonucleotide
ugccuacaacuugccacug

SEQ ID NO: 2955830 - RNA, 19 nt, Artificial Sequence
  Description of Artificial Sequence: Synthetic oligonucleotide
ccugcaucuccuagaguac

SEQ ID NO: 2955831 - RNA, 19 nt, Artificial Sequence
  Description of Artificial Sequence: Synthetic oligonucleotide
gggugugagcgcucgugcc

SEQ ID NO: 2955832 - RNA, 19 nt, Artificial Sequence
  Description of Artificial Sequence: Synthetic oligonucleotide
cacugggugcagggaaagg

SEQ ID NO: 2955833 - RNA, 19 nt, Artificial Sequence
  Description of Artificial Sequence: Synthetic oligonucleotide
ccaggagcuucuccaacgc

SEQ ID NO: 2955834 - RNA, 19 nt, Artificial Sequence
  Description of Artificial Sequence: Synthetic oligonucleotide
cagggaaagggccggagcu

SEQ ID NO: 2955835 - RNA, 19 nt, Artificial Sequence
  Description of Artificial Sequence: Synthetic oligonucleotide
cacuagcacucaggaaagc

SEQ ID NO: 2955836 - RNA, 19 nt, Artificial Sequence
  Description of Artificial Sequence: Synthetic oligonucleotide
gggugcagggaaagggccg

SEQ ID NO: 2955837 - RNA, 19 nt, Artificial Sequence
  Description of Artificial Sequence: Synthetic oligonucleotide
gcacucaggaaagcuuuag

SEQ ID NO: 2955838 - RNA, 19 nt, Artificial Sequence
  Description of Artificial Sequence: Synthetic oligonucleotide
acaagaggcucuaggggua

SEQ ID NO: 2955839 - RNA, 19 nt, Artificial Sequence
  Description of Artificial Sequence: Synthetic oligonucleotide
gcguacugagcugugggug

SEQ ID NO: 2955840 - RNA, 19 nt, Artificial Sequence
  Description of Artificial Sequence: Synthetic oligonucleotide
guguggagaaaguuucuuu

SEQ ID NO: 2955841 - RNA, 19 nt, Artificial Sequence
  Description of Artificial Sequence: Synthetic oligonucleotide
acccuucuucuggcauucc

SEQ ID NO: 2955842 - RNA, 19 nt, Artificial Sequence
  Description of Artificial Sequence: Synthetic oligonucleotide
gggugcguucauguuugcg

SEQ ID NO: 2955843 - RNA, 19 nt, Artificial Sequence
  Description of Artificial Sequence: Synthetic oligonucleotide
gcaucuccuagaguaccag

SEQ ID NO: 2955844 - RNA, 19 nt, Artificial Sequence
  Description of Artificial Sequence: Synthetic oligonucleotide
cuacaacuugccacugugu

SEQ ID NO: 2955845 - RNA, 19 nt, Artificial Sequence
  Description of Artificial Sequence: Synthetic oligonucleotide
gugccugcguagcaacguc

SEQ ID NO: 2955846 - RNA, 19 nt, Artificial Sequence
  Description of Artificial Sequence: Synthetic oligonucleotide
ugggugcguucauguuugc

SEQ ID NO: 2955847 - RNA, 19 nt, Artificial Sequence
  Description of Artificial Sequence: Synthetic oligonucleotide
acgucaguguggagaaagu

SEQ ID NO: 2955848 - RNA, 19 nt, Artificial Sequence
  Description of Artificial Sequence: Synthetic oligonucleotide
uagcaacgucaguguggag

SEQ ID NO: 2955849 - RNA, 19 nt, Artificial Sequence
  Description of Artificial Sequence: Synthetic oligonucleotide
aggaaagcuuuaggacacu

SEQ ID NO: 2955850 - RNA, 19 nt, Artificial Sequence
  Description of Artificial Sequence: Synthetic oligonucleotide
ggagcuucuccaacgccac

SEQ ID NO: 2955851 - RNA, 19 nt, Artificial Sequence
  Description of Artificial Sequence: Synthetic oligonucleotide
cucacgacacacgaacugu

SEQ ID NO: 2955852 - RNA, 19 nt, Artificial Sequence
  Description of Artificial Sequence: Synthetic oligonucleotide
ccuggcacuccacaugcuc

SEQ ID NO: 2955853 - RNA, 19 nt, Artificial Sequence
  Description of Artificial Sequence: Synthetic oligonucleotide
gcuucuccaacgccaccug

SEQ ID NO: 2955854 - RNA, 19 nt, Artificial Sequence
  Description of Artificial Sequence: Synthetic oligonucleotide
gcguagcaacgucagugug

SEQ ID NO: 2955855 - RNA, 19 nt, Artificial Sequence
  Description of Artificial Sequence: Synthetic oligonucleotide
ggacacuggggacaggagu

SEQ ID NO: 2955856 - RNA, 19 nt, Artificial Sequence
  Description of Artificial Sequence: Synthetic oligonucleotide
gagaagcucuuaccacacu

SEQ ID NO: 2955857 - RNA, 19 nt, Artificial Sequence
  Description of Artificial Sequence: Synthetic oligonucleotide
ccaaggggcacaggguggg

SEQ ID NO: 2955858 - RNA, 19 nt, Artificial Sequence
  Description of Artificial Sequence: Synthetic oligonucleotide
gugagcgcucgugccugcg

SEQ ID NO: 2955859 - RNA, 19 nt, Artificial Sequence
  Description of Artificial Sequence: Synthetic oligonucleotide
gggugcggcuauguuuacg

SEQ ID NO: 2955860 - RNA, 19 nt, Artificial Sequence
  Description of Artificial Sequence: Synthetic oligonucleotide
ggucacuagcacucaggaa

SEQ ID NO: 2955861 - RNA, 19 nt, Artificial Sequence
  Description of Artificial Sequence: Synthetic oligonucleotide
gccugcguagcaacgucag

SEQ ID NO: 2955862 - RNA, 19 nt, Artificial Sequence
  Description of Artificial Sequence: Synthetic oligonucleotide
ccaccuggcacuccacaug

SEQ ID NO: 2955863 - RNA, 19 nt, Artificial Sequence
  Description of Artificial Sequence: Synthetic oligonucleotide
gagcgcucgugccugcgua

SEQ ID NO: 2955864 - RNA, 19 nt, Artificial Sequence
  Description of Artificial Sequence: Synthetic oligonucleotide
ccacagucaugccuacaac

SEQ ID NO: 2955865 - RNA, 19 nt, Artificial Sequence
  Description of Artificial Sequence: Synthetic oligonucleotide
cagggugggugcguucaug

SEQ ID NO: 2955866 - RNA, 19 nt, Artificial Sequence
  Description of Artificial Sequence: Synthetic oligonucleotide
ugggugcggcuauguuuac

SEQ ID NO: 2955867 - RNA, 19 nt, Artificial Sequence
  Description of Artificial Sequence: Synthetic oligonucleotide
ggugggugcguucauguuu

SEQ ID NO: 2955868 - RNA, 19 nt, Artificial Sequence
  Description of Artificial Sequence: Synthetic oligonucleotide
acagggugggugcguucau

SEQ ID NO: 2955869 - RNA, 19 nt, Artificial Sequence
  Description of Artificial Sequence: Synthetic oligonucleotide
ggggcguacugagcugugg

SEQ ID NO: 2955870 - RNA, 19 nt, Artificial Sequence
  Description of Artificial Sequence: Synthetic oligonucleotide
cacucacgacacacgaacu

SEQ ID NO: 2955871 - RNA, 19 nt, Artificial Sequence
  Description of Artificial Sequence: Synthetic oligonucleotide
ccuucuucuggcauuccua

SEQ ID NO: 2955872 - RNA, 19 nt, Artificial Sequence
  Description of Artificial Sequence: Synthetic oligonucleotide
gcgcaggucacuagcacuc

SEQ ID NO: 2955873 - RNA, 19 nt, Artificial Sequence
  Description of Artificial Sequence: Synthetic oligonucleotide
ggugugagcgcucgugccu

SEQ ID NO: 2955874 - RNA, 19 nt, Artificial Sequence
  Description of Artificial Sequence: Synthetic oligonucleotide
caguguggagaaaguuucu

SEQ ID NO: 2955875 - RNA, 19 nt, Artificial Sequence
  Description of Artificial Sequence: Synthetic oligonucleotide
agcacucaggaaagcuuua

SEQ ID NO: 2955876 - RNA, 19 nt, Artificial Sequence
  Description of Artificial Sequence: Synthetic oligonucleotide
gugcggcuauguuuacgaa

SEQ ID NO: 2955877 - RNA, 19 nt, Artificial Sequence
  Description of Artificial Sequence: Synthetic oligonucleotide
cauguuugcgcaggucacu

SEQ ID NO: 2955878 - RNA, 19 nt, Artificial Sequence
  Description of Artificial Sequence: Synthetic oligonucleotide
ugccacuguguggccacua

SEQ ID NO: 2955879 - RNA, 19 nt, Artificial Sequence
  Description of Artificial Sequence: Synthetic oligonucleotide
cugacccuucuucuggcau

SEQ ID NO: 2955880 - RNA, 19 nt, Artificial Sequence
  Description of Artificial Sequence: Synthetic oligonucleotide
gcacuccacaugcuccaca

SEQ ID NO: 2955881 - RNA, 19 nt, Artificial Sequence
  Description of Artificial Sequence: Synthetic oligonucleotide
uugccacuguguggccacu

SEQ ID NO: 2955882 - RNA, 19 nt, Artificial Sequence
  Description of Artificial Sequence: Synthetic oligonucleotide
agcugugggugcggcuaug

SEQ ID NO: 2955883 - RNA, 19 nt, Artificial Sequence
  Description of Artificial Sequence: Synthetic oligonucleotide
acgccaccuggcacuccac

SEQ ID NO: 2955884 - RNA, 19 nt, Artificial Sequence
  Description of Artificial Sequence: Synthetic oligonucleotide
ggcguacugagcugugggu

SEQ ID NO: 2955885 - RNA, 19 nt, Artificial Sequence
  Description of Artificial Sequence: Synthetic oligonucleotide
gcuccacagucaugccuac

SEQ ID NO: 2955886 - RNA, 19 nt, Artificial Sequence
  Description of Artificial Sequence: Synthetic oligonucleotide
aggggcguacugagcugug

SEQ ID NO: 2955887 - RNA, 19 nt, Artificial Sequence
  Description of Artificial Sequence: Synthetic oligonucleotide
gggaaagggccggagcucu

SEQ ID NO: 2955888 - RNA, 19 nt, Artificial Sequence
  Description of Artificial Sequence: Synthetic oligonucleotide
cggcuauguuuacgaagcc

SEQ ID NO: 2955889 - RNA, 19 nt, Artificial Sequence
  Description of Artificial Sequence: Synthetic oligonucleotide
gucccaaggggcacagggu

SEQ ID NO: 2955890 - RNA, 19 nt, Artificial Sequence
  Description of Artificial Sequence: Synthetic oligonucleotide
gcccagcccugucugagaa

SEQ ID NO: 2955891 - RNA, 19 nt, Artificial Sequence
  Description of Artificial Sequence: Synthetic oligonucleotide
ggaaagggccggagcucug

SEQ ID NO: 2955892 - RNA, 19 nt, Artificial Sequence
  Description of Artificial Sequence: Synthetic oligonucleotide
cuccacagucaugccuaca

SEQ ID NO: 2955893 - RNA, 19 nt, Artificial Sequence
  Description of Artificial Sequence: Synthetic oligonucleotide
caacgccaccuggcacucc

SEQ ID NO: 2955894 - RNA, 19 nt, Artificial Sequence
  Description of Artificial Sequence: Synthetic oligonucleotide
accuggcacuccacaugcu

SEQ ID NO: 2955895 - RNA, 19 nt, Artificial Sequence
  Description of Artificial Sequence: Synthetic oligonucleotide
ggcacuccacaugcuccac

SEQ ID NO: 2955896 - RNA, 19 nt, Artificial Sequence
  Description of Artificial Sequence: Synthetic oligonucleotide
cugagcugugggugcggcu

SEQ ID NO: 2955897 - RNA, 19 nt, Artificial Sequence
  Description of Artificial Sequence: Synthetic oligonucleotide
cggagcucugggugugagc

SEQ ID NO: 2955898 - RNA, 19 nt, Artificial Sequence
  Description of Artificial Sequence: Synthetic oligonucleotide
gccuacaacuugccacugu

SEQ ID NO: 2955899 - RNA, 19 nt, Artificial Sequence
  Description of Artificial Sequence: Synthetic oligonucleotide
gcgcucgugccugcguagc

SEQ ID NO: 2955900 - RNA, 19 nt, Artificial Sequence
  Description of Artificial Sequence: Synthetic oligonucleotide
ggccggagcucugggugug

SEQ ID NO: 2955901 - RNA, 19 nt, Artificial Sequence
  Description of Artificial Sequence: Synthetic oligonucleotide
gugcagggaaagggccgga

SEQ ID NO: 2955902 - RNA, 19 nt, Artificial Sequence
  Description of Artificial Sequence: Synthetic oligonucleotide
gcacagggugggugcguuc

SEQ ID NO: 2955903 - RNA, 19 nt, Artificial Sequence
  Description of Artificial Sequence: Synthetic oligonucleotide
caagaggcucuagggguau

SEQ ID NO: 2955904 - RNA, 19 nt, Artificial Sequence
  Description of Artificial Sequence: Synthetic oligonucleotide
gcccugucugagaagcucu

SEQ ID NO: 2955905 - RNA, 19 nt, Artificial Sequence
  Description of Artificial Sequence: Synthetic oligonucleotide
ccaacgccaccuggcacuc

SEQ ID NO: 2955906 - RNA, 19 nt, Artificial Sequence
  Description of Artificial Sequence: Synthetic oligonucleotide
ccggagcucugggugugag

SEQ ID NO: 2955907 - RNA, 19 nt, Artificial Sequence
  Description of Artificial Sequence: Synthetic oligonucleotide
caacgucaguguggagaaa

SEQ ID NO: 2955908 - RNA, 19 nt, Artificial Sequence
  Description of Artificial Sequence: Synthetic oligonucleotide
gggacaggaguaggggcgu

SEQ ID NO: 2955909 - RNA, 19 nt, Artificial Sequence
  Description of Artificial Sequence: Synthetic oligonucleotide
cagcccugucugagaagcu

SEQ ID NO: 2955910 - RNA, 19 nt, Artificial Sequence
  Description of Artificial Sequence: Synthetic oligonucleotide
cccuucuucuggcauuccu

SEQ ID NO: 2955911 - RNA, 19 nt, Artificial Sequence
  Description of Artificial Sequence: Synthetic oligonucleotide
gggccggagcucugggugu

SEQ ID NO: 2955912 - RNA, 19 nt, Artificial Sequence
  Description of Artificial Sequence: Synthetic oligonucleotide
cugugggugcggcuauguu

SEQ ID NO: 2955913 - RNA, 19 nt, Artificial Sequence
  Description of Artificial Sequence: Synthetic oligonucleotide
gcugugggugcggcuaugu

SEQ ID NO: 2955914 - RNA, 19 nt, Artificial Sequence
  Description of Artificial Sequence: Synthetic oligonucleotide
ccugucugagaagcucuua

SEQ ID NO: 2955915 - RNA, 19 nt, Artificial Sequence
  Description of Artificial Sequence: Synthetic oligonucleotide
ggcuucucaucagccuccu

SEQ ID NO: 2955916 - RNA, 19 nt, Artificial Sequence
  Description of Artificial Sequence: Synthetic oligonucleotide
gggugggugcguucauguu

SEQ ID NO: 2955917 - RNA, 19 nt, Artificial Sequence
  Description of Artificial Sequence: Synthetic oligonucleotide
gcucugggugugagcgcuc

SEQ ID NO: 2955918 - RNA, 19 nt, Artificial Sequence
  Description of Artificial Sequence: Synthetic oligonucleotide
caaggggcacagggugggu

SEQ ID NO: 2955919 - RNA, 19 nt, Artificial Sequence
  Description of Artificial Sequence: Synthetic oligonucleotide
ggacaggaguaggggcgua

SEQ ID NO: 2955920 - RNA, 19 nt, Artificial Sequence
  Description of Artificial Sequence: Synthetic oligonucleotide
ccugcguagcaacgucagu

SEQ ID NO: 2955921 - RNA, 19 nt, Artificial Sequence
  Description of Artificial Sequence: Synthetic oligonucleotide
ggcacagggugggugcguu

SEQ ID NO: 2955922 - RNA, 19 nt, Artificial Sequence
  Description of Artificial Sequence: Synthetic oligonucleotide
cgcucgugccugcguagca

SEQ ID NO: 2955923 - RNA, 19 nt, Artificial Sequence
  Description of Artificial Sequence: Synthetic oligonucleotide
ccuagaguaccaggagcuu

SEQ ID NO: 2955924 - RNA, 19 nt, Artificial Sequence
  Description of Artificial Sequence: Synthetic oligonucleotide
cgugccugcguagcaacgu

SEQ ID NO: 2955925 - RNA, 19 nt, Artificial Sequence
  Description of Artificial Sequence: Synthetic oligonucleotide
gccggagcucuggguguga

SEQ ID NO: 2955926 - RNA, 19 nt, Artificial Sequence
  Description of Artificial Sequence: Synthetic oligonucleotide
cccugucugagaagcucuu

SEQ ID NO: 2955927 - RNA, 19 nt, Artificial Sequence
  Description of Artificial Sequence: Synthetic oligonucleotide
gggcacagggugggugcgu

SEQ ID NO: 2955928 - RNA, 19 nt, Artificial Sequence
  Description of Artificial Sequence: Synthetic oligonucleotide
ccccugcaucuccuagagu

SEQ ID NO: 2955929 - RNA, 19 nt, Artificial Sequence
  Description of Artificial Sequence: Synthetic oligonucleotide
acaaucacaacucuggacc

SEQ ID NO: 2955930 - RNA, 19 nt, Artificial Sequence
  Description of Artificial Sequence: Synthetic oligonucleotide
cuucaaguagcuaugaggg

SEQ ID NO: 2955931 - RNA, 19 nt, Artificial Sequence
  Description of Artificial Sequence: Synthetic oligonucleotide
aagaagaacuucaaguagc

SEQ ID NO: 2955932 - RNA, 19 nt, Artificial Sequence
  Description of Artificial Sequence: Synthetic oligonucleotide
acuucaaguagcuaugagg

SEQ ID NO: 2955933 - RNA, 19 nt, Artificial Sequence
  Description of Artificial Sequence: Synthetic oligonucleotide
aagaacuucaaguagcuau

SEQ ID NO: 2955934 - RNA, 19 nt, Artificial Sequence
  Description of Artificial Sequence: Synthetic oligonucleotide
ugcuacaacaaacagcacc

SEQ ID NO: 2955935 - RNA, 19 nt, Artificial Sequence
  Description of Artificial Sequence: Synthetic oligonucleotide
aaagguuuccuguucagca

SEQ ID NO: 2955936 - RNA, 19 nt, Artificial Sequence
  Description of Artificial Sequence: Synthetic oligonucleotide
uccagugacaaucacaacu

SEQ ID NO: 2955937 - RNA, 19 nt, Artificial Sequence
  Description of Artificial Sequence: Synthetic oligonucleotide
ucuacaucuaggaccaagg

SEQ ID NO: 2955938 - RNA, 19 nt, Artificial Sequence
  Description of Artificial Sequence: Synthetic oligonucleotide
aacucuggaccccaaacgg

SEQ ID NO: 2955939 - RNA, 19 nt, Artificial Sequence
  Description of Artificial Sequence: Synthetic oligonucleotide
cuuuccauuagccaugggg

SEQ ID NO: 2955940 - RNA, 19 nt, Artificial Sequence
  Description of Artificial Sequence: Synthetic oligonucleotide
gaggggaagauccaggagg

SEQ ID NO: 2955941 - RNA, 19 nt, Artificial Sequence
  Description of Artificial Sequence: Synthetic oligonucleotide
gaagaagaacuucaaguag

SEQ ID NO: 2955942 - RNA, 19 nt, Artificial Sequence
  Description of Artificial Sequence: Synthetic oligonucleotide
ucauugguccccuugaccc

SEQ ID NO: 2955943 - RNA, 19 nt, Artificial Sequence
  Description of Artificial Sequence: Synthetic oligonucleotide
gaaaugaugaauggggugc

SEQ ID NO: 2955944 - RNA, 19 nt, Artificial Sequence
  Description of Artificial Sequence: Synthetic oligonucleotide
ucaaguagcuaugagggag

SEQ ID NO: 2955945 - RNA, 19 nt, Artificial Sequence
  Description of Artificial Sequence: Synthetic oligonucleotide
ugaagaagaacuucaagua

SEQ ID NO: 2955946 - RNA, 19 nt, Artificial Sequence
  Description of Artificial Sequence: Synthetic oligonucleotide
cuaugagggagccacaggg

SEQ ID NO: 2955947 - RNA, 19 nt, Artificial Sequence
  Description of Artificial Sequence: Synthetic oligonucleotide
uacaucuaggaccaaggcc

SEQ ID NO: 2955948 - RNA, 19 nt, Artificial Sequence
  Description of Artificial Sequence: Synthetic oligonucleotide
aacaaacagcaccaaaggu

SEQ ID NO: 2955949 - RNA, 19 nt, Artificial Sequence
  Description of Artificial Sequence: Synthetic oligonucleotide
aaucauugguccccuugac

SEQ ID NO: 2955950 - RNA, 19 nt, Artificial Sequence
  Description of Artificial Sequence: Synthetic oligonucleotide
uguucagcagucauuugcc

SEQ ID NO: 2955951 - RNA, 19 nt, Artificial Sequence
  Description of Artificial Sequence: Synthetic oligonucleotide
acaacaaacagcaccaaag

SEQ ID NO: 2955952 - RNA, 19 nt, Artificial Sequence
  Description of Artificial Sequence: Synthetic oligonucleotide
aguggaagggagcaagacg

SEQ ID NO: 2955953 - RNA, 19 nt, Artificial Sequence
  Description of Artificial Sequence: Synthetic oligonucleotide
aucauugguccccuugacc

SEQ ID NO: 2955954 - RNA, 19 nt, Artificial Sequence
  Description of Artificial Sequence: Synthetic oligonucleotide
caacaaacagcaccaaagg

SEQ ID NO: 2955955 - RNA, 19 nt, Artificial Sequence
  Description of Artificial Sequence: Synthetic oligonucleotide
gugacaaucacaacucugg

SEQ ID NO: 2955956 - RNA, 19 nt, Artificial Sequence
  Description of Artificial Sequence: Synthetic oligonucleotide
guggaagggagcaagacgg

SEQ ID NO: 2955957 - RNA, 19 nt, Artificial Sequence
  Description of Artificial Sequence: Synthetic oligonucleotide
uggaucagaagacggcacg

SEQ ID NO: 2955958 - RNA, 19 nt, Artificial Sequence
  Description of Artificial Sequence: Synthetic oligonucleotide
aauggggugcacaugucac

SEQ ID NO: 2955959 - RNA, 19 nt, Artificial Sequence
  Description of Artificial Sequence: Synthetic oligonucleotide
aacuucaaguagcuaugag

SEQ ID NO: 2955960 - RNA, 19 nt, Artificial Sequence
  Description of Artificial Sequence: Synthetic oligonucleotide
acaucuaggaccaaggccu

SEQ ID NO: 2955961 - RNA, 19 nt, Artificial Sequence
  Description of Artificial Sequence: Synthetic oligonucleotide
ugacuugggaucaccaggc

SEQ ID NO: 2955962 - RNA, 19 nt, Artificial Sequence
  Description of Artificial Sequence: Synthetic oligonucleotide
ugacuggaggugaagaaga

SEQ ID NO: 2955963 - RNA, 19 nt, Artificial Sequence
  Description of Artificial Sequence: Synthetic oligonucleotide
aagguuuccuguucagcag

SEQ ID NO: 2955964 - RNA, 19 nt, Artificial Sequence
  Description of Artificial Sequence: Synthetic oligonucleotide
cuguucagcagucauuugc

SEQ ID NO: 2955965 - RNA, 19 nt, Artificial Sequence
  Description of Artificial Sequence: Synthetic oligonucleotide
aagggagcaagacgggguc

SEQ ID NO: 2955966 - RNA, 19 nt, Artificial Sequence
  Description of Artificial Sequence: Synthetic oligonucleotide
gcagucauuugccagaggg

SEQ ID NO: 2955967 - RNA, 19 nt, Artificial Sequence
  Description of Artificial Sequence: Synthetic oligonucleotide
augaauggggugcacaugu

SEQ ID NO: 2955968 - RNA, 19 nt, Artificial Sequence
  Description of Artificial Sequence: Synthetic oligonucleotide
aaucacaacucuggacccc

SEQ ID NO: 2955969 - RNA, 19 nt, Artificial Sequence
  Description of Artificial Sequence: Synthetic oligonucleotide
uucagcagucauuugccag

SEQ ID NO: 2955970 - RNA, 19 nt, Artificial Sequence
  Description of Artificial Sequence: Synthetic oligonucleotide
ucgaauagggccucugccc

SEQ ID NO: 2955971 - RNA, 19 nt, Artificial Sequence
  Description of Artificial Sequence: Synthetic oligonucleotide
guccccuugacccuggagg

SEQ ID NO: 2955972 - RNA, 19 nt, Artificial Sequence
  Description of Artificial Sequence: Synthetic oligonucleotide
ucagaagacggcacgcacc

SEQ ID NO: 2955973 - RNA, 19 nt, Artificial Sequence
  Description of Artificial Sequence: Synthetic oligonucleotide
aaggccuccucgaauaggg

SEQ ID NO: 2955974 - RNA, 19 nt, Artificial Sequence
  Description of Artificial Sequence: Synthetic oligonucleotide
ugaagagcugacuugggau

SEQ ID NO: 2955975 - RNA, 19 nt, Artificial Sequence
  Description of Artificial Sequence: Synthetic oligonucleotide
aucagaagacggcacgcac

SEQ ID NO: 2955976 - RNA, 19 nt, Artificial Sequence
  Description of Artificial Sequence: Synthetic oligonucleotide
gugaagaagaacuucaagu

SEQ ID NO: 2955977 - RNA, 19 nt, Artificial Sequence
  Description of Artificial Sequence: Synthetic oligonucleotide
ucagcagucauuugccaga

SEQ ID NO: 2955978 - RNA, 19 nt, Artificial Sequence
  Description of Artificial Sequence: Synthetic oligonucleotide
gacaaucacaacucuggac

SEQ ID NO: 2955979 - RNA, 19 nt, Artificial Sequence
  Description of Artificial Sequence: Synthetic oligonucleotide
aaguagcuaugagggagcc

SEQ ID NO: 2955980 - RNA, 19 nt, Artificial Sequence
  Description of Artificial Sequence: Synthetic oligonucleotide
guagcuaugagggagccac

SEQ ID NO: 2955981 - RNA, 19 nt, Artificial Sequence
  Description of Artificial Sequence: Synthetic oligonucleotide
agcaccaaagguuuccugu

SEQ ID NO: 2955982 - RNA, 19 nt, Artificial Sequence
  Description of Artificial Sequence: Synthetic oligonucleotide
ggggaaaugaugaaugggg

SEQ ID NO: 2955983 - RNA, 19 nt, Artificial Sequence
  Description of Artificial Sequence: Synthetic oligonucleotide
gugcacaugucacugacug

SEQ ID NO: 2955984 - RNA, 19 nt, Artificial Sequence
  Description of Artificial Sequence: Synthetic oligonucleotide
agugguggaaucauugguc

SEQ ID NO: 2955985 - RNA, 19 nt, Artificial Sequence
  Description of Artificial Sequence: Synthetic oligonucleotide
caagacggggucccgaugg

SEQ ID NO: 2955986 - RNA, 19 nt, Artificial Sequence
  Description of Artificial Sequence: Synthetic oligonucleotide
agauccaggaggcagugga

SEQ ID NO: 2955987 - RNA, 19 nt, Artificial Sequence
  Description of Artificial Sequence: Synthetic oligonucleotide
caacucuggaccccaaacg

SEQ ID NO: 2955988 - RNA, 19 nt, Artificial Sequence
  Description of Artificial Sequence: Synthetic oligonucleotide
ugugaagagcugacuuggg

SEQ ID NO: 2955989 - RNA, 19 nt, Artificial Sequence
  Description of Artificial Sequence: Synthetic oligonucleotide
acaugucacugacuggagg

SEQ ID NO: 2955990 - RNA, 19 nt, Artificial Sequence
  Description of Artificial Sequence: Synthetic oligonucleotide
cucuggaccccaaacgggg

SEQ ID NO: 2955991 - RNA, 19 nt, Artificial Sequence
  Description of Artificial Sequence: Synthetic oligonucleotide
cagaagacggcacgcaccg

SEQ ID NO: 2955992 - RNA, 19 nt, Artificial Sequence
  Description of Artificial Sequence: Synthetic oligonucleotide
uacaacaaacagcaccaaa

SEQ ID NO: 2955993 - RNA, 19 nt, Artificial Sequence
  Description of Artificial Sequence: Synthetic oligonucleotide
ugacaaucacaacucugga

SEQ ID NO: 2955994 - RNA, 19 nt, Artificial Sequence
  Description of Artificial Sequence: Synthetic oligonucleotide
aaugaugaauggggugcac

SEQ ID NO: 2955995 - RNA, 19 nt, Artificial Sequence
  Description of Artificial Sequence: Synthetic oligonucleotide
gaagagcugacuugggauc

SEQ ID NO: 2955996 - RNA, 19 nt, Artificial Sequence
  Description of Artificial Sequence: Synthetic oligonucleotide
gugguggaaucauuggucc

SEQ ID NO: 2955997 - RNA, 19 nt, Artificial Sequence
  Description of Artificial Sequence: Synthetic oligonucleotide
gaaucauugguccccuuga

SEQ ID NO: 2955998 - RNA, 19 nt, Artificial Sequence
  Description of Artificial Sequence: Synthetic oligonucleotide
caaguagcuaugagggagc

SEQ ID NO: 2955999 - RNA, 19 nt, Artificial Sequence
  Description of Artificial Sequence: Synthetic oligonucleotide
caaucacaacucuggaccc

SEQ ID NO: 2956000 - RNA, 19 nt, Artificial Sequence
  Description of Artificial Sequence: Synthetic oligonucleotide
agucauuugccagagggga

SEQ ID NO: 2956001 - RNA, 19 nt, Artificial Sequence
  Description of Artificial Sequence: Synthetic oligonucleotide
ccacucuacaucuaggacc

SEQ ID NO: 2956002 - RNA, 19 nt, Artificial Sequence
  Description of Artificial Sequence: Synthetic oligonucleotide
uggaggaccccugugaaga

SEQ ID NO: 2956003 - RNA, 19 nt, Artificial Sequence
  Description of Artificial Sequence: Synthetic oligonucleotide
uaggaccaaggccuccucg

SEQ ID NO: 2956004 - RNA, 19 nt, Artificial Sequence
  Description of Artificial Sequence: Synthetic oligonucleotide
ugaugaauggggugcacau

SEQ ID NO: 2956005 - RNA, 19 nt, Artificial Sequence
  Description of Artificial Sequence: Synthetic oligonucleotide
cucgaauagggccucugcc

SEQ ID NO: 2956006 - RNA, 19 nt, Artificial Sequence
  Description of Artificial Sequence: Synthetic oligonucleotide
cuacaucuaggaccaaggc

SEQ ID NO: 2956007 - RNA, 19 nt, Artificial Sequence
  Description of Artificial Sequence: Synthetic oligonucleotide
uuuccuguucagcagucau

SEQ ID NO: 2956008 - RNA, 19 nt, Artificial Sequence
  Description of Artificial Sequence: Synthetic oligonucleotide
gaggugaagaagaacuuca

SEQ ID NO: 2956009 - RNA, 19 nt, Artificial Sequence
  Description of Artificial Sequence: Synthetic oligonucleotide
aaaugaugaauggggugca

SEQ ID NO: 2956010 - RNA, 19 nt, Artificial Sequence
  Description of Artificial Sequence: Synthetic oligonucleotide
agaacuucaaguagcuaug

SEQ ID NO: 2956011 - RNA, 19 nt, Artificial Sequence
  Description of Artificial Sequence: Synthetic oligonucleotide
ggaaaugaugaauggggug

SEQ ID NO: 2956012 - RNA, 19 nt, Artificial Sequence
  Description of Artificial Sequence: Synthetic oligonucleotide
accaaagguuuccuguuca

SEQ ID NO: 2956013 - RNA, 19 nt, Artificial Sequence
  Description of Artificial Sequence: Synthetic oligonucleotide
uggaagggagcaagacggg

SEQ ID NO: 2956014 - RNA, 19 nt, Artificial Sequence
  Description of Artificial Sequence: Synthetic oligonucleotide
acuggaggugaagaagaac

SEQ ID NO: 2956015 - RNA, 19 nt, Artificial Sequence
  Description of Artificial Sequence: Synthetic oligonucleotide
uucaaguagcuaugaggga

SEQ ID NO: 2956016 - RNA, 19 nt, Artificial Sequence
  Description of Artificial Sequence: Synthetic oligonucleotide
aauagggccucugccccgg

SEQ ID NO: 2956017 - RNA, 19 nt, Artificial Sequence
  Description of Artificial Sequence: Synthetic oligonucleotide
acuccagugacaaucacaa

SEQ ID NO: 2956018 - RNA, 19 nt, Artificial Sequence
  Description of Artificial Sequence: Synthetic oligonucleotide
gaauggggugcacauguca

SEQ ID NO: 2956019 - RNA, 19 nt, Artificial Sequence
  Description of Artificial Sequence: Synthetic oligonucleotide
accaggcuuuccauuagcc

SEQ ID NO: 2956020 - RNA, 19 nt, Artificial Sequence
  Description of Artificial Sequence: Synthetic oligonucleotide
gaagacggcacgcaccgca

SEQ ID NO: 2956021 - RNA, 19 nt, Artificial Sequence
  Description of Artificial Sequence: Synthetic oligonucleotide
ucccgauggucucuggagc

SEQ ID NO: 2956022 - RNA, 19 nt, Artificial Sequence
  Description of Artificial Sequence: Synthetic oligonucleotide
aagagcugacuugggauca

SEQ ID NO: 2956023 - RNA, 19 nt, Artificial Sequence
  Description of Artificial Sequence: Synthetic oligonucleotide
augagggagccacagggga

SEQ ID NO: 2956024 - RNA, 19 nt, Artificial Sequence
  Description of Artificial Sequence: Synthetic oligonucleotide
gucucuggagccuggauca

SEQ ID NO: 2956025 - RNA, 19 nt, Artificial Sequence
  Description of Artificial Sequence: Synthetic oligonucleotide
gaauagggccucugccccg

SEQ ID NO: 2956026 - RNA, 19 nt, Artificial Sequence
  Description of Artificial Sequence: Synthetic oligonucleotide
uggccacucuacaucuagg

SEQ ID NO: 2956027 - RNA, 19 nt, Artificial Sequence
  Description of Artificial Sequence: Synthetic oligonucleotide
agaggggaagauccaggag

SEQ ID NO: 2956028 - RNA, 19 nt, Artificial Sequence
  Description of Artificial Sequence: Synthetic oligonucleotide
agaagaacuucaaguagcu

SEQ ID NO: 2956029 - RNA, 19 nt, Artificial Sequence
  Description of Artificial Sequence: Synthetic oligonucleotide
acaggggaugccuggccac

SEQ ID NO: 2956030 - RNA, 19 nt, Artificial Sequence
  Description of Artificial Sequence: Synthetic oligonucleotide
ucaccaggcuuuccauuag

SEQ ID NO: 2956031 - RNA, 19 nt, Artificial Sequence
  Description of Artificial Sequence: Synthetic oligonucleotide
acugacuggaggugaagaa

SEQ ID NO: 2956032 - RNA, 19 nt, Artificial Sequence
  Description of Artificial Sequence: Synthetic oligonucleotide
aucaccaggcuuuccauua

SEQ ID NO: 2956033 - RNA, 19 nt, Artificial Sequence
  Description of Artificial Sequence: Synthetic oligonucleotide
agcagugguggaaucauug

SEQ ID NO: 2956034 - RNA, 19 nt, Artificial Sequence
  Description of Artificial Sequence: Synthetic oligonucleotide
gagccuggaucagaagacg

SEQ ID NO: 2956035 - RNA, 19 nt, Artificial Sequence
  Description of Artificial Sequence: Synthetic oligonucleotide
ggaaucauugguccccuug

SEQ ID NO: 2956036 - RNA, 19 nt, Artificial Sequence
  Description of Artificial Sequence: Synthetic oligonucleotide
cuggccacucuacaucuag

SEQ ID NO: 2956037 - RNA, 19 nt, Artificial Sequence
  Description of Artificial Sequence: Synthetic oligonucleotide
uccuguucagcagucauuu

SEQ ID NO: 2956038 - RNA, 19 nt, Artificial Sequence
  Description of Artificial Sequence: Synthetic oligonucleotide
agguuuccuguucagcagu

SEQ ID NO: 2956039 - RNA, 19 nt, Artificial Sequence
  Description of Artificial Sequence: Synthetic oligonucleotide
uccccuugacccuggagga

SEQ ID NO: 2956040 - RNA, 19 nt, Artificial Sequence
  Description of Artificial Sequence: Synthetic oligonucleotide
gucccgauggucucuggag

SEQ ID NO: 2956041 - RNA, 19 nt, Artificial Sequence
  Description of Artificial Sequence: Synthetic oligonucleotide
ugguggaaucauugguccc

SEQ ID NO: 2956042 - RNA, 19 nt, Artificial Sequence
  Description of Artificial Sequence: Synthetic oligonucleotide
cucuacaucuaggaccaag

SEQ ID NO: 2956043 - RNA, 19 nt, Artificial Sequence
  Description of Artificial Sequence: Synthetic oligonucleotide
agccccagaaggcugggug

SEQ ID NO: 2956044 - RNA, 19 nt, Artificial Sequence
  Description of Artificial Sequence: Synthetic oligonucleotide
uuugccagaggggaagauc

SEQ ID NO: 2956045 - RNA, 19 nt, Artificial Sequence
  Description of Artificial Sequence: Synthetic oligonucleotide
gaugaauggggugcacaug

SEQ ID NO: 2956046 - RNA, 19 nt, Artificial Sequence
  Description of Artificial Sequence: Synthetic oligonucleotide
ugucacugacuggagguga

SEQ ID NO: 2956047 - RNA, 19 nt, Artificial Sequence
  Description of Artificial Sequence: Synthetic oligonucleotide
ggaggcucagcaguggugg

SEQ ID NO: 2956048 - RNA, 19 nt, Artificial Sequence
  Description of Artificial Sequence: Synthetic oligonucleotide
uggggugcacaugucacug

SEQ ID NO: 2956049 - RNA, 19 nt, Artificial Sequence
  Description of Artificial Sequence: Synthetic oligonucleotide
cuggaucagaagacggcac

SEQ ID NO: 2956050 - RNA, 19 nt, Artificial Sequence
  Description of Artificial Sequence: Synthetic oligonucleotide
aggaccaaggccuccucga

SEQ ID NO: 2956051 - RNA, 19 nt, Artificial Sequence
  Description of Artificial Sequence: Synthetic oligonucleotide
gcagugguggaaucauugg

SEQ ID NO: 2956052 - RNA, 19 nt, Artificial Sequence
  Description of Artificial Sequence: Synthetic oligonucleotide
agcuaugagggagccacag

SEQ ID NO: 2956053 - RNA, 19 nt, Artificial Sequence
  Description of Artificial Sequence: Synthetic oligonucleotide
ugccuggccacucuacauc

SEQ ID NO: 2956054 - RNA, 19 nt, Artificial Sequence
  Description of Artificial Sequence: Synthetic oligonucleotide
aaacagcaccaaagguuuc

SEQ ID NO: 2956055 - RNA, 19 nt, Artificial Sequence
  Description of Artificial Sequence: Synthetic oligonucleotide
accaaggccuccucgaaua

SEQ ID NO: 2956056 - RNA, 19 nt, Artificial Sequence
  Description of Artificial Sequence: Synthetic oligonucleotide
aagauccaggaggcagugg

SEQ ID NO: 2956057 - RNA, 19 nt, Artificial Sequence
  Description of Artificial Sequence: Synthetic oligonucleotide
ccagugacaaucacaacuc

SEQ ID NO: 2956058 - RNA, 19 nt, Artificial Sequence
  Description of Artificial Sequence: Synthetic oligonucleotide
aagacggcacgcaccgcac

SEQ ID NO: 2956059 - RNA, 19 nt, Artificial Sequence
  Description of Artificial Sequence: Synthetic oligonucleotide
gaagauccaggaggcagug

SEQ ID NO: 2956060 - RNA, 19 nt, Artificial Sequence
  Description of Artificial Sequence: Synthetic oligonucleotide
acucuggaccccaaacggg

SEQ ID NO: 2956061 - RNA, 19 nt, Artificial Sequence
  Description of Artificial Sequence: Synthetic oligonucleotide
gugaagagcugacuuggga

SEQ ID NO: 2956062 - RNA, 19 nt, Artificial Sequence
  Description of Artificial Sequence: Synthetic oligonucleotide
auccaggaggcaguggaag

SEQ ID NO: 2956063 - RNA, 19 nt, Artificial Sequence
  Description of Artificial Sequence: Synthetic oligonucleotide
agccacaggggaugccugg

SEQ ID NO: 2956064 - RNA, 19 nt, Artificial Sequence
  Description of Artificial Sequence: Synthetic oligonucleotide
agccuggaucagaagacgg

SEQ ID NO: 2956065 - RNA, 19 nt, Artificial Sequence
  Description of Artificial Sequence: Synthetic oligonucleotide
gggaagauccaggaggcag

SEQ ID NO: 2956066 - RNA, 19 nt, Artificial Sequence
  Description of Artificial Sequence: Synthetic oligonucleotide
augaugaauggggugcaca

SEQ ID NO: 2956067 - RNA, 19 nt, Artificial Sequence
  Description of Artificial Sequence: Synthetic oligonucleotide
gaggcaguggaagggagca

SEQ ID NO: 2956068 - RNA, 19 nt, Artificial Sequence
  Description of Artificial Sequence: Synthetic oligonucleotide
ugagggagccacaggggau

SEQ ID NO: 2956069 - RNA, 19 nt, Artificial Sequence
  Description of Artificial Sequence: Synthetic oligonucleotide
ucugccccggagaggaggu

SEQ ID NO: 2956070 - RNA, 19 nt, Artificial Sequence
  Description of Artificial Sequence: Synthetic oligonucleotide
acuugggaucaccaggcuu

SEQ ID NO: 2956071 - RNA, 19 nt, Artificial Sequence
  Description of Artificial Sequence: Synthetic oligonucleotide
aucuaggaccaaggccucc

SEQ ID NO: 2956072 - RNA, 19 nt, Artificial Sequence
  Description of Artificial Sequence: Synthetic oligonucleotide
gaacuucaaguagcuauga

SEQ ID NO: 2956073 - RNA, 19 nt, Artificial Sequence
  Description of Artificial Sequence: Synthetic oligonucleotide
ugaauggggugcacauguc

SEQ ID NO: 2956074 - RNA, 19 nt, Artificial Sequence
  Description of Artificial Sequence: Synthetic oligonucleotide
ugggaggcucagcaguggu

SEQ ID NO: 2956075 - RNA, 19 nt, Artificial Sequence
  Description of Artificial Sequence: Synthetic oligonucleotide
auggggugcacaugucacu

SEQ ID NO: 2956076 - RNA, 19 nt, Artificial Sequence
  Description of Artificial Sequence: Synthetic oligonucleotide
gagggagccacaggggaug

SEQ ID NO: 2956077 - RNA, 19 nt, Artificial Sequence
  Description of Artificial Sequence: Synthetic oligonucleotide
agggagcaagacggggucc

SEQ ID NO: 2956078 - RNA, 19 nt, Artificial Sequence
  Description of Artificial Sequence: Synthetic oligonucleotide
gcugacuugggaucaccag

SEQ ID NO: 2956079 - RNA, 19 nt, Artificial Sequence
  Description of Artificial Sequence: Synthetic oligonucleotide
gaucagaagacggcacgca

SEQ ID NO: 2956080 - RNA, 19 nt, Artificial Sequence
  Description of Artificial Sequence: Synthetic oligonucleotide
aagacggggucccgauggu

SEQ ID NO: 2956081 - RNA, 19 nt, Artificial Sequence
  Description of Artificial Sequence: Synthetic oligonucleotide
aucacaacucuggacccca

SEQ ID NO: 2956082 - RNA, 19 nt, Artificial Sequence
  Description of Artificial Sequence: Synthetic oligonucleotide
ggaagggagcaagacgggg

SEQ ID NO: 2956083 - RNA, 19 nt, Artificial Sequence
  Description of Artificial Sequence: Synthetic oligonucleotide
ggaggugggaggcucagca

SEQ ID NO: 2956084 - RNA, 19 nt, Artificial Sequence
  Description of Artificial Sequence: Synthetic oligonucleotide
cagaggggaagauccagga

SEQ ID NO: 2956085 - RNA, 19 nt, Artificial Sequence
  Description of Artificial Sequence: Synthetic oligonucleotide
ugacccuggaggaccccug

SEQ ID NO: 2956086 - RNA, 19 nt, Artificial Sequence
  Description of Artificial Sequence: Synthetic oligonucleotide
agcagucauuugccagagg

SEQ ID NO: 2956087 - RNA, 19 nt, Artificial Sequence
  Description of Artificial Sequence: Synthetic oligonucleotide
gcuaugagggagccacagg

SEQ ID NO: 2956088 - RNA, 19 nt, Artificial Sequence
  Description of Artificial Sequence: Synthetic oligonucleotide
cuggaggaccccugugaag

SEQ ID NO: 2956089 - RNA, 19 nt, Artificial Sequence
  Description of Artificial Sequence: Synthetic oligonucleotide
ccugugaagagcugacuug

SEQ ID NO: 2956090 - RNA, 19 nt, Artificial Sequence
  Description of Artificial Sequence: Synthetic oligonucleotide
caaggccuccucgaauagg

SEQ ID NO: 2956091 - RNA, 19 nt, Artificial Sequence
  Description of Artificial Sequence: Synthetic oligonucleotide
ggucucuggagccuggauc

SEQ ID NO: 2956092 - RNA, 19 nt, Artificial Sequence
  Description of Artificial Sequence: Synthetic oligonucleotide
ggccuccucgaauagggcc

SEQ ID NO: 2956093 - RNA, 19 nt, Artificial Sequence
  Description of Artificial Sequence: Synthetic oligonucleotide
ucacugacuggaggugaag

SEQ ID NO: 2956094 - RNA, 19 nt, Artificial Sequence
  Description of Artificial Sequence: Synthetic oligonucleotide
caccaggcuuuccauuagc

SEQ ID NO: 2956095 - RNA, 19 nt, Artificial Sequence
  Description of Artificial Sequence: Synthetic oligonucleotide
cuugggaucaccaggcuuu

SEQ ID NO: 2956096 - RNA, 19 nt, Artificial Sequence
  Description of Artificial Sequence: Synthetic oligonucleotide
auugguccccuugacccug

SEQ ID NO: 2956097 - RNA, 19 nt, Artificial Sequence
  Description of Artificial Sequence: Synthetic oligonucleotide
gcacaugucacugacugga

SEQ ID NO: 2956098 - RNA, 19 nt, Artificial Sequence
  Description of Artificial Sequence: Synthetic oligonucleotide
ggcaguggaagggagcaag

SEQ ID NO: 2956099 - RNA, 19 nt, Artificial Sequence
  Description of Artificial Sequence: Synthetic oligonucleotide
guucagcagucauuugcca

SEQ ID NO: 2956100 - RNA, 19 nt, Artificial Sequence
  Description of Artificial Sequence: Synthetic oligonucleotide
caccaaagguuuccuguuc

SEQ ID NO: 2956101 - RNA, 19 nt, Artificial Sequence
  Description of Artificial Sequence: Synthetic oligonucleotide
augucacugacuggaggug

SEQ ID NO: 2956102 - RNA, 19 nt, Artificial Sequence
  Description of Artificial Sequence: Synthetic oligonucleotide
ugccagaggggaagaucca

SEQ ID NO: 2956103 - RNA, 19 nt, Artificial Sequence
  Description of Artificial Sequence: Synthetic oligonucleotide
agagcugacuugggaucac

SEQ ID NO: 2956104 - RNA, 19 nt, Artificial Sequence
  Description of Artificial Sequence: Synthetic oligonucleotide
caggcuuuccauuagccau

SEQ ID NO: 2956105 - RNA, 19 nt, Artificial Sequence
  Description of Artificial Sequence: Synthetic oligonucleotide
aggaccccugugaagagcu

SEQ ID NO: 2956106 - RNA, 19 nt, Artificial Sequence
  Description of Artificial Sequence: Synthetic oligonucleotide
accccugugaagagcugac

SEQ ID NO: 2956107 - RNA, 19 nt, Artificial Sequence
  Description of Artificial Sequence: Synthetic oligonucleotide
gggaucaccaggcuuucca

SEQ ID NO: 2956108 - RNA, 19 nt, Artificial Sequence
  Description of Artificial Sequence: Synthetic oligonucleotide
agcaagacggggucccgau

SEQ ID NO: 2956109 - RNA, 19 nt, Artificial Sequence
  Description of Artificial Sequence: Synthetic oligonucleotide
gacggcacgcaccgcacuc

SEQ ID NO: 2956110 - RNA, 19 nt, Artificial Sequence
  Description of Artificial Sequence: Synthetic oligonucleotide
cucugccccggagaggagg

SEQ ID NO: 2956111 - RNA, 19 nt, Artificial Sequence
  Description of Artificial Sequence: Synthetic oligonucleotide
aggcuuuccauuagccaug

SEQ ID NO: 2956112 - RNA, 19 nt, Artificial Sequence
  Description of Artificial Sequence: Synthetic oligonucleotide
caguggaagggagcaagac

SEQ ID NO: 2956113 - RNA, 19 nt, Artificial Sequence
  Description of Artificial Sequence: Synthetic oligonucleotide
ggaucagaagacggcacgc

SEQ ID NO: 2956114 - RNA, 19 nt, Artificial Sequence
  Description of Artificial Sequence: Synthetic oligonucleotide
ggaggugaagaagaacuuc

SEQ ID NO: 2956115 - RNA, 19 nt, Artificial Sequence
  Description of Artificial Sequence: Synthetic oligonucleotide
uagcuaugagggagccaca

SEQ ID NO: 2956116 - RNA, 19 nt, Artificial Sequence
  Description of Artificial Sequence: Synthetic oligonucleotide
agggccucugccccggaga

SEQ ID NO: 2956117 - RNA, 19 nt, Artificial Sequence
  Description of Artificial Sequence: Synthetic oligonucleotide
gagaggaggugggaggcuc

SEQ ID NO: 2956118 - RNA, 19 nt, Artificial Sequence
  Description of Artificial Sequence: Synthetic oligonucleotide
augccuggccacucuacau

SEQ ID NO: 2956119 - RNA, 19 nt, Artificial Sequence
  Description of Artificial Sequence: Synthetic oligonucleotide
acagcaccaaagguuuccu

SEQ ID NO: 2956120 - RNA, 19 nt, Artificial Sequence
  Description of Artificial Sequence: Synthetic oligonucleotide
acggggucccgauggucuc

SEQ ID NO: 2956121 - RNA, 19 nt, Artificial Sequence
  Description of Artificial Sequence: Synthetic oligonucleotide
caucuaggaccaaggccuc

SEQ ID NO: 2956122 - RNA, 19 nt, Artificial Sequence
  Description of Artificial Sequence: Synthetic oligonucleotide
agggagccacaggggaugc

SEQ ID NO: 2956123 - RNA, 19 nt, Artificial Sequence
  Description of Artificial Sequence: Synthetic oligonucleotide
gaagggagcaagacggggu

SEQ ID NO: 2956124 - RNA, 19 nt, Artificial Sequence
  Description of Artificial Sequence: Synthetic oligonucleotide
agaagacggcacgcaccgc

SEQ ID NO: 2956125 - RNA, 19 nt, Artificial Sequence
  Description of Artificial Sequence: Synthetic oligonucleotide
ggccacucuacaucuagga

SEQ ID NO: 2956126 - RNA, 19 nt, Artificial Sequence
  Description of Artificial Sequence: Synthetic oligonucleotide
uugacccuggaggaccccu

SEQ ID NO: 2956127 - RNA, 19 nt, Artificial Sequence
  Description of Artificial Sequence: Synthetic oligonucleotide
uagggccucugccccggag

SEQ ID NO: 2956128 - RNA, 19 nt, Artificial Sequence
  Description of Artificial Sequence: Synthetic oligonucleotide
cacgcaccgcacuccagug

SEQ ID NO: 2956129 - RNA, 19 nt, Artificial Sequence
  Description of Artificial Sequence: Synthetic oligonucleotide
uccucgaauagggccucug

SEQ ID NO: 2956130 - RNA, 19 nt, Artificial Sequence
  Description of Artificial Sequence: Synthetic oligonucleotide
cagcagucauuugccagag

SEQ ID NO: 2956131 - RNA, 19 nt, Artificial Sequence
  Description of Artificial Sequence: Synthetic oligonucleotide
gaccccugugaagagcuga

SEQ ID NO: 2956132 - RNA, 19 nt, Artificial Sequence
  Description of Artificial Sequence: Synthetic oligonucleotide
gagcugacuugggaucacc

SEQ ID NO: 2956133 - RNA, 19 nt, Artificial Sequence
  Description of Artificial Sequence: Synthetic oligonucleotide
cagcaccaaagguuuccug

SEQ ID NO: 2956134 - RNA, 19 nt, Artificial Sequence
  Description of Artificial Sequence: Synthetic oligonucleotide
gccccagaaggcugggugg

SEQ ID NO: 2956135 - RNA, 19 nt, Artificial Sequence
  Description of Artificial Sequence: Synthetic oligonucleotide
gggugcacaugucacugac

SEQ ID NO: 2956136 - RNA, 19 nt, Artificial Sequence
  Description of Artificial Sequence: Synthetic oligonucleotide
gccacucuacaucuaggac

SEQ ID NO: 2956137 - RNA, 19 nt, Artificial Sequence
  Description of Artificial Sequence: Synthetic oligonucleotide
cgaauagggccucugcccc

SEQ ID NO: 2956138 - RNA, 19 nt, Artificial Sequence
  Description of Artificial Sequence: Synthetic oligonucleotide
uggucucuggagccuggau

SEQ ID NO: 2956139 - RNA, 19 nt, Artificial Sequence
  Description of Artificial Sequence: Synthetic oligonucleotide
cuccagugacaaucacaac

SEQ ID NO: 2956140 - RNA, 19 nt, Artificial Sequence
  Description of Artificial Sequence: Synthetic oligonucleotide
gaagaacuucaaguagcua

SEQ ID NO: 2956141 - RNA, 19 nt, Artificial Sequence
  Description of Artificial Sequence: Synthetic oligonucleotide
gaggaggugggaggcucag

SEQ ID NO: 2956142 - RNA, 19 nt, Artificial Sequence
  Description of Artificial Sequence: Synthetic oligonucleotide
ucucuggagccuggaucag

SEQ ID NO: 2956143 - RNA, 19 nt, Artificial Sequence
  Description of Artificial Sequence: Synthetic oligonucleotide
agacggggucccgaugguc

SEQ ID NO: 2956144 - RNA, 19 nt, Artificial Sequence
  Description of Artificial Sequence: Synthetic oligonucleotide
cccgauggucucuggagcc

SEQ ID NO: 2956145 - RNA, 19 nt, Artificial Sequence
  Description of Artificial Sequence: Synthetic oligonucleotide
aggugaagaagaacuucaa

SEQ ID NO: 2956146 - RNA, 19 nt, Artificial Sequence
  Description of Artificial Sequence: Synthetic oligonucleotide
ggcuuuccauuagccaugg

SEQ ID NO: 2956147 - RNA, 19 nt, Artificial Sequence
  Description of Artificial Sequence: Synthetic oligonucleotide
aguagcuaugagggagcca

SEQ ID NO: 2956148 - RNA, 19 nt, Artificial Sequence
  Description of Artificial Sequence: Synthetic oligonucleotide
agcugacuugggaucacca

SEQ ID NO: 2956149 - RNA, 19 nt, Artificial Sequence
  Description of Artificial Sequence: Synthetic oligonucleotide
aggccuccucgaauagggc

SEQ ID NO: 2956150 - RNA, 19 nt, Artificial Sequence
  Description of Artificial Sequence: Synthetic oligonucleotide
ccggagaggaggugggagg

SEQ ID NO: 2956151 - RNA, 19 nt, Artificial Sequence
  Description of Artificial Sequence: Synthetic oligonucleotide
augcuacaacaaacagcac

SEQ ID NO: 2956152 - RNA, 19 nt, Artificial Sequence
  Description of Artificial Sequence: Synthetic oligonucleotide
gugggaggcucagcagugg

SEQ ID NO: 2956153 - RNA, 19 nt, Artificial Sequence
  Description of Artificial Sequence: Synthetic oligonucleotide
ucacaacucuggaccccaa

SEQ ID NO: 2956154 - RNA, 19 nt, Artificial Sequence
  Description of Artificial Sequence: Synthetic oligonucleotide
cagugguggaaucauuggu

SEQ ID NO: 2956155 - RNA, 19 nt, Artificial Sequence
  Description of Artificial Sequence: Synthetic oligonucleotide
ccucgaauagggccucugc

SEQ ID NO: 2956156 - RNA, 19 nt, Artificial Sequence
  Description of Artificial Sequence: Synthetic oligonucleotide
acgcaccgcacuccaguga

SEQ ID NO: 2956157 - RNA, 19 nt, Artificial Sequence
  Description of Artificial Sequence: Synthetic oligonucleotide
agacggcacgcaccgcacu

SEQ ID NO: 2956158 - RNA, 19 nt, Artificial Sequence
  Description of Artificial Sequence: Synthetic oligonucleotide
gacuggaggugaagaagaa

SEQ ID NO: 2956159 - RNA, 19 nt, Artificial Sequence
  Description of Artificial Sequence: Synthetic oligonucleotide
acccuggaggaccccugug

SEQ ID NO: 2956160 - RNA, 19 nt, Artificial Sequence
  Description of Artificial Sequence: Synthetic oligonucleotide
ggaggaccccugugaagag

SEQ ID NO: 2956161 - RNA, 19 nt, Artificial Sequence
  Description of Artificial Sequence: Synthetic oligonucleotide
aggggaugccuggccacuc

SEQ ID NO: 2956162 - RNA, 19 nt, Artificial Sequence
  Description of Artificial Sequence: Synthetic oligonucleotide
guuuccuguucagcaguca

SEQ ID NO: 2956163 - RNA, 19 nt, Artificial Sequence
  Description of Artificial Sequence: Synthetic oligonucleotide
gagccacaggggaugccug

SEQ ID NO: 2956164 - RNA, 19 nt, Artificial Sequence
  Description of Artificial Sequence: Synthetic oligonucleotide
uugggaucaccaggcuuuc

SEQ ID NO: 2956165 - RNA, 19 nt, Artificial Sequence
  Description of Artificial Sequence: Synthetic oligonucleotide
gaucaccaggcuuuccauu

SEQ ID NO: 2956166 - RNA, 19 nt, Artificial Sequence
  Description of Artificial Sequence: Synthetic oligonucleotide
auuugccagaggggaagau

SEQ ID NO: 2956167 - RNA, 19 nt, Artificial Sequence
  Description of Artificial Sequence: Synthetic oligonucleotide
ugggaucaccaggcuuucc

SEQ ID NO: 2956168 - RNA, 19 nt, Artificial Sequence
  Description of Artificial Sequence: Synthetic oligonucleotide
ggugggaggcucagcagug

SEQ ID NO: 2956169 - RNA, 19 nt, Artificial Sequence
  Description of Artificial Sequence: Synthetic oligonucleotide
gacggggucccgauggucu

SEQ ID NO: 2956170 - RNA, 19 nt, Artificial Sequence
  Description of Artificial Sequence: Synthetic oligonucleotide
gaggcucagcaguggugga

SEQ ID NO: 2956171 - RNA, 19 nt, Artificial Sequence
  Description of Artificial Sequence: Synthetic oligonucleotide
gauccaggaggcaguggaa

SEQ ID NO: 2956172 - RNA, 19 nt, Artificial Sequence
  Description of Artificial Sequence: Synthetic oligonucleotide
ggaggcaguggaagggagc

SEQ ID NO: 2956173 - RNA, 19 nt, Artificial Sequence
  Description of Artificial Sequence: Synthetic oligonucleotide
gccuggaucagaagacggc

SEQ ID NO: 2956174 - RNA, 19 nt, Artificial Sequence
  Description of Artificial Sequence: Synthetic oligonucleotide
ccagaaggcuggguggucc

SEQ ID NO: 2956175 - RNA, 19 nt, Artificial Sequence
  Description of Artificial Sequence: Synthetic oligonucleotide
gucauuugccagaggggaa

SEQ ID NO: 2956176 - RNA, 19 nt, Artificial Sequence
  Description of Artificial Sequence: Synthetic oligonucleotide
gccagaggggaagauccag

SEQ ID NO: 2956177 - RNA, 19 nt, Artificial Sequence
  Description of Artificial Sequence: Synthetic oligonucleotide
gggccucugccccggagag

SEQ ID NO: 2956178 - RNA, 19 nt, Artificial Sequence
  Description of Artificial Sequence: Synthetic oligonucleotide
ccgcacuccagugacaauc

SEQ ID NO: 2956179 - RNA, 19 nt, Artificial Sequence
  Description of Artificial Sequence: Synthetic oligonucleotide
gggaaaugaugaauggggu

SEQ ID NO: 2956180 - RNA, 19 nt, Artificial Sequence
  Description of Artificial Sequence: Synthetic oligonucleotide
cccuugacccuggaggacc

SEQ ID NO: 2956181 - RNA, 19 nt, Artificial Sequence
  Description of Artificial Sequence: Synthetic oligonucleotide
ccuugacccuggaggaccc

SEQ ID NO: 2956182 - RNA, 19 nt, Artificial Sequence
  Description of Artificial Sequence: Synthetic oligonucleotide
agaggaggugggaggcuca

SEQ ID NO: 2956183 - RNA, 19 nt, Artificial Sequence
  Description of Artificial Sequence: Synthetic oligonucleotide
cauuugccagaggggaaga

SEQ ID NO: 2956184 - RNA, 19 nt, Artificial Sequence
  Description of Artificial Sequence: Synthetic oligonucleotide
gagcaagacggggucccga

SEQ ID NO: 2956185 - RNA, 19 nt, Artificial Sequence
  Description of Artificial Sequence: Synthetic oligonucleotide
gacuugggaucaccaggcu

SEQ ID NO: 2956186 - RNA, 19 nt, Artificial Sequence
  Description of Artificial Sequence: Synthetic oligonucleotide
ggucccgauggucucugga

SEQ ID NO: 2956187 - RNA, 19 nt, Artificial Sequence
  Description of Artificial Sequence: Synthetic oligonucleotide
cuugacccuggaggacccc

SEQ ID NO: 2956188 - RNA, 19 nt, Artificial Sequence
  Description of Artificial Sequence: Synthetic oligonucleotide
caggaggcaguggaaggga

SEQ ID NO: 2956189 - RNA, 19 nt, Artificial Sequence
  Description of Artificial Sequence: Synthetic oligonucleotide
cacaacucuggaccccaaa

SEQ ID NO: 2956190 - RNA, 19 nt, Artificial Sequence
  Description of Artificial Sequence: Synthetic oligonucleotide
gaccaaggccuccucgaau

SEQ ID NO: 2956191 - RNA, 19 nt, Artificial Sequence
  Description of Artificial Sequence: Synthetic oligonucleotide
gucacugacuggaggugaa

SEQ ID NO: 2956192 - RNA, 19 nt, Artificial Sequence
  Description of Artificial Sequence: Synthetic oligonucleotide
auggucucuggagccugga

SEQ ID NO: 2956193 - RNA, 19 nt, Artificial Sequence
  Description of Artificial Sequence: Synthetic oligonucleotide
caccgcacuccagugacaa

SEQ ID NO: 2956194 - RNA, 19 nt, Artificial Sequence
  Description of Artificial Sequence: Synthetic oligonucleotide
aggcucagcagugguggaa

SEQ ID NO: 2956195 - RNA, 19 nt, Artificial Sequence
  Description of Artificial Sequence: Synthetic oligonucleotide
ccaaggccuccucgaauag

SEQ ID NO: 2956196 - RNA, 19 nt, Artificial Sequence
  Description of Artificial Sequence: Synthetic oligonucleotide
ggagcaagacggggucccg

SEQ ID NO: 2956197 - RNA, 19 nt, Artificial Sequence
  Description of Artificial Sequence: Synthetic oligonucleotide
gcaagacggggucccgaug

SEQ ID NO: 2956198 - RNA, 19 nt, Artificial Sequence
  Description of Artificial Sequence: Synthetic oligonucleotide
cagugacaaucacaacucu

SEQ ID NO: 2956199 - RNA, 19 nt, Artificial Sequence
  Description of Artificial Sequence: Synthetic oligonucleotide
cauugguccccuugacccu

SEQ ID NO: 2956200 - RNA, 19 nt, Artificial Sequence
  Description of Artificial Sequence: Synthetic oligonucleotide
gcuuuccauuagccauggg

SEQ ID NO: 2956201 - RNA, 19 nt, Artificial Sequence
  Description of Artificial Sequence: Synthetic oligonucleotide
ggaagauccaggaggcagu

SEQ ID NO: 2956202 - RNA, 19 nt, Artificial Sequence
  Description of Artificial Sequence: Synthetic oligonucleotide
cgcaccgcacuccagugac

SEQ ID NO: 2956203 - RNA, 19 nt, Artificial Sequence
  Description of Artificial Sequence: Synthetic oligonucleotide
gggaggcucagcaguggug

SEQ ID NO: 2956204 - RNA, 19 nt, Artificial Sequence
  Description of Artificial Sequence: Synthetic oligonucleotide
ggaugccuggccacucuac

SEQ ID NO: 2956205 - RNA, 19 nt, Artificial Sequence
  Description of Artificial Sequence: Synthetic oligonucleotide
gacccuggaggaccccugu

SEQ ID NO: 2956206 - RNA, 19 nt, Artificial Sequence
  Description of Artificial Sequence: Synthetic oligonucleotide
accgcacuccagugacaau

SEQ ID NO: 2956207 - RNA, 19 nt, Artificial Sequence
  Description of Artificial Sequence: Synthetic oligonucleotide
ggaccaaggccuccucgaa

SEQ ID NO: 2956208 - RNA, 19 nt, Artificial Sequence
  Description of Artificial Sequence: Synthetic oligonucleotide
gcacuccagugacaaucac

SEQ ID NO: 2956209 - RNA, 19 nt, Artificial Sequence
  Description of Artificial Sequence: Synthetic oligonucleotide
auagggccucugccccgga

SEQ ID NO: 2956210 - RNA, 19 nt, Artificial Sequence
  Description of Artificial Sequence: Synthetic oligonucleotide
ggggugcacaugucacuga

SEQ ID NO: 2956211 - RNA, 19 nt, Artificial Sequence
  Description of Artificial Sequence: Synthetic oligonucleotide
ggaucaccaggcuuuccau

SEQ ID NO: 2956212 - RNA, 19 nt, Artificial Sequence
  Description of Artificial Sequence: Synthetic oligonucleotide
gcaguggaagggagcaaga

SEQ ID NO: 2956213 - RNA, 19 nt, Artificial Sequence
  Description of Artificial Sequence: Synthetic oligonucleotide
gccacaggggaugccuggc

SEQ ID NO: 2956214 - RNA, 19 nt, Artificial Sequence
  Description of Artificial Sequence: Synthetic oligonucleotide
ggagccccagaaggcuggg

SEQ ID NO: 2956215 - RNA, 19 nt, Artificial Sequence
  Description of Artificial Sequence: Synthetic oligonucleotide
gccuggccacucuacaucu

SEQ ID NO: 2956216 - RNA, 19 nt, Artificial Sequence
  Description of Artificial Sequence: Synthetic oligonucleotide
cccuggaggaccccuguga

SEQ ID NO: 2956217 - RNA, 19 nt, Artificial Sequence
  Description of Artificial Sequence: Synthetic oligonucleotide
gggucccgauggucucugg

SEQ ID NO: 2956218 - RNA, 19 nt, Artificial Sequence
  Description of Artificial Sequence: Synthetic oligonucleotide
gcaccaaagguuuccuguu

SEQ ID NO: 2956219 - RNA, 19 nt, Artificial Sequence
  Description of Artificial Sequence: Synthetic oligonucleotide
aggcaguggaagggagcaa

SEQ ID NO: 2956220 - RNA, 19 nt, Artificial Sequence
  Description of Artificial Sequence: Synthetic oligonucleotide
gcacgcaccgcacuccagu

SEQ ID NO: 2956221 - RNA, 19 nt, Artificial Sequence
  Description of Artificial Sequence: Synthetic oligonucleotide
gccccggagaggagguggg

SEQ ID NO: 2956222 - RNA, 19 nt, Artificial Sequence
  Description of Artificial Sequence: Synthetic oligonucleotide
cgcacuccagugacaauca

SEQ ID NO: 2956223 - RNA, 19 nt, Artificial Sequence
  Description of Artificial Sequence: Synthetic oligonucleotide
gccuccucgaauagggccu

SEQ ID NO: 2956224 - RNA, 19 nt, Artificial Sequence
  Description of Artificial Sequence: Synthetic oligonucleotide
ggggucccgauggucucug

SEQ ID NO: 2956225 - RNA, 19 nt, Artificial Sequence
  Description of Artificial Sequence: Synthetic oligonucleotide
ggccucugccccggagagg

SEQ ID NO: 2956226 - RNA, 19 nt, Artificial Sequence
  Description of Artificial Sequence: Synthetic oligonucleotide
gggaugccuggccacucua

SEQ ID NO: 2956227 - RNA, 19 nt, Artificial Sequence
  Description of Artificial Sequence: Synthetic oligonucleotide
ggcacgcaccgcacuccag

SEQ ID NO: 2956228 - RNA, 19 nt, Artificial Sequence
  Description of Artificial Sequence: Synthetic oligonucleotide
ggugcacaugucacugacu

SEQ ID NO: 2956229 - RNA, 19 nt, Artificial Sequence
  Description of Artificial Sequence: Synthetic oligonucleotide
acucuacaucuaggaccaa

SEQ ID NO: 2956230 - RNA, 19 nt, Artificial Sequence
  Description of Artificial Sequence: Synthetic oligonucleotide
ggggaagauccaggaggca

SEQ ID NO: 2956231 - RNA, 19 nt, Artificial Sequence
  Description of Artificial Sequence: Synthetic oligonucleotide
cccugugaagagcugacuu

SEQ ID NO: 2956232 - RNA, 19 nt, Artificial Sequence
  Description of Artificial Sequence: Synthetic oligonucleotide
ggaccccugugaagagcug

SEQ ID NO: 2956233 - RNA, 19 nt, Artificial Sequence
  Description of Artificial Sequence: Synthetic oligonucleotide
cugccccggagaggaggug

SEQ ID NO: 2956234 - RNA, 19 nt, Artificial Sequence
  Description of Artificial Sequence: Synthetic oligonucleotide
ggcucagcagugguggaau

SEQ ID NO: 2956235 - RNA, 19 nt, Artificial Sequence
  Description of Artificial Sequence: Synthetic oligonucleotide
cgauggucucuggagccug

SEQ ID NO: 2956236 - RNA, 19 nt, Artificial Sequence
  Description of Artificial Sequence: Synthetic oligonucleotide
gggagccacaggggaugcc

SEQ ID NO: 2956237 - RNA, 19 nt, Artificial Sequence
  Description of Artificial Sequence: Synthetic oligonucleotide
ccuccucgaauagggccuc

SEQ ID NO: 2956238 - RNA, 19 nt, Artificial Sequence
  Description of Artificial Sequence: Synthetic oligonucleotide
cagcagugguggaaucauu

SEQ ID NO: 2956239 - RNA, 19 nt, Artificial Sequence
  Description of Artificial Sequence: Synthetic oligonucleotide
caggggaugccuggccacu

SEQ ID NO: 2956240 - RNA, 19 nt, Artificial Sequence
  Description of Artificial Sequence: Synthetic oligonucleotide
ccccuugacccuggaggac

SEQ ID NO: 2956241 - RNA, 19 nt, Artificial Sequence
  Description of Artificial Sequence: Synthetic oligonucleotide
ccucugccccggagaggag

SEQ ID NO: 2956242 - RNA, 19 nt, Artificial Sequence
  Description of Artificial Sequence: Synthetic oligonucleotide
cccagaaggcugggugguc

SEQ ID NO: 2956243 - RNA, 19 nt, Artificial Sequence
  Description of Artificial Sequence: Synthetic oligonucleotide
gcaccgcacuccagugaca

SEQ ID NO: 2956244 - RNA, 19 nt, Artificial Sequence
  Description of Artificial Sequence: Synthetic oligonucleotide
ccuggccacucuacaucua

SEQ ID NO: 2956245 - RNA, 19 nt, Artificial Sequence
  Description of Artificial Sequence: Synthetic oligonucleotide
cuccucgaauagggccucu

SEQ ID NO: 2956246 - RNA, 19 nt, Artificial Sequence
  Description of Artificial Sequence: Synthetic oligonucleotide
ccgauggucucuggagccu

SEQ ID NO: 2956247 - RNA, 19 nt, Artificial Sequence
  Description of Artificial Sequence: Synthetic oligonucleotide
ccccagaaggcuggguggu

SEQ ID NO: 2956248 - RNA, 19 nt, Artificial Sequence
  Description of Artificial Sequence: Synthetic oligonucleotide
cggcacgcaccgcacucca

SEQ ID NO: 2956249 - RNA, 19 nt, Artificial Sequence
  Description of Artificial Sequence: Synthetic oligonucleotide
ccccugugaagagcugacu

SEQ ID NO: 2956250 - RNA, 19 nt, Artificial Sequence
  Description of Artificial Sequence: Synthetic oligonucleotide
ccccggagaggagguggga

SEQ ID NO: 2956251 - RNA, 19 nt, Artificial Sequence
  Description of Artificial Sequence: Synthetic oligonucleotide
cggggucccgauggucucu

SEQ ID NO: 2956252 - RNA, 19 nt, Artificial Sequence
  Description of Artificial Sequence: Synthetic oligonucleotide
aacaauugguuuuacauuc

SEQ ID NO: 2956253 - RNA, 19 nt, Artificial Sequence
  Description of Artificial Sequence: Synthetic oligonucleotide
guuaaaaucaccuuucucc

SEQ ID NO: 2956254 - RNA, 19 nt, Artificial Sequence
  Description of Artificial Sequence: Synthetic oligonucleotide
uuuauucagaacaaaaucu

SEQ ID NO: 2956255 - RNA, 19 nt, Artificial Sequence
  Description of Artificial Sequence: Synthetic oligonucleotide
uacauucuaagccacaagg

SEQ ID NO: 2956256 - RNA, 19 nt, Artificial Sequence
  Description of Artificial Sequence: Synthetic oligonucleotide
auaaauauuuauucagaac

SEQ ID NO: 2956257 - RNA, 19 nt, Artificial Sequence
  Description of Artificial Sequence: Synthetic oligonucleotide
aaggaaauagcaaaacagc

SEQ ID NO: 2956258 - RNA, 19 nt, Artificial Sequence
  Description of Artificial Sequence: Synthetic oligonucleotide
aaagagaagacaaacacug

SEQ ID NO: 2956259 - RNA, 19 nt, Artificial Sequence
  Description of Artificial Sequence: Synthetic oligonucleotide
ugguuuuacauucuaagcc

SEQ ID NO: 2956260 - RNA, 19 nt, Artificial Sequence
  Description of Artificial Sequence: Synthetic oligonucleotide
uuaacaauugguuuuacau

SEQ ID NO: 2956261 - RNA, 19 nt, Artificial Sequence
  Description of Artificial Sequence: Synthetic oligonucleotide
caaggaaauagcaaaacag

SEQ ID NO: 2956262 - RNA, 19 nt, Artificial Sequence
  Description of Artificial Sequence: Synthetic oligonucleotide
aaaaucaccuuucuccaag

SEQ ID NO: 2956263 - RNA, 19 nt, Artificial Sequence
  Description of Artificial Sequence: Synthetic oligonucleotide
ucacugauuacaauggcag

SEQ ID NO: 2956264 - RNA, 19 nt, Artificial Sequence
  Description of Artificial Sequence: Synthetic oligonucleotide
aauguaaaugucuggcaag

SEQ ID NO: 2956265 - RNA, 19 nt, Artificial Sequence
  Description of Artificial Sequence: Synthetic oligonucleotide
aacuugguaacaguugacc

SEQ ID NO: 2956266 - RNA, 19 nt, Artificial Sequence
  Description of Artificial Sequence: Synthetic oligonucleotide
uuaacuugguaacaguuga

SEQ ID NO: 2956267 - RNA, 19 nt, Artificial Sequence
  Description of Artificial Sequence: Synthetic oligonucleotide
augauucuggguuaaaauc

SEQ ID NO: 2956268 - RNA, 19 nt, Artificial Sequence
  Description of Artificial Sequence: Synthetic oligonucleotide
ugauucuggguuaaaauca

SEQ ID NO: 2956269 - RNA, 19 nt, Artificial Sequence
  Description of Artificial Sequence: Synthetic oligonucleotide
uucucacugauuacaaugg

SEQ ID NO: 2956270 - RNA, 19 nt, Artificial Sequence
  Description of Artificial Sequence: Synthetic oligonucleotide
acuugguaacaguugaccc

SEQ ID NO: 2956271 - RNA, 19 nt, Artificial Sequence
  Description of Artificial Sequence: Synthetic oligonucleotide
uuuaacuugguaacaguug

SEQ ID NO: 2956272 - RNA, 19 nt, Artificial Sequence
  Description of Artificial Sequence: Synthetic oligonucleotide
auuacaauggcagugggag

SEQ ID NO: 2956273 - RNA, 19 nt, Artificial Sequence
  Description of Artificial Sequence: Synthetic oligonucleotide
ucagaacaaaaucuuaaca

SEQ ID NO: 2956274 - RNA, 19 nt, Artificial Sequence
  Description of Artificial Sequence: Synthetic oligonucleotide
uauuuauucagaacaaaau

SEQ ID NO: 2956275 - RNA, 19 nt, Artificial Sequence
  Description of Artificial Sequence: Synthetic oligonucleotide
aaaacagcaaagagaagac

SEQ ID NO: 2956276 - RNA, 19 nt, Artificial Sequence
  Description of Artificial Sequence: Synthetic oligonucleotide
aagacaaacacugaggaaa

SEQ ID NO: 2956277 - RNA, 19 nt, Artificial Sequence
  Description of Artificial Sequence: Synthetic oligonucleotide
aaaucuuaacaauugguuu

SEQ ID NO: 2956278 - RNA, 19 nt, Artificial Sequence
  Description of Artificial Sequence: Synthetic oligonucleotide
uuucacuuuaacuugguaa

SEQ ID NO: 2956279 - RNA, 19 nt, Artificial Sequence
  Description of Artificial Sequence: Synthetic oligonucleotide
aaucuuaacaauugguuuu

SEQ ID NO: 2956280 - RNA, 19 nt, Artificial Sequence
  Description of Artificial Sequence: Synthetic oligonucleotide
uucacuuuaacuugguaac

SEQ ID NO: 2956281 - RNA, 19 nt, Artificial Sequence
  Description of Artificial Sequence: Synthetic oligonucleotide
uaaaugucuggcaaguucu

SEQ ID NO: 2956282 - RNA, 19 nt, Artificial Sequence
  Description of Artificial Sequence: Synthetic oligonucleotide
uuaaaaucaccuuucucca

SEQ ID NO: 2956283 - RNA, 19 nt, Artificial Sequence
  Description of Artificial Sequence: Synthetic oligonucleotide
agagaagacaaacacugag

SEQ ID NO: 2956284 - RNA, 19 nt, Artificial Sequence
  Description of Artificial Sequence: Synthetic oligonucleotide
acaaacacugaggaaaagc

SEQ ID NO: 2956285 - RNA, 19 nt, Artificial Sequence
  Description of Artificial Sequence: Synthetic oligonucleotide
aauagcaaaacagcaaaga

SEQ ID NO: 2956286 - RNA, 19 nt, Artificial Sequence
  Description of Artificial Sequence: Synthetic oligonucleotide
aguuugaagguuucgauga

SEQ ID NO: 2956287 - RNA, 19 nt, Artificial Sequence
  Description of Artificial Sequence: Synthetic oligonucleotide
uagcaaaacagcaaagaga

SEQ ID NO: 2956288 - RNA, 19 nt, Artificial Sequence
  Description of Artificial Sequence: Synthetic oligonucleotide
uaagccacaaggaaauagc

SEQ ID NO: 2956289 - RNA, 19 nt, Artificial Sequence
  Description of Artificial Sequence: Synthetic oligonucleotide
uuacagaucacucaugauu

SEQ ID NO: 2956290 - RNA, 19 nt, Artificial Sequence
  Description of Artificial Sequence: Synthetic oligonucleotide
aaccauuucucacugauua

SEQ ID NO: 2956291 - RNA, 19 nt, Artificial Sequence
  Description of Artificial Sequence: Synthetic oligonucleotide
uuuacugucuuucacuuua

SEQ ID NO: 2956292 - RNA, 19 nt, Artificial Sequence
  Description of Artificial Sequence: Synthetic oligonucleotide
agaagacaaacacugagga

SEQ ID NO: 2956293 - RNA, 19 nt, Artificial Sequence
  Description of Artificial Sequence: Synthetic oligonucleotide
uacagaucacucaugauuc

SEQ ID NO: 2956294 - RNA, 19 nt, Artificial Sequence
  Description of Artificial Sequence: Synthetic oligonucleotide
gaaauagcaaaacagcaaa

SEQ ID NO: 2956295 - RNA, 19 nt, Artificial Sequence
  Description of Artificial Sequence: Synthetic oligonucleotide
uaugaugugguacucccca

SEQ ID NO: 2956296 - RNA, 19 nt, Artificial Sequence
  Description of Artificial Sequence: Synthetic oligonucleotide
uugguuuuacauucuaagc

SEQ ID NO: 2956297 - RNA, 19 nt, Artificial Sequence
  Description of Artificial Sequence: Synthetic oligonucleotide
aaaaucuuaacaauugguu

SEQ ID NO: 2956298 - RNA, 19 nt, Artificial Sequence
  Description of Artificial Sequence: Synthetic oligonucleotide
aggaaaagcaguuuacugu

SEQ ID NO: 2956299 - RNA, 19 nt, Artificial Sequence
  Description of Artificial Sequence: Synthetic oligonucleotide
ucuggcaaguucuuuacug

SEQ ID NO: 2956300 - RNA, 19 nt, Artificial Sequence
  Description of Artificial Sequence: Synthetic oligonucleotide
agaacaaaaucuuaacaau

SEQ ID NO: 2956301 - RNA, 19 nt, Artificial Sequence
  Description of Artificial Sequence: Synthetic oligonucleotide
aaaucaccuuucuccaagg

SEQ ID NO: 2956302 - RNA, 19 nt, Artificial Sequence
  Description of Artificial Sequence: Synthetic oligonucleotide
uuauucagaacaaaaucuu

SEQ ID NO: 2956303 - RNA, 19 nt, Artificial Sequence
  Description of Artificial Sequence: Synthetic oligonucleotide
ugugguacuccccaggacu

SEQ ID NO: 2956304 - RNA, 19 nt, Artificial Sequence
  Description of Artificial Sequence: Synthetic oligonucleotide
ugaguuuacagaucacuca

SEQ ID NO: 2956305 - RNA, 19 nt, Artificial Sequence
  Description of Artificial Sequence: Synthetic oligonucleotide
ugucuuucacuuuaacuug

SEQ ID NO: 2956306 - RNA, 19 nt, Artificial Sequence
  Description of Artificial Sequence: Synthetic oligonucleotide
uucuggguuaaaaucaccu

SEQ ID NO: 2956307 - RNA, 19 nt, Artificial Sequence
  Description of Artificial Sequence: Synthetic oligonucleotide
uugaagguuucgaugagcu

SEQ ID NO: 2956308 - RNA, 19 nt, Artificial Sequence
  Description of Artificial Sequence: Synthetic oligonucleotide
gagaagacaaacacugagg

SEQ ID NO: 2956309 - RNA, 19 nt, Artificial Sequence
  Description of Artificial Sequence: Synthetic oligonucleotide
ucaccuuucuccaaggauc

SEQ ID NO: 2956310 - RNA, 19 nt, Artificial Sequence
  Description of Artificial Sequence: Synthetic oligonucleotide
gaggaaaagcaguuuacug

SEQ ID NO: 2956311 - RNA, 19 nt, Artificial Sequence
  Description of Artificial Sequence: Synthetic oligonucleotide
caaaacagcaaagagaaga

SEQ ID NO: 2956312 - RNA, 19 nt, Artificial Sequence
  Description of Artificial Sequence: Synthetic oligonucleotide
uuugaguuuacagaucacu

SEQ ID NO: 2956313 - RNA, 19 nt, Artificial Sequence
  Description of Artificial Sequence: Synthetic oligonucleotide
ucacucaugauucuggguu

SEQ ID NO: 2956314 - RNA, 19 nt, Artificial Sequence
  Description of Artificial Sequence: Synthetic oligonucleotide
acaaggaaauagcaaaaca

SEQ ID NO: 2956315 - RNA, 19 nt, Artificial Sequence
  Description of Artificial Sequence: Synthetic oligonucleotide
agcaaaacagcaaagagaa

SEQ ID NO: 2956316 - RNA, 19 nt, Artificial Sequence
  Description of Artificial Sequence: Synthetic oligonucleotide
cuuucuccaaggaucagag

SEQ ID NO: 2956317 - RNA, 19 nt, Artificial Sequence
  Description of Artificial Sequence: Synthetic oligonucleotide
uacaauggcagugggagag

SEQ ID NO: 2956318 - RNA, 19 nt, Artificial Sequence
  Description of Artificial Sequence: Synthetic oligonucleotide
uugaguuuacagaucacuc

SEQ ID NO: 2956319 - RNA, 19 nt, Artificial Sequence
  Description of Artificial Sequence: Synthetic oligonucleotide
aagcaguuuacugucuuuc

SEQ ID NO: 2956320 - RNA, 19 nt, Artificial Sequence
  Description of Artificial Sequence: Synthetic oligonucleotide
aacagcaaagagaagacaa

SEQ ID NO: 2956321 - RNA, 19 nt, Artificial Sequence
  Description of Artificial Sequence: Synthetic oligonucleotide
acugucuuucacuuuaacu

SEQ ID NO: 2956322 - RNA, 19 nt, Artificial Sequence
  Description of Artificial Sequence: Synthetic oligonucleotide
ucgaugagcucucucuagg

SEQ ID NO: 2956323 - RNA, 19 nt, Artificial Sequence
  Description of Artificial Sequence: Synthetic oligonucleotide
ugauuacaauggcaguggg

SEQ ID NO: 2956324 - RNA, 19 nt, Artificial Sequence
  Description of Artificial Sequence: Synthetic oligonucleotide
gaucacucaugauucuggg

SEQ ID NO: 2956325 - RNA, 19 nt, Artificial Sequence
  Description of Artificial Sequence: Synthetic oligonucleotide
acagcuaugaugugguacu

SEQ ID NO: 2956326 - RNA, 19 nt, Artificial Sequence
  Description of Artificial Sequence: Synthetic oligonucleotide
gaguuugaagguuucgaug

SEQ ID NO: 2956327 - RNA, 19 nt, Artificial Sequence
  Description of Artificial Sequence: Synthetic oligonucleotide
cagaacaaaaucuuaacaa

SEQ ID NO: 2956328 - RNA, 19 nt, Artificial Sequence
  Description of Artificial Sequence: Synthetic oligonucleotide
agaggugcaaauguaaaug

SEQ ID NO: 2956329 - RNA, 19 nt, Artificial Sequence
  Description of Artificial Sequence: Synthetic oligonucleotide
ugaugugguacuccccagg

SEQ ID NO: 2956330 - RNA, 19 nt, Artificial Sequence
  Description of Artificial Sequence: Synthetic oligonucleotide
uuacauucuaagccacaag

SEQ ID NO: 2956331 - RNA, 19 nt, Artificial Sequence
  Description of Artificial Sequence: Synthetic oligonucleotide
uggcaaguucuuuacugcg

SEQ ID NO: 2956332 - RNA, 19 nt, Artificial Sequence
  Description of Artificial Sequence: Synthetic oligonucleotide
uuccuaguagcugaggcag

SEQ ID NO: 2956333 - RNA, 19 nt, Artificial Sequence
  Description of Artificial Sequence: Synthetic oligonucleotide
guuuacagaucacucauga

SEQ ID NO: 2956334 - RNA, 19 nt, Artificial Sequence
  Description of Artificial Sequence: Synthetic oligonucleotide
acugauuacaauggcagug

SEQ ID NO: 2956335 - RNA, 19 nt, Artificial Sequence
  Description of Artificial Sequence: Synthetic oligonucleotide
uggguuaaaaucaccuuuc

SEQ ID NO: 2956336 - RNA, 19 nt, Artificial Sequence
  Description of Artificial Sequence: Synthetic oligonucleotide
uugguaacaguugacccag

SEQ ID NO: 2956337 - RNA, 19 nt, Artificial Sequence
  Description of Artificial Sequence: Synthetic oligonucleotide
guaaaugucuggcaaguuc

SEQ ID NO: 2956338 - RNA, 19 nt, Artificial Sequence
  Description of Artificial Sequence: Synthetic oligonucleotide
uuuuacauucuaagccaca

SEQ ID NO: 2956339 - RNA, 19 nt, Artificial Sequence
  Description of Artificial Sequence: Synthetic oligonucleotide
uaacaauugguuuuacauu

SEQ ID NO: 2956340 - RNA, 19 nt, Artificial Sequence
  Description of Artificial Sequence: Synthetic oligonucleotide
caaggaucagaguuugaag

SEQ ID NO: 2956341 - RNA, 19 nt, Artificial Sequence
  Description of Artificial Sequence: Synthetic oligonucleotide
ucucuaggguuccuaguag

SEQ ID NO: 2956342 - RNA, 19 nt, Artificial Sequence
  Description of Artificial Sequence: Synthetic oligonucleotide
uuuacauucuaagccacaa

SEQ ID NO: 2956343 - RNA, 19 nt, Artificial Sequence
  Description of Artificial Sequence: Synthetic oligonucleotide
uacuccccaggacugaugc

SEQ ID NO: 2956344 - RNA, 19 nt, Artificial Sequence
  Description of Artificial Sequence: Synthetic oligonucleotide
guagcugaggcagaggugc

SEQ ID NO: 2956345 - RNA, 19 nt, Artificial Sequence
  Description of Artificial Sequence: Synthetic oligonucleotide
cugauuacaauggcagugg

SEQ ID NO: 2956346 - RNA, 19 nt, Artificial Sequence
  Description of Artificial Sequence: Synthetic oligonucleotide
ugggacagcuaugaugugg

SEQ ID NO: 2956347 - RNA, 19 nt, Artificial Sequence
  Description of Artificial Sequence: Synthetic oligonucleotide
uaggguuccuaguagcuga

SEQ ID NO: 2956348 - RNA, 19 nt, Artificial Sequence
  Description of Artificial Sequence: Synthetic oligonucleotide
ucucacugauuacaauggc

SEQ ID NO: 2956349 - RNA, 19 nt, Artificial Sequence
  Description of Artificial Sequence: Synthetic oligonucleotide
cuaagccacaaggaaauag

SEQ ID NO: 2956350 - RNA, 19 nt, Artificial Sequence
  Description of Artificial Sequence: Synthetic oligonucleotide
accauuucucacugauuac

SEQ ID NO: 2956351 - RNA, 19 nt, Artificial Sequence
  Description of Artificial Sequence: Synthetic oligonucleotide
aggaaauagcaaaacagca

SEQ ID NO: 2956352 - RNA, 19 nt, Artificial Sequence
  Description of Artificial Sequence: Synthetic oligonucleotide
aaguucuuuacugcgggga

SEQ ID NO: 2956353 - RNA, 19 nt, Artificial Sequence
  Description of Artificial Sequence: Synthetic oligonucleotide
gguuuuacauucuaagcca

SEQ ID NO: 2956354 - RNA, 19 nt, Artificial Sequence
  Description of Artificial Sequence: Synthetic oligonucleotide
acugaggaaaagcaguuua

SEQ ID NO: 2956355 - RNA, 19 nt, Artificial Sequence
  Description of Artificial Sequence: Synthetic oligonucleotide
guaacaguugacccagccc

SEQ ID NO: 2956356 - RNA, 19 nt, Artificial Sequence
  Description of Artificial Sequence: Synthetic oligonucleotide
cuggcaaguucuuuacugc

SEQ ID NO: 2956357 - RNA, 19 nt, Artificial Sequence
  Description of Artificial Sequence: Synthetic oligonucleotide
uuugaagguuucgaugagc

SEQ ID NO: 2956358 - RNA, 19 nt, Artificial Sequence
  Description of Artificial Sequence: Synthetic oligonucleotide
acuuuaacuugguaacagu

SEQ ID NO: 2956359 - RNA, 19 nt, Artificial Sequence
  Description of Artificial Sequence: Synthetic oligonucleotide
uucuuuacugcggggaacc

SEQ ID NO: 2956360 - RNA, 19 nt, Artificial Sequence
  Description of Artificial Sequence: Synthetic oligonucleotide
uuuacugcggggaaccauu

SEQ ID NO: 2956361 - RNA, 19 nt, Artificial Sequence
  Description of Artificial Sequence: Synthetic oligonucleotide
agaucacucaugauucugg

SEQ ID NO: 2956362 - RNA, 19 nt, Artificial Sequence
  Description of Artificial Sequence: Synthetic oligonucleotide
uucgaugagcucucucuag

SEQ ID NO: 2956363 - RNA, 19 nt, Artificial Sequence
  Description of Artificial Sequence: Synthetic oligonucleotide
acugcggggaaccauuucu

SEQ ID NO: 2956364 - RNA, 19 nt, Artificial Sequence
  Description of Artificial Sequence: Synthetic oligonucleotide
aggaucagaguuugaaggu

SEQ ID NO: 2956365 - RNA, 19 nt, Artificial Sequence
  Description of Artificial Sequence: Synthetic oligonucleotide
ugaggaaaagcaguuuacu

SEQ ID NO: 2956366 - RNA, 19 nt, Artificial Sequence
  Description of Artificial Sequence: Synthetic oligonucleotide
aguuuacugucuuucacuu

SEQ ID NO: 2956367 - RNA, 19 nt, Artificial Sequence
  Description of Artificial Sequence: Synthetic oligonucleotide
agaguuugaagguuucgau

SEQ ID NO: 2956368 - RNA, 19 nt, Artificial Sequence
  Description of Artificial Sequence: Synthetic oligonucleotide
aaucaccuuucuccaagga

SEQ ID NO: 2956369 - RNA, 19 nt, Artificial Sequence
  Description of Artificial Sequence: Synthetic oligonucleotide
uguuuccccaagaacacuu

SEQ ID NO: 2956370 - RNA, 19 nt, Artificial Sequence
  Description of Artificial Sequence: Synthetic oligonucleotide
gaagguuucgaugagcucu

SEQ ID NO: 2956371 - RNA, 19 nt, Artificial Sequence
  Description of Artificial Sequence: Synthetic oligonucleotide
ggaaaagcaguuuacuguc

SEQ ID NO: 2956372 - RNA, 19 nt, Artificial Sequence
  Description of Artificial Sequence: Synthetic oligonucleotide
cugaggaaaagcaguuuac

SEQ ID NO: 2956373 - RNA, 19 nt, Artificial Sequence
  Description of Artificial Sequence: Synthetic oligonucleotide
agcuaugaugugguacucc

SEQ ID NO: 2956374 - RNA, 19 nt, Artificial Sequence
  Description of Artificial Sequence: Synthetic oligonucleotide
cuugguaacaguugaccca

SEQ ID NO: 2956375 - RNA, 19 nt, Artificial Sequence
  Description of Artificial Sequence: Synthetic oligonucleotide
auucagaacaaaaucuuaa

SEQ ID NO: 2956376 - RNA, 19 nt, Artificial Sequence
  Description of Artificial Sequence: Synthetic oligonucleotide
uuugccuguuuccccaaga

SEQ ID NO: 2956377 - RNA, 19 nt, Artificial Sequence
  Description of Artificial Sequence: Synthetic oligonucleotide
cacuuuaacuugguaacag

SEQ ID NO: 2956378 - RNA, 19 nt, Artificial Sequence
  Description of Artificial Sequence: Synthetic oligonucleotide
cagugggagaggaaggccc

SEQ ID NO: 2956379 - RNA, 19 nt, Artificial Sequence
  Description of Artificial Sequence: Synthetic oligonucleotide
uuuugaguuuacagaucac

SEQ ID NO: 2956380 - RNA, 19 nt, Artificial Sequence
  Description of Artificial Sequence: Synthetic oligonucleotide
aauugguuuuacauucuaa

SEQ ID NO: 2956381 - RNA, 19 nt, Artificial Sequence
  Description of Artificial Sequence: Synthetic oligonucleotide
gacagcuaugaugugguac

SEQ ID NO: 2956382 - RNA, 19 nt, Artificial Sequence
  Description of Artificial Sequence: Synthetic oligonucleotide
aaagcaguuuacugucuuu

SEQ ID NO: 2956383 - RNA, 19 nt, Artificial Sequence
  Description of Artificial Sequence: Synthetic oligonucleotide
caaauguaaaugucuggca

SEQ ID NO: 2956384 - RNA, 19 nt, Artificial Sequence
  Description of Artificial Sequence: Synthetic oligonucleotide
uaacuugguaacaguugac

SEQ ID NO: 2956385 - RNA, 19 nt, Artificial Sequence
  Description of Artificial Sequence: Synthetic oligonucleotide
gcaaguucuuuacugcggg

SEQ ID NO: 2956386 - RNA, 19 nt, Artificial Sequence
  Description of Artificial Sequence: Synthetic oligonucleotide
cuuaacaauugguuuuaca

SEQ ID NO: 2956387 - RNA, 19 nt, Artificial Sequence
  Description of Artificial Sequence: Synthetic oligonucleotide
caaaaucuuaacaauuggu

SEQ ID NO: 2956388 - RNA, 19 nt, Artificial Sequence
  Description of Artificial Sequence: Synthetic oligonucleotide
aagguuucgaugagcucuc

SEQ ID NO: 2956389 - RNA, 19 nt, Artificial Sequence
  Description of Artificial Sequence: Synthetic oligonucleotide
ugucuggcaaguucuuuac

SEQ ID NO: 2956390 - RNA, 19 nt, Artificial Sequence
  Description of Artificial Sequence: Synthetic oligonucleotide
gucuuucacuuuaacuugg

SEQ ID NO: 2956391 - RNA, 19 nt, Artificial Sequence
  Description of Artificial Sequence: Synthetic oligonucleotide
ucuuucacuuuaacuuggu

SEQ ID NO: 2956392 - RNA, 19 nt, Artificial Sequence
  Description of Artificial Sequence: Synthetic oligonucleotide
ugagcucucucuaggguuc

SEQ ID NO: 2956393 - RNA, 19 nt, Artificial Sequence
  Description of Artificial Sequence: Synthetic oligonucleotide
cauucuaagccacaaggaa

SEQ ID NO: 2956394 - RNA, 19 nt, Artificial Sequence
  Description of Artificial Sequence: Synthetic oligonucleotide
gguuccuaguagcugaggc

SEQ ID NO: 2956395 - RNA, 19 nt, Artificial Sequence
  Description of Artificial Sequence: Synthetic oligonucleotide
gaugugguacuccccagga

SEQ ID NO: 2956396 - RNA, 19 nt, Artificial Sequence
  Description of Artificial Sequence: Synthetic oligonucleotide
uuuacagaucacucaugau

SEQ ID NO: 2956397 - RNA, 19 nt, Artificial Sequence
  Description of Artificial Sequence: Synthetic oligonucleotide
aucaccuuucuccaaggau

SEQ ID NO: 2956398 - RNA, 19 nt, Artificial Sequence
  Description of Artificial Sequence: Synthetic oligonucleotide
uuucgaugagcucucucua

SEQ ID NO: 2956399 - RNA, 19 nt, Artificial Sequence
  Description of Artificial Sequence: Synthetic oligonucleotide
cucacugauuacaauggca

SEQ ID NO: 2956400 - RNA, 19 nt, Artificial Sequence
  Description of Artificial Sequence: Synthetic oligonucleotide
gcuaugaugugguacuccc

SEQ ID NO: 2956401 - RNA, 19 nt, Artificial Sequence
  Description of Artificial Sequence: Synthetic oligonucleotide
gugcaaauguaaaugucug

SEQ ID NO: 2956402 - RNA, 19 nt, Artificial Sequence
  Description of Artificial Sequence: Synthetic oligonucleotide
ucaugauucuggguuaaaa

SEQ ID NO: 2956403 - RNA, 19 nt, Artificial Sequence
  Description of Artificial Sequence: Synthetic oligonucleotide
uaaaaucaccuuucuccaa

SEQ ID NO: 2956404 - RNA, 19 nt, Artificial Sequence
  Description of Artificial Sequence: Synthetic oligonucleotide
cagcaaagagaagacaaac

SEQ ID NO: 2956405 - RNA, 19 nt, Artificial Sequence
  Description of Artificial Sequence: Synthetic oligonucleotide
cuaugaugugguacucccc

SEQ ID NO: 2956406 - RNA, 19 nt, Artificial Sequence
  Description of Artificial Sequence: Synthetic oligonucleotide
guuugaagguuucgaugag

SEQ ID NO: 2956407 - RNA, 19 nt, Artificial Sequence
  Description of Artificial Sequence: Synthetic oligonucleotide
aaggcccugggacagcuau

SEQ ID NO: 2956408 - RNA, 19 nt, Artificial Sequence
  Description of Artificial Sequence: Synthetic oligonucleotide
auguaaaugucuggcaagu

SEQ ID NO: 2956409 - RNA, 19 nt, Artificial Sequence
  Description of Artificial Sequence: Synthetic oligonucleotide
ucuggguuaaaaucaccuu

SEQ ID NO: 2956410 - RNA, 19 nt, Artificial Sequence
  Description of Artificial Sequence: Synthetic oligonucleotide
agcaaagagaagacaaaca

SEQ ID NO: 2956411 - RNA, 19 nt, Artificial Sequence
  Description of Artificial Sequence: Synthetic oligonucleotide
caaguucuuuacugcgggg

SEQ ID NO: 2956412 - RNA, 19 nt, Artificial Sequence
  Description of Artificial Sequence: Synthetic oligonucleotide
auucuaagccacaaggaaa

SEQ ID NO: 2956413 - RNA, 19 nt, Artificial Sequence
  Description of Artificial Sequence: Synthetic oligonucleotide
cacaaggaaauagcaaaac

SEQ ID NO: 2956414 - RNA, 19 nt, Artificial Sequence
  Description of Artificial Sequence: Synthetic oligonucleotide
agcaguuuacugucuuuca

SEQ ID NO: 2956415 - RNA, 19 nt, Artificial Sequence
  Description of Artificial Sequence: Synthetic oligonucleotide
aagccacaaggaaauagca

SEQ ID NO: 2956416 - RNA, 19 nt, Artificial Sequence
  Description of Artificial Sequence: Synthetic oligonucleotide
augugguacuccccaggac

SEQ ID NO: 2956417 - RNA, 19 nt, Artificial Sequence
  Description of Artificial Sequence: Synthetic oligonucleotide
ucacuuuaacuugguaaca

SEQ ID NO: 2956418 - RNA, 19 nt, Artificial Sequence
  Description of Artificial Sequence: Synthetic oligonucleotide
uuuugccuguuuccccaag

SEQ ID NO: 2956419 - RNA, 19 nt, Artificial Sequence
  Description of Artificial Sequence: Synthetic oligonucleotide
agaggaaggcccugggaca

SEQ ID NO: 2956420 - RNA, 19 nt, Artificial Sequence
  Description of Artificial Sequence: Synthetic oligonucleotide
guuucgaugagcucucucu

SEQ ID NO: 2956421 - RNA, 19 nt, Artificial Sequence
  Description of Artificial Sequence: Synthetic oligonucleotide
gaagacaaacacugaggaa

SEQ ID NO: 2956422 - RNA, 19 nt, Artificial Sequence
  Description of Artificial Sequence: Synthetic oligonucleotide
ugccuguuuccccaagaac

SEQ ID NO: 2956423 - RNA, 19 nt, Artificial Sequence
  Description of Artificial Sequence: Synthetic oligonucleotide
cucucucuaggguuccuag

SEQ ID NO: 2956424 - RNA, 19 nt, Artificial Sequence
  Description of Artificial Sequence: Synthetic oligonucleotide
uuacaauggcagugggaga

SEQ ID NO: 2956425 - RNA, 19 nt, Artificial Sequence
  Description of Artificial Sequence: Synthetic oligonucleotide
aggugcaaauguaaauguc

SEQ ID NO: 2956426 - RNA, 19 nt, Artificial Sequence
  Description of Artificial Sequence: Synthetic oligonucleotide
gaguuuacagaucacucau

SEQ ID NO: 2956427 - RNA, 19 nt, Artificial Sequence
  Description of Artificial Sequence: Synthetic oligonucleotide
acauucuaagccacaagga

SEQ ID NO: 2956428 - RNA, 19 nt, Artificial Sequence
  Description of Artificial Sequence: Synthetic oligonucleotide
aguucuuuacugcggggaa

SEQ ID NO: 2956429 - RNA, 19 nt, Artificial Sequence
  Description of Artificial Sequence: Synthetic oligonucleotide
gguaacaguugacccagcc

SEQ ID NO: 2956430 - RNA, 19 nt, Artificial Sequence
  Description of Artificial Sequence: Synthetic oligonucleotide
guuuuacauucuaagccac

SEQ ID NO: 2956431 - RNA, 19 nt, Artificial Sequence
  Description of Artificial Sequence: Synthetic oligonucleotide
gaggugcaaauguaaaugu

SEQ ID NO: 2956432 - RNA, 19 nt, Artificial Sequence
  Description of Artificial Sequence: Synthetic oligonucleotide
aagagaagacaaacacuga

SEQ ID NO: 2956433 - RNA, 19 nt, Artificial Sequence
  Description of Artificial Sequence: Synthetic oligonucleotide
auuucucacugauuacaau

SEQ ID NO: 2956434 - RNA, 19 nt, Artificial Sequence
  Description of Artificial Sequence: Synthetic oligonucleotide
guuccuaguagcugaggca

SEQ ID NO: 2956435 - RNA, 19 nt, Artificial Sequence
  Description of Artificial Sequence: Synthetic oligonucleotide
augagcucucucuaggguu

SEQ ID NO: 2956436 - RNA, 19 nt, Artificial Sequence
  Description of Artificial Sequence: Synthetic oligonucleotide
uugccuguuuccccaagaa

SEQ ID NO: 2956437 - RNA, 19 nt, Artificial Sequence
  Description of Artificial Sequence: Synthetic oligonucleotide
gccacaaggaaauagcaaa

SEQ ID NO: 2956438 - RNA, 19 nt, Artificial Sequence
  Description of Artificial Sequence: Synthetic oligonucleotide
caaagagaagacaaacacu

SEQ ID NO: 2956439 - RNA, 19 nt, Artificial Sequence
  Description of Artificial Sequence: Synthetic oligonucleotide
augucuggcaaguucuuua

SEQ ID NO: 2956440 - RNA, 19 nt, Artificial Sequence
  Description of Artificial Sequence: Synthetic oligonucleotide
aucacucaugauucugggu

SEQ ID NO: 2956441 - RNA, 19 nt, Artificial Sequence
  Description of Artificial Sequence: Synthetic oligonucleotide
gauuacaauggcaguggga

SEQ ID NO: 2956442 - RNA, 19 nt, Artificial Sequence
  Description of Artificial Sequence: Synthetic oligonucleotide
augaugugguacuccccag

SEQ ID NO: 2956443 - RNA, 19 nt, Artificial Sequence
  Description of Artificial Sequence: Synthetic oligonucleotide
gaggcagaggugcaaaugu

SEQ ID NO: 2956444 - RNA, 19 nt, Artificial Sequence
  Description of Artificial Sequence: Synthetic oligonucleotide
ugcggggaaccauuucuca

SEQ ID NO: 2956445 - RNA, 19 nt, Artificial Sequence
  Description of Artificial Sequence: Synthetic oligonucleotide
gguuaaaaucaccuuucuc

SEQ ID NO: 2956446 - RNA, 19 nt, Artificial Sequence
  Description of Artificial Sequence: Synthetic oligonucleotide
ucucucuaggguuccuagu

SEQ ID NO: 2956447 - RNA, 19 nt, Artificial Sequence
  Description of Artificial Sequence: Synthetic oligonucleotide
uuuccccaagaacacuuuu

SEQ ID NO: 2956448 - RNA, 19 nt, Artificial Sequence
  Description of Artificial Sequence: Synthetic oligonucleotide
gacaaacacugaggaaaag

SEQ ID NO: 2956449 - RNA, 19 nt, Artificial Sequence
  Description of Artificial Sequence: Synthetic oligonucleotide
gaggaaggcccugggacag

SEQ ID NO: 2956450 - RNA, 19 nt, Artificial Sequence
  Description of Artificial Sequence: Synthetic oligonucleotide
ugaagguuucgaugagcuc

SEQ ID NO: 2956451 - RNA, 19 nt, Artificial Sequence
  Description of Artificial Sequence: Synthetic oligonucleotide
aaugucuggcaaguucuuu

SEQ ID NO: 2956452 - RNA, 19 nt, Artificial Sequence
  Description of Artificial Sequence: Synthetic oligonucleotide
ggaaauagcaaaacagcaa

SEQ ID NO: 2956453 - RNA, 19 nt, Artificial Sequence
  Description of Artificial Sequence: Synthetic oligonucleotide
cuuuaacuugguaacaguu

SEQ ID NO: 2956454 - RNA, 19 nt, Artificial Sequence
  Description of Artificial Sequence: Synthetic oligonucleotide
ucuuaacaauugguuuuac

SEQ ID NO: 2956455 - RNA, 19 nt, Artificial Sequence
  Description of Artificial Sequence: Synthetic oligonucleotide
aguuuacagaucacucaug

SEQ ID NO: 2956456 - RNA, 19 nt, Artificial Sequence
  Description of Artificial Sequence: Synthetic oligonucleotide
caugauucuggguuaaaau

SEQ ID NO: 2956457 - RNA, 19 nt, Artificial Sequence
  Description of Artificial Sequence: Synthetic oligonucleotide
gccuguuuccccaagaaca

SEQ ID NO: 2956458 - RNA, 19 nt, Artificial Sequence
  Description of Artificial Sequence: Synthetic oligonucleotide
ggcaaguucuuuacugcgg

SEQ ID NO: 2956459 - RNA, 19 nt, Artificial Sequence
  Description of Artificial Sequence: Synthetic oligonucleotide
aguugacccagccccucug

SEQ ID NO: 2956460 - RNA, 19 nt, Artificial Sequence
  Description of Artificial Sequence: Synthetic oligonucleotide
cagaucacucaugauucug

SEQ ID NO: 2956461 - RNA, 19 nt, Artificial Sequence
  Description of Artificial Sequence: Synthetic oligonucleotide
aucuuaacaauugguuuua

SEQ ID NO: 2956462 - RNA, 19 nt, Artificial Sequence
  Description of Artificial Sequence: Synthetic oligonucleotide
uuucuccaaggaucagagu

SEQ ID NO: 2956463 - RNA, 19 nt, Artificial Sequence
  Description of Artificial Sequence: Synthetic oligonucleotide
gaugagcucucucuagggu

SEQ ID NO: 2956464 - RNA, 19 nt, Artificial Sequence
  Description of Artificial Sequence: Synthetic oligonucleotide
gcaguuuacugucuuucac

SEQ ID NO: 2956465 - RNA, 19 nt, Artificial Sequence
  Description of Artificial Sequence: Synthetic oligonucleotide
caccuuucuccaaggauca

SEQ ID NO: 2956466 - RNA, 19 nt, Artificial Sequence
  Description of Artificial Sequence: Synthetic oligonucleotide
cuccaaggaucagaguuug

SEQ ID NO: 2956467 - RNA, 19 nt, Artificial Sequence
  Description of Artificial Sequence: Synthetic oligonucleotide
uccuaguagcugaggcaga

SEQ ID NO: 2956468 - RNA, 19 nt, Artificial Sequence
  Description of Artificial Sequence: Synthetic oligonucleotide
acaauugguuuuacauucu

SEQ ID NO: 2956469 - RNA, 19 nt, Artificial Sequence
  Description of Artificial Sequence: Synthetic oligonucleotide
cagaguuugaagguuucga

SEQ ID NO: 2956470 - RNA, 19 nt, Artificial Sequence
  Description of Artificial Sequence: Synthetic oligonucleotide
cuaguagcugaggcagagg

SEQ ID NO: 2956471 - RNA, 19 nt, Artificial Sequence
  Description of Artificial Sequence: Synthetic oligonucleotide
aacaguugacccagccccu

SEQ ID NO: 2956472 - RNA, 19 nt, Artificial Sequence
  Description of Artificial Sequence: Synthetic oligonucleotide
caguuuacugucuuucacu

SEQ ID NO: 2956473 - RNA, 19 nt, Artificial Sequence
  Description of Artificial Sequence: Synthetic oligonucleotide
agacaaacacugaggaaaa

SEQ ID NO: 2956474 - RNA, 19 nt, Artificial Sequence
  Description of Artificial Sequence: Synthetic oligonucleotide
uguaaaugucuggcaaguu

SEQ ID NO: 2956475 - RNA, 19 nt, Artificial Sequence
  Description of Artificial Sequence: Synthetic oligonucleotide
ggugcaaauguaaaugucu

SEQ ID NO: 2956476 - RNA, 19 nt, Artificial Sequence
  Description of Artificial Sequence: Synthetic oligonucleotide
cucucuaggguuccuagua

SEQ ID NO: 2956477 - RNA, 19 nt, Artificial Sequence
  Description of Artificial Sequence: Synthetic oligonucleotide
ccuguuuccccaagaacac

SEQ ID NO: 2956478 - RNA, 19 nt, Artificial Sequence
  Description of Artificial Sequence: Synthetic oligonucleotide
acaguugacccagccccuc

SEQ ID NO: 2956479 - RNA, 19 nt, Artificial Sequence
  Description of Artificial Sequence: Synthetic oligonucleotide
ggggaaccauuucucacug

SEQ ID NO: 2956480 - RNA, 19 nt, Artificial Sequence
  Description of Artificial Sequence: Synthetic oligonucleotide
cugcggggaaccauuucuc

SEQ ID NO: 2956481 - RNA, 19 nt, Artificial Sequence
  Description of Artificial Sequence: Synthetic oligonucleotide
cuggguuaaaaucaccuuu

SEQ ID NO: 2956482 - RNA, 19 nt, Artificial Sequence
  Description of Artificial Sequence: Synthetic oligonucleotide
ugguaacaguugacccagc

SEQ ID NO: 2956483 - RNA, 19 nt, Artificial Sequence
  Description of Artificial Sequence: Synthetic oligonucleotide
gugguacuccccaggacug

SEQ ID NO: 2956484 - RNA, 19 nt, Artificial Sequence
  Description of Artificial Sequence: Synthetic oligonucleotide
ucuuuacugcggggaacca

SEQ ID NO: 2956485 - RNA, 19 nt, Artificial Sequence
  Description of Artificial Sequence: Synthetic oligonucleotide
uuacugcggggaaccauuu

SEQ ID NO: 2956486 - RNA, 19 nt, Artificial Sequence
  Description of Artificial Sequence: Synthetic oligonucleotide
ugacccagccccucuguuu

SEQ ID NO: 2956487 - RNA, 19 nt, Artificial Sequence
  Description of Artificial Sequence: Synthetic oligonucleotide
uagcugaggcagaggugca

SEQ ID NO: 2956488 - RNA, 19 nt, Artificial Sequence
  Description of Artificial Sequence: Synthetic oligonucleotide
uacugcggggaaccauuuc

SEQ ID NO: 2956489 - RNA, 19 nt, Artificial Sequence
  Description of Artificial Sequence: Synthetic oligonucleotide
agccacaaggaaauagcaa

SEQ ID NO: 2956490 - RNA, 19 nt, Artificial Sequence
  Description of Artificial Sequence: Synthetic oligonucleotide
ggaaccauuucucacugau

SEQ ID NO: 2956491 - RNA, 19 nt, Artificial Sequence
  Description of Artificial Sequence: Synthetic oligonucleotide
acacugaggaaaagcaguu

SEQ ID NO: 2956492 - RNA, 19 nt, Artificial Sequence
  Description of Artificial Sequence: Synthetic oligonucleotide
cuuucacuuuaacuuggua

SEQ ID NO: 2956493 - RNA, 19 nt, Artificial Sequence
  Description of Artificial Sequence: Synthetic oligonucleotide
aauggcagugggagaggaa

SEQ ID NO: 2956494 - RNA, 19 nt, Artificial Sequence
  Description of Artificial Sequence: Synthetic oligonucleotide
ucuaagccacaaggaaaua

SEQ ID NO: 2956495 - RNA, 19 nt, Artificial Sequence
  Description of Artificial Sequence: Synthetic oligonucleotide
uugacccagccccucuguu

SEQ ID NO: 2956496 - RNA, 19 nt, Artificial Sequence
  Description of Artificial Sequence: Synthetic oligonucleotide
acucaugauucuggguuaa

SEQ ID NO: 2956497 - RNA, 19 nt, Artificial Sequence
  Description of Artificial Sequence: Synthetic oligonucleotide
cgaugagcucucucuaggg

SEQ ID NO: 2956498 - RNA, 19 nt, Artificial Sequence
  Description of Artificial Sequence: Synthetic oligonucleotide
ccauuucucacugauuaca

SEQ ID NO: 2956499 - RNA, 19 nt, Artificial Sequence
  Description of Artificial Sequence: Synthetic oligonucleotide
ccuaguagcugaggcagag

SEQ ID NO: 2956500 - RNA, 19 nt, Artificial Sequence
  Description of Artificial Sequence: Synthetic oligonucleotide
cacucaugauucuggguua

SEQ ID NO: 2956501 - RNA, 19 nt, Artificial Sequence
  Description of Artificial Sequence: Synthetic oligonucleotide
aggaaggcccugggacagc

SEQ ID NO: 2956502 - RNA, 19 nt, Artificial Sequence
  Description of Artificial Sequence: Synthetic oligonucleotide
cagaggugcaaauguaaau

SEQ ID NO: 2956503 - RNA, 19 nt, Artificial Sequence
  Description of Artificial Sequence: Synthetic oligonucleotide
aggguuccuaguagcugag

SEQ ID NO: 2956504 - RNA, 19 nt, Artificial Sequence
  Description of Artificial Sequence: Synthetic oligonucleotide
ugguacuccccaggacuga

SEQ ID NO: 2956505 - RNA, 19 nt, Artificial Sequence
  Description of Artificial Sequence: Synthetic oligonucleotide
uccccaggacugaugcauu

SEQ ID NO: 2956506 - RNA, 19 nt, Artificial Sequence
  Description of Artificial Sequence: Synthetic oligonucleotide
gguuucgaugagcucucuc

SEQ ID NO: 2956507 - RNA, 19 nt, Artificial Sequence
  Description of Artificial Sequence: Synthetic oligonucleotide
gagcucucucuaggguucc

SEQ ID NO: 2956508 - RNA, 19 nt, Artificial Sequence
  Description of Artificial Sequence: Synthetic oligonucleotide
gcggggaaccauuucucac

SEQ ID NO: 2956509 - RNA, 19 nt, Artificial Sequence
  Description of Artificial Sequence: Synthetic oligonucleotide
cacugauuacaauggcagu

SEQ ID NO: 2956510 - RNA, 19 nt, Artificial Sequence
  Description of Artificial Sequence: Synthetic oligonucleotide
gcaaaacagcaaagagaag

SEQ ID NO: 2956511 - RNA, 19 nt, Artificial Sequence
  Description of Artificial Sequence: Synthetic oligonucleotide
ggagaggaaggcccuggga

SEQ ID NO: 2956512 - RNA, 19 nt, Artificial Sequence
  Description of Artificial Sequence: Synthetic oligonucleotide
ccacaaggaaauagcaaaa

SEQ ID NO: 2956513 - RNA, 19 nt, Artificial Sequence
  Description of Artificial Sequence: Synthetic oligonucleotide
accuuucuccaaggaucag

SEQ ID NO: 2956514 - RNA, 19 nt, Artificial Sequence
  Description of Artificial Sequence: Synthetic oligonucleotide
ggcagaggugcaaauguaa

SEQ ID NO: 2956515 - RNA, 19 nt, Artificial Sequence
  Description of Artificial Sequence: Synthetic oligonucleotide
gacccagccccucuguuuu

SEQ ID NO: 2956516 - RNA, 19 nt, Artificial Sequence
  Description of Artificial Sequence: Synthetic oligonucleotide
gcagugggagaggaaggcc

SEQ ID NO: 2956517 - RNA, 19 nt, Artificial Sequence
  Description of Artificial Sequence: Synthetic oligonucleotide
ggguuaaaaucaccuuucu

SEQ ID NO: 2956518 - RNA, 19 nt, Artificial Sequence
  Description of Artificial Sequence: Synthetic oligonucleotide
guacuccccaggacugaug

SEQ ID NO: 2956519 - RNA, 19 nt, Artificial Sequence
  Description of Artificial Sequence: Synthetic oligonucleotide
gcagaggugcaaauguaaa

SEQ ID NO: 2956520 - RNA, 19 nt, Artificial Sequence
  Description of Artificial Sequence: Synthetic oligonucleotide
cagcuaugaugugguacuc

SEQ ID NO: 2956521 - RNA, 19 nt, Artificial Sequence
  Description of Artificial Sequence: Synthetic oligonucleotide
guuuacugucuuucacuuu

SEQ ID NO: 2956522 - RNA, 19 nt, Artificial Sequence
  Description of Artificial Sequence: Synthetic oligonucleotide
guugacccagccccucugu

SEQ ID NO: 2956523 - RNA, 19 nt, Artificial Sequence
  Description of Artificial Sequence: Synthetic oligonucleotide
gucuggcaaguucuuuacu

SEQ ID NO: 2956524 - RNA, 19 nt, Artificial Sequence
  Description of Artificial Sequence: Synthetic oligonucleotide
ccuuucuccaaggaucaga

SEQ ID NO: 2956525 - RNA, 19 nt, Artificial Sequence
  Description of Artificial Sequence: Synthetic oligonucleotide
aggcagaggugcaaaugua

SEQ ID NO: 2956526 - RNA, 19 nt, Artificial Sequence
  Description of Artificial Sequence: Synthetic oligonucleotide
gaaccauuucucacugauu

SEQ ID NO: 2956527 - RNA, 19 nt, Artificial Sequence
  Description of Artificial Sequence: Synthetic oligonucleotide
gggacagcuaugauguggu

SEQ ID NO: 2956528 - RNA, 19 nt, Artificial Sequence
  Description of Artificial Sequence: Synthetic oligonucleotide
ggcccugggacagcuauga

SEQ ID NO: 2956529 - RNA, 19 nt, Artificial Sequence
  Description of Artificial Sequence: Synthetic oligonucleotide
cuccccaggacugaugcau

SEQ ID NO: 2956530 - RNA, 19 nt, Artificial Sequence
  Description of Artificial Sequence: Synthetic oligonucleotide
agguuucgaugagcucucu

SEQ ID NO: 2956531 - RNA, 19 nt, Artificial Sequence
  Description of Artificial Sequence: Synthetic oligonucleotide
gggaaccauuucucacuga

SEQ ID NO: 2956532 - RNA, 19 nt, Artificial Sequence
  Description of Artificial Sequence: Synthetic oligonucleotide
cuuuacugcggggaaccau

SEQ ID NO: 2956533 - RNA, 19 nt, Artificial Sequence
  Description of Artificial Sequence: Synthetic oligonucleotide
cucaugauucuggguuaaa

SEQ ID NO: 2956534 - RNA, 19 nt, Artificial Sequence
  Description of Artificial Sequence: Synthetic oligonucleotide
ggaucagaguuugaagguu

SEQ ID NO: 2956535 - RNA, 19 nt, Artificial Sequence
  Description of Artificial Sequence: Synthetic oligonucleotide
gcugaggcagaggugcaaa

SEQ ID NO: 2956536 - RNA, 19 nt, Artificial Sequence
  Description of Artificial Sequence: Synthetic oligonucleotide
aggcccugggacagcuaug

SEQ ID NO: 2956537 - RNA, 19 nt, Artificial Sequence
  Description of Artificial Sequence: Synthetic oligonucleotide
cugaggcagaggugcaaau

SEQ ID NO: 2956538 - RNA, 19 nt, Artificial Sequence
  Description of Artificial Sequence: Synthetic oligonucleotide
cuguuuccccaagaacacu

SEQ ID NO: 2956539 - RNA, 19 nt, Artificial Sequence
  Description of Artificial Sequence: Synthetic oligonucleotide
guuuccccaagaacacuuu

SEQ ID NO: 2956540 - RNA, 19 nt, Artificial Sequence
  Description of Artificial Sequence: Synthetic oligonucleotide
caguugacccagccccucu

SEQ ID NO: 2956541 - RNA, 19 nt, Artificial Sequence
  Description of Artificial Sequence: Synthetic oligonucleotide
ggacagcuaugauguggua

SEQ ID NO: 2956542 - RNA, 19 nt, Artificial Sequence
  Description of Artificial Sequence: Synthetic oligonucleotide
cacugaggaaaagcaguuu

SEQ ID NO: 2956543 - RNA, 19 nt, Artificial Sequence
  Description of Artificial Sequence: Synthetic oligonucleotide
cggggaaccauuucucacu

SEQ ID NO: 2956544 - RNA, 19 nt, Artificial Sequence
  Description of Artificial Sequence: Synthetic oligonucleotide
gaaggcccugggacagcua

SEQ ID NO: 2956545 - RNA, 19 nt, Artificial Sequence
  Description of Artificial Sequence: Synthetic oligonucleotide
gguacuccccaggacugau

SEQ ID NO: 2956546 - RNA, 19 nt, Artificial Sequence
  Description of Artificial Sequence: Synthetic oligonucleotide
gcucucucuaggguuccua

SEQ ID NO: 2956547 - RNA, 19 nt, Artificial Sequence
  Description of Artificial Sequence: Synthetic oligonucleotide
ccccaggacugaugcauuu

SEQ ID NO: 2956548 - RNA, 19 nt, Artificial Sequence
  Description of Artificial Sequence: Synthetic oligonucleotide
gcccugggacagcuaugau

SEQ ID NO: 2956549 - RNA, 19 nt, Artificial Sequence
  Description of Artificial Sequence: Synthetic oligonucleotide
ucuacucugacucacagag

SEQ ID NO: 2956550 - RNA, 19 nt, Artificial Sequence
  Description of Artificial Sequence: Synthetic oligonucleotide
agaagugccaccuugauga

SEQ ID NO: 2956551 - RNA, 19 nt, Artificial Sequence
  Description of Artificial Sequence: Synthetic oligonucleotide
aguucaagagcucuggugg

SEQ ID NO: 2956552 - RNA, 19 nt, Artificial Sequence
  Description of Artificial Sequence: Synthetic oligonucleotide
accgggaccacccugaagc

SEQ ID NO: 2956553 - RNA, 19 nt, Artificial Sequence
  Description of Artificial Sequence: Synthetic oligonucleotide
gauguacucagcuuccucg

SEQ ID NO: 2956554 - RNA, 19 nt, Artificial Sequence
  Description of Artificial Sequence: Synthetic oligonucleotide
ugugugucaggauagaaca

SEQ ID NO: 2956555 - RNA, 19 nt, Artificial Sequence
  Description of Artificial Sequence: Synthetic oligonucleotide
aacugguagaccugcuucc

SEQ ID NO: 2956556 - RNA, 19 nt, Artificial Sequence
  Description of Artificial Sequence: Synthetic oligonucleotide
acaauauacucuauugucc

SEQ ID NO: 2956557 - RNA, 19 nt, Artificial Sequence
  Description of Artificial Sequence: Synthetic oligonucleotide
ugcuacaccagacaggagc

SEQ ID NO: 2956558 - RNA, 19 nt, Artificial Sequence
  Description of Artificial Sequence: Synthetic oligonucleotide
uguugugugacaauauacu

SEQ ID NO: 2956559 - RNA, 19 nt, Artificial Sequence
  Description of Artificial Sequence: Synthetic oligonucleotide
gacaauauacucuauuguc

SEQ ID NO: 2956560 - RNA, 19 nt, Artificial Sequence
  Description of Artificial Sequence: Synthetic oligonucleotide
ucuauuguccaguucaaga

SEQ ID NO: 2956561 - RNA, 19 nt, Artificial Sequence
  Description of Artificial Sequence: Synthetic oligonucleotide
ugugcaugcaguuaugugu

SEQ ID NO: 2956562 - RNA, 19 nt, Artificial Sequence
  Description of Artificial Sequence: Synthetic oligonucleotide
  modified_base (2)..(2): a, c, u, g, unknown or other
gngggcagcauauggaacg

SEQ ID NO: 2956563 - RNA, 19 nt, Artificial Sequence
  Description of Artificial Sequence: Synthetic oligonucleotide
guacagaaggugcagaugc

SEQ ID NO: 2956564 - RNA, 19 nt, Artificial Sequence
  Description of Artificial Sequence: Synthetic oligonucleotide
cuauuguccaguucaagag

SEQ ID NO: 2956565 - RNA, 19 nt, Artificial Sequence
  Description of Artificial Sequence: Synthetic oligonucleotide
ugacaauauacucuauugu

SEQ ID NO: 2956566 - RNA, 19 nt, Artificial Sequence
  Description of Artificial Sequence: Synthetic oligonucleotide
auauggaacgccgaggaac

SEQ ID NO: 2956567 - RNA, 19 nt, Artificial Sequence
  Description of Artificial Sequence: Synthetic oligonucleotide
aauauacucuauuguccag

SEQ ID NO: 2956568 - RNA, 19 nt, Artificial Sequence
  Description of Artificial Sequence: Synthetic oligonucleotide
ucaggauagaacacgcacc

SEQ ID NO: 2956569 - RNA, 19 nt, Artificial Sequence
  Description of Artificial Sequence: Synthetic oligonucleotide
gugacaauauacucuauug

SEQ ID NO: 2956570 - RNA, 19 nt, Artificial Sequence
  Description of Artificial Sequence: Synthetic oligonucleotide
uugugugacaauauacucu

SEQ ID NO: 2956571 - RNA, 19 nt, Artificial Sequence
  Description of Artificial Sequence: Synthetic oligonucleotide
aacgccgaggaacugguag

SEQ ID NO: 2956572 - RNA, 19 nt, Artificial Sequence
  Description of Artificial Sequence: Synthetic oligonucleotide
uauuguccaguucaagagc

SEQ ID NO: 2956573 - RNA, 19 nt, Artificial Sequence
  Description of Artificial Sequence: Synthetic oligonucleotide
uuguugugugacaauauac

SEQ ID NO: 2956574 - RNA, 19 nt, Artificial Sequence
  Description of Artificial Sequence: Synthetic oligonucleotide
ggucaaugcguacagaagg

SEQ ID NO: 2956575 - RNA, 19 nt, Artificial Sequence
  Description of Artificial Sequence: Synthetic oligonucleotide
ugugugacaauauacucua

SEQ ID NO: 2956576 - RNA, 19 nt, Artificial Sequence
  Description of Artificial Sequence: Synthetic oligonucleotide
uagaacacgcaccucacac

SEQ ID NO: 2956577 - RNA, 19 nt, Artificial Sequence
  Description of Artificial Sequence: Synthetic oligonucleotide
aaggugcagaugcuacacc

SEQ ID NO: 2956578 - RNA, 19 nt, Artificial Sequence
  Description of Artificial Sequence: Synthetic oligonucleotide
aagcgauugucguccaagg

SEQ ID NO: 2956579 - RNA, 19 nt, Artificial Sequence
  Description of Artificial Sequence: Synthetic oligonucleotide
uccaagaagugccaccuug

SEQ ID NO: 2956580 - RNA, 19 nt, Artificial Sequence
  Description of Artificial Sequence: Synthetic oligonucleotide
gaacacgcaccucacaccc

SEQ ID NO: 2956581 - RNA, 19 nt, Artificial Sequence
  Description of Artificial Sequence: Synthetic oligonucleotide
aagcagaaguccugucuac

SEQ ID NO: 2956582 - RNA, 19 nt, Artificial Sequence
  Description of Artificial Sequence: Synthetic oligonucleotide
aagaagugccaccuugaug

SEQ ID NO: 2956583 - RNA, 19 nt, Artificial Sequence
  Description of Artificial Sequence: Synthetic oligonucleotide
auguacucagcuuccucgc

SEQ ID NO: 2956584 - RNA, 19 nt, Artificial Sequence
  Description of Artificial Sequence: Synthetic oligonucleotide
aguuaugugugucaggaua

SEQ ID NO: 2956585 - RNA, 19 nt, Artificial Sequence
  Description of Artificial Sequence: Synthetic oligonucleotide
agcucuggugguccgaagc

SEQ ID NO: 2956586 - RNA, 19 nt, Artificial Sequence
  Description of Artificial Sequence: Synthetic oligonucleotide
caaugcguacagaaggugc

SEQ ID NO: 2956587 - RNA, 19 nt, Artificial Sequence
  Description of Artificial Sequence: Synthetic oligonucleotide
uagaccugcuuccaagaag

SEQ ID NO: 2956588 - RNA, 19 nt, Artificial Sequence
  Description of Artificial Sequence: Synthetic oligonucleotide
uuuguugugugacaauaua

SEQ ID NO: 2956589 - RNA, 19 nt, Artificial Sequence
  Description of Artificial Sequence: Synthetic oligonucleotide
uauggaacgccgaggaacu

SEQ ID NO: 2956590 - RNA, 19 nt, Artificial Sequence
  Description of Artificial Sequence: Synthetic oligonucleotide
gaugcuacaccagacagga

SEQ ID NO: 2956591 - RNA, 19 nt, Artificial Sequence
  Description of Artificial Sequence: Synthetic oligonucleotide
agugccaccuugaugaccg

SEQ ID NO: 2956592 - RNA, 19 nt, Artificial Sequence
  Description of Artificial Sequence: Synthetic oligonucleotide
ugucuacucugacucacag

SEQ ID NO: 2956593 - RNA, 19 nt, Artificial Sequence
  Description of Artificial Sequence: Synthetic oligonucleotide
ugugacaauauacucuauu

SEQ ID NO: 2956594 - RNA, 19 nt, Artificial Sequence
  Description of Artificial Sequence: Synthetic oligonucleotide
ugguccgaagcgauugucg

SEQ ID NO: 2956595 - RNA, 19 nt, Artificial Sequence
  Description of Artificial Sequence: Synthetic oligonucleotide
uugaugaccgggaccaccc

SEQ ID NO: 2956596 - RNA, 19 nt, Artificial Sequence
  Description of Artificial Sequence: Synthetic oligonucleotide
aaggggucaaugcguacag

SEQ ID NO: 2956597 - RNA, 19 nt, Artificial Sequence
  Description of Artificial Sequence: Synthetic oligonucleotide
guuaugugugucaggauag

SEQ ID NO: 2956598 - RNA, 19 nt, Artificial Sequence
  Description of Artificial Sequence: Synthetic oligonucleotide
  modified_base (6)..(6): a, c, u, g, unknown or other
caaggngggcagcauaugg

SEQ ID NO: 2956599 - RNA, 19 nt, Artificial Sequence
  Description of Artificial Sequence: Synthetic oligonucleotide
uuccucgcggagcagaagc

SEQ ID NO: 2956600 - RNA, 19 nt, Artificial Sequence
  Description of Artificial Sequence: Synthetic oligonucleotide
uguacucagcuuccucgcg

SEQ ID NO: 2956601 - RNA, 19 nt, Artificial Sequence
  Description of Artificial Sequence: Synthetic oligonucleotide
caauauacucuauugucca

SEQ ID NO: 2956602 - RNA, 19 nt, Artificial Sequence
  Description of Artificial Sequence: Synthetic oligonucleotide
aaguccugucuacucugac

SEQ ID NO: 2956603 - RNA, 19 nt, Artificial Sequence
  Description of Artificial Sequence: Synthetic oligonucleotide
gucaggauagaacacgcac

SEQ ID NO: 2956604 - RNA, 19 nt, Artificial Sequence
  Description of Artificial Sequence: Synthetic oligonucleotide
agacuugcgguagauguac

SEQ ID NO: 2956605 - RNA, 19 nt, Artificial Sequence
  Description of Artificial Sequence: Synthetic oligonucleotide
uuuuguugugugacaauau

SEQ ID NO: 2956606 - RNA, 19 nt, Artificial Sequence
  Description of Artificial Sequence: Synthetic oligonucleotide
guugugugacaauauacuc

SEQ ID NO: 2956607 - RNA, 19 nt, Artificial Sequence
  Description of Artificial Sequence: Synthetic oligonucleotide
gguagauguacucagcuuc

SEQ ID NO: 2956608 - RNA, 19 nt, Artificial Sequence
  Description of Artificial Sequence: Synthetic oligonucleotide
augugugucaggauagaac

SEQ ID NO: 2956609 - RNA, 19 nt, Artificial Sequence
  Description of Artificial Sequence: Synthetic oligonucleotide
uccgaagcgauugucgucc

SEQ ID NO: 2956610 - RNA, 19 nt, Artificial Sequence
  Description of Artificial Sequence: Synthetic oligonucleotide
accacccugaagcuggccg

SEQ ID NO: 2956611 - RNA, 19 nt, Artificial Sequence
  Description of Artificial Sequence: Synthetic oligonucleotide
cagaugcuacaccagacag

SEQ ID NO: 2956612 - RNA, 19 nt, Artificial Sequence
  Description of Artificial Sequence: Synthetic oligonucleotide
uccaguucaagagcucugg

SEQ ID NO: 2956613 - RNA, 19 nt, Artificial Sequence
  Description of Artificial Sequence: Synthetic oligonucleotide
aaugcguacagaaggugca

SEQ ID NO: 2956614 - RNA, 19 nt, Artificial Sequence
  Description of Artificial Sequence: Synthetic oligonucleotide
gaagcgauugucguccaag

SEQ ID NO: 2956615 - RNA, 19 nt, Artificial Sequence
  Description of Artificial Sequence: Synthetic oligonucleotide
gaacugguagaccugcuuc

SEQ ID NO: 2956616 - RNA, 19 nt, Artificial Sequence
  Description of Artificial Sequence: Synthetic oligonucleotide
ccugcuuccaagaagugcc

SEQ ID NO: 2956617 - RNA, 19 nt, Artificial Sequence
  Description of Artificial Sequence: Synthetic oligonucleotide
ugguagaccugcuuccaag

SEQ ID NO: 2956618 - RNA, 19 nt, Artificial Sequence
  Description of Artificial Sequence: Synthetic oligonucleotide
agcagaagccagcaggucu

SEQ ID NO: 2956619 - RNA, 19 nt, Artificial Sequence
  Description of Artificial Sequence: Synthetic oligonucleotide
auuccugcaagcagaaguc

SEQ ID NO: 2956620 - RNA, 19 nt, Artificial Sequence
  Description of Artificial Sequence: Synthetic oligonucleotide
agaaguccugucuacucug

SEQ ID NO: 2956621 - RNA, 19 nt, Artificial Sequence
  Description of Artificial Sequence: Synthetic oligonucleotide
uugcgguagauguacucag

SEQ ID NO: 2956622 - RNA, 19 nt, Artificial Sequence
  Description of Artificial Sequence: Synthetic oligonucleotide
  modified_base (14)..(14): a, c, u, g, unknown or other
uugucguccaaggngggca

SEQ ID NO: 2956623 - RNA, 19 nt, Artificial Sequence
  Description of Artificial Sequence: Synthetic oligonucleotide
aaggcaggccuggugacgg

SEQ ID NO: 2956624 - RNA, 19 nt, Artificial Sequence
  Description of Artificial Sequence: Synthetic oligonucleotide
gacaaggcaggccugguga

SEQ ID NO: 2956625 - RNA, 19 nt, Artificial Sequence
  Description of Artificial Sequence: Synthetic oligonucleotide
aagugccaccuugaugacc

SEQ ID NO: 2956626 - RNA, 19 nt, Artificial Sequence
  Description of Artificial Sequence: Synthetic oligonucleotide
ugcaguuaugugugucagg

SEQ ID NO: 2956627 - RNA, 19 nt, Artificial Sequence
  Description of Artificial Sequence: Synthetic oligonucleotide
ugcagaugcuacaccagac

SEQ ID NO: 2956628 - RNA, 19 nt, Artificial Sequence
  Description of Artificial Sequence: Synthetic oligonucleotide
uacaccagacaggagccgg

SEQ ID NO: 2956629 - RNA, 19 nt, Artificial Sequence
  Description of Artificial Sequence: Synthetic oligonucleotide
aggugcagaugcuacacca

SEQ ID NO: 2956630 - RNA, 19 nt, Artificial Sequence
  Description of Artificial Sequence: Synthetic oligonucleotide
  modified_base (18)..(18): a, c, u, g, unknown or other
gcgauugucguccaaggng

SEQ ID NO: 2956631 - RNA, 19 nt, Artificial Sequence
  Description of Artificial Sequence: Synthetic oligonucleotide
guacucagcuuccucgcgg

SEQ ID NO: 2956632 - RNA, 19 nt, Artificial Sequence
  Description of Artificial Sequence: Synthetic oligonucleotide
guccugucuacucugacuc

SEQ ID NO: 2956633 - RNA, 19 nt, Artificial Sequence
  Description of Artificial Sequence: Synthetic oligonucleotide
auauacucuauuguccagu

SEQ ID NO: 2956634 - RNA, 19 nt, Artificial Sequence
  Description of Artificial Sequence: Synthetic oligonucleotide
caguucaagagcucuggug

SEQ ID NO: 2956635 - RNA, 19 nt, Artificial Sequence
  Description of Artificial Sequence: Synthetic oligonucleotide
auuguccaguucaagagcu

SEQ ID NO: 2956636 - RNA, 19 nt, Artificial Sequence
  Description of Artificial Sequence: Synthetic oligonucleotide
ggauagaacacgcaccuca

SEQ ID NO: 2956637 - RNA, 19 nt, Artificial Sequence
  Description of Artificial Sequence: Synthetic oligonucleotide
uccugcaagcagaaguccu

SEQ ID NO: 2956638 - RNA, 19 nt, Artificial Sequence
  Description of Artificial Sequence: Synthetic oligonucleotide
uggaacgccgaggaacugg

SEQ ID NO: 2956639 - RNA, 19 nt, Artificial Sequence
  Description of Artificial Sequence: Synthetic oligonucleotide
agcauauggaacgccgagg

SEQ ID NO: 2956640 - RNA, 19 nt, Artificial Sequence
  Description of Artificial Sequence: Synthetic oligonucleotide
  modified_base (15)..(15): a, c, u, g, unknown or other
auugucguccaaggngggc

SEQ ID NO: 2956641 - RNA, 19 nt, Artificial Sequence
  Description of Artificial Sequence: Synthetic oligonucleotide
uauacucuauuguccaguu

SEQ ID NO: 2956642 - RNA, 19 nt, Artificial Sequence
  Description of Artificial Sequence: Synthetic oligonucleotide
accuugaugaccgggacca

SEQ ID NO: 2956643 - RNA, 19 nt, Artificial Sequence
  Description of Artificial Sequence: Synthetic oligonucleotide
acaaggcaggccuggugac

SEQ ID NO: 2956644 - RNA, 19 nt, Artificial Sequence
  Description of Artificial Sequence: Synthetic oligonucleotide
cagaaggugcagaugcuac

SEQ ID NO: 2956645 - RNA, 19 nt, Artificial Sequence
  Description of Artificial Sequence: Synthetic oligonucleotide
ucaagagcucugguggucc

SEQ ID NO: 2956646 - RNA, 19 nt, Artificial Sequence
  Description of Artificial Sequence: Synthetic oligonucleotide
ucaaugcguacagaaggug

SEQ ID NO: 2956647 - RNA, 19 nt, Artificial Sequence
  Description of Artificial Sequence: Synthetic oligonucleotide
  modified_base (8)..(8): a, c, u, g, unknown or other
uccaaggngggcagcauau

SEQ ID NO: 2956648 - RNA, 19 nt, Artificial Sequence
  Description of Artificial Sequence: Synthetic oligonucleotide
ugucaggauagaacacgca

SEQ ID NO: 2956649 - RNA, 19 nt, Artificial Sequence
  Description of Artificial Sequence: Synthetic oligonucleotide
aguccugucuacucugacu

SEQ ID NO: 2956650 - RNA, 19 nt, Artificial Sequence
  Description of Artificial Sequence: Synthetic oligonucleotide
uguccaguucaagagcucu

SEQ ID NO: 2956651 - RNA, 19 nt, Artificial Sequence
  Description of Artificial Sequence: Synthetic oligonucleotide
agaugcuacaccagacagg

SEQ ID NO: 2956652 - RNA, 19 nt, Artificial Sequence
  Description of Artificial Sequence: Synthetic oligonucleotide
  modified_base (13)..(13): a, c, u, g, unknown or other
ugucguccaaggngggcag

SEQ ID NO: 2956653 - RNA, 19 nt, Artificial Sequence
  Description of Artificial Sequence: Synthetic oligonucleotide
ugcgguagauguacucagc

SEQ ID NO: 2956654 - RNA, 19 nt, Artificial Sequence
  Description of Artificial Sequence: Synthetic oligonucleotide
guagauguacucagcuucc

SEQ ID NO: 2956655 - RNA, 19 nt, Artificial Sequence
  Description of Artificial Sequence: Synthetic oligonucleotide
gauagaacacgcaccucac

SEQ ID NO: 2956656 - RNA, 19 nt, Artificial Sequence
  Description of Artificial Sequence: Synthetic oligonucleotide
ggagcauuccugcaagcag

SEQ ID NO: 2956657 - RNA, 19 nt, Artificial Sequence
  Description of Artificial Sequence: Synthetic oligonucleotide
  modified_base (4)..(4): a, c, u, g, unknown or other
aggngggcagcauauggaa

SEQ ID NO: 2956658 - RNA, 19 nt, Artificial Sequence
  Description of Artificial Sequence: Synthetic oligonucleotide
  modified_base (5)..(5): a, c, u, g, unknown or other
aaggngggcagcauaugga

SEQ ID NO: 2956659 - RNA, 19 nt, Artificial Sequence
  Description of Artificial Sequence: Synthetic oligonucleotide
gugacgggagcauuccugc

SEQ ID NO: 2956660 - RNA, 19 nt, Artificial Sequence
  Description of Artificial Sequence: Synthetic oligonucleotide
ugacaaggcaggccuggug

SEQ ID NO: 2956661 - RNA, 19 nt, Artificial Sequence
  Description of Artificial Sequence: Synthetic oligonucleotide
cugaagcuggccgaagggg

SEQ ID NO: 2956662 - RNA, 19 nt, Artificial Sequence
  Description of Artificial Sequence: Synthetic oligonucleotide
uacagaaggugcagaugcu

SEQ ID NO: 2956663 - RNA, 19 nt, Artificial Sequence
  Description of Artificial Sequence: Synthetic oligonucleotide
caugcaguuauguguguca

SEQ ID NO: 2956664 - RNA, 19 nt, Artificial Sequence
  Description of Artificial Sequence: Synthetic oligonucleotide
uggccgaaggggucaaugc

SEQ ID NO: 2956665 - RNA, 19 nt, Artificial Sequence
  Description of Artificial Sequence: Synthetic oligonucleotide
gaugaccgggaccacccug

SEQ ID NO: 2956666 - RNA, 19 nt, Artificial Sequence
  Description of Artificial Sequence: Synthetic oligonucleotide
acgggagcauuccugcaag

SEQ ID NO: 2956667 - RNA, 19 nt, Artificial Sequence
  Description of Artificial Sequence: Synthetic oligonucleotide
agcaggucuggcuccguag

SEQ ID NO: 2956668 - RNA, 19 nt, Artificial Sequence
  Description of Artificial Sequence: Synthetic oligonucleotide
cuugaugaccgggaccacc

SEQ ID NO: 2956669 - RNA, 19 nt, Artificial Sequence
  Description of Artificial Sequence: Synthetic oligonucleotide
cugugcaugcaguuaugug

SEQ ID NO: 2956670 - RNA, 19 nt, Artificial Sequence
  Description of Artificial Sequence: Synthetic oligonucleotide
gugcaugcaguuaugugug

SEQ ID NO: 2956671 - RNA, 19 nt, Artificial Sequence
  Description of Artificial Sequence: Synthetic oligonucleotide
ucuggugguccgaagcgau

SEQ ID NO: 2956672 - RNA, 19 nt, Artificial Sequence
  Description of Artificial Sequence: Synthetic oligonucleotide
uggugguccgaagcgauug

SEQ ID NO: 2956673 - RNA, 19 nt, Artificial Sequence
  Description of Artificial Sequence: Synthetic oligonucleotide
uaugugugucaggauagaa

SEQ ID NO: 2956674 - RNA, 19 nt, Artificial Sequence
  Description of Artificial Sequence: Synthetic oligonucleotide
auagaacacgcaccucaca

SEQ ID NO: 2956675 - RNA, 19 nt, Artificial Sequence
  Description of Artificial Sequence: Synthetic oligonucleotide
  modified_base (19)..(19): a, c, u, g, unknown or other
agcgauugucguccaaggn

SEQ ID NO: 2956676 - RNA, 19 nt, Artificial Sequence
  Description of Artificial Sequence: Synthetic oligonucleotide
  modified_base (17)..(17): a, c, u, g, unknown or other
cgauugucguccaaggngg

SEQ ID NO: 2956677 - RNA, 19 nt, Artificial Sequence
  Description of Artificial Sequence: Synthetic oligonucleotide
agcguggugacaaggcagg

SEQ ID NO: 2956678 - RNA, 19 nt, Artificial Sequence
  Description of Artificial Sequence: Synthetic oligonucleotide
augcaguuaugugugucag

SEQ ID NO: 2956679 - RNA, 19 nt, Artificial Sequence
  Description of Artificial Sequence: Synthetic oligonucleotide
aacacgcaccucacacccc

SEQ ID NO: 2956680 - RNA, 19 nt, Artificial Sequence
  Description of Artificial Sequence: Synthetic oligonucleotide
uacucagcuuccucgcgga

SEQ ID NO: 2956681 - RNA, 19 nt, Artificial Sequence
  Description of Artificial Sequence: Synthetic oligonucleotide
uuaugugugucaggauaga

SEQ ID NO: 2956682 - RNA, 19 nt, Artificial Sequence
  Description of Artificial Sequence: Synthetic oligonucleotide
gugucaggauagaacacgc

SEQ ID NO: 2956683 - RNA, 19 nt, Artificial Sequence
  Description of Artificial Sequence: Synthetic oligonucleotide
uccucgcggagcagaagcc

SEQ ID NO: 2956684 - RNA, 19 nt, Artificial Sequence
  Description of Artificial Sequence: Synthetic oligonucleotide
aggcugugcaugcaguuau

SEQ ID NO: 2956685 - RNA, 19 nt, Artificial Sequence
  Description of Artificial Sequence: Synthetic oligonucleotide
cuccguaggcugugcaugc

SEQ ID NO: 2956686 - RNA, 19 nt, Artificial Sequence
  Description of Artificial Sequence: Synthetic oligonucleotide
cucgcggagcagaagccag

SEQ ID NO: 2956687 - RNA, 19 nt, Artificial Sequence
  Description of Artificial Sequence: Synthetic oligonucleotide
uuccugcaagcagaagucc

SEQ ID NO: 2956688 - RNA, 19 nt, Artificial Sequence
  Description of Artificial Sequence: Synthetic oligonucleotide
gcauauggaacgccgagga

SEQ ID NO: 2956689 - RNA, 19 nt, Artificial Sequence
  Description of Artificial Sequence: Synthetic oligonucleotide
gggaccacccugaagcugg

SEQ ID NO: 2956690 - RNA, 19 nt, Artificial Sequence
  Description of Artificial Sequence: Synthetic oligonucleotide
ggccgaaggggucaaugcg

SEQ ID NO: 2956691 - RNA, 19 nt, Artificial Sequence
  Description of Artificial Sequence: Synthetic oligonucleotide
gcaguuaugugugucagga

SEQ ID NO: 2956692 - RNA, 19 nt, Artificial Sequence
  Description of Artificial Sequence: Synthetic oligonucleotide
cuugcgguagauguacuca

SEQ ID NO: 2956693 - RNA, 19 nt, Artificial Sequence
  Description of Artificial Sequence: Synthetic oligonucleotide
ccaggcuggaucugcagcg

SEQ ID NO: 2956694 - RNA, 19 nt, Artificial Sequence
  Description of Artificial Sequence: Synthetic oligonucleotide
caccuugaugaccgggacc

SEQ ID NO: 2956695 - RNA, 19 nt, Artificial Sequence
  Description of Artificial Sequence: Synthetic oligonucleotide
cucuauuguccaguucaag

SEQ ID NO: 2956696 - RNA, 19 nt, Artificial Sequence
  Description of Artificial Sequence: Synthetic oligonucleotide
gcucuggugguccgaagcg

SEQ ID NO: 2956697 - RNA, 19 nt, Artificial Sequence
  Description of Artificial Sequence: Synthetic oligonucleotide
gcuuccaagaagugccacc

SEQ ID NO: 2956698 - RNA, 19 nt, Artificial Sequence
  Description of Artificial Sequence: Synthetic oligonucleotide
cucagcuuccucgcggagc

SEQ ID NO: 2956699 - RNA, 19 nt, Artificial Sequence
  Description of Artificial Sequence: Synthetic oligonucleotide
gaagccagcaggucuggcu

SEQ ID NO: 2956700 - RNA, 19 nt, Artificial Sequence
  Description of Artificial Sequence: Synthetic oligonucleotide
gugcagaugcuacaccaga

SEQ ID NO: 2956701 - RNA, 19 nt, Artificial Sequence
  Description of Artificial Sequence: Synthetic oligonucleotide
caagcagaaguccugucua

SEQ ID NO: 2956702 - RNA, 19 nt, Artificial Sequence
  Description of Artificial Sequence: Synthetic oligonucleotide
gacgggagcauuccugcaa

SEQ ID NO: 2956703 - RNA, 19 nt, Artificial Sequence
  Description of Artificial Sequence: Synthetic oligonucleotide
uccugucuacucugacuca

SEQ ID NO: 2956704 - RNA, 19 nt, Artificial Sequence
  Description of Artificial Sequence: Synthetic oligonucleotide
acgccgaggaacugguaga

SEQ ID NO: 2956705 - RNA, 19 nt, Artificial Sequence
  Description of Artificial Sequence: Synthetic oligonucleotide
uucaagagcucuggugguc

SEQ ID NO: 2956706 - RNA, 19 nt, Artificial Sequence
  Description of Artificial Sequence: Synthetic oligonucleotide
agaagccagcaggucuggc

SEQ ID NO: 2956707 - RNA, 19 nt, Artificial Sequence
  Description of Artificial Sequence: Synthetic oligonucleotide
caggauagaacacgcaccu

SEQ ID NO: 2956708 - RNA, 19 nt, Artificial Sequence
  Description of Artificial Sequence: Synthetic oligonucleotide
  modified_base (11)..(11): a, c, u, g, unknown or other
ucguccaaggngggcagca

SEQ ID NO: 2956709 - RNA, 19 nt, Artificial Sequence
  Description of Artificial Sequence: Synthetic oligonucleotide
ggugacaaggcaggccugg

SEQ ID NO: 2956710 - RNA, 19 nt, Artificial Sequence
  Description of Artificial Sequence: Synthetic oligonucleotide
uuguccaguucaagagcuc

SEQ ID NO: 2956711 - RNA, 19 nt, Artificial Sequence
  Description of Artificial Sequence: Synthetic oligonucleotide
ucgcggagcagaagccagc

SEQ ID NO: 2956712 - RNA, 19 nt, Artificial Sequence
  Description of Artificial Sequence: Synthetic oligonucleotide
gcuacaccagacaggagcc

SEQ ID NO: 2956713 - RNA, 19 nt, Artificial Sequence
  Description of Artificial Sequence: Synthetic oligonucleotide
agcagaaguccugucuacu

SEQ ID NO: 2956714 - RNA, 19 nt, Artificial Sequence
  Description of Artificial Sequence: Synthetic oligonucleotide
uccagacuugcgguagaug

SEQ ID NO: 2956715 - RNA, 19 nt, Artificial Sequence
  Description of Artificial Sequence: Synthetic oligonucleotide
gaagugccaccuugaugac

SEQ ID NO: 2956716 - RNA, 19 nt, Artificial Sequence
  Description of Artificial Sequence: Synthetic oligonucleotide
uagauguacucagcuuccu

SEQ ID NO: 2956717 - RNA, 19 nt, Artificial Sequence
  Description of Artificial Sequence: Synthetic oligonucleotide
uggugacaaggcaggccug

SEQ ID NO: 2956718 - RNA, 19 nt, Artificial Sequence
  Description of Artificial Sequence: Synthetic oligonucleotide
ggggucaaugcguacagaa

SEQ ID NO: 2956719 - RNA, 19 nt, Artificial Sequence
  Description of Artificial Sequence: Synthetic oligonucleotide
ugcaagcagaaguccuguc

SEQ ID NO: 2956720 - RNA, 19 nt, Artificial Sequence
  Description of Artificial Sequence: Synthetic oligonucleotide
aggauagaacacgcaccuc

SEQ ID NO: 2956721 - RNA, 19 nt, Artificial Sequence
  Description of Artificial Sequence: Synthetic oligonucleotide
ugcaugcaguuaugugugu

SEQ ID NO: 2956722 - RNA, 19 nt, Artificial Sequence
  Description of Artificial Sequence: Synthetic oligonucleotide
ugacgggagcauuccugca

SEQ ID NO: 2956723 - RNA, 19 nt, Artificial Sequence
  Description of Artificial Sequence: Synthetic oligonucleotide
gguuccagacuugcgguag

SEQ ID NO: 2956724 - RNA, 19 nt, Artificial Sequence
  Description of Artificial Sequence: Synthetic oligonucleotide
gguagaccugcuuccaaga

SEQ ID NO: 2956725 - RNA, 19 nt, Artificial Sequence
  Description of Artificial Sequence: Synthetic oligonucleotide
augcguacagaaggugcag

SEQ ID NO: 2956726 - RNA, 19 nt, Artificial Sequence
  Description of Artificial Sequence: Synthetic oligonucleotide
ccugaagcuggccgaaggg

SEQ ID NO: 2956727 - RNA, 19 nt, Artificial Sequence
  Description of Artificial Sequence: Synthetic oligonucleotide
caggucuggcuccguaggc

SEQ ID NO: 2956728 - RNA, 19 nt, Artificial Sequence
  Description of Artificial Sequence: Synthetic oligonucleotide
ugaugaccgggaccacccu

SEQ ID NO: 2956729 - RNA, 19 nt, Artificial Sequence
  Description of Artificial Sequence: Synthetic oligonucleotide
acugguagaccugcuucca

SEQ ID NO: 2956730 - RNA, 19 nt, Artificial Sequence
  Description of Artificial Sequence: Synthetic oligonucleotide
aagcuggccgaagggguca

SEQ ID NO: 2956731 - RNA, 19 nt, Artificial Sequence
  Description of Artificial Sequence: Synthetic oligonucleotide
cuggugacgggagcauucc

SEQ ID NO: 2956732 - RNA, 19 nt, Artificial Sequence
  Description of Artificial Sequence: Synthetic oligonucleotide
gucuacucugacucacaga

SEQ ID NO: 2956733 - RNA, 19 nt, Artificial Sequence
  Description of Artificial Sequence: Synthetic oligonucleotide
ggaucugcagcguggugac

SEQ ID NO: 2956734 - RNA, 19 nt, Artificial Sequence
  Description of Artificial Sequence: Synthetic oligonucleotide
gcagaugcuacaccagaca

SEQ ID NO: 2956735 - RNA, 19 nt, Artificial Sequence
  Description of Artificial Sequence: Synthetic oligonucleotide
guagaccugcuuccaagaa

SEQ ID NO: 2956736 - RNA, 19 nt, Artificial Sequence
  Description of Artificial Sequence: Synthetic oligonucleotide
uggugacgggagcauuccu

SEQ ID NO: 2956737 - RNA, 19 nt, Artificial Sequence
  Description of Artificial Sequence: Synthetic oligonucleotide
acagaaggugcagaugcua

SEQ ID NO: 2956738 - RNA, 19 nt, Artificial Sequence
  Description of Artificial Sequence: Synthetic oligonucleotide
ggugacgggagcauuccug

SEQ ID NO: 2956739 - RNA, 19 nt, Artificial Sequence
  Description of Artificial Sequence: Synthetic oligonucleotide
ugcuuccaagaagugccac

SEQ ID NO: 2956740 - RNA, 19 nt, Artificial Sequence
  Description of Artificial Sequence: Synthetic oligonucleotide
gggucaaugcguacagaag

SEQ ID NO: 2956741 - RNA, 19 nt, Artificial Sequence
  Description of Artificial Sequence: Synthetic oligonucleotide
gaagcuggccgaagggguc

SEQ ID NO: 2956742 - RNA, 19 nt, Artificial Sequence
  Description of Artificial Sequence: Synthetic oligonucleotide
gcagaaguccugucuacuc

SEQ ID NO: 2956743 - RNA, 19 nt, Artificial Sequence
  Description of Artificial Sequence: Synthetic oligonucleotide
acaccagacaggagccggg

SEQ ID NO: 2956744 - RNA, 19 nt, Artificial Sequence
  Description of Artificial Sequence: Synthetic oligonucleotide
ucuggcuccguaggcugug

SEQ ID NO: 2956745 - RNA, 19 nt, Artificial Sequence
  Description of Artificial Sequence: Synthetic oligonucleotide
gaaguccugucuacucuga

SEQ ID NO: 2956746 - RNA, 19 nt, Artificial Sequence
  Description of Artificial Sequence: Synthetic oligonucleotide
cugcagcguggugacaagg

SEQ ID NO: 2956747 - RNA, 19 nt, Artificial Sequence
  Description of Artificial Sequence: Synthetic oligonucleotide
acucagcuuccucgcggag

SEQ ID NO: 2956748 - RNA, 19 nt, Artificial Sequence
  Description of Artificial Sequence: Synthetic oligonucleotide
ccugcaagcagaaguccug

SEQ ID NO: 2956749 - RNA, 19 nt, Artificial Sequence
  Description of Artificial Sequence: Synthetic oligonucleotide
ggucuggcuccguaggcug

SEQ ID NO: 2956750 - RNA, 19 nt, Artificial Sequence
  Description of Artificial Sequence: Synthetic oligonucleotide
uaggcugugcaugcaguua

SEQ ID NO: 2956751 - RNA, 19 nt, Artificial Sequence
  Description of Artificial Sequence: Synthetic oligonucleotide
ggugcagaugcuacaccag

SEQ ID NO: 2956752 - RNA, 19 nt, Artificial Sequence
  Description of Artificial Sequence: Synthetic oligonucleotide
aagagcucuggugguccga

SEQ ID NO: 2956753 - RNA, 19 nt, Artificial Sequence
  Description of Artificial Sequence: Synthetic oligonucleotide
gaccgggaccacccugaag

SEQ ID NO: 2956754 - RNA, 19 nt, Artificial Sequence
  Description of Artificial Sequence: Synthetic oligonucleotide
cuggccgaaggggucaaug

SEQ ID NO: 2956755 - RNA, 19 nt, Artificial Sequence
  Description of Artificial Sequence: Synthetic oligonucleotide
augaccgggaccacccuga

SEQ ID NO: 2956756 - RNA, 19 nt, Artificial Sequence
  Description of Artificial Sequence: Synthetic oligonucleotide
cuuccaagaagugccaccu

SEQ ID NO: 2956757 - RNA, 19 nt, Artificial Sequence
  Description of Artificial Sequence: Synthetic oligonucleotide
gugugucaggauagaacac

SEQ ID NO: 2956758 - RNA, 19 nt, Artificial Sequence
  Description of Artificial Sequence: Synthetic oligonucleotide
caccagacaggagccgggg

SEQ ID NO: 2956759 - RNA, 19 nt, Artificial Sequence
  Description of Artificial Sequence: Synthetic oligonucleotide
uggcuccguaggcugugca

SEQ ID NO: 2956760 - RNA, 19 nt, Artificial Sequence
  Description of Artificial Sequence: Synthetic oligonucleotide
aggucuggcuccguaggcu

SEQ ID NO: 2956761 - RNA, 19 nt, Artificial Sequence
  Description of Artificial Sequence: Synthetic oligonucleotide
guccaguucaagagcucug

SEQ ID NO: 2956762 - RNA, 19 nt, Artificial Sequence
  Description of Artificial Sequence: Synthetic oligonucleotide
gagcucuggugguccgaag

SEQ ID NO: 2956763 - RNA, 19 nt, Artificial Sequence
  Description of Artificial Sequence: Synthetic oligonucleotide
guccgaagcgauugucguc

SEQ ID NO: 2956764 - RNA, 19 nt, Artificial Sequence
  Description of Artificial Sequence: Synthetic oligonucleotide
uuccaagaagugccaccuu

SEQ ID NO: 2956765 - RNA, 19 nt, Artificial Sequence
  Description of Artificial Sequence: Synthetic oligonucleotide
ggcuggaucugcagcgugg

SEQ ID NO: 2956766 - RNA, 19 nt, Artificial Sequence
  Description of Artificial Sequence: Synthetic oligonucleotide
ccagacuugcgguagaugu

SEQ ID NO: 2956767 - RNA, 19 nt, Artificial Sequence
  Description of Artificial Sequence: Synthetic oligonucleotide
gucaaugcguacagaaggu

SEQ ID NO: 2956768 - RNA, 19 nt, Artificial Sequence
  Description of Artificial Sequence: Synthetic oligonucleotide
cugucuacucugacucaca

SEQ ID NO: 2956769 - RNA, 19 nt, Artificial Sequence
  Description of Artificial Sequence: Synthetic oligonucleotide
guucaagagcucugguggu

SEQ ID NO: 2956770 - RNA, 19 nt, Artificial Sequence
  Description of Artificial Sequence: Synthetic oligonucleotide
agcuuccucgcggagcaga

SEQ ID NO: 2956771 - RNA, 19 nt, Artificial Sequence
  Description of Artificial Sequence: Synthetic oligonucleotide
cccugaagcuggccgaagg

SEQ ID NO: 2956772 - RNA, 19 nt, Artificial Sequence
  Description of Artificial Sequence: Synthetic oligonucleotide
cagaaguccugucuacucu

SEQ ID NO: 2956773 - RNA, 19 nt, Artificial Sequence
  Description of Artificial Sequence: Synthetic oligonucleotide
guuccagacuugcgguaga

SEQ ID NO: 2956774 - RNA, 19 nt, Artificial Sequence
  Description of Artificial Sequence: Synthetic oligonucleotide
cagaagccagcaggucugg

SEQ ID NO: 2956775 - RNA, 19 nt, Artificial Sequence
  Description of Artificial Sequence: Synthetic oligonucleotide
acucuauuguccaguucaa

SEQ ID NO: 2956776 - RNA, 19 nt, Artificial Sequence
  Description of Artificial Sequence: Synthetic oligonucleotide
gcaagcagaaguccugucu

SEQ ID NO: 2956777 - RNA, 19 nt, Artificial Sequence
  Description of Artificial Sequence: Synthetic oligonucleotide
uuccagacuugcgguagau

SEQ ID NO: 2956778 - RNA, 19 nt, Artificial Sequence
  Description of Artificial Sequence: Synthetic oligonucleotide
caggccuggugacgggagc

SEQ ID NO: 2956779 - RNA, 19 nt, Artificial Sequence
  Description of Artificial Sequence: Synthetic oligonucleotide
gaccugcuuccaagaagug

SEQ ID NO: 2956780 - RNA, 19 nt, Artificial Sequence
  Description of Artificial Sequence: Synthetic oligonucleotide
gcuccguaggcugugcaug

SEQ ID NO: 2956781 - RNA, 19 nt, Artificial Sequence
  Description of Artificial Sequence: Synthetic oligonucleotide
cauauggaacgccgaggaa

SEQ ID NO: 2956782 - RNA, 19 nt, Artificial Sequence
  Description of Artificial Sequence: Synthetic oligonucleotide
  modified_base (9)..(9): a, c, u, g, unknown or other
guccaaggngggcagcaua

SEQ ID NO: 2956783 - RNA, 19 nt, Artificial Sequence
  Description of Artificial Sequence: Synthetic oligonucleotide
agagcucuggugguccgaa

SEQ ID NO: 2956784 - RNA, 19 nt, Artificial Sequence
  Description of Artificial Sequence: Synthetic oligonucleotide
ccuggugacgggagcauuc

SEQ ID NO: 2956785 - RNA, 19 nt, Artificial Sequence
  Description of Artificial Sequence: Synthetic oligonucleotide
cagacuugcgguagaugua

SEQ ID NO: 2956786 - RNA, 19 nt, Artificial Sequence
  Description of Artificial Sequence: Synthetic oligonucleotide
uccguaggcugugcaugca

SEQ ID NO: 2956787 - RNA, 19 nt, Artificial Sequence
  Description of Artificial Sequence: Synthetic oligonucleotide
ccugucuacucugacucac

SEQ ID NO: 2956788 - RNA, 19 nt, Artificial Sequence
  Description of Artificial Sequence: Synthetic oligonucleotide
ccaagaagugccaccuuga

SEQ ID NO: 2956789 - RNA, 19 nt, Artificial Sequence
  Description of Artificial Sequence: Synthetic oligonucleotide
ugaccgggaccacccugaa

SEQ ID NO: 2956790 - RNA, 19 nt, Artificial Sequence
  Description of Artificial Sequence: Synthetic oligonucleotide
cugcuuccaagaagugcca

SEQ ID NO: 2956791 - RNA, 19 nt, Artificial Sequence
  Description of Artificial Sequence: Synthetic oligonucleotide
cuggaucugcagcguggug

SEQ ID NO: 2956792 - RNA, 19 nt, Artificial Sequence
  Description of Artificial Sequence: Synthetic oligonucleotide
aggccuggugacgggagca

SEQ ID NO: 2956793 - RNA, 19 nt, Artificial Sequence
  Description of Artificial Sequence: Synthetic oligonucleotide
gcagcguggugacaaggca

SEQ ID NO: 2956794 - RNA, 19 nt, Artificial Sequence
  Description of Artificial Sequence: Synthetic oligonucleotide
gggagcauuccugcaagca

SEQ ID NO: 2956795 - RNA, 19 nt, Artificial Sequence
  Description of Artificial Sequence: Synthetic oligonucleotide
  modified_base (3)..(3): a, c, u, g, unknown or other
ggngggcagcauauggaac

SEQ ID NO: 2956796 - RNA, 19 nt, Artificial Sequence
  Description of Artificial Sequence: Synthetic oligonucleotide
cuuccucgcggagcagaag

SEQ ID NO: 2956797 - RNA, 19 nt, Artificial Sequence
  Description of Artificial Sequence: Synthetic oligonucleotide
gguccgaagcgauugucgu

SEQ ID NO: 2956798 - RNA, 19 nt, Artificial Sequence
  Description of Artificial Sequence: Synthetic oligonucleotide
gugguccgaagcgauuguc

SEQ ID NO: 2956799 - RNA, 19 nt, Artificial Sequence
  Description of Artificial Sequence: Synthetic oligonucleotide
gcgguagauguacucagcu

SEQ ID NO: 2956800 - RNA, 19 nt, Artificial Sequence
  Description of Artificial Sequence: Synthetic oligonucleotide
auggaacgccgaggaacug

SEQ ID NO: 2956801 - RNA, 19 nt, Artificial Sequence
  Description of Artificial Sequence: Synthetic oligonucleotide
cucuggugguccgaagcga

SEQ ID NO: 2956802 - RNA, 19 nt, Artificial Sequence
  Description of Artificial Sequence: Synthetic oligonucleotide
gcaugcaguuauguguguc

SEQ ID NO: 2956803 - RNA, 19 nt, Artificial Sequence
  Description of Artificial Sequence: Synthetic oligonucleotide
cugguagaccugcuuccaa

SEQ ID NO: 2956804 - RNA, 19 nt, Artificial Sequence
  Description of Artificial Sequence: Synthetic oligonucleotide
gugccaccuugaugaccgg

SEQ ID NO: 2956805 - RNA, 19 nt, Artificial Sequence
  Description of Artificial Sequence: Synthetic oligonucleotide
guaggcugugcaugcaguu

SEQ ID NO: 2956806 - RNA, 19 nt, Artificial Sequence
  Description of Artificial Sequence: Synthetic oligonucleotide
caagaagugccaccuugau

SEQ ID NO: 2956807 - RNA, 19 nt, Artificial Sequence
  Description of Artificial Sequence: Synthetic oligonucleotide
ccguaggcugugcaugcag

SEQ ID NO: 2956808 - RNA, 19 nt, Artificial Sequence
  Description of Artificial Sequence: Synthetic oligonucleotide
ccaccuugaugaccgggac

SEQ ID NO: 2956809 - RNA, 19 nt, Artificial Sequence
  Description of Artificial Sequence: Synthetic oligonucleotide
aggggucaaugcguacaga

SEQ ID NO: 2956810 - RNA, 19 nt, Artificial Sequence
  Description of Artificial Sequence: Synthetic oligonucleotide
gaccacccugaagcuggcc

SEQ ID NO: 2956811 - RNA, 19 nt, Artificial Sequence
  Description of Artificial Sequence: Synthetic oligonucleotide
acccugaagcuggccgaag

SEQ ID NO: 2956812 - RNA, 19 nt, Artificial Sequence
  Description of Artificial Sequence: Synthetic oligonucleotide
ggagcagaagccagcaggu

SEQ ID NO: 2956813 - RNA, 19 nt, Artificial Sequence
  Description of Artificial Sequence: Synthetic oligonucleotide
  modified_base (12)..(12): a, c, u, g, unknown or other
gucguccaaggngggcagc

SEQ ID NO: 2956814 - RNA, 19 nt, Artificial Sequence
  Description of Artificial Sequence: Synthetic oligonucleotide
gggguuccagacuugcggu

SEQ ID NO: 2956815 - RNA, 19 nt, Artificial Sequence
  Description of Artificial Sequence: Synthetic oligonucleotide
gccaccuugaugaccggga

SEQ ID NO: 2956816 - RNA, 19 nt, Artificial Sequence
  Description of Artificial Sequence: Synthetic oligonucleotide
cuggcuccguaggcugugc

SEQ ID NO: 2956817 - RNA, 19 nt, Artificial Sequence
  Description of Artificial Sequence: Synthetic oligonucleotide
augcuacaccagacaggag

SEQ ID NO: 2956818 - RNA, 19 nt, Artificial Sequence
  Description of Artificial Sequence: Synthetic oligonucleotide
cgaggaacugguagaccug

SEQ ID NO: 2956819 - RNA, 19 nt, Artificial Sequence
  Description of Artificial Sequence: Synthetic oligonucleotide
cguacagaaggugcagaug

SEQ ID NO: 2956820 - RNA, 19 nt, Artificial Sequence
  Description of Artificial Sequence: Synthetic oligonucleotide
  modified_base (7)..(7): a, c, u, g, unknown or other
ccaaggngggcagcauaug

SEQ ID NO: 2956821 - RNA, 19 nt, Artificial Sequence
  Description of Artificial Sequence: Synthetic oligonucleotide
cguggugacaaggcaggcc

SEQ ID NO: 2956822 - RNA, 19 nt, Artificial Sequence
  Description of Artificial Sequence: Synthetic oligonucleotide
gcggagcagaagccagcag

SEQ ID NO: 2956823 - RNA, 19 nt, Artificial Sequence
  Description of Artificial Sequence: Synthetic oligonucleotide
gaucugcagcguggugaca

SEQ ID NO: 2956824 - RNA, 19 nt, Artificial Sequence
  Description of Artificial Sequence: Synthetic oligonucleotide
gcaggccuggugacgggag

SEQ ID NO: 2956825 - RNA, 19 nt, Artificial Sequence
  Description of Artificial Sequence: Synthetic oligonucleotide
ggcugugcaugcaguuaug

SEQ ID NO: 2956826 - RNA, 19 nt, Artificial Sequence
  Description of Artificial Sequence: Synthetic oligonucleotide
cugcaagcagaaguccugu

SEQ ID NO: 2956827 - RNA, 19 nt, Artificial Sequence
  Description of Artificial Sequence: Synthetic oligonucleotide
gccgaggaacugguagacc

SEQ ID NO: 2956828 - RNA, 19 nt, Artificial Sequence
  Description of Artificial Sequence: Synthetic oligonucleotide
caguuaugugugucaggau

SEQ ID NO: 2956829 - RNA, 19 nt, Artificial Sequence
  Description of Artificial Sequence: Synthetic oligonucleotide
gcugugcaugcaguuaugu

SEQ ID NO: 2956830 - RNA, 19 nt, Artificial Sequence
  Description of Artificial Sequence: Synthetic oligonucleotide
ccacccugaagcuggccga

SEQ ID NO: 2956831 - RNA, 19 nt, Artificial Sequence
  Description of Artificial Sequence: Synthetic oligonucleotide
ggguuccagacuugcggua

SEQ ID NO: 2956832 - RNA, 19 nt, Artificial Sequence
  Description of Artificial Sequence: Synthetic oligonucleotide
ggaacgccgaggaacuggu

SEQ ID NO: 2956833 - RNA, 19 nt, Artificial Sequence
  Description of Artificial Sequence: Synthetic oligonucleotide
gccgaaggggucaaugcgu

SEQ ID NO: 2956834 - RNA, 19 nt, Artificial Sequence
  Description of Artificial Sequence: Synthetic oligonucleotide
cgaaggggucaaugcguac

SEQ ID NO: 2956835 - RNA, 19 nt, Artificial Sequence
  Description of Artificial Sequence: Synthetic oligonucleotide
ccccaggcuggaucugcag

SEQ ID NO: 2956836 - RNA, 19 nt, Artificial Sequence
  Description of Artificial Sequence: Synthetic oligonucleotide
ggugguccgaagcgauugu

SEQ ID NO: 2956837 - RNA, 19 nt, Artificial Sequence
  Description of Artificial Sequence: Synthetic oligonucleotide
ccgaaggggucaaugcgua

SEQ ID NO: 2956838 - RNA, 19 nt, Artificial Sequence
  Description of Artificial Sequence: Synthetic oligonucleotide
cgggagcauuccugcaagc

SEQ ID NO: 2956839 - RNA, 19 nt, Artificial Sequence
  Description of Artificial Sequence: Synthetic oligonucleotide
gcguggugacaaggcaggc

SEQ ID NO: 2956840 - RNA, 19 nt, Artificial Sequence
  Description of Artificial Sequence: Synthetic oligonucleotide
cagcaggucuggcuccgua

SEQ ID NO: 2956841 - RNA, 19 nt, Artificial Sequence
  Description of Artificial Sequence: Synthetic oligonucleotide
gaacgccgaggaacuggua

SEQ ID NO: 2956842 - RNA, 19 nt, Artificial Sequence
  Description of Artificial Sequence: Synthetic oligonucleotide
cacccugaagcuggccgaa

SEQ ID NO: 2956843 - RNA, 19 nt, Artificial Sequence
  Description of Artificial Sequence: Synthetic oligonucleotide
ggcaggccuggugacggga

SEQ ID NO: 2956844 - RNA, 19 nt, Artificial Sequence
  Description of Artificial Sequence: Synthetic oligonucleotide
agcuggccgaaggggucaa

SEQ ID NO: 2956845 - RNA, 19 nt, Artificial Sequence
  Description of Artificial Sequence: Synthetic oligonucleotide
ggaccacccugaagcuggc

SEQ ID NO: 2956846 - RNA, 19 nt, Artificial Sequence
  Description of Artificial Sequence: Synthetic oligonucleotide
gcuggaucugcagcguggu

SEQ ID NO: 2956847 - RNA, 19 nt, Artificial Sequence
  Description of Artificial Sequence: Synthetic oligonucleotide
ggcuccguaggcugugcau

SEQ ID NO: 2956848 - RNA, 19 nt, Artificial Sequence
  Description of Artificial Sequence: Synthetic oligonucleotide
gugugacaauauacucuau

SEQ ID NO: 2956849 - RNA, 19 nt, Artificial Sequence
  Description of Artificial Sequence: Synthetic oligonucleotide
gcuuccucgcggagcagaa

SEQ ID NO: 2956850 - RNA, 19 nt, Artificial Sequence
  Description of Artificial Sequence: Synthetic oligonucleotide
cgccgaggaacugguagac

SEQ ID NO: 2956851 - RNA, 19 nt, Artificial Sequence
  Description of Artificial Sequence: Synthetic oligonucleotide
cuggugguccgaagcgauu

SEQ ID NO: 2956852 - RNA, 19 nt, Artificial Sequence
  Description of Artificial Sequence: Synthetic oligonucleotide
ccucgcggagcagaagcca

SEQ ID NO: 2956853 - RNA, 19 nt, Artificial Sequence
  Description of Artificial Sequence: Synthetic oligonucleotide
gucuggcuccguaggcugu

SEQ ID NO: 2956854 - RNA, 19 nt, Artificial Sequence
  Description of Artificial Sequence: Synthetic oligonucleotide
ccaguucaagagcucuggu

SEQ ID NO: 2956855 - RNA, 19 nt, Artificial Sequence
  Description of Artificial Sequence: Synthetic oligonucleotide
caggcuggaucugcagcgu

SEQ ID NO: 2956856 - RNA, 19 nt, Artificial Sequence
  Description of Artificial Sequence: Synthetic oligonucleotide
ccuugaugaccgggaccac

SEQ ID NO: 2956857 - RNA, 19 nt, Artificial Sequence
  Description of Artificial Sequence: Synthetic oligonucleotide
cguaggcugugcaugcagu

SEQ ID NO: 2956858 - RNA, 19 nt, Artificial Sequence
  Description of Artificial Sequence: Synthetic oligonucleotide
ccgaagcgauugucgucca

SEQ ID NO: 2956859 - RNA, 19 nt, Artificial Sequence
  Description of Artificial Sequence: Synthetic oligonucleotide
cgggaccacccugaagcug

SEQ ID NO: 2956860 - RNA, 19 nt, Artificial Sequence
  Description of Artificial Sequence: Synthetic oligonucleotide
cgcggagcagaagccagca

SEQ ID NO: 2956861 - RNA, 19 nt, Artificial Sequence
  Description of Artificial Sequence: Synthetic oligonucleotide
cgguagauguacucagcuu

SEQ ID NO: 2956862 - RNA, 19 nt, Artificial Sequence
  Description of Artificial Sequence: Synthetic oligonucleotide
ccgggaccacccugaagcu

SEQ ID NO: 2956863 - RNA, 19 nt, Artificial Sequence
  Description of Artificial Sequence: Synthetic oligonucleotide
cgaagcgauugucguccaa

SEQ ID NO: 2956864 - RNA, 19 nt, Artificial Sequence
  Description of Artificial Sequence: Synthetic oligonucleotide
ggccuggugacgggagcau

SEQ ID NO: 2956865 - RNA, 19 nt, Artificial Sequence
  Description of Artificial Sequence: Synthetic oligonucleotide
gccuggugacgggagcauu

SEQ ID NO: 2956866 - RNA, 19 nt, Artificial Sequence
  Description of Artificial Sequence: Synthetic oligonucleotide
  modified_base (10)..(10): a, c, u, g, unknown or other
cguccaaggngggcagcau

SEQ ID NO: 2956867 - RNA, 19 nt, Artificial Sequence
  Description of Artificial Sequence: Synthetic oligonucleotide
gcuggccgaaggggucaau

SEQ ID NO: 2956868 - RNA, 19 nt, Artificial Sequence
  Description of Artificial Sequence: Synthetic oligonucleotide
ccagcaggucuggcuccgu

SEQ ID NO: 2956869 - RNA, 19 nt, Artificial Sequence
  Description of Artificial Sequence: Synthetic oligonucleotide
  modified_base (1)..(1): a, c, u, g, unknown or other
ngggcagcauauggaacgc

SEQ ID NO: 2956870 - RNA, 19 nt, Artificial Sequence
  Description of Artificial Sequence: Synthetic oligonucleotide
aaggucauguuacagaugg

SEQ ID NO: 2956871 - RNA, 19 nt, Artificial Sequence
  Description of Artificial Sequence: Synthetic oligonucleotide
uaucucuucacuuuguugg

SEQ ID NO: 2956872 - RNA, 19 nt, Artificial Sequence
  Description of Artificial Sequence: Synthetic oligonucleotide
ucagagaucagcauggcgc

SEQ ID NO: 2956873 - RNA, 19 nt, Artificial Sequence
  Description of Artificial Sequence: Synthetic oligonucleotide
aaaaggucauguuacagau

SEQ ID NO: 2956874 - RNA, 19 nt, Artificial Sequence
  Description of Artificial Sequence: Synthetic oligonucleotide
ucugcugcucuucugaucu

SEQ ID NO: 2956875 - RNA, 19 nt, Artificial Sequence
  Description of Artificial Sequence: Synthetic oligonucleotide
gaucauguacuccacuucc

SEQ ID NO: 2956876 - RNA, 19 nt, Artificial Sequence
  Description of Artificial Sequence: Synthetic oligonucleotide
auguacuccacuuccuccc

SEQ ID NO: 2956877 - RNA, 19 nt, Artificial Sequence
  Description of Artificial Sequence: Synthetic oligonucleotide
ucugagucgagucucuuca

SEQ ID NO: 2956878 - RNA, 19 nt, Artificial Sequence
  Description of Artificial Sequence: Synthetic oligonucleotide
uagugugccagcuucuggg

SEQ ID NO: 2956879 - RNA, 19 nt, Artificial Sequence
  Description of Artificial Sequence: Synthetic oligonucleotide
gaaaaggucauguuacaga

SEQ ID NO: 2956880 - RNA, 19 nt, Artificial Sequence
  Description of Artificial Sequence: Synthetic oligonucleotide
ugcucuucugaucugaguc

SEQ ID NO: 2956881 - RNA, 19 nt, Artificial Sequence
  Description of Artificial Sequence: Synthetic oligonucleotide
ucgaagugcaguccguccg

SEQ ID NO: 2956882 - RNA, 19 nt, Artificial Sequence
  Description of Artificial Sequence: Synthetic oligonucleotide
uucuucuggaucauguacu

SEQ ID NO: 2956883 - RNA, 19 nt, Artificial Sequence
  Description of Artificial Sequence: Synthetic oligonucleotide
uuacagauggggcagcagu

SEQ ID NO: 2956884 - RNA, 19 nt, Artificial Sequence
  Description of Artificial Sequence: Synthetic oligonucleotide
uuuuagucgucuccauucc

SEQ ID NO: 2956885 - RNA, 19 nt, Artificial Sequence
  Description of Artificial Sequence: Synthetic oligonucleotide
gacucagagaucagcaugg

SEQ ID NO: 2956886 - RNA, 19 nt, Artificial Sequence
  Description of Artificial Sequence: Synthetic oligonucleotide
auugcuagguaucucuuca

SEQ ID NO: 2956887 - RNA, 19 nt, Artificial Sequence
  Description of Artificial Sequence: Synthetic oligonucleotide
  modified_base (2)..(2): a, c, u, g, unknown or other
gnggaaaaggucauguuac

SEQ ID NO: 2956888 - RNA, 19 nt, Artificial Sequence
  Description of Artificial Sequence: Synthetic oligonucleotide
  modified_base (17)..(17): a, c, u, g, unknown or other
ugagccacaacaggggngg

SEQ ID NO: 2956889 - RNA, 19 nt, Artificial Sequence
  Description of Artificial Sequence: Synthetic oligonucleotide
  modified_base (11)..(11): a, c, u, g, unknown or other
acaacaggggnggaaaagg

SEQ ID NO: 2956890 - RNA, 19 nt, Artificial Sequence
  Description of Artificial Sequence: Synthetic oligonucleotide
uucaccuccccuuuuaguc

SEQ ID NO: 2956891 - RNA, 19 nt, Artificial Sequence
  Description of Artificial Sequence: Synthetic oligonucleotide
uggauugcuagguaucucu

SEQ ID NO: 2956892 - RNA, 19 nt, Artificial Sequence
  Description of Artificial Sequence: Synthetic oligonucleotide
agugcaguccguccgguuc

SEQ ID NO: 2956893 - RNA, 19 nt, Artificial Sequence
  Description of Artificial Sequence: Synthetic oligonucleotide
ucugaucugagucgagucu

SEQ ID NO: 2956894 - RNA, 19 nt, Artificial Sequence
  Description of Artificial Sequence: Synthetic oligonucleotide
cagacuuugcacugggugc

SEQ ID NO: 2956895 - RNA, 19 nt, Artificial Sequence
  Description of Artificial Sequence: Synthetic oligonucleotide
agucgucuccauuccaugg

SEQ ID NO: 2956896 - RNA, 19 nt, Artificial Sequence
  Description of Artificial Sequence: Synthetic oligonucleotide
ucaccuccccuuuuagucg

SEQ ID NO: 2956897 - RNA, 19 nt, Artificial Sequence
  Description of Artificial Sequence: Synthetic oligonucleotide
cagguagugcgacugagcc

SEQ ID NO: 2956898 - RNA, 19 nt, Artificial Sequence
  Description of Artificial Sequence: Synthetic oligonucleotide
uuugcucugguagugugcc

SEQ ID NO: 2956899 - RNA, 19 nt, Artificial Sequence
  Description of Artificial Sequence: Synthetic oligonucleotide
ugagucgagucucuucacc

SEQ ID NO: 2956900 - RNA, 19 nt, Artificial Sequence
  Description of Artificial Sequence: Synthetic oligonucleotide
ugcgacugagccacaacag

SEQ ID NO: 2956901 - RNA, 19 nt, Artificial Sequence
  Description of Artificial Sequence: Synthetic oligonucleotide
  modified_base (9)..(9): a, c, u, g, unknown or other
aacaggggnggaaaagguc

SEQ ID NO: 2956902 - RNA, 19 nt, Artificial Sequence
  Description of Artificial Sequence: Synthetic oligonucleotide
cauguacuccacuuccucc

SEQ ID NO: 2956903 - RNA, 19 nt, Artificial Sequence
  Description of Artificial Sequence: Synthetic oligonucleotide
uguacuccacuuccucccg

SEQ ID NO: 2956904 - RNA, 19 nt, Artificial Sequence
  Description of Artificial Sequence: Synthetic oligonucleotide
ugguucuugucuuugcuuc

SEQ ID NO: 2956905 - RNA, 19 nt, Artificial Sequence
  Description of Artificial Sequence: Synthetic oligonucleotide
uucugggacucagagauca

SEQ ID NO: 2956906 - RNA, 19 nt, Artificial Sequence
  Description of Artificial Sequence: Synthetic oligonucleotide
gucuccauuccauggauug

SEQ ID NO: 2956907 - RNA, 19 nt, Artificial Sequence
  Description of Artificial Sequence: Synthetic oligonucleotide
guucuucuggaucauguac

SEQ ID NO: 2956908 - RNA, 19 nt, Artificial Sequence
  Description of Artificial Sequence: Synthetic oligonucleotide
accggacacagcuuccagc

SEQ ID NO: 2956909 - RNA, 19 nt, Artificial Sequence
  Description of Artificial Sequence: Synthetic oligonucleotide
ggucauguuacagaugggg

SEQ ID NO: 2956910 - RNA, 19 nt, Artificial Sequence
  Description of Artificial Sequence: Synthetic oligonucleotide
acacugguucuucuggauc

SEQ ID NO: 2956911 - RNA, 19 nt, Artificial Sequence
  Description of Artificial Sequence: Synthetic oligonucleotide
guaucucuucacuuuguug

SEQ ID NO: 2956912 - RNA, 19 nt, Artificial Sequence
  Description of Artificial Sequence: Synthetic oligonucleotide
uuuagucgucuccauucca

SEQ ID NO: 2956913 - RNA, 19 nt, Artificial Sequence
  Description of Artificial Sequence: Synthetic oligonucleotide
cacagcuuccagcaggcgg

SEQ ID NO: 2956914 - RNA, 19 nt, Artificial Sequence
  Description of Artificial Sequence: Synthetic oligonucleotide
uuagucgucuccauuccau

SEQ ID NO: 2956915 - RNA, 19 nt, Artificial Sequence
  Description of Artificial Sequence: Synthetic oligonucleotide
uccccuuuuagucgucucc

SEQ ID NO: 2956916 - RNA, 19 nt, Artificial Sequence
  Description of Artificial Sequence: Synthetic oligonucleotide
ucuucaccuccccuuuuag

SEQ ID NO: 2956917 - RNA, 19 nt, Artificial Sequence
  Description of Artificial Sequence: Synthetic oligonucleotide
ugcuagguaucucuucacu

SEQ ID NO: 2956918 - RNA, 19 nt, Artificial Sequence
  Description of Artificial Sequence: Synthetic oligonucleotide
ucauguacuccacuuccuc

SEQ ID NO: 2956919 - RNA, 19 nt, Artificial Sequence
  Description of Artificial Sequence: Synthetic oligonucleotide
uccacuuccucccgccccg

SEQ ID NO: 2956920 - RNA, 19 nt, Artificial Sequence
  Description of Artificial Sequence: Synthetic oligonucleotide
uccauggauugcuagguau

SEQ ID NO: 2956921 - RNA, 19 nt, Artificial Sequence
  Description of Artificial Sequence: Synthetic oligonucleotide
aucugagucgagucucuuc

SEQ ID NO: 2956922 - RNA, 19 nt, Artificial Sequence
  Description of Artificial Sequence: Synthetic oligonucleotide
ugcuggugaagagacacug

SEQ ID NO: 2956923 - RNA, 19 nt, Artificial Sequence
  Description of Artificial Sequence: Synthetic oligonucleotide
agagacacugguucuucug

SEQ ID NO: 2956924 - RNA, 19 nt, Artificial Sequence
  Description of Artificial Sequence: Synthetic oligonucleotide
uucugaucugagucgaguc

SEQ ID NO: 2956925 - RNA, 19 nt, Artificial Sequence
  Description of Artificial Sequence: Synthetic oligonucleotide
cucagagaucagcauggcg

SEQ ID NO: 2956926 - RNA, 19 nt, Artificial Sequence
  Description of Artificial Sequence: Synthetic oligonucleotide
aguccguccgguuccggac

SEQ ID NO: 2956927 - RNA, 19 nt, Artificial Sequence
  Description of Artificial Sequence: Synthetic oligonucleotide
agucgagucucuucaccuc

SEQ ID NO: 2956928 - RNA, 19 nt, Artificial Sequence
  Description of Artificial Sequence: Synthetic oligonucleotide
uggaucauguacuccacuu

SEQ ID NO: 2956929 - RNA, 19 nt, Artificial Sequence
  Description of Artificial Sequence: Synthetic oligonucleotide
gauugcuagguaucucuuc

SEQ ID NO: 2956930 - RNA, 19 nt, Artificial Sequence
  Description of Artificial Sequence: Synthetic oligonucleotide
aagagacacugguucuucu

SEQ ID NO: 2956931 - RNA, 19 nt, Artificial Sequence
  Description of Artificial Sequence: Synthetic oligonucleotide
ugcucugguagugugccag

SEQ ID NO: 2956932 - RNA, 19 nt, Artificial Sequence
  Description of Artificial Sequence: Synthetic oligonucleotide
gucauguuacagauggggc

SEQ ID NO: 2956933 - RNA, 19 nt, Artificial Sequence
  Description of Artificial Sequence: Synthetic oligonucleotide
ugugccagcuucugggacu

SEQ ID NO: 2956934 - RNA, 19 nt, Artificial Sequence
  Description of Artificial Sequence: Synthetic oligonucleotide
agugcgacugagccacaac

SEQ ID NO: 2956935 - RNA, 19 nt, Artificial Sequence
  Description of Artificial Sequence: Synthetic oligonucleotide
ggacacagcuuccagcagg

SEQ ID NO: 2956936 - RNA, 19 nt, Artificial Sequence
  Description of Artificial Sequence: Synthetic oligonucleotide
guagugugccagcuucugg

SEQ ID NO: 2956937 - RNA, 19 nt, Artificial Sequence
  Description of Artificial Sequence: Synthetic oligonucleotide
auuccauggauugcuaggu

SEQ ID NO: 2956938 - RNA, 19 nt, Artificial Sequence
  Description of Artificial Sequence: Synthetic oligonucleotide
cugguagugugccagcuuc

SEQ ID NO: 2956939 - RNA, 19 nt, Artificial Sequence
  Description of Artificial Sequence: Synthetic oligonucleotide
  modified_base (8)..(8): a, c, u, g, unknown or other
acaggggnggaaaagguca

SEQ ID NO: 2956940 - RNA, 19 nt, Artificial Sequence
  Description of Artificial Sequence: Synthetic oligonucleotide
gguagugcgacugagccac

SEQ ID NO: 2956941 - RNA, 19 nt, Artificial Sequence
  Description of Artificial Sequence: Synthetic oligonucleotide
ucagcauggcgcagcagac

SEQ ID NO: 2956942 - RNA, 19 nt, Artificial Sequence
  Description of Artificial Sequence: Synthetic oligonucleotide
  modified_base (19)..(19): a, c, u, g, unknown or other
acugagccacaacaggggn

SEQ ID NO: 2956943 - RNA, 19 nt, Artificial Sequence
  Description of Artificial Sequence: Synthetic oligonucleotide
ucuucugaucugagucgag

SEQ ID NO: 2956944 - RNA, 19 nt, Artificial Sequence
  Description of Artificial Sequence: Synthetic oligonucleotide
gucgagucucuucaccucc

SEQ ID NO: 2956945 - RNA, 19 nt, Artificial Sequence
  Description of Artificial Sequence: Synthetic oligonucleotide
gcagacuuugcacugggug

SEQ ID NO: 2956946 - RNA, 19 nt, Artificial Sequence
  Description of Artificial Sequence: Synthetic oligonucleotide
ucuucacuuuguuggcaug

SEQ ID NO: 2956947 - RNA, 19 nt, Artificial Sequence
  Description of Artificial Sequence: Synthetic oligonucleotide
ggacucagagaucagcaug

SEQ ID NO: 2956948 - RNA, 19 nt, Artificial Sequence
  Description of Artificial Sequence: Synthetic oligonucleotide
  modified_base (18)..(18): a, c, u, g, unknown or other
cugagccacaacaggggng

SEQ ID NO: 2956949 - RNA, 19 nt, Artificial Sequence
  Description of Artificial Sequence: Synthetic oligonucleotide
ugaucugagucgagucucu

SEQ ID NO: 2956950 - RNA, 19 nt, Artificial Sequence
  Description of Artificial Sequence: Synthetic oligonucleotide
uggcgcagcagacuuugca

SEQ ID NO: 2956951 - RNA, 19 nt, Artificial Sequence
  Description of Artificial Sequence: Synthetic oligonucleotide
aaaggucauguuacagaug

SEQ ID NO: 2956952 - RNA, 19 nt, Artificial Sequence
  Description of Artificial Sequence: Synthetic oligonucleotide
gcucuucugaucugagucg

SEQ ID NO: 2956953 - RNA, 19 nt, Artificial Sequence
  Description of Artificial Sequence: Synthetic oligonucleotide
uagucgucuccauuccaug

SEQ ID NO: 2956954 - RNA, 19 nt, Artificial Sequence
  Description of Artificial Sequence: Synthetic oligonucleotide
ggaaaaggucauguuacag

SEQ ID NO: 2956955 - RNA, 19 nt, Artificial Sequence
  Description of Artificial Sequence: Synthetic oligonucleotide
acuccacuuccucccgccc

SEQ ID NO: 2956956 - RNA, 19 nt, Artificial Sequence
  Description of Artificial Sequence: Synthetic oligonucleotide
gagaucagcauggcgcagc

SEQ ID NO: 2956957 - RNA, 19 nt, Artificial Sequence
  Description of Artificial Sequence: Synthetic oligonucleotide
cacugguucuucuggauca

SEQ ID NO: 2956958 - RNA, 19 nt, Artificial Sequence
  Description of Artificial Sequence: Synthetic oligonucleotide
  modified_base (3)..(3): a, c, u, g, unknown or other
ggnggaaaaggucauguua

SEQ ID NO: 2956959 - RNA, 19 nt, Artificial Sequence
  Description of Artificial Sequence: Synthetic oligonucleotide
ucgagucucuucaccuccc

SEQ ID NO: 2956960 - RNA, 19 nt, Artificial Sequence
  Description of Artificial Sequence: Synthetic oligonucleotide
acucagagaucagcauggc

SEQ ID NO: 2956961 - RNA, 19 nt, Artificial Sequence
  Description of Artificial Sequence: Synthetic oligonucleotide
gucgaagugcaguccgucc

SEQ ID NO: 2956962 - RNA, 19 nt, Artificial Sequence
  Description of Artificial Sequence: Synthetic oligonucleotide
agacacugguucuucugga

SEQ ID NO: 2956963 - RNA, 19 nt, Artificial Sequence
  Description of Artificial Sequence: Synthetic oligonucleotide
agucucuucaccuccccuu

SEQ ID NO: 2956964 - RNA, 19 nt, Artificial Sequence
  Description of Artificial Sequence: Synthetic oligonucleotide
ucuccauuccauggauugc

SEQ ID NO: 2956965 - RNA, 19 nt, Artificial Sequence
  Description of Artificial Sequence: Synthetic oligonucleotide
uuccggacccucccgcucc

SEQ ID NO: 2956966 - RNA, 19 nt, Artificial Sequence
  Description of Artificial Sequence: Synthetic oligonucleotide
gugcgacugagccacaaca

SEQ ID NO: 2956967 - RNA, 19 nt, Artificial Sequence
  Description of Artificial Sequence: Synthetic oligonucleotide
ugcgguuggguccggcccc

SEQ ID NO: 2956968 - RNA, 19 nt, Artificial Sequence
  Description of Artificial Sequence: Synthetic oligonucleotide
ucugggacucagagaucag

SEQ ID NO: 2956969 - RNA, 19 nt, Artificial Sequence
  Description of Artificial Sequence: Synthetic oligonucleotide
uccgguuccggacccuccc

SEQ ID NO: 2956970 - RNA, 19 nt, Artificial Sequence
  Description of Artificial Sequence: Synthetic oligonucleotide
agacuuugcacugggugcu

SEQ ID NO: 2956971 - RNA, 19 nt, Artificial Sequence
  Description of Artificial Sequence: Synthetic oligonucleotide
auguuacagauggggcagc

SEQ ID NO: 2956972 - RNA, 19 nt, Artificial Sequence
  Description of Artificial Sequence: Synthetic oligonucleotide
agcauggcgcagcagacuu

SEQ ID NO: 2956973 - RNA, 19 nt, Artificial Sequence
  Description of Artificial Sequence: Synthetic oligonucleotide
ucacuuuguuggcauguuu

SEQ ID NO: 2956974 - RNA, 19 nt, Artificial Sequence
  Description of Artificial Sequence: Synthetic oligonucleotide
ggugcuggugaagagacac

SEQ ID NO: 2956975 - RNA, 19 nt, Artificial Sequence
  Description of Artificial Sequence: Synthetic oligonucleotide
gaagagacacugguucuuc

SEQ ID NO: 2956976 - RNA, 19 nt, Artificial Sequence
  Description of Artificial Sequence: Synthetic oligonucleotide
uugcuagguaucucuucac

SEQ ID NO: 2956977 - RNA, 19 nt, Artificial Sequence
  Description of Artificial Sequence: Synthetic oligonucleotide
uguuacagauggggcagca

SEQ ID NO: 2956978 - RNA, 19 nt, Artificial Sequence
  Description of Artificial Sequence: Synthetic oligonucleotide
gcgacugagccacaacagg

SEQ ID NO: 2956979 - RNA, 19 nt, Artificial Sequence
  Description of Artificial Sequence: Synthetic oligonucleotide
agaucagcauggcgcagca

SEQ ID NO: 2956980 - RNA, 19 nt, Artificial Sequence
  Description of Artificial Sequence: Synthetic oligonucleotide
auggauugcuagguaucuc

SEQ ID NO: 2956981 - RNA, 19 nt, Artificial Sequence
  Description of Artificial Sequence: Synthetic oligonucleotide
uccucggagcugcgguugg

SEQ ID NO: 2956982 - RNA, 19 nt, Artificial Sequence
  Description of Artificial Sequence: Synthetic oligonucleotide
cugggacucagagaucagc

SEQ ID NO: 2956983 - RNA, 19 nt, Artificial Sequence
  Description of Artificial Sequence: Synthetic oligonucleotide
uggugaagagacacugguu

SEQ ID NO: 2956984 - RNA, 19 nt, Artificial Sequence
  Description of Artificial Sequence: Synthetic oligonucleotide
ucgucuccauuccauggau

SEQ ID NO: 2956985 - RNA, 19 nt, Artificial Sequence
  Description of Artificial Sequence: Synthetic oligonucleotide
uuggguccggccccgccag

SEQ ID NO: 2956986 - RNA, 19 nt, Artificial Sequence
  Description of Artificial Sequence: Synthetic oligonucleotide
cauggcgcagcagacuuug

SEQ ID NO: 2956987 - RNA, 19 nt, Artificial Sequence
  Description of Artificial Sequence: Synthetic oligonucleotide
agugugccagcuucuggga

SEQ ID NO: 2956988 - RNA, 19 nt, Artificial Sequence
  Description of Artificial Sequence: Synthetic oligonucleotide
ugguagugugccagcuucu

SEQ ID NO: 2956989 - RNA, 19 nt, Artificial Sequence
  Description of Artificial Sequence: Synthetic oligonucleotide
ugaagagacacugguucuu

SEQ ID NO: 2956990 - RNA, 19 nt, Artificial Sequence
  Description of Artificial Sequence: Synthetic oligonucleotide
gagucgagucucuucaccu

SEQ ID NO: 2956991 - RNA, 19 nt, Artificial Sequence
  Description of Artificial Sequence: Synthetic oligonucleotide
cagagaucagcauggcgca

SEQ ID NO: 2956992 - RNA, 19 nt, Artificial Sequence
  Description of Artificial Sequence: Synthetic oligonucleotide
agcuucugggacucagaga

SEQ ID NO: 2956993 - RNA, 19 nt, Artificial Sequence
  Description of Artificial Sequence: Synthetic oligonucleotide
cuuccucccgccccgccgg

SEQ ID NO: 2956994 - RNA, 19 nt, Artificial Sequence
  Description of Artificial Sequence: Synthetic oligonucleotide
cgacugagccacaacaggg

SEQ ID NO: 2956995 - RNA, 19 nt, Artificial Sequence
  Description of Artificial Sequence: Synthetic oligonucleotide
ucugguagugugccagcuu

SEQ ID NO: 2956996 - RNA, 19 nt, Artificial Sequence
  Description of Artificial Sequence: Synthetic oligonucleotide
agguagugcgacugagcca

SEQ ID NO: 2956997 - RNA, 19 nt, Artificial Sequence
  Description of Artificial Sequence: Synthetic oligonucleotide
acuuugcacugggugcugg

SEQ ID NO: 2956998 - RNA, 19 nt, Artificial Sequence
  Description of Artificial Sequence: Synthetic oligonucleotide
uuccauggauugcuaggua

SEQ ID NO: 2956999 - RNA, 19 nt, Artificial Sequence
  Description of Artificial Sequence: Synthetic oligonucleotide
cuccacuuccucccgcccc

SEQ ID NO: 2957000 - RNA, 19 nt, Artificial Sequence
  Description of Artificial Sequence: Synthetic oligonucleotide
gucgucuccauuccaugga

SEQ ID NO: 2957001 - RNA, 19 nt, Artificial Sequence
  Description of Artificial Sequence: Synthetic oligonucleotide
ggaucauguacuccacuuc

SEQ ID NO: 2957002 - RNA, 19 nt, Artificial Sequence
  Description of Artificial Sequence: Synthetic oligonucleotide
ugcacugggugcuggugaa

SEQ ID NO: 2957003 - RNA, 19 nt, Artificial Sequence
  Description of Artificial Sequence: Synthetic oligonucleotide
guuacagauggggcagcag

SEQ ID NO: 2957004 - RNA, 19 nt, Artificial Sequence
  Description of Artificial Sequence: Synthetic oligonucleotide
gugcaguccguccgguucc

SEQ ID NO: 2957005 - RNA, 19 nt, Artificial Sequence
  Description of Artificial Sequence: Synthetic oligonucleotide
uccauuccauggauugcua

SEQ ID NO: 2957006 - RNA, 19 nt, Artificial Sequence
  Description of Artificial Sequence: Synthetic oligonucleotide
  modified_base (10)..(10): a, c, u, g, unknown or other
caacaggggnggaaaaggu

SEQ ID NO: 2957007 - RNA, 19 nt, Artificial Sequence
  Description of Artificial Sequence: Synthetic oligonucleotide
cugcgguuggguccggccc

SEQ ID NO: 2957008 - RNA, 19 nt, Artificial Sequence
  Description of Artificial Sequence: Synthetic oligonucleotide
gcuuccagcaggcggcgcg

SEQ ID NO: 2957009 - RNA, 19 nt, Artificial Sequence
  Description of Artificial Sequence: Synthetic oligonucleotide
gcggucgaagugcaguccg

SEQ ID NO: 2957010 - RNA, 19 nt, Artificial Sequence
  Description of Artificial Sequence: Synthetic oligonucleotide
ggcgcagcagacuuugcac

SEQ ID NO: 2957011 - RNA, 19 nt, Artificial Sequence
  Description of Artificial Sequence: Synthetic oligonucleotide
uccguccgguuccggaccc

SEQ ID NO: 2957012 - RNA, 19 nt, Artificial Sequence
  Description of Artificial Sequence: Synthetic oligonucleotide
gcuucugcugcucuucuga

SEQ ID NO: 2957013 - RNA, 19 nt, Artificial Sequence
  Description of Artificial Sequence: Synthetic oligonucleotide
cugagucgagucucuucac

SEQ ID NO: 2957014 - RNA, 19 nt, Artificial Sequence
  Description of Artificial Sequence: Synthetic oligonucleotide
uccggccccgccagggucc

SEQ ID NO: 2957015 - RNA, 19 nt, Artificial Sequence
  Description of Artificial Sequence: Synthetic oligonucleotide
aucauguacuccacuuccu

SEQ ID NO: 2957016 - RNA, 19 nt, Artificial Sequence
  Description of Artificial Sequence: Synthetic oligonucleotide
ucgcggucgaagugcaguc

SEQ ID NO: 2957017 - RNA, 19 nt, Artificial Sequence
  Description of Artificial Sequence: Synthetic oligonucleotide
ggagcugcgguuggguccg

SEQ ID NO: 2957018 - RNA, 19 nt, Artificial Sequence
  Description of Artificial Sequence: Synthetic oligonucleotide
ccauuccauggauugcuag

SEQ ID NO: 2957019 - RNA, 19 nt, Artificial Sequence
  Description of Artificial Sequence: Synthetic oligonucleotide
guacuccacuuccucccgc

SEQ ID NO: 2957020 - RNA, 19 nt, Artificial Sequence
  Description of Artificial Sequence: Synthetic oligonucleotide
uucacuuuguuggcauguu

SEQ ID NO: 2957021 - RNA, 19 nt, Artificial Sequence
  Description of Artificial Sequence: Synthetic oligonucleotide
cucuucugaucugagucga

SEQ ID NO: 2957022 - RNA, 19 nt, Artificial Sequence
  Description of Artificial Sequence: Synthetic oligonucleotide
ccauggauugcuagguauc

SEQ ID NO: 2957023 - RNA, 19 nt, Artificial Sequence
  Description of Artificial Sequence: Synthetic oligonucleotide
agagaucagcauggcgcag

SEQ ID NO: 2957024 - RNA, 19 nt, Artificial Sequence
  Description of Artificial Sequence: Synthetic oligonucleotide
ucggagcugcgguuggguc

SEQ ID NO: 2957025 - RNA, 19 nt, Artificial Sequence
  Description of Artificial Sequence: Synthetic oligonucleotide
ucccgcuccucggagcugc

SEQ ID NO: 2957026 - RNA, 19 nt, Artificial Sequence
  Description of Artificial Sequence: Synthetic oligonucleotide
gcuggugaagagacacugg

SEQ ID NO: 2957027 - RNA, 19 nt, Artificial Sequence
  Description of Artificial Sequence: Synthetic oligonucleotide
aggucauguuacagauggg

SEQ ID NO: 2957028 - RNA, 19 nt, Artificial Sequence
  Description of Artificial Sequence: Synthetic oligonucleotide
cacuuuguuggcauguuuu

SEQ ID NO: 2957029 - RNA, 19 nt, Artificial Sequence
  Description of Artificial Sequence: Synthetic oligonucleotide
aagugcaguccguccgguu

SEQ ID NO: 2957030 - RNA, 19 nt, Artificial Sequence
  Description of Artificial Sequence: Synthetic oligonucleotide
ugcaguccguccgguuccg

SEQ ID NO: 2957031 - RNA, 19 nt, Artificial Sequence
  Description of Artificial Sequence: Synthetic oligonucleotide
gugugccagcuucugggac

SEQ ID NO: 2957032 - RNA, 19 nt, Artificial Sequence
  Description of Artificial Sequence: Synthetic oligonucleotide
ucucgcggucgaagugcag

SEQ ID NO: 2957033 - RNA, 19 nt, Artificial Sequence
  Description of Artificial Sequence: Synthetic oligonucleotide
guccguccgguuccggacc

SEQ ID NO: 2957034 - RNA, 19 nt, Artificial Sequence
  Description of Artificial Sequence: Synthetic oligonucleotide
aggcggcgcgcccucucgc

SEQ ID NO: 2957035 - RNA, 19 nt, Artificial Sequence
  Description of Artificial Sequence: Synthetic oligonucleotide
uccagcaggcggcgcgccc

SEQ ID NO: 2957036 - RNA, 19 nt, Artificial Sequence
  Description of Artificial Sequence: Synthetic oligonucleotide
guuggguccggccccgcca

SEQ ID NO: 2957037 - RNA, 19 nt, Artificial Sequence
  Description of Artificial Sequence: Synthetic oligonucleotide
agcagugguucuugucuuu

SEQ ID NO: 2957038 - RNA, 19 nt, Artificial Sequence
  Description of Artificial Sequence: Synthetic oligonucleotide
ucucuucaccuccccuuuu

SEQ ID NO: 2957039 - RNA, 19 nt, Artificial Sequence
  Description of Artificial Sequence: Synthetic oligonucleotide
ccagguagugcgacugagc

SEQ ID NO: 2957040 - RNA, 19 nt, Artificial Sequence
  Description of Artificial Sequence: Synthetic oligonucleotide
cuucugggacucagagauc

SEQ ID NO: 2957041 - RNA, 19 nt, Artificial Sequence
  Description of Artificial Sequence: Synthetic oligonucleotide
uuccccagguagugcgacu

SEQ ID NO: 2957042 - RNA, 19 nt, Artificial Sequence
  Description of Artificial Sequence: Synthetic oligonucleotide
gacacugguucuucuggau

SEQ ID NO: 2957043 - RNA, 19 nt, Artificial Sequence
  Description of Artificial Sequence: Synthetic oligonucleotide
agguaucucuucacuuugu

SEQ ID NO: 2957044 - RNA, 19 nt, Artificial Sequence
  Description of Artificial Sequence: Synthetic oligonucleotide
caccggacacagcuuccag

SEQ ID NO: 2957045 - RNA, 19 nt, Artificial Sequence
  Description of Artificial Sequence: Synthetic oligonucleotide
uugcucugguagugugcca

SEQ ID NO: 2957046 - RNA, 19 nt, Artificial Sequence
  Description of Artificial Sequence: Synthetic oligonucleotide
gguagugugccagcuucug

SEQ ID NO: 2957047 - RNA, 19 nt, Artificial Sequence
  Description of Artificial Sequence: Synthetic oligonucleotide
gcagcagacuuugcacugg

SEQ ID NO: 2957048 - RNA, 19 nt, Artificial Sequence
  Description of Artificial Sequence: Synthetic oligonucleotide
gaucagcauggcgcagcag

SEQ ID NO: 2957049 - RNA, 19 nt, Artificial Sequence
  Description of Artificial Sequence: Synthetic oligonucleotide
cuccccuuuuagucgucuc

SEQ ID NO: 2957050 - RNA, 19 nt, Artificial Sequence
  Description of Artificial Sequence: Synthetic oligonucleotide
cuuccagcaggcggcgcgc

SEQ ID NO: 2957051 - RNA, 19 nt, Artificial Sequence
  Description of Artificial Sequence: Synthetic oligonucleotide
  modified_base (6)..(6): a, c, u, g, unknown or other
aggggnggaaaaggucaug

SEQ ID NO: 2957052 - RNA, 19 nt, Artificial Sequence
  Description of Artificial Sequence: Synthetic oligonucleotide
gacuuugcacugggugcug

SEQ ID NO: 2957053 - RNA, 19 nt, Artificial Sequence
  Description of Artificial Sequence: Synthetic oligonucleotide
cauggauugcuagguaucu

SEQ ID NO: 2957054 - RNA, 19 nt, Artificial Sequence
  Description of Artificial Sequence: Synthetic oligonucleotide
cugcgcaccggacacagcu

SEQ ID NO: 2957055 - RNA, 19 nt, Artificial Sequence
  Description of Artificial Sequence: Synthetic oligonucleotide
ccggacacagcuuccagca

SEQ ID NO: 2957056 - RNA, 19 nt, Artificial Sequence
  Description of Artificial Sequence: Synthetic oligonucleotide
cuucacuuuguuggcaugu

SEQ ID NO: 2957057 - RNA, 19 nt, Artificial Sequence
  Description of Artificial Sequence: Synthetic oligonucleotide
uagugcgacugagccacaa

SEQ ID NO: 2957058 - RNA, 19 nt, Artificial Sequence
  Description of Artificial Sequence: Synthetic oligonucleotide
cacugggugcuggugaaga

SEQ ID NO: 2957059 - RNA, 19 nt, Artificial Sequence
  Description of Artificial Sequence: Synthetic oligonucleotide
cugguucuucuggaucaug

SEQ ID NO: 2957060 - RNA, 19 nt, Artificial Sequence
  Description of Artificial Sequence: Synthetic oligonucleotide
  modified_base (14)..(14): a, c, u, g, unknown or other
gccacaacaggggnggaaa

SEQ ID NO: 2957061 - RNA, 19 nt, Artificial Sequence
  Description of Artificial Sequence: Synthetic oligonucleotide
ggacccucccgcuccucgg

SEQ ID NO: 2957062 - RNA, 19 nt, Artificial Sequence
  Description of Artificial Sequence: Synthetic oligonucleotide
cuccauuccauggauugcu

SEQ ID NO: 2957063 - RNA, 19 nt, Artificial Sequence
  Description of Artificial Sequence: Synthetic oligonucleotide
caggcggcgcgcccucucg

SEQ ID NO: 2957064 - RNA, 19 nt, Artificial Sequence
  Description of Artificial Sequence: Synthetic oligonucleotide
acccucccgcuccucggag

SEQ ID NO: 2957065 - RNA, 19 nt, Artificial Sequence
  Description of Artificial Sequence: Synthetic oligonucleotide
cuccucggagcugcgguug

SEQ ID NO: 2957066 - RNA, 19 nt, Artificial Sequence
  Description of Artificial Sequence: Synthetic oligonucleotide
gagucucuucaccuccccu

SEQ ID NO: 2957067 - RNA, 19 nt, Artificial Sequence
  Description of Artificial Sequence: Synthetic oligonucleotide
gcagugguucuugucuuug

SEQ ID NO: 2957068 - RNA, 19 nt, Artificial Sequence
  Description of Artificial Sequence: Synthetic oligonucleotide
ugcgcaccggacacagcuu

SEQ ID NO: 2957069 - RNA, 19 nt, Artificial Sequence
  Description of Artificial Sequence: Synthetic oligonucleotide
auggcgcagcagacuuugc

SEQ ID NO: 2957070 - RNA, 19 nt, Artificial Sequence
  Description of Artificial Sequence: Synthetic oligonucleotide
guuccggacccucccgcuc

SEQ ID NO: 2957071 - RNA, 19 nt, Artificial Sequence
  Description of Artificial Sequence: Synthetic oligonucleotide
cuucaccuccccuuuuagu

SEQ ID NO: 2957072 - RNA, 19 nt, Artificial Sequence
  Description of Artificial Sequence: Synthetic oligonucleotide
ccucucgcggucgaagugc

SEQ ID NO: 2957073 - RNA, 19 nt, Artificial Sequence
  Description of Artificial Sequence: Synthetic oligonucleotide
cucuucaccuccccuuuua

SEQ ID NO: 2957074 - RNA, 19 nt, Artificial Sequence
  Description of Artificial Sequence: Synthetic oligonucleotide
gcugcgguuggguccggcc

SEQ ID NO: 2957075 - RNA, 19 nt, Artificial Sequence
  Description of Artificial Sequence: Synthetic oligonucleotide
cgaagugcaguccguccgg

SEQ ID NO: 2957076 - RNA, 19 nt, Artificial Sequence
  Description of Artificial Sequence: Synthetic oligonucleotide
agcugcgguuggguccggc

SEQ ID NO: 2957077 - RNA, 19 nt, Artificial Sequence
  Description of Artificial Sequence: Synthetic oligonucleotide
cucucgcggucgaagugca

SEQ ID NO: 2957078 - RNA, 19 nt, Artificial Sequence
  Description of Artificial Sequence: Synthetic oligonucleotide
ggcagcagugguucuuguc

SEQ ID NO: 2957079 - RNA, 19 nt, Artificial Sequence
  Description of Artificial Sequence: Synthetic oligonucleotide
uggguccggccccgccagg

SEQ ID NO: 2957080 - RNA, 19 nt, Artificial Sequence
  Description of Artificial Sequence: Synthetic oligonucleotide
caguccguccgguuccgga

SEQ ID NO: 2957081 - RNA, 19 nt, Artificial Sequence
  Description of Artificial Sequence: Synthetic oligonucleotide
  modified_base (15)..(15): a, c, u, g, unknown or other
agccacaacaggggnggaa

SEQ ID NO: 2957082 - RNA, 19 nt, Artificial Sequence
  Description of Artificial Sequence: Synthetic oligonucleotide
gcucugguagugugccagc

SEQ ID NO: 2957083 - RNA, 19 nt, Artificial Sequence
  Description of Artificial Sequence: Synthetic oligonucleotide
gcugcucuucugaucugag

SEQ ID NO: 2957084 - RNA, 19 nt, Artificial Sequence
  Description of Artificial Sequence: Synthetic oligonucleotide
gcuagguaucucuucacuu

SEQ ID NO: 2957085 - RNA, 19 nt, Artificial Sequence
  Description of Artificial Sequence: Synthetic oligonucleotide
  modified_base (5)..(5): a, c, u, g, unknown or other
ggggnggaaaaggucaugu

SEQ ID NO: 2957086 - RNA, 19 nt, Artificial Sequence
  Description of Artificial Sequence: Synthetic oligonucleotide
gguucuugucuuugcuucu

SEQ ID NO: 2957087 - RNA, 19 nt, Artificial Sequence
  Description of Artificial Sequence: Synthetic oligonucleotide
agcagacuuugcacugggu

SEQ ID NO: 2957088 - RNA, 19 nt, Artificial Sequence
  Description of Artificial Sequence: Synthetic oligonucleotide
cggagcugcgguugggucc

SEQ ID NO: 2957089 - RNA, 19 nt, Artificial Sequence
  Description of Artificial Sequence: Synthetic oligonucleotide
cccgccaggguccgcagcc

SEQ ID NO: 2957090 - RNA, 19 nt, Artificial Sequence
  Description of Artificial Sequence: Synthetic oligonucleotide
uuccagcaggcggcgcgcc

SEQ ID NO: 2957091 - RNA, 19 nt, Artificial Sequence
  Description of Artificial Sequence: Synthetic oligonucleotide
cacuuccucccgccccgcc

SEQ ID NO: 2957092 - RNA, 19 nt, Artificial Sequence
  Description of Artificial Sequence: Synthetic oligonucleotide
ggucgaagugcaguccguc

SEQ ID NO: 2957093 - RNA, 19 nt, Artificial Sequence
  Description of Artificial Sequence: Synthetic oligonucleotide
uggggcagcagugguucuu

SEQ ID NO: 2957094 - RNA, 19 nt, Artificial Sequence
  Description of Artificial Sequence: Synthetic oligonucleotide
cuggaucauguacuccacu

SEQ ID NO: 2957095 - RNA, 19 nt, Artificial Sequence
  Description of Artificial Sequence: Synthetic oligonucleotide
ggcggcgcgcccucucgcg

SEQ ID NO: 2957096 - RNA, 19 nt, Artificial Sequence
  Description of Artificial Sequence: Synthetic oligonucleotide
gguaucucuucacuuuguu

SEQ ID NO: 2957097 - RNA, 19 nt, Artificial Sequence
  Description of Artificial Sequence: Synthetic oligonucleotide
  modified_base (7)..(7): a, c, u, g, unknown or other
caggggnggaaaaggucau

SEQ ID NO: 2957098 - RNA, 19 nt, Artificial Sequence
  Description of Artificial Sequence: Synthetic oligonucleotide
cgcagcagacuuugcacug

SEQ ID NO: 2957099 - RNA, 19 nt, Artificial Sequence
  Description of Artificial Sequence: Synthetic oligonucleotide
uuccucccgccccgccggc

SEQ ID NO: 2957100 - RNA, 19 nt, Artificial Sequence
  Description of Artificial Sequence: Synthetic oligonucleotide
gguuggguccggccccgcc

SEQ ID NO: 2957101 - RNA, 19 nt, Artificial Sequence
  Description of Artificial Sequence: Synthetic oligonucleotide
cuuugcacugggugcuggu

SEQ ID NO: 2957102 - RNA, 19 nt, Artificial Sequence
  Description of Artificial Sequence: Synthetic oligonucleotide
gcgcaccggacacagcuuc

SEQ ID NO: 2957103 - RNA, 19 nt, Artificial Sequence
  Description of Artificial Sequence: Synthetic oligonucleotide
  modified_base (16)..(16): a, c, u, g, unknown or other
gagccacaacaggggngga

SEQ ID NO: 2957104 - RNA, 19 nt, Artificial Sequence
  Description of Artificial Sequence: Synthetic oligonucleotide
gucucuucaccuccccuuu

SEQ ID NO: 2957105 - RNA, 19 nt, Artificial Sequence
  Description of Artificial Sequence: Synthetic oligonucleotide
cucgcggucgaagugcagu

SEQ ID NO: 2957106 - RNA, 19 nt, Artificial Sequence
  Description of Artificial Sequence: Synthetic oligonucleotide
cccagguagugcgacugag

SEQ ID NO: 2957107 - RNA, 19 nt, Artificial Sequence
  Description of Artificial Sequence: Synthetic oligonucleotide
cugcucuucugaucugagu

SEQ ID NO: 2957108 - RNA, 19 nt, Artificial Sequence
  Description of Artificial Sequence: Synthetic oligonucleotide
gaagugcaguccguccggu

SEQ ID NO: 2957109 - RNA, 19 nt, Artificial Sequence
  Description of Artificial Sequence: Synthetic oligonucleotide
guccgguuccggacccucc

SEQ ID NO: 2957110 - RNA, 19 nt, Artificial Sequence
  Description of Artificial Sequence: Synthetic oligonucleotide
cagauggggcagcaguggu

SEQ ID NO: 2957111 - RNA, 19 nt, Artificial Sequence
  Description of Artificial Sequence: Synthetic oligonucleotide
guccggccccgccaggguc

SEQ ID NO: 2957112 - RNA, 19 nt, Artificial Sequence
  Description of Artificial Sequence: Synthetic oligonucleotide
cuucugcugcucuucugau

SEQ ID NO: 2957113 - RNA, 19 nt, Artificial Sequence
  Description of Artificial Sequence: Synthetic oligonucleotide
caccuccccuuuuagucgu

SEQ ID NO: 2957114 - RNA, 19 nt, Artificial Sequence
  Description of Artificial Sequence: Synthetic oligonucleotide
ggguccggccccgccaggg

SEQ ID NO: 2957115 - RNA, 19 nt, Artificial Sequence
  Description of Artificial Sequence: Synthetic oligonucleotide
accuccccuuuuagucguc

SEQ ID NO: 2957116 - RNA, 19 nt, Artificial Sequence
  Description of Artificial Sequence: Synthetic oligonucleotide
gcgcagcagacuuugcacu

SEQ ID NO: 2957117 - RNA, 19 nt, Artificial Sequence
  Description of Artificial Sequence: Synthetic oligonucleotide
  modified_base (4)..(4): a, c, u, g, unknown or other
gggnggaaaaggucauguu

SEQ ID NO: 2957118 - RNA, 19 nt, Artificial Sequence
  Description of Artificial Sequence: Synthetic oligonucleotide
gggacucagagaucagcau

SEQ ID NO: 2957119 - RNA, 19 nt, Artificial Sequence
  Description of Artificial Sequence: Synthetic oligonucleotide
ccgguuccggacccucccg

SEQ ID NO: 2957120 - RNA, 19 nt, Artificial Sequence
  Description of Artificial Sequence: Synthetic oligonucleotide
ucccgccccgccggcugcg

SEQ ID NO: 2957121 - RNA, 19 nt, Artificial Sequence
  Description of Artificial Sequence: Synthetic oligonucleotide
ccccuuuuagucgucucca

SEQ ID NO: 2957122 - RNA, 19 nt, Artificial Sequence
  Description of Artificial Sequence: Synthetic oligonucleotide
cucccgccccgccggcugc

SEQ ID NO: 2957123 - RNA, 19 nt, Artificial Sequence
  Description of Artificial Sequence: Synthetic oligonucleotide
cucugguagugugccagcu

SEQ ID NO: 2957124 - RNA, 19 nt, Artificial Sequence
  Description of Artificial Sequence: Synthetic oligonucleotide
gccggcugcgcaccggaca

SEQ ID NO: 2957125 - RNA, 19 nt, Artificial Sequence
  Description of Artificial Sequence: Synthetic oligonucleotide
gcggcgcgcccucucgcgg

SEQ ID NO: 2957126 - RNA, 19 nt, Artificial Sequence
  Description of Artificial Sequence: Synthetic oligonucleotide
cagcagugguucuugucuu

SEQ ID NO: 2957127 - RNA, 19 nt, Artificial Sequence
  Description of Artificial Sequence: Synthetic oligonucleotide
cccucucgcggucgaagug

SEQ ID NO: 2957128 - RNA, 19 nt, Artificial Sequence
  Description of Artificial Sequence: Synthetic oligonucleotide
gaucugagucgagucucuu

SEQ ID NO: 2957129 - RNA, 19 nt, Artificial Sequence
  Description of Artificial Sequence: Synthetic oligonucleotide
gccaggguccgcagccucc

SEQ ID NO: 2957130 - RNA, 19 nt, Artificial Sequence
  Description of Artificial Sequence: Synthetic oligonucleotide
  modified_base (13)..(13): a, c, u, g, unknown or other
ccacaacaggggnggaaaa

SEQ ID NO: 2957131 - RNA, 19 nt, Artificial Sequence
  Description of Artificial Sequence: Synthetic oligonucleotide
cccucccgcuccucggagc

SEQ ID NO: 2957132 - RNA, 19 nt, Artificial Sequence
  Description of Artificial Sequence: Synthetic oligonucleotide
cgcaccggacacagcuucc

SEQ ID NO: 2957133 - RNA, 19 nt, Artificial Sequence
  Description of Artificial Sequence: Synthetic oligonucleotide
gcacugggugcuggugaag

SEQ ID NO: 2957134 - RNA, 19 nt, Artificial Sequence
  Description of Artificial Sequence: Synthetic oligonucleotide
gcaccggacacagcuucca

SEQ ID NO: 2957135 - RNA, 19 nt, Artificial Sequence
  Description of Artificial Sequence: Synthetic oligonucleotide
gugcuggugaagagacacu

SEQ ID NO: 2957136 - RNA, 19 nt, Artificial Sequence
  Description of Artificial Sequence: Synthetic oligonucleotide
gguuccggacccucccgcu

SEQ ID NO: 2957137 - RNA, 19 nt, Artificial Sequence
  Description of Artificial Sequence: Synthetic oligonucleotide
gcgguuggguccggccccg

SEQ ID NO: 2957138 - RNA, 19 nt, Artificial Sequence
  Description of Artificial Sequence: Synthetic oligonucleotide
cgguuccggacccucccgc

SEQ ID NO: 2957139 - RNA, 19 nt, Artificial Sequence
  Description of Artificial Sequence: Synthetic oligonucleotide
uccucccgccccgccggcu

SEQ ID NO: 2957140 - RNA, 19 nt, Artificial Sequence
  Description of Artificial Sequence: Synthetic oligonucleotide
cagcaggcggcgcgcccuc

SEQ ID NO: 2957141 - RNA, 19 nt, Artificial Sequence
  Description of Artificial Sequence: Synthetic oligonucleotide
cucggagcugcgguugggu

SEQ ID NO: 2957142 - RNA, 19 nt, Artificial Sequence
  Description of Artificial Sequence: Synthetic oligonucleotide
ggauugcuagguaucucuu

SEQ ID NO: 2957143 - RNA, 19 nt, Artificial Sequence
  Description of Artificial Sequence: Synthetic oligonucleotide
cggacacagcuuccagcag

SEQ ID NO: 2957144 - RNA, 19 nt, Artificial Sequence
  Description of Artificial Sequence: Synthetic oligonucleotide
guagugcgacugagccaca

SEQ ID NO: 2957145 - RNA, 19 nt, Artificial Sequence
  Description of Artificial Sequence: Synthetic oligonucleotide
gcaguccguccgguuccgg

SEQ ID NO: 2957146 - RNA, 19 nt, Artificial Sequence
  Description of Artificial Sequence: Synthetic oligonucleotide
ccucggagcugcgguuggg

SEQ ID NO: 2957147 - RNA, 19 nt, Artificial Sequence
  Description of Artificial Sequence: Synthetic oligonucleotide
cucccgcuccucggagcug

SEQ ID NO: 2957148 - RNA, 19 nt, Artificial Sequence
  Description of Artificial Sequence: Synthetic oligonucleotide
ccuuuuagucgucuccauu

SEQ ID NO: 2957149 - RNA, 19 nt, Artificial Sequence
  Description of Artificial Sequence: Synthetic oligonucleotide
cgcggucgaagugcagucc

SEQ ID NO: 2957150 - RNA, 19 nt, Artificial Sequence
  Description of Artificial Sequence: Synthetic oligonucleotide
cagcauggcgcagcagacu

SEQ ID NO: 2957151 - RNA, 19 nt, Artificial Sequence
  Description of Artificial Sequence: Synthetic oligonucleotide
agcaggcggcgcgcccucu

SEQ ID NO: 2957152 - RNA, 19 nt, Artificial Sequence
  Description of Artificial Sequence: Synthetic oligonucleotide
gggugcuggugaagagaca

SEQ ID NO: 2957153 - RNA, 19 nt, Artificial Sequence
  Description of Artificial Sequence: Synthetic oligonucleotide
ccucccgccccgccggcug

SEQ ID NO: 2957154 - RNA, 19 nt, Artificial Sequence
  Description of Artificial Sequence: Synthetic oligonucleotide
gcccucucgcggucgaagu

SEQ ID NO: 2957155 - RNA, 19 nt, Artificial Sequence
  Description of Artificial Sequence: Synthetic oligonucleotide
ggccccgccaggguccgca

SEQ ID NO: 2957156 - RNA, 19 nt, Artificial Sequence
  Description of Artificial Sequence: Synthetic oligonucleotide
gcugcgcaccggacacagc

SEQ ID NO: 2957157 - RNA, 19 nt, Artificial Sequence
  Description of Artificial Sequence: Synthetic oligonucleotide
ggcgcgcccucucgcgguc

SEQ ID NO: 2957158 - RNA, 19 nt, Artificial Sequence
  Description of Artificial Sequence: Synthetic oligonucleotide
gccccgccaggguccgcag

SEQ ID NO: 2957159 - RNA, 19 nt, Artificial Sequence
  Description of Artificial Sequence: Synthetic oligonucleotide
cgcccucucgcggucgaag

SEQ ID NO: 2957160 - RNA, 19 nt, Artificial Sequence
  Description of Artificial Sequence: Synthetic oligonucleotide
ccccagguagugcgacuga

SEQ ID NO: 2957161 - RNA, 19 nt, Artificial Sequence
  Description of Artificial Sequence: Synthetic oligonucleotide
ccgcuccucggagcugcgg

SEQ ID NO: 2957162 - RNA, 19 nt, Artificial Sequence
  Description of Artificial Sequence: Synthetic oligonucleotide
ccucccgcuccucggagcu

SEQ ID NO: 2957163 - RNA, 19 nt, Artificial Sequence
  Description of Artificial Sequence: Synthetic oligonucleotide
gggcagcagugguucuugu

SEQ ID NO: 2957164 - RNA, 19 nt, Artificial Sequence
  Description of Artificial Sequence: Synthetic oligonucleotide
cccuuuuagucgucuccau

SEQ ID NO: 2957165 - RNA, 19 nt, Artificial Sequence
  Description of Artificial Sequence: Synthetic oligonucleotide
gcgcgcccucucgcggucg

SEQ ID NO: 2957166 - RNA, 19 nt, Artificial Sequence
  Description of Artificial Sequence: Synthetic oligonucleotide
ccacuuccucccgccccgc

SEQ ID NO: 2957167 - RNA, 19 nt, Artificial Sequence
  Description of Artificial Sequence: Synthetic oligonucleotide
gcuccucggagcugcgguu

SEQ ID NO: 2957168 - RNA, 19 nt, Artificial Sequence
  Description of Artificial Sequence: Synthetic oligonucleotide
gccccgccggcugcgcacc

SEQ ID NO: 2957169 - RNA, 19 nt, Artificial Sequence
  Description of Artificial Sequence: Synthetic oligonucleotide
gguccggccccgccagggu

SEQ ID NO: 2957170 - RNA, 19 nt, Artificial Sequence
  Description of Artificial Sequence: Synthetic oligonucleotide
cguccgguuccggacccuc

SEQ ID NO: 2957171 - RNA, 19 nt, Artificial Sequence
  Description of Artificial Sequence: Synthetic oligonucleotide
cccgccggcugcgcaccgg

SEQ ID NO: 2957172 - RNA, 19 nt, Artificial Sequence
  Description of Artificial Sequence: Synthetic oligonucleotide
cgccaggguccgcagccuc

SEQ ID NO: 2957173 - RNA, 19 nt, Artificial Sequence
  Description of Artificial Sequence: Synthetic oligonucleotide
cgccccgccggcugcgcac

SEQ ID NO: 2957174 - RNA, 19 nt, Artificial Sequence
  Description of Artificial Sequence: Synthetic oligonucleotide
ccgccggcugcgcaccgga

SEQ ID NO: 2957175 - RNA, 19 nt, Artificial Sequence
  Description of Artificial Sequence: Synthetic oligonucleotide
cgcuccucggagcugcggu

SEQ ID NO: 2957176 - RNA, 19 nt, Artificial Sequence
  Description of Artificial Sequence: Synthetic oligonucleotide
ccggccccgccaggguccg

SEQ ID NO: 2957177 - RNA, 19 nt, Artificial Sequence
  Description of Artificial Sequence: Synthetic oligonucleotide
ccccgccggcugcgcaccg

SEQ ID NO: 2957178 - RNA, 19 nt, Artificial Sequence
  Description of Artificial Sequence: Synthetic oligonucleotide
cgucuccauuccauggauu

SEQ ID NO: 2957179 - RNA, 19 nt, Artificial Sequence
  Description of Artificial Sequence: Synthetic oligonucleotide
ccagcaggcggcgcgcccu

SEQ ID NO: 2957180 - RNA, 19 nt, Artificial Sequence
  Description of Artificial Sequence: Synthetic oligonucleotide
cgccggcugcgcaccggac

SEQ ID NO: 2957181 - RNA, 19 nt, Artificial Sequence
  Description of Artificial Sequence: Synthetic oligonucleotide
gcauggcgcagcagacuuu

SEQ ID NO: 2957182 - RNA, 19 nt, Artificial Sequence
  Description of Artificial Sequence: Synthetic oligonucleotide
cggucgaagugcaguccgu

SEQ ID NO: 2957183 - RNA, 19 nt, Artificial Sequence
  Description of Artificial Sequence: Synthetic oligonucleotide
ccggacccucccgcuccuc

SEQ ID NO: 2957184 - RNA, 19 nt, Artificial Sequence
  Description of Artificial Sequence: Synthetic oligonucleotide
cgcgcccucucgcggucga

SEQ ID NO: 2957185 - RNA, 19 nt, Artificial Sequence
  Description of Artificial Sequence: Synthetic oligonucleotide
cgguuggguccggccccgc

SEQ ID NO: 2957186 - RNA, 19 nt, Artificial Sequence
  Description of Artificial Sequence: Synthetic oligonucleotide
ccgccccgccggcugcgca

SEQ ID NO: 2957187 - RNA, 19 nt, Artificial Sequence
  Description of Artificial Sequence: Synthetic oligonucleotide
gcgcccucucgcggucgaa

SEQ ID NO: 2957188 - RNA, 19 nt, Artificial Sequence
  Description of Artificial Sequence: Synthetic oligonucleotide
cggcgcgcccucucgcggu

SEQ ID NO: 2957189 - RNA, 19 nt, Artificial Sequence
  Description of Artificial Sequence: Synthetic oligonucleotide
ccgccaggguccgcagccu

SEQ ID NO: 2957190 - RNA, 19 nt, Artificial Sequence
  Description of Artificial Sequence: Synthetic oligonucleotide
ccguccgguuccggacccu

SEQ ID NO: 2957191 - RNA, 19 nt, Artificial Sequence
  Description of Artificial Sequence: Synthetic oligonucleotide
cggccccgccaggguccgc

SEQ ID NO: 2957192 - RNA, 19 nt, Artificial Sequence
  Description of Artificial Sequence: Synthetic oligonucleotide
aaucauuucacacuggucc

SEQ ID NO: 2957193 - RNA, 19 nt, Artificial Sequence
  Description of Artificial Sequence: Synthetic oligonucleotide
aaucauagaagucuugaag

SEQ ID NO: 2957194 - RNA, 19 nt, Artificial Sequence
  Description of Artificial Sequence: Synthetic oligonucleotide
uggguuaucugcuucauag

SEQ ID NO: 2957195 - RNA, 19 nt, Artificial Sequence
  Description of Artificial Sequence: Synthetic oligonucleotide
gaagaaucauuucacacug

SEQ ID NO: 2957196 - RNA, 19 nt, Artificial Sequence
  Description of Artificial Sequence: Synthetic oligonucleotide
aguucauauagcuccuucc

SEQ ID NO: 2957197 - RNA, 19 nt, Artificial Sequence
  Description of Artificial Sequence: Synthetic oligonucleotide
caguucacaaacaagcugg

SEQ ID NO: 2957198 - RNA, 19 nt, Artificial Sequence
  Description of Artificial Sequence: Synthetic oligonucleotide
aagucuugaagucucccgg

SEQ ID NO: 2957199 - RNA, 19 nt, Artificial Sequence
  Description of Artificial Sequence: Synthetic oligonucleotide
uucacaaacaagcuggagu

SEQ ID NO: 2957200 - RNA, 19 nt, Artificial Sequence
  Description of Artificial Sequence: Synthetic oligonucleotide
gaagcuguggcuaugcugg

SEQ ID NO: 2957201 - RNA, 19 nt, Artificial Sequence
  Description of Artificial Sequence: Synthetic oligonucleotide
acuagacugggucucauac

SEQ ID NO: 2957202 - RNA, 19 nt, Artificial Sequence
  Description of Artificial Sequence: Synthetic oligonucleotide
aucauagaagucuugaagu

SEQ ID NO: 2957203 - RNA, 19 nt, Artificial Sequence
  Description of Artificial Sequence: Synthetic oligonucleotide
ugaagaaucauuucacacu

SEQ ID NO: 2957204 - RNA, 19 nt, Artificial Sequence
  Description of Artificial Sequence: Synthetic oligonucleotide
uauacaucgauccuuguua

SEQ ID NO: 2957205 - RNA, 19 nt, Artificial Sequence
  Description of Artificial Sequence: Synthetic oligonucleotide
uguggaaucauagaagucu

SEQ ID NO: 2957206 - RNA, 19 nt, Artificial Sequence
  Description of Artificial Sequence: Synthetic oligonucleotide
ucgauccuuguuaaggugg

SEQ ID NO: 2957207 - RNA, 19 nt, Artificial Sequence
  Description of Artificial Sequence: Synthetic oligonucleotide
caugucuucauauuccgag

SEQ ID NO: 2957208 - RNA, 19 nt, Artificial Sequence
  Description of Artificial Sequence: Synthetic oligonucleotide
uaggcguauacaucgaucc

SEQ ID NO: 2957209 - RNA, 19 nt, Artificial Sequence
  Description of Artificial Sequence: Synthetic oligonucleotide
aagucucccggguuuauuc

SEQ ID NO: 2957210 - RNA, 19 nt, Artificial Sequence
  Description of Artificial Sequence: Synthetic oligonucleotide
cuucccagaguucauauag

SEQ ID NO: 2957211 - RNA, 19 nt, Artificial Sequence
  Description of Artificial Sequence: Synthetic oligonucleotide
gaugcacucugccaugucg

SEQ ID NO: 2957212 - RNA, 19 nt, Artificial Sequence
  Description of Artificial Sequence: Synthetic oligonucleotide
gaagucuugaagucucccg

SEQ ID NO: 2957213 - RNA, 19 nt, Artificial Sequence
  Description of Artificial Sequence: Synthetic oligonucleotide
aagcuggaguaucucaggg

SEQ ID NO: 2957214 - RNA, 19 nt, Artificial Sequence
  Description of Artificial Sequence: Synthetic oligonucleotide
ucucauacucuucccagag

SEQ ID NO: 2957215 - RNA, 19 nt, Artificial Sequence
  Description of Artificial Sequence: Synthetic oligonucleotide
ugcuguggaaucauagaag

SEQ ID NO: 2957216 - RNA, 19 nt, Artificial Sequence
  Description of Artificial Sequence: Synthetic oligonucleotide
ugucuucauauuccgaggc

SEQ ID NO: 2957217 - RNA, 19 nt, Artificial Sequence
  Description of Artificial Sequence: Synthetic oligonucleotide
ugcuauguccccaacgaug

SEQ ID NO: 2957218 - RNA, 19 nt, Artificial Sequence
  Description of Artificial Sequence: Synthetic oligonucleotide
acaucgauccuuguuaagg

SEQ ID NO: 2957219 - RNA, 19 nt, Artificial Sequence
  Description of Artificial Sequence: Synthetic oligonucleotide
aucugcuggugcuaugucc

SEQ ID NO: 2957220 - RNA, 19 nt, Artificial Sequence
  Description of Artificial Sequence: Synthetic oligonucleotide
ucuucuuuggggauguuau

SEQ ID NO: 2957221 - RNA, 19 nt, Artificial Sequence
  Description of Artificial Sequence: Synthetic oligonucleotide
cugaagaaucauuucacac

SEQ ID NO: 2957222 - RNA, 19 nt, Artificial Sequence
  Description of Artificial Sequence: Synthetic oligonucleotide
ucacaaacaagcuggagua

SEQ ID NO: 2957223 - RNA, 19 nt, Artificial Sequence
  Description of Artificial Sequence: Synthetic oligonucleotide
ccagaguucauauagcucc

SEQ ID NO: 2957224 - RNA, 19 nt, Artificial Sequence
  Description of Artificial Sequence: Synthetic oligonucleotide
agaaucauuucacacuggu

SEQ ID NO: 2957225 - RNA, 19 nt, Artificial Sequence
  Description of Artificial Sequence: Synthetic oligonucleotide
aacaagcuggaguaucuca

SEQ ID NO: 2957226 - RNA, 19 nt, Artificial Sequence
  Description of Artificial Sequence: Synthetic oligonucleotide
guucauauagcuccuuccc

SEQ ID NO: 2957227 - RNA, 19 nt, Artificial Sequence
  Description of Artificial Sequence: Synthetic oligonucleotide
uguuaagguggucaucucu

SEQ ID NO: 2957228 - RNA, 19 nt, Artificial Sequence
  Description of Artificial Sequence: Synthetic oligonucleotide
auagccuccucuucucgcc

SEQ ID NO: 2957229 - RNA, 19 nt, Artificial Sequence
  Description of Artificial Sequence: Synthetic oligonucleotide
ucauacucuucccagaguu

SEQ ID NO: 2957230 - RNA, 19 nt, Artificial Sequence
  Description of Artificial Sequence: Synthetic oligonucleotide
uaugcuggcauuucucucu

SEQ ID NO: 2957231 - RNA, 19 nt, Artificial Sequence
  Description of Artificial Sequence: Synthetic oligonucleotide
aagguccucuggcagcagc

SEQ ID NO: 2957232 - RNA, 19 nt, Artificial Sequence
  Description of Artificial Sequence: Synthetic oligonucleotide
uuaagguggucaucucugg

SEQ ID NO: 2957233 - RNA, 19 nt, Artificial Sequence
  Description of Artificial Sequence: Synthetic oligonucleotide
uagacugggucucauacuc

SEQ ID NO: 2957234 - RNA, 19 nt, Artificial Sequence
  Description of Artificial Sequence: Synthetic oligonucleotide
uucauauagcuccuuccca

SEQ ID NO: 2957235 - RNA, 19 nt, Artificial Sequence
  Description of Artificial Sequence: Synthetic oligonucleotide
uuaucugcuucauagccuc

SEQ ID NO: 2957236 - RNA, 19 nt, Artificial Sequence
  Description of Artificial Sequence: Synthetic oligonucleotide
auagaagucuugaagucuc

SEQ ID NO: 2957237 - RNA, 19 nt, Artificial Sequence
  Description of Artificial Sequence: Synthetic oligonucleotide
ucauagaagucuugaaguc

SEQ ID NO: 2957238 - RNA, 19 nt, Artificial Sequence
  Description of Artificial Sequence: Synthetic oligonucleotide
augucuucauauuccgagg

SEQ ID NO: 2957239 - RNA, 19 nt, Artificial Sequence
  Description of Artificial Sequence: Synthetic oligonucleotide
ucauauagcuccuucccaa

SEQ ID NO: 2957240 - RNA, 19 nt, Artificial Sequence
  Description of Artificial Sequence: Synthetic oligonucleotide
auauagcuccuucccaagg

SEQ ID NO: 2957241 - RNA, 19 nt, Artificial Sequence
  Description of Artificial Sequence: Synthetic oligonucleotide
uauagcuccuucccaaggu

SEQ ID NO: 2957242 - RNA, 19 nt, Artificial Sequence
  Description of Artificial Sequence: Synthetic oligonucleotide
ucuccaugucuucauauuc

SEQ ID NO: 2957243 - RNA, 19 nt, Artificial Sequence
  Description of Artificial Sequence: Synthetic oligonucleotide
acgaaucuggcuucugcac

SEQ ID NO: 2957244 - RNA, 19 nt, Artificial Sequence
  Description of Artificial Sequence: Synthetic oligonucleotide
uucugcacuagacuggguc

SEQ ID NO: 2957245 - RNA, 19 nt, Artificial Sequence
  Description of Artificial Sequence: Synthetic oligonucleotide
gguuaucugcuucauagcc

SEQ ID NO: 2957246 - RNA, 19 nt, Artificial Sequence
  Description of Artificial Sequence: Synthetic oligonucleotide
ugcuucacgaaucuggcuu

SEQ ID NO: 2957247 - RNA, 19 nt, Artificial Sequence
  Description of Artificial Sequence: Synthetic oligonucleotide
uuuauucuccaugucuuca

SEQ ID NO: 2957248 - RNA, 19 nt, Artificial Sequence
  Description of Artificial Sequence: Synthetic oligonucleotide
acaaacaagcuggaguauc

SEQ ID NO: 2957249 - RNA, 19 nt, Artificial Sequence
  Description of Artificial Sequence: Synthetic oligonucleotide
uccaguucacaaacaagcu

SEQ ID NO: 2957250 - RNA, 19 nt, Artificial Sequence
  Description of Artificial Sequence: Synthetic oligonucleotide
uggcuucugcacuagacug

SEQ ID NO: 2957251 - RNA, 19 nt, Artificial Sequence
  Description of Artificial Sequence: Synthetic oligonucleotide
uucuuuggggauguuaucu

SEQ ID NO: 2957252 - RNA, 19 nt, Artificial Sequence
  Description of Artificial Sequence: Synthetic oligonucleotide
ggugacugaauuuuccugc

SEQ ID NO: 2957253 - RNA, 19 nt, Artificial Sequence
  Description of Artificial Sequence: Synthetic oligonucleotide
ucacgaaucuggcuucugc

SEQ ID NO: 2957254 - RNA, 19 nt, Artificial Sequence
  Description of Artificial Sequence: Synthetic oligonucleotide
agucuugaagucucccggg

SEQ ID NO: 2957255 - RNA, 19 nt, Artificial Sequence
  Description of Artificial Sequence: Synthetic oligonucleotide
uggugcuauguccccaacg

SEQ ID NO: 2957256 - RNA, 19 nt, Artificial Sequence
  Description of Artificial Sequence: Synthetic oligonucleotide
agaagucuugaagucuccc

SEQ ID NO: 2957257 - RNA, 19 nt, Artificial Sequence
  Description of Artificial Sequence: Synthetic oligonucleotide
uuuggggauguuaucugcu

SEQ ID NO: 2957258 - RNA, 19 nt, Artificial Sequence
  Description of Artificial Sequence: Synthetic oligonucleotide
ucuucauauuccgaggccu

SEQ ID NO: 2957259 - RNA, 19 nt, Artificial Sequence
  Description of Artificial Sequence: Synthetic oligonucleotide
ucauagccuccucuucucg

SEQ ID NO: 2957260 - RNA, 19 nt, Artificial Sequence
  Description of Artificial Sequence: Synthetic oligonucleotide
auagcuccuucccaagguc

SEQ ID NO: 2957261 - RNA, 19 nt, Artificial Sequence
  Description of Artificial Sequence: Synthetic oligonucleotide
gaguaucucagggugacug

SEQ ID NO: 2957262 - RNA, 19 nt, Artificial Sequence
  Description of Artificial Sequence: Synthetic oligonucleotide
ucuuuggggauguuaucug

SEQ ID NO: 2957263 - RNA, 19 nt, Artificial Sequence
  Description of Artificial Sequence: Synthetic oligonucleotide
cuuuggggauguuaucugc

SEQ ID NO: 2957264 - RNA, 19 nt, Artificial Sequence
  Description of Artificial Sequence: Synthetic oligonucleotide
agcugcuucacgaaucugg

SEQ ID NO: 2957265 - RNA, 19 nt, Artificial Sequence
  Description of Artificial Sequence: Synthetic oligonucleotide
uccccaacgaugcacucug

SEQ ID NO: 2957266 - RNA, 19 nt, Artificial Sequence
  Description of Artificial Sequence: Synthetic oligonucleotide
ucccagaguucauauagcu

SEQ ID NO: 2957267 - RNA, 19 nt, Artificial Sequence
  Description of Artificial Sequence: Synthetic oligonucleotide
guuaagguggucaucucug

SEQ ID NO: 2957268 - RNA, 19 nt, Artificial Sequence
  Description of Artificial Sequence: Synthetic oligonucleotide
ucugcacuagacugggucu

SEQ ID NO: 2957269 - RNA, 19 nt, Artificial Sequence
  Description of Artificial Sequence: Synthetic oligonucleotide
uauuccgaggccugaagaa

SEQ ID NO: 2957270 - RNA, 19 nt, Artificial Sequence
  Description of Artificial Sequence: Synthetic oligonucleotide
uggcauuucucucugccuc

SEQ ID NO: 2957271 - RNA, 19 nt, Artificial Sequence
  Description of Artificial Sequence: Synthetic oligonucleotide
auauuccgaggccugaaga

SEQ ID NO: 2957272 - RNA, 19 nt, Artificial Sequence
  Description of Artificial Sequence: Synthetic oligonucleotide
aucauuucacacuggucca

SEQ ID NO: 2957273 - RNA, 19 nt, Artificial Sequence
  Description of Artificial Sequence: Synthetic oligonucleotide
cugggucucauacucuucc

SEQ ID NO: 2957274 - RNA, 19 nt, Artificial Sequence
  Description of Artificial Sequence: Synthetic oligonucleotide
gggcuaggcguauacaucg

SEQ ID NO: 2957275 - RNA, 19 nt, Artificial Sequence
  Description of Artificial Sequence: Synthetic oligonucleotide
gauguuaucugcuggugcu

SEQ ID NO: 2957276 - RNA, 19 nt, Artificial Sequence
  Description of Artificial Sequence: Synthetic oligonucleotide
cuucccaagguccucuggc

SEQ ID NO: 2957277 - RNA, 19 nt, Artificial Sequence
  Description of Artificial Sequence: Synthetic oligonucleotide
aacgaugcacucugccaug

SEQ ID NO: 2957278 - RNA, 19 nt, Artificial Sequence
  Description of Artificial Sequence: Synthetic oligonucleotide
uuaucugcuggugcuaugu

SEQ ID NO: 2957279 - RNA, 19 nt, Artificial Sequence
  Description of Artificial Sequence: Synthetic oligonucleotide
cauauagcuccuucccaag

SEQ ID NO: 2957280 - RNA, 19 nt, Artificial Sequence
  Description of Artificial Sequence: Synthetic oligonucleotide
uggaaucauagaagucuug

SEQ ID NO: 2957281 - RNA, 19 nt, Artificial Sequence
  Description of Artificial Sequence: Synthetic oligonucleotide
aagaaucauuucacacugg

SEQ ID NO: 2957282 - RNA, 19 nt, Artificial Sequence
  Description of Artificial Sequence: Synthetic oligonucleotide
uagcuccuucccaaggucc

SEQ ID NO: 2957283 - RNA, 19 nt, Artificial Sequence
  Description of Artificial Sequence: Synthetic oligonucleotide
uuuucuucuuuggggaugu

SEQ ID NO: 2957284 - RNA, 19 nt, Artificial Sequence
  Description of Artificial Sequence: Synthetic oligonucleotide
ucuggcagcagcuggguua

SEQ ID NO: 2957285 - RNA, 19 nt, Artificial Sequence
  Description of Artificial Sequence: Synthetic oligonucleotide
aucgauccuuguuaaggug

SEQ ID NO: 2957286 - RNA, 19 nt, Artificial Sequence
  Description of Artificial Sequence: Synthetic oligonucleotide
ucucccggguuuauucucc

SEQ ID NO: 2957287 - RNA, 19 nt, Artificial Sequence
  Description of Artificial Sequence: Synthetic oligonucleotide
auacucuucccagaguuca

SEQ ID NO: 2957288 - RNA, 19 nt, Artificial Sequence
  Description of Artificial Sequence: Synthetic oligonucleotide
acaagcuggaguaucucag

SEQ ID NO: 2957289 - RNA, 19 nt, Artificial Sequence
  Description of Artificial Sequence: Synthetic oligonucleotide
accagggcuaggcguauac

SEQ ID NO: 2957290 - RNA, 19 nt, Artificial Sequence
  Description of Artificial Sequence: Synthetic oligonucleotide
ugaaccagggcuaggcgua

SEQ ID NO: 2957291 - RNA, 19 nt, Artificial Sequence
  Description of Artificial Sequence: Synthetic oligonucleotide
cagggugacugaauuuucc

SEQ ID NO: 2957292 - RNA, 19 nt, Artificial Sequence
  Description of Artificial Sequence: Synthetic oligonucleotide
uuggggauguuaucugcug

SEQ ID NO: 2957293 - RNA, 19 nt, Artificial Sequence
  Description of Artificial Sequence: Synthetic oligonucleotide
uagaagucuugaagucucc

SEQ ID NO: 2957294 - RNA, 19 nt, Artificial Sequence
  Description of Artificial Sequence: Synthetic oligonucleotide
ucugccuccaguucacaaa

SEQ ID NO: 2957295 - RNA, 19 nt, Artificial Sequence
  Description of Artificial Sequence: Synthetic oligonucleotide
ugacugaauuuuccugcug

SEQ ID NO: 2957296 - RNA, 19 nt, Artificial Sequence
  Description of Artificial Sequence: Synthetic oligonucleotide
agguggucaucucugguca

SEQ ID NO: 2957297 - RNA, 19 nt, Artificial Sequence
  Description of Artificial Sequence: Synthetic oligonucleotide
uaagguggucaucucuggu

SEQ ID NO: 2957298 - RNA, 19 nt, Artificial Sequence
  Description of Artificial Sequence: Synthetic oligonucleotide
uccucuucucgccugugcu

SEQ ID NO: 2957299 - RNA, 19 nt, Artificial Sequence
  Description of Artificial Sequence: Synthetic oligonucleotide
gcuggaguaucucagggug

SEQ ID NO: 2957300 - RNA, 19 nt, Artificial Sequence
  Description of Artificial Sequence: Synthetic oligonucleotide
ucccaagguccucuggcag

SEQ ID NO: 2957301 - RNA, 19 nt, Artificial Sequence
  Description of Artificial Sequence: Synthetic oligonucleotide
cuucauauuccgaggccug

SEQ ID NO: 2957302 - RNA, 19 nt, Artificial Sequence
  Description of Artificial Sequence: Synthetic oligonucleotide
cuaggcguauacaucgauc

SEQ ID NO: 2957303 - RNA, 19 nt, Artificial Sequence
  Description of Artificial Sequence: Synthetic oligonucleotide
cauagccuccucuucucgc

SEQ ID NO: 2957304 - RNA, 19 nt, Artificial Sequence
  Description of Artificial Sequence: Synthetic oligonucleotide
uauguccccaacgaugcac

SEQ ID NO: 2957305 - RNA, 19 nt, Artificial Sequence
  Description of Artificial Sequence: Synthetic oligonucleotide
aggccugaagaaucauuuc

SEQ ID NO: 2957306 - RNA, 19 nt, Artificial Sequence
  Description of Artificial Sequence: Synthetic oligonucleotide
caugucgugaaccagggcu

SEQ ID NO: 2957307 - RNA, 19 nt, Artificial Sequence
  Description of Artificial Sequence: Synthetic oligonucleotide
uacaucgauccuuguuaag

SEQ ID NO: 2957308 - RNA, 19 nt, Artificial Sequence
  Description of Artificial Sequence: Synthetic oligonucleotide
agggugacugaauuuuccu

SEQ ID NO: 2957309 - RNA, 19 nt, Artificial Sequence
  Description of Artificial Sequence: Synthetic oligonucleotide
auccuuguuaaggugguca

SEQ ID NO: 2957310 - RNA, 19 nt, Artificial Sequence
  Description of Artificial Sequence: Synthetic oligonucleotide
uccagcugcuucacgaauc

SEQ ID NO: 2957311 - RNA, 19 nt, Artificial Sequence
  Description of Artificial Sequence: Synthetic oligonucleotide
auacaucgauccuuguuaa

SEQ ID NO: 2957312 - RNA, 19 nt, Artificial Sequence
  Description of Artificial Sequence: Synthetic oligonucleotide
uuccgaggccugaagaauc

SEQ ID NO: 2957313 - RNA, 19 nt, Artificial Sequence
  Description of Artificial Sequence: Synthetic oligonucleotide
cauauuccgaggccugaag

SEQ ID NO: 2957314 - RNA, 19 nt, Artificial Sequence
  Description of Artificial Sequence: Synthetic oligonucleotide
gacugaauuuuccugcugu

SEQ ID NO: 2957315 - RNA, 19 nt, Artificial Sequence
  Description of Artificial Sequence: Synthetic oligonucleotide
ucgccugugcuuuucuucu

SEQ ID NO: 2957316 - RNA, 19 nt, Artificial Sequence
  Description of Artificial Sequence: Synthetic oligonucleotide
ucauuucacacugguccag

SEQ ID NO: 2957317 - RNA, 19 nt, Artificial Sequence
  Description of Artificial Sequence: Synthetic oligonucleotide
gucuucauauuccgaggcc

SEQ ID NO: 2957318 - RNA, 19 nt, Artificial Sequence
  Description of Artificial Sequence: Synthetic oligonucleotide
ucgugaaccagggcuaggc

SEQ ID NO: 2957319 - RNA, 19 nt, Artificial Sequence
  Description of Artificial Sequence: Synthetic oligonucleotide
ggucucauacucuucccag

SEQ ID NO: 2957320 - RNA, 19 nt, Artificial Sequence
  Description of Artificial Sequence: Synthetic oligonucleotide
aguaucucagggugacuga

SEQ ID NO: 2957321 - RNA, 19 nt, Artificial Sequence
  Description of Artificial Sequence: Synthetic oligonucleotide
guuuauucuccaugucuuc

SEQ ID NO: 2957322 - RNA, 19 nt, Artificial Sequence
  Description of Artificial Sequence: Synthetic oligonucleotide
uuucucucugccuccaguu

SEQ ID NO: 2957323 - RNA, 19 nt, Artificial Sequence
  Description of Artificial Sequence: Synthetic oligonucleotide
ggauguuaucugcuggugc

SEQ ID NO: 2957324 - RNA, 19 nt, Artificial Sequence
  Description of Artificial Sequence: Synthetic oligonucleotide
uccgaggccugaagaauca

SEQ ID NO: 2957325 - RNA, 19 nt, Artificial Sequence
  Description of Artificial Sequence: Synthetic oligonucleotide
ggugcuauguccccaacga

SEQ ID NO: 2957326 - RNA, 19 nt, Artificial Sequence
  Description of Artificial Sequence: Synthetic oligonucleotide
uggaguaucucagggugac

SEQ ID NO: 2957327 - RNA, 19 nt, Artificial Sequence
  Description of Artificial Sequence: Synthetic oligonucleotide
uucauagccuccucuucuc

SEQ ID NO: 2957328 - RNA, 19 nt, Artificial Sequence
  Description of Artificial Sequence: Synthetic oligonucleotide
auuucacacugguccagcu

SEQ ID NO: 2957329 - RNA, 19 nt, Artificial Sequence
  Description of Artificial Sequence: Synthetic oligonucleotide
gaaucauuucacacugguc

SEQ ID NO: 2957330 - RNA, 19 nt, Artificial Sequence
  Description of Artificial Sequence: Synthetic oligonucleotide
cugccuccaguucacaaac

SEQ ID NO: 2957331 - RNA, 19 nt, Artificial Sequence
  Description of Artificial Sequence: Synthetic oligonucleotide
aucucagggugacugaauu

SEQ ID NO: 2957332 - RNA, 19 nt, Artificial Sequence
  Description of Artificial Sequence: Synthetic oligonucleotide
uucccaagguccucuggca

SEQ ID NO: 2957333 - RNA, 19 nt, Artificial Sequence
  Description of Artificial Sequence: Synthetic oligonucleotide
uccuuguuaagguggucau

SEQ ID NO: 2957334 - RNA, 19 nt, Artificial Sequence
  Description of Artificial Sequence: Synthetic oligonucleotide
uucuccaugucuucauauu

SEQ ID NO: 2957335 - RNA, 19 nt, Artificial Sequence
  Description of Artificial Sequence: Synthetic oligonucleotide
agcuggaguaucucagggu

SEQ ID NO: 2957336 - RNA, 19 nt, Artificial Sequence
  Description of Artificial Sequence: Synthetic oligonucleotide
ggaaucauagaagucuuga

SEQ ID NO: 2957337 - RNA, 19 nt, Artificial Sequence
  Description of Artificial Sequence: Synthetic oligonucleotide
ucuugaagucucccggguu

SEQ ID NO: 2957338 - RNA, 19 nt, Artificial Sequence
  Description of Artificial Sequence: Synthetic oligonucleotide
cuaugcuggcauuucucuc

SEQ ID NO: 2957339 - RNA, 19 nt, Artificial Sequence
  Description of Artificial Sequence: Synthetic oligonucleotide
gcuauguccccaacgaugc

SEQ ID NO: 2957340 - RNA, 19 nt, Artificial Sequence
  Description of Artificial Sequence: Synthetic oligonucleotide
ugcuucauagccuccucuu

SEQ ID NO: 2957341 - RNA, 19 nt, Artificial Sequence
  Description of Artificial Sequence: Synthetic oligonucleotide
aaucuggcuucugcacuag

SEQ ID NO: 2957342 - RNA, 19 nt, Artificial Sequence
  Description of Artificial Sequence: Synthetic oligonucleotide
agcuggguuaucugcuuca

SEQ ID NO: 2957343 - RNA, 19 nt, Artificial Sequence
  Description of Artificial Sequence: Synthetic oligonucleotide
ucugcggaagcuguggcua

SEQ ID NO: 2957344 - RNA, 19 nt, Artificial Sequence
  Description of Artificial Sequence: Synthetic oligonucleotide
uucucucugccuccaguuc

SEQ ID NO: 2957345 - RNA, 19 nt, Artificial Sequence
  Description of Artificial Sequence: Synthetic oligonucleotide
cugcuguggaaucauagaa

SEQ ID NO: 2957346 - RNA, 19 nt, Artificial Sequence
  Description of Artificial Sequence: Synthetic oligonucleotide
cucgccugugcuuuucuuc

SEQ ID NO: 2957347 - RNA, 19 nt, Artificial Sequence
  Description of Artificial Sequence: Synthetic oligonucleotide
uaucugcuucauagccucc

SEQ ID NO: 2957348 - RNA, 19 nt, Artificial Sequence
  Description of Artificial Sequence: Synthetic oligonucleotide
gaaucuggcuucugcacua

SEQ ID NO: 2957349 - RNA, 19 nt, Artificial Sequence
  Description of Artificial Sequence: Synthetic oligonucleotide
cauuucacacugguccagc

SEQ ID NO: 2957350 - RNA, 19 nt, Artificial Sequence
  Description of Artificial Sequence: Synthetic oligonucleotide
uaucucagggugacugaau

SEQ ID NO: 2957351 - RNA, 19 nt, Artificial Sequence
  Description of Artificial Sequence: Synthetic oligonucleotide
uggcuaugcuggcauuucu

SEQ ID NO: 2957352 - RNA, 19 nt, Artificial Sequence
  Description of Artificial Sequence: Synthetic oligonucleotide
agucucccggguuuauucu

SEQ ID NO: 2957353 - RNA, 19 nt, Artificial Sequence
  Description of Artificial Sequence: Synthetic oligonucleotide
gcuggcauuucucucugcc

SEQ ID NO: 2957354 - RNA, 19 nt, Artificial Sequence
  Description of Artificial Sequence: Synthetic oligonucleotide
agggcuaggcguauacauc

SEQ ID NO: 2957355 - RNA, 19 nt, Artificial Sequence
  Description of Artificial Sequence: Synthetic oligonucleotide
cacgaaucuggcuucugca

SEQ ID NO: 2957356 - RNA, 19 nt, Artificial Sequence
  Description of Artificial Sequence: Synthetic oligonucleotide
cuucuuuggggauguuauc

SEQ ID NO: 2957357 - RNA, 19 nt, Artificial Sequence
  Description of Artificial Sequence: Synthetic oligonucleotide
ugucgugaaccagggcuag

SEQ ID NO: 2957358 - RNA, 19 nt, Artificial Sequence
  Description of Artificial Sequence: Synthetic oligonucleotide
guucacaaacaagcuggag

SEQ ID NO: 2957359 - RNA, 19 nt, Artificial Sequence
  Description of Artificial Sequence: Synthetic oligonucleotide
uucuucuuuggggauguua

SEQ ID NO: 2957360 - RNA, 19 nt, Artificial Sequence
  Description of Artificial Sequence: Synthetic oligonucleotide
ugcacucugccaugucgug

SEQ ID NO: 2957361 - RNA, 19 nt, Artificial Sequence
  Description of Artificial Sequence: Synthetic oligonucleotide
gggugacugaauuuuccug

SEQ ID NO: 2957362 - RNA, 19 nt, Artificial Sequence
  Description of Artificial Sequence: Synthetic oligonucleotide
cucugccaugucgugaacc

SEQ ID NO: 2957363 - RNA, 19 nt, Artificial Sequence
  Description of Artificial Sequence: Synthetic oligonucleotide
ucuucccagaguucauaua

SEQ ID NO: 2957364 - RNA, 19 nt, Artificial Sequence
  Description of Artificial Sequence: Synthetic oligonucleotide
guuaucugcuggugcuaug

SEQ ID NO: 2957365 - RNA, 19 nt, Artificial Sequence
  Description of Artificial Sequence: Synthetic oligonucleotide
gcuguggaaucauagaagu

SEQ ID NO: 2957366 - RNA, 19 nt, Artificial Sequence
  Description of Artificial Sequence: Synthetic oligonucleotide
ucauauuccgaggccugaa

SEQ ID NO: 2957367 - RNA, 19 nt, Artificial Sequence
  Description of Artificial Sequence: Synthetic oligonucleotide
aggcguauacaucgauccu

SEQ ID NO: 2957368 - RNA, 19 nt, Artificial Sequence
  Description of Artificial Sequence: Synthetic oligonucleotide
gucucauacucuucccaga

SEQ ID NO: 2957369 - RNA, 19 nt, Artificial Sequence
  Description of Artificial Sequence: Synthetic oligonucleotide
augcuggcauuucucucug

SEQ ID NO: 2957370 - RNA, 19 nt, Artificial Sequence
  Description of Artificial Sequence: Synthetic oligonucleotide
uuguuaagguggucaucuc

SEQ ID NO: 2957371 - RNA, 19 nt, Artificial Sequence
  Description of Artificial Sequence: Synthetic oligonucleotide
caaacaagcuggaguaucu

SEQ ID NO: 2957372 - RNA, 19 nt, Artificial Sequence
  Description of Artificial Sequence: Synthetic oligonucleotide
gcuucugcacuagacuggg

SEQ ID NO: 2957373 - RNA, 19 nt, Artificial Sequence
  Description of Artificial Sequence: Synthetic oligonucleotide
ggguuaucugcuucauagc

SEQ ID NO: 2957374 - RNA, 19 nt, Artificial Sequence
  Description of Artificial Sequence: Synthetic oligonucleotide
ggguuuauucuccaugucu

SEQ ID NO: 2957375 - RNA, 19 nt, Artificial Sequence
  Description of Artificial Sequence: Synthetic oligonucleotide
cucucugccuccaguucac

SEQ ID NO: 2957376 - RNA, 19 nt, Artificial Sequence
  Description of Artificial Sequence: Synthetic oligonucleotide
uucucgccugugcuuuucu

SEQ ID NO: 2957377 - RNA, 19 nt, Artificial Sequence
  Description of Artificial Sequence: Synthetic oligonucleotide
uuuccugcuguggaaucau

SEQ ID NO: 2957378 - RNA, 19 nt, Artificial Sequence
  Description of Artificial Sequence: Synthetic oligonucleotide
auuccgaggccugaagaau

SEQ ID NO: 2957379 - RNA, 19 nt, Artificial Sequence
  Description of Artificial Sequence: Synthetic oligonucleotide
cauagaagucuugaagucu

SEQ ID NO: 2957380 - RNA, 19 nt, Artificial Sequence
  Description of Artificial Sequence: Synthetic oligonucleotide
ugccuccaguucacaaaca

SEQ ID NO: 2957381 - RNA, 19 nt, Artificial Sequence
  Description of Artificial Sequence: Synthetic oligonucleotide
cuucauagccuccucuucu

SEQ ID NO: 2957382 - RNA, 19 nt, Artificial Sequence
  Description of Artificial Sequence: Synthetic oligonucleotide
ggcuucugcacuagacugg

SEQ ID NO: 2957383 - RNA, 19 nt, Artificial Sequence
  Description of Artificial Sequence: Synthetic oligonucleotide
aguucacaaacaagcugga

SEQ ID NO: 2957384 - RNA, 19 nt, Artificial Sequence
  Description of Artificial Sequence: Synthetic oligonucleotide
aggagcccggcucugcgga

SEQ ID NO: 2957385 - RNA, 19 nt, Artificial Sequence
  Description of Artificial Sequence: Synthetic oligonucleotide
acucugccaugucgugaac

SEQ ID NO: 2957386 - RNA, 19 nt, Artificial Sequence
  Description of Artificial Sequence: Synthetic oligonucleotide
ccuccaguucacaaacaag

SEQ ID NO: 2957387 - RNA, 19 nt, Artificial Sequence
  Description of Artificial Sequence: Synthetic oligonucleotide
acugggucucauacucuuc

SEQ ID NO: 2957388 - RNA, 19 nt, Artificial Sequence
  Description of Artificial Sequence: Synthetic oligonucleotide
uacucuucccagaguucau

SEQ ID NO: 2957389 - RNA, 19 nt, Artificial Sequence
  Description of Artificial Sequence: Synthetic oligonucleotide
guauacaucgauccuuguu

SEQ ID NO: 2957390 - RNA, 19 nt, Artificial Sequence
  Description of Artificial Sequence: Synthetic oligonucleotide
agcagcuggguuaucugcu

SEQ ID NO: 2957391 - RNA, 19 nt, Artificial Sequence
  Description of Artificial Sequence: Synthetic oligonucleotide
ugcacuagacugggucuca

SEQ ID NO: 2957392 - RNA, 19 nt, Artificial Sequence
  Description of Artificial Sequence: Synthetic oligonucleotide
caucgauccuuguuaaggu

SEQ ID NO: 2957393 - RNA, 19 nt, Artificial Sequence
  Description of Artificial Sequence: Synthetic oligonucleotide
cacucugccaugucgugaa

SEQ ID NO: 2957394 - RNA, 19 nt, Artificial Sequence
  Description of Artificial Sequence: Synthetic oligonucleotide
augcacucugccaugucgu

SEQ ID NO: 2957395 - RNA, 19 nt, Artificial Sequence
  Description of Artificial Sequence: Synthetic oligonucleotide
uagccuccucuucucgccu

SEQ ID NO: 2957396 - RNA, 19 nt, Artificial Sequence
  Description of Artificial Sequence: Synthetic oligonucleotide
gugaaccagggcuaggcgu

SEQ ID NO: 2957397 - RNA, 19 nt, Artificial Sequence
  Description of Artificial Sequence: Synthetic oligonucleotide
uucacgaaucuggcuucug

SEQ ID NO: 2957398 - RNA, 19 nt, Artificial Sequence
  Description of Artificial Sequence: Synthetic oligonucleotide
gccugaagaaucauuucac

SEQ ID NO: 2957399 - RNA, 19 nt, Artificial Sequence
  Description of Artificial Sequence: Synthetic oligonucleotide
cuggaguaucucaggguga

SEQ ID NO: 2957400 - RNA, 19 nt, Artificial Sequence
  Description of Artificial Sequence: Synthetic oligonucleotide
gaggccugaagaaucauuu

SEQ ID NO: 2957401 - RNA, 19 nt, Artificial Sequence
  Description of Artificial Sequence: Synthetic oligonucleotide
gcugcuucacgaaucuggc

SEQ ID NO: 2957402 - RNA, 19 nt, Artificial Sequence
  Description of Artificial Sequence: Synthetic oligonucleotide
uccuucccaagguccucug

SEQ ID NO: 2957403 - RNA, 19 nt, Artificial Sequence
  Description of Artificial Sequence: Synthetic oligonucleotide
ccugaagaaucauuucaca

SEQ ID NO: 2957404 - RNA, 19 nt, Artificial Sequence
  Description of Artificial Sequence: Synthetic oligonucleotide
gugacugaauuuuccugcu

SEQ ID NO: 2957405 - RNA, 19 nt, Artificial Sequence
  Description of Artificial Sequence: Synthetic oligonucleotide
gcguauacaucgauccuug

SEQ ID NO: 2957406 - RNA, 19 nt, Artificial Sequence
  Description of Artificial Sequence: Synthetic oligonucleotide
auguccccaacgaugcacu

SEQ ID NO: 2957407 - RNA, 19 nt, Artificial Sequence
  Description of Artificial Sequence: Synthetic oligonucleotide
gucucccggguuuauucuc

SEQ ID NO: 2957408 - RNA, 19 nt, Artificial Sequence
  Description of Artificial Sequence: Synthetic oligonucleotide
cugcuggugcuaugucccc

SEQ ID NO: 2957409 - RNA, 19 nt, Artificial Sequence
  Description of Artificial Sequence: Synthetic oligonucleotide
gccaugucgugaaccaggg

SEQ ID NO: 2957410 - RNA, 19 nt, Artificial Sequence
  Description of Artificial Sequence: Synthetic oligonucleotide
ugcuggugcuaugucccca

SEQ ID NO: 2957411 - RNA, 19 nt, Artificial Sequence
  Description of Artificial Sequence: Synthetic oligonucleotide
uugaagucucccggguuua

SEQ ID NO: 2957412 - RNA, 19 nt, Artificial Sequence
  Description of Artificial Sequence: Synthetic oligonucleotide
ugcuggcauuucucucugc

SEQ ID NO: 2957413 - RNA, 19 nt, Artificial Sequence
  Description of Artificial Sequence: Synthetic oligonucleotide
guaucucagggugacugaa

SEQ ID NO: 2957414 - RNA, 19 nt, Artificial Sequence
  Description of Artificial Sequence: Synthetic oligonucleotide
cccaacgaugcacucugcc

SEQ ID NO: 2957415 - RNA, 19 nt, Artificial Sequence
  Description of Artificial Sequence: Synthetic oligonucleotide
caacgaugcacucugccau

SEQ ID NO: 2957416 - RNA, 19 nt, Artificial Sequence
  Description of Artificial Sequence: Synthetic oligonucleotide
cugguccagcugcuucacg

SEQ ID NO: 2957417 - RNA, 19 nt, Artificial Sequence
  Description of Artificial Sequence: Synthetic oligonucleotide
cugcacuagacugggucuc

SEQ ID NO: 2957418 - RNA, 19 nt, Artificial Sequence
  Description of Artificial Sequence: Synthetic oligonucleotide
gcuucacgaaucuggcuuc

SEQ ID NO: 2957419 - RNA, 19 nt, Artificial Sequence
  Description of Artificial Sequence: Synthetic oligonucleotide
ggcucugcggaagcugugg

SEQ ID NO: 2957420 - RNA, 19 nt, Artificial Sequence
  Description of Artificial Sequence: Synthetic oligonucleotide
cccagaguucauauagcuc

SEQ ID NO: 2957421 - RNA, 19 nt, Artificial Sequence
  Description of Artificial Sequence: Synthetic oligonucleotide
cuggcuucugcacuagacu

SEQ ID NO: 2957422 - RNA, 19 nt, Artificial Sequence
  Description of Artificial Sequence: Synthetic oligonucleotide
gcuucauagccuccucuuc

SEQ ID NO: 2957423 - RNA, 19 nt, Artificial Sequence
  Description of Artificial Sequence: Synthetic oligonucleotide
gggucucauacucuuccca

SEQ ID NO: 2957424 - RNA, 19 nt, Artificial Sequence
  Description of Artificial Sequence: Synthetic oligonucleotide
aucuggcuucugcacuaga

SEQ ID NO: 2957425 - RNA, 19 nt, Artificial Sequence
  Description of Artificial Sequence: Synthetic oligonucleotide
uguccccaacgaugcacuc

SEQ ID NO: 2957426 - RNA, 19 nt, Artificial Sequence
  Description of Artificial Sequence: Synthetic oligonucleotide
gacugggucucauacucuu

SEQ ID NO: 2957427 - RNA, 19 nt, Artificial Sequence
  Description of Artificial Sequence: Synthetic oligonucleotide
cuagacugggucucauacu

SEQ ID NO: 2957428 - RNA, 19 nt, Artificial Sequence
  Description of Artificial Sequence: Synthetic oligonucleotide
cuugaagucucccggguuu

SEQ ID NO: 2957429 - RNA, 19 nt, Artificial Sequence
  Description of Artificial Sequence: Synthetic oligonucleotide
gauccuuguuaaggugguc

SEQ ID NO: 2957430 - RNA, 19 nt, Artificial Sequence
  Description of Artificial Sequence: Synthetic oligonucleotide
ugcggaagcuguggcuaug

SEQ ID NO: 2957431 - RNA, 19 nt, Artificial Sequence
  Description of Artificial Sequence: Synthetic oligonucleotide
cagcuggguuaucugcuuc

SEQ ID NO: 2957432 - RNA, 19 nt, Artificial Sequence
  Description of Artificial Sequence: Synthetic oligonucleotide
gggauguuaucugcuggug

SEQ ID NO: 2957433 - RNA, 19 nt, Artificial Sequence
  Description of Artificial Sequence: Synthetic oligonucleotide
cccggguuuauucuccaug

SEQ ID NO: 2957434 - RNA, 19 nt, Artificial Sequence
  Description of Artificial Sequence: Synthetic oligonucleotide
ccaacgaugcacucugcca

SEQ ID NO: 2957435 - RNA, 19 nt, Artificial Sequence
  Description of Artificial Sequence: Synthetic oligonucleotide
acgaugcacucugccaugu

SEQ ID NO: 2957436 - RNA, 19 nt, Artificial Sequence
  Description of Artificial Sequence: Synthetic oligonucleotide
cccaagguccucuggcagc

SEQ ID NO: 2957437 - RNA, 19 nt, Artificial Sequence
  Description of Artificial Sequence: Synthetic oligonucleotide
agcuccuucccaagguccu

SEQ ID NO: 2957438 - RNA, 19 nt, Artificial Sequence
  Description of Artificial Sequence: Synthetic oligonucleotide
augucgugaaccagggcua

SEQ ID NO: 2957439 - RNA, 19 nt, Artificial Sequence
  Description of Artificial Sequence: Synthetic oligonucleotide
gcuaugcuggcauuucucu

SEQ ID NO: 2957440 - RNA, 19 nt, Artificial Sequence
  Description of Artificial Sequence: Synthetic oligonucleotide
ucucgccugugcuuuucuu

SEQ ID NO: 2957441 - RNA, 19 nt, Artificial Sequence
  Description of Artificial Sequence: Synthetic oligonucleotide
gucgugaaccagggcuagg

SEQ ID NO: 2957442 - RNA, 19 nt, Artificial Sequence
  Description of Artificial Sequence: Synthetic oligonucleotide
cugccaugucgugaaccag

SEQ ID NO: 2957443 - RNA, 19 nt, Artificial Sequence
  Description of Artificial Sequence: Synthetic oligonucleotide
cagggcuaggcguauacau

SEQ ID NO: 2957444 - RNA, 19 nt, Artificial Sequence
  Description of Artificial Sequence: Synthetic oligonucleotide
gguuuauucuccaugucuu

SEQ ID NO: 2957445 - RNA, 19 nt, Artificial Sequence
  Description of Artificial Sequence: Synthetic oligonucleotide
acucuucccagaguucaua

SEQ ID NO: 2957446 - RNA, 19 nt, Artificial Sequence
  Description of Artificial Sequence: Synthetic oligonucleotide
gucuugaagucucccgggu

SEQ ID NO: 2957447 - RNA, 19 nt, Artificial Sequence
  Description of Artificial Sequence: Synthetic oligonucleotide
agguccucuggcagcagcu

SEQ ID NO: 2957448 - RNA, 19 nt, Artificial Sequence
  Description of Artificial Sequence: Synthetic oligonucleotide
guggcuaugcuggcauuuc

SEQ ID NO: 2957449 - RNA, 19 nt, Artificial Sequence
  Description of Artificial Sequence: Synthetic oligonucleotide
ugaagucucccggguuuau

SEQ ID NO: 2957450 - RNA, 19 nt, Artificial Sequence
  Description of Artificial Sequence: Synthetic oligonucleotide
gccuccaguucacaaacaa

SEQ ID NO: 2957451 - RNA, 19 nt, Artificial Sequence
  Description of Artificial Sequence: Synthetic oligonucleotide
agacugggucucauacucu

SEQ ID NO: 2957452 - RNA, 19 nt, Artificial Sequence
  Description of Artificial Sequence: Synthetic oligonucleotide
cucugccuccaguucacaa

SEQ ID NO: 2957453 - RNA, 19 nt, Artificial Sequence
  Description of Artificial Sequence: Synthetic oligonucleotide
gagcccggcucugcggaag

SEQ ID NO: 2957454 - RNA, 19 nt, Artificial Sequence
  Description of Artificial Sequence: Synthetic oligonucleotide
gcucugcggaagcuguggc

SEQ ID NO: 2957455 - RNA, 19 nt, Artificial Sequence
  Description of Artificial Sequence: Synthetic oligonucleotide
ucucugccuccaguucaca

SEQ ID NO: 2957456 - RNA, 19 nt, Artificial Sequence
  Description of Artificial Sequence: Synthetic oligonucleotide
ggcuaugcuggcauuucuc

SEQ ID NO: 2957457 - RNA, 19 nt, Artificial Sequence
  Description of Artificial Sequence: Synthetic oligonucleotide
cuggugcuauguccccaac

SEQ ID NO: 2957458 - RNA, 19 nt, Artificial Sequence
  Description of Artificial Sequence: Synthetic oligonucleotide
ucuucucgccugugcuuuu

SEQ ID NO: 2957459 - RNA, 19 nt, Artificial Sequence
  Description of Artificial Sequence: Synthetic oligonucleotide
cgugaaccagggcuaggcg

SEQ ID NO: 2957460 - RNA, 19 nt, Artificial Sequence
  Description of Artificial Sequence: Synthetic oligonucleotide
ucccggguuuauucuccau

SEQ ID NO: 2957461 - RNA, 19 nt, Artificial Sequence
  Description of Artificial Sequence: Synthetic oligonucleotide
ggggauguuaucugcuggu

SEQ ID NO: 2957462 - RNA, 19 nt, Artificial Sequence
  Description of Artificial Sequence: Synthetic oligonucleotide
gguggucaucucuggucac

SEQ ID NO: 2957463 - RNA, 19 nt, Artificial Sequence
  Description of Artificial Sequence: Synthetic oligonucleotide
ccuucccaagguccucugg

SEQ ID NO: 2957464 - RNA, 19 nt, Artificial Sequence
  Description of Artificial Sequence: Synthetic oligonucleotide
cuucucgccugugcuuuuc

SEQ ID NO: 2957465 - RNA, 19 nt, Artificial Sequence
  Description of Artificial Sequence: Synthetic oligonucleotide
cuauguccccaacgaugca

SEQ ID NO: 2957466 - RNA, 19 nt, Artificial Sequence
  Description of Artificial Sequence: Synthetic oligonucleotide
guggaaucauagaagucuu

SEQ ID NO: 2957467 - RNA, 19 nt, Artificial Sequence
  Description of Artificial Sequence: Synthetic oligonucleotide
cucccggguuuauucucca

SEQ ID NO: 2957468 - RNA, 19 nt, Artificial Sequence
  Description of Artificial Sequence: Synthetic oligonucleotide
cucauacucuucccagagu

SEQ ID NO: 2957469 - RNA, 19 nt, Artificial Sequence
  Description of Artificial Sequence: Synthetic oligonucleotide
cugcuucauagccuccucu

SEQ ID NO: 2957470 - RNA, 19 nt, Artificial Sequence
  Description of Artificial Sequence: Synthetic oligonucleotide
cacuagacugggucucaua

SEQ ID NO: 2957471 - RNA, 19 nt, Artificial Sequence
  Description of Artificial Sequence: Synthetic oligonucleotide
cuggguuaucugcuucaua

SEQ ID NO: 2957472 - RNA, 19 nt, Artificial Sequence
  Description of Artificial Sequence: Synthetic oligonucleotide
ccaugucuucauauuccga

SEQ ID NO: 2957473 - RNA, 19 nt, Artificial Sequence
  Description of Artificial Sequence: Synthetic oligonucleotide
cucugcggaagcuguggcu

SEQ ID NO: 2957474 - RNA, 19 nt, Artificial Sequence
  Description of Artificial Sequence: Synthetic oligonucleotide
gcuggugcuauguccccaa

SEQ ID NO: 2957475 - RNA, 19 nt, Artificial Sequence
  Description of Artificial Sequence: Synthetic oligonucleotide
cagcugcuucacgaaucug

SEQ ID NO: 2957476 - RNA, 19 nt, Artificial Sequence
  Description of Artificial Sequence: Synthetic oligonucleotide
gcuguggcuaugcuggcau

SEQ ID NO: 2957477 - RNA, 19 nt, Artificial Sequence
  Description of Artificial Sequence: Synthetic oligonucleotide
ccggguuuauucuccaugu

SEQ ID NO: 2957478 - RNA, 19 nt, Artificial Sequence
  Description of Artificial Sequence: Synthetic oligonucleotide
ccaugucgugaaccagggc

SEQ ID NO: 2957479 - RNA, 19 nt, Artificial Sequence
  Description of Artificial Sequence: Synthetic oligonucleotide
ccuuguuaagguggucauc

SEQ ID NO: 2957480 - RNA, 19 nt, Artificial Sequence
  Description of Artificial Sequence: Synthetic oligonucleotide
caagguccucuggcagcag

SEQ ID NO: 2957481 - RNA, 19 nt, Artificial Sequence
  Description of Artificial Sequence: Synthetic oligonucleotide
gugcuauguccccaacgau

SEQ ID NO: 2957482 - RNA, 19 nt, Artificial Sequence
  Description of Artificial Sequence: Synthetic oligonucleotide
aaccagggcuaggcguaua

SEQ ID NO: 2957483 - RNA, 19 nt, Artificial Sequence
  Description of Artificial Sequence: Synthetic oligonucleotide
cugcuucacgaaucuggcu

SEQ ID NO: 2957484 - RNA, 19 nt, Artificial Sequence
  Description of Artificial Sequence: Synthetic oligonucleotide
ggcguauacaucgauccuu

SEQ ID NO: 2957485 - RNA, 19 nt, Artificial Sequence
  Description of Artificial Sequence: Synthetic oligonucleotide
uuucuucuuuggggauguu

SEQ ID NO: 2957486 - RNA, 19 nt, Artificial Sequence
  Description of Artificial Sequence: Synthetic oligonucleotide
guccccaacgaugcacucu

SEQ ID NO: 2957487 - RNA, 19 nt, Artificial Sequence
  Description of Artificial Sequence: Synthetic oligonucleotide
gcacucugccaugucguga

SEQ ID NO: 2957488 - RNA, 19 nt, Artificial Sequence
  Description of Artificial Sequence: Synthetic oligonucleotide
gaagucucccggguuuauu

SEQ ID NO: 2957489 - RNA, 19 nt, Artificial Sequence
  Description of Artificial Sequence: Synthetic oligonucleotide
gcuaggcguauacaucgau

SEQ ID NO: 2957490 - RNA, 19 nt, Artificial Sequence
  Description of Artificial Sequence: Synthetic oligonucleotide
ccaagguccucuggcagca

SEQ ID NO: 2957491 - RNA, 19 nt, Artificial Sequence
  Description of Artificial Sequence: Synthetic oligonucleotide
cucuucucgccugugcuuu

SEQ ID NO: 2957492 - RNA, 19 nt, Artificial Sequence
  Description of Artificial Sequence: Synthetic oligonucleotide
cuucacgaaucuggcuucu

SEQ ID NO: 2957493 - RNA, 19 nt, Artificial Sequence
  Description of Artificial Sequence: Synthetic oligonucleotide
cacaaacaagcuggaguau

SEQ ID NO: 2957494 - RNA, 19 nt, Artificial Sequence
  Description of Artificial Sequence: Synthetic oligonucleotide
ggcuaggcguauacaucga

SEQ ID NO: 2957495 - RNA, 19 nt, Artificial Sequence
  Description of Artificial Sequence: Synthetic oligonucleotide
cggguuuauucuccauguc

SEQ ID NO: 2957496 - RNA, 19 nt, Artificial Sequence
  Description of Artificial Sequence: Synthetic oligonucleotide
ccagcugcuucacgaaucu

SEQ ID NO: 2957497 - RNA, 19 nt, Artificial Sequence
  Description of Artificial Sequence: Synthetic oligonucleotide
cuucugcacuagacugggu

SEQ ID NO: 2957498 - RNA, 19 nt, Artificial Sequence
  Description of Artificial Sequence: Synthetic oligonucleotide
cuggcagcagcuggguuau

SEQ ID NO: 2957499 - RNA, 19 nt, Artificial Sequence
  Description of Artificial Sequence: Synthetic oligonucleotide
cgaaucuggcuucugcacu

SEQ ID NO: 2957500 - RNA, 19 nt, Artificial Sequence
  Description of Artificial Sequence: Synthetic oligonucleotide
ccccaacgaugcacucugc

SEQ ID NO: 2957501 - RNA, 19 nt, Artificial Sequence
  Description of Artificial Sequence: Synthetic oligonucleotide
gaaccagggcuaggcguau

SEQ ID NO: 2957502 - RNA, 19 nt, Artificial Sequence
  Description of Artificial Sequence: Synthetic oligonucleotide
cccggcucugcggaagcug

SEQ ID NO: 2957503 - RNA, 19 nt, Artificial Sequence
  Description of Artificial Sequence: Synthetic oligonucleotide
cugcggaagcuguggcuau

SEQ ID NO: 2957504 - RNA, 19 nt, Artificial Sequence
  Description of Artificial Sequence: Synthetic oligonucleotide
gccugugcuuuucuucuuu

SEQ ID NO: 2957505 - RNA, 19 nt, Artificial Sequence
  Description of Artificial Sequence: Synthetic oligonucleotide
gcagcuggguuaucugcuu

SEQ ID NO: 2957506 - RNA, 19 nt, Artificial Sequence
  Description of Artificial Sequence: Synthetic oligonucleotide
cgauccuuguuaagguggu

SEQ ID NO: 2957507 - RNA, 19 nt, Artificial Sequence
  Description of Artificial Sequence: Synthetic oligonucleotide
ccagggcuaggcguauaca

SEQ ID NO: 2957508 - RNA, 19 nt, Artificial Sequence
  Description of Artificial Sequence: Synthetic oligonucleotide
ggaguaucucagggugacu

SEQ ID NO: 2957509 - RNA, 19 nt, Artificial Sequence
  Description of Artificial Sequence: Synthetic oligonucleotide
cgaugcacucugccauguc

SEQ ID NO: 2957510 - RNA, 19 nt, Artificial Sequence
  Description of Artificial Sequence: Synthetic oligonucleotide
ggagcccggcucugcggaa

SEQ ID NO: 2957511 - RNA, 19 nt, Artificial Sequence
  Description of Artificial Sequence: Synthetic oligonucleotide
cuguggcuaugcuggcauu

SEQ ID NO: 2957512 - RNA, 19 nt, Artificial Sequence
  Description of Artificial Sequence: Synthetic oligonucleotide
ccggcucugcggaagcugu

SEQ ID NO: 2957513 - RNA, 19 nt, Artificial Sequence
  Description of Artificial Sequence: Synthetic oligonucleotide
gcuggguuaucugcuucau

SEQ ID NO: 2957514 - RNA, 19 nt, Artificial Sequence
  Description of Artificial Sequence: Synthetic oligonucleotide
ccuccucuucucgccugug

SEQ ID NO: 2957515 - RNA, 19 nt, Artificial Sequence
  Description of Artificial Sequence: Synthetic oligonucleotide
cucuggcagcagcuggguu

SEQ ID NO: 2957516 - RNA, 19 nt, Artificial Sequence
  Description of Artificial Sequence: Synthetic oligonucleotide
uggcagcagcuggguuauc

SEQ ID NO: 2957517 - RNA, 19 nt, Artificial Sequence
  Description of Artificial Sequence: Synthetic oligonucleotide
cguauacaucgauccuugu

SEQ ID NO: 2957518 - RNA, 19 nt, Artificial Sequence
  Description of Artificial Sequence: Synthetic oligonucleotide
cggcucugcggaagcugug

SEQ ID NO: 2957519 - RNA, 19 nt, Artificial Sequence
  Description of Artificial Sequence: Synthetic oligonucleotide
cgaggccugaagaaucauu

SEQ ID NO: 2957520 - RNA, 19 nt, Artificial Sequence
  Description of Artificial Sequence: Synthetic oligonucleotide
gcacuagacugggucucau

SEQ ID NO: 2957521 - RNA, 19 nt, Artificial Sequence
  Description of Artificial Sequence: Synthetic oligonucleotide
ccucuggcagcagcugggu

SEQ ID NO: 2957522 - RNA, 19 nt, Artificial Sequence
  Description of Artificial Sequence: Synthetic oligonucleotide
cggaagcuguggcuaugcu

SEQ ID NO: 2957523 - RNA, 19 nt, Artificial Sequence
  Description of Artificial Sequence: Synthetic oligonucleotide
ccgaggccugaagaaucau

SEQ ID NO: 2957524 - RNA, 19 nt, Artificial Sequence
  Description of Artificial Sequence: Synthetic oligonucleotide
gcccggcucugcggaagcu

SEQ ID NO: 2957525 - RNA, 19 nt, Artificial Sequence
  Description of Artificial Sequence: Synthetic oligonucleotide
cgccugugcuuuucuucuu

SEQ ID NO: 2957526 - RNA, 19 nt, Artificial Sequence
  Description of Artificial Sequence: Synthetic oligonucleotide
auucaaugcacuuauaggg

SEQ ID NO: 2957527 - RNA, 19 nt, Artificial Sequence
  Description of Artificial Sequence: Synthetic oligonucleotide
ugaaugaaucuucugaugc

SEQ ID NO: 2957528 - RNA, 19 nt, Artificial Sequence
  Description of Artificial Sequence: Synthetic oligonucleotide
uucuguaugaauuugcuga

SEQ ID NO: 2957529 - RNA, 19 nt, Artificial Sequence
  Description of Artificial Sequence: Synthetic oligonucleotide
acauuuaugauguuccuag

SEQ ID NO: 2957530 - RNA, 19 nt, Artificial Sequence
  Description of Artificial Sequence: Synthetic oligonucleotide
auucaugacaauuguaagg

SEQ ID NO: 2957531 - RNA, 19 nt, Artificial Sequence
  Description of Artificial Sequence: Synthetic oligonucleotide
aaagcuucucuccugaaug

SEQ ID NO: 2957532 - RNA, 19 nt, Artificial Sequence
  Description of Artificial Sequence: Synthetic oligonucleotide
uuuaugauguuccuagagc

SEQ ID NO: 2957533 - RNA, 19 nt, Artificial Sequence
  Description of Artificial Sequence: Synthetic oligonucleotide
aagugaaaacagcagcuac

SEQ ID NO: 2957534 - RNA, 19 nt, Artificial Sequence
  Description of Artificial Sequence: Synthetic oligonucleotide
guuugguuagagcagagcg

SEQ ID NO: 2957535 - RNA, 19 nt, Artificial Sequence
  Description of Artificial Sequence: Synthetic oligonucleotide
cuacauguuguuuuaauag

SEQ ID NO: 2957536 - RNA, 19 nt, Artificial Sequence
  Description of Artificial Sequence: Synthetic oligonucleotide
uacauguuguuuuaauagg

SEQ ID NO: 2957537 - RNA, 19 nt, Artificial Sequence
  Description of Artificial Sequence: Synthetic oligonucleotide
uuaugauguuccuagagca

SEQ ID NO: 2957538 - RNA, 19 nt, Artificial Sequence
  Description of Artificial Sequence: Synthetic oligonucleotide
aauagggguuccuuacccc

SEQ ID NO: 2957539 - RNA, 19 nt, Artificial Sequence
  Description of Artificial Sequence: Synthetic oligonucleotide
acauucaaugcacuuauag

SEQ ID NO: 2957540 - RNA, 19 nt, Artificial Sequence
  Description of Artificial Sequence: Synthetic oligonucleotide
cauucaaugcacuuauagg

SEQ ID NO: 2957541 - RNA, 19 nt, Artificial Sequence
  Description of Artificial Sequence: Synthetic oligonucleotide
aaaccaaagugaaaacagc

SEQ ID NO: 2957542 - RNA, 19 nt, Artificial Sequence
  Description of Artificial Sequence: Synthetic oligonucleotide
ugcugaaugagguaugugc

SEQ ID NO: 2957543 - RNA, 19 nt, Artificial Sequence
  Description of Artificial Sequence: Synthetic oligonucleotide
uacucugauguucaguuag

SEQ ID NO: 2957544 - RNA, 19 nt, Artificial Sequence
  Description of Artificial Sequence: Synthetic oligonucleotide
uccuagagcagcuauacca

SEQ ID NO: 2957545 - RNA, 19 nt, Artificial Sequence
  Description of Artificial Sequence: Synthetic oligonucleotide
auuuaugauguuccuagag

SEQ ID NO: 2957546 - RNA, 19 nt, Artificial Sequence
  Description of Artificial Sequence: Synthetic oligonucleotide
uuuaauagggguuccuuac

SEQ ID NO: 2957547 - RNA, 19 nt, Artificial Sequence
  Description of Artificial Sequence: Synthetic oligonucleotide
uuugcugaugcugaguuag

SEQ ID NO: 2957548 - RNA, 19 nt, Artificial Sequence
  Description of Artificial Sequence: Synthetic oligonucleotide
uucaaugcacuuauagggc

SEQ ID NO: 2957549 - RNA, 19 nt, Artificial Sequence
  Description of Artificial Sequence: Synthetic oligonucleotide
acuuauagggcuucucuuc

SEQ ID NO: 2957550 - RNA, 19 nt, Artificial Sequence
  Description of Artificial Sequence: Synthetic oligonucleotide
acagcagcuacauuuauga

SEQ ID NO: 2957551 - RNA, 19 nt, Artificial Sequence
  Description of Artificial Sequence: Synthetic oligonucleotide
ucuuugggcauucaugaca

SEQ ID NO: 2957552 - RNA, 19 nt, Artificial Sequence
  Description of Artificial Sequence: Synthetic oligonucleotide
agcagcuacauuuaugaug

SEQ ID NO: 2957553 - RNA, 19 nt, Artificial Sequence
  Description of Artificial Sequence: Synthetic oligonucleotide
cauguuguuuuaauagggg

SEQ ID NO: 2957554 - RNA, 19 nt, Artificial Sequence
  Description of Artificial Sequence: Synthetic oligonucleotide
aauuugcugaugcugaguu

SEQ ID NO: 2957555 - RNA, 19 nt, Artificial Sequence
  Description of Artificial Sequence: Synthetic oligonucleotide
uuucuuugccuacauguug

SEQ ID NO: 2957556 - RNA, 19 nt, Artificial Sequence
  Description of Artificial Sequence: Synthetic oligonucleotide
ugggcauucaugacaauug

SEQ ID NO: 2957557 - RNA, 19 nt, Artificial Sequence
  Description of Artificial Sequence: Synthetic oligonucleotide
aaugaaucuucugaugcug

SEQ ID NO: 2957558 - RNA, 19 nt, Artificial Sequence
  Description of Artificial Sequence: Synthetic oligonucleotide
uguucaguuaggugcaugc

SEQ ID NO: 2957559 - RNA, 19 nt, Artificial Sequence
  Description of Artificial Sequence: Synthetic oligonucleotide
ucaguuaggugcaugcucu

SEQ ID NO: 2957560 - RNA, 19 nt, Artificial Sequence
  Description of Artificial Sequence: Synthetic oligonucleotide
uaauagggguuccuuaccc

SEQ ID NO: 2957561 - RNA, 19 nt, Artificial Sequence
  Description of Artificial Sequence: Synthetic oligonucleotide
uagagcagcuauaccaggg

SEQ ID NO: 2957562 - RNA, 19 nt, Artificial Sequence
  Description of Artificial Sequence: Synthetic oligonucleotide
agucuuugggcauucauga

SEQ ID NO: 2957563 - RNA, 19 nt, Artificial Sequence
  Description of Artificial Sequence: Synthetic oligonucleotide
acagucaucacauccaaaa

SEQ ID NO: 2957564 - RNA, 19 nt, Artificial Sequence
  Description of Artificial Sequence: Synthetic oligonucleotide
uaugauguuccuagagcag

SEQ ID NO: 2957565 - RNA, 19 nt, Artificial Sequence
  Description of Artificial Sequence: Synthetic oligonucleotide
ugggaguucuggcuaaagg

SEQ ID NO: 2957566 - RNA, 19 nt, Artificial Sequence
  Description of Artificial Sequence: Synthetic oligonucleotide
uuugguuagagcagagcga

SEQ ID NO: 2957567 - RNA, 19 nt, Artificial Sequence
  Description of Artificial Sequence: Synthetic oligonucleotide
uaugugcucuggcugaaag

SEQ ID NO: 2957568 - RNA, 19 nt, Artificial Sequence
  Description of Artificial Sequence: Synthetic oligonucleotide
uuaauagggguuccuuacc

SEQ ID NO: 2957569 - RNA, 19 nt, Artificial Sequence
  Description of Artificial Sequence: Synthetic oligonucleotide
aguuagaugggaguucugg

SEQ ID NO: 2957570 - RNA, 19 nt, Artificial Sequence
  Description of Artificial Sequence: Synthetic oligonucleotide
ucuucuguaugaauuugcu

SEQ ID NO: 2957571 - RNA, 19 nt, Artificial Sequence
  Description of Artificial Sequence: Synthetic oligonucleotide
acauguuguuuuaauaggg

SEQ ID NO: 2957572 - RNA, 19 nt, Artificial Sequence
  Description of Artificial Sequence: Synthetic oligonucleotide
cauucaugacaauuguaag

SEQ ID NO: 2957573 - RNA, 19 nt, Artificial Sequence
  Description of Artificial Sequence: Synthetic oligonucleotide
uuagaugggaguucuggcu

SEQ ID NO: 2957574 - RNA, 19 nt, Artificial Sequence
  Description of Artificial Sequence: Synthetic oligonucleotide
uucuuugccuacauguugu

SEQ ID NO: 2957575 - RNA, 19 nt, Artificial Sequence
  Description of Artificial Sequence: Synthetic oligonucleotide
auagggguuccuuaccccg

SEQ ID NO: 2957576 - RNA, 19 nt, Artificial Sequence
  Description of Artificial Sequence: Synthetic oligonucleotide
uauaccagggugcagucuc

SEQ ID NO: 2957577 - RNA, 19 nt, Artificial Sequence
  Description of Artificial Sequence: Synthetic oligonucleotide
aaccaaagugaaaacagca

SEQ ID NO: 2957578 - RNA, 19 nt, Artificial Sequence
  Description of Artificial Sequence: Synthetic oligonucleotide
ugauguucaguuaggugca

SEQ ID NO: 2957579 - RNA, 19 nt, Artificial Sequence
  Description of Artificial Sequence: Synthetic oligonucleotide
ucugauucaucacuauaaa

SEQ ID NO: 2957580 - RNA, 19 nt, Artificial Sequence
  Description of Artificial Sequence: Synthetic oligonucleotide
aaaagcuucucuccugaau

SEQ ID NO: 2957581 - RNA, 19 nt, Artificial Sequence
  Description of Artificial Sequence: Synthetic oligonucleotide
guuaggugcaugcucuggg

SEQ ID NO: 2957582 - RNA, 19 nt, Artificial Sequence
  Description of Artificial Sequence: Synthetic oligonucleotide
cuggcugaaagucuuuggg

SEQ ID NO: 2957583 - RNA, 19 nt, Artificial Sequence
  Description of Artificial Sequence: Synthetic oligonucleotide
aaugcacuuauagggcuuc

SEQ ID NO: 2957584 - RNA, 19 nt, Artificial Sequence
  Description of Artificial Sequence: Synthetic oligonucleotide
aaugagguaugugcucugg

SEQ ID NO: 2957585 - RNA, 19 nt, Artificial Sequence
  Description of Artificial Sequence: Synthetic oligonucleotide
ucaaugcacuuauagggcu

SEQ ID NO: 2957586 - RNA, 19 nt, Artificial Sequence
  Description of Artificial Sequence: Synthetic oligonucleotide
ucuggcugaaagucuuugg

SEQ ID NO: 2957587 - RNA, 19 nt, Artificial Sequence
  Description of Artificial Sequence: Synthetic oligonucleotide
uuuuaauagggguuccuua

SEQ ID NO: 2957588 - RNA, 19 nt, Artificial Sequence
  Description of Artificial Sequence: Synthetic oligonucleotide
ugugaauacucugauguuc

SEQ ID NO: 2957589 - RNA, 19 nt, Artificial Sequence
  Description of Artificial Sequence: Synthetic oligonucleotide
cugguguuugguuagagca

SEQ ID NO: 2957590 - RNA, 19 nt, Artificial Sequence
  Description of Artificial Sequence: Synthetic oligonucleotide
uucaguuaggugcaugcuc

SEQ ID NO: 2957591 - RNA, 19 nt, Artificial Sequence
  Description of Artificial Sequence: Synthetic oligonucleotide
aaagucuuugggcauucau

SEQ ID NO: 2957592 - RNA, 19 nt, Artificial Sequence
  Description of Artificial Sequence: Synthetic oligonucleotide
agcuacauuuaugauguuc

SEQ ID NO: 2957593 - RNA, 19 nt, Artificial Sequence
  Description of Artificial Sequence: Synthetic oligonucleotide
aagucuuugggcauucaug

SEQ ID NO: 2957594 - RNA, 19 nt, Artificial Sequence
  Description of Artificial Sequence: Synthetic oligonucleotide
ugguguuugguuagagcag

SEQ ID NO: 2957595 - RNA, 19 nt, Artificial Sequence
  Description of Artificial Sequence: Synthetic oligonucleotide
ugaauuugcugaugcugag

SEQ ID NO: 2957596 - RNA, 19 nt, Artificial Sequence
  Description of Artificial Sequence: Synthetic oligonucleotide
augagguaugugcucuggc

SEQ ID NO: 2957597 - RNA, 19 nt, Artificial Sequence
  Description of Artificial Sequence: Synthetic oligonucleotide
cucuucuguaugaauuugc

SEQ ID NO: 2957598 - RNA, 19 nt, Artificial Sequence
  Description of Artificial Sequence: Synthetic oligonucleotide
ugagguaugugcucuggcu

SEQ ID NO: 2957599 - RNA, 19 nt, Artificial Sequence
  Description of Artificial Sequence: Synthetic oligonucleotide
guuagaugggaguucuggc

SEQ ID NO: 2957600 - RNA, 19 nt, Artificial Sequence
  Description of Artificial Sequence: Synthetic oligonucleotide
ugaugcugaguuagauggg

SEQ ID NO: 2957601 - RNA, 19 nt, Artificial Sequence
  Description of Artificial Sequence: Synthetic oligonucleotide
gagguaugugcucuggcug

SEQ ID NO: 2957602 - RNA, 19 nt, Artificial Sequence
  Description of Artificial Sequence: Synthetic oligonucleotide
uuagagcagagcgauaccu

SEQ ID NO: 2957603 - RNA, 19 nt, Artificial Sequence
  Description of Artificial Sequence: Synthetic oligonucleotide
ugaaugagguaugugcucu

SEQ ID NO: 2957604 - RNA, 19 nt, Artificial Sequence
  Description of Artificial Sequence: Synthetic oligonucleotide
agcagcuauaccagggugc

SEQ ID NO: 2957605 - RNA, 19 nt, Artificial Sequence
  Description of Artificial Sequence: Synthetic oligonucleotide
gcuacauuuaugauguucc

SEQ ID NO: 2957606 - RNA, 19 nt, Artificial Sequence
  Description of Artificial Sequence: Synthetic oligonucleotide
ucugguguuugguuagagc

SEQ ID NO: 2957607 - RNA, 19 nt, Artificial Sequence
  Description of Artificial Sequence: Synthetic oligonucleotide
uggcugaaagucuuugggc

SEQ ID NO: 2957608 - RNA, 19 nt, Artificial Sequence
  Description of Artificial Sequence: Synthetic oligonucleotide
guuguuuuaauagggguuc

SEQ ID NO: 2957609 - RNA, 19 nt, Artificial Sequence
  Description of Artificial Sequence: Synthetic oligonucleotide
uuuucuuugccuacauguu

SEQ ID NO: 2957610 - RNA, 19 nt, Artificial Sequence
  Description of Artificial Sequence: Synthetic oligonucleotide
ugugcucuggcugaaaguc

SEQ ID NO: 2957611 - RNA, 19 nt, Artificial Sequence
  Description of Artificial Sequence: Synthetic oligonucleotide
cugaaugaaucuucugaug

SEQ ID NO: 2957612 - RNA, 19 nt, Artificial Sequence
  Description of Artificial Sequence: Synthetic oligonucleotide
ugaguuagaugggaguucu

SEQ ID NO: 2957613 - RNA, 19 nt, Artificial Sequence
  Description of Artificial Sequence: Synthetic oligonucleotide
aagcuucucuccugaauga

SEQ ID NO: 2957614 - RNA, 19 nt, Artificial Sequence
  Description of Artificial Sequence: Synthetic oligonucleotide
cuucuguaugaauuugcug

SEQ ID NO: 2957615 - RNA, 19 nt, Artificial Sequence
  Description of Artificial Sequence: Synthetic oligonucleotide
cucugauucaucacuauaa

SEQ ID NO: 2957616 - RNA, 19 nt, Artificial Sequence
  Description of Artificial Sequence: Synthetic oligonucleotide
cagagcgauaccugaaggc

SEQ ID NO: 2957617 - RNA, 19 nt, Artificial Sequence
  Description of Artificial Sequence: Synthetic oligonucleotide
ugauguuccuagagcagcu

SEQ ID NO: 2957618 - RNA, 19 nt, Artificial Sequence
  Description of Artificial Sequence: Synthetic oligonucleotide
uagagcagagcgauaccug

SEQ ID NO: 2957619 - RNA, 19 nt, Artificial Sequence
  Description of Artificial Sequence: Synthetic oligonucleotide
agcagagcgauaccugaag

SEQ ID NO: 2957620 - RNA, 19 nt, Artificial Sequence
  Description of Artificial Sequence: Synthetic oligonucleotide
ugaugcugaaugagguaug

SEQ ID NO: 2957621 - RNA, 19 nt, Artificial Sequence
  Description of Artificial Sequence: Synthetic oligonucleotide
accaaagugaaaacagcag

SEQ ID NO: 2957622 - RNA, 19 nt, Artificial Sequence
  Description of Artificial Sequence: Synthetic oligonucleotide
ugaauacucugauguucag

SEQ ID NO: 2957623 - RNA, 19 nt, Artificial Sequence
  Description of Artificial Sequence: Synthetic oligonucleotide
aaagugaaaacagcagcua

SEQ ID NO: 2957624 - RNA, 19 nt, Artificial Sequence
  Description of Artificial Sequence: Synthetic oligonucleotide
cuagagcagcuauaccagg

SEQ ID NO: 2957625 - RNA, 19 nt, Artificial Sequence
  Description of Artificial Sequence: Synthetic oligonucleotide
augaauuugcugaugcuga

SEQ ID NO: 2957626 - RNA, 19 nt, Artificial Sequence
  Description of Artificial Sequence: Synthetic oligonucleotide
uugguuagagcagagcgau

SEQ ID NO: 2957627 - RNA, 19 nt, Artificial Sequence
  Description of Artificial Sequence: Synthetic oligonucleotide
agagcgauaccugaaggcu

SEQ ID NO: 2957628 - RNA, 19 nt, Artificial Sequence
  Description of Artificial Sequence: Synthetic oligonucleotide
ugcugaguuagaugggagu

SEQ ID NO: 2957629 - RNA, 19 nt, Artificial Sequence
  Description of Artificial Sequence: Synthetic oligonucleotide
uagaugggaguucuggcua

SEQ ID NO: 2957630 - RNA, 19 nt, Artificial Sequence
  Description of Artificial Sequence: Synthetic oligonucleotide
agugaaaacagcagcuaca

SEQ ID NO: 2957631 - RNA, 19 nt, Artificial Sequence
  Description of Artificial Sequence: Synthetic oligonucleotide
uguuugguuagagcagagc

SEQ ID NO: 2957632 - RNA, 19 nt, Artificial Sequence
  Description of Artificial Sequence: Synthetic oligonucleotide
ucucuucuguaugaauuug

SEQ ID NO: 2957633 - RNA, 19 nt, Artificial Sequence
  Description of Artificial Sequence: Synthetic oligonucleotide
agcuauaccagggugcagu

SEQ ID NO: 2957634 - RNA, 19 nt, Artificial Sequence
  Description of Artificial Sequence: Synthetic oligonucleotide
caaagugaaaacagcagcu

SEQ ID NO: 2957635 - RNA, 19 nt, Artificial Sequence
  Description of Artificial Sequence: Synthetic oligonucleotide
uuaggugcaugcucugggu

SEQ ID NO: 2957636 - RNA, 19 nt, Artificial Sequence
  Description of Artificial Sequence: Synthetic oligonucleotide
uucucuccugaaugaaucu

SEQ ID NO: 2957637 - RNA, 19 nt, Artificial Sequence
  Description of Artificial Sequence: Synthetic oligonucleotide
gaugcugaguuagauggga

SEQ ID NO: 2957638 - RNA, 19 nt, Artificial Sequence
  Description of Artificial Sequence: Synthetic oligonucleotide
aaacagcagcuacauuuau

SEQ ID NO: 2957639 - RNA, 19 nt, Artificial Sequence
  Description of Artificial Sequence: Synthetic oligonucleotide
agagcagcuauaccagggu

SEQ ID NO: 2957640 - RNA, 19 nt, Artificial Sequence
  Description of Artificial Sequence: Synthetic oligonucleotide
cuuugggcauucaugacaa

SEQ ID NO: 2957641 - RNA, 19 nt, Artificial Sequence
  Description of Artificial Sequence: Synthetic oligonucleotide
guuccuagagcagcuauac

SEQ ID NO: 2957642 - RNA, 19 nt, Artificial Sequence
  Description of Artificial Sequence: Synthetic oligonucleotide
uguuuuaauagggguuccu

SEQ ID NO: 2957643 - RNA, 19 nt, Artificial Sequence
  Description of Artificial Sequence: Synthetic oligonucleotide
cugaaugagguaugugcuc

SEQ ID NO: 2957644 - RNA, 19 nt, Artificial Sequence
  Description of Artificial Sequence: Synthetic oligonucleotide
agguaugugcucuggcuga

SEQ ID NO: 2957645 - RNA, 19 nt, Artificial Sequence
  Description of Artificial Sequence: Synthetic oligonucleotide
gagcagcuauaccagggug

SEQ ID NO: 2957646 - RNA, 19 nt, Artificial Sequence
  Description of Artificial Sequence: Synthetic oligonucleotide
gguuagagcagagcgauac

SEQ ID NO: 2957647 - RNA, 19 nt, Artificial Sequence
  Description of Artificial Sequence: Synthetic oligonucleotide
uacauuuaugauguuccua

SEQ ID NO: 2957648 - RNA, 19 nt, Artificial Sequence
  Description of Artificial Sequence: Synthetic oligonucleotide
aguuaggugcaugcucugg

SEQ ID NO: 2957649 - RNA, 19 nt, Artificial Sequence
  Description of Artificial Sequence: Synthetic oligonucleotide
ugcaugcucuggguaaagg

SEQ ID NO: 2957650 - RNA, 19 nt, Artificial Sequence
  Description of Artificial Sequence: Synthetic oligonucleotide
uguuccuagagcagcuaua

SEQ ID NO: 2957651 - RNA, 19 nt, Artificial Sequence
  Description of Artificial Sequence: Synthetic oligonucleotide
uuguuuuaauagggguucc

SEQ ID NO: 2957652 - RNA, 19 nt, Artificial Sequence
  Description of Artificial Sequence: Synthetic oligonucleotide
uuccuagagcagcuauacc

SEQ ID NO: 2957653 - RNA, 19 nt, Artificial Sequence
  Description of Artificial Sequence: Synthetic oligonucleotide
gaaugaaucuucugaugcu

SEQ ID NO: 2957654 - RNA, 19 nt, Artificial Sequence
  Description of Artificial Sequence: Synthetic oligonucleotide
gaaugagguaugugcucug

SEQ ID NO: 2957655 - RNA, 19 nt, Artificial Sequence
  Description of Artificial Sequence: Synthetic oligonucleotide
gugaauacucugauguuca

SEQ ID NO: 2957656 - RNA, 19 nt, Artificial Sequence
  Description of Artificial Sequence: Synthetic oligonucleotide
ucugaugcugaaugaggua

SEQ ID NO: 2957657 - RNA, 19 nt, Artificial Sequence
  Description of Artificial Sequence: Synthetic oligonucleotide
guuagagcagagcgauacc

SEQ ID NO: 2957658 - RNA, 19 nt, Artificial Sequence
  Description of Artificial Sequence: Synthetic oligonucleotide
ggcugaaagucuuugggca

SEQ ID NO: 2957659 - RNA, 19 nt, Artificial Sequence
  Description of Artificial Sequence: Synthetic oligonucleotide
cugauucaucacuauaaaa

SEQ ID NO: 2957660 - RNA, 19 nt, Artificial Sequence
  Description of Artificial Sequence: Synthetic oligonucleotide
agucucugguguuugguua

SEQ ID NO: 2957661 - RNA, 19 nt, Artificial Sequence
  Description of Artificial Sequence: Synthetic oligonucleotide
uugggcauucaugacaauu

SEQ ID NO: 2957662 - RNA, 19 nt, Artificial Sequence
  Description of Artificial Sequence: Synthetic oligonucleotide
ccuagagcagcuauaccag

SEQ ID NO: 2957663 - RNA, 19 nt, Artificial Sequence
  Description of Artificial Sequence: Synthetic oligonucleotide
uagggguuccuuaccccgc

SEQ ID NO: 2957664 - RNA, 19 nt, Artificial Sequence
  Description of Artificial Sequence: Synthetic oligonucleotide
gcagagcgauaccugaagg

SEQ ID NO: 2957665 - RNA, 19 nt, Artificial Sequence
  Description of Artificial Sequence: Synthetic oligonucleotide
uuccuuaccccgcucugau

SEQ ID NO: 2957666 - RNA, 19 nt, Artificial Sequence
  Description of Artificial Sequence: Synthetic oligonucleotide
auguuccuagagcagcuau

SEQ ID NO: 2957667 - RNA, 19 nt, Artificial Sequence
  Description of Artificial Sequence: Synthetic oligonucleotide
accagggugcagucucugg

SEQ ID NO: 2957668 - RNA, 19 nt, Artificial Sequence
  Description of Artificial Sequence: Synthetic oligonucleotide
caugacaauuguaagguuu

SEQ ID NO: 2957669 - RNA, 19 nt, Artificial Sequence
  Description of Artificial Sequence: Synthetic oligonucleotide
aggugcaugcucuggguaa

SEQ ID NO: 2957670 - RNA, 19 nt, Artificial Sequence
  Description of Artificial Sequence: Synthetic oligonucleotide
augacaauuguaagguuuu

SEQ ID NO: 2957671 - RNA, 19 nt, Artificial Sequence
  Description of Artificial Sequence: Synthetic oligonucleotide
ugaaaacagcagcuacauu

SEQ ID NO: 2957672 - RNA, 19 nt, Artificial Sequence
  Description of Artificial Sequence: Synthetic oligonucleotide
cauuuaugauguuccuaga

SEQ ID NO: 2957673 - RNA, 19 nt, Artificial Sequence
  Description of Artificial Sequence: Synthetic oligonucleotide
gcagcuacauuuaugaugu

SEQ ID NO: 2957674 - RNA, 19 nt, Artificial Sequence
  Description of Artificial Sequence: Synthetic oligonucleotide
uaggugcaugcucugggua

SEQ ID NO: 2957675 - RNA, 19 nt, Artificial Sequence
  Description of Artificial Sequence: Synthetic oligonucleotide
uugccuacauguuguuuua

SEQ ID NO: 2957676 - RNA, 19 nt, Artificial Sequence
  Description of Artificial Sequence: Synthetic oligonucleotide
agggugcagucucuggugu

SEQ ID NO: 2957677 - RNA, 19 nt, Artificial Sequence
  Description of Artificial Sequence: Synthetic oligonucleotide
accccgcucugauucauca

SEQ ID NO: 2957678 - RNA, 19 nt, Artificial Sequence
  Description of Artificial Sequence: Synthetic oligonucleotide
uugcugaugcugaguuaga

SEQ ID NO: 2957679 - RNA, 19 nt, Artificial Sequence
  Description of Artificial Sequence: Synthetic oligonucleotide
agaugggaguucuggcuaa

SEQ ID NO: 2957680 - RNA, 19 nt, Artificial Sequence
  Description of Artificial Sequence: Synthetic oligonucleotide
ugcugaugcugaguuagau

SEQ ID NO: 2957681 - RNA, 19 nt, Artificial Sequence
  Description of Artificial Sequence: Synthetic oligonucleotide
ccuuaccccgcucugauuc

SEQ ID NO: 2957682 - RNA, 19 nt, Artificial Sequence
  Description of Artificial Sequence: Synthetic oligonucleotide
cugaguuagaugggaguuc

SEQ ID NO: 2957683 - RNA, 19 nt, Artificial Sequence
  Description of Artificial Sequence: Synthetic oligonucleotide
gggaguucuggcuaaaggu

SEQ ID NO: 2957684 - RNA, 19 nt, Artificial Sequence
  Description of Artificial Sequence: Synthetic oligonucleotide
gucuuugggcauucaugac

SEQ ID NO: 2957685 - RNA, 19 nt, Artificial Sequence
  Description of Artificial Sequence: Synthetic oligonucleotide
auuugcugaugcugaguua

SEQ ID NO: 2957686 - RNA, 19 nt, Artificial Sequence
  Description of Artificial Sequence: Synthetic oligonucleotide
auacucugauguucaguua

SEQ ID NO: 2957687 - RNA, 19 nt, Artificial Sequence
  Description of Artificial Sequence: Synthetic oligonucleotide
gaauacucugauguucagu

SEQ ID NO: 2957688 - RNA, 19 nt, Artificial Sequence
  Description of Artificial Sequence: Synthetic oligonucleotide
augcugaguuagaugggag

SEQ ID NO: 2957689 - RNA, 19 nt, Artificial Sequence
  Description of Artificial Sequence: Synthetic oligonucleotide
cucuggcugaaagucuuug

SEQ ID NO: 2957690 - RNA, 19 nt, Artificial Sequence
  Description of Artificial Sequence: Synthetic oligonucleotide
gcaugcucuggguaaagga

SEQ ID NO: 2957691 - RNA, 19 nt, Artificial Sequence
  Description of Artificial Sequence: Synthetic oligonucleotide
gaugcugaaugagguaugu

SEQ ID NO: 2957692 - RNA, 19 nt, Artificial Sequence
  Description of Artificial Sequence: Synthetic oligonucleotide
auguucaguuaggugcaug

SEQ ID NO: 2957693 - RNA, 19 nt, Artificial Sequence
  Description of Artificial Sequence: Synthetic oligonucleotide
caugcucuggguaaaggau

SEQ ID NO: 2957694 - RNA, 19 nt, Artificial Sequence
  Description of Artificial Sequence: Synthetic oligonucleotide
ucuuugccuacauguuguu

SEQ ID NO: 2957695 - RNA, 19 nt, Artificial Sequence
  Description of Artificial Sequence: Synthetic oligonucleotide
gguguuugguuagagcaga

SEQ ID NO: 2957696 - RNA, 19 nt, Artificial Sequence
  Description of Artificial Sequence: Synthetic oligonucleotide
augggaguucuggcuaaag

SEQ ID NO: 2957697 - RNA, 19 nt, Artificial Sequence
  Description of Artificial Sequence: Synthetic oligonucleotide
cucugguguuugguuagag

SEQ ID NO: 2957698 - RNA, 19 nt, Artificial Sequence
  Description of Artificial Sequence: Synthetic oligonucleotide
agggguuccuuaccccgcu

SEQ ID NO: 2957699 - RNA, 19 nt, Artificial Sequence
  Description of Artificial Sequence: Synthetic oligonucleotide
guguuugguuagagcagag

SEQ ID NO: 2957700 - RNA, 19 nt, Artificial Sequence
  Description of Artificial Sequence: Synthetic oligonucleotide
caguuaggugcaugcucug

SEQ ID NO: 2957701 - RNA, 19 nt, Artificial Sequence
  Description of Artificial Sequence: Synthetic oligonucleotide
augcugaaugagguaugug

SEQ ID NO: 2957702 - RNA, 19 nt, Artificial Sequence
  Description of Artificial Sequence: Synthetic oligonucleotide
gugaaaacagcagcuacau

SEQ ID NO: 2957703 - RNA, 19 nt, Artificial Sequence
  Description of Artificial Sequence: Synthetic oligonucleotide
cuacauuuaugauguuccu

SEQ ID NO: 2957704 - RNA, 19 nt, Artificial Sequence
  Description of Artificial Sequence: Synthetic oligonucleotide
ccuacauguuguuuuaaua

SEQ ID NO: 2957705 - RNA, 19 nt, Artificial Sequence
  Description of Artificial Sequence: Synthetic oligonucleotide
cugaugcugaaugagguau

SEQ ID NO: 2957706 - RNA, 19 nt, Artificial Sequence
  Description of Artificial Sequence: Synthetic oligonucleotide
gaguuagaugggaguucug

SEQ ID NO: 2957707 - RNA, 19 nt, Artificial Sequence
  Description of Artificial Sequence: Synthetic oligonucleotide
augcucuggguaaaggauu

SEQ ID NO: 2957708 - RNA, 19 nt, Artificial Sequence
  Description of Artificial Sequence: Synthetic oligonucleotide
uaccagggugcagucucug

SEQ ID NO: 2957709 - RNA, 19 nt, Artificial Sequence
  Description of Artificial Sequence: Synthetic oligonucleotide
gaaucuucugaugcugaau

SEQ ID NO: 2957710 - RNA, 19 nt, Artificial Sequence
  Description of Artificial Sequence: Synthetic oligonucleotide
agcgauaccugaaggcuuu

SEQ ID NO: 2957711 - RNA, 19 nt, Artificial Sequence
  Description of Artificial Sequence: Synthetic oligonucleotide
ugguuagagcagagcgaua

SEQ ID NO: 2957712 - RNA, 19 nt, Artificial Sequence
  Description of Artificial Sequence: Synthetic oligonucleotide
cuuaccccgcucugauuca

SEQ ID NO: 2957713 - RNA, 19 nt, Artificial Sequence
  Description of Artificial Sequence: Synthetic oligonucleotide
guuuuaauagggguuccuu

SEQ ID NO: 2957714 - RNA, 19 nt, Artificial Sequence
  Description of Artificial Sequence: Synthetic oligonucleotide
uuugggcauucaugacaau

SEQ ID NO: 2957715 - RNA, 19 nt, Artificial Sequence
  Description of Artificial Sequence: Synthetic oligonucleotide
ugccuacauguuguuuuaa

SEQ ID NO: 2957716 - RNA, 19 nt, Artificial Sequence
  Description of Artificial Sequence: Synthetic oligonucleotide
gaguucuggcuaaagguuu

SEQ ID NO: 2957717 - RNA, 19 nt, Artificial Sequence
  Description of Artificial Sequence: Synthetic oligonucleotide
gcuauaccagggugcaguc

SEQ ID NO: 2957718 - RNA, 19 nt, Artificial Sequence
  Description of Artificial Sequence: Synthetic oligonucleotide
gauguuccuagagcagcua

SEQ ID NO: 2957719 - RNA, 19 nt, Artificial Sequence
  Description of Artificial Sequence: Synthetic oligonucleotide
uaccccgcucugauucauc

SEQ ID NO: 2957720 - RNA, 19 nt, Artificial Sequence
  Description of Artificial Sequence: Synthetic oligonucleotide
gcagcuauaccagggugca

SEQ ID NO: 2957721 - RNA, 19 nt, Artificial Sequence
  Description of Artificial Sequence: Synthetic oligonucleotide
gcucugauucaucacuaua

SEQ ID NO: 2957722 - RNA, 19 nt, Artificial Sequence
  Description of Artificial Sequence: Synthetic oligonucleotide
gugcagucucugguguuug

SEQ ID NO: 2957723 - RNA, 19 nt, Artificial Sequence
  Description of Artificial Sequence: Synthetic oligonucleotide
uuaccccgcucugauucau

SEQ ID NO: 2957724 - RNA, 19 nt, Artificial Sequence
  Description of Artificial Sequence: Synthetic oligonucleotide
gugcaugcucuggguaaag

SEQ ID NO: 2957725 - RNA, 19 nt, Artificial Sequence
  Description of Artificial Sequence: Synthetic oligonucleotide
uccuuaccccgcucugauu

SEQ ID NO: 2957726 - RNA, 19 nt, Artificial Sequence
  Description of Artificial Sequence: Synthetic oligonucleotide
guucaguuaggugcaugcu

SEQ ID NO: 2957727 - RNA, 19 nt, Artificial Sequence
  Description of Artificial Sequence: Synthetic oligonucleotide
auaccagggugcagucucu

SEQ ID NO: 2957728 - RNA, 19 nt, Artificial Sequence
  Description of Artificial Sequence: Synthetic oligonucleotide
gaugggaguucuggcuaaa

SEQ ID NO: 2957729 - RNA, 19 nt, Artificial Sequence
  Description of Artificial Sequence: Synthetic oligonucleotide
augcacuuauagggcuucu

SEQ ID NO: 2957730 - RNA, 19 nt, Artificial Sequence
  Description of Artificial Sequence: Synthetic oligonucleotide
gugugaauacucugauguu

SEQ ID NO: 2957731 - RNA, 19 nt, Artificial Sequence
  Description of Artificial Sequence: Synthetic oligonucleotide
cacauucaaugcacuuaua

SEQ ID NO: 2957732 - RNA, 19 nt, Artificial Sequence
  Description of Artificial Sequence: Synthetic oligonucleotide
caaugcacuuauagggcuu

SEQ ID NO: 2957733 - RNA, 19 nt, Artificial Sequence
  Description of Artificial Sequence: Synthetic oligonucleotide
ggaguucuggcuaaagguu

SEQ ID NO: 2957734 - RNA, 19 nt, Artificial Sequence
  Description of Artificial Sequence: Synthetic oligonucleotide
cagcuauaccagggugcag

SEQ ID NO: 2957735 - RNA, 19 nt, Artificial Sequence
  Description of Artificial Sequence: Synthetic oligonucleotide
gcugaaagucuuugggcau

SEQ ID NO: 2957736 - RNA, 19 nt, Artificial Sequence
  Description of Artificial Sequence: Synthetic oligonucleotide
gagcgauaccugaaggcuu

SEQ ID NO: 2957737 - RNA, 19 nt, Artificial Sequence
  Description of Artificial Sequence: Synthetic oligonucleotide
gcugaguuagaugggaguu

SEQ ID NO: 2957738 - RNA, 19 nt, Artificial Sequence
  Description of Artificial Sequence: Synthetic oligonucleotide
gccuacauguuguuuuaau

SEQ ID NO: 2957739 - RNA, 19 nt, Artificial Sequence
  Description of Artificial Sequence: Synthetic oligonucleotide
cagucucugguguuugguu

SEQ ID NO: 2957740 - RNA, 19 nt, Artificial Sequence
  Description of Artificial Sequence: Synthetic oligonucleotide
ggugcaugcucuggguaaa

SEQ ID NO: 2957741 - RNA, 19 nt, Artificial Sequence
  Description of Artificial Sequence: Synthetic oligonucleotide
guaugugcucuggcugaaa

SEQ ID NO: 2957742 - RNA, 19 nt, Artificial Sequence
  Description of Artificial Sequence: Synthetic oligonucleotide
gauguucaguuaggugcau

SEQ ID NO: 2957743 - RNA, 19 nt, Artificial Sequence
  Description of Artificial Sequence: Synthetic oligonucleotide
ggguuccuuaccccgcucu

SEQ ID NO: 2957744 - RNA, 19 nt, Artificial Sequence
  Description of Artificial Sequence: Synthetic oligonucleotide
cuauaccagggugcagucu

SEQ ID NO: 2957745 - RNA, 19 nt, Artificial Sequence
  Description of Artificial Sequence: Synthetic oligonucleotide
cugaaagucuuugggcauu

SEQ ID NO: 2957746 - RNA, 19 nt, Artificial Sequence
  Description of Artificial Sequence: Synthetic oligonucleotide
cccgcucugauucaucacu

SEQ ID NO: 2957747 - RNA, 19 nt, Artificial Sequence
  Description of Artificial Sequence: Synthetic oligonucleotide
gguaugugcucuggcugaa

SEQ ID NO: 2957748 - RNA, 19 nt, Artificial Sequence
  Description of Artificial Sequence: Synthetic oligonucleotide
cagcagcuacauuuaugau

SEQ ID NO: 2957749 - RNA, 19 nt, Artificial Sequence
  Description of Artificial Sequence: Synthetic oligonucleotide
ccccgcucugauucaucac

SEQ ID NO: 2957750 - RNA, 19 nt, Artificial Sequence
  Description of Artificial Sequence: Synthetic oligonucleotide
ccagggugcagucucuggu

SEQ ID NO: 2957751 - RNA, 19 nt, Artificial Sequence
  Description of Artificial Sequence: Synthetic oligonucleotide
gggguuccuuaccccgcuc

SEQ ID NO: 2957752 - RNA, 19 nt, Artificial Sequence
  Description of Artificial Sequence: Synthetic oligonucleotide
ccgcucugauucaucacua

SEQ ID NO: 2957753 - RNA, 19 nt, Artificial Sequence
  Description of Artificial Sequence: Synthetic oligonucleotide
cgauaccugaaggcuuuuc

SEQ ID NO: 2957754 - RNA, 19 nt, Artificial Sequence
  Description of Artificial Sequence: Synthetic oligonucleotide
gggugcagucucugguguu

SEQ ID NO: 2957755 - RNA, 19 nt, Artificial Sequence
  Description of Artificial Sequence: Synthetic oligonucleotide
cgcucugauucaucacuau

SEQ ID NO: 2957756 - RNA, 19 nt, Artificial Sequence
  Description of Artificial Sequence: Synthetic oligonucleotide
gcgauaccugaaggcuuuu

SEQ ID NO: 2957757 - RNA, 19 nt, Artificial Sequence
  Description of Artificial Sequence: Synthetic oligonucleotide
auugauugcaucuagcagg

SEQ ID NO: 2957758 - RNA, 19 nt, Artificial Sequence
  Description of Artificial Sequence: Synthetic oligonucleotide
gacauuggcaucuuuaggc

SEQ ID NO: 2957759 - RNA, 19 nt, Artificial Sequence
  Description of Artificial Sequence: Synthetic oligonucleotide
gauugcaucuagcaggugg

SEQ ID NO: 2957760 - RNA, 19 nt, Artificial Sequence
  Description of Artificial Sequence: Synthetic oligonucleotide
uguuguagcagucugucug

SEQ ID NO: 2957761 - RNA, 19 nt, Artificial Sequence
  Description of Artificial Sequence: Synthetic oligonucleotide
aagaaggcuacuccugccc

SEQ ID NO: 2957762 - RNA, 19 nt, Artificial Sequence
  Description of Artificial Sequence: Synthetic oligonucleotide
cuuggcauuauucagguug

SEQ ID NO: 2957763 - RNA, 19 nt, Artificial Sequence
  Description of Artificial Sequence: Synthetic oligonucleotide
gucauaguccugcagaugg

SEQ ID NO: 2957764 - RNA, 19 nt, Artificial Sequence
  Description of Artificial Sequence: Synthetic oligonucleotide
cuggagaagagcucgaugg

SEQ ID NO: 2957765 - RNA, 19 nt, Artificial Sequence
  Description of Artificial Sequence: Synthetic oligonucleotide
uauugauugcaucuagcag

SEQ ID NO: 2957766 - RNA, 19 nt, Artificial Sequence
  Description of Artificial Sequence: Synthetic oligonucleotide
ucaacugaagauaccgccg

SEQ ID NO: 2957767 - RNA, 19 nt, Artificial Sequence
  Description of Artificial Sequence: Synthetic oligonucleotide
gacuguauucccuuacucg

SEQ ID NO: 2957768 - RNA, 19 nt, Artificial Sequence
  Description of Artificial Sequence: Synthetic oligonucleotide
uuaggcugccuauugauug

SEQ ID NO: 2957769 - RNA, 19 nt, Artificial Sequence
  Description of Artificial Sequence: Synthetic oligonucleotide
aucuggaggagacaggccg

SEQ ID NO: 2957770 - RNA, 19 nt, Artificial Sequence
  Description of Artificial Sequence: Synthetic oligonucleotide
uucuaggacuuucugacug

SEQ ID NO: 2957771 - RNA, 19 nt, Artificial Sequence
  Description of Artificial Sequence: Synthetic oligonucleotide
uauguuuucuugcucuggc

SEQ ID NO: 2957772 - RNA, 19 nt, Artificial Sequence
  Description of Artificial Sequence: Synthetic oligonucleotide
uccugcagauggaagaagg

SEQ ID NO: 2957773 - RNA, 19 nt, Artificial Sequence
  Description of Artificial Sequence: Synthetic oligonucleotide
gauggaagaaggcuacucc

SEQ ID NO: 2957774 - RNA, 19 nt, Artificial Sequence
  Description of Artificial Sequence: Synthetic oligonucleotide
ugugcaguauguuuucuug

SEQ ID NO: 2957775 - RNA, 19 nt, Artificial Sequence
  Description of Artificial Sequence: Synthetic oligonucleotide
acuccugcccgauacaagg

SEQ ID NO: 2957776 - RNA, 19 nt, Artificial Sequence
  Description of Artificial Sequence: Synthetic oligonucleotide
uccuagauuggguaucggg

SEQ ID NO: 2957777 - RNA, 19 nt, Artificial Sequence
  Description of Artificial Sequence: Synthetic oligonucleotide
acuuucugacuguauuccc

SEQ ID NO: 2957778 - RNA, 19 nt, Artificial Sequence
  Description of Artificial Sequence: Synthetic oligonucleotide
acagcaucucgguacuucc

SEQ ID NO: 2957779 - RNA, 19 nt, Artificial Sequence
  Description of Artificial Sequence: Synthetic oligonucleotide
uguuuucuugcucuggcgu

SEQ ID NO: 2957780 - RNA, 19 nt, Artificial Sequence
  Description of Artificial Sequence: Synthetic oligonucleotide
acuguauucccuuacucgu

SEQ ID NO: 2957781 - RNA, 19 nt, Artificial Sequence
  Description of Artificial Sequence: Synthetic oligonucleotide
agcucgaugguaccgacuc

SEQ ID NO: 2957782 - RNA, 19 nt, Artificial Sequence
  Description of Artificial Sequence: Synthetic oligonucleotide
gaugguaccgacucacagc

SEQ ID NO: 2957783 - RNA, 19 nt, Artificial Sequence
  Description of Artificial Sequence: Synthetic oligonucleotide
gucaacugaagauaccgcc

SEQ ID NO: 2957784 - RNA, 19 nt, Artificial Sequence
  Description of Artificial Sequence: Synthetic oligonucleotide
uucagguugucguucuagg

SEQ ID NO: 2957785 - RNA, 19 nt, Artificial Sequence
  Description of Artificial Sequence: Synthetic oligonucleotide
auuggcaucuuuaggcugc

SEQ ID NO: 2957786 - RNA, 19 nt, Artificial Sequence
  Description of Artificial Sequence: Synthetic oligonucleotide
gugucaacugaagauaccg

SEQ ID NO: 2957787 - RNA, 19 nt, Artificial Sequence
  Description of Artificial Sequence: Synthetic oligonucleotide
gauaccgccggacauuggc

SEQ ID NO: 2957788 - RNA, 19 nt, Artificial Sequence
  Description of Artificial Sequence: Synthetic oligonucleotide
auuauucagguugucguuc

SEQ ID NO: 2957789 - RNA, 19 nt, Artificial Sequence
  Description of Artificial Sequence: Synthetic oligonucleotide
uggguaucggggaaggcag

SEQ ID NO: 2957790 - RNA, 19 nt, Artificial Sequence
  Description of Artificial Sequence: Synthetic oligonucleotide
augguaccgacucacagca

SEQ ID NO: 2957791 - RNA, 19 nt, Artificial Sequence
  Description of Artificial Sequence: Synthetic oligonucleotide
agaagagcucgaugguacc

SEQ ID NO: 2957792 - RNA, 19 nt, Artificial Sequence
  Description of Artificial Sequence: Synthetic oligonucleotide
uugauugcaucuagcaggu

SEQ ID NO: 2957793 - RNA, 19 nt, Artificial Sequence
  Description of Artificial Sequence: Synthetic oligonucleotide
ucguucguaguucacuggc

SEQ ID NO: 2957794 - RNA, 19 nt, Artificial Sequence
  Description of Artificial Sequence: Synthetic oligonucleotide
acuggcuccaucuggagga

SEQ ID NO: 2957795 - RNA, 19 nt, Artificial Sequence
  Description of Artificial Sequence: Synthetic oligonucleotide
ugucaacugaagauaccgc

SEQ ID NO: 2957796 - RNA, 19 nt, Artificial Sequence
  Description of Artificial Sequence: Synthetic oligonucleotide
cuauugauugcaucuagca

SEQ ID NO: 2957797 - RNA, 19 nt, Artificial Sequence
  Description of Artificial Sequence: Synthetic oligonucleotide
ucuugcucuggcgugagag

SEQ ID NO: 2957798 - RNA, 19 nt, Artificial Sequence
  Description of Artificial Sequence: Synthetic oligonucleotide
guuguagcagucugucugg

SEQ ID NO: 2957799 - RNA, 19 nt, Artificial Sequence
  Description of Artificial Sequence: Synthetic oligonucleotide
ugcagauggaagaaggcua

SEQ ID NO: 2957800 - RNA, 19 nt, Artificial Sequence
  Description of Artificial Sequence: Synthetic oligonucleotide
ugcaguauguuuucuugcu

SEQ ID NO: 2957801 - RNA, 19 nt, Artificial Sequence
  Description of Artificial Sequence: Synthetic oligonucleotide
gacuuucugacuguauucc

SEQ ID NO: 2957802 - RNA, 19 nt, Artificial Sequence
  Description of Artificial Sequence: Synthetic oligonucleotide
uucccuuacucguucguag

SEQ ID NO: 2957803 - RNA, 19 nt, Artificial Sequence
  Description of Artificial Sequence: Synthetic oligonucleotide
uggaagaaggcuacuccug

SEQ ID NO: 2957804 - RNA, 19 nt, Artificial Sequence
  Description of Artificial Sequence: Synthetic oligonucleotide
caacugaagauaccgccgg

SEQ ID NO: 2957805 - RNA, 19 nt, Artificial Sequence
  Description of Artificial Sequence: Synthetic oligonucleotide
uaguccugcagauggaaga

SEQ ID NO: 2957806 - RNA, 19 nt, Artificial Sequence
  Description of Artificial Sequence: Synthetic oligonucleotide
agcugcugaguucugacug

SEQ ID NO: 2957807 - RNA, 19 nt, Artificial Sequence
  Description of Artificial Sequence: Synthetic oligonucleotide
ugacugugucaacugaaga

SEQ ID NO: 2957808 - RNA, 19 nt, Artificial Sequence
  Description of Artificial Sequence: Synthetic oligonucleotide
agaaggcuacuccugcccg

SEQ ID NO: 2957809 - RNA, 19 nt, Artificial Sequence
  Description of Artificial Sequence: Synthetic oligonucleotide
auguuuucuugcucuggcg

SEQ ID NO: 2957810 - RNA, 19 nt, Artificial Sequence
  Description of Artificial Sequence: Synthetic oligonucleotide
aucucgguacuucccuucc

SEQ ID NO: 2957811 - RNA, 19 nt, Artificial Sequence
  Description of Artificial Sequence: Synthetic oligonucleotide
ucuuuaggcugccuauuga

SEQ ID NO: 2957812 - RNA, 19 nt, Artificial Sequence
  Description of Artificial Sequence: Synthetic oligonucleotide
uuggauccagaccucgcag

SEQ ID NO: 2957813 - RNA, 19 nt, Artificial Sequence
  Description of Artificial Sequence: Synthetic oligonucleotide
uguauucccuuacucguuc

SEQ ID NO: 2957814 - RNA, 19 nt, Artificial Sequence
  Description of Artificial Sequence: Synthetic oligonucleotide
ucugacuguauucccuuac

SEQ ID NO: 2957815 - RNA, 19 nt, Artificial Sequence
  Description of Artificial Sequence: Synthetic oligonucleotide
uucacuggcuccaucugga

SEQ ID NO: 2957816 - RNA, 19 nt, Artificial Sequence
  Description of Artificial Sequence: Synthetic oligonucleotide
uuggcauuauucagguugu

SEQ ID NO: 2957817 - RNA, 19 nt, Artificial Sequence
  Description of Artificial Sequence: Synthetic oligonucleotide
ugugucaacugaagauacc

SEQ ID NO: 2957818 - RNA, 19 nt, Artificial Sequence
  Description of Artificial Sequence: Synthetic oligonucleotide
auggaagaaggcuacuccu

SEQ ID NO: 2957819 - RNA, 19 nt, Artificial Sequence
  Description of Artificial Sequence: Synthetic oligonucleotide
ccuagauuggguaucgggg

SEQ ID NO: 2957820 - RNA, 19 nt, Artificial Sequence
  Description of Artificial Sequence: Synthetic oligonucleotide
uaguucacuggcuccaucu

SEQ ID NO: 2957821 - RNA, 19 nt, Artificial Sequence
  Description of Artificial Sequence: Synthetic oligonucleotide
ugaagauaccgccggacau

SEQ ID NO: 2957822 - RNA, 19 nt, Artificial Sequence
  Description of Artificial Sequence: Synthetic oligonucleotide
ucugacugugucaacugaa

SEQ ID NO: 2957823 - RNA, 19 nt, Artificial Sequence
  Description of Artificial Sequence: Synthetic oligonucleotide
aguauguuuucuugcucug

SEQ ID NO: 2957824 - RNA, 19 nt, Artificial Sequence
  Description of Artificial Sequence: Synthetic oligonucleotide
ucguucuaggacuuucuga

SEQ ID NO: 2957825 - RNA, 19 nt, Artificial Sequence
  Description of Artificial Sequence: Synthetic oligonucleotide
acucguucguaguucacug

SEQ ID NO: 2957826 - RNA, 19 nt, Artificial Sequence
  Description of Artificial Sequence: Synthetic oligonucleotide
uuauucagguugucguucu

SEQ ID NO: 2957827 - RNA, 19 nt, Artificial Sequence
  Description of Artificial Sequence: Synthetic oligonucleotide
uucguaguucacuggcucc

SEQ ID NO: 2957828 - RNA, 19 nt, Artificial Sequence
  Description of Artificial Sequence: Synthetic oligonucleotide
agguugucguucuaggacu

SEQ ID NO: 2957829 - RNA, 19 nt, Artificial Sequence
  Description of Artificial Sequence: Synthetic oligonucleotide
ugaguucugacugugucaa

SEQ ID NO: 2957830 - RNA, 19 nt, Artificial Sequence
  Description of Artificial Sequence: Synthetic oligonucleotide
acauuggcaucuuuaggcu

SEQ ID NO: 2957831 - RNA, 19 nt, Artificial Sequence
  Description of Artificial Sequence: Synthetic oligonucleotide
acugaagauaccgccggac

SEQ ID NO: 2957832 - RNA, 19 nt, Artificial Sequence
  Description of Artificial Sequence: Synthetic oligonucleotide
cugugucaacugaagauac

SEQ ID NO: 2957833 - RNA, 19 nt, Artificial Sequence
  Description of Artificial Sequence: Synthetic oligonucleotide
gaagaaggcuacuccugcc

SEQ ID NO: 2957834 - RNA, 19 nt, Artificial Sequence
  Description of Artificial Sequence: Synthetic oligonucleotide
aucuuuaggcugccuauug

SEQ ID NO: 2957835 - RNA, 19 nt, Artificial Sequence
  Description of Artificial Sequence: Synthetic oligonucleotide
ggaaggcagacuuggaucc

SEQ ID NO: 2957836 - RNA, 19 nt, Artificial Sequence
  Description of Artificial Sequence: Synthetic oligonucleotide
ugacuguauucccuuacuc

SEQ ID NO: 2957837 - RNA, 19 nt, Artificial Sequence
  Description of Artificial Sequence: Synthetic oligonucleotide
cugacugugucaacugaag

SEQ ID NO: 2957838 - RNA, 19 nt, Artificial Sequence
  Description of Artificial Sequence: Synthetic oligonucleotide
gaagagcucgaugguaccg

SEQ ID NO: 2957839 - RNA, 19 nt, Artificial Sequence
  Description of Artificial Sequence: Synthetic oligonucleotide
gauuggguaucggggaagg

SEQ ID NO: 2957840 - RNA, 19 nt, Artificial Sequence
  Description of Artificial Sequence: Synthetic oligonucleotide
cagguugucguucuaggac

SEQ ID NO: 2957841 - RNA, 19 nt, Artificial Sequence
  Description of Artificial Sequence: Synthetic oligonucleotide
ucggggaaggcagacuugg

SEQ ID NO: 2957842 - RNA, 19 nt, Artificial Sequence
  Description of Artificial Sequence: Synthetic oligonucleotide
uuggguaucggggaaggca

SEQ ID NO: 2957843 - RNA, 19 nt, Artificial Sequence
  Description of Artificial Sequence: Synthetic oligonucleotide
ucagguugucguucuagga

SEQ ID NO: 2957844 - RNA, 19 nt, Artificial Sequence
  Description of Artificial Sequence: Synthetic oligonucleotide
accgacucacagcaucucg

SEQ ID NO: 2957845 - RNA, 19 nt, Artificial Sequence
  Description of Artificial Sequence: Synthetic oligonucleotide
aguucugacugugucaacu

SEQ ID NO: 2957846 - RNA, 19 nt, Artificial Sequence
  Description of Artificial Sequence: Synthetic oligonucleotide
aagauaccgccggacauug

SEQ ID NO: 2957847 - RNA, 19 nt, Artificial Sequence
  Description of Artificial Sequence: Synthetic oligonucleotide
gagaagagcucgaugguac

SEQ ID NO: 2957848 - RNA, 19 nt, Artificial Sequence
  Description of Artificial Sequence: Synthetic oligonucleotide
uaucggggaaggcagacuu

SEQ ID NO: 2957849 - RNA, 19 nt, Artificial Sequence
  Description of Artificial Sequence: Synthetic oligonucleotide
uucugacugugucaacuga

SEQ ID NO: 2957850 - RNA, 19 nt, Artificial Sequence
  Description of Artificial Sequence: Synthetic oligonucleotide
agccuggucauaguccugc

SEQ ID NO: 2957851 - RNA, 19 nt, Artificial Sequence
  Description of Artificial Sequence: Synthetic oligonucleotide
uccaucuggaggagacagg

SEQ ID NO: 2957852 - RNA, 19 nt, Artificial Sequence
  Description of Artificial Sequence: Synthetic oligonucleotide
agguuguuguagcagucug

SEQ ID NO: 2957853 - RNA, 19 nt, Artificial Sequence
  Description of Artificial Sequence: Synthetic oligonucleotide
cuagauuggguaucgggga

SEQ ID NO: 2957854 - RNA, 19 nt, Artificial Sequence
  Description of Artificial Sequence: Synthetic oligonucleotide
uccugcccgauacaaggcc

SEQ ID NO: 2957855 - RNA, 19 nt, Artificial Sequence
  Description of Artificial Sequence: Synthetic oligonucleotide
ucgcagcuggagaagagcu

SEQ ID NO: 2957856 - RNA, 19 nt, Artificial Sequence
  Description of Artificial Sequence: Synthetic oligonucleotide
ucagguccuagauugggua

SEQ ID NO: 2957857 - RNA, 19 nt, Artificial Sequence
  Description of Artificial Sequence: Synthetic oligonucleotide
aggacuuucugacuguauu

SEQ ID NO: 2957858 - RNA, 19 nt, Artificial Sequence
  Description of Artificial Sequence: Synthetic oligonucleotide
uggauccagaccucgcagc

SEQ ID NO: 2957859 - RNA, 19 nt, Artificial Sequence
  Description of Artificial Sequence: Synthetic oligonucleotide
ugucguucuaggacuuucu

SEQ ID NO: 2957860 - RNA, 19 nt, Artificial Sequence
  Description of Artificial Sequence: Synthetic oligonucleotide
uuuaggcugccuauugauu

SEQ ID NO: 2957861 - RNA, 19 nt, Artificial Sequence
  Description of Artificial Sequence: Synthetic oligonucleotide
guauguuuucuugcucugg

SEQ ID NO: 2957862 - RNA, 19 nt, Artificial Sequence
  Description of Artificial Sequence: Synthetic oligonucleotide
agagcucgaugguaccgac

SEQ ID NO: 2957863 - RNA, 19 nt, Artificial Sequence
  Description of Artificial Sequence: Synthetic oligonucleotide
aggccuuggcauuauucag

SEQ ID NO: 2957864 - RNA, 19 nt, Artificial Sequence
  Description of Artificial Sequence: Synthetic oligonucleotide
ucuaggacuuucugacugu

SEQ ID NO: 2957865 - RNA, 19 nt, Artificial Sequence
  Description of Artificial Sequence: Synthetic oligonucleotide
gugcaguauguuuucuugc

SEQ ID NO: 2957866 - RNA, 19 nt, Artificial Sequence
  Description of Artificial Sequence: Synthetic oligonucleotide
guauucccuuacucguucg

SEQ ID NO: 2957867 - RNA, 19 nt, Artificial Sequence
  Description of Artificial Sequence: Synthetic oligonucleotide
auucagguugucguucuag

SEQ ID NO: 2957868 - RNA, 19 nt, Artificial Sequence
  Description of Artificial Sequence: Synthetic oligonucleotide
guucugacugugucaacug

SEQ ID NO: 2957869 - RNA, 19 nt, Artificial Sequence
  Description of Artificial Sequence: Synthetic oligonucleotide
agagcugggcccucagguc

SEQ ID NO: 2957870 - RNA, 19 nt, Artificial Sequence
  Description of Artificial Sequence: Synthetic oligonucleotide
ggcauuauucagguugucg

SEQ ID NO: 2957871 - RNA, 19 nt, Artificial Sequence
  Description of Artificial Sequence: Synthetic oligonucleotide
uauucccuuacucguucgu

SEQ ID NO: 2957872 - RNA, 19 nt, Artificial Sequence
  Description of Artificial Sequence: Synthetic oligonucleotide
uaggcugccuauugauugc

SEQ ID NO: 2957873 - RNA, 19 nt, Artificial Sequence
  Description of Artificial Sequence: Synthetic oligonucleotide
uggagaagagcucgauggu

SEQ ID NO: 2957874 - RNA, 19 nt, Artificial Sequence
  Description of Artificial Sequence: Synthetic oligonucleotide
ucgguacuucccuucccgg

SEQ ID NO: 2957875 - RNA, 19 nt, Artificial Sequence
  Description of Artificial Sequence: Synthetic oligonucleotide
ugcaucuagcagguggugc

SEQ ID NO: 2957876 - RNA, 19 nt, Artificial Sequence
  Description of Artificial Sequence: Synthetic oligonucleotide
uagauuggguaucggggaa

SEQ ID NO: 2957877 - RNA, 19 nt, Artificial Sequence
  Description of Artificial Sequence: Synthetic oligonucleotide
agcaucucgguacuucccu

SEQ ID NO: 2957878 - RNA, 19 nt, Artificial Sequence
  Description of Artificial Sequence: Synthetic oligonucleotide
uuuucuugcucuggcguga

SEQ ID NO: 2957879 - RNA, 19 nt, Artificial Sequence
  Description of Artificial Sequence: Synthetic oligonucleotide
cauuggcaucuuuaggcug

SEQ ID NO: 2957880 - RNA, 19 nt, Artificial Sequence
  Description of Artificial Sequence: Synthetic oligonucleotide
aacugaagauaccgccgga

SEQ ID NO: 2957881 - RNA, 19 nt, Artificial Sequence
  Description of Artificial Sequence: Synthetic oligonucleotide
gacuuggauccagaccucg

SEQ ID NO: 2957882 - RNA, 19 nt, Artificial Sequence
  Description of Artificial Sequence: Synthetic oligonucleotide
uuucugacuguauucccuu

SEQ ID NO: 2957883 - RNA, 19 nt, Artificial Sequence
  Description of Artificial Sequence: Synthetic oligonucleotide
ggacauuggcaucuuuagg

SEQ ID NO: 2957884 - RNA, 19 nt, Artificial Sequence
  Description of Artificial Sequence: Synthetic oligonucleotide
uacuccugcccgauacaag

SEQ ID NO: 2957885 - RNA, 19 nt, Artificial Sequence
  Description of Artificial Sequence: Synthetic oligonucleotide
acugugucaacugaagaua

SEQ ID NO: 2957886 - RNA, 19 nt, Artificial Sequence
  Description of Artificial Sequence: Synthetic oligonucleotide
uucccuucccgguagcgcu

SEQ ID NO: 2957887 - RNA, 19 nt, Artificial Sequence
  Description of Artificial Sequence: Synthetic oligonucleotide
cucguucguaguucacugg

SEQ ID NO: 2957888 - RNA, 19 nt, Artificial Sequence
  Description of Artificial Sequence: Synthetic oligonucleotide
cuuacucguucguaguuca

SEQ ID NO: 2957889 - RNA, 19 nt, Artificial Sequence
  Description of Artificial Sequence: Synthetic oligonucleotide
aaggcagacuuggauccag

SEQ ID NO: 2957890 - RNA, 19 nt, Artificial Sequence
  Description of Artificial Sequence: Synthetic oligonucleotide
cuggucauaguccugcaga

SEQ ID NO: 2957891 - RNA, 19 nt, Artificial Sequence
  Description of Artificial Sequence: Synthetic oligonucleotide
ggaagaaggcuacuccugc

SEQ ID NO: 2957892 - RNA, 19 nt, Artificial Sequence
  Description of Artificial Sequence: Synthetic oligonucleotide
guuguuguagcagucuguc

SEQ ID NO: 2957893 - RNA, 19 nt, Artificial Sequence
  Description of Artificial Sequence: Synthetic oligonucleotide
gacugugucaacugaagau

SEQ ID NO: 2957894 - RNA, 19 nt, Artificial Sequence
  Description of Artificial Sequence: Synthetic oligonucleotide
aguucacuggcuccaucug

SEQ ID NO: 2957895 - RNA, 19 nt, Artificial Sequence
  Description of Artificial Sequence: Synthetic oligonucleotide
uggcgugagagcugggccc

SEQ ID NO: 2957896 - RNA, 19 nt, Artificial Sequence
  Description of Artificial Sequence: Synthetic oligonucleotide
aagagcucgaugguaccga

SEQ ID NO: 2957897 - RNA, 19 nt, Artificial Sequence
  Description of Artificial Sequence: Synthetic oligonucleotide
cuugcucuggcgugagagc

SEQ ID NO: 2957898 - RNA, 19 nt, Artificial Sequence
  Description of Artificial Sequence: Synthetic oligonucleotide
cuccaucuggaggagacag

SEQ ID NO: 2957899 - RNA, 19 nt, Artificial Sequence
  Description of Artificial Sequence: Synthetic oligonucleotide
cguucuaggacuuucugac

SEQ ID NO: 2957900 - RNA, 19 nt, Artificial Sequence
  Description of Artificial Sequence: Synthetic oligonucleotide
uggguggugugcaguaugu

SEQ ID NO: 2957901 - RNA, 19 nt, Artificial Sequence
  Description of Artificial Sequence: Synthetic oligonucleotide
cuagguuguuguagcaguc

SEQ ID NO: 2957902 - RNA, 19 nt, Artificial Sequence
  Description of Artificial Sequence: Synthetic oligonucleotide
uacucguucguaguucacu

SEQ ID NO: 2957903 - RNA, 19 nt, Artificial Sequence
  Description of Artificial Sequence: Synthetic oligonucleotide
uggucauaguccugcagau

SEQ ID NO: 2957904 - RNA, 19 nt, Artificial Sequence
  Description of Artificial Sequence: Synthetic oligonucleotide
auugcaucuagcagguggu

SEQ ID NO: 2957905 - RNA, 19 nt, Artificial Sequence
  Description of Artificial Sequence: Synthetic oligonucleotide
acuuggauccagaccucgc

SEQ ID NO: 2957906 - RNA, 19 nt, Artificial Sequence
  Description of Artificial Sequence: Synthetic oligonucleotide
gcagcuggagaagagcucg

SEQ ID NO: 2957907 - RNA, 19 nt, Artificial Sequence
  Description of Artificial Sequence: Synthetic oligonucleotide
gcccucagguccuagauug

SEQ ID NO: 2957908 - RNA, 19 nt, Artificial Sequence
  Description of Artificial Sequence: Synthetic oligonucleotide
ucuggcgugagagcugggc

SEQ ID NO: 2957909 - RNA, 19 nt, Artificial Sequence
  Description of Artificial Sequence: Synthetic oligonucleotide
ucuagcagguggugccgag

SEQ ID NO: 2957910 - RNA, 19 nt, Artificial Sequence
  Description of Artificial Sequence: Synthetic oligonucleotide
ccuauugauugcaucuagc

SEQ ID NO: 2957911 - RNA, 19 nt, Artificial Sequence
  Description of Artificial Sequence: Synthetic oligonucleotide
cuggcgugagagcugggcc

SEQ ID NO: 2957912 - RNA, 19 nt, Artificial Sequence
  Description of Artificial Sequence: Synthetic oligonucleotide
gcaucuagcagguggugcc

SEQ ID NO: 2957913 - RNA, 19 nt, Artificial Sequence
  Description of Artificial Sequence: Synthetic oligonucleotide
cucgaugguaccgacucac

SEQ ID NO: 2957914 - RNA, 19 nt, Artificial Sequence
  Description of Artificial Sequence: Synthetic oligonucleotide
uugcucuggcgugagagcu

SEQ ID NO: 2957915 - RNA, 19 nt, Artificial Sequence
  Description of Artificial Sequence: Synthetic oligonucleotide
gucguucuaggacuuucug

SEQ ID NO: 2957916 - RNA, 19 nt, Artificial Sequence
  Description of Artificial Sequence: Synthetic oligonucleotide
ucugucuggguggugugca

SEQ ID NO: 2957917 - RNA, 19 nt, Artificial Sequence
  Description of Artificial Sequence: Synthetic oligonucleotide
ucguaguucacuggcucca

SEQ ID NO: 2957918 - RNA, 19 nt, Artificial Sequence
  Description of Artificial Sequence: Synthetic oligonucleotide
agguccuagauuggguauc

SEQ ID NO: 2957919 - RNA, 19 nt, Artificial Sequence
  Description of Artificial Sequence: Synthetic oligonucleotide
uuguuguagcagucugucu

SEQ ID NO: 2957920 - RNA, 19 nt, Artificial Sequence
  Description of Artificial Sequence: Synthetic oligonucleotide
uuguagcagucugucuggg

SEQ ID NO: 2957921 - RNA, 19 nt, Artificial Sequence
  Description of Artificial Sequence: Synthetic oligonucleotide
guacuucccuucccgguag

SEQ ID NO: 2957922 - RNA, 19 nt, Artificial Sequence
  Description of Artificial Sequence: Synthetic oligonucleotide
uagguuguuguagcagucu

SEQ ID NO: 2957923 - RNA, 19 nt, Artificial Sequence
  Description of Artificial Sequence: Synthetic oligonucleotide
ucccuuacucguucguagu

SEQ ID NO: 2957924 - RNA, 19 nt, Artificial Sequence
  Description of Artificial Sequence: Synthetic oligonucleotide
agaccucgcagcuggagaa

SEQ ID NO: 2957925 - RNA, 19 nt, Artificial Sequence
  Description of Artificial Sequence: Synthetic oligonucleotide
uguagcagucugucugggu

SEQ ID NO: 2957926 - RNA, 19 nt, Artificial Sequence
  Description of Artificial Sequence: Synthetic oligonucleotide
gguaccgacucacagcauc

SEQ ID NO: 2957927 - RNA, 19 nt, Artificial Sequence
  Description of Artificial Sequence: Synthetic oligonucleotide
agauuggguaucggggaag

SEQ ID NO: 2957928 - RNA, 19 nt, Artificial Sequence
  Description of Artificial Sequence: Synthetic oligonucleotide
auaguccugcagauggaag

SEQ ID NO: 2957929 - RNA, 19 nt, Artificial Sequence
  Description of Artificial Sequence: Synthetic oligonucleotide
cugaguucugacuguguca

SEQ ID NO: 2957930 - RNA, 19 nt, Artificial Sequence
  Description of Artificial Sequence: Synthetic oligonucleotide
gcagacuuggauccagacc

SEQ ID NO: 2957931 - RNA, 19 nt, Artificial Sequence
  Description of Artificial Sequence: Synthetic oligonucleotide
ucgaugguaccgacucaca

SEQ ID NO: 2957932 - RNA, 19 nt, Artificial Sequence
  Description of Artificial Sequence: Synthetic oligonucleotide
caucuggaggagacaggcc

SEQ ID NO: 2957933 - RNA, 19 nt, Artificial Sequence
  Description of Artificial Sequence: Synthetic oligonucleotide
cuuggauccagaccucgca

SEQ ID NO: 2957934 - RNA, 19 nt, Artificial Sequence
  Description of Artificial Sequence: Synthetic oligonucleotide
ucacuggcuccaucuggag

SEQ ID NO: 2957935 - RNA, 19 nt, Artificial Sequence
  Description of Artificial Sequence: Synthetic oligonucleotide
gggaaggcagacuuggauc

SEQ ID NO: 2957936 - RNA, 19 nt, Artificial Sequence
  Description of Artificial Sequence: Synthetic oligonucleotide
ggacuuucugacuguauuc

SEQ ID NO: 2957937 - RNA, 19 nt, Artificial Sequence
  Description of Artificial Sequence: Synthetic oligonucleotide
caguauguuuucuugcucu

SEQ ID NO: 2957938 - RNA, 19 nt, Artificial Sequence
  Description of Artificial Sequence: Synthetic oligonucleotide
uuacucguucguaguucac

SEQ ID NO: 2957939 - RNA, 19 nt, Artificial Sequence
  Description of Artificial Sequence: Synthetic oligonucleotide
cugaagauaccgccggaca

SEQ ID NO: 2957940 - RNA, 19 nt, Artificial Sequence
  Description of Artificial Sequence: Synthetic oligonucleotide
guagcgcugguucccuucc

SEQ ID NO: 2957941 - RNA, 19 nt, Artificial Sequence
  Description of Artificial Sequence: Synthetic oligonucleotide
caucucgguacuucccuuc

SEQ ID NO: 2957942 - RNA, 19 nt, Artificial Sequence
  Description of Artificial Sequence: Synthetic oligonucleotide
uggugugcaguauguuuuc

SEQ ID NO: 2957943 - RNA, 19 nt, Artificial Sequence
  Description of Artificial Sequence: Synthetic oligonucleotide
uagcugcugaguucugacu

SEQ ID NO: 2957944 - RNA, 19 nt, Artificial Sequence
  Description of Artificial Sequence: Synthetic oligonucleotide
uugucguucuaggacuuuc

SEQ ID NO: 2957945 - RNA, 19 nt, Artificial Sequence
  Description of Artificial Sequence: Synthetic oligonucleotide
ggccuuggcauuauucagg

SEQ ID NO: 2957946 - RNA, 19 nt, Artificial Sequence
  Description of Artificial Sequence: Synthetic oligonucleotide
gagagcugggcccucaggu

SEQ ID NO: 2957947 - RNA, 19 nt, Artificial Sequence
  Description of Artificial Sequence: Synthetic oligonucleotide
gauacaaggccuuggcauu

SEQ ID NO: 2957948 - RNA, 19 nt, Artificial Sequence
  Description of Artificial Sequence: Synthetic oligonucleotide
uaggacuuucugacuguau

SEQ ID NO: 2957949 - RNA, 19 nt, Artificial Sequence
  Description of Artificial Sequence: Synthetic oligonucleotide
cucgcagcuggagaagagc

SEQ ID NO: 2957950 - RNA, 19 nt, Artificial Sequence
  Description of Artificial Sequence: Synthetic oligonucleotide
ugcugaguucugacugugu

SEQ ID NO: 2957951 - RNA, 19 nt, Artificial Sequence
  Description of Artificial Sequence: Synthetic oligonucleotide
cuggguggugugcaguaug

SEQ ID NO: 2957952 - RNA, 19 nt, Artificial Sequence
  Description of Artificial Sequence: Synthetic oligonucleotide
gccuauugauugcaucuag

SEQ ID NO: 2957953 - RNA, 19 nt, Artificial Sequence
  Description of Artificial Sequence: Synthetic oligonucleotide
uuucuugcucuggcgugag

SEQ ID NO: 2957954 - RNA, 19 nt, Artificial Sequence
  Description of Artificial Sequence: Synthetic oligonucleotide
ugcucuggcgugagagcug
